(19) United States
(12) Patent Application Publication
(10) Pub. No.: US 2011/0318380 A1
(43) Pub. Date: Dec. 29, 2011

(54) MHC Multimers in Cancer Vaccines and Immune Monitoring

(75) Inventors: Liselotte Brix, Bagsvaerd (DK); Jørgen Schøller, Lyngby (DK); Henrik Pedersen, Lynge (DE)

(73) Assignee: DAKO DENMARK A/S, Glostrup (DK)

(21) Appl. No.: 13/122,027

(22) PCT Filed: Oct. 1, 2009
(86) PCT No.: PCT/DK2009/050255

§ 371 Date: Sep. 14, 2011

Related U.S. Application Data
(60) Provisional application No. 61/101,878, filed on Oct. 1, 2008.

(30) Foreign Application Priority Data
Oct. 1, 2008 (DK) PA 2008 01382
Mar. 6, 2009 (EP) 09154516.0

(51) Int. Cl. A61K 39/385; A61K 39/00; C07K 2/00; A61P 35/00; G01N 33/566; C12N 5/0783; A61P 37/04; C07K 14/74; C07K 1/107

(52) U.S. Cl. 424/193.1; 530/405; 424/277.1; 530/300; 435/7.24; 435/325

(57) ABSTRACT

The present invention relates to MHC-peptide complexes and uses thereof in the diagnosis of, treatment of or vaccination against a disease in an individual. More specifically the invention discloses MHC complexes comprising cancer antigenic peptides and uses there of.

[0001] The Danish patent application PA 2008 01382, the European patent application EP09154516.0 and the U.S. provisional patent application U.S. Ser. No. 61/101,878 are hereby incorporated by reference in its entirety.

[0002] All patent and non-patent references cited in PA 2008 01382, EP09154516.0 and U.S. 61/101,878, or in the present application, are also hereby incorporated by reference in their entirety.

[0003] PCT/DK2009/050185, PCT/DK2008/050167, PA 2008 01384 and PCT/DK2008/000118 are hereby incorporated by reference in its entirety.

[0004] All patent and non-patent references cited in PCT/DK2009/050185, PCT/DK2008/050167, PA 2008 01384 and PCT/DK2008/000118, are also hereby incorporated by reference in their entirety.

### FIELD OF INVENTION

[0005] The present invention relates to MHC-peptide complexes and uses thereof in the treatment of a disease in an individual.

### BACKGROUND OF INVENTION

[0006] Biochemical interactions between peptide epitope specific membrane molecules encoded by the Major Histocompatibility Complex (MHC, in humans HLA) and T-cell receptors (TCR) are required to elicit specific immune responses. This requires activation of T-cells by presentation to the T-cells of peptides against which a T-cell response should be raised. The peptides are presented to the T-cells by the MHC complexes.

### The Immune Response

[0007] The immune response is divided into two parts termed the innate immune response and the adaptive immune response. Both responses work together to eliminate pathogens (antigens). Innate immunity is present at all times and is the first line of defense against invading pathogens. The immediate response by means of pre-existing elements, i.e. various proteins and phagocytic cells that recognize conserved features on the pathogens, is important in clearing and control of spreading of pathogens. If a pathogen is persistent in the body and thus only partially cleared by the actions of the innate immune system, the adaptive immune system initiate a response against the pathogen. The adaptive immune system is capable of eliciting a response against virtually any type of pathogen and is unlike the innate immune system capable of establishing immunological memory.

[0008] The adaptive response is highly specific to the particular pathogen that activated it but it is not so quickly launched as the innate when first encountering a pathogen.

[0009] However, due to the generation of memory cells, a fast and more efficient response is generated upon repeated exposure to the same pathogen. The adaptive response is carried out by two distinct sets of lymphocytes, the B cells producing antibodies leading to the humoral or antibody mediated immune response, and the T cells leading to the cell mediated immune response.

[0010] T cells express a clonotypic T cell receptor (TCR) on the surface. This receptor enable the T cell to recognize peptide antigens bound to major histocompatibility complex (MHC) molecules, called human leukocyte antigens (HLA) in man. Depending on the type of pathogen, being intracellular or extracellular, the antigenic peptides are bound to MHC class I or MHC class II, respectively. The two classes of MHC complexes are recognized by different subsets of T cells; Cytotoxic CD8+ T cells recognizing MHC class I and CD4+ helper cells recognizing MHC class II. In general, TCR recognition of MHC-peptide complexes result in T cell activation, clonal expansion and differentiation of the T cells into effector, memory and regulatory T cells.

[0011] B cells express a membrane bound form of immunoglobulin (Ig) called the B cell receptor (BCR). The BCR recognizes an epitope that is part of an intact three dimensional antigenic molecule. Upon BCR recognition of an antigen the BCR:antigen complex is internalized and fragments from the internalized antigen is presented in the context of MHC class II on the surface of the B cell to CD4+ helper T-cells (Th). The specific Th cell will then activate the B cell leading to differentiation into an antibody producing plasma cell.

[0012] A very important feature of the adaptive immune system is its ability to distinguish between self and non-self antigens, and preferably respond against non-self. If the immune system fails to discriminate between the two, specific immune responses against self-antigens are generated. These autoimmune reactions can lead to damage of self-tissue.

[0013] The adaptive immune response is initiated when antigens are taken up by professional antigen presenting cells such as dendritic cells, Macrophages, Langerhans cells and B-cells. These cells present peptide fragments, resulting from the degradation of proteins, in the context of MHC class II proteins (Major Histocompatibility Complex) to helper T cells. The T helper cells then mediate help to B-cells and antigen-specific cytotoxic T cells, both of which have received primary activation signals via their BCR respective TCR. The help from the Th-cell is mediated by means of soluble mediators e.g. cytokines.

[0014] In general the interactions between the various cells of the cellular immune response is governed by receptor-ligand interactions directly between the cells and by production of various soluble reporter substances e.g. cytokines by activated cells.

### MHC-Peptide Complexes.

[0015] MHC complexes function as antigenic peptide receptors, collecting peptides inside the cell and transporting them to the cell surface, where the MHC-peptide complex can be recognized by T-lymphocytes. Two classes of classical MHC complexes exist, MHC class I and II. The most important difference between these two molecules lies in the protein source from which they obtain their associated peptides. MHC class I molecules present peptides derived from endogenous antigens degraded in the cytosol and are thus able to display fragments of viral proteins and unique proteins derived from cancerous cells. Almost all nucleated cells express MHC class I on their surface even though the expression level varies among different cell types. MHC class II molecules bind peptides derived from exogenous antigens. Exogenous proteins enter the cells by endocytosis or phagocytosis, and these proteins are degraded by proteases in acidified intracellular vesicles before presentation by MHC class II molecules. MHC class II molecules are only expressed on professional antigen presenting cells like B cells and macrophages.

[0016] The three-dimensional structure of MHC class I and II molecules are very similar but important differences exist. MHC class I molecules consist of two polypeptide chains, a heavy chain, α, spanning the membrane and a light chain, β2-microglobulin (β2m). The heavy chain is encoded in the gene complex termed the major histocompatibility complex (MHC), and its extracellular portion comprises three domains, α1, α2 and α3. The β2m chain is not encoded in the MHC gene and consists of a single domain, which together with the α3 domain of the heavy chain make up a folded structure that closely resembles that of the immunoglobulin. The α1 and α2 domains pair to form the peptide binding cleft, consisting of two segmented α helices lying on a sheet of eight β-strands. In humans as well as in mice three different types of MHC class I molecule exist. HLA-A, B, C are found in humans while MHC class I molecules in mice are designated H-2K, H-2D and H-2L.

[0017] The MHC class II molecule is composed of two membrane spanning polypeptide chains, α and β, of similar size (about 30000 Da). Genes located in the major histocompatibility complex encode both chains. Each chain consists of two domains, where α1 and β1 forms a 9-pocket peptide-binding cleft, where pocket 1, 4, 6 and 9 are considered as major peptide binding pockets. The α2 and β2, like the α2 and β2m in the MHC class I molecules, have amino acid sequence and structural similarities to immunoglobulin constant domains. In contrast to MHC class I complexes, where the ends of the antigenic peptide is buried, peptide-ends in MHC class II complexes are not. HLA-DR, DQ and DP are the human class II molecules, H-2A, M and E are those of the mice.

[0018] A remarkable feature of MHC genes is their polymorphism accomplished by multiple alleles at each gene. The polygenic and polymorphic nature of MHC genes is reflected in the peptide-binding cleft so that different MHC complexes bind different sets of peptides. The variable amino acids in the peptide binding cleft form pockets where the amino acid side chains of the bound peptide can be buried. This permits a specific variant of MHC to bind some peptides better than others.

### MHC Multimers

[0019] Due to the short half-life of the peptide-MHC-T cell receptor ternary complex (typically between 10 and 25 seconds) it is difficult to label specific T cells with labelled MHC-peptide complexes, and like-wise, it is difficult to employ such monomers of MHC-peptide for therapeutic and vaccine purposes because of their weak binding. In order to circumvent this problem, MHC multimers have been developed. These are complexes that include multiple copies of MHC-peptide complexes, providing these complexes with an increased affinity and half-life of interaction, compared to that of the monomer MHC-peptide complex. The multiple copies of MHC-peptide complexes are attached, covalently or non-covalently, to a multimerization domain. Known examples of such MHC multimers include the following:
[0020] MHC-dimers: Each MHC dimer contains two copies of MHC-peptide. IgG is used as multimerization domain, and one of the domains of the MHC protein is covalently linked to IgG.
[0021] MHC-tetramers: Each MHC-tetramer contains four copies of MHC-peptide, each of which is biotinylated. The MHC complexes are held together in a complex by the streptavidin tetramer protein, providing a non-covalent linkage between a streptavidin monomer and the MHC protein. Tetramers are described in U.S. Pat. No. 5,635,363.
[0022] MHC pentamers: Five copies of MHC-peptide complexes are multimerised by a self-assembling coiled-coil domain, to form a MHC pentamer. MHC pentamers are described in the US patent 2004209295
[0023] MHC dextramers: A large number of MHC-peptide complexes, typically more than ten, are attached to a dextran polymer. MHC-dextramers are described in the patent application WO 02/072631 A2.
[0024] MHC streptamers: 8-12 MHC-peptide complexes attached to Streptactin. MHC streptamers are described in Knabel M et al. Reversibel MHC multimer staining for functional isolation of T-cell populations and effective adoptive transfer. Nature medicine 6. 631-637 (2002).

### Use of MHC Multimers in Flow Cytometry and Related Techniques

[0025] The concentration of antigen-specific T-cells in samples from e.g. peripheral blood can be very low. Flow cytometry and related methods offer the ability to analyze a large number of cells and simultaneously identify the few of interest. MHC multimers have turned out to be very valuable reagents for detection and characterization of antigen-specific T-cells in flow cytometer experiments. The relative amount of antigen-specific T cells in a sample can be determined and also the affinity of the binding of MHC multimer to the T-cell receptor can be determined.

[0026] The basic function of a flow cytometer is its ability to analyse and identify fluorochrome labelled entities in a liquid sample, by means of its excitation, using a light source such as a laser beam and the light emission from the bound fluorochrome.

[0027] MHC multimers is used as detections molecule for identification of antigen-specific T-cells in flow cytometry, by labelling the MHC multimer with a specific fluorochrome, which is detectable, by the flow cytometer used.

[0028] In order to facilitate the identification of a small amount of cells, the cells can be sub-categorized using antibodies or other fluorochrome labelled detections molecules directed against surface markers other than the TCR on the specific T-cells population. Antibodies or other fluorochrome labelled detections molecules can also be used to identify cells known not to be antigen-specific T-cells. Both kinds of detections molecules are in the following referred to as gating reagents. Gating reagents, helps identify the “true” antigen-specific T cells bound by MHC multimers by identifying specific subpopulations in a sample, e.g. T cells and by excluding cells that for some reason bind MHC multimers without being antigen-specific T-cells.

[0029] Other cytometry methods, e.g. fluorescence microscopy and IHC can like flow cytometry be employed in identification of antigen-specific T cells in a cell sample using MHC multimers.

### Application of MHC Multimers in Immune Monitoring, Diagnostics, Prognostics, Therapy and Vaccines

[0030] T cells are pivotal for mounting an adaptive immune response. It is therefore of importance to be able to measure the number of specific T cells when performing a monitoring of a given immune response, for example in connection with vaccine development, infectious diseases e.g. tuberculosis, toxicity studies etc.

[0031] Accordingly, the present invention further provides powerful tools in the fields of vaccines, therapy and diagnosis. One objective of the present invention is to provide methods for anti-bacterial immunotherapy by generating antigen-specific T-cells capable of inactivating or eliminating undesirable target cells. Another objective is to isolate antigen-specific T-cells and culture these in the presence of co-stimulatory molecules. Ex vivo priming and expansion of T-cell populations allows the T-cells to be used in immunotherapy of various types of infectious diseases. A third objective of the present invention is to identify and label specific subsets of cells with relevance for the development or treatment of diseases.

[0032] One disease of special interest of the present invention is cancer. MHC multimers of the present invention are can be used in prognostics, diagnosis, vaccine monitoring, vaccine and therapy related to this disease.

### SUMMARY OF INVENTION

[0033] Measurement of antigen-specific T cells during an immune response are important parameters in vaccine development, autologous cancer therapy, transplantation, infectious diseases, inflammation, autoimmunity, toxicity studies etc. MHC multimers are crucial reagents in monitoring of antigen-specific T cells. The present invention describes novel methods to generate MHC multimers and methods to improve existing and new MHC multimers. The invention also describes improved methods for the use of MHC multimers in analysis of T cells in samples including diagnostic, prognostic and immune monitoring methods. Furthermore the use of MHC multimers in anti-tumour therapy are described, including isolation of antigen-specific T cells capable of inactivation or elimination of undesirable target cells or isolation of specific T cells capable of regulation of other immune cells. The present invention also relates to MHC multimers comprising one or more tumour derived peptides. In one preferred embodiment the present invention relates to a cancer vaccine comprising antigenic peptides derived from cancer proteins. The antigenic peptides may be used themselves as a vaccine or used in a MHC multimer bound in the peptide binding cleft of MHC.

[0034] The present invention also relates to a composition for cancer vaccination and/or immune monitoring of a vaccine response. In another embodiment the present invention relates to a method of making the composition for cancer vaccination and/or immune monitoring of a vaccine response. This invention also relates to a method for cancer vaccination comprising administration to an individual in need thereof an effective amount of a cancer vaccine composition.

### Definitions

[0035] As used everywhere herein, the term “a”, “an” or “the” is meant to be one or more, i.e. at least one.

[0036] Adjuvant: adjuvants are drugs that have few or no pharmacological effects by themselves, but can increase the efficacy or potency of other drugs when given at the same time. In another embodiment, an adjuvant is an agent which, while not having any specific antigenic effect in it self, can stimulate the immune system, increasing the response to a vaccine.

[0037] Agonist: agonist as used herein is a substance that binds to a specific receptor and triggers a response in the cell. It mimics the action of an endogenous ligand that binds to the same receptor.

[0038] Anchor amino acid: Anchor amino acid is used interchangeably herein with anchor residue and is an amino acid of antigenic peptide having amino acid sidechains that bind into pockets lining the peptide-binding groove of MHC molecules thereby anchoring the peptide to the MHC molecule. Anchor residues being responsible for the main anchoring of peptide to MHC molecule are called primary anchor amino acids. Amino acids contributing to the binding of antigenic peptide to MHC molecule but in a lesser extend than primary anchor amino acids are called secondary anchor amino acids.

[0039] Anchor motif: The pattern of anchor residues in an antigenic peptide binding a certain MHC molecule. Peptides binding different MHC molecules have different anchor motifs defined by the patterns of anchor residues in the peptide sequence.

[0040] Anchor residue: Anchor residue is used interchangeably herein with anchor amino acid

[0041] Anchor position: The position of an anchor amino acid in antigenic peptide sequence. For MHC II the anchor positions is defined in the 9-mer core motif.

[0042] Antagonist: antagonist as used herein is a substance that binds to a specific receptor and blocks the response in the cell. It blocks the action of an endogenous ligand that binds to the same receptor.

[0043] Antibodies: As used herein, the term “antibody” means an isolated or recombinant binding agent that comprises the necessary variable region sequences to specifically bind an antigenic epitope. Therefore, an antibody is any form of antibody or fragment thereof that exhibits the desired biological activity, e.g., binding the specific target antigen. Antibodies can derive from multiple species. For example, antibodies include rodent (such as mouse and rat), rabbit, sheep, camel, and human antibodies. Antibodies can also include chimeric antibodies, which join variable regions from one species to constant regions from another species. Likewise, antibodies can be humanized, that is constructed by recombinant DNA technology to produce immunoglobulins which have human framework regions from one species combined with complementarity determining regions (CDR's) from a another species' immunoglobulin. The antibody can be monoclonal or polyclonal.

[0044] Antibodies can be divided into isotypes (IgA, IgG, IgM, IgD, IgE, IgG1, IgG2, IgG3, IgG4, IgA1, IgA2, IgM1, IgM2)

[0045] Antibodies: In another embodiment the term “antibody” refers to an intact antibody, or a fragment of an antibody that competes with the intact antibody for antigen binding. In certain embodiments, antibody fragments are produced by recombinant DNA techniques. In certain embodiments, antibody fragments are produced by enzymatic or chemical cleavage of intact antibodies. Exemplary antibody fragments include, but are not limited to, Fab, Fab′, F(ab′)2, Fv, and scFv. Exemplary antibody fragments also include, but are not limited to, domain antibodies, nanobodies, minibodies ((scFv-C.sub.H3).sub.2), maxibodies ((scFv-C.sub.H2-C.sub.H3).sub.2), diabodies (noncovalent dimer of scFv).

[0046] Antigenic peptide: Used interchangeably with binding peptide. Any peptide molecule that is bound or able to bind into the binding groove of either MHC class 1 or MHC class 2.

[0047] Antigen presenting cell: An antigen-presenting cell (APC) as used herein is a cell that displays foreign antigen complexed with MHC on its surface.

[0048] Antigenic polypeptide: Polypeptide that contains one or more antigenic peptide sequences.

[0049] APC: Antigen presenting cell

[0050] Aptamer: the term aptamer as used herein is defined as oligonucleic acid or peptide molecules that bind a specific target molecule. Aptamers are usually created by selecting them from a large random sequence pool, but natural aptamers also exist. Aptamers can be divided into DNA aptamers, RNA aptamers and peptide aptamers.

[0051] Avidin: Avidin as used herein is a glycoprotein found in the egg white and tissues of birds, reptiles and amphibians. It contains four identical subunits having a combined mass of 67,000-68,000 daltons. Each subunit consists of 128 amino acids and binds one molecule of biotin.

[0052] Biologically active molecule: A biologically active molecule is a molecule having itself a biological activity/effect or is able to induce a biological activity/effect when administered to a biological system. Biologically active molecules include adjuvants, immune targets (e.g. antigens), enzymes, regulators of receptor activity, receptor ligands, immune potentiators, drugs, toxins, cytotoxic molecules, co-receptors, proteins and peptides in general, sugar moieties, lipid groups, nucleic acids including siRNA, nanoparticles, and small molecules.

[0053] Bioluminescent: Bioluminescence, as used herein, is the production and emission of light by a living organism as the result of a chemical reaction during which chemical energy is converted to light energy.

[0054] Biotin: Biotin, as used herein, is also known as vitamin H or B₇. Niotin has the chemical formula C₁₀H₁₆N₂O₃S.

[0055] Bispecific antibodies: The term bispecific antibodies as used herein is defined as antibodies that have binding specificities for at least two different antigens. The antibody can also be trispecific or multispecific.

[0056] Bispecific capture molecule: Molecule that have binding specificities for at least two different antigens. The molecule can also be trispecific or multispecific.

[0057] Carrier: A carrier as used herin can be any type of molecule that is directly or indirectly associated with the MHC peptide complex. In this invention, a carrier will typically refer to a functionalized polymer (e.g. dextran) that is capable of reacting with MHC-peptide complexes, thus covalently attaching the MHC-peptide complex to the carrier, or that is capable of reacting with scaffold molecules (e.g. streptavidin), thus covalently attaching streptavidin to the carrier; the streptavidin then may bind MHC-peptide complexes. Carrier and scaffold are used interchangeably herein where scaffold typically refers to smaller molecules of a multimerization domain and carrier typically refers to larger molecule and/or cell like structures.

[0058] Chelating chemical compound: Chelating chemical compound, as used herein, is the process of reversible binding of a ligand to a metal ion, forming a metal complex.

[0059] Chemiluminescent: Chemiluminescence, as used herein, is the emission of light (luminescence) without emission of heat as the result of a chemical reaction.

[0060] Chromophore: A chromophore, as used herein, is the part of a visibly coloured molecule responsible for light absorption over a range of wavelengths thus giving rise to the colour. By extension the term can be applied to uv or it absorbing parts of molecules.

[0061] Coiled-coil polypeptide: Used interchangeably with coiled-coil peptide and coiled-coil structure. The term coiled-coil polypeptide as used herein is a structural motif in proteins, in which 2-7 alpha-helices are coiled together like the strands of a rope.

[0062] Complement protein: Protein of the complement system.

[0063] Counting beads: Beads countable in a flow cytometry experiment.

[0064] Covalent binding: The term covalent binding is used herein to describe a form of chemical bonding that is characterized by the sharing of pairs of electrons between atoms. Attraction-to-repulsion stability that forms between atoms when they share electrons is known as covalent bonding.

[0065] Crosslinking is the process of chemically joining two or more molecules by a covalent bond. Crosslinking reagents contain reactive ends to specific functional groups (primary amines, sulfhydryls, etc.) on proteins or other molecules.

[0066] CSF: Cerebrospinal fluid.

[0067] Diagnosis: The act or process of identifying or determining the nature and cause of a disease or injury through evaluation

[0068] Diabodies: The term “diabodies” refers to small antibody fragments with two antigen-binding sites, which fragments comprise a heavy-chain variable domain (VH) connected to a light-chain variable domain (VL) in the same polypeptide chain (V_{H}-V_{L}). By using a linker that is too short to allow pairing between the two domains on the same chain, the domains are forced to pair with the complementary domains of another chain and create two antigen-binding sites.

[0069] Dendritic cell: The term dendritic cell as used herein is a type of immune cells. Their main function is to process antigen material and present it on the surface to other cells of the immune system, thus functioning as antigen-presenting cells.

[0070] Detection: In this invention detection means any method capable of measuring one molecule bound to another molecule. The molecules are typically proteins but can be any type of molecule

[0071] Dextran: the term dextran as used herein is a complex, branched polysaccharide made of many glucose molecules joined into chains of varying lengths. The straight chain consists of α1->6 glycosidic linkages between glucose molecules, while branches begin from α1->3 linkages (and in some cases, α1->2 and α1->4 linkages as well).

[0072] Direct detection of T cells: Direct detection of T cells is used herein interchangeably with direct detection of TCR and direct detection of T cell receptor. As used herein direct detection of T cells is detection directly of the binding interaction between a specific T cell receptor and a MHC multimer.

[0073] DNA: The term DNA (Deoxyribonucleic acid) duplex as used herein is a polymer of simple units called nucleotides, with a backbone made of sugars and phosphate atoms joined by ester bonds. Attached to each sugar is one of four types of molecules called bases.

[0074] DNA duplex: In living organisms, DNA does not usually exist as a single molecule, but instead as a tightly-associated pair of molecules. These two long strands entwine like vines, in the shape of a double helix.

[0075] Electrophilic: electrophile, as used herein, is a reagent attracted to electrons that participates in a chemical reaction by accepting an electron pair in order to bond to a nucleophile.

[0076] Enzyme label: enzyme labelling, as used herein, involves a detection method comprising a reaction catalysed by an enzyme.

[0077] Epitope-focused antibody: Antibodies also include epitope-focused antibodies, which have at least one minimal essential binding specificity determinant from a heavy chain or light chain CDR3 from a reference antibody, methods for making such epitope-focused antibodies are described in U.S. patent application Ser. No. 11/040,159, which is incorporated herein by reference in its entirety.

[0078] Flow cytomerty: The analysis of single cells using a flow cytometer.

[0079] Flow cytometer: Instrument that measures cell size, granularity and flourescence due to bound fluorescent marker molecules as single cells pass in a stream past photodectors. A flow cytomter carry out the measurements and/or sorting of individual cells.

[0080] Fluorescent: the term fluorescent as used herein is to have the ability to emit light of a certain wavelength when activated by light of another wavelength.

[0081] Fluorochromes: fluorochrome, as used herein, is any fluorescent compound used as a dye to mark e.g. protein with a fluorescent label.

[0082] Fluorophore: A fluorophore, as used herein, is a component of a molecule which causes a molecule to be fluorescent.

[0083] Folding: In this invention folding means in vitro or in vivo folding of proteins in a tertiery structure.

[0084] Fusion antibody: As used herein, the term “fusion antibody” refers to a molecule in which an antibody is fused to a non-antibody polypeptide at the N- or C-terminus of the antibody polypeptide.

[0085] Glycosylated: Glycosylation, as used herein, is the process or result of addition of saccharides to proteins and lipids.

[0086] Hapten: A residue on a molecule for which there is a specific molecule that can bind, e.g. an antibody.

[0087] Heteroconjugate antibodies are composed of two covalently joined antibodies. Such antibodies have, for example, been proposed to target immune system cells to unwanted cells.

[0088] IgG: IgG as used herein is a monomeric immunoglobulin, built of two heavy chains and two light chains. Each molecule has two antigen binding sites.

[0089] Isolated antibody: The term “isolated” antibody as used herein is an antibody which has been identified and separated and/or recovered from a component of its natural environment.

[0090] Immunoconjugates: The invention also pertains to immunoconjugates comprising an antibody or a MHC-peptide complex conjugated to a cytotoxic agent such as a chemotherapeutic agent, toxin (e.g., an enzymatically active toxin of bacterial, fungal, plant, or animal origin, or fragments thereof), or a radioactive isotope (i.e., a radioconjugate). Enzymatically active toxins and fragments thereof that can be used include diphtheria A chain, nonbinding active fragments of diphtheria toxin, exotoxin A chain (from Pseudomonas aeruginosa), ricin A chain, abrin A chain, modeccin A chain, alpha-sarcin, Aleurites fordii proteins, dianthin proteins, Phytolaca americana proteins (PAPI, PAPII, and PAP-S), momordica charantia inhibitor, curcin, crotin, sapaonaria officinalis inhibitor, gelonin, mitogellin, restrictocin, phenomycin, enomycin, and the tricothecenes. A variety of radionuclides are available for the production of radioconjugated antibodies or MHC-peptide complexes. Conjugates of the antibody or MHC-peptide complex and cytotoxic agent are made using a variety of bifunctional protein-coupling agents such as N-succinimidyl-3-(2-pyridyldithiol) propionate (SPDP), iminothiolane (IT), bifunctional derivatives of imidoesters (such as dimethyl adipimidate HCL), active esters (such as disuccinimidyl suberate), aldehydes (such as glutaraldehyde), bis-azido compounds (such as bis(p-azidobenzoyl)hexanediamine), bis-diazonium derivatives (such as bis-(p-diazoniumbenzoyl)-ethylenediamine), diisocyanates (such as tolyene 2,6-diisocyanate), and bis-active fluorine compounds (such as 1,5-difluoro-2,4-dinitrobenzene).

[0091] Immune monitoring: Immune monitoring of the present invention refers to testing of immune status in the diagnosis and therapy of diseases like but not limited to cancer, immunoproliferative and immunodeficiency disorders, autoimmune abnormalities, and infectious diseases. It also refers to testing of immune status before, during and after vaccination and transplantation procedures.

[0092] Immune monitoring process: a series of one or more immune monitoring analysis

[0093] Immunologically active molecules: By the term “immuno active molecules” is meant any compound that as an active part of the therapeutics or vaccine is modulating the immuno-activity of the therapeutic/vaccine itself or the immune system as such.

[0094] Immuno profiling: Immuno profiling as used herein defines the profiling of an individual's antigen-specific T-cell repertoire

[0095] Indirect detection of T cells: Indirect detection of T cells is used interchangeably herein with Indirect detection of TCR and indirect detection of T cell receptor. As used herein indirect detection of T cells is detection of the binding interaction between a specific T cell receptor and a MHC multimer by measurement of the effect of the binding interaction.

[0096] Ionophore: ionophore, as used herein, is a lipid-soluble molecule usually synthesized by microorganisms capable of transporting ions.

[0097] Label: Label herein is used interchangeable with labeling molecule. Label as described herein is an identifiable substance that is detectable in an assay and that can be attached to a molecule creating a labeled molecule. The behavior of the labeled molecule can then be studied.

[0098] Labelling: Labelling herein means attachment of a label to a molecule.

[0099] Lanthanide: lanthanide, as used herein, series comprises the 15 elements with atomic numbers 57 through 71, from lanthanum to lutetium.

[0100] Linker molecule: Linker molecule and linker is used interchangeable herein. A linker molecule is a molecule that covalently or non-covalently connects two or more molecules, thereby creating a larger complex consisting of all molecules including the linker molecule.

[0101] LDA: limiting dilution assay

[0102] Liposomes: The term liposomes as used herein is defined as a spherical vesicle with a membrane composed of a phospholipid and cholesterol bilayer. Liposomes, usually but not by definition, contain a core of aqueous solution; lipid spheres that contain no aqueous material are called micelles.

[0103] Immunoliposomes: The antibodies or MHC-peptide complexes disclosed herein can also be formulated as immunoliposomes. Liposomes comprising the antibody or MHC-peptide complexes are prepared by methods known in the art, such as described in Epstein et al., Proc. Natl. Acad. Sci. USA 82: 3688 (1985); Hwang et al., Proc. Natl. Acad. Sci. USA 77: 4030 (1980); and U.S. Pat. Nos. 4,485,045 and 4,544,545.

[0104] Particularly useful liposomes can be generated by the reverse-phase evaporation method with a lipid composition comprising phosphatidylcholine, cholesterol, and PEG-derivatized phosphatidylethanolamine (PEG-PE).

[0105] Marker: Marker is used interchangeably with marker molecule herein. A marker is molecule that specifically associates covalently or non-covalently with a molecule belonging to or associated with an entity.

[0106] MHC: Denotes the major histocompatibility complex.

[0107] MHC I is used interchangeably herein with MHC class I and denotes the major histocompatibility complex class I.

[0108] MHC II is used interchangeably herein with MHC class II and denotes the major histocompatibility complex class I.

[0109] MHC molecule: a MHC molecule as used everywhere herein is defined as any MHC class I molecule or MHC class II molecule as defined herein.

[0110] A “MHC Class I molecule” as used everywhere herein is used interchangeably with MHC I molecule and is defined as a molecule which comprises 1-3 subunits, including a MHC I heavy chain, a MHC I heavy chain combined with a MHC I beta2microglobulin chain, a MHC I heavy chain combined with MHC I beta2microglobulin chain through a flexible linker, a MHC I heavy chain combined with an antigenic peptide, a MHC I heavy chain combined with an antigenic peptide through a linker, a MHC I heavy chain/MHC I beta2microglobulin dimer combined with an antigenic peptide, and a MHC I heavy chain/MHC I beta2microglobulin dimer combined with an antigenic peptide through a flexible linker to the heavy chain or beta2microglobulin. The MHC I molecule chains can be changed by substitution of single or by cohorts of native amino acids, or by inserts, or deletions to enhance or impair the functions attributed to said molecule. MHC complex: MHC complex is herein used interchangeably with MHC-peptide complex, and defines any MHC I and/or MHC II molecule combined with antigenic peptide unless it is specified that the MHC complex is empty, i.e. is not complexed with antigenic peptide

[0111] MHC Class I like molecules (including non-classical MHC Class I molecules) include CD1d, HLA E, HLA G, HLA F, HLA H, MIC A, MIC B, ULBP-1, ULBP-2, and ULBP-3.

[0112] A “MHC Class II molecule” as used everywhere herein is used interchangeably with MHC II molecule and is defined as a molecule which comprises 2-3 subunits including a MHC II alpha-chain and a MHC II beta-chain (i.e. a MHC II alpha/beta-dimer), an MHC II alpha/beta dimer with an antigenic peptide, and an MHC II alpha/beta dimer combined with an antigenic peptide through a flexible linker to the MHC II alpha or MHC II beta chain, a MHC II alpha/beta dimer combined through an interaction by affinity tags e.g. jun-fos, a MHC II alpha/beta dimer combined through an interaction by affinity tags e.g. jun-fos and further combined with an antigenic peptide through a flexible linker to the MHC II alpha or MHC II beta chain. The MHC II molecule chains can be changed by substitution of single or by cohorts of native amino acids, or by inserts, or deletions to enhance or impair the functions attributed to said molecule. Under circumstances where the MHC II alpha-chain and MHC II beta-chain have been fused, to form one subunit, the “MHC Class II molecule” can comprise only 1 subunit or 2 subunits if antigenic peptide is also included.

[0113] MHC Class II like molecules (including non-classical MHC Class II molecules) include HLA DM, HLA DO, I-A beta2, and I-E beta2.

[0114] A “peptide free MHC Class I molecule” is used interchangeably herein with “peptide free MHC I molecule” and as used everywhere herein is meant to be a MHC Class I molecule as defined above with no peptide.

[0115] A “peptide free MHC Class II molecule” is used interchangeably herein with “peptide free MHC II molecule” and as used everywhere herein is meant to be a MHC Class II molecule as defined above with no peptide.

[0116] Such peptide free MHC Class I and II molecules are also called “empty” MHC Class I and II molecules.

[0117] The MHC molecule may suitably be a vertebrate MHC molecule such as a human, a mouse, a rat, a porcine, a bovine or an avian MHC molecule. Such MHC complexes from different species have different names. E.g. in humans, MHC complexes are denoted HLA. The person skilled in the art will readily know the name of the MHC complexes from various species.

[0118] In general, the term “MHC molecule” is intended to include all alleles. By way of example, in humans e.g. HLA A, HLA B, HLA C, HLA D, HLA E, HLA F, HLA G, HLA H, HLA DR, HLA DQ and HLA DP alleles are of interestshall be included, and in the mouse system, H-2 alleles are of interestshall be included. Likewise, in the rat system RT1-alleles, in the porcine system SLA-alleles, in the bovine system BoLA, in the avian system e.g. chicken-B alleles, are of interestshall be included.

[0119] “MHC complexes” and “MHC constructs” are used interchangeably herein.

[0120] By the terms “MHC complexes” and “MHC multimers” as used herein are meant such complexes and multimers thereof, which are capable of performing at least one of the functions attributed to said complex or multimer. The terms include both classical and non-classical MHC complexes. The meaning of “classical” and “non-classical” in connection with MHC complexes is well known to the person skilled in the art. Non-classical MHC complexes are subgroups of MHC-like complexes. The term “MHC complex” includes MHC Class I molecules, MHC Class II molecules, as well as MHC-like molecules (both Class I and Class II), including the subgroup non-classical MHC Class I and Class II molecules.

[0121] MHC multimer: The terms MHC multimer, MHC-multimer, MHCmer and MHC'mer herein are used interchangeably, to denote a complex comprising more than one MHC-peptide complexes, held together by covalent or non-covalent bonds.

[0122] Monoclonal antibodies: Monoclonal antibodies, as used herein, are antibodies that are identical because they were produced by one type of immune cell and are all clones of a single parent cell.

[0123] Monovalent antibodies: The antibodies in the present invention can be monovalent antibodies. Methods for preparing monovalent antibodies are well known in the art. For example, one method involves recombinant expression of immunoglobulin light chain and modified heavy chain. The heavy chain is truncated generally at any point in the Fc region so as to prevent heavy chain crosslinking. Alternatively, the relevant cysteine residues are substituted with another amino acid residue or are deleted so as to prevent crosslinking. In vitro methods are also suitable for preparing monovalent antibodies. Digestion of antibodies to produce fragments thereof, particularly, Fab fragments, can be accomplished using routine techniques known in the art.

[0124] Multimerization domain: A multimerization domain is a molecule, a complex of molecules, or a solid support, to which one or more MHC or MHC-peptide complexes can be attached. A multimerization domain consist of one or more carriers and/or one or more scaffolds and may also contain one or more linkers connecting carrier to scaffold, carrier to carrier, scaffold to scaffold. The multimerization domain may also contain one or more linkers that can be used for attachment of MHC complexes and/or other molecules to the multimerization domain.

[0125] Multimerization domains thus include IgG, streptavidin, streptactin, micelles, cells, polymers, beads and other types of solid support, and small organic molecules carrying reactive groups or carrying chemical motifs that can bind MHC complexes and other molecules.

[0126] Nanobodies: Nanobodies as used herein is a type of antibodies derived from camels, and are much smaller than traditional antibodies.

[0127] Neutralizing antibodies: neutralizing antibodies as used herein is an antibody which, on mixture with the homologous infectious agent, reduces the infectious titer.

[0128] NMR: NMR (Nuclear magnetic resonance), as used herein, is a physical phenomenon based upon the quantum mechanical magnetic properties of an atom's nucleus. NMR refers to a family of scientific methods that exploit nuclear magnetic resonance to study molecules.

[0129] Non-covalent: The term noncovalent bond as used herein is a type of chemical bond, that does not involve the sharing of pairs of electrons, but rather involves more dispersed variations of electromagnetic interactions.

[0130] Nucleic acid duplex: A nucleic acid is a complex, high-molecular-weight biochemical macromolecule composed of nucleotide chains that convey genetic information. The most common nucleic acids are deoxyribonucleic acid (DNA) and ribonucleic acid (RNA).

[0131] Nucleophilic: a nucleophile, as used herein, is a reagent that forms a chemical bond to its reaction partner (the electrophile) by donating both bonding electrons.

[0132] “One or more” as used everywhere herein is intended to include one and a plurality.

[0133] A “peptide free MHC Class I molecule” as used everywhere herein is meant to be a MHC Class I molecule as defined above with no peptide.

[0134] A “peptide free MHC Class II molecule” as used everywhere herein is meant to be a MHC Class II molecule as defined above with no peptide.

[0135] Such peptide free MHC Class I and II molecules are also called “empty” MHC Class I and II molecules.

[0136] Pegylated: pegylated, as used herein, is conjugation of Polyethylene glycol (PEG) to proteins.

[0137] Pentamer, MHC pentamer and pentamer MHC multimer is used interchangeable herein and refers to a MHC multimer comprising 5 MHC molecules and optionally one or more labelling compounds.

[0138] Peptide or protein: Any molecule composed of at least two amino acids. Peptide normally refers to smaller molecules of up to around 30 amino acids and protein to larger molecules containing more amino acids.

[0139] Phosphorylated; phosphorylated, as used herein, is the addition of a phosphate (PO₄) group to a protein molecule or a small molecule.

[0140] “A plurality” as used everywhere herein should be interpreted as two or more. PNA: PNA (Peptide nucleic acid) as used herein is a chemical similar to DNA or RNA. PNA is not known to occur naturally in existing life on Earth but is artificially synthesized and used in some biological research and medical treatments.DNA and RNA have a deoxyribose and ribose sugar backbone, respectively, whereas PNA's backbone is composed of repeating N-(2-aminoethyl)-glycine units linked by peptide bonds. The various purine and pyrimidine bases are linked to the backbone by methylene carbonyl bonds. PNAs are depicted like peptides, with the N-terminus at the first (left) position and the C-terminus at the right.

[0141] “A plurality” as used everywhere herein should be interpreted as two or more. This applies i.a. to the MHC peptide complex and the binding entity. When a plurality of MHC peptide complexes is attached to the multimerization domain, such as a scaffold or a carrier molecule, the number of MHC peptide complexes need only be limited by the capacity of the multimerization domain.

[0142] Polyclonal antibodies: a polyclonal antibody as used herein is an antibody that is derived from different B-cell lines. They are a mixture of immunoglobulin molecules secreted against a specific antigen, each recognising a different epitope.

[0143] Polymer: the term polymer as used herein is defined as a compound composed of repeating structural units, or monomers, connected by covalent chemical bonds.

[0144] Polypeptide: Peptides are the family of short molecules formed from the linking, in a defined order, of various α-amino acids. The link between one amino acid residue and the next is an amide bond and is sometimes referred to as a peptide bond. Longer peptides are referred to as proteins or polypeptide.

[0145] Polysaccharide: The term polysaccharide as used herein is defined as polymers made up of many monosaccharides joined together by glycosidic linkages.

[0146] Radicals: radicals, as used herein, are atomic or molecular species with unpaired electrons on an otherwise open shell configuration. These unpaired electrons are usually highly reactive, so radicals are likely to take part in chemical reactions.

[0147] Radioactivity: Radioactive decay is the process in which an unstable atomic nucleus loses energy by emitting radiation in the form of particles or electromagnetic waves. RNA: RNA (Ribonucleic acid) as used herein is a nucleic acid polymer consisting of nucleotide monomers that plays several important roles in the processes that translate genetic information from deoxyribonucleic acid (DNA) into protein products

[0148] Scaffold: A scaffold is typically an organic molecule carrying reactive groups, capable of reacting with reactive groups on a MHC-peptide complex. Particularly small organic molecules of cyclic structure (e.g. functionalized cycloalkanes or functionalized aromatic ring structures) are termed scaffolds. Scaffold and carrier are used interchangeably herein where scaffold typically refers to smaller molecules of a multimerization domain and carrier typically refers to larger molecule and/or cell like structures.

[0149] Staining: In this invention staining means specific or unspecific labelling of cells by binding labeled molecules to defined proteins or other structures on the surface of cells or inside cells. The cells are either in suspension or part of a tissue. The labeled molecules can be MHC multimers, antibodies or similar molecules capable of binding specific structures on the surface of cells.

[0150] Streptavidin: Streptavidin as used herein is a tetrameric protein purified from the bacterium Streptomyces avidinii. Streptavidin is widely use in molecular biology through its extraordinarily strong affinity for biotin.

[0151] Sugar: Sugars as used herein include monosaccharides, disaccharides, trisaccharides and the oligosaccharides—comprising 1, 2, 3, and 4 or more monosaccharide units respectively.

[0152] Therapy: Treatment of illness or disability

[0153] Treatment: As used herein, the term “treatment” refers to prophylactic, ameliorating, therapeutic or curative treatment.

[0154] Vaccine: A vaccine is an antigenic preparation used to establish immunity to a disease or illness and thereby protects or cure the body from a specific disease or illness. Vaccines are either prophylactic and prevent disease or therapeutic and treat disease.

[0155] Vaccines may contain more than one type of antigen and is then called a combined vaccine.

[0156] Vaccination: The introduction of vaccine into the body of human or animals for the purpose of inducing immunity.

[0157] B.L. is an abbreviation for Bind level

[0158] Aff. Is an abbreviation for affinity

### DETAILED DESCRIPTION OF INVENTION

[0159] The present invention in one aspect refers to a MHC monomer comprising a-b-P, or a MHC multimer comprising (a-b-P)ₙ, wherein n>1,

wherein a and b together form a functional MHC protein capable of binding the antigenic peptide P,
wherein (a-b-P) is the MHC-peptide complex formed when the antigenic peptide P binds to the functional MHC protein, and
wherein each MHC peptide complex of a MHC multimer is associated with one or more multimerization domains.

[0160] In the following the antigenic peptide P is used interchangeably with antigenic peptide.

[0161] Another aspect of the present invention refers to an antigenic peptide not bound to a MHC molecule or an antigenic polypeptide featuring one or more antigenic peptides.

[0162] The antigenic peptide is in one embodiment a cancer peptide such as e.g. a peptide derived from a tumour antigen.

[0163] MHC monomers and MHC multimers comprising one or more MHC peptide complexes of class 1 or class 2 MHC are covered by the present invention. In another embodiment the present invention covers antigenic peptides able to bind MHC class 1 and/or MHC class 2 molecules or antigenic polypeptides featuring such antigenic peptides. Accordingly, the antigenic peptide of the present invention can have a length of e.g. 8, 9, 10, 11, 12, 13, 14, 15, 16, 16-20, or 20-30 amino acid residues.

[0164] Examples of the antigenic peptide P or antigenic peptide is provided herein below. In one embodiment, the antigenic peptide P as part of an MHC monomer or MHC multimer can be selected from the group consisting of sequences disclosed in the sequence listing starting with SEQ ID NO 1 and ending with SEQ ID NO 146508. An isolated antigenic peptide can according to the invention be selected from the group consisting of sequences identified by SEQ ID NO 1-105978 and SEQ ID NO 107384-109570 and SEQ ID NO 116661-146508.

[0165] In another aspect the present invention is directed to a composition comprising a plurality of MHC monomers and/or MHC multimers according to the present invention, wherein the MHC multimers are identical or different, and a carrier.

[0166] In another aspect the present invention is directed to a composition comprising a plurality of antigenic peptides and/or antigenic polypeptides according to the present invention, wherein the antigenic peptides and/or antigenic polypeptides are identical or different.

[0167] In yet another aspect there is provided a kit comprising one or more MHC monomer(s), one or more MHC multimer(s), one or more antigenic peptides or one or more antigenic polypeptides according to the present invention, or a composition according to the present invention, and at least one additional component, such as a positive control and/or instructions for use.

[0168] The present invention further relates to a method for detection of antigen-specific T cells, said method comprising the steps of 1) providing the MHC multimer described above, 2) providing a population of antigen-specific T cells, and 3) detecting antigen-specific T cells specific for the peptide P of the MHC multimer.

[0169] The present invention also relates to a method for detection of antigen-specific T cells, said method comprising the steps of 1) providing the antigenic peptide or antigenic polypeptide described above, 2) providing a population of antigen-specific T cells, and 3) detecting antigen-specific T cells specific for the antigenic peptide P in complex with MHC molecules.

[0170] In a further embodiment the present invention relates to a method for counting of antigen-specific T cells, said method comprising the steps of 1) providing the MHC multimer described above, 2) providing a population of antigen-specific T cells, and 3) counting antigen-specific T cells specific for the peptide P of the MHC multimer.

[0171] The present invention also relates to a method for sorting of antigen-specific T cells, said method comprising the steps of 1) providing the MHC multimer described above, 2) providing a population of antigen-specific T cells, and 3) sorting antigen-specific T cells specific for the peptide P of the MHC multimer.

[0172] In yet another embodiment the present invention relates to a method for isolation of antigen-specific T cells, said method comprising the steps of 1) providing the MHC multimer described above, 2) providing a population of antigen-specific T cells, and 3) isolating antigen-specific T cells specific for the peptide P of the MHC multimer.

[0173] In a still further aspect there is provided a method for immune monitoring one or more diseases or effects of vaccines comprising monitoring of antigen-specific T cells, said method comprising the steps of
[0174] i) providing the MHC monomer or MHC multimer or individual components thereof according to the present invention, or the individual components thereof,
[0175] ii) providing a population of antigen-specific T cells or individual antigen-specific T cells, and
[0176] iii) measuring the number, activity or state and/or presence of antigen-specific of T cells specific for the antigenic peptide P of the said MHC monomer or MHC multimer, thereby immune monitoring said one or more diseases. or
[0177] i) providing the antigenic peptide or antigenic polypeptide according to the present invention,
[0178] ii) providing a population of antigen presenting cells
[0179] iii) providing a population of antigen-specific T cells or individual antigen-specific T cells, and
[0180] iv) measuring the number, activity or state and/or presence of antigen-specific of T cells specific for the antigenic peptide or antigenic polypeptide, thereby immune monitoring said one or more diseases.

[0181] In yet another aspect there is provided a method for diagnosing one or more diseases comprising immune monitoring of antigen-specific T cells, said method comprising the following steps: of
[0182] i) providing the MHC monomer or MHC multimer or individual components thereof according to the present invention, or individual components thereof,
[0183] ii) providing a population of antigen-specific T cells or individual antigen-specific T cells, and
[0184] iii) measuring the number, activity or state and/or presence of T cells specific for said MHC monomer or the antigenic peptide P of the MHC multimer, thereby diagnosing said one or more diseases.

[0185] Or
[0186] i) providing the antigenic peptide or antigenic polypeptide according to the present invention,
[0187] ii) providing a population of antigen presenting cells
[0188] iii) providing a population of antigen-specific T cells or individual antigen-specific T cells, and
[0189] iv) measuring the number, activity or state and/or presence of T cells specific for said MHC monomer or the antigenic peptide P of the MHC multimer, thereby diagnosing said one or more diseases.

[0190] There is also provided a method for isolation of one or more antigen-specific T cells, said method comprising the steps of
[0191] i) providing the MHC monomer or MHC multimer or individual components thereof according to the present invention, or individual components thereof, and
[0192] ii) providing a population of antigen-specific T cells or individual antigen-specific T cells, and
[0193] iii) thereby isolating said T cells specific for the antigenic peptide P of the said MHC monomer or MHC multimer.

[0194] The present invention makes it possible to pursue different immune monitoring methods using the MHC monomers, MHC multimers, antigenic peptides and/or antigenic polypeptides according to the present invention. The immune monitoring methods include e.g. flow cytometry, ELISPOT, LDA, Quantaferon and Quantaferon-like methods. Using the above-cited methods, the MHC monomers and/or the MHC multimers can be provided as a MHC peptide complex, or the peptide and the MHC monomer and/or multimer can be provided separately.

[0195] Accordingly, recognition of TCR's can be achieved by direct or indirect detection, e.g. by using one or more of the following methods:

ELISPOT technique using indirect detection, e.g. by adding the antigenic peptide optionally associated with a MHC monomer or MHC multimer or adding antigenic polypeptide comprising antigenic peptide, followed by measurement of INF-gamma secretion from a population of cells or from individual cells.

[0196] Another technique involves a Quantaferon-like detection assays, e.g. by using indirect detection, e.g. by adding the antigenic peptide optionally associated with a MHC monomer or MHC multimer or adding antigenic polypeptide comprising antigenic peptide, followed by measurement of INF-gamma secretion from a population of cells or from individual cells.

[0197] Flow cytometry offers another alternative for performing detection assays, e.g. by using direct detection (e.g. of MHC tetramers), e.g. by adding the antigenic peptide optionally associated with a MHC monomer or MHC multimer, followed by detection of a fluorescein label, thereby measuring the number of TCRs on specific T-cells.

[0198] Flow cytometry can also be used for indirect detection, e.g. by adding the antigenic peptide optionally associated with a MHC monomer or MHC multimeror adding antigenic polypeptide comprising antigenic peptide, followed by addition of a “cell-permeabilizing factor”, and subsequent measurement of an intracellular component (e.g. INF-gamma mRNA), from individual cells or populations of cells.

[0199] By using the above-mentioned and other techniques, one can diagnose and/or monitor cancer disease. The diagnosis and/or monitoring of a particular disease can greatly aid in directing an optimal treatment of said disease in an individual.

[0200] In still further aspects of the present invention there is provided a method for performing a vaccination of an individual in need thereof, said method comprising the steps of
[0201] providing a MHC monomer or a MHC multimer according to the present invention, or the individual components thereof, and
[0202] administering said MHC monomer or MHC multimer to said individual and obtaining a protective immune response, thereby performing a vaccination of the said individual.

[0203] Or
[0204] providing an antigenic peptide or an antigenic polypeptide according to the present invention, and
[0205] administering said antigenic peptide or antigenic polypeptide to said individual and obtaining a protective immune response, thereby performing a vaccination of the said individual.

[0206] In yet another embodiment there is provided a method for performing therapeutic treatment of an individual comprising the steps of
[0207] Providing the MHC multimer according to the present invention, or individual components thereof, and
[0208] Isolating or obtaining T-cells from a source, such as an individual or an ex-vivo library or cell bank, wherein said isolated or obtained T-cells are specific for said provided MHC multimer,
[0209] Optionally manipulating said T-cells, and
[0210] Introducing said isolated or obtained T-cells into an individual to be subjected to a therapeutic treatment, wherein the individual can be the same individual or a different individual from the source individual.

[0211] There is also provided in accordance with the present invention a method for immune monitoring one or more cancer diseases or effects of cancer vaccines comprising the step of monitoring one or more cancer antigen specific T-cells, said method comprising the steps of
[0212] providing a MHC monomer or MHC multimer, or individual components thereof, according to any of the claims 1 and 3-817 and 819-851,
[0213] providing a population of cancer antigen specific T cells, or individual cancer antigen specific T cells, and
[0214] measuring the number and/or presence of cancer antigen specific T cells specific for the antigenic peptide of the MHC monomer or MHC multimer, thereby immune monitoring said one or more cancer diseases.

[0215] Or
[0216] providing an antigenic peptide or an antigenic polypeptide, according to any of the claims 2 and 818-853,
[0217] providing a population of cancer antigen specific T cells, or individual cancer antigen specific T cells, and
[0218] measuring the number and/or presence of cancer antigen specific T cells specific for the antigenic peptide or antigenic polypeptide, thereby immune monitoring said one or more cancer diseases.

[0219] In a still further aspect there is provided a method for diagnosing one or more cancer diseases in an individual, said method comprising the step of performing an immune monitoration of one or more cancer antigen specific T cell(s), said method comprising the further steps of
[0220] providing the MHC multimer or individual components thereof according to the present invention, and
[0221] providing a population of cancer antigen specific T cells, or individual cancer antigen specific T cells, and
[0222] measuring the number and/or presence of T cells specific for the antigenic peptide of the MHC monomer or MHC multimer, thereby diagnosing said one or more cancer diseases.

[0223] Or
[0224] providing an antigenic peptide or an antigenic polypeptide, and
[0225] providing a population of cancer antigen specific T cells, or individual cancer antigen specific T cells, and
[0226] measuring the number and/or presence of cancer antigen specific T cells specific for the antigenic peptide or antigenic polypeptide, thereby immune monitoring said one or more cancer diseases.

[0227] In yet another aspect of the present invention there is provided a method for performing a cancer vaccination of an individual in need thereof, said method comprising the steps of
[0228] providing a MHC monomer, MHC multimer, antigenic peptide or antigenic polypeptide according to any of the present invention, and
[0229] administering said MHC monomer, said MHC multimer, said antigenic peptide or said antigenic polypeptide to said individual, thereby performing a cancer vaccination of the said individual.

[0230] In a still further aspect of the present invention there is provided a method for performing a cancer therapeutic treatment of an individual comprising the steps of
[0231] Providing the MHC multimer according to the present invention, and
[0232] Isolation of T cells specific for said MHC multimer, and
[0233] Optionally manipulation of said T cell and
[0234] Introduction of said T cells into the same or a different individual to obtain a cancer therapeutic treatment.

[0235] There is also provided a method comprising one or more steps for minimizing undesired binding of the MHC multimer according to the present invention. This method is disclosed herein below in more detail.

[0236] In further aspects the present invention provides:

[0237] A method for performing a control experiment comprising the step of counting of particles comprising the MHC multimer according to the present invention.

[0238] A method for performing a control experiment comprising the step of sorting of particles comprising the MHC multimer according to the present invention.

[0239] A method for performing a control experiment comprising the step of performing flow cytometry analysis of particles comprising the MHC multimer according to the present invention.

[0240] A method for performing a control experiment comprising the step of performing a immunohistochemistry analysis comprising the MHC multimer according to the present invention.

[0241] A method for performing a control experiment comprising the step of performing a immunocytochemistry analysis comprising the MHC multimer according to the present invention.

[0242] A method for performing a control experiment comprising the step of performing an ELISA analysis comprising the MHC multimer according to the present invention.

[0243] In a still further aspect of the present invention there is provided a method for generating MHC multimers according to the present invention, said method comprising the steps of
[0244] i) providing one or more peptides P; and/or
[0245] ii) providing one or more functional MHC proteins,
[0246] iii) optionally providing one or more multimerization domains, and
[0247] iv) contacting the one or more peptides P and the one or more functional MHC proteins and the one or more multimerization domains simultaneously or sequentially in any order, thereby obtaining MHC multimers according to the present invention.

[0248] The method can also be performed by initially providing one or more antigenic peptide(s) P and one or more functional MHC proteins to generate a MHC-peptide complex (a-b-P); subsequently providing one or more multimerisation domain(s); and reacting the one or more MHC-peptide complexes and the one or more multimerization domain(s) to generate a MHC multimer according to the present invention.

[0249] In one aspect, the present invention is directed to novel MHC complexes optionally comprising a multimerization domain preferably comprising a carrier molecule and/or a scaffold.

[0250] There is also provided a MHC multimer comprising 2 or more MHC-peptide complexes and a multimerization domain to which the 2 or more MHC-peptide complexes are associated. The MHC multimer can generally be formed by association of the 2 or more MHC-peptide complexes with the multimerization domain to which the 2 or more MHC-peptide complexes are capable of associating.

[0251] The multimerization domain can be a scaffold associated with one or more MHC-peptide complexes, or a carrier associated with one or more, preferably more than one, MHC-peptide complex(es), or a carrier associated with a plurality of scaffolds each associated with one or more MHC-peptide complexes, such as 2 MHC-peptide complexes, 3 MHC-peptide complexes, 4 MHC-peptide complexes, 5 MHC-peptide complexes or more than 5 MHC-peptide complexes. Accordingly, multimerization domain collectively refers to each and every of the above. It will be clear from the detailed description of the invention provided herein below when the multimerization domain refers to a scaffold or a carrier or a carrier comprising one or more scaffolds.

[0252] Generally, when a multimerization domain comprising a carrier and/or a scaffold is present, the MHC complexes can be associated with this domain either directly or via one or more binding entities. The association can be covalent or non-covalent.

[0253] Accordingly, there is provided in one embodiment a MHC complex comprising one or more entities (a-b-P)ₙ, wherein a and b together form a functional MHC protein capable of binding a antigenic peptide P, and wherein (a-b-P) is the MHC-peptide complex formed when the antigenic peptide P binds to the functional MHC protein, said MHC complex optionally further comprising a multimerization domain comprising a carrier molecule and/or a scaffold. “MHC complex” refers to any MHC complex, including MHC monomers in the form of a single MHC-peptide complex and MHC multimers comprising a multimerization domain to which more than one MHC peptide complex is associated.

[0254] When the invention is directed to complexes comprising a MHC multimer, i.e. a plurality of MHC peptide complexes of the general composition (a-b-P)ₙ associated with a multimerization domain, n is by definition more than 1, i.e. at least 2 or more. Accordingly, the term “MHC multimer” is used herein specifically to indicate that more than one MHC-peptide complex is associated with a multimerization domain, such as a scaffold or carrier or carrier comprising one or more scaffolds. Accordingly, a single MHC-peptide complex can be associated with a scaffold or a carrier or a carrier comprising a scaffold and a MHC-multimer comprising 2 or more MHC-peptide complexes can be formed by association of the individual MHC-peptide complexes with a scaffold or a carrier or a carrier comprising one or more scaffolds each associated with one or more MHC-peptide complexes.

[0255] When the MHC complex comprises a multimerization domain to which the n MHC-peptide complexes are associated, the association can be a covalent linkage so that each or at least some of the n MHC-peptide complexes is covalently linked to the multimerization domain, or the association can be a non-covalent association so that each or at least some of the n MHC-peptide complexes are non-covalently associated with the multimerization domain.

[0256] The MHC complexes of the invention may be provided in non-soluble or soluble form, depending on the intended application.

[0257] Effective methods to produce a variety of MHC complexes comprising highly polymorphic human HLA encoded proteins makes it possible to perform advanced analyses of complex immune responses, which may comprise a variety of peptide epitope specific T-cell clones.

[0258] One of the benefits of the MHC complexes of the present invention is that the MHC complexes overcome low intrinsic affinities of monomer ligands and counter receptors. The MHC complexes have a large variety of applications that include targeting of high affinity receptors (e.g. hormone peptide receptors for insulin) on target cells. Taken together poly-ligand binding to target cells has numerous practical, clinical and scientifically uses.

[0259] Thus, the present invention provides MHC complexes which present mono-valent or multi-valent binding sites for MHC recognising cells, such as MHC complexes optionally comprising a multimerization domain, such as a scaffold or a carrier molecule, which multimerization domain have attached thereto, directly or indirectly via one or more linkers, covalently or non-covalently, one or more MHC peptide complexes. “One or more” as used herein is intended to include one as well as a plurality, such as at least 2. This applies i.a. to the MHC peptide complexes and to the binding entities of the multimerization domain. The scaffold or carrier molecule may thus have attached thereto a MHC peptide complex or a plurality of such MHC peptide complexes, and/or a linker or a plurality of linkers.

### Product

[0260] In one embodiment of the present invention the product is a MHC monomer or a MHC multimer as described above. As used in the description of this invention, the term “MHC multimers” will be used interchangeably with the terms MHC'mers and MHCmers, and will include any number, (larger than one) of MHC-peptide complexes, held together in a large complex by covalent or non-covalent interactions between a multimerization domain and one or more MHC-peptide complexes, and will also include the monomeric form of the MHC-peptide complex, i.e. a MHC-peptide complex that is not attached to a multimerization domain. The multimerization domain consists of one or more carriers and/or one or more scaffolds while the MHC-peptide complex consists of MHC molecule and antigenic peptide. MHC-peptide complexes may be attached to the multimerization domain through one or more linkers. A schematic representation of a MHC multimer is presented in FIG. 1.

[0261] In another embodiment of the present invention the product is antigenic peptide or antigenic polypeptide containing one or more antigenic peptide(s). As used in the description of this invention the term antigenic peptide will be used interchangeably with the term binding peptide and refers to any peptide molecule that is bound or able to bind into the binding groove of either MHC class 1 or MHC class 2.

[0262] In the following the design and generation of the different components of MHC monomers, MHC multimers, antigenic peptides and/or antigenic polypeptides are described.

### Design and Generation of Antigenic Peptides

[0263] Antigenic peptides of the present invention may be used in processes of the present invention either as part of MHC monomers, MHC multimers or antigenic polypeptides or used themselves as a product. Antigenic polypeptide and antigenic peptide products will later in the process they are used for, bind MHC molecules and thereby generate MHC monomers and/or MHC multimers, e.g. when used as a vaccine the antigenic peptides may bind MHC molecules on cells inside the body or when used for an immune monitoring process antigenic peptides binds MHC molecules present in the sample they are applied to.

[0264] Therefore the features of and principles for design and generation of antigenic peptides used themselves as a product or used in MHC monomers, MHC multimers or in antigenic polypeptides are identical and will be described in more detail in the following.

[0265] MHC class 1 protein typically binds octa-, nona-, deca- or ondecamer (8-, 9-, 10, -11-mer) peptides in their peptide binding groove. The individual MHC class 1 alleles have individual preferences for the peptide length within the given range. MHC class 2 proteins typically bind peptides with a total length of 13-18 amino acids, comprising a 9′-mer core motif containing the important amino acid anchor residues. However the total length is not strictly defined, as opposed to most MHC class 1 molecules.

[0266] For some of the MHC alleles the optimal peptide length and the preferences for specific amino acid residues in the so called anchor positions are known.

[0267] To identify high-affinity binding peptides derived from a specific protein for a given MHC allele it is necessary to systematically work through the amino acid sequence of the protein to identify the putative high-affinity binding peptides. Although a given peptide is a binder it is not necessarily a functional T-cell epitope. Functionality needs to be confirmed by a functional analysis e.g. ELISPOT, CTL killing assay or flow cytometry assay as described elsewhere herein.

[0268] The binding affinity of the peptide for the MHC molecules can for some MHC molecules be predicted in databases such as www.syfpeithi.de; http://www-bimas.cit.nih.gov/molbio/hla_bind/; www.cbs.dtu.dk/services/NetMHC/; www.cbs.dtu.dk/services/NetMHClI/

### Design of Binding Peptides

[0269] The first step in the design of binding peptides is obtaining the protein's amino acid sequence. In many cases the amino acid sequence of the protein from which antigenic peptides have to be identified from are known. However, when only the genomic DNA sequences are known, i.e. the reading frame and direction of transcription of the genes is unknown, the DNA sequence needs to be translated in all three reading frames in both directions leading to a total of six amino acid sequences for a given genome. From these amino acid sequences binding peptides can then be identified as described below. In organisms having intron/exon gene structure the present approach must be modified accordingly, to identify peptide sequence motifs that are derived by combination of amino acid sequences derived partly from two separate introns. cDNA sequences can be translated into the actual amino acid sequences to allow peptide identification. In cases where the protein sequence is known, these can directly be used to predict peptide epitopes.

[0270] Binding peptide sequences can be predicted from any protein sequence by either a total approach, generating binding peptide sequences for potentially any MHC allele, or by a directed approach, identifying a subset of binding peptides with certain preferred characteristics such as affinity for MHC protein, specificity for MHC protein, likelihood of being formed by proteolysis in the cell, and other important characteristics.

### Design of MHC Class 1 Binding Peptide Sequence

[0271] Many parameters influence the design of the individual binding peptide, as well as the choice of the set of binding peptides to be used in a particular application. Important characteristics of the MHC-peptide complex are physical and chemical (e.g. proteolytic) stability. The relevance of these parameters must be considered for the production of the antigenic peptides, the antigenic polypeptides, the MHC-peptide complexes and the MHC multimers, as well as for their use in a given application. As an example, the stability of the MHC-peptide complex in assay buffer (e.g. PBS), in blood, or in the body can be very important for a particular application.

[0272] In the interaction of the MHC-peptide complex with the TCR, a number of additional characteristics must be considered, including binding affinity and specificity for the TCR, degree of cross-talk, undesired binding or interaction with other TCRs. Finally, a number of parameters must be considered for the interaction of MHC-peptide complexes or MHC multimers with the sample or individual it is being applied to. These include immunogenicity, allergenicity, as well as side effects resulting from un-desired interaction with “wrong” T cells, including cross-talk with e.g. autoimmune diseases and un-desired interaction with other cells than antigen-specific T cells.

[0273] For some applications, e.g. immuno profiling of an individual's immune response focused on one antigen, it is preferred that all possible binding peptides of that antigen are included in the application (i.e. the “total approach” for the design of binding peptides described below). For other applications, e.g. vaccines it may be adequate to include a few or just one binding peptide for each of the HLA-alleles included in the application (i.e. the “directed approach” whereby only the most potent binding peptides can be included). Personalized diagnostics, therapeutics and vaccines will often fall in-between these two extremes, as it will only be necessary to include a few or just one binding peptide in e.g. a vaccine targeting a given individual, but the specific binding peptide may have to be picked from binding peptides designed by the total approach, and identified through the use of immuno profiling studies involving all possible binding peptides. The principles of immuno profiling is described elsewhere herein.

### a) Total Approach

[0274] The MHC class 1 binding peptide prediction is done as follows using the total approach. The actual protein sequence is split up into 8-, 9-, 10-, and 11-mer peptide sequences. This is performed by starting at amino acid position 1 identifying the first 8-mer; then move the start position by one amino acid identifying the second 8-mer; then move the start position by one amino acid, identifying the third 8-mer. This procedure continues by moving start position by one amino acid for each round of peptide identification. Generated peptides will be amino acid position 1-8, 2-9, 3-10 etc. This procedure can be carried out manually or by means of a software program (FIG. 2). This procedure is then repeated in an identical fashion for 9-, 10 and 11-mers, respectively.

### b) Directed Approach

[0275] The directed approach identifies a preferred subset of binding peptides from the binding peptides generated in the total approach. This preferred subset is of particularly value in a given context.

[0276] One way to select subsets of antigenic peptides is to use consensus sequences to choose a set of relevant binding peptides able to bind the individual MHC allele and that will suit the “average” individual. Such consensus sequences often solely consider the affinity of the binding peptide for the MHC protein; in other words, a subset of binding peptides is identified where the designed binding peptides have a high probability of forming stable MHC-peptide complexes, but where it is uncertain whether this MHC-peptide complex is of high relevance in a population, and more uncertain whether this MHC-peptide complex is of high relevance in a given individual. For class I MHC-alleles, the consensus sequence for a binding peptide is generally given by the formula

X1-X2-X3-X4- . . . -Xn,

where n equals 8, 9, 10, or 11, and where X represents one of the twenty naturally occurring amino acids, optionally modified as described elsewhere in this application. X1-Xn can be further defined. Thus certain positions in the consensus sequence are more likely to contribute to binding to a given MHC molecule than others.

[0277] Antigenic peptide-binding by MHC I is accomplished by interaction of specific amino acid side chains of the antigenic peptide with discrete pockets within the peptide-binding groove of the MHC molecule. The peptide-binding groove is formed by the α1 and α2 domains of the MHC I heavy chain and contains six pockets denoted A, B, C, D, E, F. For human HLA molecules the main binding energy associating antigenic peptide to MHC I is provided by interaction of amino acids in position 2 and at the c-terminus of the antigenic peptide with the B and F binding pockets of the MHC I molecule. The amino acids of the antigenic peptide being responsible for the main anchoring of the peptide to the MHC molecule are in the following called primary anchor amino acids and the motif they form for primary anchor motif. Other amino acid side chains of an antigenic peptide may also contribute to the anchoring of the antigenic peptide to the MHC molecule but to a lesser extent. Such amino acids are often referred to as secondary anchor amino acids and form a secondary anchor motif.

[0278] Different HLA alleles have different amino acids lining the various pockets of the peptide-binding groove enabling the various alleles to bind unique repertoires of antigenic peptides with specific anchor amino acid motifs. Thus for a selected consensus sequence certain positions are the socalled anchor positions and the selection of useful amino acids for these positions is limited to those able to fit into the corresponding binding pockets in the HLA molecule. For example for peptides binding HLA-A*02, X2 and X9 are primary anchor positions docking into the B and F pocket of the HLA molecule respectively, and useful amino acids at these two positions in the binding peptide are preferable limited to leucine or methionine for X2 and to valine or leucine at position X9. In contrast the primary anchor positions of peptides binding HLA-B*08 are X3, X5 and X9 and the corresponding preferred amino acids at these positions are lysine at position X3, lysine or arginine at position X5 and leucine at position X9.

[0279] However, the different HLA alleles can be grouped into clusters or supertypes where the alleles of the supertype share peptide-binding pocket similarities in that they are able to recognize the same type of antigenic peptide primary anchor motif. Therefore antigenic peptides can be selected on their ability to bind a given HLA molecule or a given HLA supertype on the basis of their amino acid sequence, e.g. the identity of the primary anchor motif.

[0280] Antigenic peptide primary anchor motifs of special interest of the present invention are listed in table 6.

TABLE 6
HLA I supertype familie's and their antigenic peptide anchor motifs

| | Anchor motif | | | | |
|---|---|---|---|---|---|
| | | Example | | Example | |
| | B pocket | aa B | F pocket | aa F | Example of HLA |
| Supertype | specificity | pocket | specificity | pocket | allele's |
| A01 | Small and | A, T, S, V, | Aromatic and | F, W, Y, | A*0101, A*2601, |
| | aliphatic | L, I, M, Q | large | L, I, M | A*2602, A*2603, |
| | | | hydrophobic | | A*3002, A*3003, |
| | | | | | A*3004, A*3201 |
| A01/A03 | Small and | A, T, S, V, | Aromatic and | Y, R, K | A*3001, A*3201, |
| | aliphatic | L, I, M, Q | basic | | A*7401 |
| A01/A24 | Small, | A, S, T, V, | Aromatic and | F, W, Y, | A*2902 |
| | aliphatic and | L, I, M, Q, | large | L, I, M | |
| | aromatic | F, W, Y | hydrophobic | | |
| A02 | Small and | A, T, S, V, | Aliphatic and | L, I, V, M, | A*0201, A*0202, |
| | aliphatic | L, I, M, Q | small | Q, A | A*0203, A*0204, |
| | | | hydrophobic | | A*0205, A*0206, |
| | | | | | A*0207, A*0214, |
| | | | | | A*0217, A*6802, |
| | | | | | A*6901 |
| A03 | Small and | A, T, S, V, | Basic | R, H, K | A*0301, A*1101, |
| | aliphatic | L, I, M, Q | | | A*3101, A*3301, |
| | | | | | A*3303, A*6601, |
| | | | | | A*6801, A*7401 |
| A24 | Aromatic and | F, W, Y, L, | Aromatic, | F, W, Y, | A*2301, A*2402 |
| | aliphatic | I, V, M, Q | aliphatic and | L, I, V, M, | |
| | | | hydrophbic | Q, A | |
| B07 | Proline | P | Aromatic, | F, W, Y, | B*0702, B*0703, |
| | | | aliphatic and | L, I, V, M, | B*0705, B*1508, |
| | | | hydrophbic | Q, A | B*3501, B*3503, |
| | | | | | B*4201, B*5101, |
| | | | | | B*5102, B*5103, |
| | | | | | B*5301, B*5401, |
| | | | | | B*5501, B*5502, |
| | | | | | B*5601, B*6701, |
| | | | | | B*7801 |
| B08 | **Undefined | | Aromatic, | F, W, Y, | B*0801, B*0802 |
| | | | aliphatic and | L, I, V, M, | |
| | | | hydrophbic | Q, A | |
| B27 | Basic | R, H, K | Aromatic, | F, W, Y, | B*1402, B*1503, |
| | | | aliphatic, | L, I, V, M, | B*1509, B*1510, |
| | | | basic and | Q, A, R, | B*1518, B*2702, |
| | | | hydrophbic | H, K | B*2703, B*2704, |
| | | | | | B*2705, B*2706, |
| | | | | | B*2707, B*2709, |
| | | | | | B*3801, B*3901, |
| | | | | | B*3902, B*3909, |
| | | | | | B*4801, B*7301 |
| B44 | Acidic | D, E | Aromatic, | F, W, Y, | B*1801, B*3701, |
| | | | aliphatic and | L, I, V, M, | B*4001, |
| | | | hydrophbic | Q, A | B*4002, B*4006, |
| | | | | | B*4402, B*4403, |
| | | | | | B*4501 |
| B58 | Small | A, S, T | Aromatic, | F, W, Y, | B*1516, B*1517, |
| | | | aliphatic and | L, I, V, M, | B*5701, B*5702, |
| | | | hydrophbic | Q, A | B*5801, B*5802 |
| B62 | Aliphatic | L, I, V, M, | Aromatic, | F, W, Y, | B*1501, B*1502, |
| | | Q | aliphatic and | L, I, V, M, | B*1512, B*1513, |
| | | | hydrophbic | Q, A | B*4501, B*4601, |
| | | | | | B*5201 |

[0281] Antigenic peptides able to bind a given MHC molecule do not necessarily have primary anchor amino acid residues compatible with both main anchoring pockets of the MHC molecule but may have one or no primary anchor amino acids suitable for binding the MHC molecule in question. However, having the preferred primary anchor motif for a given MHC allele increases the affinity of the antigenic peptide for that given allele and thereby the likelihood of making a stable and usefull MHC-peptide molecule.

[0282] Therefore in one embodiment of the present invention antigenic peptides can be identified and selected on their ability to bind a given HLA or other MHC molecule based on what amino acids they have at primary anchor positions and/or secondary anchor positions.

[0283] Software programs are available that use neural networks or established binding preferences to predict the interaction of specific binding peptides with specific MHC class I alleles. Examples of such programs are www.syfpeithi.de; www.imtech.res.in/raghava/propred1/index.html; www.cbs.dtu.dk/services/NetMHC/.

[0284] Another useful parameter for prediction and selection of useful antigenic peptides are the probability of the binding peptide in question to be generated in vivo by the proteolytic machinery inside cells. For example for a given antigen the combined action of endosolic, cytosolic and membrane bound protease activities as well as the TAP1 and TAP2 transporter specificities can be taken into consideration. However, the proteolytic activitiy varies a lot among individuals, and for personalized diagnostics, treatment or vaccination it may be desirable to disregard these general proteolytic data. An example of a program predicting the ability of antigenic peptides to be processed is www.cbs.dtu.dk/services/NetCTU.

[0285] Using the above described principles individual peptides or a subset of peptides able to bind one or more types of MHC molecules and make stable MHC-peptide complexes can be identified. The identified peptides can then be tested for biological relevance in functional assays such as Cytokine release assays (e.g. ELISPOT), cytotoxicity assays (e.g. CTL killing assays) or using other methods as described in the section “Detection” elsewhere herein. Alternatively or complementary hereto the ability of the identified antigenic peptides to bind selected MHC molecules may be determined in binding assays like Biacore measurement, competition assays or other assays useful for measurement of binding of peptide to MHC molecules, known by persons skilled in the art.

### Design of MHC Class 2 Binding Peptide Sequence.

### a) Total Approach and b) Directed Approach

[0286] The approach to predict antigenic peptide binders for MHC class 2 can be done in a similar way as described for MHC class 1 binding peptide prediction above. The change is the different size of the antigenic peptides binding MHC II compared to MHC

[0287] I. MHC II molecules bind antigenic peptides with a size of 12-24 amino acids or even longer peptides. From a given antigenic protein, MHC II molecules typically can bind sets of overlapping peptides that shares a common core sequence but differs in the overall peptide size and in positioning of the core sequence in the peptide. The core peptide sequence is typically 9 amino acids long but may also be shorter or longer. Useful antigenic peptide sequences binding MHC II of the present invention are described by the central part of the peptide mainly the 9-mer core peptide. The core peptide sequence may be flanked with a few or several important amino acids, generating antigenic peptides with a length of 13-16 amino acids. In some cases the peptide may contain even more flanking residues resulting in binding peptides longer than 13-16 amino acids. Thus, antigenic peptides of special interest of the present invention are peptides consisting of or containing 9-mer core peptide sequences The antigenic peptide sequences may be selected using the total approach as described for MHC I antigenic peptides elsewhere herein, e.g. using the software program shown in FIG. 2.

[0288] Alternatively a directed approach identifying a preferred subset of binding peptides from the binding peptides generated in the total approach can be used. As for MHC I one way to select subsets of antigenic peptides is to use consensus sequences to choose a set of relevant binding peptides able to bind the individual MHC allele and that will suit the “average” individual. Such consensus sequences often solely consider the affinity of the binding peptide for the MHC protein; in other words, a subset of binding peptides is identified where the designed binding peptides have a high probability of forming stable MHC-peptide complexes, but where it is uncertain whether this MHC-peptide complex is of high relevance in a population, and more uncertain whether this MHC-peptide complex is of high relevance in a given individual. For class II MHC-alleles, the consensus sequence for the interacting core of a binding peptide is generally given by the formula

X1-X2-X3-X4- . . . -Xn,

where n equals 9, and where X represents one of the twenty naturally occurring amino acids, optionally modified as described elsewhere in this application.

[0289] X1-Xn can be further defined. Thus, certain positions in the consensus sequence are the socalled anchor positions and the selection of useful amino acids for these positions is limited to those able to fit into the corresponding binding pockets in the HLA molecule. For example HLA-DRB1*1501 have X1, X4 and X7 as primary anchor positions where preferred amino acids at the three positions are as follows, X1: leucine, valine and isoleucine, X4: phenylalanine, tyrosine or isoleucine, X7: isoleucine, leucine, valine, methionine or phenylalanine.

[0290] Therefore in one embodiment of the present invention antigenic peptides can be identified and selected on their ability to bind a given HLA or other MHC molecule based on what amino acids they have at various anchor positions.

[0291] In general, MHC II binding peptides have much more varied anchor positions than MHC I binding peptides and the number of useful amino acids at each anchor position is much higher. For some MHC II alleles no really consensus sequence has been identified. In general position 1, 4, 6 and 9 of the 9-mer core motif of MHC II antigenic peptides are important for anchoring of the antigenic peptide to the MHC II molecule.

[0292] Table 7 shows examples of primary anchor positions and corresponding useful amino acids for antigenic peptides binding various MHC II molecules.

TABLE 7
Examples of primary anchor positions and corresponding usefull
amino acids shown as one letter code.

| MHC II | 1 | 2 | 3 | 4 | 5 | 6 | 7 | 8 | 9 |
|---|---|---|---|---|---|---|---|---|---|
| DQ2 | F, W, | | | D, E, | | P, D, | D, E | | F, W, |
| | Y, I, | | | L, V, | | E, H, | | | Y, I, |
| | L, V | | | I, H | | P, A | | | L, V, |
| | | | | | | | | | M |
| DQA1*0101/ | L | | | | Y, F, | | | | |
| DQB1*0501 | | | | | W | | | | |
| DQA1*0102/ | | | | | | L, I, | | | A, G, |
| DQB1*0602 | | | | | | V | | | S, T |
| DR17 | L, I, | | | D | | K, R, | | | Y, L, |
| (DRB1*0301) | F, M, | | | | | E, Q, | | | F |
| | V | | | | | N | | | |
| DR4 | F, Y, | | | P, W, | | N, S, | D, E, | | E, H, |
| (DRB1*0401) | W, I, | | | I, L, | | T, Q, | H, K, | | K, N, |
| | L, V, | | | V, A, | | H, R | N, Q, | | Q, R, |
| | M | | | D, E | | | R, S, | | S, T, |
| | | | | | | | T, Y, | | Y, A, |
| | | | | | | | A, C, | | C, I, |
| | | | | | | | I, L, | | L, M, |
| | | | | | | | M, V | | V |
| DRB1*1101 | W, Y, | | | L, V, | | R, K, | | | A, G, |
| | F | | | M, A, | | H | | | S, P |
| | | | | F, Y | | | | | |
| DRB1*1301 | I, V, | | | Y, | | R, K | | | Y, F, |
| | F, L | | | W, L, | | | | | A, S, |
| | | | | V, A, | | | | | T |
| | | | | M | | | | | |
| DRB1*1302 | Y, F, | | | Y, W, | | R, K | | | Y, F, |
| | V, A, | | | L, V, | | | | | A, S, |
| | I | | | A, M | | | | | T |

[0293] Another useful parameter for prediction and selection of useful antigenic peptides are the probability of the binding peptide in question to be generated in vivo or processed by the proteolytic machinery inside cells. However, like for MHC I, the proteolytic activity varies a lot among individuals, and for personalized diagnostics, treatment or vaccination it may be desirable to disregard these general proteolytic data.

[0294] Using the above described principles individual peptides or one or more subsets of peptides able to bind one or more types of MHC molecules and make stable MHC-peptide complexes can be identified. The identified peptides can then be tested for biological relevance in functional assays such as inteferone gamma release assays, ELISPOT, CTL killing assays or using other methods as described in the section “Detection” elsewhere herein. Alternatively or complementary hereto the ability of the identified antigenic peptides to bind selected MHC molecules may be determined in binding assays like Biacore measurement, competition assays or other assays useful for measurement of binding of peptide to MHC molecules, known by persons skilled in the art.

### Peptide Modifications

[0295] In addition to the binding peptides designed by the total approach and/or directed approach, homologous peptides and peptides that have been modified in the amino acid side chains or in the backbone can be used as binding peptides.

### Homologous Peptides

[0296] Homologues MHC peptide sequences may arise from the existence of multiple strongly homologous alleles, from small insertions, deletions, inversions or substitutions. If they are sufficiently homologous to peptides derived by the total approach, i.e. have an amino acid sequence identity greater than e.g. more than 90%, more than 80%, or more than 70%, or more than 60%, to one or two binding peptides derived by the total approach, they may be good candidates. Identity is often most important for the anchor residues.

[0297] A MHC binding peptide may be of split- or combinatorial epitope origin i.e. formed by linkage of peptide fragments derived from two different peptide fragments and/or proteins. Such peptides can be the result of either genetic recombination on the DNA level or due to peptide fragment association during the complex break down of proteins during protein turnover. Possibly it could also be the result of faulty reactions during protein synthesis i.e. caused by some kind of mixed RNA handling. A kind of combinatorial peptide epitope can also be seen if a portion of a longer peptide make a loop out leaving only the terminal parts of the peptide bound in the groove.

### Uncommon, Artificial and Chemically Modified Amino Acids.

[0298] Peptides having un-common amino acids, such as selenocysteine and pyrrolysine, may be bound in the MHC groove as well. Artificial amino acids e.g. having the isomeric D-form may also make up isomeric D-peptides that can bind in the binding groove of the MHC molecules. Bound peptides may also contain amino acids that are chemically modified or being linked to reactive groups that can be activated to induce changes in or disrupt the peptide. Example post-translational modifications are shown below. However, chemical modifications of amino acid side chains or the peptide backbone can also be performed.

[0299] Any of the modifications can be found individually or in combination at any position of the peptide, e.g. position 1, 2, 3, 4, 5, 6, etc. up to n.

TABLE 1
Post translational modification of peptides
Protein primary structure and posttranslational modifications

| | |
|---|---|
| N-terminus | Acetylation, Formylation, Pyroglutamate, Methylation, |
| | Glycation, Myristoylation (Gly), carbamylation |
| C-terminus | Amidation, Glycosyl phosphatidylinositol (GPI), |
| | O-methylation, Glypiation, Ubiquitination, Sumoylation |
| Lysine | Methylation, Acetylation, Acylation, Hydroxylation, |
| | Ubiquitination, SUMOylation, Desmosine formation, |
| | ADP-ribosylation, Deamination and Oxidation to |
| | aldehyde |
| Cysteine | Disulfide bond, Prenylation, Palmitoylation |
| Serine/ | Phosphorylation, Glycosylation |
| Threonine | |
| Tyrosine | Phosphorylation, Sulfation, Porphyrin ring linkage, |
| | Flavin linkage GFP prosthetic group (Thr-Tyr-Gly |
| | sequence) formation, Lysine tyrosine quinone (LTQ) |
| | formation, Topaquinone (TPQ) formation |
| Asparagine | Deamidation, Glycosylation |
| Aspartate | Succinimide formation |
| Glutamine | Transglutamination |
| Glutamate | Carboxylation, Methylation, Polyglutamylation, |
| | Polyglycylation |
| Arginine | Citrullination, Methylation |
| Proline | Hydroxylation |

### Post Translationally Modified Peptides

[0300] The amino acids of the antigenic peptides can also be modified in various ways dependent on the amino acid in question, or the modification can affect the amino- or carboxy-terminal end of the peptide. See table 1. Such peptide modifications are occurring naturally as the result of post translational processing of the parental protein. A non-exhaustive description of the major post translational modifications is given below, divided into three main types.

a) Modification that Adds a Chemical Moiety to the Binding Peptide.
[0301] acetylation, the addition of an acetyl group, usually at the N-terminus of the protein
[0302] alkylation, the addition of an alkyl group (e.g. methyl, ethyl). Methylation, the addition of a methyl group, usually at lysine or arginine residues is a type of alkylation. Demethylation involves the removal of a methyl-group.
[0303] amidation at C-terminus
[0304] biotinylation, acylation of conserved lysine residues with a biotin appendage
[0305] formylation
[0306] gamma-carboxylation dependent on Vitamin K
[0307] glutamylation, covalent linkage of glutamic acid residues to tubulin and some other proteins by means of tubulin polyglutamylase
[0308] glycosylation, the addition of a glycosyl group to either asparagine, hydroxylysine, serine, or threonine, resulting in a glycoprotein. Distinct from glycation, which is regarded as a nonenzymatic attachment of sugars.
[0309] glycylation, covalent linkage of one to more than 40 glycine residues to the tubulin C-terminal tail
[0310] heme moiety may be covalently attached
[0311] hydroxylation, is any chemical process that introduces one or more hydroxyl groups (—OH) into a compound (or radical) thereby oxidizing it. The principal residue to be hydroxylated is Proline. The hydroxilation occurs at the C^{γ} atom, forming hydroxyproline (Hyp). In some cases, proline may be hydroxylated instead on its C^{β} atom. Lysine may also be hydroxylated on its C^{δ} atom, forming hydroxylysine (Hyl).
[0312] iodination

[0313] isoprenylation, the addition of an isoprenoid group (e.g. farnesol and geranylgeraniol)
[0314] lipoylation, attachment of a lipoate functionality, as in prenylation, GPI anchor formation, myristoylation, farnesylation, geranylation
[0315] nucleotides or derivatives thereof may be covalently attached, as in ADP-ribosylation and flavin attachment
[0316] oxidation, lysine can be oxidized to aldehyde
[0317] pegylation, addition of poly-ethylen-glycol groups to a protein. Typical reactive amino acids include lysine, cysteine, histidine, arginine, aspartic acid, glutamic acid, serine, threonine, tyrosine. The N-terminal amino group and the C-terminal carboxylic acid can also be used
[0318] phosphatidylinositol may be covalently attached
[0319] phosphopantetheinylation, the addition of a 4′-phosphopantetheinyl moiety from coenzyme A, as in fatty acid, polyketide, non-ribosomal peptide and leucine biosynthesis
[0320] phosphorylation, the addition of a phosphate group, usually to serine, tyrosine, threonine or histidine
[0321] pyroglutamate formation as a result of N-terminal glutamine self-attack, resulting in formation of a cyclic pyroglutamate group.
[0322] racemization of proline by prolyl isomerase
[0323] tRNA-mediated addition of amino acids such as arginylation
[0324] sulfation, the addition of a sulfate group to a tyrosine.
[0325] Selenoylation (co-translational incorporation of selenium in selenoproteins)
   b) Modification that Adds Protein or Peptide.
[0326] ISGylation, the covalent linkage to the ISG15 protein (Interferon-Stimulated Gene 15)
[0327] SUMOylation, the covalent linkage to the SUMO protein (Small Ubiquitin-related MOdifier)
[0328] ubiquitination, the covalent linkage to the protein ubiquitin.
   c) Modification that Converts One or More Amino Acids to Different Amino Acids.
[0329] citrullination, or deimination the conversion of arginine to citrulline
[0330] deamidation, the conversion of glutamine to glutamic acid or asparagine to aspartic acid

[0331] The peptide modifications can occur as modification of a single amino acid or more than one i.e. in combinations. Modifications can be present on any position within the peptide i.e. on position 1, 2, 3, 4, 5,etc. for the entire length of the peptide.

### Sources of Binding Peptides

### a) From Natural Sources

[0332] The binding peptides can be obtained from natural sources by enzymatic digestion or proteolysis of natural proteins or proteins derived by in vitro translation of mRNA. Binding peptides may also be eluted from the MHC binding groove.

### b) From Recombinant Sources

[0333] 1) As Monomeric or Multimeric Peptide

[0334] Alternatively peptides can be produced recombinantly by transfected cells either as monomeric antigenic peptides or as multimeric (concatemeric) antigenic peptides. Optionally, the Multimeric antigenic peptides are cleaved to form monomeric antigenic peptides before binding to MHC protein.

[0335] 2) As Part of a Bigger Recombinant Protein

[0336] Binding peptides may also constitute a part of a bigger recombinant protein e.g. consisting of,

[0337] 2a) For MHC Class 1 Binding Peptides,

[0338] Peptide-linker-β2m, β2m being full length or truncated;

[0339] Peptide-linker-MHC class 1 heavy chain, the heavy chain being full length or truncated. Most importantly the truncated class I heavy chain will consist of the extracellular part i.e. the α1, α2, and α domains. The heavy chain fragment may also only contain the α1 and α2 domains, or α1 domain alone, or any fragment or full length β2m or heavy chain attached to a designer domain(s) or protein fragment(s).

[0340] 2b) For MHC Class 2 Binding Peptides the Recombinant Construction can Consist of,

[0341] Peptide-linker-MHC class 2 α-chain, full length or truncated;

[0342] Peptide-linker-MHC class 2 β-chain, full length or truncated;

[0343] Peptide-linker-MHC class 2 α-chain-linker-MHC class 2 β-chain, both chains can be full length or truncated, truncation may involve, omission of α- and/or β-chain intermembrane domain, or omission of α- and/or β-chain intermembrane plus cytoplasmic domains. MHC class 2 part of the construction may consist of fused domains from NH2-terminal, MHC class 2 β1 domain-MHC class 2 α1domain-constant α3 of MHC class 1, or alternatively of fused domains from NH2-terminal, MHC class 2 α1domain-MHC class 2 β1domain-constant α3 of MHC class 1. In both cases β2m will be associated non-covalently in the folded MHC complex. β2m can also be covalently associated in the folded MHC class 2 complex if the following constructs are used from NH2 terminal, MHC class 2 β1domain-MHC class 2 α1domain-constant α3 of MHC class 1-linker-β2m, or alternatively of fused domains from NH2-terminal, MHC class 2 α1domain-MHC class 2 β1domain-constant α3 of MHC class 1-linker-β2m; the construct may also consist of any of the above MHC class 2 constructs with added designer domain(s) or sequence(s).

### c) From Chemical Synthesis

[0344] MHC binding peptide may also be chemically synthesized by solid phase or fluid phase synthesis, according to standard protocols.

[0345] Comprehensive collections of antigenic peptides, derived from one antigen, may be prepared by a modification of the solid phase synthesis protocol, as described in the following and exemplified in Example 24.

[0346] The protocol for the synthesis of the full-length antigen on solid support is modified by adding a partial cleavage step after each coupling of an amino acid. Thus, the starting point for the synthesis is a solid support to which has been attached a cleavable linker. Then the first amino acid X1 (corresponding to the C-terminal end of the antigen) is added and a coupling reaction performed. The solid support now carries the molecule “linker-X1”. After washing, a fraction (e.g. 10%) of the cleavable linkers are now cleaved, to release into solution X1. The supernatant is transferred to a collection container. Additional solid support carrying a cleavable linker is added, e.g. corresponding to 10% of the initial amount of solid support.

[0347] Then the second amino acid X2 is added and coupled to X1 or the cleavable linker, to form on solid support the molecules “linker-X2” and “linker-X1-X2”. After washing, a fraction (e.g. 10%) of the cleavable linker is cleaved, to release into solution X2 and X1-X2. The supernatant is collected into the collection container, which therefore now contains X1, X2, and X1-X2. Additional solid support carrying a cleavable linker is added, e.g. corresponding to 10% of the initial amount of solid support.

[0348] Then the third amino acid X3 is added and coupled to X2 or the cleavable linker, to form on solid support the molecules “linker-X3”, “linker-X2-X3” and “linker-X1-X2-X3”. After washing, a fraction (e.g. 10%) of the cleavable linker is cleaved, to release into solution X3, X2-X3 and X1-X2-X3. The supernatant is collected into the collection container, which therefore now contains X1, X2, X3, X1-X2, X2-X3 and X1-X2-X3. Additional solid support carrying a cleavable linker is added, e.g. corresponding to 10% of the initial amount of solid support.

[0349] This step-wise coupling and partial cleavage of the linker is continued until the N-terminal end of the antigen is reached. The collection container will now contain a large number of peptides of different length and sequence. In the present example where a 10% partial cleavage was employed, a large fraction of the peptides will be 8′-mers, 9′-mers, 10′-mers and 11′-mers, corresponding to class I antigenic peptides. As an example, for a 100 amino acid antigen the 8′-mers will consist of the sequences X1-X2-X3-X4-X5-X6-X7-X8, X2-X3-X4-X5-X6-X7-X8-X9, X93-X94-X95-X96-X97-X98-X99-X100.

[0350] Optionally, after a number of coupling and cleavage steps or after each coupling and cleavage step, the used (inactivated) linkers on solid support can be regenerated, in order to maintain a high fraction of linkers available for synthesis. The collection of antigenic peptides can be used as a pool for e.g. the display by APCs to stimulate CTLs in ELISPOT assays, or the antigenic peptides may be mixed with one or more MHC alleles, to form a large number of different MHC-peptide complexes which can e.g. be used to form a large number of different MHC multimers which can e.g. be used in flow cytometry experiments.

### Sequences for Use in MHC Monomers, MHC Multimers, Antigenic Peptides and Antigenic Polypeptides.

[0351] The present invention relates in one embodiment to cancer antigenic peptides derived from cancer antigens. The one or more antigenic peptides can in one embodiment comprise one or more fragments from one or more cancer antigens capable of interacting with one or more MHC class 1 molecules. The one or more antigenic peptides can in another embodiment comprise one or more fragments from one or more cancer antigens capable of interacting with one or more MHC class 2 molecules. The peptide(s) can e.g. be 8 mers, 9 mers, 10 mers, 11 mers, 12 mers, 13 mers, 14 mers, 15 mers, 16 mers or even longer peptides.

[0352] The antigenic peptides used in MHC multimers and/or MHC monomers can be generated from any cancer antigen such as the cancer antigens mentioned in this application including the cancer antigens listed in Table 10, Table 11 and Table 12.

[0353] In another embodiment where the antigenic peptides are not used as part of a MHC multimer and/or MHC monomer these antigenic peptides can be generated from the cancer antigens listed in Table 10 and Table 12.

[0354] MHC Class I and MHC Class II molecules have different structures, as described above, and therefore have different restrictions on the size of the peptide which may be accommodated. In general, MHC class 1 molecules will accommodate peptides of from about 8 amino acids in length to about 11 amino acids. MHC Class II molecules will in general accommodate peptides of from about 13 amino acids in length to about 16 amino acids or even longer peptides.

[0355] The antigenic peptides can in one embodiment be identified and generated by the total approach as described above.

[0356] In another embodiment a more directed approach identifying individual or subsets of antigenic peptides are used. This can be done as described elsewhere herein by computational prediction e.g. using NetMHC (www.cbs.dtu.dk/services/NetMHC/) or by selection of specific 8, 9, 10, 11, 13, 14, 15 or 16 amino acid sequences.

[0357] The present invention relates in one embodiment to one or more antigenic peptides such as the antigenic peptides listed in Table 10 and/or Table 13 (SEQ ID NO 1-105978 and 107384-109570 and 116661-146508) and/or the antigenic peptides characterized by item 1 to 735 herein below.

[0358] In another embodiment the present invention relates to one or more MHC multimers and/or one or more MHC complexes comprising one or more antigenic peptides such as the antigenic peptides listed in this application including the antigenic peptides listed in Table 8, Table 9, Table 10, Table 11, and/or Table 13 (SEQ ID NO 1 to SEQ ID NO 146508) and/or the antigenic peptides characterized by item 1 to 735 herein below.

[0359] The one or more antigenic peptides can in one embodiment comprise or consist of a fragment of one or more antigenic peptides listed in Table 10 and/or Table 13 (SEQ ID NO 1-105978 and 107384-109570 and 116661-146508) and/or the antigenic peptides characterized by item 1 to 735 herein below, such as a fragment consisting of 1, 2, 3, 4, 5, 6, 7, 8, 9, 10, 11, 12, 13, 14, 15 or 16 amino acids.

[0360] In another embodiment the one or more antigenic peptides are part of one or more MHC multimers and/or MHC monomers and these antigenic peptides can comprise or consist of a fragment of one or more antigenic peptides listed in Table 8, Table 9, Table 10, Table 11 and/or Table 13 (SEQ ID NO 1 to SEQ ID NO 146508) and/or the antigenic peptides characterized by item 1 to 735 herein below, such as a fragment consisting of 1, 2, 3, 4, 5, 6, 7, 8, 9, 10, 11, 12, 13, 14, 15 or 16 amino acids.

[0361] In another embodiment the antigenic peptide listed in Table 10 and/or Table 13 (SEQ ID NO 1-105978 and 107384-109570 and 116661-146508) and/or the antigenic peptides characterized by item 1 to 735 herein below can be part of a larger antigenic polypeptide, wherein the larger antigenic polypeptide may be of a total length of 17, such as 18, for example 19, such as 20, for example 21, such as 22, for example 23, such as 24, for example 25, such as 26, for example 27, such as 28, for example 29, such as 30, for example 31, such as 32, for example 33, such as 34, for example 35, such as 36, for example 37, such as 38, for example 39, such as 40 amino acids, wherein 8 to 16 of said amino acids are defined in the items below. In another embodiment, the larger protein may be of a total length of between 20 to 30, such as 30-40, for example 40-50, such as 50-60, for example 60-70, such as 70-80, for example 80-90, such as 90-100, for example 100-150, such as 150-200, for example 200-250, such as 250-300, for example 300-500, such as 500-1000, for example 1000-2000, such as 2000-3000, for example 3000-4000, such as 4000-5000, for example 5000-10,000, such as 10,000-20,000, for example 20,000-30,000, such as 30,000-40,000, for example 40,000-50,000, such as 50,000-75,000, for example 75,000-100,000, such as 100,000-250,000, for example 250,000-,500,000, such as 500,000-1,000,000 amino acids.

[0362] In one embodiment the antigenic peptides listed in Table 10 and/or Table 13 (SEQ ID NO 1-105978 and 107384-109570 and 116661-146508) are modified by one or more type(s) of post-translational modifications such as one or more of the post-translational modifications listed in the items (item 1 to 735) herein below. The same or different types of post-translational modification can occur on one or more amino acids in the antigenic peptide such as on 2, 3, 4, 5, 6, 7, 8, 9, 10, 11, 12, 13, 14, 15 or 16 amino acids.

[0363] In another embodiment where the antigenic peptides are part of one or more MHC multimers and/or MHC monomers the antigenic peptides listed in Table 8, Table 9, Table 10, Table 11 and/or Table 13 (SEQ ID NO 1 to SEQ ID NO 146508) are modified by one or more type(s) of post-translational modifications such as one or more of the post-translational modifications listed in the items (item 1 to 735) herein below. The same or different types of post-translational modification can occur on one or more amino acids in the antigenic peptide such as on 2, 3, 4, 5, 6, 7, 8, 9, 10, 11, 12, 13, 14, or 16 amino acids.

Lengthy table referenced here
US20110318380A1-20111229-T00001
Please refer to the end of the specification for access instructions.

Lengthy table referenced here
US20110318380A1-20111229-T00002
Please refer to the end of the specification for access instructions.

Lengthy table referenced here
US20110318380A1-20111229-T00003
Please refer to the end of the specification for access instructions.

Lengthy table referenced here
US20110318380A1-20111229-T00004
Please refer to the end of the specification for access instructions.

Lengthy table referenced here
US20110318380A1-20111229-T00005
Please refer to the end of the specification for access instructions.

Lengthy table referenced here
US20110318380A1-20111229-T00006
Please refer to the end of the specification for access instructions.

### Antigenic Peptide Variants

[0364] MHC class 2 proteins typically bind peptides with a total length of 13-18 amino acids, comprising a 9′-mer core motif containing the important amino acid anchor residues. However the total length is not strictly defined, as opposed to most MHC class 1 molecules.

[0365] The putative binding peptide sequences only describe the central part of the peptide including the 9-mer core motif; in other words, the peptide sequences shown represent the core of the binding peptide with a few important flanking amino acids, which in some cases may be of considerably length generating binding peptides longer than the 13-16 amino acids.

[0366] The above mentioned 9-mer core motif core peptides can be part of one or more 13 mers, 14 mers, 15 mers, 16 mers or n mers. The 9-mer core motif core peptides can have different positions in the 13 mers, 14 mers, 15 mers, 16 mers or n mers as indicated below.

[0367] In one embodiment the 9-mer core motif starts at position 1 from the N-terminus of the 13 mer. In one embodiment the 9-mer core motif starts at position 2 from the N-terminus of the 13 mer. In one embodiment the 9-mer core motif starts at position 3 from the N-terminus of the 13 mer. In one embodiment the 9-mer core motif starts at position 4 from the N-terminus of the 13 mer. In one embodiment the 9-mer core motif starts at position 5 from the N-terminus of the 13 mer.

[0368] In one embodiment the 9-mer core motif starts at position 1 from the N-terminus of the 14 mer. In one embodiment the 9-mer core motif starts at position 2 from the N-terminus of the 14 mer. In one embodiment the 9-mer core motif starts at position 3 from the N-terminus of the 14 mer. In one embodiment the 9-mer core motif starts at position 4 from the N-terminus of the 14 mer. In one embodiment the 9-mer core motif starts at position 5 from the N-terminus of the 14 mer. In one embodiment the 9-mer core motif starts at position 6 from the N-terminus of the 14 mer.

[0369] In one embodiment the 9-mer core motif starts at position 1 from the N-terminus of the mer. In one embodiment the 9-mer core motif starts at position 2 from the N-terminus of the 15 mer. In one embodiment the 9-mer core motif starts at position 3 from the N-terminus of the 15 mer. In one embodiment the 9-mer core motif starts at position 4 from the N-terminus of the 15 mer. In one embodiment the 9-mer core motif starts at position 5 from the N-terminus of the 15 mer. In one embodiment the 9-mer core motif starts at position 6 from the N-terminus of the 15 mer. In one embodiment the 9-mer core motif starts at position 7 from the N-terminus of the 15 mer.

[0370] In one embodiment the 9-mer core motif starts at position 1 from the N-terminus of the 16 mer. In one embodiment the 9-mer core motif starts at position 2 from the N-terminus of the 16 mer. In one embodiment the 9-mer core motif starts at position 3 from the N-terminus of the 16 mer. In one embodiment the 9-mer core motif starts at position 4 from the N-terminus of the 16 mer. In one embodiment the 9-mer core motif starts at position 5 from the N-terminus of the 16 mer. In one embodiment the 9-mer core motif starts at position 6 from the N-terminus of the 16 mer. In one embodiment the 9-mer core motif starts at position 7 from the N-terminus of the 16 mer. In one embodiment the 9-mer core motif starts at position 8 from the N-terminus of the 16 mer.

[0371] In one embodiment the 9-mer core motif starts at position 1 from the N-terminus of the n mer where n equals any number between 17 and 30. In one embodiment the 9-mer core motif starts at position 2 from the N-terminus of the n mer. In one embodiment the 9-mer core motif starts at position 3 from the N-terminus of the n mer. In one embodiment the 9-mer core motif starts at position 4 from the N-terminus of the n mer.

[0372] In one embodiment the 9-mer core motif starts at position 5 from the N-terminus of the n mer. In one embodiment the 9-mer core motif starts at position 6 from the N-terminus of the n mer. In one embodiment the 9-mer core motif starts at position 7 from the N-terminus of the n mer. In one embodiment the 9-mer core motif starts at position 8 from the N-terminus of the n mer. In one embodiment the 9-mer core motif starts at position n-8 from the N-terminus of the n mer.

[0373] The amino acids surrounding the 9-mer core motif core peptides in the 13 mers, 14 mers, 15 mers, 16 mers and/or n mers can in one embodiment be any amino acids.

[0374] The present invention further relates to one or more antigenic peptides such as the antigenic peptides disclosed in this application, wherein the one or more antigenic peptides have one or more amino acid substitutions such as 1, 2, 3, 4, 5, 6, 7, or 8. In one embodiment the one or more amino acid substitutions are within the amino acid anchor motif. In another embodiment the one or more amino acid substitutions are outside the amino acid anchor motif. In one embodiment the one or more amino acid substitutions are within the 9 mer core motif. In another embodiment the one or more amino acid substitutions are outside the 9 mer core motif.

[0375] In a preferred embodiment these amino acid substitutions comprise substitution with an “equivalent amino acid residue”. An “equivalent amino acid residue” refers to an amino acid residue capable of replacing another amino acid residue in a polypeptide without substantially altering the structure and/or functionality of the polypeptide. Equivalent amino acids thus have similar properties such as bulkiness of the side-chain, side chain polarity (polar or non-polar), hydrophobicity (hydrophobic or hydrophilic), pH (acidic, neutral or basic) and side chain organization of carbon molecules (aromatic/aliphatic). As such, “equivalent amino acid residues” can be regarded as “conservative amino acid substitutions”.

[0376] The classification of equivalent amino acids refers in one embodiment to the following classes: 1) HRK, 2) DENQ, 3) C, 4) STPAG, 5) MILV and 6) FYW.

[0377] Within the meaning of the term “equivalent amino acid substitution” as applied herein, one amino acid may be substituted for another, in one embodiment, within the groups of amino acids indicated herein below:

[0378] Amino acids having polar side chains (Asp, Glu, Lys, Arg, His, Asn, Gln, Ser, Thr, Tyr, and Cys)

[0379] Amino acids having non-polar side chains (Gly, Ala, Val, Leu, Ile, Phe, Trp, Pro, and Met)

[0380] Amino acids having aliphatic side chains (Gly, Ala Val, Leu, Ile)

[0381] Amino acids having cyclic side chains (Phe, Tyr, Trp, His, Pro)

[0382] Amino acids having aromatic side chains (Phe, Tyr, Trp)

[0383] Amino acids having acidic side chains (Asp, Glu)

[0384] Amino acids having basic side chains (Lys, Arg, His)

[0385] Amino acids having amide side chains (Asn, Gln)

[0386] Amino acids having hydroxy side chains (Ser, Thr)

[0387] Amino acids having sulphor-containing side chains (Cys, Met),

[0388] Neutral, weakly hydrophobic amino acids (Pro, Ala, Gly, Ser, Thr)

[0389] Hydrophilic, acidic amino acids (Gln, Asn, Glu, Asp), and

[0390] Hydrophobic amino acids (Leu, Ile, Val)

[0391] A Venn diagram is another method for grouping of amino acids according to their properties (Livingstone & Barton, CABIOS, 9, 745-756, 1993). In another preferred embodiment one or more amino acids may be substituted with another within the same Venn diagram group.

[0392] In another preferred embodiment these amino acid substitutions comprise substitution with a “non-equivalent amino acid residue”. Non-equivalent amino acid residues are amino acid residues with dissimilar properties to the properties of the amino acid they substitute according to the groupings described above.

[0393] In one preferred embodiment the amino acid substitutions increases the affinity of the peptide for the MHC molecule and thereby increase the stability of the MHC-peptide complex.

[0394] In another preferred embodiment the amino acid substitutions decreases the affinity of the peptide for the MHC molecule and thereby increase the stability of the MHC-peptide complex.

[0395] In one preferred embodiment the amino acid substitutions increases the overall affinity of one or more T-cell receptors for the MHC-peptide complex containing the modified antigenic peptide.

[0396] In another preferred embodiment the amino acid substitutions decreases the overall affinity of one or more T-cell receptors for the MHC-peptide complex containing the modified antigenic peptide.

[0397] It is also to be understood, that the co-translational and post-translational modifications may occur either individually or in combination, on the same or different amino acid residues. Thus, in one embodiment, any one amino acid may be modified once, twice or three times with the same or different types of modifications. Furthermore, said identical and/or different modification may be present on 1, 2, 3, 4, 5, 6, 7, 8, 9, 10, 11, 12, 13, 14, 15 or 16 of the amino acid residues of the peptide according to the present invention as defined in the items below. In addition, modifications may also be present on amino acid residues outside said 8 to 16 amino acids, in case the peptide is part of a larger protein or antigenic polypeptide.

### Choice of MHC Allele

[0398] More than 600 MHC alleles (class 1 and 2) are known in humans; for many of these, the peptide binding characteristics are known. FIG. 3 presents an updated list of the HLA class 1 alleles. The frequency of the different HLA alleles varies considerably, also between different ethnic groups (FIG. 4). Thus it is of outmost importance to carefully select the MHC alleles that corresponds to the population that one wish to study.

### The Combined Choice of Peptide, MHC and Carrier.

[0399] Above it has been described how to generate binding peptides, and which MHC alleles are available. In the following it is described what characteristics of binding peptides and MHC alleles are important when using the MHC-peptide complex or MHC-multimer for different purposes.

[0400] A first preferred embodiment employs binding peptides of particularly high affinity for the MHC proteins. This may be done in order to increase the stability of the MHC-peptide complex. A higher affinity of the binding peptide for the MHC proteins may in some instances also result in increased rigidity of the MHC-peptide complex, which in turn often will result in higher affinity and/or specificity of the MHC-peptide complex for the T-cell receptor. A higher affinity and specificity will in turn have consequences for the immunogenicity and allergenicity, as well as possible side-effects of the MHC-peptide complex in e.g. the body.

[0401] Binding peptides of particularly high affinity for the MHC proteins may be identified by several means, including the following.
[0402] Incubation of candidate binding peptides and MHC proteins, followed by analysis of the resulting complexes to identify those binding peptides that have most frequently been associated with MHC proteins. The binding peptides that have most frequently been associated with MHC proteins typically will represent high-affinity binding peptides. The identification of binding peptides with particularly high-affinity may involve enrichment of binding peptides, e.g. incubation of candidate peptides with immobilized MHC molecules, removal of non-binding peptides by e.g. washing, elution of binding peptides. This pool of peptides enriched for binding to the chosen MHC molecules may then be identified e.g. by mass spectrometry or HPLC and amino acid sequencing or the pool can be further enriched by another round of incubation with immobilized MHC.
[0403] Candidate binding peptides may be compared to consensus sequences for the binding to a specific MHC allele. Thus, for a given class 1 allele, the consensus 8′ mer sequence may be given by the sequence “X1-X2-X3-X4-X5-X6-X7-X8”, where each of the X1-X8 amino acids can be chosen from a specific subset of amino acids, as described above.
[0404] Those binding peptides that correlate the best with the consensus sequence are expected to have particularly high affinity for the MHC allele in question.
[0405] Based on a large data set of affinities of binding peptides for specific MHC alleles, software programs (often involving neural networks) have been developed that allow a relatively accurate prediction of the affinity of a given candidate binding peptide for a given MHC allele. By examining candidate binding peptides using such software programs, one can identify binding peptides of expected high-affinity for the MHC molecule.

[0406] A second preferred embodiment employs binding peptides with medium affinity for the MHC molecule. A medium affinity of the peptide for the MHC protein will often lead to lower physical and chemical stability of the MHC-peptide complex, which can be an advantage for certain applications. As an example, it is often desirable to administer a drug on a daily basis due to convenience. An MHC-peptide complex-based drug with high stability in the body would not allow this. In contrast a binding peptide with medium or low affinity for the MHC protein can be an advantage for such applications, since these functional MHC-peptide molecules will be cleared more rapidly from the body due to their lower stability.

[0407] For some applications where some level of cross-talk is desired, e.g. in applications where the target is a number of T cell clones that interact with a number of structurally related MHC-peptide complexes, e.g. MHC-peptide complexes containing binding peptides from different strains of a given species, a medium or low affinity of the binding peptide for the MHC protein can be an advantage. Thus, these MHC-peptide complexes are often more structurally flexible, allowing the MHC-peptide complexes to interact with several structurally related TCRs.

[0408] The affinity of a given peptide for a MHC protein, predicted by a software program or by its similarity to a consensus sequence, should only be considered a guideline to its real affinity. Moreover, the affinity can vary a lot depending on the conditions in the environment, e.g. the affinity in blood may be very different from the affinity in a biochemical assay. Further, in the context of a MHC multimer, the flexibility of the MHC-peptide complex can sometimes be an important parameter for overall avidity.

[0409] In summary, a lot of factors must be considered for the choice of binding peptides in a certain application. Some applications benefit from the use of all possible binding peptides for an antigen (“total approach”), other applications benefit from the selective choice of just a few binding peptides. Depending on the application, the affinity of the binding peptide for MHC protein is preferably high, medium, or low; the physical and/or chemical stability of the MHC-peptide complex is preferably high, medium or low; the binding peptide is preferably a very common or very rare epitope in a given population; etc.

[0410] It is obvious from the above preferred embodiments that most or all of the binding peptides generated by the total approach have important applications. In other words, in order to make relevant MHC multimers that suit the different applications with regard to e.g. personalized or general targeting, or with regard to affinity, avidity, specificity, immunogenicity, stimulatory efficiency, or stability, one must be able to choose from the whole set of binding peptides generated by the total approach

Loading of the Peptide into the MHCmer

[0411] Loading of the peptides into the MHCmer being either MHC class 1 or class 2 can be performed in a number of ways depending on the source of the peptide and the MHC, and depending on the application. MHC class 2 molecules can in principle be loaded with peptides in similar ways as MHC class 1. However, due to complex instability the most successful approach have been to make the complexes recombinant in toto in eukaryotic cells from a gene construct encoding the following form β chain-flexible linker-α chain-flexible linker-antigenic peptide.

[0412] The antigenic peptide may be added to the other peptide chain(s) at different times and in different forms, as follows.

### a) Loading of Antigenic Peptide During MHC Complex Folding

[0413] a1) Antigenic Peptide is Added as a Free Peptide

[0414] MHC class 1 molecules are most often loaded with peptide during assembly in vitro by the individual components in a folding reaction i.e. consisting of purified recombinant heavy chain α with the purified recombinant β2 microglobulin and a peptide or a peptide mix.

a2) Antigenic Peptide is Part of a Recombinant Protein Construct

[0415] Alternatively the peptide to be folded into the binding groove can be encoded together with e.g. the α heavy chain or fragment hereof by a gene construct having the structure, heavy chain-flexible linker-peptide. This recombinant molecule is then folded in vitro with β2-microglobulin.

### b) Antigenic Peptide Replaces Another Antigenic Peptide by an Exchange Reaction.

[0416] b1) Exchange Reaction “in Solution”

[0417] Loading of desired peptide can also be made by an in vitro exchange reaction where a peptide already in place in the binding groove are being exchanged by another peptide species.

b2) Exchange Reaction “In Situ”

[0418] Peptide exchange reactions can also take place when the parent molecule is attached to other molecules, structures, surfaces, artificial or natural membranes and nano-particles.

b3) Aided Exchange Reaction.

[0419] This method can be refined by making the parent construct with a peptide containing a meta-stable amino acid analog that is split by either light or chemically induction thereby leaving the parent structure free for access of the desired peptide in the binding groove.

b4) Display by In Vivo Loading

[0420] Loading of MHC class I and II molecules expressed on the cell surface with the desired peptides can be performed by an exchange reaction. Alternatively cells can be transfected by the peptides themselves or by the mother proteins that are then being processed leading to an in vivo analogous situation where the peptides are bound in the groove during the natural cause of MHC expression by the transfected cells. In the case of professional antigen presenting cells e.g. dendritic cells, macrophages, Langerhans cells, the proteins and peptides can be taken up by the cells themselves by phagocytosis and then bound to the MHC complexes the natural way and expressed on the cell surface in the correct MHC context.

### Other Features of Product

[0421] In one preferred embodiment the MHC multimer is between 50,000 Da and 1,000,000 Da, such as from 50,000 Da to 980,000; for example from 50,000 Da to 960,000; such as from 50,000 Da to 940,000; for example from 50,000 Da to 920,000; such as from 50,000 Da to 900,000; for example from 50,000 Da to 880,000; such as from 50,000 Da to 860,000; for example from 50,000 Da to 840,000; such as from 50,000 Da to 820,000; for example from 50,000 Da to 800,000; such as from 50,000 Da to 780,000; for example from 50,000 Da to 760,000; such as from 50,000 Da to 740,000; for example from 50,000 Da to 720,000; such as from 50,000 Da to 700,000; for example from 50,000 Da to 680,000; such as from 50,000 Da to 660,000; for example from 50,000 Da to 640,000; such as from 50,000 Da to 620,000; for example from 50,000 Da to 600,000; such as from 50,000 Da to 580,000; for example from 50,000 Da to 560,000; such as from 50,000 Da to 540,000; for example from 50,000 Da to 520,000; such as from 50,000 Da to 500,000; for example from 50,000 Da to 480,000; such as from 50,000 Da to 460,000; for example from 50,000 Da to 440,000; such as from 50,000 Da to 420,000; for example from 50,000 Da to 400,000; such as from 50,000 Da to 380,000; for example from 50,000 Da to 360,000; such as from 50,000 Da to 340,000; for example from 50,000 Da to 320,000; such as from 50,000 Da to 300,000; for example from 50,000 Da to 280,000; such as from 50,000 Da to 260,000; for example from 50,000 Da to 240,000; such as from 50,000 Da to 220,000; for example from 50,000 Da to 200,000; such as from 50,000 Da to 180,000; for example from 50,000 Da to 160,000; such as from 50,000 Da to 140,000; for example from 50,000 Da to 120,000; such as from 50,000 Da to 100,000; for example from 50,000 Da to 80,000; such as from 50,000 Da to 60,000; such as from 100,000 Da to 980,000; for example from 100,000 Da to 960,000; such as from 100,000 Da to 940,000; for example from 100,000 Da to 920,000; such as from 100,000 Da to 900,000; for example from 100,000 Da to 880,000; such as from 100,000 Da to 860,000; for example from 100,000 Da to 840,000; such as from 100,000 Da to 820,000; for example from 100,000 Da to 800,000; such as from 100,000 Da to 780,000; for example from 100,000 Da to 760,000; such as from 100,000 Da to 740,000; for example from 100,000 Da to 720,000; such as from 100,000 Da to 700,000; for example from 100,000 Da to 680,000; such as from 100,000 Da to 660,000; for example from 100,000 Da to 640,000; such as from 100,000 Da to 620,000; for example from 100,000 Da to 600,000; such as from 100,000 Da to 580,000; for example from 100,000 Da to 560,000; such as from 100,000 Da to 540,000; for example from 100,000 Da to 520,000; such as from 100,000 Da to 500,000; for example from 100,000 Da to 480,000; such as from 100,000 Da to 460,000; for example from 100,000 Da to 440,000; such as from 100,000 Da to 420,000; for example from 100,000 Da to 400,000; such as from 100,000 Da to 380,000; for example from 100,000 Da to 360,000; such as from 100,000 Da to 340,000; for example from 100,000 Da to 320,000; such as from 100,000 Da to 300,000; for example from 100,000 Da to 280,000; such as from 100,000 Da to 260,000; for example from 100,000 Da to 240,000; such as from 100,000 Da to 220,000; for example from 100,000 Da to 200,000; such as from 100,000 Da to 180,000; for example from 100,000 Da to 160,000; such as from 100,000 Da to 140,000; for example from 100,000 Da to 120,000; such as from 150,000 Da to 980,000; for example from 150,000 Da to 960,000; such as from 150,000 Da to 940,000; for example from 150,000 Da to 920,000; such as from 150,000 Da to 900,000; for example from 150,000 Da to 880,000; such as from 150,000 Da to 860,000; for example from 150,000 Da to 840,000; such as from 150,000 Da to 820,000; for example from 150,000 Da to 800,000; such as from 150,000 Da to 780,000; for example from 150,000 Da to 760,000; such as from 150,000 Da to 740,000; for example from 150,000 Da to 720,000; such as from 150,000 Da to 700,000; for example from 150,000 Da to 680,000; such as from 150,000 Da to 660,000; for example from 150,000 Da to 640,000; such as from 150,000 Da to 620,000; for example from 150,000 Da to 600,000; such as from 150,000 Da to 580,000; for example from 150,000 Da to 560,000; such as from 150,000 Da to 540,000; for example from 150,000 Da to 520,000; such as from 150,000 Da to 500,000; for example from 150,000 Da to 480,000; such as from 150,000 Da to 460,000; for example from 150,000 Da to 440,000; such as from 150,000 Da to 420,000; for example from 150,000 Da to 400,000; such as from 150,000 Da to 380,000; for example from 150,000 Da to 360,000; such as from 150,000 Da to 340,000; for example from 150,000 Da to 320,000; such as from 150,000 Da to 300,000; for example from 150,000 Da to 280,000; such as from 150,000 Da to 260,000; for example from 150,000 Da to 240,000; such as from 150,000 Da to 220,000; for example from 150,000 Da to 200,000; such as from 150,000 Da to 180,000; for example from 150,000 Da to 160,000.

[0422] In another preferred embodiment the MHC multimer is between 1,000,000 Da and 3,000,000 Da, such as from 1,000,000 Da to 2,800,000; for example from 1,000,000 Da to 2,600,000; such as from 1,000,000 Da to 2,400,000; for example from 1,000,000 Da to 2,200,000; such as from 1,000,000 Da to 2,000,000; for example from 1,000,000 Da to 1,800,000; such as from 1,000,000 Da to 1,600,000; for example from 1,000,000 Da to 1,400,000.

[0423] Above it was described how to design and produce the key components of the MHC multimers, i.e. the MHC-peptide complex. In the following it is described how to generate the MHC monomer or MHC multimer products of the present invention.

### Number of MHC Complexes pr Multimer

[0424] A non-exhaustive list of possible MHC mono- and multimers illustrates the possibilities. n indicates the number of MHC complexes comprised in the multimer:

a) n=1, Monomers
b) n=2, Dimers, multimerization can be based on IgG scaffold, streptavidin with two MHC's, coiled-coil dimerization e.g. Fos.Jun dimerization
c) n=3, Trimers, multimerization can be based on streptavidin as scaffold with three MHC's, TNFalpha-MHC hybrids, triplex DNA-MHC konjugates or other trimer structures
d) n=4, Tetramers, multimerization can be based on streptavidin with all four binding sites occupied by MHC molecules or based on dimeric IgA
e) n=5, Pentamers, multimerization can take place around a pentameric coil-coil structure
f) n=6, Hexamers
g) n=7, Heptamers
h) n=8-12, Octa-dodecamers, multimerization can take place using Streptactin
i) n=10, Decamers, multimerization can take place using IgM
j) 1<n<100, Dextramers, as multimerization domain polymers such as polypeptide, polysaccharides and Dextrans can be used.
k) 1<n<1000, Multimerization can make use of dendritic cells (DC), antigen-presenting cells (APC), micelles, liposomes, beads, surfaces e.g. microtiterplate, tubes, microarray devices, micro-fluidic systems
l) 1<n, n in billions or trillions or higher, multimerization take place on beads, and surfaces e.g. microtiterplate, tubes, microarray devices, micro-fluidic systems

### MHC Origin

[0425] Any of the three components of a MHC complex can be of any of the below mentioned origins. The list is non-exhaustive. A complete list would encompass all Chordate species. By origin is meant that the sequence is identical or highly homologous to a naturally occurring sequence of the specific species.

### List of Origins:

[0426] Human
[0427] Mouse
[0428] Primate
   [0429] Chimpansee
   [0430] Gorilla
   [0431] Orang Utan
[0432] Monkey
   [0433] Macaques
[0434] Porcine (Swine/Pig)
[0435] Bovine (Cattle/Antilopes)
[0436] Equine (Horse)
[0437] Camelides (Camels)
[0438] Ruminants (Deears)
[0439] Canine (Dog)
[0440] Feline (Cat)
[0441] Bird
   [0442] Chicken
   [0443] Turkey
[0444] Fish
[0445] Reptiles
[0446] Amphibians

### Generation of MHC Multimers

[0447] Different approaches to the generation of various types of MHC multimers are described in U.S. Pat. No. 5,635,363 (Altmann et al.), patent application WO 02/072631 A2 (Winther et al.), patent application WO 99/42597, US patent 2004209295, U.S. Pat. No. 5,635,363, and is described elsewhere in the present patent application as well. In brief, MHC multimers can be generated by first expressing and purifying the individual protein components of the MHC protein, and then combining the MHC protein components and the peptide, to form the MHC-peptide complex. Then an appropriate number of MHC-peptide complexes are linked together by covalent or non-covalent bonds to a multimerization domain. This can be done by chemical reactions between reactive groups of the multimerization domain (e.g. vinyl sulfone functionalities on a dextran polymer) and reactive groups on the MHC protein (e.g. amino groups on the protein surface), or by non-covalent interaction between a part of the MHC protein (e.g. a biotinylated peptide component) and the multimerization domain (e.g. four binding sites for biotin on the strepavidin tetrameric protein). As an alternative, the MHC multimer can be formed by the non-covalent association of amino acid helices fused to one component of the MHC protein, to form a pentameric MHC multimer, held together by five helices in a coiled-coil structure making up the multimerization domain.

[0448] Appropriate chemical reactions for the covalent coupling of MHC and the multimerization domain include nucleophilic substitution by activation of electrophiles (e.g. acylation such as amide formation, pyrazolone formation, isoxazolone formation; alkylation; vinylation; disulfide formation), addition to carbon-hetero multiple bonds (e.g. alkene formation by reaction of phosphonates with aldehydes or ketones; arylation; alkylation of arenes/hetarenes by reaction with alkyl boronates or enolethers), nucleophilic substitution using activation of nucleophiles (e.g. condensations; alkylation of aliphatic halides or tosylates with enolethers or enamines), and cycloadditions.

[0449] Appropriate molecules, capable of providing non-covalent interactions between the multimerization domain and the MHC-peptide complex, involve the following molecule pairs and molecules: streptavidin/biotin, avidin/biotin, antibody/antigen, DNA/DNA, DNA/PNA, DNA/RNA, PNA/PNA, LNA/DNA, leucine zipper e.g. Fos/Jun, IgG dimeric protein, IgM multivalent protein, acid/base coiled-coil helices, chelate/metal ion-bound chelate, streptavidin (SA) and avidin and derivatives thereof, biotin, immunoglobulins, antibodies (monoclonal, polyclonal, and recombinant), antibody fragments and derivatives thereof, leucine zipper domain of AP-1 (jun and fos), hexa-his (metal chelate moiety), hexa-hat GST (glutathione S-transferase) glutathione affinity, Calmodulin-binding peptide (CBP), Strep-tag, Cellulose Binding Domain, Maltose Binding Protein, S-Peptide Tag, Chitin Binding Tag, Immuno-reactive Epitopes, Epitope Tags, E2Tag, HA Epitope Tag, Myc Epitope, FLAG Epitope, AU1 and AU5 Epitopes, Glu-Glu Epitope, KT3 Epitope, IRS Epitope, Btag Epitope, Protein Kinase-C Epitope, VSV Epitope, lectins that mediate binding to a diversity of compounds, including carbohydrates, lipids and proteins, e.g. Con A (Canavalia ensiformis) or WGA (wheat germ agglutinin) and tetranectin or Protein A or G (antibody affinity). Combinations of such binding entities are also comprised. In particular, when the MHC complex is tagged, the binding entity can be an “anti-tag”. By “anti-tag” is meant an antibody binding to the tag and any other molecule capable of binding to such tag.

### Generation of Components of MHC

[0450] When employing MHC multimers for diagnostic purposes, it is preferable to use a MHC allele that corresponds to the tissue type of the person or animal to be diagnosed. Once the MHC allele has been chosen, a peptide derived from the antigenic protein may be chosen. The choice will depend on factors such as known or expected binding affinity of the MHC protein and the various possible peptide fragments that may be derived from the full sequence of the antigenic peptide, and will depend on the expected or known binding affinity and specificity of the MHC-peptide complex for the TCR. Preferably, the affinity of the peptide for the MHC molecule, and the affinity and specificity of the MHC-peptide complex for the TCR, should be high.

[0451] Similar considerations apply to the choice of MHC allele and peptide for therapeutic and vaccine purposes. In addition, for some of these applications the effect of binding the MHC multimer to the TCR is also important. Thus, in these cases the effect on the T-cell's general state must be considered, e.g. it must be decided whether the desired end result is apoptosis or proliferation of the T-cell.

[0452] Likewise, it must be decided whether stability is important. For some applications low stability may be an advantage, e.g. when a short-term effect is desired; in other instances, a long-term effect is desired and MHC multimers of high stability is desired.

[0453] Stabilities of the MHC protein and of the MHC-peptide complex may be modified as described elsewhere herein.

[0454] Finally, modifications to the protein structure may be advantageous for some diagnostics purposes, because of e.g. increased stability, while for vaccine purposes modifications to the MHC protein structure may induce undesired allergenic responses.

### Generation of Protein Chains of MHC

### Generation of MHC Class I Heavy Chain and β2-Microglobulin

[0455] MHC class I heavy chain (HC) and β2-microglobulin (β2m) can be obtained from a variety of sources.
[0456] a) Natural sources by means of purification from eukaryotic cells naturally expressing the MHC class 1 or β2m molecules in question.
[0457] b) The molecules can be obtained by recombinant means e.g. using.
   [0458] a. in vitro translation of mRNA obtained from cells naturally expressing the MHC or β2m molecules in question
   [0459] b. by expression and purification of HC and/or β2m gene transfected cells of mammalian, yeast, bacterial or other origin. This last method will normally be the method of choice. The genetic material used for transfection/transformation can be:
      [0460] i. of natural origin isolated from cells, tissue or organisms
      [0461] ii. of synthetical origin i.e. synthetic genes identical to the natural DNA sequence or it could be modified to introduce molecular changes or to ease recombinant expression.
      [0462] The genetic material can encode all or only a fragment of β2m, all or only a fragment of MHC class 1 heavy chain. Of special interest are MHC class 1 heavy chain fragments consisting of, the complete chain minus the intramembrane domain, a chain consisting of only the extracellular α1 and α2 class 1 heavy chain domains, or any of the mentioned β2m and heavy chain fragments containing modified or added designer domain(s) or sequence(s).

### Generation of MHC Class 2 α- and β-Chains

[0463] MHC class 2 α- and β-chains can be obtained from a variety of sources:
[0464] a) Natural sources by means of purification from eukaryotic cells naturally expressing the MHC class 2 molecules in question.
[0465] b) By recombinant means e.g. using:
   [0466] a. in vitro translation of mRNA obtained from cells naturally expressing the MHC class 2 molecules in question
   [0467] b. By purification from MHC class 2 gene transfected cells of mammalian, yeast, bacterial or other origin. This last method will normally be the method of choice. The genetic material used for transfection/transformation can be
      [0468] i. of natural origin isolated from cells, tissue or organisms
      [0469] ii. of synthetical origin i.e. synthetic genes identical to the natural DNA sequence or it could be modified to introduce molecular changes or to ease recombinant expression.
         [0470] The genetic material can encode all or only a fragment of MHC class 2 α- and β-chains. Of special interest are MHC class 2 α- and β-chain fragments consisting of, the complete α- and β-chains minus the intramembrane domains of either or both chains; and α- and β-chains consisting of only the extracellular domains of either or both, i.e. α1 plus α2 and β1 plus β2 domains, respectively. The genetic material can be modified to encode the interesting MHC class 2 molecule fragments consisting of domains starting from the amino terminal in consecutive order, MHC class 2 β1 plus MHC class 2 α1 plus MHC class 1 α3 domains or in alternative order, MHC class 2 α1 plus MHC class 2 β1 plus MHC class 1 α3 domains.
         [0471] Lastly, the genetic material can encode any of the above mentioned MHC class 2 α- and β-chain molecules or fragments containing modified or added designer domain(s) or sequence(s).
[0472] c) The MHC material may also be of exclusively synthetic origin manufactured by solid phase protein synthesis. Any of the above mentioned molecules can be made this way.

### Modified MHC I or MHC II Complexes

[0473] MHC I and MHC II complexes modified in any way as described above, can bind TCR. Modifications include mutations (substitutions, deletions or insertions of natural or non-natural amino acids, or any other organic molecule. The mutations are not limited to those that increase the stability of the MHC complex, and could be introduced anywhere in the MHC complex. One example of special interest is mutations introduced in the α3 subunit of MHC I heavy chain. The α3-subunit interacts with CD8 molecules on the surface of T cells. To minimize binding of MHC multimer to CD8 molecules on the surface of non-specific T cells, amino acids in a3 domain involved in the interaction with CD8 can be mutated. Such a mutation can result in altered or abrogated binding of MHC to CD8 molecules. Another example of special interest is mutations in areas of the β2-domain of MHC II molecules responsible for binding CD4 molecules.

[0474] Another embodiment is chemically modified MHC complexes where the chemical modification could be introduced anywhere in the complex, e.g. a MHC complex where the peptide in the peptide-binding cleft has a dinitrophenyl group attached. Modified MHC complexes could also be MHC I or MHC II fusion proteins where the fusion protein is not necessarily more stable than the native protein. Of special interest is MHC complexes fused with genes encoding an amino acid sequence capable of being biotinylated with a Bir A enzyme (Schatz, P. J., (1993), Biotechnology 11(10):1138-1143). This biotinylation sequence could be fused with the COOH-terminal of β2m or the heavy chain of MHC I molecules or the COOH-terminal of either the α-chain or β-chain of MHC II. Similarly, other sequences capable of being enzymatically or chemically modified, can be fused to the NH₂ or COOH-terminal ends of the MHC complex.

### Stabilization of Empty MHC Complexes and MHC-Peptide Complexes.

[0475] Classical MHC complexes are in nature embedded in the membrane. A preferred embodiment includes multimers comprising a soluble form of MHC II or I where the transmembrane and cytosolic domains of the membrane-anchored MHC complexes are removed. The removal of the membrane-anchoring parts of the molecules can influence the stability of the MHC complexes. The stability of MHC complexes is an important parameter when generating and using MHC multimers.

[0476] MHC I complexes consist of a single membrane-anchored heavy chain that contains the complete peptide binding groove and is stable in the soluble form when complexed with β2m. The long-term stability is dependent on the binding of peptide in the peptide-binding groove. Without a peptide in the peptide binding groove the heavy chain and β2m tend to dissociate. Similarly, peptides with high affinity for binding in the peptide-binding groove will typically stabilize the soluble form of the MHC complex while peptides with low affinity for the peptide-binding groove will typically have a smaller stabilizing effect.

[0477] In contrast, MHC II complexes consist of two membrane-anchored chains of almost equal size. When not attached to the cell membrane the two chains tend to dissociate and are therefore not stable in the soluble form unless a high affinity peptide is bound in the peptide-binding groove or the two chains are held together in another way.

[0478] In nature MHC I molecules consist of a heavy chain combined with β2m, and a peptide of typically 8-11 amino acids. Herein, MHC I molecules also include molecules consisting of a heavy chain and β2m (empty MHC), or a heavy chain combined with a peptide or a truncated heavy chain comprising a1 and a2 subunits combined with a peptide, or a full-length or truncated heavy chain combined with a full-length or truncated β2m chain. These MHC I molecules can be produced in E. coli as recombinant proteins, purified and refolded in vitro (Garboczi et al., (1992), Proc. Natl. Acad. Sci. 89, 3429-33). Alternatively, insect cell systems or mammalian cell systems can be used. To produce stable MHC I complexes and thereby generate reliable MHC I multimers several strategies can be followed. Stabilization strategies for MHC I complexes are described in the following.

### Stabilization Strategies for MHC I Complexes

[0479] Generation of Covalent Protein-Fusions.
[0480] MHC I molecules can be stabilized by introduction of one or more linkers between the individual components of the MHC I complex. This could be a complex consisting of a heavy chain fused with β2m through a linker and a soluble peptide, a heavy chain fused to β2m through a linker, a heavy chain /β2m dimer covalently linked to a peptide through a linker to either heavy chain or β2m, and where there can or can not be a linker between the heavy chain and β2m, a heavy chain fused to a peptide through a linker, or the α1 and α2 subunits of the heavy chain fused to a peptide through a linker. In all of these example protein-fusions, each of the heavy chain, β2m and the peptide can be truncated.
[0481] The linker could be a flexible linker, e.g. made of glycine and serine and e.g. between 5-20 residues long. The linker could also be rigid with a defined structure, e.g. made of amino acids like glutamate, alanine, lysine, and leucine creating e.g. a more rigid structure.
[0482] In heavy chain-β2m fusion proteins the COOH terminus of β2m can be covalently linked to the NH₂ terminus of the heavy chain, or the NH₂ terminus of β2m can be linked to the COOH terminus of the heavy chain. The fusion-protein can also comprise a β2m domain, or a truncated β2m domain, inserted into the heavy chain, to form a fusion-protein of the form “heavy chain (first part)-(32m-heavy chain (last part)”.
[0483] Likewise, the fusion-protein can comprise a heavy chain domain, or a truncated heavy chain, inserted into the β2m chain, to form a fusion-protein of the form “β2m(first part)-heavy chain-β2m(last part)”.
[0484] In peptide-β2m fusion proteins the COOH terminus of the peptide is preferable linked to the NH₂ terminus of β2m but the peptide can also be linked to the COOH terminal of β2m via its NH₂ terminus. In heavy chain-peptide fusion proteins it is preferred to fuse the NH₂ terminus of the heavy chain to the COOH terminus of the peptide, but the fusion can also be between the COOH terminus of the heavy chain and the NH₂ terminus of the peptide. In heavy chain-β2m-peptide fusion proteins the NH₂ terminus of the heavy chain can be fused to the COOH terminus of β2m and the NH₂ terminus of β2m can be fused to the COOH terminus of the peptide.

[0485] Non-Covalent Stabilization by Binding to an Unnatural Component
[0486] Non-covalent binding of unnatural components to the MHC I complexes can lead to increased stability. The unnatural component can bind to both the heavy chain and the β2m, and in this way promote the assemble of the complex, and/or stabilize the formed complex. Alternatively, the unnatural component can bind to either β2m or heavy chain, and in this way stabilize the polypeptide in its correct conformation, and in this way increase the affinity of the heavy chain for β2m and/or peptide, or increase the affinity of β2m for peptide.
[0487] Here, unnatural components mean antibodies, peptides, aptamers or any other molecule with the ability to bind peptides stretches of the MHC complex. Antibody is here to be understood as truncated or full-length antibodies (of isotype IgG, IgM, IgA, IgE), Fab, scFv or bi-Fab fragments or diabodies.
[0488] An example of special interest is an antibody binding the MHC I molecule by interaction with the heavy chain as well as β2m. The antibody can be a bispecific antibody that binds with one arm to the heavy chain and the other arm to the β2m of the MHC complex. Alternatively the antibody can be monospecific, and bind at the interface between heavy chain and β2m.
[0489] Another example of special interest is an antibody binding the heavy chain but only when the heavy chain is correct folded. Correct folded is here a conformation where the MHC complex is able to bind and present peptide in such a way that a restricted T cell can recognize the MHC-peptide complex and be activated. This type of antibody can be an antibody like the one produced by the clone W6/32 (M0736 from Dako, Denmark) that recognizes a conformational epitope on intact human and some monkey MHC complexes containing β2m, heavy chain and peptide.

[0490] Generation of Modified Proteins or Protein Components
[0491] One way to improve stability of a MHC I complex is to increase the affinity of the binding peptide for the MHC complex. This can be done by mutation/substitution of amino acids at relevant positions in the peptide, by chemical modifications of amino acids at relevant positions in the peptide or introduction by synthesis of non-natural amino acids at relevant positions in the peptide. Alternatively, mutations, chemical modifications, insertion of natural or non-natural amino acids or deletions could be introduced in the peptide binding cleft, i.e. in the binding pockets that accommodate peptide side chains responsible for anchoring the peptide to the peptide binding cleft. Moreover, reactive groups can be introduced into the antigenic peptide; before, during or upon binding of the peptide, the reactive groups can react with amino acid residues of the peptide binding cleft, thus covalently linking the peptide to the binding pocket.
[0492] Mutations/substitutions, chemical modifications, insertion of natural or non-natural amino acids or deletions could also be introduced in the heavy chain and/or β2m at positions outside the peptide-binding cleft. By example, it has been shown that substitution of XX with YY in position nn of human β₂m enhance the biochemical stability of MHC class 1 molecule complexes and thus may lead to more efficient antigen presentation of subdominant peptide epitopes.
[0493] A preferred embodiment is removal of “unwanted cysteine residues” in the heavy chain by mutation, chemical modification, amino acid exchange or deletion. “Unwanted cysteine residues” is here to be understood as cysteines not involved in the correct folding of the final MHC I molecule. The presence of cysteine not directly involved in the formation of correctly folded MHC I molecules can lead to formation of intra molecular disulfide bridges resulting in a non correct folded MHC complex during in vitro refolding.
[0494] Another method for covalent stabilization of MHC I complex am to covalently attach a linker between two of the subunits of the MHC complex. This can be a linker between peptide and heavy chain or between heavy chain and beta2microglobulin.
   Stabilization with Soluble Additives.
[0495] The stability of proteins in aqueous solution depends on the composition of the solution. Addition of salts, detergents organic solvent, polymers ect. can influence the stability. Of special interest are additives that increase surface tension of the MHC molecule without binding the molecule. Examples are sucrose, mannose, glycine, betaine, alanine, glutamine, glutamic acid and ammoniumsulfate. Glycerol, mannitol and sorbitol are also included in this group even though they are able to bind polar regions.
[0496] Another group of additives of special interest are able to increase surface tension of the MHC molecule and simultaneously interact with charged groups in the protein. Examples are MgSO₄, NaCl, polyethylenglycol, 2-methyl-2,4-pentandiol and guanidiniumsulfate.
[0497] Correct folding of MHC I complexes is very dependent on binding of peptide in the peptide-binding cleft and the peptide binding stabilises correct conformation. Addition of molar excess of peptide will force the equilibrium against correct folded MHC-peptide complexes. Likewise is excess β2m also expected to drive the folding process in direction of correct folded MHC I complexes. Therefore peptide identical to the peptide bound in the peptide-binding cleft and β2m are included as stabilizing soluble additives.
[0498] Other additives of special interest for stabilization of MHC I molecules are BSA, fetal and bovine calf serum or individual protein components in serum with a protein stabilizing effect.
[0499] All of the above mentioned soluble additives could be added to any solution containing MHC I molecules in order to increase the stability of the molecule. That could be during the refolding process, to the soluble monomer or to a solutions containing MHC I bound to a carrier.

[0500] MHC II molecules as used herein are defined as classical MHC II molecule consisting of a α-chain and a β-chain combined with a peptide. It could also be a molecule only consisting of α-chain and β-chain (α/βdimer or empty MHC II), a truncated α-chain (e.g. α1 domain alone) combined with full-length β-chain either empty or loaded with a peptide, a truncated β-chain (e.g. β1 domain alone) combined with a full-length α-chain either empty or loaded with a peptide or a truncated α-chain combined with a truncated β-chain (e.g. α1 and β1 domain) either empty or loaded with a peptide.

[0501] In contrast to MHC I molecules MHC II molecules are not easily refolded in vitro. Only some MHC II alleles may be produced in E. coli followed by refolding in vitro. Therefore preferred expression systems for production of MHC II molecules are eukaryotic systems where refolding after expression of protein is not necessary. Such expression systems could be stable Drosophila cell transfectants, baculovirus infected insect cells, CHO cells or other mammalian cell lines suitable for expression of proteins.

[0502] Stabilization of soluble MHC II molecules is even more important than for MHC I molecules since both α- and β-chain are participants in formation of the peptide binding groove and tend to dissociate when not embedded in the cell membrane.

### Stabilization Strategies for MHC II Complexes

[0503] Generation of Covalent Protein-Fusions.
[0504] MHC II complexes can be stabilized by introduction of one or more linkers between the individual components of the MHC II complex. This can be a α/β dimer with a linker between α-chain and β-chain; a α/β dimer covalently linked to the peptide via a linker to either the α-chain or β-chain; a α/β dimer, covalently linked by a linker between the α-chain and β-chain, and where the dimer is covalently linked to the peptide; a α/β dimer with a linker between α-chain and β-chain, where the dimer is combined with a peptide covalently linked to either α-chain or β-chain.
[0505] The linker can be a flexible linker, e.g. made of glycine and serine, and is typically between 5-20 residues long, but can be shorter or longer. The linker can also be more rigid with a more defined structure, e.g. made of amino acids like glutamate, alanine, lysine, and leucine.
[0506] The peptides can be linked to the NH₂- or COOH-terminus of either α-chain or β-chain. Of special interest are peptides linked to the NH₂-terminus of the β-chain via their COOH-terminus, since the linker required is shorter than if the peptide is linked to the COOH-terminus of the β-chain.
[0507] Linkage of α-chain to β-chain can be via the COOH-terminus of the β-chain to the NH₂-terminus of the α-chain or from the COOH-terminus of the α-chain to the NH₂-terminus of the β-chain.
[0508] In a three-molecule fusion protein consisting of α-chain, β-chain and peptide a preferred construct is where one linker connect the COOH-terminus of the β-chain with the NH₂-terminus of the α-chain and another linker connects the COOH-terminal of the peptide with the NH₂-terminal of the β-chain. Alternatively one linker joins the COOH-terminus of the α-chain with the NH₂-terminus of the β-chain and the second linker joins the NH₂-terminus of the peptide with the COOH-terminus of the β-chain. The three peptides of the MHC complex can further be linked as described above for the three peptides of the MHC complex, including internal fusion points for the proteins.

[0509] Non-Covalent Stabilization by Binding Ligand.
[0510] Non-covalent binding of ligands to the MHC II complex can promote assembly of α- and β-chain by bridging the two chains, or by binding to either of the α- or β-chains, and in this way stabilize the conformation of α or β, that binds β or α, respectively, and/or that binds the peptide. Ligands here mean antibodies, peptides, aptamers or any other molecules with the ability to bind proteins.
[0511] A particular interesting example is an antibody binding the MHC complex distal to the interaction site with TCR, i.e. distal to the peptide-binding cleft. An antibody in this example can be any truncated or full length antibody of any isotype (e.g. IgG, IgM, IgA or IgE), a bi-Fab fragment or a diabody. The antibody could be bispecific with one arm binding to the α-chain and the other arm binding to the β-chain. Alternatively the antibody could be monospecific and directed to a sequence fused to the α-chain as well as to the β-chain.
[0512] Another example of interest is an antibody binding more central in the MHC II molecule, but still interacting with both α- and β-chain. Preferable the antibody binds a conformational epitope, thereby forcing the MHC molecule into a correct folded configuration. The antibody can be bispecific binding with one arm to the α-chain and the other arm to the β-chain. Alternatively the antibody is monospecific and binds to a surface of the complex that involves both the α- and β-chain, e.g. both the α2- and β2-domain or both the α1- and β1-domain.
[0513] The antibodies described above can be substituted with any other ligand that binds at the α-/β-chain interface, e.g. peptides and aptamers. The ligand can also bind the peptide, although, in this case it is important that the ligand does not interfere with the interaction of the peptide or binding cleft with the TCR.

[0514] Non-Covalent Stabilization by Induced Multimerization.
[0515] In nature the anchoring of the α- and β-chains in the cell membrane stabilizes the MHC II complexes considerably. As mentioned above, a similar concept for stabilization of the α/β-dimer was employed by attachment of the MHC II chains to the Fc regions of an antibody, leading to a stable α/β-dimer, where α and β are held together by the tight interactions between two Fc domains of an antibody. Other dimerization domains can be used as well.
[0516] In one other example of special interest MHC II molecules are incorporated into artificial membrane spheres like liposomes or lipospheres. MHC II molecules can be incorporated as monomers in the membrane or as dimers like the MHC II-antibody constructs describes above. In addition to stabilization of the MHC II complex an increased avidity is obtained. The stabilization of the dimer will in most cases also stabilize the trimeric MHC-peptide complex.
[0517] Induced multimerization can also be achieved by biotinylation of α- as well as β-chain and the two chains brought together by binding to streptavidin. Long flexible linkers such as extended glycine-serine tracts can be used to extend both chains, and the chains can be biotinylated at the end of such extended linkers. Then streptavidin can be used as a scaffold to bring the chains together in the presence of the peptide, while the flexible linkers still allow the chains to orientate properly.

[0518] Generation of Modified Proteins or Protein Components
[0519] Stability of MHC II complexes can be increased by covalent modifications of the protein. One method is to increase the affinity of the peptide for the MHC complex. This can be done by exchange of the natural amino acids with other natural or non-natural amino acids at relevant positions in the peptide or by chemical modifications of amino acids at relevant positions in the peptide. Alternatively, mutations, chemical modifications, insertion of natural or non-natural amino acids or deletions can be introduced in the peptide-binding cleft.
[0520] Mutations, chemical modifications, insertion of natural or non-natural amino acids or deletions can alternatively be introduced in α- and/or β-chain at positions outside the peptide-binding cleft.
[0521] In this respect a preferred embodiment is to replace the hydrophobic transmembrane regions of α-chain and β-chain by leucine zipper dimerisation domains (e.g. Fos-Jun leucine zipper; acid-base coiled-coil structure) to promote assembly of α-chain and β-chain.
[0522] Another preferred embodiment is to introduce one or more cysteine residues by amino acid exchange at the COOH-terminal of both α-chain and β-chain, to create disulfide bridges between the two chains upon assembly of the MHC complex. Another embodiment is removal of “unwanted cysteine residues” in either of the chains by mutation, chemical modification, amino acid exchange or deletion. “Unwanted cysteine residues” is here to be understood as cysteines not involved in correct folding of the MHC II-peptide complex. The presence of cysteines not directly involved in the formation of correctly folded MHC II complexes can lead to formation of intra molecular disulfide bridges and incorrectly folded MHC complexes.
[0523] MHC II complexes can also be stabilized by chemically linking together the subunits and the peptide. That can be a linker between peptide and α-chain, between peptide and β-chain, between α-chain and β-chain, and combination thereof.
[0524] Such linkages can be introduced prior to folding by linking two of the complex constituents together, then folding this covalent hetero-dimer in the presence of the third constituent. An advantage of this method is that it only requires complex formation between two, rather than three species.
[0525] Another possibility is to allow all three constituents to fold, and then to introduce covalent cross-links on the folded MHC-complex, stabilizing the structure. An advantage of this method is that the two chains and the peptide will be correctly positioned relatively to each other when the cross linkages are introduced.

[0526] Stabilization with Soluble Additives.
[0527] Salts, detergents, organic solvent, polymers and any other soluble additives can be added to increase the stability of MHC complexes. Of special interest are additives that increase surface tension of the MHC complex. Examples are sucrose, mannose, glycine, betaine, alanine, glutamine, glutamic acid and ammonium sulfate. Glycerol, mannitol and sorbitol are also included in this group even though they are able to bind polar regions.
[0528] Another group of additives of special interest increases surface tension of the MHC complex and simultaneously can interact with charged groups in the protein. Examples are MgSO₄, NaCl, polyethylenglycol, 2-methyl-2,4-pentanediol and guanidiniumsulphate.
[0529] Correct formation of MHC complexes is dependent on binding of peptide in the peptide-binding cleft; the bound peptide appears to stabilize the complex in its correct conformation. Addition of molar excess of peptide will force the equilibrium towards correctly folded MHC-peptide complexes. Likewise, excess β2m is also expected to drive the folding process in direction of correctly folded MHC complexes. Therefore peptide identical to the peptide bound in the peptide-binding cleft and β2m can be included as stabilizing soluble additives.
[0530] Other additives of special interest for stabilization of MHC complexes are BSA, fetal and bovine calf serum, and other protein components in serum with a protein stabilizing effect.
[0531] All of the above mentioned soluble additives could be added to any solution containing MHC complexes in order to increase the stability of the molecule. This can be during the refolding process, to the formed MHC complex or to a solution of MHC multimers comprising several MHC complexes That could be to the soluble monomer, to a solution containing MHC II bound to a carrier or to solutions used during analysis of MHC II specific T cells with MHC II multimers.
[0532] Other additives of special interest for stabilization of MHC II molecules are BSA, fetal and bovine calf serum or individual protein components in serum with a protein stabilizing effect.
[0533] All of the above mentioned soluble additives could be added to any solution containing MHC II molecules in order to increase the stability of the molecule. That could be to the soluble monomer, to a solution containing MHC II bound to a carrier or to solutions used during analysis of MHC II specific T cells with MHC II multimers.

[0534] Chemically Modified MHC I and II Complexes
[0535] There are a number of amino acids that are particularly reactive towards chemical cross linkers. In the following, chemical reactions are described that are particularly preferable for the cross-linking or modification of MHC I or MHC II complexes. The amino group at the N-terminal of both chains and of the peptide, as well as amino groups of lysine side chains, are nucleophilic and can be used in a number of chemical reactions, including nucleophilic substitution by activation of electrophiles (e.g. acylation such as amide formation, pyrazolone formation, isoxazolone formation; alkylation; vinylation; disulfide formation), addition to carbon-hetero multiple bonds (e.g. alkene formation by reaction of phosphonates with aldehydes or ketones; arylation; alkylation of arenes/hetarenes by reaction with alkyl boronates or enolethers), nucleophilic substitution using activation of nucleophiles (e.g. condensations; alkylation of aliphatic halides or tosylates with enolethers or enamines), and cycloadditions. Example reagents that can be used in a reaction with the amino groups are activated carboxylic acids such as NHS-ester, tetra and pentafluoro phenolic esters, anhydrides, acid chlorides and fluorides, to form stable amide bonds. Likewise, sulphonyl chlorides can react with these amino groups to form stable sulphone-amides. Iso-Cyanates can also react with amino groups to form stable ureas, and isothiocyanates can be used to introduce thio-urea linkages.
[0536] Aldehydes, such as formaldehyde and glutardialdehyde will react with amino groups to form shiff's bases, than can be further reduced to secondary amines. The guanidino group on the side chain of arginine will undergo similar reactions with the same type of reagents.
[0537] Another very useful amino acid is cysteine. The thiol on the side chain is readily alkylated by maleimides, vinyl sulphones and halides to form stable thioethers, and reaction with other thiols will give rise to disulphides.
[0538] Carboxylic acids at the C-terminal of both chains and peptide, as well as on the side chains of glutamic and aspartic acid, can also be used to introduce cross-links. They will require activation with reagents such as carbodiimides, and can then react with amino groups to give stable amides.
[0539] Thus, a large number of chemistries can be employed to form covalent cross-links. The crucial point is that the chemical reagents are bi-functional, being capable of reacting with two amino acid residues.
[0540] They can be either homo bi-functional, possessing two identical reactive moieties, such as glutardialdehyde or can be hetero bi-functional with two different reactive moieties, such as GMBS (MaleimidoButyryloxy-Succinimide ester).
[0541] Alternatively, two or more reagents can be used; i.e. GMBS can be used to introduce maleimides on the α-chain, and iminothiolane can be used to introduce thiols on the β-chain; the malemide and thiol can then form a thioether link between the two chains.
[0542] For the present invention some types of cross-links are particularly useful. The folded MHC-complex can be reacted with dextrans possessing a large number (up to many hundreds) of vinyl sulphones. These can react with lysine residues on both the α and β chains as well as with lysine residues on the peptide protruding from the binding site, effectively cross linking the entire MHC-complex. Such cross linking is indeed a favored reaction because as the first lysine residue reacts with the dextran, the MHC-complex becomes anchored to the dextran favoring further reactions between the MHC complex and the dextran multimerization domain. Another great advantage of this dextran chemistry is that it can be combined with fluorochrome labelling; i.e. the dextran is reacted both with one or several MHC-complexes and one or more fluorescent protein such as APC.
[0543] Another valuable approach is to combine the molecular biological tools described above with chemical cross linkers. As an example, one or more lysine residues can be inserted into the α-chain, juxtaposed with glutamic acids in the β-chain, where after the introduced amino groups and carboxylic acids are reacted by addition of carbodiimide. Such reactions are usually not very effective in water, unless as in this case, the groups are well positioned towards reaction. This implies that one avoids excessive reactions that could otherwise end up denaturing or changing the conformation of the MHC-complex.
[0544] Likewise a dextran multimerization domain can be cross-linked with appropriately modified MHC-complexes; i.e. one or both chains of the MHC complex can be enriched with lysine residues, increasing reactivity towards the vinylsulphone dextran. The lysine's can be inserted at positions opposite the peptide binding cleft, orienting the MHC-complexes favorably for T-cell recognition.
[0545] Another valuable chemical tool is to use extended and flexible cross-linkers. An extended linker will allow the two chains to interact with little or no strain resulting from the linker that connects them, while keeping the chains in the vicinity of each other should the complex dissociate. An excess of peptide should further favor reformation of dissociated MHC-complex.

### Other TCR Binding Molecules

[0546] MHC I and MHC II complexes bind to TCRs. However, other molecules also bind TCR. Some TCR-binding molecules are described in the following. MHC I and MHC II complexes binding to TCRs may be substituted with other molecules capable of binding TCR or molecules that have homology to the classical MHC molecules and therefore potentially could be TCR binding molecules. These other TCR binding or MHC like molecules include:

### Non-Classical MHC Complexes and Other MHC-Like Molecules:

[0547] Non-classical MHC complexes include protein products of MHC Ib and MHC IIb genes. MHC Ib genes encode β2m-associated cell-surface molecules but show little polymorphism in contrast to classical MHC class I genes. Protein products of MHC class Ib genes include HLA-E, HLA-G, HLA-F, HLA-H, MIC A, MIC B, ULBP-1, ULBP-2, ULBP-3 in humans and H2-M, H2-Q, H2-T and Rae1 in mice.

[0548] Non-classical MHC II molecules (protein products of MHC IIb genes) include HLA-DM, HLA-DO in humans and H2-DM and H2-DO in mice that are involved in regulation of peptide loading into MHC II molecules.

[0549] Another MHC-like molecule of special interest is the MHC I-like molecule CD1. CD1 is similar to MHC I molecules in its organization of subunits and association with β2m but presents glycolipids and lipids instead of peptides.

### Artificial Molecules Capable of Binding Specific TCRs

[0550] Of special interest are antibodies that bind TCRs. Antibodies herein include full length antibodies of isotype IgG, IgM, IgE, IgA and truncated versions of these, antibody fragments like Fab fragments and scFv. Antibodies also include antibodies of antibody fragments displayed on various supramolecular structures or solid supports, including filamentous phages, yeast, mammalian cells, fungi, artificial cells or micelles, and beads with various surface chemistries.

### Peptide Binding TCR

[0551] Another embodiment of special interest is peptides that bind TCRs. Peptides herein include peptides composed of natural, non-natural and/or chemically modified amino acids with a length of 8-20 amino acid. The peptides could also be longer than 20 amino acids or shorter than 8 amino acids. The peptides can or can not have a defined tertiary structure.

### Aptamers

[0552] Aptamers are another preferred group of TCR ligands. Aptamers are herein understood as natural nucleic acids (e.g. RNA and DNA) or unnatural nucleic acids (e.g. PNA, LNA, morpholinos) capable of binding TCR. The aptamer molecules consist of natural or modified nucleotides in various lengths.

[0553] Other TCR-binding molecules can be ankyrin repeat proteins or other repeat proteins, Avimers, or small chemical molecules, as long as they are capable of binding TCR with a dissociation constant smaller than 10⁻³ M.

### Verification of Correctly Folded MHC-Peptide Complexes

### Quantitative ELISA and Other Techniques to Quantify Correctly Folded MHC Complexes

[0554] When producing MHC multimers, it is desirable to determine the degree of correctly folded MHC.

[0555] The fraction or amount of functional and/or correctly folded MHC can be tested in a number of different ways, including:
[0556] Measurement of correctly folded MHC in a quantitative ELISA, e.g. where the MHC bind to immobilized molecules recognizing the correctly folded complex.
[0557] Measurement of functional MHC in an assay where the total protein concentration is measured before functional MHC is captured, by binding to e.g. immobilized TCR, and the excess, non-bound protein are measured. If the dissociation constant for the interaction is known, the amount of total and the amount of non-bound protein can be determined. From these numbers, the fraction of functional MHC complex can be determined.
[0558] Measurement of functional MHC complex by a non-denaturing gel-shift assay, where functional MHC complexes bind to TCR (or another molecule that recognize correctly folded MHC complex), and thereby shifts the TCR to another position in the gel.

### Multimerization Domain

[0559] A number of MHC complexes associate with a multimerization domain to form a MHC multimer. The size of the multimerization domain spans a wide range, from multimerisation domains based on small organic molecule scaffolds to large multimers based on a cellular structure or solid support. The multimerization domain may thus be based on different types of carriers or scaffolds, and likewise, the attachment of MHC complexes to the multimerization domain may involve covalent or non-covalent linkers. Characteristics of different kinds of multimerization domains are described below.

### Molecular Weight of Multimerization Domain.

[0560] In one embodiment the multimerization domain(s) in the present invention is preferably less than 1,000 Da (small molecule scaffold). Examples include short peptides (e.g. comprising 10 amino acids), and various small molecule scaffolds (e.g. aromatic ring structures).
[0561] In another embodiment the multimerization domain(s) is preferably between 1,000 Da and 10,000 Da (small molecule scaffold, small peptides, small polymers). Examples include polycyclic structures of both aliphatic and aromatic compounds, peptides comprising e.g. 10-100 amino acids, and other polymers such as dextran, polyethylenglycol, and polyureas.
[0562] In another embodiment the multimerization domain(s) is between 10,000 Da and 100,000 Da (Small molecule scaffold, polymers e.g. dextran, streptavidin, IgG, pentamer structure). Examples include proteins and large polypeptides, small molecule scaffolds such as steroids, dextran, dimeric streptavidin, and multi-subunit proteins such as used in Pentamers.
[0563] In another embodiment the multimerization domain(s) is preferably between 100,000 Da and 1,000,000 Da (Small molecule scaffold, polymers e.g. dextran, streptavidin, IgG, pentamer structure). Typical examples include larger polymers such as dextran (used in e.g. Dextramers), and streptavidin tetramers.
[0564] In another embodiment the multimerization domain(s) is preferably larger than 1,000,000 Da (Small molecule scaffold, polymers e.g. dextran, streptavidin, IgG, pentamer structure, cells, liposomes, artificial lipid bilayers, polystyrene beads and other beads. Most examples of this size involve cells or cell-based structures such as micelles and liposomes, as well as beads and other solid supports.

[0565] As mentioned elsewhere herein multimerisation domains can comprise carrier molecules, scaffolds or combinations of the two.

[0566] Type of Multimerization Domain.
[0567] In principle any kind of carrier or scaffold can be used as multimerization domain, including any kind of cell, polymer, protein or other molecular structure, or particles and solid supports. Below different types and specific examples of multimerization domains are listed.
   [0568] Cell. Cells can be used as carriers. Cells can be either alive and mitotic active, alive and mitotic inactive as a result of irradiation or chemically treatment, or the cells may be dead. The MHC expression may be natural (i.e. not stimulated) or may be induced/stimulated by e.g. Inf-γ. Of special interest are natural antigen presenting cells (APCs) such as dendritic cells, macrophages, Kupfer cells, Langerhans cells, B-cells and any MHC expressing cell either naturally expressing, being transfected or being a hybridoma.
   [0569] Cell-like structures. Cell-like carriers include membrane-based structures carrying MHC-peptide complexes in their membranes such as micelles, liposomes, and other structures of membranes, and phages such as filamentous phages.
   [0570] Solid support. Solid support includes beads, particulate matters and other surfaces. A preferred embodiment include beads (magnetic or non-magnetic beads) that carry electrophilic groups e.g. divinyl sulfone activated polysaccharide, polystyrene beads that have been functionalized with tosyl-activated esters, magnetic polystyrene beads functionalized with tosyl-activated esters), and where MHC complexes may be covalently immobilized to these by reaction of nucleophiles comprised within the MHC complex with the electrophiles of the beads. Beads may be made of sepharose, sephacryl, polystyrene, agarose, polysaccharide, polycarbamate or any other kind of beads that can be suspended in aqueous buffer.
   [0571] Another embodiment includes surfaces, i.e. solid supports and particles carrying immobilized MHC complexes on the surface. Of special interest are wells of a microtiter plate or other plate formats, reagent tubes, glass slides or other supports for use in microarray analysis, tubings or channels of micro fluidic chambers or devices, Biacore chips and beads
   [0572] Molecule. Multimerization domains may also be molecules or complexes of molecules held together by non-covalent bonds. The molecules constituting the multimerization domain can be small organic molecules or large polymers, and may be flexible linear molecules or rigid, globular structures such as e.g. proteins. Different kinds of molecules used in multimerization domains are described below.
      [0573] Small organic molecules. Small organic molecules here includes steroids, peptides, linear or cyclic structures, and aromatic or aliphatic structures, and many others. The prototypical small organic scaffold is a functionalized benzene ring, i.e. a benzene ring functionalized with a number of reactive groups such as amines, to which a number of MHC molecules may be covalently linked. However, the types of reactive groups constituting the linker connecting the MHC complex and the multimerization domain, as well as the type of scaffold structure, can be chosen from a long list of chemical structures. A non-comprehensive list of scaffold structures are listed below.
      [0574] Typical scaffolds include aromatic structures, benzodiazepines, hydantoins, piperazines, indoles, furans, thiazoles, steroids, diketopiperazines, morpholines, tropanes, coumarines, qinolines, pyrroles, oxazoles, amino acid precursors, cyclic or aromatic ring structures, and many others.
      [0575] Typical carriers include linear and branched polymers such as peptides, polysaccharides, nucleic acids, and many others. Multimerization domains based on small organic or polymer molecules thus include a wealth of different structures, including small compact molecules, linear structures, polymers, polypeptides, polyureas, polycarbamates, cyclic structures, natural compound derivatives, alpha-, beta-, gamma-, and omega-peptides, mono-, di- and tri-substituted peptides, L- and D-form peptides, cyclohexane- and cyclopentane-backbone modified beta-peptides, vinylogous polypeptides, glycopolypeptides, polyamides, vinylogous sulfonamide peptide, Polysulfonamide-conjugated peptide (i.e., having prosthetic groups), Polyesters, Polysaccharides such as dextran and aminodextran, polycarbamates, polycarbonates, polyureas, poly-peptidylphosphonates, Azatides, peptoids (oligo N-substituted glycines), Polyethers, ethoxyformacetal oligomers, poly-thioethers, polyethylene, glycols (PEG), polyethylenes, polydisulfides, polyarylene sulfides, Polynucleotides, PNAs, LNAs, Morpholinos, oligo pyrrolinone, polyoximes, Polyimines, Polyethyleneimine, Polyacetates, Polystyrenes, Polyacetylene, Polyvinyl, Lipids, Phospholipids, Glycolipids, polycycles, (aliphatic), polycycles (aromatic), polyheterocycles, Proteoglycan, Polysiloxanes, Polyisocyanides, Polyisocyanates, polymethacrylates, Monofunctional, Difunctional, Trifunctional and Oligofunctional open-chain hydrocarbons, Monofunctional, Difunctional, Trifunctional and Oligofunctional Nonaromat Carbocycles, Monocyclic, Bicyclic, Tricyclic and Polycyclic Hydrocarbons, Bridged Polycyclic Hydrocarbones, Monofunctional, Difunctional, Trifunctional and Oligofunctional Nonaromatic, Heterocycles, Monocyclic, Bicyclic, Tricyclic and Polycyclic Heterocycles, bridged Polycyclic Heterocycles, Monofunctional, Difunctional, Trifunctional and Oligofunctional Aromatic Carbocycles, Monocyclic, Bicyclic, Tricyclic and Polycyclic Aromatic Carbocycles, Monofunctional, Difunctional, Trifunctional and Oligofunctional Aromatic Hetero-cycles. Monocyclic, Bicyclic, Tricyclic and Polycyclic Heterocycles. Chelates, fullerenes, and any combination of the above and many others.
      [0576] Biological polymers. Biological molecules here include peptides, proteins (including antibodies, coiled-coil helices, streptavidin and many others), nucleic acids such as DNA and RNA, and polysaccharides such as dextran. The biological polymers may be reacted with MHC complexes (e.g. a number of MHC complexes chemically coupled to e.g. the amino groups of a protein), or may be linked through e.g. DNA duplex formation between a carrier DNA molecule and a number of DNA oligonucleotides each coupled to a MHC complex. Another type of multimerization domain based on a biological polymer is the streptavidin-based tetramer, where a streptavidin binds up to four biotinylated MHC complexes, as described above (see Background of the invention).
      [0577] Self-assembling multimeric structures. Several examples of commercial MHC multimers exist where the multimer is formed through self-assembling. Thus, the Pentamers are formed through formation of a coiled-coil structure that holds together 5 MHC complexes in an apparently planar structure. In a similar way, the Streptamers are based on the Streptactin protein which oligomerizes to form a MHC multimer comprising several MHC complexes (see Background of the invention).

[0578] In the following, alternative ways to make MHC multimers based on a molecule multimerization domain are described. They involve one or more of the abovementioned types of multimerization domains.

[0579] MHC dextramers can be made by coupling MHC complexes to dextran via a streptavidin-biotin interaction. In principle, biotin-streptavidin can be replaced by any dimerization domain, where one half of the dimerization domain is coupled to the MHC-peptide complex and the other half is coupled to dextran. For example, an acidic helix (one half of a coiled-coil dimer) is coupled or fused to MHC, and a basic helix (other half of a coiled-coil dimmer) is coupled to dextran. Mixing the two results in MHC binding to dextran by forming the acid/base coiled-coil structure.

[0580] Antibodies can be used as scaffolds by using their capacity to bind to a carefully selected antigen found naturally or added as a tag to a part of the MHC molecule not involved in peptide binding. For example, IgG and IgE will be able to bind two MHC molecules, IgM having a pentameric structure will be able to bind 10 MHC molecules. The antibodies can be full-length or truncated; a standard antibody-fragment includes the Fab2 fragment.

[0581] Peptides involved in coiled-coil structures can act as scaffold by making stable dimeric, trimeric, tetrameric and pentameric interactions. Examples hereof are the Fos-Jun heterodimeric coiled coil, the E. coli homo-trimeric coiled-coil domain Lpp-56, the engineered Trp-zipper protein forming a discrete, stable, α-helical pentamer in water at physiological pH.

[0582] Further examples of suitable scaffolds, carriers and linkers are streptavidin (SA) and avidin and derivatives thereof, biotin, immunoglobulins, antibodies (monoclonal, polyclonal, and recombinant), antibody fragments and derivatives thereof, leucine zipper domain of AP-1 (jun and fos), hexa-his (metal chelate moiety), hexa-hat GST (glutathione S-tranferase), glutathione, Calmodulin-binding peptide (CBP), Strep-tag, Cellulose Binding Domain, Maltose Binding Protein, S-Peptide Tag, Chitin Binding Tag, Immuno-reactive Epitopes, Epitope Tags, E2Tag, HA Epitope Tag, Myc Epitope, FLAG Epitope, AU1 and AU5 Epitopes, Glu-Glu Epitope, KT3 Epitope, IRS Epitope, Btag Epitope, Protein Kinase-C Epitope, VSV Epitope, lectins that mediate binding to a diversity of compounds, including carbohydrates, lipids and proteins, e.g. Con A (Canavalia ensiformis) or WGA (wheat germ agglutinin) and tetranectin or Protein A or G (antibody affinity). Combinations of such binding entities are also comprised. Non-limiting examples are streptavidin-biotin and jun-fos. In particular, when the MHC molecule is tagged, the binding entity may be an “anti-tag”. By “anti-tag” is meant an antibody binding to the tag, or any other molecule capable of binding to such tag.

[0583] MHC complexes can be multimerized by other means than coupling or binding to a multimerization domain. Thus, the multimerization domain may be formed during the multimerization of MHCs. One such method is to extend the bound antigenic peptide with dimerization domains. One end of the antigenic peptide is extended with dimerization domain A (e.g. acidic helix, half of a coiled-coil dimer) and the other end is extended with dimerization domain B (e.g. basic helix, other half of a coiled-coil dimer). When MHC complexes are loaded/mixed with these extended peptides the following multimer structure will be formed: A-MHC-BA-MHC-BA-MHC-B etc. The antigenic peptides in the mixture can either be identical or a mixture of peptides with comparable extended dimerization domains. Alternatively both ends of a peptide are extended with the same dimerization domain A and another peptide (same amino acid sequence or a different amino acid sequence) is extended with dimerization domain B. When MHC and peptides are mixed the following structures are formed: A-MHC-AB-MHC-BA-MHC-AB-MHC-B etc. Multimerization of MHC complexes by extension of peptides are restricted to MHC II molecules since the peptide binding groove of MHC I molecules is typically closed in both ends thereby limiting the size of peptide that can be embedded in the groove, and therefore preventing the peptide from extending out of the groove.

[0584] Another multimerization approach applicable to both MHC I and MHC II complexes is based on extension of N- and C-terminal of the MHC complex. For example the N-terminal of the MHC complex is extended with dimerization domain A and the C-terminal is extended with dimerization domain B. When MHC complexes are incubated together they pair with each other and form multimers like: A-MHC-BA-MHC-BA-MHC-BA-MHC-B etc. Alternatively the N-terminal and the C-terminal of a MHC complex are both extended with dimerization domain A and the N-terminal and C-terminal of another preparation of MHC complex (either the same or a different MHC) are extended with dimerization domain B. When these two types of MHC complexes are incubated together multimers will be formed: A-MHC-AB-MHC-BA-MHC-AB-MHC-B etc.

[0585] In all the above-described examples the extension can be either chemically coupled to the peptide/MHC complex or introduced as extension by gene fusion.

[0586] Dimerization domain AB can be any molecule pair able to bind to each other, such as acid/base coiled-coil helices, antibody-antigen, DNA-DNA, PNA-PNA, DNA-PNA, DNA-RNA, LNA-DNA, leucine zipper e.g. Fos/Jun, streptavidin-biotin and other molecule pairs as described elsewhere herein.

### Linker Molecules.

[0587] A number of MHC complexes associate with a multimerization domain to form a MHC multimer. The attachment of MHC complexes to the multimerization domain may involve covalent or non-covalent linkers, and may involve small reactive groups as well as large protein-protein interactions.

[0588] The coupling of multimerization domains and MHC complexes involve the association of an entity X (attached to or part of the multimerization domain) and an entity Y (attached to or part of the MHC complex). Thus, the linker that connects the multimerization domain and the MHC complex comprises an XY portion.
[0589] Covalent linker. The XY linkage can be covalent, in which case X and Y are reactive groups. In this case, X can be a nucleophilic group (such as —NH₂, —OH, —SH, —NH—NH₂), and Y an electrophilic group (such as CHO, COOH, CO) that react to form a covalent bond XY; or Y can be a nucleophilic group and X an electrophilic group that react to form a covalent bond XY. Other possibilities exist, e.g either of the reactive groups can be a radical, capable of reacting with the other reactive group. A number of reactive groups X and Y, and the bonds that are formed upon reaction of X and Y, are shown in FIG. 5.
[0590] X and Y can be reactive groups naturally comprised within the multimerization domain and/or the MHC complex, or they can be artificially added reactive groups. Thus, linkers containing reactive groups can be linked to either of the multimerization domain and MHC complex; subsequently the introduced reactive group(s) can be used to covalently link the multimerization domain and MHC complex.
[0591] Example natural reactive groups of MHC complexes include amino acid side chains comprising —NH₂, —OH, —SH, and —NH—. Example natural reactive groups of multimerization domains include hydroxyls of polysaccharides such as dextrans, but also include amino acid side chains comprising —NH₂, —OH, —SH, and —NH— of polypeptides, when the polypeptide is used as a multimerization domain. In some MHC multimers, one of the polypeptides of the MHC complex (i.e. the 132M, heavy chain or the antigenic peptide) is linked by a protein fusion to the multimerization domain. Thus, during the translation of the fusion protein, an acyl group (reactive group X or Y) and an amino group (reactive group Y or X) react to form an amide bond. Example MHC multimers where the bond between the multimerization domain and the MHC complex is covalent and results from reaction between natural reactive groups, include MHC-pentamers (described in US patent 2004209295) and MHC-dimers, where the linkage between multimerization domain and MHC complex is in both cases generated during the translation of the fusion protein.
[0592] Example artificial reactive groups include reactive groups that are attached to the multimerization domain or MHC complex, through association of a linker molecule comprising the reactive group. The activation of dextran by reaction of the dextran hydroxyls with divinyl sulfone, introduces a reactive vinyl group that can react with e.g. amines of the MHC complex, to form an amine that now links the multimerization domain (the dextran polymer) and the MHC complex. An alternative activation of the dextran multimerization domain involves a multistep reaction that results in the decoration of the dextran with maleimide groups, as described in the patent Siiman et al. U.S. Pat. No. 6,387,622. In this approach, the amino groups of MHC complexes are converted to —SH groups, capable of reacting with the maleimide groups of the activated dextran. Thus, in the latter example, both the reactive group of the multimerization domain (the maleimide) and the reactive group of the MHC complex (the thiol) are artificially introduced.
[0593] Sometimes activating reagents are used in order to make the reactive groups more reactive. For example, acids such as glutamate or aspartate can be converted to activated esters by addition of e.g. carbodiimid and NHS or nitrophenol, or by converting the acid moiety to a tosyl-activated ester. The activated ester reacts efficiently with a nucleophile such as —NH₂, —SH, —OH, etc.
[0594] For the purpose of this invention, the multimerization domains (including small organic scaffold molecules, proteins, protein complexes, polymers, beads, liposomes, micelles, cells) that form a covalent bond with the MHC complexes can be divided into separate groups, depending on the nature of the reactive group that the multimerization domain contains. One group comprise multimerization domains that carry nucleophilic groups (e.g. —NH₂, —OH, —SH, —CN, —NH—NH₂), exemplified by polysaccharides, polypeptides containing e.g. lysine, serine, and cysteine; another group of multimerization domains carry electrophilic groups (e.g. —COOH, —CHO, —CO, NHS-ester, tosyl-activated ester, and other activated esters, acid-anhydrides), exemplified by polypeptides containing e.g. glutamate and aspartate, or vinyl sulfone activated dextran; yet another group of multimerization domains carry radicals or conjugated double bonds.
[0595] The multimerization domains appropriate for this invention thus include those that contain any of the reactive groups shown in FIG. 5 or that can react with other reactive groups to form the bonds shown in FIG. 5.
[0596] Likewise, MHC complexes can be divided into separate groups, depending on the nature of the reactive group comprised within the MHC complex. One group comprise MHCs that carry nucleophilic groups (e.g. —NH₂, —OH, —SH, —CN, —NH—NH₂), e.g. lysine, serine, and cysteine; another group of MHCs carry electrophilic groups (e.g. —COOH, —CHO, —CO, NHS-ester, tosyl-activated ester, and other activated esters, acid-anhydrides), exemplified by e.g. glutamate and aspartate; yet another group of MHCs carry radicals or conjugated double bonds.
[0597] The reactive groups of the MHC complex are either carried by the amino acids of the MHC-peptide complex (and may be comprised by any of the peptides of the MHC-peptide complex, including the antigenic peptide), or alternatively, the reactive group of the MHC complex has been introduced by covalent or non-covalent attachment of a molecule containing the appropriate reactive group.
[0598] Preferred reactive groups in this regard include —CSO₂OH, phenylchloride, —SH, —SS, aldehydes, hydroxyls, isocyanate, thiols, amines, esters, thioesters, carboxylic acids, triple bonds, double bonds, ethers, acid chlorides, phosphates, imidazoles, halogenated aromatic rings, any precursors thereof, or any protected reactive groups, and many others. Example pairs of reactive groups, and the resulting bonds formed, are shown in FIG. 5.
[0599] Reactions that may be employed include acylation (formation of amide, pyrazolone, isoxazolone, pyrimidine, comarine, quinolinon, phthalhydrazide, diketopiperazine, benzodiazepinone, and hydantoin), alkylation, vinylation, disulfide formation, Wittig reaction, Horner-Wittig-Emmans reaction, arylation (formation of biaryl or vinylarene), condensation reactions, cycloadditions ((2+4), (3+2)), addition to carbon-carbon multiplebonds, cycloaddition to multiple bonds, addition to carbon-hetero multiple bonds, nucleophilic aromatic substitution, transition metal catalyzed reactions, and may involve formation of ethers, thioethers, secondary amines, tertiary amines, beta-hydroxy ethers, beta-hydroxy thioethers, beta-hydroxy amines, beta-amino ethers, amides, thioamides, oximes, sulfonamides, di- and tri-functional compounds, substituted aromatic compounds, vinyl substituted aromatic compounds, alkyn substituted aromatic compounds, biaryl compounds, hydrazines, hydroxylamine ethers, substituted cycloalkenes, substituted cyclodienes, substituted 1, 2, 3 triazoles, substituted cycloalkenes, beta-hydroxy ketones, beta-hydroxy aldehydes, vinyl ketones, vinyl aldehydes, substituted alkenes, substituted alkenes, substituted amines, and many others.
[0600] MHC dextramers can be made by covalent coupling of MHC complexes to the dextran backbone, e.g. by chemical coupling of MHC complexes to dextran backbones. The MHC complexes can be coupled through either heavy chain or β2-microglobulin if the MHC complexes are MHC I or through α-chain or β-chain if the MHC complexes are MHC II. MHC complexes can be coupled as folded complexes comprising heavy chain/beta2microglobulin or α-chain/β-chain or either combination together with peptide in the peptide-binding cleft. Alternatively either of the protein chains can be coupled to dextran and then folded in vitro together with the other chain of the MHC complex not coupled to dextran and together with peptide. Direct coupling of MHC complexes to dextran multimerization domain can be via an amino group or via a sulphide group. Either group can be a natural component of the MHC complex or attached to the MHC complex chemically. Alternatively, a cysteine may be introduced into the genes of either chain of the MHC complex.
[0601] Another way to covalently link MHC complexes to dextran multimerization domains is to use the antigenic peptide as a linker between MHC and dextran. Linker containing antigenic peptide at one end is coupled to dextran. Antigenic peptide here means a peptide able to bind MHC complexes in the peptide-binding cleft. As an example, 10 or more antigenic peptides may be coupled to one dextran molecule. When MHC complexes are added to such peptide-dextran construct the MHC complexes will bind the antigenic peptides and thereby MHC-peptide complexes are displayed around the dextran multimerization domain. The antigenic peptides can be identical or different from each other. Similarly MHC complexes can be either identical or different from each other as long as they are capable of binding one or more of the peptides on the dextran multimerization domain.
[0602] Non-covalent linker. The linker that connects the multimerization domain and the MHC complex comprises an XY portion. Above different kinds of covalent linkages XY were described. However, the XY linkage can also be non-covalent.
[0603] Non-covalent XY linkages can comprise natural dimerization pairs such as antigen-antibody pairs, DNA-DNA interactions, or can include natural interactions between small molecules and proteins, e.g. between biotin and streptavidin. Artificial XY examples include XY pairs such as His₆ tag (X) interacting with Ni-NTA (Y) and PNA-PNA interations.
[0604] Protein-protein interactions. The non-covalent linker may comprise a complex of two or more polypeptides or proteins, held together by non-covalent interactions. Example polypeptides and proteins belonging to this group include Fos/Jun, Acid/Base coiled coil structure, antibody/antigen (where the antigen is a peptide), and many others.
[0605] A preferred embodiment involving non-covalent interactions between polypeptides and/or proteins are represented by the Pentamer structure described in US patent 2004209295.
[0606] Another preferred embodiment involves the use of antibodies, with affinity for the surface of MHC opposite to the peptide-binding groove. Thus, an anti-MHC antibody, with its two binding site, will bind two MHC complexes and in this way generate a bivalent MHC multimer. In addition, the antibody can stabilize the MHC complex through the binding interactions. This is particularly relevant for MHC class II complexes, as these are less stable than class I MHC complexes.
[0607] Polynucleotide-polynucleotide interactions. The non-covalent linker may comprise nucleotides that interact non-covalently. Example interactions include PNA/PNA, DNA/DNA, RNA/RNA, LNA/DNA, and any other nucleic acid duplex structure, and any combination of such natural and unnatural polynucleotides such as DNA/PNA, RNA/DNA, and PNA/LNA.
[0608] Protein-small molecule interactions. The non-covalent linker may comprise a macromolecule (e.g. protein, polynucleotide) and a small molecule ligand of the macromolecule. The interaction may be natural (i.e., found in Nature, such as the Streptavidin/biotin interaction) or non-natural (e.g. His-tag peptide/Ni-NTA interaction). Example interactions include Streptavidin/biotin and anti-biotin antibody/biotin.
[0609] Combinations—non-covalent linker molecules. Other combinations of proteins, polynucleotides, small organic molecules, and other molecules, may be used to link the MHC to the multimerization domain. These other combinations include protein-DNA interactions (e.g. DNA binding protein such as the gene regulatory protein CRP interacting with its DNA recognition sequence), RNA aptamer-protein interactions (e.g. RNA aptamer specific for growth hormone interacting with growth hormone)
[0610] Synthetic molecule-synthetic molecule interaction. The non-covalent linker may comprise a complex of two or more organic molecules, held together by non-covalent interactions. Example interactions are two chelate molecules binding to the same metal ion (e.g. EDTA-Ni⁺⁺-NTA), or a short polyhistidine peptide (e.g. His₆) bound to NTA-Ni⁺⁺.

[0611] In another preferred embodiment the multimerization domain is a bead. The bead is covalently or non-covalently coated with MHC multimers or single MHC complexes, through non-cleavable or cleavable linkers. As an example, the bead can be coated with streptavidin monomers, which in turn are associated with biotinylated MHC complexes; or the bead can be coated with streptavidin tetramers, each of which are associated with 0, 1, 2, 3, or 4 biotinylated MHC complexes; or the bead can be coated with MHC-dextramers where e.g. the reactive groups of the MHC-dextramer (e.g. the divinyl sulfone-activated dextran backbone) has reacted with nucleophilic groups on the bead, to form a covalent linkage between the dextran of the dextramer and the beads.

[0612] In another preferred embodiment, the MHC multimers described above (e.g. where the multimerization domain is a bead) further contains a flexible or rigid, and water soluble, linker that allows for the immobilized MHC complexes to interact efficiently with cells, such as T-cells with affinity for the MHC complexes. In yet another embodiment, the linker is cleavable, allowing for release of the MHC complexes from the bead. If T-cells have been immobilized, by binding to the MHC complexes, the T-cells can very gently be released by cleavage of this cleavable linker. Appropriate cleavable linkers are shown in FIG. 6. Most preferably, the linker is cleaved at physiological conditions, allowing for the integrity of the isolated cells.

[0613] Further examples of linker molecules that may be employed in the present invention include Calmodulin-binding peptide (CBP), 6×HIS, Protein A, Protein G, biotin, Avidine, Streptavidine, Strep-tag, Cellulose Binding Domain, Maltose Binding Protein, S-Peptide Tag, Chitin Binding Tag, Immuno-reactive Epitopes, Epitope Tags, GST tagged proteins, E2Tag, HA Epitope Tag, Myc Epitope, FLAG Epitope, AU1 and AU5 Epitopes, Glu-Glu Epitope, KT3 Epitope, IRS Epitope, Btag Epitope, Protein Kinase-C Epitope, VSV Epitope.

[0614] The list of dimerization- and multimerization domains, described elsewhere in this document, define alternative non-covalent linkers between the multimerization domain and the MHC complex.

[0615] The abovementioned dimerization- and multimerization domains represent specific binding interactions. Another type of non-covalent interactions involves the non-specific adsorption of e.g. proteins onto surfaces. As an example, the non-covalent adsorption of proteins onto glass beads represents this class of XY interactions. Likewise, the interaction of MHC complexes (comprising full-length polypeptide chains, including the transmembrane portion) with the cell membrane of for example dendritic cells is an example of a non-covalent, primarily non-specific XY interaction.

[0616] In some of the abovementioned embodiments, several multimerization domains (e.g. streptavidin tetramers bound to biotinylated MHC complexes) are linked to another multimerization domain (e.g. the bead). For the purpose of this invention we shall call both the smaller and the bigger multimerization domain, as well as the combined multimerization domain, for multimerization domain

### Additional Features of Product

[0617] Additional components may be coupled to carrier or added as individual components not coupled to carrier

### Attachment of Biologically Active Molecules to MHc Multimers

[0618] Engagement of MHC complex to the specific T cell receptor leads to a signaling cascade in the T cell. However, T-cells normally respond to a single signal stimulus by going into apoptosis. T cells needs a second signal in order to become activated and start development into a specific activation state e.g. become an active cytotoxic T cell, helper T cell or regulatory T cell.

[0619] It is to be understood that the MHC multimer of the invention may further comprise one or more additional substituents. The definition of the terms “one or more”, “a plurality”, “a”, “an”, and “the” also apply here. Such biologically active molecules may be attached to the construct in order to affect the characteristics of the constructs, e.g. with respect to binding properties, effects, MHC molecule specificities, solubility, stability, or detectability. For instance, spacing could be provided between the MHC complexes, one or both chromophores of a Fluorescence Resonance Energy Transfer (FRET) donor/acceptor pair could be inserted, functional groups could be attached, or groups having a biological activity could be attached.

[0620] MHC multimers can be covalently or non-covalently associated with various molecules: having adjuvant effects; being immune targets e.g. antigens; having biological activity e.g. enzymes, regulators of receptor activity, receptor ligands, immune potentiators, drugs, toxins, co-receptors, proteins and peptides in general; sugar moieties; lipid groups; nucleic acids including siRNA; nano particles; small molecules. In the following these molecules are collectively called biologically active molecules. Such molecules can be attached to the MHC multimer using the same principles as those described for attachment of MHC complexes to multimerisation domains as described elsewhere herein. In brief, attachment can be done by chemical reactions between reactive groups on the biologically active molecule and reactive groups of the multimerisation domain and/or between reactive groups on the biologically active molecule and reactive groups of the MHC-peptide complex. Alternatively, attachment is done by non-covalent interaction between part of the multimerisation domain and part of the biological active molecule or between part of the MHC-peptide complex and part of the biological active molecule. In both covalent and non-covalent attachment of the biologically molecule to the multimerisation domain a linker molecule can connect the two. The linker molecule can be covalent or non-covalent attached to both molecules. Examples of linker molecules are described elsewhere herein. Some of the MHCmer structures better allows these kind of modifications than others.

[0621] Biological active molecules can be attached repetitively aiding to recognition by and stimulation of the innate immune system via Toll or other receptors.

[0622] MHC multimers carrying one or more additional groups can be used as therapeutic or vaccine reagents.

[0623] In particular, the biologically active molecule may be selected from

proteins such as MHC Class I-like proteins like MIC A, MIC B, CD1d, HLA E, HLA F, HLA G, HLA H, ULBP-1, ULBP-2, and ULBP-3,
co-stimulatory molecules such as CD2, CD3, CD4, CD5, CD8, CD9, CD27, CD28, CD30, CD69, CD134 (OX40), CD137 (4-1BB), CD147, CDw150 (SLAM), CD152 (CTLA-4), CD153 (CD30L), CD40L (CD154), NKG2D, ICOS, HVEM, HLA Class II, PD-1, Fas (CD95), FasL expressed on T and/or NK cells, CD40, CD48, CD58, CD70, CD72, B7.1 (CD80), B7.2 (CD86), B7RP-1, B7-H3, PD-L1, PD-L2, CD134L, CD137L, ICOSL, LIGHT expressed on APC and/or tumour cells,
cell modulating molecules such as CD16, NKp30, NKp44, NKp46, NKp80, 2B4, KIR, LIR, CD94/NKG2A, CD94/NKG2C expressed on NK cells, IFN-alpha, IFN-beta, IFN-gamma, IL-1, IL-2, IL-3, IL-4, IL-6, IL-7, IL-8, IL-10, IL-11, IL-12, IL-15, CSFs (colony-stimulating factors), vitamin D3, IL-2 toxins, cyclosporin, FK-506, rapamycin, TGF-beta, clotrimazole, nitrendipine, and charybdotoxin,
accessory molecules such as LFA-1, CD11a/18, CD54 (ICAM-1), CD106 (VCAM), and CD49a,b,c,d,e,f/CD29 (VLA-4),
adhesion molecules such as ICAM-1, ICAM-2, GlyCAM-1, CD34, anti-LFA-1, anti-CD44, anti-beta7, chemokines, CXCR4, CCR5, anti-selectin L, anti-selectin E, and anti-selectin P,
toxic molecules selected from toxins, enzymes, antibodies, radioisotopes, chemi-luminescent substances, bioluminescent substances, polymers, metal particles, and haptens, such as cyclophosphamide, methrotrexate, Azathioprine, mizoribine, 15-deoxuspergualin, neomycin, staurosporine, genestein, herbimycin A, Pseudomonas exotoxin A, saporin, Rituxan, Ricin, gemtuzumab ozogamicin, Shiga toxin, heavy metals like inorganic and organic mercurials, and FN18-CRM9, radioisotopes such as incorporated isotopes of iodide, cobalt, selenium, tritium, and phosphor, and haptens such as DNP, and digoxiginin,
and combinations of any of the foregoing, as well as antibodies (monoclonal, polyclonal, and recombinant) to the foregoing, where relevant. Antibody derivatives or fragments thereof may also be used.

### Design and Generation of Product to be Used for Immune Monitoring, Diagnosis, Therapy or Vaccination

[0624] The product of the present invention may be used for immune monitoring, diagnosis, therapy and/or vaccination. The generation of product may follow some or all of the following general steps.
[0625] 1. Design of antigenic peptides
[0626] 2. Choice of MHC allele
[0627] 3. Generation of product
[0628] 4. Validation and optimization of product

### Production of a MHC Multimer, Antigenic Peptide or Antigenic Polypeptide Diagnostic or Immune Monitoring Reagent May Follow Some or all of the Following Steps.

[0629] 1. Identify disease of interest. Most relevant diseases in this regard are infectious-, cancer-, auto immune-, transplantation-, or immuno-suppression-related diseases.
[0630] 2. Identify relevant protein antigen(s). This may be individual proteins, a group of proteins from a given tissue or subgroups of proteins from an organism.
[0631] 3. Identify the protein sequence. Amino acid sequences can be directly found in databases or deduced from gene- or mRNA sequence e.g. using the following link http://www.ncbi.nlm.nih.gov/Genbank/index.html. If not in databases relevant proteins or genes encoding relevant proteins may be isolated and sequenced. In some cases only DNA sequences will be available without knowing which part of the sequence is protein coding. Then the DNA sequence is translated into amino acid sequence in all reading frames.
[0632] 4. Choose MHC allele(s). Decide on needed MHC allele population coverage. If a broad coverage of a given population is needed (i.e. when generally applicable reagents are sought) the most frequently expressed MHC alleles by the population of interest may be chosen e.g. using the database http://www.allelefrequencies.net/test/default1.asp or http://epitope.liai.org:8080/tools/population/iedb_input.
   [0633] In case of personalized medicine the patient is tissue typed (HLA type) and then MHC alleles may be selected according to that.
[0634] 5. Run the general peptide epitope generator program described elsewhere herein on all selected amino acid sequences from step 3, thereby generating all possible epitopes of defined length (8′-, 9′-, 10′-, 11′-, 13-, 14′-, 15′-, and/or 16′-mers).
[0635] 6. If searching for broadly applicable epitope sequences, a good alternative to step 5 is to run the “intelligent” peptide epitope prediction programs on the selected amino acid sequences of step 3 using the selected MHC alleles from step 4 e.g. using epitope prediction programs like http://www.syfpeithi.de/, http://www.cbs.dtu.dk/services/NetMHC/, and http://www.cbs.dtu.dk/services/NetMHClI/.
   [0636] This step can also be used supplementary to step 5 by running selected or all epitopes from the general peptide epitope generator program through one or more of the intelligent peptide epitope prediction programs.
[0637] 7. If searching for broadly applicable epitope sequences, one may choose to select the epitopes with highest binding score, or the most likely proteolytic products of the species in question, for the chosen MHC alleles and run them through the BLAST program (http://www.ncbi.nlm.nih.gov/blast/Blast.cgi) to validate the uniqueness of the peptides. If the peptide sequences are present in other species, evaluate the potential risk of disease states caused by the non-relevant species in relation to causing false positive results. If considered being a potential problem for evaluating the future analysis outcome, leave out the peptide. Preferably, choose unique peptide sequences only present in the selected protein.
[0638] 8. Produce selected peptides as described elsewhere herein, e.g. by standard organic synthesis, and optionally test for binding to the desired MHC alleles by e.g. in vitro folding, peptide exchange of already preloaded MHC complexes or another method able to test for peptide binding to MHC I or II molecules.
[0639] 9. Generate desired MHC multimer by covalently or non-covalently attaching MHC-peptide complex(es) to multimerization domain, and optionally attach a fluorophore to the MHC multimer, as described elsewhere herein. Optionally, test efficacy in detecting specific T-cells using e.g. the methods described in the section “Detection”.
[0640] The MHC multimer, antigenic peptide or antigenic polypeptide reagents may be used in a diagnostic procedure or kit for testing patient and control samples e.g. by flow cytometry, immune histochemistry, Elispot or other methods as described herein.

### Production of a MHC Multimer, Antigenic Peptide or Antigenic Polypeptide Vaccine or Therapeutic Reagent May Follow Some or all of the Following Steps.

[0641] 1. As step 1-8 above for diagnostic reagent.
[0642] 9. Select additional molecules (e.g. biologically active molecules, toxins) to attach or add to the MHC multimer, antigenic peptide or antigenic polypeptide as described elsewhere herein. The additional molecules can have different functionalities as e.g. adjuvants, specific activators, toxins etc.
[0643] 10. Test the vaccine or therapeutic reagent following general guidelines
[0644] 11. Use for vaccination or therapy
   Processes Involving MHC Multimers, Antigenic Peptides and/or Antigenic Polypeptides

[0645] The present invention relates to methods for detecting the presence of MHC recognising cells in a sample comprising the steps of

(a) providing a sample suspected of comprising MHC recognising cells,
(b) contacting the sample with a MHC multimer as defined above, and
(c) determining any binding of the MHC multimer.

[0646] Binding indicates the presence of MHC recognising cells.

[0647] Or

(a) providing a sample suspected of comprising MHC recognising cells,
(b) contacting the sample with an antigenic peptide or an antigenic polypeptide as defined above, and
(c) determining any binding of the MHC multimer generated due to addition of antigenic peptide or antigenic polypeptide to sample.

[0648] Binding indicates the presence of MHC recognising cells.

[0649] Such methods are a powerful tool in diagnosing various diseases. Establishing a diagnosis is important in several ways. A diagnosis provides information about the disease, thus the patient can be offered a suitable treatment regime. Also, establishing a more specific diagnosis may give important information about a subtype of a disease for which a particular treatment will be beneficial (i.e. various subtypes of diseases may involve display of different peptides which are recognised by MHC recognising cells, and thus treatment can be targeted effectively against a particular subtype). In this way, it may also be possible to gain information about aberrant cells, which emerge through the progress of the disease or condition, or to investigate whether and how T-cell specificity is affected. The binding of the MHC multimer makes possible these options, since the binding is indicative for the presence of the MHC recognising cells in the sample, and accordingly the presence of MHC multimers displaying the peptide.

[0650] The present invention also relates to methods for monitoring MHC recognising cells comprising the steps of

(a) providing a sample suspected of comprising MHC recognising cells,
(b) contacting the sample with a MHC complex as defined above, and
(c) determining any binding of the MHC multimer, thereby monitoring MHC recognising cells.

[0651] Or

(a) providing a sample suspected of comprising MHC recognising cells,
(b) contacting the sample with an antigenic peptide or an antigenic polypeptide as defined above, and
(c) determining any binding of the MHC multimer generated due to addition of antigenic peptide or antigenic polypeptide to sample, thereby monitoring MHC recognising cells.

[0652] Such methods are a powerful tool in monitoring the progress of a disease, e.g. to closely follow the effect of a treatment. The method can i.e. be used to manage or control the disease in a better way, to ensure the patient receives the optimum treatment regime, to adjust the treatment, to confirm remission or recurrence, and to ensure the patient is not treated with a medicament which does not cure or alleviate the disease. In this way, it may also be possible to monitor aberrant cells, which emerge through the progress of the disease or condition, or to investigate whether and how T-cell specificity is affected during treatment. The binding of the MHC multimer makes possible these options, since the binding is indicative for the presence of the MHC recognising cells in the sample, and accordingly the presence of MHC multimers displaying the antigenic peptide.

[0653] The present invention also relates to methods for establishing a prognosis of a disease involving MHC recognising cells comprising the steps of

(a) providing a sample suspected of comprising MHC recognising cells,
(b) contacting the sample with a MHC multimer as defined above, and
(c) determining any binding of the MHC multimer, thereby establishing a prognosis of a disease involving MHC recognising cells.

[0654] Or (a) providing a sample suspected of comprising MHC recognising cells,

(b) contacting the sample with an antigenic peptide or an antigenic polypeptide as defined above, and
(c) determining any binding of the MHC multimer generated due to addition of antigenic peptide or antigenic polypeptide to sample, thereby establishing a prognosis of a disease involving MHC recognising cells.

[0655] Such methods are a valuable tool in order to manage diseases, i.a. to ensure the patient is not treated without effect, to ensure the disease is treated in the optimum way, and to predict the chances of survival or cure. In this way, it may also be possible to gain information about aberrant cells, which emerge through the progress of the disease or condition, or to investigate whether and how T-cell specificity is affected, thereby being able to establish a prognosis. The binding of the MHC multimer makes possible these options, since the binding is indicative for the presence of the MHC recognising cells in the sample, and accordingly the presence of MHC complexs displaying the antigenic peptide.

[0656] The present invention also relates to methods for determining the status of a disease involving MHC recognising cells comprising the steps of

(a) providing a sample suspected of comprising MHC recognising cells,
(b) contacting the sample with a MHC complex as defined above, and
(c) determining any binding of the MHC complex, thereby determining the status of a disease involving MHC recognising cells.

[0657] Or

(a) providing a sample suspected of comprising MHC recognising cells,
(b) contacting the sample with an antigenic peptide or an antigenic polypeptide as defined above, and
(c) determining any binding of the MHC multimer generated due to addition of antigenic peptide or antigenic polypeptide to sample, thereby determining the status of a disease involving MHC recognising cells.

[0658] Such methods are a valuable tool in managing and controlling various diseases. A disease could, e.g. change from one stage to another, and thus it is important to be able to determine the disease status. In this way, it may also be possible to gain information about aberrant cells which emerge through the progress of the disease or condition, or to investigate whether and how T-cell specificity is affected, thereby determining the status of a disease or condition. The binding of the MHC complex makes possible these options, since the binding is indicative for the presence of the MHC recognising cells in the sample, and accordingly the presence of MHC complexs displaying the antigenic peptide.

[0659] The present invention also relates to methods for the diagnosis of a disease involving MHC recognising cells comprising the steps of

(a) providing a sample suspected of comprising MHC recognising cells,
(b) contacting the sample with a MHC multimer as defined above, and
(c) determining any binding of the MHC multimer, thereby diagnosing a disease involving MHC recognising cells.

[0660] Or

(a) providing a sample suspected of comprising MHC recognising cells,
(b) contacting the sample with an antigenic peptide or an antigenic polypeptide as defined above, and
(c) determining any binding of the MHC multimer generated due to addition of antigenic peptide or antigenic polypeptide to sample, thereby diagnosing a disease involving MHC recognising cells.

[0661] Such diagnostic methods are a powerful tool in the diagnosis of various diseases. Establishing a diagnosis is important in several ways. A diagnosis gives information about the disease, thus the patient can be offered a suitable treatment regime. Also, establishing a more specific diagnosis may give important information about a subtype of a disease for which a particular treatment will be beneficial (i.e. various subtypes of diseases may involve display of different peptides which are recognised by MHC recognising cells, and thus treatment can be targeted effectively against a particular subtype). Valuable information may also be obtained about aberrant cells emerging through the progress of the disease or condition as well as whether and how T-cell specificity is affected. The binding of the MHC multimer makes possible these options, since the binding is indicative for the presence of the MHC recognising cells in the sample, and accordingly the presence of MHC multimers displaying the peptide.

[0662] The present invention also relates to methods of correlating cellular morphology with the presence of MHC recognising cells in a sample comprising the steps of

(a) providing a sample suspected of comprising MHC recognising cells,
(b) contacting the sample with a MHC multimer as defined above, and
(c) determining any binding of the MHC multimer, thereby correlating the binding of the MHC multimer with the cellular morphology.

[0663] Such methods are especially valuable as applied in the field of histochemical methods, as the binding pattern and distribution of the MHC multimers can be observed directly. In such methods, the sample is treated so as to preserve the morphology of the individual cells of the sample. The information gained is important i.a. in diagnostic procedures as sites affected can be observed directly.

[0664] The present invention also relates to methods for determining the effectiveness of a medicament against a disease involving MHC recognising cells comprising the steps of

(a) providing a sample from a subject receiving treatment with a medicament,
(b) contacting the sample with a MHC multimer as defined herein, and
(c) determining any binding of the MHC multimer, thereby determining the effectiveness of the medicament.

[0665] Or

(a) providing a sample from a subject receiving treatment with a medicament,
(b)) contacting the sample with an antigenic peptide or an antigenic polypeptide as defined above, and
(c) determining any binding of the MHC multimer generated due to addition of antigenic peptide or antigenic polypeptide to sample, thereby determining the effectiveness of the medicament.

[0666] Such methods are a valuable tool in several ways. The methods may be used to determine whether a treatment is effectively combating the disease. The method may also provide information about aberrant cells which emerge through the progress of the disease or condition as well as whether and how T-cell specificity is affected, thereby providing information of the effectiveness of a medicament in question. The binding of the MHC multimer makes possible these options, since the binding is indicative for the presence of the MHC recognising cells in the sample, and accordingly the presence of MHC multimers displaying the peptide.

[0667] The present invention also relates to methods for manipulating MHC recognising cells populations comprising the steps of

(a) providing a sample comprising MHC recognising cells,
(b) contacting the sample with a MHC multimer immobilised onto a solid support as defined above,
(c) isolating the relevant MHC recognising cells, and
(d) expanding such cells to a clinically relevant number, with or without further manipulation.

[0668] Or

(a) providing a sample comprising MHC recognising cells,
(b) contacting the sample with an antigenic peptide or an antigenic polypeptide as defined above,
(c) identify MHC recognizing cells being activated upon binding MHC multimer generated from added antigenic peptide or antigenic polypeptide
(c) isolating the relevant MHC recognising cells, and
(d) expanding such cells to a clinically relevant number, with or without further manipulation.

[0669] Such ex vivo methods are a powerful tool to generate antigen-specific, long-lived human effector T-cell populations that, when re-introduced to the subject, enable killing of target cells and has a great potential for use in immunotherapy applications against various types of cancer and infectious diseases.

[0670] As used everywhere herein, the term “MHC recognising cells” are intended to mean such which are able to recognise and bind to MHC multimers. The intended meaning of “MHC multimers” is given above. Such MHC recognising cells may also be called MHC recognising cell clones, target cells, target MHC recognising cells, target MHC molecule recognising cells, MHC molecule receptors, MHC receptors, MHC peptide specific receptors, or peptide-specific cells. The term “MHC recognising cells” is intended to include all subsets of normal, abnormal and defect cells, which recognise and bind to the MHC molecule. Actually, it is the receptor on the MHC recognising cell that binds to the MHC molecule.

[0671] As described above, in diseases and various conditions, peptides are displayed by means of MHC multimers, which are recognised by the immune system, and cells targeting such MHC multimers are produced (MHC recognising cells). Thus, the presence of such MHC protein recognising cells is a direct indication of the presence of MHC multimers displaying the peptides recognised by the MHC protein recognising cells. The peptides displayed are indicative and may involved in various diseases and conditions.

[0672] For instance, such MHC recognising cells may be involved in diseases of inflammatory, auto-immune, allergic, viral, cancerous, infectious, allo- or xenogene (graft versus host and host versus graft) origin.

[0673] The MHC multimers, antigenic peptides and/or antigenic polypeptides of the present invention have numerous uses and are valuable and powerful tools e.g. in the fields of therapy, diagnosis, prognosis, monitoring, stratification, and determining the status of diseases or conditions. Thus, the MHC multimers, antigenic peptides and/or antigenic polypeptides may be applied in the various methods involving the detection of MHC recognising cells.

[0674] Furthermore, the present invention relates to compositions comprising the MHC multimers, antigenic peptides and/or antigenic polypeptides in a solubilising medium. The present invention also relates to compositions comprising the MHC multimers, antigenic peptides and/or antigenic polypeptides immobilised onto a solid or semi-solid support.

[0675] The MHC multimers, antigenic peptides and/or antigenic polypeptides can be used in a number of applications, including analyses such as flow cytometry, immunohistochemistry (IHC), and ELISA-like analyses, and can be used for diagnostic, prognostic or therapeutic purposes including autologous cancer therapy or vaccines such as HIV vaccine or cancer vaccine.

[0676] The MHC multimers, antigenic peptides and/or antigenic polypeptides are very suitable as detection systems. Thus, the present invention relates to the use of the MHC multimers, antigenic peptides and/or antigenic polypeptides as defined herein as detection systems.

[0677] In another aspect, the present invention relates to the general use of antigenic peptides, antigenic polypeptides, MHC peptide complexes and multimers of such MHC peptide complexes in various methods. These methods include therapeutic methods, diagnostic methods, prognostic methods, methods for determining the progress and status of a disease or condition, and methods for the stratification of a patient.

[0678] The MHC multimers, antigenic peptides and/or antigenic polypeptides of the present invention are also of value in testing the expected efficacy of medicaments against or for the treatment of various diseases. Thus, the present invention relates to methods of testing the effect of medicaments or treatments, the methods comprising detecting the binding of the MHC multimers to MHC recognising cells and establishing the effectiveness of the medicament or the treatment in question based on the specificity of the MHC recognising cells.

[0679] As mentioned above, the present invention also relates generally to the field of therapy. Thus, the present invention relates per se to the MHC multimers, antigenic peptides and/or antigenic polypeptides as defined herein for use as medicaments, and to the MHC multimers, antigenic peptides and/or antigenic polypeptides for use in in vivo and ex vivo therapy.

[0680] The present invention relates to therapeutic compositions comprising as active ingredients the MHC multimers, antigenic peptides and/or antigenic polypeptides as defined herein.

[0681] An important aspect of the present invention is therapeutic compositions comprising as active ingredients effective amounts of MHC recognising cells obtained using the MHC multimers, antigenic peptides and/or antigenic polypeptides as defined herein to isolate relevant MHC recognising cells, and expanding such cells to a clinically relevant number.

[0682] The present invention further relates to methods for treating, preventing or alleviating diseases, methods for inducing anergy of cells, as well as to methods for up-regulating, down-regulating, modulating, stimulating, inhibiting, restoring, enhancing and/or otherwise manipulating immune responses.

[0683] The invention also relates to methods for obtaining MHC recognising cells by using the MHC multimers, antigenic peptides and/or antigenic polypeptides as described herein.

[0684] Also encompassed by the present invention are methods for preparing the therapeutic compositions of the invention.

[0685] The present invention is also directed to generating MHC multimers for detecting and analysing receptors on MHC recognising cells, such as epitope specific T-cell clones or other immune competent effector cells.

[0686] It is a further object of the present invention to provide new and powerful strategies for the development of preventive and/or curative vaccines. This in turn will improve the possibilities for directed and efficient immune manipulations against diseases caused by tumour genesis or infection by pathogenic agent like viruses and bacteria. The ability to generate and optionally attach recombinant MHC multimers to multimerization domains, such as scaffolds and/or carrier molecules, will enable the development of a novel analytical and therapeutical tool for monitoring immune responses and contribute to a rational platform for novel therapy and “vaccine” applications.

[0687] Therapeutic compositions (e.g. “therapeutical vaccines”) that stimulate specific T-cell proliferation by antigenic peptide-specific stimulation are indeed a possibility within the present invention. Thus, quantitative analysis and ligand-based detection of specific T-cells that proliferate by the antigenic peptide specific stimulation should be performed simultaneously to monitoring the generated response.

### Application of Mhc Multimers in Immune Monitoring, Diagnostics, Therapy, Vaccine

[0688] MHC multimers, antigenic peptides and/or antigenic polypeptides as described herein can be used to identify and isolate specific T cells in a wide array of applications. In principle all kind of samples possessing T cells can be analyzed with MHC multimers, antigenic peptides and/or antigenic polypeptides creating one or more MHC multimers in sample.

[0689] MHC multimers detect antigen-specific T cells of the various T cell subsets. T cells are pivotal for mounting an adaptive immune response. It is therefore of importance to be able to measure the number of specific T cells when performing a monitoring of a given immune response. Typically, the adaptive immune response is monitored by measuring the specific antibody response, which is only one of the effector arms of the immune system. This can lead to miss-interpretation of the actual clinical immune status.

[0690] In many cases intruders of the organism can hide away inside cells, which often does not provoke a humoral response. In other cases, e.g. in the case of certain viruses the intruder mutates fast, particularly in the genes encoding the proteins that are targets for the humoral response. Examples include the influenza and HIV viruses. The high rate of mutagenesis renders the humoral response unable to cope with the infection. In these cases the immune system relies on the cellular immune response. When developing vaccines against such targets one needs to provoke the cellular response in order to get an efficient vaccine.

[0691] MHC multimers, antigenic peptides and/or antigenic polypeptides can be used for monitoring immune responses elicited by vaccines One preferred embodiment of the present invention is monitoring the effect of cancer vaccines.

[0692] Therapeutically cancer vaccines generally rely on cytotoxic effector T cells and have short duration of function. Therefore, continuous monitoring is important.

[0693] MHC multimers, antigenic peptides and/or antigenic polypeptides are therefore very important for immune monitoring of vaccine responses both during vaccine development, as a means to verify the obtained immunity for lifelong vaccines and to follow cancer patients under treatment with therapeutically cancer vaccines.

[0694] In another preferred embodiment of the present invention MHC multimers, antigenic peptides and/or antigenic polypeptides are used as components of a cancer vaccine. An example of useful MHC multimers are cells expressing MHC-peptide complexes where the antigenic peptides are derived from tumor proteins. Such cells if used as a vaccine in itself or generated upon injection of antigenic peptides and/or antigenic polypeptides may be able to induce a cellular immune response generating T cells specific for the protein from which the antigenic peptides are derived and thereby generate an immune response against the tumor. To further enhance the MHC-peptide specific stimulation of the T cells, T cell stimulatory molecules can be coupled to the multimerisation domain together with MHC or may be added as soluble adjuvant together with the MHC multimer. Example T cell stimulatory molecules include but are not limited to IL-2, CD80 (B7.1), CD86 (B7.2), anti-CD28 antibody, CD40, CD37ligand (4-1BBL), IL-6, IL-15,IL-21, IFN-γ, IFN-α, IFN-β, CD27 ligand, CD30 ligand, IL-23, IL-1α and IL-1β.

[0695] One or more T cell stimulatory molecules may be added together with or coupled to the MHC multimer. Likewise, adjuvants or molecules enhancing or otherwise affecting the cellular, humoral or innate immune response may be coupled to or added together with the MHC multimer, antigenic peptides and/or antigenic polypeptides vaccine. Other MHC multimers as described elsewhere herein may also be useful as cancer vaccines by eliciting a tumor-specific immune response

[0696] In principles any MHC multimer, antigenic peptides and/or antigenic polypeptides or derivatives of MHC multimers, antigenic peptides and/or antigenic polypeptides can be useful as vaccines, as vaccine components or as engineered intelligent adjuvant. The possibility of combining MHC multimers, antigenic peptides and/or antigenic polypeptides that specifically bind certain T cells with molecules that trigger, e.g. the humoral response or the innate immune response, can accelerate vaccine development and improve the efficiency of vaccines.

[0697] The number of antigen-specific cytotoxic T cells can be used as surrogate markers for the overall wellness of the immune system. The immune system can be compromised severely by natural causes such as HIV infections, big traumas or cancers or by immuno suppressive therapy in relation to transplantation or due to chemotherapy. The efficacy of an anti HIV treatment can be evaluated by studying the number of common antigen-specific cytotoxic T cells, specific for e.g. Cytomegalovirus (CMV) and Epstein-Barr virus. In this case the measured T cells can be conceived as surrogate markers. The treatment can then be corrected accordingly and a prognosis can be made.

[0698] A reaction denoted graft versus cancer is sometimes employed in the treatment of malignancies of the lymphoid system. It is evident that such treatment is balancing on the edge of a knife and will benefit of specific measurement of relevant effector T cells in order to determine the wellbeing of the immune system.

[0699] MHC multimers, antigenic peptides and/or antigenic polypeptides can be of importance in diagnosis. One preferred embodiment of the present invention is the use of MHC multimers, antigenic peptides and/or antigenic polypeptides in the diagnosis of cancer and/or residual tumor. For example cancers can be diagnosed early in its development if increased numbers of cancer specific T cells can be measured in circulation, even though the tumor is not yet localized.

[0700] Infiltrating lymphocytes can be used to identify tumor lesions and metastases as the antigen specific T cells will migrate/home to the tumor site to exert their help or immuno modulatory action (CD4+ T helper cells) or cytotoxic killing of tumor cells expressing the tumor specific/tumor associated peptide MHC multimer (CD8+T-cells). Likewise identification of sites of infection tumor lesions can be identified as they typically attract antigen specific T-cells.

[0701] Localization of tumors and sites of infection can be carried out using antigen specific T-cells labelled with a paramagnetic isotope in conjunction with magnetic resonance imaging (MRI) or electron spin resonance (ESR). In general, any conventional method for diagnostic imaging visualization can be utilized. Usually gamma and positron emitting radioisotopes are used for camera and paramagnetic isotopes for MRI. For peripheral cancer lesion in skin (e.g. melanoma) fluorescently labeled antigen specific T-cells can be used likewise.

[0702] MHC multimers may be used to label the tumor infiltration lymphocytes, e.g. MHC multimers may be labeled with a paramagnetic isotope are injected into the patient, the labeled MHC multimer binds specific T cells and are then internalized thereby introducing the paragmagnetic isotope to the T cell in this way labeling the T cell.

[0703] Therapeutic use of MHC multimers, antigenic peptides and/or antigenic polypeptides is possible, either directly or as part of therapeutic vaccines. In therapies involving T cells, e.g. treatment with in vitro amplified antigen-specific effector T cells, the T cells often do not home effectively to the correct target sites but ends up in undesired parts of the body. If the molecules responsible for interaction with the correct homing receptor can be identified these can be added to a MHC multimer making a dual, triple or multiple molecular structure that are able to aid the antigen-specific T cells home to the correct target, as the MHC multimer will bind to the specific T cell and the additional molecules will mediate binding to the target cells.

[0704] In a preferable embodiment, MHC multimers bound to other functional molecules are employed to directly block, regulate or kill the targeted cells.

[0705] In another aspect of the present invention modulation of regulatory T cells could be part of a treatment. In diseases where the function of regulatory T cells is understood it may be possible to directly block, regulate or kill these regulatory cells by means of MHC multimers that besides MHC-peptide complexes also features other functional molecules. The MHC multimers specifically recognize the target regulatory T cells and direct the action of the other functional molecules to this target T cell.

### Diseases

[0706] MHC multimers, antigenic peptides and/or antigenic polypeptides of the present invention can be used in immune monitoring, diagnostics, prognostics, therapy and vaccines for many different cancer diseases, including but not limited to the diseases listed in the following.

[0707] Cancerous diseases associated with antigens such as:

Survivin, Survivin-2B, Livin/ML-IAP, Bcl-2, Mcl-1, Bcl-X(L), Mucin-1, NY-ESO-1, Telomerase, CEA, MART-1, HER-2/neu, bcr-abl, PSA, PSCA, Tyrosinase, p53, hTRT, Leukocyte Proteinase-3, hTRT, gp100, MAGE antigens, GASC, JMJD2C, JARD2 (JMJ), JHDM3a, WT-1,CA 9, Protein kinases, where the cancerous diseases include malignant melanoma, renal carcinoma, breast cancer, lung cancer, cancer of the uterus, cervical cancer, prostatic cancer, pancreatic cancer, brain cancer, head and neck cancer, leukemia, cutaneous lymphoma, hepatic carcinoma, colorectal cancer, bladder cancer.

[0708] In one embodiment, the present invention relates to diagnosis, monitoring and/or treatment of cancer diseases as listed herein: Acute Lymphoblastic Leukemia, Acute Myeloid Leukemia, Adrenocortical Carcinoma, AIDS-Related Cancers, AIDS-Related Lymphoma, Anal Cancer, Astrocytoma (e.g. Childhood Cerebellar or Childhood Cerebral), Basal Cell Carcinoma, Extrahepatic Bile Duct Cancer, Bladder Cancer, Bone Cancer, Osteosarcoma/Malignant Fibrous Histiocytoma, Brain Stem Glioma, Brain Tumor, Breast Cancer, Male Breast Cancer, Bronchial Adenomas/Carcinoids, Burkitt's Lymphoma, Carcinoid Tumor, Carcinoma of Unknown Primary, Primary Central Nervous System Lymphoma, Cerebral Astrocytoma/Malignant Glioma, Cervical Cancer, Childhood Cancers, Chronic Lymphocytic Leukemia, Chronic Myelogenous Leukemia, Chronic Myeloproliferative Disorders, Colon Cancer, Cutaneous T-Cell Lymphoma, Endometrial Cancer, Ependymoma (such as Childhood Epdndymoma), Esophageal Cancer, Ewing's Family of Tumors, Extracranial Germ Cell Tumor (such as Childhood Extracranial Germ Cell Tumor), Extragonadal Germ Cell Tumor, Eye Cancer (Intraocular Melanoma or Retinoblastoma), Gallbladder Cancer, Gastric (Stomach) Cancer, Gastrointestinal Carcinoid Tumor, Gestational Trophoblastic Tumor, Glioma, Hairy Cell Leukemia, Head and Neck Cancer, Hepatocellular (Liver) Cancer, Hodgkin's Lymphoma, Hypopharyngeal Cancer, Hypothalamic and Visual Pathway Glioma (such as Childhood Hypothalamic and Visual Pathway Glioma), Intraocular Melanoma, Islet Cell Carcinoma (Endocrine Pancreas), Kaposi's Sarcoma, Kidney (Renal Cell) Cancer, Laryngeal Cancer, Lip and Oral Cavity Cancer, Lung Cancer (Non-Small Cell or Small Cell), Lymphoma (such as AIDS-Related Lymphoma, Burkitt's Lymphoma, Cutaneous T-Cell Lymphoma, Non-Hodgkin's Lymphoma), Macroglobulinemia (such as Waldenström's Macroglobulinemia), Malignant Fibrous Histiocytoma of Bone/Osteosarcoma, Medulloblastoma (such as Childhood Medulloblastoma), Melanoma, Merkel Cell Carcinoma, Mesothelioma (such as Adult Malignant Mesothelioma or childhood Mesothelioma), Metastatic Squamous Neck Cancer with Occult Primary, Multiple Endocrine Neoplasia Syndrome (such as occurring in childhood), Multiple Myeloma/Plasma Cell Neoplasm, Mycosis Fungoides, Myelodysplastic Syndromes, Myelodysplastic/Myeloproliferative Diseases, Myeloma (such as Multiple Myeloma), Chronic myeloproliferative disorders, Nasal Cavity and Paranasal Sinus Cancer, Nasopharyngeal Cancer, Nasopharyngeal Cancer (such as Childhood Nasopharyngeal Cancer), Neuroblastoma, Oropharyngeal Cancer, Osteosarcoma/Malignant Fibrous Histiocytoma of Bone, Ovarian Cancer (such as Childhood Ovarian Cancer), Ovarian Epithelial Cancer, Ovarian Germ Cell Tumor, Ovarian Low Malignant Potential Tumor, Pancreatic Cancer, Pancreatic Cancer, Paranasal Sinus and Nasal Cavity Cancer, Parathyroid Cancer, Penile Cancer, Pheochromocytoma, Pineoblastoma and Supratentorial Primitive Neuroectodermal Tumors, Pituitary Tumor, Pleuropulmonary Blastoma, Prostate Cancer, Renal Pelvis and Ureter Transitional Cell Cancer, Retinoblastoma, Rhabdomyosarcoma (such as Childhood Rhabdomyosarcoma), Salivary Gland Cancer, Adult-onset soft tissue Sarcoma, Soft Tissue Sarcoma (such as Childhood Soft Tissue Sarcoma), uterine Sarcoma, Sezary Syndrome, Skin Cancer (such as non-Melanoma skin cancer), Merkel Cell Skin Carcinoma, Small Intestine Cancer, Supratentorial Primitive Neuroectodermal Tumors (such as occurring in Childhood), Cutaneous T-Cell Lymphoma, Testicular Cancer, Thymoma and Thymic Carcinoma, Thyroid Cancer, Transitional Cell Cancer of the Renal Pelvis and Ureter, Trophoblastic Tumor (such as Gestational Trophoblastic Tumor), Urethral Cancer, Endometrial uterine cancer, Uterine Sarcoma, Vaginal Cancer, Visual Pathway and Hypothalamic Glioma (such as Childhood Visual Pathway and Hypothalamic Glioma), Waldenstrom's Macroglobulinemia and Wilms' Tumor.

[0709] The term “cancer” as used herein is meant to emcompass any cancer, neoplastic and preneoplastic disease. Said cancer may for example be selected from the group consisting of colon carcinoma, breast cancer, pancreatic cancer, ovarian cancer, prostate cancer, fibrosarcoma, myxosarcoma, liposarcoma, chondrosarcoma, osteogenic sarcoma, chordoma, angiosarcoma, endotheliosarcoma, lymphangeosarcoma, lymphangeoendothelia sarcoma, synovioma, mesothelioma, Ewing's sarcoma, leiomyosarcoma, rhabdomyosarcoma, squamous cell carcinoma, basal cell carcinoma, adenocarcinoma, sweat gland carcinoma, sebaceous gland carcinoma, papillary carcinoma, papillary adenocarcinomas, cystandeocarcinoma, medullary carcinoma, bronchogenic carcinoma, renal cell carcinoma, hepatoma, bile duct carcinoma, choriocarcinoma, seminoma, embryonal carcinoma, Wilms' tumor, cervical cancer, testicular tumor, lung carcinoma, small cell lung carcinoma, bladder carcinoma, epithelial carcinoma, glioblastomas, neuronomas, craniopharingiomas, schwannomas, glioma, astrocytoma, medulloblastoma, craniopharyngioma, ependymoma, pinealoma, hemangioblastoma, acoustic neuroama, oligodendroglioma, meningioma, melanoma, neuroblastoma, retinoblastoma, leukemias and lymphomas, acute lymphocytic leukemia and acute myelocytic polycythemia vera, multiple myeloma, Waldenstrom's macroglobulinemia, and heavy chain disease, acute nonlymphocytic leukemias, chronic lymphocytic leukemia, chronic myelogenous leukemia, Hodgkin's Disease, non-Hodgkin's lymphomas, rectum cancer, urinary cancers, uterine cancers, oral cancers, skin cancers, stomach cancer, brain tumors, liver cancer, laryngeal cancer, esophageal cancer, mammary tumors, childhood-null acute lymphoid leukemia (ALL), thymic ALL, B-cell ALL, acute myeloid leukemia, myelomonocytoid leukemia, acute megakaryocytoid leukemia, Burkitt's lymphoma, acute myeloid leukemia, chronic myeloid leukemia, and T cell leukemia, small and large non-small cell lung carcinoma, acute granulocytic leukemia, germ cell tumors, endometrial cancer, gastric cancer, cancer of the head and neck, chronic lymphoid leukemia, hairy cell leukemia and thyroid cancer.

### Approaches to the Analysis or Treatment of Diseases.

[0710] For each application of a MHC multimer, antigenic peptides and/or antigenic polypeptides, a number of choices must be made. These include:
[0711] A. Disease (to be e.g. treated, prevented, diagnosed, monitored).
[0712] B. Application (e.g. analyze by flow cytometry, isolate specific cells, induce an immune response)
[0713] C. Label (e.g. should the MHC multimer be labelled with a fluorophore or a chromophore)
[0714] D. Biologically active molecule (e.g. should a biologically active molecule such as an interleukin be added or chemically linked to the MHC multimer, antigenic peptides and/or antigenic polypeptides)
[0715] E. Antigenic peptide (e.g. decide on an antigenic peptide to be complexed with MHC)
[0716] F. MHC (e.g. use a MHC allele that does not interfere with the patient's immune system in an undesired way).

[0717] A number of diseases A₁-Aₙ, relevant in connection with MHC multimers, have been described herein; a number of applications B₁-Bₙ, relevant in connection with MHC multimers, have been described herein; a number of Labels C₁-Cₙ, relevant in connection with MHC multimers, have been described herein; a number of biologically active molecules D₁-Dₙ, relevant in connection with MHC multimers, have been described herein; a number of peptides E₁-Eₙ, relevant in connection with MHC multimers, have been described herein; and a number of MHC molecules F₁-Fₙ, relevant in connection with MHC multimers, have been described herein.

[0718] Thus, each approach involves a choice to be made regarding all or some of the parameters A-F. A given application and the choices it involves can thus be described as follows:

Ai×Bi×Ci×Di×Ei×Fi

[0719] Where i specifies a number between 1 and n. n is different for different choices A, B, C, D, E, or F. Consequently, the present invention describes a large number of approaches to the diagnosis, monitoring, prognosis, therapeutic or vaccine treatment of diseases. The total number of approaches, as defined by these parameters, are

n(A)×n(B)×n(C)×n(D)×n(E)×n(F),

where n(A) describes the number of different diseases A described herein, n(B) describes the number of different applications B described herein, etc.

### Detection

[0720] Diagnostic procedures, immune monitoring and some therapeutic processes of the present invention all involve identification and/or enumeration and/or isolation of antigen-specific T cells. Identification and enumeration of antigen-specific T cells may be done in a number of ways, and several assays are currently employed to provide this information.

[0721] In the following it is described how MHC multimers, antigenic peptides and/or antigenic polypeptides as described in the present invention can be used to detect specific T cell receptors (TCRs) and thereby antigen-specific T cells in a variety of methods and assays. In the present invention detection includes detection of the presence of antigen-specific TCR/T cells in a sample, detection of and isolation of cells or entities with antigen-specific TCR from a sample and detection and enrichment of cells or entities with antigen-specific TCR in a sample.

[0722] The sample may be a biological sample including solid tissue, solid tissue section and fluid samples such as, but not limited to, whole blood, serum, plasma, nasal secretions, sputum, urine, sweat, saliva, transdermal exudates, pharyngeal exudates, bronchoalveolar lavage, tracheal aspirations, cerebrospinal fluid, synovial fluid, fluid from joints, vitreous fluid, vaginal or urethral secretions, seemen, or the like. Herein, disaggregated cellular tissues such as, for example, hair, skin, synovial tissue, tissue biopsies and nail scrapings are also considered as biological samples.

[0723] Many of the assays and methods described in the present invention are particularly useful for assaying T-cells in blood samples. Blood samples includes but is not limited to whole blood samples or blood processed to remove erythrocytes and platelets (e.g., by Ficoll density centrifugation or other such methods known to one of skill in the art) and the remaining PBMC sample, which includes the T-cells of interest, as well as B-cells, macrophages and dendritic cells, is used directly. Also included are blood samples processed in other ways e.g. isolating various subsets of blood cells by selecting or deselecting cells or entities in blood.

[0724] In order to be able to detect specific T cells by MHC multimers, labels and marker molecules can be used.

### Marker Molecules

[0725] Marker molecules are molecules or complexes of molecules that bind to other molecules. Marker molecules thus may bind to molecules on entities, including the desired entities as well as undesired entities. Labeling molecules are molecules that may be detected in a certain analysis, i.e. the labeling molecules provide a signal detectable by the used method. Marker molecules, linked to labeling molecules, constitute detection molecules. Likewise labeling molecules linked to MHC multimers also constitute detection molecules but in contrast to detection molecules made up of marker and labelling molecule labeled MHC multimers are specific for TCR. Sometimes a marker molecule in itself provides a detectable signal, wherefore attachment to a labeling molecule is not necessary.

[0726] Marker molecules are typically antibodies or antibody fragments but can also be aptamers, proteins, peptides, small organic molecules, natural compounds (e.g. steroids), non-peptide polymers, or any other molecules that specifically and efficiently bind to other molecules are also marker molecules.

### Labelling Molecules

[0727] Labelling molecules are molecules that can be detected in a certain analysis, i.e. the labelling molecules provide a signal detectable by the used method. The amount of labelling molecules can be quantified.

[0728] The labelling molecule is preferably such which is directly or indirectly detectable.

[0729] The labelling molecule may be any labelling molecule suitable for direct or indirect detection. By the term “direct” is meant that the labelling molecule can be detected per se without the need for a secondary molecule, i.e. is a “primary” labelling molecule. By the term “indirect” is meant that the labelling molecule can be detected by using one or more “secondary” molecules, i.e. the detection is performed by the detection of the binding of the secondary molecule(s) to the primary molecule.

[0730] The labelling molecule may further be attached via a suitable linker. Linkers suitable for attachment to labelling molecules would be readily known by the person skilled in the art and as described elsewhere herein for attachment of MHC molecules to multimerisation domains.

[0731] Examples of such suitable labelling compounds are fluorescent labels, enzyme labels, radioisotopes, chemiluminescent labels, bioluminescent labels, polymers, metal particles, haptens, antibodies, and dyes.

[0732] The labelling compound may suitably be selected:

from fluorescent labels such as 5-(and 6)-carboxyfluorescein, 5- or 6-carboxy-fluorescein, 6-(fluorescein)-5-(and 6)-carboxamido hexanoic acid, fluorescein isothio-cyanate (FITC), rhodamine, tetramethylrhodamine, and dyes such as Cy2, Cy3, and Cy₅, optionally substituted coumarin including AMCA, PerCP, phycobiliproteins including R-phycoerythrin (RPE) and allophycoerythrin (APC), Texas Red, Princeston Red, Green fluorescent protein (GFP) and analogues thereof, and conjugates of R-phycoerythrin or allophycoerythrin and e.g. Cy5 or Texas Red, and inorganic fluorescent labels based on semiconductor nanocrystals (like quantum dot and Qdot™ nanocrystals), and time-resolved fluorescent labels based on lanthanides like Eu3+ and Sm3+,
from haptens such as DNP, biotin, and digoxiginin,
from enzymic labels such as horse radish peroxidase (HRP), alkaline phosphatase (AP), beta-galactosidase (GAL), glucose-6-phosphate dehydrogenase, beta-N-acetyl-glucosaminidase, β-glucuronidase, invertase, Xanthine Oxidase, firefly luciferase and glucose oxidase (GO),
from luminiscence labels such as luminol, isoluminol, acridinium esters, 1,2-dioxetanes and pyridopyridazines, and
from radioactivity labels such as incorporated isotopes of iodide, cobalt, selenium, tritium, and phosphor.

[0733] Radioactive labels may in particular be interesting in connection with labelling of the peptides harboured by the MHC multimers.

[0734] Different principles of labelling and detection exist, based on the specific property of the labelling molecule. Examples of different types of labelling are emission of radioactive radiation (radionuclide, isotopes), absorption of light (e.g. dyes, chromophores), emission of light after excitation (fluorescence from fluorochromes), NMR (nuclear magnetic resonance form paramagnetic molecules) and reflection of light (scatter from e.g. such as gold-, plastic- or glass-beads/particles of various sizes and shapes). Alternatively, the labelling molecules can have an enzymatic activity, by which they catalyze a reaction between chemicals in the near environment of the labelling molecules, producing a signal, which include production of light (chemi-luminescence), precipitation of chromophor dyes, or precipitates that can be detected by an additional layer of detection molecules. The enzymatic product can deposit at the location of the enzyme or, in a cell based analysis system, react with the membrane of the cell or diffuse into the cell to which it is attached. Examples of labelling molecules and associated detection principles are shown in table 2 below.

TABLE 2
Examples of labelling molecules and associated detection principles.

| Labelling substance | Effect | Assay-principle |
|---|---|---|
| Fluorochromes | emission of light having a | ^{¤}Photometry, Microscopy, |
| | specific spectra | spectroscopy |
| | | PMT, photographic film, |
| | | CCD's (Color-Capture |
| | | Device or Charge-coupled |
| | | device). |
| Radionuclide | irradiation, α, β or gamma | Scintillation counting, GM- |
| | rays | tube, photographic film, |
| | | excitation of phosphor- |
| | | imager screen |
| Enzyme; | catalysis of H₂O₂ reduction | ^{¤}Photometry, Microscopy, |
| HRP, (horse reddish | using luminol as Oxygen | spectroscopy |
| peroxidase), | acceptor, resulting in | PMT, photographic film, |
| peroxidases in general | oxidized luminal + light | CCD's (Colour-Capture |
| | catalysis of H₂O₂ reduction | Device or Charge-coupled |
| | using a soluble dye, or | device), |
| | molecule containing a | Secondary label linked |
| | hapten, such as a biotin | antibody |
| | residue as Oxygen | |
| | acceptor, resulting in | |
| | precipitation. The habten | |
| | can be recognized by a | |
| | detection molecule. | |
| Particles; gold, polystyrene | Change of scatter, | Microscopy, cytometry, |
| beads, pollen and other | reflection and transparency | electron microscopy |
| particles | of the associated entity | PMT's, light detecting |
| | | devices, flowcytometry |
| | | scatter |
| AP (Alkaline Phosphatase) | Catalyze a chemical | ^{¤}Photometry, Microscopy, |
| | conversion of a non- | spectroscopy |
| | detectable to a precipitated | Secondary label linked |
| | detectable molecule, such | antibody |
| | as a dye or a hapten | |
| Ionophores or chelating | Change in absorption and | ^{¤}Photometry, Cytometry, |
| chemical compounds | emission spectrums when | spectroscopy |
| binding to specific ions, | binding. | |
| e.g. Ca²⁺ | Change in intensity | |
| Lanthanides | Fluorescence | ^{¤}photometry, cytometry, |
| | Phosphorescence | spectroscopy |
| | Paramagnetic | NMR (Nuclear magnetic |
| | | resonance) |
| DNA fluorescing stains | Propidium iodide | ^{¤}Photometry, cytometry, |
| | Hoechst stain | spectroscopy |
| | DAPI | |
| | AMC | |
| | DraQ5 ™ | |
| | Acridine orange | |
| | 7-AAD | |

^{¤}Photometry; is to be understood as any method that can be applied to detect the intensity, analyze the wavelength spectra, and or measure the accumulation of light derived form a source emitting light of one or multiple wavelength or spectra.

[0735] Labelling molecules can be used to label MHC multimers as well as other reagents used together with MHC multimers, e.g. antibodies, aptamers or other proteins or molecules able to bind specific structures in another protein, in sugars, in DNA or in other molecules. In the following molecules able to bind a specific structure in another molecule are named a marker.

[0736] Labelling molecules can be attached to a given MHC multimer or any other protein marker by covalent linkage as described for attachment of MHC multimers to multimerization domains elsewhere herein. The attachment can be directly between reactive groups in the labelling molecule and reactive groups in the marker molecule or the attachment can be through a linker covalently attached to labelling molecule and marker, both as described elsewhere herein. When labelling MHC multimers the label can be attached either to the MHC complex (heavy chain, β2m or peptide) or to the multimerization domain.

[0737] In particular,

one or more labelling molecules may be attached to the carrier molecule, or
one or more labelling molecules may be attached to one or more of the scaffolds, or
one or more labelling compounds may be attached to one or more of the MHC complexes, or one or more labelling compounds may be attached to the carrier molecule and/or one or more of the scaffolds and/or one or more of the MHC complexes, or
one or more labelling compounds may be attached to the peptide harboured by the MHC molecule.

[0738] A single labelling molecule on a marker does not always generate sufficient signal intensity. The signal intensity can be improved by assembling single label molecules into large multi-labelling compounds, containing two or more label molecule residues. Generation of multi-label compounds can be achived by covalent or non-covalent, association of labelling molecules with a major structural molecule. Examples of such structures are synthetic or natural polymers (e.g. dextramers), proteins (e.g. streptavidin), or polymers. The labelling molecules in a multi-labelling compound can all be of the same type or can be a mixture of different labelling molecules.

[0739] In some applications, it may be advantageous to apply different MHC complexs, either as a combination or in individual steps. Such different MHC multimers can be differently labelled (i.e. by labelling with different labelling compounds) enabling visualisation of different target MHC recognising cells. Thus, if several different MHC multimers with different labelling compounds are present, it is possible simultaneously to identify more than one specific receptor, if each of the MHC multimers present a different peptide.

[0740] Detection principles, such as listed in Table 2, can be applied to flow cytometry, stationary cytometry, and batch-based analysis. Most batch-based approaches can use any of the labelling substances depending on the purpose of the assay. Flow cytometry primarily employs fluorescence, whereas stationary cytometry primarily employs light absorption, e.g. dyes or chromophore deposit from enzymatic activity. In the following section, principles involving fluorescence detection will be exemplified for flow cytometry, and principles involving chromophore detection will be exemplified in the context of stationary cytometry. However, the labelling molecules can be applied to any of the analyses described in this invention.

### Labelling Molecules of Particular Utility in Flow Cytometry:

[0741] In flowcytometry the typical label is detected by its fluorescence. Most often a positive detection is based on the presents of light from a single fluorochrome, but in other techniques the signal is detected by a shift in wavelength of emitted light; as in FRET based techniques, where the exited fluorochrome transfer its energy to an adjacent bound fluorochrome that emits light, or when using Ca²⁺ chelating fluorescent props, which change the emission (and absorption) spectra upon binding to calcium. Preferably labelling molecules employed in flow cytometry are illustrated in Table 3 and 4 and described in the following.

[0742] Simple fluorescent labels:
[0743] Fluor dyes, Pacific Blue™, Pacific Orange™, Cascade Yellow™
[0744] AlexaFluor® (AF);
   [0745] AF405, AF488,AF500, AF514, AF532, AF546, AF555, AF568, AF594, AF610, AF633, AF635, AF647, AF680, AF700, AF710, AF750, AF800
[0746] Quantum Dot based dyes, QDot® Nanocrystals (Invitrogen, MolecularProbs)
   [0747] Qdot®525, Qdot®565, Qdot®585, Qdot®605, Qdot®655, Qdot®705, Qdot®800
[0748] DyLight™ Dyes (Pierce) (DL);
   [0749] DL549, DL649, DL680, DL800
[0750] Fluorescein (Flu) or any derivate of that, ex. FITC
[0751] Cy-Dyes
   [0752] Cy2, Cy3, Cy3.5, Cy5, Cy5.5, Cy7
[0753] Fluorescent Proteins;
   [0754] RPE, PerCp, APC
   [0755] Green fluorescent proteins;
      [0756] GFP and GFP-derived mutant proteins; BFP, CFP, YFP, DsRed, T1, Dimer2, mRFP1,MBanana, mOrange, dTomato, tdTomato, mTangerine, mStrawberry, mCherry
[0757] Tandem dyes:
   [0758] RPE-Cy5, RPE-Cy5.5, RPE-Cy7, RPE-AlexaFluor® tandem conjugates; RPE-Alexa610, RPE-TxRed
   [0759] APC-Aleca600, APC-Alexa610, APC-Alexa750, APC-Cy5, APC-Cy5.5
[0760] Ionophors; ion chelating fluorescent props
   [0761] Props that change wavelength when binding a specific ion, such as Calcium
   [0762] Props that change intensity when binding to a specific ion, such as Calcium
[0763] Combinations of fluorochromes on the same marker. Thus, the marker is not identified by a single fluorochrome but by a code of identification being a specific combination of fluorochromes, as well as inter related ratio of intensities.
[0764] Example: Antibody Ab1 and Ab2, are conjugated to both. FITC and BP but Ab1 have 1 FITC to 1 BP whereas Ab2 have 2 FITC to 1 BP. Each antibody may then be identified individually by the relative intensity of each fluorochrome. Any such combinations of n fluorochromes with m different ratios can be generated.

TABLE 3
Examples of preferable fluorochromes

| | Excitation | Emission |
|---|---|---|
| Fluorofor/Fluorochrome | nm | nm |
| 2-(4′-maleimidylanilino)naphthalene-6- | 322 | 417 |
| sulfonic acid, sodium salt | | |
| 5-((((2-iodoacetyl)amino)ethyl)amino) | 336 | 490 |
| naphthalene-1-sulfonic acid | | |
| Pyrene-1-butanoic acid | 340 | 376 |
| AlexaFluor 350 (7-amino-6-sulfonic acid-4- | 346 | 442 |
| methyl coumarin-3-acetic acid) | | |
| AMCA (7-amino-4-methyl coumarin-3- | 353 | 442 |
| acetic acid) | | |
| 7-hydroxy-4-methyl coumarin-3-acetic acid | 360 | 455 |
| Marina Blue (6,8-difluoro-7-hydroxy-4- | 362 | 459 |
| methyl coumarin-3-acetic acid) | | |
| 7-dimethylamino-coumarin-4-acetic acid | 370 | 459 |
| Fluorescamin-N-butyl amine adduct | 380 | 464 |
| 7-hydroxy-coumarine-3-carboxylic acid | 386 | 448 |
| CascadeBlue (pyrene-trisulphonic acid | 396 | 410 |
| acetyl azide) | | |
| Cascade Yellow | 409 | 558 |
| Pacific Blue (6,8 difluoro-7-hydroxy | 416 | 451 |
| coumarin-3-carboxylic acid) | | |
| 7-diethylamino-coumarin-3-carboxylic acid | 420 | 468 |
| N-(((4-azidobenzoyl)amino)ethyl)-4- | 426 | 534 |
| amino-3,6-disulfo-1,8-naphthalimide, | | |
| dipotassium salt | | |
| Alexa Fluor 430 | 434 | 539 |
| 3-perylenedodecanoic acid | 440 | 448 |
| 8-hydroxypyrene-1,3,6-trisulfonic acid, | 454 | 511 |
| trisodium salt | | |
| 12-(N-(7-nitrobenz-2-oxa-1,3-diazol-4- | 467 | 536 |
| yl)amino)dodecanoic acid | | |
| N,N′-dimethyl-N-(iodoacetyl)-N′-(7- | 478 | 541 |
| nitrobenz-2-oxa-1,3-diazol-4- | | |
| yl)ethylenediamine | | |
| Oregon Green 488 (difluoro carboxy | 488 | 518 |
| fluorescein) | | |
| 5-iodoacetamidofluorescein | 492 | 515 |
| propidium iodide-DNA adduct | 493 | 636 |
| Carboxy fluorescein | 495 | 519 |

TABLE 4
Examples of preferable fluorochrome families

| Fluorochrome family | Example fluorochrome |
|---|---|
| AlexaFluor ®(AF) | AF ®350, AF405, AF430, AF488, AF500, |
| | AF514, AF532, AF546, AF555, AF568, |
| | AF594, AF610, AF633, AF635, AF647, |
| | AF680, AF700, AF710, AF750, AF800 |
| Quantum Dot (Qdot ®) | Qdot ®525, Qdot ®565, Qdot ®585, |
| based dyes | Qdot ®605, Qdot ®655, Qdot ®705, |
| | Qdot ®800 |
| DyLight ™ Dyes (DL) | DL549, DL649, DL680, DL800 |
| Small fluorescing dyes | FITC, Pacific Blue ™, Pacific Orange ™, |
| | Cascade Yellow ™, Marina blue ™, DSred, |
| | DSred-2, 7-AAD, TO-Pro-3, |
| Cy-Dyes | Cy2, Cy3, Cy3.5, Cy5, Cy5.5, Cy7 |
| Phycobili Proteins: | R-Phycoerythrin (RPE), PerCP, |
| | Allophycocyanin (APC), B-Phycoerythrin, |
| | C-Phycocyanin |
| Fluorescent Proteins | (E)GFP and GFP ((enhanced) green fluorescent |
| | protein) derived mutant proteins; BFP, |
| | CFP, YFP, DsRed, T1, Dimer2, mRFP1, |
| | MBanana, mOrange, dTomato, tdTomato, |
| | mTangerine, mStrawberry, mCherry |
| Tandem dyes with RPE | RPE-Cy5, RPE-Cy5.5, RPE-Cy7, |
| | RPE-AlexaFluor ® tandem |
| | conjugates; RPE-Alexa610, |
| | RPE-TxRed |
| Tandem dyes with APC | APC-Aleca600, APC-Alexa610, |
| | APC-Alexa750, APC-Cy5, APC-Cy5.5 |
| Calcium dyes | Indo-1-Ca2+ Indo-2-Ca2+ |

### Preferably Labelling Molecules Employed in Stationary Cytometry and IHC

[0765] Enzymatic labelling, as exemplified in Table 5:
   [0766] Horse radish peroxidase; reduces peroxides (H₂O₂), and the signal is generated by the Oxygen acceptor when being oxidized.
      [0767] Precipitating dyes; Dyes that when they arereduced they are soluble, and precipitate when oxidized, generating a coloured deposit at the site of the reaction.
      [0768] Precipitating agent, carrying a chemical residue, a hapten, for second layer binding of marker molecules, for amplification of the primary signal.
      [0769] Luminol reaction, generating a light signal at the site of reaction.
   [0770] Other enzymes, such as Alkaline Phosphatase, capable of converting a chemical compound from a non-detectable molecule to a precipitated detectable molecule, which can be coloured, or carries a hapten as described above.
[0771] Fluorescent labels, as exemplified in Table 3 and 4; as those described for Flow cytometry are likewise important for used in stationary cytometry, such as in fluorescent microscopy.

TABLE 5
Examples of preferable labels for stationary cytometry

| | Enzyme substrate, | Precipitate or | |
|---|---|---|---|
| | Oxygen acceptor | Residue, hapten* | |
| | Chromogen/precip- | for secondary | Binding partner |
| Label | itating agent | detection layer | to hapten |
| HRP | diaminobenzidine | Colored precipitate | — |
| | (DAB) | | |
| HRP | 3-amino-9-ethyl- | Colored precipitate | — |
| | carbazole (AEC+) | | |
| AP | Fast red dye | Red precipitate | — |
| HRP | biotinyl tyramide | Exposed Biotin | Streptavidin, |
| | | residue | avidine |
| HRP | fluorescein tyramide | Exposed Fluorescein | Anti-Fluorecein |
| | | residue | Antibody |
| “Enzyme” | Substrate that when | Primary label; being | Secondary |
| | reacted precipitate | a dye, | label in case |
| | | chemiluminescence's, | the primary |
| | | or exposure of a | label is |
| | | hapten | a hapten |

### Detection Methods and Principles

[0772] Detection of TCRs with multimers may be direct or indirect.

### Direct Detection

[0773] Direct detection of TCRs is detection directly of the binding interaction between the specific T cell receptor and the MHC multimer. Direct detection includes detection of TCR when TCR is attached to lipid bilayer (e.g. T cells), when TCR is attached to or in a solid medium or when TCR is in solution.

### Direct Detection of TCR Attached to Lipid Bilayer

[0774] One type of TCRs to detect and measure are TCRs attached to lipid bilayer including but not limited to naturally occurring T cells (from blood, spleen, lymphnode, brain or any other tissue containing T cells), TCR transfected cells, T cell hybridomas, TCRs embedded in liposomes or any other membrane structure. In the following methods for direct detection of entities of TCRs attached to lipid bilayer will be described and any entity consisting of TCR attached to lipid bilayer will be referred to as T cells.

[0775] T cells can be directly detected either when in a fluid solution or when immobilized to a solid support.

### Direct Detection of T Cells in Fluid Sample.

[0776] T cells can be detected in fluid samples using the methods described below including but not limited to detection of T cells in culture media, in buffers, in water or in other liquids and also suspensions of disrupted tissues e.g. homogenized tissue resuspended in the fluids described above. T cells in fluid samples can be detected individually or detected as populations of T cells. In the following different methods for direct detection of T cells in fluid samples are described.

### Direct Detection of Individual T Cells

[0777] Direct detection of individual T cells using flow cytometry.
[0778] An example of direct detection of individual T cells by flow cytometry is measurement of antigen specific T cells using MHC multimers like Tetramers, Pentamers, Dextramers or similar types of reagents.
[0779] Briefly, a suspension of T cells are added MHC multimers, the sample washed and then the amount of MHC multimer bound to each cell are measured. Bound MHC multimers may be labelled directly or measured through addition and binding of labelled marker molecules. The sample is analyzed using a flow cytometer, able to detect and count individual cells passing in a stream through a laser beam. For identification of specific T cells using MHC multimers, cells are stained with fluorescently labeled MHC multimer by incubating cells with fluorochrome labelled MHC multimer and then forcing the cells with a large volume of liquid through a nozzle creating a stream of spaced cells. Each cell passes through a laser beam and any fluorochrome bound to the cell is excited and thereby fluoresces. Sensitive photomultipliers detect emitted fluorescence, providing information about the amount of MHC multimer bound to the cell. By this method MHC multimers can be used to identify specific T cell populations in liquid samples such as blood, CSF, synovial fluid, cell cultures or any other liquid sample containing T cells.
[0780] When analyzing blood samples whole blood can be used with or without lysis of red blood cells. Alternatively lymphocytes can be purified from blood before flow cytometry analysis e.g. using a standard procedure like a Ficoll-Hypaque gradient. Another possibility is to isolate lymphocytes, subgroups of lymphocytes, T cells or subgroups of T cells from the blood sample for example by affinity purification like binding to antibody coated surfaces, followed by elution of bound cells. This purified lymphocyte or T cell population can then be used for flow cytometry analysis together with MHC multimers.

[0781] Instead of actively isolating T cells or subgroups of lymphocytes unwanted cells like B cells, NK cells or any other unwanted cells or substances can be removed prior to the analysis. One way to do this is by affinity purification e.g. using columns or beads or other surfaces coated with antibodies specific for the unwanted cells. Alternatively, specific antibodies recognizing the unwanted cells can be added to the blood sample together with complement proteins, thereby killing cells recognized by the antibodies.
[0782] Various gating reagents can be included in the analysis. Gating reagents here means labeled antibodies or other labeled marker molecules identifying subsets of cells by binding to unique surface proteins. Preferred gating reagents when using MHC multimers are antibodies or other marker molecules directed against CD3, CD4, and CD8 identifying major subsets of T cells. Other preferred gating reagents are antibodies or marker molecules specifically binding CD14, CD15, CD19, CD25, CD56, CD27, CD28, CD45, CD45RA, CD45RO, CCR7, CCR5, CD62L, Foxp3, CD95, CD127, CD7, CD57, CD154, CD137 or other specific proteins or molecules unique for different lymphocytes of the immune system. Following labelling with MHC multimers and before analysis on a flow cytometer stained cells can be treated with a fixation reagent e.g. formaldehyde to cross-link bound MHC multimer to the cell surface. Stained cells can also be analyzed directly without fixation.
[0783] The number of cells in a sample can vary. When the target cells are rare, it is preferable to analyze large amounts of cells. In contrast, fewer cells are required when looking at T cell lines or samples containing many cells of the target cell type.
[0784] The flow cytometer can be equipped to separate and collect particular types of cells. This is called cell sorting. MHC multimers in combination with sorting on a flowcytometer can be used to isolate specific T cell populations. Isolated specific T cell populations can then be further manipulated as described elsewhere herein, e.g. expanded in vitro. This can be useful in autologous cancer therapy.
[0785] Amounts of MHC-peptide specific T cells in a blood sample can be determined by flow cytometry by calculating the amount of MHC multimer labeled cells in a given volumen of sample with a given cell density and then back calculate. Exact enumeration of specific T cells is better achieved by incubating sample with MHC multimers (and optionally gating reagents) together with an exact amount of counting beads followed by flow cytometry analysis. Counting beads is here to be understood as any fluorescent bead with a size that can be visualized in a sample containing T cells by flow cytometry. The beads could e.g. be made of polystyrene with a size of about 1-10 μm. They could also be made of agarose, polyacrylamide, silica, or any other material, and have any size between 0.1 μm and 100 μm. The counting beads are used as reference population to measure the exact volume of analyzed sample. The sample are analyzed on a flow cytometer and the amount of MHC-specific T cell detected can then be correlated with the amount of counting beads in the same volume of the sample and an exact number of MHC-peptide specific T cells determined using the following equation:

Concentration of MHC-specific T-cell in sample=(number of MHC-peptide specific T cells counted/number of counting beads counted)×concentration of counting beads in sample
[0786] Alternatively MHC multimers are added to one tube (below denoted tube 1) together with sample and counting beads are added to a separate tube (below denoted tube 2) containing the same sample but no MHC multimers. To both tubes one or more gating reagents are added able to identify other cell subsets in sample e.g. CD3+, CD4+, CD8+, CD19+, CD56+ cells. The exact amount of one of the cell subsets for which gating reagents are included are then calculated from the tube containing counting beads. For example if CD8+ cells are measured in both tubes the following equation can be used to determine the exact concentration of CD8+ cells in the sample:

(((number of CD8+ cells counted (tube 2))/(number of counting beads counted (tube 2)))×(concentration of counting beads in sample)=exact concentration of CD8+ cells in sample
[0787] The exact concentration of CD8+cells in sample are then used to determine the exact concentration of MHC-specific T cells in sample using the equation:

(Calculated exact concentration of CD8+ cells in sample (calculated from tube 2))×(MHC-specific T cells counted as percentage of CD8+ events counted in sample (tube 1))=concentration of MHC-specific T-cell in sample

[0788] Direct Detection of Individual T Cells in Fluid Sample by Microscopy
[0789] A suspension of T cells are added MHC multimers, the sample washed and then the amount of MHC multimer bound to each cell are measured. Bound MHC multimers may be labelled directly or labelled through addition of labelled marker molecules. The sample is then spread out on a slide or similar in a thin layer able to distinguish individual cells and labelled cells identified using a microscope. Depending on the type of label different types of microscopes may be used, e.g. if fluorescent labels are used a fluorescent microscope is used for the analysis. For example MHC multimers can be labeled with a fluorochrome or bound MHC multimer detected with a fluorescent antibody. Cells with bound fluorescent MHC multimers can then be visualized using an immunofluorescence microscope or a confocal fluorescence microscope.

### Direct Detection of Populations of T Cells

[0790] Cell suspensions are added labeled MHC multimer, samples are washed and then total signal from label are measured. The MHC multimers may be labeled themselves or detected through a labeled marker molecule.
[0791] Cell suspensions are added labeled MHC multimer, samples are washed and then signal from label are amplified and then total signal from label and/or amplifier are measured.

### Direct Detection of Immobilized T Cells.

[0792] T cells may be immobilized and then detected directly. Immobilization can be on solid support, in solid tissue or in fixator (e.g. paraffin, a sugar matrix or another medium fixing the T cells).

### Direct Detection of T Cells Immobilized on Solid Support.

[0793] In a number of applications, it may be advantageous to immobilize the T cell onto a solid or semi-solid support. Such support may be any which is suited for immobilisation, separation etc. Non-limiting examples include particles, beads, biodegradable particles, sheets, gels, filters, membranes (e.g. nylon membranes), fibres, capillaries, needles, microtitre strips, tubes, plates or wells, combs, pipette tips, micro arrays, chips, slides, or indeed any solid surface material. The solid or semi-solid support may be labelled, if this is desired. The support may also have scattering properties or sizes, which enable discrimination among supports of the same nature, e.g. particles of different sizes or scattering properties, colour or intensities.

[0794] Conveniently the support may be made of glass, silica, latex, plastic or any polymeric material. The support may also be made from a biodegradable material.

[0795] Generally speaking, the nature of the support is not critical and a variety of materials may be used. The surface of support may be hydrophobic or hydrophilic.

[0796] Preferred are materials presenting a high surface area for binding of the T cells. Such supports may for example be porous or particulate e.g. particles, beads, fibres, webs, sinters or sieves. Particulate materials like particles and beads are generally preferred due to their greater binding capacity. Particularly polymeric beads and particles may be of interest.

[0797] Conveniently, a particulate support (e.g. beads or particles) may be substantially spherical. The size of the particulate support is not critical, but it may for example have a diameter of at least 1 μm and preferably at least 2 μm, and have a maximum diameter of preferably not more than 10 μm and more preferably not more than 6 μm. For example, particulate supports having diameters of 2.8 μm and 4.5 μm will work well.

[0798] An example of a particulate support is monodisperse particles, i.e. such which are substantially uniform in size (e.g. size having a diameter standard deviation of less than 5%). Such have the advantage that they provide very uniform reproducibility of reaction. Monodisperse particles, e.g. made of a polymeric material, produced by the technique described in U.S. Pat. No. 4,336,173 (ref. 25) are especially suitable.

[0799] Non-magnetic polymer beads may also be applicable. Such are available from a wide range of manufactures, e.g. Dynal Particles AS, Qiagen, Amersham Biosciences, Serotec, Seradyne, Merck, Nippon Paint, Chemagen, Promega, Prolabo, Polysciences, Agowa, and Bangs Laboratories.

[0800] Another example of a suitable support is magnetic beads or particles. The term “magnetic” as used everywhere herein is intended to mean that the support is capable of having a magnetic moment imparted to it when placed in a magnetic field, and thus is displaceable under the action of that magnetic field. In other words, a support comprising magnetic beads or particles may readily be removed by magnetic aggregation, which provides a quick, simple and efficient way of separating out the beads or particles from a solution. Magnetic beads and particles may suitably be paramagnetic or superparamagnetic. Superparamagnetic beads and particles are e.g. described in EP 0 106 873 (Sintef, ref. 26). Magnetic beads and particles are available from several manufacturers, e.g. Dynal Biotech ASA (Oslo, Norway, previously Dynal AS, e.g. Dynabeads®).

[0801] The support may suitably have a functionalised surface. Different types of functionalisation include making the surface of the support positively or negatively charged, or hydrophilic or hydrophobic. This applies in particular to beads and particles. Various methods therefore are e.g. described in U.S. Pat. No. 4,336,173 (ref. 25), U.S. Pat. No. 4,459,378 (ref. 27) and U.S. Pat. No. 4,654,267 (ref. 28).

[0802] Immobilized T cells may be detected in several ways including:

[0803] Direct Detection of T Cells Directly Immobilized on Solid Support.
[0804] T cells may be directly immobilized on solid support e.g. by non-specific adhesion. Then MHC multimers are added to the immobilized T cells thereby allowing specific T cells to bind the MHC multimers. Bound MHC multimer may be measured through label directly attached to the multimer or through labeled marker molecules. Individual T cells may be detected if the method for analysis is able to distinguish individual labelled cells, e.g. cells are immobilized in a monolayer on a cell culture well or a glass slide. Following staining with labelled multimer a digital picture is taken and labelled cells identified and counted. Alternatively a population of T cells is detected by measurement of total signal from all labelled T cells, e.g. cells are plated to wells of a microtiter plate, stained with labelled MHC multimer and total signal from each well are measured.

[0805] Direct Detection of T Cells Immobilized on Solid Support Through Linker Molecule
[0806] T cells can also be immobilized to solid support through a linker molecule. The linker molecule can be an antibody specific for the T cell, a MHC multimer, or any molecule capable of binding T cells. In any case the linker may be attached directly to the solid support, to the solid support through another linker, or the linker molecule may be embedded in a matrix, e.g. a sugar matrix.
[0807] Then MHC multimers are added to the immobilized T cells thereby allowing specific T cells to bind the MHC multimers. Bound MHC multimer may be measured through label directly attached to the multimer or through labeled marker molecules. Individual T cells may be detected if the method for analysis is able to distinguish individual labelled cells, e.g. a digital picture is taken and labelled cells identified and counted.
[0808] By using a specific MHC multimer both for the immobilization of the T-cells and for the labelling of immobilized cells (e.g. by labelling immobilized cells with chromophore- or fluorophore-labelled MHC multimer), a very high analytical specificity may be achieved because of the low background noise that results.
[0809] Alternatively a population of T cells is detected by measurement of total signal from all labeled T cells.

[0810] Immuno Profiling: Phenotyping T Cell Sample Using MHC Multimer Beads or Arrays.
[0811] Different MHC multimers are immobilized to different beads with different characteristics (e.g. different size, different fluorophores or different fluorescence intensities) where each kind of bead has a specific type of MHC multimer molecule immobilized. The immobilization may be direct or through a linker molecule as described above. The amount of bound T cells to a specific population of beads can be analyzed, thereby phenotyping the sample. The TCR on the T cell is defined by the MHC multimer and hence the bead to which it binds.
[0812] Likewise, MHC multimers can be immobilized in an array, e.g. on a glass plate or pin array so that the position in the array specifies the identity of the MHC multimer. Again, the immobilization may be direct or through a linker molecule as described above. After addition of T cells, the amount of bound T cells at a specified position in the array can be determined by addition of a label or labelled marker that binds to cells in general, or that binds specifically to the cells of interest. For example, the cells may be generally labelled by the addition of a labelled molecule that binds to all kinds of cells, or specific cell types, e.g. CD4+ T-cells, may be labelled with anti-CD4 antibodies that are labelled with e.g. a chromophore or fluorophore. Either of these approaches allow a phenotyping of the sample. An example for the use of immuno profiling is given below.
   [0813] Profiling of an individual's disease-specific T-cell repertoire.
      [0814] Mass profiling of the T-cells of an individual may be done by first immobilizing specific MHC multimers (e.g. 10⁻¹⁰⁶ different MHC multimers, each comprising a specific MHC-peptide combination) in an array (e.g. a glass plate), adding e.g. a blood sample from the individual, and then after washing the unbound cells off, label the immobilized cells. Positions in the array of particularly high staining indicate MHC-peptide combinations that recognize specific T-cells of particularly high abundance or affinity. Thus, an immuno profiling of the individual with regard to the tested MHC-peptide combinations is achieved. A similar profiling of an individuals disease may be made using MHC multimers immobilized to different beads as described above.
[0815] Whether the profiling is performed using beads or arrays, the profiling may entail a number of diseases, a specific disease, a set of specific antigens implicated in one or more diseases, or a specific antigen (e.g. implicated in a specific disease or set of diseases).
[0816] In a preferred embodiment, an individual's immuno profile for a particular antigen is obtained. Thus, peptides corresponding to all possible 8′-, 9′-10′- and 11′-mer peptide sequences derived from the peptide antigen sequence are generated, for example by standard organic synthesis or combinatorial chemistry, and the corresponding MHC multimers are produced, using one or more of the class I MHC-alleles of the individual in question. Further, peptides of e.g. 13, 14, 15, 16 and up to 25 amino acids length may be generated, for example by organic synthesis or combinatorial chemistry, corresponding to all 13′, 14′, 15′, 16′ and up to 25′-mers of the antigen, and the corresponding class II MHC multimers are produced, using one or more of the class II MHC-alleles of the individual in question. For a complete profiling for this particular antigen, all of the HLA-alleles of the individual in question should be used for the generation of the array; i.e., if the HLA class I haplotype of the individual is HLA-A*02, HLA-A*03, HLA-B*08 and HLA-B*07, all these HLA class I alleles should be combined with every tested peptide and similarly for all HLA class II alleles of the given individual.
[0817] Based on the profile, a personalized drug, -vaccine or -diagnostic test may be produced.
[0818] The principle described above may also be employed to distinguish between the immune response raised against a disease (e.g. an infection with a bacterium or the formation of a tumour), and the immune response raised against a vaccine for the same disease (in the example, a vaccine against the bacterium or the tumour). Most vaccines consists of subcomponents of the pathogen/tumour they are directed against and/or are designed to elicit an immune response different from the natural occurring immune response i.e. the T cell epitopes of the two immune responses differs. Thus, by establishing the immuno profile, using a comprehensive array (i.e. an array that comprises all possible epitopes from one or more antigen(s)) or a subset of these epitopes, it is possible to deduce whether the immune response has been generated against the disease or the vaccine, or against both the disease and the vaccine. If the vaccine raises a response against a particular epitope or a particular set of epitopes, the corresponding positions in the array will give rise to high signals (compared to the remaining positions). Similarly a natural generated immune response will be directed against other and/or more particular epitopes and therefore give rise to high signals in other positions and/or more positions in the array. When an individual is vaccinated the immuno profile will reflect the effect of the vaccination on the immune response, and even if the individual has encountered the disease before and has generated a general immune response towards this disease, it will still be possible to deduce from the profiling whether this individual also has generated a specific response against the vaccine.
[0819] In another preferred embodiment, an individual's immuno profile for a set of antigens implicated in a specific disease is obtained. A subset of epitopes from a number of antigens is used. Thus, this is not a comprehensive profiling of this individual with regard to these antigens, but careful selection of the epitopes used may ensure that the profiling data can be used afterwards to choose between e.g. a limited set of vaccines available, or the data can be used to evaluate the immune response of the individual following an infection, where the epitopes used have been selected in order to avoid interference from related infectious diseases.
[0820] As above, a personalized drug, -vaccine or -diagnostic test may be produced. based on the information obtained from the immuno profiling.
[0821] In yet another preferred embodiment, the array comprising all possible 8′-, 9′-10′- and 11′-mer peptide sequences derived from a given peptide antigen, and all 13, 14, 15 and 16′-mers of the same antigen, are synthesized and assembled in MHC multimers, and immobilized in an array. Then, the ability of the individual peptide to form a complex with MHC is tested. As an example, one may add labelled W6/32 antibody, an antibody that binds correctly folded MHC I heavy chain, when this heavy chain is assembled together with antigenic peptide and beta2microglobulin, and which therefore can be used to detect formation of MHC-peptide complex, as binding of W6/32 antibody is usually considered a strong indication that the MHC-peptide complex has been formed. The ability of different peptides to enter into a MHC-peptide complex may also be promoted by the addition to the array of T-cells. Specific T-cells will drive the formation of the corresponding specific MHC-peptide complexes. Thus, after addition of T-cells to the array, the MHC-peptide complex integrity can be examined by addition of the labelled W6/32 antibody or other antibodies specific for correct conformation. Positions on the array that have strong signals indicate that the peptide that was added to MHC and immobilized at this position, was capable of forming the MHC-peptide complex in the presence of specific T-cells. Alternatively, the binding of the specific T-cells to the corresponding MHC-peptide complexes may be detected directly through a labelled antibody specific for the T cell.

### Direct Detection of Immobilized T Cells Followed by Sorting

[0822] Specific T cells or specific T cell subsets can be isolated from a sample containing other T cells, T cell subsets and/or other cells by immobilization of the wanted specific

[0823] T cells in sample to solid support as described above followed by washing and elution. For example, MHC multimers are immobilized to a support e.g. beads, immunotubes, wells of a microtiterplate, CD, mircrochip or similar as described elsewhere herein, then a suspension of T cells (the sample) are added allowing specific T cells to bind MHC multimer molecules. Following washing bound T cells are recovered/eluted (e.g. using acid or competition with one or more competitor molecules) and counted.

[0824] Specific T-cells can e.g. be isolated through the use of bead-based MHC multimers. Bead-based MHC multimers are beads whereto monomer MHC-peptide complexes or MHC multimers are immobilized.

[0825] The isolated T cells can following elution optionally be manipulated further before final use. For example the isolated cells can be activated (to differentiate or proliferate), they can undergo induced apoptosis, or undesired cells of the isolated cell population can be removed. Then, the manipulated cell population can be re-introduced into the patient from which the sample originate, or can be introduced into another patient. A typical cell sorting experiment, based on bead-based MHC multimers, would follow some of the steps of the general procedure outlined in general terms in the following: Acquire the sample, e.g. a cell sample from the blood or bone marrow of a cancer patient.

[0826] Block the sample with a protein solution, e.g. BSA or skim milk.

[0827] Block the beads coated with MHC complexes or MHC multimers, with BSA or skim milk.

[0828] Mix MHC-coated beads and the cell sample, and incubate.

[0829] Wash the beads with washing buffer, to remove unbound cells and non-specifically bound cells.

[0830] Isolate the immobilized cells, by either cleavage of the linker that connects MHC complex/MHC multimer and bead; or alternatively, release the cells by a change in pH, salt-concentration addition of competitive binding molecule or the like. Preferably, the cells are released under conditions that do not disrupt the integrity of the cells. Manipulate the isolated cells (e.g. induce apoptosis, proliferation or differentiation)

### Direct Detection of T Cells in Solid Tissue.

[0831] Direct Detection of T Cells in Solid Tissue In Vitro.
[0832] Example direct detection of T cells in solid tissue in vitro include but is not limited til Immunohistochemistry (IHC). IHC is here referred to as the detection of antigens in solid tissue by antibodies or other marker molecules labelled with a labelling molecule as described elsewhere herein.
[0833] For in vitro methods of the present invention solid tissue includes tissue, tissue biopsies, frozen tissue or tissue biopsies, paraffin embedded tissue or tissue biopsies and sections of either of the above mentioned. In a preferred method of this invention sections of fixed or frozen tissues are incubated with MHC multimer, allowing MHC multimer to bind to specific T cells in the tissue section. The MHC multimer may be labeled directly or through a labeled marker molecule. As an example, the MHC multimer can be labeled with a tag that can be recognized by e.g. a secondary antibody, optionally labeled with HRP or another label. The bound MHC multimer is then detected by its fluorescence or absorbance (for fluorophore or chromophore), or by addition of an enzyme-labeled antibody directed against this tag, or another component of the MHC multimer (e.g. one of the protein chains, a label on the multimerization domain). The enzyme can be Horse Raddish Peroxidase (HRP) or Alkaline Phosphatase (AP), both of which convert a colorless substrate into a colored reaction product in situ. This colored deposit identifies the binding site of the MHC multimer, and can be visualized under a light microscope. The MHC multimer can also be directly labeled with e.g. HRP or AP, and used in IHC without an additional antibody.
[0834] The tissue sections may derive from blocks of tissue or tissue biopsies embedded in paraffin, and tissue sections from this paraffin-tissue block fixed in formalin before staining. This procedure may influence the structure of the TCR in the fixed T cells and thereby influence the ability to recognize specific MHC complexes. In this case, the native structure of TCR needs to be at least partly preserved in the fixed tissue. Fixation of tissue therefore should be gentle. Alternatively, the staining is performed on frozen tissue sections, and the fixation is done after MHC multimer staining.

[0835] Direct Detection of T Cells in Solid Tissue In Vivo
[0836] For in vivo detection of T cells labeled MHC multimers are injected in to the body of the individual to be investigated. The MHC multimers may be labeled with e.g. a paramagnetic isotope. Using a magnetic resonance imaging (MRI) scanner or electron spin resonance (ESR) scanner MHC multimer binding T cells can then be measured and localized. In general, any conventional method for diagnostic imaging visualization can be utilized. Usually gamma and positron emitting radioisotopes are used for camera and paramagnetic isotopes for MRI.

[0837] The methods described above for direct detection of TCR embedded in lipid bilayers collectively called T cells using MHC multimers also applies to detection of TCR in solution and detection of TCR attached to or in a solid medium. Though detection of individual TCRs may not be possible when TCR is in solution.

### Indirect Detection of TCR

[0838] Indirect detection of TCR is primarily useful for detection of TCRs embedded in lipid bilayer, preferably natural occurring T cells, T cell hybridomas or transfected T cells. In indirect detection, the number or activity of T cells are measured, by detection of events that are the result of TCR-MHC-peptide complex interaction. Interaction between MHC multimer and T cell may stimulate the T cell resulting in activation of T cells, in cell division and proliferation of T cell populations or alternatively result in inactivation of T cells. All these mechanism can be measured using various detection methods.

### Indirect Detection of T Cells by Measurement of Activation.

[0839] MHC multimers, e.g. antigen presenting cells, can stimulate T cells resulting in activation of the stimulated T cells. Activation of T cell can be detected by measurement of production of specific soluble factor from the stimulated T cell, e.g. production of cytokines like INFγ and IL2. Stimulation of T cells can also be detected by measurement of changes in expression of specific surface receptors, or by measurement of T cell effector functions.

[0840] Measurement of activation of T cells involves the following steps:
[0841] a) Antigenic peptide is added to a sample of T cells containing antigen presenting cells, preferably a suspension of cells e.g. blood. The antigenic peptide have to be able to bind MHC I or MHC II molecules of one or more antigen presenting cells in the sample thereby generating one or more cell based MHC multimer(s) in sample. Alternatively antigenic polypeptide containing one or more antigenic peptides is added to such sampe. The antigenic polypeptide is then taken up by antigen presenting cells in sample, processed into antigenic peptides and presented by MHC I or MHC II molecules on the surface of antigen presenting cells thereby creating cell based MHC multimers in the sample. Several different antigenic peptides or antigenic polypeptides may be added to the sample. The peptide-loaded antigen presenting cells (the cell based MHC multimers) can then stimulate specific T cells in sample, and thereby induce the production of soluble factor, up- or down-regulation of surface receptors, or mediate other changes in the T cell, e.g. enhancing effector functions.
   [0842] Alternatively, one or more MHC multimer(s) containing one or more antigenic peptide(s) are added to a sample containing T cells, preferably a suspension of cells, to stimulate MHC multimer specific T cells in sample and thereby induce production of soluble factor, up- or down-regulation of surface receptor and/or other changes in the T cell.
   [0843] Following addition of antigenic peptide, antigenic polypeptide or MHC multimer to sample, a second soluble factor, e.g. cytokine and/or growth factor(s) may optionally be added to facilitate continued activation and expansion of antigen-specific T cells
[0844] b) Detection of the presence of produced soluble factor, the presence/absence of surface receptor or detection of effector function.
   [0845] Correlate the measured result with presence of T cells. The measured signal/response indicates the presence of specific T cells that have been stimulated with particular MHC multimer. The signal/response of a T lymphocyte population is a measure of the overall response in sample.
   [0846] The frequency of specific T cells able to respond to a given MHC multimer can be determined by including a limiting-dilution culture in the assay also called a Limiting dilution assay.

[0847] The limiting-dilution culture method involves the following steps:
[0848] i. Sample of T cells in suspension are plated into culture wells at increasing dilutions.
[0849] ii. Antigen presenting cells are provided into the sample if not already in sample and then antigenic peptide or protein containing antigenic peptide is added to the sample as described above thereby creating cell based MHC multimers in sample able to stimulate antigen-specific T cells in the sample. Alternatively, already generated MHC multimers are added to sample to stimulate specific T cells.
   [0850] Optionally growth factors, cytokines or other factors helping T cells to proliferate are added.
[0851] iii. Cells are allowed to grow and proliferate (½-several days). Each well that initially contained a specific T cell will make a response to the MHC multimer and divide.
[0852] iv. Wells are tested for a specific response e.g. production of soluble factors, cell proliferation, cytotoxicity or other effector functions.
   [0853] The assay is replicated with different numbers of T cells in the sample, and each well that originally contained a specific T cell will make a response to the MHC multimer. The frequency of specific T cells in the sample equals the reciprocal of the number of cells added to each well when 37% of the wells are negative, because due to Poisson distribution each well then on average contained one specific T cell at the beginning of the culture. Optionally step i) and ii) from above maybe reversed, e.g. adding T cells in various dilutions to wells or containers containing antigenic peptide, antigenic peptide+antigen presenting cells or MHC multimer.

[0854] In the following various methods to measure production of specific soluble factor, expression of surface receptors, effector functions or proliferation is described.

### Indirect Detection of T Cells by Measurement of Production of Soluble Factors.

### Indirect Detection of T Cells by Measurement of Secreted Soluble Factors.

[0855] Secreted soluble factors can be measured directly in fluid suspension or the soluble factor captured by immobilization on solid support and then detected or an effect of the secreted soluble factor can be detected.

[0856] Examples of such detection methods are interferon gamma release assays (IGRA's) like Quantiferon, enzyme-linked immunospot (ELISPOT) and cytokine flow cytometry (CFC), where INF-γ released from antigen stimulated T cells are measured. Principles of the various and alternative assays are described in more details below.

[0857] Indirect Detection of T Cells by Measurement of Secreted Soluble Factor Directly in Fluid Sample.
[0858] A sample of T cells are added MHC multimer or antigenic peptide as described above to induce production and secretion of soluble factors from antigen-specific T cells. The secreted soluble factors can be measured directly in the supernatant using e.g. mass spectrometry.

[0859] Indirect Detection of T Cells by Capture of Secreted Soluble Factor on Solid Support.
[0860] A sample of T cells are added MHC multimer, antigenic peptide or antigenic polypeptide as described above to induce production and secretion of soluble factors from antigen-specific T cells. Secreted soluble factors in the supernatant are then immobilized on a solid support either directly or through a linker as described for immobilization of T cells elsewhere herein. Then immobilized soluble factors can be detected using labeled marker molecules.
[0861] Soluble factors secreted from individual T cells can be detected using ELISPOT assays or related techniques. The principle is capturing of the secreted soluble factors locally by marker molecules, e.g antibodies specific for the soluble factor. Soluble factor recognised by marker molecules are immobilised on a solid support together with T cells and soluble factors secreted by individual T cells are thereby captured in the proximity of each T cell. Bound soluble factor can then be measured using labelled marker molecules specific for the captured soluble factor. The number of T cells that has given rise to labelled spots on solid support can then be enumerated and these spots indicate the presence of specific T cells that have been stimulated with particular MHC multimer.
[0862] Soluble factors secreted from a population of T cells are detected by capture and detection of soluble factor secreted from the entire population of specific T cells. In this case soluble factor do not have to be captured locally close to each T cell but the secreted soluble factors my be captured and detected in the same well or container as where the T cells are, or supernatant containing secreted soluble factor transferred to another solid support with marker molecules for capture e.g. beads or wells of ELISA plate. An example of such an assay is QuantiFERON or QuantiFERON like assays measuring secretion of INF-γ from antigen stimulated T cells.

[0863] Indirect Detection of T Cells Immobilized to Solid Support in a Defined Pattern.

[0864] Different MHC multimers or MHC-peptide complexes are immobilized to a support to form a spatial array in a defined pattern, where the position specifies the identity of the MHC multimer/MHC-peptide complex immobilized at this position. Marker molecules able to bind T cell secreted soluble factors are co-spotted together with MHC multimer/MHC-peptide complex. Such marker molecules can e.g. be antibodies specific for cytokines like INFγ or IL-2. The immobilization may be direct or through a linker molecule as described above. Then a suspension of labeled T cells are added or passed over the array of MHC multimers/MHC-peptide complexes and specific T cells will bind to the immobilized MHC multimers/MHC-peptide complexes and upon binding be stimulated to secrete soluble factors e.g. cytokines like INFγ ord IL-2. Soluble factors secreted by individual T cells are then captured in the proximity of each T cell and bound soluble factor can be measured using labelled marker molecule specific for the soluble factor. The number and position of different specific T cells that has given rise to labelled spots on solid support can then be identified and enumerated. In this way T cells bound to defined areas of the support are analyzed, thereby, phenotyping the sample. Each individual T cell is defined by the TCR it expose and depending on these TCRs each entity will bind to different types of MHC multimers/MHC-peptide complexes immobilized at defined positions on the solid support.

[0865] Indirect Detection of T Cells by Measurement of Secreted Soluble Factor on Surface of T Cell
[0866] An alternative way to detect secretion of soluble factor from individual cells is to use soluble factor capture on the surface of the T cell secreting the soluble factor. This can be done by using a bispecific capture molecule able to bind a component on the surface of the T cell with one part of the capture molecule and bind the secreted soluble factor by another part of the capture molecule. Example useful capture molecules are bispecific antibodies in which two different heavy- and light chain pairs from different antibodies are combined in one antibody resulting in an antibody molecule with the two antigen-binding sites recognizing different ligands.
[0867] Activated T cells in a sample can then be detected by adding the bispecific capture molecules to the sample. These molecules will then bind all T cells with on part of the molecule. T cells secreting soluble factor (due to activation) will then capture the secreted soluble factor on their surface by the soluble factor binding part of the capture molecule. Bound soluble factor can then be detected by addition of a labelled marker molecule specific for the soluble factor in question.

[0868] Indirect Detection of T Cells by Measurement of Effect of Secreted Soluble Factor.
[0869] Secreted soluble factors can be measured and quantified indirectly by measurement of the effect of the soluble factor on other cell systems. Briefly, a sample of T cells are added MHC multimer or antigenic peptide as described above to induce secretion of soluble factors from antigen-specific T cells. The supernatant containing secreted soluble factor are transferred to another cell system and the effect measured. The soluble factor may induce proliferation, secretion of other soluble factors, expression/downregulation of receptors, or the soluble factor may have cytotoxic effects on these other cells. All effects can be measured as described elsewhere herein.

### Indirect Detection of T Cells by Measurement of Produced Soluble Factors Intracellularly

[0870] Production of soluble factors can be measured intracellularly using flow cytometry. Often cytokines are measured and the method is therefore referred to as cytokine flow cytometry (CFC). The principles are described below.

[0871] Soluble factor production by stimulated T cells can also be measured intracellular by e.g. flow cytometry. This can be done using block of secretion of soluble factor (e.g. by monensin), permeabilization of cell (by e.g. saponine) followed by immunofluorescent staining. The method involves the following steps: 1) Stimulation of T cells e.g. by binding specific MHC multimers: The MHC multimers may be generated and added to sample containing T cells or antigenic peptide or protein containing antigenic peptide can be added to sample and MHC multimers generated in sample as described elsewhere herein. An example of useful MHC multimers for stimulation of specific T cells is antigen presenting cells displaying MHC molecules containing antigenic peptide. A reagent able to block extracellular secretion of cytokine is added during stimulation, e.g. monensin that interrupt intracellular transport processes leading to accumulation of produced soluble factor, e.g. cytokine in the Golgi complex. Other soluble factors may be added to the T cell sample during stimulation to enhance activation and/or expansion. This other soluble factor can be cytokine and or growth factors. 2) addition of one or more labelled marker molecules able to detect special surface receptors (e.g. marker molecules able to bind CD8, CD4, CD3, CD27, CD28, CD2). 3) Fixation of cell membrane using mild fixator followed by permeabilization of cell membrane e.g. by saponine. 4) Addition of labelled marker specific for the produced soluble factor to be determined, e.g. INFγ, IL-2, IL-4, IL-10. 5) Measurement of labelled cells using a flow cytometer.

[0872] An alternative to this procedure is to trap secreted soluble factors on the surface of the secreting T cell as described elsewhere herein or as described by Manz, R. et al., Proc. Natl. Acad. Sci. USA 92:1921 (1995).

### Indirect Detection of T Cells by Measurement of Expression of Receptors

[0873] Activation of T cells can be detected by measurement of expression and/or down regulation of specific surface receptors. The method includes the following steps. A sample of T cells are added MHC multimer, antigenic peptide or protein containng antigenic peptide as described elsewhere herein to stimulate T cell and thereby induce expression or downregulation of specific surface receptors on antigen-specific T cells. These receptors include but are not limited to CD28, CD27, CCR7, CD45RO, CD45RA, IL2-receptor, CD62L, CCR5. Their expression level can be detected by addition of labelled marker specific for the desired receptor and then measure the amount of label cells using flow cytometry, microscopy, immobilization of activated T cell on solid support or any other method like those described for direct detection of TCR.

### Indirect Detection of T Cells by Measurement of Effector Function

[0874] Activation of T cells can be detected indirectly by measurement of effector functions. A sample of T cells are added MHC multimer, antigenic peptide or protein containing antigenic peptide as described elsewhere herein to stimulate T cell and thereby induce one or more effector functions of the antigen-specific T cells. The one or more effector function(s) are then measured. For example activation of antigen-specific CD8 positive T cells can be determined by measurement of killing of target cells, i.e. cells displaying specific MHC-peptide complexes recognized by the activated antigen-specific CD8 positive T cell. This method is often referred to as cytotoxicity assays and involves the following steps:

[0875] 1) Sample containing antigen-specific CD8 positive cells are stimulated by addition of MHC multimer, antigenic peptide or protein containing antigenic peptide as described elsewhere herein. 2) Another sampe containing live target cells displaying MHC I molecules containing specific antigenic peptide are added labelled molecules that can be taken up by live cells but that are not spontaneously released by the target cells following uptake e.g. radioactive labelled compounds. 3) Stimulated and activated T cells from step 1 are then added to target cells of step 2. target cells displaying the MHC complexes containing specific antigenic peptide(s) are then killed releasing labelled compound from the target cells and the presence of this labelled compound may be detected in the supernatant of mixtures of target and cytoxic cells. Alternatively, amount of labelled compound in cells that are not killed by the CD8 positive T cells are measured, by removing labelled compound released by killed target cells followed by measurement of label inside remaining cells either directly or by release of the labelled compound from these remaining cells.

### Indirect Detection of T Cells by Measurement of Proliferation

[0876] T cells can be stimulated to proliferate upon binding specific MHC multimers. Proliferation of T cells can be measured several ways including but not limited to:

[0877] Detection of mRNA
[0878] Proliferation of T cells can be detected by measurement of mRNA inside cell. Cell division and proliferation requires production of new protein in each cell which as an initial step requires production of mRNA encoding the proteins to be synthesized.
[0879] A sample of T cells are added MHC multimer or antigenic peptide as described above to induce proliferation of antigen-specific T cells. Detection of levels of mRNA inside the proliferating T cells can be done by quantitative PCR and indirectly measure activation of a T cell population as a result of interaction with MHC multimer. An example is measurement of cytokine mRNA by in situ hybridization.

[0880] Detection of Incorporation of Thymidine
[0881] The proliferative capacity of T cells in response to stimulation by MHC multimer can be determined by a radioactive assay based on incorporation of [³H]thymidine ([³H]TdR) into newly generated DNA followed by measurement of radioactive signal.

[0882] Detection of Incorporation of BrdU
[0883] T cell proliferation can also be detected by of incorporation of bromo-2′-deoxyuridine (BrdU) followed by measurement of incorporated BrdU using a labeled anti-BrdU antibody in an ELISA based analysis.

[0884] Viability of cells may be measured by measurement ATP in a cell culture.

### Indirect Detection of T Cells by Measurement of Inactivation

[0885] Not all MHC multimers will lead to activation of the T cells they bind. Under certain circumstances some MHC multimers may rather inactivate the T cells they bind to.

### Indirect Detection of T Cells by Measurement of Effect of Blockade of TCR

[0886] Inactivation of T cells by MHC multimers may be measured be measuring the effect of blocking TCR on antigen-specific T cells. MHC multimers, e.g. MHC-peptide complexes coupled to IgG scaffold can block the TCR of an antigen-specific T cell by binding the TCR, thereby prevent the blocked T cell receptor interacting with e.g. antigen presenting cells. Blockade of TCRs of a T cell can be detected in any of the above described methods for detection of TCR by addition of an unlabeled blocking MHC multimer together with the labelled MHC multimer and then measuring the effect of the blockade on the readout.

### Indirect Detection of T Cells by Measurement of Induction of Apoptosis

[0887] Inactivation of T cells by MHC multimers may be measured be measuring apoptosis of the antigen-specific T cell. Binding of some MHC multimers to specific T cells may lead to induction of apoptosis. Inactivation of T cells by binding MHC multimer may therefore be detected by measuring apoptosis in the T cell population. Methods to measure apoptosis in T cells include but are not limited to measurement of the following:
[0888] DNA fragmentation
[0889] Alterations in membrane asymmetry (phosphatidylserine translocation)
[0890] Activation of apoptotic caspases
[0891] Release of cytochrome C and AIF from mitochondria into the cytoplasm

### Positive Control Experiments for the Use of MHC Multimers in Flow Cytometry and Related Techniques

[0892] When performing flow cytometry experiments, or when using similar technologies, it is important to include appropriate positive and negative controls. In addition to establishing proper conditions for the experiments, positive and negative control reagents can also be used to evaluate the quality (e.g. specificity and affinity) and stability (e.g. shelf life) of produced MHC multimers.

[0893] The quality and stability of a given MHC multimer can be tested in a number of different ways, including:
[0894] Measurement of specific MHC multimer binding to beads, other types of solid support, or micelles and liposomes, to which TCR's have been immobilized. Other kinds of molecules that recognize specifically the MHC-peptide complex can be immobilized and used as well. Depending on the nature of the solid support or membrane structure to which the TCR is immobilized, the TCR can be full-length (i.e. comprise the intracellular- and intra-membrane domains), or can be truncated (e.g. only comprise the extracellular domains). Likewise, the TCR can be recombinant, and can be chemically or enzymatically modified.
[0895] Measurement of MHC multimer binding to beads, other types of solid support, or micelles and liposomes, to which aptamers, antibodies or other kinds of molecules that recognize correctly folded MHC-peptide complexes have been immobilized.
[0896] Measurement of specific MHC multimer binding to specific cell lines (e.g. T-cell lines) displaying MHC multimer-binding molecules, e.g. displaying TCRs with appropriate specificity and affinity for the MHC multimer in question.
[0897] Measurement of specific MHC multimer binding to cells in blood samples, preparations of purified lymphocytes (HPBMCs), or other bodily fluids that contain cells carrying receptor molecules specific for the MHC multimer in question.
[0898] Measurement of specific MHC multimer binding to soluble TCRs, aptamers, antibodies, or other soluble MHC-peptide complex-binding molecules, by density-gradient centrifugation (e.g. in CsCl) or by size exclusion chromatography, PAGE or other type of chromatographic method.

[0899] Measurement of specific MHC binding to TCRs, aptamers, antibodies, streptavidin, or other MHC-peptide complex-binding molecules immobilized on a solid surface (e.g. a microtiter plate). The degree of MHC multimer binding can be visualized with a secondary component that binds the MHC multimer, e.g. a biotinylated fluorophore in cases where the MHC multimer contains streptavidin proteins, not fully loaded with biotin. Alternatively, the secondary component is unlabelled, and a labelled second component-specific compound is employed (e.g. EnVision System, Dako) for visualization. This solid surface can be beads, immunotubes, microtiterplates act. The principle for purification are basically the same I.e. T cells are added to the solid with immobilized MHC'mer, non-binding T cells are washed away and MHC-peptide specific T cells can be retrieved by elution with mild acid or a competitive binding reagent.
[0900] Measurement of specific MHC multimer binding to TCRs, aptamers, antibodies, streptavidin, or other MHC-peptide complex-binding molecules immobilized on a solid surface (e.g. a microtiter plate) visualized with a secondary component specific to MHC multimer (e.g. TCRs, aptamers, antibodies, streptavidin, or other MHC-peptide binding complex-binding molecules). Alternatively the secondary receptor is unlabelled, and a labelled second receptor-specific compound is employed (e.g. EnVision System, Dako) before visualization.

[0901] In the above mentioned approaches, positive control reagents include MHC multimers comprising correctly folded MHC, complexed with an appropriate peptide that allows the MHC multimer to interact specifically and efficiently with its cognate TCR. Negative control reagents include empty MHC multimers, or correctly folded MHC multimers complexed with so-called nonsense peptides that support a correct conformation of the MHC-peptide complex, but that do not efficiently bind TCRs through the peptide-binding site of the MHC complex.

### Negative Control Reagents and Negative Control Experiments for the Use of MHC Multimers in Flow Cytometry and Related Techniques

[0902] Experiments with MHC multimers require a negative control in order to determine background staining with MHC multimer. Background staining can be due to unwanted binding of any of the individual components of the MHC multimer, e.g., MHC complex or individual components of the MHC complex, multimerization domain or label molecules. The unwanted binding can be to any surface or intracellular protein or other cellular structure of any cell in the test sample, e.g. undesired binding to B cells, NK cells or T cells. Unwanted binding to certain cells or certain components on cells can normally be corrected for during the analysis, by staining with antibodies that bind to unique surface markers of these specific cells, and thus identifies these as false positives, or alternatively, that bind to other components of the target cells, and thus identifies these cells as true positives. A negative control reagent can be used in any experiment involving MHC multimers, e.g. flow cytometry analysis, other cytometric methods, immunohistochemistry (IHC) and ELISA. Negative control reagents include the following:
[0903] MHC complexes or MHC multimers comprising MHC complexes carrying nonsense peptides. A nonsense peptide is here to be understood as a peptide that binds the MHC protein efficiently, but that does not support binding of the resultant MHC-peptide complex to the desired TCR. An example nonsense peptide is a peptide with an amino acid sequence different from the linear sequence of any peptide derived from any known protein. When choosing an appropriate nonsense peptide the following points are taken into consideration. The peptide should ideally have appropriate amino acids at relevant positions that can anchor the peptide to the peptide-binding groove of the MHC. The remaining amino acids should ideally be chosen in such a way that possible binding to TCR (through interactions with the peptide or peptide-binding site of MHC) are minimized. The peptide should ideally be soluble in water to make proper folding with MHC alpha chain and β2m possible in aqueous buffer. The length of the peptide should ideally match the type and allele of MHC complex. The final peptide sequence should ideally be taken through a blast search or similar analysis, to ensure that it is not identical with any peptide sequence found in any known naturally occurring proteins.
[0904] MHC complexes or MHC multimers comprising MHC complexes carrying a chemically modified peptide in the peptide-binding groove. The modification should ideally allow proper conformation of the MHC-peptide structure, yet should not allow efficient interaction of the peptide or peptide-binding site of MHC with the TCR.
[0905] MHC complexes or MHC multimers comprising MHC complexes carrying a naturally occurring peptide different from the peptide used for analysis of specific T cells in the sample. When choosing the appropriate natural peptide the following should be taken into consideration. The peptide in complex with the MHC protein should ideally not be likely to bind a TCR of any T cell in the sample with such an affinity that it can be detected with the applied analysis method. The peptide should ideally be soluble in water to make proper folding with MHC alpha chain and β2m possible in aqueous buffer. The length of the peptide should match the type and allele of MHC complex.
[0906] Empty MHC complexes or MHC multimers comprising empty MHC complexes, meaning any correctly folded MHC complex without a peptide in the peptide-binding groove.
[0907] MHC heavy chain or MHC multimers comprising MHC heavy chain, where MHC heavy chain should be understood as full-length MHC I or MHC II heavy chain or any truncated version of MHC I or MHC II heavy chain. The MHC heavy chains can be either folded or unfolded. Of special interest is MHC I alpha chains containing the α3 domain that binds CD8 molecules on cytotoxic T cells. Another embodiment of special interest is MHC II β chains containing the β2 domain that binds CD4 on the surface of helper T cells.
[0908] Beta2microglobulin or subunits of beta2microglobulin, or MHC multimers comprising Beta2microglobulin or subunits of beta2microglobulin, folded or unfolded.
[0909] MHC-like complexes or MHC multimers comprising MHC-like complexes, folded or unfolded. An example could be CD1 molecules that are able to bind peptides in a peptide-binding groove that can be recognized by T cells (Russano et al. (2007). CD1-restricted recognition of exogenous and self-lipid antigens by duodenal gammadelta+T lymphocytes. J. Immunol. 178(6):3620-6)
[0910] Multimerization domains without MHC or MHC-like molecules, e.g. dextran, streptavidin, IgG, coiled-coil-domain liposomes.
[0911] Labels, e.g. FITC, PE, APC, pacific blue, cascade yellow, or any other label listed elsewhere herein.

[0912] Negative controls 1-4 can provide information about potentially undesired binding of the MHC multimer, through interaction of a surface of the MHC-peptide complex different from the peptide-binding groove and its surroundings. Negative control 5 and 6 can provide information about binding through interactions through the MHC I or MHC II proteins (in the absence of peptide). Negative control 7 can provide information about binding through surfaces of the MHC complex that is not unique to the MHC complex. Negative controls 8 and 9 provide information about potential undesired interactions between non-MHC-peptide complex components of the MHC multimer and cell constituents.

### Minimization of Undesired Binding of the MHC Multimer

[0913] Identification of MHC-peptide specific T cells can give rise to background signals due to unwanted binding to cells that do not carry TCRs. This undesired binding can result from binding to cells or other material, by various components of the MHC multimer, e.g. the dextran in a MHC dextramer construct, the labelling molecule (e.g. FITC), or surface regions of the MHC-peptide complex that do not include the peptide and the peptide-binding cleft.

[0914] MHC-peptide complexes bind to specific T cells through interaction with at least two receptors in the cell membrane of the T-cell. These two receptors are the T-cell receptor (TCR) and CD8 for MHC I-peptide complexes and TCR and CD4 receptor protein for MHC II-peptide complexes. Therefore, a particularly interesting example of undesired binding of a MHC multimer is its binding to the CD8 or CD4 molecules of T cells that do not carry a TCR specific for the actual MHC-peptide complex. The interaction of CD8 or CD4 molecules with the MHC is not very strong; however, because of the avidity gained from the binding of several MHC complexes of a MHC multimer, the interaction between the MHC multimer and several CD8 or CD4
[0915] receptors potentially can result in undesired but efficient binding of the MHC multimer to these T cells. In an analytical experiment this would give rise to an unwanted background signal; in a cell sorting experiment undesired cells might become isolated. Other particular interesting examples of undesired binding is binding to lymphoid cells different from T cells, e.g. NK-cells, B-cells, monocytes, dendritic cells, and granulocytes like eosinophils, neutrophils and basophiles.

[0916] Apart from the MHC complex, other components in the MHC multimer can give rise to unspecific binding. Of special interest are the multimerization domain, multimerization domain molecules, and labelling molecules.

[0917] One way to overcome the problem with unwanted binding is to include negative controls in the experiment and subtract this signal from signals derived from the analyzed sample, as described elsewhere in the invention.

[0918] Alternatively, unwanted binding could be minimized or eliminated during the experiment. Methods to minimize or eliminate background signals include:
[0919] Mutations in areas of the MHC complex responsible for binding to unwanted cells can be introduced. Mutations here mean substitution, insertion, or deletion of natural or non-natural amino acids. Sub-domains in the MHC complex can be responsible for unwanted binding of the MHC multimer to cells without a TCR specific for the MHC-peptide complex contained in the MHC multimer. One example of special interest is a small region in the α3-domain of the α-chain of MHC I molecules that is responsible for binding to CD8 on all cytotoxic T cells. Mutations in this area can alter or completely abolish the interaction between CD8 on cytotoxic T cells and MHC multimer (Neveu et al. (2006) Int Immunol. 18, 1139-45). Similarly a sub domain in the β2 domain of the β-chain of MHC II molecules is responsible for binding CD4 molecules on all CD4 positive T cells. Mutations in this sub domain can alter or completely abolish the interaction between MHC II and CD4.
[0920] Another embodiment is to mutate other areas of MHC I/MHC II complexes that are involved in interactions with T cell surface receptors different from TCR, CD8 and CD4, or that bind surface receptors on B cells, NK cells, Eosiniophils, Neutrophils, Basophiles, Dendritic cells or monocytes.
[0921] Chemical alterations in areas of the MHC complex responsible for binding to unwanted cells can be employed in order to minimize unwanted binding of MHC multimer to irrelevant cells. Chemical alteration here means any chemical modification of one or more amino acids. Regions in MHC complexes that are of special interest are as mentioned above the α3 domain of the α-chain in MHC I molecules and β2 domains in the β-chain of MHC II molecules. Other regions in MHC I/MHC II molecules that can be chemically modified to decrease the extent of undesired binding are regions involved in interaction with T cell surface receptors different from TCR, CD8 and CD4, or that bind surface receptors on B cells, NK cells, Eosiniophils, Neutrophils, Basophiles, Dendritic cells or monocytes.
[0922] Another method to minimize undesired binding involves the addition of one or more components of a MHC multimer, predicted to be responsible for the unwanted binding. The added component is not labeled, or carries a label different from the label of the MHC multimer used for analysis. Of special interest is addition of MHC multimers that contain nonsense peptides, i.e. peptides that interact efficiently with the MHC protein, but that expectably do not support specific binding of the MHC multimer to the TCR in question. Another example of interest is addition of soluble MHC complexes not coupled to a multimerization domain, and with or without peptide bound in the peptide binding cleft. In another embodiment, individual components of the MHC complex can be added to the sample, e.g. I α-chain or subunits of MHC I α-chain either folded or unfolded, beta2microglobulin or subunits thereof either folded or unfolded, α/β-chain of MHC II or subunits thereof either folded or unfolded. Any of the above mentioned individual components can also be attached to a multimerization domain identical or different from the one used in the MHC multimer employed in the analysis.
[0923] Of special interest is also addition of multimerization domain similar or identical to the multimerization domain used in the MHC multimer or individual components of the multimerization domain.
[0924] Reagents able to identify specific cell types either by selection or exclusion can be included in the analysis to help identify the population of T cells of interest, and in this way deselect the signal arising from binding of the MHC multimer to undesired cells.
[0925] Of special interest is the use of appropriate gating reagents in flow cytometry experiments. Thus, fluorescent antibodies directed against specific surface markers can be used for identification of specific subpopulations of cells, and in this way help to deselect signals resulting from MHC multimers binding to undesired cells. Gating reagents of special interest that helps identify the subset of T cells of interest when using MHC I multimers are reagents binding to CD3 and CD8 identifying all cytotoxic T cells. These reagents are preferably antibodies but can be any labeled molecule capable of binding CD3 or CD8. Gating reagents directed against CD3 and CD8 are preferably used together. As they stain overlapping cell populations they are preferably labeled with distinct fluorochromes. However, they can also be used individually in separate samples. In experiments with MHC II multimers reagents binding to CD3 and CD4 identifying T helper cells can be used. These reagents are preferably antibodies but can be any labeled molecule capable of binding CD3 or CD4. Gating reagents directed against CD3 and CD4 are preferable used together. As they stain overlapping cell populations they are preferably labeled with distinct fluorochromes. However, they can also be used individually in separate samples.

[0926] Other gating reagents of special interest in experiments with any MHC multimer, are reagents binding to the cell surface markers CD2, CD27, CD28, CD45RA, CD45RO, CD62L and CCR7. These surface markers are unique to T cells in various differentiation states. Co staining with either of these reagents or combinations thereof together with MHC multimers helps to select MHC multimer binding T cells expressing a correct TCR. These reagents can also be combined with reagents directed against CD3, CD4 and/or CD8.

[0927] Another flow cytometric method of special interest to remove signals from MHC multimer stained cells not expressing the specific TCR, is to introduce an exclusion gate. Antibodies or other reagents specific for surface markers unique to the unwanted cells are labeled with a fluorochrome and added to the test sample together with the MHC multimer. The number of antibodies or surface marker specific reagents are not limited to one but can be two, three, four, five, six, seven, eight, nine, ten or more individual reagents recognizing different surface markers, all of which are unique to the unwanted cells. During or after collection of data all events representing cells labeled with these antibodies are dumped in the same gate and removed from the dataset. This is possible because all the antibodies/reagents that bind to the wrong cells are labeled with the same fluorochrome.

[0928] Reagents of special interest that exclude irrelevant cells include reagents against CD45 expressed on red blood cells, CD19 expressed on B cells, CD56 expressed on NK cells, CD4 expressed on T helper cells and CD8 expressed on cytotoxic T cells, CD14 expressed on monocytes and CD15 expressed on granulocytes and monocytes.

### Vaccines

[0929] The present invention also relates to a cancer vaccine such as the types of cancer vaccines described herein below.

[0930] One type of cancer vaccine comprises one or more antigenic peptides such as one or more of the antigenic peptides listed in Table 10 and Table 13. The cancer vaccine comprising one or more antigenic peptides can e.g. be administered to an individual in need there of by intravenoeus administration. The one or more antigenic peptides bind to MHC complexes after administration to said individual and specific T cells are hereby stimulated to proliferate. In one embodiment the cancer vaccine does not comprise administration of one or more MHC complexes and/or one or more MHC multimers.

[0931] A second type of cancer vaccine comprises a vira and/or another DNA vector encoding one or more antigenic peptides such as any of the peptides listed in Table 10 and Table 13. The vira infect and/or the DNA is introduced into cells in the individual in need of the cancer vaccine. Hereafter the one or more antigenic peptides are generated in said cells and the antigenic peptides bind to MHC complexes in said individual. Specific T cells are hereby stimulated to proliferate in said individual.

[0932] A third type of cancer vaccine comprises one or more types of cells expressing MHC complexes and/or MHC multimers. The cells expressing MHC complexes and/or MHC multimers comprising antigenic peptides such as any of the peptides listed in Table 8, Table 9, Table 10, Table 11 and Table 13. The cells expressing MHC complexes loaded with one or more peptides are administered as a cancer vaccine or part thereof to an individual in need thereof. Specific T cells are hereby stimulated to proliferate in said individual.

[0933] A fourth type of cancer vaccine comprises administration to an individual in need there of MHC complexes and/or MHC multimers such as any MHC complex and/or any MHC multimer according to the present invention bound to one or more identical or different antigenic peptides such as any of the peptides listed in Table 8, Table 9, Table 10, Table 11 and Table 13. Specific T cells are hereby stimulated to proliferate in said individual.

[0934] The cancer vaccines may be categorized depending on several characteristics, including way of action; being prophylactic or therapeutic i.e. whether the cancer vaccine induce complete prevention from disease; or improvement of disease or relief from disease symptoms; way of administration; times of administration; what kind of physical feature or matter is administered; what specific physical feature or matter is treated and how is this feature or matter treated.

[0935] A vaccine is an antigenic preparation used to establish immunity to a disease or illness and thereby protects or cures the body from a specific disease or illness. The cancer vaccine can be either prophylactic and prevent disease or therapeutic and treat the cancer disease. Cancer vaccines may contain more than one type of antigen and is then called a combined vaccine.

[0936] For cancer treatment, researchers are developing vaccines that can encourage the immune system to recognize cancer cells. These vaccines can help the body reject tumors and prevent cancer from recurring. In contrast to traditional vaccines against infectious diseases, cancer vaccines are often designed to be injected after the disease is diagnosed, rather than before it develops and are therefore therapeutic. By example, it has been shown that immunization with dendritic cells (DC) loaded with appropriate peptides from tumor associated antigens (TAAs) stimulate “tumor specific” T-cells, which in some patients prevent further progression of the disease and eventually lead to regression of the disease.

[0937] The cancer vaccine of the present invention can be administered by several routes including but not limited to injection including intravenously, intramuscularly, subcutaneously, inter peritoneal injection and transmucosally (nasal, rectal, vaginal) application, by inhalation, per-orally or by inoculation.

[0938] The cancer vaccine of the present invention can be administered alone or in combination with one or more adjuvant and/or one or more drugs and/or one or more other vaccines such one or more other cancer vaccines.

[0939] The cancer vaccine may be administered only once or may be administered several times. The cancer vaccine administered more than once may have the same composition throughout the vaccination program or alternatively the vaccine change composition from 1^{st} administration to 2^{nd}, 3^{rd}, etc administration.

[0940] The cancer vaccine administered more than once can be administered by same route or by alternating routes. Similarly the individual components of the cancer vaccine can be administered alone or in combinations by the same route or by alternating/mixed routes

[0941] In the present invention vaccines are subdivided into the following categories:
[0942] Vaccines made of living virulent microorganisms. Virulence refers to the degree of pathogenecity of a microbe, or in other words the relative ability of a microbe to cause disease. Examples of such organisms include but is not limited to bacteria, virus, parasites or other pathogens. Most pathogens will not be useful for vaccines if they are fully virulent but certain natural occurring modest virulent strains can be used. The vaccine may result in protection against the organism used for vaccination but may also induce protections against related virulent organisms
   [0943] The organism may be fully virulent
   [0944] The organism may be partly virulent meaning that the virulence of the organism has been reduced. Such organisms are often called live attenuated microorganisms. Attenuated means reducing the virulence of the microorganism while keeping it viable. Examples of reducing the virulence og an microorganism includes but is not limited to
      [0945] Modifying the microorganism by physical means, e.g. by heating
      [0946] Modifying the microorganism by chemical means, e.g. by addition of chemicals to the microorganism.
      [0947] Genetically modified microorganisms, e.g. recombinant bacteria or virus missing virulence factors
      [0948] Cultured under conditions that disable their virulent properties One way to reduce the virulence of an organism is passage through a foreign host e.g. tissue cultures, embryo eggs or live animals.
[0949] Killed microorganisms are another type of vaccine. Microorganisms can be killed in several ways including but not limited to
   [0950] Physically killing
      [0951] Killing by heating
      [0952] Killing by radioactive irradiation
   [0953] Chemically killing, e.g. by treatment with phenol, formaldehyde or other chemicals able to kill microorganism.
[0954] Subunit/fragment(s) of microorganism can be used as vaccine. The fragments may be isolated directly from microorganism or produced using recombinant DNA technology. Fragments/subunits of microorganisms useful in vaccines of the present invention includes but is not limited to
   [0955] Macromolecules, e.g. naturally occurring or artificial made. Macromolecules of the present invention includes but is not limited to:
      [0956] Proteins. The proteins may be full length or truncated and may be modified e.g. by introduction of additional amino acids, mutated, chemically modified (e.g. acetylation, methylation, Pegylation, phosphorylation, glycosylation ect.) or carrying other modifications e.g. converted into lipoprotein by the N-terminal addition of NE-palmytoyl-lysine. The proteins may also be stabilized by covalent or non-covalent attachment of protein linkers or other protein molecules. Proteins of the present invention includes but is not limited to:
         [0957] Proteins of the immune system
            [0958] Cytokines
            Interleukins (cytokines produces by leukocytes)
            Interferon's (cytokines that can induce cells to resist viral replication)
            [0959] Chemokines or their receptors
            [0960] Antibodies (monoclonal, polyclonal,
            Full length
            Fab fragments
            scFv fragments
            antibody-like (scaffolds)
            [0961] MHC molecules.
            MHC I molecules
            MHC I molecules consisting of full length or truncated heavy chain, full length or truncated β2m and peptide
            MHC I molecule consisting of full length or truncated heavy chain and full length and truncated β2m but no peptide (empty MHC I molecule)
            MHC I molecule consisting of full length or truncated heavy chain and peptide
            MHC I molecule consisting of full length or truncated heavy chain
            MHC II molecules
            MHC II molecules consisting of full length or truncated alpha chain and full length or truncated beta chain and peptide
            MHC II molecules consisting of full length or truncated alpha chain and full length and truncated beta chain but no peptide (empty MHC II molecule)
            [0962] Peptides
            Antigenic peptides, meaning any peptide that is bound or able to bind MHC molecules.
            With binding motif for MHC I
            With binding motif for MHC II
            Other peptides
            [0963] Heat shock proteins e.g. HSP70 and HSP90
            [0964] T cell receptor (TCR)
            Full length
            Truncated
            Stabilized by e.g. a peptide linker
         [0965] Proteins from microorganisms
            [0966] Surface proteins
            [0967] Intracellular proteins
            [0968] Secreted proteins (e.g. toxins)
            Unmodified
            Modified (e.g. toxoid)
            Chemically modified
            Physically modified
      [0969] Nucleic acids
         [0970] DNA
            [0971] Encoding protein
            [0972] Structural not encoding protein
         [0973] RNA
            [0974] Ribosome's
            [0975] Antisense
            [0976] Silencing RNA
            [0977] Micro RNA
         [0978] LNA
         [0979] PNA
      [0980] Carbohydrates
         [0981] Saccharides and derivatives thereof, e.g. phosphorylated, oxidized, reduced, amino derivatives, acetylated ect. Saccharides may have more than one modification
            [0982] Monosaccharide's
            [0983] Disaccharides
            [0984] Polysaccharides
            Homopolysaccharides (e.g. glycans, dextran)
            Polymers of repeating disaccharide units in which one of the sugars are is either N-acetylgalactosamine or N-acetylglucosamine (e.g. Glucosaminoglycans)
            Polysaccharide-peptide polymer (Peptidoglycan (bacterial cell wall))
         [0985] Proteins carrying covalent attached oligosaccharides or polysaccharides (Glycoprotein's)
         [0986] Lipids carrying covalent attached oligo- or polysaccharides (Glycolipids)
   [0987] All macromolecules may be individual or in complex (e.g. attached to polymer backbone, solid support e.g. beads or other solid support, microspheres, liposome's or other nanoclusters)
[0988] Cell based vaccine is another type of vaccine of the present invention. Characteristics of different cell based vaccines are listed below.
   [0989] Consisting of naturally occurring cells
      [0990] Cells are isolated and optionally amplified e.g. by proliferation
      [0991] Cells are isolated and modified to display specific molecules e.g. specific MHC complexes by incubation with antigenic peptide. Following modification the cells may be proliferated.
   [0992] Consisting of non-naturally occurring cells. Non-naturally occurring cells of the present invention includes but is not limited to:
      [0993] Chemically modified cells
      [0994] Genetically modified cells
         [0995] Cells fused to another cell (e.g. hybridomas)
         [0996] Cells transfected, transformed or transduced with genes or nucleic acids encoding specific proteins (e.g. with super coiled plasmid DNA linear DNA, RNA, siRNA or other)

### Adjuvants

[0997] The cancer vaccine according to the present invention may be combined with one or more adjuvant(s) in order to improve the effect of the vaccine. Adjuvants are pharmacological or immunological agents that modify the effect of other agents (e.g. vaccines and drugs) while having few if any direct effects when given by themselves.

[0998] Adjuvants can be mixed with the vaccine and administered simultaneously with the vaccine. The adjuvant can be attached to one or more components of the vaccine by covalent or non-covalent interaction or be in the vaccine as an individual component. The adjuvant may also be administered before or after the vaccine is administered. More than one type of adjuvant can be used together with a given vaccine likewise one specific type of adjuvant may be used for more than one vaccine.

[0999] Immunological adjuvants are substances that stimulate the immune system and increase the response to a vaccine without having any specific antigenic effect itself. An immunological adjuvant either potentiates the immune responses to an antigen and/or modulates it towards the desired immune responses.

[1000] More than one adjuvant may be present in the final vaccine product. They may be combined together with a single antigen or all antigens present in the vaccine, or each adjuvant may be combined with one particular antigen.

[1001] Examples of immunological adjuvants include oil emulsions and surfactant based formulations e.g. MF59, QS21, AS02, Montanide ISA-51, ISA-720, Titermax gold, mineral salts (e.g. aluminium hydroxide, aluminium or calcium phosphate gels), particulate adjuvants (e.g. virosomes, AS04, immune stimulatory complexes (ISCOMs), polylactide co-glycolide (PLG)), natural and synthetic microbial derivatives (e.g. monophosphoryl lipid A (MPL), Detox (MPL+M. Phlei cell wall skeleton), AGP [RC-529] (synthetic acylated monosaccharide), DC_Chol (lipoidal immunostimulators able to self organize into liposome's), OM-174 (lipid A derivative), CpG motifs (synthetic oligonucleotides containing immunostimulatory CpG motifs), modified LT and CT (genetically modified bacterial toxins to provide non-toxic adjuvant effects), endogenous human immunomodulators, (e.g., hGM-CSF or hIL-12 (cytokines that can be administered either as protein or plasmid encoded), Immudaptin (C3d tandem array)), saponins, squalene or phosphate based adjuvants, lipopolysaccharides, Inert vehicles, such as gold particles microbial antigens, copolymers.

[1002] Adjuvant pertaining to the present invention may be grouped according to their origin, be it mineral, bacterial, plant, synthetic, or host product. The first group under this classification is the mineral adjuvants, such as aluminium compounds. Antigens precipitated with aluminum salts or antigens mixed with or adsorbed to performed aluminum compounds have been used extensively to augment immune responses in animals and humans. Aluminum particles have been demonstrated in regional lymph nodes of rabbits seven days following immunization, and it may be that another significant function is to direct antigen to T cell containing areas in the nodes themselves. Adjuvant potency has been shown to correlate with intimation of the draining lymph nodes. While many studies have confirmed that antigens administered with aluminum salts led to increased humoral immunity, cell mediated immunity appears to be only slightly increased, as measured by delayed-type hypersensitivity. Aluminum hydroxide has also been described as activating the complement pathway. This mechanism may play a role in the local inflammatory response as well as immunoglobulin production and B cell memory. Primarily because of their excellent record of safety, aluminum compounds are presently the only adjuvants used in humans.

[1003] While aluminum salts have been a sufficient adjuvant for strong immunogens that require only antibody responses to elicit protection, they may not always be effective when used with weak immunogens such as e.g. synthetic peptides of malaria, or for introducing cell-mediated immune responses or IgG isotype of the type required to fight infections. Thus, the immunostimulating fragment of TGF according to the present invention may in one embodiment act as an adjuvant or immunostimulator and may be conjugated or non-conjugated to the immunogenic determinant against which it is desirable to raise an immune response.

[1004] Another large group of adjuvants are those of bacterial origin. Adjuvants with bacterial origins can be purified and synthesized (e.g. muramyl dipeptides, lipid A) and host mediators have been cloned (Interleukin 1 and 2). The last decade has brought significant progress in the chemical purification of at least three adjuvants of active components of bacterial origin: Bordetella pertussis, lipopolysaccharide and Freund's Complete Adjuvant (FCA). Additionally suitable adjuvants in accordance with the present invention are e.g. Titermax, ISCOMS, Quil A, and ALUN, see U.S. Pat. Nos. 58,767 and 5,554,372, Lipid A derivatives, choleratoxin derivatives, HSP derivatives, LPS derivatives, synthetic peptide matrixes, GMDP, and other as well as combined with immunostimulants (U.S. Pat. No. 5,876,735).

[1005] B. pertussis is of interest as an adjuvant in the context of the present invention due to its ability to modulate cell-mediated immunity through action on T-lymphocyte populations. For lipopolysaccharide and Freund's Complete Adjuvant, adjuvant active moieties have been identified and synthesized which permit study of structure-function relationships. These are also considered for inclusion in immunogenic compositions according to the present invention.

[1006] Lipopolysaccharide and its various derivatives, including lipid A, have been found to be powerful adjuvants in combination with liposome's or other lipid emulsions. It is not yet certain whether derivatives with sufficiently low toxicity for general use in humans can be produced. Freund's Complete Adjuvant is the standard in most experimental studies.

[1007] Endogenous human immunomodulators are another group of adjuvants of interest for the present invention and among others include cytokines, interleukins, interferons and growth factors. These immunomodulators can be administered either as protein or plasmid encoded.

[1008] Many other types of materials can be used as adjuvants in immunogenic compositions according to the present invention. They include plant products such as saponin, animal products such as chitin, inert vehicles, such as gold particles and numerous synthetic chemicals.

[1009] Adjuvants according to the present invention can also be categorized by their proposed mechanisms of action. This type of classification is necessarily somewhat arbitrary because most adjuvants appear to function by more than one mechanism. Adjuvants may act through antigen localization and delivery, or by direct effects on cells making up the immune system, such as macrophages and lymphocytes. Another mechanism by which adjuvants according to the invention enhance the immune response is by creation of an antigen depot. This appears to contribute to the adjuvant activity of aluminum compounds, oil emulsions, liposomes, and synthetic polymers. The adjuvant activity of lipopolysaccharides and muramyl dipeptides appears to be mainly mediated through activation of the macrophage, whereas B. pertussis affects both macrophages and lymphocytes. Further examples of adjuvants that may be useful when incorporated into immunogenic compositions according to the present invention are described in U.S. Pat. No. 5,554,372.

[1010] At present only a few of the above mentioned adjuvants are approved for human use. Most relevant in this aspect are Alhydrogel (AluminiumHydroxide), MF59 and the proprietary Montanide ISA720.

[1011] In one embodiment adjuvants are any substance whose admixture into the vaccine composition increases or otherwise modifies the immune response to the pharmamers of the present invention.

[1012] Adjuvants could for example be selected from the group consisting of: AlK(SO₄)₂, AlNa(SO₄)₂, AlNH₄ (SO₄), silica, alum, Al(OH)₃, Ca₃ (PO₄)₂, kaolin, carbon, aluminum hydroxide, muramyl dipeptides, N-acetyl-muramyl-L-threonyl-D-isoglutamine (thr-DMP), N-acetyl-nornuramyl-L-alanyl-D-isoglutamine (CGP 11687, also referred to as nor-MDP), N-acetylmuramyul-L-alanyl-D-isoglutaminyl-L-alanine-2-(1′2′-dipalmitoyl-sn-glycero-3-hydroxphosphoryloxy)-ethylamine (CGP 19835A, also referred to as MTP-PE), RIBI (MPL+TDM+CWS) in a 2% squalene/Tween-80®. emulsion, lipopolysaccharides and its various derivatives, including lipid A, Freund's Complete Adjuvant (FCA), Freund's Incomplete Adjuvants, Merck Adjuvant 65, polynucleotides (for example, poly IC and poly AU acids), wax D from Mycobacterium, tuberculosis, substances found in Corynebacterium parvum, Bordetella pertussis, and members of the genus Brucella, liposomes or other lipid emulsions, Titermax, ISCOMS, Quil A, ALUN (see U.S. Pat. Nos. 58,767 and 5,554,372), Lipid A derivatives, choleratoxin derivatives, HSP derivatives, LPS derivatives, synthetic peptide matrixes or GMDP, Interleukin 1, Interleukin 2, Montanide ISA-51 and QS-21. Preferred adjuvants to be used with the invention include Montanide ISA-51 and QS-21.

[1013] Montanide ISA-51 (Seppic, Inc.) is a mineral oil-based adjuvant analogous to incomplete Freund's adjuvant, which must be administered as an emulsion. QS-21 (Antigenics; Aquila Biopharmaceuticals, Framingham, Mass.) is a highly purified, water-soluble saponin that handles as an aqueous solution. QS-21 and Montanide ISA-51 adjuvants can be provided in sterile, single-use vials.

[1014] Additional preferred adjuvants capable of being used in vaccine compositions comprising one or more of the pharmamers of the present invention are e.g. any substance which promote an immune responses. Frequently, the adjuvant of choice is Freund's complete or incomplete adjuvant, or killed B. pertussis organisms, used e.g. in combination with alum precipitated antigen. A general discussion of adjuvants is provided in Goding, Monoclonal Antibodies: Principles & Practice (2nd edition, 1986) at pages 61-63. Goding notes, however, that when the antigen of interest is of low molecular weight, or is poorly immunogenic, coupling to an immunogenic carrier is recommended. Examples of such carrier molecules include keyhole limpet haemocyanin, bovine serum albumin, ovalbumin and fowl immunoglobulin. Various saponin extracts have also been suggested to be useful as adjuvants in immunogenic compositions. Recently, it has been proposed to use granulocyte-macrophage colony stimulating factor (GM-CSF), a well known cytokine, as an adjuvant (WO 97/28816).

[1015] Desirable functionalities of adjuvants capable of being used in accordance with the present invention are listed in the below table.

Modes of adjuvant action

| Action | Adjuvant type | Benefit |
|---|---|---|
| 1. | Generally small molecules or | Upregulation of immune |
| Immunomodulation | proteins which modify the | response. Selection of Th1 or |
| | cytokine network | Th2 |
| 2. Presentation | Generally amphipathic molecules | Increased neutralizing antibody |
| | or complexes which interact with | response. Greater duration of |
| | immunogen in its native | response |
| | conformation | |
| 3. CTL | Particles which can bind or | Cytosolic processing of protein |
| induction | enclose immunogen and | yielding correct class 1 |
| | which can fuse with or disrupt | restricted peptides |
| | cell membranes | |
| | w/o emulsions for direct | Simple process if promiscuous |
| | attachment of peptide to cell | peptide(s) known |
| | surface MHC-1 | |
| 4. Targeting | Particulate adjuvants which | Efficient use of adjuvant and |
| | bind immunogen. Adjuvants | immunogen |
| | which saturate Kupffer cells | |
| | Carbohydrate adjuvants which | As above. May also determine |
| | target lectin receptors on | type of response if targeting |
| | macrophages and DCs | selective |
| 5. Depot | w/o emulsion for short | Efficiency |
| Generation | term | Potential for single-dose |
| | Microspheres or nanospheres for | vaccine |
| | long term | |

Source: Cox, J. C., and Coulter, A. R. (1997). Vaccine 15, 248-56.

[1016] A vaccine composition according to the present invention may comprise more than one different adjuvant such as one or more of the adjuvants mentioned in this application. Furthermore, the invention encompasses a therapeutic composition further comprising any adjuvant substance including any of the above or combinations thereof. It is also contemplated that one or more of the pharmamers according to the present invention, and the adjuvant can be administered separately in any appropriate sequence.

### Vaccine Treatment

[1017] For the purpose of making cancer vaccines or other types of vaccines it can be desirable to employ MHC multimers that comprise a polymer such as dextran, or that are cell-based (e.g. specialized dendritic cells such as described by Banchereau and Palucka, Nature Reviews, Immunology, 2005, vol. 5, p. 296-306).
[1018] Preventive vaccination leading to prophylaxis/sterile immunity by inducing memory in the immune system may be obtained by immunizing/vaccinating an individual or animal with MHC alone, or with MHC in combination with other molecules as mentioned elsewhere in the patent.
   [1019] Vaccine antigens can be administered alone
   [1020] Vaccine can be administered in combination with adjuvant(s).
      [1021] Adjuvant can be mixed with vaccine component or administered alone, simultaneously or in any order.
      [1022] Adjuvant can be administered by the same route as the other vaccine components
   [1023] Vaccine administered more than once may change composition from 1^{st} administration to the 2^{nd}, 3^{rd}, etc.
   [1024] Vaccine administered more than once can be administered by alternating routes
   [1025] Vaccine components can be administered alone or in combinations by the same route or by alternating/mixed routes
   [1026] Vaccine can be administered by the following routes
      [1027] Cutaneously
      [1028] Subcutaneously (SC)
      [1029] Intramuscular (IM)
      [1030] Intravenous (IV)
      [1031] Per-oral (PO)
      [1032] Inter peritoneally
      [1033] Pulmonally
      [1034] Vaginally
      [1035] Rectally
[1036] Therapeutic vaccination i.e. vaccination “teaching” the immune system to fight an existing infection or disease, may be obtained by immunizing/vaccinating an individual or animal with MHC alone, or with MHC in combination with other molecules as mentioned elsewhere in the patent.
   [1037] Vaccine antigens can be administered alone
   [1038] Vaccine can be administered in combination with adjuvant(s).
      [1039] Adjuvant can be mixed with vaccine component or administered alone, simultaneously or in any order.
      [1040] Adjuvant can be administered by the same route as the other vaccine components
[1041] Vaccine administered more than once may change composition from 1^{st} administration to the 2^{nd}, 3^{r d}, etc.
[1042] Vaccine administered more than once can be administered by alternating routes
[1043] Vaccine components can be administered alone or in combinations by the same route or by alternating/mixed routes
[1044] Vaccine can be administered by the following routes
   [1045] Cutaneously
   [1046] Subcutaneously (SC)
   [1047] Intramuscular (IM)
   [1048] Intravenous (IV)
   [1049] Per-oral (PO)
   [1050] Inter peritoneally
   [1051] Pulmonally
   [1052] Vaginally
   [1053] Rectally

### Therapeutic Treatment

[1054] Therapeutic treatment includes the use of MHC molecules alone or in any molecular combination mentioned elsewhere in the patent application for the purpose of treating a disease in any state. Treatment may be in the form of
   [1055] Per-orally intake
      [1056] Pills
      [1057] Capsules
   [1058] Injections
      [1059] Systemic
      [1060] Local
   [1061] Jet-infusion (micro-drops, micro-spheres, micro-beads) through skin
   [1062] Drinking solution, suspension or gel
   [1063] Inhalation
   [1064] Nose-drops
   [1065] Eye-drops
   [1066] Ear-drops
   [1067] Skin application as ointment, gel or creme
   [1068] Vaginal application as ointment, gel, crème or washing
   [1069] Gastro-Intestinal flushing
   [1070] Rectal washings or by use of suppositories
[1071] Treatment can be performed as
   [1072] Single intake, injection, application, washing
   [1073] Multiple intake, injection, application, washing
      [1074] On single day basis
      [1075] Over prolonged time as days, month, years
[1076] Treatment dose and regimen can be modified during the course

### Patient Groups, Dosage and Administration

[1077] The individual to receive the cancer vaccine composition according to the present invention may be any individual in need thereof, preferably a mammal in need thereof, more preferably a human being in need thereof, such as a newborn, a child, an adult, a woman or a man.

[1078] In one preferred embodiment the cancer vaccine composition is administered prophylactically and in this embodiment the individual in need thereof, may be any individual at risk of encountering the given clinical condition against which the cancer vaccine composition is directed.

[1079] It is further contemplated that the amount of antigenic peptide required to induce a systemic immune response will typically be in the range of from 0.0001 to 10000 ug/kg/dose, such as from 0.01 to 1000 ug/kg/dose, from 0.1 to 100 ug/kg/dose, or from 1 to 10 ug/kg/dose.

[1080] In one embodiment, each dosage unit of said vaccine composition preferably comprises in the range of 0.01 to 1 μg, such as in the range of 0.05 to 1 μg, for example in the range of 0.1 to 1 μg, such as in the range of 0.05 to 1 μg, for example in the range of 0.1 to 1 μg, such as in the range of 0.05 to 0.8 μg, for example in the range of 0.05 to 0.6 μg, such as in the range of 0.05 to 0.4 μg, for example in the range of 0.05 to 0.2 μg, such as in the range of 0.1 to 0.8 μg, for example in the range of 0.1 to 0.6 μg, such as in the range of 0.1 to 0.5 μg, for example in the range of 0.1 to 0.4 μg, such as in the range of 0.1 to 0.3 μg, for example in the range of 0.1 to 0.2 μg of the antigenic peptide of the present invention.

[1081] In one embodiment the daily dosage of the antigenic peptide may be varied over a wide range from 0.001 to 1,000 mg per adult human/per day. For intraveneous administration, the compositions can be administered in doses of 0.01, 0.05, 0.1, 0.5, 1.0, 2.5, 5.0, 10.0, 15.0, 25.0, and 50.0 milligrams of the antigenic peptide for the symptomatic adjustment of the dosage to the patient to be treated. An effective amount of the drug is ordinarily supplied at a dosage level of from about 0.0001 mg/kg to about 100 mg/kg of body weight per day. The range is more particularly from about 0.001 mg/kg to 10 mg/kg of body weight per day. Even more particularly, the range varies from about 0.05 to about 1 mg/kg.

[1082] Of course the dosage level will vary depending upon the potency of the particular antigenic peptide. Certain antigenic peptides will be more potent than others.

[1083] The amount of the antigenic peptide of the invention in the pharmaceutical composition may vary, depending on the particular application. However, a single dose of the antigenic peptide is in one embodiment preferably anywhere from about 10 μg to about 5000 μg, more preferably from about 50 μg to about 2500 μg such as about 100 μg to about 1000 μg.

[1084] Modes of administration include intradermal, subcutaneous and intravenous administration, implantation in the form of a time release formulation, etc. Any and all forms of administration known in the art are encompassed herein. Also any and all conventional dosage forms that are known in the art to be appropriate for formulating injectable immunogenic peptide composition are encompassed, such as lyophilised forms and solutions, suspensions or emulsion forms containing, if required, conventional pharmaceutically acceptable carriers, diluents, preservatives, adjuvants, buffer components, etc.

[1085] The vaccine compositions may be administered in any suitable manner. For example the vaccine compositions may be administered enterally, parenterally, transdermally, orally, by inhalation and/or over a mucosal membrane.

[1086] In a preferred embodiment, the vaccine compositions are administered parenterally. Examples of parenteral routes of administration include injections and infusions, e.g. intravenous, intraarterial, intramuscular, intracardial, subcutaneous, intraosseous, intradermal, intraperitonal or intrethecal. A preferred route of parenteral administration of the vaccine comporision is by subcutaneous injection. A suitable administration form for parenteral administration is a solution or dispersion.

[1087] In some embodiments of the present invention it is desirable that the cancer vaccine composition comprises an isotonic agent. In particular when the cancer vaccine composition is prepared for administration by injection or infusion it is often desirable that an isotonic agent is added.

[1088] Accordingly, the composition may comprise at least one pharmaceutically acceptable additive which is an isotonic agent.

[1089] The pharmaceutical composition may be isotonic, hypotonic or hypertonic. However it is often preferred that a pharmaceutical composition for infusion or injection is essentially isotonic, when it is administrated. Hence, for storage the pharmaceutical composition may preferably be isotonic or hypertonic. If the pharmaceutical composition is hypertonic for storage, it may be diluted to become an isotonic solution prior to administration. The isotonic agent may be an ionic isotonic agent such as a salt or a non-ionic isotonic agent such as a carbohydrate. Examples of ionic isotonic agents include but are not limited to NaCl, CaCl₂, KCl and MgCl₂. Examples of non-ionic isotonic agents include but are not limited to mannitol, sorbitol and glycerol.

[1090] It is also contained within the present invention that at least one pharmaceutically acceptable additive is a buffer. For some purposes, for example, when the cancer vaccine composition is meant for infusion or injection, it is often desirable that the composition comprises a buffer, which is capable of buffering a solution to a pH in the range of 4 to 10, such as 5 to 9, for example 6 to 8. However, in other embodiments of the invention the cancer vaccine composition may comprise no buffer at all or only micromolar amounts of buffer. The buffer may for example be selected from the group consisting of TRIS, acetate, glutamate, lactate, maleate, tartrate, phosphate, citrate, carbonate, glycinate, histidine, glycine, succinate and triethanolamine buffer. TRIS buffer is known under various other names for example tromethamine including tromethamine USP, THAM, Trizma, Trisamine, Tris amino and trometamol. The designation TRIS covers all the aforementioned designations. The buffer may furthermore for example be selected from USP compatible buffers for parenteral use, in particular, when the pharmaceutical formulation is for parenteral use. For example the buffer may be selected from the group consisting of monobasic acids such as acetic, benzoic, gluconic, glyceric and lactic, dibasic acids such as aconitic, adipic, ascorbic, carbonic, glutamic, malic, succinic and tartaric, polybasic acids such as citric and phosphoric and bases such as ammonia, diethanolamine, glycine, triethanolamine, and TRIS.

[1091] The vaccine composition may also comprise antioxidants and/or reducing agents for example acetone sodium bisulfite, ascorbate, bisulfite sodium, butylated hydroxy anisole, butylated hydroxy toluene, cystein/cysteinate HCL, dithionite sodium, gentisic acid, gentisic acid ethanolamine, glutamate monosodium, formaldehyde sulfoxylate sodium, metabisulfite potassium, metabisulfite sodium, monothioglycerol, propyl gallate, sulfite sodium and thioglycolate sodium.

[1092] In another embodiment the vaccine composition is administered transdermally. Examples of useful administration forms for transdermal administration include ointment, gel, cream, gel-like cream, paste, liquid, lotion, aerosol, spray, liniment, plaster, poultice, foam, bath admixture, a patch and a bandage. Preferably, if the vaccine composition is to be administered transdermally, it is preferably in the form of a patch.

[1093] Ointments, lotions, creams and the like may be prepared as described in Remington “The science and practice of pharmacy”, chapter 44 pages 845-851, 20^{th} edition. Patches for transdermal vaccines may be prepared by any conventional methods, for example as described in EP1384403 or WO2004/030696. Preferably patches for transdermal vaccines are prepared essentially as described in Examples 4 to 13 of WO2004/03069 except that the transdermal patches should comprise the vaccine composition according to the present invention. The skilled person will readily be able to make the required adaptations.

[1094] For inhalation the cancer vaccine composition may be administered in the form of an aerosol and/or spray dosage form which can be prepared, for example, by filling an aerosol container with above-mentioned solution for example, together with an injection agent such as liquefied petroleum gas. A poultice can be prepared by adding the above mentioned cancer vaccine composition to an ointment base formed from a partially neutralized polyacrylic acid, sodium polyacrylate, and the like.

[1095] For oral administration, the cancer vaccine composition may be administered in the form of a tablet, capsule, drop, liquid mixture or powder. Tablet, capsules, and drops may be swallowed or chewed. Oral administration may result in uptake via the mucosa in the mouth, such as buccal or sublingual uptake, and/or in uptake via the gastro-intestinal route, such as uptake over the mucosa of the intestines.

[1096] As the pH adjuster, for example, lactic acid, citric acid, phosphoric acid and the like can be mentioned for adjusting to a lower pH range, and sodium hydroxide, potassium hydroxide, sodium lactate, sodium citrate, monoethanolamine and diisopropanolamine and the like can be mentioned for adjusting to a higher pH range. Addition of carboxyvinyl polymer, which is a water-soluble polymer, can also achieve a lower pH. Buffers such as acetate buffer, a phosphate buffer, a citrate buffer, a succinate buffer or TRIS may also be included for pH adjustment.

[1097] As the stabilizer, for example, ascorbic acid, dibutylhydroxytoluene, sodium thiosulfate, sodium thioglycolate, sodium thiomalate, erythorbic acid, sodium erythorbate, sodium pyrosulfite, benzoic acid, sodium benzoate, sodium alginate, sodium caprylate, L-arginine, L-cysteine, dl-.alpha.-tocopherol, tocopherol acetate, propyl gallate, disodium edetate and the like can be mentioned.

[1098] As the preservative, for example, benzethonium chloride, benzalkonium chloride, methylparaben, ethylparaben, propylparaben, chlorobutanol, benzyl alcohol, thimerosal and the like can be mentioned.

[1099] The cancer vaccine compositions of the present invention may also be administered over a mucosal membrane. Thus, the vaccine composition may be applied to any mucous membrane including the conjunctiva, nasopharynx, orthopharnyx, vagina, colon, urethra, urinary bladder, lung, large (rectal) and small (enteral) intestine.

[1100] When administered ocularly or nasally, the compositions of the present invention can be formulated in an aqueous solution buffered to a pH of between 3.0 and 8.0, most preferably pH 5.0-5.4, by means of a pharmaceutically acceptable buffer system. Any pharmaceutically acceptable buffering system capable of maintaining the pH in the preferred ranges can be used in the practice of this invention. A typical buffer will be, for example, an acetate buffer, a phosphate buffer, a citrate buffer, a succinate buffer, or the like. The concentration of buffer is typically in the range from between 0.005 and 0.1 molar, most preferably about 0.02 molar.

[1101] In one embodiment of the invention, the cancer vaccine compositions of the present invention may be formulated for sustained release. For example, one or more of the immune stimulating complex, carrier protein, saccharide antigen and/or aluminium containing adjuvant may be combined with a silicone elastomer that releases the saccharide antigen over a long period of time. The silicone elastomer can also comprise albumin. See U.S. Pat. No. 4,985,253, the contents of which are fully incorporated by reference herein. The release rate of the antigen from the silicone elastomer can be controlled by incorporation of a water soluble or fat soluble mixing agent or cosolvent (e.g., polyethylene glycol 400, polysorbate 80, sodium alginate, L-alanine, sodium chloride, polydimethylsiloxane) into the silicone elastomer. Any other additive can also be incorporated into the silicone elastomer for the purpose of accelerating the release rate.

[1102] The cancer vaccine composition according to the invention may be formulated into unit dosage forms, wherein each unit, for example a sealed container, comprises one dosage of the vaccine composition.

[1103] The cancer vaccine compositions may be administered once; however, more often the vaccine compositions are administered more than once, such as more than 2 times, for example more than 5 times, such as more than 10, for example more than 15, such as more than 20, for example more than 30 times, such as more than 50 times, for example more than 100 times. Preferably, the cancer vaccine compositions are administered in the range of 2 to 10 times, more preferably in the range of 2 to 5 times, such as twice.

[1104] When the cancer vaccine composition is administered more than once, the time period between two individual administrations is typically in the range of 1 week to 5 years, such as in the range of 1 month to 2 year, for example in the range of 1 month to 1 year, such as in the range of 2 months to 7 months. If the vaccine composition is administered more than twice, then the time period between the individual administrations may each individually be any of the aforementioned. Thus by way of example the interval between the first and second administration may be around 2 months and the interval between the second and the third administration may be around 7 months.

[1105] In one embodiment the cancer vaccine can be administered by several routes including but not limited to injection including intravenously, intramuscularly, subcutaneously, inter peritoneal injection and transmucosally (nasal, rectal, vaginal) application, by inhalation, per-orally or by inoculation.

[1106] The administration of the cancer vaccine of the invention can be as single doses or as several doses. In certain cases, administration only once can be sufficient. In general, several doses should be given with intervals of e.g. a day, a week, two weeks, a month, or several months, etc. For example, a single dose can be given once, or a dose can be given as a primer, followed by one or more administration, or a continuous administration regime like up to four doses per week, followed by one month without administrations, followed by up to four doses per week. Further but not limiting examples are vaccination protocols where administration is performed on week 0, 4, 8, and 16; or on week 0, 2, 4, 6, 8, 10, 12, and 14; or on week 0, 5, 11, 17; or on month 0, 1, and 2; or on day 0, 7, and 30; or every year. Optionally with increasing amount of cancer vaccine; optionally using different adjuvants or combinations of adjuvants in the different administrations. Administration protocol can also be linked to age of the individual in need of the vaccine. Known examples are childhood vaccines. Examples of age related protocols, at the age of 3 month, 5, month, and 12 month; or 3 month, 5, month, 12 month, and 5 years; or 15 month, and 4 years. These examples are not exhaustive. The person skilled in the art will readily know how to optimise this.

[1107] Other medicaments can be administered simultaneously in order to enhance or support the vaccine treatment.

### Kit-Of-Parts

[1108] The present invention also relates to a kit-of-parts comprising a cancer vaccine composition. The kit-of-parts can include a separate container containing a suitable carrier, diluent or excipients. In addition, the kit-of-parts can include instructions for mixing or combining ingredients and/or administration route/schemes and/or a dosage regime.

### Detection of Vaccine Results

[1109] In one embodiment the present invention relates to use of one or more of the antigenic peptides mentioned in this application for detection of a vaccine result. Detection of the vaccine response can comprise any method for immune monitoring know in the art including one or more assays described in PCT/DK/2008/050168, PCT/DK2008/050167 and PA 2008 01035. PCT/DK/2008/050168, PCT/DK2008/050167 and PA 2008 01035 are hereby incorporated by reference in there entirety in this application.

[1110] In one embodiment a blood sample such as peripheral blood is obtained from a patient before vaccination and subsequent to a series of vaccinations. In order to identify peptide-specific T-cell precursors, periferal blood lymphocytes (PBL) are used e.g. directly in ELISPOT (designated direct ELISPOT) or any other relevant assay know in the art such as ELISA.

[1111] In one aspect the invention relates to methods of monitoring immunisation, said method comprising the steps of
[1112] i) providing a blood sample from an individual
[1113] ii) providing an antigenic peptide of the present invention or a MHC complex/MHC multimer comprising an antigenic peptide of the present invention
[1114] iii) determining whether said blood sample comprises antibodies or T-cells comprising T-cell receptors specifically binding the antigenic peptide of the present invention
[1115] iv) thereby determining whether an immune response to said antigenic peptide has been raised in said individual.

[1116] Use of the antigenic peptides of the present invention for immune monitorering assays such as MHC multimer assays, ELISPOT, CFC and other assays involving formation of MHC-peptide complexes are also part of the present invention.

[1117] There is, in still further aspects, provided a diagnostic kit for ex vivo or in situ diagnosis of the presence specific T cells among PBLs or in tissue such as tumour tissue comprising one or more antigenic peptides of the invention, and a method of detecting in a patient the presence of such reactive T cells, the method comprising contacting a tissue or a blood sample with a complex of a peptide of the invention and e.g. a Class I HLA molecule or a fragment of such molecule and detecting binding of the complex to the tissue or the blood cells.

### Cancer Vaccine Preparation and Administration

[1118] Cancer vaccine compositions may be prepared and administered using any conventional protocol known by a person skilled in the art. Below is a non-limiting example of preparation of a vaccine composition according to the invention is given as well as a non-limiting example of administration of such as a vaccine. It will be appreciated by the person skilled in the art that the protocol may be easily adapted to any of the vaccine compositions described herein.

[1119] The peptides can e.g. be synthesized e.g. at the UVA Biomolecular Core Facility with a free amide NH₂ terminus and free acid COOH terminus. Each was provided as a lyophilized peptide, which was then reconstituted in sterile water and diluted with Lactated Ringer's solution (LR, Baxter Healthcare, Deerfield, Ill.) as a buffer for a final concentration of 67-80% Lactated Ringer's in water. These solutions were then sterile-filtered, placed in borosilicate glass vials, and submitted to a series of quality assurance studies including confirmation of identity, sterility, general safety, and purity, in accordance with FDA guidelines, as defined in IND 6453.

[1120] In practical circumstances, patients will receive a vaccine comprising about 100 μg of a class I HLA-restricted peptide with or without a class II HLA-restricted helper peptide. The patients are vaccinated with e.g. about 100 μg of the class I HLA peptide in adjuvant alone, or vaccinated with e.g. about 100 μg of the HLA class I-restricted peptide plus 190 μg of the class II-restricted helper peptide. The higher dose of the helper peptide is calculated to provide equimolar quantities of the helper and cytotoxic epitopes. Additionally, patients can be vaccinated with a longer peptide comprising the amino acid sequences of both peptides.

[1121] The above peptides, in 1-ml aqueous solution, can be administered either as a solution/suspension with about 100 μg of QS-21, or as an emulsion with about 1 ml of Montanide ISA-51 adjuvant.

[1122] Patients are immunized e.g. at day 0 and months 1, 2, 3, 6, 9, and 12, with the antigenic peptide plus adjuvant, for a total of seven immunizations. The antigenic peptide compositions are administered s.c.

### Combination Therapy

[1123] The present invention furthermore relates to cancer vaccine compositions and kit-of-parts for use in combination therapy.

[1124] Combination therapy as used herein denotes treatment an individual in need thereof with more than one different method. Hence combination therapy may in one aspect involve administration of a pharmaceutical composition or a kit-of-parts comprising a vaccine composition as described herein above and e.g. an anti-cancer medicament and/or anti-cancer treatment.

[1125] Anti-cancer medicaments may be any of the medicaments described herein below, for example a chemotherapeutic agent or a immunotherapeutic agent.

[1126] In particular combination therapy may involve administration to an individual of a chemotherapeutic agent and/or an immunotherapeutic agent in combination with one or more of i) the cancer vaccine of the present invention, ii) an antigen presenting cell presenting one or more of the antigenic peptide of the present invention, and iii) an activated, antigenic peptide specific T-cell. However, combination therapy may also involve radiation therapy, gene therapy and/or surgery.

[1127] Combination therapy thus may include administration, simultaneously, or sequentially in any order, of e.g.:
[1128] i) the cancer vaccine of the present invention+at least one chemotherapeutic agent/anti-cancer drug
[1129] ii) the cancer vaccine of the present invention+at least one immunotherapeutic agent
[1130] iii) Antigen presenting cell presenting one or more antigenic peptides of the present invention+at least one chemotherapeutic agent/anti-cancer drug
[1131] iv) Antigen presenting cell presenting one or more antigenic peptides of the present invention+at least one immunotherapeutic agent
[1132] v) Activated T-cells+at least one chemotherapeutic agent/anti-cancer drug
[1133] vi) Activated T-cells+at least one immunotherapeutic agent

[1134] Further combinations include i) and ii); iii) and iv); v) and vi); i) and iii); i) and iv), i) and v); i) and vi); ii) and iii); ii) and iv); ii) and v); ii) and vi); iii) and v); iii) and vi); iv) and v); iv) and vi); i) and iv) and any of v) and vi).

[1135] The chemotherapeutic agent can be e.g. methotrexate, vincristine, adriamycin, cisplatin, non-sugar containing chloroethylnitrosoureas, 5-fluorouracil, mitomycin C, bleomycin, doxorubicin, dacarbazine, taxol, fragyline, Meglamine GLA, valrubicin, carmustaine and poliferposan, MM1270, BAY 12-9566, RAS farnesyl transferase inhibitor, farnesyl transferase inhibitor, MMP, MTA/LY231514, LY264618/Lometexol, Glamolec, CI-994, TNP-470, Hycamtin/Topotecan, PKC412, Valspodar/PSC833, Novantrone/Mitroxantrone, Metaret/Suramin, Batimastat, E7070, BCH-4556, CS-682, 9-AC, AG3340, AG3433, Incel/VX-710, VX-853, ZD0101, 1S1641, ODN 698, TA 2516/Marmistat, BB2516/Marmistat, CDP 845, D2163, PD183805, DX8951f, Lemonal DP 2202, FK 317, Picibanil/OK-432, AD 32/Valrubicin, Metastron/strontium derivative, Temodal/Temozolomide, Evacet/liposomal doxorubicin, Yewtaxan/Placlitaxel, Taxol/Paclitaxel, Xeload/Capecitabine, Furtulon/Doxifluridine, Cyclopax/oral paclitaxel, Oral Taxoid, SPU-077/Cisplatin, HMR 1275/Flavopiridol, CP-358 (774)/EGFR, CP-609 (754)/RAS oncogene inhibitor, BMS-182751/oral platinum, UFT (Tegafur/Uracil), Ergamisol/Levamisole, Eniluracil/776C85/5FU enhancer, Campto/Levamisole, Camptosar/Irinotecan, Tumodex/Ralitrexed, Leustatin/Cladribine, Paxex/Paclitaxel, Doxil/liposomal doxorubicin, Caelyx/liposomal doxorubicin, Fludara/Fludarabine, Pharmarubicin/Epirubicin, DepoCyt, ZD1839, LU 79553/Bis-Naphtalimide, LU 103793/Dolastain, Caetyx/liposomal doxorubicin, Gemzar/Gemcitabine, ZD 0473/Anormed, YM 116, Iodine seeds, CDK4 and CDK2 inhibitors, PARP inhibitors, D4809/Dexifosamide, Ifes/Mesnex/Ifosamide, Vumon/Teniposide, Paraplatin/Carboplatin, Plantinol/cisplatin, Vepeside/Etoposide, ZD 9331, Taxotere/Docetaxel, prodrug of guanine arabinoside, Taxane Analog, nitrosoureas, alkylating agents such as melphelan and cyclophosphamide, Aminoglutethimide, Asparaginase, Busulfan, Carboplatin, Chlorombucil, Cytarabine HCl, Dactinomycin, Daunorubicin HCl, Estramustine phosphate sodium, Etoposide (VP16-213), Floxuridine, Fluorouracil (5-FU), Flutamide, Hydroxyurea (hydroxycarbamide), Ifosfamide, Interferon Alfa-2a, Alfa-2b, Leuprolide acetate (LHRH-releasing factor analogue), Lomustine (CCNU), Mechlorethamine HCl (nitrogen mustard), Mercaptopurine, Mesna, Mitotane (o.p′-DDD), Mitoxantrone HCl, Octreotide, Plicamycin, Procarbazine HCl, Streptozocin, Tamoxifen citrate, Thioguanine, Thiotepa, Vinblastine sulfate, Amsacrine (m-AMSA), Azacitidine, Erthropoietin, Hexamethylmelamine (HMM), Interleukin 2, Mitoguazone (methyl-GAG; methyl glyoxal bis-guanylhydrazone; MGBG), Pentostatin (2′deoxycoformycin), Semustine (methyl-CCNU), Teniposide (VM-26) and Vindesine sulfate. Furthermore, the chemotheraputic agent may be any of the chemotherapeutic agents mentioned in table 3 of U.S. Pat. No. 6,482,843 column 13 to 18.

[1136] The anti-cancer drug can in one preferred embodiment be selected from the group consisting of Aldesleukin/Proleukin (Chiron Corp), Alemtuzumab/Campath (Millennium and ILEX Partners, LP), alitretinoin/Panretin (Ligand Pharmaceuticals), allopurinol/Zyloprim (GlaxoSmithKline), altretamine/Hexylen (US Bioscience), amifostine/Ethyol (US Bioscience), anastrozole/Arimidex (AstraZeneca), arsenic trioxide/Trisenox (Cell Therapeutic), Asparaginase/Elspar (Merck & Co, Inc), BCG Live/TICE BCG (Organon Teknika Corp), bexarotene capsules/Targretin (Ligand Pharmaceuticals), bleomycin/Blenoxane (Bristol-Myers Squibb), busulfan/Busulfex (GlaxoSmithKline), calusterone/Methosarb (Pharmacia & Upjohn Company), capecitabine/Xeloda (Roche), carboplatin/Paraplatin (Bristol-Myers Squibb), carmustine/BCNU, BiCNU (Bristol-Myers Squibb), carmustine with Polifeprosan 20 Implant/Gliadel Wafer (Guilford Pharmaceuticals Inc.), celecoxib/Celebrex (Searle), chlorambucil/Leukeran (GlaxoSmithKline), cisplatin/Platinol (Bristol-Myers Squibb), cladribine/Leustatin, 2-CdA (R.W. Johnson Pharmaceutical Research Institute), cyclophosphamide Cytoxan/Neosar (Bristol-Myers Squibb), cytarabine/Cytosar-U (Pharmacia & Upjohn Company), dacarbazine/DTIC-Dome (Bayer), dactinomycin/actinomycin D Cosmegen (Merck), Darbepoetin alfa/Aranesp (Amgen, Inc), daunorubicin/daunomycin/Daunorubicin (Bedford Labs), daunorubicin/daunomycin/Cerubidine (Wyeth Ayerst), Denileukin/diftitox/Ontak (Seragen, Inc), dexrazoxane/Zinecard (Pharmacia & Upjohn Company), docetaxel/Taxotere (Aventis Pharmaceutical), doxorubicin Adriamycin/Rubex (Pharmacia & Upjohn Company), DROMOSTANOLONE PROPIONATE/MASTERONE INJECTION (SYNTEX), Elliott's B Solution (Orphan Medical, Inc), epirubicin/Ellence (Pharmacia & Upjohn Company), etoposide phosphate (Bristol-Myers Squibb), etoposide/VP-16/Vepesid (Bristol-Myers Squibb), exemestane/Aromasin (Pharmacia & Upjohn Company), Filgrastim/Neupogen (Amgen, Inc), floxuridine/FUDR (Roche), fludarabine/Fludara (Berlex Laboratories Inc.), fluorouracil/5-FU/Adrucil (ICN Puerto Rico), fulvestrant/Faslodex (IPR), gemcitabine/Gemzar (Eli Lilly), gemtuzumab/ozogamicin/Mylotarg (Wyeth Ayerst), goserelin acetate/Zoladex Implant (AstraZeneca Pharmaceuticals), hydroxyurea/Hydrea (Bristol-Myers Squibb), Ibritumomab Tiuxetan/Zevalin (IDEC Pharmaceuticals Corp), idarubicin/Idamycin (Adria Laboratories), ifosfamide/IFEX (Bristol-Myers Squibb), imatinib mesylate/Gleevec (Novartis), Interferon alfa-2a/Roferon-A (Hoffmann-La Roche Inc), Interferon alfa-2b/Intron A (Schering Corp), irinotecan/Camptosar (Pharmacia & Upjohn Company), letrozole/Femara (Novartis), leucovorin Wellcovorin/Leucovorin (Immunex Corporation), levamisole/Ergamisol (Janssen Research Foundation), lomustine/CCNU/CeeBU (Bristol-Myers Squibb), meclorethamine/nitrogen mustard/Mustargen (Merck), megestrol acetate/Megace (Bristol-Myers Squibb), melphalan/L-PAM/Alkeran (GlaxoSmithKline), mercaptopurine/6-MP Purinethol (GlaxoSmithKline), mesna/Mesnex (Asta Medica), methotrexate (Lederle Laboratories), methoxsalen/Uvadex (Therakos), mitomycin C/Mutamycin (Bristol-Myers Squibb), mitomycin C/Mitozytrex (Supergen), mitotane/Lysodren (Bristol-Myers Squibb), mitoxantrone/Novantrone (Lederle Laboratories), nandrolone phenpropionate/Durabolin-50 (Organon), Nofetumomab/Verluma (Boehringer Ingelheim Pharma KG (formerly Dr. Karl Thomae GmbH)), Oprelvekin/Neumega (Genetics Institute), oxaliplatin/Eloxatin (Sanofi Synthelabo), paclitaxel/Taxol (Bristol-Myers Squibb), pamidronate/Aredia (Novartis), pegademase/Adagen (Pegademase Bovine) (Enzon), Pegaspargase/Oncaspar (Enzon, Inc), Pegfilgrastim/Neulasta (Amgen, Inc), pentostatin/Nipent (Parke-Davis Pharmaceutical Co.), pipobroman/Vercyte (Abbott Labs), plicamycin/mithramycin/Mithracin (Pfizer Labs), porfimer sodium/Photofrin (QLT Phototherapeutics Inc.), procarbazine/Matulane (Sigma Tau Pharms), quinacrine/Atabrine (Abbott Labs), Rasburicase/Elitek (Sanofi-Synthelabo, Inc), Rituximab/Rituxan (Genentech, Inc), Sargramostim/Prokine (Immunex Corp), streptozocin/Zanosar (Pharmacia & Upjohn Company), talc/Sclerosol (Bryan), tamoxifen/Nolvadex (AstraZeneca Pharmaceuticals), temozolomide/Temodar (Schering), teniposide/VM-26/Vumon (Bristol-Myers Squibb), testolactone/Teslac (Bristol-Myers Squibb), thioguanine/6-TG/Thioguanine (GlaxoSmithKline), thiotepa/Thioplex (Lederle Laboratories), topotecan/Hycamtin (GlaxoSmithKline), topotecan/Hycamtin (GlaxoSmithKline), toremifene/Fareston (Orion Corp), Tositumomab/Bexxar (Corixa Corporation), Trastuzumab/Herceptin (Genentech, Inc), tretinoin/ATRA/Vesanoid (Roche), Uracil Mustard (Roberts Labs), valrubicin/Valstar (Medeva), vinblastine/Velban (Eli Lilly), vincristine/Oncovin (Eli Lilly), vinorelbine/Navelbine (GlaxoSmithKline), and zoledronate/Zometa (Novartis). The immunotherapeutic agent can be e.g. Ributaxin, Herceptin, Quadramet, Panorex, IDEC-Y2B8, BEC2, C225, Oncolym, SMART MI 95, ATRAGEN, Ovarex, Bexxar, LDP-03, ior t6, MDX-210, MDX-11, MDX-22, OV103, 3622W94, anti-VEGF, Zenapax, MDX-220, MDX-447, MELIMMUNE-2, MELIMMUNE-1, CEACIDE, Pretarget, NovoMAb-G2, TNT, Gliomab-H, GNI-250, EMD-72000, LymphoCide, CMA 676, Monopharm-C, 4B5, ior egf.r3, ior c5, BABS, anti-FLK-2, MDX-260, ANA Ab, SMART 1D10 Ab, SMART ABL 364 Ab and ImmuRAIT-CEA. Furthermore the immunotherapeutic agent may be any cytokine or interferon.

[1137] The cancer vaccine of the invention can also be used in combination with other anti-cancer strategies, and such combination therapies are effective in inhibiting and/or eliminating tumor growth and metastasis. The methods of the present invention can advantageously be used with other treatment modalities, including, without limitation, radiation, surgery, gene therapy and chemotherapy.

The Variation in Peptide Epitope Usage Among Individuals Must be Considered when Developing Personalized Medicine Based on Antigenic Peptides and/or MHC Complexes.

[1138] The immune system is very complex. Each individual has a very large repertoire of specific T cells (on the order of 10⁶-10⁹ different T cell specificities, differing in the identity of the T cell receptor), which again is only a small subset of the total T cell repertoire of a population of individuals. It is estimated that the Caucasian population represents a T cell diversity of 10¹⁰-10¹².

[1139] The T cell receptor recognizes MHC peptide complexes, embedded in the cell membrane. Each individual has between 3 and 6 MHC I alleles and 3 and 8 MHC II alleles. Each of these MHC alleles forms complexes with short antigenic peptides generated by proteolytic degradation and prematurely terminated protein synthesis. Individuals of a population differ in their pattern of peptide degradation. The MHC allele diversity described above combined with this variation among individuals' proteolytic metabolism further enhances the variation among different individuals' immune responses. As a result, each individual has its own characteristic immune response profile, comprising its unique set of alleles and peptide combinations.

[1140] This is important when designing an antigenic peptide-based or a MHC multimer-based immune monitoring reagent or immunotherapeutic agent. If an agent is sought that should be generally applicable to the majority of individuals in a population, one should try to identify peptide epitopes and MHC alleles that are common to the majority of individuals of a population. As described elsewhere in this application, such peptide epitopes can be identified through computerized search algorithms and/or experimental testing of a large set of individuals.

[1141] This approach will be advantageous in many cases, but because of the variability among immune response profiles of different individuals, is likely to be inefficient in certain individuals, because of these individuals' non-average profile. In these latter cases one may have to turn to personalized medicine. In the case of immune monitoring and immunotherapy, this may involve testing a large number of different epitopes from a given antigen, in order to find peptide epitopes that apllies to the given individual.

[1142] When considering the patient population as a whole, a large fraction of the epitopes that theoretically may be generated from a given antigen, for use as a free antigenic peptide agent or to be included in a MHC I or MHC II multimer reagent, are therefore of relevance in personalized medicine. For the individual patient only a small fraction of these will be efficient; and in order to make generally applicable diagnostics, vaccines or therapeutics, even less epitopes are of relevance. Only in the case where one wants to generate a therapeutic agent or diagnostic reagent that is applicable to the majority of individuals of a population can the large majority of epitope sequences be said to be irrelevant, and those identified by computerized search algorithms and experimental testing be said to be the only epitopes of value. For the odd individual with the odd immune response these disregarded peptide epitopes may be the epitopes that provide an efficient diagnostic reagent or cures that individual from a deadly disease. In conclusion, a large fraction of the theoretical epitopes that can be generated from an antigen are of great practical value for use in personalized diagnostics, vaccines and therapeutics.

### Items

[1143] 1. An antigenic peptide of between 8 to 16 consecutive amino acids, comprising at least 8 of amino acid number X₁-X₂-X₃-X₄-X₅-X₆-X₇-X₈-X₉-X₁₀-X₁₁-X₁₂-X₁₃-X₁₄-X₁₅-X₁₆
[1144] 2. The peptide according to item 1, wherein X₁ is alanine
[1145] 3. The peptide according to item 1, wherein X₁ is arginine
[1146] 4. The peptide according to item 1, wherein X₁ is asparagine
[1147] 5. The peptide according to item 1, wherein X₁ is aspartic acid
[1148] 6. The peptide according to item 1, wherein X₁ is cysteine
[1149] 7. The peptide according to item 1, wherein X₁ is glutamic acid
[1150] 8. The peptide according to item 1, wherein X₁ is glutamine
[1151] 9. The peptide according to item 1, wherein X₁ is glycine
[1152] 10. The peptide according to item 1, wherein X₁ is histidine
[1153] 11. The peptide according to item 1, wherein X₁ is isoleucine
[1154] 12. The peptide according to item 1, wherein X₁ is leucine
[1155] 13. The peptide according to item 1, wherein X₁ is lysine
[1156] 14. The peptide according to item 1, wherein X₁ is methionine
[1157] 15. The peptide according to item 1, wherein X₁ is phenylalanine
[1158] 16. The peptide according to item 1, wherein X₁ is proline
[1159] 17. The peptide according to item 1, wherein X₁ is serine
[1160] 18. The peptide according to item 1, wherein X₁ is threonine
[1161] 19. The peptide according to item 1, wherein X₁ is tryptophan
[1162] 20. The peptide according to item 1, wherein X₁ is tyrosine
[1163] 21. The peptide according to item 1, wherein X₁ is valine
[1164] 22. The peptide according to item 1, wherein X₂ is alanine
[1165] 23. The peptide according to item 1, wherein X₂ is arginine
[1166] 24. The peptide according to item 1, wherein X₂ is asparagine
[1167] 25. The peptide according to item 1, wherein X₂ is aspartic acid
[1168] 26. The peptide according to item 1, wherein X₂ is cysteine
[1169] 27. The peptide according to item 1, wherein X₂ is glutamic acid
[1170] 28. The peptide according to item 1, wherein X₂ is glutamine
[1171] 29. The peptide according to item 1, wherein X₂ is glycine
[1172] 30. The peptide according to item 1, wherein X₂ is histidine
[1173] 31. The peptide according to item 1, wherein X₂ is isoleucine
[1174] 32. The peptide according to item 1, wherein X₂ is leucine
[1175] 33. The peptide according to item 1, wherein X₂ is lysine
[1176] 34. The peptide according to item 1, wherein X₂ is methionine
[1177] 35. The peptide according to item 1, wherein X₂ is phenylalanine
[1178] 36. The peptide according to item 1, wherein X₂ is proline
[1179] 37. The peptide according to item 1, wherein X₂ is serine
[1180] 38. The peptide according to item 1, wherein X₂ is threonine
[1181] 39. The peptide according to item 1, wherein X₂ is tryptophan
[1182] 40. The peptide according to item 1, wherein X₂ is tyrosine
[1183] 41. The peptide according to item 1, wherein X₂ is valine
[1184] 42. The peptide according to item 1, wherein X₃ is alanine
[1185] 43. The peptide according to item 1, wherein X₃ is arginine
[1186] 44. The peptide according to item 1, wherein X₃ is asparagine
[1187] 45. The peptide according to item 1, wherein X₃ is aspartic acid
[1188] 46. The peptide according to item 1, wherein X₃ is cysteine
[1189] 47. The peptide according to item 1, wherein X₃ is glutamic acid
[1190] 48. The peptide according to item 1, wherein X₃ is glutamine
[1191] 49. The peptide according to item 1, wherein X₃ is glycine
[1192] 50. The peptide according to item 1, wherein X₃ is histidine
[1193] 51. The peptide according to item 1, wherein X₃ is isoleucine
[1194] 52. The peptide according to item 1, wherein X₃ is leucine
[1195] 53. The peptide according to item 1, wherein X₃ is lysine
[1196] 54. The peptide according to item 1, wherein X₃ is methionine
[1197] 55. The peptide according to item 1, wherein X₃ is phenylalanine
[1198] 56. The peptide according to item 1, wherein X₃ is proline
[1199] 57. The peptide according to item 1, wherein X₃ is serine
[1200] 58. The peptide according to item 1, wherein X₃ is threonine
[1201] 59. The peptide according to item 1, wherein X₃ is tryptophan
[1202] 60. The peptide according to item 1, wherein X₃ is tyrosine
[1203] 61. The peptide according to item 1, wherein X₃ is valine
[1204] 62. The peptide according to item 1, wherein X₄ is alanine
[1205] 63. The peptide according to item 1, wherein X₄ is arginine
[1206] 64. The peptide according to item 1, wherein X₄ is asparagine
[1207] 65. The peptide according to item 1, wherein X₄ is aspartic acid
[1208] 66. The peptide according to item 1, wherein X₄ is cysteine
[1209] 67. The peptide according to item 1, wherein X₄ is glutamic acid
[1210] 68. The peptide according to item 1, wherein X₄ is glutamine
[1211] 69. The peptide according to item 1, wherein X₄ is glycine
[1212] 70. The peptide according to item 1, wherein X₄ is histidine
[1213] 71. The peptide according to item 1, wherein X₄ is isoleucine
[1214] 72. The peptide according to item 1, wherein X₄ is leucine
[1215] 73. The peptide according to item 1, wherein X₄ is lysine
[1216] 74. The peptide according to item 1, wherein X₄ is methionine
[1217] 75. The peptide according to item 1, wherein X₄ is phenylalanine
[1218] 76. The peptide according to item 1, wherein X₄ is proline
[1219] 77. The peptide according to item 1, wherein X₄ is serine
[1220] 78. The peptide according to item 1, wherein X₄ is threonine
[1221] 79. The peptide according to item 1, wherein X₄ is tryptophan
[1222] 80. The peptide according to item 1, wherein X₄ is tyrosine
[1223] 81. The peptide according to item 1, wherein X₄ is valine
[1224] 82. The peptide according to item 1, wherein X₅ is alanine
[1225] 83. The peptide according to item 1, wherein X₅ is arginine
[1226] 84. The peptide according to item 1, wherein X₅ is asparagine
[1227] 85. The peptide according to item 1, wherein X₅ is aspartic acid
[1228] 86. The peptide according to item 1, wherein X₅ is cysteine
[1229] 87. The peptide according to item 1, wherein X₅ is glutamic acid
[1230] 88. The peptide according to item 1, wherein X₅ is glutamine
[1231] 89. The peptide according to item 1, wherein X₅ is glycine
[1232] 90. The peptide according to item 1, wherein X₅ is histidine
[1233] 91. The peptide according to item 1, wherein X₅ is isoleucine
[1234] 92. The peptide according to item 1, wherein X₅ is leucine
[1235] 93. The peptide according to item 1, wherein X₅ is lysine
[1236] 94. The peptide according to item 1, wherein X₅ is methionine
[1237] 95. The peptide according to item 1, wherein X₅ is phenylalanine
[1238] 96. The peptide according to item 1, wherein X₅ is proline
[1239] 97. The peptide according to item 1, wherein X₅ is serine
[1240] 98. The peptide according to item 1, wherein X₅ is threonine
[1241] 99. The peptide according to item 1, wherein X₅ is tryptophan
[1242] 100. The peptide according to item 1, wherein X₅ is tyrosine
[1243] 101. The peptide according to item 1, wherein X₅ is valine
[1244] 102. The peptide according to item 1, wherein X₆ is alanine
[1245] 103. The peptide according to item 1, wherein X₆ is arginine
[1246] 104. The peptide according to item 1, wherein X₆ is asparagine
[1247] 105. The peptide according to item 1, wherein X₆ is aspartic acid
[1248] 106. The peptide according to item 1, wherein X₆ is cysteine
[1249] 107. The peptide according to item 1, wherein X₆ is glutamic acid
[1250] 108. The peptide according to item 1, wherein X₆ is glutamine
[1251] 109. The peptide according to item 1, wherein X₆ is glycine
[1252] 110. The peptide according to item 1, wherein X₆ is histidine
[1253] 111. The peptide according to item 1, wherein X₆ is isoleucine
[1254] 112. The peptide according to item 1, wherein X₆ is leucine
[1255] 113. The peptide according to item 1, wherein X₆ is lysine
[1256] 114. The peptide according to item 1, wherein X₆ is methionine
[1257] 115. The peptide according to item 1, wherein X₆ is phenylalanine
[1258] 116. The peptide according to item 1, wherein X₆ is proline
[1259] 117. The peptide according to item 1, wherein X₆ is serine
[1260] 118. The peptide according to item 1, wherein X₆ is threonine
[1261] 119. The peptide according to item 1, wherein X₆ is tryptophan
[1262] 120. The peptide according to item 1, wherein X₆ is tyrosine
[1263] 121. The peptide according to item 1, wherein X₆ is valine
[1264] 122. The peptide according to item 1, wherein X₇ is alanine
[1265] 123. The peptide according to item 1, wherein X₇ is arginine
[1266] 124. The peptide according to item 1, wherein X₇ is asparagine
[1267] 125. The peptide according to item 1, wherein X₇ is aspartic acid
[1268] 126. The peptide according to item 1, wherein X₇ is cysteine
[1269] 127. The peptide according to item 1, wherein X₇ is glutamic acid
[1270] 128. The peptide according to item 1, wherein X₇ is glutamine
[1271] 129. The peptide according to item 1, wherein X₇ is glycine
[1272] 130. The peptide according to item 1, wherein X₇ is histidine
[1273] 131. The peptide according to item 1, wherein X₇ is isoleucine
[1274] 132. The peptide according to item 1, wherein X₇ is leucine
[1275] 133. The peptide according to item 1, wherein X₇ is lysine
[1276] 134. The peptide according to item 1, wherein X₇ is methionine
[1277] 135. The peptide according to item 1, wherein X₇ is phenylalanine
[1278] 136. The peptide according to item 1, wherein X₇ is proline
[1279] 137. The peptide according to item 1, wherein X₇ is serine
[1280] 138. The peptide according to item 1, wherein X₇ is threonine
[1281] 139. The peptide according to item 1, wherein X₇ is tryptophan
[1282] 140. The peptide according to item 1, wherein X₇ is tyrosine
[1283] 141. The peptide according to item 1, wherein X₇ is valine
[1284] 142. The peptide according to item 1, wherein X₈ is alanine
[1285] 143. The peptide according to item 1, wherein X₈ is arginine
[1286] 144. The peptide according to item 1, wherein X₈ is asparagine
[1287] 145. The peptide according to item 1, wherein X₈ is aspartic acid
[1288] 146. The peptide according to item 1, wherein X₈ is cysteine
[1289] 147. The peptide according to item 1, wherein X₈ is glutamic acid
[1290] 148. The peptide according to item 1, wherein X₈ is glutamine
[1291] 149. The peptide according to item 1, wherein X₈ is glycine
[1292] 150. The peptide according to item 1, wherein X₈ is an histidine
[1293] 151. The peptide according to item 1, wherein X₈ is isoleucine
[1294] 152. The peptide according to item 1, wherein X₈ is leucine
[1295] 153. The peptide according to item 1, wherein X₈ is lysine
[1296] 154. The peptide according to item 1, wherein X₈ is methionine
[1297] 155. The peptide according to item 1, wherein X₈ is phenylalanine
[1298] 156. The peptide according to item 1, wherein X₈ is proline
[1299] 157. The peptide according to item 1, wherein X₈ is serine
[1300] 158. The peptide according to item 1, wherein X₈ is threonine
[1301] 159. The peptide according to item 1, wherein X₈ is tryptophan
[1302] 160. The peptide according to item 1, wherein X₈ is tyrosine
[1303] 161. The peptide according to item 1, wherein X₈ is valine
[1304] 162. The peptide according to item 1, wherein X₉ is alanine
[1305] 163. The peptide according to item 1, wherein X₉ is arginine
[1306] 164. The peptide according to item 1, wherein X₉ is asparagine
[1307] 165. The peptide according to item 1, wherein X₉ is aspartic acid
[1308] 166. The peptide according to item 1, wherein X₉ is cysteine
[1309] 167. The peptide according to item 1, wherein X₉ is glutamic acid
[1310] 168. The peptide according to item 1, wherein X₉ is glutamine
[1311] 169. The peptide according to item 1, wherein X₉ is glycine
[1312] 170. The peptide according to item 1, wherein X₉ is an histidine
[1313] 171. The peptide according to item 1, wherein X₉ is isoleucine
[1314] 172. The peptide according to item 1, wherein X₉ is leucine
[1315] 173. The peptide according to item 1, wherein X₉ is lysine
[1316] 174. The peptide according to item 1, wherein X₉ is methionine
[1317] 175. The peptide according to item 1, wherein X₉ is phenylalanine
[1318] 176. The peptide according to item 1, wherein X₉ is proline
[1319] 177. The peptide according to item 1, wherein X₉ is serine
[1320] 178. The peptide according to item 1, wherein X₉ is threonine
[1321] 179. The peptide according to item 1, wherein X₉ is tryptophan
[1322] 180. The peptide according to item 1, wherein X₉ is tyrosine
[1323] 181. The peptide according to item 1, wherein X₉ is valine
[1324] 182. The peptide according to item 1, wherein X₉ is alanine
[1325] 183. The peptide according to item 1, wherein X₉ is arginine
[1326] 184. The peptide according to item 1, wherein X₉ is asparagine
[1327] 185. The peptide according to item 1, wherein X₉ is aspartic acid
[1328] 186. The peptide according to item 1, wherein X₉ is cysteine
[1329] 187. The peptide according to item 1, wherein X₉ is glutamic acid
[1330] 188. The peptide according to item 1, wherein X₉ is glutamine
[1331] 189. The peptide according to item 1, wherein X₉ is glycine
[1332] 190. The peptide according to item 1, wherein X₉ is an histidine
[1333] 191. The peptide according to item 1, wherein X₉ is isoleucine
[1334] 192. The peptide according to item 1, wherein X₉ is leucine
[1335] 193. The peptide according to item 1, wherein X₉ is lysine
[1336] 194. The peptide according to item 1, wherein X₉ is methionine
[1337] 195. The peptide according to item 1, wherein X₉ is phenylalanine
[1338] 196. The peptide according to item 1, wherein X₉ is proline
[1339] 197. The peptide according to item 1, wherein X₉ is serine
[1340] 198. The peptide according to item 1, wherein X₉ is threonine
[1341] 199. The peptide according to item 1, wherein X₉ is tryptophan
[1342] 200. The peptide according to item 1, wherein X₉ is tyrosine
[1343] 201. The peptide according to item 1, wherein X₉ is valine
[1344] 202. The peptide according to item 1, wherein X₁₀ is alanine
[1345] 203. The peptide according to item 1, wherein X₁₀ is arginine
[1346] 204. The peptide according to item 1, wherein X₁₀ is asparagine
[1347] 205. The peptide according to item 1, wherein X₁₀ is aspartic acid
[1348] 206. The peptide according to item 1, wherein X₁₀ is cysteine
[1349] 207. The peptide according to item 1, wherein X₁₀ is glutamic acid
[1350] 208. The peptide according to item 1, wherein X₁₀ is glutamine
[1351] 209. The peptide according to item 1, wherein X₁₀ is glycine
[1352] 210. The peptide according to item 1, wherein X₁₀ is an histidine
[1353] 211. The peptide according to item 1, wherein X₁₀ is isoleucine
[1354] 212. The peptide according to item 1, wherein X₁₀ is leucine
[1355] 213. The peptide according to item 1, wherein X₁₀ is lysine
[1356] 214. The peptide according to item 1, wherein X₁₀ is methionine
[1357] 215. The peptide according to item 1, wherein X₁₀ is phenylalanine
[1358] 216. The peptide according to item 1, wherein X₁₀ is proline
[1359] 217. The peptide according to item 1, wherein X₁₀ is serine
[1360] 218. The peptide according to item 1, wherein X₁₀ is threonine
[1361] 219. The peptide according to item 1, wherein X₁₀ is tryptophan
[1362] 220. The peptide according to item 1, wherein X₁₀ is tyrosine
[1363] 221. The peptide according to item 1, wherein X₁₀ is valine
[1364] 222. The peptide according to item 1, wherein X₁₁ is alanine
[1365] 223. The peptide according to item 1, wherein X₁₁ is arginine
[1366] 224. The peptide according to item 1, wherein X₁₁ is asparagine
[1367] 225. The peptide according to item 1, wherein X₁₁ is aspartic acid
[1368] 226. The peptide according to item 1, wherein X₁₁ is cysteine
[1369] 227. The peptide according to item 1, wherein X₁₁ is glutamic acid
[1370] 228. The peptide according to item 1, wherein X₁₁ is glutamine
[1371] 229. The peptide according to item 1, wherein X₁₁ is glycine
[1372] 230. The peptide according to item 1, wherein X₁₁ is an histidine
[1373] 231. The peptide according to item 1, wherein X₁₁ is isoleucine
[1374] 232. The peptide according to item 1, wherein X₁₁ is leucine
[1375] 233. The peptide according to item 1, wherein X₁₁ is lysine
[1376] 234. The peptide according to item 1, wherein X₁₁ is methionine
[1377] 235. The peptide according to item 1, wherein X₁₁ is phenylalanine
[1378] 236. The peptide according to item 1, wherein X₁₁ is proline
[1379] 237. The peptide according to item 1, wherein X₁₁ is serine
[1380] 238. The peptide according to item 1, wherein X₁₁ is threonine
[1381] 239. The peptide according to item 1, wherein X₁₁ is tryptophan
[1382] 240. The peptide according to item 1, wherein X₁₁ is tyrosine
[1383] 241. The peptide according to item 1, wherein X₁₁ is valine
[1384] 242. The peptide according to item 1, wherein X₁₂ is alanine
[1385] 243. The peptide according to item 1, wherein X₁₂ is arginine
[1386] 244. The peptide according to item 1, wherein X₁₂ is asparagine
[1387] 245. The peptide according to item 1, wherein X₁₂ is aspartic acid
[1388] 246. The peptide according to item 1, wherein X₁₂ is cysteine
[1389] 247. The peptide according to item 1, wherein X₁₂ is glutamic acid
[1390] 248. The peptide according to item 1, wherein X₁₂ is glutamine
[1391] 249. The peptide according to item 1, wherein X₁₂ is glycine
[1392] 250. The peptide according to item 1, wherein X₁₂ is histidine
[1393] 251. The peptide according to item 1, wherein X₁₂ is isoleucine
[1394] 252. The peptide according to item 1, wherein X₁₂ is leucine
[1395] 253. The peptide according to item 1, wherein X₁₂ is lysine
[1396] 254. The peptide according to item 1, wherein X₁₂ is methionine
[1397] 255. The peptide according to item 1, wherein X₁₂ is phenylalanine
[1398] 256. The peptide according to item 1, wherein X₁₂ is proline
[1399] 257. The peptide according to item 1, wherein X₁₂ is serine
[1400] 258. The peptide according to item 1, wherein X₁₂ is threonine
[1401] 259. The peptide according to item 1, wherein X₁₂ is tryptophan
[1402] 260. The peptide according to item 1, wherein X₁₂ is tyrosine
[1403] 261. The peptide according to item 1, wherein X₁₂ is valine
[1404] 262. The peptide according to item 1, wherein X₁₃ is alanine
[1405] 263. The peptide according to item 1, wherein X₁₃ is arginine
[1406] 264. The peptide according to item 1, wherein X₁₃ is asparagine
[1407] 265. The peptide according to item 1, wherein X₁₃ is aspartic acid
[1408] 266. The peptide according to item 1, wherein X₁₃ is cysteine
[1409] 267. The peptide according to item 1, wherein X₁₃ is glutamic acid
[1410] 268. The peptide according to item 1, wherein X₁₃ is glutamine
[1411] 269. The peptide according to item 1, wherein X₁₃ is glycine
[1412] 270. The peptide according to item 1, wherein X₁₃ is histidine
[1413] 271. The peptide according to item 1, wherein X₁₃ is isoleucine
[1414] 272. The peptide according to item 1, wherein X₁₃ is leucine
[1415] 273. The peptide according to item 1, wherein X₁₃ is lysine
[1416] 274. The peptide according to item 1, wherein X₁₃ is methionine
[1417] 275. The peptide according to item 1, wherein X₁₃ is phenylalanine
[1418] 276. The peptide according to item 1, wherein X₁₃ is proline
[1419] 277. The peptide according to item 1, wherein X₁₃ is serine
[1420] 278. The peptide according to item 1, wherein X₁₃ is threonine
[1421] 279. The peptide according to item 1, wherein X₁₃ is tryptophan
[1422] 280. The peptide according to item 1, wherein X₁₃ is tyrosine
[1423] 281. The peptide according to item 1, wherein X₁₃ is valine
[1424] 282. The peptide according to item 1, wherein X₁₄ is alanine
[1425] 283. The peptide according to item 1, wherein X₁₄ is arginine
[1426] 284. The peptide according to item 1, wherein X₁₄ is asparagine
[1427] 285. The peptide according to item 1, wherein X₁₄ is aspartic acid
[1428] 286. The peptide according to item 1, wherein X₁₄ is cysteine
[1429] 287. The peptide according to item 1, wherein X₁₄ is glutamic acid
[1430] 288. The peptide according to item 1, wherein X₁₄ is glutamine
[1431] 289. The peptide according to item 1, wherein X₁₄ is glycine
[1432] 290. The peptide according to item 1, wherein X₁₄ is histidine
[1433] 291. The peptide according to item 1, wherein X₁₄ is isoleucine
[1434] 292. The peptide according to item 1, wherein X₁₄ is leucine
[1435] 293. The peptide according to item 1, wherein X₁₄ is lysine
[1436] 294. The peptide according to item 1, wherein X₁₄ is methionine
[1437] 295. The peptide according to item 1, wherein X₁₄ is phenylalanine
[1438] 296. The peptide according to item 1, wherein X₁₄ is proline
[1439] 297. The peptide according to item 1, wherein X₁₄ is serine
[1440] 298. The peptide according to item 1, wherein X₁₄ is threonine
[1441] 299. The peptide according to item 1, wherein X₁₄ is tryptophan
[1442] 300. The peptide according to item 1, wherein X₁₄ is tyrosine
[1443] 301. The peptide according to item 1, wherein X₁₄ is valine
[1444] 302. The peptide according to item 1, wherein X₁₅ is alanine
[1445] 303. The peptide according to item 1, wherein X₁₅ is arginine
[1446] 304. The peptide according to item 1, wherein X₁₅ is asparagine
[1447] 305. The peptide according to item 1, wherein X₁₅ is aspartic acid
[1448] 306. The peptide according to item 1, wherein X₁₅ is cysteine
[1449] 307. The peptide according to item 1, wherein X₁₅ is glutamic acid
[1450] 308. The peptide according to item 1, wherein X₁₅ is glutamine
[1451] 309. The peptide according to item 1, wherein X₁₅ is glycine
[1452] 310. The peptide according to item 1, wherein X₁₅ is histidine
[1453] 311. The peptide according to item 1, wherein X₁₅ is isoleucine
[1454] 312. The peptide according to item 1, wherein X₁₅ is leucine
[1455] 313. The peptide according to item 1, wherein X₁₅ is lysine
[1456] 314. The peptide according to item 1, wherein X₁₅ is methionine
[1457] 315. The peptide according to item 1, wherein X₁₅ is phenylalanine
[1458] 316. The peptide according to item 1, wherein X₁₅ is proline
[1459] 317. The peptide according to item 1, wherein X₁₅ is serine
[1460] 318. The peptide according to item 1, wherein X₁₅ is threonine
[1461] 319. The peptide according to item 1, wherein X₁₅ is tryptophan
[1462] 320. The peptide according to item 1, wherein X₁₅ is tyrosine
[1463] 321. The peptide according to item 1, wherein X₁₅ is valine
[1464] 322. The peptide according to item 1, wherein X₁₆ is alanine
[1465] 323. The peptide according to item 1, wherein X₁₆ is arginine
[1466] 324. The peptide according to item 1, wherein X₁₆ is asparagine
[1467] 325. The peptide according to item 1, wherein X₁₆ is aspartic acid
[1468] 326. The peptide according to item 1, wherein X₁₆ is cysteine
[1469] 327. The peptide according to item 1, wherein X₁₆ is glutamic acid
[1470] 328. The peptide according to item 1, wherein X₁₆ is glutamine
[1471] 329. The peptide according to item 1, wherein X₁₆ is glycine
[1472] 330. The peptide according to item 1, wherein X₁₆ is histidine
[1473] 331. The peptide according to item 1, wherein X₁₆ is isoleucine
[1474] 332. The peptide according to item 1, wherein X₁₆ is leucine
[1475] 333. The peptide according to item 1, wherein X₁₆ is lysine
[1476] 334. The peptide according to item 1, wherein X₁₆ is methionine
[1477] 335. The peptide according to item 1, wherein X₁₆ is phenylalanine
[1478] 336. The peptide according to item 1, wherein X₁₆ is proline
[1479] 337. The peptide according to item 1, wherein X₁₆ is serine
[1480] 338. The peptide according to item 1, wherein X₁₆ is threonine
[1481] 339. The peptide according to item 1, wherein X₁₆ is tryptophan
[1482] 340. The peptide according to item 1, wherein X₁₆ is tyrosine
[1483] 341. The peptide according to item 1, wherein X₁₆ is valine
[1484] 342. The peptide according to any of items 2, 22, 42, 62, 82, 102, 122, 142, 162, 182, 202, 222, 242, 262, 282, 302 or 322, wherein the alanine is D-alanine
[1485] 343. The peptide according to any of items 2, 22, 42, 62, 82, 102, 122, 142, 162, 182, 202, 222, 242, 262, 282, 302 or 322, wherein the alanine is L-alanine
[1486] 344. The peptide according to any of items 3, 23, 43, 63, 83, 103, 123, 143, 163, 183, 203, 223, 243, 263, 283, 303 or 323, wherein the arginine is D-arginine
[1487] 345. The peptide according to any of items 3, 23, 43, 63, 83, 103, 123, 143, 163, 183, 203, 223, 243, 263, 283, 303 or 323, wherein the arginine is L-arginine
[1488] 346. The peptide according to any of items 4, 24, 44, 64, 84, 104, 124, 144, 164, 184, 204, 224, 244, 264, 284, 304 or 324, wherein the asparagine is D-asparagine
[1489] 347. The peptide according to any of items 4, 24, 44, 64, 84, 104, 124, 144, 164, 184, 204, 224, 244, 264, 284, 304 or 324, wherein the asparagine is L-asparagine
[1490] 348. The peptide according to any of items 5, 25, 45, 65, 85, 105, 125, 145, 165, 185, 205, 225, 245, 265, 285, 305 or 325, wherein the aspartic acid is D-aspartic acid
[1491] 349. The peptide according to any of items 5, 25, 45, 65, 85, 105, 125, 145, 165, 185, 205, 225, 245, 265, 285, 305 or 325, wherein the aspartic acid is L-aspartic acid
[1492] 350. The peptide according to any of items 6, 26, 46, 66, 86, 106, 126, 146, 166, 186, 206, 226, 246, 266, 286, 306 or 326, wherein the cysteine is D-cysteine
[1493] 351. The peptide according to any of items 6, 26, 46, 66, 86, 106, 126, 146, 166, 186, 206, 226, 246, 266, 286, 306 or 326, wherein the cysteine is L-cysteine
[1494] 352. The peptide according to any of items 7, 27, 47, 67, 87, 107, 127, 147, 167, 187, 207, 227, 247, 267, 287, 307 or 327, wherein the glutamic acid is D-glutamic acid
[1495] 353. The peptide according to any of items 7, 27, 47, 67, 87, 107, 127, 147, 167, 187, 207, 227, 247, 267, 287, 307 or 327, wherein the glutamic acid is L-glutamic acid
[1496] 354. The peptide according to any of items 8, 28, 48, 68, 88, 108, 128, 148, 168, 188, 208, 228, 248, 268, 288, 308 or 328, wherein the glutamine is D-glutamine
[1497] 355. The peptide according to any of items 8, 28, 48, 68, 88, 108, 128, 148, 168, 188, 208, 228, 248, 268, 288, 308 or 328, wherein the glutamine is L-glutamine
[1498] 356. The peptide according to any of items 9, 29, 49, 69, 89, 109, 129, 149, 169, 189, 209, 229, 249, 269, 289, 309 or 329, wherein the glycine is D-glycine
[1499] 357. The peptide according to any of items 9, 29, 49, 69, 89, 109, 129, 149, 169, 189, 209, 229, 249, 269, 289, 309 or 329, wherein the glycine is L-glycine
[1500] 358. The peptide according to any of items 10, 30, 50, 70, 90, 110, 130, 150, 170, 190, 210, 230, 250, 270, 290, 310 or 330, wherein the histidine is D-histidine
[1501] 359. The peptide according to any of items 10, 30, 50, 70, 90, 110, 130, 150, 170, 190, 210, 230, 250, 270, 290, 310 or 330, wherein the histidine is L-histidine
[1502] 360. The peptide according to any of items 11, 31, 51, 71, 91, 111, 131, 151, 171, 191, 211, 231, 251, 271, 291, 311 or 331, wherein the isoleucine is D-isoleucine
[1503] 361. The peptide according to any of items 11, 31, 51, 71, 91, 111, 131, 151, 171, 191, 211, 231, 251, 271, 291, 311 or 331, wherein the isoleucine is L-isoleucine
[1504] 362. The peptide according to any of items 12, 32, 52, 72, 92, 112, 132, 152, 172, 192, 212, 232, 252, 272, 292, 312 or 332, wherein the leucine is D-leucine
[1505] 363. The peptide according to any of items 12, 32, 52, 72, 92, 112, 132, 152, 172, 192, 212, 232, 252, 272, 292, 312 or 332, wherein the leucine is L-leucine
[1506] 364. The peptide according to any of items 13, 33, 53, 73, 93, 113, 133, 153, 173, 193, 213, 233, 253, 273, 293, 313 or 333, wherein the lysine is D-lysine
[1507] 365. The peptide according to any of items 13, 33, 53, 73, 93, 113, 133, 153, 173, 193, 213, 233, 253, 273, 293, 313 or 333, wherein the lysine is L-lysine
[1508] 366. The peptide according to any of items 14, 34, 54, 74, 94, 114, 134, 154, 174, 194, 214, 234, 254, 274, 294, 314 or 334, wherein the methionine is D-methionine
[1509] 367. The peptide according to any of items 14, 34, 54, 74, 94, 114, 134, 154, 174, 194, 214, 234, 254, 274, 294, 314 or 334, wherein the methionine is L-methionine
[1510] 368. The peptide according to any of items 15, 35, 55, 75, 95, 115, 135, 155, 175, 195, 215, 235, 255, 275, 295, 315 or 335, wherein the phenylalanine is D-phenylalanine
[1511] 369. The peptide according to any of items 15, 35, 55, 75, 95, 115, 135, 155, 175, 195, 215, 235, 255, 275, 295, 315 or 335, wherein the phenylalanine is L-phenylalanine
[1512] 370. The peptide according to any of items 16, 36, 56, 76, 96, 116, 136, 156, 176, 196, 216, 236, 256, 276, 296, 316 or 336, wherein the proline is D-proline
[1513] 371. The peptide according to any of items 16, 36, 56, 76, 96, 116, 136, 156, 176, 196, 216, 236, 256, 276, 296, 316 or 336, wherein the proline is L-proline
[1514] 372. The peptide according to any of items 17, 37, 57, 77, 97, 117, 137, 157, 177, 197, 217, 237, 257, 277, 297, 317 or 337, wherein the serine is D-serine
[1515] 373. The peptide according to any of items 17, 37, 57, 77, 97, 117, 137, 157, 177, 197, 217, 237, 257, 277, 297, 317 or 337, wherein the serine is L-serine
[1516] 374. The peptide according to any of items 18, 38, 58, 78, 98, 118, 138, 158, 178, 198, 218, 238, 258, 278, 298, 318 or 338, wherein the threonine is D-threonine
[1517] 375. The peptide according to any of items 18, 38, 58, 78, 98, 118, 138, 158, 178, 198, 218, 238, 258, 278, 298, 318 or 338, wherein the threonine is L-threonine
[1518] 376. The peptide according to any of items 19, 39, 59, 79, 99, 119, 139, 159, 179, 199, 219, 239, 259, 279, 299, 319 or 339, wherein the tryptophan is D-tryptophan
[1519] 377. The peptide according to any of items 19, 39, 59, 79, 99, 119, 139, 159, 179, 199, 219, 239, 259, 279, 299, 319 or 339, wherein the tryptophan is L-tryptophan
[1520] 378. The peptide according to any of items 20, 40, 60, 80, 100, 120, 140, 160, 180, 200, 220, 240, 260, 280, 300, 320 or 340, wherein the tyrosine is D-tyrosine
[1521] 379. The peptide according to any of items 20, 40, 60, 80, 100, 120, 140, 160, 180, 200, 220, 240, 260, 280, 300, 320 or 340, wherein the tyrosine is L-tyrosine
[1522] 380. The peptide according to any of items 21, 41, 61, 81, 101, 121, 141, 161, 181, 201, 221, 241, 261, 281, 301, 321 or 341, wherein the valine is D-valine
[1523] 381. The peptide according to any of items 21, 41, 61, 81, 101, 121, 141, 161, 181, 201, 221, 241, 261, 281, 301, 321 or 341, wherein the valine is L-valine
[1524] 382. The peptide according to item 1 to 381, wherein one or more of said amino acid residues are modified, such as post-translationally modified or co-translationally modified
[1525] 383. The peptide according to item 382, wherein said modification is acetylation of one or more amino acid residues
[1526] 384. The peptide according to item 382, wherein said modification is phosphorylation of one or more amino acid residues
[1527] 385. The peptide according to item 382, wherein said modification is glycosylation of one or more amino acid residues
[1528] 386. The peptide according to item 382, wherein said modification is non-enzymatic glycosylation (or glycation) of one or more amino acid residues
[1529] 387. The peptide according to item 382, wherein said modification is methylation of one or more amino acid residues
[1530] 388. The peptide according to item 382, wherein said modification is amidation of one or more amino acid residues
[1531] 389. The peptide according to item 382, wherein said modification is deamidation of one or more amino acid residues
[1532] 390. The peptide according to item 382, wherein said modification is succinimide formation of one or more amino acid residues
[1533] 391. The peptide according to item 382, wherein said modification is biotinylation of one or more amino acid residues
[1534] 392. The peptide according to item 382, wherein said modification is formylation of one or more amino acid residues
[1535] 393. The peptide according to item 382, wherein said modification is carboxylation of one or more amino acid residues
[1536] 394. The peptide according to item 382, wherein said modification is carbamylation of one or more amino acid residues
[1537] 395. The peptide according to item 382, wherein said modification is hydroxylation of one or more amino acid residues
[1538] 396. The peptide according to item 382, wherein said modification is iodination of one or more amino acid residues
[1539] 397. The peptide according to item 382, wherein said modification is isoprenylation (or prenylation or lipidation or lipoylation) of one or more amino acid residues
[1540] 398. The peptide according to item 382, wherein said modification is GPI (glycosyl phosphatidylinositol) anchor formation of one or more amino acid residues
[1541] 399. The peptide according to item 382, wherein said modification is myristoylation of one or more amino acid residues
[1542] 400. The peptide according to item 382, wherein said modification is farnesylation of one or more amino acid residues
[1543] 401. The peptide according to item 382, wherein said modification is geranylgeranylation of one or more amino acid residues
[1544] 402. The peptide according to item 382, wherein said modification is covalent attachment of nucleotides or derivates thereof to one or more amino acid residues
[1545] 403. The peptide according to item 382, wherein said modification is ADP-ribosylation of one or more amino acid residues
[1546] 404. The peptide according to item 382, wherein said modification is flavin attachment to one or more amino acid residues
[1547] 405. The peptide according to item 382, wherein said modification is oxidation of one or more amino acid residues
[1548] 406. The peptide according to item 382, wherein said modification is oxidative deamination of one or more amino acid residues
[1549] 407. The peptide according to item 382, wherein said modification is deamination of one or more amino acid residues
[1550] 408. The peptide according to item 382, wherein said modification is palmitoylation of one or more amino acid residues
[1551] 409. The peptide according to item 382, wherein said modification is pegylation of one or more amino acid residues
[1552] 410. The peptide according to item 382, wherein said modification is attachment of phosphatidyl-inositol of one or more amino acid residues
[1553] 411. The peptide according to item 382, wherein said modification is phosphopantetheinylation of one or more amino acid residues
[1554] 412. The peptide according to item 382, wherein said modification is polysialylation of one or more amino acid residues
[1555] 413. The peptide according to item 382, wherein said modification is sulfation of one or more amino acid residues
[1556] 414. The peptide according to item 382, wherein said modification is selenoylation of one or more amino acid residues
[1557] 415. The peptide according to item 382, wherein said modification is arginylation of one or more amino acid residues
[1558] 416. The peptide according to item 382, wherein said modification is glutamylation or polyglutamylation of one or more amino acid residues
[1559] 417. The peptide according to item 382, wherein said modification is glycylation or polyglycylation of one or more amino acid residues
[1560] 418. The peptide according to item 382, wherein said modification is acylation (or alkanoylation) of one or more amino acid residues
[1561] 419. The peptide according to item 382, wherein said modification is Methylidene-imidazolone (MIO) formation of one or more amino acid residues
[1562] 420. The peptide according to item 382, wherein said modification is p-Hydroxybenzylidene-imidazolone formation of one or more amino acid residues
[1563] 421. The peptide according to item 382, wherein said modification is Lysine tyrosyl quinone (LTQ) formation of one or more amino acid residues
[1564] 422. The peptide according to item 382, wherein said modification is Topaquinone (TPQ) formation of one or more amino acid residues
[1565] 423. The peptide according to item 382, wherein said modification is Porphyrin ring linkage of one or more amino acid residues
[1566] 424. The peptide according to item 382, wherein said modification is glypiation (addition of glycosyl phosphatidyl inositol) of one or more amino acid residues
[1567] 425. The peptide according to item 382, wherein said modification is addition of heme to one or more amino acid residues
[1568] 426. The peptide according to item 382, wherein said modification is ubiquitination of one or more amino acid residues
[1569] 427. The peptide according to item 382, wherein said modification is SUMOylation (Small Ubiquitin-like Modifier) of one or more amino acid residues
[1570] 428. The peptide according to item 382, wherein said modification is ISGylation of one or more amino acid residues
[1571] 429. The peptide according to item 382, wherein said modification is citrullination (or deimination) of one or more amino acid residues
[1572] 430. The peptide according to item 382, wherein said modification is the formation of pyroglutamic acid (or pidolic acid) of one or more amino acid residues
[1573] 431. The peptide according to item 382, wherein said modification is formation of disulfide bridges (or disulfide bond or SS-bond or persulfide connection) between two amino acid residues
[1574] 432. The peptide according to item 382, wherein said modification is formation of a desmosine cross-link between two or more amino acid residues
[1575] 433. The peptide according to item 382, wherein said modification is transglutamination between two or more amino acid residues
[1576] 434. The peptide according to item 1, wherein any of X₁, X₂, X₃, X₄, X₅, X₆, X₇, X₈, X₉, X₁₀, X₁₁, X₁₂, X₁₃, X₁₄, X₁₆ and/or X₁₆ is an uncommon or modified amino acid
[1577] 435. The peptide according to item 434, wherein said uncommon amino acid is acetylalanine
[1578] 436. The peptide according to item 434, wherein said uncommon amino acid is acetylaspartic acid
[1579] 437. The peptide according to item 434, wherein said uncommon amino acid is acetylcysteine
[1580] 438. The peptide according to item 434, wherein said uncommon amino acid is acetylglutamic acid
[1581] 439. The peptide according to item 434, wherein said uncommon amino acid is acetylglutamine
[1582] 440. The peptide according to item 434, wherein said uncommon amino acid is acetylglycine
[1583] 441. The peptide according to item 434, wherein said uncommon amino acid is acetylisoleucine
[1584] 442. The peptide according to item 434, wherein said uncommon amino acid is acetyllysine
[1585] 443. The peptide according to item 434, wherein said uncommon amino acid is acetylmethionine
[1586] 444. The peptide according to item 434, wherein said uncommon amino acid is acetylproline
[1587] 445. The peptide according to item 434, wherein said uncommon amino acid is acetylserine
[1588] 446. The peptide according to item 434, wherein said uncommon amino acid is acetylthreonine
[1589] 447. The peptide according to item 434, wherein said uncommon amino acid is acetyltyrosine
[1590] 448. The peptide according to item 434, wherein said uncommon amino acid is acetylvaline
[1591] 449. The peptide according to item 434, wherein said uncommon amino acid is acetyllysine
[1592] 450. The peptide according to item 434, wherein said uncommon amino acid is acetylcysteine
[1593] 451. The peptide according to item 434, wherein said uncommon amino acid is alanine amide
[1594] 452. The peptide according to item 434, wherein said uncommon amino acid is arginine amide
[1595] 453. The peptide according to item 434, wherein said uncommon amino acid is asparagine amide
[1596] 454. The peptide according to item 434, wherein said uncommon amino acid is aspartic acid amide
[1597] 455. The peptide according to item 434, wherein said uncommon amino acid is cysteine amide
[1598] 456. The peptide according to item 434, wherein said uncommon amino acid is glutamine amide
[1599] 457. The peptide according to item 434, wherein said uncommon amino acid is glutamic acid amide
[1600] 458. The peptide according to item 434, wherein said uncommon amino acid is glycine amide
[1601] 459. The peptide according to item 434, wherein said uncommon amino acid is histidine amide
[1602] 460. The peptide according to item 434, wherein said uncommon amino acid is isoleucine amide
[1603] 461. The peptide according to item 434, wherein said uncommon amino acid is leucine amide
[1604] 462. The peptide according to item 434, wherein said uncommon amino acid is lysine amide
[1605] 463. The peptide according to item 434, wherein said uncommon amino acid is methionine amide
[1606] 464. The peptide according to item 434, wherein said uncommon amino acid is phenylalanine amide
[1607] 465. The peptide according to item 434, wherein said uncommon amino acid is proline amide
[1608] 466. The peptide according to item 434, wherein said uncommon amino acid is serine amide
[1609] 467. The peptide according to item 434, wherein said uncommon amino acid is threonine amide
[1610] 468. The peptide according to item 434, wherein said uncommon amino acid is tryptophan amide
[1611] 469. The peptide according to item 434, wherein said uncommon amino acid is tyrosine amide
[1612] 470. The peptide according to item 434, wherein said uncommon amino acid is valine amide
[1613] 471. The peptide according to item 434, wherein said uncommon amino acid is an amino acid alcohol
[1614] 472. The peptide according to item 434, wherein said uncommon amino acid is Aminobenzoic Acid
[1615] 473. The peptide according to item 434, wherein said uncommon amino acid is Aminobutyric Acid
[1616] 474. The peptide according to item 434, wherein said uncommon amino acid is Aminocyanobutyric acid
[1617] 475. The peptide according to item 434, wherein said uncommon amino acid is Aminocyanopropionic acid
[1618] 476. The peptide according to item 434, wherein said uncommon amino acid is Aminocyclohexanoic acid
[1619] 477. The peptide according to item 434, wherein said uncommon amino acid is Aminocyclopropanoic acid
[1620] 478. The peptide according to item 434, wherein said uncommon amino acid is Aminocylopentanoic acid
[1621] 479. The peptide according to item 434, wherein said uncommon amino acid is Aminodecanoic acid
[1622] 480. The peptide according to item 434, wherein said uncommon amino acid is Aminododecanoic acid
[1623] 481. The peptide according to item 434, wherein said uncommon amino acid is Aminohexanoic acid
[1624] 482. The peptide according to item 434, wherein said uncommon amino acid is Aminoisobutyric acid
[1625] 483. The peptide according to item 434, wherein said uncommon amino acid is Aminomethylbenzoic acid
[1626] 484. The peptide according to item 434, wherein said uncommon amino acid is Aminomethylcyclohexanoic acid
[1627] 485. The peptide according to item 434, wherein said uncommon amino acid is Aminononanoic acid
[1628] 486. The peptide according to item 434, wherein said uncommon amino acid is Aminooctanoic acid
[1629] 487. The peptide according to item 434, wherein said uncommon amino acid is Aminophenylalanine
[1630] 488. The peptide according to item 434, wherein said uncommon amino acid is Amino Salicylic acid
[1631] 489. The peptide according to item 434, wherein said uncommon amino acid is 2-Amino-2-Thiazoline-4-carboxylic acid
[1632] 490. The peptide according to item 434, wherein said uncommon amino acid is Aminoundecanoic acid
[1633] 491. The peptide according to item 434, wherein said uncommon amino acid is Aminovaleric acid
[1634] 492. The peptide according to item 434, wherein said uncommon amino acid is
[1635] 4-Benzoylphenylalanine
[1636] 493. The peptide according to item 434, wherein said uncommon amino acid is Biphenylalanine
[1637] 494. The peptide according to item 434, wherein said uncommon amino acid is Bromophenylalanine
[1638] 495. The peptide according to item 434, wherein said uncommon amino acid is gamma-Carboxyglutamic acid
[1639] 496. The peptide according to item 434, wherein said uncommon amino acid is canavanine
[1640] 497. The peptide according to item 434, wherein said uncommon amino acid is Carnitine
[1641] 498. The peptide according to item 434, wherein said uncommon amino acid is Chlorophenylalanine
[1642] 499. The peptide according to item 434, wherein said uncommon amino acid is Chlorotyrosine
[1643] 500. The peptide according to item 434, wherein said uncommon amino acid is Cine
[1644] 501. The peptide according to item 434, wherein said uncommon amino acid is Citrulline
[1645] 502. The peptide according to item 434, wherein said uncommon amino acid is
[1646] 4-Cyano-2-Aminobutyric acid
[1647] 503. The peptide according to item 434, wherein said uncommon amino acid is Cyclohexylalanine
[1648] 504. The peptide according to item 434, wherein said uncommon amino acid is Cyclohexylglycine
[1649] 505. The peptide according to item 434, wherein said uncommon amino acid is Diaminobenzoic acid
[1650] 506. The peptide according to item 434, wherein said uncommon amino acid is 2,4-Diaminobutyric acid
[1651] 507. The peptide according to item 434, wherein said uncommon amino acid is 2,3-Diaminopropionic acid
[1652] 508. The peptide according to item 434, wherein said uncommon amino acid is Dibutylglycine
[1653] 509. The peptide according to item 434, wherein said uncommon amino acid is Diethylglycine
[1654] 510. The peptide according to item 434, wherein said uncommon amino acid is Dihydrotryptophan
[1655] 511. The peptide according to item 434, wherein said uncommon amino acid is Dipropylglycine
[1656] 512. The peptide according to item 434, wherein said uncommon amino acid is Fluorophenylalanine
[1657] 513. The peptide according to item 434, wherein said uncommon amino acid is formylmethionine
[1658] 514. The peptide according to item 434, wherein said uncommon amino acid is formylglycine
[1659] 515. The peptide according to item 434, wherein said uncommon amino acid is formyllysine
[1660] 516. The peptide according to item 434, wherein said uncommon amino acid is farnesylcysteine
[1661] 517. The peptide according to item 434, wherein said uncommon amino acid is hydroxyfarnesylcysteine
[1662] 518. The peptide according to item 434, wherein said uncommon amino acid is Homoalanine
[1663] 519. The peptide according to item 434, wherein said uncommon amino acid is Homoarginine
[1664] 520. The peptide according to item 434, wherein said uncommon amino acid is Homoasparagine
[1665] 521. The peptide according to item 434, wherein said uncommon amino acid is Homoaspartic acid
[1666] 522. The peptide according to item 434, wherein said uncommon amino acid is Homoglutamic acid
[1667] 523. The peptide according to item 434, wherein said uncommon amino acid is Homoglutamine
[1668] 524. The peptide according to item 434, wherein said uncommon amino acid is Homoisoleucine
[1669] 525. The peptide according to item 434, wherein said uncommon amino acid is Homophenylalanine
[1670] 526. The peptide according to item 434, wherein said uncommon amino acid is Homoserine
[1671] 527. The peptide according to item 434, wherein said uncommon amino acid is Homotyrosine
[1672] 528. The peptide according to item 434, wherein said uncommon amino acid is Hydroxyproline
[1673] 529. The peptide according to item 434, wherein said uncommon amino acid is Hydroxylysine
[1674] 530. The peptide according to item 434, wherein said uncommon amino acid is 2-Indanylglycine
[1675] 531. The peptide according to item 434, wherein said uncommon amino acid is 2-Indolecarboxylic acid
[1676] 532. The peptide according to item 434, wherein said uncommon amino acid is Indoleglycine
[1677] 533. The peptide according to item 434, wherein said uncommon amino acid is Iodophenylalanine
[1678] 534. The peptide according to item 434, wherein said uncommon amino acid is Isonipecotic Acid
[1679] 535. The peptide according to item 434, wherein said uncommon amino acid is Kynurenine
[1680] 536. The peptide according to item 434, wherein said uncommon amino acid is 6-(S-Benzyl)Mercapto-6,6-cyclopentamethylene propionic acid
[1681] 537. The peptide according to item 434, wherein said uncommon amino acid is Methyltyrosine
[1682] 538. The peptide according to item 434, wherein said uncommon amino acid is Methylphenylalanine
[1683] 539. The peptide according to item 434, wherein said uncommon amino acid is methylalanine
[1684] 540. The peptide according to item 434, wherein said uncommon amino acid is trimethylalanine
[1685] 541. The peptide according to item 434, wherein said uncommon amino acid is methylglycine
[1686] 542. The peptide according to item 434, wherein said uncommon amino acid is methylmethionine
[1687] 543. The peptide according to item 434, wherein said uncommon amino acid is methylphenylalanine
[1688] 544. The peptide according to item 434, wherein said uncommon amino acid is dimethylproline
[1689] 545. The peptide according to item 434, wherein said uncommon amino acid is dimethylarginine
[1690] 546. The peptide according to item 434, wherein said uncommon amino acid is methylarginine
[1691] 547. The peptide according to item 434, wherein said uncommon amino acid is methylasparagine
[1692] 548. The peptide according to item 434, wherein said uncommon amino acid is methylglutamine
[1693] 549. The peptide according to item 434, wherein said uncommon amino acid is methylhistidine
[1694] 550. The peptide according to item 434, wherein said uncommon amino acid is trimethyllysine
[1695] 551. The peptide according to item 434, wherein said uncommon amino acid is dimethyllysine
[1696] 552. The peptide according to item 434, wherein said uncommon amino acid is methyllysine
[1697] 553. The peptide according to item 434, wherein said uncommon amino acid is methylcysteine
[1698] 554. The peptide according to item 434, wherein said uncommon amino acid is glutamic acid 5-methyl ester
[1699] 555. The peptide according to item 434, wherein said uncommon amino acid is Naphthylalanine
[1700] 556. The peptide according to item 434, wherein said uncommon amino acid is Nipecotic acid
[1701] 557. The peptide according to item 434, wherein said uncommon amino acid is Nitrophenylalanine
[1702] 558. The peptide according to item 434, wherein said uncommon amino acid is Norleucine
[1703] 559. The peptide according to item 434, wherein said uncommon amino acid is Norvaline
[1704] 560. The peptide according to item 434, wherein said uncommon amino acid is Octahydroindolecarboxylic acid
[1705] 561. The peptide according to item 434, wherein said uncommon amino acid is ornithine
[1706] 562. The peptide according to item 434, wherein said uncommon amino acid is Penicillamine
[1707] 563. The peptide according to item 434, wherein said uncommon amino acid is Phenylglycine
[1708] 564. The peptide according to item 434, wherein said uncommon amino acid is phosphocysteine
[1709] 565. The peptide according to item 434, wherein said uncommon amino acid is phosphohistidine
[1710] 566. The peptide according to item 434, wherein said uncommon amino acid is phosphoserine
[1711] 567. The peptide according to item 434, wherein said uncommon amino acid is phosphothreonine
[1712] 568. The peptide according to item 434, wherein said uncommon amino acid is phosphotyrosine
[1713] 569. The peptide according to item 434, wherein said uncommon amino acid is phosphoarginine
[1714] 570. The peptide according to item 434, wherein said uncommon amino acid is (phospho-5′-adenosine)-tyrosine
[1715] 571. The peptide according to item 434, wherein said uncommon amino acid is phosphopantetheine-serine
[1716] 572. The peptide according to item 434, wherein said uncommon amino acid is (phospho-5′-RNA)-serine
[1717] 573. The peptide according to item 434, wherein said uncommon amino acid is (phospho-5′-adenosine)-lysine
[1718] 574. The peptide according to item 434, wherein said uncommon amino acid is (phospho-5′-guanosine)-lysine
[1719] 575. The peptide according to item 434, wherein said uncommon amino acid is (phospho-5′-DNA)-serine
[1720] 576. The peptide according to item 434, wherein said uncommon amino acid is (phospho-5′-RNA)-tyrosine
[1721] 577. The peptide according to item 434, wherein said uncommon amino acid is (phospho-5′-adenosine)-threonine
[1722] 578. The peptide according to item 434, wherein said uncommon amino acid is (phospho-5′-DNA)-tyrosine
[1723] 579. The peptide according to item 434, wherein said uncommon amino acid is (phospho-5′-DNA)-threonine
[1724] 580. The peptide according to item 434, wherein said uncommon amino acid is (phospho-5′-uridine)-tyrosine
[1725] 581. The peptide according to item 434, wherein said uncommon amino acid is 4-Phosphonomethylphenylalanine
[1726] 582. The peptide according to item 434, wherein said uncommon amino acid is palmitoylcysteine
[1727] 583. The peptide according to item 434, wherein said uncommon amino acid is palmitoyllysine
[1728] 584. The peptide according to item 434, wherein said uncommon amino acid is palmitoylthreonine
[1729] 585. The peptide according to item 434, wherein said uncommon amino acid is palmitoylserine
[1730] 586. The peptide according to item 434, wherein said uncommon amino acid is palmitoylcysteine
[1731] 587. The peptide according to item 434, wherein said uncommon amino acid is phycoerythrobilin-bis-cysteine
[1732] 588. The peptide according to item 434, wherein said uncommon amino acid is phycourobilin-bis-cysteine
[1733] 589. The peptide according to item 434, wherein said uncommon amino acid is pyrrolidone-5-carboxylic acid
[1734] 590. The peptide according to item 434, wherein said uncommon amino acid is Pipericolic Acid
[1735] 591. The peptide according to item 434, wherein said uncommon amino acid is Propargylglycine
[1736] 592. The peptide according to item 434, wherein said uncommon amino acid is Pyridinylalanine
[1737] 593. The peptide according to item 434, wherein said uncommon amino acid is pyroglutamic acid
[1738] 594. The peptide according to item 434, wherein said uncommon amino acid is Sarcosine
[1739] 595. The peptide according to item 434, wherein said uncommon amino acid is Tert-Leucine
[1740] 596. The peptide according to item 434, wherein said uncommon amino acid is Tetrahydroisoquinoline-3-carboxylic acid
[1741] 597. The peptide according to item 434, wherein said uncommon amino acid is Thiazolidinecarboxylic acid
[1742] 598. The peptide according to item 434, wherein said uncommon amino acid is Thyronine
[1743] 599. The peptide according to item 434, wherein said uncommon amino acid is selenocysteine
[1744] 600. The peptide according to item 434, wherein said uncommon amino acid is selenomethionine
[1745] 601. The peptide according to item 434, wherein said uncommon amino acid is erythro-beta-hydroxyasparagine
[1746] 602. The peptide according to item 434, wherein said uncommon amino acid is erythro-beta-hydroxyaspartic acid
[1747] 603. The peptide according to item 434, wherein said uncommon amino acid is gamma-carboxyglutamic acid
[1748] 604. The peptide according to item 434, wherein said uncommon amino acid is aspartic 4-phosphoric anhydride
[1749] 605. The peptide according to item 434, wherein said uncommon amino acid is 2′-[3-carboxamido-3-(trimethylammonio)propyl]-histidine
[1750] 606. The peptide according to item 434, wherein said uncommon amino acid is glucuronoylglycine
[1751] 607. The peptide according to item 434, wherein said uncommon amino acid is geranylgeranylcysteine
[1752] 608. The peptide according to item 434, wherein said uncommon amino acid is myristoylglycine
[1753] 609. The peptide according to item 434, wherein said uncommon amino acid is myristoyllysine
[1754] 610. The peptide according to item 434, wherein said uncommon amino acid is cysteine methyl disulfide
[1755] 611. The peptide according to item 434, wherein said uncommon amino acid is diacylglycerolcysteine
[1756] 612. The peptide according to item 434, wherein said uncommon amino acid is isoglutamylcysteine
[1757] 613. The peptide according to item 434, wherein said uncommon amino acid is cysteinylhistidine
[1758] 614. The peptide according to item 434, wherein said uncommon amino acid is lanthionine
[1759] 615. The peptide according to item 434, wherein said uncommon amino acid is mesolanthionine
[1760] 616. The peptide according to item 434, wherein said uncommon amino acid is methyllanthionine
[1761] 617. The peptide according to item 434, wherein said uncommon amino acid is cysteinyltyrosine
[1762] 618. The peptide according to item 434, wherein said uncommon amino acid is carboxylysine
[1763] 619. The peptide according to item 434, wherein said uncommon amino acid is carboxyethyllysine
[1764] 620. The peptide according to item 434, wherein said uncommon amino acid is (4-amino-2-hydroxybutyl)-lysine
[1765] 621. The peptide according to item 434, wherein said uncommon amino acid is biotinyllysine
[1766] 622. The peptide according to item 434, wherein said uncommon amino acid is lipoyllysine
[1767] 623. The peptide according to item 434, wherein said uncommon amino acid is pyridoxal phosphate-lysine
[1768] 624. The peptide according to item 434, wherein said uncommon amino acid is retinal-lysine
[1769] 625. The peptide according to item 434, wherein said uncommon amino acid is allysine
[1770] 626. The peptide according to item 434, wherein said uncommon amino acid is lysinoalanine
[1771] 627. The peptide according to item 434, wherein said uncommon amino acid is isoglutamyllysine
[1772] 628. The peptide according to item 434, wherein said uncommon amino acid is glycyllysine
[1773] 629. The peptide according to item 434, wherein said uncommon amino acid is isoaspartylglycine
[1774] 630. The peptide according to item 434, wherein said uncommon amino acid is pyruvic acid
[1775] 631. The peptide according to item 434, wherein said uncommon amino acid is phenyllacetic acid
[1776] 632. The peptide according to item 434, wherein said uncommon amino acid is oxobutanoic acid
[1777] 633. The peptide according to item 434, wherein said uncommon amino acid is succinyltryptophan
[1778] 634. The peptide according to item 434, wherein said uncommon amino acid is phycocyanobilincysteine
[1779] 635. The peptide according to item 434, wherein said uncommon amino acid is phycoerythrobilincysteine
[1780] 636. The peptide according to item 434, wherein said uncommon amino acid is phytochromobilincysteine
[1781] 637. The peptide according to item 434, wherein said uncommon amino acid is heme-bis-cysteine
[1782] 638. The peptide according to item 434, wherein said uncommon amino acid is heme-cysteine
[1783] 639. The peptide according to item 434, wherein said uncommon amino acid is tetrakis-cysteinyl iron
[1784] 640. The peptide according to item 434, wherein said uncommon amino acid is tetrakis-cysteinyl diiron disulfide
[1785] 641. The peptide according to item 434, wherein said uncommon amino acid is tris-cysteinyl triiron trisulfide
[1786] 642. The peptide according to item 434, wherein said uncommon amino acid is tris-cysteinyl triiron tetrasulfide
[1787] 643. The peptide according to item 434, wherein said uncommon amino acid is tetrakis-cysteinyl tetrairon tetrasulfide
[1788] 644. The peptide according to item 434, wherein said uncommon amino acid is cysteinyl homocitryl molybdenum-heptairon-nonasulfide
[1789] 645. The peptide according to item 434, wherein said uncommon amino acid is cysteinyl molybdopterin
[1790] 646. The peptide according to item 434, wherein said uncommon amino acid is (8alpha-FAD)-cysteine
[1791] 647. The peptide according to item 434, wherein said uncommon amino acid is (8alpha-FAD)-histidine
[1792] 648. The peptide according to item 434, wherein said uncommon amino acid is (8alpha-FAD)-tyrosine
[1793] 649. The peptide according to item 434, wherein said uncommon amino acid is dihydroxyphenylalanine
[1794] 650. The peptide according to item 434, wherein said uncommon amino acid is topaquinone
[1795] 651. The peptide according to item 434, wherein said uncommon amino acid is tryptophyl quinine
[1796] 652. The peptide according to item 434, wherein said uncommon amino acid is (tryptophan)-tryptophyl quinone
[1797] 653. The peptide according to item 434, wherein said uncommon amino acid is glycosylasparagine
[1798] 654. The peptide according to item 434, wherein said uncommon amino acid is glycosylcysteine
[1799] 655. The peptide according to item 434, wherein said uncommon amino acid is glycosylhydroxylysine
[1800] 656. The peptide according to item 434, wherein said uncommon amino acid is glycosylserine
[1801] 657. The peptide according to item 434, wherein said uncommon amino acid is glycosylthreonine
[1802] 658. The peptide according to item 434, wherein said uncommon amino acid is glycosyltryptophan
[1803] 659. The peptide according to item 434, wherein said uncommon amino acid is glycosyltyrosine
[1804] 660. The peptide according to item 434, wherein said uncommon amino acid is asparaginyl-glycosylphosphatidylinositolethanolamine
[1805] 661. The peptide according to item 434, wherein said uncommon amino acid is aspartyl-glycosylphosphatidylinositolethanolamine
[1806] 662. The peptide according to item 434, wherein said uncommon amino acid is cysteinyl-glycosylphosphatidylinositolethanolamine
[1807] 663. The peptide according to item 434, wherein said uncommon amino acid is glycyl-glycosylphosphatidylinositolethanolamine
[1808] 664. The peptide according to item 434, wherein said uncommon amino acid is seryl-glycosylphosphatidylinositolethanolamine
[1809] 665. The peptide according to item 434, wherein said uncommon amino acid is seryl-glycosylsphingolipidinositolethanolamine
[1810] 666. The peptide according to item 434, wherein said uncommon amino acid is (phosphoribosyl dephospho-coenzyme A)-serine
[1811] 667. The peptide according to item 434, wherein said uncommon amino acid is (ADP-ribosyl)-arginine
[1812] 668. The peptide according to item 434, wherein said uncommon amino acid is (ADP-ribosyl)-cysteine
[1813] 669. The peptide according to item 434, wherein said uncommon amino acid is glutamyl-glycerylphosphorylethanolamine
[1814] 670. The peptide according to item 434, wherein said uncommon amino acid is sulfocysteine
[1815] 671. The peptide according to item 434, wherein said uncommon amino acid is sulfotyrosine
[1816] 672. The peptide according to item 434, wherein said uncommon amino acid is bromohistidine
[1817] 673. The peptide according to item 434, wherein said uncommon amino acid is bromophenylalanine
[1818] 674. The peptide according to item 434, wherein said uncommon amino acid is triiodothyronine
[1819] 675. The peptide according to item 434, wherein said uncommon amino acid is thyroxine
[1820] 676. The peptide according to item 434, wherein said uncommon amino acid is bromotryptophan
[1821] 677. The peptide according to item 434, wherein said uncommon amino acid is dehydroalanine
[1822] 678. The peptide according to item 434, wherein said uncommon amino acid is dehydrobutyrine
[1823] 679. The peptide according to item 434, wherein said uncommon amino acid is dehydrotyrosine
[1824] 680. The peptide according to item 434, wherein said uncommon amino acid is seryl-imidazolinone glycine
[1825] 681. The peptide according to item 434, wherein said uncommon amino acid is oxoalanine
[1826] 682. The peptide according to item 434, wherein said uncommon amino acid is alanyl-imidazolinone glycine
[1827] 683. The peptide according to item 434, wherein said uncommon amino acid is allo-isoleucine
[1828] 684. The peptide according to item 434, wherein said uncommon amino acid is isoglutamyl-polyglycine
[1829] 685. The peptide according to item 434, wherein said uncommon amino acid is isoglutamyl-polyglutamic acid
[1830] 686. The peptide according to item 434, wherein said uncommon amino acid is aminovinyl-cysteine
[1831] 687. The peptide according to item 434, wherein said uncommon amino acid is (aminovinyl)-methyl-cysteine
[1832] 688. The peptide according to item 434, wherein said uncommon amino acid is cysteine sulfenic acid
[1833] 689. The peptide according to item 434, wherein said uncommon amino acid is glycyl-cysteine
[1834] 690. The peptide according to item 434, wherein said uncommon amino acid is hydroxycinnamyl-cysteine
[1835] 691. The peptide according to item 434, wherein said uncommon amino acid is chondroitin sulfate glucuronyl-galactosyl-galactosyl-xylosyl-serine
[1836] 692. The peptide according to item 434, wherein said uncommon amino acid is dermatan sulfate glucuronyl-galactosyl-galactosyl-xylosyl-serine
[1837] 693. The peptide according to item 434, wherein said uncommon amino acid is heparan sulfate glucuronyl-galactosyl-galactosyl-xylosyl-serine
[1838] 694. The peptide according to item 434, wherein said uncommon amino acid is glycosyl-hydroxyproline
[1839] 695. The peptide according to item 434, wherein said uncommon amino acid is hydroxy-arginine
[1840] 696. The peptide according to item 434, wherein said uncommon amino acid is isoaspartyl-cysteine
[1841] 697. The peptide according to item 434, wherein said uncommon amino acid is alpha-mannosyl-tryptophan
[1842] 698. The peptide according to item 434, wherein said uncommon amino acid is mureinyl-lysine
[1843] 699. The peptide according to item 434, wherein said uncommon amino acid is chondroitin sulfate-aspartic acid ester
[1844] 700. The peptide according to item 434, wherein said uncommon amino acid is (6-FMN)-cysteine
[1845] 701. The peptide according to item 434, wherein said uncommon amino acid is diphytanylglycerol diether-cysteine
[1846] 702. The peptide according to item 434, wherein said uncommon amino acid is bis-cysteinyl bis-histidino diiron disulfide
[1847] 703. The peptide according to item 434, wherein said uncommon amino acid is hexakis-cysteinyl hexairon hexasulfide
[1848] 704. The peptide according to item 434, wherein said uncommon amino acid is cysteine glutathione disulfide
[1849] 705. The peptide according to item 434, wherein said uncommon amino acid is nitrosyl-cysteine
[1850] 706. The peptide according to item 434, wherein said uncommon amino acid is (ADP-ribosyl)-asparagine
[1851] 707. The peptide according to item 434, wherein said uncommon amino acid is beta-methylthioaspartic acid
[1852] 708. The peptide according to item 434, wherein said uncommon amino acid is (lysine)-topaquinone
[1853] 709. The peptide according to item 434, wherein said uncommon amino acid is hydroxymethyl-asparagine
[1854] 710. The peptide according to item 434, wherein said uncommon amino acid is (ADP-ribosyl)-serine
[1855] 711. The peptide according to item 434, wherein said uncommon amino acid is cysteine oxazolecarboxylic acid
[1856] 712. The peptide according to item 434, wherein said uncommon amino acid is cysteine oxazolinecarboxylic acid
[1857] 713. The peptide according to item 434, wherein said uncommon amino acid is glycine oxazolecarboxylic acid
[1858] 714. The peptide according to item 434, wherein said uncommon amino acid is glycine thiazolecarboxylic acid
[1859] 715. The peptide according to item 434, wherein said uncommon amino acid is serine thiazolecarboxylic acid
[1860] 716. The peptide according to item 434, wherein said uncommon amino acid is phenyalanine thiazolecarboxylic acid
[1861] 717. The peptide according to item 434, wherein said uncommon amino acid is cysteine thiazolecarboxylic acid
[1862] 718. The peptide according to item 434, wherein said uncommon amino acid is lysine thiazolecarboxylic acid
[1863] 719. The peptide according to item 434, wherein said uncommon amino acid is keratan sulfate glucuronyl-galactosyl-galactosyl-xylosyl-threonine
[1864] 720. The peptide according to item 434, wherein said uncommon amino acid is selenocysteinyl molybdopterin guanine dinucleotide
[1865] 721. The peptide according to item 434, wherein said uncommon amino acid is histidyl-tyrosine
[1866] 722. The peptide according to item 434, wherein said uncommon amino acid is methionine sulfone
[1867] 723. The peptide according to item 434, wherein said uncommon amino acid is dipyrrolylmethanemethyl-cysteine
[1868] 724. The peptide according to item 434, wherein said uncommon amino acid is glutamyl-tyrosine
[1869] 725. The peptide according to item 434, wherein said uncommon amino acid is glutamyl-poly-glutamic acid
[1870] 726. The peptide according to item 434, wherein said uncommon amino acid is cysteine sulfinic acid
[1871] 727. The peptide according to item 434, wherein said uncommon amino acid is trihydroxyphenylalanine
[1872] 728. The peptide according to item 434, wherein said uncommon amino acid is (sn-1-glycerophosphoryl)-serine
[1873] 729. The peptide according to item 434, wherein said uncommon amino acid is thioglycine
[1874] 730. The peptide according to item 434, wherein said uncommon amino acid is heme P460-bis-cysteine-tyrosine
[1875] 731. The peptide according to item 434, wherein said uncommon amino acid is tris-cysteinyl-cysteine persulfido-bis-glutamato-histidino tetrairon disulfide trioxide
[1876] 732. The peptide according to item 434, wherein said uncommon amino acid is cysteine persulfide
[1877] 733. The peptide according to item 434, wherein said uncommon amino acid is Lactic acid (2-hydroxypropanoic acid)
[1878] 734. The peptide according to any of items 434 to 733, wherein said uncommon amino acid is the L-enantiomer
[1879] 735. The peptide according to any of items 434 to 733, wherein said uncommon amino acid is the D-enantiomer

### FIGURE LEGENDS

[1880] FIG. 1: Schematic representation of MHC multimer.

[1881] A MHC multimer consist of a multimerization domain whereto one or more MHC-peptide complexes are attached through one or more linkers. The multimerization domain comprise one or more carriers and/or one or more scaffolds. The MHC-peptide complexes comprise a peptide and a MHC molecule.

[1882] FIG. 2: Program for peptide sequence motifs prediction

[1883] FIG. 3: Full List of HLA Class I alleles assigned as of January 2007 from http://www.anthonynolan.org.uk/HIG/lists/classllist.html

[1884] FIG. 4: Top 30 HLA class 1 alleles in human ethnic groups

[1885] FIG. 5: Reactive groups and the bonds formed upon their reaction.

[1886] FIG. 6: Cleavable linkers, conditions for cleaving them and the resulting products of the cleavage.

[1887] FIG. 7: Size exclusion chromatography of folded HLA-A*0201-β2m-QLFEELQEL (SEQ ID NO 110876) peptide-complex.

[1888] Purification of HLA-A*0201-β2m-QLFEELQEL (SEQ ID NO 110876) peptide-complex by size exclusion chromatography on a HiLoad 16/60 Superdex 75 column. Eluted protein was followed by measurement of the absorbance at 280 nm. The elution profile consisted of 4 peaks, corresponding to aggregated Heavy Chain, correctly folded MHC-complex, β2m and excess biotin and peptide.

[1889] FIG. 8: MHC-SHIFT Assay.

[1890] The SHIFT Assay shows that heavy chain is efficiently biotinylated, since the band corresponding to biotinylated heavy chain (lane 2) is shifted up-wards upon incubation with streptavidin.

[1891] Lane 1: Benchmark protein-ladder

[1892] Lane 2: Folded HLA-A*0201-β2m-QLFEELQEL (SEQ ID NO 110876) peptide-complex.

[1893] Lane 3: Folded HLA-A*0201-β2m-QLFEELQEL (SEQ ID NO 110876) peptide-complex incubated with molar excess Streptavidin.

[1894] FIG. 9: Composition of Fluorescein-linker molecule.

[1895] (A) Schematic representation of an example of a Fluorescein-linker molecule. (B) Composition of a L15 linker.

[1896] FIG. 10: HLA alleles of the NetMHC databases

[1897] List of the 24 MHC class 1 alleles used for peptide prediction by the database http://www.cbs.dtu.dk/services/NetMHC/ and the 14 MHC class 2 alleles used for peptide prediction by the database http://www.cbs.dtu.dk/services/NetMHClI/WO

[1898] FIG. 11: Ex vivo ELISPOT analysis of BclX(L)-specific CD8 positive T cells in PBL from a breast cancer patient.

[1899] Ex vivo ELISPOT analysis of BclX(L)-specific, CD8 positive T cells in PBL from a breast cancer patient either with or without the BclX(L) YLNDHLEPWI (SEQ ID NO 110877) peptide. Analysis were performed in doublets and number of IFN-gamma producing T-cells are presented. (Reference: Sorensen R B, Hadrup S R, Kollgaard T, Svane I M, Thor Straten P, Andersen M H (2006) Efficient tumor cell lysis mediated by a Bcl-X(L) specific T cell clone isolated from a breast cancer patient. Cancer Immunol Immunother April; 56(4)527-33)

[1900] FIG. 12: PBL from a breast cancer patient analyzed by flow cytometry.

[1901] PBL from a breast cancer patient was analyzed by flow cytometry to identify Bcl-X(L)173-182 (peptide YLNDHLEPWI) (SEQ ID NO 110877) specific CD8 T cells using the dextramer complex HLA-A2/Bcl-X(L)173-182-APC, 7-AAD-PerCP, CD3-FITC, and CD8-APC-Cy7. The dextramer complex HLA-A2/HIV-1 pol476-484-APC was used as negative control.

[1902] (Reference: Sorensen R B, Hadrup S R, Kollgaard T, Svane I M, Thor Straten P, Andersen M H (2006) Efficient tumor cell lysis mediated by a Bcl-X(L) specific T cell clone isolated from a breast cancer patient. Cancer Immunol Immunother April; 56(4)527-33)

[1903] FIG. 13: 51-Cr release assay of isolated T cell clones.

[1904] Ten expanded T cell clones isolated by Flow sorting and then expanded were tested for their specificity by analysis in a standard 51-Cr release assay. For this purpose, T2 cells loaded with either Bcl-X(L)173-182, YLNDHLEPWI (SEQ ID NO 110877) peptide or an irrelevant peptide (BA4697-105, GLQHWVPEL (SEQ ID NO 110878)) were used as target cells.

[1905] (Reference: Sorensen R B, Hadrup S R, Kollgaard T, Svane I M, Thor Straten P, Andersen M H (2006) Efficient tumor cell lysis mediated by a Bcl-X(L) specific T cell clone isolated from a breast cancer patient. Cancer Immunol Immunother April; 56(4)527-33)

[1906] FIG. 14: Bcl-X(L)173-182 specific clone tested for its cytotoxic potential in 51Cr-release assays.

[1907] A Bcl-X(L)173-182 specific clone was tested for its cytotoxic potential in 51Cr-release assays. Two assays were performed a Cell lysis of T2 cells pulsed with Bcl-X(L)173-182 peptide or an irrelevant peptide (BA4697-105, GLQHWVPEL (SEQ ID NO 110878)) in three E:T ratios. b Cell lysis of T2 cells pulsed with different concentrations of Bcl-X(L)173-182 peptide at the E:T ratio 1:1

[1908] (Reference: Sorensen R B, Hadrup S R, Kollgaard T, Svane I M, Thor Straten P, Andersen M H (2006) Efficient tumor cell lysis mediated by a Bcl-X(L) specific T cell clone isolated from a breast cancer patient. Cancer Immunol Immunother April; 56(4)527-33)

[1909] FIG. 15: Detection of CMV specific T cells using MHC dextramers.

[1910] Dot plots showing live gated CD3⁺/CD4⁻ lymphocytes from CMV infected patient stained with (A) Negative Control MHC Dextramers (HLA-A*0201(GLAGDVSAV) (SEQ ID NO 110879)) or (B) MHC Dextramers containing peptides from CMV pp 65 antigen (HLA-A*0201(NLVPMVATV); (SEQ ID NO 110880)).

[1911] FIG. 16: Conformational ELISA.

[1912] The ELISA is carried out as a sandwich-ELISA. The ELISA-plate was coated with W6/32 mouse-anti-hHLA-ABC (DAKO M0736) antibody, which recognizes a conformational epitope on correctly folded MHC-complex. Then MHC complex in various concentration was added. β2m in various concentrations was used as negative control. HRP-conjugated rabbit anti-β2m (DAKO P0174) was used for detection of bound MHC complex. TMB One-step substrate system (Dako) was used as a substrate for HRP, and color formation was followed by measurement of absorbance at 450 nm.

[1913] FIG. 17. Carboxylate-modified beads coupled to TCR and stained with HLA-A*0201(NLVPMVATV; (SEQ ID NO 110880))/RPE or HLA-A*0201(ILKEPVHGV) (SEQ ID NO 110881)/RPE dextramers.

[1914] TCR in various concentrations were coupled to carboxylate-modified beads and then stained with HLA-A*0201(NLVPMVATV; (SEQ ID NO 110880))/RPE or HLA-A*0201(ILKEPVHGV; (SEQ ID NO 110881))/RPE dextramers in a flow cytometry experiment.

[1915] A) Histogram showing x-axis: Fluorescence intensity measured in the RPE channel (FL2), y-axis: events counted. Events measured in the Region R9 are regarded as negative, and events measured in Region R10 are regarded as positive.

[1916] B) Percentage of positively stained beads is shown for each preparation of beads.

[1917] Negative control samples:

1) Beads coupled with 10 μg TCR stained with HLA-A*0201(ILKEPVHGV; (SEQ ID NO 110881))/RPE
2) Beads coupled with 0 μg TCR stained with HLA-A*0201(NLVPMVATV; (SEQ ID NO 110880))/RPE

[1918] Positive control samples:

3) Beads coupled with 2 μg TCR stained with HLA-A*0201(NLVPMVATV; (SEQ ID NO 110880))/RPE
4) Beads coupled with 5 μg TCR stained with HLA-A*0201(NLVPMVATV; (SEQ ID NO 110880))/RPE
5) Beads coupled with 10 μg TCR stained with HLA-A*0201(NLVPMVATV; (SEQ ID NO 110880))/RPE
6) Beads coupled with 20 μg TCR stained with HLA-A*0201(NLVPMVATV; (SEQ ID NO 110880))/RPE

[1919] FIG. 18: Flow cytometry analysis of human cell samples added TCR-coated beads. TCR-beads were added into human peripheral whole blood (left panel) or HPBMC (right panel) and then the samples were analysed by flow cytometry. Region R1 represents TCR-beads; region R2 represents lymphocyte cell population of interest.

[1920] FIG. 19: Flow cytometry analysis of MHC multimer constructs carrying nonsense peptides.

[1921] Human Peripheral Blood Lymphocytes were ficoll purified from blood from a human donor and stained with mouse anti-human CD3/PE antibody and mouse anti-human CD8/PB antibody together with either of the MHC Dextramer molecule constructs A) HLA-A*0201(NLVPMVATV; (SEQ ID NO 110880))/APC, B) HLA-A*0201(ILKEPVHGV; (SEQ ID NO 110881))/APC, C) HLA-A*0201(nonsense peptide 1)/APC or D) HLA-A*0201(nonsense peptide 2)/APC. The staining was analysed on a CyAn ADP flow cytometer. Live-gated and CD3 positive lymphocytes are shown.

[1922] FIG. 20: Summary of flow cytometry analysis of the binding of different MHC multimer constructs to specific T cells in purified Human Peripheral Blood.

[1923] Mononuclear Cell samples. Purified HPBMC were stained with different MHC(peptide) molecules attached to APC labeled dextran270 multimerization domain and analyzed by flow cytometry. See example 58 for details on experimental procedures. 5 different MHC (peptide) molecules were investigated. Construct 1: HLA-A*0201(GLAGDVSAV) (SEQ ID NO 110879), construct 2: HLA-A*0201(ALIAPVHAV; SEQ ID NO 100882)), construct 3: HLA-A*0201(NLVPMVATV; (SEQ ID NO 110880)), construct 4: HLA-A*0201(GLCTLVAML; (SEQ ID NO 110883)) and construct 5: HLA-A*0201(ILKEPVHGV; (SEQ ID NO 110881)). A positive staining is symbolized with a (+) and is here defined as the identification of a distinct CD8 positive and MHC (peptide) positive population when visualized in a dot plot (as exemplified in FIG. 15). Negative staining is symbolized with a (−) and is defined as absence of a distinct CD8 positive and MHC (peptide) positive population when visualized in a dot plot. Nt means not determined. All samples have previously been analyzed for the presence of T-cells restricted by HLA-A*0201(NLVPMVATV; (SEQ ID NO 110880)), HLA-A*0201(GLCTLVAML; (SEQ ID NO 110883)) and HLA-A*0201(ILKEPVHGV; (SEQ ID NO 110881)) and these results are shown in italics in the figure (column 2 and 3).

[1924] FIG. 21: Gating strategy for no-lyse no-wash procedure.

[1925] Whole blood was stained with MHC multimer, anti-CD8/APC, anti-CD3/PB and CD45/CY antibody in a no-lyse no-wash procedure. For further details see text in example 66. During analysis of data the following gating strategy was used: CD45/PB antibody was used to set a trigger discriminator to allow the flow cytometer to distinguish between red blood cells and stained white blood cells. This was done during data collection by gating on CD45/PB positive cells in a CD45/PB vs. side scatter dot plot as shown in A. After data collection and during data analysis CD3 positive cells were selected by gating CD3/FITC positive cells in a CD3/FITC vs side scatter plot as shown in B. The final data was illustrated in a MHC multimer/PE vs CD8/APC plot (see FIG. 22).

[1926] FIG. 22: Identification of CMV-specific T cells in a blood sample using no-lyse no-wash procedure.

[1927] Whole blood from three different donors were analysed for the presence of CMV-specific T cells by flow cytometry using a no-lyse no-wash procedure. Donor 1 was stained with a MHC multimer consisting of PE-conjugated 270 kDa dextran coupled with HLA-A*0201 in complex with beta2microglobulin and the peptide NLVPMVATV (SEQ ID NO 110880) derived from Human Cytomegalo Virus (HCMV) (left panel) and with a negative control MHC multimer consisting of PE conjugated 270 kDa dextran coupled with HLA-A*0201 in complex with beta2microglobulin and the peptide ILKEPVHGV (SEQ ID NO 110881) derived from Human Immunodeficiency Virus (HIV) (right panel). Donor 2 was stained with a MHC multimer consisting of PE-conjugated 270 kDa dextran coupled with HLA-A*0101 in complex with beta2microglobulin and the peptide VTEHDTLLY (SEQ ID NO 110884) derived from Human Cytomegalo Virus (HCMV) (left panel) and a negative control MHC multimer consisting of PE-conjugated 270 kDa dextran coupled with HLA-A*0101 in complex with beta2microglobulin and the peptide IVDCLTEMY (SEQ ID NO 110885) derived from ubiquitin specific peptidase 9 (USP9) (right panel). Donor 3 was stained with twoMHC multimers consisting of PE conjugated 270 kDa dextran coupled with HLA-B*0207 in complex with beta2microglobulin and either of the peptides TPRVTGGGAM (SEQ ID NO 110886) (left panel) or RPHERNGFTVL (SEQ ID NO 110887) (center panel) both derived from Human Cytomegalo Virus (HCMV) and with a negative control MHC multimer consisting of PE-conjugated 270 kDa dextran coupled with HLA-B*0207 in complex with beta2microglobulin and the peptide TPGPGVRYPL (SEQ ID NO 110888) derived from Human Immunodeficiency Virus (HIV) (right panel).

[1928] All samples were also added Anti-CD45/PB, anti-CD3/FITC and anti-CD8/APC antibodies. The samples were gated as shown in FIG. 21.

[1929] FIG. 23: Enumeration of specific T cells using CytoCount™ beads.

[1930] Whole blood from a human donor were analysed for the presence of CMV-specific T cells with MHC multimers by flow cytometry using a no-lyse no-wash procedure. 2×100 μl donor blood was analysed with two different MHC multimers: A) PE-conjugated 270 kDa dextran coupled with HLA-A*0101 in complex with beta2microglobulin and the peptide VTEHDTLLY (SEQ ID NO 110884) derived from Human Cytomegalo Virus (HCMV) and a negative control construct B) consisting of PE-conjugated 270 kDa dextran coupled with HLA-A*0101 in complex with beta2microglobulin and the peptide IVDCLTEMY (SEQ ID NO 110885) derived from ubiquitin specific peptidase 9 (USP9). To each sample Anti-CD45/CY, anti-CD3/APC and anti-CD8/PB antibody was added together with 50 μl CytoCount beads (1028 beads/A. Following staining for 15 minutes PBS was added to 1 ml and the samples analysed on a CyAn flow cytometer. During analysis CD45/CY antibody was used to set a trigger discriminator to allow the flow cytometer to distinguish between red blood cells and stained white blood cells and CD3/APC antibody was used to gate for CD3 positive T lymphocytes.

[1931] Amount of counted beads in sample A are shown in the histogram C and amount of beads counted in the negative control sample B are show in histogram D. Concentration of HLA-A*0101(VTEHDTLLY; (SEQ ID NO 110884)) specific T cells in the blood sample was determined as follows:

((count of MHC multimer+CD8+ cells in A× concentration of beads×dilution factor of beads)/counted beads C))−((counted MHC multimer+CD8+ cells in B× concentration of beads×dilution factor of beads)/counted beads D)=((1300 cells×1028 beads/μl×0.05)/67225 beads)−((2 cells×1028 beads/μl×0.05)/72623 beads)=0.9926 cells/μl=992.6 celler/ml

[1932] FIG. 24: MHC dextramers can be embedded in a sugar matrix together with antibodies and used for detection of specific T cells in a blood sample.

[1933] MHC dextramer constructs was embedded in a sugar matrix together with relevant gating reagents (anti-CD3/Pacific Blue, anti-CD8/Alexa700 and anti-CD45/Cascade Yellow antibodies) and the matrix dried. Then EDTA stabilized blood from a human donor were added and the samples analyzed by flow cytometry. Two different MHC construct were used HLA-A*0101(VTEHDTLLY) (SEQ ID NO 110884)/PE dextramer (A) and the negative control construct HLA-A*0101(IVDCLTEMY) (SEQ ID NO 110885)/PE (B). As a control antibodies and MHC dextramer constructs were used to stain blood from the same donor following a general staining procedure without embedding the antibodies and MHC dextramers in a sugar matrix as described elsewhere herein. (C) Staining with HLA-A*0101(VTEHDTLLY) (SEQ ID NO 110884)/PE dextramer following a normal staining procedure and (D) Staining with HLA-A*0101(IVDCLTEMY) (SEQ ID NO 110885)/PE dextramer following a normal staining procedure.

[1934] FIG. 25: Summary flow chart, ELISPOT

[1935] summary flow chart showing measurement of antigen reactive T-Cells by IFN-γ capture in blood samples by ELISPOT. See example 31 for more detailed information.

[1936] FIG. 26. Detection of activated lymphocytes using MHC pentamers and IFN-γ.

[1937] The figures illustrate IFN-γ versus MHC Pentamer staining of live lymphocytes. PBMCs were incubated with either a negative control (non-specific) Pentamer (A*0201/EBV (GLCTLVAML; (SEQ ID NO 110883))) or a Pentamer specific for the cells of interest (B*0801/EBV (RAKFKQLL)), then stimulated with LAC (non-specific activation) or B*0801/EBV peptide (specific peptide activation) for 15 hours in the presence of Brefeldin A. Fixation, permeabilization and staining for IFN-γ were carried out exactly as detailed in the protocol. From www.proimmune.com: Pro5 Recombinant MHC Pentamer staining protocol for human Intracellular Proteins. Version 4.1 February 2007.

[1938] FIG. 27. IFN-γ ELISPOT to KLH and autologous tumor lysate

[1939] PBMC response to KLH (a) and autologous tumor lysate (b) was examined pretreatment (Pre-V) and post treatment 4 weeks after last vaccination (Post-V), as described in example 52. The figure is modified from Redman et al. Phase 1b trial assessing autologous, tumor-pulsed dendritic cells as a vaccine administered with or without IL-2 in patients with metastatic melanoma. J. Immunother. 2008; 31(6): 591-598.

[1940] FIG. 28. Proliferation to KLH and autologous tumor lysate

[1941] PBMC to KLH (a) and autologous tumor lysate (b) was measured pretreatment (Pre-V) and post treatment 4 weeks after last vaccination (Post-V), as described in example 52. The figure is modified from Redman et al. Phase 1b trial assessing autologous, tumor-pulsed dendritic cells as a vaccine administered with or without IL-2 in patients with metastatic melanoma. J. Immunother. 2008; 31(6): 591-598.

[1942] FIG. 29. Proliferation of vaccine draining lymph node cells.

[1943] Vaccine draining lymph node cells response was measured to KLH (a) and autologous tumor lysate (b), as described in example 52. The figure is modified from Redman et al. Phase 1b trial assessing autologous, tumor-pulsed dendritic cells as a vaccine administered with or without IL-2 in patients with metastatic melanoma. J. Immunother. 2008; 31(6): 591-598.

[1944] FIG. 30. IFN-γ ELISPOT of vaccine draining lymph node cells

[1945] Vaccine draining lymph node cells response was examined to KLH (a) and autologous tumor lysate (b) as described in example 52. The figure is modified from Redman et al. Phase 1b trial assessing autologous, tumor-pulsed dendritic cells as a vaccine administered with or without IL-2 in patients with metastatic melanoma. J. Immunother. 2008; 31(6): 591-598.

[1946] Table 8: Prediction of cancer antigen BcIX(L) specific MHC class 1, 8-, 9-, 10-, 11-mer peptide binders.

[1947] Prediction of cancer antigen BclX(L) specific MHC class 1, 8-, 9-, 10-, 11-mer peptide binders for 24 MHC class 1 alleles using the http://www.cbs.dtu.dk/services/NetMHC/database. The peptide sequences in Table 8 correspond to SEQ ID NO 109571 to SEQ ID NO 110363 in the sequence listing. The MHC class 1 molecules for which no binders were found are not listed.

[1948] Table 9: Prediction of cancer antigen BcIX(L) specific MHC class 2, 15-mer peptide binders.

[1949] Prediction of cancer antigen BclX(L) specific MHC class 2, 15-mer peptide binders for 14 MHC class 2 alleles using the http://www.cbs.dtu.dk/services/NetMHClI/database. The peptide sequences in Table 9 correspond to SEQ ID NO 110364 to SEQ ID NO 110875 in the sequence listing. The MHC class 2 molecules for which no binders were found are not listed. The 9-mer core motif is listed after each 15-mer peptide.

[1950] Table 10. Sequences of cancer antigens and cancer antigenic peptides predicted from these antigens.

[1951] The antigenic peptide epitopes shown in the figure have been selected from the matching cancer antigen sequences also shown in the figure, by using either the NetMHC algorithm software or by random prediction software as shown in FIG. 2. All MHC class I epitopes (8-11 mers) are predicted by the NetMHC algorithm software. All MHC class II epitopes (13-16 mers) are selected by random prediction software besides the 15-mers and 9-mer core motifs derived from MAGE A2, gp100 and NY-ESO-1 which are predicted by the NetMHC algorithm software.

[1952] Table 11. Sequences of Bcl-X(L), Bcl-2, Survivin, Mcl-1 and livin inhibitor of apoptosis cancer antigens and cancer antigenic peptides predicted from these antigens either by the NetMHC algorithm or by random prediction. A) Sequences of the cancer antigens Bcl-2, BclX(L), Survivin, Mcl-1 and livin inhibitor. These protein sequences were used for prediction of the antigenic peptide sequences shown in B-I. B) Antigenic peptide epitopes derived form Bcl-X(L) antigen able to bind MHC 1 molecules. Binding peptides were predicted using NetMHC software C) Antigenic peptide epitopes derived form Bcl-2 antigen able to bind MHC I molecules. Binding peptides were predicted using NetMHC software D) Antigenic peptide epitopes derived form Bcl-X(L) antigen able to bind MHC II molecules. Binding peptides were predicted using NetMHClI software E) Antigenic peptide epitopes derived form Bcl-2 antigen able to bind MHC II molecules. Binding peptides were predicted using NetMHClI software F) Antigenic peptide epitopes derived from Survivin antigen. Binding peptides were predicted using random prediction software shown in FIG. 2. G) Antigenic peptide epitopes derived form Mcl-1 antigen able to MHC II molecules. Binding peptides were predicted using random prediction software shown in FIG. 2. H) Antigenic peptide epitopes derived from Mcl-1, Bcl-X_{L}, Bcl-2 and Livin inhibitor of apoptosis cancer antigens. Binding peptides were predicted using random prediction software shown in FIG. 2. I) Antigenic peptide epitopes derived from Livin inhibitor of apoptosis cancer antigens. Binding peptides were predicted using NetMHC software or random prediction software as shown in FIG. 2.

[1953] Table 12. Sequences of HPV E6 and E7 cancer antigens. Sequences of different isoforms of the cancer antigens HPV E6 and HPV E7.

[1954] Table 13. Sequences of cancer antigenic peptides predicted by random prediction. Sequences of antigenic peptide 9 mer epitopes predicted from cancer antigens using random prediction. The sequences of the cancer antigens from which the 9 mer epitopes are predicted are listed in Table 10 and 31.

### EXAMPLES

### Example 1

[1955] This example describes how to make a MHC class I complex with a peptide in the peptide binding-groove using in vitro refolding. The MHC-complex in this example consisted of light chain β2m, the MHC class I Heavy Chain allele HLA-A*0201 (a truncated version in which the intracellular and transmembrane domains have been deleted) and the peptide QLFEELQEL (SEQ ID NO 110876).

[1956] MHC I-complexes consists of 3 components; Light Chain (β2m), Heavy Chain and a peptide of typically 8-10 amino acids. In this example MHC-complexes was generated by in vitro refolding of heavy chain, β2m and peptide in a buffer containing reduced and oxidized glutathione. By incubation in this buffer a non-covalent complex between Heavy Chain, β2m and peptide was formed. Heavy chain and β2m was expressed as inclusion bodies in E. coli prior to in vitro refolding following standard procedures as described in Garboczi et al., (1996), Nature 384, 134-141. Following refolding the MHC complexes was biotinylated using BirA enzyme able to biotinylate a specific amino acid residue in a recognition sequence fused to the C-terminal of the Heavy Chain by genetic fusion. Monomer MHC complexes was then purified by size exclusion chromatography.
[1957] 1. 200 ml of refolding buffer (100 mM Tris, 400 mM L-arginin-HCL, 2 mM NaEDTA, 0.5 mM oxidized Gluthathione, 5 mM reduced Glutathione, pH 8.0) was supplied with protease inhibitors PMSF (phenylmethylsulphonyl fluoride), Pepstatin A and Leupeptin (to a final concentration of 1 mM, 1 mg/l and 1 mg/l, respectively). The refolding buffer was placed at 10° C. on a stirrer.
[1958] 2. 12 mg of peptide QLFEELQEL (SEQ ID NO 110876) was dissolved in DMSO or another suitable solvent (300-500 μl), and added drop-wise to the refolding buffer at vigorous stirring.
[1959] 3. 4.4 mg of human Light Chain β2m was added drop-wise to the refolding buffer at vigorous stirring.
[1960] 4. 6.2 mg of Heavy Chain HLA-A*0201 (supplied with DTT to a concentration of 0.1 mM) was added drop-wise to the refolding buffer at vigorous stirring.
[1961] 5. The folding reaction was placed at 10° C. at slow stirring for 4-8 hours.
[1962] 6. After 4-8 hours, step 3 and 4 was repeated and the folding reaction is placed at 10° C. at slow stirring O/N.
[1963] 7. Step 3 and 4 was repeated, and the folding reaction is placed at 10° C. at slow stirring for 6-8 hours.

[1964] Optionally, steps 5-7 may be done in less time, e.g. a total of 0.5-5 hours.
[1965] 8. After 6-8 hours the folding reaction was filtrated through a 0.2 μm filter to remove aggregates.
[1966] 9. The folding reaction was concentrated O/N at 10° C. shaking gently in a suitable concentrator with a 5000 mw cut-off filter. The folding reaction was concentrated to approximately 5-10 ml. (Optionally the filtrate can be stored at 4° C. and reused for another folding with the same peptide and heavy chain.)
[1967] 10. The concentrated folding reaction was buffer-exchanged at least 8 times, into a MHC-buffer (20 mM Tris-HCl, 50 mM NaCl, pH 8.0) and concentrated (at 10° C. in a suitable concentrator with a 5000 mw cut-off filter) down to approximately 1 ml.
[1968] 11. The heavy chain part of the MHC-complex was biotinylated by mixing the following components: approximately 1000 μl folded MHC-complex, 100 μl each of Biomix-A, Biomix-B and d-Biotin (all 3 from Biotin Protein Ligase Kit from Avidity, 10 μl birA enzyme (3 mg/ml, from Biotin Protein Ligase Kit from Avidity, 0.5 μl Pepstatin A (2 mg/ml) and 0.5 μl Leupeptin (2 mg/ml). The above was gently mixed and incubated O/N at room temperature.
[1969] 12. The biotinylated and folded MHC-complex solution was centrifuged for 5 min. at 1700×g, room temperature.
[1970] 13. Correctly folded MHC-complex was separated and purified from excess biotin, excess β2m, excesss heavy chain and aggregates thereoff, by size exclusion chromatography on a column that separates proteins in the 10-100 kDa range. Correctly folded monomer MHC-complex was eluted with a MHC-buffer (20 mM Tris-HCl, 50 mM NaCl, pH 8.0). The elution profile consisted of 4 peaks, corresponding to aggregated Heavy Chain, correctly folded monomer MHC-complex, β2m and excess biotin and peptide (See FIG. 7).
[1971] 14. Fractions containing the folded MHC-complex were pooled and concentrated to approximately 1 ml in a suitable concentrator with a 5000 mw cut-off filter. The protein-concentration was estimated from its absorption at 280 nm.
[1972] 15. Folded MHC-complex can optionally be stored stored at −170° C. before further use.
[1973] 16. The grade of biotinylation was analyzed by a SDS PAGE SHIFT-assay with Streptavidin (FIG. 8) and correct folding was confirmed by ELISA, using the antibody W6/32 that recognizes correctly folded MHC-peptide complex.

[1974] The above procedure may be used for folding any MHC I complexes consisting of any β2m, any heavy chain and any peptide approx. 8-11 amino acids long. Either of the components can be truncated or otherwise modified. The above procedure can also be used for generation of “empty” MHC I complexes consisting of 32m and heavy chain without peptide.

### Example 2

[1975] This example describes how to generate soluble biotinylated MHC II complexes using a baculovirus expression system, where the MHC II complex was DR4 consisting of the α-chain DRA1*0101 and the β-chain DRB1*0401 as described by Svendsen et al., (2004), J. Immunol. 173(11):7037-45. Briefly, The hydrophobic transmembrane regions of the DRα and DRβ chains of DR4 were replaced by leucine zipper dimerization domains from the transcription factors Fos and Jun to promote DR α/β assembly. This was done by ligating cytoplasmic cDNA sequences of DRA1*0101 and DRB1*0401 to fos- and jun-encoding sequences. A birA site GLNDIFEAQKIEWH (SEQ ID NO 110889) was added to the 3′ end of the DRA1*0101-fos template. Covalently bound peptide AGFKGEQGPKGEP (SEQ ID NO 110890) derived from collagen II amino acid 261-273 were genetically attached by a flexible linker peptide to the N terminus of the DRβ-chain. Finally, the modified DRA1*0101 and DRB1*0401 inserts were cloned into the expression vector pAcAb3. The pAcAB3-DRA1*0101/DRB1*0401 plasmids were cotransfected with linearized baculovirus DNA (BD Pharmingen; BaculoGold kit) into Sf9 insect cells, according to the manufacturer's instructions. Following two rounds of plaque purification, clonal virus isolates were further amplified three times before preparation of high-titer virus (10⁸-10¹⁶/ml). These stocks were used to infect High Five or serum-free Sf21 insect cells (Invitrogen Life Technologies, Carlsbad, Calif.) for protein production. Spinner cultures (2-3×10⁶ cells/ml) were infected at a multiplicity of infection of 1-3 in a volume of 150 ml per 2 L spinner flask. Supernatants were harvested and proteinase inhibitor tablets (Roche, Basel, Switzerland) were added before affinity purification on MiniLeak-Low columns (Kem-En-Tec) coupled with the anti-HLA-DR monoclonal antibody L243. HLA-DR4 complexes were eluted with diethylamine (pH 11) into neutralization buffer (2 M Tris, pH 6.5) and immediately buffer exchanged and concentrated in PBS, 0.01% NaN₃, using Millipore (Bedford, Mass.) concentrators. The purity of protein was confirmed by SDS-PAGE. The purified DR4 complexes were biotinylated in vitro as described for MHC I complexes elsewhere herein. These complexes may now be used for coupling to any dimerization domain, e.g. divynylsulfone activated dextran 270coupled with SA and a fluorochrome.

### Example 3

[1976] This example describes how to generate empty biotinylated MHC II complexes using a baculovirus expression system, where the MHC II complex consist of any α-chain and any β-chain, including truncated and otherwise modified versions of the two. Briefly, The hydrophobic transmembrane regions of the DRα and DRβ chains of MHC II are replaced by leucine zipper dimerization domains from the transcription factors Fos and Jun to promote DR α/β assembly. This is done by ligating cytoplasmic cDNA sequences of DRα and DRβ to fos- and jun-encoding sequences. A birA site GLNDIFEAQKIEWH (SEQ ID NO 110889) is added to the 3′ end of either the DRα-fos/DRα-jun or the DRβ-jun/DRβ-fos template. The modified DRα and DRβ inserts is cloned into the expression vector pAcAb3 and cotransfected with linearized baculovirus DNA into Sf9 insect cells, according to the manufacturer's instructions. Following rounds of plaque purification, clonal virus isolates is further amplified before preparation of high-titer virus. These stocks are used to infect High Five or serum-free Sf21 insect cells (Invitrogen Life Technologies, Carlsbad, Calif.) for protein production, e.g. as Spinner cultures. Supernatants are harvested and proteinase inhibitors added before affinity purification, e.g. using a MiniLeak-Low columns (Kem-En-Tec) coupled with anti-MHC II antibody. The purified MHC II complexes is biotinylated in vitro as described for MHC I complexes elsewhere herein. These biotinylated MHC II complexes may now be used for coupling to any dimerization domain, e.g. divynylsulfone activated dextran 270coupled with SA and a fluorochrome.

### Example 4

[1977] This example describes how to generate biotinylated MHC II complexes using a cell based protein expression system, where the MHC II complex consist of any α-chain and any β-chain, including truncated and otherwise modified versions of the two. The MHC II complex may also have a peptide bound in the peptide binding cleft. The hydrophobic transmembrane regions of the MHC II α-chain and MHC II β-chain are replaced by leucine zipper dimerization domains from the transcription factors Fos and Jun to promote α/β chain assembly. This is done by ligating cytoplasmic cDNA sequences of α-chain and β-chain to fos- and jun-encoding sequences. A birA site GLNDIFEAQKIEWH (SEQ ID NO 110889) is added to the 3′ end of the DRα-fos template. Optionally covalently bound peptide is genetically attached by a flexible linker peptide to the N terminus of the DRβ-chain. The modified DRα and DRβ inserts is cloned into a suitable expression vector and transfected into a cell line capable of protein expression, e.g. insect cells, CHO cells or similar. Transfected cells are grown in culture, supernatants are harvested and proteinase inhibitors added before affinity purification, e.g. using a MiniLeak-Low columns (Kem-En-Tec) coupled with anti-MHC II antibody. Alternatively the expressed MHC II complexes may be purified by anion- or cation-exchange chromatography. The purified MHC II complexes is biotinylated in vitro as described for MHC I complexes elsewhere herein. These biotinylated MHC II complexes may now be used for coupling to any dimerization domain, e.g. divynylsulfone activated dextran 270coupled with SA and a fluorochrome.

### Example 5

[1978] This is an example of how to make a MHC multimer that is a tetramer and where the MHC are attached to the multimerization domain through a non-covalent interaction The multimerization domain consist of Streptavidin. The MHC molecule was biotinylated DR4 consisting of the α-chain DRA1*0101 and the β-chain DRB1*0401 and the peptide AGFKGEQGPKGEP (SEQ ID NO 110890) derived from collagen II amino acid 261-273. The biotinylated MHC-peptide complexes was generated as described in a previous example herein.

[1979] Fluorescent DR4-peptide tetramer complexes were assembled by addition of ultra-avidin-R-PE (Leinco Technologies, St. Louis, Mo.) at a final molar ratio of biotinylated to DR4-peptide ultra-avidin-R-PE of 6:1. The resulting DR4-peptide multimer complexes were subjected to size exclusion on a Superdex-200 column to separate the tetramer complexes from protein aggregates and lower molecular weight complexes and excess fre DR4-peptide. The tetramer complexes were concentrated using Centicon-30 concentrators and stored at 0.1-0.3 mg/ml in a mixture of protease inhibitors.

[1980] These complexes could be used to detect specific T cells in a flow cytometry assay as described by Svendsen et al. (2004) Tracking of Proinflammatory Collagen-Specific T cells in Early and Late Collagen-Induced Arthritis in Humanized mice. J. Immunol. 173:7037-7045.

### Example 6

[1981] This example describes how an activated divinylsylfone-dextran(270 kDa)(VS-dex270) was coupled with streptavidin (SA) and Allophycocyanin (APC). Such molecules can be used as multimerization domains for attachment of biotinylated MHC molecules.
[1982] 1. Streptavidin (approx. 100 mg SA/ml in 10 mM HEPES, 0.1M NaCl, pH 7.85) was dialysed with gentle stirring for 2 days against 10 mM HEPES, 0.1M NaCl, pH 7.85 (20 fold excess volume) at 2-8° C. with 1 buffer change/day.
[1983] 2. 5 ml of APC from a homogen suspension (approx. 10 mg/ml) was centrifuged 40 min. at 3000 rpm. The supernatant was discharged and the precipitate dissolved in 5 ml of 10 mM HEPES, 0.1M NaCl, pH 7.85. This APC solution was dialysed with gentle stirring in the dark for 2 days against 10 mM HEPES, 0.1 M NaCl, pH 7.85 (20 fold excess volume) at 2-8° C. with 1 buffer change/day.
[1984] 3. The APC-solution was concentrated to 1 ml and the concentration measured to 47 g/L at UV 650 nm. The A650/A278-ratio was measured to 4.2.
[1985] 4. The SA-solution was filtrated through a 0.45 μm filter and the protein concentration was measured to 61.8 g SA/L at UV 278 nm.
[1986] 5. Conjugation: The reagents was mixed to a total volume of 500 μl in the following order with 8.1 mol SA/mol Dex and 27 mol APC/mol Dex.:
   [1987] a) 90 μl water
   [1988] b) 160 μl activated VS-dex270
   [1989] c) 23 μl SA (61.8 g/L)˜8.1 equivalents,
   [1990] d) 177 μl APC (47 g/L)˜27 equivalents,
   [1991] e) 50 μl of 100 mM HEPES, 1M NaCl, pH 8

[1992] The reaction was placed in a water bath with stirring at 30° C. in the dark for 18 hours.
[1993] 6. The coupling was stopped by adding 50 μl 0.1M ethanolamine, pH 8.0.
[1994] 7. The conjugate was purified on a Sephacryl S-200 column with 10 mM HEPES, 0.1M NaCl buffer, pH 7.2.
[1995] 8. 3 peaks were collected (peak 1: APC-SA-dex270; peak 2: Free APC; peak 3: Free SA). Volume, UV A650 and UV A278 were measured.
[1996] 9. The concentration of dextran270, APC/Dex and SA/Dex were calculated to 22.4×10⁻⁸ M; 3.48 and 9.54 respectively.
[1997] 10. The conjugate were added NaN₃ and BSA to a final concentration of 15 mM and 1% respectively. The volume was adjusted with 10 mM HEPES, 0.1M NaCl, pH 7.2 to a final concentration of 16×10⁻⁸M Dex270.
[1998] 11. The conjugate were kept at 2-8° C. in dark until further use.

[1999] The conjugate can be coupled with biotinylated MHC molecules to generate a MHC multimer as described in example 8.

### Example 7

[2000] This example describes how an activated divinylsylfone-dextran(270 kDa)(VS-dex270) was coupled with streptavidin (SA) and R-phycoerythrin (RPE).

[2001] The coupling procedure described for coupling of SA and APC to VS-dex270 (as described in example 6) were followed with the exception that APC were replaced with RPE.

[2002] The conjugate can be coupled with biotinylated MHC molecules to generate a MHC multimer as described in example 8.

### Example 8

[2003] This example describes how to couple an empty MHC or a MHC-complex to a dextran multimerization domain through a non-covalent coupling, to generate a MHC-dextramer. The MHC-dextramer in this example consisted of APC-streptavidin (APC-SA)-conjugated 270 kDA dextran and a biotinylated, folded MHC-complex composed of β2m, HLA-A*0201 heavy chain and the peptide NLVPMVATV (SEQ ID NO 110880). The APC-SA conjugated 270 kDA dextran was generated as described in example 6 and contained 3.7 molecules of SA per dextran (each SA can bind 3 MHC-complexes) and the concentration was 16×10⁻⁸ M. The concentration of the HLA-A*0201/NLVPMVATV (SEQ ID NO 110880)-complex was 4 mg/ml (1 μg=20.663 μmol). The molecular concentration of the MHC-complex was 8.27×10⁻⁵M.

[2004] The MHC-complex was attached to the dextran by a non-covalent Biotin-Streptavidin interaction between the biotinylated Heavy Chain part of the MHC-complex and the SA, conjugated to dextran.

[2005] Here follows a protocol for how to produce 1000 μl of a MHC-dextramer solution with a final concentration of approximately 32×10⁻⁹M:
[2006] 1. 200 μL 270 kDA vinylsulfone-activated dextran, corresponding to 3.2×10⁻¹¹ mol, and 4 μl MHC-complex, corresponding to 3.55×10⁻¹⁹ mol was mixed and incubated at room temperature in the dark for 30 min.
[2007] 2. A buffer of 0.05M Tris-HCl, 15 mM NaN₃, 1% BSA, pH 7.2 was added to a total volume of 1000 μl.
[2008] 3. The resulting MHC-dextramer preparation may now be used in flow cytometry experiments.

### Example 9

[2009] This is an example of how to make and use MHC multimers that are trimers consisting of a streptavidin multimerization domain with 3 biotinylated MHC complexes and 1 fluorophore molecule attached to the biotin binding pockets of streptavidin. MHC complexes consisting of HLA-A*0201 heavy chain, beta2microglobulin and NLVPMVATV (SEQ ID NO 110880) peptide or the negative control peptide GLAGDVSAV (SEQ ID NO 110879) were generated as described elsewhere herein. The fluorophore in this example was Fluorescein-linker molecules as shown in FIG. 9. Each of these molecules consist of a linker-biotin molecule mounted with 4 trippel fluorescein-linker molecules. The linker-biotin molecule was here H-L30-Lys(NH₂)-L30-Lys(NH₂)-L30-Lys(NH₂)L300Lys(caproylamidobiotin)-NH₂ where L30 was a 30 atom large linker and L300 was a 300 atom large linker. Both L30 and L300 was composed of multiple L15 linkers with the structure shown in FIG. 9B. Linker-biotin molecules were generated as follows: Downloaded Boc-L300-Lys(Fmoc) resin (100 mg) was deprotected and subjected to coupling with Boc-Lys(2ClZ)-OH, Boc-L30-OH, Boc-Lys(2ClZ)-OH, Boc-L30-OH, Boc-Lys(2ClZ)-OH then Boc-L30-OH. The resin was Fmoc deprotected and reacted twice (2×2 h) with caproylamido biotin NHS ester (25 mg in 0.5 mL NMP+25 microL DIPEA). The resin was washed with TFA and the product cleaved off with TFA:TFMSA:mCresol:thioanisol (6:2:1:1), 1 mL, precipitated with diethyl ether and purified by RP-HPLC. MS calculated for C₃₀₀H₅₄₄N₆₄O₁₃₇S is 7272.009 Da, found 7271.19 Da.

[2010] Alternatively linker-biotin molecule was H-L60-Lys(NH₂)-L60-Lys(NH₂)-L60-Lys(NH₂)L300Lys(caproylamidobiotin)-NH₂ and made from downloaded Boc-L300-Lys(Fmoc) resin (100 mg), and then prepared analogously to H-L30-Lys(NH₂)-L30-Lys(NH₂)-L30-Lys(NH₂)L300Lys(caproylamidobiotin)-NH₂. MS calculated for C₃₆₀H₆₅₂N₇₆O₁₆₇S is 8749.5848 Da and was found to be 7271.19 Da. Yield 3 mg. The trippel fluorescein-linker molecules was here betaalanin-L90-Lys(Flu)-L90-Lys(Flu)-L90-Lys(Flu)-NH₂ where Lys=Lysine, Flu=Fluorescein and L90 is a 90 atom linker (se FIG. 9 for further details). The trippel-fluorescein-linker molecule was generated as follows: Downloaded Boc-Lys(Fmoc) resin, 2 g, was Boc deprotected and subjected to 3× coupling with Boc-L30-OH, Boc-Lys(Fmoc)-OH, 3×Boc-L30-OH, Boc-Lys(Fmoc)-OH, 3×Boc-L30-OH. The three Fmoc groups were removed and carboxyfluorescein, 301 mg, activated with HATU, 274 mg, and DIPEA, 139 μL, in 8 mL NMP, was added to the resin twice for 30 min. The resin was Boc deprotected and subjected to 2×30 min coupling with beta-alanine-N,N-diacetic acid benzyl ester, followed by 5 min treatment with 20% piperidine in NMP. The resin was washed with DCM, then TFA and the product was cleaved off the resin, precipitated with diethyl ether and purified by RP-HPLC. Yield was 621 mg. MS calculated for C268H402N440116 is 6096.384 Da, while MS found was 6096 Da.

[2011] Biotin-linker molecule were coupled together with 4 trippel fluorescein-linker molecules as follows: (500 nmol) was dissolved in 88 microliter NMP+2 μl it pyridine and activated for 10 min at room temperature (conversion to cyclic anhydride) by addition of 10 μl N,N′ diisopropylcarbodiimide. Following activation the trippel fluorescein-linker was precipitated with diethyl ether and redissolved in 100 microliter NMP containing 10 nmol biotin-linker. Once dissolved the coupling was initiated by addition of 5 μl diisopropyl ethyl amine, and was complete after 30 min.

[2012] Streptavidin and Fluorescein-linker molecules are then mixed in a molar ration of 1:1 and incubated for ½ hour. Then MHC complexes are added in 3-fold molar excess in respect to streptavidin and incubated for another ½ hour. Alternatively, MHC complexes are added first, then Fluorescein-linker molecules or MHC complexes are mixed with Fluorescein-linker molecules before addition to Streptavidin.

[2013] These MHC multimers are then used to stain CMV specific T cells in a flow Cytometry experiment. 1×10⁶ purified HPBMC from a donor with T cells specific for HLA-A*0201(NLVPMVATV; (SEQ ID NO 110880)) are incubated with 10 μl of each of the two HLA-A*0201(peptide)/Fluorescein constructs described above for 10 minutes in the dark at room temperature with a cell concentration of 2×10⁷cells/ml. 10 μl of mouse-anti-human CD8/PB (clone DK25 from Dako) are added and the incubation continued for another 20 minutes at 4° C. in the dark. The samples are then washed by adding 2 ml PBS; pH=7.2 followed by centrifugation for 5 minutes at 200×g and the supernatant removed. The cells are resuspended in 400-500 μl PBS; pH=7.2 and analyzed on a flowcytometer.

[2014] In the above described example the Fluorescein-linker is as shown in FIG. 9 but the linker molecule can be any linker molecule as described in patent application WO 2007/015168 A2 (Lohse (2007)) or alternatively chemical biotinylated fluorochrom can be used instead of Fluorescein-linker molecules. The MHC complexes described in this example is a MHC I molecule composed of HLA-A*0201 heavy chain, beta2microglobulin and NLVPMVATV (SEQ ID NO 110880) peptide but can in principle be any MHC complex or MHC like molecule as described elsewhere herein.

### Example 10

[2015] This is an example of how to make MHC multimers consisting of a streptavidin multimerization domain with 3 biotinylated MHC complexes attached to the biotin binding pockets of streptavidin and how to use such trimer MHC complexes to detect specific T cells by direct detection of individual cells in a flow cytometry experiment by addition of a biotinylated fluorophore molecule. In this example the fluorophore is Fluorescein linker molecules constructed as described elsewhere herein.

[2016] MHC complexes consisting of HLA-A*0201 heavy chain, beta2microglobulin and peptide are generated as described elsewhere. MHC complexes are incubated with streptavidin in a molar ratio of 3:1 for ½ hour.

[2017] These trimer MHC multimers are then used to stain CMV specific T cells in a flow Cytometry experiment. 1×10⁶ purified HPBMC from a donor with T cells specific for HLA-A*0201(NLVPMVATV) (SEQ ID NO 110880) are incubated with 10 μl HLA-A*0201(peptide) multimer construct for 10 minutes in the dark at room temperature with a cell concentration of 2×10⁷ cells/ml. Then Fluorescein linker molecules (as described in Example 9) are added and incubation continued for 5 minutes. 10 μl mouse-anti-human CD8/PB antibody (clone DK25 from Dako) is added and the incubation continued for another 20 minutes at 4° C. in the dark. The samples are then washed by addition of 2 ml PBS; pH=7.2 followed by centrifugation for 5 minutes at 200×g and the supernatant removed. Cells are resuspended in 400-500 μl PBS; pH=7.2 and analyzed on a flowcytometer.

[2018] In this example the Fluorescein-linker is as shown in FIG. 9 but the linker molecule can be any linker molecule as described in Lohse, Jesper, (2007), WO 2007/015168 A2 or alternative chemically biotinylated fluorochrome may be used. The MHC complexes described in this example is a MHC I molecule composed of HLA-A*0201 heavy chain, beta2microglobulin and NLVPMVATV (SEQ ID NO 110880) peptide but can in principle be any MHC complex or MHC like molecule as described elsewhere herein.

### Example 11

[2019] This is an example of how to make MHC multimers where the multimerization domain is dextran and the MHC complexes are chemically conjugated to the dextran multimerization domain.

[2020] MHC complexes consisting of HLA-A*0201 heavy chain, beta2microglobulin and NLVPMVATV (SEQ ID NO 110880) peptide or the negative control peptide GLAGDVSAV (SEQ ID NO 110879) are generated as described elsewhere herein. Dextran with a molecular weight of 270 kDa is activated with divinylsulfone. Activated Dextran is then incubated with MHC and RPE in a 0.05 M NaCHO₃ buffer; pH=9.5 with a molar ratio between MHC and Dextran of 30-60 and a molar ratio between RPE and dextran of 3-7:1 The mixture is placed in a water bath at 30° C. for 16 hours. Excess fluorochrome, MHC and dextran are removed by FPLC using a sephacryl S-300 column.

[2021] These MHC/RPE dextramers are then used to stain CMV specific T cells in a flow Cytometry experiment. Briefly, 1×10⁶ purified HPBMC from a donor with T cells specific for HLA-A*0201(NLVPMVATV; (SEQ ID NO 110880)) are incubated with 10 μl of each of the two HLA-A*0201(peptide)/RPE constructs described above for 10 minutes in the dark at room temperature with a cell concentration of 2×10⁷ cells/ml. 10 μl mouse-anti-human CD8/PB antibody (clone DK25 from Dako) are added and the incubation continued for another 20 minutes at 4° C. in the dark. The samples are then washed by adding 2 ml PBS; pH=7.2 followed by centrifugation for 5 minutes at 200×g and the supernatant removed. The cells are then resuspended in 400-500 μl PBS; pH=7.2 and analyzed on a flow cytometer.

### Example 12

[2022] This is an example of how to make MHC multimers where the multimerization domain is dextran and MHC complexes are MHC I molecules chemically conjugated to dextran multimerization domain and the dextran multimerization domain also have fluorochrome chemically coupled.

[2023] Human beta2microglobulin is coupled to dextran as follows. Dextran with a molecular weight of 270 kDa is activated with divinylsulfone. Activated dextran is incubated with human beta2microglobulin and RPE in a 0.05 M NaCHO₃ buffer; pH=9.5 with a molar ratio between beta2microglobulin and Dextran of 30-60 and a molar ratio between RPE and dextran of 3-7:1. The molar ratio of the final product is preferable 4-6 RPE and 15-24 beta2microglobulin per dextran. The mixture is placed in a water bath at 30° C. for 16 hours. Excess fluorochrome, beta2microglobulin and dextran are removed by FPLC using a sephacryl S-300 column. The beta2microglobulin-RPE-dextran construct is then refolded in vitro together with heavy chain and peptide using the following procedure. 200 ml refolding buffer (100 mM Tris, 400 mM L-arginin-HCL, 2 mM NaEDTA, 0.5 mM oxidized Gluthathione, 5 mM reduced Glutathione, pH 8.0) supplied with protease inhibitors PMSF, Pepstatin A and Leupeptin (to a final concentration of 1 mM, 1 mg/l and 1 mg/l, respectively) is made and cooled to 10° C. 12 mg NLVPMVATV (SEQ ID NO 110880) peptide is dissolved in DMSO and added to the refolding buffer together with 20-30 mg beta2microglobulin-RPE-dex and 6 mg HLA-A*0201 heavy chain. Incubation at 10° C. for 4-8 hours, then 20-30 mg beta2microglobulin-RPE-dex and 6 mg HLA-A*0201 heavy chain is added and incubation continued for 4-8 hours. Another 20-30 mg beta2microglobulin-RPE-dex and 6 mg HLA-A*0201 heavy chain is added and incubation continued for 6-8 hours. The folding reaction is filtrated through a 0.2 μm filter to remove larger aggregates and then buffer exchanged into a buffer containing 20 mM Tris-HCl, 50 nM NaCl; pH=8.0 followed by concentration to 1-2 ml sample. Dextran-RPE-MHC complexes are then separated from excess heavy chain and peptide by size exclusion chromatography using a sephacryl S-300, S-400 or sephacryl S-500 column.

[2024] These MHC/RPE dextramers may be used to stain CMV specific T cells in a flow Cytometry experiment. Briefly, 1×10⁶ purified HPBMC from a donor with T cells specific for HLA-A*0201(NLVPMVATV) (SEQ ID NO 110880) are incubated with 10 μl of each of the two HLA-A*0201(peptide)/RPE constructs described above for 10 minutes in the dark at room temperature with a cell concentration of 2×10⁷ cells/ml. 10 μl of mouse-anti-human CD8/PB antibody (clone DK25 from Dako) are added and the incubation continued for another 20 minutes at 4° C. in the dark. The samples are then washed by adding 2 ml PBS; pH=7.2 followed by centrifugation for 5 minutes at 200×g and the supernatant removed. The cells are then resuspended in 400-500 μl PBS; pH=7.2 and analyzed on a flowcytometer.

### Example 13

[2025] The preparation of a Pentamer MHC multimer is described in e.g. (United States Patent application 20040209295). Briefly, the following steps lead to a fluorescent Pentamer MHC multimer reagent:

[2026] The following is a detailed example for cloning, expressing, and purifying a pentameric class I MHC multimer, which comprises a chimeric fusion of .beta.2m with COMP. The chimeric .beta.2m-COMP protein is expressed in insoluble inclusion bodies in E. coli and subsequently assembled as pentameric .beta.2m-COMP in vitro. The pentameric class I MHC peptide multimer is then formed in a second refolding reaction by combining .beta.2m-COMP pentamers and the human MHC class I .alpha. molecule known as HLA-A*0201, in the presence of an appropriate synthetic binding peptide representing the T cell antigen. In this example, a well characterized antigen derived from Epstein-Barr virus BMLF1 protein, GLCTLVAML (SEQ ID NO 110883), is used. The resultant complex is labelled with a fluorescent entity and used as a staining reagent for detecting antigen-specific T cells from a mixed lymphocyte population, in a flow cytometry application.

[2027] The strategy involves the sequential cloning into pET-24c vector of .beta.2m, yielding a construct referred to as pETBMC01, followed by the insertion of the oligomerisation domain of cartilage oligomeric matrix protein (COMP) with a biotin acceptor sequence (BP) for site-specific biotinylation with the biotin-protein ligase BirA, yielding a construct referred to as pETBMC02. Thirdly a polyglycine linker is cloned in between .beta.2m and COMP, yielding a construct referred to as pETBMC03, and finally, a serine-residue is removed by site-directed mutagenesis, which serine residue precedes the poly-glycine linker, to give the final .beta.2m-COMP/pET-24c construct, referred to as pETBMC04 (see also FIG. 3). Removal of the serine residue is carried out to avoid steric hindrance when the .beta.2m molecule is associated with the MHC class I chain protein.

[2028] The extracellular portion of .beta.2m comprises of 99 amino acids (equivalent to Ile1-Met99 of the mature protein) encoded by 74 bp-370 bp of the DNA sequence. This region of the .beta.2m sequence is amplified from a normal human lymphocyte cDNA library, by polymerase chain reaction (PCR)

[2029] beta.2m PCR product is purified from the above reaction mix using a QIAquick® PCR purification kit according to the manufacturer's instructions (Qiagen). 200 ng of purified PCR product and 1 .mu.g pET-24c vector (Novagen) are each digested with BamH I (10 U) and Nde I (10 U) restriction enzymes (New England Biolabs, NEB) for 4 h at 37.degree. C., in accordance with the manufacturer's instructions, and purified.

[2030] The gel-purified insert and vector DNA are ligated at a 1:3 molar ratio (vector:insert, 50 ng: 7.5 ng) using T4 DNA ligase (5 U; Bioline), in T4 DNA ligase buffer (as supplied) for 16 hrs at 16.degree. C.

[2031] The ligation mixtures and appropriate controls are subsequently transformed into XL1-Blue strain competent E. coli cells, according to the manufacturer's instructions (Stratagene). Successful transformants are selected by plating the cells on Luria-Bertani (LB) agar plates containing 30.mu.g/ml kanamycin, and incubating overnight at 37.degree. C.

[2032] A selection of single colonies from the bacterial transformation plates are screened by PCR with T7 promoter (1.mu.M) and T7 terminator (1.mu.M) primers (Sigma Genosys, see Appendix I for primer sequences), which are complementary to regions of the pET vector flanking the cloning site. Amplification is carried out using Taq DNA polymerase (1 U, Bioline) in Taq reaction buffer (as supplied), supplemented with 2 mM MgSO.sub.4 and 0.2 mM dNTPs, using 25 thermal-cycling reactions as detailed above. Successful transformants generated a DNA fragment of approximately 500 bp, ascertained by 1.5% agarose gel electrophoresis.

[2033] Bacterial transformants that generated the correct size of PCR products are inoculated into 6 ml of sterile LB-kanamycin medium and incubated overnight at 37.degree. C. with 200 rpm shaking. pETBMC01 plasmid DNA is recovered from the bacterial cultures using a QIAprep®. Spin Mini-prep kit according to the manufacturer's instructions (Qiagen). The presence of the .beta.2m fragment in these plasmids is further verified by automated DNA sequencing.

[2034] The sequence of the oligomerisation domain of COMP is obtained from the Genbank database (accession #1705995) and a region encoding the coiled-coil domain (amino acids 21-85) is selected based on self-association experiments of COMP (Efinov et al., FEBS Letters 341:54-58 (1994)). A biotin acceptor sequence ‘BP’: SLNDIFEAQKIEWHE (SEQ ID NO 110893) is incorporated at the C terminus and an additional 14 amino acid linker, PQPQPKPQPKPEPET (SEQ ID NO 110894) is included to provide a physical separation between the COMP oligomerising domain and BP.

[2035] The whole region is synthesized using the overlapping complementary oligonucleotides, and purified COMP-BP and 1 .mu.g pETBMC01 vector are digested for 4 hrs at 37.degree. C. using Hind III (10 U) and Xho I (10 U) restriction enzymes (NEB), as described in Section 1.1. The digestion products are purified, ligated, transformed and PCR screened as in Section 1.1. Plasmids positive from the screen are purified and sequenced as described in Section 1.1.

[2036] The poly-glycine linker is synthesized by annealing overlapping oligonucleotides. Since the nucleotide sequence of the polyGlycine linker only incorporates the 5′ overhang of the cut BamH I restriction site, and the 3′ overhang of the cut Hind III nucleotide recognition motifs, there is no need to digest the annealed product to produce the complementary single-stranded overhangs suitable for subsequent ligation. The oligonucleotides are phosphorylated and annealed as described in Section 1.2.

[2037] pETBMC02 is digested with BamH I (10 U) and Hind III (10 U). Ligation of the annealed poly-glycine linker into pETBMC02 was as described previously (Section 1.1), assuming 96 fmoles of annealed oligonucleotide/.mu.l. The transformation and PCR-screening reactions are as described in Section 1.1, but in addition, the presence of an inserted linker is verified by a restriction enzyme digestion of the PCR screen product to ascertain the presence or absence of a Sal I restriction site. Successful transformants are not susceptible to Sal I digestion, given the removal of the site from the plasmid vector backbone. Purification of pETBMC03 and automated sequencing is as described in Section 1.1.

[2038] Analysis of X-ray crystallography models of MHC class 1 molecules reveal that the C terminus of .beta.2m closely abuts the .alpha.3 domain of the .alpha. chain. It is therefore desirable to achieve maximum flexibility at the start of the poly-glycine linker.

[2039] The extracellular portion of HLA-A*0201.alpha. chain (EMBL M84379) comprises of 276 amino acids (equivalent to Glyl-Pro276 of the mature protein) encoded by bases 73-900 of the messenger RNA sequence. In the following HLA-A*0201 is used interchangeably with A*0201. This region of the A*0201 sequence is amplified from a normal human lymphocyte cDNA library by PCR, using suitable primers which incorporated NcoI and BamHI restriction sites respectively. The procedure for cloning the A*0201 insert into Nco I/BamH I-digested pET-11d vector (Novagen) is essentially as described for .beta.2m in Section 1.1.

[2040] An identical procedure is carried out to produce either .beta.2m-COMP or A*0201 .alpha. chain proteins. Plasmid DNA is transformed into an E. coli expression host strain in preparation for a large scale bacterial prep. Protein is produced as insoluble inclusion bodies within the bacterial cells, and is recovered by sonication. Purified inclusion bodies are solubilised in denaturing buffer and stored at −80.degree. C. until required.

[2041] Purified plasmid DNA is transformed into the BL21(DE3)pLysS E. coli strain, which carries a chromosomal copy of the T7 RNA polymerase required to drive protein expression from pET-based constructs. Transformations into BL21(DE3)pLysS competent cells (Stratagene) are carried out with appropriate controls.

[2042] A single bacterial transformant colony is innoculated into 60 ml sterile LB medium, containing appropriate antibiotics for selection, and left to stand overnight in a warm room (.about.24.degree. C.) The resulting overnight culture is added to 6 litres of LB and grown at 37.degree. C. with shaking (.about.240 rpm), up to mid-log phase (OD.sub.600=0.3-0.4). Protein expression is induced at this stage by addition of 1.0 ml of 1M IPTG to each flask. The cultures are left for a further 4 h at 37.degree. C. with shaking, after which the cells are harvested by centrifugation and the supernatant discarded.

[2043] The bacterial cell pellet is resuspended in ice-cold balanced salt solution and sonicated (XL series sonicator; Misonix Inc., USA) in a small glass beaker on ice in order to lyse the cells and release the protein inclusion bodies. Once the cells are completely lysed the inclusion bodies are spun down in 50 ml polycarbonate Oak Ridge centrifuge tubes in a Beckman high-speed centrifuge (J2 series) at 15,000 rpm for 10 min. The inclusion bodies are then washed three times in chilled Triton® wash This is followed by a final wash in detergent-free wash buffer.

[2044] The resultant purified protein preparation is solubilised in 20-50 ml of 8 M urea buffer, containing 50 mM MES, pH 6.5, 0.1 mM EDTA and 1 mM DTT, and left on an end-over-end rotator overnight at 4.degree. C. Insoluble particles are removed by centrifugation and the protein yield is determined using Bradford's protein assay reagent (Bio-Rad Laboratories) and by comparison with known standards. Urea-solubilised protein is dispensed in 10 mg aliquots and stored at −80.degree. C. for future use.

[2045] Assembly of .beta.2m-COMP from the urea-solubilised inclusion bodies is performed by diluting the protein into 20 mM CAPS buffer, pH 11.0, containing 0.2 M sodium chloride and 1 mM EDTA, to give a final protein concentration of 1.5 mg/ml. The protein is oxidised at room temperature by addition of oxidised and reduced glutathione to final concentrations of 20 mM and 2 mM, respectively. Following an overnight incubation, disulphide bond formation is analysed by non-reducing SDS-PAGE on 10% bis-tricine gels (Invitrogen).

[2046] The protein mixture is subsequently buffer exchanged into 20 mM Tris, pH 8.0, 50 mM sodium chloride (‘S200 buffer’), and concentrated to a final volume of 4.5 ml, in preparation for enzymatic biotinylation with BirA (Affinity, Denver, Colo.). 0.5 ml of 10.times. BirA reaction buffer (as supplied) is added, and recombinant BirA enzyme at 10 .mu.M final concentration, supplemented with 10 mM ATP, pH 7.0. A selection of protease inhibitors is also used to preserve the proteins: 0.2 mM PMSF, 2 .mu.g/ml pepstatin and 2 .mu.g/ml leupeptin. The reaction is left for 4 hours at room temperature.

[2047] Biotinylated .beta.2m-COMP is purified by size exclusion chromatography (SEC) on a Superdex®200 HR 26/60 column (Amersham Biosciences), running S200 buffer.

[2048] 500 ml of refolding buffer is prepared as follows: 100 mM Tris, pH 8.0, 400 mM Larginine hydrochloride, 2 mM EDTA, 5 mM reduced glutathione and 0.5 mM oxidised glutathione, dissolved in deionised water and left stirring at 4.degree. C. 15 mg of lyophilised synthetic peptide GLCTLVAML (SEQ ID NO 110883) is dissolved in 0.5 ml dimethylsulfoxide and added to the refolding buffer whilst stirring. 50 mg of biotinylated pentameric .beta.2m-COMP and 30 mg of A*0201.alpha. chain is added sequentially, injected through a 23gauge hypodermic needle directly into the vigorously-stirred buffer, to ensure adequate dispersion. The refolding mixture is then left stirring gently for 16 hours at 4.degree. C.

[2049] The protein refolding mixture is subsequently concentrated from 500 ml to 20 ml using a MiniKros hollow fibre ultrafiltration cartridge (Spectrum Labs, Rancho Dominguez, Calif.) with a 30 kD molecular weight cutoff. Further concentration of the complex from 20 ml to 5 ml is carried out in Centricon Plus-20 centrifugal concentrators (30 kD molecular weight cut-off) according to the manufacturers instructions, followed by buffer exchange into S200 buffer using disposable PD10 desalting columns (Amersham Biosciences), according to the manufacturer's instructions. Final volume is 7.5 ml. The concentrated protein refold mixture is first purified by SEC on a Superdex® 200 HR 26/60 gel filtration chromatography column, as in Section 4.2. Fractions containing protein complexes in the region of 310 kD is collected.

[2050] Fractions collected from SEC are pooled and subjected to further purification by anion exchange chromatography on a MonoQ® HR 5/5 column (Amersham Biosciences), running a salt gradient from 0-0.5 M sodium chloride in 20 mM Tris over 15 column volumes. The dominant peak is collected. Protein recovery is determined using the Bradford assay.

[2051] Since each streptavidin molecule is able to bind up to 4 biotin entities, final labelling with phycoerythrin (PE)-conjugated streptavidin is carried out in a molar ratio of 1:0.8, streptavidin to biotinylated pentamer complex respectively, taking into account the initial biotinylation efficiency measurement made for .beta.2m-COMP in Section 4.2. The total required amount of pentamer complex is subdivided (e.g. into 5 equal amounts) and titrated successively into streptavidin-PE. The concentration of A*0201 pentamer-streptavidin complex is adjusted to 1 mg/ml with phosphate buffered saline (PBS), supplemented with 0.01% azide and 1% BSA.

[2052] This resultant fluorescent Pentamer MHC multimer reagent is stored at 4.degree until use. This reagent may be used for detection of antigen specific T cells by flow cytometry , IHC or other procedures described herein useful for detection of specific T cells using MHC multimers.

[2053] Pentamer MHC multimers are used in the following interchangeably with Pentamers or pentamer complexes.

### Example 14

[2054] This is an example of how the directed approach described elsewhere herein for selection of antigenic peptides (as described elsewhere herein) is applied to an antigenic protein with known protein sequence, the cancer protein BclX(L) encoded by the human genome. The purpose is to predict BclX(L) peptide sequences that binds to MHC class 1 molecules for use in construction of MHC'mers designed to be used for analytical, diagnostic, prognostic, therapeutic and vaccine purposes, through the interaction of the MHC'mers with human BclX(L) specific T-cells. Prediction is carried out using the known preferences of the 24 HLA class 1 alleles included in the http://www.cbs.dtu.dk/services/NetMHC/database (FIG. 10).

[2055] The result of the prediction software is used to find all strong and weak 8-, 9-, 10- and 11-mer peptide binders of the 24 HLA class 1 alleles. The result can be seen in Table 8. The MHC class 1 alleles for whom no binders are predicted are omitted from the list. The listed peptides are ranked according to decreased binding affinity for the individual MHC alleles. Strong binders are defined as binders with an affinity value of less than 50 nM and weak binders with a value of less than 500 nM. Only peptides defined as weak or strong binders are shown.

### Example 15

[2056] This is an example of how the directed approach described elsewhere herein for selection of antigenic peptides (as described elsewhere herein) is applied to an antigenic protein with known protein sequence, the cancer protein BclX(L) encoded by the human genome. The purpose is to predict BclX(L) peptide sequences that binds to MHC class 2 molecules for use in construction of MHC'mers designed to be used for analytical, diagnostic, prognostic, therapeutic and vaccine purposes, through the interaction of the MHC'mers with human BcIX(L) specific T-cells. Prediction is carried out using the known preferences of the 14 HLA class 2 alleles included in the http://www.cbs.dtu.dk/services/NetMHClI/database (FIG. 10).

[2057] The result of the prediction software is used to find all strong and weak 15-mer peptide binders of the 14 HLA class 2 alleles. It also finds the important central nonamer core peptide sequence of each binding peptide. The result can be seen in Table 9. The MHC class 2 alleles for whom no binders are predicted are omitted from the list. The listed peptides are ranked according to decreased binding affinity for the individual MHC alleles. Strong binders are defined as binders with an affinity value of less than 50 nM and weak binders with a value of less than 500 nM. Only peptides defined as weak or strong binders are shown.

### Example 16

### Test of Predicted BcIX(L) 10-mer Binding Peptide Functionality in ELISPOT

[2058] This is an example of how antigenic peptides derived from a cancer antigen are used to detect antigen specific T cells using an indirect detection method measuring secreted soluble factor from individual cells.

[2059] In example 14 the best binding BclX(L) 10-mer peptide for HLA-A*0201 was identified to be YLNDHLEPWI (SEQ ID NO 110877). This peptide has then been tested in ELISPOT to see if it were able to detect the presence Bcl-X(L)-specific, CD8 positive T cells in PBL (Peripheral Blood Lymphocytes) from a breast cancer patient. PBL from a breast cancer patient was analyzed by ELISPOT ex vivo either with or without the Bcl-X(L)173-182 peptide (YLNDHLEPWI; (SEQ ID NO 110877)), 106 PBL/well in doublets. The number of spots was counted using the Immunospot Series 2.0 Analyzer (CTL Analysers). The result is given as number of spots above the pictures of the result as shown in FIG. 11 and it clearly shows the presence of BclX(L) specific T-cells and thereby the functionality of the peptide as compared to the absence of added peptide. This example is from Cancer Immunol Immunother April; 56(4)527-33.

### Example 17

### Test of Predicted BcIX(L) 10-mer Binding Peptide Functionality in Flow Cytometry

[2060] This is an example of how antigenic peptides derived from a cancer antigen are used in a MHC multimer to detect antigen specific T cells by direct detection of individual cells using flow cytometry.

[2061] In example 14 the best binding BclX(L) 10-mer peptide for HLA-A*0201 was identified to be YLNDHLEPWI (SEQ ID NO 110877). In the present example the functionality of the peptide is shown in a flow cytometric analysis of PBL from the patient was analyzed ex vivo by Flow cytometry to identify Bcl-X(L)173-182 specific CD8 T cells using the dextramer complex HLA-A2/Bcl-X(L)173-182-APC, 7-AAD-PerCP, CD3-FITC, and CD8-APC-Cy7. The dextramer complex HLA-A2/HIV-1 pol476-484-APC was used as negative control. The result (FIG. 12) clearly demonstrate that a MHC Dextramer HLA-A*0201/YLNDHLEPWI (SEQ ID NO 110877) complex detects BclX(L) antigen specific CD-8 cells in the patient sample at a level of 0.03% as compared with the negative control using HIV specific MHC Dextramer.

[2062] This example is from Cancer Immunol Immunother April; 56(4)527-33.

### Example 18

### Use of BclX(L) Specific MHC Dextramer for Sorting of Antigen Specific CD8 T Cells from Patient Sample

[2063] This is an example of use of MHC multimers for direct detection of individual cells followed by sorting.

[2064] This is also an example of how sorted antigen specific T cells are further manipulated.

[2065] The antigen specific CD8 positive T-cells of example 17 were sorted out during the flow cytometric analysis using the MHC Dextramer HLA-A*0201/YLNDHLEPWI (SEQ ID NO 110877). The detectable population of dextramer positive CD8 T cells was sorted as single cells into 96 well plates using the following protocol:

[2066] Small lymphocytes were gated by forward and side scatter profile, before cloning according to CD8/MHC-multimer double staining. CD8/MHC-multimer double-positive cells were sorted as single cells into 96 well plates (Nunc) already containing 10⁵ cloning mix cells/well. The cloning mix was prepared containing 10⁶ irradiated (20 Gy) lymphocytes from three healthy donors per ml in X-vivo with 5% heat-inactivated human serum, 25 mM HEPES buffer (GibcoBRL), 1 μg/ml phytohemagglutinin (PHA) (Peprotech) and 120 U/ml IL-2. The cloning mix was incubated for two hours at 37° C./5% CO₂, prior to cloning. After cloning, the plates were incubated at 37° C./5% CO₂. Every 3-4 days 50 μl fresh media were added containing IL-2 to a final concentration of 120 U/ml. Following 10-14 days of incubation, growing clones were further expanded using cloning mix cells. Consequently, each of the growing clones were transferred (split) into two or three wells (depending on the number of growing cells) of a new 96 well plate containing 5×10⁴ cloning mix cells/well. Clones that were not growing at this time were incubated for another week with IL-2, and then expanded. Subsequently, the specificity of the growing clones was tested in a ⁵¹Cr-release assay or by FACS.

[2067] Out of twenty-isolated dextramer positive CD8 T cells, ten were able to be expanded into T-cell clones.

### Example 19

### Demonstration of Specific Cytolytic Activity of Isolated Bclx(L) Specific CD8 T-Cells

[2068] This is an example of indirect detection of antigen specific T cells, detecting the activation of the T cells upon stimulation with antigenic peptide followed by measurement of elicited effector function.

[2069] The ten expanded T cell clones isolated by Flow sorting as shown in example 18 were tested for their specificity by analysis in a standard 51-Cr release assay. For this purpose, T2 cells loaded with either Bcl-X(L)173-182 peptide or an irrelevant peptide (BA4697-105, GLQHWVPEL; (SEQ ID NO 110878)) were used as target cells. Five CD8 T-cell clones (Clone 8, 9, 10, 11, and 12) effectively lysed T2 cells pulsed with Bcl-X(L)173-182 without killing of T2 cells pulsed with an irrelevant peptide (FIG. 13). One of these BclX(L)173-182 specific CD8 T-cell clones [Clone 9] were expanded for further analyses. The remaining five expanded clones (Clone 7, 13, 15, 17, and 18) did not show specific lysis against T2 cells pulsed with Bcl-X(L)173-182 peptide. This example is from Cancer Immunol Immunother April; 56(4)527-33.

### Example 20

### Demonstration of the Cytotoxic Capacity of a Bclx(L)173-182 Specific CD8 T Cell Clone Isolated by Flow Aided Sorting of Antigen (HLA-A*0201/YLNDHLEPWI (SEQ ID NO 110877)) Specific T Cells

[2070] This is an example of indirect detection of antigen specific T cells, detecting the activation of the T cells upon stimulation with antigenic peptide followed by measurement of elicited effector function.

[2071] The Bcl-X(L)173-182 specific clone 9 from example 19 was expanded for additional 2 weeks before the cytotoxic potential was examined further in 51Cr-release assays. Two assays were performed a Cell lysis of T2 cells pulsed with Bcl-X(L)173-182 peptide or an irrelevant peptide (BA4697-105, GLQHWVPEL (SEQ ID NO 110878)) in three E:T ratios. b Cell lysis of T2 cells pulsed with different concentrations of Bcl-X(L)173-182 peptide at the E:T ratio 1:1 The result is given in FIG. 14. As can be seen the presence of the specific peptide is necessary to get killing of the target cell and the effect of the peptide is significant even at low concentrations.

[2072] This example is from Cancer Immunol Immunother April; 56(4)527-33.

### Example 21

[2073] This is an example of synthesis of a comprehensive library of antigenic peptides of variable size derived from a full-length antigen sequence.

[2074] In this example it is described how virtually all of the possible 8′- to 20′-mer peptide epitopes of an antigen may be synthetically prepared by modification of the standard Fmoc peptide synthesis protocol.

[2075] N-α-amino acids are incorporated into a peptide of the desired sequence with one end of the sequence remaining attached to a solid support matrix. All soluble reagents can be removed from the peptide-solid support matrix by filtration and washed away at the end of each coupling step. After each of the coupling steps, and after the removal of reagents, a fraction of the generated peptides are removed and recovered from the polymeric support by cleavage of the cleavable linker that links the growing peptide to solid support.

[2076] The solid support can be a synthetic polymer that bears reactive groups such as —OH. These groups are made so that they can react easily with the carboxyl group of an N-α-protected amino acid, thereby covalently binding it to the polymer. The amino protecting group can then be removed and a second N-a-protected amino acid can be coupled to the attached amino acid. These steps are repeated until the desired sequence is obtained. At the end of the synthesis, a different reagent is applied to cleave the bond between the C-terminal amino acid and the polymer support; the peptide then goes into solution and can be obtained from the solution.

[2077] Initially, the first Fmoc amino acid (starting at the C-terminal end of the antigen sequence) is coupled to a precursor molecule on an insoluble support resin via an acid labile linker. Deprotection of Fmoc is accomplished by treatment of the amino acid with a base, usually piperidine. Before coupling the next amino acid, a fraction of the synthesized peptide (for example 0.1%) is detached from the solid support, and recovered. Then additional beads carrying only the precursor molecule including the linker (for example corresponding to 0.1% of the total amount of solid support in the reaction) is added. Then the next Fmoc amino acid is coupled utilizing a pre-activated species or in situ activation.

[2078] This cycle of amino acid coupling, removal of reagents, detachment of a small fraction of synthesized peptide and recovery of these, and activation of the immobilized peptide to prepare for the next round of coupling, goes on until the entire antigen sequence has been processed.

[2079] The recovered peptides thus represent different fragments of the antigen, with varying lengths. The peptide pool thus contains most or all of the possible peptide epitopes of the antigen, and may be used in the preparation of MHC multimers as a pool.

[2080] The entire process, including the detachment of a fraction of the peptides after each round of coupling, follows standard Fmoc peptide synthesis protocols, and involves weak acids such as TFA or TMSBr, typical scavengers such as thiol compounds, phenol and water, and involves standard protecting groups.

### Example 22

[2081] This is an example of how MHC multimers may be used for detection of Cytomegalovirus (CMV) specific T cells in blood samples from humans infected with CMV.

[2082] In this example the MHC multimer used are MHC complexes coupled to fluorophor-labelled dextran (Dextramers). The dextramers are used for direct detection of TCR in flow cytometry. The antigen origin is CMV, thus, immune monitoring of CMV. MHC multimers carrying CMV specific peptides is in this example used to detect the presence of CMV specific T cells in the blood of patients infected with Cytomegalovirus.

[2083] Purified MHC-peptide complexes consisting of HLA-A*0201 heavy chain, human beta2microglobulin and peptide derived from a region in CMV internal matrix protein pp 65 or a negative control peptide are generated by in vitro refolding, purified and biotinylated as described elsewhere herein. Biotinylated MHC-peptide complexes are then coupled to a 270 kDa dextran multimerization domain labelled with APC by interaction with streptavidin (SA) on the dextran multimerization domain. The dextran-APC-SA multimerization domain is generated as described elsewhere herein. MHC-peptide complexes are added in an amount corresponding to a ratio of three MHC-peptide molecules per SA molecule and each molecule dextran contains 3.7 SA molecule and 8.95 molecules APC. The final concentration of dextran is 3.8×10e-8 M. The following MHC(peptide)/APC dextran constructs are made:
[2084] 1. APC-SA conjugated 270 kDa dextran coupled with HLA-A*0201 in complex with beta2microglobulin and the peptide NLVPMVATV (SEQ ID NO 110880) derived from CMV pp 65.
[2085] 2. APC-SA conjugated 270 kDa dextran coupled with HLA-A*0201 in complex with beta2microglobulin and the non-sense peptide GLAGDVSAV (SEQ ID NO 110879).

[2086] The binding of the above described MHC(peptide)/APC dextran is used to determine the presence of CMV pp 65 specific T cells in the blood from CMV infected individuals by flow cytometry following a standard flow cytometry protocol.

[2087] Blood from a patient with CMV infection is isolated and 100 ul of this blood is incubated with 10 μl of the MHC(peptide)/APC dextran constructs described above for 10 minutes in the dark at room temperature. 5 μl of each of each of the antibodies mouse-anti-human CD3/PB (clone UCHT1 from Dako), and mouse-anti-human CD8/PE (clone DK25 from Dako) are added and the incubation continues for another 20 minutes at 4° C. in the dark. The samples are then washed by adding 2 ml PBS; pH=7.2 followed by centrifugation for 5 minutes at 300×g and the supernatant removed. The washing step is repeated twice. The washed cells are resuspended in 400-500 μl PBS+1% BSA; pH=7.2 and analyzed on flowcytometer.

[2088] The presence of cells labeled with anti-CD3/PB, anti-CD8/PE and the MHC(peptide)/APC dextran construct 1 described above and thereby the presence of CMV specific T cells indicate that the patient are infected with Cytomegalovirus. Blood analysed with MHC(peptide)/APC dextran construct 2 show no staining of CD3 and CD8 positive cells with this MHC(peptide)/APC dextran construct. The result is shown in FIG. 15

[2089] The sensitivity of the above described test may be enhanced by addition of labeled antibodies specific for activation markers expressed in or on the surface of the CMV specific T cells.

[2090] We conclude that the MHC(peptide)/APC dextran constructs can be used to detect the presence of CMV specific T cells in the blood of patients infected with Cytomegalovirus.

### Example 23

[2091] This is an example of how MHC multimers may be used for detection of Cytomegalovirus (CMV) specific T cells in blood samples from humans infected with CMV.

[2092] In this example the MHC multimer used are MHC complexes coupled to fluorophor-labelled multimerisation domain Streptavidin (SA), used for direct detection of TCR in flow cytometry. The antigen origin is CMV, thus, immune monitoring of CMV. MHC multimers carrying CMV specific peptides is in this example used to detect the presence of CMV specific T cells in the blood of patients infected with Cytomegalovirus.

[2093] Purified MHC-peptide complexes consisting of HLA-A*0201 heavy chain, human beta2microglobulin and peptide derived from a region in CMV internal matrix protein pp65 or a negative control peptide were generated by in vitro refolding, purified and biotinylated as described elsewhere herein. Biotinylated MHC-peptide complexes are then coupled SA labelled with APC. MHC-peptide complexes were added in an amount corresponding to a ratio of 5 MHC-peptide molecules per SA molecule. Then SA/APC carrying four MHC complexes were purified from free SA, free monomeric MHC complex, SA carrying three, two and one MHC complexes.

[2094] The following SA-MHC(peptide)/APC tetramers are made:
[2095] 3. APC-SA coupled with HLA-A*0201 in complex with beta2microglobulin and the peptide NLVPMVATV (SEQ ID NO 110880) derived from CMV pp 65.
[2096] 4. APC-SA coupled with HLA-A*0201 in complex with beta2microglobulin and the non-sense peptide GLAGDVSAV (SEQ ID NO 110879).

[2097] The binding of the above described MHC(peptide)/APC dextran can be used to determine the presence of CMV pp 65 specific T cells in the blood from Cytomegalovirus infected individuals by flow cytometry following a standard flow cytometry protocol.

[2098] Blood from a patient with CMV is isolated and 100 ul of this blood is incubated with either of the SA-MHC(peptide)/APC tetramers described above for 10 minutes in the dark at room temperature. 5 μl of each of each of the antibodies mouse-anti-human CD3/PB (clone UCHT1 from Dako) and mouse-anti-human CD8/PE (clone DK25 from Dako) are added and the incubation continued for another 20 minutes at 4° C. in the dark. The samples are then washed by adding 2 ml PBS; pH=7.2 followed by centrifugation for 5 minutes at 200×g and the supernatant removed. The washing step is repeated. The washed cells are resuspended in 400-500 μl PBS; pH=7.2 and analyzed on flowcytometer.

[2099] The presence of cells labeled with anti-CD3/PB, anti-CD8/PE and the SA-MHC(peptide)/APC tetramers 3 described above and thereby the presence of CMV specific T cells will indicate that the patient are infected with Cytomegalovirus. Blood analysed with SA-MHC(peptide)/APC tetramers 4 should show no staining of CD3 and CD8 positive cells with this SA-MHC(peptide)/APC tetramer.

[2100] The sensitivity of the above described test may be enhanced by addition of labeled antibodies specific for activation markers expressed in or on the surface of the CMV specific T cells.

[2101] We conclude that the APC-SA coupled MHC(peptide) constructs may be used to detect the presence of CMV specific T cells in the blood of patients infected with Cytomegalovirus.

### Example 24

[2102] This is an example of how MHC multimers may be used for detection of Cytomegalovirus (CMV) specific T cells in blood samples from humans infected with CMV.

[2103] In this example the MHC multimer used are MHC complexes coupled to any fluorophor-labelled multimerisation as described elsewhere herein. The MHC multimers are used for direct detection of TCR in flow cytometry. The antigen origin is CMV, thus, immune monitoring of CMV.

[2104] MHC multimers carrying CMV specific peptides is in this example used to detect the presence of CMV specific T cells in the blood of patients infected with Cytomegalovirus.

[2105] Purified MHC-peptide complexes consisting of HLA-A*0201 heavy chain, human beta2microglobulin and peptide derived a region in CMV internal matrix protein pp 65 or a negative control peptide were generated by in vitro refolding and purified or purified from antigen presenting cells. MHC-peptide complexes are then coupled to a multimerisation domain together with APC.

[2106] The following MHC(peptide)/APC multimers are made:
[2107] 5. APC-multimerisation domain coupled with HLA-A*0201 in complex with beta2microglobulin and the peptide NLVPMVATV (SEQ ID NO 110880) derived from CMV pp 65.
[2108] 6. APC-multimerisation domain coupled with HLA-A*0201 in complex with beta2microglobulin and the non-sense peptide GLAGDVSAV (SEQ ID NO 110879).

[2109] The binding of the above described MHC(peptide)/APC multimers can be used to determine the presence of CMV pp 65 specific T cells in the blood from CMV infected individuals by flow cytometry following a standard flow cytometry protocol.

[2110] Blood from a patient with CMV infection is isolated and 100 ul of this blood is incubated with either of the MHC(peptide)/APC multimers described above for 10 minutes in the dark at room temperature. 5 μl of each of each of the antibodies mouse-anti-human CD3/PB (clone UCHT1 from Dako) and mouse-anti-human CD8/PE (clone DK25 from Dako) are added and the incubation continued for another 20 minutes at 4° C. in the dark. The samples are then washed by adding 2 ml PBS; pH=7.2 followed by centrifugation for 5 minutes at 200×g and the supernatant removed. The washing step is repeated. The washed cells are resuspended in 400-500 μl PBS; pH=7.2 and analyzed on flowcytometer.

[2111] The presence of cells labeled with anti-CD3/PB, anti-CD8/PE and the MHC(peptide)/APC multimers 5 described above and thereby the presence of CMV specific T cells will indicate that the patient are infected with Cytomegalovirus. Blood analysed with MHC(peptide)/APC multimer 6 should show no staining of CD3 and CD8 positive cells with this SA-MHC(peptide)/APC multimer.

[2112] The sensitivity of the above described test may be enhanced by addition of labeled antibodies specific for activation markers expressed in or on the surface of the CMV specific T cells.

[2113] We conclude that the APC-multimerisation domain coupled MHC(peptide) constructs may be used to detect the presence of CMV specific T cells in the blood of patients infected with Cytomegalovirus.

### Example 25

[2114] This is an example of how MHC multimers may be used for detection of Cytomegalovirus (CMV) specific T cells in blood samples from humans infected with CMV.

[2115] In this example the MHC multimer used are MHC complexes coupled to fluorophor-labelled dextran (Dextramers). The dextramers are used for direct detection of TCR in flow cytometry. The antigen origin is CMV, thus, immune monitoring of CMV. MHC multimers carrying CMV specific peptides is in this example used to detect the presence of CMV specific T cells in the blood of patients infected with Cytomegalovirus.

[2116] Purified MHC-peptide complexes consisting of HLA-A*2402 heavy chain, human beta2microglobulin and peptide derived from a region in CMV internal matrix protein pp65 or a negative control peptide are generated by in vitro refolding, purified and biotinylated as described elsewhere herein. Biotinylated MHC-peptide complexes are then coupled to a 270 kDa dextran multimerization domain labelled with APC by interaction with streptavidin (SA) on the dextran multimerization domain. The dextran-APC-SA multimerization domain is generated as described elsewhere herein. MHC-peptide complexes are added in an amount corresponding to a ratio of three MHC-peptide molecules per SA molecule and each molecule dextran contains 3.7 SA molecule and 8.95 molecules APC. The final concentration of dextran is 3.8×10e-8 M. The following MHC(peptide)/APC dextran constructs are made:
[2117] 7. APC-SA conjugated 270 kDa dextran coupled with HLA-A*2402 in complex with beta2microglobulin and the peptide QYDPVAALF (SEQ ID NO 110891) derived from CMV pp 65.
[2118] 8. APC-SA conjugated 270 kDa dextran coupled with HLA-A*2402 in complex with beta2microglobulin and the peptide VYALPLKML (SEQ ID NO 110892) derived from CMV pp 65.
[2119] 9. APC-SA conjugated 270 kDa dextran coupled with HLA-A*2402 in complex with beta2microglobulin and the non-sense peptide.

[2120] The binding of the above described MHC(peptide)/APC dextran is used to determine the presence of CMV pp 65 specific T cells in the blood from CMV infected individuals by flow cytometry following a standard flow cytometry protocol.

[2121] Blood from a patient with CMV infection is isolated and 100 ul of this blood is incubated with 10 μl of the MHC(peptide)/APC dextran constructs described above for 10 minutes in the dark at room temperature. 5 μl of each of each of the antibodies mouse-anti-human CD3/PB (clone UCHT1 from Dako), and mouse-anti-human CD8/PE (clone DK25 from Dako) are added and the incubation continues for another 20 minutes at 4° C. in the dark. The samples are then washed by adding 2 ml PBS; pH=7.2 followed by centrifugation for 5 minutes at 300×g and the supernatant removed. The washing step is repeated. The washed cells are resuspended in 400-500 μl PBS+1% BSA; pH=7.2 and analyzed on flowcytometer.

[2122] The presence of cells labeled with anti-CD3/PB, anti-CD8/PE and the MHC(peptide)/APC dextran constructs 7 or 8 described above and thereby the presence of CMV specific T cells indicate that the patient are infected with Cytomegalovirus. Blood analysed with MHC(peptide)/APC dextran construct 9 show no staining of CD3 and CD8 positive cells with this MHC(peptide)/APC dextran construct.

[2123] The sensitivity of the above described test may be enhanced by addition of labeled antibodies specific for activation markers expressed in or on the surface of the CMV specific T cells.

[2124] We conclude that the MHC(peptide)/APC dextran constructs can be used to detect the presence of CMV specific T cells in the blood of patients infected with Cytomegalovirus.

### Example 26

[2125] This is an example of how MHC multimers may be used for detection of Cytomegalovirus (CMV) specific T cells in blood samples from humans infected with CMV.

[2126] In this example the MHC multimer used are MHC complexes coupled to fluorophor-labelled multimerisation domain Streptavidin (SA), used for direct detection of TCR in flow cytometry. The antigen origin is CMV, thus, immune monitoring of CMV. MHC multimers carrying CMV specific peptides is in this example used to detect the presence of CMV specific T cells in the blood of patients infected with Cytomegalovirus.

[2127] Purified MHC-peptide complexes consisting of HLA-A*2402 heavy chain, human beta2microglobulin and peptide derived from a region in CMV internal matrix protein pp65 or a negative control peptide were generated by in vitro refolding, purified and biotinylated as described elsewhere herein. Biotinylated MHC-peptide complexes are then coupled SA labelled with APC. MHC-peptide complexes were added in an amount corresponding to a ratio of 5 MHC-peptide molecules per SA molecule. Then SA/APC carrying four MHC complexes were purified from free SA, free monomeric MHC complex, SA carrying three, two and one MHC complexes.

[2128] The following SA-MHC(peptide)/APC tetramers are made:
[2129] 10. APC-SA coupled with HLA-A*2402 in complex with beta2microglobulin and the peptide QYDPVAALF (SEQ ID NO 110891) derived from CMV pp 65.
[2130] 11. APC-SA coupled with HLA-A*2402 in complex with beta2microglobulin and the peptide VYALPLKML (SEQ ID NO 110892) derived from CMV pp 65.
[2131] 12. APC-SA coupled with HLA-A*2402 in complex with beta2microglobulin and the non-sense peptide.

[2132] The binding of the above described MHC(peptide)/APC dextran can be used to determine the presence of CMV pp 65 specific T cells in the blood from Cytomegalovirus infected individuals by flow cytometry following a standard flow cytometry protocol.

[2133] Blood from a patient with CMV is isolated and 100 ul of this blood is incubated with either of the SA-MHC(peptide)/APC tetramers described above for 10 minutes in the dark at room temperature. 5 μl of each of each of the antibodies mouse-anti-human CD3/PB (clone UCHT1 from Dako) and mouse-anti-human CD8/PE (clone DK25 from Dako) are added and the incubation continued for another 20 minutes at 4° C. in the dark. The samples are then washed by adding 2 ml PBS; pH=7.2 followed by centrifugation for 5 minutes at 200×g and the supernatant removed. The washing step is repeated. The washed cells are resuspended in 400-500 μl PBS; pH=7.2 and analyzed on flowcytometer.

[2134] The presence of cells labeled with anti-CD3/PB, anti-CD8/PE and either of the SA-MHC(peptide)/APC tetramers 10 or 11 described above and thereby the presence of CMV specific T cells will indicate that the patient are infected with Cytomegalovirus. Blood analysed with SA-MHC(peptide)/APC tetramers 12 should show no staining of CD3 and CD8 positive cells with this SA-MHC(peptide)/APC tetramer.

[2135] The sensitivity of the above described test may be enhanced by addition of labeled antibodies specific for activation markers expressed in or on the surface of the CMV specific T cells.

[2136] We conclude that the APC-SA coupled MHC(peptide) constructs may be used to detect the presence of CMV specific T cells in the blood of patients infected with Cytomegalovirus.

### Example 27

[2137] This is an example of how MHC multimers may be used for detection of Cytomegalovirus (CMV) specific T cells in blood samples from humans infected with CMV.

[2138] In this example the MHC multimer used are MHC complexes coupled to any fluorophor-labelled multimerisation as described elsewhere herein. The MHC multimers are used for direct detection of TCR in flow cytometry. The antigen origin is CMV, thus, immune monitoring of CMV.

[2139] MHC multimers carrying CMV specific peptides is in this example used to detect the presence of CMV specific T cells in the blood of patients infected with Cytomegalovirus.

[2140] Purified MHC-peptide complexes consisting of HLA-A*2402 heavy chain, human beta2microglobulin and peptide derived a region in CMV internal matrix protein pp 65 or a negative control peptide were generated by in vitro refolding and purified or purified from antigen presenting cells. MHC-peptide complexes are then coupled to a multimerisation domain together with APC.

[2141] The following MHC(peptide)/APC multimers are made:
[2142] 13. APC-multimerisation domain coupled with HLA-A*2402 in complex with beta2microglobulin and the peptide QYDPVAALF (SEQ ID NO 110891) derived from CMV pp65.
[2143] 14. APC-multimerisation domain coupled with HLA-A*2402 in complex with beta2microglobulin and the peptide VYALPLKML (SEQ ID NO 110892) derived from CMV pp65.
[2144] 15. APC-multimerisation domain coupled with HLA-A*2402 in complex with beta2microglobulin and the non-sense peptide.

[2145] The binding of the above described MHC(peptide)/APC multimers can be used to determine the presence of CMV pp 65 specific T cells in the blood from CMV infected individuals by flow cytometry following a standard flow cytometry protocol.

[2146] Blood from a patient with CMV infection is isolated and 100 ul of this blood is incubated with either of the MHC(peptide)/APC multimers described above for 10 minutes in the dark at room temperature. 5 μl of each of each of the antibodies mouse-anti-human CD3/PB (clone UCHT1 from Dako) and mouse-anti-human CD8/PE (clone DK25 from Dako) are added and the incubation continued for another 20 minutes at 4° C. in the dark. The samples are then washed by adding 2 ml PBS; pH=7.2 followed by centrifugation for 5 minutes at 200×g and the supernatant removed. The washing step is repeated. The washed cells are resuspended in 400-500 μl PBS; pH=7.2 and analyzed on flowcytometer.

[2147] The presence of cells labeled with anti-CD3/PB, anti-CD8/PE and either of the MHC(peptide)/APC multimers 13 or 14 described above and thereby the presence of CMV specific T cells will indicate that the patient are infected with Cytomegalovirus. Blood analysed with MHC(peptide)/APC multimer 15 should show no staining of CD3 and CD8 positive cells with this SA-MHC(peptide)/APC multimer.

[2148] The sensitivity of the above described test may be enhanced by addition of labeled antibodies specific for activation markers expressed in or on the surface of the CMV specific T cells.

[2149] We conclude that the APC-multimerisation domain coupled MHC(peptide) constructs may be used to detect the presence of CMV specific T cells in the blood of patients infected with Cytomegalovirus.

### Example 28

[2150] This is an example of how MHC multimers may be used for detection of cancer specific T cells in blood samples from patients.

[2151] In this example the MHC multimer used are MHC complexes coupled to fluorophor-labelled dextran (Dextramers). The dextramers are used for direct detection of TCR in flow Cytometry. The antigen origin is cancer, thus, immune monitoring of a cancer. MHC multimers carrying cancer specific peptides is in this example used to detect the presence of cancer specific T cells in the blood from cancer patients.

[2152] Purified MHC-peptide complexes consisting of HLA-A*1101 heavy chain, human beta2microglobulin and peptide derived from a region in Survivin (Table 11) or a negative control peptide were generated by in vitro refolding, purified and biotinylated as described elsewhere herein. Biotinylated MHC-peptide complexes were then coupled to a 270 kDa dextran multimerization domain labelled with APC by interaction with streptavidin (SA) on the dextran multimerization domain. The dextran-APC-SA multimerization domain was generated as described elsewhere herein. MHC-peptide complexes were added in an amount corresponding to a ratio of three MHC-peptide molecules per SA molecule and each molecule dextran contains 3.7 SA molecule and 8.95 molecules APC. The final concentration of dextran was 3.8×10e-8 M. The following MHC(peptide)/APC dextran constructs were made:
[2153] 16. APC-SA conjugated 270 kDa dextran coupled with HLA-A*1101 in complex with beta2microglobulin and the peptide DLAQCFFCFK derived from Survivin.
[2154] 17. APC-SA conjugated 270 kDa dextran coupled with HLA-A*1101 in complex with beta2microglobulin and the non-sense peptide.

[2155] The binding of the above described MHC(peptide)/APC dextran was used to determine the presence of Survivin specific T cells in the blood from cancer patients by flow cytometry following a standard flow cytometry protocol.

[2156] Blood from a cancer patient is isolated and 100 ul of this blood is incubated with 10 μl of the MHC(peptide)/APC dextran constructs described above for 10 minutes in the dark at room temperature. 5 μl of each of each of the antibodies mouse-anti-human CD3/PB (clone UCHT1 from Dako), and mouse-anti-human CD8/PE (clone DK25 from Dako) are added and the incubation continues for another 20 minutes at 4° C. in the dark. The samples are then washed by adding 2 ml PBS; pH=7.2 followed by centrifugation for 5 minutes at 200×g and the supernatant removed. The washing step is repeated. The washed cells are resuspended in 400-500 μl PBS; pH=7.2 and analyzed on flowcytometer.

[2157] The presence of cells labeled with anti-CD3/PB, anti-CD8/PE and the MHC(peptide)/APC dextran construct 1 described above and thereby the presence of Survivin specific T cells in the blood. Blood analysed with MHC(peptide)/APC dextran construct 2 show no staining of CD3 and CD8 positive cells with this MHC(peptide)/APC dextran construct.

[2158] The sensitivity of the above described test may be enhanced by addition of labeled antibodies specific for activation markers expressed in or on the surface of the Survivin specific T cells.

[2159] We conclude that the MHC(peptide)/APC dextran constructs can be used to detect the presence of Survivin specific T cells in the blood of cancer.

### Example 29

[2160] This is an example of how MHC multimers may be used for detection of cancer specific T cells in blood samples from patients.

[2161] In this example the MHC multimer used are MHC complexes coupled to fluorophor-labelled multimerisation domain Streptavidin (SA, used for direct detection of TCR in flow Cytometry. The antigen origin is cancer, thus, immune monitoring of a cancer. MHC multimers carrying cancer specific peptides is in this example used to detect the presence of cancer specific T cells in the blood from cancer patients.

[2162] Purified MHC-peptide complexes consisting of HLA-A*1101 heavy chain, human beta2microglobulin and peptide derived from a region in Survivin (Table 11) or a negative control peptide were generated by in vitro refolding, purified and biotinylated as described elsewhere herein. Biotinylated MHC-peptide complexes are then coupled SA labelled with APC. MHC-peptide complexes were added in an amount corresponding to a ratio of 5 MHC-peptide molecules per SA molecule. Then SA/APC carrying four MHC complexes were purified from free SA, free monomeric MHC complex, SA carrying three, two and one MHC complexes.

[2163] The following SA-MHC(peptide)/APC tetramers are made:
[2164] 18. APC-SA coupled with HLA-A*1101 in complex with beta2microglobulin and the peptide DLAQCFFCFK derived from Survivin.
[2165] 19. APC-SA coupled with HLA-A*1101 in complex with beta2microglobulin and the non-sense peptide.

[2166] The binding of the above described MHC(peptide)/APC dextran can be used to determine the presence of Survivin specific T cells in the blood from cancer patients by flow cytometry following a standard flow cytometry protocol.

[2167] Blood from a cancer patient is isolated and 100 ul of this blood is incubated with either of the SA-MHC(peptide)/APC tetramers described above for 10 minutes in the dark at room temperature. 5 μl of each of each of the antibodies mouse-anti-human CD3/PB (clone UCHT1 from Dako) and mouse-anti-human CD8/PE (clone DK25 from Dako) are added and the incubation continued for another 20 minutes at 4° C. in the dark. The samples are then washed by adding 2 ml PBS; pH=7.2 followed by centrifugation for 5 minutes at 200×g and the supernatant removed. The washing step is repeated. The washed cells are resuspended in 400-500 μl PBS; pH=7.2 and analyzed on flowcytometer.

[2168] The presence of cells labeled with anti-CD3/PB, anti-CD8/PE and the SA-MHC(peptide)/APC tetramers 3 described above and thereby the presence of Survivin specific T cells in the blood. Blood analysed with SA-MHC(peptide)/APC tetramers 4 should show no staining of CD3 and CD8 positive cells with this SA-MHC(peptide)/APC tetramer.

[2169] The sensitivity of the above described test may be enhanced by addition of labeled antibodies specific for activation markers expressed in or on the surface of the Survivin specific T cells.

[2170] We conclude that the APC-SA coupled MHC(peptide) constructs may be used to detect the presence of Survivin specific T cells in the blood of cancer patients.

### Example 30

[2171] This is an example of how MHC multimers may be used for detection of cancer specific T cells in blood samples from patients.

[2172] In this example the MHC multimer used are MHC complexes coupled to any fluorophor-labelled multimerisation as described elsewhere herein. The MHC multimers are used for direct detection of TCR in flow Cytometry. The antigen origin is cancer, thus, immune monitoring of a cancer.

[2173] MHC multimers carrying cancer specific peptides is in this example used to detect the presence of cancer specific T cells in the blood from cancer patients.

[2174] Purified MHC-peptide complexes consisting of HLA-A*1101 heavy chain, human beta2microglobulin and peptide derived a region in Survivin (Table 11) or a negative control peptide were generated by in vitro refolding and purified or purified from antigen presenting cells. MHC-peptide complexes are then coupled to a multimerisation domain together with APC.

[2175] The following MHC(peptide)/APC multimers are made:
[2176] 20. APC-multimerisation domain coupled with HLA-A*1101 in complex with beta2microglobulin and the peptide DLAQCFFCFK derived from Survivin.
[2177] 21. APC-multimerisation domain coupled with HLA-A*1101 in complex with beta2microglobulin and the non-sense peptide.

[2178] The binding of the above described MHC(peptide)/APC multimers can be used to determine the presence of Survivin specific T cells in the blood from cancer patients by flow cytometry following a standard flow cytometry protocol.

[2179] Blood from a cancer patient is isolated and 100 ul of this blood is incubated with either of the MHC(peptide)/APC multimers described above for 10 minutes in the dark at room temperature. 5 μl of each of each of the antibodies mouse-anti-human CD3/PB (clone UCHT1 from Dako) and mouse-anti-human CD8/PE (clone DK25 from Dako) are added and the incubation continued for another 20 minutes at 4° C. in the dark. The samples are then washed by adding 2 ml PBS; pH=7.2 followed by centrifugation for 5 minutes at 200×g and the supernatant removed. The washing step is repeated. The washed cells are resuspended in 400-500 μl PBS; pH=7.2 and analyzed on flowcytometer.

[2180] The presence of cells labeled with anti-CD3/PB, anti-CD8/PE and the MHC(peptide)/APC multimers 5 described above and thereby the presence of Survivin specific T cells in the blood. Blood analysed with MHC(peptide)/APC multimer 6 should show no staining of CD3 and CD8 positive cells with this SA-MHC(peptide)/APC multimer.

[2181] The sensitivity of the above described test may be enhanced by addition of labeled antibodies specific for activation markers expressed in or on the surface of the Survivin specific T cells.

[2182] We conclude that the APC-multimerisation domain coupled MHC(peptide) constructs may be used to detect the presence of Survivin specific T cells in the blood of cancer patients.

### Example 31

[2183] This example describes how to identify specific T cells in a blood sample with MHC multimers using flow cytometry analysis without lysis of red blood cells and without washing the cells after staining. MHC complexes in this example consisted of HLA-A*0201 heavy chain, human beta2microglobulin and different peptides, and the MHC complexes were coupled to a 270 kDa dextran multimerization domain.

[2184] Purified MHC-peptide complexes consisting of human heavy chain, human beta2microglobulin and peptide were generated by in vitro refolding, purified and biotinylated as described elsewhere herein. Biotinylated MHC-peptide complexes were then coupled to a 270 kDa dextran multimerization domain labelled with PE by interaction with streptavidin (SA) on the dextran multimerization domain. The SA-PE-dextran was made as described elsewhere herein. MHC-peptide complexes was added in an amount corresponding to a ratio of three MHC-peptide molecules per SA molecule and each molecule dextran contained 6.1 SA molecule and 3.9 molecules PE. The final concentration of dextran was 3.8×10e-8 M. The following constructs were made:
[2185] 1. PE conjugated 270 kDa dextran coupled with HLA-A*0101 in complex with beta2microglobulin and the peptide VTEHDTLLY (SEQ ID NO 110884) derived from Human Cytomegalo Virus (HCMV).
[2186] 2. PE conjugated 270 kDa dextran coupled with HLA-A*0101 in complex with beta2microglobulin and the peptide IVDCLTEMY (SEQ ID NO 110885) derived from ubiquitin specific peptidase 9 (USP9).
[2187] 3. PE conjugated 270 kDa dextran coupled with HLA-A*0201 in complex with beta2microglobulin and the peptide NLVPMVATV (SEQ ID NO 110880) derived from Human Cytomegalo Virus (HCMV).
[2188] 4. PE conjugated 270 kDa dextran coupled with HLA-A*0201 in complex with beta2microglobulin and the peptide ILKEPVHGV (SEQ ID NO 110881) derived from Human Immunodeficiency Virus (HIV).
[2189] 5. PE/SA conjugated 270 kDa dextran coupled with HLA-B*0207 in complex with beta2microglobulin and the peptide TPRVTGGGAM (SEQ ID NO 110886) derived from Human Cytomegalo Virus (HCMV).
[2190] 6. PE conjugated 270 kDa dextran coupled with HLA-B*0207 in complex with beta2microglobulin and the peptide RPHERNGFTVL (SEQ ID NO 110887) derived from Human Cytomegalo Virus (HCMV).
[2191] 7. PE conjugated 270 kDa dextran coupled with HLA-B*0207 in complex with beta2microglobulin and the peptide TPGPGVRYPL (SEQ ID NO 110888) derived from Human Immunodeficiency Virus (HIV).

[2192] These seven MHC multimer constructs were used for detection of specific T cells in flow cytometry analysis using a no-lyse no-wash procedure. Blood samples from three individual donors were analyzed. The donors had previously been screened for the presence of specific T cells using a general staining procedure including lysis and wash of the cell sample, and donor one turned out to be positive for HLA*0201 in complex with the peptide NLVPMVATV (SEQ ID NO 110880), donor two were positive for HLA*0101 in complex with the peptide VTEHDTLLY (SEQ ID NO 110884) and donor three were positive for HLA-B*0207 in complex with the peptides TPRVTGGGAM (SEQ ID NO 110886) and RPHERNGFTVL (SEQ ID NO 110887). In this experiment blood from each donor were analyzed with the MHC multimer construct they were supposed to have specific T cells restricted for and with MHC multimers of same haplotype but carrying a negative control peptide. The negative control peptides were either derived from HIV or the self-protein USP 9. Self-protein here means a naturally occurring protein in normal cells of a human individual. Normal healthy donors not infected with HIV are not expected to have specific T cells recognizing HIV derived peptides or peptides derived from self-proteins in complex with any HLA molecule in an amount detectable with this analysis method.

[2193] The blood were stained as follows:

[2194] 100 μl EDTA stabilized blood were incubated with 5 μl MHC(peptide)/PE dextran for 5 minutes at room temperature. Anti-CD45/PB, anti-CD3/FITC and anti-CD8/APC antibody in an amount of 0.4-1.2 μg/sample was added to each tube and the incubation continued for another 15 minutes. 850 μl PBS; pH=7.2 was added and the sample analyzed on a CyAn ADP flowcytometry instrument with a speed of 150 μl/minute. A total of 20.000 CD8 positive cells were acquired. During analysis CD45/PB antibody was used to set a trigger discriminator to allow the flow cytometer to distinguish between red blood cells and stained white blood cells (see FIG. 21A). Furthermore CD3/FITC antibody was used to select CD3 positive cells in a second gating strategy (see FIG. 21B).

[2195] Blood from donor one showed specific staining with HLA-A*0201(NLVPMVATV; (SEQ ID NO 110880)) multimer (construct 3) while no staining of specific T cells was observed with the negative control HLA-A*0201(ILKEPVHGV; (SEQ ID NO 110881)) multimer (construct 4). Donor two showed specific staining with HLA-A*0101(VTEHDTLLY; (SEQ ID NO 110884)) multimer (construct 1) and no staining was observed with the negative control HLA-A*0101(IVDCLTEMY; (SEQ ID NO 110885)) multimer (construct 2). In blood from donor three a population of T cells were stained with HLA-B*0207(TPRVTGGGAM; (SEQ ID NO 110886)) multimer (construct 5) and another population with HLA-B*0207(RPHERNGFTVL; (SEQ ID NO 110887)) multimer (construct 6) while no specific staining was observed with the negative control HLA-B*0207(TPGPGVRYPL) (SEQ ID NO 110888) multimer (construct 7). The results are shown in FIG. 22.

[2196] We have shown that MHC multimers of three different haplotypes can be used to identify specific T cells in blood samples from three different donors using an approach without lysing red blood cells and without wash following staining with MHC multimer. This method is simple, fast and interfere as little as possible with cells in the blood sample.

### Example 32

[2197] This example illustrates how MHC multimers together with counting beads was used for exact numeration of MHC-peptide specific T cells in a flow cytometry analysis whit no lyses of red blood cells and no washing steps during or after staining. Counting beads in this example was CytoCount™, Count Control Beads from Dako that are polystyrene Fluorospheres with a diameter of 5.2 μm. The MHC multimer consisted of HLA-A*0101 heavy chain complexed with human beta2 microgloblin and a peptide and the MHC-peptide complexes were coupled to a 270 kDa dextran multimerization domain labelled with PE. MHC multimers were generated as described elsewhere herein and the following two constructs were made:
[2198] 1) PE conjugated 270 kDa dextran coupled with HLA-A*0101 in complex with beta2microglobulin and the peptide VTEHDTLLY (SEQ ID NO 110884) derived from Human Cytomegalo Virus (HCMV).
[2199] 2) PE conjugated 270 kDa dextran coupled with HLA-A*0101 in complex with beta2microglobulin and the peptide IVDCLTEMY (SEQ ID NO 110885) derived from ubiquitin specific peptidase 9 (USP9).

[2200] Construct 2 is a negative control for construct 1 in this example and both were used for detection of specific T cells by flow cytometry using a no-lyse no-wash procedure: 100 μl of EDTA stabilized blood from a donor positive for HLA*0101 in complex with the peptide VTEHDLLY were incubated with 5 μl MHC multimer for 5 minutes at room temperature. Anti-CD45/CY, anti-CD3/PB and anti-CD8/APC antibody in an amount of 0.4-1.2 μg/sample was added and the incubation continued for another 15 minutes. 850 μl PBS; pH=7.2 was added together with precise 50 μl CytoCount beads 1028 bead/μl and the sample analyzed on a CyAn ADP flowcytometry instrument with a speed of 150 μl/minute. A total of 20.000 CD8 positive cells were acquired. During analysis CD45/CY antibody was used to set a trigger discriminator to allow the flow cytometer to distinguish between red blood cells and stained white blood cells. A dot plot was made for each sample showing MHC multimer vs CD8 positive events (se FIGS. 23 A and B). Based on the negative control a gate comprising events representing CD8 positive T cells specific for MHC multimer was defined. Similarly histogram plots for each sample was made showing FITC signal vs counts (FIGS. 23 C and D). In these histograms the amount of beads in the analyzed sample were identified since the beads in contrast to the cells emit light in the FITC channel. In principle the beads could be visualized in any fluorochrome channel because they emit light in all channels but it was important to visualize the beads in a channel where there was no interfering signal from labelled cells.

[2201] The concentration of T cells specific for HLA-A*0101(VTEHDTLLY; (SEQ ID NO 110884)) multimer (construct 1) in the blood sample were determined using the counting beads as an internal standard. Events obtained from staining with the negative control MHC multimer, construct 2, were defined as background signals and subtracted from the result obtained from staining with construct 1.

Concentration of HLA-A*0101(VTEHDTLLY; (SEQ ID NO 110884)) specific T cells in the blood sample=((Count of MHC multimer+CD8+ positive cells, construct 1× concentration of beads×dilution factor of beads)/counted beads))−((Counted MHC multimer+CD8+ cells, construct 2× concentration of beads×dilution factor of beads)/counted beads)=992.6 cells/ml

[2202] For details see FIG. 23.

[2203] This experiment demonstrated how CytoCount™ counting beads together with MHC multimers could be used to determine the exact concentration of MHC-peptide specific T cells in a blood sample using a no-lyse no-wash method.

### Example 33

[2204] This example describes an analysis of specific T cells in blood using MHC multimers where MHC multimers together with antibodies are pre-mixed and embedded in a matrix material to retain and immobilize the reagents prior to use. In this example the matrix was composed of Trehalose and Fructose and the MHC complex consisted of HLA-A*0101 heavy chain complexed with human beta2microglobulin and peptide. The MHC-peptide complexes were coupled to a 270 kDa dextran multimerization domain. Purified MHC-peptide complexes consisting of heavy chain, human beta2microglobulin and peptide were generated by in vitro refolding, purified and biotinylated as described elsewhere herein. Biotinylated MHC(peptide) complexes were coupled to a 270 kDa dextran multimerization domain labelled with PE, thereby generating PE labelled MHC multimers. The following MHC multimer constructs were made:
[2205] 1) PE conjugated 270 kDa dextran coupled with HLA-A*0101 in complex with beta2microglobulin and the peptide VTEHDTLLY (SEQ ID NO 110884) derived from Human Cytomegalo Virus (HCMV).
[2206] 2) PE conjugated 270 kDa dextran coupled with HLA-A*0101 in complex with beta2microglobulin and the negative control peptide IVDCLTEMY (SEQ ID NO 110885) derived from ubiquitin specific peptidase 9 (USP9).

[2207] Tubes with a matrix material to retain and immobilize the above described MHC multimer constructs together with antibodies relevant for later flow cytometer analysis was made. The matrix material was made to retain MHC multimer and antibody in the container when dry but release them into the sample medium when a sample comprising cells of interest was added to the tube.

[2208] Experimentally, solutions of 20% Fructose in water and 20% Trehalose in water were made and mixed in a 1:1 ratio. 15 μl of this mixture were transferred to two 5 ml Falcon tubes. A premix of antibodies were made consisting of 40 μl anti-CD8 Alexa700 labelled antibody in a concentration of 25 μg/ml+40 μl anti-CD3 Pacific Blue labelled antibody in a concentration of 100 μg/ml+160 μl anti-CD45 Cascade Yellow labelled antibody in a concentration of 200 μg/ml. 12 μl of this mixture were added to each Falcon tube together with 3 μl of either of the two MHC multimer constructs. 100 μl butylated hydroxytoluen (BHT) with a concentration of 99 mg/L were added. The mixtures were dried under vacuum a 2-8° C. over night. 100 μl EDTA stabilized blood from a donor with T cells specific for HLA-A*0101 complexed with the peptide VTEHDTLLY (SEQ ID NO 110884) were added to each of the two tubes. As a control experiment 6 μl of the antibody premix described above were transferred to two empty 5 ml Falcon tubes together with 3 μl of either of the MHC multimer constructs and 100 μl blood from the same donor. All four tubes were incubated for 15 minutes at room temperature. Then 900 μl PBS; pH=7.2 was added and the sample analyzed on a CyAn ADP flowcytometer instrument.

[2209] A total of 20.000 CD8 positive cells were acquired for each sample. During analysis CD45/CY antibody was used to set a trigger discriminator to allow the flow cytometer to distinguish between red blood cells and stained white blood cells.

[2210] As expected and shown in FIG. 24 a population of CD8 positive and HLA-A*0101(VTEHDTLLY; (SEQ ID NO 110884)) multimer positive cells were observed in the two samples stained with construct 1. The amount of specific T cells detected in the matrix sample was comparable to the amount of specific T cells detected in the control sample without matrix material. No HLA-A*0101(IVDCLTEMY; (SEQ ID NO 110885)) multimer specific CD8 positive cells were observed in the two samples stained with the negative control MHC multimer construct 2.

[2211] This experiment demonstrates that the MHC multimer constructs used in this experiment can be embedded in a sugar matrix and later used for analysis of specific T cells in a blood sample and that this method gives results comparable to results obtained from a no-lyse no-wash staining procedure.

### Example 34

[2212] This example describes the generation and application of negative controls, where the MHC complex is HLA-A*0201 loaded with either of the nonsense peptides GLAGDVSAV (SEQ ID NO 110879) or ALIAPVHAV SEQ ID NO 100882) and these MHC complexes are coupled to a 270 kDa dextran multimerization domain. The nonsense peptides have an amino acid sequence different from the linear sequence of any peptide derived from any known naturally occurring protein. This was analyzed by a blast search. The amino acids at position 2 and 9 can serve as anchor residues when binding to HLA-A*0201 molecules.

[2213] Purified MHC(peptide) molecules consisting of the allele HLA-A*0201, human beta2microglobulin and peptide was generated by in vitro refolding, purified and biotinylated as described elsewhere herin. Biotinylated HLA-A*0201(peptide) was mixed with APC-SA-conjugated 270 kDa dextran in an amount corresponding to a ratio of three biotinylated HLA-A*0201(peptide) molecules per SA molecule and incubated for 30 minutes in the dark at room temperature. The APC-SA-conjugated 270 kDa dextran contained 9 molecules APC and 3.7 molecules SA per dextran molecule. Following incubation the mixture was diluted into a buffer comprising 0.05M Tris/HCl, 15 nM NaN₃ and 1% BSA to a final concentration of 3.8×10⁻⁸ M dextran. By this procedure the following MHC multimer constructs were made:
[2214] 1) A negative control construct comprising APC-SA-conjugated 270 kDa dextran and biotinylated HLA-A*0201 in complex with beta2microglobulin and the nonsense peptide GLAGDVSAV (nonsense peptide 1; (SEQ ID NO 110879)).
[2215] 2) A negative control construct comprising APC-SA-conjugated 270 kDa dextran and biotinylated HLA-A*0201 in complex with beta2microglobulin and the nonsense peptide ALIAPVHAV (nonsense peptide 2; (SEQ ID NO 100882)).
[2216] 3) A construct comprising APC-SA-conjugated 270 kDa dextran and biotinylated HLA-A*0201 in complex with beta2microglobulin and the peptide NLVPMVATV (SEQ ID NO 110880) derived from pp 65 protein from human cytomegalovirus (HCMV).
[2217] 4) A construct comprising APC-SA-conjugated 270 kDa dextran and biotinylated HLA-A*0201 in complex with beta2microglobulin and the peptide GLCTLVAML (SEQ ID NO 110883) derived from BMLF-1 protein from Epstein Barr virus (EBV).
[2218] 5) A construct comprising APC-SA-conjugated 270 kDa dextran and biotinylated HLA-A*0201 in complex with beta2microglobulin and the peptide ILKEPVHGV (SEQ ID NO 110881) Reverse Transcriptase from Human Immunodeficiency Virus (HIV).

[2219] The binding of the HLA-A*0201(peptide)/APC dextran constructs to Human Peripheral Blood Mononuclear Cells (HPBMC) from various donors was analyzed by flow cytometry following a standard flow cytometry protocol. Briefly, HPBMC from the blood of 9 individual donors were isolated, by a standard protocol using Ficoll-Hypaque. 1×10⁶ purified HPBMC at a concentration of 2×10⁷ cells/ml were incubated with 10 μl of one of the HLA-A*0201(peptide)/APC dextran constructs described above for 10 minutes in the dark at room temperature. 10 μl of each of the antibodies mouse-anti-human CD3/PE (clone UCHT1 from Dako) and mouse-anti-human CD8/PB (clone DK25 from Dako) were added and the incubation continued for another 20 minutes at 4° C. in the dark. The samples were then washed by adding 2 ml PBS; pH=7.2 followed by centrifugation for 5 minutes at 200×g and the supernatant removed. The cells were then resuspended in 400-500 μl PBS; pH=7.2 and analyzed on a CYAN ADP flowcytometer.

[2220] Donor 1-5 were known to have detectable T cells specific for HLA-A*0201(NLVPMVATV) (SEQ ID NO 110880) and no detectable T cells specific for HLA-A*0201(ILKEPVHGV; (SEQ ID NO 110881)) while donor 6 were known not to have detectable specific T cells for either HLA-A*0201(NLVPMVATV) (SEQ ID NO 110880) nor HLA-A*0201(ILKEPVHGV; (SEQ ID NO 110881)). Lymphocytes from these 6 donors were stained with MHC multimer construct 1, 2, 3, and 5. Donor 1-5 showed positive staining with MHC multimer construct 3 as expected while no staining was observed with the either of the negative control MHC complex constructs 1 and 2 or with MHC complex construct 5. An example showing the staining patterns for donor 2 is shown in FIG. 19. No specific staining was observed of lymphocytes from donor 6 with either of the MHC multimer constructs.

[2221] Donor 7-8 known to have detectable T cells specific for HLA-A*0201(GLCTLVAML (SEQ ID NO 110883)) and no detectable T cells recognizing HLA-A*0201(ILKEPVHGV; (SEQ ID NO 110881)) and donor 9 having no detectable T cells specific for either HLA-A*0201(GLCTLVAML (SEQ ID NO 110883)) nor HLA-A*0201(ILKEPVHGV; (SEQ ID NO 110881)) were all stained with MHC multimer construct 1, 2, 4, and 5. Donor 7 and 8 demonstrated efficient staining with MHC multimer construct 4 as expected while no staining was observed with the other MHC multimer constructs tested. No staining was observed of lymphocytes from donor 9 with either of the MHC multimer constructs tested. A summary of the results is shown in FIG. 20.

[2222] In conclusion this experiment demonstrates that the negative MHC multimer constructs 1 and 2 did not stain any specific T cells in lymphocyte preparations from 10 different donors. Donors known to have specific T cells for either HLA-A*0201(GLCTLVAML; (SEQ ID NO 110883)) or HLA-A*0201(NLVPMVATV) (SEQ ID NO 110880) also demonstrated positive staining with the corresponding MHC multimer constructs 3 and 4. None of the 10 donors were infected with HIV and as expected did not appear to have T cells specific for HLA-A*0201 in complex with the HIV derived peptide ILKEPVHGV (SEQ ID NO 110881), and as expected none of these donors showed staining with MHC multimere construct 5. MHC multimer construct 1 and 2 are therefore suitable negative controls when using HLA-A*0201(peptide) multimers for detection of specific T cells in Flow Cytometry.

### Example 35

[2223] This example describes the generation of a negative control, where the MHC complex is HLA-A*0201 coupled to a 270 kDa dextran, and where the MHC is loaded with the peptide ILAKFLHWL that have pivaloyl coupled to Lysine at position 4. ILAKFLHWL is a peptide derived from telomerase and is known to bind HLA-A*0201. Pivaloyl is a small molecule that confers high sterical hindrance. Because pivaloyl is placed at a central position in the peptide it is likely to inhibit or completely abrogate the interaction with a specific TCR, because TCR-recognition is normally directed to the middle of the peptide when bound in the peptide-binding cleft. In the following the pivaloyl-modified peptide will be designated ILAK^{p}FLHWL (SEQ ID NO 115533).

[2224] Purified HLA-A*0201(ILAK^{p}FLHWL; (SEQ ID NO 110895)) molecules consisting of the HLA-A*0201 heavy chain, human beta2microglobulin and ILAK^{p}FLHWL (SEQ ID NO 110895) peptide is generated by in vitro refolding, purified and biotinylated as described elsewhere herein. Biotinylated HLA-A*0201(ILAK^{p}FLHWL; (SEQ ID NO 110895)) molecules are mixed with fluorochrome-SA-conjugated 270 kDa dextran molecules. The resulting HLA-A*0201(ILAK^{p}FLHWL; (SEQ ID NO 110895))/fluorochrome-carrying dextran molecules can be used as negative controls in e.g. flow cytometric analysis.

### Example 36

[2225] This example describes the generation of a negative control, where the MHC complex is any MHC I or MHC II molecule of human, mouse, rabbit, rat, swine, monkey or any other origin loaded with the peptide ILAK^{p}FLHWL (SEQ ID NO 110895) and coupled to any multimerization domain labeled with fluorochrome, HRP or any other label. Purified MHC(ILAK^{p}FLHWL; (SEQ ID NO 110895)) complexes consisting of the heavy chain, human beta2microglobulin and ILAK^{p}FLHWL (SEQ ID NO 110895) peptide is generated by in vitro refolding, purified and biotinylated as described elsewhere herein. Biotinylated MHC(ILAK^{P}FLHWL; (SEQ ID NO 110895)) complexes are mixed with labeled multimerization domain, thereby generating MHC(ILAK^{P}FLHWL; (SEQ ID NO 110895)) multimers. The MHC(ILAK^{P}FLHWL; (SEQ ID NO 110895)) multimers may be used as negative controls in e.g. flow cytometric analysis, 1HC, ELISA or similar.

### Example 37

[2226] This example describes how to verify that a MHC-complex is correctly folded by a sandwich-ELISA assay. W6/32 mouse-anti-HLA-ABC antibody (Dako M0736), that recognizes a conformational epitope on correctly folded MHC-complex, was used as coating-antibody. HRP-conjugated rabbit anti-β2m (Dako P0174) was used for visualization.
[2227] 1. Wells of a microtiter plate was pre-coated with W6/32 antibody (Dako M0736, 5 μg/ml in 0.1M NaHCO₃, 1 mM MgCl₂, pH 9.8, 50 μl/well) following a standard ELISA procedure regarding washes and blocking ect.
[2228] 2. After addition of 50 μl of 0.5M Tris-HCl, 0.1 M NaCl, 0.1% Tween 20, 0.01% Bronidox, pH 7.2 to each well, 50 μl of a sample of purified folded MHC-complex (in a concentration of approx. 0.4 mg/ml) was added to two wells in to columns in the microtiter plate, diluted 2-fold down the column and incubated 2 hours at 4° C. Light chain β2m (0.15 mg/ml in 0.5M Tris-HCl, 0.1 M NaCl, 0.1% Tween 20, 0.01% Bronidox, pH 7.2) was used as a negative control and the cell-line KG-1a, expressing HLA-A*30, HLA-A*31 and HLA-B*35 heavy chains, was used as positive control (10⁶ cells/well).
[2229] 3. After a standard ELISA wash, 50 μl of the detecting antibody; HRP-conjugated rabbit anti-132m (Dako P0174), diluted 1:2500 in 1% Skimmed Milk in 0.5M Tris-HCl, 0.1 M NaCl, 0.1% Tween 20, 0.01% Bronidox, pH 7.2 was added to each well. The plate wass incubated 1 hour at 4° C.
[2230] 4. After a standard ELISA wash, 50 μl of an amplifying antibody; HRP-Dextran500-conjugated goat anti-rabbit (Dako DM0106), diluted 1:2000 in 1% Skimmed Milk in 0.5M Tris-HCl, 0.1 M NaCl, 0.1% Tween 20, 0.01% Bronidox, 1% mouse serum (Dako X0190) pH 7.2 was added. The plate was incubated 30 min. at 20° C.
[2231] 5. After a standard ELISA wash, 50 μl of Dako S1599 (TMB+Substrat Chromogen) was added to each well for visualization.
[2232] 6. After 10 min. the visualization reaction was stopped with 50 μl 0.5M H₂SO₄/well.
[2233] 7. The chromogenic intensity was measured at OD₄₅₀ and the result from the ELISA assay evaluated.

[2234] As shown in FIG. 16 the OD₄₅₀ values from wells with MHC complex was more than 6 times higher than OD₄₅₀ values from wells with the negative control β2m. This ELISA procedure can be used to verify the presence of correctly folded MHC-peptide complexes in a preparation of MHC complexes.

### Example 38

[2235] This example describes how MHC multimers can be used for detection of TCR immobilized to solid support. This example also describes how the quality of a MHC multimer can be tested.

[2236] The MHC multimer is in this example a MHC-dextramer, and the test involves specific binding of the MHC-dextramer to TCRs immobilized on beads.

[2237] Recombinant TCRs (CMV3 TCRs; Soluble CMVpp65(NLVPMVATV; (SEQ ID NO 110880))-specific TCR protein) specific for the MHC-peptide complex HLA-A*0201(NLVPMVATV; (SEQ ID NO 110880)), where the letters in parenthesis denote the peptide complexed to the MHC-allel HLA-A*0201, were obtained from Altor Biosciences. The TCRs were dimers linked together via an IgG framework. The purity of the TCRs were verified by SDS PAGE and was between 95-100% pure. The quality of the TCRs were verified by their ability to recognize the relevant MHC-dextramer and not irrelevant MHC dextramers in ELISA experiments (data not shown).

[2238] Carboxylate-modified beads were coupled with dimeric TCR (CMV3 TCRs; Soluble CMVpp65(NLVPMVATV; (SEQ ID NO 110880))-specific TCR protein), incubated with fluorescently labeled MHC-dextramers and the extend of cell staining analysed by flow cytometry, as follows:

[2239] Immobilization of TCR on carboxylate beads:
[2240] 1. 3×10⁹ Carboxylate-modified beads, Duke Scientific Corporation, XPR-1536, 4 μm, lot:4394 were washed in 2×500 μl Wash buffer 1 (0.05% Tetronic 1307, 0.1 M MES-buffer (2-[N-morpholino]ethanesulfonic acid), pH 6.0), centrifuged 4 min at 15000 g, and the supernatant was discarded.
[2241] 2. 125 μl EDAC/Sulfo-NHS (50 mM EDAC (1-ethyl-3-(3-dimethylaminopropyl)carbodiimide), 50 mM Sulfo-NHS, in Wash buffer 1) was added to the beads, and the suspension incubated at room temperature for 20 min.
[2242] 3. Beads were washed in 2×250 μl Wash buffer 1 and centrifuged 2 min at 15000 g, and the supernatant was discarded.
[2243] 4. TCR was added in various concentrations from 0 μg to 20 μg, and incubated with slow shaking overnight at 4° C.
[2244] 5. Beads were centrifuged 4 min at 15000 g, and the supernatant discarded.
[2245] 6. Beads were washed in 2×500 μl Wash buffer 1 and centrifuged 4 min at 1500 g, and the supernatant was discarded.
[2246] 7. 125 μl 20 mM Glycin in Wash buffer 1 was added, and resuspended beads incubated for 1 hour at room temperature.
[2247] 8. Beads were washed in 2×500 μl phosphate-buffered saline (PBS) pH 7.2, 0.5% Tetronic 1307, and centrifuged 2 min at 15000 g, and the supernatant was discarded.
[2248] 9. Beads were resuspended in 250 μl PBS pH 7.2, 0.05% Tetronic 1307.

[2249] Bead concentration after resuspension was 1.2×10⁷ beads/μl. Beads coated with TCR were stored at 2-8° C. until further use.

[2250] Flow cytometry analysis:
[2251] 1. 20 μl beads (1.2×10⁷ beads/μl) coated with 0-20 μg TCRs, as described above were washed in 200 μl Wash buffer 2 (5% FCS, PBS, pH 7.4).
[2252] 2. Beads were centrifuged 3 min at 12000 g, and the supernatant was discarded, and beads resuspended in 50 μl Wash buffer 2.
[2253] 3. 10 μl MHC-dextramers were added, and samples were incubated 15 min. at room temperature in the dark.
[2254] 4. Samples were washed in 1 ml Wash buffer 2, centrifuged at 300 g for 5 min. The supernatant was discarded, and pellet resuspended in 0.4 ml PBS pH 7.4, and kept at 4° C. in the dark until analysis on flow cytometer.
[2255] 5. Samples were analysed by flow cytometry on a CyAn instrument.

[2256] The results are shown in FIG. 17. Beads coated with 2-20 μg TCR all showed positive staining with the specific HLA-A*0201(NLVPMVATV; (SEQ ID NO 110880))/RPE and not with an irrelevant HLA-A*0201(ILKEPVHGV; (SEQ ID NO 110881))/RPE dextramer. It can be concluded that carboxylate beads coated with dimeric TCRs can be used to test the quality of the MHC-dextramers.

### Example 39

[2257] This example describes how MHC multimers can be used for detection of TCR immobilized to solid support. This example also describes how TCR-coated beads can be used as internal, positive controls when analysing suspensions of Human Peripheral Blood Mononuclear Cells (HPBMCs), whole blood samples or any other cell sample of interest. The MHC multimer employed in this example is a MHC-dextramer.

[2258] In this example TCR-coated carboxylated beads generated as described in example 35 were added to a sample comprising either HPBMCs or whole peripheral blood.

[2259] HPBMCs and TCR-beads were incubated with fluorescently labelled MHC-dextramers and the extent of cell staining analysed by flow cytometry according to this general staining procedure:
[2260] 1. Transfer 1-3×10⁶ lymphoid cells (PBMC or splenocytes) to a 12×75 mm polystyrene test tube. Other cells of interest can be used. Allocate only 2-5×10⁵ cells per tube when staining T-cell clones or cell lines due to the high frequency of antigen-specific T cells
[2261] 2. Add 2 ml 0.01 mol/L PBS comprising 5% fetal calf serum and centrifuge at 300×g for 5 minutes. Remove supernatant and resuspend cells in remaining liquid.
[2262] 3. Add 10 μl of MHC Dextramer and mix gently with a vortex mixer. Incubate in the dark at room temperature for 10 minutes.
[2263] 4. Add an optimally titrated amount of anti-CD8 antibody conjugated with a relevant fluorochrome (e.g. Dako clone DK25 for human lymphocytes or clone YTS169.4/KT15 for mouse lymphocytes). Incubate in the dark at 2-8° C. for 20 min.
[2264] 5. Add 2 ml of 0.01 mol/L PBS comprising 5% fetal calf serum and centrifuge at 300×g for 5 minutes.
[2265] 6. Resuspend pellet in an appropriate fluid for flow cytometry, e.g. 0.4 ml PBS. Analyse on a flow cytometer or store at 2-8° C. in the dark until analysis. Do not store longer than 2 hours before analysis.

[2266] Human peripheral whole blood and TCR-beads were incubated with fluorescently labelled MHC-dextramers and the extent of cell staining analysed by flow cytometry as follows:
[2267] 1. Transfer 100 μL whole blood to a 12×75 mm polystyrene test tube.
[2268] 2. Add 10 μl of MHC Dextramer and mix with a vortex mixer. Incubate in the dark at room temperature for 10 minutes.
[2269] 3. Add an optimally titrated amount of anti-CD8 antibody (e.g. Dako clone DK25) conjugated with a relevant fluorochromes and mix well. Continue incubation at 2-8° C. in the dark for 20 minutes.
[2270] 4. Add 2 mL EasyLyse™ working solution (Code No. S2364) and incubate for 10 minutes.
[2271] 5. Centrifuge for 5 minutes at 300×g and aspirate supernatant.
[2272] 6. Add 2 mL 0.01 mol/L PBS and centrifuge for 5 minutes at 300×g and aspirate supernatant.
[2273] 7. Resuspend pellet in an appropriate fluid for flow cytometry, e.g. 0.4 mL PBS, and analyze on a flow cytometer or store at 2-8° C. in the dark until analysis. Do not store longer than 2 hours before analysis.

[2274] FIG. 18 shows examples of TCR-beads added into whole blood or HPBMC samples.

[2275] In both experiments it is possible, by forward- vs. side-scatter measurements, to distinguish TCR-beads from cell populations in the sample. Region R1 is TCR-beads, and region R2 is lymphocyte cell population of interest in the analysis of MHC positive T cells.

[2276] The size and conditions of coating of beads might be optimized. The size of beads or labeling of beads (e.g. fluorescent labeling) can be optimized to allow separation of cells of interest in the sample. In this example the forward- vs. side-scatter dot plot has been used for gating of cell populations of interest. Other parameters (e.g. fluorescence intensity) for cell populations of interest can be used.

[2277] Human peripheral whole blood and other cells (e.g. HPBMCs) can be stained with MHC Dextramers simultaneously with immuno-phenotyping of relevant antigens. The staining procedure describes the use of labelled CD8 antibody together with MHC dextramers; additional antibodies for detection of other extracellular antigens can be added. Likewise, detection of intracellular antigens can be performed simultaneously with MHC-detection (for protocol, see IntraStain procedure, cat no. K2311, Dako. Additional washing step prior to IntraStain Reagent A is essential for good results using MHC Dextramers together with this IntraStain procedure).

### Example 40

[2278] This is an example of measurement of antigen reactive T-Cells by IFN-γ capture in blood samples by ELISPOT.

[2279] This is an example of indirect detection of TCR, where individual cells are immobilized and measured by a chromogen assay.

[2280] The example provides a sensitive assay for the detection of T-cells reactive to an antigen by detecting a soluble factor whose production is induced by stimulation of the T-cell by the antigen.

[2281] A summary flow chart of the method is shown in FIG. 25. In brief, peripheral blood is diluted threefold in Dulbecco's phosphate buffered saline (DPBS), underlain with 15 ml of Ficoll (Pharmacia Ficoll-Paque #17-0840-02, Piscataway, N.J.) per 40 ml diluted blood in a 50 ml polypropylene centrifuge tube, and spun at 2000 RPM for 20 minutes in a Beckman CS-6R centrifuge (Beckman Inc., Palo Alto, Calif.). The buffy layer at the DPBS/Ficoll interface is removed, washed twice with DPBS and once with human tissue culture medium (hTCM: aMEM+5% heat inactivated human AB serum (Ultraserum, BioWhittaker, Walkersville, Md.), penicillin/streptomycin, 1-glutamine) at low RCF to remove platelets. Sixty percent of the PBMCs are resuspended in freezing medium (10% dimethyl sulfoxide(Sigma Chemical Co., St. Louis, Mo.), 90% fetal bovine serum to a concentration of 5×10⁶cells/ml, frozen in a programmable Cryo-Med (New Baltimore, Mich.) cell freezer, and stored under liquid nitrogen until needed.

[2282] The purified PBMCs are plated at 2×10⁵ cells/well at a volume of 0.1 ml in 96 well Costar cell culture plates. An equal volume of antigen at 10 μg/ml is added to triplicate or sextuplet sets of wells and the plate is incubated in a 37° C., 5% CO₂ incubator. On day five, 10 μl/well of 100 U/ml stock recombinant IL-2 (Advanced Biotechnologies Inc., Columbia, Md.) is added to each well. On day 8, frozen PBMCs are thawed, washed in DPBS+0.5% bovine serum albumin (BSA) to remove DMSO, resuspended to a concentration of 4×10⁶cells/ml in hTCM, and γ-irradiated (3,000 RADS). Fifty microliters/well are dispensed along with 50 μl of the appropriate antigen at a stock concentration of 40 μl/ml to give a final antigen concentration of 10 μg/ml.

[2283] To prepare a capture plate, IFN-γ capture antibody (monoclonal mouse anti-human IFN-g, Endogen #M700A, Cambridge, Mass.) is diluted to 10 μg/ml in sterile 0.1 M Na(CO₃)₂ pH 8.2 buffer, aliquotted at 50 μl/well in flat bottomed 96 well sterile microtiter plates (Corning Costar Corp.), and incubated at 4° C. for a minimum of 24 hours. Prior to use, excess antibody is removed and wells are washed twice with dPBS+1% Tween 20 (PBST). To block further nonspecific protein binding, plates are incubated with 250 μl/well of PBS+5% BSA at room temperature for 1 hour. After discarding the blocking solution, wells are washed once with PBST (0.1% Tween), followed by hTCM in preparation for the antigen stimulated cells.

[2284] On day 9 of the assay, twenty four hours after the second antigen stimulation, the stimulation plate is spun for 5 minutes at 1500 RPM in a Beckman CS-6R centrifuge and 90 μl of supernatant is carefully removed from each well with a micropipette. The pelleted cells are resuspended in 100 μl of hTCM, pooled in sterile tubes (Corning Costar corp sterile ClusterTAb #4411, Cambridge, Mass.), mixed and transferred into an equal number of wells of an anti IFN-γ capture plate. Capture plates are incubated undisturbed at 37° C. for 16-20 hours. At the end of the IFN-γ secretion phase, the cells are discarded and the plates are washed three times with 0.1% PBST. A final aliquot of PBST is added to the wells for ten minutes, removed, and 100 μl of a 1:500 dilution of rabbit anti-human IFN-γ polyclonal antibody (Endogen #P700, Cambridge, Mass.) in PBST+1% BSA is added to each well for 3.5 hours at room temperature with gentle rocking. Unbound anti-IFN-γ polyclonal antibody is removed by three washes with PBST, followed by a wash with 250 μl of 1×Tris-buffered saline+0.05% Tween 20 (TBST). Next, a 100 μl aliquot of 1:5000 alkaline phosphatase-conjugated mouse anti-rabbit polyclonal antibody (Jackson Immunological #211-055-109, West Grove, Pa.) diluted in TBST is added to each well and incubated at room temperature for 1.5-2 hours with gentle rocking. Excess enzyme-conjugated antibody is removed by three washes with PBST and two washes with alkaline phosphatase buffer (APB=0.1 M NaCl, 0.05 M MgCl.sub.2, 0.1 M Tris HCl, pH 9.5) followed by addition of the substrate mix of p-Toluidine salt and nitroblue tetrazolium chloride (BCIP/NBT, GIBCO BRL #18280-016, Gaithersburg, Md.). To stop the calorimetric reaction, plates were washed three times in dH₂O, inverted to minimize deposition of dust in the wells, and dried overnight at 28° C. in a dust free drying oven.

[2285] Images of the spots corresponding to the lymphokine secreted by individual antigen-stimulated T cells are captured with a CCD video camera and the image is analyzed by NIH image software. Captured images are enhanced using the Look Up Table which contrasts the images. Thresholding is then applied to every image and a wand tool is used to highlight the border to effectively subtract the edge of the well so that background counts won't be high and artificial. Density slicing over a narrow range is then used to highlight the spots produced from secreting cells. Pixel limits are set to subtract out small debris and large particles, and the number of spots falling within the prescribed pixel range are counted by the software program. Totals from each well are then manually recorded for future analysis. Alternatively, spots can be counted by other commercially available or customized software applications, or may be quantitated manually by a technician using standard light microscopy. Spots can also be counted manually under a light microscope.

[2286] We conclude that the protocol detailed above can be used for the enumeration of single IFN-γ secreting T cells.

### Example 41

[2287] This is an example of measurement of antigen reactive T-Cells by IFN-γ capture in blood samples by ELISPOT.

[2288] This is an example of indirect detection of TCR, where individual cells are immobilized and measured by a chromogen assay. The antigenic peptide origin is a library of antigens.

[2289] The example provides a sensitive assay for the detection of T-cells reactive to the antigen of a library generated as described in example 21, by detecting a soluble factor whose secretion is induced by stimulation of the T-cell by the antigen.

[2290] This example is similar to the experiment above. PMBC are isolated, prepared and stored as described in the example above.

[2291] The purified PBMCs are plated at 2×10⁵ cells/well at a volume of 0.1 ml in 96 well Costar cell culture plates. An equal volume of antigens from the library, at 10 μg/ml is added to triplicate or sextuplet sets of wells and the plate is incubated in a 37° C., 5% CO₂ incubator. On day five, 10 μl/well of 100 U/ml stock recombinant IL-2 is added to each well. On day 8, frozen PBMCs are thawed, washed in DPBS+0.5% BSA to remove DMSO, resuspended to a concentration of 4×10⁶cells/ml in hTCM, and γ-irradiated (3,000 RADS). 50 μl/well are dispensed along with 50 μl of the appropriate antigen at a stock concentration of 40 μl/ml to give a final antigen concentration of 10 μg/ml.

[2292] A capture plate with IFN-γ antibody is prepared, washed and blocked as described in the example above.

[2293] On day 9 of the assay, twenty four hours after the second antigen stimulation, the stimulation plate is spun for 5 minutes at 1500 RPM and 90 μl of supernatant is carefully removed from each well with a micropipette. The pelleted cells are resuspended in 100 μl of hTCM, pooled in sterile tubes, mixed and transferred into an equal number of wells of an anti IFN-γ capture plate. Capture plates are incubated undisturbed at 37° C. for 16-20 hours. At the end of the IFN-γ secretion phase, the cells are discarded and the plates are washed three times with 0.1% PBST. A final aliquot of PBST is added to the wells for ten minutes, removed, and 100 μl of a 1:500 dilution of rabbit anti-human IFN-γ polyclonal antibody in PBST+1% BSA is added to each well for 3.5 hours at room temperature with gentle rocking. Unbound anti-IFN-γ polyclonal antibody is removed by three washes with PBST, followed by a wash with 250 μl of 1×Tris-buffered saline+0.05% Tween 20 (TBST). Next, a 100 μl aliquot of 1:5000 alkaline phosphatase-conjugated mouse anti-rabbit polyclonal antibody diluted in TBST is added to each well and incubated at room temperature for 1.5-2 hours with gentle rocking. Excess enzyme-conjugated antibody is removed by three washes with PBST and two washes with alkaline phosphatase followed by addition of the substrate mix of p-Toluidine salt and nitroblue tetrazolium chloride. To stop the calorimetric reaction, plates were washed three times in dH₂O, inverted to minimize deposition of dust in the wells, and dried overnight at 28° C. in a dust free drying oven.

[2294] Images of the spots corresponding to the lymphokine secreted by individual antigen-stimulated T cells are captured with a CCD video camera and the image is analyzed as described in the example above

[2295] We conclude that the experiment detailed above can be used for the enumeration of single IFN-γ secreting T cells in blood.

### Example 43

[2296] This is an example of how antigen specific T-cells can be detected using a direct detection method detecting T cell immobilized in solid tissue. In this example MHC dextramers are used to detect antigen specific T cells on frozen tissue sections using enzymatic chromogenic precipitation detection.

[2297] Equilibrate the cryosection tissue (e.g. section of spleen from transgenic mice) to −20° C. in the cryostate. Cut 5 μm sections and then dry sections on slides at room temperature. Store slides frozen until use at −20° C.

[2298] Equilibrate frozen sections to room temperature. Fix with acetone for 5 min. Immediately after fixation transfer slides to TBS buffer (50 mM Tris-HCL pH 7.6, 150 mM NaCl) for 10 min.

[2299] Incubate slides with FITC-conjugated MHC-dextramers at appropriate dilution (1:40-1:80) and incubate for 30 min at room temperature. Other dilution ranges, as well as incubation time and temperature, may be desirable.

[2300] Decant solution and gently tap slides against filter paper, submerge in TBS buffer.

[2301] Decant and wash for 10 min in TBS buffer.

[2302] Incubate with rabbit polyclonal anti-FITC antibody (Dako P5100) at 1:100 dilution in TBS at room temperature for 30 min.

[2303] Repeat step 5 and 6.

[2304] Incubate with Envision anti-Rabbit HRP (Dako K4003) at room temperature for 30 min. Other visualization systems may be used.

[2305] Repeat step 5 and 6.

[2306] Develop with DAB+ (Dako K3468) in fume hood for 10 min. Other substrates may be used. Rinse slides in tap-water for 5 min. Counterstain with hematoxylin (Dako S3309) for 2 min. Repeat step 12, mount slides. The slides stained with MHC-Dextramers can now be evaluated by microscopy.

### Example 44

[2307] This is an example of how antigen specific T-cells can be detected using a direct detection method detecting T cell immobilized in solid tissue. In this example MHC dextramers are used to detect antigen specific T cells on paraffin embedded tissue sections using enzymatic chromogenic precipitation detection.

[2308] Formaldehyde fixed paraffin-embedded tissue are cut in section and mounted on the glass slice, for subsequent IHC staining with MHC-dextramers. Tissue fixed and prepared according to other protocols may be used as well. E.g. fresh tissue, lightly fixed tissue section (e.g. tissue fixed in 2% formaldehyde) or formalin-fixed, paraffin-embedded tissue section.

[2309] Optimal staining may require target retrieval treatment with enzymes as well as heating in a suitable buffer before incubation with antibodies and MHC-dextramer.

[2310] The sample is stained for DNA using DAPI stain, followed by incubated with an antigen specific MHCdex/FITC reagent, followed by addition of anti-FITC antibody labeled with HRP.

[2311] Then the substrate for HRP, “DAP” is added and the reaction allows to progress. The sample is analyzed by light microscopy for the present of a colored precipitate on the cells (DAPI stained nucleus) positive for the specific MHC/dex reagent.

[2312] A digital image of the stained sample is obtained, and this can be analyzed manually in the same way as by microscopy. However, a digital image may be used for automatic determination of where and how many cells that are positive, related to the total amount of cells, determined by the DAPI staining, or other criteria or stainings.

### Example 45

[2313] This example describes how MHC multimers can be used for direct detection of a specific T cell line. This example also describes how the quality of a MHC multimer can be tested. The MHC multimer in this example is a MHC-dextramer, and the test involves specific binding of the MHC-dextramer to a cell line that express specific TCRs and display these on the cell surface.

[2314] A transfected Jurkat T celle line (JT3A) from Altor Biosciences specific for the MHC complex HLA-A*0201(NLVPMVATV; (SEQ ID NO 110880)) was evaluated as positive control for the MHC-dextramer HLA-A*0201(NLVPMVATV; (SEQ ID NO 110880)). The cells were cultured and treated to express TCR just before evaluation. Under the conditions used, 20-50% of the cells were expected to express and display TCR. After stimulation the cells were incubated with fluorescently labeled MHC-dextramers and the extent of cell staining analyzed by flow cytometry, as follows:
[2315] 1. JT3A cells growing in log phase were incubated at room temperature for 2-3 hours to express TCRs (The TCRs are not stable expressed at 37° C.).
[2316] 2. After 3 hours cells were centrifuged for 5 min at 400 g, and the supernatant was discarded.
[2317] 3. Cells were washed in PBS pH 7.4+5% FCS, and centrifuged for 5 min at 400 g. The supernatant was discarded, and cells resuspended in proper volume PBS pH 7.4+5% FCS for counting in a Bürker chamber.
[2318] 4. 1×10⁶ cells per sample in 1000 PBS pH 7.4+5% FCS were added to each sample tube.
[2319] 5. 10 μl MHC-dextramers were added. Incubation for 30 min at 4° C. in the dark.
[2320] 6. 5 μl anti-CD3 was added to each sample. Further incubation for 30 min at 4° C. in the dark.
[2321] 7. Samples were washed in 2 ml PBS, centrifuged for 5 min at 300 g. Supernatant discarded and sample resuspended in 0.4 ml PBS pH 7.4.
[2322] 8. Samples were kept at 2-8° C. in the dark until analysis on flow cytometer.
[2323] 9. Samples were analyzed by flow cytometry on a CyAn instrument.

[2324] Data were analyzed by the Summit software. Stimulated JT3A cells were stained with the specific MHC-dextramer HLA-A*0201(NLVPMVATV; (SEQ ID NO 110880)) and anti-CD3. Another sample of cells were stained with the irrelevant MHC-dextramer HLA-A*0201(GILGFVFTL) and anti-CD3. The cells stained with HLA-A*0201(GILGFVFTL) had weak signals (low fluorescent intensity), and therefore regarded as the negative population. A boundary was introduced in the dot plot, to mark the negative population. Cells with fluorescence higher than the negative boundary were hereafter regarded positive. 19% and 0.25% of the cells were regarded positive when stained with the relevant and irrelevant MHC-dextramer, respectively. See table below.

| MHC-complex | Percentage of positive cells |
|---|---|
| HLA-A*0201 (NLVPMVATV) | 19% |
| (SEQ ID NO 110880) | |
| HLA-A*0201(GILGFVFTL) | 0.25% |

[2325] The results thus correlate well with the expected 20-50% HLA-A*0201(NLVPMVATV; (SEQ ID NO 110880)) positive JT3A cells after stimulation. We conclude that the transfected Jurkat cell line (JT3A) can be used as positive control for the MHC-dextramer.

### Example 46

[2326] This example describes how MHC multimers can be used for direct detection of a specific T cell line. This example also describes how the quality of a MHC multimer can be tested. The MHC multimer in this example is a MHC-dextramer, and the test involves specific binding of the MHC-dextramer to cell preparations expressing TCRs.

[2327] Three different peptide specific T-cell preparations of Human cytotoxic T lymphocyte lines specific for a viral peptides were incubated with fluorescently labeled MHC-dextramers and the extent of cell staining analyzed by flow cytometry. The following T-cell preparations were examined: (NLV) specific for MHC-dextramer HLA-A*0201(NLVPMVATV; (SEQ ID NO 110880)), (IPSI) specific for MHC-dextramer B*3501(IPSINVHHY) and (GLC) specific for MHC-dextramer A*0201(GLCLVALM).
[2328] 1. Cells were added 1 ml RPMI and then transfer to a tube with 9ml RPMI. Cells were centrifuged for 5 min at 300 g, and the supernatant was discarded.
[2329] 2. Cells were washed in 10 ml PBS pH 7.4+5% FCS, and centrifuged for 5 min at 300 g, and the supernatant was discarded.
[2330] 3. 1×10⁶ cells per sample in 1000 PBS pH 7.4+5% FCS were added to sample tubes.
[2331] 4. 10 μl MHC Dextramers were added, and incubated at room temperature in the dark for 10 min.
[2332] 5. 5 μl anti-CD3 and anti-CD8 were added to each sample. Further incubation for 20 min at 4° C. in the dark.
[2333] 6. Samples were washed in 2 ml PBS pH 7.4+5% FCS and centrifuged for 5 min at 300 g, and the supernatant was discarded.
[2334] 7. Pellets were resuspended in 0.4 ml PBS pH 7.4.
[2335] 8. Samples were kept in the dark at 2-8° C. until analysis on a flow cytometer.
[2336] 9. Samples were analyzed by flow cytometry on a CyAn instrument.

[2337] Data were analyzed by the Summit software. The cell preparations were stained with anti-CD3, anti-CD8, the respective specific MHC-dextramer, or an irrelevant MHC-dextramer. Anti-CD3 positive cells were positively gated and anti-CD8 vs. MHC-dextramer were depicted in a dot plot. The main population of anti-CD8 positive cells stained with the irrelevant MHC-dextramer was regarded as negative, and a boundary was introduced in the dot plot to mark the negative population. Anti-CD8 positive cells with fluorescence higher than the negative boundary were regarded positive. In the NLV and IPSI cell preparations, approximately 95% of the CD8⁺ cells were positive for the relevant MHC dextramer. 45% of the CD8⁺ GLC cells were positive for relevant MHC Dextramers, see table below. Cell preparations were not stained by the irrelevant MHC-dextramer.

[2338] We conclude that the different peptide specific T-cell preparations can be used as positive controls for the relevant MHC-dextramer.

| Cell | | Percentage of positive |
|---|---|---|
| preparation | MHC-complex | cells |
| NLV | HLA-A*0201(NLVPMVATV) | 97% |
| | (SEQ ID NO 110880) | |
| | HLA-B*3501(IPSINVHHY) | 0.02% |
| IPSI | HLA-B*3501(IPSINVHHY) | 95% |
| | HLA-A*0201 (NLVPMVATV) | 0.01% |
| | (SEQ ID NO 110880) | |
| GLC | HLA-A*0201(GLCLVALM) | 45% |
| | HLA-A*0201(ILKEPVHGV) | 0.1% |
| | (SEQ ID NO 110881) | |

### Example 47

[2339] This is an example of how MHC multimers may be used for the detection of antigen specific T-cells simultaneously with activation of T cells.

[2340] This example is a combination of i) direct detection of TCR, using MHC complexes coupled to any multimerisation as described elsewhere herein to stain antigen specific T cells, and ii) indirect detection of TCR, by detection of induced intracellular cytokine production by addition of fluorophor-labelled anti-cytokine antibodies by flow cytometry. Multicolor immunofluorescent staining with antibodies against intracellular cytokines and cell surface markers provides a high resolution method to identify the nature and frequency of cells which express a particular cytokine(s). In addition to enabling highly specific and sensitive measurements of several parameters for individual cells simultaneously, this method has the capacity for rapid analysis of large numbers of cells which are required for making statistically significant measurements.

[2341] Production of cytokines plays an important role in the immune response. Examples include the induction of many antiviral proteins by IFN-γ, the induction of T cell proliferation by IL-2 and the inhibition of viral gene expression and replication by TNF-α. Cytokines are not preformed factors; instead they are rapidly produced upon relevant stimulation. Intracellular cytokine staining relies upon the stimulation of T cells in the presence of an inhibitor of protein transport thus retaining the cytokines inside the cell.

[2342] Cellular activation to trigger cytokine production generally results in down-regulation of the T cell receptor. For this reason, MHC multimer staining is carried out prior to activation to ensure a good level of staining. The MHC multimers may be internalized with the T cell receptor during this period, but can still be detected in permeabilized cells. To analyze the effector function of antigen-specific T cells, the cells are first stained with MHC multimers, and then stimulated with antigen. This is followed by staining with antibodies specific for extracellular epitopes (such as CD8), then by membrane permeabilization and intracellular cytokine staining. The following protocol is an example of MHC multimer co-staining with anti-IFN-γ, TNF-α, MIP-1b, or IL-2.

[2343] Protocol applicable for intracellular staining of IFN-gamma, TNFα, MIP-1b, or IL-2

[2344] 1. Prepare peripheral blood cells in phosphate buffered saline (PBS) at a cell concentration of 2×10⁷ cells/ml.

[2345] 2. Transfer the cell suspension to individual tubes in 50 μl aliquots.

[2346] 3. Add relevant titrated fluorescently-labeled MHC multimers to the desired tubes, and incubate for 10 min at 22° C. (nonstimulated single-color controls should not be stained at this stage). Add 10 μl PBS to remaining tubes.

[2347] 4. Add 500 μl PBS to each tube. Centrifuge at 450×g for 5 minutes at 10° C.

[2348] 5. Aspirate supernatant. Agitate to disrupt cell pellets and resuspend in 200 μl complete RPMI.

[2349] 6. Dilute peptide/antigen stock 1:50 in complete RPMI. Add 2 μl of this (10 μg/ml (investigate the effect on cytokine response of titrating your peptide)) to each desired tube. If using Leukocyte Activation cocktail (LAC) as a control, rapidly thaw this at 37° C. in a water bath and add 0.33 μl of this to each desired tube.

[2350] 7. Place the tubes at 37° C. in a humidified CO₂ incubator for 15 minutes to 1 hour.

[2351] 8. Add Brefeldin A (10 μg/ml final) to the desired tubes (n.b. LAC contains Brefeldin A) and return to the incubator. Incubate for 15 hours (the optimal incubation time is variable and must be determined).

[2352] 9. Remove tubes from the incubator. Centrifuge at 450×g for 5 minutes at 10° C.

[2353] 10. Aspirate supernatant. Resuspend desired cell pellets in 50 μl PBS containing an optimally titrated amount of anti-CD8 antibody. Add 50 μl PBS to remaining tubes.

Note: Single-color controls should be stained at this stage. If additional phenotyping of samples is desired, antibodies to other cell surface receptors may also be added at this time.

[2354] 11. Incubate for 20 minutes on ice.

[2355] 12. Add 500 μl PBS to each tube. Centrifuge at 450×g for 5 minutes at 10° C.

[2356] 13. Aspirate supernatant. Agitate to disrupt cell pellets.

[2357] 14. Add 200 μl 4% paraformaldehyde to each sample tube. Vortex tubes. Incubate for 20 minutes on ice. This step will fix the cell morphology of the activated cells.

Note: The procedure can be stopped at this point. Repeat steps 12 and 13. Resuspend the cells in 100 μl/tube PBS. Cover and store the cells at 4° C. for up to 3 days. To proceed, repeat steps 12 and 13. Resuspend the cells in 100 μl/tube permeabilization buffer and proceed to step 16.

[2358] 15. Add 200 μl permeabilization buffer to each tube.

[2359] 16. Centrifuge at 450×g for 5 minutes at 10° C. Aspirate supernatant.

[2360] 17. Add 100 μl permeabilization buffer to the sample tubes that are to be stained with anti-cytokine antibody. Add 100 μl PBS to the remaining tubes (i.e. Single-color controls).

[2361] 18. Incubate for 5 minutes at room temperature.

[2362] 19. Add an optimally titrated amount of conjugated anti-cytokine antibody to the desired sample tubes and mix.

[2363] 20. Incubate for 20 minutes at room temperature.

[2364] 21. Add 200 μl permeabilization buffer to each tube and centrifuge at 450×g for 5 minutes at 10° C. Aspirate supernatant and agitate tubes to disrupt the cell pellets.

[2365] 22. Resuspend the cells in 200 μl fix solution. Vortex tubes. It is important to vortex well when adding this fixative so that cells do not clump.

[2366] 23. The samples are now ready for data acquisition and analysis on a flow cytometer but may be stored overnight at 4° C. in the dark prior to analysis.

[2367] We conclude that the MHC multimer constructs can be used to detect the presence of specific T cells in the blood simultaneously with activation and intracellular staining of cytokines.

### Example 48

[2368] This is an example of how MHC multimers may be used for the detection of antigen specific T-cells simultaneously with activation of T cells.

[2369] This example is a combination of i) direct detection of TCR, using MHC complexes coupled as pentamer structures to stain antigen specific T cells, and ii) indirect detection of TCR, by detection of induced intracellular cytokine production by addition of fluorophor-labelled anti-cytokine antibodies by flow cytometry. The antigenic origin is Epstein-Barr Virus (EBV), thus, immune monitoring of EBV infection

[2370] PBMCs were incubated with either a negative control (non-specific) Pentamer MHC multimer (A*0201/EBV (GLCTLVAML; (SEQ ID NO 110883))) or a Pentamer MHC multimer specific for the cells of interest (B*0801/EBV (RAKFKQLL)), then stimulated with LAC (non-specific activation) or B*0801/EBV peptide (specific peptide activation) for 15 hours in the presence of Brefeldin A. Pentamer MHC multimers were produced as described elsewhere herein. Fixation, permeabilization and staining for IFN-γ were carried out exactly as detailed in the protocol outlined in example 47 above.

[2371] FIG. 26 illustrates Pentamer (specific or non-specific) versus intracellular IFN-γ staining after activation with specific or non-specific antigen.

[2372] We conclude that the MHC multimer constructs can be used to detect the presence of EBV specific T cells in the blood simultaneously with activation and intracellular staining of cytokines.

[2373] Modified from www.proimmune.com: Pro5 Recombinant MHC Pentamer staining protocol for human Intracellular Proteins. Version 4.1 February 2007.

### Example 49

[2374] This is an example of how MHC multimers may be used for the detection of antigen specific T-cells and activation of T cells

[2375] This example is a combination of i) direct detection of TCR, using MHC complexes generated as any multimerisation as described elsewhere herein to stain antigen specific T cells, and ii) indirect detection of TCR, by detection of induced intracellular cytokine production by addition of fluorophor-labelled anti-cytokine antibodies by flow cytometry.

[2376] PBMCs are stimulated with either a negative control (non-specific) MHC multimer or a MHC multimer carrying a cancer specific antigenic peptide (specific peptide activation) for an optimal period of time in the presence of Brefeldin A. Fixation, permeabilization and staining for IFN-γ are carried out as detailed in the protocol outlined in the example 47.

[2377] We conclude that the MHC multimer constructs can activate T cells. The cytokine production is detected by intracellular staining in flow cytometric analysis.

### Example 50

[2378] This is an example of indirect detection of a population of T cells, where cells in suspension are induced to produce soluble factor. The soluble factor produced is a cytokine) and is detected by a chromogen assay using anti-cytokine antibodies. The antigenic peptides origin is Melan-A (see Table 10).

[2379] Blood from cancer patients vaccinated with a cancer vaccine containing antigenic peptides or antigenic polypeptides from the cancer antigen Melan-A are withdrawn and the presence of IFN-γ releasing T cells specific for the antigenic peptides described below are detected as described in the following.

[2380] The procedure used in this example is a whole blood IFN-γ assay (QuantiFERON [QFT]; Cellestis, Carnegie, Australia) and involves two stages: (1) overnight incubation of whole blood with antigens and (2) measurement of IFN-γ production in harvested plasma samples by ELISA.

[2381] Briefly, the procedure is as follows:

[2382] Within 12 hours of collection, 1-ml aliquots of blood samples are dispensed into 24-well tissue culture plates and antigens are added to appropriate wells. Three drops of saline (nil control) or phytohemagglutinin (5 μg/ml; mitogen-positive control), and 100 μA of a peptide cocktail, are added to separate wells to give a final peptide concentration of 1 μg/ml. The peptide cocktail contain 5 antigenic peptides selected from the cancer antigen Melan-A. The 5 peptides are able to bind different HLA class 1 molecules and have the following sequences: MPREDAHFI;EDAHFIYGY; TTAEEAAGI;AEEAAGIGI; EAAGIGILT (see Table 10).

[2383] Blood samples were incubated with antigens for 16 to 24 hours at 37° C. before harvesting about 300 μl of plasma from above the settled blood cells.

[2384] The concentration of IFN-γ produced in the four plasma samples from each subject, as a result of stimulation of specific T cells with antigen presenting cells displaying the above listed peptides, is determined by QuantiFERON-CMI ELISA or another IFN-γ measuring ELISA assay following the manufacturer's instructions.

[2385] Samples from up to 16 subjects are tested in each ELISA run, which also included a set of standards that are measured in duplicate. For an ELISA run to be valid, strict performance criteria (coefficient of variation less than 15% and correlation coefficient for the standard curve greater than 0.98) had to be met. ELISA data for the cancer-specific antigen Melan-A and the nil and mitogen controls are converted to international units per milliliter on the basis of the IFN-γ standard curve generated for each ELISA plate. For an individual's test to be deemed valid, their response to at least one antigen (Melan-A or mitogen) has to be at least 0.25 IU of IFN-γ per milliliter above that of their nil control (five times the limit of detection for the ELISA). Results for Melan-A are expressed as the concentration of IFN-γ detected minus the concentration of IFN-γ in the respective nil control plasma.

[2386] The presence of IFN-γ in blood of the tested individual indicates the presence of activated T cells specific for one or more of the investigated peptide epitopes from the cancer antigen Melan-A tested and can be regarded as a response to the cancer vaccine.

### Example 51

[2387] This is an example of indirect detection of a population of T cells, where cells in suspension are induced to produce soluble factor. The soluble factor produced is a cytokine (IFN-γ) and is detected by a chromogen assay using anti-cytokine antibodies. The antigenic peptides origin is any cancer antigen.

[2388] Blood from cancer patients vaccinated with a cancer vaccine containing antigenic peptides or antigenic polypeptides from one or more cancer antigen(s) are withdrawn and the presence of IFN-γ releasing T cells specific for the antigenic peptides derived from the cancer antigen described are detected as described in the following.

[2389] The procedure used in this example is a whole blood IFN-1 assay (QuantiFERON [QFT]; Cellestis, Carnegie, Australia) and involves two stages: (1) overnight incubation of whole blood with antigens and (2) measurement of IFN-γ production in harvested plasma samples by ELISA.

[2390] Briefly, the procedure is as follows:

[2391] Within 12 hours of collection, 1-ml aliquots of blood samples are dispensed into 24-well tissue culture plates and antigens are added to appropriate wells. Three drops of saline (nil control) or phytohemagglutinin (5 μg/ml; mitogen-positive control), and 100 μl of a peptide cocktail, are added to separate wells to give a final peptide concentration of 1 μg/ml. The peptide cocktail contain 5-20 antigenic peptides selected from one or more cancer antigen(s). The 5-20 peptides are able to bind different HLA class 1 and/or 2 molecules and have sequences selected from the lists of cancer derived antigenic peptide sequences enclosed in this application.

[2392] Blood samples were incubated with antigens for 16 to 24 hours at 37° C. before harvesting about 300 μl of plasma from above the settled blood cells.

[2393] The concentration of IFN-γ produced in the four plasma samples from each subject, as a result of stimulation of specific T cells with antigen presenting cells displaying the above listed peptides, is determined by QuantiFERON-CMI ELISA or another IFN-γ measuring ELISA assay following the manufacturer's instructions.

[2394] Samples from up to 16 subjects are tested in each ELISA run, which also included a set of standards that are measured in duplicate. For an ELISA run to be valid, strict performance criteria (coefficient of variation less than 15% and correlation coefficient for the standard curve greater than 0.98) had to be met. ELISA data for the cancer-specific antigen(s) and the nil and mitogen controls are converted to international units per milliliter on the basis of the IFN-γ standard curve generated for each ELISA plate. For an individual's test to be deemed valid, their response to at least one antigen (cancer antigen or mitogen) has to be at least 0.25 IU of IFN-γ per milliliter above that of their nil control (five times the limit of detection for the ELISA). Results for cancer antigen(s) are expressed as the concentration of IFN-γ detected minus the concentration of IFN-γ in the respective nil control plasma.

[2395] The presence of IFN-γ in blood of the tested individual indicates the presence of activated T cells specific for one or more of the investigated antigenic peptide epitopes from the cancer antigen(s) tested and can be regarded as a response to the cancer vaccine.

### Example 52

[2396] This is an example of treatment of cancer patients with a cancer vaccine and where the effect of the cancer vaccine was followed by immune monitoring. The disease treated is Melanoma. The vaccine was a dendritic cell (DC) based vaccine and were administered with or without an adjuvant. Two different immune monitoring methods used: 1) Indirect detection of T cells by measurement of proliferation (proliferation assay) and 2) Indirect detection of individual T cell by capture of secreted soluble factor on solid support (ELISPOT assays).

### Vaccine Administration Protocol

[2397] Eligible patients were randomized to DC alone, DC followed by low dose IL-2, or DC followed by high dose IL-2.

[2398] Each patient underwent a pretreatment leukapheresis to obtain PBMC for DC vaccine preparation and also to obtain pretreatment lymphocytes for immunologic monitoring. Pretreatment each patient received DTH testing with irradiated autologous melanoma cells. Each cohort of patients received for each vaccination 107 DC pulsed with KLH and autologous melanoma lysate by i.d. injection near an inguinal or axillary nodal region felt to be free of disease. A total of 3 vaccinations administered at the same site at 2 week intervals were planned (week 0, 2 and 4). Vaccination preceded IL-2 administration in those subjects receiving IL-2. For those patients randomized to low dose IL-2 the IL-2 was administered at a fixed dose of 3 million IU subcutaneously once a day for 4 days starting the day of the vaccination. For those patients randomized to high dose IL-2 the IL-2 was administered at 360,000 IU/kg by 15 minute IV infusion every 8 hours beginning the day of vaccination for a planned maximum of 9 doses of IL-2 after each vaccination. A scheduled dose of IL-2 was omitted for toxicity rather than dose reduced or delayed. Reasons for omitting IL-2 doses were; systolic blood pressure<90 mmHg refractory to fluid boluses or requiring doses of dopamine>5 mcg/kg/hour, respiratory distress requiring supplemental oxygen, mental confusion, tachydysrhythmia or cardiac ischemia (patients with these events received no further IL-2 during the study), or any other serious toxicity that in the judgment of the investigator (B.G.R.) warranted omitting IL-2 doses. At week 7 patients had a lymph node removed draining the vaccine site under conscious sedation. At week 9 patients were assessed for tumor response and underwent a repeat leukapheresis or large volume peripheral blood draw (100 ml) to obtain lymphocytes for immunologic monitoring. Also at week 9 patients underwent repeat DTH testing with irradiated autologous melanoma cells as well as DTH testing to KLH. Tumor response was determined by RECIST criteria. Patients who had a tumor response (at least a PR) were eligible for retreatment at week 11.

### Leukapheresis and Cryopreservation of PBMCs

[2399] Patients underwent a 4-h leukapheresis on a COBE spectrum apheresis system to ensure adequate numbers of PBMCs for DC culture and for immune monitoring. PBMCs were obtained by taking the apheresis product, diluting it 4-fold in DPBS and overlaying it on Ficoll-Hypaque gradients. The cells were then centrifuged at 900×g for 30 min at room temperature. The interface representing the PBMCs were then collected and washed in DPBS twice to reduce platelets. Aliquots of PBMCs were then cryopreserved in 70% human AB serum 20% X-VIVO 15 and 10% DMSO for future use in cryopreservation bags (Baxter Corp., Deerfield, Ill.) or cryovials.

### Vaccination Preparation

[2400] DC cultures and antigen pulsing were performed in the Human Applications Laboratory of the General Clinical Research Center, which is a facility that operates under Good Manufacturing Procedures. Vaccines were prepared from cryopreserved PBMCs obtained from the pretreatment leukapheresis. PBMCs were resuspended in serum-free X-VIVO 15 medium (BioWhittaker, Walkerville, Md.) at 1×10⁷ cells/ml for a total volume of 30 ml in 225-cm2 flasks. The cells were allowed to adhere for 2 h at 37° C. in 5% CO2, and the nonadherent cells were removed after gentle rocking of the flasks and aspiration of the medium. Immediate replacement of 30 ml of X-VIVO 15 medium containing GM-CSF (100 μg/ml; Schering-Plough, Kenilworth, N.J.) and IL-4 (50 ug/ml, Schering-Plough) was completed, and the cells were incubated for 6 days at 37° C., 5% CO2 before pulsing with tumor lysate and KLH. The adherent DCs were harvested from the flasks using 10 ml of EDTA (3 mM) for each flask and allowed to incubate for 10 min. The detached DCs were harvested, washed, and resuspended at 1×10⁶ cells/ml in fresh X-VIVO 15 medium containing GM-CSF and IL-4.

[2401] Ten ml of the cell suspension were placed in 75-cm2 flasks (107 DCs/flask) for pulsing with tumor lysate and KLH. Single cell suspensions of tumor were snap freeze-thawed three times in rapid succession, irradiated at 10,000 cGy, and stored at −80° C. for later use. Tumor lysate suspension was added to DCs at 1:1 cell equivalent ratio. Specifically, a volume of tumor lysate equal to 107 tumor cells was added to the flask and incubated for 18 h at 37° C., 5% CO2. A volume of 300 μl of KLH stock solution diluted in PBS (50 μg/ml; Calbiochem, San Diego, Calif.) was added to the flask and incubated for 18 h. After incubation, the tumor lysate-pulsed and KLH-pulsed DCs were harvested and counted. The DC suspension was adjusted to a total volume of 0.5 ml of PBS at 107 DC for injection.

### Immune Monitoring Using PBMCs

[2402] PBMCs were harvested pretreatment at the time of leukapheresis for DC generation and 1 month after the third vaccination when tumor response assessment was determined. All of the assays were done in batch on cryopreserved PBMCs. Cells were used soon after thawing. Cell viabilities ranged from 67 to 98% between patients, but for a given patient, viabilities between pre- and post treatment samples were within 15%. PBMC were thawed, washed with sterile PBS, and suspended in complete medium: X-VIVO-15 supplemented with 2% HEPES, 100 units/ml penicillin, 10 mg/ml streptomycin, 2 mM glutamine, 50 μM 2-mercaptoethanol, and 3% AB serum. Counts and viability were determined with trypan blue. All incubations were conducted at 37° C., 5% CO2. Antigens for assays were KLH (40 μg/ml, Calbiochem, San Diego, Calif.), tumor lysate (cell equivalence), C. albicans (1/100 dilution of cellular lysate, (Allermed, San Diego, Calif.). The following assays were performed by the Immunologic Monitoring Core of the University of Michigan Comprehensive Cancer Center.

[2403] Proliferation Assay—Cryopreserved PBMCs were thawed, washed, and suspended in complete medium. Viability was assessed by trypan blue exclusion, and cell concentrations were adjusted to 5×106/ml. Cells were added to 96-well, round-bottomed plates (Falcon-BD, Franklin Lakes, N.J.) in 100 μl volumes and incubated in a final volume of 200 μl with either medium alone, KLH (40 μg/ml), or tumor lysate (prepared to deliver lysate at tumor cell equivalence) for a total of 6 days at 37° C., 5% CO2. Phytohemagglutinin (10 ug/ml; Sigma Chemical Co.) was added to some of the wells as a positive control on day 3. The cultures were pulsed with 1 μCi-well of [3H]thymidine (ICN, Costa Mesa, Calif.) on day 5 and incubated overnight before harvest onto glass fiber filter plates (Millipore, Bedford, Mass.). Data were collected on a TopCount NXT scintillation counter (Meriden, Conn.). A stimulation index (SI) was calculated:

SI=Avg. cpm of antigen-stimulated culture/Avg.cpm of unstimulated culture

[2404] ELISPOT Assay—One day prior to assay, ELISPOT plates (Millipore, Bedford, Ma) were pre-wet with 70% ethanol, immediately washed with sterile PBS, then incubated overnight at 4° C. with 75 μl/well of anti-IFN-γ coating Ab (Pierce, Rockford, Ill.) suspended at 4 μg/ml in sterile 0.1 M carbonate buffer. The day of assay, the plates were washed with sterile PBS (Mediatech, Herndon, Va.) and then blocked for 1 hour with complete medium. PBMCs were prepared as above and adjusted to 1×107/ml. One hundred μl of PBMCs were added to each well and incubated with antigen as above. Negative controls for the assay were unstimulated PBMCs. Background counts for these samples were quite low and were subtracted from the counts generated from stimulated cultures. Positive controls were stimulated with phorbol myristate+ionomycin. Cultures were incubated undisturbed at 37° C., 5% CO2 for 24 h. After 24 h, cells were removed, and the plates were washed two times with PBS and then two times with wash buffer (tris-buffered saline+0.05% Tween-20). Biotinylated secondary Ab suspended in assay buffer (TBS+0.2% casein) at 2 μg/ml was added and incubated for 2 hours.

[2405] Plates were washed 5 times and incubated for 1 hour with streptavidin-alkaline phosphatase (Sigma). After 6 washes, plates were developed with NBT-BCIP substrate (Bio/FX, Owings Mills, Md.) for 20-40 minutes, and stopped in running water. Plates were allowed to dry at least 24 hours before analysis using an ImmunoSpot Series 1 analyzer (Cellular Technologies Ltd, Cleveland, Ohio). Background counts were generally low and subtracted from the responses in stimulated cultures for presentation. We defined a positive ELISPOT as a 3× increase over the pretreatment result or if the pretreatment was 0 spots then the post-vaccine result had to be>10 spots.

[2406] Lymph Node Assays—Harvested lymph nodes were teased apart and cells were washed and cryopreserved prior to assay. ELISPOT and proliferation assays were performed as above using pre-vaccine PBMC as antigen presenting cells. For both assays, LN cells and PBMC were added at 105/well. The proliferation assay was performed in 96 well plates and developed using a dye-conversion assay (Dojindo, Gaithersburg, Md.).

### DTH Testing

[2407] In addition to in vitro immune monitoring, we assessed patients for in vivo immune reactivity to KLH and autologous tumor by DTH testing. For KLH reactivity, patients were given intradermal injections of 2, 20, and 100 μg of KLH in 0.2-ml volumes of PBS. Induration was measured 48 h later in two perpendicular diameters. For autologous tumor reactivity, patients were assessed before treatment and 1 month after treatment with irradiated (6,000 cGy) autologous tumor cells at 104, 105, and 106 doses i.d. Induration was measured in a similar fashion as KLH. Positive DTH reactions were scored if the average perpendicular measurements exceeded 5 mm.

### Results

### Patient Characteristics

[2408] A total of 24 subjects were registered and randomized. Overall the patients were relatively young (median age 44 years old) and the majority had not received any systemic therapy for Stage 1V disease. Only 3 subjects had a diagnosis of non-cutaneous primary melanoma (1 ocular, 2 mucosal). Twenty two subjects received at least one vaccine. Two subjects were not treated due to problems with vaccine production. Eighteen subjects received all 3 vaccines with 3 receiving 2 and 1 receiving 1 vaccine. Of the 3 subjects who received 2 vaccines, 2 had symptomatic progression of disease and 1 had vaccine production problems. The subject receiving 1 vaccine was due to production difficulties. All vaccines were prepared in antibiotic free medium as required at that time by the FDA. Of the 18 subjects who received all 3 vaccines, 14 had post treatment PBL harvest and 13 had post treatment lymph node biopsy. The 14 subjects for which there was post treatment PBL were randomized to; 5 no IL-2, 4 low dose IL-2 and 5 high dose IL-2.

### DTH Response

[2409] Fourteen subjects received all 3 vaccines and had pre and post DTH responses assessed. No subject had a pretreatment DTH response to autologous tumor. Three subjects converted to positive DTH response to autologous tumor, one in each of the treatment arms. Nine subjects had a post treatment DTH response to KLH (2/4 high dose IL-2, 3/4 low dose IL-2, 4/5 vaccine alone). All 3 subjects with response to autologous tumor also had a response to KLH.

### Analysis of PBMC (Immune Monitoring)

[2410] Pre and post treatment PBMC were available from 14 subjects. Interferon-gamma ELISPOT to KLH and autologous tumor was determined (FIG. 27). Across all treatment arms the post treatment response to KLH was significantly increased compared to pretreatment (p=0.005).

[2411] A similar significant increase was seen between pre and post treatment interferon gamma response to autologous tumor (p=0.011). A similar pattern was seen (FIG. 28) with respect to the proliferative responses to KLH and autologous tumor across all treatment arms (p<0.001, p=0.005, respectively). The three treatment arms were not significantly different from one another in respect to interferon-gamma ELISPOT or proliferation. The table below summarizes the DTH and ELISPOT responses by patient.

DTH and ELISPOT Response

| | |
|---|---|
| Post Tx DTH | Post Tx ELISPOT |

| Patient | KLH | Tumor | KLH | Tumor |
|---|---|---|---|---|
| 11 | − | − | + | + |
| 12 | + | ND | − | − |
| 13 | + | − | + | + |
| 14 | + | − | − | − |
| 15 | + | + | − | − |
| 16 | + | − | + | + |
| 21 | + | + | + | + |
| 22 | + | − | + | + |
| 23 | − | − | + | + |
| 24 | + | − | + | + |
| 31 | − | − | + | − |
| 32 | + | + | − | − |
| 33 | − | − | + | + |
| 34 | − | − | + | + |

ND—Not Done

### Analysis of Vaccine Draining Lymph Nodes

[2412] Vaccine draining lymph nodes were harvested approximately 10 to 14 days after the third vaccination. Ten subjects had vaccine draining lymph nodes retrieved and were analyzed for reactivity to KLH and autologous tumor lysate by ELISPOT and proliferative assays (FIGS. 29 and 30). By IFNγ ELISPOT assay, 9 of 10 subjects demonstrated reactivity to KLH whereas 4 of 10 had responses to autologous tumor lysate. The greater reactivity to KLH compared to tumor lysate was borne out in the proliferation assay as well. A ratio of proliferation was calculated for each subject (net absorbance of presenters+KLH to presenters) yielding ratios>1. The mean ratio for KLH was 1.61 and for tumor lysate was 1.28; this difference was statistically significant (p=0.03 by paired t-test). These data indicate that KLH immune reactivity was reliably elicited in draining lymph nodes; and was significantly more prevalent than reactivity to autologous tumor lysate. Due to the small number of subjects, no differences between the randomized groups could be observed.

### Clinical Response

[2413] There was no tumor response as defined by RECIST criteria in any subject. There were 2 minor responses (patients 32 and 33) both in subjects who received high dose IL-2 and vaccine. These patients had reduction in size of their metastatic lesions but not enough to meet RECIST criteria for a partial response. One of these minor responses occurred in a subject who had progressed on high dose IL-2 prior to participation in the DC vaccine trial.

[2414] This example shows how Dendritic cells can be pulsed with autologous tumor lysate and used for vaccination of cancer patients with melanoma and how the immunologic response can be followed using immune monitoring methods.

[2415] In this example several patients showed an increased immunological response while no patients had a clinical anti-tumor response.

[2416] This example is modified from Redman et al. Phase 1b trial assessing autologous, tumor-pulsed dendritic cells as a vaccine administered with or without IL-2 in patients with metastatic melanoma. J. Immunother. 2008; 31(6): 591-598.

### Example 53

[2417] This is an example of treatment of cancer patients with a cancer vaccine and where the effect of the cancer vaccine is followed by immune monitoring. The disease treated is Melanoma.

[2418] The vaccine is a dendritic cell (DC) based vaccine administered with an adjuvant (IL-2).

[2419] The immune monitoring method used is: Direct detection of individual T cells in fluid sample using flow cytometry.

### Vaccine Administration Protocol

[2420] Patients with the HLA type HLA-A*0201 are treated with DC pulsed with autologous tumor lysates and IL-2.

[2421] Each patient gets a pretreatment leukapheresis to obtain PBMC for DC vaccine preparation and also to obtain pretreatment lymphocytes for immunologic monitoring. Each patient receives for each vaccination 107 DC pulsed with KLH and autologous melanoma lysate by i.d. injection near an inguinal or axillary nodal region felt to be free of disease. A total of 3 vaccinations administered at the same site at 2 week intervals are planned (week 0, 2 and 4). Vaccination preceded IL-2 administration. The IL-2 was administered at 360,000 IU/kg by 15 minute IV infusion every 8 hours beginning the day of vaccination for a planned maximum of 9 doses of IL-2 after each vaccination. At week 7 patients have a lymph node removed draining the vaccine site under conscious sedation. At week 9 patients are assessed for tumor response and undergoes a repeat leukapheresis or large volume peripheral blood draw (100 ml) to obtain lymphocytes for immunologic monitoring. Clinical tumor response is determined by RECIST criteria. Patients who have a tumor response (at least a PR) are eligible for retreatment at week 11.

### Leukapheresis and Cryopreservation of PBMCs

[2422] Patients undergoes a 4-h leukapheresis on a COBE spectrum apheresis system to ensure adequate numbers of PBMCs for DC culture and for immune monitoring. PBMCs are obtained by taking the apheresis product, diluting it 4-fold in DPBS and overlaying it on Ficoll-Hypaque gradients. The cells are then centrifuged at 900×g for 30 min at room temperature. The interface representing the PBMCs are then collected and washed in DPBS twice to reduce platelets. Aliquots of PBMCs are then cryopreserved in 70% human AB serum 20% X-VIVO 15 and 10% DMSO for future use in cryopreservation bags (Baxter Corp., Deerfield, Ill.) or cryovials.

### Vaccination Preparation

[2423] Vaccines are prepared from cryopreserved PBMCs obtained from the pretreatment leukapheresis. PBMCs are resuspended in serum-free X-VIVO 15 medium (BioWhittaker, Walkerville, Md.) at 1×10⁷ cells/ml for a total volume of 30 ml in 225-cm2 flasks. The cells are allowed to adhere for 2 h at 37° C. in 5% CO2, and the nonadherent cells are removed after gentle rocking of the flasks and aspiration of the medium. Immediate replacement of 30 ml of X-VIVO 15 medium containing GM-CSF (100 μg/ml; Schering-Plough, Kenilworth, N.J.) and IL-4 (50 ug/ml, Schering-Plough) is completed, and the cells are incubated for 6 days at 37° C., 5% CO2 before pulsing with tumor lysate and KLH. The adherent DCs are harvested from the flasks using 10 ml of EDTA (3 mM) for each flask and allowed to incubate for 10 min. The detached DCs are harvested, washed, and resuspended at 1×10⁶ cells/ml in fresh X-VIVO 15 medium containing GM-CSF and IL-4. Ten ml of the cell suspension are placed in 75-cm2 flasks (107 DCs/flask) for pulsing with tumor lysate and KLH. Single cell suspensions of tumor are snap freeze-thawed three times in rapid succession, irradiated at 10,000 cGy, and stored at −80° C. for later use. Tumor lysate suspension are added to DCs at 1:1 cell equivalent ratio. Specifically, a volume of tumor lysate equal to 107 tumor cells is added to the flask and incubated for 18 h at 37° C., 5% CO2. A volume of 300 μl of KLH stock solution diluted in PBS (50 μg/ml; Calbiochem, San Diego, Calif.) is added to the flask and incubated for 18 h. After incubation, the tumor lysate-pulsed and KLH-pulsed DCs are harvested and counted. The DC suspension is adjusted to a total volume of 0.5 ml of PBS at 107 DC for injection.

### Immune Monitoring

[2424] Fluorochrome labeleld MHC multimers are used to stain PBMC obtained from patients before and after vaccine treatment and then the sample are analyzed by flow cytometry.

[2425] In this example the MHC multimer used are MHC complexes coupled to fluorophor-labelled dextran (Dextramers). The Dextramers are used for direct detection of TCR in flow Cytometry.

[2426] MHC multimers carrying melanoma specific peptides is in this example used to detect the presence of melanoma specific T cells in the blood from cancer patients. Purified MHC-peptide complexes consisting of HLA-A*0201 heavy chain, human beta2microglobulin and peptides derived from the melanoma antigens gp100 and Mart-1 or a negative control peptide are generated by in vitro refolding, purified and biotinylated using standard procedures known by persons skilled in the art. Biotinylated MHC-peptide complexes are then coupled to a 270 kDa dextran multimerization domain labelled with APC by interaction with streptavidin (SA) on the dextran multimerization domain. MHC-peptide complexes are added in an amount corresponding to a ratio of three MHC-peptide molecules per SA molecule and each molecule dextran contains 3.7 SA molecule and 8.95 molecules APC. The final concentration of dextran is 3.8×10e-8 M. The following MHC(peptide)/APC dextran constructs are made:

[2427] 1) APC-SA conjugated 270 kDa dextran coupled with HLA-A*0201 in complex with beta2microglobulin and the peptide ITDQVPGSV derived from the melanoma antigen gp100.

[2428] 2) APC-SA conjugated 270 kDa dextran coupled with HLA-A*0201 in complex with beta2microglobulin and the peptide GILTVILGV derived from the melanoma antigen Mart-1

[2429] 3) APC-SA conjugated 270 kDa dextran coupled with HLA-A*0201 in complex with beta2microglobulin and a negative control peptide (non-sense peptide): GLAGDVSAV.

[2430] The binding of the above described MHC(peptide)/APC dextran is used to determine the presence of Melanoma specific T cells in the blood from cancer patients by flow cytometry following a standard flow cytometry protocol.

[2431] Cryopreserved PBMC isolated from the patients and prepared as described are thawed and washed once in 10 RPMI medium with 5% FCS. PBMC's are then resuspended in PBS with 5% BSA in a concentration of 1-5×10⁷ cells/ml and aliquoted into appropriate tubes with 100 ul in each tube. 10 μl of each of the MHC(peptide)/APC dextran constructs described above are added to separate tubes and incubated for 10 minutes in the dark at room temperature. 5 μl of each of each of the antibodies mouse-anti-human CD3/PB (clone UCHT1 from Dako), and mouse-anti-human CD8/PE (clone DK25 from Dako) are added and the incubation continues for another 20 minutes at 4° C. in the dark. The samples are then washed by adding 2 ml PBS; pH=7.2 followed by centrifugation for 5 minutes at 200×g and the supernatant removed. The washing step is repeated. The washed cells are resuspended in 400-500 μl PBS; pH=7.2 and analyzed on flowcytometer.

[2432] The presence of cells labeled with anti-CD3/PB, anti-CD8/PE and the MHC(peptide)/APC dextran construct 1 or 2 can then be determined and thereby the presence of Melanoma specific T cells in the blood of the patients. Blood analysed with MHC(peptide)/APC dextran construct 3 is the negative control and is used to determine the level of background signal.

[2433] In order to exactly enumerate the melanoma specific T cells counting beads may be added to the sample before analysis on the flowcytometer as described elsewhere herein.

[2434] An increase in the number of melanoma specific T cells upon vaccination with the DC vaccine then indicates that the vaccine has elicited a tumor-specific immune response while no increase in the number of melanoma specific T cells upon vaccination indicates that the effect of the vaccine is limited. The sensitivity of the above described test may be enhanced further by addition of labeled antibodies specific for activation markers expressed in or on the surface of the Melanoma specific T cells.

### Example 54

[2435] This is an example of treatment of cancer patients with a cancer vaccine and where the effect of the cancer vaccine is followed by immune monitoring. The disease treated is Melanoma. The vaccine is a dendritic cell (DC) based vaccine pulsed with autologous tumor-lysates and administered with an adjuvant (IL-2).

[2436] The immune monitoring methods used are: Direct detection of individual T cells in fluid sample using flow cytometry and Direct detection of individual T cells in solid sample using IHC.

### Vaccine Administration Protocol

[2437] Patients with the HLA type HLA-A*0201 are treated with DC pulsed with autologous tumor lysates and IL-2. Each patient gets a pretreatment leukapheresis to obtain PBMC for DC vaccine preparation and also to obtain pretreatment lymphocytes for immunologic monitoring. Each patient receives for each vaccination 107 DC pulsed with KLH and autologous melanoma lysate by i.d. injection near an inguinal or axillary nodal region felt to be free of disease. A total of 3 vaccinations administered at the same site at 2 week intervals are planned (week 0, 2 and 4). Vaccination preceded IL-2 administration. The IL-2 was administered at 360,000 IU/kg by 15 minute IV infusion every 8 hours beginning the day of vaccination for a planned maximum of 9 doses of IL-2 after each vaccination. At week 7 patients have a lymph node removed draining the vaccine site under conscious sedation. At week 9 patients are assessed for tumor response and undergoes a repeat leukapheresis or large volume peripheral blood draw (100 ml) to obtain lymphocytes for immunologic monitoring. Clinical tumor response is determined by RECIST criteria. Patients who have a tumor response (at least a PR) are eligible for retreatment at week 11.

### Leukapheresis and Cryopreservation of PBMCs

[2438] Patients undergoes a 4-h leukapheresis on a COBE spectrum apheresis system to ensure adequate numbers of PBMCs for DC culture and for immune monitoring. PBMCs are obtained by taking the apheresis product, diluting it 4-fold in DPBS and overlaying it on Ficoll-Hypaque gradients. The cells are then centrifuged at 900×g for 30 min at room temperature. The interface representing the PBMCs are then collected and washed in DPBS twice to reduce platelets. Aliquots of PBMCs are then cryopreserved in 70% human AB serum 20% X-VIVO 15 and 10% DMSO for future use in cryopreservation bags (Baxter Corp., Deerfield, Ill.) or cryovials.

### Vaccination Preparation

[2439] Vaccines are prepared from cryopreserved PBMCs obtained from the pretreatment leukapheresis. PBMCs are resuspended in serum-free X-VIVO 15 medium (BioWhittaker, Walkerville, Md.) at 1×10⁷ cells/ml for a total volume of 30 ml in 225-cm2 flasks. The cells are allowed to adhere for 2 h at 37° C. in 5% CO2, and the nonadherent cells are removed after gentle rocking of the flasks and aspiration of the medium. Immediate replacement of 30 ml of X-VIVO 15 medium containing GM-CSF (100 μg/ml; Schering-Plough, Kenilworth, N.J.) and IL-4 (50 ug/ml, Schering-Plough) is completed, and the cells are incubated for 6 days at 37° C., 5% CO2 before pulsing with tumor lysate and KLH. The adherent DCs are harvested from the flasks using 10 ml of EDTA (3 mM) for each flask and allowed to incubate for 10 min. The detached DCs are harvested, washed, and resuspended at 1×10⁶ cells/ml in fresh X-VIVO 15 medium containing GM-CSF and IL-4.

[2440] Ten ml of the cell suspension are placed in 75-cm2 flasks (107 DCs/flask) for pulsing with tumor lysate and KLH. Single cell suspensions of tumor are snap freeze-thawed three times in rapid succession, irradiated at 10,000 cGy, and stored at −80° C. for later use. Tumor lysate suspension are added to DCs at 1:1 cell equivalent ratio. Specifically, a volume of tumor lysate equal to 107 tumor cells is added to the flask and incubated for 18 h at 37° C., 5% CO2. A volume of 300 μl of KLH stock solution diluted in PBS (50 μg/ml; Calbiochem, San Diego, Calif.) is added to the flask and incubated for 18 h. After incubation, the tumor lysate-pulsed and KLH-pulsed DCs are harvested and counted. The DC suspension is adjusted to a total volume of 0.5 ml of PBS at 107 DC for injection.

### Immune Monitoring

### Flow Cytometry Analysis:

[2441] Fluorochrome labeled MHC multimers are used to stain PBMC obtained from patients before and after vaccine treatment and then the sample are analyzed by flow cytometry.

[2442] In this example the MHC multimer used are MHC complexes coupled to fluorophor-labelled dextran (Dextramers). The Dextramers are used for direct detection of TCR in flow Cytometry.

[2443] MHC multimers carrying melanoma specific peptides is in this example used to detect the presence of melanoma specific T cells in the blood from cancer patients. Purified MHC-peptide complexes consisting of HLA-A*0201 heavy chain, human beta2microglobulin and peptides derived from the melanoma antigens gp100 and Mart-1 or a negative control peptide are generated by in vitro refolding, purified and biotinylated using standard procedures known by persons skilled in the art. Biotinylated MHC-peptide complexes are then coupled to a 270 kDa dextran multimerization domain labelled with FITC by interaction with streptavidin (SA) on the dextran multimerization domain. MHC-peptide complexes are added in an amount corresponding to a ratio of three MHC-peptide molecules per SA molecule and each molecule dextran contains 14 SA molecule and 31 molecules FITCC. The final concentration of dextran is 3.8×10e-8 M. The following MHC(peptide)/FITC dextran constructs are made:
[2444] 1. FITC-SA conjugated 270 kDa dextran coupled with HLA-A*0201 in complex with beta2microglobulin and the peptide ITDQVPGSV derived from the melanoma antigen gp100.
[2445] 2. FITC-SA conjugated 270 kDa dextran coupled with HLA-A*0201 in complex with beta2microglobulin and the peptide GILTVILGV derived from the melanoma antigen Mart-1
[2446] 3. FITC-SA conjugated 270 kDa dextran coupled with HLA-A*0201 in complex with beta2microglobulin and a negative control peptide (non-sense peptide): GLAGDVSAV.

[2447] The binding of the above described MHC(peptide)/FITC dextran is used to determine the presence of Melanoma specific T cells in the blood from cancer patients by flow cytometry following a standard flow cytometry protocol.

[2448] Cryopreserved PBMC isolated from the patients and prepared as described are thawed and washed once in 10 RPMI medium with 5% FCS. PBMC's are then resuspended in PBS with 5% BSA in a concentration of 1-5×10′ cells/ml and aliquoted into appropriate tubes with 100 ul in each tube. 10 μl of each of the MHC(peptide)/FITC dextran constructs described above are added to separate tubes and incubated for 10 minutes in the dark at room temperature. 5 μl of each of each of the antibodies mouse-anti-human CD3/PB (clone UCHT1 from Dako), and mouse-anti-human CD8/PE (clone DK25 from Dako) are added and the incubation continues for another 20 minutes at 4° C. in the dark. The samples are then washed by adding 2 ml PBS; pH=7.2 followed by centrifugation for 5 minutes at 200×g and the supernatant removed. The washing step is repeated. The washed cells are resuspended in 400-500 μl PBS; pH=7.2 and analyzed on flowcytometer.

[2449] The presence of cells labeled with anti-CD3/PB, anti-CD8/PE and the MHC(peptide)/FITC dextran construct 1 or 2 can then be determined and thereby the presence of Melanoma specific T cells in the blood of the patients. Blood analysed with MHC(peptide)/APC dextran construct 3 is the negative control and is used to determine the level of background signal. In order to exactly enumerate the melanoma specific T cells counting beads may be added to the sample before analysis on the flowcytometer as described elsewhere herein. An increase in the number of melanoma specific T cells upon vaccination with the DC vaccine then indicates that the vaccine has elicited an tumor-specific immune response while no increase in the number of melanoma specific T cells upon vaccination indicates that the effect of the vaccine is limited. The sensitivity of the above described test may be enhanced further by addition of labeled antibodies specific for activation markers expressed in or on the surface of the Melanoma specific T cells.

### IHC Analysis

[2450] Tumor specific T cells are detected in biopsies taken from tumor before vaccination and after the 3 vaccinations. MHC dextramers are then used to detect antigen-specific T cells on frozen tissue sections using enzymatic chromogenic precipitation detection. Biopsies from melanoma tumor are taken out, freezed and stored frozen until use.

[2451] Staining procedure:

[2452] Equilibrate the cryosection tissue (e.g. section of spleen from transgenic mice) to −20° C. in the cryostate. Out 5 μm sections and then dry sections on slides at room temperature. Store slides frozen until use at −20° C.

[2453] Equilibrate frozen sections to room temperature. Fix with acetone for 5 min.

[2454] Immediately after fixation transfer slides to TBS buffer (50 mM Tris-HCL pH 7.6, 150 mM NaCl) for 10 min.

[2455] Incubate slides with FITC-conjugated MHC-dextramers 1, 2 or 3 described above at appropriate dilution (1:40-1:80) and incubate for 30 min at room temperature. Other dilution ranges, as well as incubation time and temperature, may be desirable.

[2456] Decant solution and gently tap slides against filter paper, submerge in TBS buffer.

[2457] Decant and wash for 10 min in TBS buffer.

[2458] Incubate with rabbit polyclonal anti-FITC antibody (Dako P5100) at 1:100 dilution in TBS at room temperature for 30 min.

[2459] Repeat step 5 and 6.

[2460] Incubate with Envision anti-Rabbit HRP (Dako K4003) at room temperature for 30 min. Other visualization systems may be used.

[2461] Repeat step 5 and 6.

[2462] Develop with DAB+ (Dako K3468) in fume hood for 10 min. Other substrates may be used. Rinse slides in tap-water for 5 min. Counterstain with hematoxylin (Dako S3309) for 2 min. Repeat step 12, mount slides. The slides stained with MHC-Dextramers can now be evaluated by microscopy.

[2463] An increase in the number of melanoma specific T cells in the tissue sections upon vaccination with the DC vaccine then indicates that the vaccine has elicited a tumor-specific immune response while no increase in the number of melanoma specific T cells upon vaccination indicates that the effect of the vaccine is limited.

[2464] The sensitivity of the above described test may be enhanced further by addition of labeled antibodies specific for other molecule expressed on the surface of the Melanoma specific T cells.

[2465] The result of the flowcytometry and IHC analysis may be combined and used to determine the effect of the vaccinations and/or to determine whether further vaccinations should be performed.

LENGTHY TABLES
The patent application contains a lengthy table section. A copy of the table is available in electronic form from the USPTO web site (http://seqdata.uspto.gov/?pageRequest=docDetail&DocID=US20110318380A1). An electronic copy of the table will also be available from the USPTO upon request and payment of the fee set forth in 37 CFR 1.19(b)(3).

1. A MHC monomer comprising a-b-P or a MHC multimer comprising (a-b-P)ₙ, wherein n>1,
wherein a and b together form a functional MHC protein capable of binding the antigenic peptide, P,
wherein (a-b-P) is the MHC-peptide complex formed when the peptide P binds to the functional MHC protein,
wherein each MHC peptide complex of a MHC multimer is associated with one or more multimerization domains and wherein P is a cancer antigenic peptide.

2. An antigenic peptide comprising or consisting of a sequence selected from the group of sequences included in FIG. 29 and FIG. 32 and modified sequences obtained by modification of a sequence selected from the group of sequences included in FIG. 29 and FIG. 32.

3-1630. (canceled)

1631. A composition comprising a plurality of MHC monomers and/or MHC multimers and/or antigenic peptides and/or antigenic polypeptides according to any of claims 1 to 2, wherein the WIC monomers and/or MHC multimers and/or antigenic peptides and/or antigenic polypeptides are identical or different, and a carrier.

1632. A kit comprising a MHC monomer or a MHC multimer or an antigenic peptide or an antigenic polypeptide or a composition according to any of claims 1 to 2 and 1631 and at least one additional component, such as a positive control and/or instructions for use.

1633. A method for generating the MHC multimer according to claim 1, said method comprising the steps of
i) providing one or more antigenic peptides P;
ii) providing one or more functional MHC proteins,
iii) optionally providing one or more multimerization domains, and
iv) contacting or reacting the one or more antigenic peptides P and the one or more functional MHC proteins and the one or more multimerization domains simultaneously or sequentially in any order, thereby obtaining MHC multimers according to the present invention.

1634. A method for immune monitoring and/or diagnosing one or more diseases comprising the following steps
providing;
a MHC monomer or MHC multimer or antigenic peptide or antigenic polypeptide according to any of claims 1 to 2, or the individual components thereof, and
providing a population of T cells, and
measuring the number, activity or state of T cells specific for said MHC monomer, MHC multimer, antigenic peptide, antigenic polypeptide, and
thereby immune monitoring and/or diagnosing said one or more diseases.

1635. A method for isolation of one or more antigen-specific T cells, said method comprising the steps of
providing
a MHC monomer or MHC multimer or antigenic peptide or antigenic polypeptide according to any of claims 1 to 2 or individual components thereof,
providing a population of T cells, and
isolating T cells specific for said MFIC monomer, MHC multimer, antigenic peptide or antigenic polypeptide.

1636. A method for performing a vaccination of an individual in need thereof, said method comprising the steps of
providing
a MHC monomer or MHC multimer or antigenic peptide or antigenic polypeptide according to any of claims 1 to 2 or the individual components thereof, and
administering said MHC monomer, MHC multimer, antigenic peptide or antigenic polypeptide, to said individual and obtaining a protective immune response,
and thereby performing a vaccination of the said individual.

1637. A method for performing therapeutic treatment of an individual comprising the steps of
providing;
a MHC monomer or MHC multimer or antigenic peptide or an antigenic polypeptide according to any of claims 1 to 2 or the individual components thereof, and
isolating or obtaining T-cells from a source, such as an individual or an ex-vivo library or cell bank, wherein said isolated or obtained T-cells are specific for said provided MHC monomer, MHC multimer, antigenic peptide or antigenic polypeptide,
optionally manipulating said T-cells, and
introducing said isolated or obtained T-cells into an individual to be subjected to a therapeutic treatment, wherein the individual can be the same individual or a different individual from the source individual.

1638. A vaccine comprising:
one or more MHC monomers, one or more MHC multimers, one or more antigenic peptides or/and one or more antigenic polypeptides according to any of the claims 1 to 2 or one or more nucleic acids encoding said MHC monomers, MHC multimers, antigenic peptides and/or antigenic polypeptides.

1639. A method for performing a vaccination of an individual in need thereof, said method comprising the steps of
providing a vaccine according to claim 1638
administering said vaccine to said individual and obtaining a protective immune response and thereby performing a vaccination of the said individual.

1640. A kit comprising a vaccine according to claim 1638 and at least one additional component.

1641. A method for minimization of undesired binding of the MHC multimer according to claim 1.

1642. A method for performing a control experiment comprising use of MHC multimers as a positive control.

1643. A method for performing a control experiment comprising use of MHC multimers as a negative control.

The application's sequence listing, which the Patent Office published only in electronic form, follows.

SEQUENCE LISTING (146508 sequences)

SEQ ID NO: 1 - protein, 344 aa, Homo Sapiens
MGPPSAPPCRLHVPWKEVLLTASLLTFWNPPTTAKLTIESTPFNVAEGKEVLLLAHNLPQNRIGYSWYKGERVDGNSLIVGYVIGTQQATPGPAYSGRETIYPNASLLIQNVTQNDTGFYTLQVIKSDLVNEEATGQFHVYPELPKPSISSNNSNPVEDKDAVAFTCEPEVQNTTYLWWVNGQSLPVSPRLQLSNGNMTLTLLSVKRNDAGSYECEIQNPASANRSDPVTLNVLYGPDGPTISPSKANYRPGENLNLSCHAASNPPAQYSWFINGTFQQSTQELFIPNITVNNSGSYMCQAHNSATGLNRTTVTMITVSGSAPVLSAVATVGITIGVLARVALI

SEQ ID NO: 2 - protein, 8 aa, Homo Sapiens
MLLTLIIL

SEQ ID NO: 3 - protein, 8 aa, Homo Sapiens
LLTLIILL

SEQ ID NO: 4 - protein, 8 aa, Homo Sapiens
TLIILLPV

SEQ ID NO: 5 - protein, 8 aa, Homo Sapiens
LIILLPVV

SEQ ID NO: 6 - protein, 8 aa, Homo Sapiens
ILLPVVSK

SEQ ID NO: 7 - protein, 8 aa, Homo Sapiens
LPVVSKFS

SEQ ID NO: 8 - protein, 8 aa, Homo Sapiens
PVVSKFSF

SEQ ID NO: 9 - protein, 8 aa, Homo Sapiens
VVSKFSFV

SEQ ID NO: 10 - protein, 8 aa, Homo Sapiens
FSFVSLSA

SEQ ID NO: 11 - protein, 8 aa, Homo Sapiens
SLSAPQHW

SEQ ID NO: 12 - protein, 8 aa, Homo Sapiens
NSTCVGPA

SEQ ID NO: 13 - protein, 8 aa, Homo Sapiens
CVGPAPFL

SEQ ID NO: 14 - protein, 8 aa, Homo Sapiens
GPAPFLIF

SEQ ID NO: 15 - protein, 8 aa, Homo Sapiens
FSHGNSIF

SEQ ID NO: 16 - protein, 8 aa, Homo Sapiens
HGNSIFRI

SEQ ID NO: 17 - protein, 8 aa, Homo Sapiens
GTNYEQLV

SEQ ID NO: 18 - protein, 8 aa, Homo Sapiens
QLVVDAGV

SEQ ID NO: 19 - protein, 8 aa, Homo Sapiens
VVDAGVSV

SEQ ID NO: 20 - protein, 8 aa, Homo Sapiens
DAGVSVIM

SEQ ID NO: 21 - protein, 8 aa, Homo Sapiens
GVSVIMDF

SEQ ID NO: 22 - protein, 8 aa, Homo Sapiens
SVIMDFHY

SEQ ID NO: 23 - protein, 8 aa, Homo Sapiens
MDFHYNEK

SEQ ID NO: 24 - protein, 8 aa, Homo Sapiens
DFHYNEKR

SEQ ID NO: 25 - protein, 8 aa, Homo Sapiens
HYNEKRIY

SEQ ID NO: 26 - protein, 8 aa, Homo Sapiens
KRIYWVDL

SEQ ID NO: 27 - protein, 8 aa, Homo Sapiens
IYWVDLER

SEQ ID NO: 28 - protein, 8 aa, Homo Sapiens
WVDLERQL

SEQ ID NO: 29 - protein, 8 aa, Homo Sapiens
RQLLQRVF

SEQ ID NO: 30 - protein, 8 aa, Homo Sapiens
QLLQRVFL

SEQ ID NO: 31 - protein, 8 aa, Homo Sapiens
RVFLNGSR

SEQ ID NO: 32 - protein, 8 aa, Homo Sapiens
VSGMAINW

SEQ ID NO: 33 - protein, 8 aa, Homo Sapiens
SGMAINWI

SEQ ID NO: 34 - protein, 8 aa, Homo Sapiens
NWINEEVI

SEQ ID NO: 35 - protein, 8 aa, Homo Sapiens
WINEEVIW

SEQ ID NO: 36 - protein, 8 aa, Homo Sapiens
EVIWSNQQ

SEQ ID NO: 37 - protein, 8 aa, Homo Sapiens
QQEGIITV

SEQ ID NO: 38 - protein, 8 aa, Homo Sapiens
GIITVTDM

SEQ ID NO: 39 - protein, 8 aa, Homo Sapiens
IITVTDMK

SEQ ID NO: 40 - protein, 8 aa, Homo Sapiens
HILLSALK

SEQ ID NO: 41 - protein, 8 aa, Homo Sapiens
ILLSALKY

SEQ ID NO: 42 - protein, 8 aa, Homo Sapiens
LSALKYPA

SEQ ID NO: 43 - protein, 8 aa, Homo Sapiens
ALKYPANV

SEQ ID NO: 44 - protein, 8 aa, Homo Sapiens
KYPANVAV

SEQ ID NO: 45 - protein, 8 aa, Homo Sapiens
YPANVAVD

SEQ ID NO: 46 - protein, 8 aa, Homo Sapiens
VAVDPVER

SEQ ID NO: 47 - protein, 8 aa, Homo Sapiens
DPVERFIF

SEQ ID NO: 48 - protein, 8 aa, Homo Sapiens
FIFWSSEV

SEQ ID NO: 49 - protein, 8 aa, Homo Sapiens
SEVAGSLY

SEQ ID NO: 50 - protein, 8 aa, Homo Sapiens
EVAGSLYR

SEQ ID NO: 51 - protein, 8 aa, Homo Sapiens
YRADLDGV

SEQ ID NO: 52 - protein, 8 aa, Homo Sapiens
ADLDGVGV

SEQ ID NO: 53 - protein, 8 aa, Homo Sapiens
ALLETSEK

SEQ ID NO: 54 - protein, 8 aa, Homo Sapiens
ETSEKITA

SEQ ID NO: 55 - protein, 8 aa, Homo Sapiens
TSEKITAV

SEQ ID NO: 56 - protein, 8 aa, Homo Sapiens
ITAVSLDV

SEQ ID NO: 57 - protein, 8 aa, Homo Sapiens
TAVSLDVL

SEQ ID NO: 58 - protein, 8 aa, Homo Sapiens
VSLDVLDK

SEQ ID NO: 59 - protein, 8 aa, Homo Sapiens
DVLDKRLF

SEQ ID NO: 60 - protein, 8 aa, Homo Sapiens
KRLFWIQY

SEQ ID NO: 61 - protein, 8 aa, Homo Sapiens
RLFWIQYN

SEQ ID NO: 62 - protein, 8 aa, Homo Sapiens
LFWIQYNR

SEQ ID NO: 63 - protein, 8 aa, Homo Sapiens
NREGSNSL

SEQ ID NO: 64 - protein, 8 aa, Homo Sapiens
REGSNSLI

SEQ ID NO: 65 - protein, 8 aa, Homo Sapiens
SLICSCDY

SEQ ID NO: 66 - protein, 8 aa, Homo Sapiens
HPTQHNLF

SEQ ID NO: 67 - protein, 8 aa, Homo Sapiens
TQHNLFAM

SEQ ID NO: 68 - protein, 8 aa, Homo Sapiens
NLFAMSLF

SEQ ID NO: 69 - protein, 8 aa, Homo Sapiens
AMSLFGDR

SEQ ID NO: 70 - protein, 8 aa, Homo Sapiens
SLFGDRIF

SEQ ID NO: 71 - protein, 8 aa, Homo Sapiens
LFGDRIFY

SEQ ID NO: 72 - protein, 8 aa, Homo Sapiens
RIFYSTWK

SEQ ID NO: 73 - protein, 8 aa, Homo Sapiens
FYSTWKMK

SEQ ID NO: 74 - protein, 8 aa, Homo Sapiens
STWKMKTI

SEQ ID NO: 75 - protein, 8 aa, Homo Sapiens
KMKTIWIA

SEQ ID NO: 76 - protein, 8 aa, Homo Sapiens
KTIWIANK

SEQ ID NO: 77 - protein, 8 aa, Homo Sapiens
IANKHTGK

SEQ ID NO: 78 - protein, 8 aa, Homo Sapiens
HTGKDMVR

SEQ ID NO: 79 - protein, 8 aa, Homo Sapiens
RINLHSSF

SEQ ID NO: 80 - protein, 8 aa, Homo Sapiens
LHSSFVPL

SEQ ID NO: 81 - protein, 8 aa, Homo Sapiens
SFVPLGEL

SEQ ID NO: 82 - protein, 8 aa, Homo Sapiens
FVPLGELK

SEQ ID NO: 83 - protein, 8 aa, Homo Sapiens
VPLGELKV

SEQ ID NO: 84 - protein, 8 aa, Homo Sapiens
PLGELKVV

SEQ ID NO: 85 - protein, 8 aa, Homo Sapiens
ELKVVHPL

SEQ ID NO: 86 - protein, 8 aa, Homo Sapiens
HPLAQPKA

SEQ ID NO: 87 - protein, 8 aa, Homo Sapiens
DTWEPEQK

SEQ ID NO: 88 - protein, 8 aa, Homo Sapiens
EQKLCKLR

SEQ ID NO: 89 - protein, 8 aa, Homo Sapiens
GQDLQSHL

SEQ ID NO: 90 - protein, 8 aa, Homo Sapiens
DLQSHLCM

SEQ ID NO: 91 - protein, 8 aa, Homo Sapiens
MCAEGYAL

SEQ ID NO: 92 - protein, 8 aa, Homo Sapiens
YALSRDRK

SEQ ID NO: 93 - protein, 8 aa, Homo Sapiens
DVNECAFW

SEQ ID NO: 94 - protein, 8 aa, Homo Sapiens
SYYCTCPV

SEQ ID NO: 95 - protein, 8 aa, Homo Sapiens
CTCPVGFV

SEQ ID NO: 96 - protein, 8 aa, Homo Sapiens
CPVGFVLL

SEQ ID NO: 97 - protein, 8 aa, Homo Sapiens
FVLLPDGK

SEQ ID NO: 98 - protein, 8 aa, Homo Sapiens
LLPDGKRC

SEQ ID NO: 99 - protein, 8 aa, Homo Sapiens
HQLVSCPR

SEQ ID NO: 100 - protein, 8 aa, Homo Sapiens
LVSCPRNV

SEQ ID NO: 101 - protein, 8 aa, Homo Sapiens
CPRNVSEC

SEQ ID NO: 102 - protein, 8 aa, Homo Sapiens
SECSHDCV

SEQ ID NO: 103 - protein, 8 aa, Homo Sapiens
VLTSEGPL

SEQ ID NO: 104 - protein, 8 aa, Homo Sapiens
FCPEGSVL

SEQ ID NO: 105 - protein, 8 aa, Homo Sapiens
SVLERDGK

SEQ ID NO: 106 - protein, 8 aa, Homo Sapiens
LCVPLSPV

SEQ ID NO: 107 - protein, 8 aa, Homo Sapiens
VPLSPVSW

SEQ ID NO: 108 - protein, 8 aa, Homo Sapiens
FPGYDLQL

SEQ ID NO: 109 - protein, 8 aa, Homo Sapiens
QLDEKSCA

SEQ ID NO: 110 - protein, 8 aa, Homo Sapiens
AASGPQPF

SEQ ID NO: 111 - protein, 8 aa, Homo Sapiens
QPFLLFAN

SEQ ID NO: 112 - protein, 8 aa, Homo Sapiens
FLLFANSQ

SEQ ID NO: 113 - protein, 8 aa, Homo Sapiens
FANSQDIR

SEQ ID NO: 114 - protein, 8 aa, Homo Sapiens
MHFDGTDY

SEQ ID NO: 115 - protein, 8 aa, Homo Sapiens
GTDYGTLL

SEQ ID NO: 116 - protein, 8 aa, Homo Sapiens
LLSQQMGM

SEQ ID NO: 117 - protein, 8 aa, Homo Sapiens
SQQMGMVY

SEQ ID NO: 118 - protein, 8 aa, Homo Sapiens
QQMGMVYA

SEQ ID NO: 119 - protein, 8 aa, Homo Sapiens
QMGMVYAL

SEQ ID NO: 120 - protein, 8 aa, Homo Sapiens
YALDHDPV

SEQ ID NO: 121 - protein, 8 aa, Homo Sapiens
DPVENKIY

SEQ ID NO: 122 - protein, 8 aa, Homo Sapiens
KIYFAHTA

SEQ ID NO: 123 - protein, 8 aa, Homo Sapiens
IYFAHTAL

SEQ ID NO: 124 - protein, 8 aa, Homo Sapiens
YFAHTALK

SEQ ID NO: 125 - protein, 8 aa, Homo Sapiens
FAHTALKW

SEQ ID NO: 126 - protein, 8 aa, Homo Sapiens
TALKWIER

SEQ ID NO: 127 - protein, 8 aa, Homo Sapiens
ALKWIERA

SEQ ID NO: 128 - protein, 8 aa, Homo Sapiens
LIEEGVDV

SEQ ID NO: 129 - protein, 8 aa, Homo Sapiens
DVPEGLAV

SEQ ID NO: 130 - protein, 8 aa, Homo Sapiens
EGLAVDWI

SEQ ID NO: 131 - protein, 8 aa, Homo Sapiens
LAVDWIGR

SEQ ID NO: 132 - protein, 8 aa, Homo Sapiens
AVDWIGRR

SEQ ID NO: 133 - protein, 8 aa, Homo Sapiens
RRFYWTDR

SEQ ID NO: 134 - protein, 8 aa, Homo Sapiens
FYWTDRGK

SEQ ID NO: 135 - protein, 8 aa, Homo Sapiens
WTDRGKSL

SEQ ID NO: 136 - protein, 8 aa, Homo Sapiens
RGKSLIGR

SEQ ID NO: 137 - protein, 8 aa, Homo Sapiens
SLIGRSDL

SEQ ID NO: 138 - protein, 8 aa, Homo Sapiens
RSDLNGKR

SEQ ID NO: 139 - protein, 8 aa, Homo Sapiens
DLNGKRSK

SEQ ID NO: 140 - protein, 8 aa, Homo Sapiens
KRSKIITK

SEQ ID NO: 141 - protein, 8 aa, Homo Sapiens
KENISQPR

SEQ ID NO: 142 - protein, 8 aa, Homo Sapiens
SQPRGIAV

SEQ ID NO: 143 - protein, 8 aa, Homo Sapiens
QPRGIAVH

SEQ ID NO: 144 - protein, 8 aa, Homo Sapiens
IAVHPMAK

SEQ ID NO: 145 - protein, 8 aa, Homo Sapiens
AVHPMAKR

SEQ ID NO: 146 - protein, 8 aa, Homo Sapiens
HPMAKRLF

SEQ ID NO: 147 - protein, 8 aa, Homo Sapiens
DTGINPRI

SEQ ID NO: 148 - protein, 8 aa, Homo Sapiens
ESSSLQGL

SEQ ID NO: 149 - protein, 8 aa, Homo Sapiens
SSLQGLGR

SEQ ID NO: 150 - protein, 8 aa, Homo Sapiens
SLQGLGRL

SEQ ID NO: 151 - protein, 8 aa, Homo Sapiens
LQGLGRLV

SEQ ID NO: 152 - protein, 8 aa, Homo Sapiens
GLGRLVIA

SEQ ID NO: 153 - protein, 8 aa, Homo Sapiens
VIASSDLI

SEQ ID NO: 154 - protein, 8 aa, Homo Sapiens
IASSDLIW

SEQ ID NO: 155 - protein, 8 aa, Homo Sapiens
DLIWPSGI

SEQ ID NO: 156 - protein, 8 aa, Homo Sapiens
IWPSGITI

SEQ ID NO: 157 - protein, 8 aa, Homo Sapiens
SGITIDFL

SEQ ID NO: 158 - protein, 8 aa, Homo Sapiens
TIDFLTDK

SEQ ID NO: 159 - protein, 8 aa, Homo Sapiens
FLTDKLYW

SEQ ID NO: 160 - protein, 8 aa, Homo Sapiens
KLYWCDAK

SEQ ID NO: 161 - protein, 8 aa, Homo Sapiens
WCDAKQSV

SEQ ID NO: 162 - protein, 8 aa, Homo Sapiens
KQSVIEMA

SEQ ID NO: 163 - protein, 8 aa, Homo Sapiens
SVIEMANL

SEQ ID NO: 164 - protein, 8 aa, Homo Sapiens
MANLDGSK

SEQ ID NO: 165 - protein, 8 aa, Homo Sapiens
DVGHPFAV

SEQ ID NO: 166 - protein, 8 aa, Homo Sapiens
HPFAVAVF

SEQ ID NO: 167 - protein, 8 aa, Homo Sapiens
AVAVFEDY

SEQ ID NO: 168 - protein, 8 aa, Homo Sapiens
VAVFEDYV

SEQ ID NO: 169 - protein, 8 aa, Homo Sapiens
AVFEDYVW

SEQ ID NO: 170 - protein, 8 aa, Homo Sapiens
VFEDYVWF

SEQ ID NO: 171 - protein, 8 aa, Homo Sapiens
DYVWFSDW

SEQ ID NO: 172 - protein, 8 aa, Homo Sapiens
YVWFSDWA

SEQ ID NO: 173 - protein, 8 aa, Homo Sapiens
DWAMPSVI

SEQ ID NO: 174 - protein, 8 aa, Homo Sapiens
WAMPSVIR

SEQ ID NO: 175 - protein, 8 aa, Homo Sapiens
AMPSVIRV

SEQ ID NO: 176 - protein, 8 aa, Homo Sapiens
MPSVIRVN

SEQ ID NO: 177 - protein, 8 aa, Homo Sapiens
SVIRVNKR

SEQ ID NO: 178 - protein, 8 aa, Homo Sapiens
RVNKRTGK

SEQ ID NO: 179 - protein, 8 aa, Homo Sapiens
RTGKDRVR

SEQ ID NO: 180 - protein, 8 aa, Homo Sapiens
RVRLQGSM

SEQ ID NO: 181 - protein, 8 aa, Homo Sapiens
RLQGSMLK

SEQ ID NO: 182 - protein, 8 aa, Homo Sapiens
SMLKPSSL

SEQ ID NO: 183 - protein, 8 aa, Homo Sapiens
MLKPSSLV

SEQ ID NO: 184 - protein, 8 aa, Homo Sapiens
KPSSLVVV

SEQ ID NO: 185 - protein, 8 aa, Homo Sapiens
SLVVVHPL

SEQ ID NO: 186 - protein, 8 aa, Homo Sapiens
VVVHPLAK

SEQ ID NO: 187 - protein, 8 aa, Homo Sapiens
HPLAKPGA

SEQ ID NO: 188 - protein, 8 aa, Homo Sapiens
YQNGGCEH

SEQ ID NO: 189 - protein, 8 aa, Homo Sapiens
GTAWCSCR

SEQ ID NO: 190 - protein, 8 aa, Homo Sapiens
SCREGFMK

SEQ ID NO: 191 - protein, 8 aa, Homo Sapiens
FMKASDGK

SEQ ID NO: 192 - protein, 8 aa, Homo Sapiens
LALDGHQL

SEQ ID NO: 193 - protein, 8 aa, Homo Sapiens
ALDGHQLL

SEQ ID NO: 194 - protein, 8 aa, Homo Sapiens
QLLAGGEV

SEQ ID NO: 195 - protein, 8 aa, Homo Sapiens
EVDLKNQV

SEQ ID NO: 196 - protein, 8 aa, Homo Sapiens
QVTPLDIL

SEQ ID NO: 197 - protein, 8 aa, Homo Sapiens
TPLDILSK

SEQ ID NO: 198 - protein, 8 aa, Homo Sapiens
DILSKTRV

SEQ ID NO: 199 - protein, 8 aa, Homo Sapiens
NITESQHM

SEQ ID NO: 200 - protein, 8 aa, Homo Sapiens
TESQHMLV

SEQ ID NO: 201 - protein, 8 aa, Homo Sapiens
MLVAEIMV

SEQ ID NO: 202 - protein, 8 aa, Homo Sapiens
AEIMVSDQ

SEQ ID NO: 203 - protein, 8 aa, Homo Sapiens
DQDDCAPV

SEQ ID NO: 204 - protein, 8 aa, Homo Sapiens
APVGCSMY

SEQ ID NO: 205 - protein, 8 aa, Homo Sapiens
VGCSMYAR

SEQ ID NO: 206 - protein, 8 aa, Homo Sapiens
CSMYARCI

SEQ ID NO: 207 - protein, 8 aa, Homo Sapiens
DATCQCLK

SEQ ID NO: 208 - protein, 8 aa, Homo Sapiens
KGFAGDGK

SEQ ID NO: 209 - protein, 8 aa, Homo Sapiens
VPVCPPAS

SEQ ID NO: 210 - protein, 8 aa, Homo Sapiens
YQGDGIHC

SEQ ID NO: 211 - protein, 8 aa, Homo Sapiens
CLDIDECQ

SEQ ID NO: 212 - protein, 8 aa, Homo Sapiens
CQLGVHSC

SEQ ID NO: 213 - protein, 8 aa, Homo Sapiens
CTNTEGGY

SEQ ID NO: 214 - protein, 8 aa, Homo Sapiens
TEGGYTCM

SEQ ID NO: 215 - protein, 8 aa, Homo Sapiens
YTCMCAGR

SEQ ID NO: 216 - protein, 8 aa, Homo Sapiens
TCMCAGRL

SEQ ID NO: 217 - protein, 8 aa, Homo Sapiens
GRLSEPGL

SEQ ID NO: 218 - protein, 8 aa, Homo Sapiens
RLSEPGLI

SEQ ID NO: 219 - protein, 8 aa, Homo Sapiens
STPPPHLR

SEQ ID NO: 220 - protein, 8 aa, Homo Sapiens
CPLSHDGY

SEQ ID NO: 221 - protein, 8 aa, Homo Sapiens
CLHDGVCM

SEQ ID NO: 222 - protein, 8 aa, Homo Sapiens
VCMYIEAL

SEQ ID NO: 223 - protein, 8 aa, Homo Sapiens
MYIEALDK

SEQ ID NO: 224 - protein, 8 aa, Homo Sapiens
YIEALDKY

SEQ ID NO: 225 - protein, 8 aa, Homo Sapiens
KYACNCVV

SEQ ID NO: 226 - protein, 8 aa, Homo Sapiens
VVGYIGER

SEQ ID NO: 227 - protein, 8 aa, Homo Sapiens
YIGERCQY

SEQ ID NO: 228 - protein, 8 aa, Homo Sapiens
RCQYRDLK

SEQ ID NO: 229 - protein, 8 aa, Homo Sapiens
QYRDLKWW

SEQ ID NO: 230 - protein, 8 aa, Homo Sapiens
DLKWWELR

SEQ ID NO: 231 - protein, 8 aa, Homo Sapiens
AGHGQQQK

SEQ ID NO: 232 - protein, 8 aa, Homo Sapiens
GQQQKVIV

SEQ ID NO: 233 - protein, 8 aa, Homo Sapiens
QQQKVIVV

SEQ ID NO: 234 - protein, 8 aa, Homo Sapiens
QKVIVVAV

SEQ ID NO: 235 - protein, 8 aa, Homo Sapiens
VIVVAVCV

SEQ ID NO: 236 - protein, 8 aa, Homo Sapiens
IVVAVCVV

SEQ ID NO: 237 - protein, 8 aa, Homo Sapiens
VVAVCVVV

SEQ ID NO: 238 - protein, 8 aa, Homo Sapiens
VAVCVVVL

SEQ ID NO: 239 - protein, 8 aa, Homo Sapiens
AVCVVVLV

SEQ ID NO: 240 - protein, 8 aa, Homo Sapiens
CVVVLVML

SEQ ID NO: 241 - protein, 8 aa, Homo Sapiens
VVVLVMLL

SEQ ID NO: 242 - protein, 8 aa, Homo Sapiens
VVLVMLLL

SEQ ID NO: 243 - protein, 8 aa, Homo Sapiens
VLVMLLLL

SEQ ID NO: 244 - protein, 8 aa, Homo Sapiens
VMLLLLSL

SEQ ID NO: 245 - protein, 8 aa, Homo Sapiens
LLLSLWGA

SEQ ID NO: 246 - protein, 8 aa, Homo Sapiens
LSLWGAHY

SEQ ID NO: 247 - protein, 8 aa, Homo Sapiens
SLWGAHYY

SEQ ID NO: 248 - protein, 8 aa, Homo Sapiens
LWGAHYYR

SEQ ID NO: 249 - protein, 8 aa, Homo Sapiens
HYYRTQKL

SEQ ID NO: 250 - protein, 8 aa, Homo Sapiens
YYRTQKLL

SEQ ID NO: 251 - protein, 8 aa, Homo Sapiens
RTQKLLSK

SEQ ID NO: 252 - protein, 8 aa, Homo Sapiens
KLLSKNPK

SEQ ID NO: 253 - protein, 8 aa, Homo Sapiens
NPYEESSR

SEQ ID NO: 254 - protein, 8 aa, Homo Sapiens
SSRDVRSR

SEQ ID NO: 255 - protein, 8 aa, Homo Sapiens
MSSCPQPW

SEQ ID NO: 256 - protein, 8 aa, Homo Sapiens
SCPQPWFV

SEQ ID NO: 257 - protein, 8 aa, Homo Sapiens
CPQPWFVV

SEQ ID NO: 258 - protein, 8 aa, Homo Sapiens
VIKEHQDL

SEQ ID NO: 259 - protein, 8 aa, Homo Sapiens
GQAADGSM

SEQ ID NO: 260 - protein, 8 aa, Homo Sapiens
GSMQPTSW

SEQ ID NO: 261 - protein, 8 aa, Homo Sapiens
SMQPTSWR

SEQ ID NO: 262 - protein, 8 aa, Homo Sapiens
EQGCWIPV

SEQ ID NO: 263 - protein, 8 aa, Homo Sapiens
VMERSFHM

SEQ ID NO: 264 - protein, 8 aa, Homo Sapiens
RSFHMPSY

SEQ ID NO: 265 - protein, 8 aa, Homo Sapiens
MPSYGTQT

SEQ ID NO: 266 - protein, 8 aa, Homo Sapiens
TLEGGVEK

SEQ ID NO: 267 - protein, 8 aa, Homo Sapiens
GVEKPHSL

SEQ ID NO: 268 - protein, 8 aa, Homo Sapiens
VEKPHSLL

SEQ ID NO: 269 - protein, 8 aa, Homo Sapiens
KPHSLLSA

SEQ ID NO: 270 - protein, 8 aa, Homo Sapiens
SLLSANPL

SEQ ID NO: 271 - protein, 8 aa, Homo Sapiens
LLSANPLW

SEQ ID NO: 272 - protein, 8 aa, Homo Sapiens
PLWQQRAL

SEQ ID NO: 273 - protein, 8 aa, Homo Sapiens
ALDPPHQM

SEQ ID NO: 274 - protein, 9 aa, Homo Sapiens
MLLTLIILL

SEQ ID NO: 275 - protein, 9 aa, Homo Sapiens
LTLIILLPV

SEQ ID NO: 276 - protein, 9 aa, Homo Sapiens
TLIILLPVV

SEQ ID NO: 277 - protein, 9 aa, Homo Sapiens
IILLPVVSK

SEQ ID NO: 278 - protein, 9 aa, Homo Sapiens
ILLPVVSKF

SEQ ID NO: 279 - protein, 9 aa, Homo Sapiens
LPVVSKFSF

SEQ ID NO: 280 - protein, 9 aa, Homo Sapiens
PVVSKFSFV

SEQ ID NO: 281 - protein, 9 aa, Homo Sapiens
VSLSAPQHW

SEQ ID NO: 282 - protein, 9 aa, Homo Sapiens
SLSAPQHWS

SEQ ID NO: 283 - protein, 9 aa, Homo Sapiens
APQHWSCPE

SEQ ID NO: 284 - protein, 9 aa, Homo Sapiens
TLAGNGNST

SEQ ID NO: 285 - protein, 9 aa, Homo Sapiens
STCVGPAPF

SEQ ID NO: 286 - protein, 9 aa, Homo Sapiens
TCVGPAPFL

SEQ ID NO: 287 - protein, 9 aa, Homo Sapiens
CVGPAPFLI

SEQ ID NO: 288 - protein, 9 aa, Homo Sapiens
APFLIFSHG

SEQ ID NO: 289 - protein, 9 aa, Homo Sapiens
FLIFSHGNS

SEQ ID NO: 290 - protein, 9 aa, Homo Sapiens
LIFSHGNSI

SEQ ID NO: 291 - protein, 9 aa, Homo Sapiens
IFSHGNSIF

SEQ ID NO: 292 - protein, 9 aa, Homo Sapiens
FSHGNSIFR

SEQ ID NO: 293 - protein, 9 aa, Homo Sapiens
RIDTEGTNY

SEQ ID NO: 294 - protein, 9 aa, Homo Sapiens
TEGTNYEQL

SEQ ID NO: 295 - protein, 9 aa, Homo Sapiens
EQLVVDAGV

SEQ ID NO: 296 - protein, 9 aa, Homo Sapiens
LVVDAGVSV

SEQ ID NO: 297 - protein, 9 aa, Homo Sapiens
VVDAGVSVI

SEQ ID NO: 298 - protein, 9 aa, Homo Sapiens
VSVIMDFHY

SEQ ID NO: 299 - protein, 9 aa, Homo Sapiens
VIMDFHYNE

SEQ ID NO: 300 - protein, 9 aa, Homo Sapiens
IMDFHYNEK

SEQ ID NO: 301 - protein, 9 aa, Homo Sapiens
MDFHYNEKR

SEQ ID NO: 302 - protein, 9 aa, Homo Sapiens
HYNEKRIYW

SEQ ID NO: 303 - protein, 9 aa, Homo Sapiens
RIYWVDLER

SEQ ID NO: 304 - protein, 9 aa, Homo Sapiens
WVDLERQLL

SEQ ID NO: 305 - protein, 9 aa, Homo Sapiens
DLERQLLQR

SEQ ID NO: 306 - protein, 9 aa, Homo Sapiens
LERQLLQRV

SEQ ID NO: 307 - protein, 9 aa, Homo Sapiens
RQLLQRVFL

SEQ ID NO: 308 - protein, 9 aa, Homo Sapiens
QRVFLNGSR

SEQ ID NO: 309 - protein, 9 aa, Homo Sapiens
FLNGSRQER

SEQ ID NO: 310 - protein, 9 aa, Homo Sapiens
NIEKNVSGM

SEQ ID NO: 311 - protein, 9 aa, Homo Sapiens
NVSGMAINW

SEQ ID NO: 312 - protein, 9 aa, Homo Sapiens
MAINWINEE

SEQ ID NO: 313 - protein, 9 aa, Homo Sapiens
AINWINEEV

SEQ ID NO: 314 - protein, 9 aa, Homo Sapiens
EVIWSNQQE

SEQ ID NO: 315 - protein, 9 aa, Homo Sapiens
NQQEGIITV

SEQ ID NO: 316 - protein, 9 aa, Homo Sapiens
EGIITVTDM

SEQ ID NO: 317 - protein, 9 aa, Homo Sapiens
GIITVTDMK

SEQ ID NO: 318 - protein, 9 aa, Homo Sapiens
HILLSALKY

SEQ ID NO: 319 - protein, 9 aa, Homo Sapiens
LLSALKYPA

SEQ ID NO: 320 - protein, 9 aa, Homo Sapiens
SALKYPANV

SEQ ID NO: 321 - protein, 9 aa, Homo Sapiens
LKYPANVAV

SEQ ID NO: 322 - protein, 9 aa, Homo Sapiens
YPANVAVDP

SEQ ID NO: 323 - protein, 9 aa, Homo Sapiens
NVAVDPVER

SEQ ID NO: 324 - protein, 9 aa, Homo Sapiens
AVDPVERFI

SEQ ID NO: 325 - protein, 9 aa, Homo Sapiens
DPVERFIFW

SEQ ID NO: 326 - protein, 9 aa, Homo Sapiens
RFIFWSSEV

SEQ ID NO: 327 - protein, 9 aa, Homo Sapiens
FIFWSSEVA

SEQ ID NO: 328 - protein, 9 aa, Homo Sapiens
WSSEVAGSL

SEQ ID NO: 329 - protein, 9 aa, Homo Sapiens
SSEVAGSLY

SEQ ID NO: 330 - protein, 9 aa, Homo Sapiens
EVAGSLYRA

SEQ ID NO: 331 - protein, 9 aa, Homo Sapiens
RADLDGVGV

SEQ ID NO: 332 - protein, 9 aa, Homo Sapiens
DLDGVGVKA

SEQ ID NO: 333 - protein, 9 aa, Homo Sapiens
DGVGVKALL

SEQ ID NO: 334 - protein, 9 aa, Homo Sapiens
KALLETSEK

SEQ ID NO: 335 - protein, 9 aa, Homo Sapiens
ALLETSEKI

SEQ ID NO: 336 - protein, 9 aa, Homo Sapiens
ETSEKITAV

SEQ ID NO: 337 - protein, 9 aa, Homo Sapiens
SEKITAVSL

SEQ ID NO: 338 - protein, 9 aa, Homo Sapiens
KITAVSLDV

SEQ ID NO: 339 - protein, 9 aa, Homo Sapiens
ITAVSLDVL

SEQ ID NO: 340 - protein, 9 aa, Homo Sapiens
AVSLDVLDK

SEQ ID NO: 341 - protein, 9 aa, Homo Sapiens
VSLDVLDKR

SEQ ID NO: 342 - protein, 9 aa, Homo Sapiens
SLDVLDKRL

SEQ ID NO: 343 - protein, 9 aa, Homo Sapiens
VLDKRLFWI

SEQ ID NO: 344 - protein, 9 aa, Homo Sapiens
DKRLFWIQY

SEQ ID NO: 345 - protein, 9 aa, Homo Sapiens
RLFWIQYNR

SEQ ID NO: 346 - protein, 9 aa, Homo Sapiens
YNREGSNSL

SEQ ID NO: 347 - protein, 9 aa, Homo Sapiens
HISKHPTQH

SEQ ID NO: 348 - protein, 9 aa, Homo Sapiens
KHPTQHNLF

SEQ ID NO: 349 - protein, 9 aa, Homo Sapiens
HPTQHNLFA

SEQ ID NO: 350 - protein, 9 aa, Homo Sapiens
PTQHNLFAM

SEQ ID NO: 351 - protein, 9 aa, Homo Sapiens
FAMSLFGDR

SEQ ID NO: 352 - protein, 9 aa, Homo Sapiens
AMSLFGDRI

SEQ ID NO: 353 - protein, 9 aa, Homo Sapiens
MSLFGDRIF

SEQ ID NO: 354 - protein, 9 aa, Homo Sapiens
SLFGDRIFY

SEQ ID NO: 355 - protein, 9 aa, Homo Sapiens
RIFYSTWKM

SEQ ID NO: 356 - protein, 9 aa, Homo Sapiens
IFYSTWKMK

SEQ ID NO: 357 - protein, 9 aa, Homo Sapiens
STWKMKTIW

SEQ ID NO: 358 - protein, 9 aa, Homo Sapiens
TWKMKTIWI

SEQ ID NO: 359 - protein, 9 aa, Homo Sapiens
WKMKTIWIA

SEQ ID NO: 360 - protein, 9 aa, Homo Sapiens
WIANKHTGK

SEQ ID NO: 361 - protein, 9 aa, Homo Sapiens
HTGKDMVRI

SEQ ID NO: 362 - protein, 9 aa, Homo Sapiens
VRINLHSSF

SEQ ID NO: 363 - protein, 9 aa, Homo Sapiens
RINLHSSFV

SEQ ID NO: 364 - protein, 9 aa, Homo Sapiens
NLHSSFVPL

SEQ ID NO: 365 - protein, 9 aa, Homo Sapiens
SSFVPLGEL

SEQ ID NO: 366 - protein, 9 aa, Homo Sapiens
SFVPLGELK

SEQ ID NO: 367 - protein, 9 aa, Homo Sapiens
FVPLGELKV

SEQ ID NO: 368 - protein, 9 aa, Homo Sapiens
VPLGELKVV

SEQ ID NO: 369 - protein, 9 aa, Homo Sapiens
GELKVVHPL

SEQ ID NO: 370 - protein, 9 aa, Homo Sapiens
ELKVVHPLA

SEQ ID NO: 371 - protein, 9 aa, Homo Sapiens
VVHPLAQPK

SEQ ID NO: 372 - protein, 9 aa, Homo Sapiens
QPKAEDDTW

SEQ ID NO: 373 - protein, 9 aa, Homo Sapiens
DTWEPEQKL

SEQ ID NO: 374 - protein, 9 aa, Homo Sapiens
EPEQKLCKL

SEQ ID NO: 375 - protein, 9 aa, Homo Sapiens
LQSHLCMCA

SEQ ID NO: 376 - protein, 9 aa, Homo Sapiens
CMCAEGYAL

SEQ ID NO: 377 - protein, 9 aa, Homo Sapiens
CAEGYALSR

SEQ ID NO: 378 - protein, 9 aa, Homo Sapiens
GYALSRDRK

SEQ ID NO: 379 - protein, 9 aa, Homo Sapiens
YALSRDRKY

SEQ ID NO: 380 - protein, 9 aa, Homo Sapiens
CEDVNECAF

SEQ ID NO: 381 - protein, 9 aa, Homo Sapiens
AFWNHGCTL

SEQ ID NO: 382 - protein, 9 aa, Homo Sapiens
NTPGSYYCT

SEQ ID NO: 383 - protein, 9 aa, Homo Sapiens
GSYYCTCPV

SEQ ID NO: 384 - protein, 9 aa, Homo Sapiens
YYCTCPVGF

SEQ ID NO: 385 - protein, 9 aa, Homo Sapiens
YCTCPVGFV

SEQ ID NO: 386 - protein, 9 aa, Homo Sapiens
CTCPVGFVL

SEQ ID NO: 387 - protein, 9 aa, Homo Sapiens
TCPVGFVLL

SEQ ID NO: 388 - protein, 9 aa, Homo Sapiens
CPVGFVLLP

SEQ ID NO: 389 - protein, 9 aa, Homo Sapiens
FVLLPDGKR

SEQ ID NO: 390 - protein, 9 aa, Homo Sapiens
VLLPDGKRC

SEQ ID NO: 391 - protein, 9 aa, Homo Sapiens
LLPDGKRCH

SEQ ID NO: 392 - protein, 9 aa, Homo Sapiens
QLVSCPRNV

SEQ ID NO: 393 - protein, 9 aa, Homo Sapiens
SECSHDCVL

SEQ ID NO: 394 - protein, 9 aa, Homo Sapiens
LTSEGPLCF

SEQ ID NO: 395 - protein, 9 aa, Homo Sapiens
LCFCPEGSV

SEQ ID NO: 396 - protein, 9 aa, Homo Sapiens
CFCPEGSVL

SEQ ID NO: 397 - protein, 9 aa, Homo Sapiens
SPDNGGCSQ

SEQ ID NO: 398 - protein, 9 aa, Homo Sapiens
GCSQLCVPL

SEQ ID NO: 399 - protein, 9 aa, Homo Sapiens
QLCVPLSPV

SEQ ID NO: 400 - protein, 9 aa, Homo Sapiens
PLSPVSWEC

SEQ ID NO: 401 - protein, 9 aa, Homo Sapiens
WECDCFPGY

SEQ ID NO: 402 - protein, 9 aa, Homo Sapiens
CFPGYDLQL

SEQ ID NO: 403 - protein, 9 aa, Homo Sapiens
GYDLQLDEK

SEQ ID NO: 404 - protein, 9 aa, Homo Sapiens
QLDEKSCAA

SEQ ID NO: 405 - protein, 9 aa, Homo Sapiens
KSCAASGPQ

SEQ ID NO: 406 - protein, 9 aa, Homo Sapiens
CAASGPQPF

SEQ ID NO: 407 - protein, 9 aa, Homo Sapiens
AASGPQPFL

SEQ ID NO: 408 - protein, 9 aa, Homo Sapiens
QPFLLFANS

SEQ ID NO: 409 - protein, 9 aa, Homo Sapiens
LLFANSQDI

SEQ ID NO: 410 - protein, 9 aa, Homo Sapiens
LFANSQDIR

SEQ ID NO: 411 - protein, 9 aa, Homo Sapiens
FANSQDIRH

SEQ ID NO: 412 - protein, 9 aa, Homo Sapiens
SQDIRHMHF

SEQ ID NO: 413 - protein, 9 aa, Homo Sapiens
HMHFDGTDY

SEQ ID NO: 414 - protein, 9 aa, Homo Sapiens
TLLSQQMGM

SEQ ID NO: 415 - protein, 9 aa, Homo Sapiens
LLSQQMGMV

SEQ ID NO: 416 - protein, 9 aa, Homo Sapiens
LSQQMGMVY

SEQ ID NO: 417 - protein, 9 aa, Homo Sapiens
SQQMGMVYA

SEQ ID NO: 418 - protein, 9 aa, Homo Sapiens
QQMGMVYAL

SEQ ID NO: 419 - protein, 9 aa, Homo Sapiens
YALDHDPVE

SEQ ID NO: 420 - protein, 9 aa, Homo Sapiens
DPVENKIYF

SEQ ID NO: 421 - protein, 9 aa, Homo Sapiens
KIYFAHTAL

SEQ ID NO: 422 - protein, 9 aa, Homo Sapiens
IYFAHTALK

SEQ ID NO: 423 - protein, 9 aa, Homo Sapiens
YFAHTALKW

SEQ ID NO: 424 - protein, 9 aa, Homo Sapiens
FAHTALKWI

SEQ ID NO: 425 - protein, 9 aa, Homo Sapiens
HTALKWIER

SEQ ID NO: 426 - protein, 9 aa, Homo Sapiens
TALKWIERA

SEQ ID NO: 427 - protein, 9 aa, Homo Sapiens
RANMDGSQR

SEQ ID NO: 428 - protein, 9 aa, Homo Sapiens
SQRERLIEE

SEQ ID NO: 429 - protein, 9 aa, Homo Sapiens
RERLIEEGV

SEQ ID NO: 430 - protein, 9 aa, Homo Sapiens
RLIEEGVDV

SEQ ID NO: 431 - protein, 9 aa, Homo Sapiens
EGVDVPEGL

SEQ ID NO: 432 - protein, 9 aa, Homo Sapiens
VPEGLAVDW

SEQ ID NO: 433 - protein, 9 aa, Homo Sapiens
LAVDWIGRR

SEQ ID NO: 434 - protein, 9 aa, Homo Sapiens
DWIGRRFYW

SEQ ID NO: 435 - protein, 9 aa, Homo Sapiens
RFYWTDRGK

SEQ ID NO: 436 - protein, 9 aa, Homo Sapiens
WTDRGKSLI

SEQ ID NO: 437 - protein, 9 aa, Homo Sapiens
DLNGKRSKI

SEQ ID NO: 438 - protein, 9 aa, Homo Sapiens
GIAVHPMAK

SEQ ID NO: 439 - protein, 9 aa, Homo Sapiens
IAVHPMAKR

SEQ ID NO: 440 - protein, 9 aa, Homo Sapiens
AVHPMAKRL

SEQ ID NO: 441 - protein, 9 aa, Homo Sapiens
HPMAKRLFW

SEQ ID NO: 442 - protein, 9 aa, Homo Sapiens
PMAKRLFWT

SEQ ID NO: 443 - protein, 9 aa, Homo Sapiens
RLFWTDTGI

SEQ ID NO: 444 - protein, 9 aa, Homo Sapiens
NPRIESSSL

SEQ ID NO: 445 - protein, 9 aa, Homo Sapiens
IESSSLQGL

SEQ ID NO: 446 - protein, 9 aa, Homo Sapiens
SSSLQGLGR

SEQ ID NO: 447 - protein, 9 aa, Homo Sapiens
SLQGLGRLV

SEQ ID NO: 448 - protein, 9 aa, Homo Sapiens
RLVIASSDL

SEQ ID NO: 449 - protein, 9 aa, Homo Sapiens
LVIASSDLI

SEQ ID NO: 450 - protein, 9 aa, Homo Sapiens
VIASSDLIW

SEQ ID NO: 451 - protein, 9 aa, Homo Sapiens
LIWPSGITI

SEQ ID NO: 452 - protein, 9 aa, Homo Sapiens
WPSGITIDF

SEQ ID NO: 453 - protein, 9 aa, Homo Sapiens
SGITIDFLT

SEQ ID NO: 454 - protein, 9 aa, Homo Sapiens
ITIDFLTDK

SEQ ID NO: 455 - protein, 9 aa, Homo Sapiens
TIDFLTDKL

SEQ ID NO: 456 - protein, 9 aa, Homo Sapiens
FLTDKLYWC

SEQ ID NO: 457 - protein, 9 aa, Homo Sapiens
KLYWCDAKQ

SEQ ID NO: 458 - protein, 9 aa, Homo Sapiens
YWCDAKQSV

SEQ ID NO: 459 - protein, 9 aa, Homo Sapiens
DAKQSVIEM

SEQ ID NO: 460 - protein, 9 aa, Homo Sapiens
QSVIEMANL

SEQ ID NO: 461 - protein, 9 aa, Homo Sapiens
EMANLDGSK

SEQ ID NO: 462 - protein, 9 aa, Homo Sapiens
MANLDGSKR

SEQ ID NO: 463 - protein, 9 aa, Homo Sapiens
TQNDVGHPF

SEQ ID NO: 464 - protein, 9 aa, Homo Sapiens
NDVGHPFAV

SEQ ID NO: 465 - protein, 9 aa, Homo Sapiens
DVGHPFAVA

SEQ ID NO: 466 - protein, 9 aa, Homo Sapiens
VGHPFAVAV

SEQ ID NO: 467 - protein, 9 aa, Homo Sapiens
GHPFAVAVF

SEQ ID NO: 468 - protein, 9 aa, Homo Sapiens
HPFAVAVFE

SEQ ID NO: 469 - protein, 9 aa, Homo Sapiens
FAVAVFEDY

SEQ ID NO: 470 - protein, 9 aa, Homo Sapiens
AVAVFEDYV

SEQ ID NO: 471 - protein, 9 aa, Homo Sapiens
VAVFEDYVW

SEQ ID NO: 472 - protein, 9 aa, Homo Sapiens
AVFEDYVWF

SEQ ID NO: 473 - protein, 9 aa, Homo Sapiens
YVWFSDWAM

SEQ ID NO: 474 - protein, 9 aa, Homo Sapiens
FSDWAMPSV

SEQ ID NO: 475 - protein, 9 aa, Homo Sapiens
DWAMPSVIR

SEQ ID NO: 476 - protein, 9 aa, Homo Sapiens
WAMPSVIRV

SEQ ID NO: 477 - protein, 9 aa, Homo Sapiens
MPSVIRVNK

SEQ ID NO: 478 - protein, 9 aa, Homo Sapiens
IRVNKRTGK

SEQ ID NO: 479 - protein, 9 aa, Homo Sapiens
KRTGKDRVR

SEQ ID NO: 480 - protein, 9 aa, Homo Sapiens
RVRLQGSML

SEQ ID NO: 481 - protein, 9 aa, Homo Sapiens
SMLKPSSLV

SEQ ID NO: 482 - protein, 9 aa, Homo Sapiens
MLKPSSLVV

SEQ ID NO: 483 - protein, 9 aa, Homo Sapiens
KPSSLVVVH

SEQ ID NO: 484 - protein, 9 aa, Homo Sapiens
SSLVVVHPL

SEQ ID NO: 485 - protein, 9 aa, Homo Sapiens
SLVVVHPLA

SEQ ID NO: 486 - protein, 9 aa, Homo Sapiens
LVVVHPLAK

SEQ ID NO: 487 - protein, 9 aa, Homo Sapiens
KPGADPCLY

SEQ ID NO: 488 - protein, 9 aa, Homo Sapiens
YQNGGCEHI

SEQ ID NO: 489 - protein, 9 aa, Homo Sapiens
RLGTAWCSC

SEQ ID NO: 490 - protein, 9 aa, Homo Sapiens
LGTAWCSCR

SEQ ID NO: 491 - protein, 9 aa, Homo Sapiens
AWCSCREGF

SEQ ID NO: 492 - protein, 9 aa, Homo Sapiens
CSCREGFMK

SEQ ID NO: 493 - protein, 9 aa, Homo Sapiens
GFMKASDGK

SEQ ID NO: 494 - protein, 9 aa, Homo Sapiens
KASDGKTCL

SEQ ID NO: 495 - protein, 9 aa, Homo Sapiens
CLALDGHQL

SEQ ID NO: 496 - protein, 9 aa, Homo Sapiens
LALDGHQLL

SEQ ID NO: 497 - protein, 9 aa, Homo Sapiens
ALDGHQLLA

SEQ ID NO: 498 - protein, 9 aa, Homo Sapiens
HQLLAGGEV

SEQ ID NO: 499 - protein, 9 aa, Homo Sapiens
LLAGGEVDL

SEQ ID NO: 500 - protein, 9 aa, Homo Sapiens
GEVDLKNQV

SEQ ID NO: 501 - protein, 9 aa, Homo Sapiens
DLKNQVTPL

SEQ ID NO: 502 - protein, 9 aa, Homo Sapiens
NQVTPLDIL

SEQ ID NO: 503 - protein, 9 aa, Homo Sapiens
VTPLDILSK

SEQ ID NO: 504 - protein, 9 aa, Homo Sapiens
NITESQHML

SEQ ID NO: 505 - protein, 9 aa, Homo Sapiens
ITESQHMLV

SEQ ID NO: 506 - protein, 9 aa, Homo Sapiens
SQHMLVAEI

SEQ ID NO: 507 - protein, 9 aa, Homo Sapiens
HMLVAEIMV

SEQ ID NO: 508 - protein, 9 aa, Homo Sapiens
MLVAEIMVS

SEQ ID NO: 509 - protein, 9 aa, Homo Sapiens
AEIMVSDQD

SEQ ID NO: 510 - protein, 9 aa, Homo Sapiens
MVSDQDDCA

SEQ ID NO: 511 - protein, 9 aa, Homo Sapiens
APVGCSMYA

SEQ ID NO: 512 - protein, 9 aa, Homo Sapiens
PVGCSMYAR

SEQ ID NO: 513 - protein, 9 aa, Homo Sapiens
GEDATCQCL

SEQ ID NO: 514 - protein, 9 aa, Homo Sapiens
EDATCQCLK

SEQ ID NO: 515 - protein, 9 aa, Homo Sapiens
DIDECEMGV

SEQ ID NO: 516 - protein, 9 aa, Homo Sapiens
DECEMGVPV

SEQ ID NO: 517 - protein, 9 aa, Homo Sapiens
MGVPVCPPA

SEQ ID NO: 518 - protein, 9 aa, Homo Sapiens
PVCPPASSK

SEQ ID NO: 519 - protein, 9 aa, Homo Sapiens
CPPASSKCI

SEQ ID NO: 520 - protein, 9 aa, Homo Sapiens
CINTEGGYV

SEQ ID NO: 521 - protein, 9 aa, Homo Sapiens
NTEGGYVCR

SEQ ID NO: 522 - protein, 9 aa, Homo Sapiens
YVCRCSEGY

SEQ ID NO: 523 - protein, 9 aa, Homo Sapiens
YQGDGIHCL

SEQ ID NO: 524 - protein, 9 aa, Homo Sapiens
CLDIDECQL

SEQ ID NO: 525 - protein, 9 aa, Homo Sapiens
DIDECQLGV

SEQ ID NO: 526 - protein, 9 aa, Homo Sapiens
NTEGGYTCM

SEQ ID NO: 527 - protein, 9 aa, Homo Sapiens
GYTCMCAGR

SEQ ID NO: 528 - protein, 9 aa, Homo Sapiens
YTCMCAGRL

SEQ ID NO: 529 - protein, 9 aa, Homo Sapiens
RLSEPGLIC

SEQ ID NO: 530 - protein, 9 aa, Homo Sapiens
DSTPPPHLR

SEQ ID NO: 531 - protein, 9 aa, Homo Sapiens
HLREDDHHY

SEQ ID NO: 532 - protein, 9 aa, Homo Sapiens
REDDHHYSV

SEQ ID NO: 533 - protein, 9 aa, Homo Sapiens
ECPLSHDGY

SEQ ID NO: 534 - protein, 9 aa, Homo Sapiens
PLSHDGYCL

SEQ ID NO: 535 - protein, 9 aa, Homo Sapiens
DGYCLHDGV

SEQ ID NO: 536 - protein, 9 aa, Homo Sapiens
CLHDGVCMY

SEQ ID NO: 537 - protein, 9 aa, Homo Sapiens
GVCMYIEAL

SEQ ID NO: 538 - protein, 9 aa, Homo Sapiens
CMYIEALDK

SEQ ID NO: 539 - protein, 9 aa, Homo Sapiens
MYIEALDKY

SEQ ID NO: 540 - protein, 9 aa, Homo Sapiens
ALDKYACNC

SEQ ID NO: 541 - protein, 9 aa, Homo Sapiens
DKYACNCVV

SEQ ID NO: 542 - protein, 9 aa, Homo Sapiens
YACNCVVGY

SEQ ID NO: 543 - protein, 9 aa, Homo Sapiens
CVVGYIGER

SEQ ID NO: 544 - protein, 9 aa, Homo Sapiens
GYIGERCQY

SEQ ID NO: 545 - protein, 9 aa, Homo Sapiens
YIGERCQYR

SEQ ID NO: 546 - protein, 9 aa, Homo Sapiens
GERCQYRDL

SEQ ID NO: 547 - protein, 9 aa, Homo Sapiens
YRDLKWWEL

SEQ ID NO: 548 - protein, 9 aa, Homo Sapiens
HAGHGQQQK

SEQ ID NO: 549 - protein, 9 aa, Homo Sapiens
GQQQKVIVV

SEQ ID NO: 550 - protein, 9 aa, Homo Sapiens
QQQKVIVVA

SEQ ID NO: 551 - protein, 9 aa, Homo Sapiens
QQKVIVVAV

SEQ ID NO: 552 - protein, 9 aa, Homo Sapiens
KVIVVAVCV

SEQ ID NO: 553 - protein, 9 aa, Homo Sapiens
VIVVAVCVV

SEQ ID NO: 554 - protein, 9 aa, Homo Sapiens
IVVAVCVVV

SEQ ID NO: 555 - protein, 9 aa, Homo Sapiens
VVAVCVVVL

SEQ ID NO: 556 - protein, 9 aa, Homo Sapiens
VAVCVVVLV

SEQ ID NO: 557 - protein, 9 aa, Homo Sapiens
CVVVLVMLL

SEQ ID NO: 558 - protein, 9 aa, Homo Sapiens
VVVLVMLLL

SEQ ID NO: 559 - protein, 9 aa, Homo Sapiens
VVLVMLLLL

SEQ ID NO: 560 - protein, 9 aa, Homo Sapiens
VLVMLLLLS

SEQ ID NO: 561 - protein, 9 aa, Homo Sapiens
LVMLLLLSL

SEQ ID NO: 562 - protein, 9 aa, Homo Sapiens
MLLLLSLWG

SEQ ID NO: 563 - protein, 9 aa, Homo Sapiens
LLLLSLWGA

SEQ ID NO: 564 - protein, 9 aa, Homo Sapiens
LLSLWGAHY

SEQ ID NO: 565 - protein, 9 aa, Homo Sapiens
LSLWGAHYY

SEQ ID NO: 566 - protein, 9 aa, Homo Sapiens
SLWGAHYYR

SEQ ID NO: 567 - protein, 9 aa, Homo Sapiens
GAHYYRTQK

SEQ ID NO: 568 - protein, 9 aa, Homo Sapiens
AHYYRTQKL

SEQ ID NO: 569 - protein, 9 aa, Homo Sapiens
HYYRTQKLL

SEQ ID NO: 570 - protein, 9 aa, Homo Sapiens
YRTQKLLSK

SEQ ID NO: 571 - protein, 9 aa, Homo Sapiens
LSKNPKNPY

SEQ ID NO: 572 - protein, 9 aa, Homo Sapiens
ESSRDVRSR

SEQ ID NO: 573 - protein, 9 aa, Homo Sapiens
SSRDVRSRR

SEQ ID NO: 574 - protein, 9 aa, Homo Sapiens
RPADTEDGM

SEQ ID NO: 575 - protein, 9 aa, Homo Sapiens
GMSSCPQPW

SEQ ID NO: 576 - protein, 9 aa, Homo Sapiens
SSCPQPWFV

SEQ ID NO: 577 - protein, 9 aa, Homo Sapiens
SCPQPWFVV

SEQ ID NO: 578 - protein, 9 aa, Homo Sapiens
CPQPWFVVI

SEQ ID NO: 579 - protein, 9 aa, Homo Sapiens
VIKEHQDLK

SEQ ID NO: 580 - protein, 9 aa, Homo Sapiens
DLKNGGQPV

SEQ ID NO: 581 - protein, 9 aa, Homo Sapiens
GSMQPTSWR

SEQ ID NO: 582 - protein, 9 aa, Homo Sapiens
SMQPTSWRQ

SEQ ID NO: 583 - protein, 9 aa, Homo Sapiens
RQEPQLCGM

SEQ ID NO: 584 - protein, 9 aa, Homo Sapiens
TEQGCWIPV

SEQ ID NO: 585 - protein, 9 aa, Homo Sapiens
CWIPVSSDK

SEQ ID NO: 586 - protein, 9 aa, Homo Sapiens
GSCPQVMER

SEQ ID NO: 587 - protein, 9 aa, Homo Sapiens
CPQVMERSF

SEQ ID NO: 588 - protein, 9 aa, Homo Sapiens
QVMERSFHM

SEQ ID NO: 589 - protein, 9 aa, Homo Sapiens
MERSFHMPS

SEQ ID NO: 590 - protein, 9 aa, Homo Sapiens
ERSFHMPSY

SEQ ID NO: 591 - protein, 9 aa, Homo Sapiens
HMPSYGTQT

SEQ ID NO: 592 - protein, 9 aa, Homo Sapiens
MPSYGTQTL

SEQ ID NO: 593 - protein, 9 aa, Homo Sapiens
QTLEGGVEK

SEQ ID NO: 594 - protein, 9 aa, Homo Sapiens
SLLSANPLW

SEQ ID NO: 595 - protein, 9 aa, Homo Sapiens
LLSANPLWQ

SEQ ID NO: 596 - protein, 9 aa, Homo Sapiens
SANPLWQQR

SEQ ID NO: 597 - protein, 9 aa, Homo Sapiens
NPLWQQRAL

SEQ ID NO: 598 - protein, 9 aa, Homo Sapiens
QQRALDPPH

SEQ ID NO: 599 - protein, 9 aa, Homo Sapiens
RALDPPHQM

SEQ ID NO: 600 - protein, 9 aa, Homo Sapiens
ALDPPHQME

SEQ ID NO: 601 - protein, 10 aa, Homo Sapiens
MLLTLIILLP

SEQ ID NO: 602 - protein, 10 aa, Homo Sapiens
LLTLIILLPV

SEQ ID NO: 603 - protein, 10 aa, Homo Sapiens
LTLIILLPVV

SEQ ID NO: 604 - protein, 10 aa, Homo Sapiens
LIILLPVVSK

SEQ ID NO: 605 - protein, 10 aa, Homo Sapiens
IILLPVVSKF

SEQ ID NO: 606 - protein, 10 aa, Homo Sapiens
ILLPVVSKFS

SEQ ID NO: 607 - protein, 10 aa, Homo Sapiens
LPVVSKFSFV

SEQ ID NO: 608 - protein, 10 aa, Homo Sapiens
VVSKFSFVSL

SEQ ID NO: 609 - protein, 10 aa, Homo Sapiens
FVSLSAPQHW

SEQ ID NO: 610 - protein, 10 aa, Homo Sapiens
SLSAPQHWSC

SEQ ID NO: 611 - protein, 10 aa, Homo Sapiens
TLAGNGNSTC

SEQ ID NO: 612 - protein, 10 aa, Homo Sapiens
LAGNGNSTCV

SEQ ID NO: 613 - protein, 10 aa, Homo Sapiens
NSTCVGPAPF

SEQ ID NO: 614 - protein, 10 aa, Homo Sapiens
STCVGPAPFL

SEQ ID NO: 615 - protein, 10 aa, Homo Sapiens
TCVGPAPFLI

SEQ ID NO: 616 - protein, 10 aa, Homo Sapiens
CVGPAPFLIF

SEQ ID NO: 617 - protein, 10 aa, Homo Sapiens
APFLIFSHGN

SEQ ID NO: 618 - protein, 10 aa, Homo Sapiens
FLIFSHGNSI

SEQ ID NO: 619 - protein, 10 aa, Homo Sapiens
LIFSHGNSIF

SEQ ID NO: 620 - protein, 10 aa, Homo Sapiens
IFSHGNSIFR

SEQ ID NO: 621 - protein, 10 aa, Homo Sapiens
FSHGNSIFRI

SEQ ID NO: 622 - protein, 10 aa, Homo Sapiens
FRIDTEGTNY

SEQ ID NO: 623 - protein, 10 aa, Homo Sapiens
TEGTNYEQLV

SEQ ID NO: 624 - protein, 10 aa, Homo Sapiens
YEQLVVDAGV

SEQ ID NO: 625 - protein, 10 aa, Homo Sapiens
QLVVDAGVSV

SEQ ID NO: 626 - protein, 10 aa, Homo Sapiens
LVVDAGVSVI

SEQ ID NO: 627 - protein, 10 aa, Homo Sapiens
VVDAGVSVIM

SEQ ID NO: 628 - protein, 10 aa, Homo Sapiens
GVSVIMDFHY

SEQ ID NO: 629 - protein, 10 aa, Homo Sapiens
VIMDFHYNEK

SEQ ID NO: 630 - protein, 10 aa, Homo Sapiens
IMDFHYNEKR

SEQ ID NO: 631 - protein, 10 aa, Homo Sapiens
HYNEKRIYWV

SEQ ID NO: 632 - protein, 10 aa, Homo Sapiens
NEKRIYWVDL

SEQ ID NO: 633 - protein, 10 aa, Homo Sapiens
KRIYWVDLER

SEQ ID NO: 634 - protein, 10 aa, Homo Sapiens
RIYWVDLERQ

SEQ ID NO: 635 - protein, 10 aa, Homo Sapiens
IYWVDLERQL

SEQ ID NO: 636 - protein, 10 aa, Homo Sapiens
YWVDLERQLL

SEQ ID NO: 637 - protein, 10 aa, Homo Sapiens
DLERQLLQRV

SEQ ID NO: 638 - protein, 10 aa, Homo Sapiens
LERQLLQRVF

SEQ ID NO: 639 - protein, 10 aa, Homo Sapiens
LQRVFLNGSR

SEQ ID NO: 640 - protein, 10 aa, Homo Sapiens
VFLNGSRQER

SEQ ID NO: 641 - protein, 10 aa, Homo Sapiens
FLNGSRQERV

SEQ ID NO: 642 - protein, 10 aa, Homo Sapiens
RQERVCNIEK

SEQ ID NO: 643 - protein, 10 aa, Homo Sapiens
KNVSGMAINW

SEQ ID NO: 644 - protein, 10 aa, Homo Sapiens
NVSGMAINWI

SEQ ID NO: 645 - protein, 10 aa, Homo Sapiens
MAINWINEEV

SEQ ID NO: 646 - protein, 10 aa, Homo Sapiens
AINWINEEVI

SEQ ID NO: 647 - protein, 10 aa, Homo Sapiens
VIWSNQQEGI

SEQ ID NO: 648 - protein, 10 aa, Homo Sapiens
IWSNQQEGII

SEQ ID NO: 649 - protein, 10 aa, Homo Sapiens
NQQEGIITVT

SEQ ID NO: 650 - protein, 10 aa, Homo Sapiens
EGIITVTDMK

SEQ ID NO: 651 - protein, 10 aa, Homo Sapiens
DMKGNNSHIL

SEQ ID NO: 652 - protein, 10 aa, Homo Sapiens
NSHILLSALK

SEQ ID NO: 653 - protein, 10 aa, Homo Sapiens
SHILLSALKY

SEQ ID NO: 654 - protein, 10 aa, Homo Sapiens
ILLSALKYPA

SEQ ID NO: 655 - protein, 10 aa, Homo Sapiens
LSALKYPANV

SEQ ID NO: 656 - protein, 10 aa, Homo Sapiens
ALKYPANVAV

SEQ ID NO: 657 - protein, 10 aa, Homo Sapiens
KYPANVAVDP

SEQ ID NO: 658 - protein, 10 aa, Homo Sapiens
YPANVAVDPV

SEQ ID NO: 659 - protein, 10 aa, Homo Sapiens
NVAVDPVERF

SEQ ID NO: 660 - protein, 10 aa, Homo Sapiens
AVDPVERFIF

SEQ ID NO: 661 - protein, 10 aa, Homo Sapiens
ERFIFWSSEV

SEQ ID NO: 662 - protein, 10 aa, Homo Sapiens
WSSEVAGSLY

SEQ ID NO: 663 - protein, 10 aa, Homo Sapiens
SSEVAGSLYR

SEQ ID NO: 664 - protein, 10 aa, Homo Sapiens
SEVAGSLYRA

SEQ ID NO: 665 - protein, 10 aa, Homo Sapiens
SLYRADLDGV

SEQ ID NO: 666 - protein, 10 aa, Homo Sapiens
YRADLDGVGV

SEQ ID NO: 667 - protein, 10 aa, Homo Sapiens
DLDGVGVKAL

SEQ ID NO: 668 - protein, 10 aa, Homo Sapiens
ALLETSEKIT

SEQ ID NO: 669 - protein, 10 aa, Homo Sapiens
LLETSEKITA

SEQ ID NO: 670 - protein, 10 aa, Homo Sapiens
ETSEKITAVS

SEQ ID NO: 671 - protein, 10 aa, Homo Sapiens
KITAVSLDVL

SEQ ID NO: 672 - protein, 10 aa, Homo Sapiens
TAVSLDVLDK

SEQ ID NO: 673 - protein, 10 aa, Homo Sapiens
AVSLDVLDKR

SEQ ID NO: 674 - protein, 10 aa, Homo Sapiens
SLDVLDKRLF

SEQ ID NO: 675 - protein, 10 aa, Homo Sapiens
DVLDKRLFWI

SEQ ID NO: 676 - protein, 10 aa, Homo Sapiens
VLDKRLFWIQ

SEQ ID NO: 677 - protein, 10 aa, Homo Sapiens
KRLFWIQYNR

SEQ ID NO: 678 - protein, 10 aa, Homo Sapiens
QYNREGSNSL

SEQ ID NO: 679 - protein, 10 aa, Homo Sapiens
SVHISKHPTQ

SEQ ID NO: 680 - protein, 10 aa, Homo Sapiens
HPTQHNLFAM

SEQ ID NO: 681 - protein, 10 aa, Homo Sapiens
TQHNLFAMSL

SEQ ID NO: 682 - protein, 10 aa, Homo Sapiens
LFAMSLFGDR

SEQ ID NO: 683 - protein, 10 aa, Homo Sapiens
FAMSLFGDRI

SEQ ID NO: 684 - protein, 10 aa, Homo Sapiens
AMSLFGDRIF

SEQ ID NO: 685 - protein, 10 aa, Homo Sapiens
MSLFGDRIFY

SEQ ID NO: 686 - protein, 10 aa, Homo Sapiens
SLFGDRIFYS

SEQ ID NO: 687 - protein, 10 aa, Homo Sapiens
FGDRIFYSTW

SEQ ID NO: 688 - protein, 10 aa, Homo Sapiens
GDRIFYSTWK

SEQ ID NO: 689 - protein, 10 aa, Homo Sapiens
RIFYSTWKMK

SEQ ID NO: 690 - protein, 10 aa, Homo Sapiens
FYSTWKMKTI

SEQ ID NO: 691 - protein, 10 aa, Homo Sapiens
YSTWKMKTIW

SEQ ID NO: 692 - protein, 10 aa, Homo Sapiens
STWKMKTIWI

SEQ ID NO: 693 - protein, 10 aa, Homo Sapiens
KMKTIWIANK

SEQ ID NO: 694 - protein, 10 aa, Homo Sapiens
IWIANKHTGK

SEQ ID NO: 695 - protein, 10 aa, Homo Sapiens
MVRINLHSSF

SEQ ID NO: 696 - protein, 10 aa, Homo Sapiens
HSSFVPLGEL

SEQ ID NO: 697 - protein, 10 aa, Homo Sapiens
SSFVPLGELK

SEQ ID NO: 698 - protein, 10 aa, Homo Sapiens
SFVPLGELKV

SEQ ID NO: 699 - protein, 10 aa, Homo Sapiens
FVPLGELKVV

SEQ ID NO: 700 - protein, 10 aa, Homo Sapiens
VPLGELKVVH

SEQ ID NO: 701 - protein, 10 aa, Homo Sapiens
KVVHPLAQPK

SEQ ID NO: 702 - protein, 10 aa, Homo Sapiens
WEPEQKLCKL

SEQ ID NO: 703 - protein, 10 aa, Homo Sapiens
KLRKGNCSST

SEQ ID NO: 704 - protein, 10 aa, Homo Sapiens
DLQSHLCMCA

SEQ ID NO: 705 - protein, 10 aa, Homo Sapiens
HLCMCAEGYA

SEQ ID NO: 706 - protein, 10 aa, Homo Sapiens
MCAEGYALSR

SEQ ID NO: 707 - protein, 10 aa, Homo Sapiens
EGYALSRDRK

SEQ ID NO: 708 - protein, 10 aa, Homo Sapiens
YCEDVNECAF

SEQ ID NO: 709 - protein, 10 aa, Homo Sapiens
SYYCTCPVGF

SEQ ID NO: 710 - protein, 10 aa, Homo Sapiens
YYCTCPVGFV

SEQ ID NO: 711 - protein, 10 aa, Homo Sapiens
YCTCPVGFVL

SEQ ID NO: 712 - protein, 10 aa, Homo Sapiens
CTCPVGFVLL

SEQ ID NO: 713 - protein, 10 aa, Homo Sapiens
LLPDGKRCHQ

SEQ ID NO: 714 - protein, 10 aa, Homo Sapiens
LPDGKRCHQL

SEQ ID NO: 715 - protein, 10 aa, Homo Sapiens
RCHQLVSCPR

SEQ ID NO: 716 - protein, 10 aa, Homo Sapiens
NVSECSHDCV

SEQ ID NO: 717 - protein, 10 aa, Homo Sapiens
PLCFCPEGSV

SEQ ID NO: 718 - protein, 10 aa, Homo Sapiens
SPDNGGCSQL

SEQ ID NO: 719 - protein, 10 aa, Homo Sapiens
SQLCVPLSPV

SEQ ID NO: 720 - protein, 10 aa, Homo Sapiens
LCVPLSPVSW

SEQ ID NO: 721 - protein, 10 aa, Homo Sapiens
SPVSWECDCF

SEQ ID NO: 722 - protein, 10 aa, Homo Sapiens
LQLDEKSCAA

SEQ ID NO: 723 - protein, 10 aa, Homo Sapiens
QLDEKSCAAS

SEQ ID NO: 724 - protein, 10 aa, Homo Sapiens
CAASGPQPFL

SEQ ID NO: 725 - protein, 10 aa, Homo Sapiens
AASGPQPFLL

SEQ ID NO: 726 - protein, 10 aa, Homo Sapiens
FLLFANSQDI

SEQ ID NO: 727 - protein, 10 aa, Homo Sapiens
LLFANSQDIR

SEQ ID NO: 728 - protein, 10 aa, Homo Sapiens
FANSQDIRHM

SEQ ID NO: 729 - protein, 10 aa, Homo Sapiens
NSQDIRHMHF

SEQ ID NO: 730 - protein, 10 aa, Homo Sapiens
TLLSQQMGMV

SEQ ID NO: 731 - protein, 10 aa, Homo Sapiens
LLSQQMGMVY

SEQ ID NO: 732 - protein, 10 aa, Homo Sapiens
SQQMGMVYAL

SEQ ID NO: 733 - protein, 10 aa, Homo Sapiens
MVYALDHDPV

SEQ ID NO: 734 - protein, 10 aa, Homo Sapiens
ALDHDPVENK

SEQ ID NO: 735 - protein, 10 aa, Homo Sapiens
DPVENKIYFA

SEQ ID NO: 736 - protein, 10 aa, Homo Sapiens
KIYFAHTALK

SEQ ID NO: 737 - protein, 10 aa, Homo Sapiens
IYFAHTALKW

SEQ ID NO: 738 - protein, 10 aa, Homo Sapiens
YFAHTALKWI

SEQ ID NO: 739 - protein, 10 aa, Homo Sapiens
AHTALKWIER

SEQ ID NO: 740 - protein, 10 aa, Homo Sapiens
HTALKWIERA

SEQ ID NO: 741 - protein, 10 aa, Homo Sapiens
ALKWIERANM

SEQ ID NO: 742 - protein, 10 aa, Homo Sapiens
ERANMDGSQR

SEQ ID NO: 743 - protein, 10 aa, Homo Sapiens
NMDGSQRERL

SEQ ID NO: 744 - protein, 10 aa, Homo Sapiens
EEGVDVPEGL

SEQ ID NO: 745 - protein, 10 aa, Homo Sapiens
EGVDVPEGLA

SEQ ID NO: 746 - protein, 10 aa, Homo Sapiens
GVDVPEGLAV

SEQ ID NO: 747 - protein, 10 aa, Homo Sapiens
DVPEGLAVDW

SEQ ID NO: 748 - protein, 10 aa, Homo Sapiens
LAVDWIGRRF

SEQ ID NO: 749 - protein, 10 aa, Homo Sapiens
AVDWIGRRFY

SEQ ID NO: 750 - protein, 10 aa, Homo Sapiens
IGRRFYWTDR

SEQ ID NO: 751 - protein, 10 aa, Homo Sapiens
RRFYWTDRGK

SEQ ID NO: 752 - protein, 10 aa, Homo Sapiens
FYWTDRGKSL

SEQ ID NO: 753 - protein, 10 aa, Homo Sapiens
YWTDRGKSLI

SEQ ID NO: 754 - protein, 10 aa, Homo Sapiens
LIGRSDLNGK

SEQ ID NO: 755 - protein, 10 aa, Homo Sapiens
RSDLNGKRSK

SEQ ID NO: 756 - protein, 10 aa, Homo Sapiens
ITKENISQPR

SEQ ID NO: 757 - protein, 10 aa, Homo Sapiens
KENISQPRGI

SEQ ID NO: 758 - protein, 10 aa, Homo Sapiens
NISQPRGIAV

SEQ ID NO: 759 - protein, 10 aa, Homo Sapiens
QPRGIAVHPM

SEQ ID NO: 760 - protein, 10 aa, Homo Sapiens
RGIAVHPMAK

SEQ ID NO: 761 - protein, 10 aa, Homo Sapiens
GIAVHPMAKR

SEQ ID NO: 762 - protein, 10 aa, Homo Sapiens
HPMAKRLFWT

SEQ ID NO: 763 - protein, 10 aa, Homo Sapiens
KRLFWTDTGI

SEQ ID NO: 764 - protein, 10 aa, Homo Sapiens
FWTDTGINPR

SEQ ID NO: 765 - protein, 10 aa, Homo Sapiens
WTDTGINPRI

SEQ ID NO: 766 - protein, 10 aa, Homo Sapiens
RIESSSLQGL

SEQ ID NO: 767 - protein, 10 aa, Homo Sapiens
ESSSLQGLGR

SEQ ID NO: 768 - protein, 10 aa, Homo Sapiens
SSLQGLGRLV

SEQ ID NO: 769 - protein, 10 aa, Homo Sapiens
SLQGLGRLVI

SEQ ID NO: 770 - protein, 10 aa, Homo Sapiens
LQGLGRLVIA

SEQ ID NO: 771 - protein, 10 aa, Homo Sapiens
GRLVIASSDL

SEQ ID NO: 772 - protein, 10 aa, Homo Sapiens
RLVIASSDLI

SEQ ID NO: 773 - protein, 10 aa, Homo Sapiens
LVIASSDLIW

SEQ ID NO: 774 - protein, 10 aa, Homo Sapiens
DLIWPSGITI

SEQ ID NO: 775 - protein, 10 aa, Homo Sapiens
IWPSGITIDF

SEQ ID NO: 776 - protein, 10 aa, Homo Sapiens
WPSGITIDFL

SEQ ID NO: 777 - protein, 10 aa, Homo Sapiens
GITIDFLTDK

SEQ ID NO: 778 - protein, 10 aa, Homo Sapiens
ITIDFLTDKL

SEQ ID NO: 779 - protein, 10 aa, Homo Sapiens
TIDFLTDKLY

SEQ ID NO: 780 - protein, 10 aa, Homo Sapiens
FLTDKLYWCD

SEQ ID NO: 781 - protein, 10 aa, Homo Sapiens
KLYWCDAKQS

SEQ ID NO: 782 - protein, 10 aa, Homo Sapiens
LYWCDAKQSV

SEQ ID NO: 783 - protein, 10 aa, Homo Sapiens
KQSVIEMANL

SEQ ID NO: 784 - protein, 10 aa, Homo Sapiens
EMANLDGSKR

SEQ ID NO: 785 - protein, 10 aa, Homo Sapiens
MANLDGSKRR

SEQ ID NO: 786 - protein, 10 aa, Homo Sapiens
NLDGSKRRRL

SEQ ID NO: 787 - protein, 10 aa, Homo Sapiens
RRLTQNDVGH

SEQ ID NO: 788 - protein, 10 aa, Homo Sapiens
LTQNDVGHPF

SEQ ID NO: 789 - protein, 10 aa, Homo Sapiens
TQNDVGHPFA

SEQ ID NO: 790 - protein, 10 aa, Homo Sapiens
DVGHPFAVAV

SEQ ID NO: 791 - protein, 10 aa, Homo Sapiens
PFAVAVFEDY

SEQ ID NO: 792 - protein, 10 aa, Homo Sapiens
FAVAVFEDYV

SEQ ID NO: 793 - protein, 10 aa, Homo Sapiens
AVAVFEDYVW

SEQ ID NO: 794 - protein, 10 aa, Homo Sapiens
VAVFEDYVWF

SEQ ID NO: 795 - protein, 10 aa, Homo Sapiens
AVFEDYVWFS

SEQ ID NO: 796 - protein, 10 aa, Homo Sapiens
DYVWFSDWAM

SEQ ID NO: 797 - protein, 10 aa, Homo Sapiens
WFSDWAMPSV

SEQ ID NO: 798 - protein, 10 aa, Homo Sapiens
FSDWAMPSVI

SEQ ID NO: 799 - protein, 10 aa, Homo Sapiens
AMPSVIRVNK

SEQ ID NO: 800 - protein, 10 aa, Homo Sapiens
MPSVIRVNKR

SEQ ID NO: 801 - protein, 10 aa, Homo Sapiens
VIRVNKRTGK

SEQ ID NO: 802 - protein, 10 aa, Homo Sapiens
RVNKRTGKDR

SEQ ID NO: 803 - protein, 10 aa, Homo Sapiens
KRTGKDRVRL

SEQ ID NO: 804 - protein, 10 aa, Homo Sapiens
RVRLQGSMLK

SEQ ID NO: 805 - protein, 10 aa, Homo Sapiens
SMLKPSSLVV

SEQ ID NO: 806 - protein, 10 aa, Homo Sapiens
MLKPSSLVVV

SEQ ID NO: 807 - protein, 10 aa, Homo Sapiens
SLVVVHPLAK

SEQ ID NO: 808 - protein, 10 aa, Homo Sapiens
LYQNGGCEHI

SEQ ID NO: 809 - protein, 10 aa, Homo Sapiens
RLGTAWCSCR

SEQ ID NO: 810 - protein, 10 aa, Homo Sapiens
TAWCSCREGF

SEQ ID NO: 811 - protein, 10 aa, Homo Sapiens
EGFMKASDGK

SEQ ID NO: 812 - protein, 10 aa, Homo Sapiens
KASDGKTCLA

SEQ ID NO: 813 - protein, 10 aa, Homo Sapiens
CLALDGHQLL

SEQ ID NO: 814 - protein, 10 aa, Homo Sapiens
LALDGHQLLA

SEQ ID NO: 815 - protein, 10 aa, Homo Sapiens
ALDGHQLLAG

SEQ ID NO: 816 - protein, 10 aa, Homo Sapiens
QLLAGGEVDL

SEQ ID NO: 817 - protein, 10 aa, Homo Sapiens
LLAGGEVDLK

SEQ ID NO: 818 - protein, 10 aa, Homo Sapiens
QVTPLDILSK

SEQ ID NO: 819 - protein, 10 aa, Homo Sapiens
PLDILSKTRV

SEQ ID NO: 820 - protein, 10 aa, Homo Sapiens
NITESQHMLV

SEQ ID NO: 821 - protein, 10 aa, Homo Sapiens
ESQHMLVAEI

SEQ ID NO: 822 - protein, 10 aa, Homo Sapiens
SQHMLVAEIM

SEQ ID NO: 823 - protein, 10 aa, Homo Sapiens
AEIMVSDQDD

SEQ ID NO: 824 - protein, 10 aa, Homo Sapiens
IMVSDQDDCA

SEQ ID NO: 825 - protein, 10 aa, Homo Sapiens
VSDQDDCAPV

SEQ ID NO: 826 - protein, 10 aa, Homo Sapiens
APVGCSMYAR

SEQ ID NO: 827 - protein, 10 aa, Homo Sapiens
CLKGFAGDGK

SEQ ID NO: 828 - protein, 10 aa, Homo Sapiens
EMGVPVCPPA

SEQ ID NO: 829 - protein, 10 aa, Homo Sapiens
GYQGDGIHCL

SEQ ID NO: 830 - protein, 10 aa, Homo Sapiens
CQLGVHSCGE

SEQ ID NO: 831 - protein, 10 aa, Homo Sapiens
GGYTCMCAGR

SEQ ID NO: 832 - protein, 10 aa, Homo Sapiens
GYTCMCAGRL

SEQ ID NO: 833 - protein, 10 aa, Homo Sapiens
RLSEPGLICP

SEQ ID NO: 834 - protein, 10 aa, Homo Sapiens
HLREDDHHYS

SEQ ID NO: 835 - protein, 10 aa, Homo Sapiens
LREDDHHYSV

SEQ ID NO: 836 - protein, 10 aa, Homo Sapiens
SECPLSHDGY

SEQ ID NO: 837 - protein, 10 aa, Homo Sapiens
CPLSHDGYCL

SEQ ID NO: 838 - protein, 10 aa, Homo Sapiens
YCLHDGVCMY

SEQ ID NO: 839 - protein, 10 aa, Homo Sapiens
CLHDGVCMYI

SEQ ID NO: 840 - protein, 10 aa, Homo Sapiens
DGVCMYIEAL

SEQ ID NO: 841 - protein, 10 aa, Homo Sapiens
VCMYIEALDK

SEQ ID NO: 842 - protein, 10 aa, Homo Sapiens
CMYIEALDKY

SEQ ID NO: 843 - protein, 10 aa, Homo Sapiens
ALDKYACNCV

SEQ ID NO: 844 - protein, 10 aa, Homo Sapiens
KYACNCVVGY

SEQ ID NO: 845 - protein, 10 aa, Homo Sapiens
YACNCVVGYI

SEQ ID NO: 846 - protein, 10 aa, Homo Sapiens
GYIGERCQYR

SEQ ID NO: 847 - protein, 10 aa, Homo Sapiens
GERCQYRDLK

SEQ ID NO: 848 - protein, 10 aa, Homo Sapiens
QYRDLKWWEL

SEQ ID NO: 849 - protein, 10 aa, Homo Sapiens
HAGHGQQQKV

SEQ ID NO: 850 - protein, 10 aa, Homo Sapiens
GQQQKVIVVA

SEQ ID NO: 851 - protein, 10 aa, Homo Sapiens
QQQKVIVVAV

SEQ ID NO: 852 - protein, 10 aa, Homo Sapiens
KVIVVAVCVV

SEQ ID NO: 853 - protein, 10 aa, Homo Sapiens
VIVVAVCVVV

SEQ ID NO: 854 - protein, 10 aa, Homo Sapiens
IVVAVCVVVL

SEQ ID NO: 855 - protein, 10 aa, Homo Sapiens
VVAVCVVVLV

SEQ ID NO: 856 - protein, 10 aa, Homo Sapiens
VAVCVVVLVM

SEQ ID NO: 857 - protein, 10 aa, Homo Sapiens
CVVVLVMLLL

SEQ ID NO: 858 - protein, 10 aa, Homo Sapiens
VVVLVMLLLL

SEQ ID NO: 859 - protein, 10 aa, Homo Sapiens
VLVMLLLLSL

SEQ ID NO: 860 - protein, 10 aa, Homo Sapiens
LVMLLLLSLW

SEQ ID NO: 861 - protein, 10 aa, Homo Sapiens
MLLLLSLWGA

SEQ ID NO: 862 - protein, 10 aa, Homo Sapiens
LLLSLWGAHY

SEQ ID NO: 863 - protein, 10 aa, Homo Sapiens
LLSLWGAHYY

SEQ ID NO: 864 - protein, 10 aa, Homo Sapiens
LSLWGAHYYR

SEQ ID NO: 865 - protein, 10 aa, Homo Sapiens
SLWGAHYYRT

SEQ ID NO: 866 - protein, 10 aa, Homo Sapiens
AHYYRTQKLL

SEQ ID NO: 867 - protein, 10 aa, Homo Sapiens
YYRTQKLLSK

SEQ ID NO: 868 - protein, 10 aa, Homo Sapiens
TQKLLSKNPK

SEQ ID NO: 869 - protein, 10 aa, Homo Sapiens
LLSKNPKNPY

SEQ ID NO: 870 - protein, 10 aa, Homo Sapiens
NPYEESSRDV

SEQ ID NO: 871 - protein, 10 aa, Homo Sapiens
ESSRDVRSRR

SEQ ID NO: 872 - protein, 10 aa, Homo Sapiens
GMSSCPQPWF

SEQ ID NO: 873 - protein, 10 aa, Homo Sapiens
MSSCPQPWFV

SEQ ID NO: 874 - protein, 10 aa, Homo Sapiens
SSCPQPWFVV

SEQ ID NO: 875 - protein, 10 aa, Homo Sapiens
SCPQPWFVVI

SEQ ID NO: 876 - protein, 10 aa, Homo Sapiens
QPWFVVIKEH

SEQ ID NO: 877 - protein, 10 aa, Homo Sapiens
VVIKEHQDLK

SEQ ID NO: 878 - protein, 10 aa, Homo Sapiens
DLKNGGQPVA

SEQ ID NO: 879 - protein, 10 aa, Homo Sapiens
QAADGSMQPT

SEQ ID NO: 880 - protein, 10 aa, Homo Sapiens
CGMGTEQGCW

SEQ ID NO: 881 - protein, 10 aa, Homo Sapiens
GMGTEQGCWI

SEQ ID NO: 882 - protein, 10 aa, Homo Sapiens
GTEQGCWIPV

SEQ ID NO: 883 - protein, 10 aa, Homo Sapiens
IPVSSDKGSC

SEQ ID NO: 884 - protein, 10 aa, Homo Sapiens
SSDKGSCPQV

SEQ ID NO: 885 - protein, 10 aa, Homo Sapiens
KGSCPQVMER

SEQ ID NO: 886 - protein, 10 aa, Homo Sapiens
MERSFHMPSY

SEQ ID NO: 887 - protein, 10 aa, Homo Sapiens
HMPSYGTQTL

SEQ ID NO: 888 - protein, 10 aa, Homo Sapiens
MPSYGTQTLE

SEQ ID NO: 889 - protein, 10 aa, Homo Sapiens
TQTLEGGVEK

SEQ ID NO: 890 - protein, 10 aa, Homo Sapiens
HSLLSANPLW

SEQ ID NO: 891 - protein, 10 aa, Homo Sapiens
SLLSANPLWQ

SEQ ID NO: 892 - protein, 10 aa, Homo Sapiens
LLSANPLWQQ

SEQ ID NO: 893 - protein, 10 aa, Homo Sapiens
LSANPLWQQR

SEQ ID NO: 894 - protein, 10 aa, Homo Sapiens
SANPLWQQRA

SEQ ID NO: 895 - protein, 10 aa, Homo Sapiens
WQQRALDPPH

SEQ ID NO: 896 - protein, 10 aa, Homo Sapiens
ALDPPHQMEL

SEQ ID NO: 897 - protein, 11 aa, Homo Sapiens
MLLTLIILLPV

SEQ ID NO: 898 - protein, 11 aa, Homo Sapiens
LLTLIILLPVV

SEQ ID NO: 899 - protein, 11 aa, Homo Sapiens
TLIILLPVVSK

SEQ ID NO: 900 - protein, 11 aa, Homo Sapiens
LIILLPVVSKF

SEQ ID NO: 901 - protein, 11 aa, Homo Sapiens
ILLPVVSKFSF

SEQ ID NO: 902 - protein, 11 aa, Homo Sapiens
LLPVVSKFSFV

SEQ ID NO: 903 - protein, 11 aa, Homo Sapiens
LPVVSKFSFVS

SEQ ID NO: 904 - protein, 11 aa, Homo Sapiens
PVVSKFSFVSL

SEQ ID NO: 905 - protein, 11 aa, Homo Sapiens
SFVSLSAPQHW

SEQ ID NO: 906 - protein, 11 aa, Homo Sapiens
TLAGNGNSTCV

SEQ ID NO: 907 - protein, 11 aa, Homo Sapiens
STCVGPAPFLI

SEQ ID NO: 908 - protein, 11 aa, Homo Sapiens
APFLIFSHGNS

SEQ ID NO: 909 - protein, 11 aa, Homo Sapiens
FLIFSHGNSIF

SEQ ID NO: 910 - protein, 11 aa, Homo Sapiens
LIFSHGNSIFR

SEQ ID NO: 911 - protein, 11 aa, Homo Sapiens
IFSHGNSIFRI

SEQ ID NO: 912 - protein, 11 aa, Homo Sapiens
IFRIDTEGTNY

SEQ ID NO: 913 - protein, 11 aa, Homo Sapiens
DTEGTNYEQLV

SEQ ID NO: 914 - protein, 11 aa, Homo Sapiens
EQLVVDAGVSV

SEQ ID NO: 915 - protein, 11 aa, Homo Sapiens
QLVVDAGVSVI

SEQ ID NO: 916 - protein, 11 aa, Homo Sapiens
LVVDAGVSVIM

SEQ ID NO: 917 - protein, 11 aa, Homo Sapiens
SVIMDFHYNEK

SEQ ID NO: 918 - protein, 11 aa, Homo Sapiens
VIMDFHYNEKR

SEQ ID NO: 919 - protein, 11 aa, Homo Sapiens
IMDFHYNEKRI

SEQ ID NO: 920 - protein, 11 aa, Homo Sapiens
MDFHYNEKRIY

SEQ ID NO: 921 - protein, 11 aa, Homo Sapiens
FHYNEKRIYWV

SEQ ID NO: 922 - protein, 11 aa, Homo Sapiens
YNEKRIYWVDL

SEQ ID NO: 923 - protein, 11 aa, Homo Sapiens
RIYWVDLERQL

SEQ ID NO: 924 - protein, 11 aa, Homo Sapiens
IYWVDLERQLL

SEQ ID NO: 925 - protein, 11 aa, Homo Sapiens
VDLERQLLQRV

SEQ ID NO: 926 - protein, 11 aa, Homo Sapiens
DLERQLLQRVF

SEQ ID NO: 927 - protein, 11 aa, Homo Sapiens
LERQLLQRVFL

SEQ ID NO: 928 - protein, 11 aa, Homo Sapiens
LLQRVFLNGSR

SEQ ID NO: 929 - protein, 11 aa, Homo Sapiens
RVFLNGSRQER

SEQ ID NO: 930 - protein, 11 aa, Homo Sapiens
VFLNGSRQERV

SEQ ID NO: 931 - protein, 11 aa, Homo Sapiens
FLNGSRQERVC

SEQ ID NO: 932 - protein, 11 aa, Homo Sapiens
GMAINWINEEV

SEQ ID NO: 933 - protein, 11 aa, Homo Sapiens
MAINWINEEVI

SEQ ID NO: 934 - protein, 11 aa, Homo Sapiens
AINWINEEVIW

SEQ ID NO: 935 - protein, 11 aa, Homo Sapiens
EEVIWSNQQEG

SEQ ID NO: 936 - protein, 11 aa, Homo Sapiens
EVIWSNQQEGI

SEQ ID NO: 937 - protein, 11 aa, Homo Sapiens
VIWSNQQEGII

SEQ ID NO: 938 - protein, 11 aa, Homo Sapiens
DMKGNNSHILL

SEQ ID NO: 939 - protein, 11 aa, Homo Sapiens
NNSHILLSALK

SEQ ID NO: 940 - protein, 11 aa, Homo Sapiens
NSHILLSALKY

SEQ ID NO: 941 - protein, 11 aa, Homo Sapiens
LLSALKYPANV

SEQ ID NO: 942 - protein, 11 aa, Homo Sapiens
SALKYPANVAV

SEQ ID NO: 943 - protein, 11 aa, Homo Sapiens
KYPANVAVDPV

SEQ ID NO: 944 - protein, 11 aa, Homo Sapiens
YPANVAVDPVE

SEQ ID NO: 945 - protein, 11 aa, Homo Sapiens
NVAVDPVERFI

SEQ ID NO: 946 - protein, 11 aa, Homo Sapiens
VAVDPVERFIF

SEQ ID NO: 947 - protein, 11 aa, Homo Sapiens
VERFIFWSSEV

SEQ ID NO: 948 - protein, 11 aa, Homo Sapiens
FIFWSSEVAGS

SEQ ID NO: 949 - protein, 11 aa, Homo Sapiens
FWSSEVAGSLY

SEQ ID NO: 950 - protein, 11 aa, Homo Sapiens
WSSEVAGSLYR

SEQ ID NO: 951 - protein, 11 aa, Homo Sapiens
EVAGSLYRADL

SEQ ID NO: 952 - protein, 11 aa, Homo Sapiens
YRADLDGVGVK

SEQ ID NO: 953 - protein, 11 aa, Homo Sapiens
DLDGVGVKALL

SEQ ID NO: 954 - protein, 11 aa, Homo Sapiens
GVKALLETSEK

SEQ ID NO: 955 - protein, 11 aa, Homo Sapiens
ALLETSEKITA

SEQ ID NO: 956 - protein, 11 aa, Homo Sapiens
LLETSEKITAV

SEQ ID NO: 957 - protein, 11 aa, Homo Sapiens
ETSEKITAVSL

SEQ ID NO: 958 - protein, 11 aa, Homo Sapiens
ITAVSLDVLDK

SEQ ID NO: 959 - protein, 11 aa, Homo Sapiens
TAVSLDVLDKR

SEQ ID NO: 960 - protein, 11 aa, Homo Sapiens
VSLDVLDKRLF

SEQ ID NO: 961 - protein, 11 aa, Homo Sapiens
SLDVLDKRLFW

SEQ ID NO: 962 - protein, 11 aa, Homo Sapiens
VLDKRLFWIQY

SEQ ID NO: 963 - protein, 11 aa, Homo Sapiens
DKRLFWIQYNR

SEQ ID NO: 964 - protein, 11 aa, Homo Sapiens
RLFWIQYNREG

SEQ ID NO: 965 - protein, 11 aa, Homo Sapiens
IQYNREGSNSL

SEQ ID NO: 966 - protein, 11 aa, Homo Sapiens
QYNREGSNSLI

SEQ ID NO: 967 - protein, 11 aa, Homo Sapiens
GSNSLICSCDY

SEQ ID NO: 968 - protein, 11 aa, Homo Sapiens
DYDGGSVHISK

SEQ ID NO: 969 - protein, 11 aa, Homo Sapiens
HISKHPTQHNL

SEQ ID NO: 970 - protein, 11 aa, Homo Sapiens
ISKHPTQHNLF

SEQ ID NO: 971 - protein, 11 aa, Homo Sapiens
HPTQHNLFAMS

SEQ ID NO: 972 - protein, 11 aa, Homo Sapiens
TQHNLFAMSLF

SEQ ID NO: 973 - protein, 11 aa, Homo Sapiens
NLFAMSLFGDR

SEQ ID NO: 974 - protein, 11 aa, Homo Sapiens
FAMSLFGDRIF

SEQ ID NO: 975 - protein, 11 aa, Homo Sapiens
AMSLFGDRIFY

SEQ ID NO: 976 - protein, 11 aa, Homo Sapiens
SLFGDRIFYST

SEQ ID NO: 977 - protein, 11 aa, Homo Sapiens
IFYSTWKMKTI

SEQ ID NO: 978 - protein, 11 aa, Homo Sapiens
FYSTWKMKTIW

SEQ ID NO: 979 - protein, 11 aa, Homo Sapiens
STWKMKTIWIA

SEQ ID NO: 980 - protein, 11 aa, Homo Sapiens
KMKTIWIANKH

SEQ ID NO: 981 - protein, 11 aa, Homo Sapiens
TIWIANKHTGK

SEQ ID NO: 982 - protein, 11 aa, Homo Sapiens
WIANKHTGKDM

SEQ ID NO: 983 - protein, 11 aa, Homo Sapiens
HTGKDMVRINL

SEQ ID NO: 984 - protein, 11 aa, Homo Sapiens
DMVRINLHSSF

SEQ ID NO: 985 - protein, 11 aa, Homo Sapiens
MVRINLHSSFV

SEQ ID NO: 986 - protein, 11 aa, Homo Sapiens
RINLHSSFVPL

SEQ ID NO: 987 - protein, 11 aa, Homo Sapiens
HSSFVPLGELK

SEQ ID NO: 988 - protein, 11 aa, Homo Sapiens
SFVPLGELKVV

SEQ ID NO: 989 - protein, 11 aa, Homo Sapiens
PLGELKVVHPL

SEQ ID NO: 990 - protein, 11 aa, Homo Sapiens
KVVHPLAQPKA

SEQ ID NO: 991 - protein, 11 aa, Homo Sapiens
LAQPKAEDDTW

SEQ ID NO: 992 - protein, 11 aa, Homo Sapiens
DTWEPEQKLCK

SEQ ID NO: 993 - protein, 11 aa, Homo Sapiens
KLRKGNCSSTV

SEQ ID NO: 994 - protein, 11 aa, Homo Sapiens
TVCGQDLQSHL

SEQ ID NO: 995 - protein, 11 aa, Homo Sapiens
HLCMCAEGYAL

SEQ ID NO: 996 - protein, 11 aa, Homo Sapiens
CMCAEGYALSR

SEQ ID NO: 997 - protein, 11 aa, Homo Sapiens
CAEGYALSRDR

SEQ ID NO: 998 - protein, 11 aa, Homo Sapiens
KYCEDVNECAF

SEQ ID NO: 999 - protein, 11 aa, Homo Sapiens
ECAFWNHGCTL

SEQ ID NO: 1000 - protein, 11 aa, Homo Sapiens
TPGSYYCTCPV

SEQ ID NO: 1001 - protein, 11 aa, Homo Sapiens
GSYYCTCPVGF

SEQ ID NO: 1002 - protein, 11 aa, Homo Sapiens
SYYCTCPVGFV

SEQ ID NO: 1003 - protein, 11 aa, Homo Sapiens
YYCTCPVGFVL

SEQ ID NO: 1004 - protein, 11 aa, Homo Sapiens
YCTCPVGFVLL

SEQ ID NO: 1005 - protein, 11 aa, Homo Sapiens
PVGFVLLPDGK

SEQ ID NO: 1006 - protein, 11 aa, Homo Sapiens
VLLPDGKRCHQ

SEQ ID NO: 1007 - protein, 11 aa, Homo Sapiens
LLPDGKRCHQL

SEQ ID NO: 1008 - protein, 11 aa, Homo Sapiens
LPDGKRCHQLV

SEQ ID NO: 1009 - protein, 11 aa, Homo Sapiens
NVSECSHDCVL

SEQ ID NO: 1010 - protein, 11 aa, Homo Sapiens
VLTSEGPLCFC

SEQ ID NO: 1011 - protein, 11 aa, Homo Sapiens
CFCPEGSVLER

SEQ ID NO: 1012 - protein, 11 aa, Homo Sapiens
CSQLCVPLSPV

SEQ ID NO: 1013 - protein, 11 aa, Homo Sapiens
SQLCVPLSPVS

SEQ ID NO: 1014 - protein, 11 aa, Homo Sapiens
PLSPVSWECDC

SEQ ID NO: 1015 - protein, 11 aa, Homo Sapiens
VSWECDCFPGY

SEQ ID NO: 1016 - protein, 11 aa, Homo Sapiens
WECDCFPGYDL

SEQ ID NO: 1017 - protein, 11 aa, Homo Sapiens
KSCAASGPQPF

SEQ ID NO: 1018 - protein, 11 aa, Homo Sapiens
CAASGPQPFLL

SEQ ID NO: 1019 - protein, 11 aa, Homo Sapiens
FLLFANSQDIR

SEQ ID NO: 1020 - protein, 11 aa, Homo Sapiens
FANSQDIRHMH

SEQ ID NO: 1021 - protein, 11 aa, Homo Sapiens
MHFDGTDYGTL

SEQ ID NO: 1022 - protein, 11 aa, Homo Sapiens
HFDGTDYGTLL

SEQ ID NO: 1023 - protein, 11 aa, Homo Sapiens
TLLSQQMGMVY

SEQ ID NO: 1024 - protein, 11 aa, Homo Sapiens
LLSQQMGMVYA

SEQ ID NO: 1025 - protein, 11 aa, Homo Sapiens
QQMGMVYALDH

SEQ ID NO: 1026 - protein, 11 aa, Homo Sapiens
GMVYALDHDPV

SEQ ID NO: 1027 - protein, 11 aa, Homo Sapiens
YALDHDPVENK

SEQ ID NO: 1028 - protein, 11 aa, Homo Sapiens
ALDHDPVENKI

SEQ ID NO: 1029 - protein, 11 aa, Homo Sapiens
DPVENKIYFAH

SEQ ID NO: 1030 - protein, 11 aa, Homo Sapiens
NKIYFAHTALK

SEQ ID NO: 1031 - protein, 11 aa, Homo Sapiens
KIYFAHTALKW

SEQ ID NO: 1032 - protein, 11 aa, Homo Sapiens
IYFAHTALKWI

SEQ ID NO: 1033 - protein, 11 aa, Homo Sapiens
FAHTALKWIER

SEQ ID NO: 1034 - protein, 11 aa, Homo Sapiens
RANMDGSQRER

SEQ ID NO: 1035 - protein, 11 aa, Homo Sapiens
NMDGSQRERLI

SEQ ID NO: 1036 - protein, 11 aa, Homo Sapiens
SQRERLIEEGV

SEQ ID NO: 1037 - protein, 11 aa, Homo Sapiens
RERLIEEGVDV

SEQ ID NO: 1038 - protein, 11 aa, Homo Sapiens
IEEGVDVPEGL

SEQ ID NO: 1039 - protein, 11 aa, Homo Sapiens
EGVDVPEGLAV

SEQ ID NO: 1040 - protein, 11 aa, Homo Sapiens
DVPEGLAVDWI

SEQ ID NO: 1041 - protein, 11 aa, Homo Sapiens
LAVDWIGRRFY

SEQ ID NO: 1042 - protein, 11 aa, Homo Sapiens
AVDWIGRRFYW

SEQ ID NO: 1043 - protein, 11 aa, Homo Sapiens
WIGRRFYWTDR

SEQ ID NO: 1044 - protein, 11 aa, Homo Sapiens
GRRFYWTDRGK

SEQ ID NO: 1045 - protein, 11 aa, Homo Sapiens
RRFYWTDRGKS

SEQ ID NO: 1046 - protein, 11 aa, Homo Sapiens
RFYWTDRGKSL

SEQ ID NO: 1047 - protein, 11 aa, Homo Sapiens
FYWTDRGKSLI

SEQ ID NO: 1048 - protein, 11 aa, Homo Sapiens
SLIGRSDLNGK

SEQ ID NO: 1049 - protein, 11 aa, Homo Sapiens
GRSDLNGKRSK

SEQ ID NO: 1050 - protein, 11 aa, Homo Sapiens
IITKENISQPR

SEQ ID NO: 1051 - protein, 11 aa, Homo Sapiens
SQPRGIAVHPM

SEQ ID NO: 1052 - protein, 11 aa, Homo Sapiens
RGIAVHPMAKR

SEQ ID NO: 1053 - protein, 11 aa, Homo Sapiens
LFWTDTGINPR

SEQ ID NO: 1054 - protein, 11 aa, Homo Sapiens
GINPRIESSSL

SEQ ID NO: 1055 - protein, 11 aa, Homo Sapiens
ESSSLQGLGRL

SEQ ID NO: 1056 - protein, 11 aa, Homo Sapiens
SLQGLGRLVIA

SEQ ID NO: 1057 - protein, 11 aa, Homo Sapiens
RLVIASSDLIW

SEQ ID NO: 1058 - protein, 11 aa, Homo Sapiens
ASSDLIWPSGI

SEQ ID NO: 1059 - protein, 11 aa, Homo Sapiens
LIWPSGITIDF

SEQ ID NO: 1060 - protein, 11 aa, Homo Sapiens
IWPSGITIDFL

SEQ ID NO: 1061 - protein, 11 aa, Homo Sapiens
WPSGITIDFLT

SEQ ID NO: 1062 - protein, 11 aa, Homo Sapiens
ITIDFLTDKLY

SEQ ID NO: 1063 - protein, 11 aa, Homo Sapiens
FLTDKLYWCDA

SEQ ID NO: 1064 - protein, 11 aa, Homo Sapiens
LTDKLYWCDAK

SEQ ID NO: 1065 - protein, 11 aa, Homo Sapiens
KLYWCDAKQSV

SEQ ID NO: 1066 - protein, 11 aa, Homo Sapiens
LYWCDAKQSVI

SEQ ID NO: 1067 - protein, 11 aa, Homo Sapiens
VIEMANLDGSK

SEQ ID NO: 1068 - protein, 11 aa, Homo Sapiens
EMANLDGSKRR

SEQ ID NO: 1069 - protein, 11 aa, Homo Sapiens
MANLDGSKRRR

SEQ ID NO: 1070 - protein, 11 aa, Homo Sapiens
NLDGSKRRRLT

SEQ ID NO: 1071 - protein, 11 aa, Homo Sapiens
RRRLTQNDVGH

SEQ ID NO: 1072 - protein, 11 aa, Homo Sapiens
RLTQNDVGHPF

SEQ ID NO: 1073 - protein, 11 aa, Homo Sapiens
TQNDVGHPFAV

SEQ ID NO: 1074 - protein, 11 aa, Homo Sapiens
DVGHPFAVAVF

SEQ ID NO: 1075 - protein, 11 aa, Homo Sapiens
HPFAVAVFEDY

SEQ ID NO: 1076 - protein, 11 aa, Homo Sapiens
FAVAVFEDYVW

SEQ ID NO: 1077 - protein, 11 aa, Homo Sapiens
AVAVFEDYVWF

SEQ ID NO: 1078 - protein, 11 aa, Homo Sapiens
FEDYVWFSDWA

SEQ ID NO: 1079 - protein, 11 aa, Homo Sapiens
EDYVWFSDWAM

SEQ ID NO: 1080 - protein, 11 aa, Homo Sapiens
YVWFSDWAMPS

SEQ ID NO: 1081 - protein, 11 aa, Homo Sapiens
WFSDWAMPSVI

SEQ ID NO: 1082 - protein, 11 aa, Homo Sapiens
FSDWAMPSVIR

SEQ ID NO: 1083 - protein, 11 aa, Homo Sapiens
WAMPSVIRVNK

SEQ ID NO: 1084 - protein, 11 aa, Homo Sapiens
AMPSVIRVNKR

SEQ ID NO: 1085 - protein, 11 aa, Homo Sapiens
MPSVIRVNKRT

SEQ ID NO: 1086 - protein, 11 aa, Homo Sapiens
SVIRVNKRTGK

SEQ ID NO: 1087 - protein, 11 aa, Homo Sapiens
RVNKRTGKDRV

SEQ ID NO: 1088 - protein, 11 aa, Homo Sapiens
LQGSMLKPSSL

SEQ ID NO: 1089 - protein, 11 aa, Homo Sapiens
SMLKPSSLVVV

SEQ ID NO: 1090 - protein, 11 aa, Homo Sapiens
KPSSLVVVHPL

SEQ ID NO: 1091 - protein, 11 aa, Homo Sapiens
SSLVVVHPLAK

SEQ ID NO: 1092 - protein, 11 aa, Homo Sapiens
HPLAKPGADPC

SEQ ID NO: 1093 - protein, 11 aa, Homo Sapiens
PLAKPGADPCL

SEQ ID NO: 1094 - protein, 11 aa, Homo Sapiens
LAKPGADPCLY

SEQ ID NO: 1095 - protein, 11 aa, Homo Sapiens
CLYQNGGCEHI

SEQ ID NO: 1096 - protein, 11 aa, Homo Sapiens
YQNGGCEHICK

SEQ ID NO: 1097 - protein, 11 aa, Homo Sapiens
KRLGTAWCSCR

SEQ ID NO: 1098 - protein, 11 aa, Homo Sapiens
TAWCSCREGFM

SEQ ID NO: 1099 - protein, 11 aa, Homo Sapiens
AWCSCREGFMK

SEQ ID NO: 1100 - protein, 11 aa, Homo Sapiens
FMKASDGKTCL

SEQ ID NO: 1101 - protein, 11 aa, Homo Sapiens
KASDGKTCLAL

SEQ ID NO: 1102 - protein, 11 aa, Homo Sapiens
CLALDGHQLLA

SEQ ID NO: 1103 - protein, 11 aa, Homo Sapiens
ALDGHQLLAGG

SEQ ID NO: 1104 - protein, 11 aa, Homo Sapiens
QLLAGGEVDLK

SEQ ID NO: 1105 - protein, 11 aa, Homo Sapiens
LLAGGEVDLKN

SEQ ID NO: 1106 - protein, 11 aa, Homo Sapiens
AGGEVDLKNQV

SEQ ID NO: 1107 - protein, 11 aa, Homo Sapiens
EVDLKNQVTPL

SEQ ID NO: 1108 - protein, 11 aa, Homo Sapiens
NQVTPLDILSK

SEQ ID NO: 1109 - protein, 11 aa, Homo Sapiens
TPLDILSKTRV

SEQ ID NO: 1110 - protein, 11 aa, Homo Sapiens
NITESQHMLVA

SEQ ID NO: 1111 - protein, 11 aa, Homo Sapiens
TESQHMLVAEI

SEQ ID NO: 1112 - protein, 11 aa, Homo Sapiens
ESQHMLVAEIM

SEQ ID NO: 1113 - protein, 11 aa, Homo Sapiens
SQHMLVAEIMV

SEQ ID NO: 1114 - protein, 11 aa, Homo Sapiens
AEIMVSDQDDC

SEQ ID NO: 1115 - protein, 11 aa, Homo Sapiens
EIMVSDQDDCA

SEQ ID NO: 1116 - protein, 11 aa, Homo Sapiens
MVSDQDDCAPV

SEQ ID NO: 1117 - protein, 11 aa, Homo Sapiens
DCAPVGCSMYA

SEQ ID NO: 1118 - protein, 11 aa, Homo Sapiens
CAPVGCSMYAR

SEQ ID NO: 1119 - protein, 11 aa, Homo Sapiens
SMYARCISEGE

SEQ ID NO: 1120 - protein, 11 aa, Homo Sapiens
SEGEDATCQCL

SEQ ID NO: 1121 - protein, 11 aa, Homo Sapiens
CLKGFAGDGKL

SEQ ID NO: 1122 - protein, 11 aa, Homo Sapiens
KLCSDIDECEM

SEQ ID NO: 1123 - protein, 11 aa, Homo Sapiens
DIDECEMGVPV

SEQ ID NO: 1124 - protein, 11 aa, Homo Sapiens
GVPVCPPASSK

SEQ ID NO: 1125 - protein, 11 aa, Homo Sapiens
CPPASSKCINT

SEQ ID NO: 1126 - protein, 11 aa, Homo Sapiens
CINTEGGYVCR

SEQ ID NO: 1127 - protein, 11 aa, Homo Sapiens
YQGDGIHCLDI

SEQ ID NO: 1128 - protein, 11 aa, Homo Sapiens
CLDIDECQLGV

SEQ ID NO: 1129 - protein, 11 aa, Homo Sapiens
NASCTNTEGGY

SEQ ID NO: 1130 - protein, 11 aa, Homo Sapiens
MCAGRLSEPGL

SEQ ID NO: 1131 - protein, 11 aa, Homo Sapiens
HLREDDHHYSV

SEQ ID NO: 1132 - protein, 11 aa, Homo Sapiens
SVRNSDSECPL

SEQ ID NO: 1133 - protein, 11 aa, Homo Sapiens
DSECPLSHDGY

SEQ ID NO: 1134 - protein, 11 aa, Homo Sapiens
SHDGYCLHDGV

SEQ ID NO: 1135 - protein, 11 aa, Homo Sapiens
CLHDGVCMYIE

SEQ ID NO: 1136 - protein, 11 aa, Homo Sapiens
GVCMYIEALDK

SEQ ID NO: 1137 - protein, 11 aa, Homo Sapiens
CMYIEALDKYA

SEQ ID NO: 1138 - protein, 11 aa, Homo Sapiens
EALDKYACNCV

SEQ ID NO: 1139 - protein, 11 aa, Homo Sapiens
ALDKYACNCVV

SEQ ID NO: 1140 - protein, 11 aa, Homo Sapiens
KYACNCVVGYI

SEQ ID NO: 1141 - protein, 11 aa, Homo Sapiens
CNCVVGYIGER

SEQ ID NO: 1142 - protein, 11 aa, Homo Sapiens
VVGYIGERCQY

SEQ ID NO: 1143 - protein, 11 aa, Homo Sapiens
VGYIGERCQYR

SEQ ID NO: 1144 - protein, 11 aa, Homo Sapiens
YIGERCQYRDL

SEQ ID NO: 1145 - protein, 11 aa, Homo Sapiens
CQYRDLKWWEL

SEQ ID NO: 1146 - protein, 11 aa, Homo Sapiens
QYRDLKWWELR

SEQ ID NO: 1147 - protein, 11 aa, Homo Sapiens
LRHAGHGQQQK

SEQ ID NO: 1148 - protein, 11 aa, Homo Sapiens
GQQQKVIVVAV

SEQ ID NO: 1149 - protein, 11 aa, Homo Sapiens
KVIVVAVCVVV

SEQ ID NO: 1150 - protein, 11 aa, Homo Sapiens
IVVAVCVVVLV

SEQ ID NO: 1151 - protein, 11 aa, Homo Sapiens
VVAVCVVVLVM

SEQ ID NO: 1152 - protein, 11 aa, Homo Sapiens
VAVCVVVLVML

SEQ ID NO: 1153 - protein, 11 aa, Homo Sapiens
CVVVLVMLLLL

SEQ ID NO: 1154 - protein, 11 aa, Homo Sapiens
VVLVMLLLLSL

SEQ ID NO: 1155 - protein, 11 aa, Homo Sapiens
VMLLLLSLWGA

SEQ ID NO: 1156 - protein, 11 aa, Homo Sapiens
LLLLSLWGAHY

SEQ ID NO: 1157 - protein, 11 aa, Homo Sapiens
LLLSLWGAHYY

SEQ ID NO: 1158 - protein, 11 aa, Homo Sapiens
LLSLWGAHYYR

SEQ ID NO: 1159 - protein, 11 aa, Homo Sapiens
SLWGAHYYRTQ

SEQ ID NO: 1160 - protein, 11 aa, Homo Sapiens
LWGAHYYRTQK

SEQ ID NO: 1161 - protein, 11 aa, Homo Sapiens
HYYRTQKLLSK

SEQ ID NO: 1162 - protein, 11 aa, Homo Sapiens
RTQKLLSKNPK

SEQ ID NO: 1163 - protein, 11 aa, Homo Sapiens
KLLSKNPKNPY

SEQ ID NO: 1164 - protein, 11 aa, Homo Sapiens
NPYEESSRDVR

SEQ ID NO: 1165 - protein, 11 aa, Homo Sapiens
EESSRDVRSRR

SEQ ID NO: 1166 - protein, 11 aa, Homo Sapiens
SSRDVRSRRPA

SEQ ID NO: 1167 - protein, 11 aa, Homo Sapiens
RPADTEDGMSS

SEQ ID NO: 1168 - protein, 11 aa, Homo Sapiens
GMSSCPQPWFV

SEQ ID NO: 1169 - protein, 11 aa, Homo Sapiens
MSSCPQPWFVV

SEQ ID NO: 1170 - protein, 11 aa, Homo Sapiens
SSCPQPWFVVI

SEQ ID NO: 1171 - protein, 11 aa, Homo Sapiens
FVVIKEHQDLK

SEQ ID NO: 1172 - protein, 11 aa, Homo Sapiens
HQDLKNGGQPV

SEQ ID NO: 1173 - protein, 11 aa, Homo Sapiens
QPVAGEDGQAA

SEQ ID NO: 1174 - protein, 11 aa, Homo Sapiens
GEDGQAADGSM

SEQ ID NO: 1175 - protein, 11 aa, Homo Sapiens
GQAADGSMQPT

SEQ ID NO: 1176 - protein, 11 aa, Homo Sapiens
AADGSMQPTSW

SEQ ID NO: 1177 - protein, 11 aa, Homo Sapiens
SMQPTSWRQEP

SEQ ID NO: 1178 - protein, 11 aa, Homo Sapiens
RQEPQLCGMGT

SEQ ID NO: 1179 - protein, 11 aa, Homo Sapiens
QLCGMGTEQGC

SEQ ID NO: 1180 - protein, 11 aa, Homo Sapiens
MGTEQGCWIPV

SEQ ID NO: 1181 - protein, 11 aa, Homo Sapiens
CPQVMERSFHM

SEQ ID NO: 1182 - protein, 11 aa, Homo Sapiens
QVMERSFHMPS

SEQ ID NO: 1183 - protein, 11 aa, Homo Sapiens
VMERSFHMPSY

SEQ ID NO: 1184 - protein, 11 aa, Homo Sapiens
FHMPSYGTQTL

SEQ ID NO: 1185 - protein, 11 aa, Homo Sapiens
MPSYGTQTLEG

SEQ ID NO: 1186 - protein, 11 aa, Homo Sapiens
GTQTLEGGVEK

SEQ ID NO: 1187 - protein, 11 aa, Homo Sapiens
LEGGVEKPHSL

SEQ ID NO: 1188 - protein, 11 aa, Homo Sapiens
KPHSLLSANPL

SEQ ID NO: 1189 - protein, 11 aa, Homo Sapiens
SLLSANPLWQQ

SEQ ID NO: 1190 - protein, 11 aa, Homo Sapiens
LLSANPLWQQR

SEQ ID NO: 1191 - protein, 11 aa, Homo Sapiens
SANPLWQQRAL

SEQ ID NO: 1192 - protein, 11 aa, Homo Sapiens
QQRALDPPHQM

SEQ ID NO: 1193 - protein, 11 aa, Homo Sapiens
RALDPPHQMEL

SEQ ID NO: 1194 - protein, 11 aa, Homo Sapiens
ALDPPHQMELT

SEQ ID NO: 1195 - protein, 252 aa, Homo Sapiens
MGPPSASPHRECIPWQGLLLTASLLNFWNPPTTAKLTIESMPLSVAEGKEVLLLVHNLPQHLFGYSWYKGERVDGNSLIVGYVIGTQQATPGAAYSGRETIYTNASLLIQNVTQNDIGFYTLQVIKSDLVNEEATGQFHVYQENAPGLPVGAVAGIVTGVLVGVALVAALVCFLLLAKTGRTSIQRDLKEQQPQALAPGRGPSHSSAFSMSPLSTAQAPLPNPRTAASIYEELLKHDTNIYCRMDHKAEVAS

SEQ ID NO: 1196 - protein, 8 aa, Homo Sapiens
ECIPWQGL

SEQ ID NO: 1197 - protein, 8 aa, Homo Sapiens
CIPWQGLL

SEQ ID NO: 1198 - protein, 8 aa, Homo Sapiens
IPWQGLLL

SEQ ID NO: 1199 - protein, 8 aa, Homo Sapiens
WQGLLLTA

SEQ ID NO: 1200 - protein, 8 aa, Homo Sapiens
GLLLTASL

SEQ ID NO: 1201 - protein, 8 aa, Homo Sapiens
LLLTASLL

SEQ ID NO: 1202 - protein, 8 aa, Homo Sapiens
LTASLLNF

SEQ ID NO: 1203 - protein, 8 aa, Homo Sapiens
TASLLNFW

SEQ ID NO: 1204 - protein, 8 aa, Homo Sapiens
SLLNFWNP

SEQ ID NO: 1205 - protein, 8 aa, Homo Sapiens
LTIESMPL

SEQ ID NO: 1206 - protein, 8 aa, Homo Sapiens
IESMPLSV

SEQ ID NO: 1207 - protein, 8 aa, Homo Sapiens
ESMPLSVA

SEQ ID NO: 1208 - protein, 8 aa, Homo Sapiens
MPLSVAEG

SEQ ID NO: 1209 - protein, 8 aa, Homo Sapiens
SVAEGKEV

SEQ ID NO: 1210 - protein, 8 aa, Homo Sapiens
AEGKEVLL

SEQ ID NO: 1211 - protein, 8 aa, Homo Sapiens
VLLLVHNL

SEQ ID NO: 1212 - protein, 8 aa, Homo Sapiens
LLVHNLPQ

SEQ ID NO: 1213 - protein, 8 aa, Homo Sapiens
LPQHLFGY

SEQ ID NO: 1214 - protein, 8 aa, Homo Sapiens
HLFGYSWY

SEQ ID NO: 1215 - protein, 8 aa, Homo Sapiens
LFGYSWYK

SEQ ID NO: 1216 - protein, 8 aa, Homo Sapiens
YSWYKGER

SEQ ID NO: 1217 - protein, 8 aa, Homo Sapiens
SWYKGERV

SEQ ID NO: 1218 - protein, 8 aa, Homo Sapiens
ERVDGNSL

SEQ ID NO: 1219 - protein, 8 aa, Homo Sapiens
RVDGNSLI

SEQ ID NO: 1220 - protein, 8 aa, Homo Sapiens
NSLIVGYV

SEQ ID NO: 1221 - protein, 8 aa, Homo Sapiens
SLIVGYVI

SEQ ID NO: 1222 - protein, 8 aa, Homo Sapiens
YVIGTQQA

SEQ ID NO: 1223 - protein, 8 aa, Homo Sapiens
TQQATPGA

SEQ ID NO: 1224 - protein, 8 aa, Homo Sapiens
QATPGAAY

SEQ ID NO: 1225 - protein, 8 aa, Homo Sapiens
AYSGRETI

SEQ ID NO: 1226 - protein, 8 aa, Homo Sapiens
YSGRETIY

SEQ ID NO: 1227 - protein, 8 aa, Homo Sapiens
ETIYTNAS

SEQ ID NO: 1228 - protein, 8 aa, Homo Sapiens
TIYTNASL

SEQ ID NO: 1229 - protein, 8 aa, Homo Sapiens
IYTNASLL

SEQ ID NO: 1230 - protein, 8 aa, Homo Sapiens
YTNASLLI

SEQ ID NO: 1231 - protein, 8 aa, Homo Sapiens
SLLIQNVT

SEQ ID NO: 1232 - protein, 8 aa, Homo Sapiens
LLIQNVTQ

SEQ ID NO: 1233 - protein, 8 aa, Homo Sapiens
VTQNDIGF

SEQ ID NO: 1234 - protein, 8 aa, Homo Sapiens
TQNDIGFY

SEQ ID NO: 1235 - protein, 8 aa, Homo Sapiens
FYTLQVIK

SEQ ID NO: 1236 - protein, 8 aa, Homo Sapiens
QVIKSDLV

SEQ ID NO: 1237 - protein, 8 aa, Homo Sapiens
EATGQFHV

SEQ ID NO: 1238 - protein, 8 aa, Homo Sapiens
ATGQFHVY

SEQ ID NO: 1239 - protein, 8 aa, Homo Sapiens
YQENAPGL

SEQ ID NO: 1240 - protein, 8 aa, Homo Sapiens
ENAPGLPV

SEQ ID NO: 1241 - protein, 8 aa, Homo Sapiens
APGLPVGA

SEQ ID NO: 1242 - protein, 8 aa, Homo Sapiens
GLPVGAVA

SEQ ID NO: 1243 - protein, 8 aa, Homo Sapiens
LPVGAVAG

SEQ ID NO: 1244 - protein, 8 aa, Homo Sapiens
VAGIVTGV

SEQ ID NO: 1245 - protein, 8 aa, Homo Sapiens
GIVTGVLV

SEQ ID NO: 1246 - protein, 8 aa, Homo Sapiens
VTGVLVGV

SEQ ID NO: 1247 - protein, 8 aa, Homo Sapiens
GVLVGVAL

SEQ ID NO: 1248 - protein, 8 aa, Homo Sapiens
VLVGVALV

SEQ ID NO: 1249 - protein, 8 aa, Homo Sapiens
GVALVAAL

SEQ ID NO: 1250 - protein, 8 aa, Homo Sapiens
VALVAALV

SEQ ID NO: 1251 - protein, 8 aa, Homo Sapiens
LVAALVCF

SEQ ID NO: 1252 - protein, 8 aa, Homo Sapiens
VAALVCFL

SEQ ID NO: 1253 - protein, 8 aa, Homo Sapiens
AALVCFLL

SEQ ID NO: 1254 - protein, 8 aa, Homo Sapiens
ALVCFLLL

SEQ ID NO: 1255 - protein, 8 aa, Homo Sapiens
LLLAKTGR

SEQ ID NO: 1256 - protein, 8 aa, Homo Sapiens
LLAKTGRT

SEQ ID NO: 1257 - protein, 8 aa, Homo Sapiens
TSIQRDLK

SEQ ID NO: 1258 - protein, 8 aa, Homo Sapiens
KEQQPQAL

SEQ ID NO: 1259 - protein, 8 aa, Homo Sapiens
GPSHSSAF

SEQ ID NO: 1260 - protein, 8 aa, Homo Sapiens
SAFSMSPL

SEQ ID NO: 1261 - protein, 8 aa, Homo Sapiens
SMSPLSTA

SEQ ID NO: 1262 - protein, 8 aa, Homo Sapiens
SPLSTAQA

SEQ ID NO: 1263 - protein, 8 aa, Homo Sapiens
PLPNPRTA

SEQ ID NO: 1264 - protein, 8 aa, Homo Sapiens
LPNPRTAA

SEQ ID NO: 1265 - protein, 8 aa, Homo Sapiens
NPRTAASI

SEQ ID NO: 1266 - protein, 8 aa, Homo Sapiens
AASIYEEL

SEQ ID NO: 1267 - protein, 8 aa, Homo Sapiens
SIYEELLK

SEQ ID NO: 1268 - protein, 8 aa, Homo Sapiens
LLKHDTNI

SEQ ID NO: 1269 - protein, 8 aa, Homo Sapiens
HDTNIYCR

SEQ ID NO: 1270 - protein, 8 aa, Homo Sapiens
DTNIYCRM

SEQ ID NO: 1271 - protein, 8 aa, Homo Sapiens
IYCRMDHK

SEQ ID NO: 1272 - protein, 8 aa, Homo Sapiens
RMDHKAEV

SEQ ID NO: 1273 - protein, 9 aa, Homo Sapiens
RECIPWQGL

SEQ ID NO: 1274 - protein, 9 aa, Homo Sapiens
ECIPWQGLL

SEQ ID NO: 1275 - protein, 9 aa, Homo Sapiens
CIPWQGLLL

SEQ ID NO: 1276 - protein, 9 aa, Homo Sapiens
IPWQGLLLT

SEQ ID NO: 1277 - protein, 9 aa, Homo Sapiens
WQGLLLTAS

SEQ ID NO: 1278 - protein, 9 aa, Homo Sapiens
GLLLTASLL

SEQ ID NO: 1279 - protein, 9 aa, Homo Sapiens
LLTASLLNF

SEQ ID NO: 1280 - protein, 9 aa, Homo Sapiens
LTASLLNFW

SEQ ID NO: 1281 - protein, 9 aa, Homo Sapiens
LLNFWNPPT

SEQ ID NO: 1282 - protein, 9 aa, Homo Sapiens
PPTTAKLTI

SEQ ID NO: 1283 - protein, 9 aa, Homo Sapiens
TTAKLTIES

SEQ ID NO: 1284 - protein, 9 aa, Homo Sapiens
KLTIESMPL

SEQ ID NO: 1285 - protein, 9 aa, Homo Sapiens
TIESMPLSV

SEQ ID NO: 1286 - protein, 9 aa, Homo Sapiens
MPLSVAEGK

SEQ ID NO: 1287 - protein, 9 aa, Homo Sapiens
SVAEGKEVL

SEQ ID NO: 1288 - protein, 9 aa, Homo Sapiens
AEGKEVLLL

SEQ ID NO: 1289 - protein, 9 aa, Homo Sapiens
EVLLLVHNL

SEQ ID NO: 1290 - protein, 9 aa, Homo Sapiens
LLLVHNLPQ

SEQ ID NO: 1291 - protein, 9 aa, Homo Sapiens
NLPQHLFGY

SEQ ID NO: 1292 - protein, 9 aa, Homo Sapiens
LPQHLFGYS

SEQ ID NO: 1293 - protein, 9 aa, Homo Sapiens
HLFGYSWYK

SEQ ID NO: 1294 - protein, 9 aa, Homo Sapiens
GYSWYKGER

SEQ ID NO: 1295 - protein, 9 aa, Homo Sapiens
YSWYKGERV

SEQ ID NO: 1296 - protein, 9 aa, Homo Sapiens
GERVDGNSL

SEQ ID NO: 1297 - protein, 9 aa, Homo Sapiens
ERVDGNSLI

SEQ ID NO: 1298 - protein, 9 aa, Homo Sapiens
RVDGNSLIV

SEQ ID NO: 1299 - protein, 9 aa, Homo Sapiens
LIVGYVIGT

SEQ ID NO: 1300 - protein, 9 aa, Homo Sapiens
YVIGTQQAT

SEQ ID NO: 1301 - protein, 9 aa, Homo Sapiens
QQATPGAAY

SEQ ID NO: 1302 - protein, 9 aa, Homo Sapiens
TPGAAYSGR

SEQ ID NO: 1303 - protein, 9 aa, Homo Sapiens
AAYSGRETI

SEQ ID NO: 1304 - protein, 9 aa, Homo Sapiens
AYSGRETIY

SEQ ID NO: 1305 - protein, 9 aa, Homo Sapiens
ETIYTNASL

SEQ ID NO: 1306 - protein, 9 aa, Homo Sapiens
TIYTNASLL

SEQ ID NO: 1307 - protein, 9 aa, Homo Sapiens
IYTNASLLI

SEQ ID NO: 1308 - protein, 9 aa, Homo Sapiens
NASLLIQNV

SEQ ID NO: 1309 - protein, 9 aa, Homo Sapiens
SLLIQNVTQ

SEQ ID NO: 1310 - protein, 9 aa, Homo Sapiens
NVTQNDIGF

SEQ ID NO: 1311 - protein, 9 aa, Homo Sapiens
VTQNDIGFY

SEQ ID NO: 1312 - protein, 9 aa, Homo Sapiens
TQNDIGFYT

SEQ ID NO: 1313 - protein, 9 aa, Homo Sapiens
QNDIGFYTL

SEQ ID NO: 1314 - protein, 9 aa, Homo Sapiens
DIGFYTLQV

SEQ ID NO: 1315 - protein, 9 aa, Homo Sapiens
GFYTLQVIK

SEQ ID NO: 1316 - protein, 9 aa, Homo Sapiens
LQVIKSDLV

SEQ ID NO: 1317 - protein, 9 aa, Homo Sapiens
EEATGQFHV

SEQ ID NO: 1318 - protein, 9 aa, Homo Sapiens
EATGQFHVY

SEQ ID NO: 1319 - protein, 9 aa, Homo Sapiens
VYQENAPGL

SEQ ID NO: 1320 - protein, 9 aa, Homo Sapiens
QENAPGLPV

SEQ ID NO: 1321 - protein, 9 aa, Homo Sapiens
NAPGLPVGA

SEQ ID NO: 1322 - protein, 9 aa, Homo Sapiens
APGLPVGAV

SEQ ID NO: 1323 - protein, 9 aa, Homo Sapiens
LPVGAVAGI

SEQ ID NO: 1324 - protein, 9 aa, Homo Sapiens
AVAGIVTGV

SEQ ID NO: 1325 - protein, 9 aa, Homo Sapiens
IVTGVLVGV

SEQ ID NO: 1326 - protein, 9 aa, Homo Sapiens
TGVLVGVAL

SEQ ID NO: 1327 - protein, 9 aa, Homo Sapiens
GVLVGVALV

SEQ ID NO: 1328 - protein, 9 aa, Homo Sapiens
VLVGVALVA

SEQ ID NO: 1329 - protein, 9 aa, Homo Sapiens
LVGVALVAA

SEQ ID NO: 1330 - protein, 9 aa, Homo Sapiens
GVALVAALV

SEQ ID NO: 1331 - protein, 9 aa, Homo Sapiens
ALVAALVCF

SEQ ID NO: 1332 - protein, 9 aa, Homo Sapiens
LVAALVCFL

SEQ ID NO: 1333 - protein, 9 aa, Homo Sapiens
VAALVCFLL

SEQ ID NO: 1334 - protein, 9 aa, Homo Sapiens
AALVCFLLL

SEQ ID NO: 1335 - protein, 9 aa, Homo Sapiens
ALVCFLLLA

SEQ ID NO: 1336 - protein, 9 aa, Homo Sapiens
LVCFLLLAK

SEQ ID NO: 1337 - protein, 9 aa, Homo Sapiens
FLLLAKTGR

SEQ ID NO: 1338 - protein, 9 aa, Homo Sapiens
LLLAKTGRT

SEQ ID NO: 1339 - protein, 9 aa, Homo Sapiens
LAKTGRTSI

SEQ ID NO: 1340 - protein, 9 aa, Homo Sapiens
KTGRTSIQR

SEQ ID NO: 1341 - protein, 9 aa, Homo Sapiens
RTSIQRDLK

SEQ ID NO: 1342 - protein, 9 aa, Homo Sapiens
DLKEQQPQA

SEQ ID NO: 1343 - protein, 9 aa, Homo Sapiens
ALAPGRGPS

SEQ ID NO: 1344 - protein, 9 aa, Homo Sapiens
SSAFSMSPL

SEQ ID NO: 1345 - protein, 9 aa, Homo Sapiens
FSMSPLSTA

SEQ ID NO: 1346 - protein, 9 aa, Homo Sapiens
SMSPLSTAQ

SEQ ID NO: 1347 - protein, 9 aa, Homo Sapiens
MSPLSTAQA

SEQ ID NO: 1348 - protein, 9 aa, Homo Sapiens
PLSTAQAPL

SEQ ID NO: 1349 - protein, 9 aa, Homo Sapiens
AQAPLPNPR

SEQ ID NO: 1350 - protein, 9 aa, Homo Sapiens
APLPNPRTA

SEQ ID NO: 1351 - protein, 9 aa, Homo Sapiens
PLPNPRTAA

SEQ ID NO: 1352 - protein, 9 aa, Homo Sapiens
LPNPRTAAS

SEQ ID NO: 1353 - protein, 9 aa, Homo Sapiens
NPRTAASIY

SEQ ID NO: 1354 - protein, 9 aa, Homo Sapiens
TAASIYEEL

SEQ ID NO: 1355 - protein, 9 aa, Homo Sapiens
AASIYEELL

SEQ ID NO: 1356 - protein, 9 aa, Homo Sapiens
ASIYEELLK

SEQ ID NO: 1357 - protein, 9 aa, Homo Sapiens
ELLKHDTNI

SEQ ID NO: 1358 - protein, 9 aa, Homo Sapiens
LLKHDTNIY

SEQ ID NO: 1359 - protein, 9 aa, Homo Sapiens
NIYCRMDHK

SEQ ID NO: 1360 - protein, 9 aa, Homo Sapiens
CRMDHKAEV

SEQ ID NO: 1361 - protein, 9 aa, Homo Sapiens
RMDHKAEVA

SEQ ID NO: 1362 - protein, 10 aa, Homo Sapiens
MGPPSASPHR

SEQ ID NO: 1363 - protein, 10 aa, Homo Sapiens
RECIPWQGLL

SEQ ID NO: 1364 - protein, 10 aa, Homo Sapiens
ECIPWQGLLL

SEQ ID NO: 1365 - protein, 10 aa, Homo Sapiens
IPWQGLLLTA

SEQ ID NO: 1366 - protein, 10 aa, Homo Sapiens
WQGLLLTASL

SEQ ID NO: 1367 - protein, 10 aa, Homo Sapiens
LLLTASLLNF

SEQ ID NO: 1368 - protein, 10 aa, Homo Sapiens
LLTASLLNFW

SEQ ID NO: 1369 - protein, 10 aa, Homo Sapiens
SLLNFWNPPT

SEQ ID NO: 1370 - protein, 10 aa, Homo Sapiens
LLNFWNPPTT

SEQ ID NO: 1371 - protein, 10 aa, Homo Sapiens
FWNPPTTAKL

SEQ ID NO: 1372 - protein, 10 aa, Homo Sapiens
NPPTTAKLTI

SEQ ID NO: 1373 - protein, 10 aa, Homo Sapiens
TTAKLTIESM

SEQ ID NO: 1374 - protein, 10 aa, Homo Sapiens
LTIESMPLSV

SEQ ID NO: 1375 - protein, 10 aa, Homo Sapiens
SMPLSVAEGK

SEQ ID NO: 1376 - protein, 10 aa, Homo Sapiens
PLSVAEGKEV

SEQ ID NO: 1377 - protein, 10 aa, Homo Sapiens
SVAEGKEVLL

SEQ ID NO: 1378 - protein, 10 aa, Homo Sapiens
AEGKEVLLLV

SEQ ID NO: 1379 - protein, 10 aa, Homo Sapiens
KEVLLLVHNL

SEQ ID NO: 1380 - protein, 10 aa, Homo Sapiens
VLLLVHNLPQ

SEQ ID NO: 1381 - protein, 10 aa, Homo Sapiens
LLVHNLPQHL

SEQ ID NO: 1382 - protein, 10 aa, Homo Sapiens
LVHNLPQHLF

SEQ ID NO: 1383 - protein, 10 aa, Homo Sapiens
LPQHLFGYSW

SEQ ID NO: 1384 - protein, 10 aa, Homo Sapiens
PQHLFGYSWY

SEQ ID NO: 1385 - protein, 10 aa, Homo Sapiens
QHLFGYSWYK

SEQ ID NO: 1386 - protein, 10 aa, Homo Sapiens
HLFGYSWYKG

SEQ ID NO: 1387 - protein, 10 aa, Homo Sapiens
FGYSWYKGER

SEQ ID NO: 1388 - protein, 10 aa, Homo Sapiens
GERVDGNSLI

SEQ ID NO: 1389 - protein, 10 aa, Homo Sapiens
DGNSLIVGYV

SEQ ID NO: 1390 - protein, 10 aa, Homo Sapiens
SLIVGYVIGT

SEQ ID NO: 1391 - protein, 10 aa, Homo Sapiens
TQQATPGAAY

SEQ ID NO: 1392 - protein, 10 aa, Homo Sapiens
ATPGAAYSGR

SEQ ID NO: 1393 - protein, 10 aa, Homo Sapiens
AAYSGRETIY

SEQ ID NO: 1394 - protein, 10 aa, Homo Sapiens
RETIYTNASL

SEQ ID NO: 1395 - protein, 10 aa, Homo Sapiens
ETIYTNASLL

SEQ ID NO: 1396 - protein, 10 aa, Homo Sapiens
TIYTNASLLI

SEQ ID NO: 1397 - protein, 10 aa, Homo Sapiens
TNASLLIQNV

SEQ ID NO: 1398 - protein, 10 aa, Homo Sapiens
NVTQNDIGFY

SEQ ID NO: 1399 - protein, 10 aa, Homo Sapiens
TQNDIGFYTL

SEQ ID NO: 1400 - protein, 10 aa, Homo Sapiens
YTLQVIKSDL

SEQ ID NO: 1401 - protein, 10 aa, Homo Sapiens
TLQVIKSDLV

SEQ ID NO: 1402 - protein, 10 aa, Homo Sapiens
LVNEEATGQF

SEQ ID NO: 1403 - protein, 10 aa, Homo Sapiens
EEATGQFHVY

SEQ ID NO: 1404 - protein, 10 aa, Homo Sapiens
EATGQFHVYQ

SEQ ID NO: 1405 - protein, 10 aa, Homo Sapiens
GQFHVYQENA

SEQ ID NO: 1406 - protein, 10 aa, Homo Sapiens
HVYQENAPGL

SEQ ID NO: 1407 - protein, 10 aa, Homo Sapiens
YQENAPGLPV

SEQ ID NO: 1408 - protein, 10 aa, Homo Sapiens
NAPGLPVGAV

SEQ ID NO: 1409 - protein, 10 aa, Homo Sapiens
APGLPVGAVA

SEQ ID NO: 1410 - protein, 10 aa, Homo Sapiens
GLPVGAVAGI

SEQ ID NO: 1411 - protein, 10 aa, Homo Sapiens
LPVGAVAGIV

SEQ ID NO: 1412 - protein, 10 aa, Homo Sapiens
GAVAGIVTGV

SEQ ID NO: 1413 - protein, 10 aa, Homo Sapiens
AVAGIVTGVL

SEQ ID NO: 1414 - protein, 10 aa, Homo Sapiens
GIVTGVLVGV

SEQ ID NO: 1415 - protein, 10 aa, Homo Sapiens
TGVLVGVALV

SEQ ID NO: 1416 - protein, 10 aa, Homo Sapiens
VLVGVALVAA

SEQ ID NO: 1417 - protein, 10 aa, Homo Sapiens
LVGVALVAAL

SEQ ID NO: 1418 - protein, 10 aa, Homo Sapiens
VALVAALVCF

SEQ ID NO: 1419 - protein, 10 aa, Homo Sapiens
ALVAALVCFL

SEQ ID NO: 1420 - protein, 10 aa, Homo Sapiens
LVAALVCFLL

SEQ ID NO: 1421 - protein, 10 aa, Homo Sapiens
VAALVCFLLL

SEQ ID NO: 1422 - protein, 10 aa, Homo Sapiens
AALVCFLLLA

SEQ ID NO: 1423 - protein, 10 aa, Homo Sapiens
ALVCFLLLAK

SEQ ID NO: 1424 - protein, 10 aa, Homo Sapiens
CFLLLAKTGR

SEQ ID NO: 1425 - protein, 10 aa, Homo Sapiens
FLLLAKTGRT

SEQ ID NO: 1426 - protein, 10 aa, Homo Sapiens
LLAKTGRTSI

SEQ ID NO: 1427 - protein, 10 aa, Homo Sapiens
AKTGRTSIQR

SEQ ID NO: 1428 - protein, 10 aa, Homo Sapiens
DLKEQQPQAL

SEQ ID NO: 1429 - protein, 10 aa, Homo Sapiens
GPSHSSAFSM

SEQ ID NO: 1430 - protein, 10 aa, Homo Sapiens
HSSAFSMSPL

SEQ ID NO: 1431 - protein, 10 aa, Homo Sapiens
SMSPLSTAQA

SEQ ID NO: 1432 - protein, 10 aa, Homo Sapiens
SPLSTAQAPL

SEQ ID NO: 1433 - protein, 10 aa, Homo Sapiens
TAQAPLPNPR

SEQ ID NO: 1434 - protein, 10 aa, Homo Sapiens
AQAPLPNPRT

SEQ ID NO: 1435 - protein, 10 aa, Homo Sapiens
APLPNPRTAA

SEQ ID NO: 1436 - protein, 10 aa, Homo Sapiens
LPNPRTAASI

SEQ ID NO: 1437 - protein, 10 aa, Homo Sapiens
RTAASIYEEL

SEQ ID NO: 1438 - protein, 10 aa, Homo Sapiens
TAASIYEELL

SEQ ID NO: 1439 - protein, 10 aa, Homo Sapiens
AASIYEELLK

SEQ ID NO: 1440 - protein, 10 aa, Homo Sapiens
EELLKHDTNI

SEQ ID NO: 1441 - protein, 10 aa, Homo Sapiens
ELLKHDTNIY

SEQ ID NO: 1442 - protein, 10 aa, Homo Sapiens
LLKHDTNIYC

SEQ ID NO: 1443 - protein, 10 aa, Homo Sapiens
TNIYCRMDHK

SEQ ID NO: 1444 - protein, 10 aa, Homo Sapiens
NIYCRMDHKA

SEQ ID NO: 1445 - protein, 11 aa, Homo Sapiens
SASPHRECIPW

SEQ ID NO: 1446 - protein, 11 aa, Homo Sapiens
RECIPWQGLLL

SEQ ID NO: 1447 - protein, 11 aa, Homo Sapiens
CIPWQGLLLTA

SEQ ID NO: 1448 - protein, 11 aa, Homo Sapiens
IPWQGLLLTAS

SEQ ID NO: 1449 - protein, 11 aa, Homo Sapiens
WQGLLLTASLL

SEQ ID NO: 1450 - protein, 11 aa, Homo Sapiens
GLLLTASLLNF

SEQ ID NO: 1451 - protein, 11 aa, Homo Sapiens
LLLTASLLNFW

SEQ ID NO: 1452 - protein, 11 aa, Homo Sapiens
SLLNFWNPPTT

SEQ ID NO: 1453 - protein, 11 aa, Homo Sapiens
LLNFWNPPTTA

SEQ ID NO: 1454 - protein, 11 aa, Homo Sapiens
LNFWNPPTTAK

SEQ ID NO: 1455 - protein, 11 aa, Homo Sapiens
NFWNPPTTAKL

SEQ ID NO: 1456 - protein, 11 aa, Homo Sapiens
PTTAKLTIESM

SEQ ID NO: 1457 - protein, 11 aa, Homo Sapiens
KLTIESMPLSV

SEQ ID NO: 1458 - protein, 11 aa, Homo Sapiens
LTIESMPLSVA

SEQ ID NO: 1459 - protein, 11 aa, Homo Sapiens
ESMPLSVAEGK

SEQ ID NO: 1460 - protein, 11 aa, Homo Sapiens
MPLSVAEGKEV

SEQ ID NO: 1461 - protein, 11 aa, Homo Sapiens
PLSVAEGKEVL

SEQ ID NO: 1462 - protein, 11 aa, Homo Sapiens
SVAEGKEVLLL

SEQ ID NO: 1463 - protein, 11 aa, Homo Sapiens
VAEGKEVLLLV

SEQ ID NO: 1464 - protein, 11 aa, Homo Sapiens
LLLVHNLPQHL

SEQ ID NO: 1465 - protein, 11 aa, Homo Sapiens
LLVHNLPQHLF

SEQ ID NO: 1466 - protein, 11 aa, Homo Sapiens
LPQHLFGYSWY

SEQ ID NO: 1467 - protein, 11 aa, Homo Sapiens
PQHLFGYSWYK

SEQ ID NO: 1468 - protein, 11 aa, Homo Sapiens
HLFGYSWYKGE

SEQ ID NO: 1469 - protein, 11 aa, Homo Sapiens
LFGYSWYKGER

SEQ ID NO: 1470 - protein, 11 aa, Homo Sapiens
FGYSWYKGERV

SEQ ID NO: 1471 - protein, 11 aa, Homo Sapiens
YKGERVDGNSL

SEQ ID NO: 1472 - protein, 11 aa, Homo Sapiens
GERVDGNSLIV

SEQ ID NO: 1473 - protein, 11 aa, Homo Sapiens
RVDGNSLIVGY

SEQ ID NO: 1474 - protein, 11 aa, Homo Sapiens
SLIVGYVIGTQ

SEQ ID NO: 1475 - protein, 11 aa, Homo Sapiens
GTQQATPGAAY

SEQ ID NO: 1476 - protein, 11 aa, Homo Sapiens
QATPGAAYSGR

SEQ ID NO: 1477 - protein, 11 aa, Homo Sapiens
GRETIYTNASL

SEQ ID NO: 1478 - protein, 11 aa, Homo Sapiens
RETIYTNASLL

SEQ ID NO: 1479 - protein, 11 aa, Homo Sapiens
ETIYTNASLLI

SEQ ID NO: 1480 - protein, 11 aa, Homo Sapiens
YTNASLLIQNV

SEQ ID NO: 1481 - protein, 11 aa, Homo Sapiens
LLIQNVTQNDI

SEQ ID NO: 1482 - protein, 11 aa, Homo Sapiens
IQNVTQNDIGF

SEQ ID NO: 1483 - protein, 11 aa, Homo Sapiens
VTQNDIGFYTL

SEQ ID NO: 1484 - protein, 11 aa, Homo Sapiens
DIGFYTLQVIK

SEQ ID NO: 1485 - protein, 11 aa, Homo Sapiens
FYTLQVIKSDL

SEQ ID NO: 1486 - protein, 11 aa, Homo Sapiens
YTLQVIKSDLV

SEQ ID NO: 1487 - protein, 11 aa, Homo Sapiens
FHVYQENAPGL

SEQ ID NO: 1488 - protein, 11 aa, Homo Sapiens
VYQENAPGLPV

SEQ ID NO: 1489 - protein, 11 aa, Homo Sapiens
ENAPGLPVGAV

SEQ ID NO: 1490 - protein, 11 aa, Homo Sapiens
GLPVGAVAGIV

SEQ ID NO: 1491 - protein, 11 aa, Homo Sapiens
LPVGAVAGIVT

SEQ ID NO: 1492 - protein, 11 aa, Homo Sapiens
AVAGIVTGVLV

SEQ ID NO: 1493 - protein, 11 aa, Homo Sapiens
GIVTGVLVGVA

SEQ ID NO: 1494 - protein, 11 aa, Homo Sapiens
IVTGVLVGVAL

SEQ ID NO: 1495 - protein, 11 aa, Homo Sapiens
VTGVLVGVALV

SEQ ID NO: 1496 - protein, 11 aa, Homo Sapiens
GVLVGVALVAA

SEQ ID NO: 1497 - protein, 11 aa, Homo Sapiens
VLVGVALVAAL

SEQ ID NO: 1498 - protein, 11 aa, Homo Sapiens
LVGVALVAALV

SEQ ID NO: 1499 - protein, 11 aa, Homo Sapiens
GVALVAALVCF

SEQ ID NO: 1500 - protein, 11 aa, Homo Sapiens
ALVAALVCFLL

SEQ ID NO: 1501 - protein, 11 aa, Homo Sapiens
LVAALVCFLLL

SEQ ID NO: 1502 - protein, 11 aa, Homo Sapiens
AALVCFLLLAK

SEQ ID NO: 1503 - protein, 11 aa, Homo Sapiens
ALVCFLLLAKT

SEQ ID NO: 1504 - protein, 11 aa, Homo Sapiens
LLLAKTGRTSI

SEQ ID NO: 1505 - protein, 11 aa, Homo Sapiens
LAKTGRTSIQR

SEQ ID NO: 1506 - protein, 11 aa, Homo Sapiens
TGRTSIQRDLK

SEQ ID NO: 1507 - protein, 11 aa, Homo Sapiens
DLKEQQPQALA

SEQ ID NO: 1508 - protein, 11 aa, Homo Sapiens
ALAPGRGPSHS

SEQ ID NO: 1509 - protein, 11 aa, Homo Sapiens
APGRGPSHSSA

SEQ ID NO: 1510 - protein, 11 aa, Homo Sapiens
SHSSAFSMSPL

SEQ ID NO: 1511 - protein, 11 aa, Homo Sapiens
FSMSPLSTAQA

SEQ ID NO: 1512 - protein, 11 aa, Homo Sapiens
SMSPLSTAQAP

SEQ ID NO: 1513 - protein, 11 aa, Homo Sapiens
MSPLSTAQAPL

SEQ ID NO: 1514 - protein, 11 aa, Homo Sapiens
STAQAPLPNPR

SEQ ID NO: 1515 - protein, 11 aa, Homo Sapiens
AQAPLPNPRTA

SEQ ID NO: 1516 - protein, 11 aa, Homo Sapiens
APLPNPRTAAS

SEQ ID NO: 1517 - protein, 11 aa, Homo Sapiens
PLPNPRTAASI

SEQ ID NO: 1518 - protein, 11 aa, Homo Sapiens
LPNPRTAASIY

SEQ ID NO: 1519 - protein, 11 aa, Homo Sapiens
RTAASIYEELL

SEQ ID NO: 1520 - protein, 11 aa, Homo Sapiens
TAASIYEELLK

SEQ ID NO: 1521 - protein, 11 aa, Homo Sapiens
SIYEELLKHDT

SEQ ID NO: 1522 - protein, 11 aa, Homo Sapiens
YEELLKHDTNI

SEQ ID NO: 1523 - protein, 11 aa, Homo Sapiens
EELLKHDTNIY

SEQ ID NO: 1524 - protein, 11 aa, Homo Sapiens
ELLKHDTNIYC

SEQ ID NO: 1525 - protein, 11 aa, Homo Sapiens
LLKHDTNIYCR

SEQ ID NO: 1526 - protein, 11 aa, Homo Sapiens
DTNIYCRMDHK

SEQ ID NO: 1527 - protein, 11 aa, Homo Sapiens
IYCRMDHKAEV

SEQ ID NO: 1528 - protein, 526 aa, Homo Sapiens
MGHLSAPLHRVRVPWQGLLLTASLLTFWNPPTTAQLTTESMPFNVAEGKEVLLLVHNLPQQLFGYSWYKGERVDGNRQIVGYAIGTQQATPGPANSGRETIYPNASLLIQNVTQNDTGFYTLQVIKSDLVNEEATGQFHVYPELPKPSISSNNSNPVEDKDAVAFTCEPETQDTTYLWWINNQSLPVSPRLQLSNGNRTLTLLSVTRNDTGPYECEIQNPVSANRSDPVTLNVTYGPDTPTISPSDTYYRPGANLSLSCYAASNPPAQYSWLINGTFQQSTQELFIPNITVNNSGSYTCHANNSVTGCNRTTVKTIIVTELSPVVAKPQIKASKTTVTGDKDSVNLTCSTNDTGISIRWFFKNQSLPSSERMKLSQGNTTLSINPVKREDAGTYWCEVFNPISKNQSDPIMLNVNYNALPQENGLSPGAIAGIVIGVVALVALIAVALACFLHFGKTGRASDQRDLTEHKPSVSNHTQDHSNDPPNKMNEVTYSTLNFEAQQPTQPTSASPSLTATEIIYSEVKKQ

SEQ ID NO: 1529 - protein, 8 aa, Homo Sapiens
HLSAPLHR

SEQ ID NO: 1530 - protein, 8 aa, Homo Sapiens
LSAPLHRV

SEQ ID NO: 1531 - protein, 8 aa, Homo Sapiens
SAPLHRVR

SEQ ID NO: 1532 - protein, 8 aa, Homo Sapiens
APLHRVRV

SEQ ID NO: 1533 - protein, 8 aa, Homo Sapiens
RVPWQGLL

SEQ ID NO: 1534 - protein, 8 aa, Homo Sapiens
VPWQGLLL

SEQ ID NO: 1535 - protein, 8 aa, Homo Sapiens
WQGLLLTA

SEQ ID NO: 1536 - protein, 8 aa, Homo Sapiens
GLLLTASL

SEQ ID NO: 1537 - protein, 8 aa, Homo Sapiens
LLLTASLL

SEQ ID NO: 1538 - protein, 8 aa, Homo Sapiens
LLTASLLT

SEQ ID NO: 1539 - protein, 8 aa, Homo Sapiens
LTASLLTF

SEQ ID NO: 1540 - protein, 8 aa, Homo Sapiens
TASLLTFW

SEQ ID NO: 1541 - protein, 8 aa, Homo Sapiens
SLLTFWNP

SEQ ID NO: 1542 - protein, 8 aa, Homo Sapiens
LTFWNPPT

SEQ ID NO: 1543 - protein, 8 aa, Homo Sapiens
AQLTTESM

SEQ ID NO: 1544 - protein, 8 aa, Homo Sapiens
LTTESMPF

SEQ ID NO: 1545 - protein, 8 aa, Homo Sapiens
ESMPFNVA

SEQ ID NO: 1546 - protein, 8 aa, Homo Sapiens
MPFNVAEG

SEQ ID NO: 1547 - protein, 8 aa, Homo Sapiens
NVAEGKEV

SEQ ID NO: 1548 - protein, 8 aa, Homo Sapiens
AEGKEVLL

SEQ ID NO: 1549 - protein, 8 aa, Homo Sapiens
VLLLVHNL

SEQ ID NO: 1550 - protein, 8 aa, Homo Sapiens
LLVHNLPQ

SEQ ID NO: 1551 - protein, 8 aa, Homo Sapiens
LPQQLFGY

SEQ ID NO: 1552 - protein, 8 aa, Homo Sapiens
QLFGYSWY

SEQ ID NO: 1553 - protein, 8 aa, Homo Sapiens
LFGYSWYK

SEQ ID NO: 1554 - protein, 8 aa, Homo Sapiens
YSWYKGER

SEQ ID NO: 1555 - protein, 8 aa, Homo Sapiens
SWYKGERV

SEQ ID NO: 1556 - protein, 8 aa, Homo Sapiens
RVDGNRQI

SEQ ID NO: 1557 - protein, 8 aa, Homo Sapiens
RQIVGYAI

SEQ ID NO: 1558 - protein, 8 aa, Homo Sapiens
YAIGTQQA

SEQ ID NO: 1559 - protein, 8 aa, Homo Sapiens
ETIYPNAS

SEQ ID NO: 1560 - protein, 8 aa, Homo Sapiens
TIYPNASL

SEQ ID NO: 1561 - protein, 8 aa, Homo Sapiens
IYPNASLL

SEQ ID NO: 1562 - protein, 8 aa, Homo Sapiens
YPNASLLI

SEQ ID NO: 1563 - protein, 8 aa, Homo Sapiens
SLLIQNVT

SEQ ID NO: 1564 - protein, 8 aa, Homo Sapiens
LLIQNVTQ

SEQ ID NO: 1565 - protein, 8 aa, Homo Sapiens
VTQNDTGF

SEQ ID NO: 1566 - protein, 8 aa, Homo Sapiens
TQNDTGFY

SEQ ID NO: 1567 - protein, 8 aa, Homo Sapiens
TGFYTLQV

SEQ ID NO: 1568 - protein, 8 aa, Homo Sapiens
FYTLQVIK

SEQ ID NO: 1569 - protein, 8 aa, Homo Sapiens
QVIKSDLV

SEQ ID NO: 1570 - protein, 8 aa, Homo Sapiens
EATGQFHV

SEQ ID NO: 1571 - protein, 8 aa, Homo Sapiens
ATGQFHVY

SEQ ID NO: 1572 - protein, 8 aa, Homo Sapiens
GQFHVYPE

SEQ ID NO: 1573 - protein, 8 aa, Homo Sapiens
HVYPELPK

SEQ ID NO: 1574 - protein, 8 aa, Homo Sapiens
YPELPKPS

SEQ ID NO: 1575 - protein, 8 aa, Homo Sapiens
SSNNSNPV

SEQ ID NO: 1576 - protein, 8 aa, Homo Sapiens
NSNPVEDK

SEQ ID NO: 1577 - protein, 8 aa, Homo Sapiens
PVEDKDAV

SEQ ID NO: 1578 - protein, 8 aa, Homo Sapiens
EPETQDTT

SEQ ID NO: 1579 - protein, 8 aa, Homo Sapiens
ETQDTTYL

SEQ ID NO: 1580 - protein, 8 aa, Homo Sapiens
DTTYLWWI

SEQ ID NO: 1581 - protein, 8 aa, Homo Sapiens
YLWWINNQ

SEQ ID NO: 1582 - protein, 8 aa, Homo Sapiens
WWINNQSL

SEQ ID NO: 1583 - protein, 8 aa, Homo Sapiens
QSLPVSPR

SEQ ID NO: 1584 - protein, 8 aa, Homo Sapiens
SLPVSPRL

SEQ ID NO: 1585 - protein, 8 aa, Homo Sapiens
PVSPRLQL

SEQ ID NO: 1586 - protein, 8 aa, Homo Sapiens
SPRLQLSN

SEQ ID NO: 1587 - protein, 8 aa, Homo Sapiens
LQLSNGNR

SEQ ID NO: 1588 - protein, 8 aa, Homo Sapiens
RTLTLLSV

SEQ ID NO: 1589 - protein, 8 aa, Homo Sapiens
LTLLSVTR

SEQ ID NO: 1590 - protein, 8 aa, Homo Sapiens
ECEIQNPV

SEQ ID NO: 1591 - protein, 8 aa, Homo Sapiens
SANRSDPV

SEQ ID NO: 1592 - protein, 8 aa, Homo Sapiens
NRSDPVTL

SEQ ID NO: 1593 - protein, 8 aa, Homo Sapiens
DPVTLNVT

SEQ ID NO: 1594 - protein, 8 aa, Homo Sapiens
PVTLNVTY

SEQ ID NO: 1595 - protein, 8 aa, Homo Sapiens
DTPTISPS

SEQ ID NO: 1596 - protein, 8 aa, Homo Sapiens
TISPSDTY

SEQ ID NO: 1597 - protein, 8 aa, Homo Sapiens
ISPSDTYY

SEQ ID NO: 1598 - protein, 8 aa, Homo Sapiens
SPSDTYYR

SEQ ID NO: 1599 - protein, 8 aa, Homo Sapiens
DTYYRPGA

SEQ ID NO: 1600 - protein, 8 aa, Homo Sapiens
YYRPGANL

SEQ ID NO: 1601 - protein, 8 aa, Homo Sapiens
RPGANLSL

SEQ ID NO: 1602 - protein, 8 aa, Homo Sapiens
NLSLSCYA

SEQ ID NO: 1603 - protein, 8 aa, Homo Sapiens
SLSCYAAS

SEQ ID NO: 1604 - protein, 8 aa, Homo Sapiens
YAASNPPA

SEQ ID NO: 1605 - protein, 8 aa, Homo Sapiens
NPPAQYSW

SEQ ID NO: 1606 - protein, 8 aa, Homo Sapiens
SWLINGTF

SEQ ID NO: 1607 - protein, 8 aa, Homo Sapiens
WLINGTFQ

SEQ ID NO: 1608 - protein, 8 aa, Homo Sapiens
LINGTFQQ

SEQ ID NO: 1609 - protein, 8 aa, Homo Sapiens
FQQSTQEL

SEQ ID NO: 1610 - protein, 8 aa, Homo Sapiens
QQSTQELF

SEQ ID NO: 1611 - protein, 8 aa, Homo Sapiens
QELFIPNI

SEQ ID NO: 1612 - protein, 8 aa, Homo Sapiens
LFIPNITV

SEQ ID NO: 1613 - protein, 8 aa, Homo Sapiens
TVNNSGSY

SEQ ID NO: 1614 - protein, 8 aa, Homo Sapiens
TCHANNSV

SEQ ID NO: 1615 - protein, 8 aa, Homo Sapiens
NSVTGCNR

SEQ ID NO: 1616 - protein, 8 aa, Homo Sapiens
GCNRTTVK

SEQ ID NO: 1617 - protein, 8 aa, Homo Sapiens
TTVKTIIV

SEQ ID NO: 1618 - protein, 8 aa, Homo Sapiens
KTIIVTEL

SEQ ID NO: 1619 - protein, 8 aa, Homo Sapiens
IVTELSPV

SEQ ID NO: 1620 - protein, 8 aa, Homo Sapiens
ELSPVVAK

SEQ ID NO: 1621 - protein, 8 aa, Homo Sapiens
VVAKPQIK

SEQ ID NO: 1622 - protein, 8 aa, Homo Sapiens
KTTVTGDK

SEQ ID NO: 1623 - protein, 8 aa, Homo Sapiens
VTGDKDSV

SEQ ID NO: 1624 - protein, 8 aa, Homo Sapiens
NDTGISIR

SEQ ID NO: 1625 - protein, 8 aa, Homo Sapiens
GISIRWFF

SEQ ID NO: 1626 - protein, 8 aa, Homo Sapiens
ISIRWFFK

SEQ ID NO: 1627 - protein, 8 aa, Homo Sapiens
WFFKNQSL

SEQ ID NO: 1628 - protein, 8 aa, Homo Sapiens
QSLPSSER

SEQ ID NO: 1629 - protein, 8 aa, Homo Sapiens
SLPSSERM

SEQ ID NO: 1630 - protein, 8 aa, Homo Sapiens
KLSQGNTT

SEQ ID NO: 1631 - protein, 8 aa, Homo Sapiens
TTLSINPV

SEQ ID NO: 1632 - protein, 8 aa, Homo Sapiens
TLSINPVK

SEQ ID NO: 1633 - protein, 8 aa, Homo Sapiens
LSINPVKR

SEQ ID NO: 1634 - protein, 8 aa, Homo Sapiens
GTYWCEVF

SEQ ID NO: 1635 - protein, 8 aa, Homo Sapiens
EVFNPISK

SEQ ID NO: 1636 - protein, 8 aa, Homo Sapiens
NQSDPIML

SEQ ID NO: 1637 - protein, 8 aa, Homo Sapiens
PIMLNVNY

SEQ ID NO: 1638 - protein, 8 aa, Homo Sapiens
MLNVNYNA

SEQ ID NO: 1639 - protein, 8 aa, Homo Sapiens
ALPQENGL

SEQ ID NO: 1640 - protein, 8 aa, Homo Sapiens
GLSPGAIA

SEQ ID NO: 1641 - protein, 8 aa, Homo Sapiens
GAIAGIVI

SEQ ID NO: 1642 - protein, 8 aa, Homo Sapiens
IVIGVVAL

SEQ ID NO: 1643 - protein, 8 aa, Homo Sapiens
VIGVVALV

SEQ ID NO: 1644 - protein, 8 aa, Homo Sapiens
GVVALVAL

SEQ ID NO: 1645 - protein, 8 aa, Homo Sapiens
VVALVALI

SEQ ID NO: 1646 - protein, 8 aa, Homo Sapiens
ALVALIAV

SEQ ID NO: 1647 - protein, 8 aa, Homo Sapiens
LVALIAVA

SEQ ID NO: 1648 - protein, 8 aa, Homo Sapiens
VALIAVAL

SEQ ID NO: 1649 - protein, 8 aa, Homo Sapiens
ALIAVALA

SEQ ID NO: 1650 - protein, 8 aa, Homo Sapiens
IAVALACF

SEQ ID NO: 1651 - protein, 8 aa, Homo Sapiens
AVALACFL

SEQ ID NO: 1652 - protein, 8 aa, Homo Sapiens
ALACFLHF

SEQ ID NO: 1653 - protein, 8 aa, Homo Sapiens
ACFLHFGK

SEQ ID NO: 1654 - protein, 8 aa, Homo Sapiens
KPSVSNHT

SEQ ID NO: 1655 - protein, 8 aa, Homo Sapiens
HSNDPPNK

SEQ ID NO: 1656 - protein, 8 aa, Homo Sapiens
KMNEVTYS

SEQ ID NO: 1657 - protein, 8 aa, Homo Sapiens
NEVTYSTL

SEQ ID NO: 1658 - protein, 8 aa, Homo Sapiens
VTYSTLNF

SEQ ID NO: 1659 - protein, 8 aa, Homo Sapiens
YSTLNFEA

SEQ ID NO: 1660 - protein, 8 aa, Homo Sapiens
AQQPTQPT

SEQ ID NO: 1661 - protein, 8 aa, Homo Sapiens
QPTQPTSA

SEQ ID NO: 1662 - protein, 8 aa, Homo Sapiens
SASPSLTA

SEQ ID NO: 1663 - protein, 8 aa, Homo Sapiens
SLTATEII

SEQ ID NO: 1664 - protein, 8 aa, Homo Sapiens
LTATEIIY

SEQ ID NO: 1665 - protein, 8 aa, Homo Sapiens
TEIIYSEV

SEQ ID NO: 1666 - protein, 8 aa, Homo Sapiens
EIIYSEVK

SEQ ID NO: 1667 - protein, 8 aa, Homo Sapiens
IIYSEVKK

SEQ ID NO: 1668 - protein, 9 aa, Homo Sapiens
HLSAPLHRV

SEQ ID NO: 1669 - protein, 9 aa, Homo Sapiens
LSAPLHRVR

SEQ ID NO: 1670 - protein, 9 aa, Homo Sapiens
SAPLHRVRV

SEQ ID NO: 1671 - protein, 9 aa, Homo Sapiens
RVRVPWQGL

SEQ ID NO: 1672 - protein, 9 aa, Homo Sapiens
RVPWQGLLL

SEQ ID NO: 1673 - protein, 9 aa, Homo Sapiens
VPWQGLLLT

SEQ ID NO: 1674 - protein, 9 aa, Homo Sapiens
WQGLLLTAS

SEQ ID NO: 1675 - protein, 9 aa, Homo Sapiens
GLLLTASLL

SEQ ID NO: 1676 - protein, 9 aa, Homo Sapiens
LLLTASLLT

SEQ ID NO: 1677 - protein, 9 aa, Homo Sapiens
LLTASLLTF

SEQ ID NO: 1678 - protein, 9 aa, Homo Sapiens
LTASLLTFW

SEQ ID NO: 1679 - protein, 9 aa, Homo Sapiens
LLTFWNPPT

SEQ ID NO: 1680 - protein, 9 aa, Homo Sapiens
LTFWNPPTT

SEQ ID NO: 1681 - protein, 9 aa, Homo Sapiens
TTAQLTTES

SEQ ID NO: 1682 - protein, 9 aa, Homo Sapiens
TAQLTTESM

SEQ ID NO: 1683 - protein, 9 aa, Homo Sapiens
QLTTESMPF

SEQ ID NO: 1684 - protein, 9 aa, Homo Sapiens
TTESMPFNV

SEQ ID NO: 1685 - protein, 9 aa, Homo Sapiens
MPFNVAEGK

SEQ ID NO: 1686 - protein, 9 aa, Homo Sapiens
NVAEGKEVL

SEQ ID NO: 1687 - protein, 9 aa, Homo Sapiens
AEGKEVLLL

SEQ ID NO: 1688 - protein, 9 aa, Homo Sapiens
EVLLLVHNL

SEQ ID NO: 1689 - protein, 9 aa, Homo Sapiens
LLLVHNLPQ

SEQ ID NO: 1690 - protein, 9 aa, Homo Sapiens
LLVHNLPQQ

SEQ ID NO: 1691 - protein, 9 aa, Homo Sapiens
LVHNLPQQL

SEQ ID NO: 1692 - protein, 9 aa, Homo Sapiens
NLPQQLFGY

SEQ ID NO: 1693 - protein, 9 aa, Homo Sapiens
LPQQLFGYS

SEQ ID NO: 1694 - protein, 9 aa, Homo Sapiens
QQLFGYSWY

SEQ ID NO: 1695 - protein, 9 aa, Homo Sapiens
QLFGYSWYK

SEQ ID NO: 1696 - protein, 9 aa, Homo Sapiens
GYSWYKGER

SEQ ID NO: 1697 - protein, 9 aa, Homo Sapiens
YSWYKGERV

SEQ ID NO: 1698 - protein, 9 aa, Homo Sapiens
RVDGNRQIV

SEQ ID NO: 1699 - protein, 9 aa, Homo Sapiens
DGNRQIVGY

SEQ ID NO: 1700 - protein, 9 aa, Homo Sapiens
YAIGTQQAT

SEQ ID NO: 1701 - protein, 9 aa, Homo Sapiens
GPANSGRET

SEQ ID NO: 1702 - protein, 9 aa, Homo Sapiens
RETIYPNAS

SEQ ID NO: 1703 - protein, 9 aa, Homo Sapiens
ETIYPNASL

SEQ ID NO: 1704 - protein, 9 aa, Homo Sapiens
TIYPNASLL

SEQ ID NO: 1705 - protein, 9 aa, Homo Sapiens
IYPNASLLI

SEQ ID NO: 1706 - protein, 9 aa, Homo Sapiens
YPNASLLIQ

SEQ ID NO: 1707 - protein, 9 aa, Homo Sapiens
NASLLIQNV

SEQ ID NO: 1708 - protein, 9 aa, Homo Sapiens
SLLIQNVTQ

SEQ ID NO: 1709 - protein, 9 aa, Homo Sapiens
NVTQNDTGF

SEQ ID NO: 1710 - protein, 9 aa, Homo Sapiens
VTQNDTGFY

SEQ ID NO: 1711 - protein, 9 aa, Homo Sapiens
TQNDTGFYT

SEQ ID NO: 1712 - protein, 9 aa, Homo Sapiens
DTGFYTLQV

SEQ ID NO: 1713 - protein, 9 aa, Homo Sapiens
TGFYTLQVI

SEQ ID NO: 1714 - protein, 9 aa, Homo Sapiens
GFYTLQVIK

SEQ ID NO: 1715 - protein, 9 aa, Homo Sapiens
LQVIKSDLV

SEQ ID NO: 1716 - protein, 9 aa, Homo Sapiens
EEATGQFHV

SEQ ID NO: 1717 - protein, 9 aa, Homo Sapiens
EATGQFHVY

SEQ ID NO: 1718 - protein, 9 aa, Homo Sapiens
GQFHVYPEL

SEQ ID NO: 1719 - protein, 9 aa, Homo Sapiens
YPELPKPSI

SEQ ID NO: 1720 - protein, 9 aa, Homo Sapiens
ISSNNSNPV

SEQ ID NO: 1721 - protein, 9 aa, Homo Sapiens
NPVEDKDAV

SEQ ID NO: 1722 - protein, 9 aa, Homo Sapiens
VEDKDAVAF

SEQ ID NO: 1723 - protein, 9 aa, Homo Sapiens
EPETQDTTY

SEQ ID NO: 1724 - protein, 9 aa, Homo Sapiens
PETQDTTYL

SEQ ID NO: 1725 - protein, 9 aa, Homo Sapiens
ETQDTTYLW

SEQ ID NO: 1726 - protein, 9 aa, Homo Sapiens
TTYLWWINN

SEQ ID NO: 1727 - protein, 9 aa, Homo Sapiens
YLWWINNQS

SEQ ID NO: 1728 - protein, 9 aa, Homo Sapiens
LWWINNQSL

SEQ ID NO: 1729 - protein, 9 aa, Homo Sapiens
WINNQSLPV

SEQ ID NO: 1730 - protein, 9 aa, Homo Sapiens
NQSLPVSPR

SEQ ID NO: 1731 - protein, 9 aa, Homo Sapiens
LPVSPRLQL

SEQ ID NO: 1732 - protein, 9 aa, Homo Sapiens
RLQLSNGNR

SEQ ID NO: 1733 - protein, 9 aa, Homo Sapiens
QLSNGNRTL

SEQ ID NO: 1734 - protein, 9 aa, Homo Sapiens
TLTLLSVTR

SEQ ID NO: 1735 - protein, 9 aa, Homo Sapiens
VTRNDTGPY

SEQ ID NO: 1736 - protein, 9 aa, Homo Sapiens
DTGPYECEI

SEQ ID NO: 1737 - protein, 9 aa, Homo Sapiens
YECEIQNPV

SEQ ID NO: 1738 - protein, 9 aa, Homo Sapiens
IQNPVSANR

SEQ ID NO: 1739 - protein, 9 aa, Homo Sapiens
VSANRSDPV

SEQ ID NO: 1740 - protein, 9 aa, Homo Sapiens
RSDPVTLNV

SEQ ID NO: 1741 - protein, 9 aa, Homo Sapiens
DPVTLNVTY

SEQ ID NO: 1742 - protein, 9 aa, Homo Sapiens
TYGPDTPTI

SEQ ID NO: 1743 - protein, 9 aa, Homo Sapiens
PTISPSDTY

SEQ ID NO: 1744 - protein, 9 aa, Homo Sapiens
TISPSDTYY

SEQ ID NO: 1745 - protein, 9 aa, Homo Sapiens
ISPSDTYYR

SEQ ID NO: 1746 - protein, 9 aa, Homo Sapiens
TYYRPGANL

SEQ ID NO: 1747 - protein, 9 aa, Homo Sapiens
YYRPGANLS

SEQ ID NO: 1748 - protein, 9 aa, Homo Sapiens
YRPGANLSL

SEQ ID NO: 1749 - protein, 9 aa, Homo Sapiens
NLSLSCYAA

SEQ ID NO: 1750 - protein, 9 aa, Homo Sapiens
PPAQYSWLI

SEQ ID NO: 1751 - protein, 9 aa, Homo Sapiens
YSWLINGTF

SEQ ID NO: 1752 - protein, 9 aa, Homo Sapiens
WLINGTFQQ

SEQ ID NO: 1753 - protein, 9 aa, Homo Sapiens
TFQQSTQEL

SEQ ID NO: 1754 - protein, 9 aa, Homo Sapiens
FQQSTQELF

SEQ ID NO: 1755 - protein, 9 aa, Homo Sapiens
ELFIPNITV

SEQ ID NO: 1756 - protein, 9 aa, Homo Sapiens
IPNITVNNS

SEQ ID NO: 1757 - protein, 9 aa, Homo Sapiens
ITVNNSGSY

SEQ ID NO: 1758 - protein, 9 aa, Homo Sapiens
YTCHANNSV

SEQ ID NO: 1759 - protein, 9 aa, Homo Sapiens
VTGCNRTTV

SEQ ID NO: 1760 - protein, 9 aa, Homo Sapiens
IIVTELSPV

SEQ ID NO: 1761 - protein, 9 aa, Homo Sapiens
IVTELSPVV

SEQ ID NO: 1762 - protein, 9 aa, Homo Sapiens
SPVVAKPQI

SEQ ID NO: 1763 - protein, 9 aa, Homo Sapiens
KPQIKASKT

SEQ ID NO: 1764 - protein, 9 aa, Homo Sapiens
QIKASKTTV

SEQ ID NO: 1765 - protein, 9 aa, Homo Sapiens
TVTGDKDSV

SEQ ID NO: 1766 - protein, 9 aa, Homo Sapiens
STNDTGISI

SEQ ID NO: 1767 - protein, 9 aa, Homo Sapiens
DTGISIRWF

SEQ ID NO: 1768 - protein, 9 aa, Homo Sapiens
TGISIRWFF

SEQ ID NO: 1769 - protein, 9 aa, Homo Sapiens
GISIRWFFK

SEQ ID NO: 1770 - protein, 9 aa, Homo Sapiens
RWFFKNQSL

SEQ ID NO: 1771 - protein, 9 aa, Homo Sapiens
NQSLPSSER

SEQ ID NO: 1772 - protein, 9 aa, Homo Sapiens
LPSSERMKL

SEQ ID NO: 1773 - protein, 9 aa, Homo Sapiens
KLSQGNTTL

SEQ ID NO: 1774 - protein, 9 aa, Homo Sapiens
SQGNTTLSI

SEQ ID NO: 1775 - protein, 9 aa, Homo Sapiens
NTTLSINPV

SEQ ID NO: 1776 - protein, 9 aa, Homo Sapiens
TTLSINPVK

SEQ ID NO: 1777 - protein, 9 aa, Homo Sapiens
TLSINPVKR

SEQ ID NO: 1778 - protein, 9 aa, Homo Sapiens
VKREDAGTY

SEQ ID NO: 1779 - protein, 9 aa, Homo Sapiens
REDAGTYWC

SEQ ID NO: 1780 - protein, 9 aa, Homo Sapiens
DAGTYWCEV

SEQ ID NO: 1781 - protein, 9 aa, Homo Sapiens
YWCEVFNPI

SEQ ID NO: 1782 - protein, 9 aa, Homo Sapiens
QSDPIMLNV

SEQ ID NO: 1783 - protein, 9 aa, Homo Sapiens
DPIMLNVNY

SEQ ID NO: 1784 - protein, 9 aa, Homo Sapiens
IMLNVNYNA

SEQ ID NO: 1785 - protein, 9 aa, Homo Sapiens
MLNVNYNAL

SEQ ID NO: 1786 - protein, 9 aa, Homo Sapiens
NALPQENGL

SEQ ID NO: 1787 - protein, 9 aa, Homo Sapiens
GLSPGAIAG

SEQ ID NO: 1788 - protein, 9 aa, Homo Sapiens
LSPGAIAGI

SEQ ID NO: 1789 - protein, 9 aa, Homo Sapiens
SPGAIAGIV

SEQ ID NO: 1790 - protein, 9 aa, Homo Sapiens
AIAGIVIGV

SEQ ID NO: 1791 - protein, 9 aa, Homo Sapiens
GIVIGVVAL

SEQ ID NO: 1792 - protein, 9 aa, Homo Sapiens
IVIGVVALV

SEQ ID NO: 1793 - protein, 9 aa, Homo Sapiens
GVVALVALI

SEQ ID NO: 1794 - protein, 9 aa, Homo Sapiens
VALVALIAV

SEQ ID NO: 1795 - protein, 9 aa, Homo Sapiens
ALVALIAVA

SEQ ID NO: 1796 - protein, 9 aa, Homo Sapiens
LVALIAVAL

SEQ ID NO: 1797 - protein, 9 aa, Homo Sapiens
ALIAVALAC

SEQ ID NO: 1798 - protein, 9 aa, Homo Sapiens
LIAVALACF

SEQ ID NO: 1799 - protein, 9 aa, Homo Sapiens
IAVALACFL

SEQ ID NO: 1800 - protein, 9 aa, Homo Sapiens
AVALACFLH

SEQ ID NO: 1801 - protein, 9 aa, Homo Sapiens
VALACFLHF

SEQ ID NO: 1802 - protein, 9 aa, Homo Sapiens
ALACFLHFG

SEQ ID NO: 1803 - protein, 9 aa, Homo Sapiens
LACFLHFGK

SEQ ID NO: 1804 - protein, 9 aa, Homo Sapiens
FLHFGKTGR

SEQ ID NO: 1805 - protein, 9 aa, Homo Sapiens
KTGRASDQR

SEQ ID NO: 1806 - protein, 9 aa, Homo Sapiens
DQRDLTEHK

SEQ ID NO: 1807 - protein, 9 aa, Homo Sapiens
DLTEHKPSV

SEQ ID NO: 1808 - protein, 9 aa, Homo Sapiens
KMNEVTYST

SEQ ID NO: 1809 - protein, 9 aa, Homo Sapiens
EVTYSTLNF

SEQ ID NO: 1810 - protein, 9 aa, Homo Sapiens
QPTQPTSAS

SEQ ID NO: 1811 - protein, 9 aa, Homo Sapiens
QPTSASPSL

SEQ ID NO: 1812 - protein, 9 aa, Homo Sapiens
SASPSLTAT

SEQ ID NO: 1813 - protein, 9 aa, Homo Sapiens
SPSLTATEI

SEQ ID NO: 1814 - protein, 9 aa, Homo Sapiens
SLTATEIIY

SEQ ID NO: 1815 - protein, 9 aa, Homo Sapiens
ATEIIYSEV

SEQ ID NO: 1816 - protein, 9 aa, Homo Sapiens
EIIYSEVKK

SEQ ID NO: 1817 - protein, 10 aa, Homo Sapiens
MGHLSAPLHR

SEQ ID NO: 1818 - protein, 10 aa, Homo Sapiens
HLSAPLHRVR

SEQ ID NO: 1819 - protein, 10 aa, Homo Sapiens
LSAPLHRVRV

SEQ ID NO: 1820 - protein, 10 aa, Homo Sapiens
APLHRVRVPW

SEQ ID NO: 1821 - protein, 10 aa, Homo Sapiens
PLHRVRVPWQ

SEQ ID NO: 1822 - protein, 10 aa, Homo Sapiens
RVRVPWQGLL

SEQ ID NO: 1823 - protein, 10 aa, Homo Sapiens
VPWQGLLLTA

SEQ ID NO: 1824 - protein, 10 aa, Homo Sapiens
WQGLLLTASL

SEQ ID NO: 1825 - protein, 10 aa, Homo Sapiens
GLLLTASLLT

SEQ ID NO: 1826 - protein, 10 aa, Homo Sapiens
LLLTASLLTF

SEQ ID NO: 1827 - protein, 10 aa, Homo Sapiens
LLTASLLTFW

SEQ ID NO: 1828 - protein, 10 aa, Homo Sapiens
SLLTFWNPPT

SEQ ID NO: 1829 - protein, 10 aa, Homo Sapiens
LLTFWNPPTT

SEQ ID NO: 1830 - protein, 10 aa, Homo Sapiens
LTFWNPPTTA

SEQ ID NO: 1831 - protein, 10 aa, Homo Sapiens
FWNPPTTAQL

SEQ ID NO: 1832 - protein, 10 aa, Homo Sapiens
TTAQLTTESM

SEQ ID NO: 1833 - protein, 10 aa, Homo Sapiens
AQLTTESMPF

SEQ ID NO: 1834 - protein, 10 aa, Homo Sapiens
LTTESMPFNV

SEQ ID NO: 1835 - protein, 10 aa, Homo Sapiens
SMPFNVAEGK

SEQ ID NO: 1836 - protein, 10 aa, Homo Sapiens
MPFNVAEGKE

SEQ ID NO: 1837 - protein, 10 aa, Homo Sapiens
NVAEGKEVLL

SEQ ID NO: 1838 - protein, 10 aa, Homo Sapiens
AEGKEVLLLV

SEQ ID NO: 1839 - protein, 10 aa, Homo Sapiens
KEVLLLVHNL

SEQ ID NO: 1840 - protein, 10 aa, Homo Sapiens
VLLLVHNLPQ

SEQ ID NO: 1841 - protein, 10 aa, Homo Sapiens
LLLVHNLPQQ

SEQ ID NO: 1842 - protein, 10 aa, Homo Sapiens
LLVHNLPQQL

SEQ ID NO: 1843 - protein, 10 aa, Homo Sapiens
LPQQLFGYSW

SEQ ID NO: 1844 - protein, 10 aa, Homo Sapiens
PQQLFGYSWY

SEQ ID NO: 1845 - protein, 10 aa, Homo Sapiens
QQLFGYSWYK

SEQ ID NO: 1846 - protein, 10 aa, Homo Sapiens
QLFGYSWYKG

SEQ ID NO: 1847 - protein, 10 aa, Homo Sapiens
FGYSWYKGER

SEQ ID NO: 1848 - protein, 10 aa, Homo Sapiens
RQIVGYAIGT

SEQ ID NO: 1849 - protein, 10 aa, Homo Sapiens
ATPGPANSGR

SEQ ID NO: 1850 - protein, 10 aa, Homo Sapiens
GPANSGRETI

SEQ ID NO: 1851 - protein, 10 aa, Homo Sapiens
RETIYPNASL

SEQ ID NO: 1852 - protein, 10 aa, Homo Sapiens
ETIYPNASLL

SEQ ID NO: 1853 - protein, 10 aa, Homo Sapiens
TIYPNASLLI

SEQ ID NO: 1854 - protein, 10 aa, Homo Sapiens
NVTQNDTGFY

SEQ ID NO: 1855 - protein, 10 aa, Homo Sapiens
TQNDTGFYTL

SEQ ID NO: 1856 - protein, 10 aa, Homo Sapiens
TGFYTLQVIK

SEQ ID NO: 1857 - protein, 10 aa, Homo Sapiens
YTLQVIKSDL

SEQ ID NO: 1858 - protein, 10 aa, Homo Sapiens
TLQVIKSDLV

SEQ ID NO: 1859 - protein, 10 aa, Homo Sapiens
LVNEEATGQF

SEQ ID NO: 1860 - protein, 10 aa, Homo Sapiens
EEATGQFHVY

SEQ ID NO: 1861 - protein, 10 aa, Homo Sapiens
QFHVYPELPK

SEQ ID NO: 1862 - protein, 10 aa, Homo Sapiens
VYPELPKPSI

SEQ ID NO: 1863 - protein, 10 aa, Homo Sapiens
SISSNNSNPV

SEQ ID NO: 1864 - protein, 10 aa, Homo Sapiens
NPVEDKDAVA

SEQ ID NO: 1865 - protein, 10 aa, Homo Sapiens
PVEDKDAVAF

SEQ ID NO: 1866 - protein, 10 aa, Homo Sapiens
EPETQDTTYL

SEQ ID NO: 1867 - protein, 10 aa, Homo Sapiens
PETQDTTYLW

SEQ ID NO: 1868 - protein, 10 aa, Homo Sapiens
ETQDTTYLWW

SEQ ID NO: 1869 - protein, 10 aa, Homo Sapiens
TQDTTYLWWI

SEQ ID NO: 1870 - protein, 10 aa, Homo Sapiens
TTYLWWINNQ

SEQ ID NO: 1871 - protein, 10 aa, Homo Sapiens
YLWWINNQSL

SEQ ID NO: 1872 - protein, 10 aa, Homo Sapiens
NNQSLPVSPR

SEQ ID NO: 1873 - protein, 10 aa, Homo Sapiens
SLPVSPRLQL

SEQ ID NO: 1874 - protein, 10 aa, Homo Sapiens
LPVSPRLQLS

SEQ ID NO: 1875 - protein, 10 aa, Homo Sapiens
LQLSNGNRTL

SEQ ID NO: 1876 - protein, 10 aa, Homo Sapiens
QLSNGNRTLT

SEQ ID NO: 1877 - protein, 10 aa, Homo Sapiens
RTLTLLSVTR

SEQ ID NO: 1878 - protein, 10 aa, Homo Sapiens
SVTRNDTGPY

SEQ ID NO: 1879 - protein, 10 aa, Homo Sapiens
EIQNPVSANR

SEQ ID NO: 1880 - protein, 10 aa, Homo Sapiens
PVSANRSDPV

SEQ ID NO: 1881 - protein, 10 aa, Homo Sapiens
NRSDPVTLNV

SEQ ID NO: 1882 - protein, 10 aa, Homo Sapiens
VTYGPDTPTI

SEQ ID NO: 1883 - protein, 10 aa, Homo Sapiens
TPTISPSDTY

SEQ ID NO: 1884 - protein, 10 aa, Homo Sapiens
PTISPSDTYY

SEQ ID NO: 1885 - protein, 10 aa, Homo Sapiens
TISPSDTYYR

SEQ ID NO: 1886 - protein, 10 aa, Homo Sapiens
DTYYRPGANL

SEQ ID NO: 1887 - protein, 10 aa, Homo Sapiens
YYRPGANLSL

SEQ ID NO: 1888 - protein, 10 aa, Homo Sapiens
RPGANLSLSC

SEQ ID NO: 1889 - protein, 10 aa, Homo Sapiens
YAASNPPAQY

SEQ ID NO: 1890 - protein, 10 aa, Homo Sapiens
ASNPPAQYSW

SEQ ID NO: 1891 - protein, 10 aa, Homo Sapiens
NPPAQYSWLI

SEQ ID NO: 1892 - protein, 10 aa, Homo Sapiens
AQYSWLINGT

SEQ ID NO: 1893 - protein, 10 aa, Homo Sapiens
QYSWLINGTF

SEQ ID NO: 1894 - protein, 10 aa, Homo Sapiens
WLINGTFQQS

SEQ ID NO: 1895 - protein, 10 aa, Homo Sapiens
GTFQQSTQEL

SEQ ID NO: 1896 - protein, 10 aa, Homo Sapiens
TFQQSTQELF

SEQ ID NO: 1897 - protein, 10 aa, Homo Sapiens
FQQSTQELFI

SEQ ID NO: 1898 - protein, 10 aa, Homo Sapiens
STQELFIPNI

SEQ ID NO: 1899 - protein, 10 aa, Homo Sapiens
QELFIPNITV

SEQ ID NO: 1900 - protein, 10 aa, Homo Sapiens
NITVNNSGSY

SEQ ID NO: 1901 - protein, 10 aa, Homo Sapiens
ANNSVTGCNR

SEQ ID NO: 1902 - protein, 10 aa, Homo Sapiens
SVTGCNRTTV

SEQ ID NO: 1903 - protein, 10 aa, Homo Sapiens
VTGCNRTTVK

SEQ ID NO: 1904 - protein, 10 aa, Homo Sapiens
TVKTIIVTEL

SEQ ID NO: 1905 - protein, 10 aa, Homo Sapiens
TIIVTELSPV

SEQ ID NO: 1906 - protein, 10 aa, Homo Sapiens
IIVTELSPVV

SEQ ID NO: 1907 - protein, 10 aa, Homo Sapiens
VTELSPVVAK

SEQ ID NO: 1908 - protein, 10 aa, Homo Sapiens
ELSPVVAKPQ

SEQ ID NO: 1909 - protein, 10 aa, Homo Sapiens
VAKPQIKASK

SEQ ID NO: 1910 - protein, 10 aa, Homo Sapiens
KPQIKASKTT

SEQ ID NO: 1911 - protein, 10 aa, Homo Sapiens
PQIKASKTTV

SEQ ID NO: 1912 - protein, 10 aa, Homo Sapiens
ASKTTVTGDK

SEQ ID NO: 1913 - protein, 10 aa, Homo Sapiens
TTVTGDKDSV

SEQ ID NO: 1914 - protein, 10 aa, Homo Sapiens
STNDTGISIR

SEQ ID NO: 1915 - protein, 10 aa, Homo Sapiens
DTGISIRWFF

SEQ ID NO: 1916 - protein, 10 aa, Homo Sapiens
TGISIRWFFK

SEQ ID NO: 1917 - protein, 10 aa, Homo Sapiens
IRWFFKNQSL

SEQ ID NO: 1918 - protein, 10 aa, Homo Sapiens
QSLPSSERMK

SEQ ID NO: 1919 - protein, 10 aa, Homo Sapiens
SLPSSERMKL

SEQ ID NO: 1920 - protein, 10 aa, Homo Sapiens
KLSQGNTTLS

SEQ ID NO: 1921 - protein, 10 aa, Homo Sapiens
NTTLSINPVK

SEQ ID NO: 1922 - protein, 10 aa, Homo Sapiens
TTLSINPVKR

SEQ ID NO: 1923 - protein, 10 aa, Homo Sapiens
PVKREDAGTY

SEQ ID NO: 1924 - protein, 10 aa, Homo Sapiens
EDAGTYWCEV

SEQ ID NO: 1925 - protein, 10 aa, Homo Sapiens
DAGTYWCEVF

SEQ ID NO: 1926 - protein, 10 aa, Homo Sapiens
TYWCEVFNPI

SEQ ID NO: 1927 - protein, 10 aa, Homo Sapiens
NQSDPIMLNV

SEQ ID NO: 1928 - protein, 10 aa, Homo Sapiens
IMLNVNYNAL

SEQ ID NO: 1929 - protein, 10 aa, Homo Sapiens
GLSPGAIAGI

SEQ ID NO: 1930 - protein, 10 aa, Homo Sapiens
LSPGAIAGIV

SEQ ID NO: 1931 - protein, 10 aa, Homo Sapiens
SPGAIAGIVI

SEQ ID NO: 1932 - protein, 10 aa, Homo Sapiens
GAIAGIVIGV

SEQ ID NO: 1933 - protein, 10 aa, Homo Sapiens
AIAGIVIGVV

SEQ ID NO: 1934 - protein, 10 aa, Homo Sapiens
GIVIGVVALV

SEQ ID NO: 1935 - protein, 10 aa, Homo Sapiens
IVIGVVALVA

SEQ ID NO: 1936 - protein, 10 aa, Homo Sapiens
VIGVVALVAL

SEQ ID NO: 1937 - protein, 10 aa, Homo Sapiens
VVALVALIAV

SEQ ID NO: 1938 - protein, 10 aa, Homo Sapiens
ALVALIAVAL

SEQ ID NO: 1939 - protein, 10 aa, Homo Sapiens
LVALIAVALA

SEQ ID NO: 1940 - protein, 10 aa, Homo Sapiens
ALIAVALACF

SEQ ID NO: 1941 - protein, 10 aa, Homo Sapiens
LIAVALACFL

SEQ ID NO: 1942 - protein, 10 aa, Homo Sapiens
AVALACFLHF

SEQ ID NO: 1943 - protein, 10 aa, Homo Sapiens
ALACFLHFGK

SEQ ID NO: 1944 - protein, 10 aa, Homo Sapiens
CFLHFGKTGR

SEQ ID NO: 1945 - protein, 10 aa, Homo Sapiens
FLHFGKTGRA

SEQ ID NO: 1946 - protein, 10 aa, Homo Sapiens
PPNKMNEVTY

SEQ ID NO: 1947 - protein, 10 aa, Homo Sapiens
KMNEVTYSTL

SEQ ID NO: 1948 - protein, 10 aa, Homo Sapiens
NEVTYSTLNF

SEQ ID NO: 1949 - protein, 10 aa, Homo Sapiens
EVTYSTLNFE

SEQ ID NO: 1950 - protein, 10 aa, Homo Sapiens
VTYSTLNFEA

SEQ ID NO: 1951 - protein, 10 aa, Homo Sapiens
TLNFEAQQPT

SEQ ID NO: 1952 - protein, 10 aa, Homo Sapiens
AQQPTQPTSA

SEQ ID NO: 1953 - protein, 10 aa, Homo Sapiens
TQPTSASPSL

SEQ ID NO: 1954 - protein, 10 aa, Homo Sapiens
SPSLTATEII

SEQ ID NO: 1955 - protein, 10 aa, Homo Sapiens
SLTATEIIYS

SEQ ID NO: 1956 - protein, 10 aa, Homo Sapiens
TATEIIYSEV

SEQ ID NO: 1957 - protein, 10 aa, Homo Sapiens
ATEIIYSEVK

SEQ ID NO: 1958 - protein, 11 aa, Homo Sapiens
MGHLSAPLHRV

SEQ ID NO: 1959 - protein, 11 aa, Homo Sapiens
HLSAPLHRVRV

SEQ ID NO: 1960 - protein, 11 aa, Homo Sapiens
RVRVPWQGLLL

SEQ ID NO: 1961 - protein, 11 aa, Homo Sapiens
RVPWQGLLLTA

SEQ ID NO: 1962 - protein, 11 aa, Homo Sapiens
VPWQGLLLTAS

SEQ ID NO: 1963 - protein, 11 aa, Homo Sapiens
WQGLLLTASLL

SEQ ID NO: 1964 - protein, 11 aa, Homo Sapiens
GLLLTASLLTF

SEQ ID NO: 1965 - protein, 11 aa, Homo Sapiens
LLLTASLLTFW

SEQ ID NO: 1966 - protein, 11 aa, Homo Sapiens
SLLTFWNPPTT

SEQ ID NO: 1967 - protein, 11 aa, Homo Sapiens
LLTFWNPPTTA

SEQ ID NO: 1968 - protein, 11 aa, Homo Sapiens
LTFWNPPTTAQ

SEQ ID NO: 1969 - protein, 11 aa, Homo Sapiens
TFWNPPTTAQL

SEQ ID NO: 1970 - protein, 11 aa, Homo Sapiens
PTTAQLTTESM

SEQ ID NO: 1971 - protein, 11 aa, Homo Sapiens
TAQLTTESMPF

SEQ ID NO: 1972 - protein, 11 aa, Homo Sapiens
QLTTESMPFNV

SEQ ID NO: 1973 - protein, 11 aa, Homo Sapiens
LTTESMPFNVA

SEQ ID NO: 1974 - protein, 11 aa, Homo Sapiens
ESMPFNVAEGK

SEQ ID NO: 1975 - protein, 11 aa, Homo Sapiens
MPFNVAEGKEV

SEQ ID NO: 1976 - protein, 11 aa, Homo Sapiens
NVAEGKEVLLL

SEQ ID NO: 1977 - protein, 11 aa, Homo Sapiens
VAEGKEVLLLV

SEQ ID NO: 1978 - protein, 11 aa, Homo Sapiens
VLLLVHNLPQQ

SEQ ID NO: 1979 - protein, 11 aa, Homo Sapiens
LLLVHNLPQQL

SEQ ID NO: 1980 - protein, 11 aa, Homo Sapiens
LPQQLFGYSWY

SEQ ID NO: 1981 - protein, 11 aa, Homo Sapiens
PQQLFGYSWYK

SEQ ID NO: 1982 - protein, 11 aa, Homo Sapiens
QLFGYSWYKGE

SEQ ID NO: 1983 - protein, 11 aa, Homo Sapiens
LFGYSWYKGER

SEQ ID NO: 1984 - protein, 11 aa, Homo Sapiens
FGYSWYKGERV

SEQ ID NO: 1985 - protein, 11 aa, Homo Sapiens
WYKGERVDGNR

SEQ ID NO: 1986 - protein, 11 aa, Homo Sapiens
GERVDGNRQIV

SEQ ID NO: 1987 - protein, 11 aa, Homo Sapiens
RVDGNRQIVGY

SEQ ID NO: 1988 - protein, 11 aa, Homo Sapiens
RQIVGYAIGTQ

SEQ ID NO: 1989 - protein, 11 aa, Homo Sapiens
QATPGPANSGR

SEQ ID NO: 1990 - protein, 11 aa, Homo Sapiens
GPANSGRETIY

SEQ ID NO: 1991 - protein, 11 aa, Homo Sapiens
GRETIYPNASL

SEQ ID NO: 1992 - protein, 11 aa, Homo Sapiens
RETIYPNASLL

SEQ ID NO: 1993 - protein, 11 aa, Homo Sapiens
ETIYPNASLLI

SEQ ID NO: 1994 - protein, 11 aa, Homo Sapiens
TIYPNASLLIQ

SEQ ID NO: 1995 - protein, 11 aa, Homo Sapiens
YPNASLLIQNV

SEQ ID NO: 1996 - protein, 11 aa, Homo Sapiens
IQNVTQNDTGF

SEQ ID NO: 1997 - protein, 11 aa, Homo Sapiens
QNDTGFYTLQV

SEQ ID NO: 1998 - protein, 11 aa, Homo Sapiens
DTGFYTLQVIK

SEQ ID NO: 1999 - protein, 11 aa, Homo Sapiens
FYTLQVIKSDL

SEQ ID NO: 2000 - protein, 11 aa, Homo Sapiens
YTLQVIKSDLV

SEQ ID NO: 2001 - protein, 11 aa, Homo Sapiens
ATGQFHVYPEL

SEQ ID NO: 2002 - protein, 11 aa, Homo Sapiens
GQFHVYPELPK

SEQ ID NO: 2003 - protein, 11 aa, Homo Sapiens
HVYPELPKPSI

SEQ ID NO: 2004 - protein, 11 aa, Homo Sapiens
YPELPKPSISS

SEQ ID NO: 2005 - protein, 11 aa, Homo Sapiens
SSNNSNPVEDK

SEQ ID NO: 2006 - protein, 11 aa, Homo Sapiens
NSNPVEDKDAV

SEQ ID NO: 2007 - protein, 11 aa, Homo Sapiens
NPVEDKDAVAF

SEQ ID NO: 2008 - protein, 11 aa, Homo Sapiens
TCEPETQDTTY

SEQ ID NO: 2009 - protein, 11 aa, Homo Sapiens
CEPETQDTTYL

SEQ ID NO: 2010 - protein, 11 aa, Homo Sapiens
EPETQDTTYLW

SEQ ID NO: 2011 - protein, 11 aa, Homo Sapiens
PETQDTTYLWW

SEQ ID NO: 2012 - protein, 11 aa, Homo Sapiens
ETQDTTYLWWI

SEQ ID NO: 2013 - protein, 11 aa, Homo Sapiens
TYLWWINNQSL

SEQ ID NO: 2014 - protein, 11 aa, Homo Sapiens
YLWWINNQSLP

SEQ ID NO: 2015 - protein, 11 aa, Homo Sapiens
RLQLSNGNRTL

SEQ ID NO: 2016 - protein, 11 aa, Homo Sapiens
QLSNGNRTLTL

SEQ ID NO: 2017 - protein, 11 aa, Homo Sapiens
LSVTRNDTGPY

SEQ ID NO: 2018 - protein, 11 aa, Homo Sapiens
GPYECEIQNPV

SEQ ID NO: 2019 - protein, 11 aa, Homo Sapiens
NPVSANRSDPV

SEQ ID NO: 2020 - protein, 11 aa, Homo Sapiens
RSDPVTLNVTY

SEQ ID NO: 2021 - protein, 11 aa, Homo Sapiens
NVTYGPDTPTI

SEQ ID NO: 2022 - protein, 11 aa, Homo Sapiens
DTPTISPSDTY

SEQ ID NO: 2023 - protein, 11 aa, Homo Sapiens
TPTISPSDTYY

SEQ ID NO: 2024 - protein, 11 aa, Homo Sapiens
PTISPSDTYYR

SEQ ID NO: 2025 - protein, 11 aa, Homo Sapiens
TYYRPGANLSL

SEQ ID NO: 2026 - protein, 11 aa, Homo Sapiens
YYRPGANLSLS

SEQ ID NO: 2027 - protein, 11 aa, Homo Sapiens
RPGANLSLSCY

SEQ ID NO: 2028 - protein, 11 aa, Homo Sapiens
CYAASNPPAQY

SEQ ID NO: 2029 - protein, 11 aa, Homo Sapiens
AASNPPAQYSW

SEQ ID NO: 2030 - protein, 11 aa, Homo Sapiens
AQYSWLINGTF

SEQ ID NO: 2031 - protein, 11 aa, Homo Sapiens
WLINGTFQQST

SEQ ID NO: 2032 - protein, 11 aa, Homo Sapiens
TFQQSTQELFI

SEQ ID NO: 2033 - protein, 11 aa, Homo Sapiens
FQQSTQELFIP

SEQ ID NO: 2034 - protein, 11 aa, Homo Sapiens
TQELFIPNITV

SEQ ID NO: 2035 - protein, 11 aa, Homo Sapiens
HANNSVTGCNR

SEQ ID NO: 2036 - protein, 11 aa, Homo Sapiens
NSVTGCNRTTV

SEQ ID NO: 2037 - protein, 11 aa, Homo Sapiens
SVTGCNRTTVK

SEQ ID NO: 2038 - protein, 11 aa, Homo Sapiens
TTVKTIIVTEL

SEQ ID NO: 2039 - protein, 11 aa, Homo Sapiens
KTIIVTELSPV

SEQ ID NO: 2040 - protein, 11 aa, Homo Sapiens
TIIVTELSPVV

SEQ ID NO: 2041 - protein, 11 aa, Homo Sapiens
IIVTELSPVVA

SEQ ID NO: 2042 - protein, 11 aa, Homo Sapiens
IVTELSPVVAK

SEQ ID NO: 2043 - protein, 11 aa, Homo Sapiens
ELSPVVAKPQI

SEQ ID NO: 2044 - protein, 11 aa, Homo Sapiens
SPVVAKPQIKA

SEQ ID NO: 2045 - protein, 11 aa, Homo Sapiens
VVAKPQIKASK

SEQ ID NO: 2046 - protein, 11 aa, Homo Sapiens
KPQIKASKTTV

SEQ ID NO: 2047 - protein, 11 aa, Homo Sapiens
KASKTTVTGDK

SEQ ID NO: 2048 - protein, 11 aa, Homo Sapiens
TVTGDKDSVNL

SEQ ID NO: 2049 - protein, 11 aa, Homo Sapiens
NLTCSTNDTGI

SEQ ID NO: 2050 - protein, 11 aa, Homo Sapiens
CSTNDTGISIR

SEQ ID NO: 2051 - protein, 11 aa, Homo Sapiens
STNDTGISIRW

SEQ ID NO: 2052 - protein, 11 aa, Homo Sapiens
DTGISIRWFFK

SEQ ID NO: 2053 - protein, 11 aa, Homo Sapiens
SIRWFFKNQSL

SEQ ID NO: 2054 - protein, 11 aa, Homo Sapiens
RMKLSQGNTTL

SEQ ID NO: 2055 - protein, 11 aa, Homo Sapiens
KLSQGNTTLSI

SEQ ID NO: 2056 - protein, 11 aa, Homo Sapiens
QGNTTLSINPV

SEQ ID NO: 2057 - protein, 11 aa, Homo Sapiens
NTTLSINPVKR

SEQ ID NO: 2058 - protein, 11 aa, Homo Sapiens
NPVKREDAGTY

SEQ ID NO: 2059 - protein, 11 aa, Homo Sapiens
REDAGTYWCEV

SEQ ID NO: 2060 - protein, 11 aa, Homo Sapiens
GTYWCEVFNPI

SEQ ID NO: 2061 - protein, 11 aa, Homo Sapiens
YWCEVFNPISK

SEQ ID NO: 2062 - protein, 11 aa, Homo Sapiens
NPISKNQSDPI

SEQ ID NO: 2063 - protein, 11 aa, Homo Sapiens
PISKNQSDPIM

SEQ ID NO: 2064 - protein, 11 aa, Homo Sapiens
QSDPIMLNVNY

SEQ ID NO: 2065 - protein, 11 aa, Homo Sapiens
DPIMLNVNYNA

SEQ ID NO: 2066 - protein, 11 aa, Homo Sapiens
MLNVNYNALPQ

SEQ ID NO: 2067 - protein, 11 aa, Homo Sapiens
NYNALPQENGL

SEQ ID NO: 2068 - protein, 11 aa, Homo Sapiens
LPQENGLSPGA

SEQ ID NO: 2069 - protein, 11 aa, Homo Sapiens
GLSPGAIAGIV

SEQ ID NO: 2070 - protein, 11 aa, Homo Sapiens
GAIAGIVIGVV

SEQ ID NO: 2071 - protein, 11 aa, Homo Sapiens
AIAGIVIGVVA

SEQ ID NO: 2072 - protein, 11 aa, Homo Sapiens
AGIVIGVVALV

SEQ ID NO: 2073 - protein, 11 aa, Homo Sapiens
IVIGVVALVAL

SEQ ID NO: 2074 - protein, 11 aa, Homo Sapiens
GVVALVALIAV

SEQ ID NO: 2075 - protein, 11 aa, Homo Sapiens
VALVALIAVAL

SEQ ID NO: 2076 - protein, 11 aa, Homo Sapiens
ALVALIAVALA

SEQ ID NO: 2077 - protein, 11 aa, Homo Sapiens
VALIAVALACF

SEQ ID NO: 2078 - protein, 11 aa, Homo Sapiens
ALIAVALACFL

SEQ ID NO: 2079 - protein, 11 aa, Homo Sapiens
IAVALACFLHF

SEQ ID NO: 2080 - protein, 11 aa, Homo Sapiens
VALACFLHFGK

SEQ ID NO: 2081 - protein, 11 aa, Homo Sapiens
ALACFLHFGKT

SEQ ID NO: 2082 - protein, 11 aa, Homo Sapiens
ACFLHFGKTGR

SEQ ID NO: 2083 - protein, 11 aa, Homo Sapiens
ASDQRDLTEHK

SEQ ID NO: 2084 - protein, 11 aa, Homo Sapiens
TQDHSNDPPNK

SEQ ID NO: 2085 - protein, 11 aa, Homo Sapiens
SNDPPNKMNEV

SEQ ID NO: 2086 - protein, 11 aa, Homo Sapiens
DPPNKMNEVTY

SEQ ID NO: 2087 - protein, 11 aa, Homo Sapiens
EVTYSTLNFEA

SEQ ID NO: 2088 - protein, 11 aa, Homo Sapiens
TLNFEAQQPTQ

SEQ ID NO: 2089 - protein, 11 aa, Homo Sapiens
EAQQPTQPTSA

SEQ ID NO: 2090 - protein, 11 aa, Homo Sapiens
QPTQPTSASPS

SEQ ID NO: 2091 - protein, 11 aa, Homo Sapiens
PTQPTSASPSL

SEQ ID NO: 2092 - protein, 11 aa, Homo Sapiens
SASPSLTATEI

SEQ ID NO: 2093 - protein, 11 aa, Homo Sapiens
SPSLTATEIIY

SEQ ID NO: 2094 - protein, 11 aa, Homo Sapiens
SLTATEIIYSE

SEQ ID NO: 2095 - protein, 11 aa, Homo Sapiens
LTATEIIYSEV

SEQ ID NO: 2096 - protein, 11 aa, Homo Sapiens
TATEIIYSEVK

SEQ ID NO: 2097 - protein, 11 aa, Homo Sapiens
ATEIIYSEVKK

SEQ ID NO: 2098 - protein, 349 aa, Homo Sapiens [sequence omitted]

SEQ ID NO: 2099 - protein, 8 aa, Homo Sapiens
ISAPSCRW

SEQ ID NO: 2100 - protein, 8 aa, Homo Sapiens
SAPSCRWR

SEQ ID NO: 2101 - protein, 8 aa, Homo Sapiens
APSCRWRI

SEQ ID NO: 2102 - protein, 8 aa, Homo Sapiens
RIPWQGLL

SEQ ID NO: 2103 - protein, 8 aa, Homo Sapiens
IPWQGLLL

SEQ ID NO: 2104 - protein, 8 aa, Homo Sapiens
WQGLLLTA

SEQ ID NO: 2105 - protein, 8 aa, Homo Sapiens
GLLLTASL

SEQ ID NO: 2106 - protein, 8 aa, Homo Sapiens
LLLTASLF

SEQ ID NO: 2107 - protein, 8 aa, Homo Sapiens
LLTASLFT

SEQ ID NO: 2108 - protein, 8 aa, Homo Sapiens
LTASLFTF

SEQ ID NO: 2109 - protein, 8 aa, Homo Sapiens
TASLFTFW

SEQ ID NO: 2110 - protein, 8 aa, Homo Sapiens
SLFTFWNP

SEQ ID NO: 2111 - protein, 8 aa, Homo Sapiens
FTFWNPPT

SEQ ID NO: 2112 - protein, 8 aa, Homo Sapiens
AQLTIEAV

SEQ ID NO: 2113 - protein, 8 aa, Homo Sapiens
EAVPSNAA

SEQ ID NO: 2114 - protein, 8 aa, Homo Sapiens
NAAEGKEV

SEQ ID NO: 2115 - protein, 8 aa, Homo Sapiens
AEGKEVLL

SEQ ID NO: 2116 - protein, 8 aa, Homo Sapiens
VLLLVHNL

SEQ ID NO: 2117 - protein, 8 aa, Homo Sapiens
LLVHNLPQ

SEQ ID NO: 2118 - protein, 8 aa, Homo Sapiens
LPQDPRGY

SEQ ID NO: 2119 - protein, 8 aa, Homo Sapiens
DPRGYNWY

SEQ ID NO: 2120 - protein, 8 aa, Homo Sapiens
ETVDANRR

SEQ ID NO: 2121 - protein, 8 aa, Homo Sapiens
RRIIGYVI

SEQ ID NO: 2122 - protein, 8 aa, Homo Sapiens
YVISNQQI

SEQ ID NO: 2123 - protein, 8 aa, Homo Sapiens
QQITPGPA

SEQ ID NO: 2124 - protein, 8 aa, Homo Sapiens
QITPGPAY

SEQ ID NO: 2125 - protein, 8 aa, Homo Sapiens
AYSNRETI

SEQ ID NO: 2126 - protein, 8 aa, Homo Sapiens
YSNRETIY

SEQ ID NO: 2127 - protein, 8 aa, Homo Sapiens
ETIYPNAS

SEQ ID NO: 2128 - protein, 8 aa, Homo Sapiens
TIYPNASL

SEQ ID NO: 2129 - protein, 8 aa, Homo Sapiens
IYPNASLL

SEQ ID NO: 2130 - protein, 8 aa, Homo Sapiens
YPNASLLM

SEQ ID NO: 2131 - protein, 8 aa, Homo Sapiens
SLLMRNVT

SEQ ID NO: 2132 - protein, 8 aa, Homo Sapiens
LLMRNVTR

SEQ ID NO: 2133 - protein, 8 aa, Homo Sapiens
TGSYTLQV

SEQ ID NO: 2134 - protein, 8 aa, Homo Sapiens
SYTLQVIK

SEQ ID NO: 2135 - protein, 8 aa, Homo Sapiens
YTLQVIKL

SEQ ID NO: 2136 - protein, 8 aa, Homo Sapiens
LQVIKLNL

SEQ ID NO: 2137 - protein, 8 aa, Homo Sapiens
QVIKLNLM

SEQ ID NO: 2138 - protein, 8 aa, Homo Sapiens
SEEVTGQF

SEQ ID NO: 2139 - protein, 8 aa, Homo Sapiens
EEVTGQFS

SEQ ID NO: 2140 - protein, 8 aa, Homo Sapiens
EVTGQFSV

SEQ ID NO: 2141 - protein, 8 aa, Homo Sapiens
SVHPETPK

SEQ ID NO: 2142 - protein, 8 aa, Homo Sapiens
SSNNSNPV

SEQ ID NO: 2143 - protein, 8 aa, Homo Sapiens
NSNPVEDK

SEQ ID NO: 2144 - protein, 8 aa, Homo Sapiens
PVEDKDAV

SEQ ID NO: 2145 - protein, 8 aa, Homo Sapiens
EPETQNTT

SEQ ID NO: 2146 - protein, 8 aa, Homo Sapiens
ETQNTTYL

SEQ ID NO: 2147 - protein, 8 aa, Homo Sapiens
NTTYLWWV

SEQ ID NO: 2148 - protein, 8 aa, Homo Sapiens
YLWWVNGQ

SEQ ID NO: 2149 - protein, 8 aa, Homo Sapiens
QSLPVSPR

SEQ ID NO: 2150 - protein, 8 aa, Homo Sapiens
SLPVSPRL

SEQ ID NO: 2151 - protein, 8 aa, Homo Sapiens
PVSPRLQL

SEQ ID NO: 2152 - protein, 8 aa, Homo Sapiens
SPRLQLSN

SEQ ID NO: 2153 - protein, 8 aa, Homo Sapiens
LQLSNGNR

SEQ ID NO: 2154 - protein, 8 aa, Homo Sapiens
RTLTLLSV

SEQ ID NO: 2155 - protein, 8 aa, Homo Sapiens
LTLLSVTR

SEQ ID NO: 2156 - protein, 8 aa, Homo Sapiens
SANFSDPV

SEQ ID NO: 2157 - protein, 8 aa, Homo Sapiens
DPVTLNVL

SEQ ID NO: 2158 - protein, 8 aa, Homo Sapiens
PVTLNVLY

SEQ ID NO: 2159 - protein, 8 aa, Homo Sapiens
VLYGPDAP

SEQ ID NO: 2160 - protein, 8 aa, Homo Sapiens
TISPSDTY

SEQ ID NO: 2161 - protein, 8 aa, Homo Sapiens
ISPSDTYY

SEQ ID NO: 2162 - protein, 8 aa, Homo Sapiens
SPSDTYYH

SEQ ID NO: 2163 - protein, 8 aa, Homo Sapiens
DTYYHAGV

SEQ ID NO: 2164 - protein, 8 aa, Homo Sapiens
YYHAGVNL

SEQ ID NO: 2165 - protein, 8 aa, Homo Sapiens
NLNLSCHA

SEQ ID NO: 2166 - protein, 8 aa, Homo Sapiens
ASNPPSQY

SEQ ID NO: 2167 - protein, 8 aa, Homo Sapiens
NPPSQYSW

SEQ ID NO: 2168 - protein, 8 aa, Homo Sapiens
SWSVNGTF

SEQ ID NO: 2169 - protein, 8 aa, Homo Sapiens
SVNGTFQQ

SEQ ID NO: 2170 - protein, 8 aa, Homo Sapiens
TFQQYTQK

SEQ ID NO: 2171 - protein, 8 aa, Homo Sapiens
FQQYTQKL

SEQ ID NO: 2172 - protein, 8 aa, Homo Sapiens
QQYTQKLF

SEQ ID NO: 2173 - protein, 8 aa, Homo Sapiens
QYTQKLFI

SEQ ID NO: 2174 - protein, 8 aa, Homo Sapiens
FIPNITTK

SEQ ID NO: 2175 - protein, 8 aa, Homo Sapiens
TTKNSGSY

SEQ ID NO: 2176 - protein, 8 aa, Homo Sapiens
TTNSATGR

SEQ ID NO: 2177 - protein, 8 aa, Homo Sapiens
NSATGRNR

SEQ ID NO: 2178 - protein, 8 aa, Homo Sapiens
TTVRMITV

SEQ ID NO: 2179 - protein, 8 aa, Homo Sapiens
RMITVSDA

SEQ ID NO: 2180 - protein, 8 aa, Homo Sapiens
MITVSDAV

SEQ ID NO: 2181 - protein, 8 aa, Homo Sapiens
ITVSDAVV

SEQ ID NO: 2182 - protein, 8 aa, Homo Sapiens
VQGSSPGL

SEQ ID NO: 2183 - protein, 8 aa, Homo Sapiens
SSPGLSAR

SEQ ID NO: 2184 - protein, 8 aa, Homo Sapiens
GLSARATV

SEQ ID NO: 2185 - protein, 8 aa, Homo Sapiens
SARATVSI

SEQ ID NO: 2186 - protein, 8 aa, Homo Sapiens
TVSIMIGV

SEQ ID NO: 2187 - protein, 8 aa, Homo Sapiens
SIMIGVLA

SEQ ID NO: 2188 - protein, 8 aa, Homo Sapiens
IMIGVLAR

SEQ ID NO: 2189 - protein, 8 aa, Homo Sapiens
MIGVLARV

SEQ ID NO: 2190 - protein, 8 aa, Homo Sapiens
GVLARVAL

SEQ ID NO: 2191 - protein, 8 aa, Homo Sapiens
VLARVALI

SEQ ID NO: 2192 - protein, 9 aa, Homo Sapiens
ISAPSCRWR

SEQ ID NO: 2193 - protein, 9 aa, Homo Sapiens
SAPSCRWRI

SEQ ID NO: 2194 - protein, 9 aa, Homo Sapiens
RIPWQGLLL

SEQ ID NO: 2195 - protein, 9 aa, Homo Sapiens
IPWQGLLLT

SEQ ID NO: 2196 - protein, 9 aa, Homo Sapiens
WQGLLLTAS

SEQ ID NO: 2197 - protein, 9 aa, Homo Sapiens
GLLLTASLF

SEQ ID NO: 2198 - protein, 9 aa, Homo Sapiens
LLLTASLFT

SEQ ID NO: 2199 - protein, 9 aa, Homo Sapiens
LLTASLFTF

SEQ ID NO: 2200 - protein, 9 aa, Homo Sapiens
LTASLFTFW

SEQ ID NO: 2201 - protein, 9 aa, Homo Sapiens
FTFWNPPTT

SEQ ID NO: 2202 - protein, 9 aa, Homo Sapiens
PPTTAQLTI

SEQ ID NO: 2203 - protein, 9 aa, Homo Sapiens
TTAQLTIEA

SEQ ID NO: 2204 - protein, 9 aa, Homo Sapiens
TAQLTIEAV

SEQ ID NO: 2205 - protein, 9 aa, Homo Sapiens
NAAEGKEVL

SEQ ID NO: 2206 - protein, 9 aa, Homo Sapiens
AEGKEVLLL

SEQ ID NO: 2207 - protein, 9 aa, Homo Sapiens
EVLLLVHNL

SEQ ID NO: 2208 - protein, 9 aa, Homo Sapiens
LLLVHNLPQ

SEQ ID NO: 2209 - protein, 9 aa, Homo Sapiens
DPRGYNWYK

SEQ ID NO: 2210 - protein, 9 aa, Homo Sapiens
KGETVDANR

SEQ ID NO: 2211 - protein, 9 aa, Homo Sapiens
ETVDANRRI

SEQ ID NO: 2212 - protein, 9 aa, Homo Sapiens
RRIIGYVIS

SEQ ID NO: 2213 - protein, 9 aa, Homo Sapiens
GYVISNQQI

SEQ ID NO: 2214 - protein, 9 aa, Homo Sapiens
QQITPGPAY

SEQ ID NO: 2215 - protein, 9 aa, Homo Sapiens
GPAYSNRET

SEQ ID NO: 2216 - protein, 9 aa, Homo Sapiens
AYSNRETIY

SEQ ID NO: 2217 - protein, 9 aa, Homo Sapiens
RETIYPNAS

SEQ ID NO: 2218 - protein, 9 aa, Homo Sapiens
ETIYPNASL

SEQ ID NO: 2219 - protein, 9 aa, Homo Sapiens
TIYPNASLL

SEQ ID NO: 2220 - protein, 9 aa, Homo Sapiens
IYPNASLLM

SEQ ID NO: 2221 - protein, 9 aa, Homo Sapiens
YPNASLLMR

SEQ ID NO: 2222 - protein, 9 aa, Homo Sapiens
NASLLMRNV

SEQ ID NO: 2223 - protein, 9 aa, Homo Sapiens
SLLMRNVTR

SEQ ID NO: 2224 - protein, 9 aa, Homo Sapiens
VTRNDTGSY

SEQ ID NO: 2225 - protein, 9 aa, Homo Sapiens
DTGSYTLQV

SEQ ID NO: 2226 - protein, 9 aa, Homo Sapiens
GSYTLQVIK

SEQ ID NO: 2227 - protein, 9 aa, Homo Sapiens
SYTLQVIKL

SEQ ID NO: 2228 - protein, 9 aa, Homo Sapiens
TLQVIKLNL

SEQ ID NO: 2229 - protein, 9 aa, Homo Sapiens
LQVIKLNLM

SEQ ID NO: 2230 - protein, 9 aa, Homo Sapiens
KLNLMSEEV

SEQ ID NO: 2231 - protein, 9 aa, Homo Sapiens
LMSEEVTGQ

SEQ ID NO: 2232 - protein, 9 aa, Homo Sapiens
EEVTGQFSV

SEQ ID NO: 2233 - protein, 9 aa, Homo Sapiens
EVTGQFSVH

SEQ ID NO: 2234 - protein, 9 aa, Homo Sapiens
GQFSVHPET

SEQ ID NO: 2235 - protein, 9 aa, Homo Sapiens
FSVHPETPK

SEQ ID NO: 2236 - protein, 9 aa, Homo Sapiens
HPETPKPSI

SEQ ID NO: 2237 - protein, 9 aa, Homo Sapiens
ETPKPSISS

SEQ ID NO: 2238 - protein, 9 aa, Homo Sapiens
ISSNNSNPV

SEQ ID NO: 2239 - protein, 9 aa, Homo Sapiens
NPVEDKDAV

SEQ ID NO: 2240 - protein, 9 aa, Homo Sapiens
VEDKDAVAF

SEQ ID NO: 2241 - protein, 9 aa, Homo Sapiens
EPETQNTTY

SEQ ID NO: 2242 - protein, 9 aa, Homo Sapiens
PETQNTTYL

SEQ ID NO: 2243 - protein, 9 aa, Homo Sapiens
ETQNTTYLW

SEQ ID NO: 2244 - protein, 9 aa, Homo Sapiens
QNTTYLWWV

SEQ ID NO: 2245 - protein, 9 aa, Homo Sapiens
YLWWVNGQS

SEQ ID NO: 2246 - protein, 9 aa, Homo Sapiens
LWWVNGQSL

SEQ ID NO: 2247 - protein, 9 aa, Homo Sapiens
WVNGQSLPV

SEQ ID NO: 2248 - protein, 9 aa, Homo Sapiens
GQSLPVSPR

SEQ ID NO: 2249 - protein, 9 aa, Homo Sapiens
LPVSPRLQL

SEQ ID NO: 2250 - protein, 9 aa, Homo Sapiens
RLQLSNGNR

SEQ ID NO: 2251 - protein, 9 aa, Homo Sapiens
QLSNGNRTL

SEQ ID NO: 2252 - protein, 9 aa, Homo Sapiens
TLTLLSVTR

SEQ ID NO: 2253 - protein, 9 aa, Homo Sapiens
LLSVTRNDV

SEQ ID NO: 2254 - protein, 9 aa, Homo Sapiens
VTRNDVGPY

SEQ ID NO: 2255 - protein, 9 aa, Homo Sapiens
DVGPYECEI

SEQ ID NO: 2256 - protein, 9 aa, Homo Sapiens
IQNPASANF

SEQ ID NO: 2257 - protein, 9 aa, Homo Sapiens
ASANFSDPV

SEQ ID NO: 2258 - protein, 9 aa, Homo Sapiens
FSDPVTLNV

SEQ ID NO: 2259 - protein, 9 aa, Homo Sapiens
DPVTLNVLY

SEQ ID NO: 2260 - protein, 9 aa, Homo Sapiens
VLYGPDAPT

SEQ ID NO: 2261 - protein, 9 aa, Homo Sapiens
LYGPDAPTI

SEQ ID NO: 2262 - protein, 9 aa, Homo Sapiens
APTISPSDT

SEQ ID NO: 2263 - protein, 9 aa, Homo Sapiens
PTISPSDTY

SEQ ID NO: 2264 - protein, 9 aa, Homo Sapiens
TISPSDTYY

SEQ ID NO: 2265 - protein, 9 aa, Homo Sapiens
TYYHAGVNL

SEQ ID NO: 2266 - protein, 9 aa, Homo Sapiens
YHAGVNLNL

SEQ ID NO: 2267 - protein, 9 aa, Homo Sapiens
NLNLSCHAA

SEQ ID NO: 2268 - protein, 9 aa, Homo Sapiens
PPSQYSWSV

SEQ ID NO: 2269 - protein, 9 aa, Homo Sapiens
YSWSVNGTF

SEQ ID NO: 2270 - protein, 9 aa, Homo Sapiens
SVNGTFQQY

SEQ ID NO: 2271 - protein, 9 aa, Homo Sapiens
GTFQQYTQK

SEQ ID NO: 2272 - protein, 9 aa, Homo Sapiens
TFQQYTQKL

SEQ ID NO: 2273 - protein, 9 aa, Homo Sapiens
FQQYTQKLF

SEQ ID NO: 2274 - protein, 9 aa, Homo Sapiens
QQYTQKLFI

SEQ ID NO: 2275 - protein, 9 aa, Homo Sapiens
KLFIPNITT

SEQ ID NO: 2276 - protein, 9 aa, Homo Sapiens
LFIPNITTK

SEQ ID NO: 2277 - protein, 9 aa, Homo Sapiens
ITTKNSGSY

SEQ ID NO: 2278 - protein, 9 aa, Homo Sapiens
YACHTTNSA

SEQ ID NO: 2279 - protein, 9 aa, Homo Sapiens
HTTNSATGR

SEQ ID NO: 2280 - protein, 9 aa, Homo Sapiens
ATGRNRTTV

SEQ ID NO: 2281 - protein, 9 aa, Homo Sapiens
TGRNRTTVR

SEQ ID NO: 2282 - protein, 9 aa, Homo Sapiens
GRNRTTVRM

SEQ ID NO: 2283 - protein, 9 aa, Homo Sapiens
RTTVRMITV

SEQ ID NO: 2284 - protein, 9 aa, Homo Sapiens
RMITVSDAV

SEQ ID NO: 2285 - protein, 9 aa, Homo Sapiens
MITVSDAVV

SEQ ID NO: 2286 - protein, 9 aa, Homo Sapiens
VVQGSSPGL

SEQ ID NO: 2287 - protein, 9 aa, Homo Sapiens
GSSPGLSAR

SEQ ID NO: 2288 - protein, 9 aa, Homo Sapiens
SPGLSARAT

SEQ ID NO: 2289 - protein, 9 aa, Homo Sapiens
LSARATVSI

SEQ ID NO: 2290 - protein, 9 aa, Homo Sapiens
SARATVSIM

SEQ ID NO: 2291 - protein, 9 aa, Homo Sapiens
ATVSIMIGV

SEQ ID NO: 2292 - protein, 9 aa, Homo Sapiens
TVSIMIGVL

SEQ ID NO: 2293 - protein, 9 aa, Homo Sapiens
SIMIGVLAR

SEQ ID NO: 2294 - protein, 9 aa, Homo Sapiens
IMIGVLARV

SEQ ID NO: 2295 - protein, 9 aa, Homo Sapiens
GVLARVALI

SEQ ID NO: 2296 - protein, 10 aa, Homo Sapiens
MGPISAPSCR

SEQ ID NO: 2297 - protein, 10 aa, Homo Sapiens
GPISAPSCRW

SEQ ID NO: 2298 - protein, 10 aa, Homo Sapiens
PISAPSCRWR

SEQ ID NO: 2299 - protein, 10 aa, Homo Sapiens
ISAPSCRWRI

SEQ ID NO: 2300 - protein, 10 aa, Homo Sapiens
APSCRWRIPW

SEQ ID NO: 2301 - protein, 10 aa, Homo Sapiens
WRIPWQGLLL

SEQ ID NO: 2302 - protein, 10 aa, Homo Sapiens
IPWQGLLLTA

SEQ ID NO: 2303 - protein, 10 aa, Homo Sapiens
WQGLLLTASL

SEQ ID NO: 2304 - protein, 10 aa, Homo Sapiens
GLLLTASLFT

SEQ ID NO: 2305 - protein, 10 aa, Homo Sapiens
LLLTASLFTF

SEQ ID NO: 2306 - protein, 10 aa, Homo Sapiens
LLTASLFTFW

SEQ ID NO: 2307 - protein, 10 aa, Homo Sapiens
SLFTFWNPPT

SEQ ID NO: 2308 - protein, 10 aa, Homo Sapiens
FTFWNPPTTA

SEQ ID NO: 2309 - protein, 10 aa, Homo Sapiens
FWNPPTTAQL

SEQ ID NO: 2310 - protein, 10 aa, Homo Sapiens
NPPTTAQLTI

SEQ ID NO: 2311 - protein, 10 aa, Homo Sapiens
TTAQLTIEAV

SEQ ID NO: 2312 - protein, 10 aa, Homo Sapiens
LTIEAVPSNA

SEQ ID NO: 2313 - protein, 10 aa, Homo Sapiens
AVPSNAAEGK

SEQ ID NO: 2314 - protein, 10 aa, Homo Sapiens
NAAEGKEVLL

SEQ ID NO: 2315 - protein, 10 aa, Homo Sapiens
AEGKEVLLLV

SEQ ID NO: 2316 - protein, 10 aa, Homo Sapiens
KEVLLLVHNL

SEQ ID NO: 2317 - protein, 10 aa, Homo Sapiens
VLLLVHNLPQ

SEQ ID NO: 2318 - protein, 10 aa, Homo Sapiens
LVHNLPQDPR

SEQ ID NO: 2319 - protein, 10 aa, Homo Sapiens
LPQDPRGYNW

SEQ ID NO: 2320 - protein, 10 aa, Homo Sapiens
ETVDANRRII

SEQ ID NO: 2321 - protein, 10 aa, Homo Sapiens
DANRRIIGYV

SEQ ID NO: 2322 - protein, 10 aa, Homo Sapiens
RRIIGYVISN

SEQ ID NO: 2323 - protein, 10 aa, Homo Sapiens
NQQITPGPAY

SEQ ID NO: 2324 - protein, 10 aa, Homo Sapiens
ITPGPAYSNR

SEQ ID NO: 2325 - protein, 10 aa, Homo Sapiens
GPAYSNRETI

SEQ ID NO: 2326 - protein, 10 aa, Homo Sapiens
RETIYPNASL

SEQ ID NO: 2327 - protein, 10 aa, Homo Sapiens
ETIYPNASLL

SEQ ID NO: 2328 - protein, 10 aa, Homo Sapiens
TIYPNASLLM

SEQ ID NO: 2329 - protein, 10 aa, Homo Sapiens
IYPNASLLMR

SEQ ID NO: 2330 - protein, 10 aa, Homo Sapiens
ASLLMRNVTR

SEQ ID NO: 2331 - protein, 10 aa, Homo Sapiens
NVTRNDTGSY

SEQ ID NO: 2332 - protein, 10 aa, Homo Sapiens
TRNDTGSYTL

SEQ ID NO: 2333 - protein, 10 aa, Homo Sapiens
DTGSYTLQVI

SEQ ID NO: 2334 - protein, 10 aa, Homo Sapiens
YTLQVIKLNL

SEQ ID NO: 2335 - protein, 10 aa, Homo Sapiens
NLMSEEVTGQ

SEQ ID NO: 2336 - protein, 10 aa, Homo Sapiens
LMSEEVTGQF

SEQ ID NO: 2337 - protein, 10 aa, Homo Sapiens
SEEVTGQFSV

SEQ ID NO: 2338 - protein, 10 aa, Homo Sapiens
SISSNNSNPV

SEQ ID NO: 2339 - protein, 10 aa, Homo Sapiens
NPVEDKDAVA

SEQ ID NO: 2340 - protein, 10 aa, Homo Sapiens
PVEDKDAVAF

SEQ ID NO: 2341 - protein, 10 aa, Homo Sapiens
CEPETQNTTY

SEQ ID NO: 2342 - protein, 10 aa, Homo Sapiens
EPETQNTTYL

SEQ ID NO: 2343 - protein, 10 aa, Homo Sapiens
PETQNTTYLW

SEQ ID NO: 2344 - protein, 10 aa, Homo Sapiens
ETQNTTYLWW

SEQ ID NO: 2345 - protein, 10 aa, Homo Sapiens
TQNTTYLWWV

SEQ ID NO: 2346 - protein, 10 aa, Homo Sapiens
TTYLWWVNGQ

SEQ ID NO: 2347 - protein, 10 aa, Homo Sapiens
YLWWVNGQSL

SEQ ID NO: 2348 - protein, 10 aa, Homo Sapiens
GQSLPVSPRL

SEQ ID NO: 2349 - protein, 10 aa, Homo Sapiens
SLPVSPRLQL

SEQ ID NO: 2350 - protein, 10 aa, Homo Sapiens
LPVSPRLQLS

SEQ ID NO: 2351 - protein, 10 aa, Homo Sapiens
LQLSNGNRTL

SEQ ID NO: 2352 - protein, 10 aa, Homo Sapiens
QLSNGNRTLT

SEQ ID NO: 2353 - protein, 10 aa, Homo Sapiens
RTLTLLSVTR

SEQ ID NO: 2354 - protein, 10 aa, Homo Sapiens
TLLSVTRNDV

SEQ ID NO: 2355 - protein, 10 aa, Homo Sapiens
SVTRNDVGPY

SEQ ID NO: 2356 - protein, 10 aa, Homo Sapiens
EIQNPASANF

SEQ ID NO: 2357 - protein, 10 aa, Homo Sapiens
SANFSDPVTL

SEQ ID NO: 2358 - protein, 10 aa, Homo Sapiens
NFSDPVTLNV

SEQ ID NO: 2359 - protein, 10 aa, Homo Sapiens
FSDPVTLNVL

SEQ ID NO: 2360 - protein, 10 aa, Homo Sapiens
TLNVLYGPDA

SEQ ID NO: 2361 - protein, 10 aa, Homo Sapiens
VLYGPDAPTI

SEQ ID NO: 2362 - protein, 10 aa, Homo Sapiens
APTISPSDTY

SEQ ID NO: 2363 - protein, 10 aa, Homo Sapiens
PTISPSDTYY

SEQ ID NO: 2364 - protein, 10 aa, Homo Sapiens
DTYYHAGVNL

SEQ ID NO: 2365 - protein, 10 aa, Homo Sapiens
YYHAGVNLNL

SEQ ID NO: 2366 - protein, 10 aa, Homo Sapiens
SCHAASNPPS

SEQ ID NO: 2367 - protein, 10 aa, Homo Sapiens
HAASNPPSQY

SEQ ID NO: 2368 - protein, 10 aa, Homo Sapiens
ASNPPSQYSW

SEQ ID NO: 2369 - protein, 10 aa, Homo Sapiens
NPPSQYSWSV

SEQ ID NO: 2370 - protein, 10 aa, Homo Sapiens
SQYSWSVNGT

SEQ ID NO: 2371 - protein, 10 aa, Homo Sapiens
QYSWSVNGTF

SEQ ID NO: 2372 - protein, 10 aa, Homo Sapiens
WSVNGTFQQY

SEQ ID NO: 2373 - protein, 10 aa, Homo Sapiens
SVNGTFQQYT

SEQ ID NO: 2374 - protein, 10 aa, Homo Sapiens
GTFQQYTQKL

SEQ ID NO: 2375 - protein, 10 aa, Homo Sapiens
TFQQYTQKLF

SEQ ID NO: 2376 - protein, 10 aa, Homo Sapiens
FQQYTQKLFI

SEQ ID NO: 2377 - protein, 10 aa, Homo Sapiens
YTQKLFIPNI

SEQ ID NO: 2378 - protein, 10 aa, Homo Sapiens
KLFIPNITTK

SEQ ID NO: 2379 - protein, 10 aa, Homo Sapiens
NITTKNSGSY

SEQ ID NO: 2380 - protein, 10 aa, Homo Sapiens
YACHTTNSAT

SEQ ID NO: 2381 - protein, 10 aa, Homo Sapiens
TTNSATGRNR

SEQ ID NO: 2382 - protein, 10 aa, Homo Sapiens
SATGRNRTTV

SEQ ID NO: 2383 - protein, 10 aa, Homo Sapiens
ATGRNRTTVR

SEQ ID NO: 2384 - protein, 10 aa, Homo Sapiens
RMITVSDAVV

SEQ ID NO: 2385 - protein, 10 aa, Homo Sapiens
TVSDAVVQGS

SEQ ID NO: 2386 - protein, 10 aa, Homo Sapiens
AVVQGSSPGL

SEQ ID NO: 2387 - protein, 10 aa, Homo Sapiens
SPGLSARATV

SEQ ID NO: 2388 - protein, 10 aa, Homo Sapiens
GLSARATVSI

SEQ ID NO: 2389 - protein, 10 aa, Homo Sapiens
SARATVSIMI

SEQ ID NO: 2390 - protein, 10 aa, Homo Sapiens
RATVSIMIGV

SEQ ID NO: 2391 - protein, 10 aa, Homo Sapiens
ATVSIMIGVL

SEQ ID NO: 2392 - protein, 10 aa, Homo Sapiens
TVSIMIGVLA

SEQ ID NO: 2393 - protein, 10 aa, Homo Sapiens
VSIMIGVLAR

SEQ ID NO: 2394 - protein, 10 aa, Homo Sapiens
SIMIGVLARV

SEQ ID NO: 2395 - protein, 10 aa, Homo Sapiens
IMIGVLARVA

SEQ ID NO: 2396 - protein, 10 aa, Homo Sapiens
MIGVLARVAL

SEQ ID NO: 2397 - protein, 11 aa, Homo Sapiens
PISAPSCRWRI

SEQ ID NO: 2398 - protein, 11 aa, Homo Sapiens
RIPWQGLLLTA

SEQ ID NO: 2399 - protein, 11 aa, Homo Sapiens
IPWQGLLLTAS

SEQ ID NO: 2400 - protein, 11 aa, Homo Sapiens
WQGLLLTASLF

SEQ ID NO: 2401 - protein, 11 aa, Homo Sapiens
GLLLTASLFTF

SEQ ID NO: 2402 - protein, 11 aa, Homo Sapiens
LLLTASLFTFW

SEQ ID NO: 2403 - protein, 11 aa, Homo Sapiens
SLFTFWNPPTT

SEQ ID NO: 2404 - protein, 11 aa, Homo Sapiens
FTFWNPPTTAQ

SEQ ID NO: 2405 - protein, 11 aa, Homo Sapiens
TFWNPPTTAQL

SEQ ID NO: 2406 - protein, 11 aa, Homo Sapiens
QLTIEAVPSNA

SEQ ID NO: 2407 - protein, 11 aa, Homo Sapiens
LTIEAVPSNAA

SEQ ID NO: 2408 - protein, 11 aa, Homo Sapiens
EAVPSNAAEGK

SEQ ID NO: 2409 - protein, 11 aa, Homo Sapiens
VPSNAAEGKEV

SEQ ID NO: 2410 - protein, 11 aa, Homo Sapiens
NAAEGKEVLLL

SEQ ID NO: 2411 - protein, 11 aa, Homo Sapiens
AAEGKEVLLLV

SEQ ID NO: 2412 - protein, 11 aa, Homo Sapiens
LLVHNLPQDPR

SEQ ID NO: 2413 - protein, 11 aa, Homo Sapiens
LPQDPRGYNWY

SEQ ID NO: 2414 - protein, 11 aa, Homo Sapiens
WYKGETVDANR

SEQ ID NO: 2415 - protein, 11 aa, Homo Sapiens
GETVDANRRII

SEQ ID NO: 2416 - protein, 11 aa, Homo Sapiens
TVDANRRIIGY

SEQ ID NO: 2417 - protein, 11 aa, Homo Sapiens
RRIIGYVISNQ

SEQ ID NO: 2418 - protein, 11 aa, Homo Sapiens
QITPGPAYSNR

SEQ ID NO: 2419 - protein, 11 aa, Homo Sapiens
GPAYSNRETIY

SEQ ID NO: 2420 - protein, 11 aa, Homo Sapiens
RETIYPNASLL

SEQ ID NO: 2421 - protein, 11 aa, Homo Sapiens
ETIYPNASLLM

SEQ ID NO: 2422 - protein, 11 aa, Homo Sapiens
TIYPNASLLMR

SEQ ID NO: 2423 - protein, 11 aa, Homo Sapiens
YPNASLLMRNV

SEQ ID NO: 2424 - protein, 11 aa, Homo Sapiens
NASLLMRNVTR

SEQ ID NO: 2425 - protein, 11 aa, Homo Sapiens
RNDTGSYTLQV

SEQ ID NO: 2426 - protein, 11 aa, Homo Sapiens
DTGSYTLQVIK

SEQ ID NO: 2427 - protein, 11 aa, Homo Sapiens
SYTLQVIKLNL

SEQ ID NO: 2428 - protein, 11 aa, Homo Sapiens
YTLQVIKLNLM

SEQ ID NO: 2429 - protein, 11 aa, Homo Sapiens
LQVIKLNLMSE

SEQ ID NO: 2430 - protein, 11 aa, Homo Sapiens
VIKLNLMSEEV

SEQ ID NO: 2431 - protein, 11 aa, Homo Sapiens
LMSEEVTGQFS

SEQ ID NO: 2432 - protein, 11 aa, Homo Sapiens
MSEEVTGQFSV

SEQ ID NO: 2433 - protein, 11 aa, Homo Sapiens
GQFSVHPETPK

SEQ ID NO: 2434 - protein, 11 aa, Homo Sapiens
SVHPETPKPSI

SEQ ID NO: 2435 - protein, 11 aa, Homo Sapiens
SSNNSNPVEDK

SEQ ID NO: 2436 - protein, 11 aa, Homo Sapiens
NSNPVEDKDAV

SEQ ID NO: 2437 - protein, 11 aa, Homo Sapiens
NPVEDKDAVAF

SEQ ID NO: 2438 - protein, 11 aa, Homo Sapiens
TCEPETQNTTY

SEQ ID NO: 2439 - protein, 11 aa, Homo Sapiens
CEPETQNTTYL

SEQ ID NO: 2440 - protein, 11 aa, Homo Sapiens
EPETQNTTYLW

SEQ ID NO: 2441 - protein, 11 aa, Homo Sapiens
PETQNTTYLWW

SEQ ID NO: 2442 - protein, 11 aa, Homo Sapiens
ETQNTTYLWWV

SEQ ID NO: 2443 - protein, 11 aa, Homo Sapiens
TYLWWVNGQSL

SEQ ID NO: 2444 - protein, 11 aa, Homo Sapiens
YLWWVNGQSLP

SEQ ID NO: 2445 - protein, 11 aa, Homo Sapiens
RLQLSNGNRTL

SEQ ID NO: 2446 - protein, 11 aa, Homo Sapiens
QLSNGNRTLTL

SEQ ID NO: 2447 - protein, 11 aa, Homo Sapiens
LSVTRNDVGPY

SEQ ID NO: 2448 - protein, 11 aa, Homo Sapiens
GPYECEIQNPA

SEQ ID NO: 2449 - protein, 11 aa, Homo Sapiens
CEIQNPASANF

SEQ ID NO: 2450 - protein, 11 aa, Homo Sapiens
NPASANFSDPV

SEQ ID NO: 2451 - protein, 11 aa, Homo Sapiens
FSDPVTLNVLY

SEQ ID NO: 2452 - protein, 11 aa, Homo Sapiens
NVLYGPDAPTI

SEQ ID NO: 2453 - protein, 11 aa, Homo Sapiens
VLYGPDAPTIS

SEQ ID NO: 2454 - protein, 11 aa, Homo Sapiens
DAPTISPSDTY

SEQ ID NO: 2455 - protein, 11 aa, Homo Sapiens
APTISPSDTYY

SEQ ID NO: 2456 - protein, 11 aa, Homo Sapiens
TISPSDTYYHA

SEQ ID NO: 2457 - protein, 11 aa, Homo Sapiens
SPSDTYYHAGV

SEQ ID NO: 2458 - protein, 11 aa, Homo Sapiens
TYYHAGVNLNL

SEQ ID NO: 2459 - protein, 11 aa, Homo Sapiens
GVNLNLSCHAA

SEQ ID NO: 2460 - protein, 11 aa, Homo Sapiens
AASNPPSQYSW

SEQ ID NO: 2461 - protein, 11 aa, Homo Sapiens
SNPPSQYSWSV

SEQ ID NO: 2462 - protein, 11 aa, Homo Sapiens
SQYSWSVNGTF

SEQ ID NO: 2463 - protein, 11 aa, Homo Sapiens
SWSVNGTFQQY

SEQ ID NO: 2464 - protein, 11 aa, Homo Sapiens
SVNGTFQQYTQ

SEQ ID NO: 2465 - protein, 11 aa, Homo Sapiens
GTFQQYTQKLF

SEQ ID NO: 2466 - protein, 11 aa, Homo Sapiens
TFQQYTQKLFI

SEQ ID NO: 2467 - protein, 11 aa, Homo Sapiens
QYTQKLFIPNI

SEQ ID NO: 2468 - protein, 11 aa, Homo Sapiens
HTTNSATGRNR

SEQ ID NO: 2469 - protein, 11 aa, Homo Sapiens
NSATGRNRTTV

SEQ ID NO: 2470 - protein, 11 aa, Homo Sapiens
SATGRNRTTVR

SEQ ID NO: 2471 - protein, 11 aa, Homo Sapiens
TTVRMITVSDA

SEQ ID NO: 2472 - protein, 11 aa, Homo Sapiens
TVRMITVSDAV

SEQ ID NO: 2473 - protein, 11 aa, Homo Sapiens
DAVVQGSSPGL

SEQ ID NO: 2474 - protein, 11 aa, Homo Sapiens
VQGSSPGLSAR

SEQ ID NO: 2475 - protein, 11 aa, Homo Sapiens
SSPGLSARATV

SEQ ID NO: 2476 - protein, 11 aa, Homo Sapiens
SPGLSARATVS

SEQ ID NO: 2477 - protein, 11 aa, Homo Sapiens
GLSARATVSIM

SEQ ID NO: 2478 - protein, 11 aa, Homo Sapiens
LSARATVSIMI

SEQ ID NO: 2479 - protein, 11 aa, Homo Sapiens
ARATVSIMIGV

SEQ ID NO: 2480 - protein, 11 aa, Homo Sapiens
RATVSIMIGVL

SEQ ID NO: 2481 - protein, 11 aa, Homo Sapiens
ATVSIMIGVLA

SEQ ID NO: 2482 - protein, 11 aa, Homo Sapiens
TVSIMIGVLAR

SEQ ID NO: 2483 - protein, 11 aa, Homo Sapiens
VSIMIGVLARV

SEQ ID NO: 2484 - protein, 11 aa, Homo Sapiens
IMIGVLARVAL

SEQ ID NO: 2485 - protein, 11 aa, Homo Sapiens
MIGVLARVALI

SEQ ID NO: 2486 - protein, 386 aa, Homo Sapiens
MRAAPLLLARAASLSLGFLFLLFFWLDRSVLAKELKFVTLVFRHGDRSPIDTFPTDPIKESSWPQGFGQLTQLGMEQHYELGEYIRKRYRKFLNESYKHEQVYIRSTDVDRTLMSAMTNLAALFPPEGVSIWNPILLWQPIPVHTVPLSEDQLLYLPFRNCPRFQELESETLKSEEFQKRLHPYKDFIATLGKLSGLHGQDLFGIWSKVYDPLYCESVHNFTLPSWATEDTMTKLRELSELSLLSLYGIHKQKEKSRLQGGVLVNEILNHMKRATQIPSYKKLIMYSAHDTTVSGLQMALDVYNGLLPPYASCHLTELYFEKGEYFVEMHYRNETQHEPYPLMLPGCSPSCPLERFAELVGPVIPQDWSTECMTTNSHQGTEDSTD

SEQ ID NO: 2487 - protein, 8 aa, Homo Sapiens
MRAAPLLL

SEQ ID NO: 2488 - protein, 8 aa, Homo Sapiens
RAAPLLLA

SEQ ID NO: 2489 - protein, 8 aa, Homo Sapiens
APLLLARA

SEQ ID NO: 2490 - protein, 8 aa, Homo Sapiens
PLLLARAA

SEQ ID NO: 2491 - protein, 8 aa, Homo Sapiens
LLARAASL

SEQ ID NO: 2492 - protein, 8 aa, Homo Sapiens
ARAASLSL

SEQ ID NO: 2493 - protein, 8 aa, Homo Sapiens
SLSLGFLF

SEQ ID NO: 2494 - protein, 8 aa, Homo Sapiens
LSLGFLFL

SEQ ID NO: 2495 - protein, 8 aa, Homo Sapiens
SLGFLFLL

SEQ ID NO: 2496 - protein, 8 aa, Homo Sapiens
GFLFLLFF

SEQ ID NO: 2497 - protein, 8 aa, Homo Sapiens
FLFLLFFW

SEQ ID NO: 2498 - protein, 8 aa, Homo Sapiens
LFLLFFWL

SEQ ID NO: 2499 - protein, 8 aa, Homo Sapiens
FLLFFWLD

SEQ ID NO: 2500 - protein, 8 aa, Homo Sapiens
LLFFWLDR

SEQ ID NO: 2501 - protein, 8 aa, Homo Sapiens
FFWLDRSV

SEQ ID NO: 2502 - protein, 8 aa, Homo Sapiens
FWLDRSVL

SEQ ID NO: 2503 - protein, 8 aa, Homo Sapiens
WLDRSVLA

SEQ ID NO: 2504 - protein, 8 aa, Homo Sapiens
SVLAKELK

SEQ ID NO: 2505 - protein, 8 aa, Homo Sapiens
LAKELKFV

SEQ ID NO: 2506 - protein, 8 aa, Homo Sapiens
KELKFVTL

SEQ ID NO: 2507 - protein, 8 aa, Homo Sapiens
ELKFVTLV

SEQ ID NO: 2508 - protein, 8 aa, Homo Sapiens
KFVTLVFR

SEQ ID NO: 2509 - protein, 8 aa, Homo Sapiens
LVFRHGDR

SEQ ID NO: 2510 - protein, 8 aa, Homo Sapiens
SPIDTFPT

SEQ ID NO: 2511 - protein, 8 aa, Homo Sapiens
DTFPTDPI

SEQ ID NO: 2512 - protein, 8 aa, Homo Sapiens
DPIKESSW

SEQ ID NO: 2513 - protein, 8 aa, Homo Sapiens
WPQGFGQL

SEQ ID NO: 2514 - protein, 8 aa, Homo Sapiens
GFGQLTQL

SEQ ID NO: 2515 - protein, 8 aa, Homo Sapiens
GQLTQLGM

SEQ ID NO: 2516 - protein, 8 aa, Homo Sapiens
QLGMEQHY

SEQ ID NO: 2517 - protein, 8 aa, Homo Sapiens
GMEQHYEL

SEQ ID NO: 2518 - protein, 8 aa, Homo Sapiens
HYELGEYI

SEQ ID NO: 2519 - protein, 8 aa, Homo Sapiens
EYIRKRYR

SEQ ID NO: 2520 - protein, 8 aa, Homo Sapiens
YIRKRYRK

SEQ ID NO: 2521 - protein, 8 aa, Homo Sapiens
RKRYRKFL

SEQ ID NO: 2522 - protein, 8 aa, Homo Sapiens
KFLNESYK

SEQ ID NO: 2523 - protein, 8 aa, Homo Sapiens
ESYKHEQV

SEQ ID NO: 2524 - protein, 8 aa, Homo Sapiens
SYKHEQVY

SEQ ID NO: 2525 - protein, 8 aa, Homo Sapiens
VYIRSTDV

SEQ ID NO: 2526 - protein, 8 aa, Homo Sapiens
STDVDRTL

SEQ ID NO: 2527 - protein, 8 aa, Homo Sapiens
LMSAMTNL

SEQ ID NO: 2528 - protein, 8 aa, Homo Sapiens
MSAMTNLA

SEQ ID NO: 2529 - protein, 8 aa, Homo Sapiens
SAMTNLAA

SEQ ID NO: 2530 - protein, 8 aa, Homo Sapiens
AMTNLAAL

SEQ ID NO: 2531 - protein, 8 aa, Homo Sapiens
MTNLAALF

SEQ ID NO: 2532 - protein, 8 aa, Homo Sapiens
ALFPPEGV

SEQ ID NO: 2533 - protein, 8 aa, Homo Sapiens
FPPEGVSI

SEQ ID NO: 2534 - protein, 8 aa, Homo Sapiens
PPEGVSIW

SEQ ID NO: 2535 - protein, 8 aa, Homo Sapiens
GVSIWNPI

SEQ ID NO: 2536 - protein, 8 aa, Homo Sapiens
SIWNPILL

SEQ ID NO: 2537 - protein, 8 aa, Homo Sapiens
IWNPILLW

SEQ ID NO: 2538 - protein, 8 aa, Homo Sapiens
LLWQPIPV

SEQ ID NO: 2539 - protein, 8 aa, Homo Sapiens
QPIPVHTV

SEQ ID NO: 2540 - protein, 8 aa, Homo Sapiens
IPVHTVPL

SEQ ID NO: 2541 - protein, 8 aa, Homo Sapiens
PLSEDQLL

SEQ ID NO: 2542 - protein, 8 aa, Homo Sapiens
LSEDQLLY

SEQ ID NO: 2543 - protein, 8 aa, Homo Sapiens
SEDQLLYL

SEQ ID NO: 2544 - protein, 8 aa, Homo Sapiens
DQLLYLPF

SEQ ID NO: 2545 - protein, 8 aa, Homo Sapiens
QLLYLPFR

SEQ ID NO: 2546 - protein, 8 aa, Homo Sapiens
LPFRNCPR

SEQ ID NO: 2547 - protein, 8 aa, Homo Sapiens
PFRNCPRF

SEQ ID NO: 2548 - protein, 8 aa, Homo Sapiens
FQELESET

SEQ ID NO: 2549 - protein, 8 aa, Homo Sapiens
QELESETL

SEQ ID NO: 2550 - protein, 8 aa, Homo Sapiens
ELESETLK

SEQ ID NO: 2551 - protein, 8 aa, Homo Sapiens
ETLKSEEF

SEQ ID NO: 2552 - protein, 8 aa, Homo Sapiens
KSEEFQKR

SEQ ID NO: 2553 - protein, 8 aa, Homo Sapiens
SEEFQKRL

SEQ ID NO: 2554 - protein, 8 aa, Homo Sapiens
FQKRLHPY

SEQ ID NO: 2555 - protein, 8 aa, Homo Sapiens
QKRLHPYK

SEQ ID NO: 2556 - protein, 8 aa, Homo Sapiens
RLHPYKDF

SEQ ID NO: 2557 - protein, 8 aa, Homo Sapiens
HPYKDFIA

SEQ ID NO: 2558 - protein, 8 aa, Homo Sapiens
YKDFIATL

SEQ ID NO: 2559 - protein, 8 aa, Homo Sapiens
DFIATLGK

SEQ ID NO: 2560 - protein, 8 aa, Homo Sapiens
FIATLGKL

SEQ ID NO: 2561 - protein, 8 aa, Homo Sapiens
TLGKLSGL

SEQ ID NO: 2562 - protein, 8 aa, Homo Sapiens
KLSGLHGQ

SEQ ID NO: 2563 - protein, 8 aa, Homo Sapiens
HGQDLFGI

SEQ ID NO: 2564 - protein, 8 aa, Homo Sapiens
DLFGIWSK

SEQ ID NO: 2565 - protein, 8 aa, Homo Sapiens
FGIWSKVY

SEQ ID NO: 2566 - protein, 8 aa, Homo Sapiens
KVYDPLYC

SEQ ID NO: 2567 - protein, 8 aa, Homo Sapiens
DPLYCESV

SEQ ID NO: 2568 - protein, 8 aa, Homo Sapiens
ESVHNFTL

SEQ ID NO: 2569 - protein, 8 aa, Homo Sapiens
FTLPSWAT

SEQ ID NO: 2570 - protein, 8 aa, Homo Sapiens
ATEDTMTK

SEQ ID NO: 2571 - protein, 8 aa, Homo Sapiens
TEDTMTKL

SEQ ID NO: 2572 - protein, 8 aa, Homo Sapiens
EDTMTKLR

SEQ ID NO: 2573 - protein, 8 aa, Homo Sapiens
TMTKLREL

SEQ ID NO: 2574 - protein, 8 aa, Homo Sapiens
KLRELSEL

SEQ ID NO: 2575 - protein, 8 aa, Homo Sapiens
RELSELSL

SEQ ID NO: 2576 - protein, 8 aa, Homo Sapiens
ELSELSLL

SEQ ID NO: 2577 - protein, 8 aa, Homo Sapiens
SELSLLSL

SEQ ID NO: 2578 - protein, 8 aa, Homo Sapiens
ELSLLSLY

SEQ ID NO: 2579 - protein, 8 aa, Homo Sapiens
SLLSLYGI

SEQ ID NO: 2580 - protein, 8 aa, Homo Sapiens
LSLYGIHK

SEQ ID NO: 2581 - protein, 8 aa, Homo Sapiens
SLYGIHKQ

SEQ ID NO: 2582 - protein, 8 aa, Homo Sapiens
LYGIHKQK

SEQ ID NO: 2583 - protein, 8 aa, Homo Sapiens
GIHKQKEK

SEQ ID NO: 2584 - protein, 8 aa, Homo Sapiens
RLQGGVLV

SEQ ID NO: 2585 - protein, 8 aa, Homo Sapiens
EILNHMKR

SEQ ID NO: 2586 - protein, 8 aa, Homo Sapiens
ILNHMKRA

SEQ ID NO: 2587 - protein, 8 aa, Homo Sapiens
HMKRATQI

SEQ ID NO: 2588 - protein, 8 aa, Homo Sapiens
RATQIPSY

SEQ ID NO: 2589 - protein, 8 aa, Homo Sapiens
ATQIPSYK

SEQ ID NO: 2590 - protein, 8 aa, Homo Sapiens
TQIPSYKK

SEQ ID NO: 2591 - protein, 8 aa, Homo Sapiens
QIPSYKKL

SEQ ID NO: 2592 - protein, 8 aa, Homo Sapiens
IPSYKKLI

SEQ ID NO: 2593 - protein, 8 aa, Homo Sapiens
SYKKLIMY

SEQ ID NO: 2594 - protein, 8 aa, Homo Sapiens
IMYSAHDT

SEQ ID NO: 2595 - protein, 8 aa, Homo Sapiens
YSAHDTTV

SEQ ID NO: 2596 - protein, 8 aa, Homo Sapiens
TTVSGLQM

SEQ ID NO: 2597 - protein, 8 aa, Homo Sapiens
TVSGLQMA

SEQ ID NO: 2598 - protein, 8 aa, Homo Sapiens
GLQMALDV

SEQ ID NO: 2599 - protein, 8 aa, Homo Sapiens
LQMALDVY

SEQ ID NO: 2600 - protein, 8 aa, Homo Sapiens
ALDVYNGL

SEQ ID NO: 2601 - protein, 8 aa, Homo Sapiens
GLLPPYAS

SEQ ID NO: 2602 - protein, 8 aa, Homo Sapiens
LLPPYASC

SEQ ID NO: 2603 - protein, 8 aa, Homo Sapiens
LPPYASCH

SEQ ID NO: 2604 - protein, 8 aa, Homo Sapiens
PPYASCHL

SEQ ID NO: 2605 - protein, 8 aa, Homo Sapiens
CHLTELYF

SEQ ID NO: 2606 - protein, 8 aa, Homo Sapiens
HLTELYFE

SEQ ID NO: 2607 - protein, 8 aa, Homo Sapiens
LTELYFEK

SEQ ID NO: 2608 - protein, 8 aa, Homo Sapiens
LYFEKGEY

SEQ ID NO: 2609 - protein, 8 aa, Homo Sapiens
YFEKGEYF

SEQ ID NO: 2610 - protein, 8 aa, Homo Sapiens
FEKGEYFV

SEQ ID NO: 2611 - protein, 8 aa, Homo Sapiens
EYFVEMHY

SEQ ID NO: 2612 - protein, 8 aa, Homo Sapiens
YFVEMHYR

SEQ ID NO: 2613 - protein, 8 aa, Homo Sapiens
NETQHEPY

SEQ ID NO: 2614 - protein, 8 aa, Homo Sapiens
TQHEPYPL

SEQ ID NO: 2615 - protein, 8 aa, Homo Sapiens
HEPYPLML

SEQ ID NO: 2616 - protein, 8 aa, Homo Sapiens
YPLMLPGC

SEQ ID NO: 2617 - protein, 8 aa, Homo Sapiens
LMLPGCSP

SEQ ID NO: 2618 - protein, 8 aa, Homo Sapiens
MLPGCSPS

SEQ ID NO: 2619 - protein, 8 aa, Homo Sapiens
PLERFAEL

SEQ ID NO: 2620 - protein, 8 aa, Homo Sapiens
FAELVGPV

SEQ ID NO: 2621 - protein, 8 aa, Homo Sapiens
AELVGPVI

SEQ ID NO: 2622 - protein, 9 aa, Homo Sapiens
RAAPLLLAR

SEQ ID NO: 2623 - protein, 9 aa, Homo Sapiens
APLLLARAA

SEQ ID NO: 2624 - protein, 9 aa, Homo Sapiens
LLLARAASL

SEQ ID NO: 2625 - protein, 9 aa, Homo Sapiens
LARAASLSL

SEQ ID NO: 2626 - protein, 9 aa, Homo Sapiens
RAASLSLGF

SEQ ID NO: 2627 - protein, 9 aa, Homo Sapiens
AASLSLGFL

SEQ ID NO: 2628 - protein, 9 aa, Homo Sapiens
ASLSLGFLF

SEQ ID NO: 2629 - protein, 9 aa, Homo Sapiens
SLSLGFLFL

SEQ ID NO: 2630 - protein, 9 aa, Homo Sapiens
LSLGFLFLL

SEQ ID NO: 2631 - protein, 9 aa, Homo Sapiens
SLGFLFLLF

SEQ ID NO: 2632 - protein, 9 aa, Homo Sapiens
GFLFLLFFW

SEQ ID NO: 2633 - protein, 9 aa, Homo Sapiens
FLFLLFFWL

SEQ ID NO: 2634 - protein, 9 aa, Homo Sapiens
FLLFFWLDR

SEQ ID NO: 2635 - protein, 9 aa, Homo Sapiens
LLFFWLDRS

SEQ ID NO: 2636 - protein, 9 aa, Homo Sapiens
LFFWLDRSV

SEQ ID NO: 2637 - protein, 9 aa, Homo Sapiens
FFWLDRSVL

SEQ ID NO: 2638 - protein, 9 aa, Homo Sapiens
FWLDRSVLA

SEQ ID NO: 2639 - protein, 9 aa, Homo Sapiens
WLDRSVLAK

SEQ ID NO: 2640 - protein, 9 aa, Homo Sapiens
RSVLAKELK

SEQ ID NO: 2641 - protein, 9 aa, Homo Sapiens
SVLAKELKF

SEQ ID NO: 2642 - protein, 9 aa, Homo Sapiens
VLAKELKFV

SEQ ID NO: 2643 - protein, 9 aa, Homo Sapiens
KELKFVTLV

SEQ ID NO: 2644 - protein, 9 aa, Homo Sapiens
ELKFVTLVF

SEQ ID NO: 2645 - protein, 9 aa, Homo Sapiens
LKFVTLVFR

SEQ ID NO: 2646 - protein, 9 aa, Homo Sapiens
KFVTLVFRH

SEQ ID NO: 2647 - protein, 9 aa, Homo Sapiens
TLVFRHGDR

SEQ ID NO: 2648 - protein, 9 aa, Homo Sapiens
FRHGDRSPI

SEQ ID NO: 2649 - protein, 9 aa, Homo Sapiens
DTFPTDPIK

SEQ ID NO: 2650 - protein, 9 aa, Homo Sapiens
FPTDPIKES

SEQ ID NO: 2651 - protein, 9 aa, Homo Sapiens
KESSWPQGF

SEQ ID NO: 2652 - protein, 9 aa, Homo Sapiens
SWPQGFGQL

SEQ ID NO: 2653 - protein, 9 aa, Homo Sapiens
WPQGFGQLT

SEQ ID NO: 2654 - protein, 9 aa, Homo Sapiens
QLTQLGMEQ

SEQ ID NO: 2655 - protein, 9 aa, Homo Sapiens
TQLGMEQHY

SEQ ID NO: 2656 - protein, 9 aa, Homo Sapiens
LGMEQHYEL

SEQ ID NO: 2657 - protein, 9 aa, Homo Sapiens
EQHYELGEY

SEQ ID NO: 2658 - protein, 9 aa, Homo Sapiens
HYELGEYIR

SEQ ID NO: 2659 - protein, 9 aa, Homo Sapiens
ELGEYIRKR

SEQ ID NO: 2660 - protein, 9 aa, Homo Sapiens
GEYIRKRYR

SEQ ID NO: 2661 - protein, 9 aa, Homo Sapiens
EYIRKRYRK

SEQ ID NO: 2662 - protein, 9 aa, Homo Sapiens
YIRKRYRKF

SEQ ID NO: 2663 - protein, 9 aa, Homo Sapiens
KRYRKFLNE

SEQ ID NO: 2664 - protein, 9 aa, Homo Sapiens
YRKFLNESY

SEQ ID NO: 2665 - protein, 9 aa, Homo Sapiens
ESYKHEQVY

SEQ ID NO: 2666 - protein, 9 aa, Homo Sapiens
SYKHEQVYI

SEQ ID NO: 2667 - protein, 9 aa, Homo Sapiens
QVYIRSTDV

SEQ ID NO: 2668 - protein, 9 aa, Homo Sapiens
YIRSTDVDR

SEQ ID NO: 2669 - protein, 9 aa, Homo Sapiens
STDVDRTLM

SEQ ID NO: 2670 - protein, 9 aa, Homo Sapiens
DVDRTLMSA

SEQ ID NO: 2671 - protein, 9 aa, Homo Sapiens
TLMSAMTNL

SEQ ID NO: 2672 - protein, 9 aa, Homo Sapiens
LMSAMTNLA

SEQ ID NO: 2673 - protein, 9 aa, Homo Sapiens
MSAMTNLAA

SEQ ID NO: 2674 - protein, 9 aa, Homo Sapiens
SAMTNLAAL

SEQ ID NO: 2675 - protein, 9 aa, Homo Sapiens
AMTNLAALF

SEQ ID NO: 2676 - protein, 9 aa, Homo Sapiens
AALFPPEGV

SEQ ID NO: 2677 - protein, 9 aa, Homo Sapiens
LFPPEGVSI

SEQ ID NO: 2678 - protein, 9 aa, Homo Sapiens
FPPEGVSIW

SEQ ID NO: 2679 - protein, 9 aa, Homo Sapiens
EGVSIWNPI

SEQ ID NO: 2680 - protein, 9 aa, Homo Sapiens
SIWNPILLW

SEQ ID NO: 2681 - protein, 9 aa, Homo Sapiens
NPILLWQPI

SEQ ID NO: 2682 - protein, 9 aa, Homo Sapiens
ILLWQPIPV

SEQ ID NO: 2683 - protein, 9 aa, Homo Sapiens
WQPIPVHTV

SEQ ID NO: 2684 - protein, 9 aa, Homo Sapiens
PIPVHTVPL

SEQ ID NO: 2685 - protein, 9 aa, Homo Sapiens
IPVHTVPLS

SEQ ID NO: 2686 - protein, 9 aa, Homo Sapiens
VPLSEDQLL

SEQ ID NO: 2687 - protein, 9 aa, Homo Sapiens
PLSEDQLLY

SEQ ID NO: 2688 - protein, 9 aa, Homo Sapiens
DQLLYLPFR

SEQ ID NO: 2689 - protein, 9 aa, Homo Sapiens
YLPFRNCPR

SEQ ID NO: 2690 - protein, 9 aa, Homo Sapiens
LPFRNCPRF

SEQ ID NO: 2691 - protein, 9 aa, Homo Sapiens
FQELESETL

SEQ ID NO: 2692 - protein, 9 aa, Homo Sapiens
TLKSEEFQK

SEQ ID NO: 2693 - protein, 9 aa, Homo Sapiens
EFQKRLHPY

SEQ ID NO: 2694 - protein, 9 aa, Homo Sapiens
FQKRLHPYK

SEQ ID NO: 2695 - protein, 9 aa, Homo Sapiens
KRLHPYKDF

SEQ ID NO: 2696 - protein, 9 aa, Homo Sapiens
RLHPYKDFI

SEQ ID NO: 2697 - protein, 9 aa, Homo Sapiens
HPYKDFIAT

SEQ ID NO: 2698 - protein, 9 aa, Homo Sapiens
PYKDFIATL

SEQ ID NO: 2699 - protein, 9 aa, Homo Sapiens
KDFIATLGK

SEQ ID NO: 2700 - protein, 9 aa, Homo Sapiens
DFIATLGKL

SEQ ID NO: 2701 - protein, 9 aa, Homo Sapiens
ATLGKLSGL

SEQ ID NO: 2702 - protein, 9 aa, Homo Sapiens
DLFGIWSKV

SEQ ID NO: 2703 - protein, 9 aa, Homo Sapiens
IWSKVYDPL

SEQ ID NO: 2704 - protein, 9 aa, Homo Sapiens
WSKVYDPLY

SEQ ID NO: 2705 - protein, 9 aa, Homo Sapiens
KVYDPLYCE

SEQ ID NO: 2706 - protein, 9 aa, Homo Sapiens
DPLYCESVH

SEQ ID NO: 2707 - protein, 9 aa, Homo Sapiens
LYCESVHNF

SEQ ID NO: 2708 - protein, 9 aa, Homo Sapiens
CESVHNFTL

SEQ ID NO: 2709 - protein, 9 aa, Homo Sapiens
SVHNFTLPS

SEQ ID NO: 2710 - protein, 9 aa, Homo Sapiens
FTLPSWATE

SEQ ID NO: 2711 - protein, 9 aa, Homo Sapiens
LPSWATEDT

SEQ ID NO: 2712 - protein, 9 aa, Homo Sapiens
WATEDTMTK

SEQ ID NO: 2713 - protein, 9 aa, Homo Sapiens
ATEDTMTKL

SEQ ID NO: 2714 - protein, 9 aa, Homo Sapiens
DTMTKLREL

SEQ ID NO: 2715 - protein, 9 aa, Homo Sapiens
RELSELSLL

SEQ ID NO: 2716 - protein, 9 aa, Homo Sapiens
ELSELSLLS

SEQ ID NO: 2717 - protein, 9 aa, Homo Sapiens
SELSLLSLY

SEQ ID NO: 2718 - protein, 9 aa, Homo Sapiens
LLSLYGIHK

SEQ ID NO: 2719 - protein, 9 aa, Homo Sapiens
SLYGIHKQK

SEQ ID NO: 2720 - protein, 9 aa, Homo Sapiens
SRLQGGVLV

SEQ ID NO: 2721 - protein, 9 aa, Homo Sapiens
RLQGGVLVN

SEQ ID NO: 2722 - protein, 9 aa, Homo Sapiens
LVNEILNHM

SEQ ID NO: 2723 - protein, 9 aa, Homo Sapiens
NEILNHMKR

SEQ ID NO: 2724 - protein, 9 aa, Homo Sapiens
EILNHMKRA

SEQ ID NO: 2725 - protein, 9 aa, Homo Sapiens
KRATQIPSY

SEQ ID NO: 2726 - protein, 9 aa, Homo Sapiens
RATQIPSYK

SEQ ID NO: 2727 - protein, 9 aa, Homo Sapiens
ATQIPSYKK

SEQ ID NO: 2728 - protein, 9 aa, Homo Sapiens
IPSYKKLIM

SEQ ID NO: 2729 - protein, 9 aa, Homo Sapiens
YKKLIMYSA

SEQ ID NO: 2730 - protein, 9 aa, Homo Sapiens
IMYSAHDTT

SEQ ID NO: 2731 - protein, 9 aa, Homo Sapiens
MYSAHDTTV

SEQ ID NO: 2732 - protein, 9 aa, Homo Sapiens
AHDTTVSGL

SEQ ID NO: 2733 - protein, 9 aa, Homo Sapiens
DTTVSGLQM

SEQ ID NO: 2734 - protein, 9 aa, Homo Sapiens
TTVSGLQMA

SEQ ID NO: 2735 - protein, 9 aa, Homo Sapiens
TVSGLQMAL

SEQ ID NO: 2736 - protein, 9 aa, Homo Sapiens
MALDVYNGL

SEQ ID NO: 2737 - protein, 9 aa, Homo Sapiens
ALDVYNGLL

SEQ ID NO: 2738 - protein, 9 aa, Homo Sapiens
VYNGLLPPY

SEQ ID NO: 2739 - protein, 9 aa, Homo Sapiens
GLLPPYASC

SEQ ID NO: 2740 - protein, 9 aa, Homo Sapiens
LPPYASCHL

SEQ ID NO: 2741 - protein, 9 aa, Homo Sapiens
YASCHLTEL

SEQ ID NO: 2742 - protein, 9 aa, Homo Sapiens
ASCHLTELY

SEQ ID NO: 2743 - protein, 9 aa, Homo Sapiens
HLTELYFEK

SEQ ID NO: 2744 - protein, 9 aa, Homo Sapiens
ELYFEKGEY

SEQ ID NO: 2745 - protein, 9 aa, Homo Sapiens
LYFEKGEYF

SEQ ID NO: 2746 - protein, 9 aa, Homo Sapiens
YFEKGEYFV

SEQ ID NO: 2747 - protein, 9 aa, Homo Sapiens
EYFVEMHYR

SEQ ID NO: 2748 - protein, 9 aa, Homo Sapiens
VEMHYRNET

SEQ ID NO: 2749 - protein, 9 aa, Homo Sapiens
ETQHEPYPL

SEQ ID NO: 2750 - protein, 9 aa, Homo Sapiens
TQHEPYPLM

SEQ ID NO: 2751 - protein, 9 aa, Homo Sapiens
QHEPYPLML

SEQ ID NO: 2752 - protein, 9 aa, Homo Sapiens
YPLMLPGCS

SEQ ID NO: 2753 - protein, 9 aa, Homo Sapiens
LMLPGCSPS

SEQ ID NO: 2754 - protein, 9 aa, Homo Sapiens
MLPGCSPSC

SEQ ID NO: 2755 - protein, 9 aa, Homo Sapiens
CSPSCPLER

SEQ ID NO: 2756 - protein, 9 aa, Homo Sapiens
SPSCPLERF

SEQ ID NO: 2757 - protein, 9 aa, Homo Sapiens
CPLERFAEL

SEQ ID NO: 2758 - protein, 9 aa, Homo Sapiens
PLERFAELV

SEQ ID NO: 2759 - protein, 9 aa, Homo Sapiens
RFAELVGPV

SEQ ID NO: 2760 - protein, 9 aa, Homo Sapiens
FAELVGPVI

SEQ ID NO: 2761 - protein, 9 aa, Homo Sapiens
ELVGPVIPQ

SEQ ID NO: 2762 - protein, 9 aa, Homo Sapiens
MTTNSHQGT

SEQ ID NO: 2763 - protein, 10 aa, Homo Sapiens
RAAPLLLARA

SEQ ID NO: 2764 - protein, 10 aa, Homo Sapiens
APLLLARAAS

SEQ ID NO: 2765 - protein, 10 aa, Homo Sapiens
PLLLARAASL

SEQ ID NO: 2766 - protein, 10 aa, Homo Sapiens
LLARAASLSL

SEQ ID NO: 2767 - protein, 10 aa, Homo Sapiens
ARAASLSLGF

SEQ ID NO: 2768 - protein, 10 aa, Homo Sapiens
RAASLSLGFL

SEQ ID NO: 2769 - protein, 10 aa, Homo Sapiens
ASLSLGFLFL

SEQ ID NO: 2770 - protein, 10 aa, Homo Sapiens
SLSLGFLFLL

SEQ ID NO: 2771 - protein, 10 aa, Homo Sapiens
LSLGFLFLLF

SEQ ID NO: 2772 - protein, 10 aa, Homo Sapiens
SLGFLFLLFF

SEQ ID NO: 2773 - protein, 10 aa, Homo Sapiens
LGFLFLLFFW

SEQ ID NO: 2774 - protein, 10 aa, Homo Sapiens
GFLFLLFFWL

SEQ ID NO: 2775 - protein, 10 aa, Homo Sapiens
FLFLLFFWLD

SEQ ID NO: 2776 - protein, 10 aa, Homo Sapiens
LFLLFFWLDR

SEQ ID NO: 2777 - protein, 10 aa, Homo Sapiens
FLLFFWLDRS

SEQ ID NO: 2778 - protein, 10 aa, Homo Sapiens
LLFFWLDRSV

SEQ ID NO: 2779 - protein, 10 aa, Homo Sapiens
FWLDRSVLAK

SEQ ID NO: 2780 - protein, 10 aa, Homo Sapiens
RSVLAKELKF

SEQ ID NO: 2781 - protein, 10 aa, Homo Sapiens
SVLAKELKFV

SEQ ID NO: 2782 - protein, 10 aa, Homo Sapiens
VLAKELKFVT

SEQ ID NO: 2783 - protein, 10 aa, Homo Sapiens
KELKFVTLVF

SEQ ID NO: 2784 - protein, 10 aa, Homo Sapiens
ELKFVTLVFR

SEQ ID NO: 2785 - protein, 10 aa, Homo Sapiens
VTLVFRHGDR

SEQ ID NO: 2786 - protein, 10 aa, Homo Sapiens
FPTDPIKESS

SEQ ID NO: 2787 - protein, 10 aa, Homo Sapiens
SSWPQGFGQL

SEQ ID NO: 2788 - protein, 10 aa, Homo Sapiens
LTQLGMEQHY

SEQ ID NO: 2789 - protein, 10 aa, Homo Sapiens
QLGMEQHYEL

SEQ ID NO: 2790 - protein, 10 aa, Homo Sapiens
MEQHYELGEY

SEQ ID NO: 2791 - protein, 10 aa, Homo Sapiens
HYELGEYIRK

SEQ ID NO: 2792 - protein, 10 aa, Homo Sapiens
ELGEYIRKRY

SEQ ID NO: 2793 - protein, 10 aa, Homo Sapiens
GEYIRKRYRK

SEQ ID NO: 2794 - protein, 10 aa, Homo Sapiens
EYIRKRYRKF

SEQ ID NO: 2795 - protein, 10 aa, Homo Sapiens
YIRKRYRKFL

SEQ ID NO: 2796 - protein, 10 aa, Homo Sapiens
RYRKFLNESY

SEQ ID NO: 2797 - protein, 10 aa, Homo Sapiens
YRKFLNESYK

SEQ ID NO: 2798 - protein, 10 aa, Homo Sapiens
FLNESYKHEQ

SEQ ID NO: 2799 - protein, 10 aa, Homo Sapiens
SYKHEQVYIR

SEQ ID NO: 2800 - protein, 10 aa, Homo Sapiens
EQVYIRSTDV

SEQ ID NO: 2801 - protein, 10 aa, Homo Sapiens
VYIRSTDVDR

SEQ ID NO: 2802 - protein, 10 aa, Homo Sapiens
DVDRTLMSAM

SEQ ID NO: 2803 - protein, 10 aa, Homo Sapiens
RTLMSAMTNL

SEQ ID NO: 2804 - protein, 10 aa, Homo Sapiens
TLMSAMTNLA

SEQ ID NO: 2805 - protein, 10 aa, Homo Sapiens
LMSAMTNLAA

SEQ ID NO: 2806 - protein, 10 aa, Homo Sapiens
MSAMTNLAAL

SEQ ID NO: 2807 - protein, 10 aa, Homo Sapiens
SAMTNLAALF

SEQ ID NO: 2808 - protein, 10 aa, Homo Sapiens
LAALFPPEGV

SEQ ID NO: 2809 - protein, 10 aa, Homo Sapiens
ALFPPEGVSI

SEQ ID NO: 2810 - protein, 10 aa, Homo Sapiens
LFPPEGVSIW

SEQ ID NO: 2811 - protein, 10 aa, Homo Sapiens
FPPEGVSIWN

SEQ ID NO: 2812 - protein, 10 aa, Homo Sapiens
GVSIWNPILL

SEQ ID NO: 2813 - protein, 10 aa, Homo Sapiens
VSIWNPILLW

SEQ ID NO: 2814 - protein, 10 aa, Homo Sapiens
SIWNPILLWQ

SEQ ID NO: 2815 - protein, 10 aa, Homo Sapiens
PILLWQPIPV

SEQ ID NO: 2816 - protein, 10 aa, Homo Sapiens
LLWQPIPVHT

SEQ ID NO: 2817 - protein, 10 aa, Homo Sapiens
LWQPIPVHTV

SEQ ID NO: 2818 - protein, 10 aa, Homo Sapiens
QPIPVHTVPL

SEQ ID NO: 2819 - protein, 10 aa, Homo Sapiens
HTVPLSEDQL

SEQ ID NO: 2820 - protein, 10 aa, Homo Sapiens
VPLSEDQLLY

SEQ ID NO: 2821 - protein, 10 aa, Homo Sapiens
PLSEDQLLYL

SEQ ID NO: 2822 - protein, 10 aa, Homo Sapiens
SEDQLLYLPF

SEQ ID NO: 2823 - protein, 10 aa, Homo Sapiens
LYLPFRNCPR

SEQ ID NO: 2824 - protein, 10 aa, Homo Sapiens
YLPFRNCPRF

SEQ ID NO: 2825 - protein, 10 aa, Homo Sapiens
FRNCPRFQEL

SEQ ID NO: 2826 - protein, 10 aa, Homo Sapiens
RFQELESETL

SEQ ID NO: 2827 - protein, 10 aa, Homo Sapiens
ETLKSEEFQK

SEQ ID NO: 2828 - protein, 10 aa, Homo Sapiens
TLKSEEFQKR

SEQ ID NO: 2829 - protein, 10 aa, Homo Sapiens
EEFQKRLHPY

SEQ ID NO: 2830 - protein, 10 aa, Homo Sapiens
EFQKRLHPYK

SEQ ID NO: 2831 - protein, 10 aa, Homo Sapiens
RLHPYKDFIA

SEQ ID NO: 2832 - protein, 10 aa, Homo Sapiens
HPYKDFIATL

SEQ ID NO: 2833 - protein, 10 aa, Homo Sapiens
KLSGLHGQDL

SEQ ID NO: 2834 - protein, 10 aa, Homo Sapiens
GLHGQDLFGI

SEQ ID NO: 2835 - protein, 10 aa, Homo Sapiens
GQDLFGIWSK

SEQ ID NO: 2836 - protein, 10 aa, Homo Sapiens
DLFGIWSKVY

SEQ ID NO: 2837 - protein, 10 aa, Homo Sapiens
GIWSKVYDPL

SEQ ID NO: 2838 - protein, 10 aa, Homo Sapiens
IWSKVYDPLY

SEQ ID NO: 2839 - protein, 10 aa, Homo Sapiens
KVYDPLYCES

SEQ ID NO: 2840 - protein, 10 aa, Homo Sapiens
VYDPLYCESV

SEQ ID NO: 2841 - protein, 10 aa, Homo Sapiens
PLYCESVHNF

SEQ ID NO: 2842 - protein, 10 aa, Homo Sapiens
LPSWATEDTM

SEQ ID NO: 2843 - protein, 10 aa, Homo Sapiens
SWATEDTMTK

SEQ ID NO: 2844 - protein, 10 aa, Homo Sapiens
WATEDTMTKL

SEQ ID NO: 2845 - protein, 10 aa, Homo Sapiens
ATEDTMTKLR

SEQ ID NO: 2846 - protein, 10 aa, Homo Sapiens
MTKLRELSEL

SEQ ID NO: 2847 - protein, 10 aa, Homo Sapiens
KLRELSELSL

SEQ ID NO: 2848 - protein, 10 aa, Homo Sapiens
ELSELSLLSL

SEQ ID NO: 2849 - protein, 10 aa, Homo Sapiens
LSELSLLSLY

SEQ ID NO: 2850 - protein, 10 aa, Homo Sapiens
ELSLLSLYGI

SEQ ID NO: 2851 - protein, 10 aa, Homo Sapiens
SLLSLYGIHK

SEQ ID NO: 2852 - protein, 10 aa, Homo Sapiens
LLSLYGIHKQ

SEQ ID NO: 2853 - protein, 10 aa, Homo Sapiens
LSLYGIHKQK

SEQ ID NO: 2854 - protein, 10 aa, Homo Sapiens
SLYGIHKQKE

SEQ ID NO: 2855 - protein, 10 aa, Homo Sapiens
LYGIHKQKEK

SEQ ID NO: 2856 - protein, 10 aa, Homo Sapiens
KSRLQGGVLV

SEQ ID NO: 2857 - protein, 10 aa, Homo Sapiens
RLQGGVLVNE

SEQ ID NO: 2858 - protein, 10 aa, Homo Sapiens
LQGGVLVNEI

SEQ ID NO: 2859 - protein, 10 aa, Homo Sapiens
VLVNEILNHM

SEQ ID NO: 2860 - protein, 10 aa, Homo Sapiens
LVNEILNHMK

SEQ ID NO: 2861 - protein, 10 aa, Homo Sapiens
KRATQIPSYK

SEQ ID NO: 2862 - protein, 10 aa, Homo Sapiens
RATQIPSYKK

SEQ ID NO: 2863 - protein, 10 aa, Homo Sapiens
TQIPSYKKLI

SEQ ID NO: 2864 - protein, 10 aa, Homo Sapiens
QIPSYKKLIM

SEQ ID NO: 2865 - protein, 10 aa, Homo Sapiens
IPSYKKLIMY

SEQ ID NO: 2866 - protein, 10 aa, Homo Sapiens
IMYSAHDTTV

SEQ ID NO: 2867 - protein, 10 aa, Homo Sapiens
SAHDTTVSGL

SEQ ID NO: 2868 - protein, 10 aa, Homo Sapiens
TTVSGLQMAL

SEQ ID NO: 2869 - protein, 10 aa, Homo Sapiens
QMALDVYNGL

SEQ ID NO: 2870 - protein, 10 aa, Homo Sapiens
MALDVYNGLL

SEQ ID NO: 2871 - protein, 10 aa, Homo Sapiens
DVYNGLLPPY

SEQ ID NO: 2872 - protein, 10 aa, Homo Sapiens
LLPPYASCHL

SEQ ID NO: 2873 - protein, 10 aa, Homo Sapiens
LPPYASCHLT

SEQ ID NO: 2874 - protein, 10 aa, Homo Sapiens
PYASCHLTEL

SEQ ID NO: 2875 - protein, 10 aa, Homo Sapiens
YASCHLTELY

SEQ ID NO: 2876 - protein, 10 aa, Homo Sapiens
TELYFEKGEY

SEQ ID NO: 2877 - protein, 10 aa, Homo Sapiens
ELYFEKGEYF

SEQ ID NO: 2878 - protein, 10 aa, Homo Sapiens
LYFEKGEYFV

SEQ ID NO: 2879 - protein, 10 aa, Homo Sapiens
FEKGEYFVEM

SEQ ID NO: 2880 - protein, 10 aa, Homo Sapiens
GEYFVEMHYR

SEQ ID NO: 2881 - protein, 10 aa, Homo Sapiens
YRNETQHEPY

SEQ ID NO: 2882 - protein, 10 aa, Homo Sapiens
NETQHEPYPL

SEQ ID NO: 2883 - protein, 10 aa, Homo Sapiens
ETQHEPYPLM

SEQ ID NO: 2884 - protein, 10 aa, Homo Sapiens
TQHEPYPLML

SEQ ID NO: 2885 - protein, 10 aa, Homo Sapiens
EPYPLMLPGC

SEQ ID NO: 2886 - protein, 10 aa, Homo Sapiens
YPLMLPGCSP

SEQ ID NO: 2887 - protein, 10 aa, Homo Sapiens
LMLPGCSPSC

SEQ ID NO: 2888 - protein, 10 aa, Homo Sapiens
LPGCSPSCPL

SEQ ID NO: 2889 - protein, 10 aa, Homo Sapiens
CPLERFAELV

SEQ ID NO: 2890 - protein, 10 aa, Homo Sapiens
ERFAELVGPV

SEQ ID NO: 2891 - protein, 10 aa, Homo Sapiens
RFAELVGPVI

SEQ ID NO: 2892 - protein, 10 aa, Homo Sapiens
LVGPVIPQDW

SEQ ID NO: 2893 - protein, 10 aa, Homo Sapiens
IPQDWSTECM

SEQ ID NO: 2894 - protein, 11 aa, Homo Sapiens
MRAAPLLLARA

SEQ ID NO: 2895 - protein, 11 aa, Homo Sapiens
APLLLARAASL

SEQ ID NO: 2896 - protein, 11 aa, Homo Sapiens
LLLARAASLSL

SEQ ID NO: 2897 - protein, 11 aa, Homo Sapiens
LARAASLSLGF

SEQ ID NO: 2898 - protein, 11 aa, Homo Sapiens
RAASLSLGFLF

SEQ ID NO: 2899 - protein, 11 aa, Homo Sapiens
AASLSLGFLFL

SEQ ID NO: 2900 - protein, 11 aa, Homo Sapiens
ASLSLGFLFLL

SEQ ID NO: 2901 - protein, 11 aa, Homo Sapiens
SLSLGFLFLLF

SEQ ID NO: 2902 - protein, 11 aa, Homo Sapiens
LSLGFLFLLFF

SEQ ID NO: 2903 - protein, 11 aa, Homo Sapiens
SLGFLFLLFFW

SEQ ID NO: 2904 - protein, 11 aa, Homo Sapiens
LGFLFLLFFWL

SEQ ID NO: 2905 - protein, 11 aa, Homo Sapiens
FLFLLFFWLDR

SEQ ID NO: 2906 - protein, 11 aa, Homo Sapiens
FLLFFWLDRSV

SEQ ID NO: 2907 - protein, 11 aa, Homo Sapiens
LLFFWLDRSVL

SEQ ID NO: 2908 - protein, 11 aa, Homo Sapiens
FFWLDRSVLAK

SEQ ID NO: 2909 - protein, 11 aa, Homo Sapiens
WLDRSVLAKEL

SEQ ID NO: 2910 - protein, 11 aa, Homo Sapiens
VLAKELKFVTL

SEQ ID NO: 2911 - protein, 11 aa, Homo Sapiens
LAKELKFVTLV

SEQ ID NO: 2912 - protein, 11 aa, Homo Sapiens
KELKFVTLVFR

SEQ ID NO: 2913 - protein, 11 aa, Homo Sapiens
FVTLVFRHGDR

SEQ ID NO: 2914 - protein, 11 aa, Homo Sapiens
LVFRHGDRSPI

SEQ ID NO: 2915 - protein, 11 aa, Homo Sapiens
SPIDTFPTDPI

SEQ ID NO: 2916 - protein, 11 aa, Homo Sapiens
FPTDPIKESSW

SEQ ID NO: 2917 - protein, 11 aa, Homo Sapiens
ESSWPQGFGQL

SEQ ID NO: 2918 - protein, 11 aa, Homo Sapiens
WPQGFGQLTQL

SEQ ID NO: 2919 - protein, 11 aa, Homo Sapiens
QLTQLGMEQHY

SEQ ID NO: 2920 - protein, 11 aa, Homo Sapiens
TQLGMEQHYEL

SEQ ID NO: 2921 - protein, 11 aa, Homo Sapiens
GMEQHYELGEY

SEQ ID NO: 2922 - protein, 11 aa, Homo Sapiens
MEQHYELGEYI

SEQ ID NO: 2923 - protein, 11 aa, Homo Sapiens
EQHYELGEYIR

SEQ ID NO: 2924 - protein, 11 aa, Homo Sapiens
HYELGEYIRKR

SEQ ID NO: 2925 - protein, 11 aa, Homo Sapiens
YELGEYIRKRY

SEQ ID NO: 2926 - protein, 11 aa, Homo Sapiens
ELGEYIRKRYR

SEQ ID NO: 2927 - protein, 11 aa, Homo Sapiens
EYIRKRYRKFL

SEQ ID NO: 2928 - protein, 11 aa, Homo Sapiens
KRYRKFLNESY

SEQ ID NO: 2929 - protein, 11 aa, Homo Sapiens
RYRKFLNESYK

SEQ ID NO: 2930 - protein, 11 aa, Homo Sapiens
FLNESYKHEQV

SEQ ID NO: 2931 - protein, 11 aa, Homo Sapiens
ESYKHEQVYIR

SEQ ID NO: 2932 - protein, 11 aa, Homo Sapiens
QVYIRSTDVDR

SEQ ID NO: 2933 - protein, 11 aa, Homo Sapiens
YIRSTDVDRTL

SEQ ID NO: 2934 - protein, 11 aa, Homo Sapiens
STDVDRTLMSA

SEQ ID NO: 2935 - protein, 11 aa, Homo Sapiens
RTLMSAMTNLA

SEQ ID NO: 2936 - protein, 11 aa, Homo Sapiens
TLMSAMTNLAA

SEQ ID NO: 2937 - protein, 11 aa, Homo Sapiens
LMSAMTNLAAL

SEQ ID NO: 2938 - protein, 11 aa, Homo Sapiens
MSAMTNLAALF

SEQ ID NO: 2939 - protein, 11 aa, Homo Sapiens
MTNLAALFPPE

SEQ ID NO: 2940 - protein, 11 aa, Homo Sapiens
NLAALFPPEGV

SEQ ID NO: 2941 - protein, 11 aa, Homo Sapiens
FPPEGVSIWNP

SEQ ID NO: 2942 - protein, 11 aa, Homo Sapiens
PEGVSIWNPIL

SEQ ID NO: 2943 - protein, 11 aa, Homo Sapiens
EGVSIWNPILL

SEQ ID NO: 2944 - protein, 11 aa, Homo Sapiens
GVSIWNPILLW

SEQ ID NO: 2945 - protein, 11 aa, Homo Sapiens
SIWNPILLWQP

SEQ ID NO: 2946 - protein, 11 aa, Homo Sapiens
IWNPILLWQPI

SEQ ID NO: 2947 - protein, 11 aa, Homo Sapiens
NPILLWQPIPV

SEQ ID NO: 2948 - protein, 11 aa, Homo Sapiens
ILLWQPIPVHT

SEQ ID NO: 2949 - protein, 11 aa, Homo Sapiens
LLWQPIPVHTV

SEQ ID NO: 2950 - protein, 11 aa, Homo Sapiens
WQPIPVHTVPL

SEQ ID NO: 2951 - protein, 11 aa, Homo Sapiens
HTVPLSEDQLL

SEQ ID NO: 2952 - protein, 11 aa, Homo Sapiens
TVPLSEDQLLY

SEQ ID NO: 2953 - protein, 11 aa, Homo Sapiens
VPLSEDQLLYL

SEQ ID NO: 2954 - protein, 11 aa, Homo Sapiens
LSEDQLLYLPF

SEQ ID NO: 2955 - protein, 11 aa, Homo Sapiens
LLYLPFRNCPR

SEQ ID NO: 2956 - protein, 11 aa, Homo Sapiens
LYLPFRNCPRF

SEQ ID NO: 2957 - protein, 11 aa, Homo Sapiens
YLPFRNCPRFQ

SEQ ID NO: 2958 - protein, 11 aa, Homo Sapiens
LPFRNCPRFQE

SEQ ID NO: 2959 - protein, 11 aa, Homo Sapiens
RFQELESETLK

SEQ ID NO: 2960 - protein, 11 aa, Homo Sapiens
LESETLKSEEF

SEQ ID NO: 2961 - protein, 11 aa, Homo Sapiens
ETLKSEEFQKR

SEQ ID NO: 2962 - protein, 11 aa, Homo Sapiens
TLKSEEFQKRL

SEQ ID NO: 2963 - protein, 11 aa, Homo Sapiens
EEFQKRLHPYK

SEQ ID NO: 2964 - protein, 11 aa, Homo Sapiens
FQKRLHPYKDF

SEQ ID NO: 2965 - protein, 11 aa, Homo Sapiens
RLHPYKDFIAT

SEQ ID NO: 2966 - protein, 11 aa, Homo Sapiens
HPYKDFIATLG

SEQ ID NO: 2967 - protein, 11 aa, Homo Sapiens
PYKDFIATLGK

SEQ ID NO: 2968 - protein, 11 aa, Homo Sapiens
FIATLGKLSGL

SEQ ID NO: 2969 - protein, 11 aa, Homo Sapiens
TLGKLSGLHGQ

SEQ ID NO: 2970 - protein, 11 aa, Homo Sapiens
KLSGLHGQDLF

SEQ ID NO: 2971 - protein, 11 aa, Homo Sapiens
GQDLFGIWSKV

SEQ ID NO: 2972 - protein, 11 aa, Homo Sapiens
FGIWSKVYDPL

SEQ ID NO: 2973 - protein, 11 aa, Homo Sapiens
KVYDPLYCESV

SEQ ID NO: 2974 - protein, 11 aa, Homo Sapiens
DPLYCESVHNF

SEQ ID NO: 2975 - protein, 11 aa, Homo Sapiens
PLYCESVHNFT

SEQ ID NO: 2976 - protein, 11 aa, Homo Sapiens
LYCESVHNFTL

SEQ ID NO: 2977 - protein, 11 aa, Homo Sapiens
ESVHNFTLPSW

SEQ ID NO: 2978 - protein, 11 aa, Homo Sapiens
SVHNFTLPSWA

SEQ ID NO: 2979 - protein, 11 aa, Homo Sapiens
FTLPSWATEDT

SEQ ID NO: 2980 - protein, 11 aa, Homo Sapiens
TLPSWATEDTM

SEQ ID NO: 2981 - protein, 11 aa, Homo Sapiens
LPSWATEDTMT

SEQ ID NO: 2982 - protein, 11 aa, Homo Sapiens
SWATEDTMTKL

SEQ ID NO: 2983 - protein, 11 aa, Homo Sapiens
WATEDTMTKLR

SEQ ID NO: 2984 - protein, 11 aa, Homo Sapiens
TMTKLRELSEL

SEQ ID NO: 2985 - protein, 11 aa, Homo Sapiens
KLRELSELSLL

SEQ ID NO: 2986 - protein, 11 aa, Homo Sapiens
RELSELSLLSL

SEQ ID NO: 2987 - protein, 11 aa, Homo Sapiens
ELSELSLLSLY

SEQ ID NO: 2988 - protein, 11 aa, Homo Sapiens
SELSLLSLYGI

SEQ ID NO: 2989 - protein, 11 aa, Homo Sapiens
LSLLSLYGIHK

SEQ ID NO: 2990 - protein, 11 aa, Homo Sapiens
SLLSLYGIHKQ

SEQ ID NO: 2991 - protein, 11 aa, Homo Sapiens
LLSLYGIHKQK

SEQ ID NO: 2992 - protein, 11 aa, Homo Sapiens
SLYGIHKQKEK

SEQ ID NO: 2993 - protein, 11 aa, Homo Sapiens
GIHKQKEKSRL

SEQ ID NO: 2994 - protein, 11 aa, Homo Sapiens
KEKSRLQGGVL

SEQ ID NO: 2995 - protein, 11 aa, Homo Sapiens
RLQGGVLVNEI

SEQ ID NO: 2996 - protein, 11 aa, Homo Sapiens
LQGGVLVNEIL

SEQ ID NO: 2997 - protein, 11 aa, Homo Sapiens
VLVNEILNHMK

SEQ ID NO: 2998 - protein, 11 aa, Homo Sapiens
LVNEILNHMKR

SEQ ID NO: 2999 - protein, 11 aa, Homo Sapiens
ILNHMKRATQI

SEQ ID NO: 3000 - protein, 11 aa, Homo Sapiens
HMKRATQIPSY

SEQ ID NO: 3001 - protein, 11 aa, Homo Sapiens
MKRATQIPSYK

SEQ ID NO: 3002 - protein, 11 aa, Homo Sapiens
KRATQIPSYKK

SEQ ID NO: 3003 - protein, 11 aa, Homo Sapiens
RATQIPSYKKL

SEQ ID NO: 3004 - protein, 11 aa, Homo Sapiens
TQIPSYKKLIM

SEQ ID NO: 3005 - protein, 11 aa, Homo Sapiens
QIPSYKKLIMY

SEQ ID NO: 3006 - protein, 11 aa, Homo Sapiens
SYKKLIMYSAH

SEQ ID NO: 3007 - protein, 11 aa, Homo Sapiens
KLIMYSAHDTT

SEQ ID NO: 3008 - protein, 11 aa, Homo Sapiens
LIMYSAHDTTV

SEQ ID NO: 3009 - protein, 11 aa, Homo Sapiens
YSAHDTTVSGL

SEQ ID NO: 3010 - protein, 11 aa, Homo Sapiens
DTTVSGLQMAL

SEQ ID NO: 3011 - protein, 11 aa, Homo Sapiens
TVSGLQMALDV

SEQ ID NO: 3012 - protein, 11 aa, Homo Sapiens
LQMALDVYNGL

SEQ ID NO: 3013 - protein, 11 aa, Homo Sapiens
QMALDVYNGLL

SEQ ID NO: 3014 - protein, 11 aa, Homo Sapiens
ALDVYNGLLPP

SEQ ID NO: 3015 - protein, 11 aa, Homo Sapiens
LDVYNGLLPPY

SEQ ID NO: 3016 - protein, 11 aa, Homo Sapiens
DVYNGLLPPYA

SEQ ID NO: 3017 - protein, 11 aa, Homo Sapiens
GLLPPYASCHL

SEQ ID NO: 3018 - protein, 11 aa, Homo Sapiens
LLPPYASCHLT

SEQ ID NO: 3019 - protein, 11 aa, Homo Sapiens
PYASCHLTELY

SEQ ID NO: 3020 - protein, 11 aa, Homo Sapiens
YASCHLTELYF

SEQ ID NO: 3021 - protein, 11 aa, Homo Sapiens
SCHLTELYFEK

SEQ ID NO: 3022 - protein, 11 aa, Homo Sapiens
LTELYFEKGEY

SEQ ID NO: 3023 - protein, 11 aa, Homo Sapiens
TELYFEKGEYF

SEQ ID NO: 3024 - protein, 11 aa, Homo Sapiens
ELYFEKGEYFV

SEQ ID NO: 3025 - protein, 11 aa, Homo Sapiens
YFEKGEYFVEM

SEQ ID NO: 3026 - protein, 11 aa, Homo Sapiens
KGEYFVEMHYR

SEQ ID NO: 3027 - protein, 11 aa, Homo Sapiens
HYRNETQHEPY

SEQ ID NO: 3028 - protein, 11 aa, Homo Sapiens
NETQHEPYPLM

SEQ ID NO: 3029 - protein, 11 aa, Homo Sapiens
ETQHEPYPLML

SEQ ID NO: 3030 - protein, 11 aa, Homo Sapiens
YPLMLPGCSPS

SEQ ID NO: 3031 - protein, 11 aa, Homo Sapiens
MLPGCSPSCPL

SEQ ID NO: 3032 - protein, 11 aa, Homo Sapiens
SCPLERFAELV

SEQ ID NO: 3033 - protein, 11 aa, Homo Sapiens
VIPQDWSTECM

SEQ ID NO: 3034 - protein, 418 aa, Homo Sapiens
MRAAPLLLARAASLSLGFLFLLFFWLDRSVLAKELKFVTLVFRHGDRSPIDTFPTDPIKESSWPQGFGQLTQLGMEQHYELGEYIRKRYRKFLNESYKHEQVYIRSTDVDRTLMSAMTNLAALFPPEGVSIWNPILLWQPIPVHTVPLSEDQLLYLPFRNCPRFQELESETLKSEEFQKRLHPYKDFIATLGKLSGLHGQDLFGIWSKVYDPLYCESVHNFTLPSWATEDTMTKLRELSELSLLSLYGIHKQKEKSRLQGGVLVNEILNHMKRATQIPSYKKLIMYSAHDTTVSGLQMALDVYNGLLPPYASCHLTELYFEKGEYFVEMYYRNETQHEPYPLMLPGCSPSCPLERFAELVGPVIPQDWSTECMTTNSHQVLKVIFAVAFCLISAVLMVLLFIHIRRGLCWQRESYGNI

SEQ ID NO: 3035 - protein, 8 aa, Homo Sapiens
MTTNSHQV

SEQ ID NO: 3036 - protein, 8 aa, Homo Sapiens
TTNSHQVL

SEQ ID NO: 3037 - protein, 8 aa, Homo Sapiens
HQVLKVIF

SEQ ID NO: 3038 - protein, 8 aa, Homo Sapiens
QVLKVIFA

SEQ ID NO: 3039 - protein, 8 aa, Homo Sapiens
VLKVIFAV

SEQ ID NO: 3040 - protein, 8 aa, Homo Sapiens
KVIFAVAF

SEQ ID NO: 3041 - protein, 8 aa, Homo Sapiens
IFAVAFCL

SEQ ID NO: 3042 - protein, 8 aa, Homo Sapiens
FAVAFCLI

SEQ ID NO: 3043 - protein, 8 aa, Homo Sapiens
VAFCLISA

SEQ ID NO: 3044 - protein, 8 aa, Homo Sapiens
CLISAVLM

SEQ ID NO: 3045 - protein, 8 aa, Homo Sapiens
LISAVLMV

SEQ ID NO: 3046 - protein, 8 aa, Homo Sapiens
ISAVLMVL

SEQ ID NO: 3047 - protein, 8 aa, Homo Sapiens
SAVLMVLL

SEQ ID NO: 3048 - protein, 8 aa, Homo Sapiens
AVLMVLLF

SEQ ID NO: 3049 - protein, 8 aa, Homo Sapiens
VLMVLLFI

SEQ ID NO: 3050 - protein, 8 aa, Homo Sapiens
MVLLFIHI

SEQ ID NO: 3051 - protein, 8 aa, Homo Sapiens
VLLFIHIR

SEQ ID NO: 3052 - protein, 8 aa, Homo Sapiens
LLFIHIRR

SEQ ID NO: 3053 - protein, 8 aa, Homo Sapiens
FIHIRRGL

SEQ ID NO: 3054 - protein, 8 aa, Homo Sapiens
RRGLCWQR

SEQ ID NO: 3055 - protein, 9 aa, Homo Sapiens
CMTTNSHQV

SEQ ID NO: 3056 - protein, 9 aa, Homo Sapiens
MTTNSHQVL

SEQ ID NO: 3057 - protein, 9 aa, Homo Sapiens
TTNSHQVLK

SEQ ID NO: 3058 - protein, 9 aa, Homo Sapiens
HQVLKVIFA

SEQ ID NO: 3059 - protein, 9 aa, Homo Sapiens
QVLKVIFAV

SEQ ID NO: 3060 - protein, 9 aa, Homo Sapiens
VLKVIFAVA

SEQ ID NO: 3061 - protein, 9 aa, Homo Sapiens
LKVIFAVAF

SEQ ID NO: 3062 - protein, 9 aa, Homo Sapiens
VIFAVAFCL

SEQ ID NO: 3063 - protein, 9 aa, Homo Sapiens
IFAVAFCLI

SEQ ID NO: 3064 - protein, 9 aa, Homo Sapiens
AVAFCLISA

SEQ ID NO: 3065 - protein, 9 aa, Homo Sapiens
VAFCLISAV

SEQ ID NO: 3066 - protein, 9 aa, Homo Sapiens
CLISAVLMV

SEQ ID NO: 3067 - protein, 9 aa, Homo Sapiens
LISAVLMVL

SEQ ID NO: 3068 - protein, 9 aa, Homo Sapiens
ISAVLMVLL

SEQ ID NO: 3069 - protein, 9 aa, Homo Sapiens
SAVLMVLLF

SEQ ID NO: 3070 - protein, 9 aa, Homo Sapiens
AVLMVLLFI

SEQ ID NO: 3071 - protein, 9 aa, Homo Sapiens
LMVLLFIHI

SEQ ID NO: 3072 - protein, 9 aa, Homo Sapiens
MVLLFIHIR

SEQ ID NO: 3073 - protein, 9 aa, Homo Sapiens
VLLFIHIRR

SEQ ID NO: 3074 - protein, 9 aa, Homo Sapiens
WQRESYGNI

SEQ ID NO: 3075 - protein, 10 aa, Homo Sapiens
ECMTTNSHQV

SEQ ID NO: 3076 - protein, 10 aa, Homo Sapiens
CMTTNSHQVL

SEQ ID NO: 3077 - protein, 10 aa, Homo Sapiens
MTTNSHQVLK

SEQ ID NO: 3078 - protein, 10 aa, Homo Sapiens
TTNSHQVLKV

SEQ ID NO: 3079 - protein, 10 aa, Homo Sapiens
HQVLKVIFAV

SEQ ID NO: 3080 - protein, 10 aa, Homo Sapiens
QVLKVIFAVA

SEQ ID NO: 3081 - protein, 10 aa, Homo Sapiens
VLKVIFAVAF

SEQ ID NO: 3082 - protein, 10 aa, Homo Sapiens
KVIFAVAFCL

SEQ ID NO: 3083 - protein, 10 aa, Homo Sapiens
VIFAVAFCLI

SEQ ID NO: 3084 - protein, 10 aa, Homo Sapiens
FAVAFCLISA

SEQ ID NO: 3085 - protein, 10 aa, Homo Sapiens
AVAFCLISAV

SEQ ID NO: 3086 - protein, 10 aa, Homo Sapiens
VAFCLISAVL

SEQ ID NO: 3087 - protein, 10 aa, Homo Sapiens
FCLISAVLMV

SEQ ID NO: 3088 - protein, 10 aa, Homo Sapiens
CLISAVLMVL

SEQ ID NO: 3089 - protein, 10 aa, Homo Sapiens
LISAVLMVLL

SEQ ID NO: 3090 - protein, 10 aa, Homo Sapiens
ISAVLMVLLF

SEQ ID NO: 3091 - protein, 10 aa, Homo Sapiens
SAVLMVLLFI

SEQ ID NO: 3092 - protein, 10 aa, Homo Sapiens
AVLMVLLFIH

SEQ ID NO: 3093 - protein, 10 aa, Homo Sapiens
VLMVLLFIHI

SEQ ID NO: 3094 - protein, 10 aa, Homo Sapiens
LMVLLFIHIR

SEQ ID NO: 3095 - protein, 10 aa, Homo Sapiens
MVLLFIHIRR

SEQ ID NO: 3096 - protein, 10 aa, Homo Sapiens
LLFIHIRRGL

SEQ ID NO: 3097 - protein, 10 aa, Homo Sapiens
HIRRGLCWQR

SEQ ID NO: 3098 - protein, 10 aa, Homo Sapiens
CWQRESYGNI

SEQ ID NO: 3099 - protein, 11 aa, Homo Sapiens
ECMTTNSHQVL

SEQ ID NO: 3100 - protein, 11 aa, Homo Sapiens
CMTTNSHQVLK

SEQ ID NO: 3101 - protein, 11 aa, Homo Sapiens
MTTNSHQVLKV

SEQ ID NO: 3102 - protein, 11 aa, Homo Sapiens
HQVLKVIFAVA

SEQ ID NO: 3103 - protein, 11 aa, Homo Sapiens
QVLKVIFAVAF

SEQ ID NO: 3104 - protein, 11 aa, Homo Sapiens
KVIFAVAFCLI

SEQ ID NO: 3105 - protein, 11 aa, Homo Sapiens
FAVAFCLISAV

SEQ ID NO: 3106 - protein, 11 aa, Homo Sapiens
AVAFCLISAVL

SEQ ID NO: 3107 - protein, 11 aa, Homo Sapiens
VAFCLISAVLM

SEQ ID NO: 3108 - protein, 11 aa, Homo Sapiens
CLISAVLMVLL

SEQ ID NO: 3109 - protein, 11 aa, Homo Sapiens
ISAVLMVLLFI

SEQ ID NO: 3110 - protein, 11 aa, Homo Sapiens
AVLMVLLFIHI

SEQ ID NO: 3111 - protein, 11 aa, Homo Sapiens
VLMVLLFIHIR

SEQ ID NO: 3112 - protein, 11 aa, Homo Sapiens
LMVLLFIHIRR

SEQ ID NO: 3113 - protein, 11 aa, Homo Sapiens
VLLFIHIRRGL

SEQ ID NO: 3114 - protein, 11 aa, Homo Sapiens
RRGLCWQRESY

SEQ ID NO: 3115 - protein, 53 aa, Homo Sapiens
QDWSTECMTTNSHQVLKVIFAVAFCLISAVLMVLLFIHIRRGLCWQRESYGNI

SEQ ID NO: 3116 - protein, 261 aa, Homo Sapiens
MWVPVVFLTLSVTWIGAAPLILSRIVGGWECEKHSQPWQVLVASRGRAVCGGVLVHPQWVLTAAHCIRNKSVILLGRHSLFHPEDTGQVFQVSHSFPHPLYDMSLLKNRFLRPGDDSSHDLMLLRLSEPAELTDAVKVMDLPTQEPALGTTCYASGWGSIEPEEFLTPKKLQCVDLHVISNDVCAQVHPQKVTKFMLCAGRWTGGKSTCSGDSGGPLVCNGVLQGITSWGSEPCALPERPSLYTKVVHYRKWIKDTIVANP

SEQ ID NO: 3117 - protein, 8 aa, Homo Sapiens
MWVPVVFL

SEQ ID NO: 3118 - protein, 8 aa, Homo Sapiens
WVPVVFLT

SEQ ID NO: 3119 - protein, 8 aa, Homo Sapiens
VPVVFLTL

SEQ ID NO: 3120 - protein, 8 aa, Homo Sapiens
VVFLTLSV

SEQ ID NO: 3121 - protein, 8 aa, Homo Sapiens
FLTLSVTW

SEQ ID NO: 3122 - protein, 8 aa, Homo Sapiens
LTLSVTWI

SEQ ID NO: 3123 - protein, 8 aa, Homo Sapiens
SVTWIGAA

SEQ ID NO: 3124 - protein, 8 aa, Homo Sapiens
WIGAAPLI

SEQ ID NO: 3125 - protein, 8 aa, Homo Sapiens
APLILSRI

SEQ ID NO: 3126 - protein, 8 aa, Homo Sapiens
PLILSRIV

SEQ ID NO: 3127 - protein, 8 aa, Homo Sapiens
LSRIVGGW

SEQ ID NO: 3128 - protein, 8 aa, Homo Sapiens
RIVGGWEC

SEQ ID NO: 3129 - protein, 8 aa, Homo Sapiens
SQPWQVLV

SEQ ID NO: 3130 - protein, 8 aa, Homo Sapiens
QPWQVLVA

SEQ ID NO: 3131 - protein, 8 aa, Homo Sapiens
WQVLVASR

SEQ ID NO: 3132 - protein, 8 aa, Homo Sapiens
VLVASRGR

SEQ ID NO: 3133 - protein, 8 aa, Homo Sapiens
VASRGRAV

SEQ ID NO: 3134 - protein, 8 aa, Homo Sapiens
RAVCGGVL

SEQ ID NO: 3135 - protein, 8 aa, Homo Sapiens
AVCGGVLV

SEQ ID NO: 3136 - protein, 8 aa, Homo Sapiens
GVLVHPQW

SEQ ID NO: 3137 - protein, 8 aa, Homo Sapiens
VLVHPQWV

SEQ ID NO: 3138 - protein, 8 aa, Homo Sapiens
LVHPQWVL

SEQ ID NO: 3139 - protein, 8 aa, Homo Sapiens
HPQWVLTA

SEQ ID NO: 3140 - protein, 8 aa, Homo Sapiens
VLTAAHCI

SEQ ID NO: 3141 - protein, 8 aa, Homo Sapiens
LTAAHCIR

SEQ ID NO: 3142 - protein, 8 aa, Homo Sapiens
AAHCIRNK

SEQ ID NO: 3143 - protein, 8 aa, Homo Sapiens
KSVILLGR

SEQ ID NO: 3144 - protein, 8 aa, Homo Sapiens
ILLGRHSL

SEQ ID NO: 3145 - protein, 8 aa, Homo Sapiens
DTGQVFQV

SEQ ID NO: 3146 - protein, 8 aa, Homo Sapiens
VFQVSHSF

SEQ ID NO: 3147 - protein, 8 aa, Homo Sapiens
FQVSHSFP

SEQ ID NO: 3148 - protein, 8 aa, Homo Sapiens
SHSFPHPL

SEQ ID NO: 3149 - protein, 8 aa, Homo Sapiens
HSFPHPLY

SEQ ID NO: 3150 - protein, 8 aa, Homo Sapiens
FPHPLYDM

SEQ ID NO: 3151 - protein, 8 aa, Homo Sapiens
HPLYDMSL

SEQ ID NO: 3152 - protein, 8 aa, Homo Sapiens
PLYDMSLL

SEQ ID NO: 3153 - protein, 8 aa, Homo Sapiens
LYDMSLLK

SEQ ID NO: 3154 - protein, 8 aa, Homo Sapiens
DMSLLKNR

SEQ ID NO: 3155 - protein, 8 aa, Homo Sapiens
SLLKNRFL

SEQ ID NO: 3156 - protein, 8 aa, Homo Sapiens
LLKNRFLR

SEQ ID NO: 3157 - protein, 8 aa, Homo Sapiens
FLRPGDDS

SEQ ID NO: 3158 - protein, 8 aa, Homo Sapiens
SSHDLMLL

SEQ ID NO: 3159 - protein, 8 aa, Homo Sapiens
LLRLSEPA

SEQ ID NO: 3160 - protein, 8 aa, Homo Sapiens
RLSEPAEL

SEQ ID NO: 3161 - protein, 8 aa, Homo Sapiens
EPAELTDA

SEQ ID NO: 3162 - protein, 8 aa, Homo Sapiens
ELTDAVKV

SEQ ID NO: 3163 - protein, 8 aa, Homo Sapiens
KVMDLPTQ

SEQ ID NO: 3164 - protein, 8 aa, Homo Sapiens
DLPTQEPA

SEQ ID NO: 3165 - protein, 8 aa, Homo Sapiens
LPTQEPAL

SEQ ID NO: 3166 - protein, 8 aa, Homo Sapiens
EPALGTTC

SEQ ID NO: 3167 - protein, 8 aa, Homo Sapiens
ALGTTCYA

SEQ ID NO: 3168 - protein, 8 aa, Homo Sapiens
TTCYASGW

SEQ ID NO: 3169 - protein, 8 aa, Homo Sapiens
YASGWGSI

SEQ ID NO: 3170 - protein, 8 aa, Homo Sapiens
GSIEPEEF

SEQ ID NO: 3171 - protein, 8 aa, Homo Sapiens
SIEPEEFL

SEQ ID NO: 3172 - protein, 8 aa, Homo Sapiens
FLTPKKLQ

SEQ ID NO: 3173 - protein, 8 aa, Homo Sapiens
LQCVDLHV

SEQ ID NO: 3174 - protein, 8 aa, Homo Sapiens
CAQVHPQK

SEQ ID NO: 3175 - protein, 8 aa, Homo Sapiens
AQVHPQKV

SEQ ID NO: 3176 - protein, 8 aa, Homo Sapiens
HPQKVTKF

SEQ ID NO: 3177 - protein, 8 aa, Homo Sapiens
KFMLCAGR

SEQ ID NO: 3178 - protein, 8 aa, Homo Sapiens
MLCAGRWT

SEQ ID NO: 3179 - protein, 8 aa, Homo Sapiens
AGRWTGGK

SEQ ID NO: 3180 - protein, 8 aa, Homo Sapiens
VLQGITSW

SEQ ID NO: 3181 - protein, 8 aa, Homo Sapiens
EPCALPER

SEQ ID NO: 3182 - protein, 8 aa, Homo Sapiens
ALPERPSL

SEQ ID NO: 3183 - protein, 8 aa, Homo Sapiens
LPERPSLY

SEQ ID NO: 3184 - protein, 8 aa, Homo Sapiens
RPSLYTKV

SEQ ID NO: 3185 - protein, 8 aa, Homo Sapiens
LYTKVVHY

SEQ ID NO: 3186 - protein, 8 aa, Homo Sapiens
YTKVVHYR

SEQ ID NO: 3187 - protein, 8 aa, Homo Sapiens
KVVHYRKW

SEQ ID NO: 3188 - protein, 8 aa, Homo Sapiens
WIKDTIVA

SEQ ID NO: 3189 - protein, 9 aa, Homo Sapiens
WVPVVFLTL

SEQ ID NO: 3190 - protein, 9 aa, Homo Sapiens
VPVVFLTLS

SEQ ID NO: 3191 - protein, 9 aa, Homo Sapiens
PVVFLTLSV

SEQ ID NO: 3192 - protein, 9 aa, Homo Sapiens
VFLTLSVTW

SEQ ID NO: 3193 - protein, 9 aa, Homo Sapiens
FLTLSVTWI

SEQ ID NO: 3194 - protein, 9 aa, Homo Sapiens
TLSVTWIGA

SEQ ID NO: 3195 - protein, 9 aa, Homo Sapiens
VTWIGAAPL

SEQ ID NO: 3196 - protein, 9 aa, Homo Sapiens
TWIGAAPLI

SEQ ID NO: 3197 - protein, 9 aa, Homo Sapiens
WIGAAPLIL

SEQ ID NO: 3198 - protein, 9 aa, Homo Sapiens
GAAPLILSR

SEQ ID NO: 3199 - protein, 9 aa, Homo Sapiens
AAPLILSRI

SEQ ID NO: 3200 - protein, 9 aa, Homo Sapiens
APLILSRIV

SEQ ID NO: 3201 - protein, 9 aa, Homo Sapiens
ILSRIVGGW

SEQ ID NO: 3202 - protein, 9 aa, Homo Sapiens
IVGGWECEK

SEQ ID NO: 3203 - protein, 9 aa, Homo Sapiens
KHSQPWQVL

SEQ ID NO: 3204 - protein, 9 aa, Homo Sapiens
HSQPWQVLV

SEQ ID NO: 3205 - protein, 9 aa, Homo Sapiens
SQPWQVLVA

SEQ ID NO: 3206 - protein, 9 aa, Homo Sapiens
QPWQVLVAS

SEQ ID NO: 3207 - protein, 9 aa, Homo Sapiens
QVLVASRGR

SEQ ID NO: 3208 - protein, 9 aa, Homo Sapiens
LVASRGRAV

SEQ ID NO: 3209 - protein, 9 aa, Homo Sapiens
RAVCGGVLV

SEQ ID NO: 3210 - protein, 9 aa, Homo Sapiens
GGVLVHPQW

SEQ ID NO: 3211 - protein, 9 aa, Homo Sapiens
GVLVHPQWV

SEQ ID NO: 3212 - protein, 9 aa, Homo Sapiens
VLVHPQWVL

SEQ ID NO: 3213 - protein, 9 aa, Homo Sapiens
HPQWVLTAA

SEQ ID NO: 3214 - protein, 9 aa, Homo Sapiens
WVLTAAHCI

SEQ ID NO: 3215 - protein, 9 aa, Homo Sapiens
VLTAAHCIR

SEQ ID NO: 3216 - protein, 9 aa, Homo Sapiens
TAAHCIRNK

SEQ ID NO: 3217 - protein, 9 aa, Homo Sapiens
VILLGRHSL

SEQ ID NO: 3218 - protein, 9 aa, Homo Sapiens
ILLGRHSLF

SEQ ID NO: 3219 - protein, 9 aa, Homo Sapiens
LLGRHSLFH

SEQ ID NO: 3220 - protein, 9 aa, Homo Sapiens
HPEDTGQVF

SEQ ID NO: 3221 - protein, 9 aa, Homo Sapiens
EDTGQVFQV

SEQ ID NO: 3222 - protein, 9 aa, Homo Sapiens
QVFQVSHSF

SEQ ID NO: 3223 - protein, 9 aa, Homo Sapiens
FQVSHSFPH

SEQ ID NO: 3224 - protein, 9 aa, Homo Sapiens
SFPHPLYDM

SEQ ID NO: 3225 - protein, 9 aa, Homo Sapiens
FPHPLYDMS

SEQ ID NO: 3226 - protein, 9 aa, Homo Sapiens
HPLYDMSLL

SEQ ID NO: 3227 - protein, 9 aa, Homo Sapiens
PLYDMSLLK

SEQ ID NO: 3228 - protein, 9 aa, Homo Sapiens
DMSLLKNRF

SEQ ID NO: 3229 - protein, 9 aa, Homo Sapiens
SLLKNRFLR

SEQ ID NO: 3230 - protein, 9 aa, Homo Sapiens
FLRPGDDSS

SEQ ID NO: 3231 - protein, 9 aa, Homo Sapiens
SSHDLMLLR

SEQ ID NO: 3232 - protein, 9 aa, Homo Sapiens
SHDLMLLRL

SEQ ID NO: 3233 - protein, 9 aa, Homo Sapiens
MLLRLSEPA

SEQ ID NO: 3234 - protein, 9 aa, Homo Sapiens
RLSEPAELT

SEQ ID NO: 3235 - protein, 9 aa, Homo Sapiens
EPAELTDAV

SEQ ID NO: 3236 - protein, 9 aa, Homo Sapiens
AELTDAVKV

SEQ ID NO: 3237 - protein, 9 aa, Homo Sapiens
ELTDAVKVM

SEQ ID NO: 3238 - protein, 9 aa, Homo Sapiens
DLPTQEPAL

SEQ ID NO: 3239 - protein, 9 aa, Homo Sapiens
TQEPALGTT

SEQ ID NO: 3240 - protein, 9 aa, Homo Sapiens
EPALGTTCY

SEQ ID NO: 3241 - protein, 9 aa, Homo Sapiens
CYASGWGSI

SEQ ID NO: 3242 - protein, 9 aa, Homo Sapiens
EEFLTPKKL

SEQ ID NO: 3243 - protein, 9 aa, Homo Sapiens
FLTPKKLQC

SEQ ID NO: 3244 - protein, 9 aa, Homo Sapiens
LTPKKLQCV

SEQ ID NO: 3245 - protein, 9 aa, Homo Sapiens
KLQCVDLHV

SEQ ID NO: 3246 - protein, 9 aa, Homo Sapiens
LQCVDLHVI

SEQ ID NO: 3247 - protein, 9 aa, Homo Sapiens
DLHVISNDV

SEQ ID NO: 3248 - protein, 9 aa, Homo Sapiens
HVISNDVCA

SEQ ID NO: 3249 - protein, 9 aa, Homo Sapiens
ISNDVCAQV

SEQ ID NO: 3250 - protein, 9 aa, Homo Sapiens
CAQVHPQKV

SEQ ID NO: 3251 - protein, 9 aa, Homo Sapiens
QVHPQKVTK

SEQ ID NO: 3252 - protein, 9 aa, Homo Sapiens
VHPQKVTKF

SEQ ID NO: 3253 - protein, 9 aa, Homo Sapiens
HPQKVTKFM

SEQ ID NO: 3254 - protein, 9 aa, Homo Sapiens
KVTKFMLCA

SEQ ID NO: 3255 - protein, 9 aa, Homo Sapiens
TKFMLCAGR

SEQ ID NO: 3256 - protein, 9 aa, Homo Sapiens
KFMLCAGRW

SEQ ID NO: 3257 - protein, 9 aa, Homo Sapiens
FMLCAGRWT

SEQ ID NO: 3258 - protein, 9 aa, Homo Sapiens
MLCAGRWTG

SEQ ID NO: 3259 - protein, 9 aa, Homo Sapiens
CAGRWTGGK

SEQ ID NO: 3260 - protein, 9 aa, Homo Sapiens
SGDSGGPLV

SEQ ID NO: 3261 - protein, 9 aa, Homo Sapiens
GPLVCNGVL

SEQ ID NO: 3262 - protein, 9 aa, Homo Sapiens
GVLQGITSW

SEQ ID NO: 3263 - protein, 9 aa, Homo Sapiens
LQGITSWGS

SEQ ID NO: 3264 - protein, 9 aa, Homo Sapiens
ALPERPSLY

SEQ ID NO: 3265 - protein, 9 aa, Homo Sapiens
RPSLYTKVV

SEQ ID NO: 3266 - protein, 9 aa, Homo Sapiens
SLYTKVVHY

SEQ ID NO: 3267 - protein, 9 aa, Homo Sapiens
LYTKVVHYR

SEQ ID NO: 3268 - protein, 9 aa, Homo Sapiens
YTKVVHYRK

SEQ ID NO: 3269 - protein, 9 aa, Homo Sapiens
VVHYRKWIK

SEQ ID NO: 3270 - protein, 10 aa, Homo Sapiens
MWVPVVFLTL

SEQ ID NO: 3271 - protein, 10 aa, Homo Sapiens
VPVVFLTLSV

SEQ ID NO: 3272 - protein, 10 aa, Homo Sapiens
VVFLTLSVTW

SEQ ID NO: 3273 - protein, 10 aa, Homo Sapiens
VFLTLSVTWI

SEQ ID NO: 3274 - protein, 10 aa, Homo Sapiens
LTLSVTWIGA

SEQ ID NO: 3275 - protein, 10 aa, Homo Sapiens
TLSVTWIGAA

SEQ ID NO: 3276 - protein, 10 aa, Homo Sapiens
SVTWIGAAPL

SEQ ID NO: 3277 - protein, 10 aa, Homo Sapiens
VTWIGAAPLI

SEQ ID NO: 3278 - protein, 10 aa, Homo Sapiens
TWIGAAPLIL

SEQ ID NO: 3279 - protein, 10 aa, Homo Sapiens
GAAPLILSRI

SEQ ID NO: 3280 - protein, 10 aa, Homo Sapiens
RIVGGWECEK

SEQ ID NO: 3281 - protein, 10 aa, Homo Sapiens
WECEKHSQPW

SEQ ID NO: 3282 - protein, 10 aa, Homo Sapiens
SQPWQVLVAS

SEQ ID NO: 3283 - protein, 10 aa, Homo Sapiens
VLVASRGRAV

SEQ ID NO: 3284 - protein, 10 aa, Homo Sapiens
RGRAVCGGVL

SEQ ID NO: 3285 - protein, 10 aa, Homo Sapiens
CGGVLVHPQW

SEQ ID NO: 3286 - protein, 10 aa, Homo Sapiens
GVLVHPQWVL

SEQ ID NO: 3287 - protein, 10 aa, Homo Sapiens
VLVHPQWVLT

SEQ ID NO: 3288 - protein, 10 aa, Homo Sapiens
LVHPQWVLTA

SEQ ID NO: 3289 - protein, 10 aa, Homo Sapiens
HPQWVLTAAH

SEQ ID NO: 3290 - protein, 10 aa, Homo Sapiens
QWVLTAAHCI

SEQ ID NO: 3291 - protein, 10 aa, Homo Sapiens
WVLTAAHCIR

SEQ ID NO: 3292 - protein, 10 aa, Homo Sapiens
LTAAHCIRNK

SEQ ID NO: 3293 - protein, 10 aa, Homo Sapiens
AAHCIRNKSV

SEQ ID NO: 3294 - protein, 10 aa, Homo Sapiens
RNKSVILLGR

SEQ ID NO: 3295 - protein, 10 aa, Homo Sapiens
SVILLGRHSL

SEQ ID NO: 3296 - protein, 10 aa, Homo Sapiens
ILLGRHSLFH

SEQ ID NO: 3297 - protein, 10 aa, Homo Sapiens
SLFHPEDTGQ

SEQ ID NO: 3298 - protein, 10 aa, Homo Sapiens
FHPEDTGQVF

SEQ ID NO: 3299 - protein, 10 aa, Homo Sapiens
PEDTGQVFQV

SEQ ID NO: 3300 - protein, 10 aa, Homo Sapiens
GQVFQVSHSF

SEQ ID NO: 3301 - protein, 10 aa, Homo Sapiens
FQVSHSFPHP

SEQ ID NO: 3302 - protein, 10 aa, Homo Sapiens
QVSHSFPHPL

SEQ ID NO: 3303 - protein, 10 aa, Homo Sapiens
VSHSFPHPLY

SEQ ID NO: 3304 - protein, 10 aa, Homo Sapiens
FPHPLYDMSL

SEQ ID NO: 3305 - protein, 10 aa, Homo Sapiens
HPLYDMSLLK

SEQ ID NO: 3306 - protein, 10 aa, Homo Sapiens
PLYDMSLLKN

SEQ ID NO: 3307 - protein, 10 aa, Homo Sapiens
LYDMSLLKNR

SEQ ID NO: 3308 - protein, 10 aa, Homo Sapiens
MSLLKNRFLR

SEQ ID NO: 3309 - protein, 10 aa, Homo Sapiens
FLRPGDDSSH

SEQ ID NO: 3310 - protein, 10 aa, Homo Sapiens
RPGDDSSHDL

SEQ ID NO: 3311 - protein, 10 aa, Homo Sapiens
DSSHDLMLLR

SEQ ID NO: 3312 - protein, 10 aa, Homo Sapiens
SSHDLMLLRL

SEQ ID NO: 3313 - protein, 10 aa, Homo Sapiens
LMLLRLSEPA

SEQ ID NO: 3314 - protein, 10 aa, Homo Sapiens
MLLRLSEPAE

SEQ ID NO: 3315 - protein, 10 aa, Homo Sapiens
LLRLSEPAEL

SEQ ID NO: 3316 - protein, 10 aa, Homo Sapiens
SEPAELTDAV

SEQ ID NO: 3317 - protein, 10 aa, Homo Sapiens
EPAELTDAVK

SEQ ID NO: 3318 - protein, 10 aa, Homo Sapiens
AELTDAVKVM

SEQ ID NO: 3319 - protein, 10 aa, Homo Sapiens
VMDLPTQEPA

SEQ ID NO: 3320 - protein, 10 aa, Homo Sapiens
LPTQEPALGT

SEQ ID NO: 3321 - protein, 10 aa, Homo Sapiens
EPALGTTCYA

SEQ ID NO: 3322 - protein, 10 aa, Homo Sapiens
TCYASGWGSI

SEQ ID NO: 3323 - protein, 10 aa, Homo Sapiens
GWGSIEPEEF

SEQ ID NO: 3324 - protein, 10 aa, Homo Sapiens
EPEEFLTPKK

SEQ ID NO: 3325 - protein, 10 aa, Homo Sapiens
PEEFLTPKKL

SEQ ID NO: 3326 - protein, 10 aa, Homo Sapiens
EEFLTPKKLQ

SEQ ID NO: 3327 - protein, 10 aa, Homo Sapiens
FLTPKKLQCV

SEQ ID NO: 3328 - protein, 10 aa, Homo Sapiens
KLQCVDLHVI

SEQ ID NO: 3329 - protein, 10 aa, Homo Sapiens
VISNDVCAQV

SEQ ID NO: 3330 - protein, 10 aa, Homo Sapiens
DVCAQVHPQK

SEQ ID NO: 3331 - protein, 10 aa, Homo Sapiens
VCAQVHPQKV

SEQ ID NO: 3332 - protein, 10 aa, Homo Sapiens
AQVHPQKVTK

SEQ ID NO: 3333 - protein, 10 aa, Homo Sapiens
QVHPQKVTKF

SEQ ID NO: 3334 - protein, 10 aa, Homo Sapiens
HPQKVTKFML

SEQ ID NO: 3335 - protein, 10 aa, Homo Sapiens
VTKFMLCAGR

SEQ ID NO: 3336 - protein, 10 aa, Homo Sapiens
LVCNGVLQGI

SEQ ID NO: 3337 - protein, 10 aa, Homo Sapiens
VLQGITSWGS

SEQ ID NO: 3338 - protein, 10 aa, Homo Sapiens
ALPERPSLYT

SEQ ID NO: 3339 - protein, 10 aa, Homo Sapiens
RPSLYTKVVH

SEQ ID NO: 3340 - protein, 10 aa, Homo Sapiens
SLYTKVVHYR

SEQ ID NO: 3341 - protein, 10 aa, Homo Sapiens
LYTKVVHYRK

SEQ ID NO: 3342 - protein, 10 aa, Homo Sapiens
YTKVVHYRKW

SEQ ID NO: 3343 - protein, 10 aa, Homo Sapiens
KVVHYRKWIK

SEQ ID NO: 3344 - protein, 10 aa, Homo Sapiens
HYRKWIKDTI

SEQ ID NO: 3345 - protein, 11 aa, Homo Sapiens
WVPVVFLTLSV

SEQ ID NO: 3346 - protein, 11 aa, Homo Sapiens
VPVVFLTLSVT

SEQ ID NO: 3347 - protein, 11 aa, Homo Sapiens
VVFLTLSVTWI

SEQ ID NO: 3348 - protein, 11 aa, Homo Sapiens
FLTLSVTWIGA

SEQ ID NO: 3349 - protein, 11 aa, Homo Sapiens
LTLSVTWIGAA

SEQ ID NO: 3350 - protein, 11 aa, Homo Sapiens
LSVTWIGAAPL

SEQ ID NO: 3351 - protein, 11 aa, Homo Sapiens
SVTWIGAAPLI

SEQ ID NO: 3352 - protein, 11 aa, Homo Sapiens
VTWIGAAPLIL

SEQ ID NO: 3353 - protein, 11 aa, Homo Sapiens
IGAAPLILSRI

SEQ ID NO: 3354 - protein, 11 aa, Homo Sapiens
GAAPLILSRIV

SEQ ID NO: 3355 - protein, 11 aa, Homo Sapiens
ILSRIVGGWEC

SEQ ID NO: 3356 - protein, 11 aa, Homo Sapiens
CEKHSQPWQVL

SEQ ID NO: 3357 - protein, 11 aa, Homo Sapiens
WQVLVASRGRA

SEQ ID NO: 3358 - protein, 11 aa, Homo Sapiens
QVLVASRGRAV

SEQ ID NO: 3359 - protein, 11 aa, Homo Sapiens
VLVHPQWVLTA

SEQ ID NO: 3360 - protein, 11 aa, Homo Sapiens
LVHPQWVLTAA

SEQ ID NO: 3361 - protein, 11 aa, Homo Sapiens
VLTAAHCIRNK

SEQ ID NO: 3362 - protein, 11 aa, Homo Sapiens
TAAHCIRNKSV

SEQ ID NO: 3363 - protein, 11 aa, Homo Sapiens
SVILLGRHSLF

SEQ ID NO: 3364 - protein, 11 aa, Homo Sapiens
SLFHPEDTGQV

SEQ ID NO: 3365 - protein, 11 aa, Homo Sapiens
LFHPEDTGQVF

SEQ ID NO: 3366 - protein, 11 aa, Homo Sapiens
HPEDTGQVFQV

SEQ ID NO: 3367 - protein, 11 aa, Homo Sapiens
QVFQVSHSFPH

SEQ ID NO: 3368 - protein, 11 aa, Homo Sapiens
FQVSHSFPHPL

SEQ ID NO: 3369 - protein, 11 aa, Homo Sapiens
QVSHSFPHPLY

SEQ ID NO: 3370 - protein, 11 aa, Homo Sapiens
SFPHPLYDMSL

SEQ ID NO: 3371 - protein, 11 aa, Homo Sapiens
FPHPLYDMSLL

SEQ ID NO: 3372 - protein, 11 aa, Homo Sapiens
LYDMSLLKNRF

SEQ ID NO: 3373 - protein, 11 aa, Homo Sapiens
DMSLLKNRFLR

SEQ ID NO: 3374 - protein, 11 aa, Homo Sapiens
RPGDDSSHDLM

SEQ ID NO: 3375 - protein, 11 aa, Homo Sapiens
DLMLLRLSEPA

SEQ ID NO: 3376 - protein, 11 aa, Homo Sapiens
MLLRLSEPAEL

SEQ ID NO: 3377 - protein, 11 aa, Homo Sapiens
RLSEPAELTDA

SEQ ID NO: 3378 - protein, 11 aa, Homo Sapiens
EPAELTDAVKV

SEQ ID NO: 3379 - protein, 11 aa, Homo Sapiens
ELTDAVKVMDL

SEQ ID NO: 3380 - protein, 11 aa, Homo Sapiens
KVMDLPTQEPA

SEQ ID NO: 3381 - protein, 11 aa, Homo Sapiens
VMDLPTQEPAL

SEQ ID NO: 3382 - protein, 11 aa, Homo Sapiens
LPTQEPALGTT

SEQ ID NO: 3383 - protein, 11 aa, Homo Sapiens
TQEPALGTTCY

SEQ ID NO: 3384 - protein, 11 aa, Homo Sapiens
EPALGTTCYAS

SEQ ID NO: 3385 - protein, 11 aa, Homo Sapiens
TTCYASGWGSI

SEQ ID NO: 3386 - protein, 11 aa, Homo Sapiens
SIEPEEFLTPK

SEQ ID NO: 3387 - protein, 11 aa, Homo Sapiens
EEFLTPKKLQC

SEQ ID NO: 3388 - protein, 11 aa, Homo Sapiens
LTPKKLQCVDL

SEQ ID NO: 3389 - protein, 11 aa, Homo Sapiens
CVDLHVISNDV

SEQ ID NO: 3390 - protein, 11 aa, Homo Sapiens
HVISNDVCAQV

SEQ ID NO: 3391 - protein, 11 aa, Homo Sapiens
DVCAQVHPQKV

SEQ ID NO: 3392 - protein, 11 aa, Homo Sapiens
CAQVHPQKVTK

SEQ ID NO: 3393 - protein, 11 aa, Homo Sapiens
AQVHPQKVTKF

SEQ ID NO: 3394 - protein, 11 aa, Homo Sapiens
QVHPQKVTKFM

SEQ ID NO: 3395 - protein, 11 aa, Homo Sapiens
KVTKFMLCAGR

SEQ ID NO: 3396 - protein, 11 aa, Homo Sapiens
MLCAGRWTGGK

SEQ ID NO: 3397 - protein, 11 aa, Homo Sapiens
STCSGDSGGPL

SEQ ID NO: 3398 - protein, 11 aa, Homo Sapiens
TCSGDSGGPLV

SEQ ID NO: 3399 - protein, 11 aa, Homo Sapiens
DSGGPLVCNGV

SEQ ID NO: 3400 - protein, 11 aa, Homo Sapiens
PLVCNGVLQGI

SEQ ID NO: 3401 - protein, 11 aa, Homo Sapiens
ITSWGSEPCAL

SEQ ID NO: 3402 - protein, 11 aa, Homo Sapiens
EPCALPERPSL

SEQ ID NO: 3403 - protein, 11 aa, Homo Sapiens
ALPERPSLYTK

SEQ ID NO: 3404 - protein, 11 aa, Homo Sapiens
LPERPSLYTKV

SEQ ID NO: 3405 - protein, 11 aa, Homo Sapiens
PERPSLYTKVV

SEQ ID NO: 3406 - protein, 11 aa, Homo Sapiens
RPSLYTKVVHY

SEQ ID NO: 3407 - protein, 11 aa, Homo Sapiens
PSLYTKVVHYR

SEQ ID NO: 3408 - protein, 11 aa, Homo Sapiens
SLYTKVVHYRK

SEQ ID NO: 3409 - protein, 11 aa, Homo Sapiens
LYTKVVHYRKW

SEQ ID NO: 3410 - protein, 238 aa, Homo Sapiens
MWVPVVFLTLSVTWIGAAPLILSRIVGGWECEKHSQPWQVLVASRGRAVCGGVLVHPQWVLTAAHCIRNKSVILLGRHSLFHPEDTGQVFQVSHSFPHPLYDMSLLKNRFLRPGDDSSHDLMLLRLSEPAELTDAVKVMDLPTQEPALGTTCYASGWGSIEPEEFLTPKKLQCVDLHVISNDVCAQVHPQKVTKFMLCAGRWTGGKSTCSWVILITELTMPALPMVLHGSLVPWRGGV

SEQ ID NO: 3411 - protein, 58 aa, Homo Sapiens
NDVCAQVHPQKVTKFMLCAGRWTGGKSTCSWVILITELTMPALPMVLHGSLVPWRGGV

SEQ ID NO: 3412 - protein, 8 aa, Homo Sapiens
CAQVHPQK

SEQ ID NO: 3413 - protein, 8 aa, Homo Sapiens
AQVHPQKV

SEQ ID NO: 3414 - protein, 8 aa, Homo Sapiens
HPQKVTKF

SEQ ID NO: 3415 - protein, 8 aa, Homo Sapiens
KFMLCAGR

SEQ ID NO: 3416 - protein, 8 aa, Homo Sapiens
MLCAGRWT

SEQ ID NO: 3417 - protein, 8 aa, Homo Sapiens
AGRWTGGK

SEQ ID NO: 3418 - protein, 8 aa, Homo Sapiens
TCSWVILI

SEQ ID NO: 3419 - protein, 8 aa, Homo Sapiens
WVILITEL

SEQ ID NO: 3420 - protein, 8 aa, Homo Sapiens
ILITELTM

SEQ ID NO: 3421 - protein, 8 aa, Homo Sapiens
TELTMPAL

SEQ ID NO: 3422 - protein, 8 aa, Homo Sapiens
LTMPALPM

SEQ ID NO: 3423 - protein, 8 aa, Homo Sapiens
TMPALPMV

SEQ ID NO: 3424 - protein, 8 aa, Homo Sapiens
MPALPMVL

SEQ ID NO: 3425 - protein, 8 aa, Homo Sapiens
LPMVLHGS

SEQ ID NO: 3426 - protein, 8 aa, Homo Sapiens
PMVLHGSL

SEQ ID NO: 3427 - protein, 8 aa, Homo Sapiens
MVLHGSLV

SEQ ID NO: 3428 - protein, 8 aa, Homo Sapiens
HGSLVPWR

SEQ ID NO: 3429 - protein, 8 aa, Homo Sapiens
LVPWRGGV

SEQ ID NO: 3430 - protein, 9 aa, Homo Sapiens
CAQVHPQKV

SEQ ID NO: 3431 - protein, 9 aa, Homo Sapiens
QVHPQKVTK

SEQ ID NO: 3432 - protein, 9 aa, Homo Sapiens
VHPQKVTKF

SEQ ID NO: 3433 - protein, 9 aa, Homo Sapiens
HPQKVTKFM

SEQ ID NO: 3434 - protein, 9 aa, Homo Sapiens
KVTKFMLCA

SEQ ID NO: 3435 - protein, 9 aa, Homo Sapiens
TKFMLCAGR

SEQ ID NO: 3436 - protein, 9 aa, Homo Sapiens
KFMLCAGRW

SEQ ID NO: 3437 - protein, 9 aa, Homo Sapiens
FMLCAGRWT

SEQ ID NO: 3438 - protein, 9 aa, Homo Sapiens
MLCAGRWTG

SEQ ID NO: 3439 - protein, 9 aa, Homo Sapiens
CAGRWTGGK

SEQ ID NO: 3440 - protein, 9 aa, Homo Sapiens
TGGKSTCSW

SEQ ID NO: 3441 - protein, 9 aa, Homo Sapiens
STCSWVILI

SEQ ID NO: 3442 - protein, 9 aa, Homo Sapiens
SWVILITEL

SEQ ID NO: 3443 - protein, 9 aa, Homo Sapiens
WVILITELT

SEQ ID NO: 3444 - protein, 9 aa, Homo Sapiens
VILITELTM

SEQ ID NO: 3445 - protein, 9 aa, Homo Sapiens
LITELTMPA

SEQ ID NO: 3446 - protein, 9 aa, Homo Sapiens
ITELTMPAL

SEQ ID NO: 3447 - protein, 9 aa, Homo Sapiens
ELTMPALPM

SEQ ID NO: 3448 - protein, 9 aa, Homo Sapiens
LTMPALPMV

SEQ ID NO: 3449 - protein, 9 aa, Homo Sapiens
TMPALPMVL

SEQ ID NO: 3450 - protein, 9 aa, Homo Sapiens
MPALPMVLH

SEQ ID NO: 3451 - protein, 9 aa, Homo Sapiens
ALPMVLHGS

SEQ ID NO: 3452 - protein, 9 aa, Homo Sapiens
LPMVLHGSL

SEQ ID NO: 3453 - protein, 9 aa, Homo Sapiens
PMVLHGSLV

SEQ ID NO: 3454 - protein, 9 aa, Homo Sapiens
SLVPWRGGV

SEQ ID NO: 3455 - protein, 10 aa, Homo Sapiens
DVCAQVHPQK

SEQ ID NO: 3456 - protein, 10 aa, Homo Sapiens
VCAQVHPQKV

SEQ ID NO: 3457 - protein, 10 aa, Homo Sapiens
AQVHPQKVTK

SEQ ID NO: 3458 - protein, 10 aa, Homo Sapiens
QVHPQKVTKF

SEQ ID NO: 3459 - protein, 10 aa, Homo Sapiens
HPQKVTKFML

SEQ ID NO: 3460 - protein, 10 aa, Homo Sapiens
VTKFMLCAGR

SEQ ID NO: 3461 - protein, 10 aa, Homo Sapiens
WTGGKSTCSW

SEQ ID NO: 3462 - protein, 10 aa, Homo Sapiens
CSWVILITEL

SEQ ID NO: 3463 - protein, 10 aa, Homo Sapiens
WVILITELTM

SEQ ID NO: 3464 - protein, 10 aa, Homo Sapiens
ILITELTMPA

SEQ ID NO: 3465 - protein, 10 aa, Homo Sapiens
LITELTMPAL

SEQ ID NO: 3466 - protein, 10 aa, Homo Sapiens
TELTMPALPM

SEQ ID NO: 3467 - protein, 10 aa, Homo Sapiens
ELTMPALPMV

SEQ ID NO: 3468 - protein, 10 aa, Homo Sapiens
LTMPALPMVL

SEQ ID NO: 3469 - protein, 10 aa, Homo Sapiens
MPALPMVLHG

SEQ ID NO: 3470 - protein, 10 aa, Homo Sapiens
ALPMVLHGSL

SEQ ID NO: 3471 - protein, 10 aa, Homo Sapiens
LPMVLHGSLV

SEQ ID NO: 3472 - protein, 10 aa, Homo Sapiens
MVLHGSLVPW

SEQ ID NO: 3473 - protein, 10 aa, Homo Sapiens
VLHGSLVPWR

SEQ ID NO: 3474 - protein, 11 aa, Homo Sapiens
DVCAQVHPQKV

SEQ ID NO: 3475 - protein, 11 aa, Homo Sapiens
CAQVHPQKVTK

SEQ ID NO: 3476 - protein, 11 aa, Homo Sapiens
AQVHPQKVTKF

SEQ ID NO: 3477 - protein, 11 aa, Homo Sapiens
QVHPQKVTKFM

SEQ ID NO: 3478 - protein, 11 aa, Homo Sapiens
KVTKFMLCAGR

SEQ ID NO: 3479 - protein, 11 aa, Homo Sapiens
MLCAGRWTGGK

SEQ ID NO: 3480 - protein, 11 aa, Homo Sapiens
RWTGGKSTCSW

SEQ ID NO: 3481 - protein, 11 aa, Homo Sapiens
WTGGKSTCSWV

SEQ ID NO: 3482 - protein, 11 aa, Homo Sapiens
TCSWVILITEL

SEQ ID NO: 3483 - protein, 11 aa, Homo Sapiens
VILITELTMPA

SEQ ID NO: 3484 - protein, 11 aa, Homo Sapiens
ILITELTMPAL

SEQ ID NO: 3485 - protein, 11 aa, Homo Sapiens
ITELTMPALPM

SEQ ID NO: 3486 - protein, 11 aa, Homo Sapiens
TELTMPALPMV

SEQ ID NO: 3487 - protein, 11 aa, Homo Sapiens
ELTMPALPMVL

SEQ ID NO: 3488 - protein, 11 aa, Homo Sapiens
MPALPMVLHGS

SEQ ID NO: 3489 - protein, 11 aa, Homo Sapiens
ALPMVLHGSLV

SEQ ID NO: 3490 - protein, 11 aa, Homo Sapiens
LPMVLHGSLVP

SEQ ID NO: 3491 - protein, 11 aa, Homo Sapiens
MVLHGSLVPWR

SEQ ID NO: 3492 - protein, 11 aa, Homo Sapiens
HGSLVPWRGGV

SEQ ID NO: 3493 - protein, 220 aa, Homo Sapiens
MWVPVVFLTLSVTWIGAAPLILSRIVGGWECEKHSQPWQVLVASRGRAVCGGVLVHPQWVLTAAHCIRNKSVILLGRHSLFHPEDTGQVFQVSHSFPHPLYDMSLLKNRFLRPGDDSSIEPEEFLTPKKLQCVDLHVISNDVCAQVHPQKVTKFMLCAGRWTGGKSTCSGDSGGPLVCNGVLQGITSWGSEPCALPERPSLYTKVVHYRKWIKDTIVANP

SEQ ID NO: 3494 - protein, 30 aa, Homo Sapiens
SLLKNRFLRPGDDSSIEPEEFLTPKKLQCV

SEQ ID NO: 3495 - protein, 8 aa, Homo Sapiens
SLLKNRFL

SEQ ID NO: 3496 - protein, 8 aa, Homo Sapiens
LLKNRFLR

SEQ ID NO: 3497 - protein, 8 aa, Homo Sapiens
FLRPGDDS

SEQ ID NO: 3498 - protein, 8 aa, Homo Sapiens
RPGDDSSI

SEQ ID NO: 3499 - protein, 8 aa, Homo Sapiens
SSIEPEEF

SEQ ID NO: 3500 - protein, 8 aa, Homo Sapiens
SIEPEEFL

SEQ ID NO: 3501 - protein, 8 aa, Homo Sapiens
FLTPKKLQ

SEQ ID NO: 3502 - protein, 9 aa, Homo Sapiens
SLLKNRFLR

SEQ ID NO: 3503 - protein, 9 aa, Homo Sapiens
FLRPGDDSS

SEQ ID NO: 3504 - protein, 9 aa, Homo Sapiens
SSIEPEEFL

SEQ ID NO: 3505 - protein, 9 aa, Homo Sapiens
EEFLTPKKL

SEQ ID NO: 3506 - protein, 9 aa, Homo Sapiens
FLTPKKLQC

SEQ ID NO: 3507 - protein, 9 aa, Homo Sapiens
LTPKKLQCV

SEQ ID NO: 3508 - protein, 10 aa, Homo Sapiens
FLRPGDDSSI

SEQ ID NO: 3509 - protein, 10 aa, Homo Sapiens
EPEEFLTPKK

SEQ ID NO: 3510 - protein, 10 aa, Homo Sapiens
PEEFLTPKKL

SEQ ID NO: 3511 - protein, 10 aa, Homo Sapiens
EEFLTPKKLQ

SEQ ID NO: 3512 - protein, 10 aa, Homo Sapiens
FLTPKKLQCV

SEQ ID NO: 3513 - protein, 11 aa, Homo Sapiens
RFLRPGDDSSI

SEQ ID NO: 3514 - protein, 11 aa, Homo Sapiens
FLRPGDDSSIE

SEQ ID NO: 3515 - protein, 11 aa, Homo Sapiens
SIEPEEFLTPK

SEQ ID NO: 3516 - protein, 11 aa, Homo Sapiens
EEFLTPKKLQC

SEQ ID NO: 3517 - protein, 218 aa, Homo Sapiens
MWVPVVFLTLSVTWIGAAPLILSRIVGGWECEKHSQPWQVLVASRGRAVCGGVLVHPQWVLTAAHCIRKPGDDSSHDLMLLRLSEPAELTDAVKVMDLPTQEPALGTTCYASGWGSIEPEEFLTPKKLQCVDLHVISNDVCAQVHPQKVTKFMLCAGRWTGGKSTCSGDSGGPLVCNGVLQGITSWGSEPCALPERPSLYTKVVHYRKWIKDTIVANP

SEQ ID NO: 3518 - protein, 30 aa, Homo Sapiens
LVHPQWVLTAAHCIRKPGDDSSHDLMLLRL

SEQ ID NO: 3519 - protein, 8 aa, Homo Sapiens
LVHPQWVL

SEQ ID NO: 3520 - protein, 8 aa, Homo Sapiens
HPQWVLTA

SEQ ID NO: 3521 - protein, 8 aa, Homo Sapiens
VLTAAHCI

SEQ ID NO: 3522 - protein, 8 aa, Homo Sapiens
LTAAHCIR

SEQ ID NO: 3523 - protein, 8 aa, Homo Sapiens
TAAHCIRK

SEQ ID NO: 3524 - protein, 8 aa, Homo Sapiens
SSHDLMLL

SEQ ID NO: 3525 - protein, 9 aa, Homo Sapiens
HPQWVLTAA

SEQ ID NO: 3526 - protein, 9 aa, Homo Sapiens
WVLTAAHCI

SEQ ID NO: 3527 - protein, 9 aa, Homo Sapiens
VLTAAHCIR

SEQ ID NO: 3528 - protein, 9 aa, Homo Sapiens
LTAAHCIRK

SEQ ID NO: 3529 - protein, 9 aa, Homo Sapiens
SSHDLMLLR

SEQ ID NO: 3530 - protein, 9 aa, Homo Sapiens
SHDLMLLRL

SEQ ID NO: 3531 - protein, 10 aa, Homo Sapiens
LVHPQWVLTA

SEQ ID NO: 3532 - protein, 10 aa, Homo Sapiens
HPQWVLTAAH

SEQ ID NO: 3533 - protein, 10 aa, Homo Sapiens
QWVLTAAHCI

SEQ ID NO: 3534 - protein, 10 aa, Homo Sapiens
WVLTAAHCIR

SEQ ID NO: 3535 - protein, 10 aa, Homo Sapiens
VLTAAHCIRK

SEQ ID NO: 3536 - protein, 10 aa, Homo Sapiens
KPGDDSSHDL

SEQ ID NO: 3537 - protein, 10 aa, Homo Sapiens
DSSHDLMLLR

SEQ ID NO: 3538 - protein, 10 aa, Homo Sapiens
SSHDLMLLRL

SEQ ID NO: 3539 - protein, 8 aa, Homo Sapiens
LVHPQWVL

SEQ ID NO: 3540 - protein, 8 aa, Homo Sapiens
HPQWVLTA

SEQ ID NO: 3541 - protein, 8 aa, Homo Sapiens
VLTAAHCI

SEQ ID NO: 3542 - protein, 8 aa, Homo Sapiens
LTAAHCIR

SEQ ID NO: 3543 - protein, 8 aa, Homo Sapiens
TAAHCIRK

SEQ ID NO: 3544 - protein, 8 aa, Homo Sapiens
SSHDLMLL

SEQ ID NO: 3545 - protein, 1207 aa, Homo Sapiens
MLLTLIILLPVVSKFSFVSLSAPQHWSCPEGTLAGNGNSTCVGPAPFLIFSHGNSIFRIDTEGTNYEQLVVDAGVSVIMDFHYNEKRIYWVDLERQLLQRVFLNGSRQERVCNIEKNVSGMAINWINEEVIWSNQQEGIITVTDMKGNNSHILLSALKYPANVAVDPVERFIFWSSEVAGSLYRADLDGVGVKALLETSEKITAVSLDVLDKRLFWIQYNREGSNSLICSCDYDGGSVHISKHPTQHNLFAMSLFGDRIFYSTWKMKTIWIANKHTGKDMVRINLHSSFVPLGELKVVHPLAQPKAEDDTWEPEQKLCKLRKGNCSSTVCGQDLQSHLCMCAEGYALSRDRKYCEDVNECAFWNHGCTLGCKNTPGSYYCTCPVGFVLLPDGKRCHQLVSCPRNVSECSHDCVLTSEGPLCFCPEGSVLERDGKTCSGCSSPDNGGCSQLCVPLSPVSWECDCFPGYDLQLDEKSCAASGPQPFLLFANSQDIRHMHFDGTDYGTLLSQQMGMVYALDHDPVENKIYFAHTALKWIERANMDGSQRERLIEEGVDVPEGLAVDWIGRRFYWTDRGKSLIGRSDLNGKRSKIITKENISQPRGIAVHPMAKRLFWTDTGINPRIESSSLQGLGRLVIASSDLIWPSGITIDFLTDKLYWCDAKQSVIEMANLDGSKRRRLTQNDVGHPFAVAVFEDYVWFSDWAMPSVIRVNKRTGKDRVRLQGSMLKPSSLVVVHPLAKPGADPCLYQNGGCEHICKKRLGTAWCSCREGFMKASDGKTCLALDGHQLLAGGEVDLKNQVTPLDILSKTRVSEDNITESQHMLVAEIMVSDQDDCAPVGCSMYARCISEGEDATCQCLKGFAGDGKLCSDIDECEMGVPVCPPASSKCINTEGGYVCRCSEGYQGDGIHCLDIDECQLGVHSCGENASCTNTEGGYTCMCAGRLSEPGLICPDSTPPPHLREDDHHYSVRNSDSECPLSHDGYCLHDGVCMYIEALDKYACNCVVGYIGERCQYRDLKWWELRHAGHGQQQKVIVVAVCVVVLVMLLLLSLWGAHYYRTQKLLSKNPKNPYEESSRDVRSRRPADTEDGMSSCPQPWFVVIKEHQDLKNGGQPVAGEDGQAADGSMQPTSWRQEPQLCGMGTEQGCWIPVSSDKGSCPQVMERSFHMPSYGTQTLEGGVEKPHSLLSANPLWQQRALDPPHQMELTQ

SEQ ID NO: 3546 - protein, 8 aa, Homo Sapiens
MLLTLIIL

SEQ ID NO: 3547 - protein, 8 aa, Homo Sapiens
LLTLIILL

SEQ ID NO: 3548 - protein, 8 aa, Homo Sapiens
TLIILLPV

SEQ ID NO: 3549 - protein, 8 aa, Homo Sapiens
LIILLPVV

SEQ ID NO: 3550 - protein, 8 aa, Homo Sapiens
ILLPVVSK

SEQ ID NO: 3551 - protein, 8 aa, Homo Sapiens
LPVVSKFS

SEQ ID NO: 3552 - protein, 8 aa, Homo Sapiens
PVVSKFSF

SEQ ID NO: 3553 - protein, 8 aa, Homo Sapiens
VVSKFSFV

SEQ ID NO: 3554 - protein, 8 aa, Homo Sapiens
FSFVSLSA

SEQ ID NO: 3555 - protein, 8 aa, Homo Sapiens
SLSAPQHW

SEQ ID NO: 3556 - protein, 8 aa, Homo Sapiens
NSTCVGPA

SEQ ID NO: 3557 - protein, 8 aa, Homo Sapiens
CVGPAPFL

SEQ ID NO: 3558 - protein, 8 aa, Homo Sapiens
GPAPFLIF

SEQ ID NO: 3559 - protein, 8 aa, Homo Sapiens
FSHGNSIF

SEQ ID NO: 3560 - protein, 8 aa, Homo Sapiens
HGNSIFRI

SEQ ID NO: 3561 - protein, 8 aa, Homo Sapiens
GTNYEQLV

SEQ ID NO: 3562 - protein, 8 aa, Homo Sapiens
QLVVDAGV

SEQ ID NO: 3563 - protein, 8 aa, Homo Sapiens
VVDAGVSV

SEQ ID NO: 3564 - protein, 8 aa, Homo Sapiens
DAGVSVIM

SEQ ID NO: 3565 - protein, 8 aa, Homo Sapiens
GVSVIMDF

SEQ ID NO: 3566 - protein, 8 aa, Homo Sapiens
SVIMDFHY

SEQ ID NO: 3567 - protein, 8 aa, Homo Sapiens
MDFHYNEK

SEQ ID NO: 3568 - protein, 8 aa, Homo Sapiens
DFHYNEKR

SEQ ID NO: 3569 - protein, 8 aa, Homo Sapiens
HYNEKRIY

SEQ ID NO: 3570 - protein, 8 aa, Homo Sapiens
KRIYWVDL

SEQ ID NO: 3571 - protein, 8 aa, Homo Sapiens
IYWVDLER

SEQ ID NO: 3572 - protein, 8 aa, Homo Sapiens
WVDLERQL

SEQ ID NO: 3573 - protein, 8 aa, Homo Sapiens
RQLLQRVF

SEQ ID NO: 3574 - protein, 8 aa, Homo Sapiens
QLLQRVFL

SEQ ID NO: 3575 - protein, 8 aa, Homo Sapiens
RVFLNGSR

SEQ ID NO: 3576 - protein, 8 aa, Homo Sapiens
VSGMAINW

SEQ ID NO: 3577 - protein, 8 aa, Homo Sapiens
SGMAINWI

SEQ ID NO: 3578 - protein, 8 aa, Homo Sapiens
NWINEEVI

SEQ ID NO: 3579 - protein, 8 aa, Homo Sapiens
WINEEVIW

SEQ ID NO: 3580 - protein, 8 aa, Homo Sapiens
EVIWSNQQ

SEQ ID NO: 3581 - protein, 8 aa, Homo Sapiens
QQEGIITV

SEQ ID NO: 3582 - protein, 8 aa, Homo Sapiens
GIITVTDM

SEQ ID NO: 3583 - protein, 8 aa, Homo Sapiens
IITVTDMK

SEQ ID NO: 3584 - protein, 8 aa, Homo Sapiens
HILLSALK

SEQ ID NO: 3585 - protein, 8 aa, Homo Sapiens
ILLSALKY

SEQ ID NO: 3586 - protein, 8 aa, Homo Sapiens
LSALKYPA

SEQ ID NO: 3587 - protein, 8 aa, Homo Sapiens
ALKYPANV

SEQ ID NO: 3588 - protein, 8 aa, Homo Sapiens
KYPANVAV

SEQ ID NO: 3589 - protein, 8 aa, Homo Sapiens
YPANVAVD

SEQ ID NO: 3590 - protein, 8 aa, Homo Sapiens
VAVDPVER

SEQ ID NO: 3591 - protein, 8 aa, Homo Sapiens
DPVERFIF

SEQ ID NO: 3592 - protein, 8 aa, Homo Sapiens
FIFWSSEV

SEQ ID NO: 3593 - protein, 8 aa, Homo Sapiens
SEVAGSLY

SEQ ID NO: 3594 - protein, 8 aa, Homo Sapiens
EVAGSLYR

SEQ ID NO: 3595 - protein, 8 aa, Homo Sapiens
YRADLDGV

SEQ ID NO: 3596 - protein, 8 aa, Homo Sapiens
ADLDGVGV

SEQ ID NO: 3597 - protein, 8 aa, Homo Sapiens
ALLETSEK

SEQ ID NO: 3598 - protein, 8 aa, Homo Sapiens
ETSEKITA

SEQ ID NO: 3599 - protein, 8 aa, Homo Sapiens
TSEKITAV

SEQ ID NO: 3600 - protein, 8 aa, Homo Sapiens
ITAVSLDV

SEQ ID NO: 3601 - protein, 8 aa, Homo Sapiens
TAVSLDVL

SEQ ID NO: 3602 - protein, 8 aa, Homo Sapiens
VSLDVLDK

SEQ ID NO: 3603 - protein, 8 aa, Homo Sapiens
DVLDKRLF

SEQ ID NO: 3604 - protein, 8 aa, Homo Sapiens
KRLFWIQY

SEQ ID NO: 3605 - protein, 8 aa, Homo Sapiens
RLFWIQYN

SEQ ID NO: 3606 - protein, 8 aa, Homo Sapiens
LFWIQYNR

SEQ ID NO: 3607 - protein, 8 aa, Homo Sapiens
NREGSNSL

SEQ ID NO: 3608 - protein, 8 aa, Homo Sapiens
REGSNSLI

SEQ ID NO: 3609 - protein, 8 aa, Homo Sapiens
SLICSCDY

SEQ ID NO: 3610 - protein, 8 aa, Homo Sapiens
HPTQHNLF

SEQ ID NO: 3611 - protein, 8 aa, Homo Sapiens
TQHNLFAM

SEQ ID NO: 3612 - protein, 8 aa, Homo Sapiens
NLFAMSLF

SEQ ID NO: 3613 - protein, 8 aa, Homo Sapiens
AMSLFGDR

SEQ ID NO: 3614 - protein, 8 aa, Homo Sapiens
SLFGDRIF

SEQ ID NO: 3615 - protein, 8 aa, Homo Sapiens
LFGDRIFY

SEQ ID NO: 3616 - protein, 8 aa, Homo Sapiens
RIFYSTWK

SEQ ID NO: 3617 - protein, 8 aa, Homo Sapiens
FYSTWKMK

SEQ ID NO: 3618 - protein, 8 aa, Homo Sapiens
STWKMKTI

SEQ ID NO: 3619 - protein, 8 aa, Homo Sapiens
KMKTIWIA

SEQ ID NO: 3620 - protein, 8 aa, Homo Sapiens
KTIWIANK

SEQ ID NO: 3621 - protein, 8 aa, Homo Sapiens
IANKHTGK

SEQ ID NO: 3622 - protein, 8 aa, Homo Sapiens
HTGKDMVR

SEQ ID NO: 3623 - protein, 8 aa, Homo Sapiens
RINLHSSF

SEQ ID NO: 3624 - protein, 8 aa, Homo Sapiens
LHSSFVPL

SEQ ID NO: 3625 - protein, 8 aa, Homo Sapiens
SFVPLGEL

SEQ ID NO: 3626 - protein, 8 aa, Homo Sapiens
FVPLGELK

SEQ ID NO: 3627 - protein, 8 aa, Homo Sapiens
VPLGELKV

SEQ ID NO: 3628 - protein, 8 aa, Homo Sapiens
PLGELKVV

SEQ ID NO: 3629 - protein, 8 aa, Homo Sapiens
ELKVVHPL

SEQ ID NO: 3630 - protein, 8 aa, Homo Sapiens
HPLAQPKA

SEQ ID NO: 3631 - protein, 8 aa, Homo Sapiens
DTWEPEQK

SEQ ID NO: 3632 - protein, 8 aa, Homo Sapiens
EQKLCKLR

SEQ ID NO: 3633 - protein, 8 aa, Homo Sapiens
GQDLQSHL

SEQ ID NO: 3634 - protein, 8 aa, Homo Sapiens
DLQSHLCM

SEQ ID NO: 3635 - protein, 8 aa, Homo Sapiens
MCAEGYAL

SEQ ID NO: 3636 - protein, 8 aa, Homo Sapiens
YALSRDRK

SEQ ID NO: 3637 - protein, 8 aa, Homo Sapiens
DVNECAFW

SEQ ID NO: 3638 - protein, 8 aa, Homo Sapiens
SYYCTCPV

SEQ ID NO: 3639 - protein, 8 aa, Homo Sapiens
CTCPVGFV

SEQ ID NO: 3640 - protein, 8 aa, Homo Sapiens
CPVGFVLL

SEQ ID NO: 3641 - protein, 8 aa, Homo Sapiens
FVLLPDGK

SEQ ID NO: 3642 - protein, 8 aa, Homo Sapiens
LLPDGKRC

SEQ ID NO: 3643 - protein, 8 aa, Homo Sapiens
HQLVSCPR

SEQ ID NO: 3644 - protein, 8 aa, Homo Sapiens
LVSCPRNV

SEQ ID NO: 3645 - protein, 8 aa, Homo Sapiens
CPRNVSEC

SEQ ID NO: 3646 - protein, 8 aa, Homo Sapiens
SECSHDCV

SEQ ID NO: 3647 - protein, 8 aa, Homo Sapiens
VLTSEGPL

SEQ ID NO: 3648 - protein, 8 aa, Homo Sapiens
FCPEGSVL

SEQ ID NO: 3649 - protein, 8 aa, Homo Sapiens
SVLERDGK

SEQ ID NO: 3650 - protein, 8 aa, Homo Sapiens
LCVPLSPV

SEQ ID NO: 3651 - protein, 8 aa, Homo Sapiens
VPLSPVSW

SEQ ID NO: 3652 - protein, 8 aa, Homo Sapiens
FPGYDLQL

SEQ ID NO: 3653 - protein, 8 aa, Homo Sapiens
QLDEKSCA

SEQ ID NO: 3654 - protein, 8 aa, Homo Sapiens
AASGPQPF

SEQ ID NO: 3655 - protein, 8 aa, Homo Sapiens
QPFLLFAN

SEQ ID NO: 3656 - protein, 8 aa, Homo Sapiens
FLLFANSQ

SEQ ID NO: 3657 - protein, 8 aa, Homo Sapiens
FANSQDIR

SEQ ID NO: 3658 - protein, 8 aa, Homo Sapiens
MHFDGTDY

SEQ ID NO: 3659 - protein, 8 aa, Homo Sapiens
GTDYGTLL

SEQ ID NO: 3660 - protein, 8 aa, Homo Sapiens
LLSQQMGM

SEQ ID NO: 3661 - protein, 8 aa, Homo Sapiens
SQQMGMVY

SEQ ID NO: 3662 - protein, 8 aa, Homo Sapiens
QQMGMVYA

SEQ ID NO: 3663 - protein, 8 aa, Homo Sapiens
QMGMVYAL

SEQ ID NO: 3664 - protein, 8 aa, Homo Sapiens
YALDHDPV

SEQ ID NO: 3665 - protein, 8 aa, Homo Sapiens
DPVENKIY

SEQ ID NO: 3666 - protein, 8 aa, Homo Sapiens
KIYFAHTA

SEQ ID NO: 3667 - protein, 8 aa, Homo Sapiens
IYFAHTAL

SEQ ID NO: 3668 - protein, 8 aa, Homo Sapiens
YFAHTALK

SEQ ID NO: 3669 - protein, 8 aa, Homo Sapiens
FAHTALKW

SEQ ID NO: 3670 - protein, 8 aa, Homo Sapiens
TALKWIER

SEQ ID NO: 3671 - protein, 8 aa, Homo Sapiens
ALKWIERA

SEQ ID NO: 3672 - protein, 8 aa, Homo Sapiens
LIEEGVDV

SEQ ID NO: 3673 - protein, 8 aa, Homo Sapiens
DVPEGLAV

SEQ ID NO: 3674 - protein, 8 aa, Homo Sapiens
EGLAVDWI

SEQ ID NO: 3675 - protein, 8 aa, Homo Sapiens
LAVDWIGR

SEQ ID NO: 3676 - protein, 8 aa, Homo Sapiens
AVDWIGRR

SEQ ID NO: 3677 - protein, 8 aa, Homo Sapiens
RRFYWTDR

SEQ ID NO: 3678 - protein, 8 aa, Homo Sapiens
FYWTDRGK

SEQ ID NO: 3679 - protein, 8 aa, Homo Sapiens
WTDRGKSL

SEQ ID NO: 3680 - protein, 8 aa, Homo Sapiens
RGKSLIGR

SEQ ID NO: 3681 - protein, 8 aa, Homo Sapiens
SLIGRSDL

SEQ ID NO: 3682 - protein, 8 aa, Homo Sapiens
RSDLNGKR

SEQ ID NO: 3683 - protein, 8 aa, Homo Sapiens
DLNGKRSK

SEQ ID NO: 3684 - protein, 8 aa, Homo Sapiens
KRSKIITK

SEQ ID NO: 3685 - protein, 8 aa, Homo Sapiens
KENISQPR

SEQ ID NO: 3686 - protein, 8 aa, Homo Sapiens
SQPRGIAV

SEQ ID NO: 3687 - protein, 8 aa, Homo Sapiens
QPRGIAVH

SEQ ID NO: 3688 - protein, 8 aa, Homo Sapiens
IAVHPMAK

SEQ ID NO: 3689 - protein, 8 aa, Homo Sapiens
AVHPMAKR

SEQ ID NO: 3690 - protein, 8 aa, Homo Sapiens
HPMAKRLF

SEQ ID NO: 3691 - protein, 8 aa, Homo Sapiens
DTGINPRI

SEQ ID NO: 3692 - protein, 8 aa, Homo Sapiens
ESSSLQGL

SEQ ID NO: 3693 - protein, 8 aa, Homo Sapiens
SSLQGLGR

SEQ ID NO: 3694 - protein, 8 aa, Homo Sapiens
SLQGLGRL

SEQ ID NO: 3695 - protein, 8 aa, Homo Sapiens
LQGLGRLV

SEQ ID NO: 3696 - protein, 8 aa, Homo Sapiens
GLGRLVIA

SEQ ID NO: 3697 - protein, 8 aa, Homo Sapiens
VIASSDLI

SEQ ID NO: 3698 - protein, 8 aa, Homo Sapiens
IASSDLIW

SEQ ID NO: 3699 - protein, 8 aa, Homo Sapiens
DLIWPSGI

SEQ ID NO: 3700 - protein, 8 aa, Homo Sapiens
IWPSGITI

SEQ ID NO: 3701 - protein, 8 aa, Homo Sapiens
SGITIDFL

SEQ ID NO: 3702 - protein, 8 aa, Homo Sapiens
TIDFLTDK

SEQ ID NO: 3703 - protein, 8 aa, Homo Sapiens
FLTDKLYW

SEQ ID NO: 3704 - protein, 8 aa, Homo Sapiens
KLYWCDAK

SEQ ID NO: 3705 - protein, 8 aa, Homo Sapiens
WCDAKQSV

SEQ ID NO: 3706 - protein, 8 aa, Homo Sapiens
KQSVIEMA

SEQ ID NO: 3707 - protein, 8 aa, Homo Sapiens
SVIEMANL

SEQ ID NO: 3708 - protein, 8 aa, Homo Sapiens
MANLDGSK

SEQ ID NO: 3709 - protein, 8 aa, Homo Sapiens
DVGHPFAV

SEQ ID NO: 3710 - protein, 8 aa, Homo Sapiens
HPFAVAVF

SEQ ID NO: 3711 - protein, 8 aa, Homo Sapiens
AVAVFEDY

SEQ ID NO: 3712 - protein, 8 aa, Homo Sapiens
VAVFEDYV

SEQ ID NO: 3713 - protein, 8 aa, Homo Sapiens
AVFEDYVW

SEQ ID NO: 3714 - protein, 8 aa, Homo Sapiens
VFEDYVWF

SEQ ID NO: 3715 - protein, 8 aa, Homo Sapiens
DYVWFSDW

SEQ ID NO: 3716 - protein, 8 aa, Homo Sapiens
YVWFSDWA

SEQ ID NO: 3717 - protein, 8 aa, Homo Sapiens
DWAMPSVI

SEQ ID NO: 3718 - protein, 8 aa, Homo Sapiens
WAMPSVIR

SEQ ID NO: 3719 - protein, 8 aa, Homo Sapiens
AMPSVIRV

SEQ ID NO: 3720 - protein, 8 aa, Homo Sapiens
MPSVIRVN

SEQ ID NO: 3721 - protein, 8 aa, Homo Sapiens
SVIRVNKR

SEQ ID NO: 3722 - protein, 8 aa, Homo Sapiens
RVNKRTGK

SEQ ID NO: 3723 - protein, 8 aa, Homo Sapiens
RTGKDRVR

SEQ ID NO: 3724 - protein, 8 aa, Homo Sapiens
RVRLQGSM

SEQ ID NO: 3725 - protein, 8 aa, Homo Sapiens
RLQGSMLK

SEQ ID NO: 3726 - protein, 8 aa, Homo Sapiens
SMLKPSSL

SEQ ID NO: 3727 - protein, 8 aa, Homo Sapiens
MLKPSSLV

SEQ ID NO: 3728 - protein, 8 aa, Homo Sapiens
KPSSLVVV

SEQ ID NO: 3729 - protein, 8 aa, Homo Sapiens
SLVVVHPL

SEQ ID NO: 3730 - protein, 8 aa, Homo Sapiens
VVVHPLAK

SEQ ID NO: 3731 - protein, 8 aa, Homo Sapiens
HPLAKPGA

SEQ ID NO: 3732 - protein, 8 aa, Homo Sapiens
YQNGGCEH

SEQ ID NO: 3733 - protein, 8 aa, Homo Sapiens
GTAWCSCR

SEQ ID NO: 3734 - protein, 8 aa, Homo Sapiens
SCREGFMK

SEQ ID NO: 3735 - protein, 8 aa, Homo Sapiens
FMKASDGK

SEQ ID NO: 3736 - protein, 8 aa, Homo Sapiens
LALDGHQL

SEQ ID NO: 3737 - protein, 8 aa, Homo Sapiens
ALDGHQLL

SEQ ID NO: 3738 - protein, 8 aa, Homo Sapiens
QLLAGGEV

SEQ ID NO: 3739 - protein, 8 aa, Homo Sapiens
EVDLKNQV

SEQ ID NO: 3740 - protein, 8 aa, Homo Sapiens
QVTPLDIL

SEQ ID NO: 3741 - protein, 8 aa, Homo Sapiens
TPLDILSK

SEQ ID NO: 3742 - protein, 8 aa, Homo Sapiens
DILSKTRV

SEQ ID NO: 3743 - protein, 8 aa, Homo Sapiens
NITESQHM

SEQ ID NO: 3744 - protein, 8 aa, Homo Sapiens
TESQHMLV

SEQ ID NO: 3745 - protein, 8 aa, Homo Sapiens
MLVAEIMV

SEQ ID NO: 3746 - protein, 8 aa, Homo Sapiens
AEIMVSDQ

SEQ ID NO: 3747 - protein, 8 aa, Homo Sapiens
DQDDCAPV

SEQ ID NO: 3748 - protein, 8 aa, Homo Sapiens
APVGCSMY

SEQ ID NO: 3749 - protein, 8 aa, Homo Sapiens
VGCSMYAR

SEQ ID NO: 3750 - protein, 8 aa, Homo Sapiens
CSMYARCI

SEQ ID NO: 3751 - protein, 8 aa, Homo Sapiens
DATCQCLK

SEQ ID NO: 3752 - protein, 8 aa, Homo Sapiens
KGFAGDGK

SEQ ID NO: 3753 - protein, 8 aa, Homo Sapiens
VPVCPPAS

SEQ ID NO: 3754 - protein, 8 aa, Homo Sapiens
YQGDGIHC

SEQ ID NO: 3755 - protein, 8 aa, Homo Sapiens
CLDIDECQ

SEQ ID NO: 3756 - protein, 8 aa, Homo Sapiens
CQLGVHSC

SEQ ID NO: 3757 - protein, 8 aa, Homo Sapiens
CTNTEGGY

SEQ ID NO: 3758 - protein, 8 aa, Homo Sapiens
TEGGYTCM

SEQ ID NO: 3759 - protein, 8 aa, Homo Sapiens
YTCMCAGR

SEQ ID NO: 3760 - protein, 8 aa, Homo Sapiens
TCMCAGRL

SEQ ID NO: 3761 - protein, 8 aa, Homo Sapiens
GRLSEPGL

SEQ ID NO: 3762 - protein, 8 aa, Homo Sapiens
RLSEPGLI

SEQ ID NO: 3763 - protein, 8 aa, Homo Sapiens
STPPPHLR

SEQ ID NO: 3764 - protein, 8 aa, Homo Sapiens
CPLSHDGY

SEQ ID NO: 3765 - protein, 8 aa, Homo Sapiens
CLHDGVCM

SEQ ID NO: 3766 - protein, 8 aa, Homo Sapiens
VCMYIEAL

SEQ ID NO: 3767 - protein, 8 aa, Homo Sapiens
MYIEALDK

SEQ ID NO: 3768 - protein, 8 aa, Homo Sapiens
YIEALDKY

SEQ ID NO: 3769 - protein, 8 aa, Homo Sapiens
KYACNCVV

SEQ ID NO: 3770 - protein, 8 aa, Homo Sapiens
VVGYIGER

SEQ ID NO: 3771 - protein, 8 aa, Homo Sapiens
YIGERCQY

SEQ ID NO: 3772 - protein, 8 aa, Homo Sapiens
RCQYRDLK

SEQ ID NO: 3773 - protein, 8 aa, Homo Sapiens
QYRDLKWW

SEQ ID NO: 3774 - protein, 8 aa, Homo Sapiens
DLKWWELR

SEQ ID NO: 3775 - protein, 8 aa, Homo Sapiens
AGHGQQQK

SEQ ID NO: 3776 - protein, 8 aa, Homo Sapiens
GQQQKVIV

SEQ ID NO: 3777 - protein, 8 aa, Homo Sapiens
QQQKVIVV

SEQ ID NO: 3778 - protein, 8 aa, Homo Sapiens
QKVIVVAV

SEQ ID NO: 3779 - protein, 8 aa, Homo Sapiens
VIVVAVCV

SEQ ID NO: 3780 - protein, 8 aa, Homo Sapiens
IVVAVCVV

SEQ ID NO: 3781 - protein, 8 aa, Homo Sapiens
VVAVCVVV

SEQ ID NO: 3782 - protein, 8 aa, Homo Sapiens
VAVCVVVL

SEQ ID NO: 3783 - protein, 8 aa, Homo Sapiens
AVCVVVLV

SEQ ID NO: 3784 - protein, 8 aa, Homo Sapiens
CVVVLVML

SEQ ID NO: 3785 - protein, 8 aa, Homo Sapiens
VVVLVMLL

SEQ ID NO: 3786 - protein, 8 aa, Homo Sapiens
VVLVMLLL

SEQ ID NO: 3787 - protein, 8 aa, Homo Sapiens
VLVMLLLL

SEQ ID NO: 3788 - protein, 8 aa, Homo Sapiens
VMLLLLSL

SEQ ID NO: 3789 - protein, 8 aa, Homo Sapiens
LLLSLWGA

SEQ ID NO: 3790 - protein, 8 aa, Homo Sapiens
LSLWGAHY

SEQ ID NO: 3791 - protein, 8 aa, Homo Sapiens
SLWGAHYY

SEQ ID NO: 3792 - protein, 8 aa, Homo Sapiens
LWGAHYYR

SEQ ID NO: 3793 - protein, 8 aa, Homo Sapiens
HYYRTQKL

SEQ ID NO: 3794 - protein, 8 aa, Homo Sapiens
YYRTQKLL

SEQ ID NO: 3795 - protein, 8 aa, Homo Sapiens
RTQKLLSK

SEQ ID NO: 3796 - protein, 8 aa, Homo Sapiens
KLLSKNPK

SEQ ID NO: 3797 - protein, 8 aa, Homo Sapiens
NPYEESSR

SEQ ID NO: 3798 - protein, 8 aa, Homo Sapiens
SSRDVRSR

SEQ ID NO: 3799 - protein, 8 aa, Homo Sapiens
MSSCPQPW

SEQ ID NO: 3800 - protein, 8 aa, Homo Sapiens
SCPQPWFV

SEQ ID NO: 3801 - protein, 8 aa, Homo Sapiens
CPQPWFVV

SEQ ID NO: 3802 - protein, 8 aa, Homo Sapiens
VIKEHQDL

SEQ ID NO: 3803 - protein, 8 aa, Homo Sapiens
GQAADGSM

SEQ ID NO: 3804 - protein, 8 aa, Homo Sapiens
GSMQPTSW

SEQ ID NO: 3805 - protein, 8 aa, Homo Sapiens
SMQPTSWR

SEQ ID NO: 3806 - protein, 8 aa, Homo Sapiens
EQGCWIPV

SEQ ID NO: 3807 - protein, 8 aa, Homo Sapiens
VMERSFHM

SEQ ID NO: 3808 - protein, 8 aa, Homo Sapiens
RSFHMPSY

SEQ ID NO: 3809 - protein, 8 aa, Homo Sapiens
MPSYGTQT

SEQ ID NO: 3810 - protein, 8 aa, Homo Sapiens
TLEGGVEK

SEQ ID NO: 3811 - protein, 8 aa, Homo Sapiens
GVEKPHSL

SEQ ID NO: 3812 - protein, 8 aa, Homo Sapiens
VEKPHSLL

SEQ ID NO: 3813 - protein, 8 aa, Homo Sapiens
KPHSLLSA

SEQ ID NO: 3814 - protein, 8 aa, Homo Sapiens
SLLSANPL

SEQ ID NO: 3815 - protein, 8 aa, Homo Sapiens
LLSANPLW

SEQ ID NO: 3816 - protein, 8 aa, Homo Sapiens
PLWQQRAL

SEQ ID NO: 3817 - protein, 8 aa, Homo Sapiens
ALDPPHQM

SEQ ID NO: 3818 - protein, 9 aa, Homo Sapiens
MLLTLIILL

SEQ ID NO: 3819 - protein, 9 aa, Homo Sapiens
LTLIILLPV

SEQ ID NO: 3820 - protein, 9 aa, Homo Sapiens
TLIILLPVV

SEQ ID NO: 3821 - protein, 9 aa, Homo Sapiens
IILLPVVSK

SEQ ID NO: 3822 - protein, 9 aa, Homo Sapiens
ILLPVVSKF

SEQ ID NO: 3823 - protein, 9 aa, Homo Sapiens
LPVVSKFSF

SEQ ID NO: 3824 - protein, 9 aa, Homo Sapiens
PVVSKFSFV

SEQ ID NO: 3825 - protein, 9 aa, Homo Sapiens
VSLSAPQHW

SEQ ID NO: 3826 - protein, 9 aa, Homo Sapiens
SLSAPQHWS

SEQ ID NO: 3827 - protein, 9 aa, Homo Sapiens
APQHWSCPE

SEQ ID NO: 3828 - protein, 9 aa, Homo Sapiens
TLAGNGNST

SEQ ID NO: 3829 - protein, 9 aa, Homo Sapiens
STCVGPAPF

SEQ ID NO: 3830 - protein, 9 aa, Homo Sapiens
TCVGPAPFL

SEQ ID NO: 3831 - protein, 9 aa, Homo Sapiens
CVGPAPFLI

SEQ ID NO: 3832 - protein, 9 aa, Homo Sapiens
APFLIFSHG

SEQ ID NO: 3833 - protein, 9 aa, Homo Sapiens
FLIFSHGNS

SEQ ID NO: 3834 - protein, 9 aa, Homo Sapiens
LIFSHGNSI

SEQ ID NO: 3835 - protein, 9 aa, Homo Sapiens
IFSHGNSIF

SEQ ID NO: 3836 - protein, 9 aa, Homo Sapiens
FSHGNSIFR

SEQ ID NO: 3837 - protein, 9 aa, Homo Sapiens
RIDTEGTNY

SEQ ID NO: 3838 - protein, 9 aa, Homo Sapiens
TEGTNYEQL

SEQ ID NO: 3839 - protein, 9 aa, Homo Sapiens
EQLVVDAGV

SEQ ID NO: 3840 - protein, 9 aa, Homo Sapiens
LVVDAGVSV

SEQ ID NO: 3841 - protein, 9 aa, Homo Sapiens
VVDAGVSVI

SEQ ID NO: 3842 - protein, 9 aa, Homo Sapiens
VSVIMDFHY

SEQ ID NO: 3843 - protein, 9 aa, Homo Sapiens
VIMDFHYNE

SEQ ID NO: 3844 - protein, 9 aa, Homo Sapiens
IMDFHYNEK

SEQ ID NO: 3845 - protein, 9 aa, Homo Sapiens
MDFHYNEKR

SEQ ID NO: 3846 - protein, 9 aa, Homo Sapiens
HYNEKRIYW

SEQ ID NO: 3847 - protein, 9 aa, Homo Sapiens
RIYWVDLER

SEQ ID NO: 3848 - protein, 9 aa, Homo Sapiens
WVDLERQLL

SEQ ID NO: 3849 - protein, 9 aa, Homo Sapiens
DLERQLLQR

SEQ ID NO: 3850 - protein, 9 aa, Homo Sapiens
LERQLLQRV

SEQ ID NO: 3851 - protein, 9 aa, Homo Sapiens
RQLLQRVFL

SEQ ID NO: 3852 - protein, 9 aa, Homo Sapiens
QRVFLNGSR

SEQ ID NO: 3853 - protein, 9 aa, Homo Sapiens
FLNGSRQER

SEQ ID NO: 3854 - protein, 9 aa, Homo Sapiens
NIEKNVSGM

SEQ ID NO: 3855 - protein, 9 aa, Homo Sapiens
NVSGMAINW

SEQ ID NO: 3856 - protein, 9 aa, Homo Sapiens
MAINWINEE

SEQ ID NO: 3857 - protein, 9 aa, Homo Sapiens
AINWINEEV

SEQ ID NO: 3858 - protein, 9 aa, Homo Sapiens
EVIWSNQQE

SEQ ID NO: 3859 - protein, 9 aa, Homo Sapiens
NQQEGIITV

SEQ ID NO: 3860 - protein, 9 aa, Homo Sapiens
EGIITVTDM

SEQ ID NO: 3861 - protein, 9 aa, Homo Sapiens
GIITVTDMK

SEQ ID NO: 3862 - protein, 9 aa, Homo Sapiens
HILLSALKY

SEQ ID NO: 3863 - protein, 9 aa, Homo Sapiens
LLSALKYPA

SEQ ID NO: 3864 - protein, 9 aa, Homo Sapiens
SALKYPANV

SEQ ID NO: 3865 - protein, 9 aa, Homo Sapiens
LKYPANVAV

SEQ ID NO: 3866 - protein, 9 aa, Homo Sapiens
YPANVAVDP

SEQ ID NO: 3867 - protein, 9 aa, Homo Sapiens
NVAVDPVER

SEQ ID NO: 3868 - protein, 9 aa, Homo Sapiens
AVDPVERFI

SEQ ID NO: 3869 - protein, 9 aa, Homo Sapiens
DPVERFIFW

SEQ ID NO: 3870 - protein, 9 aa, Homo Sapiens
RFIFWSSEV

SEQ ID NO: 3871 - protein, 9 aa, Homo Sapiens
FIFWSSEVA

SEQ ID NO: 3872 - protein, 9 aa, Homo Sapiens
WSSEVAGSL

SEQ ID NO: 3873 - protein, 9 aa, Homo Sapiens
SSEVAGSLY

SEQ ID NO: 3874 - protein, 9 aa, Homo Sapiens
EVAGSLYRA

SEQ ID NO: 3875 - protein, 9 aa, Homo Sapiens
RADLDGVGV

SEQ ID NO: 3876 - protein, 9 aa, Homo Sapiens
DLDGVGVKA

SEQ ID NO: 3877 - protein, 9 aa, Homo Sapiens
DGVGVKALL

SEQ ID NO: 3878 - protein, 9 aa, Homo Sapiens
KALLETSEK

SEQ ID NO: 3879 - protein, 9 aa, Homo Sapiens
ALLETSEKI

SEQ ID NO: 3880 - protein, 9 aa, Homo Sapiens
ETSEKITAV

SEQ ID NO: 3881 - protein, 9 aa, Homo Sapiens
SEKITAVSL

SEQ ID NO: 3882 - protein, 9 aa, Homo Sapiens
KITAVSLDV

SEQ ID NO: 3883 - protein, 9 aa, Homo Sapiens
ITAVSLDVL

SEQ ID NO: 3884 - protein, 9 aa, Homo Sapiens
AVSLDVLDK

SEQ ID NO: 3885 - protein, 9 aa, Homo Sapiens
VSLDVLDKR

SEQ ID NO: 3886 - protein, 9 aa, Homo Sapiens
SLDVLDKRL

SEQ ID NO: 3887 - protein, 9 aa, Homo Sapiens
VLDKRLFWI

SEQ ID NO: 3888 - protein, 9 aa, Homo Sapiens
DKRLFWIQY

SEQ ID NO: 3889 - protein, 9 aa, Homo Sapiens
RLFWIQYNR

SEQ ID NO: 3890 - protein, 9 aa, Homo Sapiens
YNREGSNSL

SEQ ID NO: 3891 - protein, 9 aa, Homo Sapiens
HISKHPTQH

SEQ ID NO: 3892 - protein, 9 aa, Homo Sapiens
KHPTQHNLF

SEQ ID NO: 3893 - protein, 9 aa, Homo Sapiens
HPTQHNLFA

SEQ ID NO: 3894 - protein, 9 aa, Homo Sapiens
PTQHNLFAM

SEQ ID NO: 3895 - protein, 9 aa, Homo Sapiens
FAMSLFGDR

SEQ ID NO: 3896 - protein, 9 aa, Homo Sapiens
AMSLFGDRI

SEQ ID NO: 3897 - protein, 9 aa, Homo Sapiens
MSLFGDRIF

SEQ ID NO: 3898 - protein, 9 aa, Homo Sapiens
SLFGDRIFY

SEQ ID NO: 3899 - protein, 9 aa, Homo Sapiens
RIFYSTWKM

SEQ ID NO: 3900 - protein, 9 aa, Homo Sapiens
IFYSTWKMK

SEQ ID NO: 3901 - protein, 9 aa, Homo Sapiens
STWKMKTIW

SEQ ID NO: 3902 - protein, 9 aa, Homo Sapiens
TWKMKTIWI

SEQ ID NO: 3903 - protein, 9 aa, Homo Sapiens
WKMKTIWIA

SEQ ID NO: 3904 - protein, 9 aa, Homo Sapiens
WIANKHTGK

SEQ ID NO: 3905 - protein, 9 aa, Homo Sapiens
HTGKDMVRI

SEQ ID NO: 3906 - protein, 9 aa, Homo Sapiens
VRINLHSSF

SEQ ID NO: 3907 - protein, 9 aa, Homo Sapiens
RINLHSSFV

SEQ ID NO: 3908 - protein, 9 aa, Homo Sapiens
NLHSSFVPL

SEQ ID NO: 3909 - protein, 9 aa, Homo Sapiens
SSFVPLGEL

SEQ ID NO: 3910 - protein, 9 aa, Homo Sapiens
SFVPLGELK

SEQ ID NO: 3911 - protein, 9 aa, Homo Sapiens
FVPLGELKV

SEQ ID NO: 3912 - protein, 9 aa, Homo Sapiens
VPLGELKVV

SEQ ID NO: 3913 - protein, 9 aa, Homo Sapiens
GELKVVHPL

SEQ ID NO: 3914 - protein, 9 aa, Homo Sapiens
ELKVVHPLA

SEQ ID NO: 3915 - protein, 9 aa, Homo Sapiens
VVHPLAQPK

SEQ ID NO: 3916 - protein, 9 aa, Homo Sapiens
QPKAEDDTW

SEQ ID NO: 3917 - protein, 9 aa, Homo Sapiens
DTWEPEQKL

SEQ ID NO: 3918 - protein, 9 aa, Homo Sapiens
EPEQKLCKL

SEQ ID NO: 3919 - protein, 9 aa, Homo Sapiens
LQSHLCMCA

SEQ ID NO: 3920 - protein, 9 aa, Homo Sapiens
CMCAEGYAL

SEQ ID NO: 3921 - protein, 9 aa, Homo Sapiens
CAEGYALSR

SEQ ID NO: 3922 - protein, 9 aa, Homo Sapiens
GYALSRDRK

SEQ ID NO: 3923 - protein, 9 aa, Homo Sapiens
YALSRDRKY

SEQ ID NO: 3924 - protein, 9 aa, Homo Sapiens
CEDVNECAF

SEQ ID NO: 3925 - protein, 9 aa, Homo Sapiens
AFWNHGCTL

SEQ ID NO: 3926 - protein, 9 aa, Homo Sapiens
NTPGSYYCT

SEQ ID NO: 3927 - protein, 9 aa, Homo Sapiens
GSYYCTCPV

SEQ ID NO: 3928 - protein, 9 aa, Homo Sapiens
YYCTCPVGF

SEQ ID NO: 3929 - protein, 9 aa, Homo Sapiens
YCTCPVGFV

SEQ ID NO: 3930 - protein, 9 aa, Homo Sapiens
CTCPVGFVL

SEQ ID NO: 3931 - protein, 9 aa, Homo Sapiens
TCPVGFVLL

SEQ ID NO: 3932 - protein, 9 aa, Homo Sapiens
CPVGFVLLP

SEQ ID NO: 3933 - protein, 9 aa, Homo Sapiens
FVLLPDGKR

SEQ ID NO: 3934 - protein, 9 aa, Homo Sapiens
VLLPDGKRC

SEQ ID NO: 3935 - protein, 9 aa, Homo Sapiens
LLPDGKRCH

SEQ ID NO: 3936 - protein, 9 aa, Homo Sapiens
QLVSCPRNV

SEQ ID NO: 3937 - protein, 9 aa, Homo Sapiens
SECSHDCVL

SEQ ID NO: 3938 - protein, 9 aa, Homo Sapiens
LTSEGPLCF

SEQ ID NO: 3939 - protein, 9 aa, Homo Sapiens
LCFCPEGSV

SEQ ID NO: 3940 - protein, 9 aa, Homo Sapiens
CFCPEGSVL

SEQ ID NO: 3941 - protein, 9 aa, Homo Sapiens
SPDNGGCSQ

SEQ ID NO: 3942 - protein, 9 aa, Homo Sapiens
GCSQLCVPL

SEQ ID NO: 3943 - protein, 9 aa, Homo Sapiens
QLCVPLSPV

SEQ ID NO: 3944 - protein, 9 aa, Homo Sapiens
PLSPVSWEC

SEQ ID NO: 3945 - protein, 9 aa, Homo Sapiens
WECDCFPGY

SEQ ID NO: 3946 - protein, 9 aa, Homo Sapiens
CFPGYDLQL

SEQ ID NO: 3947 - protein, 9 aa, Homo Sapiens
GYDLQLDEK

SEQ ID NO: 3948 - protein, 9 aa, Homo Sapiens
QLDEKSCAA

SEQ ID NO: 3949 - protein, 9 aa, Homo Sapiens
KSCAASGPQ

SEQ ID NO: 3950 - protein, 9 aa, Homo Sapiens
CAASGPQPF

SEQ ID NO: 3951 - protein, 9 aa, Homo Sapiens
AASGPQPFL

SEQ ID NO: 3952 - protein, 9 aa, Homo Sapiens
QPFLLFANS

SEQ ID NO: 3953 - protein, 9 aa, Homo Sapiens
LLFANSQDI

SEQ ID NO: 3954 - protein, 9 aa, Homo Sapiens
LFANSQDIR

SEQ ID NO: 3955 - protein, 9 aa, Homo Sapiens
FANSQDIRH

SEQ ID NO: 3956 - protein, 9 aa, Homo Sapiens
SQDIRHMHF

SEQ ID NO: 3957 - protein, 9 aa, Homo Sapiens
HMHFDGTDY

SEQ ID NO: 3958 - protein, 9 aa, Homo Sapiens
TLLSQQMGM

SEQ ID NO: 3959 - protein, 9 aa, Homo Sapiens
LLSQQMGMV

SEQ ID NO: 3960 - protein, 9 aa, Homo Sapiens
LSQQMGMVY

SEQ ID NO: 3961 - protein, 9 aa, Homo Sapiens
SQQMGMVYA

SEQ ID NO: 3962 - protein, 9 aa, Homo Sapiens
QQMGMVYAL

SEQ ID NO: 3963 - protein, 9 aa, Homo Sapiens
YALDHDPVE

SEQ ID NO: 3964 - protein, 9 aa, Homo Sapiens
DPVENKIYF

SEQ ID NO: 3965 - protein, 9 aa, Homo Sapiens
KIYFAHTAL

SEQ ID NO: 3966 - protein, 9 aa, Homo Sapiens
IYFAHTALK

SEQ ID NO: 3967 - protein, 9 aa, Homo Sapiens
YFAHTALKW

SEQ ID NO: 3968 - protein, 9 aa, Homo Sapiens
FAHTALKWI

SEQ ID NO: 3969 - protein, 9 aa, Homo Sapiens
HTALKWIER

SEQ ID NO: 3970 - protein, 9 aa, Homo Sapiens
TALKWIERA

SEQ ID NO: 3971 - protein, 9 aa, Homo Sapiens
RANMDGSQR

SEQ ID NO: 3972 - protein, 9 aa, Homo Sapiens
SQRERLIEE

SEQ ID NO: 3973 - protein, 9 aa, Homo Sapiens
RERLIEEGV

SEQ ID NO: 3974 - protein, 9 aa, Homo Sapiens
RLIEEGVDV

SEQ ID NO: 3975 - protein, 9 aa, Homo Sapiens
EGVDVPEGL

SEQ ID NO: 3976 - protein, 9 aa, Homo Sapiens
VPEGLAVDW

SEQ ID NO: 3977 - protein, 9 aa, Homo Sapiens
LAVDWIGRR

SEQ ID NO: 3978 - protein, 9 aa, Homo Sapiens
DWIGRRFYW

SEQ ID NO: 3979 - protein, 9 aa, Homo Sapiens
RFYWTDRGK

SEQ ID NO: 3980 - protein, 9 aa, Homo Sapiens
WTDRGKSLI

SEQ ID NO: 3981 - protein, 9 aa, Homo Sapiens
DLNGKRSKI

SEQ ID NO: 3982 - protein, 9 aa, Homo Sapiens
GIAVHPMAK

SEQ ID NO: 3983 - protein, 9 aa, Homo Sapiens
IAVHPMAKR

SEQ ID NO: 3984 - protein, 9 aa, Homo Sapiens
AVHPMAKRL

SEQ ID NO: 3985 - protein, 9 aa, Homo Sapiens
HPMAKRLFW

SEQ ID NO: 3986 - protein, 9 aa, Homo Sapiens
PMAKRLFWT

SEQ ID NO: 3987 - protein, 9 aa, Homo Sapiens
RLFWTDTGI

SEQ ID NO: 3988 - protein, 9 aa, Homo Sapiens
NPRIESSSL

SEQ ID NO: 3989 - protein, 9 aa, Homo Sapiens
IESSSLQGL

SEQ ID NO: 3990 - protein, 9 aa, Homo Sapiens
SSSLQGLGR

SEQ ID NO: 3991 - protein, 9 aa, Homo Sapiens
SLQGLGRLV

SEQ ID NO: 3992 - protein, 9 aa, Homo Sapiens
RLVIASSDL

SEQ ID NO: 3993 - protein, 9 aa, Homo Sapiens
LVIASSDLI

SEQ ID NO: 3994 - protein, 9 aa, Homo Sapiens
VIASSDLIW

SEQ ID NO: 3995 - protein, 9 aa, Homo Sapiens
LIWPSGITI

SEQ ID NO: 3996 - protein, 9 aa, Homo Sapiens
WPSGITIDF

SEQ ID NO: 3997 - protein, 9 aa, Homo Sapiens
SGITIDFLT

SEQ ID NO: 3998 - protein, 9 aa, Homo Sapiens
ITIDFLTDK

SEQ ID NO: 3999 - protein, 9 aa, Homo Sapiens
TIDFLTDKL

SEQ ID NO: 4000 - protein, 9 aa, Homo Sapiens
FLTDKLYWC

SEQ ID NO: 4001 - protein, 9 aa, Homo Sapiens
KLYWCDAKQ

SEQ ID NO: 4002 - protein, 9 aa, Homo Sapiens
YWCDAKQSV

SEQ ID NO: 4003 - protein, 9 aa, Homo Sapiens
DAKQSVIEM

SEQ ID NO: 4004 - protein, 9 aa, Homo Sapiens
QSVIEMANL

SEQ ID NO: 4005 - protein, 9 aa, Homo Sapiens
EMANLDGSK

SEQ ID NO: 4006 - protein, 9 aa, Homo Sapiens
MANLDGSKR

SEQ ID NO: 4007 - protein, 9 aa, Homo Sapiens
TQNDVGHPF

SEQ ID NO: 4008 - protein, 9 aa, Homo Sapiens
NDVGHPFAV

SEQ ID NO: 4009 - protein, 9 aa, Homo Sapiens
DVGHPFAVA

SEQ ID NO: 4010 - protein, 9 aa, Homo Sapiens
VGHPFAVAV

SEQ ID NO: 4011 - protein, 9 aa, Homo Sapiens
GHPFAVAVF

SEQ ID NO: 4012 - protein, 9 aa, Homo Sapiens
HPFAVAVFE

SEQ ID NO: 4013 - protein, 9 aa, Homo Sapiens
FAVAVFEDY

SEQ ID NO: 4014 - protein, 9 aa, Homo Sapiens
AVAVFEDYV

SEQ ID NO: 4015 - protein, 9 aa, Homo Sapiens
VAVFEDYVW

SEQ ID NO: 4016 - protein, 9 aa, Homo Sapiens
AVFEDYVWF

SEQ ID NO: 4017 - protein, 9 aa, Homo Sapiens
YVWFSDWAM

SEQ ID NO: 4018 - protein, 9 aa, Homo Sapiens
FSDWAMPSV

SEQ ID NO: 4019 - protein, 9 aa, Homo Sapiens
DWAMPSVIR

SEQ ID NO: 4020 - protein, 9 aa, Homo Sapiens
WAMPSVIRV

SEQ ID NO: 4021 - protein, 9 aa, Homo Sapiens
MPSVIRVNK

SEQ ID NO: 4022 - protein, 9 aa, Homo Sapiens
IRVNKRTGK

SEQ ID NO: 4023 - protein, 9 aa, Homo Sapiens
KRTGKDRVR

SEQ ID NO: 4024 - protein, 9 aa, Homo Sapiens
RVRLQGSML

SEQ ID NO: 4025 - protein, 9 aa, Homo Sapiens
SMLKPSSLV

SEQ ID NO: 4026 - protein, 9 aa, Homo Sapiens
MLKPSSLVV

SEQ ID NO: 4027 - protein, 9 aa, Homo Sapiens
KPSSLVVVH

SEQ ID NO: 4028 - protein, 9 aa, Homo Sapiens
SSLVVVHPL

SEQ ID NO: 4029 - protein, 9 aa, Homo Sapiens
SLVVVHPLA

SEQ ID NO: 4030 - protein, 9 aa, Homo Sapiens
LVVVHPLAK

SEQ ID NO: 4031 - protein, 9 aa, Homo Sapiens
KPGADPCLY

SEQ ID NO: 4032 - protein, 9 aa, Homo Sapiens
YQNGGCEHI

SEQ ID NO: 4033 - protein, 9 aa, Homo Sapiens
RLGTAWCSC

SEQ ID NO: 4034 - protein, 9 aa, Homo Sapiens
LGTAWCSCR

SEQ ID NO: 4035 - protein, 9 aa, Homo Sapiens
AWCSCREGF

SEQ ID NO: 4036 - protein, 9 aa, Homo Sapiens
CSCREGFMK

SEQ ID NO: 4037 - protein, 9 aa, Homo Sapiens
GFMKASDGK

SEQ ID NO: 4038 - protein, 9 aa, Homo Sapiens
KASDGKTCL

SEQ ID NO: 4039 - protein, 9 aa, Homo Sapiens
CLALDGHQL

SEQ ID NO: 4040 - protein, 9 aa, Homo Sapiens
LALDGHQLL

SEQ ID NO: 4041 - protein, 9 aa, Homo Sapiens
ALDGHQLLA

SEQ ID NO: 4042 - protein, 9 aa, Homo Sapiens
HQLLAGGEV

SEQ ID NO: 4043 - protein, 9 aa, Homo Sapiens
LLAGGEVDL

SEQ ID NO: 4044 - protein, 9 aa, Homo Sapiens
GEVDLKNQV

SEQ ID NO: 4045 - protein, 9 aa, Homo Sapiens
DLKNQVTPL

SEQ ID NO: 4046 - protein, 9 aa, Homo Sapiens
NQVTPLDIL

SEQ ID NO: 4047 - protein, 9 aa, Homo Sapiens
VTPLDILSK

SEQ ID NO: 4048 - protein, 9 aa, Homo Sapiens
NITESQHML

SEQ ID NO: 4049 - protein, 9 aa, Homo Sapiens
ITESQHMLV

SEQ ID NO: 4050 - protein, 9 aa, Homo Sapiens
SQHMLVAEI

SEQ ID NO: 4051 - protein, 9 aa, Homo Sapiens
HMLVAEIMV

SEQ ID NO: 4052 - protein, 9 aa, Homo Sapiens
MLVAEIMVS

SEQ ID NO: 4053 - protein, 9 aa, Homo Sapiens
AEIMVSDQD

SEQ ID NO: 4054 - protein, 9 aa, Homo Sapiens
MVSDQDDCA

SEQ ID NO: 4055 - protein, 9 aa, Homo Sapiens
APVGCSMYA

SEQ ID NO: 4056 - protein, 9 aa, Homo Sapiens
PVGCSMYAR

SEQ ID NO: 4057 - protein, 9 aa, Homo Sapiens
GEDATCQCL

SEQ ID NO: 4058 - protein, 9 aa, Homo Sapiens
EDATCQCLK

SEQ ID NO: 4059 - protein, 9 aa, Homo Sapiens
DIDECEMGV

SEQ ID NO: 4060 - protein, 9 aa, Homo Sapiens
DECEMGVPV

SEQ ID NO: 4061 - protein, 9 aa, Homo Sapiens
MGVPVCPPA

SEQ ID NO: 4062 - protein, 9 aa, Homo Sapiens
PVCPPASSK

SEQ ID NO: 4063 - protein, 9 aa, Homo Sapiens
CPPASSKCI

SEQ ID NO: 4064 - protein, 9 aa, Homo Sapiens
CINTEGGYV

SEQ ID NO: 4065 - protein, 9 aa, Homo Sapiens
NTEGGYVCR

SEQ ID NO: 4066 - protein, 9 aa, Homo Sapiens
YVCRCSEGY

SEQ ID NO: 4067 - protein, 9 aa, Homo Sapiens
YQGDGIHCL

SEQ ID NO: 4068 - protein, 9 aa, Homo Sapiens
CLDIDECQL

SEQ ID NO: 4069 - protein, 9 aa, Homo Sapiens
DIDECQLGV

SEQ ID NO: 4070 - protein, 9 aa, Homo Sapiens
NTEGGYTCM

SEQ ID NO: 4071 - protein, 9 aa, Homo Sapiens
GYTCMCAGR

SEQ ID NO: 4072 - protein, 9 aa, Homo Sapiens
YTCMCAGRL

SEQ ID NO: 4073 - protein, 9 aa, Homo Sapiens
RLSEPGLIC

SEQ ID NO: 4074 - protein, 9 aa, Homo Sapiens
DSTPPPHLR

SEQ ID NO: 4075 - protein, 9 aa, Homo Sapiens
HLREDDHHY

SEQ ID NO: 4076 - protein, 9 aa, Homo Sapiens
REDDHHYSV

SEQ ID NO: 4077 - protein, 9 aa, Homo Sapiens
ECPLSHDGY

SEQ ID NO: 4078 - protein, 9 aa, Homo Sapiens
PLSHDGYCL

SEQ ID NO: 4079 - protein, 9 aa, Homo Sapiens
DGYCLHDGV

SEQ ID NO: 4080 - protein, 9 aa, Homo Sapiens
CLHDGVCMY

SEQ ID NO: 4081 - protein, 9 aa, Homo Sapiens
GVCMYIEAL

SEQ ID NO: 4082 - protein, 9 aa, Homo Sapiens
CMYIEALDK

SEQ ID NO: 4083 - protein, 9 aa, Homo Sapiens
MYIEALDKY

SEQ ID NO: 4084 - protein, 9 aa, Homo Sapiens
ALDKYACNC

SEQ ID NO: 4085 - protein, 9 aa, Homo Sapiens
DKYACNCVV

SEQ ID NO: 4086 - protein, 9 aa, Homo Sapiens
YACNCVVGY

SEQ ID NO: 4087 - protein, 9 aa, Homo Sapiens
CVVGYIGER

SEQ ID NO: 4088 - protein, 9 aa, Homo Sapiens
GYIGERCQY

SEQ ID NO: 4089 - protein, 9 aa, Homo Sapiens
YIGERCQYR

SEQ ID NO: 4090 - protein, 9 aa, Homo Sapiens
GERCQYRDL

SEQ ID NO: 4091 - protein, 9 aa, Homo Sapiens
YRDLKWWEL

SEQ ID NO: 4092 - protein, 9 aa, Homo Sapiens
HAGHGQQQK

SEQ ID NO: 4093 - protein, 9 aa, Homo Sapiens
GQQQKVIVV

SEQ ID NO: 4094 - protein, 9 aa, Homo Sapiens
QQQKVIVVA

SEQ ID NO: 4095 - protein, 9 aa, Homo Sapiens
QQKVIVVAV

SEQ ID NO: 4096 - protein, 9 aa, Homo Sapiens
KVIVVAVCV

SEQ ID NO: 4097 - protein, 9 aa, Homo Sapiens
VIVVAVCVV

SEQ ID NO: 4098 - protein, 9 aa, Homo Sapiens
IVVAVCVVV

SEQ ID NO: 4099 - protein, 9 aa, Homo Sapiens
VVAVCVVVL

SEQ ID NO: 4100 - protein, 9 aa, Homo Sapiens
VAVCVVVLV

SEQ ID NO: 4101 - protein, 9 aa, Homo Sapiens
CVVVLVMLL

SEQ ID NO: 4102 - protein, 9 aa, Homo Sapiens
VVVLVMLLL

SEQ ID NO: 4103 - protein, 9 aa, Homo Sapiens
VVLVMLLLL

SEQ ID NO: 4104 - protein, 9 aa, Homo Sapiens
VLVMLLLLS

SEQ ID NO: 4105 - protein, 9 aa, Homo Sapiens
LVMLLLLSL

SEQ ID NO: 4106 - protein, 9 aa, Homo Sapiens
MLLLLSLWG

SEQ ID NO: 4107 - protein, 9 aa, Homo Sapiens
LLLLSLWGA

SEQ ID NO: 4108 - protein, 9 aa, Homo Sapiens
LLSLWGAHY

SEQ ID NO: 4109 - protein, 9 aa, Homo Sapiens
LSLWGAHYY

SEQ ID NO: 4110 - protein, 9 aa, Homo Sapiens
SLWGAHYYR

SEQ ID NO: 4111 - protein, 9 aa, Homo Sapiens
GAHYYRTQK

SEQ ID NO: 4112 - protein, 9 aa, Homo Sapiens
AHYYRTQKL

SEQ ID NO: 4113 - protein, 9 aa, Homo Sapiens
HYYRTQKLL

SEQ ID NO: 4114 - protein, 9 aa, Homo Sapiens
YRTQKLLSK

SEQ ID NO: 4115 - protein, 9 aa, Homo Sapiens
LSKNPKNPY

SEQ ID NO: 4116 - protein, 9 aa, Homo Sapiens
ESSRDVRSR

SEQ ID NO: 4117 - protein, 9 aa, Homo Sapiens
SSRDVRSRR

SEQ ID NO: 4118 - protein, 9 aa, Homo Sapiens
RPADTEDGM

SEQ ID NO: 4119 - protein, 9 aa, Homo Sapiens
GMSSCPQPW

SEQ ID NO: 4120 - protein, 9 aa, Homo Sapiens
SSCPQPWFV

SEQ ID NO: 4121 - protein, 9 aa, Homo Sapiens
SCPQPWFVV

SEQ ID NO: 4122 - protein, 9 aa, Homo Sapiens
CPQPWFVVI

SEQ ID NO: 4123 - protein, 9 aa, Homo Sapiens
VIKEHQDLK

SEQ ID NO: 4124 - protein, 9 aa, Homo Sapiens
DLKNGGQPV

SEQ ID NO: 4125 - protein, 9 aa, Homo Sapiens
GSMQPTSWR

SEQ ID NO: 4126 - protein, 9 aa, Homo Sapiens
SMQPTSWRQ

SEQ ID NO: 4127 - protein, 9 aa, Homo Sapiens
RQEPQLCGM

SEQ ID NO: 4128 - protein, 9 aa, Homo Sapiens
TEQGCWIPV

SEQ ID NO: 4129 - protein, 9 aa, Homo Sapiens
CWIPVSSDK

SEQ ID NO: 4130 - protein, 9 aa, Homo Sapiens
GSCPQVMER

SEQ ID NO: 4131 - protein, 9 aa, Homo Sapiens
CPQVMERSF

SEQ ID NO: 4132 - protein, 9 aa, Homo Sapiens
QVMERSFHM

SEQ ID NO: 4133 - protein, 9 aa, Homo Sapiens
MERSFHMPS

SEQ ID NO: 4134 - protein, 9 aa, Homo Sapiens
ERSFHMPSY

SEQ ID NO: 4135 - protein, 9 aa, Homo Sapiens
HMPSYGTQT

SEQ ID NO: 4136 - protein, 9 aa, Homo Sapiens
MPSYGTQTL

SEQ ID NO: 4137 - protein, 9 aa, Homo Sapiens
QTLEGGVEK

SEQ ID NO: 4138 - protein, 9 aa, Homo Sapiens
SLLSANPLW

SEQ ID NO: 4139 - protein, 9 aa, Homo Sapiens
LLSANPLWQ

SEQ ID NO: 4140 - protein, 9 aa, Homo Sapiens
SANPLWQQR

SEQ ID NO: 4141 - protein, 9 aa, Homo Sapiens
NPLWQQRAL

SEQ ID NO: 4142 - protein, 9 aa, Homo Sapiens
QQRALDPPH

SEQ ID NO: 4143 - protein, 9 aa, Homo Sapiens
RALDPPHQM

SEQ ID NO: 4144 - protein, 9 aa, Homo Sapiens
ALDPPHQME

SEQ ID NO: 4145 - protein, 10 aa, Homo Sapiens
MLLTLIILLP

SEQ ID NO: 4146 - protein, 10 aa, Homo Sapiens
LLTLIILLPV

SEQ ID NO: 4147 - protein, 10 aa, Homo Sapiens
LTLIILLPVV

SEQ ID NO: 4148 - protein, 10 aa, Homo Sapiens
LIILLPVVSK

SEQ ID NO: 4149 - protein, 10 aa, Homo Sapiens
IILLPVVSKF

SEQ ID NO: 4150 - protein, 10 aa, Homo Sapiens
ILLPVVSKFS

SEQ ID NO: 4151 - protein, 10 aa, Homo Sapiens
LPVVSKFSFV

SEQ ID NO: 4152 - protein, 10 aa, Homo Sapiens
VVSKFSFVSL

SEQ ID NO: 4153 - protein, 10 aa, Homo Sapiens
FVSLSAPQHW

SEQ ID NO: 4154 - protein, 10 aa, Homo Sapiens
SLSAPQHWSC

SEQ ID NO: 4155 - protein, 10 aa, Homo Sapiens
TLAGNGNSTC

SEQ ID NO: 4156 - protein, 10 aa, Homo Sapiens
LAGNGNSTCV

SEQ ID NO: 4157 - protein, 10 aa, Homo Sapiens
NSTCVGPAPF

SEQ ID NO: 4158 - protein, 10 aa, Homo Sapiens
STCVGPAPFL

SEQ ID NO: 4159 - protein, 10 aa, Homo Sapiens
TCVGPAPFLI

SEQ ID NO: 4160 - protein, 10 aa, Homo Sapiens
CVGPAPFLIF

SEQ ID NO: 4161 - protein, 10 aa, Homo Sapiens
APFLIFSHGN

SEQ ID NO: 4162 - protein, 10 aa, Homo Sapiens
FLIFSHGNSI

SEQ ID NO: 4163 - protein, 10 aa, Homo Sapiens
LIFSHGNSIF

SEQ ID NO: 4164 - protein, 10 aa, Homo Sapiens
IFSHGNSIFR

SEQ ID NO: 4165 - protein, 10 aa, Homo Sapiens
FSHGNSIFRI

SEQ ID NO: 4166 - protein, 10 aa, Homo Sapiens
FRIDTEGTNY

SEQ ID NO: 4167 - protein, 10 aa, Homo Sapiens
TEGTNYEQLV

SEQ ID NO: 4168 - protein, 10 aa, Homo Sapiens
YEQLVVDAGV

SEQ ID NO: 4169 - protein, 10 aa, Homo Sapiens
QLVVDAGVSV

SEQ ID NO: 4170 - protein, 10 aa, Homo Sapiens
LVVDAGVSVI

SEQ ID NO: 4171 - protein, 10 aa, Homo Sapiens
VVDAGVSVIM

SEQ ID NO: 4172 - protein, 10 aa, Homo Sapiens
GVSVIMDFHY

SEQ ID NO: 4173 - protein, 10 aa, Homo Sapiens
VIMDFHYNEK

SEQ ID NO: 4174 - protein, 10 aa, Homo Sapiens
IMDFHYNEKR

SEQ ID NO: 4175 - protein, 10 aa, Homo Sapiens
HYNEKRIYWV

SEQ ID NO: 4176 - protein, 10 aa, Homo Sapiens
NEKRIYWVDL

SEQ ID NO: 4177 - protein, 10 aa, Homo Sapiens
KRIYWVDLER

SEQ ID NO: 4178 - protein, 10 aa, Homo Sapiens
RIYWVDLERQ

SEQ ID NO: 4179 - protein, 10 aa, Homo Sapiens
IYWVDLERQL

SEQ ID NO: 4180 - protein, 10 aa, Homo Sapiens
YWVDLERQLL

SEQ ID NO: 4181 - protein, 10 aa, Homo Sapiens
DLERQLLQRV

SEQ ID NO: 4182 - protein, 10 aa, Homo Sapiens
LERQLLQRVF

SEQ ID NO: 4183 - protein, 10 aa, Homo Sapiens
LQRVFLNGSR

SEQ ID NO: 4184 - protein, 10 aa, Homo Sapiens
VFLNGSRQER

SEQ ID NO: 4185 - protein, 10 aa, Homo Sapiens
FLNGSRQERV

SEQ ID NO: 4186 - protein, 10 aa, Homo Sapiens
RQERVCNIEK

SEQ ID NO: 4187 - protein, 10 aa, Homo Sapiens
KNVSGMAINW

SEQ ID NO: 4188 - protein, 10 aa, Homo Sapiens
NVSGMAINWI

SEQ ID NO: 4189 - protein, 10 aa, Homo Sapiens
MAINWINEEV

SEQ ID NO: 4190 - protein, 10 aa, Homo Sapiens
AINWINEEVI

SEQ ID NO: 4191 - protein, 10 aa, Homo Sapiens
VIWSNQQEGI

SEQ ID NO: 4192 - protein, 10 aa, Homo Sapiens
IWSNQQEGII

SEQ ID NO: 4193 - protein, 10 aa, Homo Sapiens
NQQEGIITVT

SEQ ID NO: 4194 - protein, 10 aa, Homo Sapiens
EGIITVTDMK

SEQ ID NO: 4195 - protein, 10 aa, Homo Sapiens
DMKGNNSHIL

SEQ ID NO: 4196 - protein, 10 aa, Homo Sapiens
NSHILLSALK

SEQ ID NO: 4197 - protein, 10 aa, Homo Sapiens
SHILLSALKY

SEQ ID NO: 4198 - protein, 10 aa, Homo Sapiens
ILLSALKYPA

SEQ ID NO: 4199 - protein, 10 aa, Homo Sapiens
LSALKYPANV

SEQ ID NO: 4200 - protein, 10 aa, Homo Sapiens
ALKYPANVAV

SEQ ID NO: 4201 - protein, 10 aa, Homo Sapiens
KYPANVAVDP

SEQ ID NO: 4202 - protein, 10 aa, Homo Sapiens
YPANVAVDPV

SEQ ID NO: 4203 - protein, 10 aa, Homo Sapiens
NVAVDPVERF

SEQ ID NO: 4204 - protein, 10 aa, Homo Sapiens
AVDPVERFIF

SEQ ID NO: 4205 - protein, 10 aa, Homo Sapiens
ERFIFWSSEV

SEQ ID NO: 4206 - protein, 10 aa, Homo Sapiens
WSSEVAGSLY

SEQ ID NO: 4207 - protein, 10 aa, Homo Sapiens
SSEVAGSLYR

SEQ ID NO: 4208 - protein, 10 aa, Homo Sapiens
SEVAGSLYRA

SEQ ID NO: 4209 - protein, 10 aa, Homo Sapiens
SLYRADLDGV

SEQ ID NO: 4210 - protein, 10 aa, Homo Sapiens
YRADLDGVGV

SEQ ID NO: 4211 - protein, 10 aa, Homo Sapiens
DLDGVGVKAL

SEQ ID NO: 4212 - protein, 10 aa, Homo Sapiens
ALLETSEKIT

SEQ ID NO: 4213 - protein, 10 aa, Homo Sapiens
LLETSEKITA

SEQ ID NO: 4214 - protein, 10 aa, Homo Sapiens
ETSEKITAVS

SEQ ID NO: 4215 - protein, 10 aa, Homo Sapiens
KITAVSLDVL

SEQ ID NO: 4216 - protein, 10 aa, Homo Sapiens
TAVSLDVLDK

SEQ ID NO: 4217 - protein, 10 aa, Homo Sapiens
AVSLDVLDKR

SEQ ID NO: 4218 - protein, 10 aa, Homo Sapiens
SLDVLDKRLF

SEQ ID NO: 4219 - protein, 10 aa, Homo Sapiens
DVLDKRLFWI

SEQ ID NO: 4220 - protein, 10 aa, Homo Sapiens
VLDKRLFWIQ

SEQ ID NO: 4221 - protein, 10 aa, Homo Sapiens
KRLFWIQYNR

SEQ ID NO: 4222 - protein, 10 aa, Homo Sapiens
QYNREGSNSL

SEQ ID NO: 4223 - protein, 10 aa, Homo Sapiens
SVHISKHPTQ

SEQ ID NO: 4224 - protein, 10 aa, Homo Sapiens
HPTQHNLFAM

SEQ ID NO: 4225 - protein, 10 aa, Homo Sapiens
TQHNLFAMSL

SEQ ID NO: 4226 - protein, 10 aa, Homo Sapiens
LFAMSLFGDR

SEQ ID NO: 4227 - protein, 10 aa, Homo Sapiens
FAMSLFGDRI

SEQ ID NO: 4228 - protein, 10 aa, Homo Sapiens
AMSLFGDRIF

SEQ ID NO: 4229 - protein, 10 aa, Homo Sapiens
MSLFGDRIFY

SEQ ID NO: 4230 - protein, 10 aa, Homo Sapiens
SLFGDRIFYS

SEQ ID NO: 4231 - protein, 10 aa, Homo Sapiens
FGDRIFYSTW

SEQ ID NO: 4232 - protein, 10 aa, Homo Sapiens
GDRIFYSTWK

SEQ ID NO: 4233 - protein, 10 aa, Homo Sapiens
RIFYSTWKMK

SEQ ID NO: 4234 - protein, 10 aa, Homo Sapiens
FYSTWKMKTI

SEQ ID NO: 4235 - protein, 10 aa, Homo Sapiens
YSTWKMKTIW

SEQ ID NO: 4236 - protein, 10 aa, Homo Sapiens
STWKMKTIWI

SEQ ID NO: 4237 - protein, 10 aa, Homo Sapiens
KMKTIWIANK

SEQ ID NO: 4238 - protein, 10 aa, Homo Sapiens
IWIANKHTGK

SEQ ID NO: 4239 - protein, 10 aa, Homo Sapiens
MVRINLHSSF

SEQ ID NO: 4240 - protein, 10 aa, Homo Sapiens
HSSFVPLGEL

SEQ ID NO: 4241 - protein, 10 aa, Homo Sapiens
SSFVPLGELK

SEQ ID NO: 4242 - protein, 10 aa, Homo Sapiens
SFVPLGELKV

SEQ ID NO: 4243 - protein, 10 aa, Homo Sapiens
FVPLGELKVV

SEQ ID NO: 4244 - protein, 10 aa, Homo Sapiens
VPLGELKVVH

SEQ ID NO: 4245 - protein, 10 aa, Homo Sapiens
KVVHPLAQPK

SEQ ID NO: 4246 - protein, 10 aa, Homo Sapiens
WEPEQKLCKL

SEQ ID NO: 4247 - protein, 10 aa, Homo Sapiens
KLRKGNCSST

SEQ ID NO: 4248 - protein, 10 aa, Homo Sapiens
DLQSHLCMCA

SEQ ID NO: 4249 - protein, 10 aa, Homo Sapiens
HLCMCAEGYA

SEQ ID NO: 4250 - protein, 10 aa, Homo Sapiens
MCAEGYALSR

SEQ ID NO: 4251 - protein, 10 aa, Homo Sapiens
EGYALSRDRK

SEQ ID NO: 4252 - protein, 10 aa, Homo Sapiens
YCEDVNECAF

SEQ ID NO: 4253 - protein, 10 aa, Homo Sapiens
SYYCTCPVGF

SEQ ID NO: 4254 - protein, 10 aa, Homo Sapiens
YYCTCPVGFV

SEQ ID NO: 4255 - protein, 10 aa, Homo Sapiens
YCTCPVGFVL

SEQ ID NO: 4256 - protein, 10 aa, Homo Sapiens
CTCPVGFVLL

SEQ ID NO: 4257 - protein, 10 aa, Homo Sapiens
LLPDGKRCHQ

SEQ ID NO: 4258 - protein, 10 aa, Homo Sapiens
LPDGKRCHQL

SEQ ID NO: 4259 - protein, 10 aa, Homo Sapiens
RCHQLVSCPR

SEQ ID NO: 4260 - protein, 10 aa, Homo Sapiens
NVSECSHDCV

SEQ ID NO: 4261 - protein, 10 aa, Homo Sapiens
PLCFCPEGSV

SEQ ID NO: 4262 - protein, 10 aa, Homo Sapiens
SPDNGGCSQL

SEQ ID NO: 4263 - protein, 10 aa, Homo Sapiens
SQLCVPLSPV

SEQ ID NO: 4264 - protein, 10 aa, Homo Sapiens
LCVPLSPVSW

SEQ ID NO: 4265 - protein, 10 aa, Homo Sapiens
SPVSWECDCF

SEQ ID NO: 4266 - protein, 10 aa, Homo Sapiens
LQLDEKSCAA

SEQ ID NO: 4267 - protein, 10 aa, Homo Sapiens
QLDEKSCAAS

SEQ ID NO: 4268 - protein, 10 aa, Homo Sapiens
CAASGPQPFL

SEQ ID NO: 4269 - protein, 10 aa, Homo Sapiens
AASGPQPFLL

SEQ ID NO: 4270 - protein, 10 aa, Homo Sapiens
FLLFANSQDI

SEQ ID NO: 4271 - protein, 10 aa, Homo Sapiens
LLFANSQDIR

SEQ ID NO: 4272 - protein, 10 aa, Homo Sapiens
FANSQDIRHM

SEQ ID NO: 4273 - protein, 10 aa, Homo Sapiens
NSQDIRHMHF

SEQ ID NO: 4274 - protein, 10 aa, Homo Sapiens
TLLSQQMGMV

SEQ ID NO: 4275 - protein, 10 aa, Homo Sapiens
LLSQQMGMVY

SEQ ID NO: 4276 - protein, 10 aa, Homo Sapiens
SQQMGMVYAL

SEQ ID NO: 4277 - protein, 10 aa, Homo Sapiens
MVYALDHDPV

SEQ ID NO: 4278 - protein, 10 aa, Homo Sapiens
ALDHDPVENK

SEQ ID NO: 4279 - protein, 10 aa, Homo Sapiens
DPVENKIYFA

SEQ ID NO: 4280 - protein, 10 aa, Homo Sapiens
KIYFAHTALK

SEQ ID NO: 4281 - protein, 10 aa, Homo Sapiens
IYFAHTALKW

SEQ ID NO: 4282 - protein, 10 aa, Homo Sapiens
YFAHTALKWI

SEQ ID NO: 4283 - protein, 10 aa, Homo Sapiens
AHTALKWIER

SEQ ID NO: 4284 - protein, 10 aa, Homo Sapiens
HTALKWIERA

SEQ ID NO: 4285 - protein, 10 aa, Homo Sapiens
ALKWIERANM

SEQ ID NO: 4286 - protein, 10 aa, Homo Sapiens
ERANMDGSQR

SEQ ID NO: 4287 - protein, 10 aa, Homo Sapiens
NMDGSQRERL

SEQ ID NO: 4288 - protein, 10 aa, Homo Sapiens
EEGVDVPEGL

SEQ ID NO: 4289 - protein, 10 aa, Homo Sapiens
EGVDVPEGLA

SEQ ID NO: 4290 - protein, 10 aa, Homo Sapiens
GVDVPEGLAV

SEQ ID NO: 4291 - protein, 10 aa, Homo Sapiens
DVPEGLAVDW

SEQ ID NO: 4292 - protein, 10 aa, Homo Sapiens
LAVDWIGRRF

SEQ ID NO: 4293 - protein, 10 aa, Homo Sapiens
AVDWIGRRFY

SEQ ID NO: 4294 - protein, 10 aa, Homo Sapiens
IGRRFYWTDR

SEQ ID NO: 4295 - protein, 10 aa, Homo Sapiens
RRFYWTDRGK

SEQ ID NO: 4296 - protein, 10 aa, Homo Sapiens
FYWTDRGKSL

SEQ ID NO: 4297 - protein, 10 aa, Homo Sapiens
YWTDRGKSLI

SEQ ID NO: 4298 - protein, 10 aa, Homo Sapiens
LIGRSDLNGK

SEQ ID NO: 4299 - protein, 10 aa, Homo Sapiens
RSDLNGKRSK

SEQ ID NO: 4300 - protein, 10 aa, Homo Sapiens
ITKENISQPR

SEQ ID NO: 4301 - protein, 10 aa, Homo Sapiens
KENISQPRGI

SEQ ID NO: 4302 - protein, 10 aa, Homo Sapiens
NISQPRGIAV

SEQ ID NO: 4303 - protein, 10 aa, Homo Sapiens
QPRGIAVHPM

SEQ ID NO: 4304 - protein, 10 aa, Homo Sapiens
RGIAVHPMAK

SEQ ID NO: 4305 - protein, 10 aa, Homo Sapiens
GIAVHPMAKR

SEQ ID NO: 4306 - protein, 10 aa, Homo Sapiens
HPMAKRLFWT

SEQ ID NO: 4307 - protein, 10 aa, Homo Sapiens
KRLFWTDTGI

SEQ ID NO: 4308 - protein, 10 aa, Homo Sapiens
FWTDTGINPR

SEQ ID NO: 4309 - protein, 10 aa, Homo Sapiens
WTDTGINPRI

SEQ ID NO: 4310 - protein, 10 aa, Homo Sapiens
RIESSSLQGL

SEQ ID NO: 4311 - protein, 10 aa, Homo Sapiens
ESSSLQGLGR

SEQ ID NO: 4312 - protein, 10 aa, Homo Sapiens
SSLQGLGRLV

SEQ ID NO: 4313 - protein, 10 aa, Homo Sapiens
SLQGLGRLVI

SEQ ID NO: 4314 - protein, 10 aa, Homo Sapiens
LQGLGRLVIA

SEQ ID NO: 4315 - protein, 10 aa, Homo Sapiens
GRLVIASSDL

SEQ ID NO: 4316 - protein, 10 aa, Homo Sapiens
RLVIASSDLI

SEQ ID NO: 4317 - protein, 10 aa, Homo Sapiens
LVIASSDLIW

SEQ ID NO: 4318 - protein, 10 aa, Homo Sapiens
DLIWPSGITI

SEQ ID NO: 4319 - protein, 10 aa, Homo Sapiens
IWPSGITIDF

SEQ ID NO: 4320 - protein, 10 aa, Homo Sapiens
WPSGITIDFL

SEQ ID NO: 4321 - protein, 10 aa, Homo Sapiens
GITIDFLTDK

SEQ ID NO: 4322 - protein, 10 aa, Homo Sapiens
ITIDFLTDKL

SEQ ID NO: 4323 - protein, 10 aa, Homo Sapiens
TIDFLTDKLY

SEQ ID NO: 4324 - protein, 10 aa, Homo Sapiens
FLTDKLYWCD

SEQ ID NO: 4325 - protein, 10 aa, Homo Sapiens
KLYWCDAKQS

SEQ ID NO: 4326 - protein, 10 aa, Homo Sapiens
LYWCDAKQSV

SEQ ID NO: 4327 - protein, 10 aa, Homo Sapiens
KQSVIEMANL

SEQ ID NO: 4328 - protein, 10 aa, Homo Sapiens
EMANLDGSKR

SEQ ID NO: 4329 - protein, 10 aa, Homo Sapiens
MANLDGSKRR

SEQ ID NO: 4330 - protein, 10 aa, Homo Sapiens
NLDGSKRRRL

SEQ ID NO: 4331 - protein, 10 aa, Homo Sapiens
RRLTQNDVGH

SEQ ID NO: 4332 - protein, 10 aa, Homo Sapiens
LTQNDVGHPF

SEQ ID NO: 4333 - protein, 10 aa, Homo Sapiens
TQNDVGHPFA

SEQ ID NO: 4334 - protein, 10 aa, Homo Sapiens
DVGHPFAVAV

SEQ ID NO: 4335 - protein, 10 aa, Homo Sapiens
PFAVAVFEDY

SEQ ID NO: 4336 - protein, 10 aa, Homo Sapiens
FAVAVFEDYV

SEQ ID NO: 4337 - protein, 10 aa, Homo Sapiens
AVAVFEDYVW

SEQ ID NO: 4338 - protein, 10 aa, Homo Sapiens
VAVFEDYVWF

SEQ ID NO: 4339 - protein, 10 aa, Homo Sapiens
AVFEDYVWFS

SEQ ID NO: 4340 - protein, 10 aa, Homo Sapiens
DYVWFSDWAM

SEQ ID NO: 4341 - protein, 10 aa, Homo Sapiens
WFSDWAMPSV

SEQ ID NO: 4342 - protein, 10 aa, Homo Sapiens
FSDWAMPSVI

SEQ ID NO: 4343 - protein, 10 aa, Homo Sapiens
AMPSVIRVNK

SEQ ID NO: 4344 - protein, 10 aa, Homo Sapiens
MPSVIRVNKR

SEQ ID NO: 4345 - protein, 10 aa, Homo Sapiens
VIRVNKRTGK

SEQ ID NO: 4346 - protein, 10 aa, Homo Sapiens
RVNKRTGKDR

SEQ ID NO: 4347 - protein, 10 aa, Homo Sapiens
KRTGKDRVRL

SEQ ID NO: 4348 - protein, 10 aa, Homo Sapiens
RVRLQGSMLK

SEQ ID NO: 4349 - protein, 10 aa, Homo Sapiens
SMLKPSSLVV

SEQ ID NO: 4350 - protein, 10 aa, Homo Sapiens
MLKPSSLVVV

SEQ ID NO: 4351 - protein, 10 aa, Homo Sapiens
SLVVVHPLAK

SEQ ID NO: 4352 - protein, 10 aa, Homo Sapiens
LYQNGGCEHI

SEQ ID NO: 4353 - protein, 10 aa, Homo Sapiens
RLGTAWCSCR

SEQ ID NO: 4354 - protein, 10 aa, Homo Sapiens
TAWCSCREGF

SEQ ID NO: 4355 - protein, 10 aa, Homo Sapiens
EGFMKASDGK

SEQ ID NO: 4356 - protein, 10 aa, Homo Sapiens
KASDGKTCLA

SEQ ID NO: 4357 - protein, 10 aa, Homo Sapiens
CLALDGHQLL

SEQ ID NO: 4358 - protein, 10 aa, Homo Sapiens
LALDGHQLLA

SEQ ID NO: 4359 - protein, 10 aa, Homo Sapiens
ALDGHQLLAG

SEQ ID NO: 4360 - protein, 10 aa, Homo Sapiens
QLLAGGEVDL

SEQ ID NO: 4361 - protein, 10 aa, Homo Sapiens
LLAGGEVDLK

SEQ ID NO: 4362 - protein, 10 aa, Homo Sapiens
QVTPLDILSK

SEQ ID NO: 4363 - protein, 10 aa, Homo Sapiens
PLDILSKTRV

SEQ ID NO: 4364 - protein, 10 aa, Homo Sapiens
NITESQHMLV

SEQ ID NO: 4365 - protein, 10 aa, Homo Sapiens
ESQHMLVAEI

SEQ ID NO: 4366 - protein, 10 aa, Homo Sapiens
SQHMLVAEIM

SEQ ID NO: 4367 - protein, 10 aa, Homo Sapiens
AEIMVSDQDD

SEQ ID NO: 4368 - protein, 10 aa, Homo Sapiens
IMVSDQDDCA

SEQ ID NO: 4369 - protein, 10 aa, Homo Sapiens
VSDQDDCAPV

SEQ ID NO: 4370 - protein, 10 aa, Homo Sapiens
APVGCSMYAR

SEQ ID NO: 4371 - protein, 10 aa, Homo Sapiens
CLKGFAGDGK

SEQ ID NO: 4372 - protein, 10 aa, Homo Sapiens
EMGVPVCPPA

SEQ ID NO: 4373 - protein, 10 aa, Homo Sapiens
GYQGDGIHCL

SEQ ID NO: 4374 - protein, 10 aa, Homo Sapiens
CQLGVHSCGE

SEQ ID NO: 4375 - protein, 10 aa, Homo Sapiens
GGYTCMCAGR

SEQ ID NO: 4376 - protein, 10 aa, Homo Sapiens
GYTCMCAGRL

SEQ ID NO: 4377 - protein, 10 aa, Homo Sapiens
RLSEPGLICP

SEQ ID NO: 4378 - protein, 10 aa, Homo Sapiens
HLREDDHHYS

SEQ ID NO: 4379 - protein, 10 aa, Homo Sapiens
LREDDHHYSV

SEQ ID NO: 4380 - protein, 10 aa, Homo Sapiens
SECPLSHDGY

SEQ ID NO: 4381 - protein, 10 aa, Homo Sapiens
CPLSHDGYCL

SEQ ID NO: 4382 - protein, 10 aa, Homo Sapiens
YCLHDGVCMY

SEQ ID NO: 4383 - protein, 10 aa, Homo Sapiens
CLHDGVCMYI

SEQ ID NO: 4384 - protein, 10 aa, Homo Sapiens
DGVCMYIEAL

SEQ ID NO: 4385 - protein, 10 aa, Homo Sapiens
VCMYIEALDK

SEQ ID NO: 4386 - protein, 10 aa, Homo Sapiens
CMYIEALDKY

SEQ ID NO: 4387 - protein, 10 aa, Homo Sapiens
ALDKYACNCV

SEQ ID NO: 4388 - protein, 10 aa, Homo Sapiens
KYACNCVVGY

SEQ ID NO: 4389 - protein, 10 aa, Homo Sapiens
YACNCVVGYI

SEQ ID NO: 4390 - protein, 10 aa, Homo Sapiens
GYIGERCQYR

SEQ ID NO: 4391 - protein, 10 aa, Homo Sapiens
GERCQYRDLK

SEQ ID NO: 4392 - protein, 10 aa, Homo Sapiens
QYRDLKWWEL

SEQ ID NO: 4393 - protein, 10 aa, Homo Sapiens
HAGHGQQQKV

SEQ ID NO: 4394 - protein, 10 aa, Homo Sapiens
GQQQKVIVVA

SEQ ID NO: 4395 - protein, 10 aa, Homo Sapiens
QQQKVIVVAV

SEQ ID NO: 4396 - protein, 10 aa, Homo Sapiens
KVIVVAVCVV

SEQ ID NO: 4397 - protein, 10 aa, Homo Sapiens
VIVVAVCVVV

SEQ ID NO: 4398 - protein, 10 aa, Homo Sapiens
IVVAVCVVVL

SEQ ID NO: 4399 - protein, 10 aa, Homo Sapiens
VVAVCVVVLV

SEQ ID NO: 4400 - protein, 10 aa, Homo Sapiens
VAVCVVVLVM

SEQ ID NO: 4401 - protein, 10 aa, Homo Sapiens
CVVVLVMLLL

SEQ ID NO: 4402 - protein, 10 aa, Homo Sapiens
VVVLVMLLLL

SEQ ID NO: 4403 - protein, 10 aa, Homo Sapiens
VLVMLLLLSL

SEQ ID NO: 4404 - protein, 10 aa, Homo Sapiens
LVMLLLLSLW

SEQ ID NO: 4405 - protein, 10 aa, Homo Sapiens
MLLLLSLWGA

SEQ ID NO: 4406 - protein, 10 aa, Homo Sapiens
LLLSLWGAHY

SEQ ID NO: 4407 - protein, 10 aa, Homo Sapiens
LLSLWGAHYY

SEQ ID NO: 4408 - protein, 10 aa, Homo Sapiens
LSLWGAHYYR

SEQ ID NO: 4409 - protein, 10 aa, Homo Sapiens
SLWGAHYYRT

SEQ ID NO: 4410 - protein, 10 aa, Homo Sapiens
AHYYRTQKLL

SEQ ID NO: 4411 - protein, 10 aa, Homo Sapiens
YYRTQKLLSK

SEQ ID NO: 4412 - protein, 10 aa, Homo Sapiens
TQKLLSKNPK

SEQ ID NO: 4413 - protein, 10 aa, Homo Sapiens
LLSKNPKNPY

SEQ ID NO: 4414 - protein, 10 aa, Homo Sapiens
NPYEESSRDV

SEQ ID NO: 4415 - protein, 10 aa, Homo Sapiens
ESSRDVRSRR

SEQ ID NO: 4416 - protein, 10 aa, Homo Sapiens
GMSSCPQPWF

SEQ ID NO: 4417 - protein, 10 aa, Homo Sapiens
MSSCPQPWFV

SEQ ID NO: 4418 - protein, 10 aa, Homo Sapiens
SSCPQPWFVV

SEQ ID NO: 4419 - protein, 10 aa, Homo Sapiens
SCPQPWFVVI

SEQ ID NO: 4420 - protein, 10 aa, Homo Sapiens
QPWFVVIKEH

SEQ ID NO: 4421 - protein, 10 aa, Homo Sapiens
VVIKEHQDLK

SEQ ID NO: 4422 - protein, 10 aa, Homo Sapiens
DLKNGGQPVA

SEQ ID NO: 4423 - protein, 10 aa, Homo Sapiens
QAADGSMQPT

SEQ ID NO: 4424 - protein, 10 aa, Homo Sapiens
CGMGTEQGCW

SEQ ID NO: 4425 - protein, 10 aa, Homo Sapiens
GMGTEQGCWI

SEQ ID NO: 4426 - protein, 10 aa, Homo Sapiens
GTEQGCWIPV

SEQ ID NO: 4427 - protein, 10 aa, Homo Sapiens
IPVSSDKGSC

SEQ ID NO: 4428 - protein, 10 aa, Homo Sapiens
SSDKGSCPQV

SEQ ID NO: 4429 - protein, 10 aa, Homo Sapiens
KGSCPQVMER

SEQ ID NO: 4430 - protein, 10 aa, Homo Sapiens
MERSFHMPSY

SEQ ID NO: 4431 - protein, 10 aa, Homo Sapiens
HMPSYGTQTL

SEQ ID NO: 4432 - protein, 10 aa, Homo Sapiens
MPSYGTQTLE

SEQ ID NO: 4433 - protein, 10 aa, Homo Sapiens
TQTLEGGVEK

SEQ ID NO: 4434 - protein, 10 aa, Homo Sapiens
HSLLSANPLW

SEQ ID NO: 4435 - protein, 10 aa, Homo Sapiens
SLLSANPLWQ

SEQ ID NO: 4436 - protein, 10 aa, Homo Sapiens
LLSANPLWQQ

SEQ ID NO: 4437 - protein, 10 aa, Homo Sapiens
LSANPLWQQR

SEQ ID NO: 4438 - protein, 10 aa, Homo Sapiens
SANPLWQQRA

SEQ ID NO: 4439 - protein, 10 aa, Homo Sapiens
WQQRALDPPH

SEQ ID NO: 4440 - protein, 10 aa, Homo Sapiens
ALDPPHQMEL

SEQ ID NO: 4441 - protein, 11 aa, Homo Sapiens
MLLTLIILLPV

SEQ ID NO: 4442 - protein, 11 aa, Homo Sapiens
LLTLIILLPVV

SEQ ID NO: 4443 - protein, 11 aa, Homo Sapiens
TLIILLPVVSK

SEQ ID NO: 4444 - protein, 11 aa, Homo Sapiens
LIILLPVVSKF

SEQ ID NO: 4445 - protein, 11 aa, Homo Sapiens
ILLPVVSKFSF

SEQ ID NO: 4446 - protein, 11 aa, Homo Sapiens
LLPVVSKFSFV

SEQ ID NO: 4447 - protein, 11 aa, Homo Sapiens
LPVVSKFSFVS

SEQ ID NO: 4448 - protein, 11 aa, Homo Sapiens
PVVSKFSFVSL

SEQ ID NO: 4449 - protein, 11 aa, Homo Sapiens
SFVSLSAPQHW

SEQ ID NO: 4450 - protein, 11 aa, Homo Sapiens
TLAGNGNSTCV

SEQ ID NO: 4451 - protein, 11 aa, Homo Sapiens
STCVGPAPFLI

SEQ ID NO: 4452 - protein, 11 aa, Homo Sapiens
APFLIFSHGNS

SEQ ID NO: 4453 - protein, 11 aa, Homo Sapiens
FLIFSHGNSIF

SEQ ID NO: 4454 - protein, 11 aa, Homo Sapiens
LIFSHGNSIFR

SEQ ID NO: 4455 - protein, 11 aa, Homo Sapiens
IFSHGNSIFRI

SEQ ID NO: 4456 - protein, 11 aa, Homo Sapiens
IFRIDTEGTNY

SEQ ID NO: 4457 - protein, 11 aa, Homo Sapiens
DTEGTNYEQLV

SEQ ID NO: 4458 - protein, 11 aa, Homo Sapiens
EQLVVDAGVSV

SEQ ID NO: 4459 - protein, 11 aa, Homo Sapiens
QLVVDAGVSVI

SEQ ID NO: 4460 - protein, 11 aa, Homo Sapiens
LVVDAGVSVIM

SEQ ID NO: 4461 - protein, 11 aa, Homo Sapiens
SVIMDFHYNEK

SEQ ID NO: 4462 - protein, 11 aa, Homo Sapiens
VIMDFHYNEKR

SEQ ID NO: 4463 - protein, 11 aa, Homo Sapiens
IMDFHYNEKRI

SEQ ID NO: 4464 - protein, 11 aa, Homo Sapiens
MDFHYNEKRIY

SEQ ID NO: 4465 - protein, 11 aa, Homo Sapiens
FHYNEKRIYWV

SEQ ID NO: 4466 - protein, 11 aa, Homo Sapiens
YNEKRIYWVDL

SEQ ID NO: 4467 - protein, 11 aa, Homo Sapiens
RIYWVDLERQL

SEQ ID NO: 4468 - protein, 11 aa, Homo Sapiens
IYWVDLERQLL

SEQ ID NO: 4469 - protein, 11 aa, Homo Sapiens
VDLERQLLQRV

SEQ ID NO: 4470 - protein, 11 aa, Homo Sapiens
DLERQLLQRVF

SEQ ID NO: 4471 - protein, 11 aa, Homo Sapiens
LERQLLQRVFL

SEQ ID NO: 4472 - protein, 11 aa, Homo Sapiens
LLQRVFLNGSR

SEQ ID NO: 4473 - protein, 11 aa, Homo Sapiens
RVFLNGSRQER

SEQ ID NO: 4474 - protein, 11 aa, Homo Sapiens
VFLNGSRQERV

SEQ ID NO: 4475 - protein, 11 aa, Homo Sapiens
FLNGSRQERVC

SEQ ID NO: 4476 - protein, 11 aa, Homo Sapiens
GMAINWINEEV

SEQ ID NO: 4477 - protein, 11 aa, Homo Sapiens
MAINWINEEVI

SEQ ID NO: 4478 - protein, 11 aa, Homo Sapiens
AINWINEEVIW

SEQ ID NO: 4479 - protein, 11 aa, Homo Sapiens
EEVIWSNQQEG

SEQ ID NO: 4480 - protein, 11 aa, Homo Sapiens
EVIWSNQQEGI

SEQ ID NO: 4481 - protein, 11 aa, Homo Sapiens
VIWSNQQEGII

SEQ ID NO: 4482 - protein, 11 aa, Homo Sapiens
DMKGNNSHILL

SEQ ID NO: 4483 - protein, 11 aa, Homo Sapiens
NNSHILLSALK

SEQ ID NO: 4484 - protein, 11 aa, Homo Sapiens
NSHILLSALKY

SEQ ID NO: 4485 - protein, 11 aa, Homo Sapiens
LLSALKYPANV

SEQ ID NO: 4486 - protein, 11 aa, Homo Sapiens
SALKYPANVAV

SEQ ID NO: 4487 - protein, 11 aa, Homo Sapiens
KYPANVAVDPV

SEQ ID NO: 4488 - protein, 11 aa, Homo Sapiens
YPANVAVDPVE

SEQ ID NO: 4489 - protein, 11 aa, Homo Sapiens
NVAVDPVERFI

SEQ ID NO: 4490 - protein, 11 aa, Homo Sapiens
VAVDPVERFIF

SEQ ID NO: 4491 - protein, 11 aa, Homo Sapiens
VERFIFWSSEV

SEQ ID NO: 4492 - protein, 11 aa, Homo Sapiens
FIFWSSEVAGS

SEQ ID NO: 4493 - protein, 11 aa, Homo Sapiens
FWSSEVAGSLY

SEQ ID NO: 4494 - protein, 11 aa, Homo Sapiens
WSSEVAGSLYR

SEQ ID NO: 4495 - protein, 11 aa, Homo Sapiens
EVAGSLYRADL

SEQ ID NO: 4496 - protein, 11 aa, Homo Sapiens
YRADLDGVGVK

SEQ ID NO: 4497 - protein, 11 aa, Homo Sapiens
DLDGVGVKALL

SEQ ID NO: 4498 - protein, 11 aa, Homo Sapiens
GVKALLETSEK

SEQ ID NO: 4499 - protein, 11 aa, Homo Sapiens
ALLETSEKITA

SEQ ID NO: 4500 - protein, 11 aa, Homo Sapiens
LLETSEKITAV

SEQ ID NO: 4501 - protein, 11 aa, Homo Sapiens
ETSEKITAVSL

SEQ ID NO: 4502 - protein, 11 aa, Homo Sapiens
ITAVSLDVLDK

SEQ ID NO: 4503 - protein, 11 aa, Homo Sapiens
TAVSLDVLDKR

SEQ ID NO: 4504 - protein, 11 aa, Homo Sapiens
VSLDVLDKRLF

SEQ ID NO: 4505 - protein, 11 aa, Homo Sapiens
SLDVLDKRLFW

SEQ ID NO: 4506 - protein, 11 aa, Homo Sapiens
VLDKRLFWIQY

SEQ ID NO: 4507 - protein, 11 aa, Homo Sapiens
DKRLFWIQYNR

SEQ ID NO: 4508 - protein, 11 aa, Homo Sapiens
RLFWIQYNREG

SEQ ID NO: 4509 - protein, 11 aa, Homo Sapiens
IQYNREGSNSL

SEQ ID NO: 4510 - protein, 11 aa, Homo Sapiens
QYNREGSNSLI

SEQ ID NO: 4511 - protein, 11 aa, Homo Sapiens
GSNSLICSCDY

SEQ ID NO: 4512 - protein, 11 aa, Homo Sapiens
DYDGGSVHISK

SEQ ID NO: 4513 - protein, 11 aa, Homo Sapiens
HISKHPTQHNL

SEQ ID NO: 4514 - protein, 11 aa, Homo Sapiens
ISKHPTQHNLF

SEQ ID NO: 4515 - protein, 11 aa, Homo Sapiens
HPTQHNLFAMS

SEQ ID NO: 4516 - protein, 11 aa, Homo Sapiens
TQHNLFAMSLF

SEQ ID NO: 4517 - protein, 11 aa, Homo Sapiens
NLFAMSLFGDR

SEQ ID NO: 4518 - protein, 11 aa, Homo Sapiens
FAMSLFGDRIF

SEQ ID NO: 4519 - protein, 11 aa, Homo Sapiens
AMSLFGDRIFY

SEQ ID NO: 4520 - protein, 11 aa, Homo Sapiens
SLFGDRIFYST

SEQ ID NO: 4521 - protein, 11 aa, Homo Sapiens
IFYSTWKMKTI

SEQ ID NO: 4522 - protein, 11 aa, Homo Sapiens
FYSTWKMKTIW

SEQ ID NO: 4523 - protein, 11 aa, Homo Sapiens
STWKMKTIWIA

SEQ ID NO: 4524 - protein, 11 aa, Homo Sapiens
KMKTIWIANKH

SEQ ID NO: 4525 - protein, 11 aa, Homo Sapiens
TIWIANKHTGK

SEQ ID NO: 4526 - protein, 11 aa, Homo Sapiens
WIANKHTGKDM

SEQ ID NO: 4527 - protein, 11 aa, Homo Sapiens
HTGKDMVRINL

SEQ ID NO: 4528 - protein, 11 aa, Homo Sapiens
DMVRINLHSSF

SEQ ID NO: 4529 - protein, 11 aa, Homo Sapiens
MVRINLHSSFV

SEQ ID NO: 4530 - protein, 11 aa, Homo Sapiens
RINLHSSFVPL

SEQ ID NO: 4531 - protein, 11 aa, Homo Sapiens
HSSFVPLGELK

SEQ ID NO: 4532 - protein, 11 aa, Homo Sapiens
SFVPLGELKVV

SEQ ID NO: 4533 - protein, 11 aa, Homo Sapiens
PLGELKVVHPL

SEQ ID NO: 4534 - protein, 11 aa, Homo Sapiens
KVVHPLAQPKA

SEQ ID NO: 4535 - protein, 11 aa, Homo Sapiens
LAQPKAEDDTW

SEQ ID NO: 4536 - protein, 11 aa, Homo Sapiens
DTWEPEQKLCK

SEQ ID NO: 4537 - protein, 11 aa, Homo Sapiens
KLRKGNCSSTV

SEQ ID NO: 4538 - protein, 11 aa, Homo Sapiens
TVCGQDLQSHL

SEQ ID NO: 4539 - protein, 11 aa, Homo Sapiens
HLCMCAEGYAL

SEQ ID NO: 4540 - protein, 11 aa, Homo Sapiens
CMCAEGYALSR

SEQ ID NO: 4541 - protein, 11 aa, Homo Sapiens
CAEGYALSRDR

SEQ ID NO: 4542 - protein, 11 aa, Homo Sapiens
KYCEDVNECAF

SEQ ID NO: 4543 - protein, 11 aa, Homo Sapiens
ECAFWNHGCTL

SEQ ID NO: 4544 - protein, 11 aa, Homo Sapiens
TPGSYYCTCPV

SEQ ID NO: 4545 - protein, 11 aa, Homo Sapiens
GSYYCTCPVGF

SEQ ID NO: 4546 - protein, 11 aa, Homo Sapiens
SYYCTCPVGFV

SEQ ID NO: 4547 - protein, 11 aa, Homo Sapiens
YYCTCPVGFVL

SEQ ID NO: 4548 - protein, 11 aa, Homo Sapiens
YCTCPVGFVLL

SEQ ID NO: 4549 - protein, 11 aa, Homo Sapiens
PVGFVLLPDGK

SEQ ID NO: 4550 - protein, 11 aa, Homo Sapiens
VLLPDGKRCHQ

SEQ ID NO: 4551 - protein, 11 aa, Homo Sapiens
LLPDGKRCHQL

SEQ ID NO: 4552 - protein, 11 aa, Homo Sapiens
LPDGKRCHQLV

SEQ ID NO: 4553 - protein, 11 aa, Homo Sapiens
NVSECSHDCVL

SEQ ID NO: 4554 - protein, 11 aa, Homo Sapiens
VLTSEGPLCFC

SEQ ID NO: 4555 - protein, 11 aa, Homo Sapiens
CFCPEGSVLER

SEQ ID NO: 4556 - protein, 11 aa, Homo Sapiens
CSQLCVPLSPV

SEQ ID NO: 4557 - protein, 11 aa, Homo Sapiens
SQLCVPLSPVS

SEQ ID NO: 4558 - protein, 11 aa, Homo Sapiens
PLSPVSWECDC

SEQ ID NO: 4559 - protein, 11 aa, Homo Sapiens
VSWECDCFPGY

SEQ ID NO: 4560 - protein, 11 aa, Homo Sapiens
WECDCFPGYDL

SEQ ID NO: 4561 - protein, 11 aa, Homo Sapiens
KSCAASGPQPF

SEQ ID NO: 4562 - protein, 11 aa, Homo Sapiens
CAASGPQPFLL

SEQ ID NO: 4563 - protein, 11 aa, Homo Sapiens
FLLFANSQDIR

SEQ ID NO: 4564 - protein, 11 aa, Homo Sapiens
FANSQDIRHMH

SEQ ID NO: 4565 - protein, 11 aa, Homo Sapiens
MHFDGTDYGTL

SEQ ID NO: 4566 - protein, 11 aa, Homo Sapiens
HFDGTDYGTLL

SEQ ID NO: 4567 - protein, 11 aa, Homo Sapiens
TLLSQQMGMVY

SEQ ID NO: 4568 - protein, 11 aa, Homo Sapiens
LLSQQMGMVYA

SEQ ID NO: 4569 - protein, 11 aa, Homo Sapiens
QQMGMVYALDH

SEQ ID NO: 4570 - protein, 11 aa, Homo Sapiens
GMVYALDHDPV

SEQ ID NO: 4571 - protein, 11 aa, Homo Sapiens
YALDHDPVENK

SEQ ID NO: 4572 - protein, 11 aa, Homo Sapiens
ALDHDPVENKI

SEQ ID NO: 4573 - protein, 11 aa, Homo Sapiens
DPVENKIYFAH

SEQ ID NO: 4574 - protein, 11 aa, Homo Sapiens
NKIYFAHTALK

SEQ ID NO: 4575 - protein, 11 aa, Homo Sapiens
KIYFAHTALKW

SEQ ID NO: 4576 - protein, 11 aa, Homo Sapiens
IYFAHTALKWI

SEQ ID NO: 4577 - protein, 11 aa, Homo Sapiens
FAHTALKWIER

SEQ ID NO: 4578 - protein, 11 aa, Homo Sapiens
RANMDGSQRER

SEQ ID NO: 4579 - protein, 11 aa, Homo Sapiens
NMDGSQRERLI

SEQ ID NO: 4580 - protein, 11 aa, Homo Sapiens
SQRERLIEEGV

SEQ ID NO: 4581 - protein, 11 aa, Homo Sapiens
RERLIEEGVDV

SEQ ID NO: 4582 - protein, 11 aa, Homo Sapiens
IEEGVDVPEGL

SEQ ID NO: 4583 - protein, 11 aa, Homo Sapiens
EGVDVPEGLAV

SEQ ID NO: 4584 - protein, 11 aa, Homo Sapiens
DVPEGLAVDWI

SEQ ID NO: 4585 - protein, 11 aa, Homo Sapiens
LAVDWIGRRFY

SEQ ID NO: 4586 - protein, 11 aa, Homo Sapiens
AVDWIGRRFYW

SEQ ID NO: 4587 - protein, 11 aa, Homo Sapiens
WIGRRFYWTDR

SEQ ID NO: 4588 - protein, 11 aa, Homo Sapiens
GRRFYWTDRGK

SEQ ID NO: 4589 - protein, 11 aa, Homo Sapiens
RRFYWTDRGKS

SEQ ID NO: 4590 - protein, 11 aa, Homo Sapiens
RFYWTDRGKSL

SEQ ID NO: 4591 - protein, 11 aa, Homo Sapiens
FYWTDRGKSLI

SEQ ID NO: 4592 - protein, 11 aa, Homo Sapiens
SLIGRSDLNGK

SEQ ID NO: 4593 - protein, 11 aa, Homo Sapiens
GRSDLNGKRSK

SEQ ID NO: 4594 - protein, 11 aa, Homo Sapiens
IITKENISQPR

SEQ ID NO: 4595 - protein, 11 aa, Homo Sapiens
SQPRGIAVHPM

SEQ ID NO: 4596 - protein, 11 aa, Homo Sapiens
RGIAVHPMAKR

SEQ ID NO: 4597 - protein, 11 aa, Homo Sapiens
LFWTDTGINPR

SEQ ID NO: 4598 - protein, 11 aa, Homo Sapiens
GINPRIESSSL

SEQ ID NO: 4599 - protein, 11 aa, Homo Sapiens
ESSSLQGLGRL

SEQ ID NO: 4600 - protein, 11 aa, Homo Sapiens
SLQGLGRLVIA

SEQ ID NO: 4601 - protein, 11 aa, Homo Sapiens
RLVIASSDLIW

SEQ ID NO: 4602 - protein, 11 aa, Homo Sapiens
ASSDLIWPSGI

SEQ ID NO: 4603 - protein, 11 aa, Homo Sapiens
LIWPSGITIDF

SEQ ID NO: 4604 - protein, 11 aa, Homo Sapiens
IWPSGITIDFL

SEQ ID NO: 4605 - protein, 11 aa, Homo Sapiens
WPSGITIDFLT

SEQ ID NO: 4606 - protein, 11 aa, Homo Sapiens
ITIDFLTDKLY

SEQ ID NO: 4607 - protein, 11 aa, Homo Sapiens
FLTDKLYWCDA

SEQ ID NO: 4608 - protein, 11 aa, Homo Sapiens
LTDKLYWCDAK

SEQ ID NO: 4609 - protein, 11 aa, Homo Sapiens
KLYWCDAKQSV

SEQ ID NO: 4610 - protein, 11 aa, Homo Sapiens
LYWCDAKQSVI

SEQ ID NO: 4611 - protein, 11 aa, Homo Sapiens
VIEMANLDGSK

SEQ ID NO: 4612 - protein, 11 aa, Homo Sapiens
EMANLDGSKRR

SEQ ID NO: 4613 - protein, 11 aa, Homo Sapiens
MANLDGSKRRR

SEQ ID NO: 4614 - protein, 11 aa, Homo Sapiens
NLDGSKRRRLT

SEQ ID NO: 4615 - protein, 11 aa, Homo Sapiens
RRRLTQNDVGH

SEQ ID NO: 4616 - protein, 11 aa, Homo Sapiens
RLTQNDVGHPF

SEQ ID NO: 4617 - protein, 11 aa, Homo Sapiens
TQNDVGHPFAV

SEQ ID NO: 4618 - protein, 11 aa, Homo Sapiens
DVGHPFAVAVF

SEQ ID NO: 4619 - protein, 11 aa, Homo Sapiens
HPFAVAVFEDY

SEQ ID NO: 4620 - protein, 11 aa, Homo Sapiens
FAVAVFEDYVW

SEQ ID NO: 4621 - protein, 11 aa, Homo Sapiens
AVAVFEDYVWF

SEQ ID NO: 4622 - protein, 11 aa, Homo Sapiens
FEDYVWFSDWA

SEQ ID NO: 4623 - protein, 11 aa, Homo Sapiens
EDYVWFSDWAM

SEQ ID NO: 4624 - protein, 11 aa, Homo Sapiens
YVWFSDWAMPS

SEQ ID NO: 4625 - protein, 11 aa, Homo Sapiens
WFSDWAMPSVI

SEQ ID NO: 4626 - protein, 11 aa, Homo Sapiens
FSDWAMPSVIR

SEQ ID NO: 4627 - protein, 11 aa, Homo Sapiens
WAMPSVIRVNK

SEQ ID NO: 4628 - protein, 11 aa, Homo Sapiens
AMPSVIRVNKR

SEQ ID NO: 4629 - protein, 11 aa, Homo Sapiens
MPSVIRVNKRT

SEQ ID NO: 4630 - protein, 11 aa, Homo Sapiens
SVIRVNKRTGK

SEQ ID NO: 4631 - protein, 11 aa, Homo Sapiens
RVNKRTGKDRV

SEQ ID NO: 4632 - protein, 11 aa, Homo Sapiens
LQGSMLKPSSL

SEQ ID NO: 4633 - protein, 11 aa, Homo Sapiens
SMLKPSSLVVV

SEQ ID NO: 4634 - protein, 11 aa, Homo Sapiens
KPSSLVVVHPL

SEQ ID NO: 4635 - protein, 11 aa, Homo Sapiens
SSLVVVHPLAK

SEQ ID NO: 4636 - protein, 11 aa, Homo Sapiens
HPLAKPGADPC

SEQ ID NO: 4637 - protein, 11 aa, Homo Sapiens
PLAKPGADPCL

SEQ ID NO: 4638 - protein, 11 aa, Homo Sapiens
LAKPGADPCLY

SEQ ID NO: 4639 - protein, 11 aa, Homo Sapiens
CLYQNGGCEHI

SEQ ID NO: 4640 - protein, 11 aa, Homo Sapiens
YQNGGCEHICK

SEQ ID NO: 4641 - protein, 11 aa, Homo Sapiens
KRLGTAWCSCR

SEQ ID NO: 4642 - protein, 11 aa, Homo Sapiens
TAWCSCREGFM

SEQ ID NO: 4643 - protein, 11 aa, Homo Sapiens
AWCSCREGFMK

SEQ ID NO: 4644 - protein, 11 aa, Homo Sapiens
FMKASDGKTCL

SEQ ID NO: 4645 - protein, 11 aa, Homo Sapiens
KASDGKTCLAL

SEQ ID NO: 4646 - protein, 11 aa, Homo Sapiens
CLALDGHQLLA

SEQ ID NO: 4647 - protein, 11 aa, Homo Sapiens
ALDGHQLLAGG

SEQ ID NO: 4648 - protein, 11 aa, Homo Sapiens
QLLAGGEVDLK

SEQ ID NO: 4649 - protein, 11 aa, Homo Sapiens
LLAGGEVDLKN

SEQ ID NO: 4650 - protein, 11 aa, Homo Sapiens
AGGEVDLKNQV

SEQ ID NO: 4651 - protein, 11 aa, Homo Sapiens
EVDLKNQVTPL

SEQ ID NO: 4652 - protein, 11 aa, Homo Sapiens
NQVTPLDILSK

SEQ ID NO: 4653 - protein, 11 aa, Homo Sapiens
TPLDILSKTRV

SEQ ID NO: 4654 - protein, 11 aa, Homo Sapiens
NITESQHMLVA

SEQ ID NO: 4655 - protein, 11 aa, Homo Sapiens
TESQHMLVAEI

SEQ ID NO: 4656 - protein, 11 aa, Homo Sapiens
ESQHMLVAEIM

SEQ ID NO: 4657 - protein, 11 aa, Homo Sapiens
SQHMLVAEIMV

SEQ ID NO: 4658 - protein, 11 aa, Homo Sapiens
AEIMVSDQDDC

SEQ ID NO: 4659 - protein, 11 aa, Homo Sapiens
EIMVSDQDDCA

SEQ ID NO: 4660 - protein, 11 aa, Homo Sapiens
MVSDQDDCAPV

SEQ ID NO: 4661 - protein, 11 aa, Homo Sapiens
DCAPVGCSMYA

SEQ ID NO: 4662 - protein, 11 aa, Homo Sapiens
CAPVGCSMYAR

SEQ ID NO: 4663 - protein, 11 aa, Homo Sapiens
SMYARCISEGE

SEQ ID NO: 4664 - protein, 11 aa, Homo Sapiens
SEGEDATCQCL

SEQ ID NO: 4665 - protein, 11 aa, Homo Sapiens
CLKGFAGDGKL

SEQ ID NO: 4666 - protein, 11 aa, Homo Sapiens
KLCSDIDECEM

SEQ ID NO: 4667 - protein, 11 aa, Homo Sapiens
DIDECEMGVPV

SEQ ID NO: 4668 - protein, 11 aa, Homo Sapiens
GVPVCPPASSK

SEQ ID NO: 4669 - protein, 11 aa, Homo Sapiens
CPPASSKCINT

SEQ ID NO: 4670 - protein, 11 aa, Homo Sapiens
CINTEGGYVCR

SEQ ID NO: 4671 - protein, 11 aa, Homo Sapiens
YQGDGIHCLDI

SEQ ID NO: 4672 - protein, 11 aa, Homo Sapiens
CLDIDECQLGV

SEQ ID NO: 4673 - protein, 11 aa, Homo Sapiens
NASCTNTEGGY

SEQ ID NO: 4674 - protein, 11 aa, Homo Sapiens
MCAGRLSEPGL

SEQ ID NO: 4675 - protein, 11 aa, Homo Sapiens
HLREDDHHYSV

SEQ ID NO: 4676 - protein, 11 aa, Homo Sapiens
SVRNSDSECPL

SEQ ID NO: 4677 - protein, 11 aa, Homo Sapiens
DSECPLSHDGY

SEQ ID NO: 4678 - protein, 11 aa, Homo Sapiens
SHDGYCLHDGV

SEQ ID NO: 4679 - protein, 11 aa, Homo Sapiens
CLHDGVCMYIE

SEQ ID NO: 4680 - protein, 11 aa, Homo Sapiens
GVCMYIEALDK

SEQ ID NO: 4681 - protein, 11 aa, Homo Sapiens
CMYIEALDKYA

SEQ ID NO: 4682 - protein, 11 aa, Homo Sapiens
EALDKYACNCV

SEQ ID NO: 4683 - protein, 11 aa, Homo Sapiens
ALDKYACNCVV

SEQ ID NO: 4684 - protein, 11 aa, Homo Sapiens
KYACNCVVGYI

SEQ ID NO: 4685 - protein, 11 aa, Homo Sapiens
CNCVVGYIGER

SEQ ID NO: 4686 - protein, 11 aa, Homo Sapiens
VVGYIGERCQY

SEQ ID NO: 4687 - protein, 11 aa, Homo Sapiens
VGYIGERCQYR

SEQ ID NO: 4688 - protein, 11 aa, Homo Sapiens
YIGERCQYRDL

SEQ ID NO: 4689 - protein, 11 aa, Homo Sapiens
CQYRDLKWWEL

SEQ ID NO: 4690 - protein, 11 aa, Homo Sapiens
QYRDLKWWELR

SEQ ID NO: 4691 - protein, 11 aa, Homo Sapiens
LRHAGHGQQQK

SEQ ID NO: 4692 - protein, 11 aa, Homo Sapiens
GQQQKVIVVAV

SEQ ID NO: 4693 - protein, 11 aa, Homo Sapiens
KVIVVAVCVVV

SEQ ID NO: 4694 - protein, 11 aa, Homo Sapiens
IVVAVCVVVLV

SEQ ID NO: 4695 - protein, 11 aa, Homo Sapiens
VVAVCVVVLVM

SEQ ID NO: 4696 - protein, 11 aa, Homo Sapiens
VAVCVVVLVML

SEQ ID NO: 4697 - protein, 11 aa, Homo Sapiens
CVVVLVMLLLL

SEQ ID NO: 4698 - protein, 11 aa, Homo Sapiens
VVLVMLLLLSL

SEQ ID NO: 4699 - protein, 11 aa, Homo Sapiens
VMLLLLSLWGA

SEQ ID NO: 4700 - protein, 11 aa, Homo Sapiens
LLLLSLWGAHY

SEQ ID NO: 4701 - protein, 11 aa, Homo Sapiens
LLLSLWGAHYY

SEQ ID NO: 4702 - protein, 11 aa, Homo Sapiens
LLSLWGAHYYR

SEQ ID NO: 4703 - protein, 11 aa, Homo Sapiens
SLWGAHYYRTQ

SEQ ID NO: 4704 - protein, 11 aa, Homo Sapiens
LWGAHYYRTQK

SEQ ID NO: 4705 - protein, 11 aa, Homo Sapiens
HYYRTQKLLSK

SEQ ID NO: 4706 - protein, 11 aa, Homo Sapiens
RTQKLLSKNPK

SEQ ID NO: 4707 - protein, 11 aa, Homo Sapiens
KLLSKNPKNPY

SEQ ID NO: 4708 - protein, 11 aa, Homo Sapiens
NPYEESSRDVR

SEQ ID NO: 4709 - protein, 11 aa, Homo Sapiens
EESSRDVRSRR

SEQ ID NO: 4710 - protein, 11 aa, Homo Sapiens
SSRDVRSRRPA

SEQ ID NO: 4711 - protein, 11 aa, Homo Sapiens
RPADTEDGMSS

SEQ ID NO: 4712 - protein, 11 aa, Homo Sapiens
GMSSCPQPWFV

SEQ ID NO: 4713 - protein, 11 aa, Homo Sapiens
MSSCPQPWFVV

SEQ ID NO: 4714 - protein, 11 aa, Homo Sapiens
SSCPQPWFVVI

SEQ ID NO: 4715 - protein, 11 aa, Homo Sapiens
FVVIKEHQDLK

SEQ ID NO: 4716 - protein, 11 aa, Homo Sapiens
HQDLKNGGQPV

SEQ ID NO: 4717 - protein, 11 aa, Homo Sapiens
QPVAGEDGQAA

SEQ ID NO: 4718 - protein, 11 aa, Homo Sapiens
GEDGQAADGSM

SEQ ID NO: 4719 - protein, 11 aa, Homo Sapiens
GQAADGSMQPT

SEQ ID NO: 4720 - protein, 11 aa, Homo Sapiens
AADGSMQPTSW

SEQ ID NO: 4721 - protein, 11 aa, Homo Sapiens
SMQPTSWRQEP

SEQ ID NO: 4722 - protein, 11 aa, Homo Sapiens
RQEPQLCGMGT

SEQ ID NO: 4723 - protein, 11 aa, Homo Sapiens
QLCGMGTEQGC

SEQ ID NO: 4724 - protein, 11 aa, Homo Sapiens
MGTEQGCWIPV

SEQ ID NO: 4725 - protein, 11 aa, Homo Sapiens
CPQVMERSFHM

SEQ ID NO: 4726 - protein, 11 aa, Homo Sapiens
QVMERSFHMPS

SEQ ID NO: 4727 - protein, 11 aa, Homo Sapiens
VMERSFHMPSY

SEQ ID NO: 4728 - protein, 11 aa, Homo Sapiens
FHMPSYGTQTL

SEQ ID NO: 4729 - protein, 11 aa, Homo Sapiens
MPSYGTQTLEG

SEQ ID NO: 4730 - protein, 11 aa, Homo Sapiens
GTQTLEGGVEK

SEQ ID NO: 4731 - protein, 11 aa, Homo Sapiens
LEGGVEKPHSL

SEQ ID NO: 4732 - protein, 11 aa, Homo Sapiens
KPHSLLSANPL

SEQ ID NO: 4733 - protein, 11 aa, Homo Sapiens
SLLSANPLWQQ

SEQ ID NO: 4734 - protein, 11 aa, Homo Sapiens
LLSANPLWQQR

SEQ ID NO: 4735 - protein, 11 aa, Homo Sapiens
SANPLWQQRAL

SEQ ID NO: 4736 - protein, 11 aa, Homo Sapiens
QQRALDPPHQM

SEQ ID NO: 4737 - protein, 11 aa, Homo Sapiens
RALDPPHQMEL

SEQ ID NO: 4738 - protein, 11 aa, Homo Sapiens
ALDPPHQMELT

SEQ ID NO: 4739 - protein, 13 aa, Homo Sapiens
MLLTLIILLPVVS

SEQ ID NO: 4740 - protein, 13 aa, Homo Sapiens
LLTLIILLPVVSK

SEQ ID NO: 4741 - protein, 13 aa, Homo Sapiens
LTLIILLPVVSKF

SEQ ID NO: 4742 - protein, 13 aa, Homo Sapiens
TLIILLPVVSKFS

SEQ ID NO: 4743 - protein, 13 aa, Homo Sapiens
LIILLPVVSKFSF

SEQ ID NO: 4744 - protein, 13 aa, Homo Sapiens
IILLPVVSKFSFV

SEQ ID NO: 4745 - protein, 13 aa, Homo Sapiens
ILLPVVSKFSFVS

SEQ ID NO: 4746 - protein, 13 aa, Homo Sapiens
LLPVVSKFSFVSL

SEQ ID NO: 4747 - protein, 13 aa, Homo Sapiens
LPVVSKFSFVSLS

SEQ ID NO: 4748 - protein, 13 aa, Homo Sapiens
PVVSKFSFVSLSA

SEQ ID NO: 4749 - protein, 13 aa, Homo Sapiens
VVSKFSFVSLSAP

SEQ ID NO: 4750 - protein, 13 aa, Homo Sapiens
VSKFSFVSLSAPQ

SEQ ID NO: 4751 - protein, 13 aa, Homo Sapiens
SKFSFVSLSAPQH

SEQ ID NO: 4752 - protein, 13 aa, Homo Sapiens
KFSFVSLSAPQHW

SEQ ID NO: 4753 - protein, 13 aa, Homo Sapiens
FSFVSLSAPQHWS

SEQ ID NO: 4754 - protein, 13 aa, Homo Sapiens
SFVSLSAPQHWSC

SEQ ID NO: 4755 - protein, 13 aa, Homo Sapiens
FVSLSAPQHWSCP

SEQ ID NO: 4756 - protein, 13 aa, Homo Sapiens
VSLSAPQHWSCPE

SEQ ID NO: 4757 - protein, 13 aa, Homo Sapiens
SLSAPQHWSCPEG

SEQ ID NO: 4758 - protein, 13 aa, Homo Sapiens
LSAPQHWSCPEGT

SEQ ID NO: 4759 - protein, 13 aa, Homo Sapiens
SAPQHWSCPEGTL

SEQ ID NO: 4760 - protein, 13 aa, Homo Sapiens
APQHWSCPEGTLA

SEQ ID NO: 4761 - protein, 13 aa, Homo Sapiens
PQHWSCPEGTLAG

SEQ ID NO: 4762 - protein, 13 aa, Homo Sapiens
QHWSCPEGTLAGN

SEQ ID NO: 4763 - protein, 13 aa, Homo Sapiens
HWSCPEGTLAGNG

SEQ ID NO: 4764 - protein, 13 aa, Homo Sapiens
WSCPEGTLAGNGN

SEQ ID NO: 4765 - protein, 13 aa, Homo Sapiens
SCPEGTLAGNGNS

SEQ ID NO: 4766 - protein, 13 aa, Homo Sapiens
CPEGTLAGNGNST

SEQ ID NO: 4767 - protein, 13 aa, Homo Sapiens
PEGTLAGNGNSTC

SEQ ID NO: 4768 - protein, 13 aa, Homo Sapiens
EGTLAGNGNSTCV

SEQ ID NO: 4769 - protein, 13 aa, Homo Sapiens
GTLAGNGNSTCVG

SEQ ID NO: 4770 - protein, 13 aa, Homo Sapiens
TLAGNGNSTCVGP

SEQ ID NO: 4771 - protein, 13 aa, Homo Sapiens
LAGNGNSTCVGPA

SEQ ID NO: 4772 - protein, 13 aa, Homo Sapiens
AGNGNSTCVGPAP

SEQ ID NO: 4773 - protein, 13 aa, Homo Sapiens
GNGNSTCVGPAPF

SEQ ID NO: 4774 - protein, 13 aa, Homo Sapiens
NGNSTCVGPAPFL

SEQ ID NO: 4775 - protein, 13 aa, Homo Sapiens
GNSTCVGPAPFLI

SEQ ID NO: 4776 - protein, 13 aa, Homo Sapiens
NSTCVGPAPFLIF

SEQ ID NO: 4777 - protein, 13 aa, Homo Sapiens
STCVGPAPFLIFS

SEQ ID NO: 4778 - protein, 13 aa, Homo Sapiens
TCVGPAPFLIFSH

SEQ ID NO: 4779 - protein, 13 aa, Homo Sapiens
CVGPAPFLIFSHG

SEQ ID NO: 4780 - protein, 13 aa, Homo Sapiens
VGPAPFLIFSHGN

SEQ ID NO: 4781 - protein, 13 aa, Homo Sapiens
GPAPFLIFSHGNS

SEQ ID NO: 4782 - protein, 13 aa, Homo Sapiens
PAPFLIFSHGNSI

SEQ ID NO: 4783 - protein, 13 aa, Homo Sapiens
APFLIFSHGNSIF

SEQ ID NO: 4784 - protein, 13 aa, Homo Sapiens
PFLIFSHGNSIFR

SEQ ID NO: 4785 - protein, 13 aa, Homo Sapiens
FLIFSHGNSIFRI

SEQ ID NO: 4786 - protein, 13 aa, Homo Sapiens
LIFSHGNSIFRID

SEQ ID NO: 4787 - protein, 13 aa, Homo Sapiens
IFSHGNSIFRIDT

SEQ ID NO: 4788 - protein, 13 aa, Homo Sapiens
FSHGNSIFRIDTE

SEQ ID NO: 4789 - protein, 13 aa, Homo Sapiens
SHGNSIFRIDTEG

SEQ ID NO: 4790 - protein, 13 aa, Homo Sapiens
HGNSIFRIDTEGT

SEQ ID NO: 4791 - protein, 13 aa, Homo Sapiens
GNSIFRIDTEGTN

SEQ ID NO: 4792 - protein, 13 aa, Homo Sapiens
NSIFRIDTEGTNY

SEQ ID NO: 4793 - protein, 13 aa, Homo Sapiens
SIFRIDTEGTNYE

SEQ ID NO: 4794 - protein, 13 aa, Homo Sapiens
IFRIDTEGTNYEQ

SEQ ID NO: 4795 - protein, 13 aa, Homo Sapiens
FRIDTEGTNYEQL

SEQ ID NO: 4796 - protein, 13 aa, Homo Sapiens
RIDTEGTNYEQLV

SEQ ID NO: 4797 - protein, 13 aa, Homo Sapiens
IDTEGTNYEQLVV

SEQ ID NO: 4798 - protein, 13 aa, Homo Sapiens
DTEGTNYEQLVVD

SEQ ID NO: 4799 - protein, 13 aa, Homo Sapiens
TEGTNYEQLVVDA

SEQ ID NO: 4800 - protein, 13 aa, Homo Sapiens
EGTNYEQLVVDAG

SEQ ID NO: 4801 - protein, 13 aa, Homo Sapiens
GTNYEQLVVDAGV

SEQ ID NO: 4802 - protein, 13 aa, Homo Sapiens
TNYEQLVVDAGVS

SEQ ID NO: 4803 - protein, 13 aa, Homo Sapiens
NYEQLVVDAGVSV

SEQ ID NO: 4804 - protein, 13 aa, Homo Sapiens
YEQLVVDAGVSVI

SEQ ID NO: 4805 - protein, 13 aa, Homo Sapiens
EQLVVDAGVSVIM

SEQ ID NO: 4806 - protein, 13 aa, Homo Sapiens
QLVVDAGVSVIMD

SEQ ID NO: 4807 - protein, 13 aa, Homo Sapiens
LVVDAGVSVIMDF

SEQ ID NO: 4808 - protein, 13 aa, Homo Sapiens
VVDAGVSVIMDFH

SEQ ID NO: 4809 - protein, 13 aa, Homo Sapiens
VDAGVSVIMDFHY

SEQ ID NO: 4810 - protein, 13 aa, Homo Sapiens
DAGVSVIMDFHYN

SEQ ID NO: 4811 - protein, 13 aa, Homo Sapiens
AGVSVIMDFHYNE

SEQ ID NO: 4812 - protein, 13 aa, Homo Sapiens
GVSVIMDFHYNEK

SEQ ID NO: 4813 - protein, 13 aa, Homo Sapiens
VSVIMDFHYNEKR

SEQ ID NO: 4814 - protein, 13 aa, Homo Sapiens
SVIMDFHYNEKRI

SEQ ID NO: 4815 - protein, 13 aa, Homo Sapiens
VIMDFHYNEKRIY

SEQ ID NO: 4816 - protein, 13 aa, Homo Sapiens
IMDFHYNEKRIYW

SEQ ID NO: 4817 - protein, 13 aa, Homo Sapiens
MDFHYNEKRIYWV

SEQ ID NO: 4818 - protein, 13 aa, Homo Sapiens
DFHYNEKRIYWVD

SEQ ID NO: 4819 - protein, 13 aa, Homo Sapiens
FHYNEKRIYWVDL

SEQ ID NO: 4820 - protein, 13 aa, Homo Sapiens
HYNEKRIYWVDLE

SEQ ID NO: 4821 - protein, 13 aa, Homo Sapiens
YNEKRIYWVDLER

SEQ ID NO: 4822 - protein, 13 aa, Homo Sapiens
NEKRIYWVDLERQ

SEQ ID NO: 4823 - protein, 13 aa, Homo Sapiens
EKRIYWVDLERQL

SEQ ID NO: 4824 - protein, 13 aa, Homo Sapiens
KRIYWVDLERQLL

SEQ ID NO: 4825 - protein, 13 aa, Homo Sapiens
RIYWVDLERQLLQ

SEQ ID NO: 4826 - protein, 13 aa, Homo Sapiens
IYWVDLERQLLQR

SEQ ID NO: 4827 - protein, 13 aa, Homo Sapiens
YWVDLERQLLQRV

SEQ ID NO: 4828 - protein, 13 aa, Homo Sapiens
WVDLERQLLQRVF

SEQ ID NO: 4829 - protein, 13 aa, Homo Sapiens
VDLERQLLQRVFL

SEQ ID NO: 4830 - protein, 13 aa, Homo Sapiens
DLERQLLQRVFLN

SEQ ID NO: 4831 - protein, 13 aa, Homo Sapiens
LERQLLQRVFLNG

SEQ ID NO: 4832 - protein, 13 aa, Homo Sapiens
ERQLLQRVFLNGS

SEQ ID NO: 4833 - protein, 13 aa, Homo Sapiens
RQLLQRVFLNGSR

SEQ ID NO: 4834 - protein, 13 aa, Homo Sapiens
QLLQRVFLNGSRQ

SEQ ID NO: 4835 - protein, 13 aa, Homo Sapiens
LLQRVFLNGSRQE

SEQ ID NO: 4836 - protein, 13 aa, Homo Sapiens
LQRVFLNGSRQER

SEQ ID NO: 4837 - protein, 13 aa, Homo Sapiens
QRVFLNGSRQERV

SEQ ID NO: 4838 - protein, 13 aa, Homo Sapiens
RVFLNGSRQERVC

SEQ ID NO: 4839 - protein, 13 aa, Homo Sapiens
VFLNGSRQERVCN

SEQ ID NO: 4840 - protein, 13 aa, Homo Sapiens
FLNGSRQERVCNI

SEQ ID NO: 4841 - protein, 13 aa, Homo Sapiens
LNGSRQERVCNIE

SEQ ID NO: 4842 - protein, 13 aa, Homo Sapiens
NGSRQERVCNIEK

SEQ ID NO: 4843 - protein, 13 aa, Homo Sapiens
GSRQERVCNIEKN

SEQ ID NO: 4844 - protein, 13 aa, Homo Sapiens
SRQERVCNIEKNV

SEQ ID NO: 4845 - protein, 13 aa, Homo Sapiens
RQERVCNIEKNVS

SEQ ID NO: 4846 - protein, 13 aa, Homo Sapiens
QERVCNIEKNVSG

SEQ ID NO: 4847 - protein, 13 aa, Homo Sapiens
ERVCNIEKNVSGM

SEQ ID NO: 4848 - protein, 13 aa, Homo Sapiens
RVCNIEKNVSGMA

SEQ ID NO: 4849 - protein, 13 aa, Homo Sapiens
VCNIEKNVSGMAI

SEQ ID NO: 4850 - protein, 13 aa, Homo Sapiens
CNIEKNVSGMAIN

SEQ ID NO: 4851 - protein, 13 aa, Homo Sapiens
NIEKNVSGMAINW

SEQ ID NO: 4852 - protein, 13 aa, Homo Sapiens
IEKNVSGMAINWI

SEQ ID NO: 4853 - protein, 13 aa, Homo Sapiens
EKNVSGMAINWIN

SEQ ID NO: 4854 - protein, 13 aa, Homo Sapiens
KNVSGMAINWINE

SEQ ID NO: 4855 - protein, 13 aa, Homo Sapiens
NVSGMAINWINEE

SEQ ID NO: 4856 - protein, 13 aa, Homo Sapiens
VSGMAINWINEEV

SEQ ID NO: 4857 - protein, 13 aa, Homo Sapiens
SGMAINWINEEVI

SEQ ID NO: 4858 - protein, 13 aa, Homo Sapiens
GMAINWINEEVIW

SEQ ID NO: 4859 - protein, 13 aa, Homo Sapiens
MAINWINEEVIWS

SEQ ID NO: 4860 - protein, 13 aa, Homo Sapiens
AINWINEEVIWSN

SEQ ID NO: 4861 - protein, 13 aa, Homo Sapiens
INWINEEVIWSNQ

SEQ ID NO: 4862 - protein, 13 aa, Homo Sapiens
NWINEEVIWSNQQ

SEQ ID NO: 4863 - protein, 13 aa, Homo Sapiens
WINEEVIWSNQQE

SEQ ID NO: 4864 - protein, 13 aa, Homo Sapiens
INEEVIWSNQQEG

SEQ ID NO: 4865 - protein, 13 aa, Homo Sapiens
NEEVIWSNQQEGI

SEQ ID NO: 4866 - protein, 13 aa, Homo Sapiens
EEVIWSNQQEGII

SEQ ID NO: 4867 - protein, 13 aa, Homo Sapiens
EVIWSNQQEGIIT

SEQ ID NO: 4868 - protein, 13 aa, Homo Sapiens
VIWSNQQEGIITV

SEQ ID NO: 4869 - protein, 13 aa, Homo Sapiens
IWSNQQEGIITVT

SEQ ID NO: 4870 - protein, 13 aa, Homo Sapiens
WSNQQEGIITVTD

SEQ ID NO: 4871 - protein, 13 aa, Homo Sapiens
SNQQEGIITVTDM

SEQ ID NO: 4872 - protein, 13 aa, Homo Sapiens
NQQEGIITVTDMK

SEQ ID NO: 4873 - protein, 13 aa, Homo Sapiens
QQEGIITVTDMKG

SEQ ID NO: 4874 - protein, 13 aa, Homo Sapiens
QEGIITVTDMKGN

SEQ ID NO: 4875 - protein, 13 aa, Homo Sapiens
EGIITVTDMKGNN

SEQ ID NO: 4876 - protein, 13 aa, Homo Sapiens
GIITVTDMKGNNS

SEQ ID NO: 4877 - protein, 13 aa, Homo Sapiens
IITVTDMKGNNSH

SEQ ID NO: 4878 - protein, 13 aa, Homo Sapiens
ITVTDMKGNNSHI

SEQ ID NO: 4879 - protein, 13 aa, Homo Sapiens
TVTDMKGNNSHIL

SEQ ID NO: 4880 - protein, 13 aa, Homo Sapiens
VTDMKGNNSHILL

SEQ ID NO: 4881 - protein, 13 aa, Homo Sapiens
TDMKGNNSHILLS

SEQ ID NO: 4882 - protein, 13 aa, Homo Sapiens
DMKGNNSHILLSA

SEQ ID NO: 4883 - protein, 13 aa, Homo Sapiens
MKGNNSHILLSAL

SEQ ID NO: 4884 - protein, 13 aa, Homo Sapiens
KGNNSHILLSALK

SEQ ID NO: 4885 - protein, 13 aa, Homo Sapiens
GNNSHILLSALKY

SEQ ID NO: 4886 - protein, 13 aa, Homo Sapiens
NNSHILLSALKYP

SEQ ID NO: 4887 - protein, 13 aa, Homo Sapiens
NSHILLSALKYPA

SEQ ID NO: 4888 - protein, 13 aa, Homo Sapiens
SHILLSALKYPAN

SEQ ID NO: 4889 - protein, 13 aa, Homo Sapiens
HILLSALKYPANV

SEQ ID NO: 4890 - protein, 13 aa, Homo Sapiens
ILLSALKYPANVA

SEQ ID NO: 4891 - protein, 13 aa, Homo Sapiens
LLSALKYPANVAV

SEQ ID NO: 4892 - protein, 13 aa, Homo Sapiens
LSALKYPANVAVD

SEQ ID NO: 4893 - protein, 13 aa, Homo Sapiens
SALKYPANVAVDP

SEQ ID NO: 4894 - protein, 13 aa, Homo Sapiens
ALKYPANVAVDPV

SEQ ID NO: 4895 - protein, 13 aa, Homo Sapiens
LKYPANVAVDPVE

SEQ ID NO: 4896 - protein, 13 aa, Homo Sapiens
KYPANVAVDPVER

SEQ ID NO: 4897 - protein, 13 aa, Homo Sapiens
YPANVAVDPVERF

SEQ ID NO: 4898 - protein, 13 aa, Homo Sapiens
PANVAVDPVERFI

SEQ ID NO: 4899 - protein, 13 aa, Homo Sapiens
ANVAVDPVERFIF

SEQ ID NO: 4900 - protein, 13 aa, Homo Sapiens
NVAVDPVERFIFW

SEQ ID NO: 4901 - protein, 13 aa, Homo Sapiens
VAVDPVERFIFWS

SEQ ID NO: 4902 - protein, 13 aa, Homo Sapiens
AVDPVERFIFWSS

SEQ ID NO: 4903 - protein, 13 aa, Homo Sapiens
VDPVERFIFWSSE

SEQ ID NO: 4904 - protein, 13 aa, Homo Sapiens
DPVERFIFWSSEV

SEQ ID NO: 4905 - protein, 13 aa, Homo Sapiens
PVERFIFWSSEVA

SEQ ID NO: 4906 - protein, 13 aa, Homo Sapiens
VERFIFWSSEVAG

SEQ ID NO: 4907 - protein, 13 aa, Homo Sapiens
ERFIFWSSEVAGS

SEQ ID NO: 4908 - protein, 13 aa, Homo Sapiens
RFIFWSSEVAGSL

SEQ ID NO: 4909 - protein, 13 aa, Homo Sapiens
FIFWSSEVAGSLY

SEQ ID NO: 4910 - protein, 13 aa, Homo Sapiens
IFWSSEVAGSLYR

SEQ ID NO: 4911 - protein, 13 aa, Homo Sapiens
FWSSEVAGSLYRA

SEQ ID NO: 4912 - protein, 13 aa, Homo Sapiens
WSSEVAGSLYRAD

SEQ ID NO: 4913 - protein, 13 aa, Homo Sapiens
SSEVAGSLYRADL

SEQ ID NO: 4914 - protein, 13 aa, Homo Sapiens
SEVAGSLYRADLD

SEQ ID NO: 4915 - protein, 13 aa, Homo Sapiens
EVAGSLYRADLDG

SEQ ID NO: 4916 - protein, 13 aa, Homo Sapiens
VAGSLYRADLDGV

SEQ ID NO: 4917 - protein, 13 aa, Homo Sapiens
AGSLYRADLDGVG

SEQ ID NO: 4918 - protein, 13 aa, Homo Sapiens
GSLYRADLDGVGV

SEQ ID NO: 4919 - protein, 13 aa, Homo Sapiens
SLYRADLDGVGVK

SEQ ID NO: 4920 - protein, 13 aa, Homo Sapiens
LYRADLDGVGVKA

SEQ ID NO: 4921 - protein, 13 aa, Homo Sapiens
YRADLDGVGVKAL

SEQ ID NO: 4922 - protein, 13 aa, Homo Sapiens
RADLDGVGVKALL

SEQ ID NO: 4923 - protein, 13 aa, Homo Sapiens
ADLDGVGVKALLE

SEQ ID NO: 4924 - protein, 13 aa, Homo Sapiens
DLDGVGVKALLET

SEQ ID NO: 4925 - protein, 13 aa, Homo Sapiens
LDGVGVKALLETS

SEQ ID NO: 4926 - protein, 13 aa, Homo Sapiens
DGVGVKALLETSE

SEQ ID NO: 4927 - protein, 13 aa, Homo Sapiens
GVGVKALLETSEK

SEQ ID NO: 4928 - protein, 13 aa, Homo Sapiens
VGVKALLETSEKI

SEQ ID NO: 4929 - protein, 13 aa, Homo Sapiens
GVKALLETSEKIT

SEQ ID NO: 4930 - protein, 13 aa, Homo Sapiens
VKALLETSEKITA

SEQ ID NO: 4931 - protein, 13 aa, Homo Sapiens
KALLETSEKITAV

SEQ ID NO: 4932 - protein, 13 aa, Homo Sapiens
ALLETSEKITAVS

SEQ ID NO: 4933 - protein, 13 aa, Homo Sapiens
LLETSEKITAVSL

SEQ ID NO: 4934 - protein, 13 aa, Homo Sapiens
LETSEKITAVSLD

SEQ ID NO: 4935 - protein, 13 aa, Homo Sapiens
ETSEKITAVSLDV

SEQ ID NO: 4936 - protein, 13 aa, Homo Sapiens
TSEKITAVSLDVL

SEQ ID NO: 4937 - protein, 13 aa, Homo Sapiens
SEKITAVSLDVLD

SEQ ID NO: 4938 - protein, 13 aa, Homo Sapiens
EKITAVSLDVLDK

SEQ ID NO: 4939 - protein, 13 aa, Homo Sapiens
KITAVSLDVLDKR

SEQ ID NO: 4940 - protein, 13 aa, Homo Sapiens
ITAVSLDVLDKRL

SEQ ID NO: 4941 - protein, 13 aa, Homo Sapiens
TAVSLDVLDKRLF

SEQ ID NO: 4942 - protein, 13 aa, Homo Sapiens
AVSLDVLDKRLFW

SEQ ID NO: 4943 - protein, 13 aa, Homo Sapiens
VSLDVLDKRLFWI

SEQ ID NO: 4944 - protein, 13 aa, Homo Sapiens
SLDVLDKRLFWIQ

SEQ ID NO: 4945 - protein, 13 aa, Homo Sapiens
LDVLDKRLFWIQY

SEQ ID NO: 4946 - protein, 13 aa, Homo Sapiens
DVLDKRLFWIQYN

SEQ ID NO: 4947 - protein, 13 aa, Homo Sapiens
VLDKRLFWIQYNR

SEQ ID NO: 4948 - protein, 13 aa, Homo Sapiens
LDKRLFWIQYNRE

SEQ ID NO: 4949 - protein, 13 aa, Homo Sapiens
DKRLFWIQYNREG

SEQ ID NO: 4950 - protein, 13 aa, Homo Sapiens
KRLFWIQYNREGS

SEQ ID NO: 4951 - protein, 13 aa, Homo Sapiens
RLFWIQYNREGSN

SEQ ID NO: 4952 - protein, 13 aa, Homo Sapiens
LFWIQYNREGSNS

SEQ ID NO: 4953 - protein, 13 aa, Homo Sapiens
FWIQYNREGSNSL

SEQ ID NO: 4954 - protein, 13 aa, Homo Sapiens
WIQYNREGSNSLI

SEQ ID NO: 4955 - protein, 13 aa, Homo Sapiens
IQYNREGSNSLIC

SEQ ID NO: 4956 - protein, 13 aa, Homo Sapiens
QYNREGSNSLICS

SEQ ID NO: 4957 - protein, 13 aa, Homo Sapiens
YNREGSNSLICSC

SEQ ID NO: 4958 - protein, 13 aa, Homo Sapiens
NREGSNSLICSCD

SEQ ID NO: 4959 - protein, 13 aa, Homo Sapiens
REGSNSLICSCDY

SEQ ID NO: 4960 - protein, 13 aa, Homo Sapiens
EGSNSLICSCDYD

SEQ ID NO: 4961 - protein, 13 aa, Homo Sapiens
GSNSLICSCDYDG

SEQ ID NO: 4962 - protein, 13 aa, Homo Sapiens
SNSLICSCDYDGG

SEQ ID NO: 4963 - protein, 13 aa, Homo Sapiens
NSLICSCDYDGGS

SEQ ID NO: 4964 - protein, 13 aa, Homo Sapiens
SLICSCDYDGGSV

SEQ ID NO: 4965 - protein, 13 aa, Homo Sapiens
LICSCDYDGGSVH

SEQ ID NO: 4966 - protein, 13 aa, Homo Sapiens
ICSCDYDGGSVHI

SEQ ID NO: 4967 - protein, 13 aa, Homo Sapiens
CSCDYDGGSVHIS

SEQ ID NO: 4968 - protein, 13 aa, Homo Sapiens
SCDYDGGSVHISK

SEQ ID NO: 4969 - protein, 13 aa, Homo Sapiens
CDYDGGSVHISKH

SEQ ID NO: 4970 - protein, 13 aa, Homo Sapiens
DYDGGSVHISKHP

SEQ ID NO: 4971 - protein, 13 aa, Homo Sapiens
YDGGSVHISKHPT

SEQ ID NO: 4972 - protein, 13 aa, Homo Sapiens
DGGSVHISKHPTQ

SEQ ID NO: 4973 - protein, 13 aa, Homo Sapiens
GGSVHISKHPTQH

SEQ ID NO: 4974 - protein, 13 aa, Homo Sapiens
GSVHISKHPTQHN

SEQ ID NO: 4975 - protein, 13 aa, Homo Sapiens
SVHISKHPTQHNL

SEQ ID NO: 4976 - protein, 13 aa, Homo Sapiens
VHISKHPTQHNLF

SEQ ID NO: 4977 - protein, 13 aa, Homo Sapiens
HISKHPTQHNLFA

SEQ ID NO: 4978 - protein, 13 aa, Homo Sapiens
ISKHPTQHNLFAM

SEQ ID NO: 4979 - protein, 13 aa, Homo Sapiens
SKHPTQHNLFAMS

SEQ ID NO: 4980 - protein, 13 aa, Homo Sapiens
KHPTQHNLFAMSL

SEQ ID NO: 4981 - protein, 13 aa, Homo Sapiens
HPTQHNLFAMSLF

SEQ ID NO: 4982 - protein, 13 aa, Homo Sapiens
PTQHNLFAMSLFG

SEQ ID NO: 4983 - protein, 13 aa, Homo Sapiens
TQHNLFAMSLFGD

SEQ ID NO: 4984 - protein, 13 aa, Homo Sapiens
QHNLFAMSLFGDR

SEQ ID NO: 4985 - protein, 13 aa, Homo Sapiens
HNLFAMSLFGDRI

SEQ ID NO: 4986 - protein, 13 aa, Homo Sapiens
NLFAMSLFGDRIF

SEQ ID NO: 4987 - protein, 13 aa, Homo Sapiens
LFAMSLFGDRIFY

SEQ ID NO: 4988 - protein, 13 aa, Homo Sapiens
FAMSLFGDRIFYS

SEQ ID NO: 4989 - protein, 13 aa, Homo Sapiens
AMSLFGDRIFYST

SEQ ID NO: 4990 - protein, 13 aa, Homo Sapiens
MSLFGDRIFYSTW

SEQ ID NO: 4991 - protein, 13 aa, Homo Sapiens
SLFGDRIFYSTWK

SEQ ID NO: 4992 - protein, 13 aa, Homo Sapiens
LFGDRIFYSTWKM

SEQ ID NO: 4993 - protein, 13 aa, Homo Sapiens
FGDRIFYSTWKMK

SEQ ID NO: 4994 - protein, 13 aa, Homo Sapiens
GDRIFYSTWKMKT

SEQ ID NO: 4995 - protein, 13 aa, Homo Sapiens
DRIFYSTWKMKTI

SEQ ID NO: 4996 - protein, 13 aa, Homo Sapiens
RIFYSTWKMKTIW

SEQ ID NO: 4997 - protein, 13 aa, Homo Sapiens
IFYSTWKMKTIWI

SEQ ID NO: 4998 - protein, 13 aa, Homo Sapiens
FYSTWKMKTIWIA

SEQ ID NO: 4999 - protein, 13 aa, Homo Sapiens
YSTWKMKTIWIAN

SEQ ID NO: 5000 - protein, 13 aa, Homo Sapiens
STWKMKTIWIANK

SEQ ID NO: 5001 - protein, 13 aa, Homo Sapiens
TWKMKTIWIANKH

SEQ ID NO: 5002 - protein, 13 aa, Homo Sapiens
WKMKTIWIANKHT

SEQ ID NO: 5003 - protein, 13 aa, Homo Sapiens
KMKTIWIANKHTG

SEQ ID NO: 5004 - protein, 13 aa, Homo Sapiens
MKTIWIANKHTGK

SEQ ID NO: 5005 - protein, 13 aa, Homo Sapiens
KTIWIANKHTGKD

SEQ ID NO: 5006 - protein, 13 aa, Homo Sapiens
TIWIANKHTGKDM

SEQ ID NO: 5007 - protein, 13 aa, Homo Sapiens
IWIANKHTGKDMV

SEQ ID NO: 5008 - protein, 13 aa, Homo Sapiens
WIANKHTGKDMVR

SEQ ID NO: 5009 - protein, 13 aa, Homo Sapiens
IANKHTGKDMVRI

SEQ ID NO: 5010 - protein, 13 aa, Homo Sapiens
ANKHTGKDMVRIN

SEQ ID NO: 5011 - protein, 13 aa, Homo Sapiens
NKHTGKDMVRINL

SEQ ID NO: 5012 - protein, 13 aa, Homo Sapiens
KHTGKDMVRINLH

SEQ ID NO: 5013 - protein, 13 aa, Homo Sapiens
HTGKDMVRINLHS

SEQ ID NO: 5014 - protein, 13 aa, Homo Sapiens
TGKDMVRINLHSS

SEQ ID NO: 5015 - protein, 13 aa, Homo Sapiens
GKDMVRINLHSSF

SEQ ID NO: 5016 - protein, 13 aa, Homo Sapiens
KDMVRINLHSSFV

SEQ ID NO: 5017 - protein, 13 aa, Homo Sapiens
DMVRINLHSSFVP

SEQ ID NO: 5018 - protein, 13 aa, Homo Sapiens
MVRINLHSSFVPL

SEQ ID NO: 5019 - protein, 13 aa, Homo Sapiens
VRINLHSSFVPLG

SEQ ID NO: 5020 - protein, 13 aa, Homo Sapiens
RINLHSSFVPLGE

SEQ ID NO: 5021 - protein, 13 aa, Homo Sapiens
INLHSSFVPLGEL

SEQ ID NO: 5022 - protein, 13 aa, Homo Sapiens
NLHSSFVPLGELK

SEQ ID NO: 5023 - protein, 13 aa, Homo Sapiens
LHSSFVPLGELKV

SEQ ID NO: 5024 - protein, 13 aa, Homo Sapiens
HSSFVPLGELKVV

SEQ ID NO: 5025 - protein, 13 aa, Homo Sapiens
SSFVPLGELKVVH

SEQ ID NO: 5026 - protein, 13 aa, Homo Sapiens
SFVPLGELKVVHP

SEQ ID NO: 5027 - protein, 13 aa, Homo Sapiens
FVPLGELKVVHPL

SEQ ID NO: 5028 - protein, 13 aa, Homo Sapiens
VPLGELKVVHPLA

SEQ ID NO: 5029 - protein, 13 aa, Homo Sapiens
PLGELKVVHPLAQ

SEQ ID NO: 5030 - protein, 13 aa, Homo Sapiens
LGELKVVHPLAQP

SEQ ID NO: 5031 - protein, 13 aa, Homo Sapiens
GELKVVHPLAQPK

SEQ ID NO: 5032 - protein, 13 aa, Homo Sapiens
ELKVVHPLAQPKA

SEQ ID NO: 5033 - protein, 13 aa, Homo Sapiens
LKVVHPLAQPKAE

SEQ ID NO: 5034 - protein, 13 aa, Homo Sapiens
KVVHPLAQPKAED

SEQ ID NO: 5035 - protein, 13 aa, Homo Sapiens
VVHPLAQPKAEDD

SEQ ID NO: 5036 - protein, 13 aa, Homo Sapiens
VHPLAQPKAEDDT

SEQ ID NO: 5037 - protein, 13 aa, Homo Sapiens
HPLAQPKAEDDTW

SEQ ID NO: 5038 - protein, 13 aa, Homo Sapiens
PLAQPKAEDDTWE

SEQ ID NO: 5039 - protein, 13 aa, Homo Sapiens
LAQPKAEDDTWEP

SEQ ID NO: 5040 - protein, 13 aa, Homo Sapiens
AQPKAEDDTWEPE

SEQ ID NO: 5041 - protein, 13 aa, Homo Sapiens
QPKAEDDTWEPEQ

SEQ ID NO: 5042 - protein, 13 aa, Homo Sapiens
PKAEDDTWEPEQK

SEQ ID NO: 5043 - protein, 13 aa, Homo Sapiens
KAEDDTWEPEQKL

SEQ ID NO: 5044 - protein, 13 aa, Homo Sapiens
AEDDTWEPEQKLC

SEQ ID NO: 5045 - protein, 13 aa, Homo Sapiens
EDDTWEPEQKLCK

SEQ ID NO: 5046 - protein, 13 aa, Homo Sapiens
DDTWEPEQKLCKL

SEQ ID NO: 5047 - protein, 13 aa, Homo Sapiens
DTWEPEQKLCKLR

SEQ ID NO: 5048 - protein, 13 aa, Homo Sapiens
TWEPEQKLCKLRK

SEQ ID NO: 5049 - protein, 13 aa, Homo Sapiens
WEPEQKLCKLRKG

SEQ ID NO: 5050 - protein, 13 aa, Homo Sapiens
EPEQKLCKLRKGN

SEQ ID NO: 5051 - protein, 13 aa, Homo Sapiens
PEQKLCKLRKGNC

SEQ ID NO: 5052 - protein, 13 aa, Homo Sapiens
EQKLCKLRKGNCS

SEQ ID NO: 5053 - protein, 13 aa, Homo Sapiens
QKLCKLRKGNCSS

SEQ ID NO: 5054 - protein, 13 aa, Homo Sapiens
KLCKLRKGNCSST

SEQ ID NO: 5055 - protein, 13 aa, Homo Sapiens
LCKLRKGNCSSTV

SEQ ID NO: 5056 - protein, 13 aa, Homo Sapiens
CKLRKGNCSSTVC

SEQ ID NO: 5057 - protein, 13 aa, Homo Sapiens
KLRKGNCSSTVCG

SEQ ID NO: 5058 - protein, 13 aa, Homo Sapiens
LRKGNCSSTVCGQ

SEQ ID NO: 5059 - protein, 13 aa, Homo Sapiens
RKGNCSSTVCGQD

SEQ ID NO: 5060 - protein, 13 aa, Homo Sapiens
KGNCSSTVCGQDL

SEQ ID NO: 5061 - protein, 13 aa, Homo Sapiens
GNCSSTVCGQDLQ

SEQ ID NO: 5062 - protein, 13 aa, Homo Sapiens
NCSSTVCGQDLQS

SEQ ID NO: 5063 - protein, 13 aa, Homo Sapiens
CSSTVCGQDLQSH

SEQ ID NO: 5064 - protein, 13 aa, Homo Sapiens
SSTVCGQDLQSHL

SEQ ID NO: 5065 - protein, 13 aa, Homo Sapiens
STVCGQDLQSHLC

SEQ ID NO: 5066 - protein, 13 aa, Homo Sapiens
TVCGQDLQSHLCM

SEQ ID NO: 5067 - protein, 13 aa, Homo Sapiens
VCGQDLQSHLCMC

SEQ ID NO: 5068 - protein, 13 aa, Homo Sapiens
CGQDLQSHLCMCA

SEQ ID NO: 5069 - protein, 13 aa, Homo Sapiens
GQDLQSHLCMCAE

SEQ ID NO: 5070 - protein, 13 aa, Homo Sapiens
QDLQSHLCMCAEG

SEQ ID NO: 5071 - protein, 13 aa, Homo Sapiens
DLQSHLCMCAEGY

SEQ ID NO: 5072 - protein, 13 aa, Homo Sapiens
LQSHLCMCAEGYA

SEQ ID NO: 5073 - protein, 13 aa, Homo Sapiens
QSHLCMCAEGYAL

SEQ ID NO: 5074 - protein, 13 aa, Homo Sapiens
SHLCMCAEGYALS

SEQ ID NO: 5075 - protein, 13 aa, Homo Sapiens
HLCMCAEGYALSR

SEQ ID NO: 5076 - protein, 13 aa, Homo Sapiens
LCMCAEGYALSRD

SEQ ID NO: 5077 - protein, 13 aa, Homo Sapiens
CMCAEGYALSRDR

SEQ ID NO: 5078 - protein, 13 aa, Homo Sapiens
MCAEGYALSRDRK

SEQ ID NO: 5079 - protein, 13 aa, Homo Sapiens
CAEGYALSRDRKY

SEQ ID NO: 5080 - protein, 13 aa, Homo Sapiens
AEGYALSRDRKYC

SEQ ID NO: 5081 - protein, 13 aa, Homo Sapiens
EGYALSRDRKYCE

SEQ ID NO: 5082 - protein, 13 aa, Homo Sapiens
GYALSRDRKYCED

SEQ ID NO: 5083 - protein, 13 aa, Homo Sapiens
YALSRDRKYCEDV

SEQ ID NO: 5084 - protein, 13 aa, Homo Sapiens
ALSRDRKYCEDVN

SEQ ID NO: 5085 - protein, 13 aa, Homo Sapiens
LSRDRKYCEDVNE

SEQ ID NO: 5086 - protein, 13 aa, Homo Sapiens
SRDRKYCEDVNEC

SEQ ID NO: 5087 - protein, 13 aa, Homo Sapiens
RDRKYCEDVNECA

SEQ ID NO: 5088 - protein, 13 aa, Homo Sapiens
DRKYCEDVNECAF

SEQ ID NO: 5089 - protein, 13 aa, Homo Sapiens
RKYCEDVNECAFW

SEQ ID NO: 5090 - protein, 13 aa, Homo Sapiens
KYCEDVNECAFWN

SEQ ID NO: 5091 - protein, 13 aa, Homo Sapiens
YCEDVNECAFWNH

SEQ ID NO: 5092 - protein, 13 aa, Homo Sapiens
CEDVNECAFWNHG

SEQ ID NO: 5093 - protein, 13 aa, Homo Sapiens
EDVNECAFWNHGC

SEQ ID NO: 5094 - protein, 13 aa, Homo Sapiens
DVNECAFWNHGCT

SEQ ID NO: 5095 - protein, 13 aa, Homo Sapiens
VNECAFWNHGCTL

SEQ ID NO: 5096 - protein, 13 aa, Homo Sapiens
NECAFWNHGCTLG

SEQ ID NO: 5097 - protein, 13 aa, Homo Sapiens
ECAFWNHGCTLGC

SEQ ID NO: 5098 - protein, 13 aa, Homo Sapiens
CAFWNHGCTLGCK

SEQ ID NO: 5099 - protein, 13 aa, Homo Sapiens
AFWNHGCTLGCKN

SEQ ID NO: 5100 - protein, 13 aa, Homo Sapiens
FWNHGCTLGCKNT

SEQ ID NO: 5101 - protein, 13 aa, Homo Sapiens
WNHGCTLGCKNTP

SEQ ID NO: 5102 - protein, 13 aa, Homo Sapiens
NHGCTLGCKNTPG

SEQ ID NO: 5103 - protein, 13 aa, Homo Sapiens
HGCTLGCKNTPGS

SEQ ID NO: 5104 - protein, 13 aa, Homo Sapiens
GCTLGCKNTPGSY

SEQ ID NO: 5105 - protein, 13 aa, Homo Sapiens
CTLGCKNTPGSYY

SEQ ID NO: 5106 - protein, 13 aa, Homo Sapiens
TLGCKNTPGSYYC

SEQ ID NO: 5107 - protein, 13 aa, Homo Sapiens
LGCKNTPGSYYCT

SEQ ID NO: 5108 - protein, 13 aa, Homo Sapiens
GCKNTPGSYYCTC

SEQ ID NO: 5109 - protein, 13 aa, Homo Sapiens
CKNTPGSYYCTCP

SEQ ID NO: 5110 - protein, 13 aa, Homo Sapiens
KNTPGSYYCTCPV

SEQ ID NO: 5111 - protein, 13 aa, Homo Sapiens
NTPGSYYCTCPVG

SEQ ID NO: 5112 - protein, 13 aa, Homo Sapiens
TPGSYYCTCPVGF

SEQ ID NO: 5113 - protein, 13 aa, Homo Sapiens
PGSYYCTCPVGFV

SEQ ID NO: 5114 - protein, 13 aa, Homo Sapiens
GSYYCTCPVGFVL

SEQ ID NO: 5115 - protein, 13 aa, Homo Sapiens
SYYCTCPVGFVLL

SEQ ID NO: 5116 - protein, 13 aa, Homo Sapiens
YYCTCPVGFVLLP

SEQ ID NO: 5117 - protein, 13 aa, Homo Sapiens
YCTCPVGFVLLPD

SEQ ID NO: 5118 - protein, 13 aa, Homo Sapiens
CTCPVGFVLLPDG

SEQ ID NO: 5119 - protein, 13 aa, Homo Sapiens
TCPVGFVLLPDGK

SEQ ID NO: 5120 - protein, 13 aa, Homo Sapiens
CPVGFVLLPDGKR

SEQ ID NO: 5121 - protein, 13 aa, Homo Sapiens
PVGFVLLPDGKRC

SEQ ID NO: 5122 - protein, 13 aa, Homo Sapiens
VGFVLLPDGKRCH

SEQ ID NO: 5123 - protein, 13 aa, Homo Sapiens
GFVLLPDGKRCHQ

SEQ ID NO: 5124 - protein, 13 aa, Homo Sapiens
FVLLPDGKRCHQL

SEQ ID NO: 5125 - protein, 13 aa, Homo Sapiens
VLLPDGKRCHQLV

SEQ ID NO: 5126 - protein, 13 aa, Homo Sapiens
LLPDGKRCHQLVS

SEQ ID NO: 5127 - protein, 13 aa, Homo Sapiens
LPDGKRCHQLVSC

SEQ ID NO: 5128 - protein, 13 aa, Homo Sapiens
PDGKRCHQLVSCP

SEQ ID NO: 5129 - protein, 13 aa, Homo Sapiens
DGKRCHQLVSCPR

SEQ ID NO: 5130 - protein, 13 aa, Homo Sapiens
GKRCHQLVSCPRN

SEQ ID NO: 5131 - protein, 13 aa, Homo Sapiens
KRCHQLVSCPRNV

SEQ ID NO: 5132 - protein, 13 aa, Homo Sapiens
RCHQLVSCPRNVS

SEQ ID NO: 5133 - protein, 13 aa, Homo Sapiens
CHQLVSCPRNVSE

SEQ ID NO: 5134 - protein, 13 aa, Homo Sapiens
HQLVSCPRNVSEC

SEQ ID NO: 5135 - protein, 13 aa, Homo Sapiens
QLVSCPRNVSECS

SEQ ID NO: 5136 - protein, 13 aa, Homo Sapiens
LVSCPRNVSECSH

SEQ ID NO: 5137 - protein, 13 aa, Homo Sapiens
VSCPRNVSECSHD

SEQ ID NO: 5138 - protein, 13 aa, Homo Sapiens
SCPRNVSECSHDC

SEQ ID NO: 5139 - protein, 13 aa, Homo Sapiens
CPRNVSECSHDCV

SEQ ID NO: 5140 - protein, 13 aa, Homo Sapiens
PRNVSECSHDCVL

SEQ ID NO: 5141 - protein, 13 aa, Homo Sapiens
RNVSECSHDCVLT

SEQ ID NO: 5142 - protein, 13 aa, Homo Sapiens
NVSECSHDCVLTS

SEQ ID NO: 5143 - protein, 13 aa, Homo Sapiens
VSECSHDCVLTSE

SEQ ID NO: 5144 - protein, 13 aa, Homo Sapiens
SECSHDCVLTSEG

SEQ ID NO: 5145 - protein, 13 aa, Homo Sapiens
ECSHDCVLTSEGP

SEQ ID NO: 5146 - protein, 13 aa, Homo Sapiens
CSHDCVLTSEGPL

SEQ ID NO: 5147 - protein, 13 aa, Homo Sapiens
SHDCVLTSEGPLC

SEQ ID NO: 5148 - protein, 13 aa, Homo Sapiens
HDCVLTSEGPLCF

SEQ ID NO: 5149 - protein, 13 aa, Homo Sapiens
DCVLTSEGPLCFC

SEQ ID NO: 5150 - protein, 13 aa, Homo Sapiens
CVLTSEGPLCFCP

SEQ ID NO: 5151 - protein, 13 aa, Homo Sapiens
VLTSEGPLCFCPE

SEQ ID NO: 5152 - protein, 13 aa, Homo Sapiens
LTSEGPLCFCPEG

SEQ ID NO: 5153 - protein, 13 aa, Homo Sapiens
TSEGPLCFCPEGS

SEQ ID NO: 5154 - protein, 13 aa, Homo Sapiens
SEGPLCFCPEGSV

SEQ ID NO: 5155 - protein, 13 aa, Homo Sapiens
EGPLCFCPEGSVL

SEQ ID NO: 5156 - protein, 13 aa, Homo Sapiens
GPLCFCPEGSVLE

SEQ ID NO: 5157 - protein, 13 aa, Homo Sapiens
PLCFCPEGSVLER

SEQ ID NO: 5158 - protein, 13 aa, Homo Sapiens
LCFCPEGSVLERD

SEQ ID NO: 5159 - protein, 13 aa, Homo Sapiens
CFCPEGSVLERDG

SEQ ID NO: 5160 - protein, 13 aa, Homo Sapiens
FCPEGSVLERDGK

SEQ ID NO: 5161 - protein, 13 aa, Homo Sapiens
CPEGSVLERDGKT

SEQ ID NO: 5162 - protein, 13 aa, Homo Sapiens
PEGSVLERDGKTC

SEQ ID NO: 5163 - protein, 13 aa, Homo Sapiens
EGSVLERDGKTCS

SEQ ID NO: 5164 - protein, 13 aa, Homo Sapiens
GSVLERDGKTCSG

SEQ ID NO: 5165 - protein, 13 aa, Homo Sapiens
SVLERDGKTCSGC

SEQ ID NO: 5166 - protein, 13 aa, Homo Sapiens
VLERDGKTCSGCS

SEQ ID NO: 5167 - protein, 13 aa, Homo Sapiens
LERDGKTCSGCSS

SEQ ID NO: 5168 - protein, 13 aa, Homo Sapiens
ERDGKTCSGCSSP

SEQ ID NO: 5169 - protein, 13 aa, Homo Sapiens
RDGKTCSGCSSPD

SEQ ID NO: 5170 - protein, 13 aa, Homo Sapiens
DGKTCSGCSSPDN

SEQ ID NO: 5171 - protein, 13 aa, Homo Sapiens
GKTCSGCSSPDNG

SEQ ID NO: 5172 - protein, 13 aa, Homo Sapiens
KTCSGCSSPDNGG

SEQ ID NO: 5173 - protein, 13 aa, Homo Sapiens
TCSGCSSPDNGGC

SEQ ID NO: 5174 - protein, 13 aa, Homo Sapiens
CSGCSSPDNGGCS

SEQ ID NO: 5175 - protein, 13 aa, Homo Sapiens
SGCSSPDNGGCSQ

SEQ ID NO: 5176 - protein, 13 aa, Homo Sapiens
GCSSPDNGGCSQL

SEQ ID NO: 5177 - protein, 13 aa, Homo Sapiens
CSSPDNGGCSQLC

SEQ ID NO: 5178 - protein, 13 aa, Homo Sapiens
SSPDNGGCSQLCV

SEQ ID NO: 5179 - protein, 13 aa, Homo Sapiens
SPDNGGCSQLCVP

SEQ ID NO: 5180 - protein, 13 aa, Homo Sapiens
PDNGGCSQLCVPL

SEQ ID NO: 5181 - protein, 13 aa, Homo Sapiens
DNGGCSQLCVPLS

SEQ ID NO: 5182 - protein, 13 aa, Homo Sapiens
NGGCSQLCVPLSP

SEQ ID NO: 5183 - protein, 13 aa, Homo Sapiens
GGCSQLCVPLSPV

SEQ ID NO: 5184 - protein, 13 aa, Homo Sapiens
GCSQLCVPLSPVS

SEQ ID NO: 5185 - protein, 13 aa, Homo Sapiens
CSQLCVPLSPVSW

SEQ ID NO: 5186 - protein, 13 aa, Homo Sapiens
SQLCVPLSPVSWE

SEQ ID NO: 5187 - protein, 13 aa, Homo Sapiens
QLCVPLSPVSWEC

SEQ ID NO: 5188 - protein, 13 aa, Homo Sapiens
LCVPLSPVSWECD

SEQ ID NO: 5189 - protein, 13 aa, Homo Sapiens
CVPLSPVSWECDC

SEQ ID NO: 5190 - protein, 13 aa, Homo Sapiens
VPLSPVSWECDCF

SEQ ID NO: 5191 - protein, 13 aa, Homo Sapiens
PLSPVSWECDCFP

SEQ ID NO: 5192 - protein, 13 aa, Homo Sapiens
LSPVSWECDCFPG

SEQ ID NO: 5193 - protein, 13 aa, Homo Sapiens
SPVSWECDCFPGY

SEQ ID NO: 5194 - protein, 13 aa, Homo Sapiens
PVSWECDCFPGYD

SEQ ID NO: 5195 - protein, 13 aa, Homo Sapiens
VSWECDCFPGYDL

SEQ ID NO: 5196 - protein, 13 aa, Homo Sapiens
SWECDCFPGYDLQ

SEQ ID NO: 5197 - protein, 13 aa, Homo Sapiens
WECDCFPGYDLQL

SEQ ID NO: 5198 - protein, 13 aa, Homo Sapiens
ECDCFPGYDLQLD

SEQ ID NO: 5199 - protein, 13 aa, Homo Sapiens
CDCFPGYDLQLDE

SEQ ID NO: 5200 - protein, 13 aa, Homo Sapiens
DCFPGYDLQLDEK

SEQ ID NO: 5201 - protein, 13 aa, Homo Sapiens
CFPGYDLQLDEKS

SEQ ID NO: 5202 - protein, 13 aa, Homo Sapiens
FPGYDLQLDEKSC

SEQ ID NO: 5203 - protein, 13 aa, Homo Sapiens
PGYDLQLDEKSCA

SEQ ID NO: 5204 - protein, 13 aa, Homo Sapiens
GYDLQLDEKSCAA

SEQ ID NO: 5205 - protein, 13 aa, Homo Sapiens
YDLQLDEKSCAAS

SEQ ID NO: 5206 - protein, 13 aa, Homo Sapiens
DLQLDEKSCAASG

SEQ ID NO: 5207 - protein, 13 aa, Homo Sapiens
LQLDEKSCAASGP

SEQ ID NO: 5208 - protein, 13 aa, Homo Sapiens
QLDEKSCAASGPQ

SEQ ID NO: 5209 - protein, 13 aa, Homo Sapiens
LDEKSCAASGPQP

SEQ ID NO: 5210 - protein, 13 aa, Homo Sapiens
DEKSCAASGPQPF

SEQ ID NO: 5211 - protein, 13 aa, Homo Sapiens
EKSCAASGPQPFL

SEQ ID NO: 5212 - protein, 13 aa, Homo Sapiens
KSCAASGPQPFLL

SEQ ID NO: 5213 - protein, 13 aa, Homo Sapiens
SCAASGPQPFLLF

SEQ ID NO: 5214 - protein, 13 aa, Homo Sapiens
CAASGPQPFLLFA

SEQ ID NO: 5215 - protein, 13 aa, Homo Sapiens
AASGPQPFLLFAN

SEQ ID NO: 5216 - protein, 13 aa, Homo Sapiens
ASGPQPFLLFANS

SEQ ID NO: 5217 - protein, 13 aa, Homo Sapiens
SGPQPFLLFANSQ

SEQ ID NO: 5218 - protein, 13 aa, Homo Sapiens
GPQPFLLFANSQD

SEQ ID NO: 5219 - protein, 13 aa, Homo Sapiens
PQPFLLFANSQDI

SEQ ID NO: 5220 - protein, 13 aa, Homo Sapiens
QPFLLFANSQDIR

SEQ ID NO: 5221 - protein, 13 aa, Homo Sapiens
PFLLFANSQDIRH

SEQ ID NO: 5222 - protein, 13 aa, Homo Sapiens
FLLFANSQDIRHM

SEQ ID NO: 5223 - protein, 13 aa, Homo Sapiens
LLFANSQDIRHMH

SEQ ID NO: 5224 - protein, 13 aa, Homo Sapiens
LFANSQDIRHMHF

SEQ ID NO: 5225 - protein, 13 aa, Homo Sapiens
FANSQDIRHMHFD

SEQ ID NO: 5226 - protein, 13 aa, Homo Sapiens
ANSQDIRHMHFDG

SEQ ID NO: 5227 - protein, 13 aa, Homo Sapiens
NSQDIRHMHFDGT

SEQ ID NO: 5228 - protein, 13 aa, Homo Sapiens
SQDIRHMHFDGTD

SEQ ID NO: 5229 - protein, 13 aa, Homo Sapiens
QDIRHMHFDGTDY

SEQ ID NO: 5230 - protein, 13 aa, Homo Sapiens
DIRHMHFDGTDYG

SEQ ID NO: 5231 - protein, 13 aa, Homo Sapiens
IRHMHFDGTDYGT

SEQ ID NO: 5232 - protein, 13 aa, Homo Sapiens
RHMHFDGTDYGTL

SEQ ID NO: 5233 - protein, 13 aa, Homo Sapiens
HMHFDGTDYGTLL

SEQ ID NO: 5234 - protein, 13 aa, Homo Sapiens
MHFDGTDYGTLLS

SEQ ID NO: 5235 - protein, 13 aa, Homo Sapiens
HFDGTDYGTLLSQ

SEQ ID NO: 5236 - protein, 13 aa, Homo Sapiens
FDGTDYGTLLSQQ

SEQ ID NO: 5237 - protein, 13 aa, Homo Sapiens
DGTDYGTLLSQQM

SEQ ID NO: 5238 - protein, 13 aa, Homo Sapiens
GTDYGTLLSQQMG

SEQ ID NO: 5239 - protein, 13 aa, Homo Sapiens
TDYGTLLSQQMGM

SEQ ID NO: 5240 - protein, 13 aa, Homo Sapiens
DYGTLLSQQMGMV

SEQ ID NO: 5241 - protein, 13 aa, Homo Sapiens
YGTLLSQQMGMVY

SEQ ID NO: 5242 - protein, 13 aa, Homo Sapiens
GTLLSQQMGMVYA

SEQ ID NO: 5243 - protein, 13 aa, Homo Sapiens
TLLSQQMGMVYAL

SEQ ID NO: 5244 - protein, 13 aa, Homo Sapiens
LLSQQMGMVYALD

SEQ ID NO: 5245 - protein, 13 aa, Homo Sapiens
LSQQMGMVYALDH

SEQ ID NO: 5246 - protein, 13 aa, Homo Sapiens
SQQMGMVYALDHD

SEQ ID NO: 5247 - protein, 13 aa, Homo Sapiens
QQMGMVYALDHDP

SEQ ID NO: 5248 - protein, 13 aa, Homo Sapiens
QMGMVYALDHDPV

SEQ ID NO: 5249 - protein, 13 aa, Homo Sapiens
MGMVYALDHDPVE

SEQ ID NO: 5250 - protein, 13 aa, Homo Sapiens
GMVYALDHDPVEN

SEQ ID NO: 5251 - protein, 13 aa, Homo Sapiens
MVYALDHDPVENK

SEQ ID NO: 5252 - protein, 13 aa, Homo Sapiens
VYALDHDPVENKI

SEQ ID NO: 5253 - protein, 13 aa, Homo Sapiens
YALDHDPVENKIY

SEQ ID NO: 5254 - protein, 13 aa, Homo Sapiens
ALDHDPVENKIYF

SEQ ID NO: 5255 - protein, 13 aa, Homo Sapiens
LDHDPVENKIYFA

SEQ ID NO: 5256 - protein, 13 aa, Homo Sapiens
DHDPVENKIYFAH

SEQ ID NO: 5257 - protein, 13 aa, Homo Sapiens
HDPVENKIYFAHT

SEQ ID NO: 5258 - protein, 13 aa, Homo Sapiens
DPVENKIYFAHTA

SEQ ID NO: 5259 - protein, 13 aa, Homo Sapiens
PVENKIYFAHTAL

SEQ ID NO: 5260 - protein, 13 aa, Homo Sapiens
VENKIYFAHTALK

SEQ ID NO: 5261 - protein, 13 aa, Homo Sapiens
ENKIYFAHTALKW

SEQ ID NO: 5262 - protein, 13 aa, Homo Sapiens
NKIYFAHTALKWI

SEQ ID NO: 5263 - protein, 13 aa, Homo Sapiens
KIYFAHTALKWIE

SEQ ID NO: 5264 - protein, 13 aa, Homo Sapiens
IYFAHTALKWIER

SEQ ID NO: 5265 - protein, 13 aa, Homo Sapiens
YFAHTALKWIERA

SEQ ID NO: 5266 - protein, 13 aa, Homo Sapiens
FAHTALKWIERAN

SEQ ID NO: 5267 - protein, 13 aa, Homo Sapiens
AHTALKWIERANM

SEQ ID NO: 5268 - protein, 13 aa, Homo Sapiens
HTALKWIERANMD

SEQ ID NO: 5269 - protein, 13 aa, Homo Sapiens
TALKWIERANMDG

SEQ ID NO: 5270 - protein, 13 aa, Homo Sapiens
ALKWIERANMDGS

SEQ ID NO: 5271 - protein, 13 aa, Homo Sapiens
LKWIERANMDGSQ

SEQ ID NO: 5272 - protein, 13 aa, Homo Sapiens
KWIERANMDGSQR

SEQ ID NO: 5273 - protein, 13 aa, Homo Sapiens
WIERANMDGSQRE

SEQ ID NO: 5274 - protein, 13 aa, Homo Sapiens
IERANMDGSQRER

SEQ ID NO: 5275 - protein, 13 aa, Homo Sapiens
ERANMDGSQRERL

SEQ ID NO: 5276 - protein, 13 aa, Homo Sapiens
RANMDGSQRERLI

SEQ ID NO: 5277 - protein, 13 aa, Homo Sapiens
ANMDGSQRERLIE

SEQ ID NO: 5278 - protein, 13 aa, Homo Sapiens
NMDGSQRERLIEE

SEQ ID NO: 5279 - protein, 13 aa, Homo Sapiens
MDGSQRERLIEEG

SEQ ID NO: 5280 - protein, 13 aa, Homo Sapiens
DGSQRERLIEEGV

SEQ ID NO: 5281 - protein, 13 aa, Homo Sapiens
GSQRERLIEEGVD

SEQ ID NO: 5282 - protein, 13 aa, Homo Sapiens
SQRERLIEEGVDV

SEQ ID NO: 5283 - protein, 13 aa, Homo Sapiens
QRERLIEEGVDVP

SEQ ID NO: 5284 - protein, 13 aa, Homo Sapiens
RERLIEEGVDVPE

SEQ ID NO: 5285 - protein, 13 aa, Homo Sapiens
ERLIEEGVDVPEG

SEQ ID NO: 5286 - protein, 13 aa, Homo Sapiens
RLIEEGVDVPEGL

SEQ ID NO: 5287 - protein, 13 aa, Homo Sapiens
LIEEGVDVPEGLA

SEQ ID NO: 5288 - protein, 13 aa, Homo Sapiens
IEEGVDVPEGLAV

SEQ ID NO: 5289 - protein, 13 aa, Homo Sapiens
EEGVDVPEGLAVD

SEQ ID NO: 5290 - protein, 13 aa, Homo Sapiens
EGVDVPEGLAVDW

SEQ ID NO: 5291 - protein, 13 aa, Homo Sapiens
GVDVPEGLAVDWI

SEQ ID NO: 5292 - protein, 13 aa, Homo Sapiens
VDVPEGLAVDWIG

SEQ ID NO: 5293 - protein, 13 aa, Homo Sapiens
DVPEGLAVDWIGR

SEQ ID NO: 5294 - protein, 13 aa, Homo Sapiens
VPEGLAVDWIGRR

SEQ ID NO: 5295 - protein, 13 aa, Homo Sapiens
PEGLAVDWIGRRF

SEQ ID NO: 5296 - protein, 13 aa, Homo Sapiens
EGLAVDWIGRRFY

SEQ ID NO: 5297 - protein, 13 aa, Homo Sapiens
GLAVDWIGRRFYW

SEQ ID NO: 5298 - protein, 13 aa, Homo Sapiens
LAVDWIGRRFYWT

SEQ ID NO: 5299 - protein, 13 aa, Homo Sapiens
AVDWIGRRFYWTD

SEQ ID NO: 5300 - protein, 13 aa, Homo Sapiens
VDWIGRRFYWTDR

SEQ ID NO: 5301 - protein, 13 aa, Homo Sapiens
DWIGRRFYWTDRG

SEQ ID NO: 5302 - protein, 13 aa, Homo Sapiens
WIGRRFYWTDRGK

SEQ ID NO: 5303 - protein, 13 aa, Homo Sapiens
IGRRFYWTDRGKS

SEQ ID NO: 5304 - protein, 13 aa, Homo Sapiens
GRRFYWTDRGKSL

SEQ ID NO: 5305 - protein, 13 aa, Homo Sapiens
RRFYWTDRGKSLI

SEQ ID NO: 5306 - protein, 13 aa, Homo Sapiens
RFYWTDRGKSLIG

SEQ ID NO: 5307 - protein, 13 aa, Homo Sapiens
FYWTDRGKSLIGR

SEQ ID NO: 5308 - protein, 13 aa, Homo Sapiens
YWTDRGKSLIGRS

SEQ ID NO: 5309 - protein, 13 aa, Homo Sapiens
WTDRGKSLIGRSD

SEQ ID NO: 5310 - protein, 13 aa, Homo Sapiens
TDRGKSLIGRSDL

SEQ ID NO: 5311 - protein, 13 aa, Homo Sapiens
DRGKSLIGRSDLN

SEQ ID NO: 5312 - protein, 13 aa, Homo Sapiens
RGKSLIGRSDLNG

SEQ ID NO: 5313 - protein, 13 aa, Homo Sapiens
GKSLIGRSDLNGK

SEQ ID NO: 5314 - protein, 13 aa, Homo Sapiens
KSLIGRSDLNGKR

SEQ ID NO: 5315 - protein, 13 aa, Homo Sapiens
SLIGRSDLNGKRS

SEQ ID NO: 5316 - protein, 13 aa, Homo Sapiens
LIGRSDLNGKRSK

SEQ ID NO: 5317 - protein, 13 aa, Homo Sapiens
IGRSDLNGKRSKI

SEQ ID NO: 5318 - protein, 13 aa, Homo Sapiens
GRSDLNGKRSKII

SEQ ID NO: 5319 - protein, 13 aa, Homo Sapiens
RSDLNGKRSKIIT

SEQ ID NO: 5320 - protein, 13 aa, Homo Sapiens
SDLNGKRSKIITK

SEQ ID NO: 5321 - protein, 13 aa, Homo Sapiens
DLNGKRSKIITKE

SEQ ID NO: 5322 - protein, 13 aa, Homo Sapiens
LNGKRSKIITKEN

SEQ ID NO: 5323 - protein, 13 aa, Homo Sapiens
NGKRSKIITKENI

SEQ ID NO: 5324 - protein, 13 aa, Homo Sapiens
GKRSKIITKENIS

SEQ ID NO: 5325 - protein, 13 aa, Homo Sapiens
KRSKIITKENISQ

SEQ ID NO: 5326 - protein, 13 aa, Homo Sapiens
RSKIITKENISQP

SEQ ID NO: 5327 - protein, 13 aa, Homo Sapiens
SKIITKENISQPR

SEQ ID NO: 5328 - protein, 13 aa, Homo Sapiens
KIITKENISQPRG

SEQ ID NO: 5329 - protein, 13 aa, Homo Sapiens
IITKENISQPRGI

SEQ ID NO: 5330 - protein, 13 aa, Homo Sapiens
ITKENISQPRGIA

SEQ ID NO: 5331 - protein, 13 aa, Homo Sapiens
TKENISQPRGIAV

SEQ ID NO: 5332 - protein, 13 aa, Homo Sapiens
KENISQPRGIAVH

SEQ ID NO: 5333 - protein, 13 aa, Homo Sapiens
ENISQPRGIAVHP

SEQ ID NO: 5334 - protein, 13 aa, Homo Sapiens
NISQPRGIAVHPM

SEQ ID NO: 5335 - protein, 13 aa, Homo Sapiens
ISQPRGIAVHPMA

SEQ ID NO: 5336 - protein, 13 aa, Homo Sapiens
SQPRGIAVHPMAK

SEQ ID NO: 5337 - protein, 13 aa, Homo Sapiens
QPRGIAVHPMAKR

SEQ ID NO: 5338 - protein, 13 aa, Homo Sapiens
PRGIAVHPMAKRL

SEQ ID NO: 5339 - protein, 13 aa, Homo Sapiens
RGIAVHPMAKRLF

SEQ ID NO: 5340 - protein, 13 aa, Homo Sapiens
GIAVHPMAKRLFW

SEQ ID NO: 5341 - protein, 13 aa, Homo Sapiens
IAVHPMAKRLFWT

SEQ ID NO: 5342 - protein, 13 aa, Homo Sapiens
AVHPMAKRLFWTD

SEQ ID NO: 5343 - protein, 13 aa, Homo Sapiens
VHPMAKRLFWTDT

SEQ ID NO: 5344 - protein, 13 aa, Homo Sapiens
HPMAKRLFWTDTG

SEQ ID NO: 5345 - protein, 13 aa, Homo Sapiens
PMAKRLFWTDTGI

SEQ ID NO: 5346 - protein, 13 aa, Homo Sapiens
MAKRLFWTDTGIN

SEQ ID NO: 5347 - protein, 13 aa, Homo Sapiens
AKRLFWTDTGINP

SEQ ID NO: 5348 - protein, 13 aa, Homo Sapiens
KRLFWTDTGINPR

SEQ ID NO: 5349 - protein, 13 aa, Homo Sapiens
RLFWTDTGINPRI

SEQ ID NO: 5350 - protein, 13 aa, Homo Sapiens
LFWTDTGINPRIE

SEQ ID NO: 5351 - protein, 13 aa, Homo Sapiens
FWTDTGINPRIES

SEQ ID NO: 5352 - protein, 13 aa, Homo Sapiens
WTDTGINPRIESS

SEQ ID NO: 5353 - protein, 13 aa, Homo Sapiens
TDTGINPRIESSS

SEQ ID NO: 5354 - protein, 13 aa, Homo Sapiens
DTGINPRIESSSL

SEQ ID NO: 5355 - protein, 13 aa, Homo Sapiens
TGINPRIESSSLQ

SEQ ID NO: 5356 - protein, 13 aa, Homo Sapiens
GINPRIESSSLQG

SEQ ID NO: 5357 - protein, 13 aa, Homo Sapiens
INPRIESSSLQGL

SEQ ID NO: 5358 - protein, 13 aa, Homo Sapiens
NPRIESSSLQGLG

SEQ ID NO: 5359 - protein, 13 aa, Homo Sapiens
PRIESSSLQGLGR

SEQ ID NO: 5360 - protein, 13 aa, Homo Sapiens
RIESSSLQGLGRL

SEQ ID NO: 5361 - protein, 13 aa, Homo Sapiens
IESSSLQGLGRLV

SEQ ID NO: 5362 - protein, 13 aa, Homo Sapiens
ESSSLQGLGRLVI

SEQ ID NO: 5363 - protein, 13 aa, Homo Sapiens
SSSLQGLGRLVIA

SEQ ID NO: 5364 - protein, 13 aa, Homo Sapiens
SSLQGLGRLVIAS

SEQ ID NO: 5365 - protein, 13 aa, Homo Sapiens
SLQGLGRLVIASS

SEQ ID NO: 5366 - protein, 13 aa, Homo Sapiens
LQGLGRLVIASSD

SEQ ID NO: 5367 - protein, 13 aa, Homo Sapiens
QGLGRLVIASSDL

SEQ ID NO: 5368 - protein, 13 aa, Homo Sapiens
GLGRLVIASSDLI

SEQ ID NO: 5369 - protein, 13 aa, Homo Sapiens
LGRLVIASSDLIW

SEQ ID NO: 5370 - protein, 13 aa, Homo Sapiens
GRLVIASSDLIWP

SEQ ID NO: 5371 - protein, 13 aa, Homo Sapiens
RLVIASSDLIWPS

SEQ ID NO: 5372 - protein, 13 aa, Homo Sapiens
LVIASSDLIWPSG

SEQ ID NO: 5373 - protein, 13 aa, Homo Sapiens
VIASSDLIWPSGI

SEQ ID NO: 5374 - protein, 13 aa, Homo Sapiens
IASSDLIWPSGIT

SEQ ID NO: 5375 - protein, 13 aa, Homo Sapiens
ASSDLIWPSGITI

SEQ ID NO: 5376 - protein, 13 aa, Homo Sapiens
SSDLIWPSGITID

SEQ ID NO: 5377 - protein, 13 aa, Homo Sapiens
SDLIWPSGITIDF

SEQ ID NO: 5378 - protein, 13 aa, Homo Sapiens
DLIWPSGITIDFL

SEQ ID NO: 5379 - protein, 13 aa, Homo Sapiens
LIWPSGITIDFLT

SEQ ID NO: 5380 - protein, 13 aa, Homo Sapiens
IWPSGITIDFLTD

SEQ ID NO: 5381 - protein, 13 aa, Homo Sapiens
WPSGITIDFLTDK

SEQ ID NO: 5382 - protein, 13 aa, Homo Sapiens
PSGITIDFLTDKL

SEQ ID NO: 5383 - protein, 13 aa, Homo Sapiens
SGITIDFLTDKLY

SEQ ID NO: 5384 - protein, 13 aa, Homo Sapiens
GITIDFLTDKLYW

SEQ ID NO: 5385 - protein, 13 aa, Homo Sapiens
ITIDFLTDKLYWC

SEQ ID NO: 5386 - protein, 13 aa, Homo Sapiens
TIDFLTDKLYWCD

SEQ ID NO: 5387 - protein, 13 aa, Homo Sapiens
IDFLTDKLYWCDA

SEQ ID NO: 5388 - protein, 13 aa, Homo Sapiens
DFLTDKLYWCDAK

SEQ ID NO: 5389 - protein, 13 aa, Homo Sapiens
FLTDKLYWCDAKQ

SEQ ID NO: 5390 - protein, 13 aa, Homo Sapiens
LTDKLYWCDAKQS

SEQ ID NO: 5391 - protein, 13 aa, Homo Sapiens
TDKLYWCDAKQSV

SEQ ID NO: 5392 - protein, 13 aa, Homo Sapiens
DKLYWCDAKQSVI

SEQ ID NO: 5393 - protein, 13 aa, Homo Sapiens
KLYWCDAKQSVIE

SEQ ID NO: 5394 - protein, 13 aa, Homo Sapiens
LYWCDAKQSVIEM

SEQ ID NO: 5395 - protein, 13 aa, Homo Sapiens
YWCDAKQSVIEMA

SEQ ID NO: 5396 - protein, 13 aa, Homo Sapiens
WCDAKQSVIEMAN

SEQ ID NO: 5397 - protein, 13 aa, Homo Sapiens
CDAKQSVIEMANL

SEQ ID NO: 5398 - protein, 13 aa, Homo Sapiens
DAKQSVIEMANLD

SEQ ID NO: 5399 - protein, 13 aa, Homo Sapiens
AKQSVIEMANLDG

SEQ ID NO: 5400 - protein, 13 aa, Homo Sapiens
KQSVIEMANLDGS

SEQ ID NO: 5401 - protein, 13 aa, Homo Sapiens
QSVIEMANLDGSK

SEQ ID NO: 5402 - protein, 13 aa, Homo Sapiens
SVIEMANLDGSKR

SEQ ID NO: 5403 - protein, 13 aa, Homo Sapiens
VIEMANLDGSKRR

SEQ ID NO: 5404 - protein, 13 aa, Homo Sapiens
IEMANLDGSKRRR

SEQ ID NO: 5405 - protein, 13 aa, Homo Sapiens
EMANLDGSKRRRL

SEQ ID NO: 5406 - protein, 13 aa, Homo Sapiens
MANLDGSKRRRLT

SEQ ID NO: 5407 - protein, 13 aa, Homo Sapiens
ANLDGSKRRRLTQ

SEQ ID NO: 5408 - protein, 13 aa, Homo Sapiens
NLDGSKRRRLTQN

SEQ ID NO: 5409 - protein, 13 aa, Homo Sapiens
LDGSKRRRLTQND

SEQ ID NO: 5410 - protein, 13 aa, Homo Sapiens
DGSKRRRLTQNDV

SEQ ID NO: 5411 - protein, 13 aa, Homo Sapiens
GSKRRRLTQNDVG

SEQ ID NO: 5412 - protein, 13 aa, Homo Sapiens
SKRRRLTQNDVGH

SEQ ID NO: 5413 - protein, 13 aa, Homo Sapiens
KRRRLTQNDVGHP

SEQ ID NO: 5414 - protein, 13 aa, Homo Sapiens
RRRLTQNDVGHPF

SEQ ID NO: 5415 - protein, 13 aa, Homo Sapiens
RRLTQNDVGHPFA

SEQ ID NO: 5416 - protein, 13 aa, Homo Sapiens
RLTQNDVGHPFAV

SEQ ID NO: 5417 - protein, 13 aa, Homo Sapiens
LTQNDVGHPFAVA

SEQ ID NO: 5418 - protein, 13 aa, Homo Sapiens
TQNDVGHPFAVAV

SEQ ID NO: 5419 - protein, 13 aa, Homo Sapiens
QNDVGHPFAVAVF

SEQ ID NO: 5420 - protein, 13 aa, Homo Sapiens
NDVGHPFAVAVFE

SEQ ID NO: 5421 - protein, 13 aa, Homo Sapiens
DVGHPFAVAVFED

SEQ ID NO: 5422 - protein, 13 aa, Homo Sapiens
VGHPFAVAVFEDY

SEQ ID NO: 5423 - protein, 13 aa, Homo Sapiens
GHPFAVAVFEDYV

SEQ ID NO: 5424 - protein, 13 aa, Homo Sapiens
HPFAVAVFEDYVW

SEQ ID NO: 5425 - protein, 13 aa, Homo Sapiens
PFAVAVFEDYVWF

SEQ ID NO: 5426 - protein, 13 aa, Homo Sapiens
FAVAVFEDYVWFS

SEQ ID NO: 5427 - protein, 13 aa, Homo Sapiens
AVAVFEDYVWFSD

SEQ ID NO: 5428 - protein, 13 aa, Homo Sapiens
VAVFEDYVWFSDW

SEQ ID NO: 5429 - protein, 13 aa, Homo Sapiens
AVFEDYVWFSDWA

SEQ ID NO: 5430 - protein, 13 aa, Homo Sapiens
VFEDYVWFSDWAM

SEQ ID NO: 5431 - protein, 13 aa, Homo Sapiens
FEDYVWFSDWAMP

SEQ ID NO: 5432 - protein, 13 aa, Homo Sapiens
EDYVWFSDWAMPS

SEQ ID NO: 5433 - protein, 13 aa, Homo Sapiens
DYVWFSDWAMPSV

SEQ ID NO: 5434 - protein, 13 aa, Homo Sapiens
YVWFSDWAMPSVI

SEQ ID NO: 5435 - protein, 13 aa, Homo Sapiens
VWFSDWAMPSVIR

SEQ ID NO: 5436 - protein, 13 aa, Homo Sapiens
WFSDWAMPSVIRV

SEQ ID NO: 5437 - protein, 13 aa, Homo Sapiens
FSDWAMPSVIRVN

SEQ ID NO: 5438 - protein, 13 aa, Homo Sapiens
SDWAMPSVIRVNK

SEQ ID NO: 5439 - protein, 13 aa, Homo Sapiens
DWAMPSVIRVNKR

SEQ ID NO: 5440 - protein, 13 aa, Homo Sapiens
WAMPSVIRVNKRT

SEQ ID NO: 5441 - protein, 13 aa, Homo Sapiens
AMPSVIRVNKRTG

SEQ ID NO: 5442 - protein, 13 aa, Homo Sapiens
MPSVIRVNKRTGK

SEQ ID NO: 5443 - protein, 13 aa, Homo Sapiens
PSVIRVNKRTGKD

SEQ ID NO: 5444 - protein, 13 aa, Homo Sapiens
SVIRVNKRTGKDR

SEQ ID NO: 5445 - protein, 13 aa, Homo Sapiens
VIRVNKRTGKDRV

SEQ ID NO: 5446 - protein, 13 aa, Homo Sapiens
IRVNKRTGKDRVR

SEQ ID NO: 5447 - protein, 13 aa, Homo Sapiens
RVNKRTGKDRVRL

SEQ ID NO: 5448 - protein, 13 aa, Homo Sapiens
VNKRTGKDRVRLQ

SEQ ID NO: 5449 - protein, 13 aa, Homo Sapiens
NKRTGKDRVRLQG

SEQ ID NO: 5450 - protein, 13 aa, Homo Sapiens
KRTGKDRVRLQGS

SEQ ID NO: 5451 - protein, 13 aa, Homo Sapiens
RTGKDRVRLQGSM

SEQ ID NO: 5452 - protein, 13 aa, Homo Sapiens
TGKDRVRLQGSML

SEQ ID NO: 5453 - protein, 13 aa, Homo Sapiens
GKDRVRLQGSMLK

SEQ ID NO: 5454 - protein, 13 aa, Homo Sapiens
KDRVRLQGSMLKP

SEQ ID NO: 5455 - protein, 13 aa, Homo Sapiens
DRVRLQGSMLKPS

SEQ ID NO: 5456 - protein, 13 aa, Homo Sapiens
RVRLQGSMLKPSS

SEQ ID NO: 5457 - protein, 13 aa, Homo Sapiens
VRLQGSMLKPSSL

SEQ ID NO: 5458 - protein, 13 aa, Homo Sapiens
RLQGSMLKPSSLV

SEQ ID NO: 5459 - protein, 13 aa, Homo Sapiens
LQGSMLKPSSLVV

SEQ ID NO: 5460 - protein, 13 aa, Homo Sapiens
QGSMLKPSSLVVV

SEQ ID NO: 5461 - protein, 13 aa, Homo Sapiens
GSMLKPSSLVVVH

SEQ ID NO: 5462 - protein, 13 aa, Homo Sapiens
SMLKPSSLVVVHP

SEQ ID NO: 5463 - protein, 13 aa, Homo Sapiens
MLKPSSLVVVHPL

SEQ ID NO: 5464 - protein, 13 aa, Homo Sapiens
LKPSSLVVVHPLA

SEQ ID NO: 5465 - protein, 13 aa, Homo Sapiens
KPSSLVVVHPLAK

SEQ ID NO: 5466 - protein, 13 aa, Homo Sapiens
PSSLVVVHPLAKP

SEQ ID NO: 5467 - protein, 13 aa, Homo Sapiens
SSLVVVHPLAKPG

SEQ ID NO: 5468 - protein, 13 aa, Homo Sapiens
SLVVVHPLAKPGA

SEQ ID NO: 5469 - protein, 13 aa, Homo Sapiens
LVVVHPLAKPGAD

SEQ ID NO: 5470 - protein, 13 aa, Homo Sapiens
VVVHPLAKPGADP

SEQ ID NO: 5471 - protein, 13 aa, Homo Sapiens
VVHPLAKPGADPC

SEQ ID NO: 5472 - protein, 13 aa, Homo Sapiens
VHPLAKPGADPCL

SEQ ID NO: 5473 - protein, 13 aa, Homo Sapiens
HPLAKPGADPCLY

SEQ ID NO: 5474 - protein, 13 aa, Homo Sapiens
PLAKPGADPCLYQ

SEQ ID NO: 5475 - protein, 13 aa, Homo Sapiens
LAKPGADPCLYQN

SEQ ID NO: 5476 - protein, 13 aa, Homo Sapiens
AKPGADPCLYQNG

SEQ ID NO: 5477 - protein, 13 aa, Homo Sapiens
KPGADPCLYQNGG

SEQ ID NO: 5478 - protein, 13 aa, Homo Sapiens
PGADPCLYQNGGC

SEQ ID NO: 5479 - protein, 13 aa, Homo Sapiens
GADPCLYQNGGCE

SEQ ID NO: 5480 - protein, 13 aa, Homo Sapiens
ADPCLYQNGGCEH

SEQ ID NO: 5481 - protein, 13 aa, Homo Sapiens
DPCLYQNGGCEHI

SEQ ID NO: 5482 - protein, 13 aa, Homo Sapiens
PCLYQNGGCEHIC

SEQ ID NO: 5483 - protein, 13 aa, Homo Sapiens
CLYQNGGCEHICK

SEQ ID NO: 5484 - protein, 13 aa, Homo Sapiens
LYQNGGCEHICKK

SEQ ID NO: 5485 - protein, 13 aa, Homo Sapiens
YQNGGCEHICKKR

SEQ ID NO: 5486 - protein, 13 aa, Homo Sapiens
QNGGCEHICKKRL

SEQ ID NO: 5487 - protein, 13 aa, Homo Sapiens
NGGCEHICKKRLG

SEQ ID NO: 5488 - protein, 13 aa, Homo Sapiens
GGCEHICKKRLGT

SEQ ID NO: 5489 - protein, 13 aa, Homo Sapiens
GCEHICKKRLGTA

SEQ ID NO: 5490 - protein, 13 aa, Homo Sapiens
CEHICKKRLGTAW

SEQ ID NO: 5491 - protein, 13 aa, Homo Sapiens
EHICKKRLGTAWC

SEQ ID NO: 5492 - protein, 13 aa, Homo Sapiens
HICKKRLGTAWCS

SEQ ID NO: 5493 - protein, 13 aa, Homo Sapiens
ICKKRLGTAWCSC

SEQ ID NO: 5494 - protein, 13 aa, Homo Sapiens
CKKRLGTAWCSCR

SEQ ID NO: 5495 - protein, 13 aa, Homo Sapiens
KKRLGTAWCSCRE

SEQ ID NO: 5496 - protein, 13 aa, Homo Sapiens
KRLGTAWCSCREG

SEQ ID NO: 5497 - protein, 13 aa, Homo Sapiens
RLGTAWCSCREGF

SEQ ID NO: 5498 - protein, 13 aa, Homo Sapiens
LGTAWCSCREGFM

SEQ ID NO: 5499 - protein, 13 aa, Homo Sapiens
GTAWCSCREGFMK

SEQ ID NO: 5500 - protein, 13 aa, Homo Sapiens
TAWCSCREGFMKA

SEQ ID NO: 5501 - protein, 13 aa, Homo Sapiens
AWCSCREGFMKAS

SEQ ID NO: 5502 - protein, 13 aa, Homo Sapiens
WCSCREGFMKASD

SEQ ID NO: 5503 - protein, 13 aa, Homo Sapiens
CSCREGFMKASDG

SEQ ID NO: 5504 - protein, 13 aa, Homo Sapiens
SCREGFMKASDGK

SEQ ID NO: 5505 - protein, 13 aa, Homo Sapiens
CREGFMKASDGKT

SEQ ID NO: 5506 - protein, 13 aa, Homo Sapiens
REGFMKASDGKTC

SEQ ID NO: 5507 - protein, 13 aa, Homo Sapiens
EGFMKASDGKTCL

SEQ ID NO: 5508 - protein, 13 aa, Homo Sapiens
GFMKASDGKTCLA

SEQ ID NO: 5509 - protein, 13 aa, Homo Sapiens
FMKASDGKTCLAL

SEQ ID NO: 5510 - protein, 13 aa, Homo Sapiens
MKASDGKTCLALD

SEQ ID NO: 5511 - protein, 13 aa, Homo Sapiens
KASDGKTCLALDG

SEQ ID NO: 5512 - protein, 13 aa, Homo Sapiens
ASDGKTCLALDGH

SEQ ID NO: 5513 - protein, 13 aa, Homo Sapiens
SDGKTCLALDGHQ

SEQ ID NO: 5514 - protein, 13 aa, Homo Sapiens
DGKTCLALDGHQL

SEQ ID NO: 5515 - protein, 13 aa, Homo Sapiens
GKTCLALDGHQLL

SEQ ID NO: 5516 - protein, 13 aa, Homo Sapiens
KTCLALDGHQLLA

SEQ ID NO: 5517 - protein, 13 aa, Homo Sapiens
TCLALDGHQLLAG

SEQ ID NO: 5518 - protein, 13 aa, Homo Sapiens
CLALDGHQLLAGG

SEQ ID NO: 5519 - protein, 13 aa, Homo Sapiens
LALDGHQLLAGGE

SEQ ID NO: 5520 - protein, 13 aa, Homo Sapiens
ALDGHQLLAGGEV

SEQ ID NO: 5521 - protein, 13 aa, Homo Sapiens
LDGHQLLAGGEVD

SEQ ID NO: 5522 - protein, 13 aa, Homo Sapiens
DGHQLLAGGEVDL

SEQ ID NO: 5523 - protein, 13 aa, Homo Sapiens
GHQLLAGGEVDLK

SEQ ID NO: 5524 - protein, 13 aa, Homo Sapiens
HQLLAGGEVDLKN

SEQ ID NO: 5525 - protein, 13 aa, Homo Sapiens
QLLAGGEVDLKNQ

SEQ ID NO: 5526 - protein, 13 aa, Homo Sapiens
LLAGGEVDLKNQV

SEQ ID NO: 5527 - protein, 13 aa, Homo Sapiens
LAGGEVDLKNQVT

SEQ ID NO: 5528 - protein, 13 aa, Homo Sapiens
AGGEVDLKNQVTP

SEQ ID NO: 5529 - protein, 13 aa, Homo Sapiens
GGEVDLKNQVTPL

SEQ ID NO: 5530 - protein, 13 aa, Homo Sapiens
GEVDLKNQVTPLD

SEQ ID NO: 5531 - protein, 13 aa, Homo Sapiens
EVDLKNQVTPLDI

SEQ ID NO: 5532 - protein, 13 aa, Homo Sapiens
VDLKNQVTPLDIL

SEQ ID NO: 5533 - protein, 13 aa, Homo Sapiens
DLKNQVTPLDILS

SEQ ID NO: 5534 - protein, 13 aa, Homo Sapiens
LKNQVTPLDILSK

SEQ ID NO: 5535 - protein, 13 aa, Homo Sapiens
KNQVTPLDILSKT

SEQ ID NO: 5536 - protein, 13 aa, Homo Sapiens
NQVTPLDILSKTR

SEQ ID NO: 5537 - protein, 13 aa, Homo Sapiens
QVTPLDILSKTRV

SEQ ID NO: 5538 - protein, 13 aa, Homo Sapiens
VTPLDILSKTRVS

SEQ ID NO: 5539 - protein, 13 aa, Homo Sapiens
TPLDILSKTRVSE

SEQ ID NO: 5540 - protein, 13 aa, Homo Sapiens
PLDILSKTRVSED

SEQ ID NO: 5541 - protein, 13 aa, Homo Sapiens
LDILSKTRVSEDN

SEQ ID NO: 5542 - protein, 13 aa, Homo Sapiens
DILSKTRVSEDNI

SEQ ID NO: 5543 - protein, 13 aa, Homo Sapiens
ILSKTRVSEDNIT

SEQ ID NO: 5544 - protein, 13 aa, Homo Sapiens
LSKTRVSEDNITE

SEQ ID NO: 5545 - protein, 13 aa, Homo Sapiens
SKTRVSEDNITES

SEQ ID NO: 5546 - protein, 13 aa, Homo Sapiens
KTRVSEDNITESQ

SEQ ID NO: 5547 - protein, 13 aa, Homo Sapiens
TRVSEDNITESQH

SEQ ID NO: 5548 - protein, 13 aa, Homo Sapiens
RVSEDNITESQHM

SEQ ID NO: 5549 - protein, 13 aa, Homo Sapiens
VSEDNITESQHML

SEQ ID NO: 5550 - protein, 13 aa, Homo Sapiens
SEDNITESQHMLV

SEQ ID NO: 5551 - protein, 13 aa, Homo Sapiens
EDNITESQHMLVA

SEQ ID NO: 5552 - protein, 13 aa, Homo Sapiens
DNITESQHMLVAE

SEQ ID NO: 5553 - protein, 13 aa, Homo Sapiens
NITESQHMLVAEI

SEQ ID NO: 5554 - protein, 13 aa, Homo Sapiens
ITESQHMLVAEIM

SEQ ID NO: 5555 - protein, 13 aa, Homo Sapiens
TESQHMLVAEIMV

SEQ ID NO: 5556 - protein, 13 aa, Homo Sapiens
ESQHMLVAEIMVS

SEQ ID NO: 5557 - protein, 13 aa, Homo Sapiens
SQHMLVAEIMVSD

SEQ ID NO: 5558 - protein, 13 aa, Homo Sapiens
QHMLVAEIMVSDQ

SEQ ID NO: 5559 - protein, 13 aa, Homo Sapiens
HMLVAEIMVSDQD

SEQ ID NO: 5560 - protein, 13 aa, Homo Sapiens
MLVAEIMVSDQDD

SEQ ID NO: 5561 - protein, 13 aa, Homo Sapiens
LVAEIMVSDQDDC

SEQ ID NO: 5562 - protein, 13 aa, Homo Sapiens
VAEIMVSDQDDCA

SEQ ID NO: 5563 - protein, 13 aa, Homo Sapiens
AEIMVSDQDDCAP

SEQ ID NO: 5564 - protein, 13 aa, Homo Sapiens
EIMVSDQDDCAPV

SEQ ID NO: 5565 - protein, 13 aa, Homo Sapiens
IMVSDQDDCAPVG

SEQ ID NO: 5566 - protein, 13 aa, Homo Sapiens
MVSDQDDCAPVGC

SEQ ID NO: 5567 - protein, 13 aa, Homo Sapiens
VSDQDDCAPVGCS

SEQ ID NO: 5568 - protein, 13 aa, Homo Sapiens
SDQDDCAPVGCSM

SEQ ID NO: 5569 - protein, 13 aa, Homo Sapiens
DQDDCAPVGCSMY

SEQ ID NO: 5570 - protein, 13 aa, Homo Sapiens
QDDCAPVGCSMYA

SEQ ID NO: 5571 - protein, 13 aa, Homo Sapiens
DDCAPVGCSMYAR

SEQ ID NO: 5572 - protein, 13 aa, Homo Sapiens
DCAPVGCSMYARC

SEQ ID NO: 5573 - protein, 13 aa, Homo Sapiens
CAPVGCSMYARCI

SEQ ID NO: 5574 - protein, 13 aa, Homo Sapiens
APVGCSMYARCIS

SEQ ID NO: 5575 - protein, 13 aa, Homo Sapiens
PVGCSMYARCISE

SEQ ID NO: 5576 - protein, 13 aa, Homo Sapiens
VGCSMYARCISEG

SEQ ID NO: 5577 - protein, 13 aa, Homo Sapiens
GCSMYARCISEGE

SEQ ID NO: 5578 - protein, 13 aa, Homo Sapiens
CSMYARCISEGED

SEQ ID NO: 5579 - protein, 13 aa, Homo Sapiens
SMYARCISEGEDA

SEQ ID NO: 5580 - protein, 13 aa, Homo Sapiens
MYARCISEGEDAT

SEQ ID NO: 5581 - protein, 13 aa, Homo Sapiens
YARCISEGEDATC

SEQ ID NO: 5582 - protein, 13 aa, Homo Sapiens
ARCISEGEDATCQ

SEQ ID NO: 5583 - protein, 13 aa, Homo Sapiens
RCISEGEDATCQC

SEQ ID NO: 5584 - protein, 13 aa, Homo Sapiens
CISEGEDATCQCL

SEQ ID NO: 5585 - protein, 13 aa, Homo Sapiens
ISEGEDATCQCLK

SEQ ID NO: 5586 - protein, 13 aa, Homo Sapiens
SEGEDATCQCLKG

SEQ ID NO: 5587 - protein, 13 aa, Homo Sapiens
EGEDATCQCLKGF

SEQ ID NO: 5588 - protein, 13 aa, Homo Sapiens
GEDATCQCLKGFA

SEQ ID NO: 5589 - protein, 13 aa, Homo Sapiens
EDATCQCLKGFAG

SEQ ID NO: 5590 - protein, 13 aa, Homo Sapiens
DATCQCLKGFAGD

SEQ ID NO: 5591 - protein, 13 aa, Homo Sapiens
ATCQCLKGFAGDG

SEQ ID NO: 5592 - protein, 13 aa, Homo Sapiens
TCQCLKGFAGDGK

SEQ ID NO: 5593 - protein, 13 aa, Homo Sapiens
CQCLKGFAGDGKL

SEQ ID NO: 5594 - protein, 13 aa, Homo Sapiens
QCLKGFAGDGKLC

SEQ ID NO: 5595 - protein, 13 aa, Homo Sapiens
CLKGFAGDGKLCS

SEQ ID NO: 5596 - protein, 13 aa, Homo Sapiens
LKGFAGDGKLCSD

SEQ ID NO: 5597 - protein, 13 aa, Homo Sapiens
KGFAGDGKLCSDI

SEQ ID NO: 5598 - protein, 13 aa, Homo Sapiens
GFAGDGKLCSDID

SEQ ID NO: 5599 - protein, 13 aa, Homo Sapiens
FAGDGKLCSDIDE

SEQ ID NO: 5600 - protein, 13 aa, Homo Sapiens
AGDGKLCSDIDEC

SEQ ID NO: 5601 - protein, 13 aa, Homo Sapiens
GDGKLCSDIDECE

SEQ ID NO: 5602 - protein, 13 aa, Homo Sapiens
DGKLCSDIDECEM

SEQ ID NO: 5603 - protein, 13 aa, Homo Sapiens
GKLCSDIDECEMG

SEQ ID NO: 5604 - protein, 13 aa, Homo Sapiens
KLCSDIDECEMGV

SEQ ID NO: 5605 - protein, 13 aa, Homo Sapiens
LCSDIDECEMGVP

SEQ ID NO: 5606 - protein, 13 aa, Homo Sapiens
CSDIDECEMGVPV

SEQ ID NO: 5607 - protein, 13 aa, Homo Sapiens
SDIDECEMGVPVC

SEQ ID NO: 5608 - protein, 13 aa, Homo Sapiens
DIDECEMGVPVCP

SEQ ID NO: 5609 - protein, 13 aa, Homo Sapiens
IDECEMGVPVCPP

SEQ ID NO: 5610 - protein, 13 aa, Homo Sapiens
DECEMGVPVCPPA

SEQ ID NO: 5611 - protein, 13 aa, Homo Sapiens
ECEMGVPVCPPAS

SEQ ID NO: 5612 - protein, 13 aa, Homo Sapiens
CEMGVPVCPPASS

SEQ ID NO: 5613 - protein, 13 aa, Homo Sapiens
EMGVPVCPPASSK

SEQ ID NO: 5614 - protein, 13 aa, Homo Sapiens
MGVPVCPPASSKC

SEQ ID NO: 5615 - protein, 13 aa, Homo Sapiens
GVPVCPPASSKCI

SEQ ID NO: 5616 - protein, 13 aa, Homo Sapiens
VPVCPPASSKCIN

SEQ ID NO: 5617 - protein, 13 aa, Homo Sapiens
PVCPPASSKCINT

SEQ ID NO: 5618 - protein, 13 aa, Homo Sapiens
VCPPASSKCINTE

SEQ ID NO: 5619 - protein, 13 aa, Homo Sapiens
CPPASSKCINTEG

SEQ ID NO: 5620 - protein, 13 aa, Homo Sapiens
PPASSKCINTEGG

SEQ ID NO: 5621 - protein, 13 aa, Homo Sapiens
PASSKCINTEGGY

SEQ ID NO: 5622 - protein, 13 aa, Homo Sapiens
ASSKCINTEGGYV

SEQ ID NO: 5623 - protein, 13 aa, Homo Sapiens
SSKCINTEGGYVC

SEQ ID NO: 5624 - protein, 13 aa, Homo Sapiens
SKCINTEGGYVCR

SEQ ID NO: 5625 - protein, 13 aa, Homo Sapiens
KCINTEGGYVCRC

SEQ ID NO: 5626 - protein, 13 aa, Homo Sapiens
CINTEGGYVCRCS

SEQ ID NO: 5627 - protein, 13 aa, Homo Sapiens
INTEGGYVCRCSE

SEQ ID NO: 5628 - protein, 13 aa, Homo Sapiens
NTEGGYVCRCSEG

SEQ ID NO: 5629 - protein, 13 aa, Homo Sapiens
TEGGYVCRCSEGY

SEQ ID NO: 5630 - protein, 13 aa, Homo Sapiens
EGGYVCRCSEGYQ

SEQ ID NO: 5631 - protein, 13 aa, Homo Sapiens
GGYVCRCSEGYQG

SEQ ID NO: 5632 - protein, 13 aa, Homo Sapiens
GYVCRCSEGYQGD

SEQ ID NO: 5633 - protein, 13 aa, Homo Sapiens
YVCRCSEGYQGDG

SEQ ID NO: 5634 - protein, 13 aa, Homo Sapiens
VCRCSEGYQGDGI

SEQ ID NO: 5635 - protein, 13 aa, Homo Sapiens
CRCSEGYQGDGIH

SEQ ID NO: 5636 - protein, 13 aa, Homo Sapiens
RCSEGYQGDGIHC

SEQ ID NO: 5637 - protein, 13 aa, Homo Sapiens
CSEGYQGDGIHCL

SEQ ID NO: 5638 - protein, 13 aa, Homo Sapiens
SEGYQGDGIHCLD

SEQ ID NO: 5639 - protein, 13 aa, Homo Sapiens
EGYQGDGIHCLDI

SEQ ID NO: 5640 - protein, 13 aa, Homo Sapiens
GYQGDGIHCLDID

SEQ ID NO: 5641 - protein, 13 aa, Homo Sapiens
YQGDGIHCLDIDE

SEQ ID NO: 5642 - protein, 13 aa, Homo Sapiens
QGDGIHCLDIDEC

SEQ ID NO: 5643 - protein, 13 aa, Homo Sapiens
GDGIHCLDIDECQ

SEQ ID NO: 5644 - protein, 13 aa, Homo Sapiens
DGIHCLDIDECQL

SEQ ID NO: 5645 - protein, 13 aa, Homo Sapiens
GIHCLDIDECQLG

SEQ ID NO: 5646 - protein, 13 aa, Homo Sapiens
IHCLDIDECQLGV

SEQ ID NO: 5647 - protein, 13 aa, Homo Sapiens
HCLDIDECQLGVH

SEQ ID NO: 5648 - protein, 13 aa, Homo Sapiens
CLDIDECQLGVHS

SEQ ID NO: 5649 - protein, 13 aa, Homo Sapiens
LDIDECQLGVHSC

SEQ ID NO: 5650 - protein, 13 aa, Homo Sapiens
DIDECQLGVHSCG

SEQ ID NO: 5651 - protein, 13 aa, Homo Sapiens
IDECQLGVHSCGE

SEQ ID NO: 5652 - protein, 13 aa, Homo Sapiens
DECQLGVHSCGEN

SEQ ID NO: 5653 - protein, 13 aa, Homo Sapiens
ECQLGVHSCGENA

SEQ ID NO: 5654 - protein, 13 aa, Homo Sapiens
CQLGVHSCGENAS

SEQ ID NO: 5655 - protein, 13 aa, Homo Sapiens
QLGVHSCGENASC

SEQ ID NO: 5656 - protein, 13 aa, Homo Sapiens
LGVHSCGENASCT

SEQ ID NO: 5657 - protein, 13 aa, Homo Sapiens
GVHSCGENASCTN

SEQ ID NO: 5658 - protein, 13 aa, Homo Sapiens
VHSCGENASCTNT

SEQ ID NO: 5659 - protein, 13 aa, Homo Sapiens
HSCGENASCTNTE

SEQ ID NO: 5660 - protein, 13 aa, Homo Sapiens
SCGENASCTNTEG

SEQ ID NO: 5661 - protein, 13 aa, Homo Sapiens
CGENASCTNTEGG

SEQ ID NO: 5662 - protein, 13 aa, Homo Sapiens
GENASCTNTEGGY

SEQ ID NO: 5663 - protein, 13 aa, Homo Sapiens
ENASCTNTEGGYT

SEQ ID NO: 5664 - protein, 13 aa, Homo Sapiens
NASCTNTEGGYTC

SEQ ID NO: 5665 - protein, 13 aa, Homo Sapiens
ASCTNTEGGYTCM

SEQ ID NO: 5666 - protein, 13 aa, Homo Sapiens
SCTNTEGGYTCMC

SEQ ID NO: 5667 - protein, 13 aa, Homo Sapiens
CTNTEGGYTCMCA

SEQ ID NO: 5668 - protein, 13 aa, Homo Sapiens
TNTEGGYTCMCAG

SEQ ID NO: 5669 - protein, 13 aa, Homo Sapiens
NTEGGYTCMCAGR

SEQ ID NO: 5670 - protein, 13 aa, Homo Sapiens
TEGGYTCMCAGRL

SEQ ID NO: 5671 - protein, 13 aa, Homo Sapiens
EGGYTCMCAGRLS

SEQ ID NO: 5672 - protein, 13 aa, Homo Sapiens
GGYTCMCAGRLSE

SEQ ID NO: 5673 - protein, 13 aa, Homo Sapiens
GYTCMCAGRLSEP

SEQ ID NO: 5674 - protein, 13 aa, Homo Sapiens
YTCMCAGRLSEPG

SEQ ID NO: 5675 - protein, 13 aa, Homo Sapiens
TCMCAGRLSEPGL

SEQ ID NO: 5676 - protein, 13 aa, Homo Sapiens
CMCAGRLSEPGLI

SEQ ID NO: 5677 - protein, 13 aa, Homo Sapiens
MCAGRLSEPGLIC

SEQ ID NO: 5678 - protein, 13 aa, Homo Sapiens
CAGRLSEPGLICP

SEQ ID NO: 5679 - protein, 13 aa, Homo Sapiens
AGRLSEPGLICPD

SEQ ID NO: 5680 - protein, 13 aa, Homo Sapiens
GRLSEPGLICPDS

SEQ ID NO: 5681 - protein, 13 aa, Homo Sapiens
RLSEPGLICPDST

SEQ ID NO: 5682 - protein, 13 aa, Homo Sapiens
LSEPGLICPDSTP

SEQ ID NO: 5683 - protein, 13 aa, Homo Sapiens
SEPGLICPDSTPP

SEQ ID NO: 5684 - protein, 13 aa, Homo Sapiens
EPGLICPDSTPPP

SEQ ID NO: 5685 - protein, 13 aa, Homo Sapiens
PGLICPDSTPPPH

SEQ ID NO: 5686 - protein, 13 aa, Homo Sapiens
GLICPDSTPPPHL

SEQ ID NO: 5687 - protein, 13 aa, Homo Sapiens
LICPDSTPPPHLR

SEQ ID NO: 5688 - protein, 13 aa, Homo Sapiens
ICPDSTPPPHLRE

SEQ ID NO: 5689 - protein, 13 aa, Homo Sapiens
CPDSTPPPHLRED

SEQ ID NO: 5690 - protein, 13 aa, Homo Sapiens
PDSTPPPHLREDD

SEQ ID NO: 5691 - protein, 13 aa, Homo Sapiens
DSTPPPHLREDDH

SEQ ID NO: 5692 - protein, 13 aa, Homo Sapiens
STPPPHLREDDHH

SEQ ID NO: 5693 - protein, 13 aa, Homo Sapiens
TPPPHLREDDHHY

SEQ ID NO: 5694 - protein, 13 aa, Homo Sapiens
PPPHLREDDHHYS

SEQ ID NO: 5695 - protein, 13 aa, Homo Sapiens
PPHLREDDHHYSV

SEQ ID NO: 5696 - protein, 13 aa, Homo Sapiens
PHLREDDHHYSVR

SEQ ID NO: 5697 - protein, 13 aa, Homo Sapiens
HLREDDHHYSVRN

SEQ ID NO: 5698 - protein, 13 aa, Homo Sapiens
LREDDHHYSVRNS

SEQ ID NO: 5699 - protein, 13 aa, Homo Sapiens
REDDHHYSVRNSD

SEQ ID NO: 5700 - protein, 13 aa, Homo Sapiens
EDDHHYSVRNSDS

SEQ ID NO: 5701 - protein, 13 aa, Homo Sapiens
DDHHYSVRNSDSE

SEQ ID NO: 5702 - protein, 13 aa, Homo Sapiens
DHHYSVRNSDSEC

SEQ ID NO: 5703 - protein, 13 aa, Homo Sapiens
HHYSVRNSDSECP

SEQ ID NO: 5704 - protein, 13 aa, Homo Sapiens
HYSVRNSDSECPL

SEQ ID NO: 5705 - protein, 13 aa, Homo Sapiens
YSVRNSDSECPLS

SEQ ID NO: 5706 - protein, 13 aa, Homo Sapiens
SVRNSDSECPLSH

SEQ ID NO: 5707 - protein, 13 aa, Homo Sapiens
VRNSDSECPLSHD

SEQ ID NO: 5708 - protein, 13 aa, Homo Sapiens
RNSDSECPLSHDG

SEQ ID NO: 5709 - protein, 13 aa, Homo Sapiens
NSDSECPLSHDGY

SEQ ID NO: 5710 - protein, 13 aa, Homo Sapiens
SDSECPLSHDGYC

SEQ ID NO: 5711 - protein, 13 aa, Homo Sapiens
DSECPLSHDGYCL

SEQ ID NO: 5712 - protein, 13 aa, Homo Sapiens
SECPLSHDGYCLH

SEQ ID NO: 5713 - protein, 13 aa, Homo Sapiens
ECPLSHDGYCLHD

SEQ ID NO: 5714 - protein, 13 aa, Homo Sapiens
CPLSHDGYCLHDG

SEQ ID NO: 5715 - protein, 13 aa, Homo Sapiens
PLSHDGYCLHDGV

SEQ ID NO: 5716 - protein, 13 aa, Homo Sapiens
LSHDGYCLHDGVC

SEQ ID NO: 5717 - protein, 13 aa, Homo Sapiens
SHDGYCLHDGVCM

SEQ ID NO: 5718 - protein, 13 aa, Homo Sapiens
HDGYCLHDGVCMY

SEQ ID NO: 5719 - protein, 13 aa, Homo Sapiens
DGYCLHDGVCMYI

SEQ ID NO: 5720 - protein, 13 aa, Homo Sapiens
GYCLHDGVCMYIE

SEQ ID NO: 5721 - protein, 13 aa, Homo Sapiens
YCLHDGVCMYIEA

SEQ ID NO: 5722 - protein, 13 aa, Homo Sapiens
CLHDGVCMYIEAL

SEQ ID NO: 5723 - protein, 13 aa, Homo Sapiens
LHDGVCMYIEALD

SEQ ID NO: 5724 - protein, 13 aa, Homo Sapiens
HDGVCMYIEALDK

SEQ ID NO: 5725 - protein, 13 aa, Homo Sapiens
DGVCMYIEALDKY

SEQ ID NO: 5726 - protein, 13 aa, Homo Sapiens
GVCMYIEALDKYA

SEQ ID NO: 5727 - protein, 13 aa, Homo Sapiens
VCMYIEALDKYAC

SEQ ID NO: 5728 - protein, 13 aa, Homo Sapiens
CMYIEALDKYACN

SEQ ID NO: 5729 - protein, 13 aa, Homo Sapiens
MYIEALDKYACNC

SEQ ID NO: 5730 - protein, 13 aa, Homo Sapiens
YIEALDKYACNCV

SEQ ID NO: 5731 - protein, 13 aa, Homo Sapiens
IEALDKYACNCVV

SEQ ID NO: 5732 - protein, 13 aa, Homo Sapiens
EALDKYACNCVVG

SEQ ID NO: 5733 - protein, 13 aa, Homo Sapiens
ALDKYACNCVVGY

SEQ ID NO: 5734 - protein, 13 aa, Homo Sapiens
LDKYACNCVVGYI

SEQ ID NO: 5735 - protein, 13 aa, Homo Sapiens
DKYACNCVVGYIG

SEQ ID NO: 5736 - protein, 13 aa, Homo Sapiens
KYACNCVVGYIGE

SEQ ID NO: 5737 - protein, 13 aa, Homo Sapiens
YACNCVVGYIGER

SEQ ID NO: 5738 - protein, 13 aa, Homo Sapiens
ACNCVVGYIGERC

SEQ ID NO: 5739 - protein, 13 aa, Homo Sapiens
CNCVVGYIGERCQ

SEQ ID NO: 5740 - protein, 13 aa, Homo Sapiens
NCVVGYIGERCQY

SEQ ID NO: 5741 - protein, 13 aa, Homo Sapiens
CVVGYIGERCQYR

SEQ ID NO: 5742 - protein, 13 aa, Homo Sapiens
VVGYIGERCQYRD

SEQ ID NO: 5743 - protein, 13 aa, Homo Sapiens
VGYIGERCQYRDL

SEQ ID NO: 5744 - protein, 13 aa, Homo Sapiens
GYIGERCQYRDLK

SEQ ID NO: 5745 - protein, 13 aa, Homo Sapiens
YIGERCQYRDLKW

SEQ ID NO: 5746 - protein, 13 aa, Homo Sapiens
IGERCQYRDLKWW

SEQ ID NO: 5747 - protein, 13 aa, Homo Sapiens
GERCQYRDLKWWE

SEQ ID NO: 5748 - protein, 13 aa, Homo Sapiens
ERCQYRDLKWWEL

SEQ ID NO: 5749 - protein, 13 aa, Homo Sapiens
RCQYRDLKWWELR

SEQ ID NO: 5750 - protein, 13 aa, Homo Sapiens
CQYRDLKWWELRH

SEQ ID NO: 5751 - protein, 13 aa, Homo Sapiens
QYRDLKWWELRHA

SEQ ID NO: 5752 - protein, 13 aa, Homo Sapiens
YRDLKWWELRHAG

SEQ ID NO: 5753 - protein, 13 aa, Homo Sapiens
RDLKWWELRHAGH

SEQ ID NO: 5754 - protein, 13 aa, Homo Sapiens
DLKWWELRHAGHG

SEQ ID NO: 5755 - protein, 13 aa, Homo Sapiens
LKWWELRHAGHGQ

SEQ ID NO: 5756 - protein, 13 aa, Homo Sapiens
KWWELRHAGHGQQ

SEQ ID NO: 5757 - protein, 13 aa, Homo Sapiens
WWELRHAGHGQQQ

SEQ ID NO: 5758 - protein, 13 aa, Homo Sapiens
WELRHAGHGQQQK

SEQ ID NO: 5759 - protein, 13 aa, Homo Sapiens
ELRHAGHGQQQKV

SEQ ID NO: 5760 - protein, 13 aa, Homo Sapiens
LRHAGHGQQQKVI

SEQ ID NO: 5761 - protein, 13 aa, Homo Sapiens
RHAGHGQQQKVIV

SEQ ID NO: 5762 - protein, 13 aa, Homo Sapiens
HAGHGQQQKVIVV

SEQ ID NO: 5763 - protein, 13 aa, Homo Sapiens
AGHGQQQKVIVVA

SEQ ID NO: 5764 - protein, 13 aa, Homo Sapiens
GHGQQQKVIVVAV

SEQ ID NO: 5765 - protein, 13 aa, Homo Sapiens
HGQQQKVIVVAVC

SEQ ID NO: 5766 - protein, 13 aa, Homo Sapiens
GQQQKVIVVAVCV

SEQ ID NO: 5767 - protein, 13 aa, Homo Sapiens
QQQKVIVVAVCVV

SEQ ID NO: 5768 - protein, 13 aa, Homo Sapiens
QQKVIVVAVCVVV

SEQ ID NO: 5769 - protein, 13 aa, Homo Sapiens
QKVIVVAVCVVVL

SEQ ID NO: 5770 - protein, 13 aa, Homo Sapiens
KVIVVAVCVVVLV

SEQ ID NO: 5771 - protein, 13 aa, Homo Sapiens
VIVVAVCVVVLVM

SEQ ID NO: 5772 - protein, 13 aa, Homo Sapiens
IVVAVCVVVLVML

SEQ ID NO: 5773 - protein, 13 aa, Homo Sapiens
VVAVCVVVLVMLL

SEQ ID NO: 5774 - protein, 13 aa, Homo Sapiens
VAVCVVVLVMLLL

SEQ ID NO: 5775 - protein, 13 aa, Homo Sapiens
AVCVVVLVMLLLL

SEQ ID NO: 5776 - protein, 13 aa, Homo Sapiens
VCVVVLVMLLLLS

SEQ ID NO: 5777 - protein, 13 aa, Homo Sapiens
CVVVLVMLLLLSL

SEQ ID NO: 5778 - protein, 13 aa, Homo Sapiens
VVVLVMLLLLSLW

SEQ ID NO: 5779 - protein, 13 aa, Homo Sapiens
VVLVMLLLLSLWG

SEQ ID NO: 5780 - protein, 13 aa, Homo Sapiens
VLVMLLLLSLWGA

SEQ ID NO: 5781 - protein, 13 aa, Homo Sapiens
LVMLLLLSLWGAH

SEQ ID NO: 5782 - protein, 13 aa, Homo Sapiens
VMLLLLSLWGAHY

SEQ ID NO: 5783 - protein, 13 aa, Homo Sapiens
MLLLLSLWGAHYY

SEQ ID NO: 5784 - protein, 13 aa, Homo Sapiens
LLLLSLWGAHYYR

SEQ ID NO: 5785 - protein, 13 aa, Homo Sapiens
LLLSLWGAHYYRT

SEQ ID NO: 5786 - protein, 13 aa, Homo Sapiens
LLSLWGAHYYRTQ

SEQ ID NO: 5787 - protein, 13 aa, Homo Sapiens
LSLWGAHYYRTQK

SEQ ID NO: 5788 - protein, 13 aa, Homo Sapiens
SLWGAHYYRTQKL

SEQ ID NO: 5789 - protein, 13 aa, Homo Sapiens
LWGAHYYRTQKLL

SEQ ID NO: 5790 - protein, 13 aa, Homo Sapiens
WGAHYYRTQKLLS

SEQ ID NO: 5791 - protein, 13 aa, Homo Sapiens
GAHYYRTQKLLSK

SEQ ID NO: 5792 - protein, 13 aa, Homo Sapiens
AHYYRTQKLLSKN

SEQ ID NO: 5793 - protein, 13 aa, Homo Sapiens
HYYRTQKLLSKNP

SEQ ID NO: 5794 - protein, 13 aa, Homo Sapiens
YYRTQKLLSKNPK

SEQ ID NO: 5795 - protein, 13 aa, Homo Sapiens
YRTQKLLSKNPKN

SEQ ID NO: 5796 - protein, 13 aa, Homo Sapiens
RTQKLLSKNPKNP

SEQ ID NO: 5797 - protein, 13 aa, Homo Sapiens
TQKLLSKNPKNPY

SEQ ID NO: 5798 - protein, 13 aa, Homo Sapiens
QKLLSKNPKNPYE

SEQ ID NO: 5799 - protein, 13 aa, Homo Sapiens
KLLSKNPKNPYEE

SEQ ID NO: 5800 - protein, 13 aa, Homo Sapiens
LLSKNPKNPYEES

SEQ ID NO: 5801 - protein, 13 aa, Homo Sapiens
LSKNPKNPYEESS

SEQ ID NO: 5802 - protein, 13 aa, Homo Sapiens
SKNPKNPYEESSR

SEQ ID NO: 5803 - protein, 13 aa, Homo Sapiens
KNPKNPYEESSRD

SEQ ID NO: 5804 - protein, 13 aa, Homo Sapiens
NPKNPYEESSRDV

SEQ ID NO: 5805 - protein, 13 aa, Homo Sapiens
PKNPYEESSRDVR

SEQ ID NO: 5806 - protein, 13 aa, Homo Sapiens
KNPYEESSRDVRS

SEQ ID NO: 5807 - protein, 13 aa, Homo Sapiens
NPYEESSRDVRSR

SEQ ID NO: 5808 - protein, 13 aa, Homo Sapiens
PYEESSRDVRSRR

SEQ ID NO: 5809 - protein, 13 aa, Homo Sapiens
YEESSRDVRSRRP

SEQ ID NO: 5810 - protein, 13 aa, Homo Sapiens
EESSRDVRSRRPA

SEQ ID NO: 5811 - protein, 13 aa, Homo Sapiens
ESSRDVRSRRPAD

SEQ ID NO: 5812 - protein, 13 aa, Homo Sapiens
SSRDVRSRRPADT

SEQ ID NO: 5813 - protein, 13 aa, Homo Sapiens
SRDVRSRRPADTE

SEQ ID NO: 5814 - protein, 13 aa, Homo Sapiens
RDVRSRRPADTED

SEQ ID NO: 5815 - protein, 13 aa, Homo Sapiens
DVRSRRPADTEDG

SEQ ID NO: 5816 - protein, 13 aa, Homo Sapiens
VRSRRPADTEDGM

SEQ ID NO: 5817 - protein, 13 aa, Homo Sapiens
RSRRPADTEDGMS

SEQ ID NO: 5818 - protein, 13 aa, Homo Sapiens
SRRPADTEDGMSS

SEQ ID NO: 5819 - protein, 13 aa, Homo Sapiens
RRPADTEDGMSSC

SEQ ID NO: 5820 - protein, 13 aa, Homo Sapiens
RPADTEDGMSSCP

SEQ ID NO: 5821 - protein, 13 aa, Homo Sapiens
PADTEDGMSSCPQ

SEQ ID NO: 5822 - protein, 13 aa, Homo Sapiens
ADTEDGMSSCPQP

SEQ ID NO: 5823 - protein, 13 aa, Homo Sapiens
DTEDGMSSCPQPW

SEQ ID NO: 5824 - protein, 13 aa, Homo Sapiens
TEDGMSSCPQPWF

SEQ ID NO: 5825 - protein, 13 aa, Homo Sapiens
EDGMSSCPQPWFV

SEQ ID NO: 5826 - protein, 13 aa, Homo Sapiens
DGMSSCPQPWFVV

SEQ ID NO: 5827 - protein, 13 aa, Homo Sapiens
GMSSCPQPWFVVI

SEQ ID NO: 5828 - protein, 13 aa, Homo Sapiens
MSSCPQPWFVVIK

SEQ ID NO: 5829 - protein, 13 aa, Homo Sapiens
SSCPQPWFVVIKE

SEQ ID NO: 5830 - protein, 13 aa, Homo Sapiens
SCPQPWFVVIKEH

SEQ ID NO: 5831 - protein, 13 aa, Homo Sapiens
CPQPWFVVIKEHQ

SEQ ID NO: 5832 - protein, 13 aa, Homo Sapiens
PQPWFVVIKEHQD

SEQ ID NO: 5833 - protein, 13 aa, Homo Sapiens
QPWFVVIKEHQDL

SEQ ID NO: 5834 - protein, 13 aa, Homo Sapiens
PWFVVIKEHQDLK

SEQ ID NO: 5835 - protein, 13 aa, Homo Sapiens
WFVVIKEHQDLKN

SEQ ID NO: 5836 - protein, 13 aa, Homo Sapiens
FVVIKEHQDLKNG

SEQ ID NO: 5837 - protein, 13 aa, Homo Sapiens
VVIKEHQDLKNGG

SEQ ID NO: 5838 - protein, 13 aa, Homo Sapiens
VIKEHQDLKNGGQ

SEQ ID NO: 5839 - protein, 13 aa, Homo Sapiens
IKEHQDLKNGGQP

SEQ ID NO: 5840 - protein, 13 aa, Homo Sapiens
KEHQDLKNGGQPV

SEQ ID NO: 5841 - protein, 13 aa, Homo Sapiens
EHQDLKNGGQPVA

SEQ ID NO: 5842 - protein, 13 aa, Homo Sapiens
HQDLKNGGQPVAG

SEQ ID NO: 5843 - protein, 13 aa, Homo Sapiens
QDLKNGGQPVAGE

SEQ ID NO: 5844 - protein, 13 aa, Homo Sapiens
DLKNGGQPVAGED

SEQ ID NO: 5845 - protein, 13 aa, Homo Sapiens
LKNGGQPVAGEDG

SEQ ID NO: 5846 - protein, 13 aa, Homo Sapiens
KNGGQPVAGEDGQ

SEQ ID NO: 5847 - protein, 13 aa, Homo Sapiens
NGGQPVAGEDGQA

SEQ ID NO: 5848 - protein, 13 aa, Homo Sapiens
GGQPVAGEDGQAA

SEQ ID NO: 5849 - protein, 13 aa, Homo Sapiens
GQPVAGEDGQAAD

SEQ ID NO: 5850 - protein, 13 aa, Homo Sapiens
QPVAGEDGQAADG

SEQ ID NO: 5851 - protein, 13 aa, Homo Sapiens
PVAGEDGQAADGS

SEQ ID NO: 5852 - protein, 13 aa, Homo Sapiens
VAGEDGQAADGSM

SEQ ID NO: 5853 - protein, 13 aa, Homo Sapiens
AGEDGQAADGSMQ

SEQ ID NO: 5854 - protein, 13 aa, Homo Sapiens
GEDGQAADGSMQP

SEQ ID NO: 5855 - protein, 13 aa, Homo Sapiens
EDGQAADGSMQPT

SEQ ID NO: 5856 - protein, 13 aa, Homo Sapiens
DGQAADGSMQPTS

SEQ ID NO: 5857 - protein, 13 aa, Homo Sapiens
GQAADGSMQPTSW

SEQ ID NO: 5858 - protein, 13 aa, Homo Sapiens
QAADGSMQPTSWR

SEQ ID NO: 5859 - protein, 13 aa, Homo Sapiens
AADGSMQPTSWRQ

SEQ ID NO: 5860 - protein, 13 aa, Homo Sapiens
ADGSMQPTSWRQE

SEQ ID NO: 5861 - protein, 13 aa, Homo Sapiens
DGSMQPTSWRQEP

SEQ ID NO: 5862 - protein, 13 aa, Homo Sapiens
GSMQPTSWRQEPQ

SEQ ID NO: 5863 - protein, 13 aa, Homo Sapiens
SMQPTSWRQEPQL

SEQ ID NO: 5864 - protein, 13 aa, Homo Sapiens
MQPTSWRQEPQLC

SEQ ID NO: 5865 - protein, 13 aa, Homo Sapiens
QPTSWRQEPQLCG

SEQ ID NO: 5866 - protein, 13 aa, Homo Sapiens
PTSWRQEPQLCGM

SEQ ID NO: 5867 - protein, 13 aa, Homo Sapiens
TSWRQEPQLCGMG

SEQ ID NO: 5868 - protein, 13 aa, Homo Sapiens
SWRQEPQLCGMGT

SEQ ID NO: 5869 - protein, 13 aa, Homo Sapiens
WRQEPQLCGMGTE

SEQ ID NO: 5870 - protein, 13 aa, Homo Sapiens
RQEPQLCGMGTEQ

SEQ ID NO: 5871 - protein, 13 aa, Homo Sapiens
QEPQLCGMGTEQG

SEQ ID NO: 5872 - protein, 13 aa, Homo Sapiens
EPQLCGMGTEQGC

SEQ ID NO: 5873 - protein, 13 aa, Homo Sapiens
PQLCGMGTEQGCW

SEQ ID NO: 5874 - protein, 13 aa, Homo Sapiens
QLCGMGTEQGCWI

SEQ ID NO: 5875 - protein, 13 aa, Homo Sapiens
LCGMGTEQGCWIP

SEQ ID NO: 5876 - protein, 13 aa, Homo Sapiens
CGMGTEQGCWIPV

SEQ ID NO: 5877 - protein, 13 aa, Homo Sapiens
GMGTEQGCWIPVS

SEQ ID NO: 5878 - protein, 13 aa, Homo Sapiens
MGTEQGCWIPVSS

SEQ ID NO: 5879 - protein, 13 aa, Homo Sapiens
GTEQGCWIPVSSD

SEQ ID NO: 5880 - protein, 13 aa, Homo Sapiens
TEQGCWIPVSSDK

SEQ ID NO: 5881 - protein, 13 aa, Homo Sapiens
EQGCWIPVSSDKG

SEQ ID NO: 5882 - protein, 13 aa, Homo Sapiens
QGCWIPVSSDKGS

SEQ ID NO: 5883 - protein, 13 aa, Homo Sapiens
GCWIPVSSDKGSC

SEQ ID NO: 5884 - protein, 13 aa, Homo Sapiens
CWIPVSSDKGSCP

SEQ ID NO: 5885 - protein, 13 aa, Homo Sapiens
WIPVSSDKGSCPQ

SEQ ID NO: 5886 - protein, 13 aa, Homo Sapiens
IPVSSDKGSCPQV

SEQ ID NO: 5887 - protein, 13 aa, Homo Sapiens
PVSSDKGSCPQVM

SEQ ID NO: 5888 - protein, 13 aa, Homo Sapiens
VSSDKGSCPQVME

SEQ ID NO: 5889 - protein, 13 aa, Homo Sapiens
SSDKGSCPQVMER

SEQ ID NO: 5890 - protein, 13 aa, Homo Sapiens
SDKGSCPQVMERS

SEQ ID NO: 5891 - protein, 13 aa, Homo Sapiens
DKGSCPQVMERSF

SEQ ID NO: 5892 - protein, 13 aa, Homo Sapiens
KGSCPQVMERSFH

SEQ ID NO: 5893 - protein, 13 aa, Homo Sapiens
GSCPQVMERSFHM

SEQ ID NO: 5894 - protein, 13 aa, Homo Sapiens
SCPQVMERSFHMP

SEQ ID NO: 5895 - protein, 13 aa, Homo Sapiens
CPQVMERSFHMPS

SEQ ID NO: 5896 - protein, 13 aa, Homo Sapiens
PQVMERSFHMPSY

SEQ ID NO: 5897 - protein, 13 aa, Homo Sapiens
QVMERSFHMPSYG

SEQ ID NO: 5898 - protein, 13 aa, Homo Sapiens
VMERSFHMPSYGT

SEQ ID NO: 5899 - protein, 13 aa, Homo Sapiens
MERSFHMPSYGTQ

SEQ ID NO: 5900 - protein, 13 aa, Homo Sapiens
ERSFHMPSYGTQT

SEQ ID NO: 5901 - protein, 13 aa, Homo Sapiens
RSFHMPSYGTQTL

SEQ ID NO: 5902 - protein, 13 aa, Homo Sapiens
SFHMPSYGTQTLE

SEQ ID NO: 5903 - protein, 13 aa, Homo Sapiens
FHMPSYGTQTLEG

SEQ ID NO: 5904 - protein, 13 aa, Homo Sapiens
HMPSYGTQTLEGG

SEQ ID NO: 5905 - protein, 13 aa, Homo Sapiens
MPSYGTQTLEGGV

SEQ ID NO: 5906 - protein, 13 aa, Homo Sapiens
PSYGTQTLEGGVE

SEQ ID NO: 5907 - protein, 13 aa, Homo Sapiens
SYGTQTLEGGVEK

SEQ ID NO: 5908 - protein, 13 aa, Homo Sapiens
YGTQTLEGGVEKP

SEQ ID NO: 5909 - protein, 13 aa, Homo Sapiens
GTQTLEGGVEKPH

SEQ ID NO: 5910 - protein, 13 aa, Homo Sapiens
TQTLEGGVEKPHS

SEQ ID NO: 5911 - protein, 13 aa, Homo Sapiens
QTLEGGVEKPHSL

SEQ ID NO: 5912 - protein, 13 aa, Homo Sapiens
TLEGGVEKPHSLL

SEQ ID NO: 5913 - protein, 13 aa, Homo Sapiens
LEGGVEKPHSLLS

SEQ ID NO: 5914 - protein, 13 aa, Homo Sapiens
EGGVEKPHSLLSA

SEQ ID NO: 5915 - protein, 13 aa, Homo Sapiens
GGVEKPHSLLSAN

SEQ ID NO: 5916 - protein, 13 aa, Homo Sapiens
GVEKPHSLLSANP

SEQ ID NO: 5917 - protein, 13 aa, Homo Sapiens
VEKPHSLLSANPL

SEQ ID NO: 5918 - protein, 13 aa, Homo Sapiens
EKPHSLLSANPLW

SEQ ID NO: 5919 - protein, 13 aa, Homo Sapiens
KPHSLLSANPLWQ

SEQ ID NO: 5920 - protein, 13 aa, Homo Sapiens
PHSLLSANPLWQQ

SEQ ID NO: 5921 - protein, 13 aa, Homo Sapiens
HSLLSANPLWQQR

SEQ ID NO: 5922 - protein, 13 aa, Homo Sapiens
SLLSANPLWQQRA

SEQ ID NO: 5923 - protein, 13 aa, Homo Sapiens
LLSANPLWQQRAL

SEQ ID NO: 5924 - protein, 13 aa, Homo Sapiens
LSANPLWQQRALD

SEQ ID NO: 5925 - protein, 13 aa, Homo Sapiens
SANPLWQQRALDP

SEQ ID NO: 5926 - protein, 13 aa, Homo Sapiens
ANPLWQQRALDPP

SEQ ID NO: 5927 - protein, 13 aa, Homo Sapiens
NPLWQQRALDPPH

SEQ ID NO: 5928 - protein, 13 aa, Homo Sapiens
PLWQQRALDPPHQ

SEQ ID NO: 5929 - protein, 13 aa, Homo Sapiens
LWQQRALDPPHQM

SEQ ID NO: 5930 - protein, 13 aa, Homo Sapiens
WQQRALDPPHQME

SEQ ID NO: 5931 - protein, 13 aa, Homo Sapiens
QQRALDPPHQMEL

SEQ ID NO: 5932 - protein, 13 aa, Homo Sapiens
QRALDPPHQMELT

SEQ ID NO: 5933 - protein, 13 aa, Homo Sapiens
RALDPPHQMELTQ

SEQ ID NO: 5934 - protein, 14 aa, Homo Sapiens
MLLTLIILLPVVSK

SEQ ID NO: 5935 - protein, 14 aa, Homo Sapiens
LLTLIILLPVVSKF

SEQ ID NO: 5936 - protein, 14 aa, Homo Sapiens
LTLIILLPVVSKFS

SEQ ID NO: 5937 - protein, 14 aa, Homo Sapiens
TLIILLPVVSKFSF

SEQ ID NO: 5938 - protein, 14 aa, Homo Sapiens
LIILLPVVSKFSFV

SEQ ID NO: 5939 - protein, 14 aa, Homo Sapiens
IILLPVVSKFSFVS

SEQ ID NO: 5940 - protein, 14 aa, Homo Sapiens
ILLPVVSKFSFVSL

SEQ ID NO: 5941 - protein, 14 aa, Homo Sapiens
LLPVVSKFSFVSLS

SEQ ID NO: 5942 - protein, 14 aa, Homo Sapiens
LPVVSKFSFVSLSA

SEQ ID NO: 5943 - protein, 14 aa, Homo Sapiens
PVVSKFSFVSLSAP

SEQ ID NO: 5944 - protein, 14 aa, Homo Sapiens
VVSKFSFVSLSAPQ

SEQ ID NO: 5945 - protein, 14 aa, Homo Sapiens
VSKFSFVSLSAPQH

SEQ ID NO: 5946 - protein, 14 aa, Homo Sapiens
SKFSFVSLSAPQHW

SEQ ID NO: 5947 - protein, 14 aa, Homo Sapiens
KFSFVSLSAPQHWS

SEQ ID NO: 5948 - protein, 14 aa, Homo Sapiens
FSFVSLSAPQHWSC

SEQ ID NO: 5949 - protein, 14 aa, Homo Sapiens
SFVSLSAPQHWSCP

SEQ ID NO: 5950 - protein, 14 aa, Homo Sapiens
FVSLSAPQHWSCPE

SEQ ID NO: 5951 - protein, 14 aa, Homo Sapiens
VSLSAPQHWSCPEG

SEQ ID NO: 5952 - protein, 14 aa, Homo Sapiens
SLSAPQHWSCPEGT

SEQ ID NO: 5953 - protein, 14 aa, Homo Sapiens
LSAPQHWSCPEGTL

SEQ ID NO: 5954 - protein, 14 aa, Homo Sapiens
SAPQHWSCPEGTLA

SEQ ID NO: 5955 - protein, 14 aa, Homo Sapiens
APQHWSCPEGTLAG

SEQ ID NO: 5956 - protein, 14 aa, Homo Sapiens
PQHWSCPEGTLAGN

SEQ ID NO: 5957 - protein, 14 aa, Homo Sapiens
QHWSCPEGTLAGNG

SEQ ID NO: 5958 - protein, 14 aa, Homo Sapiens
HWSCPEGTLAGNGN

SEQ ID NO: 5959 - protein, 14 aa, Homo Sapiens
WSCPEGTLAGNGNS

SEQ ID NO: 5960 - protein, 14 aa, Homo Sapiens
SCPEGTLAGNGNST

SEQ ID NO: 5961 - protein, 14 aa, Homo Sapiens
CPEGTLAGNGNSTC

SEQ ID NO: 5962 - protein, 14 aa, Homo Sapiens
PEGTLAGNGNSTCV

SEQ ID NO: 5963 - protein, 14 aa, Homo Sapiens
EGTLAGNGNSTCVG

SEQ ID NO: 5964 - protein, 14 aa, Homo Sapiens
GTLAGNGNSTCVGP

SEQ ID NO: 5965 - protein, 14 aa, Homo Sapiens
TLAGNGNSTCVGPA

SEQ ID NO: 5966 - protein, 14 aa, Homo Sapiens
LAGNGNSTCVGPAP

SEQ ID NO: 5967 - protein, 14 aa, Homo Sapiens
AGNGNSTCVGPAPF

SEQ ID NO: 5968 - protein, 14 aa, Homo Sapiens
GNGNSTCVGPAPFL

SEQ ID NO: 5969 - protein, 14 aa, Homo Sapiens
NGNSTCVGPAPFLI

SEQ ID NO: 5970 - protein, 14 aa, Homo Sapiens
GNSTCVGPAPFLIF

SEQ ID NO: 5971 - protein, 14 aa, Homo Sapiens
NSTCVGPAPFLIFS

SEQ ID NO: 5972 - protein, 14 aa, Homo Sapiens
STCVGPAPFLIFSH

SEQ ID NO: 5973 - protein, 14 aa, Homo Sapiens
TCVGPAPFLIFSHG

SEQ ID NO: 5974 - protein, 14 aa, Homo Sapiens
CVGPAPFLIFSHGN

SEQ ID NO: 5975 - protein, 14 aa, Homo Sapiens
VGPAPFLIFSHGNS

SEQ ID NO: 5976 - protein, 14 aa, Homo Sapiens
GPAPFLIFSHGNSI

SEQ ID NO: 5977 - protein, 14 aa, Homo Sapiens
PAPFLIFSHGNSIF

SEQ ID NO: 5978 - protein, 14 aa, Homo Sapiens
APFLIFSHGNSIFR

SEQ ID NO: 5979 - protein, 14 aa, Homo Sapiens
PFLIFSHGNSIFRI

SEQ ID NO: 5980 - protein, 14 aa, Homo Sapiens
FLIFSHGNSIFRID

SEQ ID NO: 5981 - protein, 14 aa, Homo Sapiens
LIFSHGNSIFRIDT

SEQ ID NO: 5982 - protein, 14 aa, Homo Sapiens
IFSHGNSIFRIDTE

SEQ ID NO: 5983 - protein, 14 aa, Homo Sapiens
FSHGNSIFRIDTEG

SEQ ID NO: 5984 - protein, 14 aa, Homo Sapiens
SHGNSIFRIDTEGT

SEQ ID NO: 5985 - protein, 14 aa, Homo Sapiens
HGNSIFRIDTEGTN

SEQ ID NO: 5986 - protein, 14 aa, Homo Sapiens
GNSIFRIDTEGTNY

SEQ ID NO: 5987 - protein, 14 aa, Homo Sapiens
NSIFRIDTEGTNYE

SEQ ID NO: 5988 - protein, 14 aa, Homo Sapiens
SIFRIDTEGTNYEQ

SEQ ID NO: 5989 - protein, 14 aa, Homo Sapiens
IFRIDTEGTNYEQL

SEQ ID NO: 5990 - protein, 14 aa, Homo Sapiens
FRIDTEGTNYEQLV

SEQ ID NO: 5991 - protein, 14 aa, Homo Sapiens
RIDTEGTNYEQLVV

SEQ ID NO: 5992 - protein, 14 aa, Homo Sapiens
IDTEGTNYEQLVVD

SEQ ID NO: 5993 - protein, 14 aa, Homo Sapiens
DTEGTNYEQLVVDA

SEQ ID NO: 5994 - protein, 14 aa, Homo Sapiens
TEGTNYEQLVVDAG

SEQ ID NO: 5995 - protein, 14 aa, Homo Sapiens
EGTNYEQLVVDAGV

SEQ ID NO: 5996 - protein, 14 aa, Homo Sapiens
GTNYEQLVVDAGVS

SEQ ID NO: 5997 - protein, 14 aa, Homo Sapiens
TNYEQLVVDAGVSV

SEQ ID NO: 5998 - protein, 14 aa, Homo Sapiens
NYEQLVVDAGVSVI

SEQ ID NO: 5999 - protein, 14 aa, Homo Sapiens
YEQLVVDAGVSVIM

SEQ ID NO: 6000 - protein, 14 aa, Homo Sapiens
EQLVVDAGVSVIMD

SEQ ID NO: 6001 - protein, 14 aa, Homo Sapiens
QLVVDAGVSVIMDF

SEQ ID NO: 6002 - protein, 14 aa, Homo Sapiens
LVVDAGVSVIMDFH

SEQ ID NO: 6003 - protein, 14 aa, Homo Sapiens
VVDAGVSVIMDFHY

SEQ ID NO: 6004 - protein, 14 aa, Homo Sapiens
VDAGVSVIMDFHYN

SEQ ID NO: 6005 - protein, 14 aa, Homo Sapiens
DAGVSVIMDFHYNE

SEQ ID NO: 6006 - protein, 14 aa, Homo Sapiens
AGVSVIMDFHYNEK

SEQ ID NO: 6007 - protein, 14 aa, Homo Sapiens
GVSVIMDFHYNEKR

SEQ ID NO: 6008 - protein, 14 aa, Homo Sapiens
VSVIMDFHYNEKRI

SEQ ID NO: 6009 - protein, 14 aa, Homo Sapiens
SVIMDFHYNEKRIY

SEQ ID NO: 6010 - protein, 14 aa, Homo Sapiens
VIMDFHYNEKRIYW

SEQ ID NO: 6011 - protein, 14 aa, Homo Sapiens
IMDFHYNEKRIYWV

SEQ ID NO: 6012 - protein, 14 aa, Homo Sapiens
MDFHYNEKRIYWVD

SEQ ID NO: 6013 - protein, 14 aa, Homo Sapiens
DFHYNEKRIYWVDL

SEQ ID NO: 6014 - protein, 14 aa, Homo Sapiens
FHYNEKRIYWVDLE

SEQ ID NO: 6015 - protein, 14 aa, Homo Sapiens
HYNEKRIYWVDLER

SEQ ID NO: 6016 - protein, 14 aa, Homo Sapiens
YNEKRIYWVDLERQ

SEQ ID NO: 6017 - protein, 14 aa, Homo Sapiens
NEKRIYWVDLERQL

SEQ ID NO: 6018 - protein, 14 aa, Homo Sapiens
EKRIYWVDLERQLL

SEQ ID NO: 6019 - protein, 14 aa, Homo Sapiens
KRIYWVDLERQLLQ

SEQ ID NO: 6020 - protein, 14 aa, Homo Sapiens
RIYWVDLERQLLQR

SEQ ID NO: 6021 - protein, 14 aa, Homo Sapiens
IYWVDLERQLLQRV

SEQ ID NO: 6022 - protein, 14 aa, Homo Sapiens
YWVDLERQLLQRVF

SEQ ID NO: 6023 - protein, 14 aa, Homo Sapiens
WVDLERQLLQRVFL

SEQ ID NO: 6024 - protein, 14 aa, Homo Sapiens
VDLERQLLQRVFLN

SEQ ID NO: 6025 - protein, 14 aa, Homo Sapiens
DLERQLLQRVFLNG

SEQ ID NO: 6026 - protein, 14 aa, Homo Sapiens
LERQLLQRVFLNGS

SEQ ID NO: 6027 - protein, 14 aa, Homo Sapiens
ERQLLQRVFLNGSR

SEQ ID NO: 6028 - protein, 14 aa, Homo Sapiens
RQLLQRVFLNGSRQ

SEQ ID NO: 6029 - protein, 14 aa, Homo Sapiens
QLLQRVFLNGSRQE

SEQ ID NO: 6030 - protein, 14 aa, Homo Sapiens
LLQRVFLNGSRQER

SEQ ID NO: 6031 - protein, 14 aa, Homo Sapiens
LQRVFLNGSRQERV

SEQ ID NO: 6032 - protein, 14 aa, Homo Sapiens
QRVFLNGSRQERVC

SEQ ID NO: 6033 - protein, 14 aa, Homo Sapiens
RVFLNGSRQERVCN

SEQ ID NO: 6034 - protein, 14 aa, Homo Sapiens
VFLNGSRQERVCNI

SEQ ID NO: 6035 - protein, 14 aa, Homo Sapiens
FLNGSRQERVCNIE

SEQ ID NO: 6036 - protein, 14 aa, Homo Sapiens
LNGSRQERVCNIEK

SEQ ID NO: 6037 - protein, 14 aa, Homo Sapiens
NGSRQERVCNIEKN

SEQ ID NO: 6038 - protein, 14 aa, Homo Sapiens
GSRQERVCNIEKNV

SEQ ID NO: 6039 - protein, 14 aa, Homo Sapiens
SRQERVCNIEKNVS

SEQ ID NO: 6040 - protein, 14 aa, Homo Sapiens
RQERVCNIEKNVSG

SEQ ID NO: 6041 - protein, 14 aa, Homo Sapiens
QERVCNIEKNVSGM

SEQ ID NO: 6042 - protein, 14 aa, Homo Sapiens
ERVCNIEKNVSGMA

SEQ ID NO: 6043 - protein, 14 aa, Homo Sapiens
RVCNIEKNVSGMAI

SEQ ID NO: 6044 - protein, 14 aa, Homo Sapiens
VCNIEKNVSGMAIN

SEQ ID NO: 6045 - protein, 14 aa, Homo Sapiens
CNIEKNVSGMAINW

SEQ ID NO: 6046 - protein, 14 aa, Homo Sapiens
NIEKNVSGMAINWI

SEQ ID NO: 6047 - protein, 14 aa, Homo Sapiens
IEKNVSGMAINWIN

SEQ ID NO: 6048 - protein, 14 aa, Homo Sapiens
EKNVSGMAINWINE

SEQ ID NO: 6049 - protein, 14 aa, Homo Sapiens
KNVSGMAINWINEE

SEQ ID NO: 6050 - protein, 14 aa, Homo Sapiens
NVSGMAINWINEEV

SEQ ID NO: 6051 - protein, 14 aa, Homo Sapiens
VSGMAINWINEEVI

SEQ ID NO: 6052 - protein, 14 aa, Homo Sapiens
SGMAINWINEEVIW

SEQ ID NO: 6053 - protein, 14 aa, Homo Sapiens
GMAINWINEEVIWS

SEQ ID NO: 6054 - protein, 14 aa, Homo Sapiens
MAINWINEEVIWSN

SEQ ID NO: 6055 - protein, 14 aa, Homo Sapiens
AINWINEEVIWSNQ

SEQ ID NO: 6056 - protein, 14 aa, Homo Sapiens
INWINEEVIWSNQQ

SEQ ID NO: 6057 - protein, 14 aa, Homo Sapiens
NWINEEVIWSNQQE

SEQ ID NO: 6058 - protein, 14 aa, Homo Sapiens
WINEEVIWSNQQEG

SEQ ID NO: 6059 - protein, 14 aa, Homo Sapiens
INEEVIWSNQQEGI

SEQ ID NO: 6060 - protein, 14 aa, Homo Sapiens
NEEVIWSNQQEGII

SEQ ID NO: 6061 - protein, 14 aa, Homo Sapiens
EEVIWSNQQEGIIT

SEQ ID NO: 6062 - protein, 14 aa, Homo Sapiens
EVIWSNQQEGIITV

SEQ ID NO: 6063 - protein, 14 aa, Homo Sapiens
VIWSNQQEGIITVT

SEQ ID NO: 6064 - protein, 14 aa, Homo Sapiens
IWSNQQEGIITVTD

SEQ ID NO: 6065 - protein, 14 aa, Homo Sapiens
WSNQQEGIITVTDM

SEQ ID NO: 6066 - protein, 14 aa, Homo Sapiens
SNQQEGIITVTDMK

SEQ ID NO: 6067 - protein, 14 aa, Homo Sapiens
NQQEGIITVTDMKG

SEQ ID NO: 6068 - protein, 14 aa, Homo Sapiens
QQEGIITVTDMKGN

SEQ ID NO: 6069 - protein, 14 aa, Homo Sapiens
QEGIITVTDMKGNN

SEQ ID NO: 6070 - protein, 14 aa, Homo Sapiens
EGIITVTDMKGNNS

SEQ ID NO: 6071 - protein, 14 aa, Homo Sapiens
GIITVTDMKGNNSH

SEQ ID NO: 6072 - protein, 14 aa, Homo Sapiens
IITVTDMKGNNSHI

SEQ ID NO: 6073 - protein, 14 aa, Homo Sapiens
ITVTDMKGNNSHIL

SEQ ID NO: 6074 - protein, 14 aa, Homo Sapiens
TVTDMKGNNSHILL

SEQ ID NO: 6075 - protein, 14 aa, Homo Sapiens
VTDMKGNNSHILLS

SEQ ID NO: 6076 - protein, 14 aa, Homo Sapiens
TDMKGNNSHILLSA

SEQ ID NO: 6077 - protein, 14 aa, Homo Sapiens
DMKGNNSHILLSAL

SEQ ID NO: 6078 - protein, 14 aa, Homo Sapiens
MKGNNSHILLSALK

SEQ ID NO: 6079 - protein, 14 aa, Homo Sapiens
KGNNSHILLSALKY

SEQ ID NO: 6080 - protein, 14 aa, Homo Sapiens
GNNSHILLSALKYP

SEQ ID NO: 6081 - protein, 14 aa, Homo Sapiens
NNSHILLSALKYPA

SEQ ID NO: 6082 - protein, 14 aa, Homo Sapiens
NSHILLSALKYPAN

SEQ ID NO: 6083 - protein, 14 aa, Homo Sapiens
SHILLSALKYPANV

SEQ ID NO: 6084 - protein, 14 aa, Homo Sapiens
HILLSALKYPANVA

SEQ ID NO: 6085 - protein, 14 aa, Homo Sapiens
ILLSALKYPANVAV

SEQ ID NO: 6086 - protein, 14 aa, Homo Sapiens
LLSALKYPANVAVD

SEQ ID NO: 6087 - protein, 14 aa, Homo Sapiens
LSALKYPANVAVDP

SEQ ID NO: 6088 - protein, 14 aa, Homo Sapiens
SALKYPANVAVDPV

SEQ ID NO: 6089 - protein, 14 aa, Homo Sapiens
ALKYPANVAVDPVE

SEQ ID NO: 6090 - protein, 14 aa, Homo Sapiens
LKYPANVAVDPVER

SEQ ID NO: 6091 - protein, 14 aa, Homo Sapiens
KYPANVAVDPVERF

SEQ ID NO: 6092 - protein, 14 aa, Homo Sapiens
YPANVAVDPVERFI

SEQ ID NO: 6093 - protein, 14 aa, Homo Sapiens
PANVAVDPVERFIF

SEQ ID NO: 6094 - protein, 14 aa, Homo Sapiens
ANVAVDPVERFIFW

SEQ ID NO: 6095 - protein, 14 aa, Homo Sapiens
NVAVDPVERFIFWS

SEQ ID NO: 6096 - protein, 14 aa, Homo Sapiens
VAVDPVERFIFWSS

SEQ ID NO: 6097 - protein, 14 aa, Homo Sapiens
AVDPVERFIFWSSE

SEQ ID NO: 6098 - protein, 14 aa, Homo Sapiens
VDPVERFIFWSSEV

SEQ ID NO: 6099 - protein, 14 aa, Homo Sapiens
DPVERFIFWSSEVA

SEQ ID NO: 6100 - protein, 14 aa, Homo Sapiens
PVERFIFWSSEVAG

SEQ ID NO: 6101 - protein, 14 aa, Homo Sapiens
VERFIFWSSEVAGS

SEQ ID NO: 6102 - protein, 14 aa, Homo Sapiens
ERFIFWSSEVAGSL

SEQ ID NO: 6103 - protein, 14 aa, Homo Sapiens
RFIFWSSEVAGSLY

SEQ ID NO: 6104 - protein, 14 aa, Homo Sapiens
FIFWSSEVAGSLYR

SEQ ID NO: 6105 - protein, 14 aa, Homo Sapiens
IFWSSEVAGSLYRA

SEQ ID NO: 6106 - protein, 14 aa, Homo Sapiens
FWSSEVAGSLYRAD

SEQ ID NO: 6107 - protein, 14 aa, Homo Sapiens
WSSEVAGSLYRADL

SEQ ID NO: 6108 - protein, 14 aa, Homo Sapiens
SSEVAGSLYRADLD

SEQ ID NO: 6109 - protein, 14 aa, Homo Sapiens
SEVAGSLYRADLDG

SEQ ID NO: 6110 - protein, 14 aa, Homo Sapiens
EVAGSLYRADLDGV

SEQ ID NO: 6111 - protein, 14 aa, Homo Sapiens
VAGSLYRADLDGVG

SEQ ID NO: 6112 - protein, 14 aa, Homo Sapiens
AGSLYRADLDGVGV

SEQ ID NO: 6113 - protein, 14 aa, Homo Sapiens
GSLYRADLDGVGVK

SEQ ID NO: 6114 - protein, 14 aa, Homo Sapiens
SLYRADLDGVGVKA

SEQ ID NO: 6115 - protein, 14 aa, Homo Sapiens
LYRADLDGVGVKAL

SEQ ID NO: 6116 - protein, 14 aa, Homo Sapiens
YRADLDGVGVKALL

SEQ ID NO: 6117 - protein, 14 aa, Homo Sapiens
RADLDGVGVKALLE

SEQ ID NO: 6118 - protein, 14 aa, Homo Sapiens
ADLDGVGVKALLET

SEQ ID NO: 6119 - protein, 14 aa, Homo Sapiens
DLDGVGVKALLETS

SEQ ID NO: 6120 - protein, 14 aa, Homo Sapiens
LDGVGVKALLETSE

SEQ ID NO: 6121 - protein, 14 aa, Homo Sapiens
DGVGVKALLETSEK

SEQ ID NO: 6122 - protein, 14 aa, Homo Sapiens
GVGVKALLETSEKI

SEQ ID NO: 6123 - protein, 14 aa, Homo Sapiens
VGVKALLETSEKIT

SEQ ID NO: 6124 - protein, 14 aa, Homo Sapiens
GVKALLETSEKITA

SEQ ID NO: 6125 - protein, 14 aa, Homo Sapiens
VKALLETSEKITAV

SEQ ID NO: 6126 - protein, 14 aa, Homo Sapiens
KALLETSEKITAVS

SEQ ID NO: 6127 - protein, 14 aa, Homo Sapiens
ALLETSEKITAVSL

SEQ ID NO: 6128 - protein, 14 aa, Homo Sapiens
LLETSEKITAVSLD

SEQ ID NO: 6129 - protein, 14 aa, Homo Sapiens
LETSEKITAVSLDV

SEQ ID NO: 6130 - protein, 14 aa, Homo Sapiens
ETSEKITAVSLDVL

SEQ ID NO: 6131 - protein, 14 aa, Homo Sapiens
TSEKITAVSLDVLD

SEQ ID NO: 6132 - protein, 14 aa, Homo Sapiens
SEKITAVSLDVLDK

SEQ ID NO: 6133 - protein, 14 aa, Homo Sapiens
EKITAVSLDVLDKR

SEQ ID NO: 6134 - protein, 14 aa, Homo Sapiens
KITAVSLDVLDKRL

SEQ ID NO: 6135 - protein, 14 aa, Homo Sapiens
ITAVSLDVLDKRLF

SEQ ID NO: 6136 - protein, 14 aa, Homo Sapiens
TAVSLDVLDKRLFW

SEQ ID NO: 6137 - protein, 14 aa, Homo Sapiens
AVSLDVLDKRLFWI

SEQ ID NO: 6138 - protein, 14 aa, Homo Sapiens
VSLDVLDKRLFWIQ

SEQ ID NO: 6139 - protein, 14 aa, Homo Sapiens
SLDVLDKRLFWIQY

SEQ ID NO: 6140 - protein, 14 aa, Homo Sapiens
LDVLDKRLFWIQYN

SEQ ID NO: 6141 - protein, 14 aa, Homo Sapiens
DVLDKRLFWIQYNR

SEQ ID NO: 6142 - protein, 14 aa, Homo Sapiens
VLDKRLFWIQYNRE

SEQ ID NO: 6143 - protein, 14 aa, Homo Sapiens
LDKRLFWIQYNREG

SEQ ID NO: 6144 - protein, 14 aa, Homo Sapiens
DKRLFWIQYNREGS

SEQ ID NO: 6145 - protein, 14 aa, Homo Sapiens
KRLFWIQYNREGSN

SEQ ID NO: 6146 - protein, 14 aa, Homo Sapiens
RLFWIQYNREGSNS

SEQ ID NO: 6147 - protein, 14 aa, Homo Sapiens
LFWIQYNREGSNSL

SEQ ID NO: 6148 - protein, 14 aa, Homo Sapiens
FWIQYNREGSNSLI

SEQ ID NO: 6149 - protein, 14 aa, Homo Sapiens
WIQYNREGSNSLIC

SEQ ID NO: 6150 - protein, 14 aa, Homo Sapiens
IQYNREGSNSLICS

SEQ ID NO: 6151 - protein, 14 aa, Homo Sapiens
QYNREGSNSLICSC

SEQ ID NO: 6152 - protein, 14 aa, Homo Sapiens
YNREGSNSLICSCD

SEQ ID NO: 6153 - protein, 14 aa, Homo Sapiens
NREGSNSLICSCDY

SEQ ID NO: 6154 - protein, 14 aa, Homo Sapiens
REGSNSLICSCDYD

SEQ ID NO: 6155 - protein, 14 aa, Homo Sapiens
EGSNSLICSCDYDG

SEQ ID NO: 6156 - protein, 14 aa, Homo Sapiens
GSNSLICSCDYDGG

SEQ ID NO: 6157 - protein, 14 aa, Homo Sapiens
SNSLICSCDYDGGS

SEQ ID NO: 6158 - protein, 14 aa, Homo Sapiens
NSLICSCDYDGGSV

SEQ ID NO: 6159 - protein, 14 aa, Homo Sapiens
SLICSCDYDGGSVH

SEQ ID NO: 6160 - protein, 14 aa, Homo Sapiens
LICSCDYDGGSVHI

SEQ ID NO: 6161 - protein, 14 aa, Homo Sapiens
ICSCDYDGGSVHIS

SEQ ID NO: 6162 - protein, 14 aa, Homo Sapiens
CSCDYDGGSVHISK

SEQ ID NO: 6163 - protein, 14 aa, Homo Sapiens
SCDYDGGSVHISKH

SEQ ID NO: 6164 - protein, 14 aa, Homo Sapiens
CDYDGGSVHISKHP

SEQ ID NO: 6165 - protein, 14 aa, Homo Sapiens
DYDGGSVHISKHPT

SEQ ID NO: 6166 - protein, 14 aa, Homo Sapiens
YDGGSVHISKHPTQ

SEQ ID NO: 6167 - protein, 14 aa, Homo Sapiens
DGGSVHISKHPTQH

SEQ ID NO: 6168 - protein, 14 aa, Homo Sapiens
GGSVHISKHPTQHN

SEQ ID NO: 6169 - protein, 14 aa, Homo Sapiens
GSVHISKHPTQHNL

SEQ ID NO: 6170 - protein, 14 aa, Homo Sapiens
SVHISKHPTQHNLF

SEQ ID NO: 6171 - protein, 14 aa, Homo Sapiens
VHISKHPTQHNLFA

SEQ ID NO: 6172 - protein, 14 aa, Homo Sapiens
HISKHPTQHNLFAM

SEQ ID NO: 6173 - protein, 14 aa, Homo Sapiens
ISKHPTQHNLFAMS

SEQ ID NO: 6174 - protein, 14 aa, Homo Sapiens
SKHPTQHNLFAMSL

SEQ ID NO: 6175 - protein, 14 aa, Homo Sapiens
KHPTQHNLFAMSLF

SEQ ID NO: 6176 - protein, 14 aa, Homo Sapiens
HPTQHNLFAMSLFG

SEQ ID NO: 6177 - protein, 14 aa, Homo Sapiens
PTQHNLFAMSLFGD

SEQ ID NO: 6178 - protein, 14 aa, Homo Sapiens
TQHNLFAMSLFGDR

SEQ ID NO: 6179 - protein, 14 aa, Homo Sapiens
QHNLFAMSLFGDRI

SEQ ID NO: 6180 - protein, 14 aa, Homo Sapiens
HNLFAMSLFGDRIF

SEQ ID NO: 6181 - protein, 14 aa, Homo Sapiens
NLFAMSLFGDRIFY

SEQ ID NO: 6182 - protein, 14 aa, Homo Sapiens
LFAMSLFGDRIFYS

SEQ ID NO: 6183 - protein, 14 aa, Homo Sapiens
FAMSLFGDRIFYST

SEQ ID NO: 6184 - protein, 14 aa, Homo Sapiens
AMSLFGDRIFYSTW

SEQ ID NO: 6185 - protein, 14 aa, Homo Sapiens
MSLFGDRIFYSTWK

SEQ ID NO: 6186 - protein, 14 aa, Homo Sapiens
SLFGDRIFYSTWKM

SEQ ID NO: 6187 - protein, 14 aa, Homo Sapiens
LFGDRIFYSTWKMK

SEQ ID NO: 6188 - protein, 14 aa, Homo Sapiens
FGDRIFYSTWKMKT

SEQ ID NO: 6189 - protein, 14 aa, Homo Sapiens
GDRIFYSTWKMKTI

SEQ ID NO: 6190 - protein, 14 aa, Homo Sapiens
DRIFYSTWKMKTIW

SEQ ID NO: 6191 - protein, 14 aa, Homo Sapiens
RIFYSTWKMKTIWI

SEQ ID NO: 6192 - protein, 14 aa, Homo Sapiens
IFYSTWKMKTIWIA

SEQ ID NO: 6193 - protein, 14 aa, Homo Sapiens
FYSTWKMKTIWIAN

SEQ ID NO: 6194 - protein, 14 aa, Homo Sapiens
YSTWKMKTIWIANK

SEQ ID NO: 6195 - protein, 14 aa, Homo Sapiens
STWKMKTIWIANKH

SEQ ID NO: 6196 - protein, 14 aa, Homo Sapiens
TWKMKTIWIANKHT

SEQ ID NO: 6197 - protein, 14 aa, Homo Sapiens
WKMKTIWIANKHTG

SEQ ID NO: 6198 - protein, 14 aa, Homo Sapiens
KMKTIWIANKHTGK

SEQ ID NO: 6199 - protein, 14 aa, Homo Sapiens
MKTIWIANKHTGKD

SEQ ID NO: 6200 - protein, 14 aa, Homo Sapiens
KTIWIANKHTGKDM

SEQ ID NO: 6201 - protein, 14 aa, Homo Sapiens
TIWIANKHTGKDMV

SEQ ID NO: 6202 - protein, 14 aa, Homo Sapiens
IWIANKHTGKDMVR

SEQ ID NO: 6203 - protein, 14 aa, Homo Sapiens
WIANKHTGKDMVRI

SEQ ID NO: 6204 - protein, 14 aa, Homo Sapiens
IANKHTGKDMVRIN

SEQ ID NO: 6205 - protein, 14 aa, Homo Sapiens
ANKHTGKDMVRINL

SEQ ID NO: 6206 - protein, 14 aa, Homo Sapiens
NKHTGKDMVRINLH

SEQ ID NO: 6207 - protein, 14 aa, Homo Sapiens
KHTGKDMVRINLHS

SEQ ID NO: 6208 - protein, 14 aa, Homo Sapiens
HTGKDMVRINLHSS

SEQ ID NO: 6209 - protein, 14 aa, Homo Sapiens
TGKDMVRINLHSSF

SEQ ID NO: 6210 - protein, 14 aa, Homo Sapiens
GKDMVRINLHSSFV

SEQ ID NO: 6211 - protein, 14 aa, Homo Sapiens
KDMVRINLHSSFVP

SEQ ID NO: 6212 - protein, 14 aa, Homo Sapiens
DMVRINLHSSFVPL

SEQ ID NO: 6213 - protein, 14 aa, Homo Sapiens
MVRINLHSSFVPLG

SEQ ID NO: 6214 - protein, 14 aa, Homo Sapiens
VRINLHSSFVPLGE

SEQ ID NO: 6215 - protein, 14 aa, Homo Sapiens
RINLHSSFVPLGEL

SEQ ID NO: 6216 - protein, 14 aa, Homo Sapiens
INLHSSFVPLGELK

SEQ ID NO: 6217 - protein, 14 aa, Homo Sapiens
NLHSSFVPLGELKV

SEQ ID NO: 6218 - protein, 14 aa, Homo Sapiens
LHSSFVPLGELKVV

SEQ ID NO: 6219 - protein, 14 aa, Homo Sapiens
HSSFVPLGELKVVH

SEQ ID NO: 6220 - protein, 14 aa, Homo Sapiens
SSFVPLGELKVVHP

SEQ ID NO: 6221 - protein, 14 aa, Homo Sapiens
SFVPLGELKVVHPL

SEQ ID NO: 6222 - protein, 14 aa, Homo Sapiens
FVPLGELKVVHPLA

SEQ ID NO: 6223 - protein, 14 aa, Homo Sapiens
VPLGELKVVHPLAQ

SEQ ID NO: 6224 - protein, 14 aa, Homo Sapiens
PLGELKVVHPLAQP

SEQ ID NO: 6225 - protein, 14 aa, Homo Sapiens
LGELKVVHPLAQPK

SEQ ID NO: 6226 - protein, 14 aa, Homo Sapiens
GELKVVHPLAQPKA

SEQ ID NO: 6227 - protein, 14 aa, Homo Sapiens
ELKVVHPLAQPKAE

SEQ ID NO: 6228 - protein, 14 aa, Homo Sapiens
LKVVHPLAQPKAED

SEQ ID NO: 6229 - protein, 14 aa, Homo Sapiens
KVVHPLAQPKAEDD

SEQ ID NO: 6230 - protein, 14 aa, Homo Sapiens
VVHPLAQPKAEDDT

SEQ ID NO: 6231 - protein, 14 aa, Homo Sapiens
VHPLAQPKAEDDTW

SEQ ID NO: 6232 - protein, 14 aa, Homo Sapiens
HPLAQPKAEDDTWE

SEQ ID NO: 6233 - protein, 14 aa, Homo Sapiens
PLAQPKAEDDTWEP

SEQ ID NO: 6234 - protein, 14 aa, Homo Sapiens
LAQPKAEDDTWEPE

SEQ ID NO: 6235 - protein, 14 aa, Homo Sapiens
AQPKAEDDTWEPEQ

SEQ ID NO: 6236 - protein, 14 aa, Homo Sapiens
QPKAEDDTWEPEQK

SEQ ID NO: 6237 - protein, 14 aa, Homo Sapiens
PKAEDDTWEPEQKL

SEQ ID NO: 6238 - protein, 14 aa, Homo Sapiens
KAEDDTWEPEQKLC

SEQ ID NO: 6239 - protein, 14 aa, Homo Sapiens
AEDDTWEPEQKLCK

SEQ ID NO: 6240 - protein, 14 aa, Homo Sapiens
EDDTWEPEQKLCKL

SEQ ID NO: 6241 - protein, 14 aa, Homo Sapiens
DDTWEPEQKLCKLR

SEQ ID NO: 6242 - protein, 14 aa, Homo Sapiens
DTWEPEQKLCKLRK

SEQ ID NO: 6243 - protein, 14 aa, Homo Sapiens
TWEPEQKLCKLRKG

SEQ ID NO: 6244 - protein, 14 aa, Homo Sapiens
WEPEQKLCKLRKGN

SEQ ID NO: 6245 - protein, 14 aa, Homo Sapiens
EPEQKLCKLRKGNC

SEQ ID NO: 6246 - protein, 14 aa, Homo Sapiens
PEQKLCKLRKGNCS

SEQ ID NO: 6247 - protein, 14 aa, Homo Sapiens
EQKLCKLRKGNCSS

SEQ ID NO: 6248 - protein, 14 aa, Homo Sapiens
QKLCKLRKGNCSST

SEQ ID NO: 6249 - protein, 14 aa, Homo Sapiens
KLCKLRKGNCSSTV

SEQ ID NO: 6250 - protein, 14 aa, Homo Sapiens
LCKLRKGNCSSTVC

SEQ ID NO: 6251 - protein, 14 aa, Homo Sapiens
CKLRKGNCSSTVCG

SEQ ID NO: 6252 - protein, 14 aa, Homo Sapiens
KLRKGNCSSTVCGQ

SEQ ID NO: 6253 - protein, 14 aa, Homo Sapiens
LRKGNCSSTVCGQD

SEQ ID NO: 6254 - protein, 14 aa, Homo Sapiens
RKGNCSSTVCGQDL

SEQ ID NO: 6255 - protein, 14 aa, Homo Sapiens
KGNCSSTVCGQDLQ

SEQ ID NO: 6256 - protein, 14 aa, Homo Sapiens
GNCSSTVCGQDLQS

SEQ ID NO: 6257 - protein, 14 aa, Homo Sapiens
NCSSTVCGQDLQSH

SEQ ID NO: 6258 - protein, 14 aa, Homo Sapiens
CSSTVCGQDLQSHL

SEQ ID NO: 6259 - protein, 14 aa, Homo Sapiens
SSTVCGQDLQSHLC

SEQ ID NO: 6260 - protein, 14 aa, Homo Sapiens
STVCGQDLQSHLCM

SEQ ID NO: 6261 - protein, 14 aa, Homo Sapiens
TVCGQDLQSHLCMC

SEQ ID NO: 6262 - protein, 14 aa, Homo Sapiens
VCGQDLQSHLCMCA

SEQ ID NO: 6263 - protein, 14 aa, Homo Sapiens
CGQDLQSHLCMCAE

SEQ ID NO: 6264 - protein, 14 aa, Homo Sapiens
GQDLQSHLCMCAEG

SEQ ID NO: 6265 - protein, 14 aa, Homo Sapiens
QDLQSHLCMCAEGY

SEQ ID NO: 6266 - protein, 14 aa, Homo Sapiens
DLQSHLCMCAEGYA

SEQ ID NO: 6267 - protein, 14 aa, Homo Sapiens
LQSHLCMCAEGYAL

SEQ ID NO: 6268 - protein, 14 aa, Homo Sapiens
QSHLCMCAEGYALS

SEQ ID NO: 6269 - protein, 14 aa, Homo Sapiens
SHLCMCAEGYALSR

SEQ ID NO: 6270 - protein, 14 aa, Homo Sapiens
HLCMCAEGYALSRD

SEQ ID NO: 6271 - protein, 14 aa, Homo Sapiens
LCMCAEGYALSRDR

SEQ ID NO: 6272 - protein, 14 aa, Homo Sapiens
CMCAEGYALSRDRK

SEQ ID NO: 6273 - protein, 14 aa, Homo Sapiens
MCAEGYALSRDRKY

SEQ ID NO: 6274 - protein, 14 aa, Homo Sapiens
CAEGYALSRDRKYC

SEQ ID NO: 6275 - protein, 14 aa, Homo Sapiens
AEGYALSRDRKYCE

SEQ ID NO: 6276 - protein, 14 aa, Homo Sapiens
EGYALSRDRKYCED

SEQ ID NO: 6277 - protein, 14 aa, Homo Sapiens
GYALSRDRKYCEDV

SEQ ID NO: 6278 - protein, 14 aa, Homo Sapiens
YALSRDRKYCEDVN

SEQ ID NO: 6279 - protein, 14 aa, Homo Sapiens
ALSRDRKYCEDVNE

SEQ ID NO: 6280 - protein, 14 aa, Homo Sapiens
LSRDRKYCEDVNEC

SEQ ID NO: 6281 - protein, 14 aa, Homo Sapiens
SRDRKYCEDVNECA

SEQ ID NO: 6282 - protein, 14 aa, Homo Sapiens
RDRKYCEDVNECAF

SEQ ID NO: 6283 - protein, 14 aa, Homo Sapiens
DRKYCEDVNECAFW

SEQ ID NO: 6284 - protein, 14 aa, Homo Sapiens
RKYCEDVNECAFWN

SEQ ID NO: 6285 - protein, 14 aa, Homo Sapiens
KYCEDVNECAFWNH

SEQ ID NO: 6286 - protein, 14 aa, Homo Sapiens
YCEDVNECAFWNHG

SEQ ID NO: 6287 - protein, 14 aa, Homo Sapiens
CEDVNECAFWNHGC

SEQ ID NO: 6288 - protein, 14 aa, Homo Sapiens
EDVNECAFWNHGCT

SEQ ID NO: 6289 - protein, 14 aa, Homo Sapiens
DVNECAFWNHGCTL

SEQ ID NO: 6290 - protein, 14 aa, Homo Sapiens
VNECAFWNHGCTLG

SEQ ID NO: 6291 - protein, 14 aa, Homo Sapiens
NECAFWNHGCTLGC

SEQ ID NO: 6292 - protein, 14 aa, Homo Sapiens
ECAFWNHGCTLGCK

SEQ ID NO: 6293 - protein, 14 aa, Homo Sapiens
CAFWNHGCTLGCKN

SEQ ID NO: 6294 - protein, 14 aa, Homo Sapiens
AFWNHGCTLGCKNT

SEQ ID NO: 6295 - protein, 14 aa, Homo Sapiens
FWNHGCTLGCKNTP

SEQ ID NO: 6296 - protein, 14 aa, Homo Sapiens
WNHGCTLGCKNTPG

SEQ ID NO: 6297 - protein, 14 aa, Homo Sapiens
NHGCTLGCKNTPGS

SEQ ID NO: 6298 - protein, 14 aa, Homo Sapiens
HGCTLGCKNTPGSY

SEQ ID NO: 6299 - protein, 14 aa, Homo Sapiens
GCTLGCKNTPGSYY

SEQ ID NO: 6300 - protein, 14 aa, Homo Sapiens
CTLGCKNTPGSYYC

SEQ ID NO: 6301 - protein, 14 aa, Homo Sapiens
TLGCKNTPGSYYCT

SEQ ID NO: 6302 - protein, 14 aa, Homo Sapiens
LGCKNTPGSYYCTC

SEQ ID NO: 6303 - protein, 14 aa, Homo Sapiens
GCKNTPGSYYCTCP

SEQ ID NO: 6304 - protein, 14 aa, Homo Sapiens
CKNTPGSYYCTCPV

SEQ ID NO: 6305 - protein, 14 aa, Homo Sapiens
KNTPGSYYCTCPVG

SEQ ID NO: 6306 - protein, 14 aa, Homo Sapiens
NTPGSYYCTCPVGF

SEQ ID NO: 6307 - protein, 14 aa, Homo Sapiens
TPGSYYCTCPVGFV

SEQ ID NO: 6308 - protein, 14 aa, Homo Sapiens
PGSYYCTCPVGFVL

SEQ ID NO: 6309 - protein, 14 aa, Homo Sapiens
GSYYCTCPVGFVLL

SEQ ID NO: 6310 - protein, 14 aa, Homo Sapiens
SYYCTCPVGFVLLP

SEQ ID NO: 6311 - protein, 14 aa, Homo Sapiens
YYCTCPVGFVLLPD

SEQ ID NO: 6312 - protein, 14 aa, Homo Sapiens
YCTCPVGFVLLPDG

SEQ ID NO: 6313 - protein, 14 aa, Homo Sapiens
CTCPVGFVLLPDGK

SEQ ID NO: 6314 - protein, 14 aa, Homo Sapiens
TCPVGFVLLPDGKR

SEQ ID NO: 6315 - protein, 14 aa, Homo Sapiens
CPVGFVLLPDGKRC

SEQ ID NO: 6316 - protein, 14 aa, Homo Sapiens
PVGFVLLPDGKRCH

SEQ ID NO: 6317 - protein, 14 aa, Homo Sapiens
VGFVLLPDGKRCHQ

SEQ ID NO: 6318 - protein, 14 aa, Homo Sapiens
GFVLLPDGKRCHQL

SEQ ID NO: 6319 - protein, 14 aa, Homo Sapiens
FVLLPDGKRCHQLV

SEQ ID NO: 6320 - protein, 14 aa, Homo Sapiens
VLLPDGKRCHQLVS

SEQ ID NO: 6321 - protein, 14 aa, Homo Sapiens
LLPDGKRCHQLVSC

SEQ ID NO: 6322 - protein, 14 aa, Homo Sapiens
LPDGKRCHQLVSCP

SEQ ID NO: 6323 - protein, 14 aa, Homo Sapiens
PDGKRCHQLVSCPR

SEQ ID NO: 6324 - protein, 14 aa, Homo Sapiens
DGKRCHQLVSCPRN

SEQ ID NO: 6325 - protein, 14 aa, Homo Sapiens
GKRCHQLVSCPRNV

SEQ ID NO: 6326 - protein, 14 aa, Homo Sapiens
KRCHQLVSCPRNVS

SEQ ID NO: 6327 - protein, 14 aa, Homo Sapiens
RCHQLVSCPRNVSE

SEQ ID NO: 6328 - protein, 14 aa, Homo Sapiens
CHQLVSCPRNVSEC

SEQ ID NO: 6329 - protein, 14 aa, Homo Sapiens
HQLVSCPRNVSECS

SEQ ID NO: 6330 - protein, 14 aa, Homo Sapiens
QLVSCPRNVSECSH

SEQ ID NO: 6331 - protein, 14 aa, Homo Sapiens
LVSCPRNVSECSHD

SEQ ID NO: 6332 - protein, 14 aa, Homo Sapiens
VSCPRNVSECSHDC

SEQ ID NO: 6333 - protein, 14 aa, Homo Sapiens
SCPRNVSECSHDCV

SEQ ID NO: 6334 - protein, 14 aa, Homo Sapiens
CPRNVSECSHDCVL

SEQ ID NO: 6335 - protein, 14 aa, Homo Sapiens
PRNVSECSHDCVLT

SEQ ID NO: 6336 - protein, 14 aa, Homo Sapiens
RNVSECSHDCVLTS

SEQ ID NO: 6337 - protein, 14 aa, Homo Sapiens
NVSECSHDCVLTSE

SEQ ID NO: 6338 - protein, 14 aa, Homo Sapiens
VSECSHDCVLTSEG

SEQ ID NO: 6339 - protein, 14 aa, Homo Sapiens
SECSHDCVLTSEGP

SEQ ID NO: 6340 - protein, 14 aa, Homo Sapiens
ECSHDCVLTSEGPL

SEQ ID NO: 6341 - protein, 14 aa, Homo Sapiens
CSHDCVLTSEGPLC

SEQ ID NO: 6342 - protein, 14 aa, Homo Sapiens
SHDCVLTSEGPLCF

SEQ ID NO: 6343 - protein, 14 aa, Homo Sapiens
HDCVLTSEGPLCFC

SEQ ID NO: 6344 - protein, 14 aa, Homo Sapiens
DCVLTSEGPLCFCP

SEQ ID NO: 6345 - protein, 14 aa, Homo Sapiens
CVLTSEGPLCFCPE

SEQ ID NO: 6346 - protein, 14 aa, Homo Sapiens
VLTSEGPLCFCPEG

SEQ ID NO: 6347 - protein, 14 aa, Homo Sapiens
LTSEGPLCFCPEGS

SEQ ID NO: 6348 - protein, 14 aa, Homo Sapiens
TSEGPLCFCPEGSV

SEQ ID NO: 6349 - protein, 14 aa, Homo Sapiens
SEGPLCFCPEGSVL

SEQ ID NO: 6350 - protein, 14 aa, Homo Sapiens
EGPLCFCPEGSVLE

SEQ ID NO: 6351 - protein, 14 aa, Homo Sapiens
GPLCFCPEGSVLER

SEQ ID NO: 6352 - protein, 14 aa, Homo Sapiens
PLCFCPEGSVLERD

SEQ ID NO: 6353 - protein, 14 aa, Homo Sapiens
LCFCPEGSVLERDG

SEQ ID NO: 6354 - protein, 14 aa, Homo Sapiens
CFCPEGSVLERDGK

SEQ ID NO: 6355 - protein, 14 aa, Homo Sapiens
FCPEGSVLERDGKT

SEQ ID NO: 6356 - protein, 14 aa, Homo Sapiens
CPEGSVLERDGKTC

SEQ ID NO: 6357 - protein, 14 aa, Homo Sapiens
PEGSVLERDGKTCS

SEQ ID NO: 6358 - protein, 14 aa, Homo Sapiens
EGSVLERDGKTCSG

SEQ ID NO: 6359 - protein, 14 aa, Homo Sapiens
GSVLERDGKTCSGC

SEQ ID NO: 6360 - protein, 14 aa, Homo Sapiens
SVLERDGKTCSGCS

SEQ ID NO: 6361 - protein, 14 aa, Homo Sapiens
VLERDGKTCSGCSS

SEQ ID NO: 6362 - protein, 14 aa, Homo Sapiens
LERDGKTCSGCSSP

SEQ ID NO: 6363 - protein, 14 aa, Homo Sapiens
ERDGKTCSGCSSPD

SEQ ID NO: 6364 - protein, 14 aa, Homo Sapiens
RDGKTCSGCSSPDN

SEQ ID NO: 6365 - protein, 14 aa, Homo Sapiens
DGKTCSGCSSPDNG

SEQ ID NO: 6366 - protein, 14 aa, Homo Sapiens
GKTCSGCSSPDNGG

SEQ ID NO: 6367 - protein, 14 aa, Homo Sapiens
KTCSGCSSPDNGGC

SEQ ID NO: 6368 - protein, 14 aa, Homo Sapiens
TCSGCSSPDNGGCS

SEQ ID NO: 6369 - protein, 14 aa, Homo Sapiens
CSGCSSPDNGGCSQ

SEQ ID NO: 6370 - protein, 14 aa, Homo Sapiens
SGCSSPDNGGCSQL

SEQ ID NO: 6371 - protein, 14 aa, Homo Sapiens
GCSSPDNGGCSQLC

SEQ ID NO: 6372 - protein, 14 aa, Homo Sapiens
CSSPDNGGCSQLCV

SEQ ID NO: 6373 - protein, 14 aa, Homo Sapiens
SSPDNGGCSQLCVP

SEQ ID NO: 6374 - protein, 14 aa, Homo Sapiens
SPDNGGCSQLCVPL

SEQ ID NO: 6375 - protein, 14 aa, Homo Sapiens
PDNGGCSQLCVPLS

SEQ ID NO: 6376 - protein, 14 aa, Homo Sapiens
DNGGCSQLCVPLSP

SEQ ID NO: 6377 - protein, 14 aa, Homo Sapiens
NGGCSQLCVPLSPV

SEQ ID NO: 6378 - protein, 14 aa, Homo Sapiens
GGCSQLCVPLSPVS

SEQ ID NO: 6379 - protein, 14 aa, Homo Sapiens
GCSQLCVPLSPVSW

SEQ ID NO: 6380 - protein, 14 aa, Homo Sapiens
CSQLCVPLSPVSWE

SEQ ID NO: 6381 - protein, 14 aa, Homo Sapiens
SQLCVPLSPVSWEC

SEQ ID NO: 6382 - protein, 14 aa, Homo Sapiens
QLCVPLSPVSWECD

SEQ ID NO: 6383 - protein, 14 aa, Homo Sapiens
LCVPLSPVSWECDC

SEQ ID NO: 6384 - protein, 14 aa, Homo Sapiens
CVPLSPVSWECDCF

SEQ ID NO: 6385 - protein, 14 aa, Homo Sapiens
VPLSPVSWECDCFP

SEQ ID NO: 6386 - protein, 14 aa, Homo Sapiens
PLSPVSWECDCFPG

SEQ ID NO: 6387 - protein, 14 aa, Homo Sapiens
LSPVSWECDCFPGY

SEQ ID NO: 6388 - protein, 14 aa, Homo Sapiens
SPVSWECDCFPGYD

SEQ ID NO: 6389 - protein, 14 aa, Homo Sapiens
PVSWECDCFPGYDL

SEQ ID NO: 6390 - protein, 14 aa, Homo Sapiens
VSWECDCFPGYDLQ

SEQ ID NO: 6391 - protein, 14 aa, Homo Sapiens
SWECDCFPGYDLQL

SEQ ID NO: 6392 - protein, 14 aa, Homo Sapiens
WECDCFPGYDLQLD

SEQ ID NO: 6393 - protein, 14 aa, Homo Sapiens
ECDCFPGYDLQLDE

SEQ ID NO: 6394 - protein, 14 aa, Homo Sapiens
CDCFPGYDLQLDEK

SEQ ID NO: 6395 - protein, 14 aa, Homo Sapiens
DCFPGYDLQLDEKS

SEQ ID NO: 6396 - protein, 14 aa, Homo Sapiens
CFPGYDLQLDEKSC

SEQ ID NO: 6397 - protein, 14 aa, Homo Sapiens
FPGYDLQLDEKSCA

SEQ ID NO: 6398 - protein, 14 aa, Homo Sapiens
PGYDLQLDEKSCAA

SEQ ID NO: 6399 - protein, 14 aa, Homo Sapiens
GYDLQLDEKSCAAS

SEQ ID NO: 6400 - protein, 14 aa, Homo Sapiens
YDLQLDEKSCAASG

SEQ ID NO: 6401 - protein, 14 aa, Homo Sapiens
DLQLDEKSCAASGP

SEQ ID NO: 6402 - protein, 14 aa, Homo Sapiens
LQLDEKSCAASGPQ

SEQ ID NO: 6403 - protein, 14 aa, Homo Sapiens
QLDEKSCAASGPQP

SEQ ID NO: 6404 - protein, 14 aa, Homo Sapiens
LDEKSCAASGPQPF

SEQ ID NO: 6405 - protein, 14 aa, Homo Sapiens
DEKSCAASGPQPFL

SEQ ID NO: 6406 - protein, 14 aa, Homo Sapiens
EKSCAASGPQPFLL

SEQ ID NO: 6407 - protein, 14 aa, Homo Sapiens
KSCAASGPQPFLLF

SEQ ID NO: 6408 - protein, 14 aa, Homo Sapiens
SCAASGPQPFLLFA

SEQ ID NO: 6409 - protein, 14 aa, Homo Sapiens
CAASGPQPFLLFAN

SEQ ID NO: 6410 - protein, 14 aa, Homo Sapiens
AASGPQPFLLFANS

SEQ ID NO: 6411 - protein, 14 aa, Homo Sapiens
ASGPQPFLLFANSQ

SEQ ID NO: 6412 - protein, 14 aa, Homo Sapiens
SGPQPFLLFANSQD

SEQ ID NO: 6413 - protein, 14 aa, Homo Sapiens
GPQPFLLFANSQDI

SEQ ID NO: 6414 - protein, 14 aa, Homo Sapiens
PQPFLLFANSQDIR

SEQ ID NO: 6415 - protein, 14 aa, Homo Sapiens
QPFLLFANSQDIRH

SEQ ID NO: 6416 - protein, 14 aa, Homo Sapiens
PFLLFANSQDIRHM

SEQ ID NO: 6417 - protein, 14 aa, Homo Sapiens
FLLFANSQDIRHMH

SEQ ID NO: 6418 - protein, 14 aa, Homo Sapiens
LLFANSQDIRHMHF

SEQ ID NO: 6419 - protein, 14 aa, Homo Sapiens
LFANSQDIRHMHFD

SEQ ID NO: 6420 - protein, 14 aa, Homo Sapiens
FANSQDIRHMHFDG

SEQ ID NO: 6421 - protein, 14 aa, Homo Sapiens
ANSQDIRHMHFDGT

SEQ ID NO: 6422 - protein, 14 aa, Homo Sapiens
NSQDIRHMHFDGTD

SEQ ID NO: 6423 - protein, 14 aa, Homo Sapiens
SQDIRHMHFDGTDY

SEQ ID NO: 6424 - protein, 14 aa, Homo Sapiens
QDIRHMHFDGTDYG

SEQ ID NO: 6425 - protein, 14 aa, Homo Sapiens
DIRHMHFDGTDYGT

SEQ ID NO: 6426 - protein, 14 aa, Homo Sapiens
IRHMHFDGTDYGTL

SEQ ID NO: 6427 - protein, 14 aa, Homo Sapiens
RHMHFDGTDYGTLL

SEQ ID NO: 6428 - protein, 14 aa, Homo Sapiens
HMHFDGTDYGTLLS

SEQ ID NO: 6429 - protein, 14 aa, Homo Sapiens
MHFDGTDYGTLLSQ

SEQ ID NO: 6430 - protein, 14 aa, Homo Sapiens
HFDGTDYGTLLSQQ

SEQ ID NO: 6431 - protein, 14 aa, Homo Sapiens
FDGTDYGTLLSQQM

SEQ ID NO: 6432 - protein, 14 aa, Homo Sapiens
DGTDYGTLLSQQMG

SEQ ID NO: 6433 - protein, 14 aa, Homo Sapiens
GTDYGTLLSQQMGM

SEQ ID NO: 6434 - protein, 14 aa, Homo Sapiens
TDYGTLLSQQMGMV

SEQ ID NO: 6435 - protein, 14 aa, Homo Sapiens
DYGTLLSQQMGMVY

SEQ ID NO: 6436 - protein, 14 aa, Homo Sapiens
YGTLLSQQMGMVYA

SEQ ID NO: 6437 - protein, 14 aa, Homo Sapiens
GTLLSQQMGMVYAL

SEQ ID NO: 6438 - protein, 14 aa, Homo Sapiens
TLLSQQMGMVYALD

SEQ ID NO: 6439 - protein, 14 aa, Homo Sapiens
LLSQQMGMVYALDH

SEQ ID NO: 6440 - protein, 14 aa, Homo Sapiens
LSQQMGMVYALDHD

SEQ ID NO: 6441 - protein, 14 aa, Homo Sapiens
SQQMGMVYALDHDP

SEQ ID NO: 6442 - protein, 14 aa, Homo Sapiens
QQMGMVYALDHDPV

SEQ ID NO: 6443 - protein, 14 aa, Homo Sapiens
QMGMVYALDHDPVE

SEQ ID NO: 6444 - protein, 14 aa, Homo Sapiens
MGMVYALDHDPVEN

SEQ ID NO: 6445 - protein, 14 aa, Homo Sapiens
GMVYALDHDPVENK

SEQ ID NO: 6446 - protein, 14 aa, Homo Sapiens
MVYALDHDPVENKI

SEQ ID NO: 6447 - protein, 14 aa, Homo Sapiens
VYALDHDPVENKIY

SEQ ID NO: 6448 - protein, 14 aa, Homo Sapiens
YALDHDPVENKIYF

SEQ ID NO: 6449 - protein, 14 aa, Homo Sapiens
ALDHDPVENKIYFA

SEQ ID NO: 6450 - protein, 14 aa, Homo Sapiens
LDHDPVENKIYFAH

SEQ ID NO: 6451 - protein, 14 aa, Homo Sapiens
DHDPVENKIYFAHT

SEQ ID NO: 6452 - protein, 14 aa, Homo Sapiens
HDPVENKIYFAHTA

SEQ ID NO: 6453 - protein, 14 aa, Homo Sapiens
DPVENKIYFAHTAL

SEQ ID NO: 6454 - protein, 14 aa, Homo Sapiens
PVENKIYFAHTALK

SEQ ID NO: 6455 - protein, 14 aa, Homo Sapiens
VENKIYFAHTALKW

SEQ ID NO: 6456 - protein, 14 aa, Homo Sapiens
ENKIYFAHTALKWI

SEQ ID NO: 6457 - protein, 14 aa, Homo Sapiens
NKIYFAHTALKWIE

SEQ ID NO: 6458 - protein, 14 aa, Homo Sapiens
KIYFAHTALKWIER

SEQ ID NO: 6459 - protein, 14 aa, Homo Sapiens
IYFAHTALKWIERA

SEQ ID NO: 6460 - protein, 14 aa, Homo Sapiens
YFAHTALKWIERAN

SEQ ID NO: 6461 - protein, 14 aa, Homo Sapiens
FAHTALKWIERANM

SEQ ID NO: 6462 - protein, 14 aa, Homo Sapiens
AHTALKWIERANMD

SEQ ID NO: 6463 - protein, 14 aa, Homo Sapiens
HTALKWIERANMDG

SEQ ID NO: 6464 - protein, 14 aa, Homo Sapiens
TALKWIERANMDGS

SEQ ID NO: 6465 - protein, 14 aa, Homo Sapiens
ALKWIERANMDGSQ

SEQ ID NO: 6466 - protein, 14 aa, Homo Sapiens
LKWIERANMDGSQR

SEQ ID NO: 6467 - protein, 14 aa, Homo Sapiens
KWIERANMDGSQRE

SEQ ID NO: 6468 - protein, 14 aa, Homo Sapiens
WIERANMDGSQRER

SEQ ID NO: 6469 - protein, 14 aa, Homo Sapiens
IERANMDGSQRERL

SEQ ID NO: 6470 - protein, 14 aa, Homo Sapiens
ERANMDGSQRERLI

SEQ ID NO: 6471 - protein, 14 aa, Homo Sapiens
RANMDGSQRERLIE

SEQ ID NO: 6472 - protein, 14 aa, Homo Sapiens
ANMDGSQRERLIEE

SEQ ID NO: 6473 - protein, 14 aa, Homo Sapiens
NMDGSQRERLIEEG

SEQ ID NO: 6474 - protein, 14 aa, Homo Sapiens
MDGSQRERLIEEGV

SEQ ID NO: 6475 - protein, 14 aa, Homo Sapiens
DGSQRERLIEEGVD

SEQ ID NO: 6476 - protein, 14 aa, Homo Sapiens
GSQRERLIEEGVDV

SEQ ID NO: 6477 - protein, 14 aa, Homo Sapiens
SQRERLIEEGVDVP

SEQ ID NO: 6478 - protein, 14 aa, Homo Sapiens
QRERLIEEGVDVPE

SEQ ID NO: 6479 - protein, 14 aa, Homo Sapiens
RERLIEEGVDVPEG

SEQ ID NO: 6480 - protein, 14 aa, Homo Sapiens
ERLIEEGVDVPEGL

SEQ ID NO: 6481 - protein, 14 aa, Homo Sapiens
RLIEEGVDVPEGLA

SEQ ID NO: 6482 - protein, 14 aa, Homo Sapiens
LIEEGVDVPEGLAV

SEQ ID NO: 6483 - protein, 14 aa, Homo Sapiens
IEEGVDVPEGLAVD

SEQ ID NO: 6484 - protein, 14 aa, Homo Sapiens
EEGVDVPEGLAVDW

SEQ ID NO: 6485 - protein, 14 aa, Homo Sapiens
EGVDVPEGLAVDWI

SEQ ID NO: 6486 - protein, 14 aa, Homo Sapiens
GVDVPEGLAVDWIG

SEQ ID NO: 6487 - protein, 14 aa, Homo Sapiens
VDVPEGLAVDWIGR

SEQ ID NO: 6488 - protein, 14 aa, Homo Sapiens
DVPEGLAVDWIGRR

SEQ ID NO: 6489 - protein, 14 aa, Homo Sapiens
VPEGLAVDWIGRRF

SEQ ID NO: 6490 - protein, 14 aa, Homo Sapiens
PEGLAVDWIGRRFY

SEQ ID NO: 6491 - protein, 14 aa, Homo Sapiens
EGLAVDWIGRRFYW

SEQ ID NO: 6492 - protein, 14 aa, Homo Sapiens
GLAVDWIGRRFYWT

SEQ ID NO: 6493 - protein, 14 aa, Homo Sapiens
LAVDWIGRRFYWTD

SEQ ID NO: 6494 - protein, 14 aa, Homo Sapiens
AVDWIGRRFYWTDR

SEQ ID NO: 6495 - protein, 14 aa, Homo Sapiens
VDWIGRRFYWTDRG

SEQ ID NO: 6496 - protein, 14 aa, Homo Sapiens
DWIGRRFYWTDRGK

SEQ ID NO: 6497 - protein, 14 aa, Homo Sapiens
WIGRRFYWTDRGKS

SEQ ID NO: 6498 - protein, 14 aa, Homo Sapiens
IGRRFYWTDRGKSL

SEQ ID NO: 6499 - protein, 14 aa, Homo Sapiens
GRRFYWTDRGKSLI

SEQ ID NO: 6500 - protein, 14 aa, Homo Sapiens
RRFYWTDRGKSLIG

SEQ ID NO: 6501 - protein, 14 aa, Homo Sapiens
RFYWTDRGKSLIGR

SEQ ID NO: 6502 - protein, 14 aa, Homo Sapiens
FYWTDRGKSLIGRS

SEQ ID NO: 6503 - protein, 14 aa, Homo Sapiens
YWTDRGKSLIGRSD

SEQ ID NO: 6504 - protein, 14 aa, Homo Sapiens
WTDRGKSLIGRSDL

SEQ ID NO: 6505 - protein, 14 aa, Homo Sapiens
TDRGKSLIGRSDLN

SEQ ID NO: 6506 - protein, 14 aa, Homo Sapiens
DRGKSLIGRSDLNG

SEQ ID NO: 6507 - protein, 14 aa, Homo Sapiens
RGKSLIGRSDLNGK

SEQ ID NO: 6508 - protein, 14 aa, Homo Sapiens
GKSLIGRSDLNGKR

SEQ ID NO: 6509 - protein, 14 aa, Homo Sapiens
KSLIGRSDLNGKRS

SEQ ID NO: 6510 - protein, 14 aa, Homo Sapiens
SLIGRSDLNGKRSK

SEQ ID NO: 6511 - protein, 14 aa, Homo Sapiens
LIGRSDLNGKRSKI

SEQ ID NO: 6512 - protein, 14 aa, Homo Sapiens
IGRSDLNGKRSKII

SEQ ID NO: 6513 - protein, 14 aa, Homo Sapiens
GRSDLNGKRSKIIT

SEQ ID NO: 6514 - protein, 14 aa, Homo Sapiens
RSDLNGKRSKIITK

SEQ ID NO: 6515 - protein, 14 aa, Homo Sapiens
SDLNGKRSKIITKE

SEQ ID NO: 6516 - protein, 14 aa, Homo Sapiens
DLNGKRSKIITKEN

SEQ ID NO: 6517 - protein, 14 aa, Homo Sapiens
LNGKRSKIITKENI

SEQ ID NO: 6518 - protein, 14 aa, Homo Sapiens
NGKRSKIITKENIS

SEQ ID NO: 6519 - protein, 14 aa, Homo Sapiens
GKRSKIITKENISQ

SEQ ID NO: 6520 - protein, 14 aa, Homo Sapiens
KRSKIITKENISQP

SEQ ID NO: 6521 - protein, 14 aa, Homo Sapiens
RSKIITKENISQPR

SEQ ID NO: 6522 - protein, 14 aa, Homo Sapiens
SKIITKENISQPRG

SEQ ID NO: 6523 - protein, 14 aa, Homo Sapiens
KIITKENISQPRGI

SEQ ID NO: 6524 - protein, 14 aa, Homo Sapiens
IITKENISQPRGIA

SEQ ID NO: 6525 - protein, 14 aa, Homo Sapiens
ITKENISQPRGIAV

SEQ ID NO: 6526 - protein, 14 aa, Homo Sapiens
TKENISQPRGIAVH

SEQ ID NO: 6527 - protein, 14 aa, Homo Sapiens
KENISQPRGIAVHP

SEQ ID NO: 6528 - protein, 14 aa, Homo Sapiens
ENISQPRGIAVHPM

SEQ ID NO: 6529 - protein, 14 aa, Homo Sapiens
NISQPRGIAVHPMA

SEQ ID NO: 6530 - protein, 14 aa, Homo Sapiens
ISQPRGIAVHPMAK

SEQ ID NO: 6531 - protein, 14 aa, Homo Sapiens
SQPRGIAVHPMAKR

SEQ ID NO: 6532 - protein, 14 aa, Homo Sapiens
QPRGIAVHPMAKRL

SEQ ID NO: 6533 - protein, 14 aa, Homo Sapiens
PRGIAVHPMAKRLF

SEQ ID NO: 6534 - protein, 14 aa, Homo Sapiens
RGIAVHPMAKRLFW

SEQ ID NO: 6535 - protein, 14 aa, Homo Sapiens
GIAVHPMAKRLFWT

SEQ ID NO: 6536 - protein, 14 aa, Homo Sapiens
IAVHPMAKRLFWTD

SEQ ID NO: 6537 - protein, 14 aa, Homo Sapiens
AVHPMAKRLFWTDT

SEQ ID NO: 6538 - protein, 14 aa, Homo Sapiens
VHPMAKRLFWTDTG

SEQ ID NO: 6539 - protein, 14 aa, Homo Sapiens
HPMAKRLFWTDTGI

SEQ ID NO: 6540 - protein, 14 aa, Homo Sapiens
PMAKRLFWTDTGIN

SEQ ID NO: 6541 - protein, 14 aa, Homo Sapiens
MAKRLFWTDTGINP

SEQ ID NO: 6542 - protein, 14 aa, Homo Sapiens
AKRLFWTDTGINPR

SEQ ID NO: 6543 - protein, 14 aa, Homo Sapiens
KRLFWTDTGINPRI

SEQ ID NO: 6544 - protein, 14 aa, Homo Sapiens
RLFWTDTGINPRIE

SEQ ID NO: 6545 - protein, 14 aa, Homo Sapiens
LFWTDTGINPRIES

SEQ ID NO: 6546 - protein, 14 aa, Homo Sapiens
FWTDTGINPRIESS

SEQ ID NO: 6547 - protein, 14 aa, Homo Sapiens
WTDTGINPRIESSS

SEQ ID NO: 6548 - protein, 14 aa, Homo Sapiens
TDTGINPRIESSSL

SEQ ID NO: 6549 - protein, 14 aa, Homo Sapiens
DTGINPRIESSSLQ

SEQ ID NO: 6550 - protein, 14 aa, Homo Sapiens
TGINPRIESSSLQG

SEQ ID NO: 6551 - protein, 14 aa, Homo Sapiens
GINPRIESSSLQGL

SEQ ID NO: 6552 - protein, 14 aa, Homo Sapiens
INPRIESSSLQGLG

SEQ ID NO: 6553 - protein, 14 aa, Homo Sapiens
NPRIESSSLQGLGR

SEQ ID NO: 6554 - protein, 14 aa, Homo Sapiens
PRIESSSLQGLGRL

SEQ ID NO: 6555 - protein, 14 aa, Homo Sapiens
RIESSSLQGLGRLV

SEQ ID NO: 6556 - protein, 14 aa, Homo Sapiens
IESSSLQGLGRLVI

SEQ ID NO: 6557 - protein, 14 aa, Homo Sapiens
ESSSLQGLGRLVIA

SEQ ID NO: 6558 - protein, 14 aa, Homo Sapiens
SSSLQGLGRLVIAS

SEQ ID NO: 6559 - protein, 14 aa, Homo Sapiens
SSLQGLGRLVIASS

SEQ ID NO: 6560 - protein, 14 aa, Homo Sapiens
SLQGLGRLVIASSD

SEQ ID NO: 6561 - protein, 14 aa, Homo Sapiens
LQGLGRLVIASSDL

SEQ ID NO: 6562 - protein, 14 aa, Homo Sapiens
QGLGRLVIASSDLI

SEQ ID NO: 6563 - protein, 14 aa, Homo Sapiens
GLGRLVIASSDLIW

SEQ ID NO: 6564 - protein, 14 aa, Homo Sapiens
LGRLVIASSDLIWP

SEQ ID NO: 6565 - protein, 14 aa, Homo Sapiens
GRLVIASSDLIWPS

SEQ ID NO: 6566 - protein, 14 aa, Homo Sapiens
RLVIASSDLIWPSG

SEQ ID NO: 6567 - protein, 14 aa, Homo Sapiens
LVIASSDLIWPSGI

SEQ ID NO: 6568 - protein, 14 aa, Homo Sapiens
VIASSDLIWPSGIT

SEQ ID NO: 6569 - protein, 14 aa, Homo Sapiens
IASSDLIWPSGITI

SEQ ID NO: 6570 - protein, 14 aa, Homo Sapiens
ASSDLIWPSGITID

SEQ ID NO: 6571 - protein, 14 aa, Homo Sapiens
SSDLIWPSGITIDF

SEQ ID NO: 6572 - protein, 14 aa, Homo Sapiens
SDLIWPSGITIDFL

SEQ ID NO: 6573 - protein, 14 aa, Homo Sapiens
DLIWPSGITIDFLT

SEQ ID NO: 6574 - protein, 14 aa, Homo Sapiens
LIWPSGITIDFLTD

SEQ ID NO: 6575 - protein, 14 aa, Homo Sapiens
IWPSGITIDFLTDK

SEQ ID NO: 6576 - protein, 14 aa, Homo Sapiens
WPSGITIDFLTDKL

SEQ ID NO: 6577 - protein, 14 aa, Homo Sapiens
PSGITIDFLTDKLY

SEQ ID NO: 6578 - protein, 14 aa, Homo Sapiens
SGITIDFLTDKLYW

SEQ ID NO: 6579 - protein, 14 aa, Homo Sapiens
GITIDFLTDKLYWC

SEQ ID NO: 6580 - protein, 14 aa, Homo Sapiens
ITIDFLTDKLYWCD

SEQ ID NO: 6581 - protein, 14 aa, Homo Sapiens
TIDFLTDKLYWCDA

SEQ ID NO: 6582 - protein, 14 aa, Homo Sapiens
IDFLTDKLYWCDAK

SEQ ID NO: 6583 - protein, 14 aa, Homo Sapiens
DFLTDKLYWCDAKQ

SEQ ID NO: 6584 - protein, 14 aa, Homo Sapiens
FLTDKLYWCDAKQS

SEQ ID NO: 6585 - protein, 14 aa, Homo Sapiens
LTDKLYWCDAKQSV

SEQ ID NO: 6586 - protein, 14 aa, Homo Sapiens
TDKLYWCDAKQSVI

SEQ ID NO: 6587 - protein, 14 aa, Homo Sapiens
DKLYWCDAKQSVIE

SEQ ID NO: 6588 - protein, 14 aa, Homo Sapiens
KLYWCDAKQSVIEM

SEQ ID NO: 6589 - protein, 14 aa, Homo Sapiens
LYWCDAKQSVIEMA

SEQ ID NO: 6590 - protein, 14 aa, Homo Sapiens
YWCDAKQSVIEMAN

SEQ ID NO: 6591 - protein, 14 aa, Homo Sapiens
WCDAKQSVIEMANL

SEQ ID NO: 6592 - protein, 14 aa, Homo Sapiens
CDAKQSVIEMANLD

SEQ ID NO: 6593 - protein, 14 aa, Homo Sapiens
DAKQSVIEMANLDG

SEQ ID NO: 6594 - protein, 14 aa, Homo Sapiens
AKQSVIEMANLDGS

SEQ ID NO: 6595 - protein, 14 aa, Homo Sapiens
KQSVIEMANLDGSK

SEQ ID NO: 6596 - protein, 14 aa, Homo Sapiens
QSVIEMANLDGSKR

SEQ ID NO: 6597 - protein, 14 aa, Homo Sapiens
SVIEMANLDGSKRR

SEQ ID NO: 6598 - protein, 14 aa, Homo Sapiens
VIEMANLDGSKRRR

SEQ ID NO: 6599 - protein, 14 aa, Homo Sapiens
IEMANLDGSKRRRL

SEQ ID NO: 6600 - protein, 14 aa, Homo Sapiens
EMANLDGSKRRRLT

SEQ ID NO: 6601 - protein, 14 aa, Homo Sapiens
MANLDGSKRRRLTQ

SEQ ID NO: 6602 - protein, 14 aa, Homo Sapiens
ANLDGSKRRRLTQN

SEQ ID NO: 6603 - protein, 14 aa, Homo Sapiens
NLDGSKRRRLTQND

SEQ ID NO: 6604 - protein, 14 aa, Homo Sapiens
LDGSKRRRLTQNDV

SEQ ID NO: 6605 - protein, 14 aa, Homo Sapiens
DGSKRRRLTQNDVG

SEQ ID NO: 6606 - protein, 14 aa, Homo Sapiens
GSKRRRLTQNDVGH

SEQ ID NO: 6607 - protein, 14 aa, Homo Sapiens
SKRRRLTQNDVGHP

SEQ ID NO: 6608 - protein, 14 aa, Homo Sapiens
KRRRLTQNDVGHPF

SEQ ID NO: 6609 - protein, 14 aa, Homo Sapiens
RRRLTQNDVGHPFA

SEQ ID NO: 6610 - protein, 14 aa, Homo Sapiens
RRLTQNDVGHPFAV

SEQ ID NO: 6611 - protein, 14 aa, Homo Sapiens
RLTQNDVGHPFAVA

SEQ ID NO: 6612 - protein, 14 aa, Homo Sapiens
LTQNDVGHPFAVAV

SEQ ID NO: 6613 - protein, 14 aa, Homo Sapiens
TQNDVGHPFAVAVF

SEQ ID NO: 6614 - protein, 14 aa, Homo Sapiens
QNDVGHPFAVAVFE

SEQ ID NO: 6615 - protein, 14 aa, Homo Sapiens
NDVGHPFAVAVFED

SEQ ID NO: 6616 - protein, 14 aa, Homo Sapiens
DVGHPFAVAVFEDY

SEQ ID NO: 6617 - protein, 14 aa, Homo Sapiens
VGHPFAVAVFEDYV

SEQ ID NO: 6618 - protein, 14 aa, Homo Sapiens
GHPFAVAVFEDYVW

SEQ ID NO: 6619 - protein, 14 aa, Homo Sapiens
HPFAVAVFEDYVWF

SEQ ID NO: 6620 - protein, 14 aa, Homo Sapiens
PFAVAVFEDYVWFS

SEQ ID NO: 6621 - protein, 14 aa, Homo Sapiens
FAVAVFEDYVWFSD

SEQ ID NO: 6622 - protein, 14 aa, Homo Sapiens
AVAVFEDYVWFSDW

SEQ ID NO: 6623 - protein, 14 aa, Homo Sapiens
VAVFEDYVWFSDWA

SEQ ID NO: 6624 - protein, 14 aa, Homo Sapiens
AVFEDYVWFSDWAM

SEQ ID NO: 6625 - protein, 14 aa, Homo Sapiens
VFEDYVWFSDWAMP

SEQ ID NO: 6626 - protein, 14 aa, Homo Sapiens
FEDYVWFSDWAMPS

SEQ ID NO: 6627 - protein, 14 aa, Homo Sapiens
EDYVWFSDWAMPSV

SEQ ID NO: 6628 - protein, 14 aa, Homo Sapiens
DYVWFSDWAMPSVI

SEQ ID NO: 6629 - protein, 14 aa, Homo Sapiens
YVWFSDWAMPSVIR

SEQ ID NO: 6630 - protein, 14 aa, Homo Sapiens
VWFSDWAMPSVIRV

SEQ ID NO: 6631 - protein, 14 aa, Homo Sapiens
WFSDWAMPSVIRVN

SEQ ID NO: 6632 - protein, 14 aa, Homo Sapiens
FSDWAMPSVIRVNK

SEQ ID NO: 6633 - protein, 14 aa, Homo Sapiens
SDWAMPSVIRVNKR

SEQ ID NO: 6634 - protein, 14 aa, Homo Sapiens
DWAMPSVIRVNKRT

SEQ ID NO: 6635 - protein, 14 aa, Homo Sapiens
WAMPSVIRVNKRTG

SEQ ID NO: 6636 - protein, 14 aa, Homo Sapiens
AMPSVIRVNKRTGK

SEQ ID NO: 6637 - protein, 14 aa, Homo Sapiens
MPSVIRVNKRTGKD

SEQ ID NO: 6638 - protein, 14 aa, Homo Sapiens
PSVIRVNKRTGKDR

SEQ ID NO: 6639 - protein, 14 aa, Homo Sapiens
SVIRVNKRTGKDRV

SEQ ID NO: 6640 - protein, 14 aa, Homo Sapiens
VIRVNKRTGKDRVR

SEQ ID NO: 6641 - protein, 14 aa, Homo Sapiens
IRVNKRTGKDRVRL

SEQ ID NO: 6642 - protein, 14 aa, Homo Sapiens
RVNKRTGKDRVRLQ

SEQ ID NO: 6643 - protein, 14 aa, Homo Sapiens
VNKRTGKDRVRLQG

SEQ ID NO: 6644 - protein, 14 aa, Homo Sapiens
NKRTGKDRVRLQGS

SEQ ID NO: 6645 - protein, 14 aa, Homo Sapiens
KRTGKDRVRLQGSM

SEQ ID NO: 6646 - protein, 14 aa, Homo Sapiens
RTGKDRVRLQGSML

SEQ ID NO: 6647 - protein, 14 aa, Homo Sapiens
TGKDRVRLQGSMLK

SEQ ID NO: 6648 - protein, 14 aa, Homo Sapiens
GKDRVRLQGSMLKP

SEQ ID NO: 6649 - protein, 14 aa, Homo Sapiens
KDRVRLQGSMLKPS

SEQ ID NO: 6650 - protein, 14 aa, Homo Sapiens
DRVRLQGSMLKPSS

SEQ ID NO: 6651 - protein, 14 aa, Homo Sapiens
RVRLQGSMLKPSSL

SEQ ID NO: 6652 - protein, 14 aa, Homo Sapiens
VRLQGSMLKPSSLV

SEQ ID NO: 6653 - protein, 14 aa, Homo Sapiens
RLQGSMLKPSSLVV

SEQ ID NO: 6654 - protein, 14 aa, Homo Sapiens
LQGSMLKPSSLVVV

SEQ ID NO: 6655 - protein, 14 aa, Homo Sapiens
QGSMLKPSSLVVVH

SEQ ID NO: 6656 - protein, 14 aa, Homo Sapiens
GSMLKPSSLVVVHP

SEQ ID NO: 6657 - protein, 14 aa, Homo Sapiens
SMLKPSSLVVVHPL

SEQ ID NO: 6658 - protein, 14 aa, Homo Sapiens
MLKPSSLVVVHPLA

SEQ ID NO: 6659 - protein, 14 aa, Homo Sapiens
LKPSSLVVVHPLAK

SEQ ID NO: 6660 - protein, 14 aa, Homo Sapiens
KPSSLVVVHPLAKP

SEQ ID NO: 6661 - protein, 14 aa, Homo Sapiens
PSSLVVVHPLAKPG

SEQ ID NO: 6662 - protein, 14 aa, Homo Sapiens
SSLVVVHPLAKPGA

SEQ ID NO: 6663 - protein, 14 aa, Homo Sapiens
SLVVVHPLAKPGAD

SEQ ID NO: 6664 - protein, 14 aa, Homo Sapiens
LVVVHPLAKPGADP

SEQ ID NO: 6665 - protein, 14 aa, Homo Sapiens
VVVHPLAKPGADPC

SEQ ID NO: 6666 - protein, 14 aa, Homo Sapiens
VVHPLAKPGADPCL

SEQ ID NO: 6667 - protein, 14 aa, Homo Sapiens
VHPLAKPGADPCLY

SEQ ID NO: 6668 - protein, 14 aa, Homo Sapiens
HPLAKPGADPCLYQ

SEQ ID NO: 6669 - protein, 14 aa, Homo Sapiens
PLAKPGADPCLYQN

SEQ ID NO: 6670 - protein, 14 aa, Homo Sapiens
LAKPGADPCLYQNG

SEQ ID NO: 6671 - protein, 14 aa, Homo Sapiens
AKPGADPCLYQNGG

SEQ ID NO: 6672 - protein, 14 aa, Homo Sapiens
KPGADPCLYQNGGC

SEQ ID NO: 6673 - protein, 14 aa, Homo Sapiens
PGADPCLYQNGGCE

SEQ ID NO: 6674 - protein, 14 aa, Homo Sapiens
GADPCLYQNGGCEH

SEQ ID NO: 6675 - protein, 14 aa, Homo Sapiens
ADPCLYQNGGCEHI

SEQ ID NO: 6676 - protein, 14 aa, Homo Sapiens
DPCLYQNGGCEHIC

SEQ ID NO: 6677 - protein, 14 aa, Homo Sapiens
PCLYQNGGCEHICK

SEQ ID NO: 6678 - protein, 14 aa, Homo Sapiens
CLYQNGGCEHICKK

SEQ ID NO: 6679 - protein, 14 aa, Homo Sapiens
LYQNGGCEHICKKR

SEQ ID NO: 6680 - protein, 14 aa, Homo Sapiens
YQNGGCEHICKKRL

SEQ ID NO: 6681 - protein, 14 aa, Homo Sapiens
QNGGCEHICKKRLG

SEQ ID NO: 6682 - protein, 14 aa, Homo Sapiens
NGGCEHICKKRLGT

SEQ ID NO: 6683 - protein, 14 aa, Homo Sapiens
GGCEHICKKRLGTA

SEQ ID NO: 6684 - protein, 14 aa, Homo Sapiens
GCEHICKKRLGTAW

SEQ ID NO: 6685 - protein, 14 aa, Homo Sapiens
CEHICKKRLGTAWC

SEQ ID NO: 6686 - protein, 14 aa, Homo Sapiens
EHICKKRLGTAWCS

SEQ ID NO: 6687 - protein, 14 aa, Homo Sapiens
HICKKRLGTAWCSC

SEQ ID NO: 6688 - protein, 14 aa, Homo Sapiens
ICKKRLGTAWCSCR

SEQ ID NO: 6689 - protein, 14 aa, Homo Sapiens
CKKRLGTAWCSCRE

SEQ ID NO: 6690 - protein, 14 aa, Homo Sapiens
KKRLGTAWCSCREG

SEQ ID NO: 6691 - protein, 14 aa, Homo Sapiens
KRLGTAWCSCREGF

SEQ ID NO: 6692 - protein, 14 aa, Homo Sapiens
RLGTAWCSCREGFM

SEQ ID NO: 6693 - protein, 14 aa, Homo Sapiens
LGTAWCSCREGFMK

SEQ ID NO: 6694 - protein, 14 aa, Homo Sapiens
GTAWCSCREGFMKA

SEQ ID NO: 6695 - protein, 14 aa, Homo Sapiens
TAWCSCREGFMKAS

SEQ ID NO: 6696 - protein, 14 aa, Homo Sapiens
AWCSCREGFMKASD

SEQ ID NO: 6697 - protein, 14 aa, Homo Sapiens
WCSCREGFMKASDG

SEQ ID NO: 6698 - protein, 14 aa, Homo Sapiens
CSCREGFMKASDGK

SEQ ID NO: 6699 - protein, 14 aa, Homo Sapiens
SCREGFMKASDGKT

SEQ ID NO: 6700 - protein, 14 aa, Homo Sapiens
CREGFMKASDGKTC

SEQ ID NO: 6701 - protein, 14 aa, Homo Sapiens
REGFMKASDGKTCL

SEQ ID NO: 6702 - protein, 14 aa, Homo Sapiens
EGFMKASDGKTCLA

SEQ ID NO: 6703 - protein, 14 aa, Homo Sapiens
GFMKASDGKTCLAL

SEQ ID NO: 6704 - protein, 14 aa, Homo Sapiens
FMKASDGKTCLALD

SEQ ID NO: 6705 - protein, 14 aa, Homo Sapiens
MKASDGKTCLALDG

SEQ ID NO: 6706 - protein, 14 aa, Homo Sapiens
KASDGKTCLALDGH

SEQ ID NO: 6707 - protein, 14 aa, Homo Sapiens
ASDGKTCLALDGHQ

SEQ ID NO: 6708 - protein, 14 aa, Homo Sapiens
SDGKTCLALDGHQL

SEQ ID NO: 6709 - protein, 14 aa, Homo Sapiens
DGKTCLALDGHQLL

SEQ ID NO: 6710 - protein, 14 aa, Homo Sapiens
GKTCLALDGHQLLA

SEQ ID NO: 6711 - protein, 14 aa, Homo Sapiens
KTCLALDGHQLLAG

SEQ ID NO: 6712 - protein, 14 aa, Homo Sapiens
TCLALDGHQLLAGG

SEQ ID NO: 6713 - protein, 14 aa, Homo Sapiens
CLALDGHQLLAGGE

SEQ ID NO: 6714 - protein, 14 aa, Homo Sapiens
LALDGHQLLAGGEV

SEQ ID NO: 6715 - protein, 14 aa, Homo Sapiens
ALDGHQLLAGGEVD

SEQ ID NO: 6716 - protein, 14 aa, Homo Sapiens
LDGHQLLAGGEVDL

SEQ ID NO: 6717 - protein, 14 aa, Homo Sapiens
DGHQLLAGGEVDLK

SEQ ID NO: 6718 - protein, 14 aa, Homo Sapiens
GHQLLAGGEVDLKN

SEQ ID NO: 6719 - protein, 14 aa, Homo Sapiens
HQLLAGGEVDLKNQ

SEQ ID NO: 6720 - protein, 14 aa, Homo Sapiens
QLLAGGEVDLKNQV

SEQ ID NO: 6721 - protein, 14 aa, Homo Sapiens
LLAGGEVDLKNQVT

SEQ ID NO: 6722 - protein, 14 aa, Homo Sapiens
LAGGEVDLKNQVTP

SEQ ID NO: 6723 - protein, 14 aa, Homo Sapiens
AGGEVDLKNQVTPL

SEQ ID NO: 6724 - protein, 14 aa, Homo Sapiens
GGEVDLKNQVTPLD

SEQ ID NO: 6725 - protein, 14 aa, Homo Sapiens
GEVDLKNQVTPLDI

SEQ ID NO: 6726 - protein, 14 aa, Homo Sapiens
EVDLKNQVTPLDIL

SEQ ID NO: 6727 - protein, 14 aa, Homo Sapiens
VDLKNQVTPLDILS

SEQ ID NO: 6728 - protein, 14 aa, Homo Sapiens
DLKNQVTPLDILSK

SEQ ID NO: 6729 - protein, 14 aa, Homo Sapiens
LKNQVTPLDILSKT

SEQ ID NO: 6730 - protein, 14 aa, Homo Sapiens
KNQVTPLDILSKTR

SEQ ID NO: 6731 - protein, 14 aa, Homo Sapiens
NQVTPLDILSKTRV

SEQ ID NO: 6732 - protein, 14 aa, Homo Sapiens
QVTPLDILSKTRVS

SEQ ID NO: 6733 - protein, 14 aa, Homo Sapiens
VTPLDILSKTRVSE

SEQ ID NO: 6734 - protein, 14 aa, Homo Sapiens
TPLDILSKTRVSED

SEQ ID NO: 6735 - protein, 14 aa, Homo Sapiens
PLDILSKTRVSEDN

SEQ ID NO: 6736 - protein, 14 aa, Homo Sapiens
LDILSKTRVSEDNI

SEQ ID NO: 6737 - protein, 14 aa, Homo Sapiens
DILSKTRVSEDNIT

SEQ ID NO: 6738 - protein, 14 aa, Homo Sapiens
ILSKTRVSEDNITE

SEQ ID NO: 6739 - protein, 14 aa, Homo Sapiens
LSKTRVSEDNITES

SEQ ID NO: 6740 - protein, 14 aa, Homo Sapiens
SKTRVSEDNITESQ

SEQ ID NO: 6741 - protein, 14 aa, Homo Sapiens
KTRVSEDNITESQH

SEQ ID NO: 6742 - protein, 14 aa, Homo Sapiens
TRVSEDNITESQHM

SEQ ID NO: 6743 - protein, 14 aa, Homo Sapiens
RVSEDNITESQHML

SEQ ID NO: 6744 - protein, 14 aa, Homo Sapiens
VSEDNITESQHMLV

SEQ ID NO: 6745 - protein, 14 aa, Homo Sapiens
SEDNITESQHMLVA

SEQ ID NO: 6746 - protein, 14 aa, Homo Sapiens
EDNITESQHMLVAE

SEQ ID NO: 6747 - protein, 14 aa, Homo Sapiens
DNITESQHMLVAEI

SEQ ID NO: 6748 - protein, 14 aa, Homo Sapiens
NITESQHMLVAEIM

SEQ ID NO: 6749 - protein, 14 aa, Homo Sapiens
ITESQHMLVAEIMV

SEQ ID NO: 6750 - protein, 14 aa, Homo Sapiens
TESQHMLVAEIMVS

SEQ ID NO: 6751 - protein, 14 aa, Homo Sapiens
ESQHMLVAEIMVSD

SEQ ID NO: 6752 - protein, 14 aa, Homo Sapiens
SQHMLVAEIMVSDQ

SEQ ID NO: 6753 - protein, 14 aa, Homo Sapiens
QHMLVAEIMVSDQD

SEQ ID NO: 6754 - protein, 14 aa, Homo Sapiens
HMLVAEIMVSDQDD

SEQ ID NO: 6755 - protein, 14 aa, Homo Sapiens
MLVAEIMVSDQDDC

SEQ ID NO: 6756 - protein, 14 aa, Homo Sapiens
LVAEIMVSDQDDCA

SEQ ID NO: 6757 - protein, 14 aa, Homo Sapiens
VAEIMVSDQDDCAP

SEQ ID NO: 6758 - protein, 14 aa, Homo Sapiens
AEIMVSDQDDCAPV

SEQ ID NO: 6759 - protein, 14 aa, Homo Sapiens
EIMVSDQDDCAPVG

SEQ ID NO: 6760 - protein, 14 aa, Homo Sapiens
IMVSDQDDCAPVGC

SEQ ID NO: 6761 - protein, 14 aa, Homo Sapiens
MVSDQDDCAPVGCS

SEQ ID NO: 6762 - protein, 14 aa, Homo Sapiens
VSDQDDCAPVGCSM

SEQ ID NO: 6763 - protein, 14 aa, Homo Sapiens
SDQDDCAPVGCSMY

SEQ ID NO: 6764 - protein, 14 aa, Homo Sapiens
DQDDCAPVGCSMYA

SEQ ID NO: 6765 - protein, 14 aa, Homo Sapiens
QDDCAPVGCSMYAR

SEQ ID NO: 6766 - protein, 14 aa, Homo Sapiens
DDCAPVGCSMYARC

SEQ ID NO: 6767 - protein, 14 aa, Homo Sapiens
DCAPVGCSMYARCI

SEQ ID NO: 6768 - protein, 14 aa, Homo Sapiens
CAPVGCSMYARCIS

SEQ ID NO: 6769 - protein, 14 aa, Homo Sapiens
APVGCSMYARCISE

SEQ ID NO: 6770 - protein, 14 aa, Homo Sapiens
PVGCSMYARCISEG

SEQ ID NO: 6771 - protein, 14 aa, Homo Sapiens
VGCSMYARCISEGE

SEQ ID NO: 6772 - protein, 14 aa, Homo Sapiens
GCSMYARCISEGED

SEQ ID NO: 6773 - protein, 14 aa, Homo Sapiens
CSMYARCISEGEDA

SEQ ID NO: 6774 - protein, 14 aa, Homo Sapiens
SMYARCISEGEDAT

SEQ ID NO: 6775 - protein, 14 aa, Homo Sapiens
MYARCISEGEDATC

SEQ ID NO: 6776 - protein, 14 aa, Homo Sapiens
YARCISEGEDATCQ

SEQ ID NO: 6777 - protein, 14 aa, Homo Sapiens
ARCISEGEDATCQC

SEQ ID NO: 6778 - protein, 14 aa, Homo Sapiens
RCISEGEDATCQCL

SEQ ID NO: 6779 - protein, 14 aa, Homo Sapiens
CISEGEDATCQCLK

SEQ ID NO: 6780 - protein, 14 aa, Homo Sapiens
ISEGEDATCQCLKG

SEQ ID NO: 6781 - protein, 14 aa, Homo Sapiens
SEGEDATCQCLKGF

SEQ ID NO: 6782 - protein, 14 aa, Homo Sapiens
EGEDATCQCLKGFA

SEQ ID NO: 6783 - protein, 14 aa, Homo Sapiens
GEDATCQCLKGFAG

SEQ ID NO: 6784 - protein, 14 aa, Homo Sapiens
EDATCQCLKGFAGD

SEQ ID NO: 6785 - protein, 14 aa, Homo Sapiens
DATCQCLKGFAGDG

SEQ ID NO: 6786 - protein, 14 aa, Homo Sapiens
ATCQCLKGFAGDGK

SEQ ID NO: 6787 - protein, 14 aa, Homo Sapiens
TCQCLKGFAGDGKL

SEQ ID NO: 6788 - protein, 14 aa, Homo Sapiens
CQCLKGFAGDGKLC

SEQ ID NO: 6789 - protein, 14 aa, Homo Sapiens
QCLKGFAGDGKLCS

SEQ ID NO: 6790 - protein, 14 aa, Homo Sapiens
CLKGFAGDGKLCSD

SEQ ID NO: 6791 - protein, 14 aa, Homo Sapiens
LKGFAGDGKLCSDI

SEQ ID NO: 6792 - protein, 14 aa, Homo Sapiens
KGFAGDGKLCSDID

SEQ ID NO: 6793 - protein, 14 aa, Homo Sapiens
GFAGDGKLCSDIDE

SEQ ID NO: 6794 - protein, 14 aa, Homo Sapiens
FAGDGKLCSDIDEC

SEQ ID NO: 6795 - protein, 14 aa, Homo Sapiens
AGDGKLCSDIDECE

SEQ ID NO: 6796 - protein, 14 aa, Homo Sapiens
GDGKLCSDIDECEM

SEQ ID NO: 6797 - protein, 14 aa, Homo Sapiens
DGKLCSDIDECEMG

SEQ ID NO: 6798 - protein, 14 aa, Homo Sapiens
GKLCSDIDECEMGV

SEQ ID NO: 6799 - protein, 14 aa, Homo Sapiens
KLCSDIDECEMGVP

SEQ ID NO: 6800 - protein, 14 aa, Homo Sapiens
LCSDIDECEMGVPV

SEQ ID NO: 6801 - protein, 14 aa, Homo Sapiens
CSDIDECEMGVPVC

SEQ ID NO: 6802 - protein, 14 aa, Homo Sapiens
SDIDECEMGVPVCP

SEQ ID NO: 6803 - protein, 14 aa, Homo Sapiens
DIDECEMGVPVCPP

SEQ ID NO: 6804 - protein, 14 aa, Homo Sapiens
IDECEMGVPVCPPA

SEQ ID NO: 6805 - protein, 14 aa, Homo Sapiens
DECEMGVPVCPPAS

SEQ ID NO: 6806 - protein, 14 aa, Homo Sapiens
ECEMGVPVCPPASS

SEQ ID NO: 6807 - protein, 14 aa, Homo Sapiens
CEMGVPVCPPASSK

SEQ ID NO: 6808 - protein, 14 aa, Homo Sapiens
EMGVPVCPPASSKC

SEQ ID NO: 6809 - protein, 14 aa, Homo Sapiens
MGVPVCPPASSKCI

SEQ ID NO: 6810 - protein, 14 aa, Homo Sapiens
GVPVCPPASSKCIN

SEQ ID NO: 6811 - protein, 14 aa, Homo Sapiens
VPVCPPASSKCINT

SEQ ID NO: 6812 - protein, 14 aa, Homo Sapiens
PVCPPASSKCINTE

SEQ ID NO: 6813 - protein, 14 aa, Homo Sapiens
VCPPASSKCINTEG

SEQ ID NO: 6814 - protein, 14 aa, Homo Sapiens
CPPASSKCINTEGG

SEQ ID NO: 6815 - protein, 14 aa, Homo Sapiens
PPASSKCINTEGGY

SEQ ID NO: 6816 - protein, 14 aa, Homo Sapiens
PASSKCINTEGGYV

SEQ ID NO: 6817 - protein, 14 aa, Homo Sapiens
ASSKCINTEGGYVC

SEQ ID NO: 6818 - protein, 14 aa, Homo Sapiens
SSKCINTEGGYVCR

SEQ ID NO: 6819 - protein, 14 aa, Homo Sapiens
SKCINTEGGYVCRC

SEQ ID NO: 6820 - protein, 14 aa, Homo Sapiens
KCINTEGGYVCRCS

SEQ ID NO: 6821 - protein, 14 aa, Homo Sapiens
CINTEGGYVCRCSE

SEQ ID NO: 6822 - protein, 14 aa, Homo Sapiens
INTEGGYVCRCSEG

SEQ ID NO: 6823 - protein, 14 aa, Homo Sapiens
NTEGGYVCRCSEGY

SEQ ID NO: 6824 - protein, 14 aa, Homo Sapiens
TEGGYVCRCSEGYQ

SEQ ID NO: 6825 - protein, 14 aa, Homo Sapiens
EGGYVCRCSEGYQG

SEQ ID NO: 6826 - protein, 14 aa, Homo Sapiens
GGYVCRCSEGYQGD

SEQ ID NO: 6827 - protein, 14 aa, Homo Sapiens
GYVCRCSEGYQGDG

SEQ ID NO: 6828 - protein, 14 aa, Homo Sapiens
YVCRCSEGYQGDGI

SEQ ID NO: 6829 - protein, 14 aa, Homo Sapiens
VCRCSEGYQGDGIH

SEQ ID NO: 6830 - protein, 14 aa, Homo Sapiens
CRCSEGYQGDGIHC

SEQ ID NO: 6831 - protein, 14 aa, Homo Sapiens
RCSEGYQGDGIHCL

SEQ ID NO: 6832 - protein, 14 aa, Homo Sapiens
CSEGYQGDGIHCLD

SEQ ID NO: 6833 - protein, 14 aa, Homo Sapiens
SEGYQGDGIHCLDI

SEQ ID NO: 6834 - protein, 14 aa, Homo Sapiens
EGYQGDGIHCLDID

SEQ ID NO: 6835 - protein, 14 aa, Homo Sapiens
GYQGDGIHCLDIDE

SEQ ID NO: 6836 - protein, 14 aa, Homo Sapiens
YQGDGIHCLDIDEC

SEQ ID NO: 6837 - protein, 14 aa, Homo Sapiens
QGDGIHCLDIDECQ

SEQ ID NO: 6838 - protein, 14 aa, Homo Sapiens
GDGIHCLDIDECQL

SEQ ID NO: 6839 - protein, 14 aa, Homo Sapiens
DGIHCLDIDECQLG

SEQ ID NO: 6840 - protein, 14 aa, Homo Sapiens
GIHCLDIDECQLGV

SEQ ID NO: 6841 - protein, 14 aa, Homo Sapiens
IHCLDIDECQLGVH

SEQ ID NO: 6842 - protein, 14 aa, Homo Sapiens
HCLDIDECQLGVHS

SEQ ID NO: 6843 - protein, 14 aa, Homo Sapiens
CLDIDECQLGVHSC

SEQ ID NO: 6844 - protein, 14 aa, Homo Sapiens
LDIDECQLGVHSCG

SEQ ID NO: 6845 - protein, 14 aa, Homo Sapiens
DIDECQLGVHSCGE

SEQ ID NO: 6846 - protein, 14 aa, Homo Sapiens
IDECQLGVHSCGEN

SEQ ID NO: 6847 - protein, 14 aa, Homo Sapiens
DECQLGVHSCGENA

SEQ ID NO: 6848 - protein, 14 aa, Homo Sapiens
ECQLGVHSCGENAS

SEQ ID NO: 6849 - protein, 14 aa, Homo Sapiens
CQLGVHSCGENASC

SEQ ID NO: 6850 - protein, 14 aa, Homo Sapiens
QLGVHSCGENASCT

SEQ ID NO: 6851 - protein, 14 aa, Homo Sapiens
LGVHSCGENASCTN

SEQ ID NO: 6852 - protein, 14 aa, Homo Sapiens
GVHSCGENASCTNT

SEQ ID NO: 6853 - protein, 14 aa, Homo Sapiens
VHSCGENASCTNTE

SEQ ID NO: 6854 - protein, 14 aa, Homo Sapiens
HSCGENASCTNTEG

SEQ ID NO: 6855 - protein, 14 aa, Homo Sapiens
SCGENASCTNTEGG

SEQ ID NO: 6856 - protein, 14 aa, Homo Sapiens
CGENASCTNTEGGY

SEQ ID NO: 6857 - protein, 14 aa, Homo Sapiens
GENASCTNTEGGYT

SEQ ID NO: 6858 - protein, 14 aa, Homo Sapiens
ENASCTNTEGGYTC

SEQ ID NO: 6859 - protein, 14 aa, Homo Sapiens
NASCTNTEGGYTCM

SEQ ID NO: 6860 - protein, 14 aa, Homo Sapiens
ASCTNTEGGYTCMC

SEQ ID NO: 6861 - protein, 14 aa, Homo Sapiens
SCTNTEGGYTCMCA

SEQ ID NO: 6862 - protein, 14 aa, Homo Sapiens
CTNTEGGYTCMCAG

SEQ ID NO: 6863 - protein, 14 aa, Homo Sapiens
TNTEGGYTCMCAGR

SEQ ID NO: 6864 - protein, 14 aa, Homo Sapiens
NTEGGYTCMCAGRL

SEQ ID NO: 6865 - protein, 14 aa, Homo Sapiens
TEGGYTCMCAGRLS

SEQ ID NO: 6866 - protein, 14 aa, Homo Sapiens
EGGYTCMCAGRLSE

SEQ ID NO: 6867 - protein, 14 aa, Homo Sapiens
GGYTCMCAGRLSEP

SEQ ID NO: 6868 - protein, 14 aa, Homo Sapiens
GYTCMCAGRLSEPG

SEQ ID NO: 6869 - protein, 14 aa, Homo Sapiens
YTCMCAGRLSEPGL

SEQ ID NO: 6870 - protein, 14 aa, Homo Sapiens
TCMCAGRLSEPGLI

SEQ ID NO: 6871 - protein, 14 aa, Homo Sapiens
CMCAGRLSEPGLIC

SEQ ID NO: 6872 - protein, 14 aa, Homo Sapiens
MCAGRLSEPGLICP

SEQ ID NO: 6873 - protein, 14 aa, Homo Sapiens
CAGRLSEPGLICPD

SEQ ID NO: 6874 - protein, 14 aa, Homo Sapiens
AGRLSEPGLICPDS

SEQ ID NO: 6875 - protein, 14 aa, Homo Sapiens
GRLSEPGLICPDST

SEQ ID NO: 6876 - protein, 14 aa, Homo Sapiens
RLSEPGLICPDSTP

SEQ ID NO: 6877 - protein, 14 aa, Homo Sapiens
LSEPGLICPDSTPP

SEQ ID NO: 6878 - protein, 14 aa, Homo Sapiens
SEPGLICPDSTPPP

SEQ ID NO: 6879 - protein, 14 aa, Homo Sapiens
EPGLICPDSTPPPH

SEQ ID NO: 6880 - protein, 14 aa, Homo Sapiens
PGLICPDSTPPPHL

SEQ ID NO: 6881 - protein, 14 aa, Homo Sapiens
GLICPDSTPPPHLR

SEQ ID NO: 6882 - protein, 14 aa, Homo Sapiens
LICPDSTPPPHLRE

SEQ ID NO: 6883 - protein, 14 aa, Homo Sapiens
ICPDSTPPPHLRED

SEQ ID NO: 6884 - protein, 14 aa, Homo Sapiens
CPDSTPPPHLREDD

SEQ ID NO: 6885 - protein, 14 aa, Homo Sapiens
PDSTPPPHLREDDH

SEQ ID NO: 6886 - protein, 14 aa, Homo Sapiens
DSTPPPHLREDDHH

SEQ ID NO: 6887 - protein, 14 aa, Homo Sapiens
STPPPHLREDDHHY

SEQ ID NO: 6888 - protein, 14 aa, Homo Sapiens
TPPPHLREDDHHYS

SEQ ID NO: 6889 - protein, 14 aa, Homo Sapiens
PPPHLREDDHHYSV

SEQ ID NO: 6890 - protein, 14 aa, Homo Sapiens
PPHLREDDHHYSVR

SEQ ID NO: 6891 - protein, 14 aa, Homo Sapiens
PHLREDDHHYSVRN

SEQ ID NO: 6892 - protein, 14 aa, Homo Sapiens
HLREDDHHYSVRNS

SEQ ID NO: 6893 - protein, 14 aa, Homo Sapiens
LREDDHHYSVRNSD

SEQ ID NO: 6894 - protein, 14 aa, Homo Sapiens
REDDHHYSVRNSDS

SEQ ID NO: 6895 - protein, 14 aa, Homo Sapiens
EDDHHYSVRNSDSE

SEQ ID NO: 6896 - protein, 14 aa, Homo Sapiens
DDHHYSVRNSDSEC

SEQ ID NO: 6897 - protein, 14 aa, Homo Sapiens
DHHYSVRNSDSECP

SEQ ID NO: 6898 - protein, 14 aa, Homo Sapiens
HHYSVRNSDSECPL

SEQ ID NO: 6899 - protein, 14 aa, Homo Sapiens
HYSVRNSDSECPLS

SEQ ID NO: 6900 - protein, 14 aa, Homo Sapiens
YSVRNSDSECPLSH

SEQ ID NO: 6901 - protein, 14 aa, Homo Sapiens
SVRNSDSECPLSHD

SEQ ID NO: 6902 - protein, 14 aa, Homo Sapiens
VRNSDSECPLSHDG

SEQ ID NO: 6903 - protein, 14 aa, Homo Sapiens
RNSDSECPLSHDGY

SEQ ID NO: 6904 - protein, 14 aa, Homo Sapiens
NSDSECPLSHDGYC

SEQ ID NO: 6905 - protein, 14 aa, Homo Sapiens
SDSECPLSHDGYCL

SEQ ID NO: 6906 - protein, 14 aa, Homo Sapiens
DSECPLSHDGYCLH

SEQ ID NO: 6907 - protein, 14 aa, Homo Sapiens
SECPLSHDGYCLHD

SEQ ID NO: 6908 - protein, 14 aa, Homo Sapiens
ECPLSHDGYCLHDG

SEQ ID NO: 6909 - protein, 14 aa, Homo Sapiens
CPLSHDGYCLHDGV

SEQ ID NO: 6910 - protein, 14 aa, Homo Sapiens
PLSHDGYCLHDGVC

SEQ ID NO: 6911 - protein, 14 aa, Homo Sapiens
LSHDGYCLHDGVCM

SEQ ID NO: 6912 - protein, 14 aa, Homo Sapiens
SHDGYCLHDGVCMY

SEQ ID NO: 6913 - protein, 14 aa, Homo Sapiens
HDGYCLHDGVCMYI

SEQ ID NO: 6914 - protein, 14 aa, Homo Sapiens
DGYCLHDGVCMYIE

SEQ ID NO: 6915 - protein, 14 aa, Homo Sapiens
GYCLHDGVCMYIEA

SEQ ID NO: 6916 - protein, 14 aa, Homo Sapiens
YCLHDGVCMYIEAL

SEQ ID NO: 6917 - protein, 14 aa, Homo Sapiens
CLHDGVCMYIEALD

SEQ ID NO: 6918 - protein, 14 aa, Homo Sapiens
LHDGVCMYIEALDK

SEQ ID NO: 6919 - protein, 14 aa, Homo Sapiens
HDGVCMYIEALDKY

SEQ ID NO: 6920 - protein, 14 aa, Homo Sapiens
DGVCMYIEALDKYA

SEQ ID NO: 6921 - protein, 14 aa, Homo Sapiens
GVCMYIEALDKYAC

SEQ ID NO: 6922 - protein, 14 aa, Homo Sapiens
VCMYIEALDKYACN

SEQ ID NO: 6923 - protein, 14 aa, Homo Sapiens
CMYIEALDKYACNC

SEQ ID NO: 6924 - protein, 14 aa, Homo Sapiens
MYIEALDKYACNCV

SEQ ID NO: 6925 - protein, 14 aa, Homo Sapiens
YIEALDKYACNCVV

SEQ ID NO: 6926 - protein, 14 aa, Homo Sapiens
IEALDKYACNCVVG

SEQ ID NO: 6927 - protein, 14 aa, Homo Sapiens
EALDKYACNCVVGY

SEQ ID NO: 6928 - protein, 14 aa, Homo Sapiens
ALDKYACNCVVGYI

SEQ ID NO: 6929 - protein, 14 aa, Homo Sapiens
LDKYACNCVVGYIG

SEQ ID NO: 6930 - protein, 14 aa, Homo Sapiens
DKYACNCVVGYIGE

SEQ ID NO: 6931 - protein, 14 aa, Homo Sapiens
KYACNCVVGYIGER

SEQ ID NO: 6932 - protein, 14 aa, Homo Sapiens
YACNCVVGYIGERC

SEQ ID NO: 6933 - protein, 14 aa, Homo Sapiens
ACNCVVGYIGERCQ

SEQ ID NO: 6934 - protein, 14 aa, Homo Sapiens
CNCVVGYIGERCQY

SEQ ID NO: 6935 - protein, 14 aa, Homo Sapiens
NCVVGYIGERCQYR

SEQ ID NO: 6936 - protein, 14 aa, Homo Sapiens
CVVGYIGERCQYRD

SEQ ID NO: 6937 - protein, 14 aa, Homo Sapiens
VVGYIGERCQYRDL

SEQ ID NO: 6938 - protein, 14 aa, Homo Sapiens
VGYIGERCQYRDLK

SEQ ID NO: 6939 - protein, 14 aa, Homo Sapiens
GYIGERCQYRDLKW

SEQ ID NO: 6940 - protein, 14 aa, Homo Sapiens
YIGERCQYRDLKWW

SEQ ID NO: 6941 - protein, 14 aa, Homo Sapiens
IGERCQYRDLKWWE

SEQ ID NO: 6942 - protein, 14 aa, Homo Sapiens
GERCQYRDLKWWEL

SEQ ID NO: 6943 - protein, 14 aa, Homo Sapiens
ERCQYRDLKWWELR

SEQ ID NO: 6944 - protein, 14 aa, Homo Sapiens
RCQYRDLKWWELRH

SEQ ID NO: 6945 - protein, 14 aa, Homo Sapiens
CQYRDLKWWELRHA

SEQ ID NO: 6946 - protein, 14 aa, Homo Sapiens
QYRDLKWWELRHAG

SEQ ID NO: 6947 - protein, 14 aa, Homo Sapiens
YRDLKWWELRHAGH

SEQ ID NO: 6948 - protein, 14 aa, Homo Sapiens
RDLKWWELRHAGHG

SEQ ID NO: 6949 - protein, 14 aa, Homo Sapiens
DLKWWELRHAGHGQ

SEQ ID NO: 6950 - protein, 14 aa, Homo Sapiens
LKWWELRHAGHGQQ

SEQ ID NO: 6951 - protein, 14 aa, Homo Sapiens
KWWELRHAGHGQQQ

SEQ ID NO: 6952 - protein, 14 aa, Homo Sapiens
WWELRHAGHGQQQK

SEQ ID NO: 6953 - protein, 14 aa, Homo Sapiens
WELRHAGHGQQQKV

SEQ ID NO: 6954 - protein, 14 aa, Homo Sapiens
ELRHAGHGQQQKVI

SEQ ID NO: 6955 - protein, 14 aa, Homo Sapiens
LRHAGHGQQQKVIV

SEQ ID NO: 6956 - protein, 14 aa, Homo Sapiens
RHAGHGQQQKVIVV

SEQ ID NO: 6957 - protein, 14 aa, Homo Sapiens
HAGHGQQQKVIVVA

SEQ ID NO: 6958 - protein, 14 aa, Homo Sapiens
AGHGQQQKVIVVAV

SEQ ID NO: 6959 - protein, 14 aa, Homo Sapiens
GHGQQQKVIVVAVC

SEQ ID NO: 6960 - protein, 14 aa, Homo Sapiens
HGQQQKVIVVAVCV

SEQ ID NO: 6961 - protein, 14 aa, Homo Sapiens
GQQQKVIVVAVCVV

SEQ ID NO: 6962 - protein, 14 aa, Homo Sapiens
QQQKVIVVAVCVVV

SEQ ID NO: 6963 - protein, 14 aa, Homo Sapiens
QQKVIVVAVCVVVL

SEQ ID NO: 6964 - protein, 14 aa, Homo Sapiens
QKVIVVAVCVVVLV

SEQ ID NO: 6965 - protein, 14 aa, Homo Sapiens
KVIVVAVCVVVLVM

SEQ ID NO: 6966 - protein, 14 aa, Homo Sapiens
VIVVAVCVVVLVML

SEQ ID NO: 6967 - protein, 14 aa, Homo Sapiens
IVVAVCVVVLVMLL

SEQ ID NO: 6968 - protein, 14 aa, Homo Sapiens
VVAVCVVVLVMLLL

SEQ ID NO: 6969 - protein, 14 aa, Homo Sapiens
VAVCVVVLVMLLLL

SEQ ID NO: 6970 - protein, 14 aa, Homo Sapiens
AVCVVVLVMLLLLS

SEQ ID NO: 6971 - protein, 14 aa, Homo Sapiens
VCVVVLVMLLLLSL

SEQ ID NO: 6972 - protein, 14 aa, Homo Sapiens
CVVVLVMLLLLSLW

SEQ ID NO: 6973 - protein, 14 aa, Homo Sapiens
VVVLVMLLLLSLWG

SEQ ID NO: 6974 - protein, 14 aa, Homo Sapiens
VVLVMLLLLSLWGA

SEQ ID NO: 6975 - protein, 14 aa, Homo Sapiens
VLVMLLLLSLWGAH

SEQ ID NO: 6976 - protein, 14 aa, Homo Sapiens
LVMLLLLSLWGAHY

SEQ ID NO: 6977 - protein, 14 aa, Homo Sapiens
VMLLLLSLWGAHYY

SEQ ID NO: 6978 - protein, 14 aa, Homo Sapiens
MLLLLSLWGAHYYR

SEQ ID NO: 6979 - protein, 14 aa, Homo Sapiens
LLLLSLWGAHYYRT

SEQ ID NO: 6980 - protein, 14 aa, Homo Sapiens
LLLSLWGAHYYRTQ

SEQ ID NO: 6981 - protein, 14 aa, Homo Sapiens
LLSLWGAHYYRTQK

SEQ ID NO: 6982 - protein, 14 aa, Homo Sapiens
LSLWGAHYYRTQKL

SEQ ID NO: 6983 - protein, 14 aa, Homo Sapiens
SLWGAHYYRTQKLL

SEQ ID NO: 6984 - protein, 14 aa, Homo Sapiens
LWGAHYYRTQKLLS

SEQ ID NO: 6985 - protein, 14 aa, Homo Sapiens
WGAHYYRTQKLLSK

SEQ ID NO: 6986 - protein, 14 aa, Homo Sapiens
GAHYYRTQKLLSKN

SEQ ID NO: 6987 - protein, 14 aa, Homo Sapiens
AHYYRTQKLLSKNP

SEQ ID NO: 6988 - protein, 14 aa, Homo Sapiens
HYYRTQKLLSKNPK

SEQ ID NO: 6989 - protein, 14 aa, Homo Sapiens
YYRTQKLLSKNPKN

SEQ ID NO: 6990 - protein, 14 aa, Homo Sapiens
YRTQKLLSKNPKNP

SEQ ID NO: 6991 - protein, 14 aa, Homo Sapiens
RTQKLLSKNPKNPY

SEQ ID NO: 6992 - protein, 14 aa, Homo Sapiens
TQKLLSKNPKNPYE

SEQ ID NO: 6993 - protein, 14 aa, Homo Sapiens
QKLLSKNPKNPYEE

SEQ ID NO: 6994 - protein, 14 aa, Homo Sapiens
KLLSKNPKNPYEES

SEQ ID NO: 6995 - protein, 14 aa, Homo Sapiens
LLSKNPKNPYEESS

SEQ ID NO: 6996 - protein, 14 aa, Homo Sapiens
LSKNPKNPYEESSR

SEQ ID NO: 6997 - protein, 14 aa, Homo Sapiens
SKNPKNPYEESSRD

SEQ ID NO: 6998 - protein, 14 aa, Homo Sapiens
KNPKNPYEESSRDV

SEQ ID NO: 6999 - protein, 14 aa, Homo Sapiens
NPKNPYEESSRDVR

SEQ ID NO: 7000 - protein, 14 aa, Homo Sapiens
PKNPYEESSRDVRS

SEQ ID NO: 7001 - protein, 14 aa, Homo Sapiens
KNPYEESSRDVRSR

SEQ ID NO: 7002 - protein, 14 aa, Homo Sapiens
NPYEESSRDVRSRR

SEQ ID NO: 7003 - protein, 14 aa, Homo Sapiens
PYEESSRDVRSRRP

SEQ ID NO: 7004 - protein, 14 aa, Homo Sapiens
YEESSRDVRSRRPA

SEQ ID NO: 7005 - protein, 14 aa, Homo Sapiens
EESSRDVRSRRPAD

SEQ ID NO: 7006 - protein, 14 aa, Homo Sapiens
ESSRDVRSRRPADT

SEQ ID NO: 7007 - protein, 14 aa, Homo Sapiens
SSRDVRSRRPADTE

SEQ ID NO: 7008 - protein, 14 aa, Homo Sapiens
SRDVRSRRPADTED

SEQ ID NO: 7009 - protein, 14 aa, Homo Sapiens
RDVRSRRPADTEDG

SEQ ID NO: 7010 - protein, 14 aa, Homo Sapiens
DVRSRRPADTEDGM

SEQ ID NO: 7011 - protein, 14 aa, Homo Sapiens
VRSRRPADTEDGMS

SEQ ID NO: 7012 - protein, 14 aa, Homo Sapiens
RSRRPADTEDGMSS

SEQ ID NO: 7013 - protein, 14 aa, Homo Sapiens
SRRPADTEDGMSSC

SEQ ID NO: 7014 - protein, 14 aa, Homo Sapiens
RRPADTEDGMSSCP

SEQ ID NO: 7015 - protein, 14 aa, Homo Sapiens
RPADTEDGMSSCPQ

SEQ ID NO: 7016 - protein, 14 aa, Homo Sapiens
PADTEDGMSSCPQP

SEQ ID NO: 7017 - protein, 14 aa, Homo Sapiens
ADTEDGMSSCPQPW

SEQ ID NO: 7018 - protein, 14 aa, Homo Sapiens
DTEDGMSSCPQPWF

SEQ ID NO: 7019 - protein, 14 aa, Homo Sapiens
TEDGMSSCPQPWFV

SEQ ID NO: 7020 - protein, 14 aa, Homo Sapiens
EDGMSSCPQPWFVV

SEQ ID NO: 7021 - protein, 14 aa, Homo Sapiens
DGMSSCPQPWFVVI

SEQ ID NO: 7022 - protein, 14 aa, Homo Sapiens
GMSSCPQPWFVVIK

SEQ ID NO: 7023 - protein, 14 aa, Homo Sapiens
MSSCPQPWFVVIKE

SEQ ID NO: 7024 - protein, 14 aa, Homo Sapiens
SSCPQPWFVVIKEH

SEQ ID NO: 7025 - protein, 14 aa, Homo Sapiens
SCPQPWFVVIKEHQ

SEQ ID NO: 7026 - protein, 14 aa, Homo Sapiens
CPQPWFVVIKEHQD

SEQ ID NO: 7027 - protein, 14 aa, Homo Sapiens
PQPWFVVIKEHQDL

SEQ ID NO: 7028 - protein, 14 aa, Homo Sapiens
QPWFVVIKEHQDLK

SEQ ID NO: 7029 - protein, 14 aa, Homo Sapiens
PWFVVIKEHQDLKN

SEQ ID NO: 7030 - protein, 14 aa, Homo Sapiens
WFVVIKEHQDLKNG

SEQ ID NO: 7031 - protein, 14 aa, Homo Sapiens
FVVIKEHQDLKNGG

SEQ ID NO: 7032 - protein, 14 aa, Homo Sapiens
VVIKEHQDLKNGGQ

SEQ ID NO: 7033 - protein, 14 aa, Homo Sapiens
VIKEHQDLKNGGQP

SEQ ID NO: 7034 - protein, 14 aa, Homo Sapiens
IKEHQDLKNGGQPV

SEQ ID NO: 7035 - protein, 14 aa, Homo Sapiens
KEHQDLKNGGQPVA

SEQ ID NO: 7036 - protein, 14 aa, Homo Sapiens
EHQDLKNGGQPVAG

SEQ ID NO: 7037 - protein, 14 aa, Homo Sapiens
HQDLKNGGQPVAGE

SEQ ID NO: 7038 - protein, 14 aa, Homo Sapiens
QDLKNGGQPVAGED

SEQ ID NO: 7039 - protein, 14 aa, Homo Sapiens
DLKNGGQPVAGEDG

SEQ ID NO: 7040 - protein, 14 aa, Homo Sapiens
LKNGGQPVAGEDGQ

SEQ ID NO: 7041 - protein, 14 aa, Homo Sapiens
KNGGQPVAGEDGQA

SEQ ID NO: 7042 - protein, 14 aa, Homo Sapiens
NGGQPVAGEDGQAA

SEQ ID NO: 7043 - protein, 14 aa, Homo Sapiens
GGQPVAGEDGQAAD

SEQ ID NO: 7044 - protein, 14 aa, Homo Sapiens
GQPVAGEDGQAADG

SEQ ID NO: 7045 - protein, 14 aa, Homo Sapiens
QPVAGEDGQAADGS

SEQ ID NO: 7046 - protein, 14 aa, Homo Sapiens
PVAGEDGQAADGSM

SEQ ID NO: 7047 - protein, 14 aa, Homo Sapiens
VAGEDGQAADGSMQ

SEQ ID NO: 7048 - protein, 14 aa, Homo Sapiens
AGEDGQAADGSMQP

SEQ ID NO: 7049 - protein, 14 aa, Homo Sapiens
GEDGQAADGSMQPT

SEQ ID NO: 7050 - protein, 14 aa, Homo Sapiens
EDGQAADGSMQPTS

SEQ ID NO: 7051 - protein, 14 aa, Homo Sapiens
DGQAADGSMQPTSW

SEQ ID NO: 7052 - protein, 14 aa, Homo Sapiens
GQAADGSMQPTSWR

SEQ ID NO: 7053 - protein, 14 aa, Homo Sapiens
QAADGSMQPTSWRQ

SEQ ID NO: 7054 - protein, 14 aa, Homo Sapiens
AADGSMQPTSWRQE

SEQ ID NO: 7055 - protein, 14 aa, Homo Sapiens
ADGSMQPTSWRQEP

SEQ ID NO: 7056 - protein, 14 aa, Homo Sapiens
DGSMQPTSWRQEPQ

SEQ ID NO: 7057 - protein, 14 aa, Homo Sapiens
GSMQPTSWRQEPQL

SEQ ID NO: 7058 - protein, 14 aa, Homo Sapiens
SMQPTSWRQEPQLC

SEQ ID NO: 7059 - protein, 14 aa, Homo Sapiens
MQPTSWRQEPQLCG

SEQ ID NO: 7060 - protein, 14 aa, Homo Sapiens
QPTSWRQEPQLCGM

SEQ ID NO: 7061 - protein, 14 aa, Homo Sapiens
PTSWRQEPQLCGMG

SEQ ID NO: 7062 - protein, 14 aa, Homo Sapiens
TSWRQEPQLCGMGT

SEQ ID NO: 7063 - protein, 14 aa, Homo Sapiens
SWRQEPQLCGMGTE

SEQ ID NO: 7064 - protein, 14 aa, Homo Sapiens
WRQEPQLCGMGTEQ

SEQ ID NO: 7065 - protein, 14 aa, Homo Sapiens
RQEPQLCGMGTEQG

SEQ ID NO: 7066 - protein, 14 aa, Homo Sapiens
QEPQLCGMGTEQGC

SEQ ID NO: 7067 - protein, 14 aa, Homo Sapiens
EPQLCGMGTEQGCW

SEQ ID NO: 7068 - protein, 14 aa, Homo Sapiens
PQLCGMGTEQGCWI

SEQ ID NO: 7069 - protein, 14 aa, Homo Sapiens
QLCGMGTEQGCWIP

SEQ ID NO: 7070 - protein, 14 aa, Homo Sapiens
LCGMGTEQGCWIPV

SEQ ID NO: 7071 - protein, 14 aa, Homo Sapiens
CGMGTEQGCWIPVS

SEQ ID NO: 7072 - protein, 14 aa, Homo Sapiens
GMGTEQGCWIPVSS

SEQ ID NO: 7073 - protein, 14 aa, Homo Sapiens
MGTEQGCWIPVSSD

SEQ ID NO: 7074 - protein, 14 aa, Homo Sapiens
GTEQGCWIPVSSDK

SEQ ID NO: 7075 - protein, 14 aa, Homo Sapiens
TEQGCWIPVSSDKG

SEQ ID NO: 7076 - protein, 14 aa, Homo Sapiens
EQGCWIPVSSDKGS

SEQ ID NO: 7077 - protein, 14 aa, Homo Sapiens
QGCWIPVSSDKGSC

SEQ ID NO: 7078 - protein, 14 aa, Homo Sapiens
GCWIPVSSDKGSCP

SEQ ID NO: 7079 - protein, 14 aa, Homo Sapiens
CWIPVSSDKGSCPQ

SEQ ID NO: 7080 - protein, 14 aa, Homo Sapiens
WIPVSSDKGSCPQV

SEQ ID NO: 7081 - protein, 14 aa, Homo Sapiens
IPVSSDKGSCPQVM

SEQ ID NO: 7082 - protein, 14 aa, Homo Sapiens
PVSSDKGSCPQVME

SEQ ID NO: 7083 - protein, 14 aa, Homo Sapiens
VSSDKGSCPQVMER

SEQ ID NO: 7084 - protein, 14 aa, Homo Sapiens
SSDKGSCPQVMERS

SEQ ID NO: 7085 - protein, 14 aa, Homo Sapiens
SDKGSCPQVMERSF

SEQ ID NO: 7086 - protein, 14 aa, Homo Sapiens
DKGSCPQVMERSFH

SEQ ID NO: 7087 - protein, 14 aa, Homo Sapiens
KGSCPQVMERSFHM

SEQ ID NO: 7088 - protein, 14 aa, Homo Sapiens
GSCPQVMERSFHMP

SEQ ID NO: 7089 - protein, 14 aa, Homo Sapiens
SCPQVMERSFHMPS

SEQ ID NO: 7090 - protein, 14 aa, Homo Sapiens
CPQVMERSFHMPSY

SEQ ID NO: 7091 - protein, 14 aa, Homo Sapiens
PQVMERSFHMPSYG

SEQ ID NO: 7092 - protein, 14 aa, Homo Sapiens
QVMERSFHMPSYGT

SEQ ID NO: 7093 - protein, 14 aa, Homo Sapiens
VMERSFHMPSYGTQ

SEQ ID NO: 7094 - protein, 14 aa, Homo Sapiens
MERSFHMPSYGTQT

SEQ ID NO: 7095 - protein, 14 aa, Homo Sapiens
ERSFHMPSYGTQTL

SEQ ID NO: 7096 - protein, 14 aa, Homo Sapiens
RSFHMPSYGTQTLE

SEQ ID NO: 7097 - protein, 14 aa, Homo Sapiens
SFHMPSYGTQTLEG

SEQ ID NO: 7098 - protein, 14 aa, Homo Sapiens
FHMPSYGTQTLEGG

SEQ ID NO: 7099 - protein, 14 aa, Homo Sapiens
HMPSYGTQTLEGGV

SEQ ID NO: 7100 - protein, 14 aa, Homo Sapiens
MPSYGTQTLEGGVE

SEQ ID NO: 7101 - protein, 14 aa, Homo Sapiens
PSYGTQTLEGGVEK

SEQ ID NO: 7102 - protein, 14 aa, Homo Sapiens
SYGTQTLEGGVEKP

SEQ ID NO: 7103 - protein, 14 aa, Homo Sapiens
YGTQTLEGGVEKPH

SEQ ID NO: 7104 - protein, 14 aa, Homo Sapiens
GTQTLEGGVEKPHS

SEQ ID NO: 7105 - protein, 14 aa, Homo Sapiens
TQTLEGGVEKPHSL

SEQ ID NO: 7106 - protein, 14 aa, Homo Sapiens
QTLEGGVEKPHSLL

SEQ ID NO: 7107 - protein, 14 aa, Homo Sapiens
TLEGGVEKPHSLLS

SEQ ID NO: 7108 - protein, 14 aa, Homo Sapiens
LEGGVEKPHSLLSA

SEQ ID NO: 7109 - protein, 14 aa, Homo Sapiens
EGGVEKPHSLLSAN

SEQ ID NO: 7110 - protein, 14 aa, Homo Sapiens
GGVEKPHSLLSANP

SEQ ID NO: 7111 - protein, 14 aa, Homo Sapiens
GVEKPHSLLSANPL

SEQ ID NO: 7112 - protein, 14 aa, Homo Sapiens
VEKPHSLLSANPLW

SEQ ID NO: 7113 - protein, 14 aa, Homo Sapiens
EKPHSLLSANPLWQ

SEQ ID NO: 7114 - protein, 14 aa, Homo Sapiens
KPHSLLSANPLWQQ

SEQ ID NO: 7115 - protein, 14 aa, Homo Sapiens
PHSLLSANPLWQQR

SEQ ID NO: 7116 - protein, 14 aa, Homo Sapiens
HSLLSANPLWQQRA

SEQ ID NO: 7117 - protein, 14 aa, Homo Sapiens
SLLSANPLWQQRAL

SEQ ID NO: 7118 - protein, 14 aa, Homo Sapiens
LLSANPLWQQRALD

SEQ ID NO: 7119 - protein, 14 aa, Homo Sapiens
LSANPLWQQRALDP

SEQ ID NO: 7120 - protein, 14 aa, Homo Sapiens
SANPLWQQRALDPP

SEQ ID NO: 7121 - protein, 14 aa, Homo Sapiens
ANPLWQQRALDPPH

SEQ ID NO: 7122 - protein, 14 aa, Homo Sapiens
NPLWQQRALDPPHQ

SEQ ID NO: 7123 - protein, 14 aa, Homo Sapiens
PLWQQRALDPPHQM

SEQ ID NO: 7124 - protein, 14 aa, Homo Sapiens
LWQQRALDPPHQME

SEQ ID NO: 7125 - protein, 14 aa, Homo Sapiens
WQQRALDPPHQMEL

SEQ ID NO: 7126 - protein, 14 aa, Homo Sapiens
QQRALDPPHQMELT

SEQ ID NO: 7127 - protein, 14 aa, Homo Sapiens
QRALDPPHQMELTQ

SEQ ID NO: 7128 - protein, 15 aa, Homo Sapiens
MLLTLIILLPVVSKF

SEQ ID NO: 7129 - protein, 15 aa, Homo Sapiens
LLTLIILLPVVSKFS

SEQ ID NO: 7130 - protein, 15 aa, Homo Sapiens
LTLIILLPVVSKFSF

SEQ ID NO: 7131 - protein, 15 aa, Homo Sapiens
TLIILLPVVSKFSFV

SEQ ID NO: 7132 - protein, 15 aa, Homo Sapiens
LIILLPVVSKFSFVS

SEQ ID NO: 7133 - protein, 15 aa, Homo Sapiens
IILLPVVSKFSFVSL

SEQ ID NO: 7134 - protein, 15 aa, Homo Sapiens
ILLPVVSKFSFVSLS

SEQ ID NO: 7135 - protein, 15 aa, Homo Sapiens
LLPVVSKFSFVSLSA

SEQ ID NO: 7136 - protein, 15 aa, Homo Sapiens
LPVVSKFSFVSLSAP

SEQ ID NO: 7137 - protein, 15 aa, Homo Sapiens
PVVSKFSFVSLSAPQ

SEQ ID NO: 7138 - protein, 15 aa, Homo Sapiens
VVSKFSFVSLSAPQH

SEQ ID NO: 7139 - protein, 15 aa, Homo Sapiens
VSKFSFVSLSAPQHW

SEQ ID NO: 7140 - protein, 15 aa, Homo Sapiens
SKFSFVSLSAPQHWS

SEQ ID NO: 7141 - protein, 15 aa, Homo Sapiens
KFSFVSLSAPQHWSC

SEQ ID NO: 7142 - protein, 15 aa, Homo Sapiens
FSFVSLSAPQHWSCP

SEQ ID NO: 7143 - protein, 15 aa, Homo Sapiens
SFVSLSAPQHWSCPE

SEQ ID NO: 7144 - protein, 15 aa, Homo Sapiens
FVSLSAPQHWSCPEG

SEQ ID NO: 7145 - protein, 15 aa, Homo Sapiens
VSLSAPQHWSCPEGT

SEQ ID NO: 7146 - protein, 15 aa, Homo Sapiens
SLSAPQHWSCPEGTL

SEQ ID NO: 7147 - protein, 15 aa, Homo Sapiens
LSAPQHWSCPEGTLA

SEQ ID NO: 7148 - protein, 15 aa, Homo Sapiens
SAPQHWSCPEGTLAG

SEQ ID NO: 7149 - protein, 15 aa, Homo Sapiens
APQHWSCPEGTLAGN

SEQ ID NO: 7150 - protein, 15 aa, Homo Sapiens
PQHWSCPEGTLAGNG

SEQ ID NO: 7151 - protein, 15 aa, Homo Sapiens
QHWSCPEGTLAGNGN

SEQ ID NO: 7152 - protein, 15 aa, Homo Sapiens
HWSCPEGTLAGNGNS

SEQ ID NO: 7153 - protein, 15 aa, Homo Sapiens
WSCPEGTLAGNGNST

SEQ ID NO: 7154 - protein, 15 aa, Homo Sapiens
SCPEGTLAGNGNSTC

SEQ ID NO: 7155 - protein, 15 aa, Homo Sapiens
CPEGTLAGNGNSTCV

SEQ ID NO: 7156 - protein, 15 aa, Homo Sapiens
PEGTLAGNGNSTCVG

SEQ ID NO: 7157 - protein, 15 aa, Homo Sapiens
EGTLAGNGNSTCVGP

SEQ ID NO: 7158 - protein, 15 aa, Homo Sapiens
GTLAGNGNSTCVGPA

SEQ ID NO: 7159 - protein, 15 aa, Homo Sapiens
TLAGNGNSTCVGPAP

SEQ ID NO: 7160 - protein, 15 aa, Homo Sapiens
LAGNGNSTCVGPAPF

SEQ ID NO: 7161 - protein, 15 aa, Homo Sapiens
AGNGNSTCVGPAPFL

SEQ ID NO: 7162 - protein, 15 aa, Homo Sapiens
GNGNSTCVGPAPFLI

SEQ ID NO: 7163 - protein, 15 aa, Homo Sapiens
NGNSTCVGPAPFLIF

SEQ ID NO: 7164 - protein, 15 aa, Homo Sapiens
GNSTCVGPAPFLIFS

SEQ ID NO: 7165 - protein, 15 aa, Homo Sapiens
NSTCVGPAPFLIFSH

SEQ ID NO: 7166 - protein, 15 aa, Homo Sapiens
STCVGPAPFLIFSHG

SEQ ID NO: 7167 - protein, 15 aa, Homo Sapiens
TCVGPAPFLIFSHGN

SEQ ID NO: 7168 - protein, 15 aa, Homo Sapiens
CVGPAPFLIFSHGNS

SEQ ID NO: 7169 - protein, 15 aa, Homo Sapiens
VGPAPFLIFSHGNSI

SEQ ID NO: 7170 - protein, 15 aa, Homo Sapiens
GPAPFLIFSHGNSIF

SEQ ID NO: 7171 - protein, 15 aa, Homo Sapiens
PAPFLIFSHGNSIFR

SEQ ID NO: 7172 - protein, 15 aa, Homo Sapiens
APFLIFSHGNSIFRI

SEQ ID NO: 7173 - protein, 15 aa, Homo Sapiens
PFLIFSHGNSIFRID

SEQ ID NO: 7174 - protein, 15 aa, Homo Sapiens
FLIFSHGNSIFRIDT

SEQ ID NO: 7175 - protein, 15 aa, Homo Sapiens
LIFSHGNSIFRIDTE

SEQ ID NO: 7176 - protein, 15 aa, Homo Sapiens
IFSHGNSIFRIDTEG

SEQ ID NO: 7177 - protein, 15 aa, Homo Sapiens
FSHGNSIFRIDTEGT

SEQ ID NO: 7178 - protein, 15 aa, Homo Sapiens
SHGNSIFRIDTEGTN

SEQ ID NO: 7179 - protein, 15 aa, Homo Sapiens
HGNSIFRIDTEGTNY

SEQ ID NO: 7180 - protein, 15 aa, Homo Sapiens
GNSIFRIDTEGTNYE

SEQ ID NO: 7181 - protein, 15 aa, Homo Sapiens
NSIFRIDTEGTNYEQ

SEQ ID NO: 7182 - protein, 15 aa, Homo Sapiens
SIFRIDTEGTNYEQL

SEQ ID NO: 7183 - protein, 15 aa, Homo Sapiens
IFRIDTEGTNYEQLV

SEQ ID NO: 7184 - protein, 15 aa, Homo Sapiens
FRIDTEGTNYEQLVV

SEQ ID NO: 7185 - protein, 15 aa, Homo Sapiens
RIDTEGTNYEQLVVD

SEQ ID NO: 7186 - protein, 15 aa, Homo Sapiens
IDTEGTNYEQLVVDA

SEQ ID NO: 7187 - protein, 15 aa, Homo Sapiens
DTEGTNYEQLVVDAG

SEQ ID NO: 7188 - protein, 15 aa, Homo Sapiens
TEGTNYEQLVVDAGV

SEQ ID NO: 7189 - protein, 15 aa, Homo Sapiens
EGTNYEQLVVDAGVS

SEQ ID NO: 7190 - protein, 15 aa, Homo Sapiens
GTNYEQLVVDAGVSV

SEQ ID NO: 7191 - protein, 15 aa, Homo Sapiens
TNYEQLVVDAGVSVI

SEQ ID NO: 7192 - protein, 15 aa, Homo Sapiens
NYEQLVVDAGVSVIM

SEQ ID NO: 7193 - protein, 15 aa, Homo Sapiens
YEQLVVDAGVSVIMD

SEQ ID NO: 7194 - protein, 15 aa, Homo Sapiens
EQLVVDAGVSVIMDF

SEQ ID NO: 7195 - protein, 15 aa, Homo Sapiens
QLVVDAGVSVIMDFH

SEQ ID NO: 7196 - protein, 15 aa, Homo Sapiens
LVVDAGVSVIMDFHY

SEQ ID NO: 7197 - protein, 15 aa, Homo Sapiens
VVDAGVSVIMDFHYN

SEQ ID NO: 7198 - protein, 15 aa, Homo Sapiens
VDAGVSVIMDFHYNE

SEQ ID NO: 7199 - protein, 15 aa, Homo Sapiens
DAGVSVIMDFHYNEK

SEQ ID NO: 7200 - protein, 15 aa, Homo Sapiens
AGVSVIMDFHYNEKR

SEQ ID NO: 7201 - protein, 15 aa, Homo Sapiens
GVSVIMDFHYNEKRI

SEQ ID NO: 7202 - protein, 15 aa, Homo Sapiens
VSVIMDFHYNEKRIY

SEQ ID NO: 7203 - protein, 15 aa, Homo Sapiens
SVIMDFHYNEKRIYW

SEQ ID NO: 7204 - protein, 15 aa, Homo Sapiens
VIMDFHYNEKRIYWV

SEQ ID NO: 7205 - protein, 15 aa, Homo Sapiens
IMDFHYNEKRIYWVD

SEQ ID NO: 7206 - protein, 15 aa, Homo Sapiens
MDFHYNEKRIYWVDL

SEQ ID NO: 7207 - protein, 15 aa, Homo Sapiens
DFHYNEKRIYWVDLE

SEQ ID NO: 7208 - protein, 15 aa, Homo Sapiens
FHYNEKRIYWVDLER

SEQ ID NO: 7209 - protein, 15 aa, Homo Sapiens
HYNEKRIYWVDLERQ

SEQ ID NO: 7210 - protein, 15 aa, Homo Sapiens
YNEKRIYWVDLERQL

SEQ ID NO: 7211 - protein, 15 aa, Homo Sapiens
NEKRIYWVDLERQLL

SEQ ID NO: 7212 - protein, 15 aa, Homo Sapiens
EKRIYWVDLERQLLQ

SEQ ID NO: 7213 - protein, 15 aa, Homo Sapiens
KRIYWVDLERQLLQR

SEQ ID NO: 7214 - protein, 15 aa, Homo Sapiens
RIYWVDLERQLLQRV

SEQ ID NO: 7215 - protein, 15 aa, Homo Sapiens
IYWVDLERQLLQRVF

SEQ ID NO: 7216 - protein, 15 aa, Homo Sapiens
YWVDLERQLLQRVFL

SEQ ID NO: 7217 - protein, 15 aa, Homo Sapiens
WVDLERQLLQRVFLN

SEQ ID NO: 7218 - protein, 15 aa, Homo Sapiens
VDLERQLLQRVFLNG

SEQ ID NO: 7219 - protein, 15 aa, Homo Sapiens
DLERQLLQRVFLNGS

SEQ ID NO: 7220 - protein, 15 aa, Homo Sapiens
LERQLLQRVFLNGSR

SEQ ID NO: 7221 - protein, 15 aa, Homo Sapiens
ERQLLQRVFLNGSRQ

SEQ ID NO: 7222 - protein, 15 aa, Homo Sapiens
RQLLQRVFLNGSRQE

SEQ ID NO: 7223 - protein, 15 aa, Homo Sapiens
QLLQRVFLNGSRQER

SEQ ID NO: 7224 - protein, 15 aa, Homo Sapiens
LLQRVFLNGSRQERV

SEQ ID NO: 7225 - protein, 15 aa, Homo Sapiens
LQRVFLNGSRQERVC

SEQ ID NO: 7226 - protein, 15 aa, Homo Sapiens
QRVFLNGSRQERVCN

SEQ ID NO: 7227 - protein, 15 aa, Homo Sapiens
RVFLNGSRQERVCNI

SEQ ID NO: 7228 - protein, 15 aa, Homo Sapiens
VFLNGSRQERVCNIE

SEQ ID NO: 7229 - protein, 15 aa, Homo Sapiens
FLNGSRQERVCNIEK

SEQ ID NO: 7230 - protein, 15 aa, Homo Sapiens
LNGSRQERVCNIEKN

SEQ ID NO: 7231 - protein, 15 aa, Homo Sapiens
NGSRQERVCNIEKNV

SEQ ID NO: 7232 - protein, 15 aa, Homo Sapiens
GSRQERVCNIEKNVS

SEQ ID NO: 7233 - protein, 15 aa, Homo Sapiens
SRQERVCNIEKNVSG

SEQ ID NO: 7234 - protein, 15 aa, Homo Sapiens
RQERVCNIEKNVSGM

SEQ ID NO: 7235 - protein, 15 aa, Homo Sapiens
QERVCNIEKNVSGMA

SEQ ID NO: 7236 - protein, 15 aa, Homo Sapiens
ERVCNIEKNVSGMAI

SEQ ID NO: 7237 - protein, 15 aa, Homo Sapiens
RVCNIEKNVSGMAIN

SEQ ID NO: 7238 - protein, 15 aa, Homo Sapiens
VCNIEKNVSGMAINW

SEQ ID NO: 7239 - protein, 15 aa, Homo Sapiens
CNIEKNVSGMAINWI

SEQ ID NO: 7240 - protein, 15 aa, Homo Sapiens
NIEKNVSGMAINWIN

SEQ ID NO: 7241 - protein, 15 aa, Homo Sapiens
IEKNVSGMAINWINE

SEQ ID NO: 7242 - protein, 15 aa, Homo Sapiens
EKNVSGMAINWINEE

SEQ ID NO: 7243 - protein, 15 aa, Homo Sapiens
KNVSGMAINWINEEV

SEQ ID NO: 7244 - protein, 15 aa, Homo Sapiens
NVSGMAINWINEEVI

SEQ ID NO: 7245 - protein, 15 aa, Homo Sapiens
VSGMAINWINEEVIW

SEQ ID NO: 7246 - protein, 15 aa, Homo Sapiens
SGMAINWINEEVIWS

SEQ ID NO: 7247 - protein, 15 aa, Homo Sapiens
GMAINWINEEVIWSN

SEQ ID NO: 7248 - protein, 15 aa, Homo Sapiens
MAINWINEEVIWSNQ

SEQ ID NO: 7249 - protein, 15 aa, Homo Sapiens
AINWINEEVIWSNQQ

SEQ ID NO: 7250 - protein, 15 aa, Homo Sapiens
INWINEEVIWSNQQE

SEQ ID NO: 7251 - protein, 15 aa, Homo Sapiens
NWINEEVIWSNQQEG

SEQ ID NO: 7252 - protein, 15 aa, Homo Sapiens
WINEEVIWSNQQEGI

SEQ ID NO: 7253 - protein, 15 aa, Homo Sapiens
INEEVIWSNQQEGII

SEQ ID NO: 7254 - protein, 15 aa, Homo Sapiens
NEEVIWSNQQEGIIT

SEQ ID NO: 7255 - protein, 15 aa, Homo Sapiens
EEVIWSNQQEGIITV

SEQ ID NO: 7256 - protein, 15 aa, Homo Sapiens
EVIWSNQQEGIITVT

SEQ ID NO: 7257 - protein, 15 aa, Homo Sapiens
VIWSNQQEGIITVTD

SEQ ID NO: 7258 - protein, 15 aa, Homo Sapiens
IWSNQQEGIITVTDM

SEQ ID NO: 7259 - protein, 15 aa, Homo Sapiens
WSNQQEGIITVTDMK

SEQ ID NO: 7260 - protein, 15 aa, Homo Sapiens
SNQQEGIITVTDMKG

SEQ ID NO: 7261 - protein, 15 aa, Homo Sapiens
NQQEGIITVTDMKGN

SEQ ID NO: 7262 - protein, 15 aa, Homo Sapiens
QQEGIITVTDMKGNN

SEQ ID NO: 7263 - protein, 15 aa, Homo Sapiens
QEGIITVTDMKGNNS

SEQ ID NO: 7264 - protein, 15 aa, Homo Sapiens
EGIITVTDMKGNNSH

SEQ ID NO: 7265 - protein, 15 aa, Homo Sapiens
GIITVTDMKGNNSHI

SEQ ID NO: 7266 - protein, 15 aa, Homo Sapiens
IITVTDMKGNNSHIL

SEQ ID NO: 7267 - protein, 15 aa, Homo Sapiens
ITVTDMKGNNSHILL

SEQ ID NO: 7268 - protein, 15 aa, Homo Sapiens
TVTDMKGNNSHILLS

SEQ ID NO: 7269 - protein, 15 aa, Homo Sapiens
VTDMKGNNSHILLSA

SEQ ID NO: 7270 - protein, 15 aa, Homo Sapiens
TDMKGNNSHILLSAL

SEQ ID NO: 7271 - protein, 15 aa, Homo Sapiens
DMKGNNSHILLSALK

SEQ ID NO: 7272 - protein, 15 aa, Homo Sapiens
MKGNNSHILLSALKY

SEQ ID NO: 7273 - protein, 15 aa, Homo Sapiens
KGNNSHILLSALKYP

SEQ ID NO: 7274 - protein, 15 aa, Homo Sapiens
GNNSHILLSALKYPA

SEQ ID NO: 7275 - protein, 15 aa, Homo Sapiens
NNSHILLSALKYPAN

SEQ ID NO: 7276 - protein, 15 aa, Homo Sapiens
NSHILLSALKYPANV

SEQ ID NO: 7277 - protein, 15 aa, Homo Sapiens
SHILLSALKYPANVA

SEQ ID NO: 7278 - protein, 15 aa, Homo Sapiens
HILLSALKYPANVAV

SEQ ID NO: 7279 - protein, 15 aa, Homo Sapiens
ILLSALKYPANVAVD

SEQ ID NO: 7280 - protein, 15 aa, Homo Sapiens
LLSALKYPANVAVDP

SEQ ID NO: 7281 - protein, 15 aa, Homo Sapiens
LSALKYPANVAVDPV

SEQ ID NO: 7282 - protein, 15 aa, Homo Sapiens
SALKYPANVAVDPVE

SEQ ID NO: 7283 - protein, 15 aa, Homo Sapiens
ALKYPANVAVDPVER

SEQ ID NO: 7284 - protein, 15 aa, Homo Sapiens
LKYPANVAVDPVERF

SEQ ID NO: 7285 - protein, 15 aa, Homo Sapiens
KYPANVAVDPVERFI

SEQ ID NO: 7286 - protein, 15 aa, Homo Sapiens
YPANVAVDPVERFIF

SEQ ID NO: 7287 - protein, 15 aa, Homo Sapiens
PANVAVDPVERFIFW

SEQ ID NO: 7288 - protein, 15 aa, Homo Sapiens
ANVAVDPVERFIFWS

SEQ ID NO: 7289 - protein, 15 aa, Homo Sapiens
NVAVDPVERFIFWSS

SEQ ID NO: 7290 - protein, 15 aa, Homo Sapiens
VAVDPVERFIFWSSE

SEQ ID NO: 7291 - protein, 15 aa, Homo Sapiens
AVDPVERFIFWSSEV

SEQ ID NO: 7292 - protein, 15 aa, Homo Sapiens
VDPVERFIFWSSEVA

SEQ ID NO: 7293 - protein, 15 aa, Homo Sapiens
DPVERFIFWSSEVAG

SEQ ID NO: 7294 - protein, 15 aa, Homo Sapiens
PVERFIFWSSEVAGS

SEQ ID NO: 7295 - protein, 15 aa, Homo Sapiens
VERFIFWSSEVAGSL

SEQ ID NO: 7296 - protein, 15 aa, Homo Sapiens
ERFIFWSSEVAGSLY

SEQ ID NO: 7297 - protein, 15 aa, Homo Sapiens
RFIFWSSEVAGSLYR

SEQ ID NO: 7298 - protein, 15 aa, Homo Sapiens
FIFWSSEVAGSLYRA

SEQ ID NO: 7299 - protein, 15 aa, Homo Sapiens
IFWSSEVAGSLYRAD

SEQ ID NO: 7300 - protein, 15 aa, Homo Sapiens
FWSSEVAGSLYRADL

SEQ ID NO: 7301 - protein, 15 aa, Homo Sapiens
WSSEVAGSLYRADLD

SEQ ID NO: 7302 - protein, 15 aa, Homo Sapiens
SSEVAGSLYRADLDG

SEQ ID NO: 7303 - protein, 15 aa, Homo Sapiens
SEVAGSLYRADLDGV

SEQ ID NO: 7304 - protein, 15 aa, Homo Sapiens
EVAGSLYRADLDGVG

SEQ ID NO: 7305 - protein, 15 aa, Homo Sapiens
VAGSLYRADLDGVGV

SEQ ID NO: 7306 - protein, 15 aa, Homo Sapiens
AGSLYRADLDGVGVK

SEQ ID NO: 7307 - protein, 15 aa, Homo Sapiens
GSLYRADLDGVGVKA

SEQ ID NO: 7308 - protein, 15 aa, Homo Sapiens
SLYRADLDGVGVKAL

SEQ ID NO: 7309 - protein, 15 aa, Homo Sapiens
LYRADLDGVGVKALL

SEQ ID NO: 7310 - protein, 15 aa, Homo Sapiens
YRADLDGVGVKALLE

SEQ ID NO: 7311 - protein, 15 aa, Homo Sapiens
RADLDGVGVKALLET

SEQ ID NO: 7312 - protein, 15 aa, Homo Sapiens
ADLDGVGVKALLETS

SEQ ID NO: 7313 - protein, 15 aa, Homo Sapiens
DLDGVGVKALLETSE

SEQ ID NO: 7314 - protein, 15 aa, Homo Sapiens
LDGVGVKALLETSEK

SEQ ID NO: 7315 - protein, 15 aa, Homo Sapiens
DGVGVKALLETSEKI

SEQ ID NO: 7316 - protein, 15 aa, Homo Sapiens
GVGVKALLETSEKIT

SEQ ID NO: 7317 - protein, 15 aa, Homo Sapiens
VGVKALLETSEKITA

SEQ ID NO: 7318 - protein, 15 aa, Homo Sapiens
GVKALLETSEKITAV

SEQ ID NO: 7319 - protein, 15 aa, Homo Sapiens
VKALLETSEKITAVS

SEQ ID NO: 7320 - protein, 15 aa, Homo Sapiens
KALLETSEKITAVSL

SEQ ID NO: 7321 - protein, 15 aa, Homo Sapiens
ALLETSEKITAVSLD

SEQ ID NO: 7322 - protein, 15 aa, Homo Sapiens
LLETSEKITAVSLDV

SEQ ID NO: 7323 - protein, 15 aa, Homo Sapiens
LETSEKITAVSLDVL

SEQ ID NO: 7324 - protein, 15 aa, Homo Sapiens
ETSEKITAVSLDVLD

SEQ ID NO: 7325 - protein, 15 aa, Homo Sapiens
TSEKITAVSLDVLDK

SEQ ID NO: 7326 - protein, 15 aa, Homo Sapiens
SEKITAVSLDVLDKR

SEQ ID NO: 7327 - protein, 15 aa, Homo Sapiens
EKITAVSLDVLDKRL

SEQ ID NO: 7328 - protein, 15 aa, Homo Sapiens
KITAVSLDVLDKRLF

SEQ ID NO: 7329 - protein, 15 aa, Homo Sapiens
ITAVSLDVLDKRLFW

SEQ ID NO: 7330 - protein, 15 aa, Homo Sapiens
TAVSLDVLDKRLFWI

SEQ ID NO: 7331 - protein, 15 aa, Homo Sapiens
AVSLDVLDKRLFWIQ

SEQ ID NO: 7332 - protein, 15 aa, Homo Sapiens
VSLDVLDKRLFWIQY

SEQ ID NO: 7333 - protein, 15 aa, Homo Sapiens
SLDVLDKRLFWIQYN

SEQ ID NO: 7334 - protein, 15 aa, Homo Sapiens
LDVLDKRLFWIQYNR

SEQ ID NO: 7335 - protein, 15 aa, Homo Sapiens
DVLDKRLFWIQYNRE

SEQ ID NO: 7336 - protein, 15 aa, Homo Sapiens
VLDKRLFWIQYNREG

SEQ ID NO: 7337 - protein, 15 aa, Homo Sapiens
LDKRLFWIQYNREGS

SEQ ID NO: 7338 - protein, 15 aa, Homo Sapiens
DKRLFWIQYNREGSN

SEQ ID NO: 7339 - protein, 15 aa, Homo Sapiens
KRLFWIQYNREGSNS

SEQ ID NO: 7340 - protein, 15 aa, Homo Sapiens
RLFWIQYNREGSNSL

SEQ ID NO: 7341 - protein, 15 aa, Homo Sapiens
LFWIQYNREGSNSLI

SEQ ID NO: 7342 - protein, 15 aa, Homo Sapiens
FWIQYNREGSNSLIC

SEQ ID NO: 7343 - protein, 15 aa, Homo Sapiens
WIQYNREGSNSLICS

SEQ ID NO: 7344 - protein, 15 aa, Homo Sapiens
IQYNREGSNSLICSC

SEQ ID NO: 7345 - protein, 15 aa, Homo Sapiens
QYNREGSNSLICSCD

SEQ ID NO: 7346 - protein, 15 aa, Homo Sapiens
YNREGSNSLICSCDY

SEQ ID NO: 7347 - protein, 15 aa, Homo Sapiens
NREGSNSLICSCDYD

SEQ ID NO: 7348 - protein, 15 aa, Homo Sapiens
REGSNSLICSCDYDG

SEQ ID NO: 7349 - protein, 15 aa, Homo Sapiens
EGSNSLICSCDYDGG

SEQ ID NO: 7350 - protein, 15 aa, Homo Sapiens
GSNSLICSCDYDGGS

SEQ ID NO: 7351 - protein, 15 aa, Homo Sapiens
SNSLICSCDYDGGSV

SEQ ID NO: 7352 - protein, 15 aa, Homo Sapiens
NSLICSCDYDGGSVH

SEQ ID NO: 7353 - protein, 15 aa, Homo Sapiens
SLICSCDYDGGSVHI

SEQ ID NO: 7354 - protein, 15 aa, Homo Sapiens
LICSCDYDGGSVHIS

SEQ ID NO: 7355 - protein, 15 aa, Homo Sapiens
ICSCDYDGGSVHISK

SEQ ID NO: 7356 - protein, 15 aa, Homo Sapiens
CSCDYDGGSVHISKH

SEQ ID NO: 7357 - protein, 15 aa, Homo Sapiens
SCDYDGGSVHISKHP

SEQ ID NO: 7358 - protein, 15 aa, Homo Sapiens
CDYDGGSVHISKHPT

SEQ ID NO: 7359 - protein, 15 aa, Homo Sapiens
DYDGGSVHISKHPTQ

SEQ ID NO: 7360 - protein, 15 aa, Homo Sapiens
YDGGSVHISKHPTQH

SEQ ID NO: 7361 - protein, 15 aa, Homo Sapiens
DGGSVHISKHPTQHN

SEQ ID NO: 7362 - protein, 15 aa, Homo Sapiens
GGSVHISKHPTQHNL

SEQ ID NO: 7363 - protein, 15 aa, Homo Sapiens
GSVHISKHPTQHNLF

SEQ ID NO: 7364 - protein, 15 aa, Homo Sapiens
SVHISKHPTQHNLFA

SEQ ID NO: 7365 - protein, 15 aa, Homo Sapiens
VHISKHPTQHNLFAM

SEQ ID NO: 7366 - protein, 15 aa, Homo Sapiens
HISKHPTQHNLFAMS

SEQ ID NO: 7367 - protein, 15 aa, Homo Sapiens
ISKHPTQHNLFAMSL

SEQ ID NO: 7368 - protein, 15 aa, Homo Sapiens
SKHPTQHNLFAMSLF

SEQ ID NO: 7369 - protein, 15 aa, Homo Sapiens
KHPTQHNLFAMSLFG

SEQ ID NO: 7370 - protein, 15 aa, Homo Sapiens
HPTQHNLFAMSLFGD

SEQ ID NO: 7371 - protein, 15 aa, Homo Sapiens
PTQHNLFAMSLFGDR

SEQ ID NO: 7372 - protein, 15 aa, Homo Sapiens
TQHNLFAMSLFGDRI

SEQ ID NO: 7373 - protein, 15 aa, Homo Sapiens
QHNLFAMSLFGDRIF

SEQ ID NO: 7374 - protein, 15 aa, Homo Sapiens
HNLFAMSLFGDRIFY

SEQ ID NO: 7375 - protein, 15 aa, Homo Sapiens
NLFAMSLFGDRIFYS

SEQ ID NO: 7376 - protein, 15 aa, Homo Sapiens
LFAMSLFGDRIFYST

SEQ ID NO: 7377 - protein, 15 aa, Homo Sapiens
FAMSLFGDRIFYSTW

SEQ ID NO: 7378 - protein, 15 aa, Homo Sapiens
AMSLFGDRIFYSTWK

SEQ ID NO: 7379 - protein, 15 aa, Homo Sapiens
MSLFGDRIFYSTWKM

SEQ ID NO: 7380 - protein, 15 aa, Homo Sapiens
SLFGDRIFYSTWKMK

SEQ ID NO: 7381 - protein, 15 aa, Homo Sapiens
LFGDRIFYSTWKMKT

SEQ ID NO: 7382 - protein, 15 aa, Homo Sapiens
FGDRIFYSTWKMKTI

SEQ ID NO: 7383 - protein, 15 aa, Homo Sapiens
GDRIFYSTWKMKTIW

SEQ ID NO: 7384 - protein, 15 aa, Homo Sapiens
DRIFYSTWKMKTIWI

SEQ ID NO: 7385 - protein, 15 aa, Homo Sapiens
RIFYSTWKMKTIWIA

SEQ ID NO: 7386 - protein, 15 aa, Homo Sapiens
IFYSTWKMKTIWIAN

SEQ ID NO: 7387 - protein, 15 aa, Homo Sapiens
FYSTWKMKTIWIANK

SEQ ID NO: 7388 - protein, 15 aa, Homo Sapiens
YSTWKMKTIWIANKH

SEQ ID NO: 7389 - protein, 15 aa, Homo Sapiens
STWKMKTIWIANKHT

SEQ ID NO: 7390 - protein, 15 aa, Homo Sapiens
TWKMKTIWIANKHTG

SEQ ID NO: 7391 - protein, 15 aa, Homo Sapiens
WKMKTIWIANKHTGK

SEQ ID NO: 7392 - protein, 15 aa, Homo Sapiens
KMKTIWIANKHTGKD

SEQ ID NO: 7393 - protein, 15 aa, Homo Sapiens
MKTIWIANKHTGKDM

SEQ ID NO: 7394 - protein, 15 aa, Homo Sapiens
KTIWIANKHTGKDMV

SEQ ID NO: 7395 - protein, 15 aa, Homo Sapiens
TIWIANKHTGKDMVR

SEQ ID NO: 7396 - protein, 15 aa, Homo Sapiens
IWIANKHTGKDMVRI

SEQ ID NO: 7397 - protein, 15 aa, Homo Sapiens
WIANKHTGKDMVRIN

SEQ ID NO: 7398 - protein, 15 aa, Homo Sapiens
IANKHTGKDMVRINL

SEQ ID NO: 7399 - protein, 15 aa, Homo Sapiens
ANKHTGKDMVRINLH

SEQ ID NO: 7400 - protein, 15 aa, Homo Sapiens
NKHTGKDMVRINLHS

SEQ ID NO: 7401 - protein, 15 aa, Homo Sapiens
KHTGKDMVRINLHSS

SEQ ID NO: 7402 - protein, 15 aa, Homo Sapiens
HTGKDMVRINLHSSF

SEQ ID NO: 7403 - protein, 15 aa, Homo Sapiens
TGKDMVRINLHSSFV

SEQ ID NO: 7404 - protein, 15 aa, Homo Sapiens
GKDMVRINLHSSFVP

SEQ ID NO: 7405 - protein, 15 aa, Homo Sapiens
KDMVRINLHSSFVPL

SEQ ID NO: 7406 - protein, 15 aa, Homo Sapiens
DMVRINLHSSFVPLG

SEQ ID NO: 7407 - protein, 15 aa, Homo Sapiens
MVRINLHSSFVPLGE

SEQ ID NO: 7408 - protein, 15 aa, Homo Sapiens
VRINLHSSFVPLGEL

SEQ ID NO: 7409 - protein, 15 aa, Homo Sapiens
RINLHSSFVPLGELK

SEQ ID NO: 7410 - protein, 15 aa, Homo Sapiens
INLHSSFVPLGELKV

SEQ ID NO: 7411 - protein, 15 aa, Homo Sapiens
NLHSSFVPLGELKVV

SEQ ID NO: 7412 - protein, 15 aa, Homo Sapiens
LHSSFVPLGELKVVH

SEQ ID NO: 7413 - protein, 15 aa, Homo Sapiens
HSSFVPLGELKVVHP

SEQ ID NO: 7414 - protein, 15 aa, Homo Sapiens
SSFVPLGELKVVHPL

SEQ ID NO: 7415 - protein, 15 aa, Homo Sapiens
SFVPLGELKVVHPLA

SEQ ID NO: 7416 - protein, 15 aa, Homo Sapiens
FVPLGELKVVHPLAQ

SEQ ID NO: 7417 - protein, 15 aa, Homo Sapiens
VPLGELKVVHPLAQP

SEQ ID NO: 7418 - protein, 15 aa, Homo Sapiens
PLGELKVVHPLAQPK

SEQ ID NO: 7419 - protein, 15 aa, Homo Sapiens
LGELKVVHPLAQPKA

SEQ ID NO: 7420 - protein, 15 aa, Homo Sapiens
GELKVVHPLAQPKAE

SEQ ID NO: 7421 - protein, 15 aa, Homo Sapiens
ELKVVHPLAQPKAED

SEQ ID NO: 7422 - protein, 15 aa, Homo Sapiens
LKVVHPLAQPKAEDD

SEQ ID NO: 7423 - protein, 15 aa, Homo Sapiens
KVVHPLAQPKAEDDT

SEQ ID NO: 7424 - protein, 15 aa, Homo Sapiens
VVHPLAQPKAEDDTW

SEQ ID NO: 7425 - protein, 15 aa, Homo Sapiens
VHPLAQPKAEDDTWE

SEQ ID NO: 7426 - protein, 15 aa, Homo Sapiens
HPLAQPKAEDDTWEP

SEQ ID NO: 7427 - protein, 15 aa, Homo Sapiens
PLAQPKAEDDTWEPE

SEQ ID NO: 7428 - protein, 15 aa, Homo Sapiens
LAQPKAEDDTWEPEQ

SEQ ID NO: 7429 - protein, 15 aa, Homo Sapiens
AQPKAEDDTWEPEQK

SEQ ID NO: 7430 - protein, 15 aa, Homo Sapiens
QPKAEDDTWEPEQKL

SEQ ID NO: 7431 - protein, 15 aa, Homo Sapiens
PKAEDDTWEPEQKLC

SEQ ID NO: 7432 - protein, 15 aa, Homo Sapiens
KAEDDTWEPEQKLCK

SEQ ID NO: 7433 - protein, 15 aa, Homo Sapiens
AEDDTWEPEQKLCKL

SEQ ID NO: 7434 - protein, 15 aa, Homo Sapiens
EDDTWEPEQKLCKLR

SEQ ID NO: 7435 - protein, 15 aa, Homo Sapiens
DDTWEPEQKLCKLRK

SEQ ID NO: 7436 - protein, 15 aa, Homo Sapiens
DTWEPEQKLCKLRKG

SEQ ID NO: 7437 - protein, 15 aa, Homo Sapiens
TWEPEQKLCKLRKGN

SEQ ID NO: 7438 - protein, 15 aa, Homo Sapiens
WEPEQKLCKLRKGNC

SEQ ID NO: 7439 - protein, 15 aa, Homo Sapiens
EPEQKLCKLRKGNCS

SEQ ID NO: 7440 - protein, 15 aa, Homo Sapiens
PEQKLCKLRKGNCSS

SEQ ID NO: 7441 - protein, 15 aa, Homo Sapiens
EQKLCKLRKGNCSST

SEQ ID NO: 7442 - protein, 15 aa, Homo Sapiens
QKLCKLRKGNCSSTV

SEQ ID NO: 7443 - protein, 15 aa, Homo Sapiens
KLCKLRKGNCSSTVC

SEQ ID NO: 7444 - protein, 15 aa, Homo Sapiens
LCKLRKGNCSSTVCG

SEQ ID NO: 7445 - protein, 15 aa, Homo Sapiens
CKLRKGNCSSTVCGQ

SEQ ID NO: 7446 - protein, 15 aa, Homo Sapiens
KLRKGNCSSTVCGQD

SEQ ID NO: 7447 - protein, 15 aa, Homo Sapiens
LRKGNCSSTVCGQDL

SEQ ID NO: 7448 - protein, 15 aa, Homo Sapiens
RKGNCSSTVCGQDLQ

SEQ ID NO: 7449 - protein, 15 aa, Homo Sapiens
KGNCSSTVCGQDLQS

SEQ ID NO: 7450 - protein, 15 aa, Homo Sapiens
GNCSSTVCGQDLQSH

SEQ ID NO: 7451 - protein, 15 aa, Homo Sapiens
NCSSTVCGQDLQSHL

SEQ ID NO: 7452 - protein, 15 aa, Homo Sapiens
CSSTVCGQDLQSHLC

SEQ ID NO: 7453 - protein, 15 aa, Homo Sapiens
SSTVCGQDLQSHLCM

SEQ ID NO: 7454 - protein, 15 aa, Homo Sapiens
STVCGQDLQSHLCMC

SEQ ID NO: 7455 - protein, 15 aa, Homo Sapiens
TVCGQDLQSHLCMCA

SEQ ID NO: 7456 - protein, 15 aa, Homo Sapiens
VCGQDLQSHLCMCAE

SEQ ID NO: 7457 - protein, 15 aa, Homo Sapiens
CGQDLQSHLCMCAEG

SEQ ID NO: 7458 - protein, 15 aa, Homo Sapiens
GQDLQSHLCMCAEGY

SEQ ID NO: 7459 - protein, 15 aa, Homo Sapiens
QDLQSHLCMCAEGYA

SEQ ID NO: 7460 - protein, 15 aa, Homo Sapiens
DLQSHLCMCAEGYAL

SEQ ID NO: 7461 - protein, 15 aa, Homo Sapiens
LQSHLCMCAEGYALS

SEQ ID NO: 7462 - protein, 15 aa, Homo Sapiens
QSHLCMCAEGYALSR

SEQ ID NO: 7463 - protein, 15 aa, Homo Sapiens
SHLCMCAEGYALSRD

SEQ ID NO: 7464 - protein, 15 aa, Homo Sapiens
HLCMCAEGYALSRDR

SEQ ID NO: 7465 - protein, 15 aa, Homo Sapiens
LCMCAEGYALSRDRK

SEQ ID NO: 7466 - protein, 15 aa, Homo Sapiens
CMCAEGYALSRDRKY

SEQ ID NO: 7467 - protein, 15 aa, Homo Sapiens
MCAEGYALSRDRKYC

SEQ ID NO: 7468 - protein, 15 aa, Homo Sapiens
CAEGYALSRDRKYCE

SEQ ID NO: 7469 - protein, 15 aa, Homo Sapiens
AEGYALSRDRKYCED

SEQ ID NO: 7470 - protein, 15 aa, Homo Sapiens
EGYALSRDRKYCEDV

SEQ ID NO: 7471 - protein, 15 aa, Homo Sapiens
GYALSRDRKYCEDVN

SEQ ID NO: 7472 - protein, 15 aa, Homo Sapiens
YALSRDRKYCEDVNE

SEQ ID NO: 7473 - protein, 15 aa, Homo Sapiens
ALSRDRKYCEDVNEC

SEQ ID NO: 7474 - protein, 15 aa, Homo Sapiens
LSRDRKYCEDVNECA

SEQ ID NO: 7475 - protein, 15 aa, Homo Sapiens
SRDRKYCEDVNECAF

SEQ ID NO: 7476 - protein, 15 aa, Homo Sapiens
RDRKYCEDVNECAFW

SEQ ID NO: 7477 - protein, 15 aa, Homo Sapiens
DRKYCEDVNECAFWN

SEQ ID NO: 7478 - protein, 15 aa, Homo Sapiens
RKYCEDVNECAFWNH

SEQ ID NO: 7479 - protein, 15 aa, Homo Sapiens
KYCEDVNECAFWNHG

SEQ ID NO: 7480 - protein, 15 aa, Homo Sapiens
YCEDVNECAFWNHGC

SEQ ID NO: 7481 - protein, 15 aa, Homo Sapiens
CEDVNECAFWNHGCT

SEQ ID NO: 7482 - protein, 15 aa, Homo Sapiens
EDVNECAFWNHGCTL

SEQ ID NO: 7483 - protein, 15 aa, Homo Sapiens
DVNECAFWNHGCTLG

SEQ ID NO: 7484 - protein, 15 aa, Homo Sapiens
VNECAFWNHGCTLGC

SEQ ID NO: 7485 - protein, 15 aa, Homo Sapiens
NECAFWNHGCTLGCK

SEQ ID NO: 7486 - protein, 15 aa, Homo Sapiens
ECAFWNHGCTLGCKN

SEQ ID NO: 7487 - protein, 15 aa, Homo Sapiens
CAFWNHGCTLGCKNT

SEQ ID NO: 7488 - protein, 15 aa, Homo Sapiens
AFWNHGCTLGCKNTP

SEQ ID NO: 7489 - protein, 15 aa, Homo Sapiens
FWNHGCTLGCKNTPG

SEQ ID NO: 7490 - protein, 15 aa, Homo Sapiens
WNHGCTLGCKNTPGS

SEQ ID NO: 7491 - protein, 15 aa, Homo Sapiens
NHGCTLGCKNTPGSY

SEQ ID NO: 7492 - protein, 15 aa, Homo Sapiens
HGCTLGCKNTPGSYY

SEQ ID NO: 7493 - protein, 15 aa, Homo Sapiens
GCTLGCKNTPGSYYC

SEQ ID NO: 7494 - protein, 15 aa, Homo Sapiens
CTLGCKNTPGSYYCT

SEQ ID NO: 7495 - protein, 15 aa, Homo Sapiens
TLGCKNTPGSYYCTC

SEQ ID NO: 7496 - protein, 15 aa, Homo Sapiens
LGCKNTPGSYYCTCP

SEQ ID NO: 7497 - protein, 15 aa, Homo Sapiens
GCKNTPGSYYCTCPV

SEQ ID NO: 7498 - protein, 15 aa, Homo Sapiens
CKNTPGSYYCTCPVG

SEQ ID NO: 7499 - protein, 15 aa, Homo Sapiens
KNTPGSYYCTCPVGF

SEQ ID NO: 7500 - protein, 15 aa, Homo Sapiens
NTPGSYYCTCPVGFV

SEQ ID NO: 7501 - protein, 15 aa, Homo Sapiens
TPGSYYCTCPVGFVL

SEQ ID NO: 7502 - protein, 15 aa, Homo Sapiens
PGSYYCTCPVGFVLL

SEQ ID NO: 7503 - protein, 15 aa, Homo Sapiens
GSYYCTCPVGFVLLP

SEQ ID NO: 7504 - protein, 15 aa, Homo Sapiens
SYYCTCPVGFVLLPD

SEQ ID NO: 7505 - protein, 15 aa, Homo Sapiens
YYCTCPVGFVLLPDG

SEQ ID NO: 7506 - protein, 15 aa, Homo Sapiens
YCTCPVGFVLLPDGK

SEQ ID NO: 7507 - protein, 15 aa, Homo Sapiens
CTCPVGFVLLPDGKR

SEQ ID NO: 7508 - protein, 15 aa, Homo Sapiens
TCPVGFVLLPDGKRC

SEQ ID NO: 7509 - protein, 15 aa, Homo Sapiens
CPVGFVLLPDGKRCH

SEQ ID NO: 7510 - protein, 15 aa, Homo Sapiens
PVGFVLLPDGKRCHQ

SEQ ID NO: 7511 - protein, 15 aa, Homo Sapiens
VGFVLLPDGKRCHQL

SEQ ID NO: 7512 - protein, 15 aa, Homo Sapiens
GFVLLPDGKRCHQLV

SEQ ID NO: 7513 - protein, 15 aa, Homo Sapiens
FVLLPDGKRCHQLVS

SEQ ID NO: 7514 - protein, 15 aa, Homo Sapiens
VLLPDGKRCHQLVSC

SEQ ID NO: 7515 - protein, 15 aa, Homo Sapiens
LLPDGKRCHQLVSCP

SEQ ID NO: 7516 - protein, 15 aa, Homo Sapiens
LPDGKRCHQLVSCPR

SEQ ID NO: 7517 - protein, 15 aa, Homo Sapiens
PDGKRCHQLVSCPRN

SEQ ID NO: 7518 - protein, 15 aa, Homo Sapiens
DGKRCHQLVSCPRNV

SEQ ID NO: 7519 - protein, 15 aa, Homo Sapiens
GKRCHQLVSCPRNVS

SEQ ID NO: 7520 - protein, 15 aa, Homo Sapiens
KRCHQLVSCPRNVSE

SEQ ID NO: 7521 - protein, 15 aa, Homo Sapiens
RCHQLVSCPRNVSEC

SEQ ID NO: 7522 - protein, 15 aa, Homo Sapiens
CHQLVSCPRNVSECS

SEQ ID NO: 7523 - protein, 15 aa, Homo Sapiens
HQLVSCPRNVSECSH

SEQ ID NO: 7524 - protein, 15 aa, Homo Sapiens
QLVSCPRNVSECSHD

SEQ ID NO: 7525 - protein, 15 aa, Homo Sapiens
LVSCPRNVSECSHDC

SEQ ID NO: 7526 - protein, 15 aa, Homo Sapiens
VSCPRNVSECSHDCV

SEQ ID NO: 7527 - protein, 15 aa, Homo Sapiens
SCPRNVSECSHDCVL

SEQ ID NO: 7528 - protein, 15 aa, Homo Sapiens
CPRNVSECSHDCVLT

SEQ ID NO: 7529 - protein, 15 aa, Homo Sapiens
PRNVSECSHDCVLTS

SEQ ID NO: 7530 - protein, 15 aa, Homo Sapiens
RNVSECSHDCVLTSE

SEQ ID NO: 7531 - protein, 15 aa, Homo Sapiens
NVSECSHDCVLTSEG

SEQ ID NO: 7532 - protein, 15 aa, Homo Sapiens
VSECSHDCVLTSEGP

SEQ ID NO: 7533 - protein, 15 aa, Homo Sapiens
SECSHDCVLTSEGPL

SEQ ID NO: 7534 - protein, 15 aa, Homo Sapiens
ECSHDCVLTSEGPLC

SEQ ID NO: 7535 - protein, 15 aa, Homo Sapiens
CSHDCVLTSEGPLCF

SEQ ID NO: 7536 - protein, 15 aa, Homo Sapiens
SHDCVLTSEGPLCFC

SEQ ID NO: 7537 - protein, 15 aa, Homo Sapiens
HDCVLTSEGPLCFCP

SEQ ID NO: 7538 - protein, 15 aa, Homo Sapiens
DCVLTSEGPLCFCPE

SEQ ID NO: 7539 - protein, 15 aa, Homo Sapiens
CVLTSEGPLCFCPEG

SEQ ID NO: 7540 - protein, 15 aa, Homo Sapiens
VLTSEGPLCFCPEGS

SEQ ID NO: 7541 - protein, 15 aa, Homo Sapiens
LTSEGPLCFCPEGSV

SEQ ID NO: 7542 - protein, 15 aa, Homo Sapiens
TSEGPLCFCPEGSVL

SEQ ID NO: 7543 - protein, 15 aa, Homo Sapiens
SEGPLCFCPEGSVLE

SEQ ID NO: 7544 - protein, 15 aa, Homo Sapiens
EGPLCFCPEGSVLER

SEQ ID NO: 7545 - protein, 15 aa, Homo Sapiens
GPLCFCPEGSVLERD

SEQ ID NO: 7546 - protein, 15 aa, Homo Sapiens
PLCFCPEGSVLERDG

SEQ ID NO: 7547 - protein, 15 aa, Homo Sapiens
LCFCPEGSVLERDGK

SEQ ID NO: 7548 - protein, 15 aa, Homo Sapiens
CFCPEGSVLERDGKT

SEQ ID NO: 7549 - protein, 15 aa, Homo Sapiens
FCPEGSVLERDGKTC

SEQ ID NO: 7550 - protein, 15 aa, Homo Sapiens
CPEGSVLERDGKTCS

SEQ ID NO: 7551 - protein, 15 aa, Homo Sapiens
PEGSVLERDGKTCSG

SEQ ID NO: 7552 - protein, 15 aa, Homo Sapiens
EGSVLERDGKTCSGC

SEQ ID NO: 7553 - protein, 15 aa, Homo Sapiens
GSVLERDGKTCSGCS

SEQ ID NO: 7554 - protein, 15 aa, Homo Sapiens
SVLERDGKTCSGCSS

SEQ ID NO: 7555 - protein, 15 aa, Homo Sapiens
VLERDGKTCSGCSSP

SEQ ID NO: 7556 - protein, 15 aa, Homo Sapiens
LERDGKTCSGCSSPD

SEQ ID NO: 7557 - protein, 15 aa, Homo Sapiens
ERDGKTCSGCSSPDN

SEQ ID NO: 7558 - protein, 15 aa, Homo Sapiens
RDGKTCSGCSSPDNG

SEQ ID NO: 7559 - protein, 15 aa, Homo Sapiens
DGKTCSGCSSPDNGG

SEQ ID NO: 7560 - protein, 15 aa, Homo Sapiens
GKTCSGCSSPDNGGC

SEQ ID NO: 7561 - protein, 15 aa, Homo Sapiens
KTCSGCSSPDNGGCS

SEQ ID NO: 7562 - protein, 15 aa, Homo Sapiens
TCSGCSSPDNGGCSQ

SEQ ID NO: 7563 - protein, 15 aa, Homo Sapiens
CSGCSSPDNGGCSQL

SEQ ID NO: 7564 - protein, 15 aa, Homo Sapiens
SGCSSPDNGGCSQLC

SEQ ID NO: 7565 - protein, 15 aa, Homo Sapiens
GCSSPDNGGCSQLCV

SEQ ID NO: 7566 - protein, 15 aa, Homo Sapiens
CSSPDNGGCSQLCVP

SEQ ID NO: 7567 - protein, 15 aa, Homo Sapiens
SSPDNGGCSQLCVPL

SEQ ID NO: 7568 - protein, 15 aa, Homo Sapiens
SPDNGGCSQLCVPLS

SEQ ID NO: 7569 - protein, 15 aa, Homo Sapiens
PDNGGCSQLCVPLSP

SEQ ID NO: 7570 - protein, 15 aa, Homo Sapiens
DNGGCSQLCVPLSPV

SEQ ID NO: 7571 - protein, 15 aa, Homo Sapiens
NGGCSQLCVPLSPVS

SEQ ID NO: 7572 - protein, 15 aa, Homo Sapiens
GGCSQLCVPLSPVSW

SEQ ID NO: 7573 - protein, 15 aa, Homo Sapiens
GCSQLCVPLSPVSWE

SEQ ID NO: 7574 - protein, 15 aa, Homo Sapiens
CSQLCVPLSPVSWEC

SEQ ID NO: 7575 - protein, 15 aa, Homo Sapiens
SQLCVPLSPVSWECD

SEQ ID NO: 7576 - protein, 15 aa, Homo Sapiens
QLCVPLSPVSWECDC

SEQ ID NO: 7577 - protein, 15 aa, Homo Sapiens
LCVPLSPVSWECDCF

SEQ ID NO: 7578 - protein, 15 aa, Homo Sapiens
CVPLSPVSWECDCFP

SEQ ID NO: 7579 - protein, 15 aa, Homo Sapiens
VPLSPVSWECDCFPG

SEQ ID NO: 7580 - protein, 15 aa, Homo Sapiens
PLSPVSWECDCFPGY

SEQ ID NO: 7581 - protein, 15 aa, Homo Sapiens
LSPVSWECDCFPGYD

SEQ ID NO: 7582 - protein, 15 aa, Homo Sapiens
SPVSWECDCFPGYDL

SEQ ID NO: 7583 - protein, 15 aa, Homo Sapiens
PVSWECDCFPGYDLQ

SEQ ID NO: 7584 - protein, 15 aa, Homo Sapiens
VSWECDCFPGYDLQL

SEQ ID NO: 7585 - protein, 15 aa, Homo Sapiens
SWECDCFPGYDLQLD

SEQ ID NO: 7586 - protein, 15 aa, Homo Sapiens
WECDCFPGYDLQLDE

SEQ ID NO: 7587 - protein, 15 aa, Homo Sapiens
ECDCFPGYDLQLDEK

SEQ ID NO: 7588 - protein, 15 aa, Homo Sapiens
CDCFPGYDLQLDEKS

SEQ ID NO: 7589 - protein, 15 aa, Homo Sapiens
DCFPGYDLQLDEKSC

SEQ ID NO: 7590 - protein, 15 aa, Homo Sapiens
CFPGYDLQLDEKSCA

SEQ ID NO: 7591 - protein, 15 aa, Homo Sapiens
FPGYDLQLDEKSCAA

SEQ ID NO: 7592 - protein, 15 aa, Homo Sapiens
PGYDLQLDEKSCAAS

SEQ ID NO: 7593 - protein, 15 aa, Homo Sapiens
GYDLQLDEKSCAASG

SEQ ID NO: 7594 - protein, 15 aa, Homo Sapiens
YDLQLDEKSCAASGP

SEQ ID NO: 7595 - protein, 15 aa, Homo Sapiens
DLQLDEKSCAASGPQ

SEQ ID NO: 7596 - protein, 15 aa, Homo Sapiens
LQLDEKSCAASGPQP

SEQ ID NO: 7597 - protein, 15 aa, Homo Sapiens
QLDEKSCAASGPQPF

SEQ ID NO: 7598 - protein, 15 aa, Homo Sapiens
LDEKSCAASGPQPFL

SEQ ID NO: 7599 - protein, 15 aa, Homo Sapiens
DEKSCAASGPQPFLL

SEQ ID NO: 7600 - protein, 15 aa, Homo Sapiens
EKSCAASGPQPFLLF

SEQ ID NO: 7601 - protein, 15 aa, Homo Sapiens
KSCAASGPQPFLLFA

SEQ ID NO: 7602 - protein, 15 aa, Homo Sapiens
SCAASGPQPFLLFAN

SEQ ID NO: 7603 - protein, 15 aa, Homo Sapiens
CAASGPQPFLLFANS

SEQ ID NO: 7604 - protein, 15 aa, Homo Sapiens
AASGPQPFLLFANSQ

SEQ ID NO: 7605 - protein, 15 aa, Homo Sapiens
ASGPQPFLLFANSQD

SEQ ID NO: 7606 - protein, 15 aa, Homo Sapiens
SGPQPFLLFANSQDI

SEQ ID NO: 7607 - protein, 15 aa, Homo Sapiens
GPQPFLLFANSQDIR

SEQ ID NO: 7608 - protein, 15 aa, Homo Sapiens
PQPFLLFANSQDIRH

SEQ ID NO: 7609 - protein, 15 aa, Homo Sapiens
QPFLLFANSQDIRHM

SEQ ID NO: 7610 - protein, 15 aa, Homo Sapiens
PFLLFANSQDIRHMH

SEQ ID NO: 7611 - protein, 15 aa, Homo Sapiens
FLLFANSQDIRHMHF

SEQ ID NO: 7612 - protein, 15 aa, Homo Sapiens
LLFANSQDIRHMHFD

SEQ ID NO: 7613 - protein, 15 aa, Homo Sapiens
LFANSQDIRHMHFDG

SEQ ID NO: 7614 - protein, 15 aa, Homo Sapiens
FANSQDIRHMHFDGT

SEQ ID NO: 7615 - protein, 15 aa, Homo Sapiens
ANSQDIRHMHFDGTD

SEQ ID NO: 7616 - protein, 15 aa, Homo Sapiens
NSQDIRHMHFDGTDY

SEQ ID NO: 7617 - protein, 15 aa, Homo Sapiens
SQDIRHMHFDGTDYG

SEQ ID NO: 7618 - protein, 15 aa, Homo Sapiens
QDIRHMHFDGTDYGT

SEQ ID NO: 7619 - protein, 15 aa, Homo Sapiens
DIRHMHFDGTDYGTL

SEQ ID NO: 7620 - protein, 15 aa, Homo Sapiens
IRHMHFDGTDYGTLL

SEQ ID NO: 7621 - protein, 15 aa, Homo Sapiens
RHMHFDGTDYGTLLS

SEQ ID NO: 7622 - protein, 15 aa, Homo Sapiens
HMHFDGTDYGTLLSQ

SEQ ID NO: 7623 - protein, 15 aa, Homo Sapiens
MHFDGTDYGTLLSQQ

SEQ ID NO: 7624 - protein, 15 aa, Homo Sapiens
HFDGTDYGTLLSQQM

SEQ ID NO: 7625 - protein, 15 aa, Homo Sapiens
FDGTDYGTLLSQQMG

SEQ ID NO: 7626 - protein, 15 aa, Homo Sapiens
DGTDYGTLLSQQMGM

SEQ ID NO: 7627 - protein, 15 aa, Homo Sapiens
GTDYGTLLSQQMGMV

SEQ ID NO: 7628 - protein, 15 aa, Homo Sapiens
TDYGTLLSQQMGMVY

SEQ ID NO: 7629 - protein, 15 aa, Homo Sapiens
DYGTLLSQQMGMVYA

SEQ ID NO: 7630 - protein, 15 aa, Homo Sapiens
YGTLLSQQMGMVYAL

SEQ ID NO: 7631 - protein, 15 aa, Homo Sapiens
GTLLSQQMGMVYALD

SEQ ID NO: 7632 - protein, 15 aa, Homo Sapiens
TLLSQQMGMVYALDH

SEQ ID NO: 7633 - protein, 15 aa, Homo Sapiens
LLSQQMGMVYALDHD

SEQ ID NO: 7634 - protein, 15 aa, Homo Sapiens
LSQQMGMVYALDHDP

SEQ ID NO: 7635 - protein, 15 aa, Homo Sapiens
SQQMGMVYALDHDPV

SEQ ID NO: 7636 - protein, 15 aa, Homo Sapiens
QQMGMVYALDHDPVE

SEQ ID NO: 7637 - protein, 15 aa, Homo Sapiens
QMGMVYALDHDPVEN

SEQ ID NO: 7638 - protein, 15 aa, Homo Sapiens
MGMVYALDHDPVENK

SEQ ID NO: 7639 - protein, 15 aa, Homo Sapiens
GMVYALDHDPVENKI

SEQ ID NO: 7640 - protein, 15 aa, Homo Sapiens
MVYALDHDPVENKIY

SEQ ID NO: 7641 - protein, 15 aa, Homo Sapiens
VYALDHDPVENKIYF

SEQ ID NO: 7642 - protein, 15 aa, Homo Sapiens
YALDHDPVENKIYFA

SEQ ID NO: 7643 - protein, 15 aa, Homo Sapiens
ALDHDPVENKIYFAH

SEQ ID NO: 7644 - protein, 15 aa, Homo Sapiens
LDHDPVENKIYFAHT

SEQ ID NO: 7645 - protein, 15 aa, Homo Sapiens
DHDPVENKIYFAHTA

SEQ ID NO: 7646 - protein, 15 aa, Homo Sapiens
HDPVENKIYFAHTAL

SEQ ID NO: 7647 - protein, 15 aa, Homo Sapiens
DPVENKIYFAHTALK

SEQ ID NO: 7648 - protein, 15 aa, Homo Sapiens
PVENKIYFAHTALKW

SEQ ID NO: 7649 - protein, 15 aa, Homo Sapiens
VENKIYFAHTALKWI

SEQ ID NO: 7650 - protein, 15 aa, Homo Sapiens
ENKIYFAHTALKWIE

SEQ ID NO: 7651 - protein, 15 aa, Homo Sapiens
NKIYFAHTALKWIER

SEQ ID NO: 7652 - protein, 15 aa, Homo Sapiens
KIYFAHTALKWIERA

SEQ ID NO: 7653 - protein, 15 aa, Homo Sapiens
IYFAHTALKWIERAN

SEQ ID NO: 7654 - protein, 15 aa, Homo Sapiens
YFAHTALKWIERANM

SEQ ID NO: 7655 - protein, 15 aa, Homo Sapiens
FAHTALKWIERANMD

SEQ ID NO: 7656 - protein, 15 aa, Homo Sapiens
AHTALKWIERANMDG

SEQ ID NO: 7657 - protein, 15 aa, Homo Sapiens
HTALKWIERANMDGS

SEQ ID NO: 7658 - protein, 15 aa, Homo Sapiens
TALKWIERANMDGSQ

SEQ ID NO: 7659 - protein, 15 aa, Homo Sapiens
ALKWIERANMDGSQR

SEQ ID NO: 7660 - protein, 15 aa, Homo Sapiens
LKWIERANMDGSQRE

SEQ ID NO: 7661 - protein, 15 aa, Homo Sapiens
KWIERANMDGSQRER

SEQ ID NO: 7662 - protein, 15 aa, Homo Sapiens
WIERANMDGSQRERL

SEQ ID NO: 7663 - protein, 15 aa, Homo Sapiens
IERANMDGSQRERLI

SEQ ID NO: 7664 - protein, 15 aa, Homo Sapiens
ERANMDGSQRERLIE

SEQ ID NO: 7665 - protein, 15 aa, Homo Sapiens
RANMDGSQRERLIEE

SEQ ID NO: 7666 - protein, 15 aa, Homo Sapiens
ANMDGSQRERLIEEG

SEQ ID NO: 7667 - protein, 15 aa, Homo Sapiens
NMDGSQRERLIEEGV

SEQ ID NO: 7668 - protein, 15 aa, Homo Sapiens
MDGSQRERLIEEGVD

SEQ ID NO: 7669 - protein, 15 aa, Homo Sapiens
DGSQRERLIEEGVDV

SEQ ID NO: 7670 - protein, 15 aa, Homo Sapiens
GSQRERLIEEGVDVP

SEQ ID NO: 7671 - protein, 15 aa, Homo Sapiens
SQRERLIEEGVDVPE

SEQ ID NO: 7672 - protein, 15 aa, Homo Sapiens
QRERLIEEGVDVPEG

SEQ ID NO: 7673 - protein, 15 aa, Homo Sapiens
RERLIEEGVDVPEGL

SEQ ID NO: 7674 - protein, 15 aa, Homo Sapiens
ERLIEEGVDVPEGLA

SEQ ID NO: 7675 - protein, 15 aa, Homo Sapiens
RLIEEGVDVPEGLAV

SEQ ID NO: 7676 - protein, 15 aa, Homo Sapiens
LIEEGVDVPEGLAVD

SEQ ID NO: 7677 - protein, 15 aa, Homo Sapiens
IEEGVDVPEGLAVDW

SEQ ID NO: 7678 - protein, 15 aa, Homo Sapiens
EEGVDVPEGLAVDWI

SEQ ID NO: 7679 - protein, 15 aa, Homo Sapiens
EGVDVPEGLAVDWIG

SEQ ID NO: 7680 - protein, 15 aa, Homo Sapiens
GVDVPEGLAVDWIGR

SEQ ID NO: 7681 - protein, 15 aa, Homo Sapiens
VDVPEGLAVDWIGRR

SEQ ID NO: 7682 - protein, 15 aa, Homo Sapiens
DVPEGLAVDWIGRRF

SEQ ID NO: 7683 - protein, 15 aa, Homo Sapiens
VPEGLAVDWIGRRFY

SEQ ID NO: 7684 - protein, 15 aa, Homo Sapiens
PEGLAVDWIGRRFYW

SEQ ID NO: 7685 - protein, 15 aa, Homo Sapiens
EGLAVDWIGRRFYWT

SEQ ID NO: 7686 - protein, 15 aa, Homo Sapiens
GLAVDWIGRRFYWTD

SEQ ID NO: 7687 - protein, 15 aa, Homo Sapiens
LAVDWIGRRFYWTDR

SEQ ID NO: 7688 - protein, 15 aa, Homo Sapiens
AVDWIGRRFYWTDRG

SEQ ID NO: 7689 - protein, 15 aa, Homo Sapiens
VDWIGRRFYWTDRGK

SEQ ID NO: 7690 - protein, 15 aa, Homo Sapiens
DWIGRRFYWTDRGKS

SEQ ID NO: 7691 - protein, 15 aa, Homo Sapiens
WIGRRFYWTDRGKSL

SEQ ID NO: 7692 - protein, 15 aa, Homo Sapiens
IGRRFYWTDRGKSLI

SEQ ID NO: 7693 - protein, 15 aa, Homo Sapiens
GRRFYWTDRGKSLIG

SEQ ID NO: 7694 - protein, 15 aa, Homo Sapiens
RRFYWTDRGKSLIGR

SEQ ID NO: 7695 - protein, 15 aa, Homo Sapiens
RFYWTDRGKSLIGRS

SEQ ID NO: 7696 - protein, 15 aa, Homo Sapiens
FYWTDRGKSLIGRSD

SEQ ID NO: 7697 - protein, 15 aa, Homo Sapiens
YWTDRGKSLIGRSDL

SEQ ID NO: 7698 - protein, 15 aa, Homo Sapiens
WTDRGKSLIGRSDLN

SEQ ID NO: 7699 - protein, 15 aa, Homo Sapiens
TDRGKSLIGRSDLNG

SEQ ID NO: 7700 - protein, 15 aa, Homo Sapiens
DRGKSLIGRSDLNGK

SEQ ID NO: 7701 - protein, 15 aa, Homo Sapiens
RGKSLIGRSDLNGKR

SEQ ID NO: 7702 - protein, 15 aa, Homo Sapiens
GKSLIGRSDLNGKRS

SEQ ID NO: 7703 - protein, 15 aa, Homo Sapiens
KSLIGRSDLNGKRSK

SEQ ID NO: 7704 - protein, 15 aa, Homo Sapiens
SLIGRSDLNGKRSKI

SEQ ID NO: 7705 - protein, 15 aa, Homo Sapiens
LIGRSDLNGKRSKII

SEQ ID NO: 7706 - protein, 15 aa, Homo Sapiens
IGRSDLNGKRSKIIT

SEQ ID NO: 7707 - protein, 15 aa, Homo Sapiens
GRSDLNGKRSKIITK

SEQ ID NO: 7708 - protein, 15 aa, Homo Sapiens
RSDLNGKRSKIITKE

SEQ ID NO: 7709 - protein, 15 aa, Homo Sapiens
SDLNGKRSKIITKEN

SEQ ID NO: 7710 - protein, 15 aa, Homo Sapiens
DLNGKRSKIITKENI

SEQ ID NO: 7711 - protein, 15 aa, Homo Sapiens
LNGKRSKIITKENIS

SEQ ID NO: 7712 - protein, 15 aa, Homo Sapiens
NGKRSKIITKENISQ

SEQ ID NO: 7713 - protein, 15 aa, Homo Sapiens
GKRSKIITKENISQP

SEQ ID NO: 7714 - protein, 15 aa, Homo Sapiens
KRSKIITKENISQPR

SEQ ID NO: 7715 - protein, 15 aa, Homo Sapiens
RSKIITKENISQPRG

SEQ ID NO: 7716 - protein, 15 aa, Homo Sapiens
SKIITKENISQPRGI

SEQ ID NO: 7717 - protein, 15 aa, Homo Sapiens
KIITKENISQPRGIA

SEQ ID NO: 7718 - protein, 15 aa, Homo Sapiens
IITKENISQPRGIAV

SEQ ID NO: 7719 - protein, 15 aa, Homo Sapiens
ITKENISQPRGIAVH

SEQ ID NO: 7720 - protein, 15 aa, Homo Sapiens
TKENISQPRGIAVHP

SEQ ID NO: 7721 - protein, 15 aa, Homo Sapiens
KENISQPRGIAVHPM

SEQ ID NO: 7722 - protein, 15 aa, Homo Sapiens
ENISQPRGIAVHPMA

SEQ ID NO: 7723 - protein, 15 aa, Homo Sapiens
NISQPRGIAVHPMAK

SEQ ID NO: 7724 - protein, 15 aa, Homo Sapiens
ISQPRGIAVHPMAKR

SEQ ID NO: 7725 - protein, 15 aa, Homo Sapiens
SQPRGIAVHPMAKRL

SEQ ID NO: 7726 - protein, 15 aa, Homo Sapiens
QPRGIAVHPMAKRLF

SEQ ID NO: 7727 - protein, 15 aa, Homo Sapiens
PRGIAVHPMAKRLFW

SEQ ID NO: 7728 - protein, 15 aa, Homo Sapiens
RGIAVHPMAKRLFWT

SEQ ID NO: 7729 - protein, 15 aa, Homo Sapiens
GIAVHPMAKRLFWTD

SEQ ID NO: 7730 - protein, 15 aa, Homo Sapiens
IAVHPMAKRLFWTDT

SEQ ID NO: 7731 - protein, 15 aa, Homo Sapiens
AVHPMAKRLFWTDTG

SEQ ID NO: 7732 - protein, 15 aa, Homo Sapiens
VHPMAKRLFWTDTGI

SEQ ID NO: 7733 - protein, 15 aa, Homo Sapiens
HPMAKRLFWTDTGIN

SEQ ID NO: 7734 - protein, 15 aa, Homo Sapiens
PMAKRLFWTDTGINP

SEQ ID NO: 7735 - protein, 15 aa, Homo Sapiens
MAKRLFWTDTGINPR

SEQ ID NO: 7736 - protein, 15 aa, Homo Sapiens
AKRLFWTDTGINPRI

SEQ ID NO: 7737 - protein, 15 aa, Homo Sapiens
KRLFWTDTGINPRIE

SEQ ID NO: 7738 - protein, 15 aa, Homo Sapiens
RLFWTDTGINPRIES

SEQ ID NO: 7739 - protein, 15 aa, Homo Sapiens
LFWTDTGINPRIESS

SEQ ID NO: 7740 - protein, 15 aa, Homo Sapiens
FWTDTGINPRIESSS

SEQ ID NO: 7741 - protein, 15 aa, Homo Sapiens
WTDTGINPRIESSSL

SEQ ID NO: 7742 - protein, 15 aa, Homo Sapiens
TDTGINPRIESSSLQ

SEQ ID NO: 7743 - protein, 15 aa, Homo Sapiens
DTGINPRIESSSLQG

SEQ ID NO: 7744 - protein, 15 aa, Homo Sapiens
TGINPRIESSSLQGL

SEQ ID NO: 7745 - protein, 15 aa, Homo Sapiens
GINPRIESSSLQGLG

SEQ ID NO: 7746 - protein, 15 aa, Homo Sapiens
INPRIESSSLQGLGR

SEQ ID NO: 7747 - protein, 15 aa, Homo Sapiens
NPRIESSSLQGLGRL

SEQ ID NO: 7748 - protein, 15 aa, Homo Sapiens
PRIESSSLQGLGRLV

SEQ ID NO: 7749 - protein, 15 aa, Homo Sapiens
RIESSSLQGLGRLVI

SEQ ID NO: 7750 - protein, 15 aa, Homo Sapiens
IESSSLQGLGRLVIA

SEQ ID NO: 7751 - protein, 15 aa, Homo Sapiens
ESSSLQGLGRLVIAS

SEQ ID NO: 7752 - protein, 15 aa, Homo Sapiens
SSSLQGLGRLVIASS

SEQ ID NO: 7753 - protein, 15 aa, Homo Sapiens
SSLQGLGRLVIASSD

SEQ ID NO: 7754 - protein, 15 aa, Homo Sapiens
SLQGLGRLVIASSDL

SEQ ID NO: 7755 - protein, 15 aa, Homo Sapiens
LQGLGRLVIASSDLI

SEQ ID NO: 7756 - protein, 15 aa, Homo Sapiens
QGLGRLVIASSDLIW

SEQ ID NO: 7757 - protein, 15 aa, Homo Sapiens
GLGRLVIASSDLIWP

SEQ ID NO: 7758 - protein, 15 aa, Homo Sapiens
LGRLVIASSDLIWPS

SEQ ID NO: 7759 - protein, 15 aa, Homo Sapiens
GRLVIASSDLIWPSG

SEQ ID NO: 7760 - protein, 15 aa, Homo Sapiens
RLVIASSDLIWPSGI

SEQ ID NO: 7761 - protein, 15 aa, Homo Sapiens
LVIASSDLIWPSGIT

SEQ ID NO: 7762 - protein, 15 aa, Homo Sapiens
VIASSDLIWPSGITI

SEQ ID NO: 7763 - protein, 15 aa, Homo Sapiens
IASSDLIWPSGITID

SEQ ID NO: 7764 - protein, 15 aa, Homo Sapiens
ASSDLIWPSGITIDF

SEQ ID NO: 7765 - protein, 15 aa, Homo Sapiens
SSDLIWPSGITIDFL

SEQ ID NO: 7766 - protein, 15 aa, Homo Sapiens
SDLIWPSGITIDFLT

SEQ ID NO: 7767 - protein, 15 aa, Homo Sapiens
DLIWPSGITIDFLTD

SEQ ID NO: 7768 - protein, 15 aa, Homo Sapiens
LIWPSGITIDFLTDK

SEQ ID NO: 7769 - protein, 15 aa, Homo Sapiens
IWPSGITIDFLTDKL

SEQ ID NO: 7770 - protein, 15 aa, Homo Sapiens
WPSGITIDFLTDKLY

SEQ ID NO: 7771 - protein, 15 aa, Homo Sapiens
PSGITIDFLTDKLYW

SEQ ID NO: 7772 - protein, 15 aa, Homo Sapiens
SGITIDFLTDKLYWC

SEQ ID NO: 7773 - protein, 15 aa, Homo Sapiens
GITIDFLTDKLYWCD

SEQ ID NO: 7774 - protein, 15 aa, Homo Sapiens
ITIDFLTDKLYWCDA

SEQ ID NO: 7775 - protein, 15 aa, Homo Sapiens
TIDFLTDKLYWCDAK

SEQ ID NO: 7776 - protein, 15 aa, Homo Sapiens
IDFLTDKLYWCDAKQ

SEQ ID NO: 7777 - protein, 15 aa, Homo Sapiens
DFLTDKLYWCDAKQS

SEQ ID NO: 7778 - protein, 15 aa, Homo Sapiens
FLTDKLYWCDAKQSV

SEQ ID NO: 7779 - protein, 15 aa, Homo Sapiens
LTDKLYWCDAKQSVI

SEQ ID NO: 7780 - protein, 15 aa, Homo Sapiens
TDKLYWCDAKQSVIE

SEQ ID NO: 7781 - protein, 15 aa, Homo Sapiens
DKLYWCDAKQSVIEM

SEQ ID NO: 7782 - protein, 15 aa, Homo Sapiens
KLYWCDAKQSVIEMA

SEQ ID NO: 7783 - protein, 15 aa, Homo Sapiens
LYWCDAKQSVIEMAN

SEQ ID NO: 7784 - protein, 15 aa, Homo Sapiens
YWCDAKQSVIEMANL

SEQ ID NO: 7785 - protein, 15 aa, Homo Sapiens
WCDAKQSVIEMANLD

SEQ ID NO: 7786 - protein, 15 aa, Homo Sapiens
CDAKQSVIEMANLDG

SEQ ID NO: 7787 - protein, 15 aa, Homo Sapiens
DAKQSVIEMANLDGS

SEQ ID NO: 7788 - protein, 15 aa, Homo Sapiens
AKQSVIEMANLDGSK

SEQ ID NO: 7789 - protein, 15 aa, Homo Sapiens
KQSVIEMANLDGSKR

SEQ ID NO: 7790 - protein, 15 aa, Homo Sapiens
QSVIEMANLDGSKRR

SEQ ID NO: 7791 - protein, 15 aa, Homo Sapiens
SVIEMANLDGSKRRR

SEQ ID NO: 7792 - protein, 15 aa, Homo Sapiens
VIEMANLDGSKRRRL

SEQ ID NO: 7793 - protein, 15 aa, Homo Sapiens
IEMANLDGSKRRRLT

SEQ ID NO: 7794 - protein, 15 aa, Homo Sapiens
EMANLDGSKRRRLTQ

SEQ ID NO: 7795 - protein, 15 aa, Homo Sapiens
MANLDGSKRRRLTQN

SEQ ID NO: 7796 - protein, 15 aa, Homo Sapiens
ANLDGSKRRRLTQND

SEQ ID NO: 7797 - protein, 15 aa, Homo Sapiens
NLDGSKRRRLTQNDV

SEQ ID NO: 7798 - protein, 15 aa, Homo Sapiens
LDGSKRRRLTQNDVG

SEQ ID NO: 7799 - protein, 15 aa, Homo Sapiens
DGSKRRRLTQNDVGH

SEQ ID NO: 7800 - protein, 15 aa, Homo Sapiens
GSKRRRLTQNDVGHP

SEQ ID NO: 7801 - protein, 15 aa, Homo Sapiens
SKRRRLTQNDVGHPF

SEQ ID NO: 7802 - protein, 15 aa, Homo Sapiens
KRRRLTQNDVGHPFA

SEQ ID NO: 7803 - protein, 15 aa, Homo Sapiens
RRRLTQNDVGHPFAV

SEQ ID NO: 7804 - protein, 15 aa, Homo Sapiens
RRLTQNDVGHPFAVA

SEQ ID NO: 7805 - protein, 15 aa, Homo Sapiens
RLTQNDVGHPFAVAV

SEQ ID NO: 7806 - protein, 15 aa, Homo Sapiens
LTQNDVGHPFAVAVF

SEQ ID NO: 7807 - protein, 15 aa, Homo Sapiens
TQNDVGHPFAVAVFE

SEQ ID NO: 7808 - protein, 15 aa, Homo Sapiens
QNDVGHPFAVAVFED

SEQ ID NO: 7809 - protein, 15 aa, Homo Sapiens
NDVGHPFAVAVFEDY

SEQ ID NO: 7810 - protein, 15 aa, Homo Sapiens
DVGHPFAVAVFEDYV

SEQ ID NO: 7811 - protein, 15 aa, Homo Sapiens
VGHPFAVAVFEDYVW

SEQ ID NO: 7812 - protein, 15 aa, Homo Sapiens
GHPFAVAVFEDYVWF

SEQ ID NO: 7813 - protein, 15 aa, Homo Sapiens
HPFAVAVFEDYVWFS

SEQ ID NO: 7814 - protein, 15 aa, Homo Sapiens
PFAVAVFEDYVWFSD

SEQ ID NO: 7815 - protein, 15 aa, Homo Sapiens
FAVAVFEDYVWFSDW

SEQ ID NO: 7816 - protein, 15 aa, Homo Sapiens
AVAVFEDYVWFSDWA

SEQ ID NO: 7817 - protein, 15 aa, Homo Sapiens
VAVFEDYVWFSDWAM

SEQ ID NO: 7818 - protein, 15 aa, Homo Sapiens
AVFEDYVWFSDWAMP

SEQ ID NO: 7819 - protein, 15 aa, Homo Sapiens
VFEDYVWFSDWAMPS

SEQ ID NO: 7820 - protein, 15 aa, Homo Sapiens
FEDYVWFSDWAMPSV

SEQ ID NO: 7821 - protein, 15 aa, Homo Sapiens
EDYVWFSDWAMPSVI

SEQ ID NO: 7822 - protein, 15 aa, Homo Sapiens
DYVWFSDWAMPSVIR

SEQ ID NO: 7823 - protein, 15 aa, Homo Sapiens
YVWFSDWAMPSVIRV

SEQ ID NO: 7824 - protein, 15 aa, Homo Sapiens
VWFSDWAMPSVIRVN

SEQ ID NO: 7825 - protein, 15 aa, Homo Sapiens
WFSDWAMPSVIRVNK

SEQ ID NO: 7826 - protein, 15 aa, Homo Sapiens
FSDWAMPSVIRVNKR

SEQ ID NO: 7827 - protein, 15 aa, Homo Sapiens
SDWAMPSVIRVNKRT

SEQ ID NO: 7828 - protein, 15 aa, Homo Sapiens
DWAMPSVIRVNKRTG

SEQ ID NO: 7829 - protein, 15 aa, Homo Sapiens
WAMPSVIRVNKRTGK

SEQ ID NO: 7830 - protein, 15 aa, Homo Sapiens
AMPSVIRVNKRTGKD

SEQ ID NO: 7831 - protein, 15 aa, Homo Sapiens
MPSVIRVNKRTGKDR

SEQ ID NO: 7832 - protein, 15 aa, Homo Sapiens
PSVIRVNKRTGKDRV

SEQ ID NO: 7833 - protein, 15 aa, Homo Sapiens
SVIRVNKRTGKDRVR

SEQ ID NO: 7834 - protein, 15 aa, Homo Sapiens
VIRVNKRTGKDRVRL

SEQ ID NO: 7835 - protein, 15 aa, Homo Sapiens
IRVNKRTGKDRVRLQ

SEQ ID NO: 7836 - protein, 15 aa, Homo Sapiens
RVNKRTGKDRVRLQG

SEQ ID NO: 7837 - protein, 15 aa, Homo Sapiens
VNKRTGKDRVRLQGS

SEQ ID NO: 7838 - protein, 15 aa, Homo Sapiens
NKRTGKDRVRLQGSM

SEQ ID NO: 7839 - protein, 15 aa, Homo Sapiens
KRTGKDRVRLQGSML

SEQ ID NO: 7840 - protein, 15 aa, Homo Sapiens
RTGKDRVRLQGSMLK

SEQ ID NO: 7841 - protein, 15 aa, Homo Sapiens
TGKDRVRLQGSMLKP

SEQ ID NO: 7842 - protein, 15 aa, Homo Sapiens
GKDRVRLQGSMLKPS

SEQ ID NO: 7843 - protein, 15 aa, Homo Sapiens
KDRVRLQGSMLKPSS

SEQ ID NO: 7844 - protein, 15 aa, Homo Sapiens
DRVRLQGSMLKPSSL

SEQ ID NO: 7845 - protein, 15 aa, Homo Sapiens
RVRLQGSMLKPSSLV

SEQ ID NO: 7846 - protein, 15 aa, Homo Sapiens
VRLQGSMLKPSSLVV

SEQ ID NO: 7847 - protein, 15 aa, Homo Sapiens
RLQGSMLKPSSLVVV

SEQ ID NO: 7848 - protein, 15 aa, Homo Sapiens
LQGSMLKPSSLVVVH

SEQ ID NO: 7849 - protein, 15 aa, Homo Sapiens
QGSMLKPSSLVVVHP

SEQ ID NO: 7850 - protein, 15 aa, Homo Sapiens
GSMLKPSSLVVVHPL

SEQ ID NO: 7851 - protein, 15 aa, Homo Sapiens
SMLKPSSLVVVHPLA

SEQ ID NO: 7852 - protein, 15 aa, Homo Sapiens
MLKPSSLVVVHPLAK

SEQ ID NO: 7853 - protein, 15 aa, Homo Sapiens
LKPSSLVVVHPLAKP

SEQ ID NO: 7854 - protein, 15 aa, Homo Sapiens
KPSSLVVVHPLAKPG

SEQ ID NO: 7855 - protein, 15 aa, Homo Sapiens
PSSLVVVHPLAKPGA

SEQ ID NO: 7856 - protein, 15 aa, Homo Sapiens
SSLVVVHPLAKPGAD

SEQ ID NO: 7857 - protein, 15 aa, Homo Sapiens
SLVVVHPLAKPGADP

SEQ ID NO: 7858 - protein, 15 aa, Homo Sapiens
LVVVHPLAKPGADPC

SEQ ID NO: 7859 - protein, 15 aa, Homo Sapiens
VVVHPLAKPGADPCL

SEQ ID NO: 7860 - protein, 15 aa, Homo Sapiens
VVHPLAKPGADPCLY

SEQ ID NO: 7861 - protein, 15 aa, Homo Sapiens
VHPLAKPGADPCLYQ

SEQ ID NO: 7862 - protein, 15 aa, Homo Sapiens
HPLAKPGADPCLYQN

SEQ ID NO: 7863 - protein, 15 aa, Homo Sapiens
PLAKPGADPCLYQNG

SEQ ID NO: 7864 - protein, 15 aa, Homo Sapiens
LAKPGADPCLYQNGG

SEQ ID NO: 7865 - protein, 15 aa, Homo Sapiens
AKPGADPCLYQNGGC

SEQ ID NO: 7866 - protein, 15 aa, Homo Sapiens
KPGADPCLYQNGGCE

SEQ ID NO: 7867 - protein, 15 aa, Homo Sapiens
PGADPCLYQNGGCEH

SEQ ID NO: 7868 - protein, 15 aa, Homo Sapiens
GADPCLYQNGGCEHI

SEQ ID NO: 7869 - protein, 15 aa, Homo Sapiens
ADPCLYQNGGCEHIC

SEQ ID NO: 7870 - protein, 15 aa, Homo Sapiens
DPCLYQNGGCEHICK

SEQ ID NO: 7871 - protein, 15 aa, Homo Sapiens
PCLYQNGGCEHICKK

SEQ ID NO: 7872 - protein, 15 aa, Homo Sapiens
CLYQNGGCEHICKKR

SEQ ID NO: 7873 - protein, 15 aa, Homo Sapiens
LYQNGGCEHICKKRL

SEQ ID NO: 7874 - protein, 15 aa, Homo Sapiens
YQNGGCEHICKKRLG

SEQ ID NO: 7875 - protein, 15 aa, Homo Sapiens
QNGGCEHICKKRLGT

SEQ ID NO: 7876 - protein, 15 aa, Homo Sapiens
NGGCEHICKKRLGTA

SEQ ID NO: 7877 - protein, 15 aa, Homo Sapiens
GGCEHICKKRLGTAW

SEQ ID NO: 7878 - protein, 15 aa, Homo Sapiens
GCEHICKKRLGTAWC

SEQ ID NO: 7879 - protein, 15 aa, Homo Sapiens
CEHICKKRLGTAWCS

SEQ ID NO: 7880 - protein, 15 aa, Homo Sapiens
EHICKKRLGTAWCSC

SEQ ID NO: 7881 - protein, 15 aa, Homo Sapiens
HICKKRLGTAWCSCR

SEQ ID NO: 7882 - protein, 15 aa, Homo Sapiens
ICKKRLGTAWCSCRE

SEQ ID NO: 7883 - protein, 15 aa, Homo Sapiens
CKKRLGTAWCSCREG

SEQ ID NO: 7884 - protein, 15 aa, Homo Sapiens
KKRLGTAWCSCREGF

SEQ ID NO: 7885 - protein, 15 aa, Homo Sapiens
KRLGTAWCSCREGFM

SEQ ID NO: 7886 - protein, 15 aa, Homo Sapiens
RLGTAWCSCREGFMK

SEQ ID NO: 7887 - protein, 15 aa, Homo Sapiens
LGTAWCSCREGFMKA

SEQ ID NO: 7888 - protein, 15 aa, Homo Sapiens
GTAWCSCREGFMKAS

SEQ ID NO: 7889 - protein, 15 aa, Homo Sapiens
TAWCSCREGFMKASD

SEQ ID NO: 7890 - protein, 15 aa, Homo Sapiens
AWCSCREGFMKASDG

SEQ ID NO: 7891 - protein, 15 aa, Homo Sapiens
WCSCREGFMKASDGK

SEQ ID NO: 7892 - protein, 15 aa, Homo Sapiens
CSCREGFMKASDGKT

SEQ ID NO: 7893 - protein, 15 aa, Homo Sapiens
SCREGFMKASDGKTC

SEQ ID NO: 7894 - protein, 15 aa, Homo Sapiens
CREGFMKASDGKTCL

SEQ ID NO: 7895 - protein, 15 aa, Homo Sapiens
REGFMKASDGKTCLA

SEQ ID NO: 7896 - protein, 15 aa, Homo Sapiens
EGFMKASDGKTCLAL

SEQ ID NO: 7897 - protein, 15 aa, Homo Sapiens
GFMKASDGKTCLALD

SEQ ID NO: 7898 - protein, 15 aa, Homo Sapiens
FMKASDGKTCLALDG

SEQ ID NO: 7899 - protein, 15 aa, Homo Sapiens
MKASDGKTCLALDGH

SEQ ID NO: 7900 - protein, 15 aa, Homo Sapiens
KASDGKTCLALDGHQ

SEQ ID NO: 7901 - protein, 15 aa, Homo Sapiens
ASDGKTCLALDGHQL

SEQ ID NO: 7902 - protein, 15 aa, Homo Sapiens
SDGKTCLALDGHQLL

SEQ ID NO: 7903 - protein, 15 aa, Homo Sapiens
DGKTCLALDGHQLLA

SEQ ID NO: 7904 - protein, 15 aa, Homo Sapiens
GKTCLALDGHQLLAG

SEQ ID NO: 7905 - protein, 15 aa, Homo Sapiens
KTCLALDGHQLLAGG

SEQ ID NO: 7906 - protein, 15 aa, Homo Sapiens
TCLALDGHQLLAGGE

SEQ ID NO: 7907 - protein, 15 aa, Homo Sapiens
CLALDGHQLLAGGEV

SEQ ID NO: 7908 - protein, 15 aa, Homo Sapiens
LALDGHQLLAGGEVD

SEQ ID NO: 7909 - protein, 15 aa, Homo Sapiens
ALDGHQLLAGGEVDL

SEQ ID NO: 7910 - protein, 15 aa, Homo Sapiens
LDGHQLLAGGEVDLK

SEQ ID NO: 7911 - protein, 15 aa, Homo Sapiens
DGHQLLAGGEVDLKN

SEQ ID NO: 7912 - protein, 15 aa, Homo Sapiens
GHQLLAGGEVDLKNQ

SEQ ID NO: 7913 - protein, 15 aa, Homo Sapiens
HQLLAGGEVDLKNQV

SEQ ID NO: 7914 - protein, 15 aa, Homo Sapiens
QLLAGGEVDLKNQVT

SEQ ID NO: 7915 - protein, 15 aa, Homo Sapiens
LLAGGEVDLKNQVTP

SEQ ID NO: 7916 - protein, 15 aa, Homo Sapiens
LAGGEVDLKNQVTPL

SEQ ID NO: 7917 - protein, 15 aa, Homo Sapiens
AGGEVDLKNQVTPLD

SEQ ID NO: 7918 - protein, 15 aa, Homo Sapiens
GGEVDLKNQVTPLDI

SEQ ID NO: 7919 - protein, 15 aa, Homo Sapiens
GEVDLKNQVTPLDIL

SEQ ID NO: 7920 - protein, 15 aa, Homo Sapiens
EVDLKNQVTPLDILS

SEQ ID NO: 7921 - protein, 15 aa, Homo Sapiens
VDLKNQVTPLDILSK

SEQ ID NO: 7922 - protein, 15 aa, Homo Sapiens
DLKNQVTPLDILSKT

SEQ ID NO: 7923 - protein, 15 aa, Homo Sapiens
LKNQVTPLDILSKTR

SEQ ID NO: 7924 - protein, 15 aa, Homo Sapiens
KNQVTPLDILSKTRV

SEQ ID NO: 7925 - protein, 15 aa, Homo Sapiens
NQVTPLDILSKTRVS

SEQ ID NO: 7926 - protein, 15 aa, Homo Sapiens
QVTPLDILSKTRVSE

SEQ ID NO: 7927 - protein, 15 aa, Homo Sapiens
VTPLDILSKTRVSED

SEQ ID NO: 7928 - protein, 15 aa, Homo Sapiens
TPLDILSKTRVSEDN

SEQ ID NO: 7929 - protein, 15 aa, Homo Sapiens
PLDILSKTRVSEDNI

SEQ ID NO: 7930 - protein, 15 aa, Homo Sapiens
LDILSKTRVSEDNIT

SEQ ID NO: 7931 - protein, 15 aa, Homo Sapiens
DILSKTRVSEDNITE

SEQ ID NO: 7932 - protein, 15 aa, Homo Sapiens
ILSKTRVSEDNITES

SEQ ID NO: 7933 - protein, 15 aa, Homo Sapiens
LSKTRVSEDNITESQ

SEQ ID NO: 7934 - protein, 15 aa, Homo Sapiens
SKTRVSEDNITESQH

SEQ ID NO: 7935 - protein, 15 aa, Homo Sapiens
KTRVSEDNITESQHM

SEQ ID NO: 7936 - protein, 15 aa, Homo Sapiens
TRVSEDNITESQHML

SEQ ID NO: 7937 - protein, 15 aa, Homo Sapiens
RVSEDNITESQHMLV

SEQ ID NO: 7938 - protein, 15 aa, Homo Sapiens
VSEDNITESQHMLVA

SEQ ID NO: 7939 - protein, 15 aa, Homo Sapiens
SEDNITESQHMLVAE

SEQ ID NO: 7940 - protein, 15 aa, Homo Sapiens
EDNITESQHMLVAEI

SEQ ID NO: 7941 - protein, 15 aa, Homo Sapiens
DNITESQHMLVAEIM

SEQ ID NO: 7942 - protein, 15 aa, Homo Sapiens
NITESQHMLVAEIMV

SEQ ID NO: 7943 - protein, 15 aa, Homo Sapiens
ITESQHMLVAEIMVS

SEQ ID NO: 7944 - protein, 15 aa, Homo Sapiens
TESQHMLVAEIMVSD

SEQ ID NO: 7945 - protein, 15 aa, Homo Sapiens
ESQHMLVAEIMVSDQ

SEQ ID NO: 7946 - protein, 15 aa, Homo Sapiens
SQHMLVAEIMVSDQD

SEQ ID NO: 7947 - protein, 15 aa, Homo Sapiens
QHMLVAEIMVSDQDD

SEQ ID NO: 7948 - protein, 15 aa, Homo Sapiens
HMLVAEIMVSDQDDC

SEQ ID NO: 7949 - protein, 15 aa, Homo Sapiens
MLVAEIMVSDQDDCA

SEQ ID NO: 7950 - protein, 15 aa, Homo Sapiens
LVAEIMVSDQDDCAP

SEQ ID NO: 7951 - protein, 15 aa, Homo Sapiens
VAEIMVSDQDDCAPV

SEQ ID NO: 7952 - protein, 15 aa, Homo Sapiens
AEIMVSDQDDCAPVG

SEQ ID NO: 7953 - protein, 15 aa, Homo Sapiens
EIMVSDQDDCAPVGC

SEQ ID NO: 7954 - protein, 15 aa, Homo Sapiens
IMVSDQDDCAPVGCS

SEQ ID NO: 7955 - protein, 15 aa, Homo Sapiens
MVSDQDDCAPVGCSM

SEQ ID NO: 7956 - protein, 15 aa, Homo Sapiens
VSDQDDCAPVGCSMY

SEQ ID NO: 7957 - protein, 15 aa, Homo Sapiens
SDQDDCAPVGCSMYA

SEQ ID NO: 7958 - protein, 15 aa, Homo Sapiens
DQDDCAPVGCSMYAR

SEQ ID NO: 7959 - protein, 15 aa, Homo Sapiens
QDDCAPVGCSMYARC

SEQ ID NO: 7960 - protein, 15 aa, Homo Sapiens
DDCAPVGCSMYARCI

SEQ ID NO: 7961 - protein, 15 aa, Homo Sapiens
DCAPVGCSMYARCIS

SEQ ID NO: 7962 - protein, 15 aa, Homo Sapiens
CAPVGCSMYARCISE

SEQ ID NO: 7963 - protein, 15 aa, Homo Sapiens
APVGCSMYARCISEG

SEQ ID NO: 7964 - protein, 15 aa, Homo Sapiens
PVGCSMYARCISEGE

SEQ ID NO: 7965 - protein, 15 aa, Homo Sapiens
VGCSMYARCISEGED

SEQ ID NO: 7966 - protein, 15 aa, Homo Sapiens
GCSMYARCISEGEDA

SEQ ID NO: 7967 - protein, 15 aa, Homo Sapiens
CSMYARCISEGEDAT

SEQ ID NO: 7968 - protein, 15 aa, Homo Sapiens
SMYARCISEGEDATC

SEQ ID NO: 7969 - protein, 15 aa, Homo Sapiens
MYARCISEGEDATCQ

SEQ ID NO: 7970 - protein, 15 aa, Homo Sapiens
YARCISEGEDATCQC

SEQ ID NO: 7971 - protein, 15 aa, Homo Sapiens
ARCISEGEDATCQCL

SEQ ID NO: 7972 - protein, 15 aa, Homo Sapiens
RCISEGEDATCQCLK

SEQ ID NO: 7973 - protein, 15 aa, Homo Sapiens
CISEGEDATCQCLKG

SEQ ID NO: 7974 - protein, 15 aa, Homo Sapiens
ISEGEDATCQCLKGF

SEQ ID NO: 7975 - protein, 15 aa, Homo Sapiens
SEGEDATCQCLKGFA

SEQ ID NO: 7976 - protein, 15 aa, Homo Sapiens
EGEDATCQCLKGFAG

SEQ ID NO: 7977 - protein, 15 aa, Homo Sapiens
GEDATCQCLKGFAGD

SEQ ID NO: 7978 - protein, 15 aa, Homo Sapiens
EDATCQCLKGFAGDG

SEQ ID NO: 7979 - protein, 15 aa, Homo Sapiens
DATCQCLKGFAGDGK

SEQ ID NO: 7980 - protein, 15 aa, Homo Sapiens
ATCQCLKGFAGDGKL

SEQ ID NO: 7981 - protein, 15 aa, Homo Sapiens
TCQCLKGFAGDGKLC

SEQ ID NO: 7982 - protein, 15 aa, Homo Sapiens
CQCLKGFAGDGKLCS

SEQ ID NO: 7983 - protein, 15 aa, Homo Sapiens
QCLKGFAGDGKLCSD

SEQ ID NO: 7984 - protein, 15 aa, Homo Sapiens
CLKGFAGDGKLCSDI

SEQ ID NO: 7985 - protein, 15 aa, Homo Sapiens
LKGFAGDGKLCSDID

SEQ ID NO: 7986 - protein, 15 aa, Homo Sapiens
KGFAGDGKLCSDIDE

SEQ ID NO: 7987 - protein, 15 aa, Homo Sapiens
GFAGDGKLCSDIDEC

SEQ ID NO: 7988 - protein, 15 aa, Homo Sapiens
FAGDGKLCSDIDECE

SEQ ID NO: 7989 - protein, 15 aa, Homo Sapiens
AGDGKLCSDIDECEM

SEQ ID NO: 7990 - protein, 15 aa, Homo Sapiens
GDGKLCSDIDECEMG

SEQ ID NO: 7991 - protein, 15 aa, Homo Sapiens
DGKLCSDIDECEMGV

SEQ ID NO: 7992 - protein, 15 aa, Homo Sapiens
GKLCSDIDECEMGVP

SEQ ID NO: 7993 - protein, 15 aa, Homo Sapiens
KLCSDIDECEMGVPV

SEQ ID NO: 7994 - protein, 15 aa, Homo Sapiens
LCSDIDECEMGVPVC

SEQ ID NO: 7995 - protein, 15 aa, Homo Sapiens
CSDIDECEMGVPVCP

SEQ ID NO: 7996 - protein, 15 aa, Homo Sapiens
SDIDECEMGVPVCPP

SEQ ID NO: 7997 - protein, 15 aa, Homo Sapiens
DIDECEMGVPVCPPA

SEQ ID NO: 7998 - protein, 15 aa, Homo Sapiens
IDECEMGVPVCPPAS

SEQ ID NO: 7999 - protein, 15 aa, Homo Sapiens
DECEMGVPVCPPASS

SEQ ID NO: 8000 - protein, 15 aa, Homo Sapiens
ECEMGVPVCPPASSK

SEQ ID NO: 8001 - protein, 15 aa, Homo Sapiens
CEMGVPVCPPASSKC

SEQ ID NO: 8002 - protein, 15 aa, Homo Sapiens
EMGVPVCPPASSKCI

SEQ ID NO: 8003 - protein, 15 aa, Homo Sapiens
MGVPVCPPASSKCIN

SEQ ID NO: 8004 - protein, 15 aa, Homo Sapiens
GVPVCPPASSKCINT

SEQ ID NO: 8005 - protein, 15 aa, Homo Sapiens
VPVCPPASSKCINTE

SEQ ID NO: 8006 - protein, 15 aa, Homo Sapiens
PVCPPASSKCINTEG

SEQ ID NO: 8007 - protein, 15 aa, Homo Sapiens
VCPPASSKCINTEGG

SEQ ID NO: 8008 - protein, 15 aa, Homo Sapiens
CPPASSKCINTEGGY

SEQ ID NO: 8009 - protein, 15 aa, Homo Sapiens
PPASSKCINTEGGYV

SEQ ID NO: 8010 - protein, 15 aa, Homo Sapiens
PASSKCINTEGGYVC

SEQ ID NO: 8011 - protein, 15 aa, Homo Sapiens
ASSKCINTEGGYVCR

SEQ ID NO: 8012 - protein, 15 aa, Homo Sapiens
SSKCINTEGGYVCRC

SEQ ID NO: 8013 - protein, 15 aa, Homo Sapiens
SKCINTEGGYVCRCS

SEQ ID NO: 8014 - protein, 15 aa, Homo Sapiens
KCINTEGGYVCRCSE

SEQ ID NO: 8015 - protein, 15 aa, Homo Sapiens
CINTEGGYVCRCSEG

SEQ ID NO: 8016 - protein, 15 aa, Homo Sapiens
INTEGGYVCRCSEGY

SEQ ID NO: 8017 - protein, 15 aa, Homo Sapiens
NTEGGYVCRCSEGYQ

SEQ ID NO: 8018 - protein, 15 aa, Homo Sapiens
TEGGYVCRCSEGYQG

SEQ ID NO: 8019 - protein, 15 aa, Homo Sapiens
EGGYVCRCSEGYQGD

SEQ ID NO: 8020 - protein, 15 aa, Homo Sapiens
GGYVCRCSEGYQGDG

SEQ ID NO: 8021 - protein, 15 aa, Homo Sapiens
GYVCRCSEGYQGDGI

SEQ ID NO: 8022 - protein, 15 aa, Homo Sapiens
YVCRCSEGYQGDGIH

SEQ ID NO: 8023 - protein, 15 aa, Homo Sapiens
VCRCSEGYQGDGIHC

SEQ ID NO: 8024 - protein, 15 aa, Homo Sapiens
CRCSEGYQGDGIHCL

SEQ ID NO: 8025 - protein, 15 aa, Homo Sapiens
RCSEGYQGDGIHCLD

SEQ ID NO: 8026 - protein, 15 aa, Homo Sapiens
CSEGYQGDGIHCLDI

SEQ ID NO: 8027 - protein, 15 aa, Homo Sapiens
SEGYQGDGIHCLDID

SEQ ID NO: 8028 - protein, 15 aa, Homo Sapiens
EGYQGDGIHCLDIDE

SEQ ID NO: 8029 - protein, 15 aa, Homo Sapiens
GYQGDGIHCLDIDEC

SEQ ID NO: 8030 - protein, 15 aa, Homo Sapiens
YQGDGIHCLDIDECQ

SEQ ID NO: 8031 - protein, 15 aa, Homo Sapiens
QGDGIHCLDIDECQL

SEQ ID NO: 8032 - protein, 15 aa, Homo Sapiens
GDGIHCLDIDECQLG

SEQ ID NO: 8033 - protein, 15 aa, Homo Sapiens
DGIHCLDIDECQLGV

SEQ ID NO: 8034 - protein, 15 aa, Homo Sapiens
GIHCLDIDECQLGVH

SEQ ID NO: 8035 - protein, 15 aa, Homo Sapiens
IHCLDIDECQLGVHS

SEQ ID NO: 8036 - protein, 15 aa, Homo Sapiens
HCLDIDECQLGVHSC

SEQ ID NO: 8037 - protein, 15 aa, Homo Sapiens
CLDIDECQLGVHSCG

SEQ ID NO: 8038 - protein, 15 aa, Homo Sapiens
LDIDECQLGVHSCGE

SEQ ID NO: 8039 - protein, 15 aa, Homo Sapiens
DIDECQLGVHSCGEN

SEQ ID NO: 8040 - protein, 15 aa, Homo Sapiens
IDECQLGVHSCGENA

SEQ ID NO: 8041 - protein, 15 aa, Homo Sapiens
DECQLGVHSCGENAS

SEQ ID NO: 8042 - protein, 15 aa, Homo Sapiens
ECQLGVHSCGENASC

SEQ ID NO: 8043 - protein, 15 aa, Homo Sapiens
CQLGVHSCGENASCT

SEQ ID NO: 8044 - protein, 15 aa, Homo Sapiens
QLGVHSCGENASCTN

SEQ ID NO: 8045 - protein, 15 aa, Homo Sapiens
LGVHSCGENASCTNT

SEQ ID NO: 8046 - protein, 15 aa, Homo Sapiens
GVHSCGENASCTNTE

SEQ ID NO: 8047 - protein, 15 aa, Homo Sapiens
VHSCGENASCTNTEG

SEQ ID NO: 8048 - protein, 15 aa, Homo Sapiens
HSCGENASCTNTEGG

SEQ ID NO: 8049 - protein, 15 aa, Homo Sapiens
SCGENASCTNTEGGY

SEQ ID NO: 8050 - protein, 15 aa, Homo Sapiens
CGENASCTNTEGGYT

SEQ ID NO: 8051 - protein, 15 aa, Homo Sapiens
GENASCTNTEGGYTC

SEQ ID NO: 8052 - protein, 15 aa, Homo Sapiens
ENASCTNTEGGYTCM

SEQ ID NO: 8053 - protein, 15 aa, Homo Sapiens
NASCTNTEGGYTCMC

SEQ ID NO: 8054 - protein, 15 aa, Homo Sapiens
ASCTNTEGGYTCMCA

SEQ ID NO: 8055 - protein, 15 aa, Homo Sapiens
SCTNTEGGYTCMCAG

SEQ ID NO: 8056 - protein, 15 aa, Homo Sapiens
CTNTEGGYTCMCAGR

SEQ ID NO: 8057 - protein, 15 aa, Homo Sapiens
TNTEGGYTCMCAGRL

SEQ ID NO: 8058 - protein, 15 aa, Homo Sapiens
NTEGGYTCMCAGRLS

SEQ ID NO: 8059 - protein, 15 aa, Homo Sapiens
TEGGYTCMCAGRLSE

SEQ ID NO: 8060 - protein, 15 aa, Homo Sapiens
EGGYTCMCAGRLSEP

SEQ ID NO: 8061 - protein, 15 aa, Homo Sapiens
GGYTCMCAGRLSEPG

SEQ ID NO: 8062 - protein, 15 aa, Homo Sapiens
GYTCMCAGRLSEPGL

SEQ ID NO: 8063 - protein, 15 aa, Homo Sapiens
YTCMCAGRLSEPGLI

SEQ ID NO: 8064 - protein, 15 aa, Homo Sapiens
TCMCAGRLSEPGLIC

SEQ ID NO: 8065 - protein, 15 aa, Homo Sapiens
CMCAGRLSEPGLICP

SEQ ID NO: 8066 - protein, 15 aa, Homo Sapiens
MCAGRLSEPGLICPD

SEQ ID NO: 8067 - protein, 15 aa, Homo Sapiens
CAGRLSEPGLICPDS

SEQ ID NO: 8068 - protein, 15 aa, Homo Sapiens
AGRLSEPGLICPDST

SEQ ID NO: 8069 - protein, 15 aa, Homo Sapiens
GRLSEPGLICPDSTP

SEQ ID NO: 8070 - protein, 15 aa, Homo Sapiens
RLSEPGLICPDSTPP

SEQ ID NO: 8071 - protein, 15 aa, Homo Sapiens
LSEPGLICPDSTPPP

SEQ ID NO: 8072 - protein, 15 aa, Homo Sapiens
SEPGLICPDSTPPPH

SEQ ID NO: 8073 - protein, 15 aa, Homo Sapiens
EPGLICPDSTPPPHL

SEQ ID NO: 8074 - protein, 15 aa, Homo Sapiens
PGLICPDSTPPPHLR

SEQ ID NO: 8075 - protein, 15 aa, Homo Sapiens
GLICPDSTPPPHLRE

SEQ ID NO: 8076 - protein, 15 aa, Homo Sapiens
LICPDSTPPPHLRED

SEQ ID NO: 8077 - protein, 15 aa, Homo Sapiens
ICPDSTPPPHLREDD

SEQ ID NO: 8078 - protein, 15 aa, Homo Sapiens
CPDSTPPPHLREDDH

SEQ ID NO: 8079 - protein, 15 aa, Homo Sapiens
PDSTPPPHLREDDHH

SEQ ID NO: 8080 - protein, 15 aa, Homo Sapiens
DSTPPPHLREDDHHY

SEQ ID NO: 8081 - protein, 15 aa, Homo Sapiens
STPPPHLREDDHHYS

SEQ ID NO: 8082 - protein, 15 aa, Homo Sapiens
TPPPHLREDDHHYSV

SEQ ID NO: 8083 - protein, 15 aa, Homo Sapiens
PPPHLREDDHHYSVR

SEQ ID NO: 8084 - protein, 15 aa, Homo Sapiens
PPHLREDDHHYSVRN

SEQ ID NO: 8085 - protein, 15 aa, Homo Sapiens
PHLREDDHHYSVRNS

SEQ ID NO: 8086 - protein, 15 aa, Homo Sapiens
HLREDDHHYSVRNSD

SEQ ID NO: 8087 - protein, 15 aa, Homo Sapiens
LREDDHHYSVRNSDS

SEQ ID NO: 8088 - protein, 15 aa, Homo Sapiens
REDDHHYSVRNSDSE

SEQ ID NO: 8089 - protein, 15 aa, Homo Sapiens
EDDHHYSVRNSDSEC

SEQ ID NO: 8090 - protein, 15 aa, Homo Sapiens
DDHHYSVRNSDSECP

SEQ ID NO: 8091 - protein, 15 aa, Homo Sapiens
DHHYSVRNSDSECPL

SEQ ID NO: 8092 - protein, 15 aa, Homo Sapiens
HHYSVRNSDSECPLS

SEQ ID NO: 8093 - protein, 15 aa, Homo Sapiens
HYSVRNSDSECPLSH

SEQ ID NO: 8094 - protein, 15 aa, Homo Sapiens
YSVRNSDSECPLSHD

SEQ ID NO: 8095 - protein, 15 aa, Homo Sapiens
SVRNSDSECPLSHDG

SEQ ID NO: 8096 - protein, 15 aa, Homo Sapiens
VRNSDSECPLSHDGY

SEQ ID NO: 8097 - protein, 15 aa, Homo Sapiens
RNSDSECPLSHDGYC

SEQ ID NO: 8098 - protein, 15 aa, Homo Sapiens
NSDSECPLSHDGYCL

SEQ ID NO: 8099 - protein, 15 aa, Homo Sapiens
SDSECPLSHDGYCLH

SEQ ID NO: 8100 - protein, 15 aa, Homo Sapiens
DSECPLSHDGYCLHD

SEQ ID NO: 8101 - protein, 15 aa, Homo Sapiens
SECPLSHDGYCLHDG

SEQ ID NO: 8102 - protein, 15 aa, Homo Sapiens
ECPLSHDGYCLHDGV

SEQ ID NO: 8103 - protein, 15 aa, Homo Sapiens
CPLSHDGYCLHDGVC

SEQ ID NO: 8104 - protein, 15 aa, Homo Sapiens
PLSHDGYCLHDGVCM

SEQ ID NO: 8105 - protein, 15 aa, Homo Sapiens
LSHDGYCLHDGVCMY

SEQ ID NO: 8106 - protein, 15 aa, Homo Sapiens
SHDGYCLHDGVCMYI

SEQ ID NO: 8107 - protein, 15 aa, Homo Sapiens
HDGYCLHDGVCMYIE

SEQ ID NO: 8108 - protein, 15 aa, Homo Sapiens
DGYCLHDGVCMYIEA

SEQ ID NO: 8109 - protein, 15 aa, Homo Sapiens
GYCLHDGVCMYIEAL

SEQ ID NO: 8110 - protein, 15 aa, Homo Sapiens
YCLHDGVCMYIEALD

SEQ ID NO: 8111 - protein, 15 aa, Homo Sapiens
CLHDGVCMYIEALDK

SEQ ID NO: 8112 - protein, 15 aa, Homo Sapiens
LHDGVCMYIEALDKY

SEQ ID NO: 8113 - protein, 15 aa, Homo Sapiens
HDGVCMYIEALDKYA

SEQ ID NO: 8114 - protein, 15 aa, Homo Sapiens
DGVCMYIEALDKYAC

SEQ ID NO: 8115 - protein, 15 aa, Homo Sapiens
GVCMYIEALDKYACN

SEQ ID NO: 8116 - protein, 15 aa, Homo Sapiens
VCMYIEALDKYACNC

SEQ ID NO: 8117 - protein, 15 aa, Homo Sapiens
CMYIEALDKYACNCV

SEQ ID NO: 8118 - protein, 15 aa, Homo Sapiens
MYIEALDKYACNCVV

SEQ ID NO: 8119 - protein, 15 aa, Homo Sapiens
YIEALDKYACNCVVG

SEQ ID NO: 8120 - protein, 15 aa, Homo Sapiens
IEALDKYACNCVVGY

SEQ ID NO: 8121 - protein, 15 aa, Homo Sapiens
EALDKYACNCVVGYI

SEQ ID NO: 8122 - protein, 15 aa, Homo Sapiens
ALDKYACNCVVGYIG

SEQ ID NO: 8123 - protein, 15 aa, Homo Sapiens
LDKYACNCVVGYIGE

SEQ ID NO: 8124 - protein, 15 aa, Homo Sapiens
DKYACNCVVGYIGER

SEQ ID NO: 8125 - protein, 15 aa, Homo Sapiens
KYACNCVVGYIGERC

SEQ ID NO: 8126 - protein, 15 aa, Homo Sapiens
YACNCVVGYIGERCQ

SEQ ID NO: 8127 - protein, 15 aa, Homo Sapiens
ACNCVVGYIGERCQY

SEQ ID NO: 8128 - protein, 15 aa, Homo Sapiens
CNCVVGYIGERCQYR

SEQ ID NO: 8129 - protein, 15 aa, Homo Sapiens
NCVVGYIGERCQYRD

SEQ ID NO: 8130 - protein, 15 aa, Homo Sapiens
CVVGYIGERCQYRDL

SEQ ID NO: 8131 - protein, 15 aa, Homo Sapiens
VVGYIGERCQYRDLK

SEQ ID NO: 8132 - protein, 15 aa, Homo Sapiens
VGYIGERCQYRDLKW

SEQ ID NO: 8133 - protein, 15 aa, Homo Sapiens
GYIGERCQYRDLKWW

SEQ ID NO: 8134 - protein, 15 aa, Homo Sapiens
YIGERCQYRDLKWWE

SEQ ID NO: 8135 - protein, 15 aa, Homo Sapiens
IGERCQYRDLKWWEL

SEQ ID NO: 8136 - protein, 15 aa, Homo Sapiens
GERCQYRDLKWWELR

SEQ ID NO: 8137 - protein, 15 aa, Homo Sapiens
ERCQYRDLKWWELRH

SEQ ID NO: 8138 - protein, 15 aa, Homo Sapiens
RCQYRDLKWWELRHA

SEQ ID NO: 8139 - protein, 15 aa, Homo Sapiens
CQYRDLKWWELRHAG

SEQ ID NO: 8140 - protein, 15 aa, Homo Sapiens
QYRDLKWWELRHAGH

SEQ ID NO: 8141 - protein, 15 aa, Homo Sapiens
YRDLKWWELRHAGHG

SEQ ID NO: 8142 - protein, 15 aa, Homo Sapiens
RDLKWWELRHAGHGQ

SEQ ID NO: 8143 - protein, 15 aa, Homo Sapiens
DLKWWELRHAGHGQQ

SEQ ID NO: 8144 - protein, 15 aa, Homo Sapiens
LKWWELRHAGHGQQQ

SEQ ID NO: 8145 - protein, 15 aa, Homo Sapiens
KWWELRHAGHGQQQK

SEQ ID NO: 8146 - protein, 15 aa, Homo Sapiens
WWELRHAGHGQQQKV

SEQ ID NO: 8147 - protein, 15 aa, Homo Sapiens
WELRHAGHGQQQKVI

SEQ ID NO: 8148 - protein, 15 aa, Homo Sapiens
ELRHAGHGQQQKVIV

SEQ ID NO: 8149 - protein, 15 aa, Homo Sapiens
LRHAGHGQQQKVIVV

SEQ ID NO: 8150 - protein, 15 aa, Homo Sapiens
RHAGHGQQQKVIVVA

SEQ ID NO: 8151 - protein, 15 aa, Homo Sapiens
HAGHGQQQKVIVVAV

SEQ ID NO: 8152 - protein, 15 aa, Homo Sapiens
AGHGQQQKVIVVAVC

SEQ ID NO: 8153 - protein, 15 aa, Homo Sapiens
GHGQQQKVIVVAVCV

SEQ ID NO: 8154 - protein, 15 aa, Homo Sapiens
HGQQQKVIVVAVCVV

SEQ ID NO: 8155 - protein, 15 aa, Homo Sapiens
GQQQKVIVVAVCVVV

SEQ ID NO: 8156 - protein, 15 aa, Homo Sapiens
QQQKVIVVAVCVVVL

SEQ ID NO: 8157 - protein, 15 aa, Homo Sapiens
QQKVIVVAVCVVVLV

SEQ ID NO: 8158 - protein, 15 aa, Homo Sapiens
QKVIVVAVCVVVLVM

SEQ ID NO: 8159 - protein, 15 aa, Homo Sapiens
KVIVVAVCVVVLVML

SEQ ID NO: 8160 - protein, 15 aa, Homo Sapiens
VIVVAVCVVVLVMLL

SEQ ID NO: 8161 - protein, 15 aa, Homo Sapiens
IVVAVCVVVLVMLLL

SEQ ID NO: 8162 - protein, 15 aa, Homo Sapiens
VVAVCVVVLVMLLLL

SEQ ID NO: 8163 - protein, 15 aa, Homo Sapiens
VAVCVVVLVMLLLLS

SEQ ID NO: 8164 - protein, 15 aa, Homo Sapiens
AVCVVVLVMLLLLSL

SEQ ID NO: 8165 - protein, 15 aa, Homo Sapiens
VCVVVLVMLLLLSLW

SEQ ID NO: 8166 - protein, 15 aa, Homo Sapiens
CVVVLVMLLLLSLWG

SEQ ID NO: 8167 - protein, 15 aa, Homo Sapiens
VVVLVMLLLLSLWGA

SEQ ID NO: 8168 - protein, 15 aa, Homo Sapiens
VVLVMLLLLSLWGAH

SEQ ID NO: 8169 - protein, 15 aa, Homo Sapiens
VLVMLLLLSLWGAHY

SEQ ID NO: 8170 - protein, 15 aa, Homo Sapiens
LVMLLLLSLWGAHYY

SEQ ID NO: 8171 - protein, 15 aa, Homo Sapiens
VMLLLLSLWGAHYYR

SEQ ID NO: 8172 - protein, 15 aa, Homo Sapiens
MLLLLSLWGAHYYRT

SEQ ID NO: 8173 - protein, 15 aa, Homo Sapiens
LLLLSLWGAHYYRTQ

SEQ ID NO: 8174 - protein, 15 aa, Homo Sapiens
LLLSLWGAHYYRTQK

SEQ ID NO: 8175 - protein, 15 aa, Homo Sapiens
LLSLWGAHYYRTQKL

SEQ ID NO: 8176 - protein, 15 aa, Homo Sapiens
LSLWGAHYYRTQKLL

SEQ ID NO: 8177 - protein, 15 aa, Homo Sapiens
SLWGAHYYRTQKLLS

SEQ ID NO: 8178 - protein, 15 aa, Homo Sapiens
LWGAHYYRTQKLLSK

SEQ ID NO: 8179 - protein, 15 aa, Homo Sapiens
WGAHYYRTQKLLSKN

SEQ ID NO: 8180 - protein, 15 aa, Homo Sapiens
GAHYYRTQKLLSKNP

SEQ ID NO: 8181 - protein, 15 aa, Homo Sapiens
AHYYRTQKLLSKNPK

SEQ ID NO: 8182 - protein, 15 aa, Homo Sapiens
HYYRTQKLLSKNPKN

SEQ ID NO: 8183 - protein, 15 aa, Homo Sapiens
YYRTQKLLSKNPKNP

SEQ ID NO: 8184 - protein, 15 aa, Homo Sapiens
YRTQKLLSKNPKNPY

SEQ ID NO: 8185 - protein, 15 aa, Homo Sapiens
RTQKLLSKNPKNPYE

SEQ ID NO: 8186 - protein, 15 aa, Homo Sapiens
TQKLLSKNPKNPYEE

SEQ ID NO: 8187 - protein, 15 aa, Homo Sapiens
QKLLSKNPKNPYEES

SEQ ID NO: 8188 - protein, 15 aa, Homo Sapiens
KLLSKNPKNPYEESS

SEQ ID NO: 8189 - protein, 15 aa, Homo Sapiens
LLSKNPKNPYEESSR

SEQ ID NO: 8190 - protein, 15 aa, Homo Sapiens
LSKNPKNPYEESSRD

SEQ ID NO: 8191 - protein, 15 aa, Homo Sapiens
SKNPKNPYEESSRDV

SEQ ID NO: 8192 - protein, 15 aa, Homo Sapiens
KNPKNPYEESSRDVR

SEQ ID NO: 8193 - protein, 15 aa, Homo Sapiens
NPKNPYEESSRDVRS

SEQ ID NO: 8194 - protein, 15 aa, Homo Sapiens
PKNPYEESSRDVRSR

SEQ ID NO: 8195 - protein, 15 aa, Homo Sapiens
KNPYEESSRDVRSRR

SEQ ID NO: 8196 - protein, 15 aa, Homo Sapiens
NPYEESSRDVRSRRP

SEQ ID NO: 8197 - protein, 15 aa, Homo Sapiens
PYEESSRDVRSRRPA

SEQ ID NO: 8198 - protein, 15 aa, Homo Sapiens
YEESSRDVRSRRPAD

SEQ ID NO: 8199 - protein, 15 aa, Homo Sapiens
EESSRDVRSRRPADT

SEQ ID NO: 8200 - protein, 15 aa, Homo Sapiens
ESSRDVRSRRPADTE

SEQ ID NO: 8201 - protein, 15 aa, Homo Sapiens
SSRDVRSRRPADTED

SEQ ID NO: 8202 - protein, 15 aa, Homo Sapiens
SRDVRSRRPADTEDG

SEQ ID NO: 8203 - protein, 15 aa, Homo Sapiens
RDVRSRRPADTEDGM

SEQ ID NO: 8204 - protein, 15 aa, Homo Sapiens
DVRSRRPADTEDGMS

SEQ ID NO: 8205 - protein, 15 aa, Homo Sapiens
VRSRRPADTEDGMSS

SEQ ID NO: 8206 - protein, 15 aa, Homo Sapiens
RSRRPADTEDGMSSC

SEQ ID NO: 8207 - protein, 15 aa, Homo Sapiens
SRRPADTEDGMSSCP

SEQ ID NO: 8208 - protein, 15 aa, Homo Sapiens
RRPADTEDGMSSCPQ

SEQ ID NO: 8209 - protein, 15 aa, Homo Sapiens
RPADTEDGMSSCPQP

SEQ ID NO: 8210 - protein, 15 aa, Homo Sapiens
PADTEDGMSSCPQPW

SEQ ID NO: 8211 - protein, 15 aa, Homo Sapiens
ADTEDGMSSCPQPWF

SEQ ID NO: 8212 - protein, 15 aa, Homo Sapiens
DTEDGMSSCPQPWFV

SEQ ID NO: 8213 - protein, 15 aa, Homo Sapiens
TEDGMSSCPQPWFVV

SEQ ID NO: 8214 - protein, 15 aa, Homo Sapiens
EDGMSSCPQPWFVVI

SEQ ID NO: 8215 - protein, 15 aa, Homo Sapiens
DGMSSCPQPWFVVIK

SEQ ID NO: 8216 - protein, 15 aa, Homo Sapiens
GMSSCPQPWFVVIKE

SEQ ID NO: 8217 - protein, 15 aa, Homo Sapiens
MSSCPQPWFVVIKEH

SEQ ID NO: 8218 - protein, 15 aa, Homo Sapiens
SSCPQPWFVVIKEHQ

SEQ ID NO: 8219 - protein, 15 aa, Homo Sapiens
SCPQPWFVVIKEHQD

SEQ ID NO: 8220 - protein, 15 aa, Homo Sapiens
CPQPWFVVIKEHQDL

SEQ ID NO: 8221 - protein, 15 aa, Homo Sapiens
PQPWFVVIKEHQDLK

SEQ ID NO: 8222 - protein, 15 aa, Homo Sapiens
QPWFVVIKEHQDLKN

SEQ ID NO: 8223 - protein, 15 aa, Homo Sapiens
PWFVVIKEHQDLKNG

SEQ ID NO: 8224 - protein, 15 aa, Homo Sapiens
WFVVIKEHQDLKNGG

SEQ ID NO: 8225 - protein, 15 aa, Homo Sapiens
FVVIKEHQDLKNGGQ

SEQ ID NO: 8226 - protein, 15 aa, Homo Sapiens
VVIKEHQDLKNGGQP

SEQ ID NO: 8227 - protein, 15 aa, Homo Sapiens
VIKEHQDLKNGGQPV

SEQ ID NO: 8228 - protein, 15 aa, Homo Sapiens
IKEHQDLKNGGQPVA

SEQ ID NO: 8229 - protein, 15 aa, Homo Sapiens
KEHQDLKNGGQPVAG

SEQ ID NO: 8230 - protein, 15 aa, Homo Sapiens
EHQDLKNGGQPVAGE

SEQ ID NO: 8231 - protein, 15 aa, Homo Sapiens
HQDLKNGGQPVAGED

SEQ ID NO: 8232 - protein, 15 aa, Homo Sapiens
QDLKNGGQPVAGEDG

SEQ ID NO: 8233 - protein, 15 aa, Homo Sapiens
DLKNGGQPVAGEDGQ

SEQ ID NO: 8234 - protein, 15 aa, Homo Sapiens
LKNGGQPVAGEDGQA

SEQ ID NO: 8235 - protein, 15 aa, Homo Sapiens
KNGGQPVAGEDGQAA

SEQ ID NO: 8236 - protein, 15 aa, Homo Sapiens
NGGQPVAGEDGQAAD

SEQ ID NO: 8237 - protein, 15 aa, Homo Sapiens
GGQPVAGEDGQAADG

SEQ ID NO: 8238 - protein, 15 aa, Homo Sapiens
GQPVAGEDGQAADGS

SEQ ID NO: 8239 - protein, 15 aa, Homo Sapiens
QPVAGEDGQAADGSM

SEQ ID NO: 8240 - protein, 15 aa, Homo Sapiens
PVAGEDGQAADGSMQ

SEQ ID NO: 8241 - protein, 15 aa, Homo Sapiens
VAGEDGQAADGSMQP

SEQ ID NO: 8242 - protein, 15 aa, Homo Sapiens
AGEDGQAADGSMQPT

SEQ ID NO: 8243 - protein, 15 aa, Homo Sapiens
GEDGQAADGSMQPTS

SEQ ID NO: 8244 - protein, 15 aa, Homo Sapiens
EDGQAADGSMQPTSW

SEQ ID NO: 8245 - protein, 15 aa, Homo Sapiens
DGQAADGSMQPTSWR

SEQ ID NO: 8246 - protein, 15 aa, Homo Sapiens
GQAADGSMQPTSWRQ

SEQ ID NO: 8247 - protein, 15 aa, Homo Sapiens
QAADGSMQPTSWRQE

SEQ ID NO: 8248 - protein, 15 aa, Homo Sapiens
AADGSMQPTSWRQEP

SEQ ID NO: 8249 - protein, 15 aa, Homo Sapiens
ADGSMQPTSWRQEPQ

SEQ ID NO: 8250 - protein, 15 aa, Homo Sapiens
DGSMQPTSWRQEPQL

SEQ ID NO: 8251 - protein, 15 aa, Homo Sapiens
GSMQPTSWRQEPQLC

SEQ ID NO: 8252 - protein, 15 aa, Homo Sapiens
SMQPTSWRQEPQLCG

SEQ ID NO: 8253 - protein, 15 aa, Homo Sapiens
MQPTSWRQEPQLCGM

SEQ ID NO: 8254 - protein, 15 aa, Homo Sapiens
QPTSWRQEPQLCGMG

SEQ ID NO: 8255 - protein, 15 aa, Homo Sapiens
PTSWRQEPQLCGMGT

SEQ ID NO: 8256 - protein, 15 aa, Homo Sapiens
TSWRQEPQLCGMGTE

SEQ ID NO: 8257 - protein, 15 aa, Homo Sapiens
SWRQEPQLCGMGTEQ

SEQ ID NO: 8258 - protein, 15 aa, Homo Sapiens
WRQEPQLCGMGTEQG

SEQ ID NO: 8259 - protein, 15 aa, Homo Sapiens
RQEPQLCGMGTEQGC

SEQ ID NO: 8260 - protein, 15 aa, Homo Sapiens
QEPQLCGMGTEQGCW

SEQ ID NO: 8261 - protein, 15 aa, Homo Sapiens
EPQLCGMGTEQGCWI

SEQ ID NO: 8262 - protein, 15 aa, Homo Sapiens
PQLCGMGTEQGCWIP

SEQ ID NO: 8263 - protein, 15 aa, Homo Sapiens
QLCGMGTEQGCWIPV

SEQ ID NO: 8264 - protein, 15 aa, Homo Sapiens
LCGMGTEQGCWIPVS

SEQ ID NO: 8265 - protein, 15 aa, Homo Sapiens
CGMGTEQGCWIPVSS

SEQ ID NO: 8266 - protein, 15 aa, Homo Sapiens
GMGTEQGCWIPVSSD

SEQ ID NO: 8267 - protein, 15 aa, Homo Sapiens
MGTEQGCWIPVSSDK

SEQ ID NO: 8268 - protein, 15 aa, Homo Sapiens
GTEQGCWIPVSSDKG

SEQ ID NO: 8269 - protein, 15 aa, Homo Sapiens
TEQGCWIPVSSDKGS

SEQ ID NO: 8270 - protein, 15 aa, Homo Sapiens
EQGCWIPVSSDKGSC

SEQ ID NO: 8271 - protein, 15 aa, Homo Sapiens
QGCWIPVSSDKGSCP

SEQ ID NO: 8272 - protein, 15 aa, Homo Sapiens
GCWIPVSSDKGSCPQ

SEQ ID NO: 8273 - protein, 15 aa, Homo Sapiens
CWIPVSSDKGSCPQV

SEQ ID NO: 8274 - protein, 15 aa, Homo Sapiens
WIPVSSDKGSCPQVM

SEQ ID NO: 8275 - protein, 15 aa, Homo Sapiens
IPVSSDKGSCPQVME

SEQ ID NO: 8276 - protein, 15 aa, Homo Sapiens
PVSSDKGSCPQVMER

SEQ ID NO: 8277 - protein, 15 aa, Homo Sapiens
VSSDKGSCPQVMERS

SEQ ID NO: 8278 - protein, 15 aa, Homo Sapiens
SSDKGSCPQVMERSF

SEQ ID NO: 8279 - protein, 15 aa, Homo Sapiens
SDKGSCPQVMERSFH

SEQ ID NO: 8280 - protein, 15 aa, Homo Sapiens
DKGSCPQVMERSFHM

SEQ ID NO: 8281 - protein, 15 aa, Homo Sapiens
KGSCPQVMERSFHMP

SEQ ID NO: 8282 - protein, 15 aa, Homo Sapiens
GSCPQVMERSFHMPS

SEQ ID NO: 8283 - protein, 15 aa, Homo Sapiens
SCPQVMERSFHMPSY

SEQ ID NO: 8284 - protein, 15 aa, Homo Sapiens
CPQVMERSFHMPSYG

SEQ ID NO: 8285 - protein, 15 aa, Homo Sapiens
PQVMERSFHMPSYGT

SEQ ID NO: 8286 - protein, 15 aa, Homo Sapiens
QVMERSFHMPSYGTQ

SEQ ID NO: 8287 - protein, 15 aa, Homo Sapiens
VMERSFHMPSYGTQT

SEQ ID NO: 8288 - protein, 15 aa, Homo Sapiens
MERSFHMPSYGTQTL

SEQ ID NO: 8289 - protein, 15 aa, Homo Sapiens
ERSFHMPSYGTQTLE

SEQ ID NO: 8290 - protein, 15 aa, Homo Sapiens
RSFHMPSYGTQTLEG

SEQ ID NO: 8291 - protein, 15 aa, Homo Sapiens
SFHMPSYGTQTLEGG

SEQ ID NO: 8292 - protein, 15 aa, Homo Sapiens
FHMPSYGTQTLEGGV

SEQ ID NO: 8293 - protein, 15 aa, Homo Sapiens
HMPSYGTQTLEGGVE

SEQ ID NO: 8294 - protein, 15 aa, Homo Sapiens
MPSYGTQTLEGGVEK

SEQ ID NO: 8295 - protein, 15 aa, Homo Sapiens
PSYGTQTLEGGVEKP

SEQ ID NO: 8296 - protein, 15 aa, Homo Sapiens
SYGTQTLEGGVEKPH

SEQ ID NO: 8297 - protein, 15 aa, Homo Sapiens
YGTQTLEGGVEKPHS

SEQ ID NO: 8298 - protein, 15 aa, Homo Sapiens
GTQTLEGGVEKPHSL

SEQ ID NO: 8299 - protein, 15 aa, Homo Sapiens
TQTLEGGVEKPHSLL

SEQ ID NO: 8300 - protein, 15 aa, Homo Sapiens
QTLEGGVEKPHSLLS

SEQ ID NO: 8301 - protein, 15 aa, Homo Sapiens
TLEGGVEKPHSLLSA

SEQ ID NO: 8302 - protein, 15 aa, Homo Sapiens
LEGGVEKPHSLLSAN

SEQ ID NO: 8303 - protein, 15 aa, Homo Sapiens
EGGVEKPHSLLSANP

SEQ ID NO: 8304 - protein, 15 aa, Homo Sapiens
GGVEKPHSLLSANPL

SEQ ID NO: 8305 - protein, 15 aa, Homo Sapiens
GVEKPHSLLSANPLW

SEQ ID NO: 8306 - protein, 15 aa, Homo Sapiens
VEKPHSLLSANPLWQ

SEQ ID NO: 8307 - protein, 15 aa, Homo Sapiens
EKPHSLLSANPLWQQ

SEQ ID NO: 8308 - protein, 15 aa, Homo Sapiens
KPHSLLSANPLWQQR

SEQ ID NO: 8309 - protein, 15 aa, Homo Sapiens
PHSLLSANPLWQQRA

SEQ ID NO: 8310 - protein, 15 aa, Homo Sapiens
HSLLSANPLWQQRAL

SEQ ID NO: 8311 - protein, 15 aa, Homo Sapiens
SLLSANPLWQQRALD

SEQ ID NO: 8312 - protein, 15 aa, Homo Sapiens
LLSANPLWQQRALDP

SEQ ID NO: 8313 - protein, 15 aa, Homo Sapiens
LSANPLWQQRALDPP

SEQ ID NO: 8314 - protein, 15 aa, Homo Sapiens
SANPLWQQRALDPPH

SEQ ID NO: 8315 - protein, 15 aa, Homo Sapiens
ANPLWQQRALDPPHQ

SEQ ID NO: 8316 - protein, 15 aa, Homo Sapiens
NPLWQQRALDPPHQM

SEQ ID NO: 8317 - protein, 15 aa, Homo Sapiens
PLWQQRALDPPHQME

SEQ ID NO: 8318 - protein, 15 aa, Homo Sapiens
LWQQRALDPPHQMEL

SEQ ID NO: 8319 - protein, 15 aa, Homo Sapiens
WQQRALDPPHQMELT

SEQ ID NO: 8320 - protein, 15 aa, Homo Sapiens
QQRALDPPHQMELTQ

SEQ ID NO: 8321 - protein, 16 aa, Homo Sapiens
MLLTLIILLPVVSKFS

SEQ ID NO: 8322 - protein, 16 aa, Homo Sapiens
LLTLIILLPVVSKFSF

SEQ ID NO: 8323 - protein, 16 aa, Homo Sapiens
LTLIILLPVVSKFSFV

SEQ ID NO: 8324 - protein, 16 aa, Homo Sapiens
TLIILLPVVSKFSFVS

SEQ ID NO: 8325 - protein, 16 aa, Homo Sapiens
LIILLPVVSKFSFVSL

SEQ ID NO: 8326 - protein, 16 aa, Homo Sapiens
IILLPVVSKFSFVSLS

SEQ ID NO: 8327 - protein, 16 aa, Homo Sapiens
ILLPVVSKFSFVSLSA

SEQ ID NO: 8328 - protein, 16 aa, Homo Sapiens
LLPVVSKFSFVSLSAP

SEQ ID NO: 8329 - protein, 16 aa, Homo Sapiens
LPVVSKFSFVSLSAPQ

SEQ ID NO: 8330 - protein, 16 aa, Homo Sapiens
PVVSKFSFVSLSAPQH

SEQ ID NO: 8331 - protein, 16 aa, Homo Sapiens
VVSKFSFVSLSAPQHW

SEQ ID NO: 8332 - protein, 16 aa, Homo Sapiens
VSKFSFVSLSAPQHWS

SEQ ID NO: 8333 - protein, 16 aa, Homo Sapiens
SKFSFVSLSAPQHWSC

SEQ ID NO: 8334 - protein, 16 aa, Homo Sapiens
KFSFVSLSAPQHWSCP

SEQ ID NO: 8335 - protein, 16 aa, Homo Sapiens
FSFVSLSAPQHWSCPE

SEQ ID NO: 8336 - protein, 16 aa, Homo Sapiens
SFVSLSAPQHWSCPEG

SEQ ID NO: 8337 - protein, 16 aa, Homo Sapiens
FVSLSAPQHWSCPEGT

SEQ ID NO: 8338 - protein, 16 aa, Homo Sapiens
VSLSAPQHWSCPEGTL

SEQ ID NO: 8339 - protein, 16 aa, Homo Sapiens
SLSAPQHWSCPEGTLA

SEQ ID NO: 8340 - protein, 16 aa, Homo Sapiens
LSAPQHWSCPEGTLAG

SEQ ID NO: 8341 - protein, 16 aa, Homo Sapiens
SAPQHWSCPEGTLAGN

SEQ ID NO: 8342 - protein, 16 aa, Homo Sapiens
APQHWSCPEGTLAGNG

SEQ ID NO: 8343 - protein, 16 aa, Homo Sapiens
PQHWSCPEGTLAGNGN

SEQ ID NO: 8344 - protein, 16 aa, Homo Sapiens
QHWSCPEGTLAGNGNS

SEQ ID NO: 8345 - protein, 16 aa, Homo Sapiens
HWSCPEGTLAGNGNST

SEQ ID NO: 8346 - protein, 16 aa, Homo Sapiens
WSCPEGTLAGNGNSTC

SEQ ID NO: 8347 - protein, 16 aa, Homo Sapiens
SCPEGTLAGNGNSTCV

SEQ ID NO: 8348 - protein, 16 aa, Homo Sapiens
CPEGTLAGNGNSTCVG

SEQ ID NO: 8349 - protein, 16 aa, Homo Sapiens
PEGTLAGNGNSTCVGP

SEQ ID NO: 8350 - protein, 16 aa, Homo Sapiens
EGTLAGNGNSTCVGPA

SEQ ID NO: 8351 - protein, 16 aa, Homo Sapiens
GTLAGNGNSTCVGPAP

SEQ ID NO: 8352 - protein, 16 aa, Homo Sapiens
TLAGNGNSTCVGPAPF

SEQ ID NO: 8353 - protein, 16 aa, Homo Sapiens
LAGNGNSTCVGPAPFL

SEQ ID NO: 8354 - protein, 16 aa, Homo Sapiens
AGNGNSTCVGPAPFLI

SEQ ID NO: 8355 - protein, 16 aa, Homo Sapiens
GNGNSTCVGPAPFLIF

SEQ ID NO: 8356 - protein, 16 aa, Homo Sapiens
NGNSTCVGPAPFLIFS

SEQ ID NO: 8357 - protein, 16 aa, Homo Sapiens
GNSTCVGPAPFLIFSH

SEQ ID NO: 8358 - protein, 16 aa, Homo Sapiens
NSTCVGPAPFLIFSHG

SEQ ID NO: 8359 - protein, 16 aa, Homo Sapiens
STCVGPAPFLIFSHGN

SEQ ID NO: 8360 - protein, 16 aa, Homo Sapiens
TCVGPAPFLIFSHGNS

SEQ ID NO: 8361 - protein, 16 aa, Homo Sapiens
CVGPAPFLIFSHGNSI

SEQ ID NO: 8362 - protein, 16 aa, Homo Sapiens
VGPAPFLIFSHGNSIF

SEQ ID NO: 8363 - protein, 16 aa, Homo Sapiens
GPAPFLIFSHGNSIFR

SEQ ID NO: 8364 - protein, 16 aa, Homo Sapiens
PAPFLIFSHGNSIFRI

SEQ ID NO: 8365 - protein, 16 aa, Homo Sapiens
APFLIFSHGNSIFRID

SEQ ID NO: 8366 - protein, 16 aa, Homo Sapiens
PFLIFSHGNSIFRIDT

SEQ ID NO: 8367 - protein, 16 aa, Homo Sapiens
FLIFSHGNSIFRIDTE

SEQ ID NO: 8368 - protein, 16 aa, Homo Sapiens
LIFSHGNSIFRIDTEG

SEQ ID NO: 8369 - protein, 16 aa, Homo Sapiens
IFSHGNSIFRIDTEGT

SEQ ID NO: 8370 - protein, 16 aa, Homo Sapiens
FSHGNSIFRIDTEGTN

SEQ ID NO: 8371 - protein, 16 aa, Homo Sapiens
SHGNSIFRIDTEGTNY

SEQ ID NO: 8372 - protein, 16 aa, Homo Sapiens
HGNSIFRIDTEGTNYE

SEQ ID NO: 8373 - protein, 16 aa, Homo Sapiens
GNSIFRIDTEGTNYEQ

SEQ ID NO: 8374 - protein, 16 aa, Homo Sapiens
NSIFRIDTEGTNYEQL

SEQ ID NO: 8375 - protein, 16 aa, Homo Sapiens
SIFRIDTEGTNYEQLV

SEQ ID NO: 8376 - protein, 16 aa, Homo Sapiens
IFRIDTEGTNYEQLVV

SEQ ID NO: 8377 - protein, 16 aa, Homo Sapiens
FRIDTEGTNYEQLVVD

SEQ ID NO: 8378 - protein, 16 aa, Homo Sapiens
RIDTEGTNYEQLVVDA

SEQ ID NO: 8379 - protein, 16 aa, Homo Sapiens
IDTEGTNYEQLVVDAG

SEQ ID NO: 8380 - protein, 16 aa, Homo Sapiens
DTEGTNYEQLVVDAGV

SEQ ID NO: 8381 - protein, 16 aa, Homo Sapiens
TEGTNYEQLVVDAGVS

SEQ ID NO: 8382 - protein, 16 aa, Homo Sapiens
EGTNYEQLVVDAGVSV

SEQ ID NO: 8383 - protein, 16 aa, Homo Sapiens
GTNYEQLVVDAGVSVI

SEQ ID NO: 8384 - protein, 16 aa, Homo Sapiens
TNYEQLVVDAGVSVIM

SEQ ID NO: 8385 - protein, 16 aa, Homo Sapiens
NYEQLVVDAGVSVIMD

SEQ ID NO: 8386 - protein, 16 aa, Homo Sapiens
YEQLVVDAGVSVIMDF

SEQ ID NO: 8387 - protein, 16 aa, Homo Sapiens
EQLVVDAGVSVIMDFH

SEQ ID NO: 8388 - protein, 16 aa, Homo Sapiens
QLVVDAGVSVIMDFHY

SEQ ID NO: 8389 - protein, 16 aa, Homo Sapiens
LVVDAGVSVIMDFHYN

SEQ ID NO: 8390 - protein, 16 aa, Homo Sapiens
VVDAGVSVIMDFHYNE

SEQ ID NO: 8391 - protein, 16 aa, Homo Sapiens
VDAGVSVIMDFHYNEK

SEQ ID NO: 8392 - protein, 16 aa, Homo Sapiens
DAGVSVIMDFHYNEKR

SEQ ID NO: 8393 - protein, 16 aa, Homo Sapiens
AGVSVIMDFHYNEKRI

SEQ ID NO: 8394 - protein, 16 aa, Homo Sapiens
GVSVIMDFHYNEKRIY

SEQ ID NO: 8395 - protein, 16 aa, Homo Sapiens
VSVIMDFHYNEKRIYW

SEQ ID NO: 8396 - protein, 16 aa, Homo Sapiens
SVIMDFHYNEKRIYWV

SEQ ID NO: 8397 - protein, 16 aa, Homo Sapiens
VIMDFHYNEKRIYWVD

SEQ ID NO: 8398 - protein, 16 aa, Homo Sapiens
IMDFHYNEKRIYWVDL

SEQ ID NO: 8399 - protein, 16 aa, Homo Sapiens
MDFHYNEKRIYWVDLE

SEQ ID NO: 8400 - protein, 16 aa, Homo Sapiens
DFHYNEKRIYWVDLER

SEQ ID NO: 8401 - protein, 16 aa, Homo Sapiens
FHYNEKRIYWVDLERQ

SEQ ID NO: 8402 - protein, 16 aa, Homo Sapiens
HYNEKRIYWVDLERQL

SEQ ID NO: 8403 - protein, 16 aa, Homo Sapiens
YNEKRIYWVDLERQLL

SEQ ID NO: 8404 - protein, 16 aa, Homo Sapiens
NEKRIYWVDLERQLLQ

SEQ ID NO: 8405 - protein, 16 aa, Homo Sapiens
EKRIYWVDLERQLLQR

SEQ ID NO: 8406 - protein, 16 aa, Homo Sapiens
KRIYWVDLERQLLQRV

SEQ ID NO: 8407 - protein, 16 aa, Homo Sapiens
RIYWVDLERQLLQRVF

SEQ ID NO: 8408 - protein, 16 aa, Homo Sapiens
IYWVDLERQLLQRVFL

SEQ ID NO: 8409 - protein, 16 aa, Homo Sapiens
YWVDLERQLLQRVFLN

SEQ ID NO: 8410 - protein, 16 aa, Homo Sapiens
WVDLERQLLQRVFLNG

SEQ ID NO: 8411 - protein, 16 aa, Homo Sapiens
VDLERQLLQRVFLNGS

SEQ ID NO: 8412 - protein, 16 aa, Homo Sapiens
DLERQLLQRVFLNGSR

SEQ ID NO: 8413 - protein, 16 aa, Homo Sapiens
LERQLLQRVFLNGSRQ

SEQ ID NO: 8414 - protein, 16 aa, Homo Sapiens
ERQLLQRVFLNGSRQE

SEQ ID NO: 8415 - protein, 16 aa, Homo Sapiens
RQLLQRVFLNGSRQER

SEQ ID NO: 8416 - protein, 16 aa, Homo Sapiens
QLLQRVFLNGSRQERV

SEQ ID NO: 8417 - protein, 16 aa, Homo Sapiens
LLQRVFLNGSRQERVC

SEQ ID NO: 8418 - protein, 16 aa, Homo Sapiens
LQRVFLNGSRQERVCN

SEQ ID NO: 8419 - protein, 16 aa, Homo Sapiens
QRVFLNGSRQERVCNI

SEQ ID NO: 8420 - protein, 16 aa, Homo Sapiens
RVFLNGSRQERVCNIE

SEQ ID NO: 8421 - protein, 16 aa, Homo Sapiens
VFLNGSRQERVCNIEK

SEQ ID NO: 8422 - protein, 16 aa, Homo Sapiens
FLNGSRQERVCNIEKN

SEQ ID NO: 8423 - protein, 16 aa, Homo Sapiens
LNGSRQERVCNIEKNV

SEQ ID NO: 8424 - protein, 16 aa, Homo Sapiens
NGSRQERVCNIEKNVS

SEQ ID NO: 8425 - protein, 16 aa, Homo Sapiens
GSRQERVCNIEKNVSG

SEQ ID NO: 8426 - protein, 16 aa, Homo Sapiens
SRQERVCNIEKNVSGM

SEQ ID NO: 8427 - protein, 16 aa, Homo Sapiens
RQERVCNIEKNVSGMA

SEQ ID NO: 8428 - protein, 16 aa, Homo Sapiens
QERVCNIEKNVSGMAI

SEQ ID NO: 8429 - protein, 16 aa, Homo Sapiens
ERVCNIEKNVSGMAIN

SEQ ID NO: 8430 - protein, 16 aa, Homo Sapiens
RVCNIEKNVSGMAINW

SEQ ID NO: 8431 - protein, 16 aa, Homo Sapiens
VCNIEKNVSGMAINWI

SEQ ID NO: 8432 - protein, 16 aa, Homo Sapiens
CNIEKNVSGMAINWIN

SEQ ID NO: 8433 - protein, 16 aa, Homo Sapiens
NIEKNVSGMAINWINE

SEQ ID NO: 8434 - protein, 16 aa, Homo Sapiens
IEKNVSGMAINWINEE

SEQ ID NO: 8435 - protein, 16 aa, Homo Sapiens
EKNVSGMAINWINEEV

SEQ ID NO: 8436 - protein, 16 aa, Homo Sapiens
KNVSGMAINWINEEVI

SEQ ID NO: 8437 - protein, 16 aa, Homo Sapiens
NVSGMAINWINEEVIW

SEQ ID NO: 8438 - protein, 16 aa, Homo Sapiens
VSGMAINWINEEVIWS

SEQ ID NO: 8439 - protein, 16 aa, Homo Sapiens
SGMAINWINEEVIWSN

SEQ ID NO: 8440 - protein, 16 aa, Homo Sapiens
GMAINWINEEVIWSNQ

SEQ ID NO: 8441 - protein, 16 aa, Homo Sapiens
MAINWINEEVIWSNQQ

SEQ ID NO: 8442 - protein, 16 aa, Homo Sapiens
AINWINEEVIWSNQQE

SEQ ID NO: 8443 - protein, 16 aa, Homo Sapiens
INWINEEVIWSNQQEG

SEQ ID NO: 8444 - protein, 16 aa, Homo Sapiens
NWINEEVIWSNQQEGI

SEQ ID NO: 8445 - protein, 16 aa, Homo Sapiens
WINEEVIWSNQQEGII

SEQ ID NO: 8446 - protein, 16 aa, Homo Sapiens
INEEVIWSNQQEGIIT

SEQ ID NO: 8447 - protein, 16 aa, Homo Sapiens
NEEVIWSNQQEGIITV

SEQ ID NO: 8448 - protein, 16 aa, Homo Sapiens
EEVIWSNQQEGIITVT

SEQ ID NO: 8449 - protein, 16 aa, Homo Sapiens
EVIWSNQQEGIITVTD

SEQ ID NO: 8450 - protein, 16 aa, Homo Sapiens
VIWSNQQEGIITVTDM

SEQ ID NO: 8451 - protein, 16 aa, Homo Sapiens
IWSNQQEGIITVTDMK

SEQ ID NO: 8452 - protein, 16 aa, Homo Sapiens
WSNQQEGIITVTDMKG

SEQ ID NO: 8453 - protein, 16 aa, Homo Sapiens
SNQQEGIITVTDMKGN

SEQ ID NO: 8454 - protein, 16 aa, Homo Sapiens
NQQEGIITVTDMKGNN

SEQ ID NO: 8455 - protein, 16 aa, Homo Sapiens
QQEGIITVTDMKGNNS

SEQ ID NO: 8456 - protein, 16 aa, Homo Sapiens
QEGIITVTDMKGNNSH

SEQ ID NO: 8457 - protein, 16 aa, Homo Sapiens
EGIITVTDMKGNNSHI

SEQ ID NO: 8458 - protein, 16 aa, Homo Sapiens
GIITVTDMKGNNSHIL

SEQ ID NO: 8459 - protein, 16 aa, Homo Sapiens
IITVTDMKGNNSHILL

SEQ ID NO: 8460 - protein, 16 aa, Homo Sapiens
ITVTDMKGNNSHILLS

SEQ ID NO: 8461 - protein, 16 aa, Homo Sapiens
TVTDMKGNNSHILLSA

SEQ ID NO: 8462 - protein, 16 aa, Homo Sapiens
VTDMKGNNSHILLSAL

SEQ ID NO: 8463 - protein, 16 aa, Homo Sapiens
TDMKGNNSHILLSALK

SEQ ID NO: 8464 - protein, 16 aa, Homo Sapiens
DMKGNNSHILLSALKY

SEQ ID NO: 8465 - protein, 16 aa, Homo Sapiens
MKGNNSHILLSALKYP

SEQ ID NO: 8466 - protein, 16 aa, Homo Sapiens
KGNNSHILLSALKYPA

SEQ ID NO: 8467 - protein, 16 aa, Homo Sapiens
GNNSHILLSALKYPAN

SEQ ID NO: 8468 - protein, 16 aa, Homo Sapiens
NNSHILLSALKYPANV

SEQ ID NO: 8469 - protein, 16 aa, Homo Sapiens
NSHILLSALKYPANVA

SEQ ID NO: 8470 - protein, 16 aa, Homo Sapiens
SHILLSALKYPANVAV

SEQ ID NO: 8471 - protein, 16 aa, Homo Sapiens
HILLSALKYPANVAVD

SEQ ID NO: 8472 - protein, 16 aa, Homo Sapiens
ILLSALKYPANVAVDP

SEQ ID NO: 8473 - protein, 16 aa, Homo Sapiens
LLSALKYPANVAVDPV

SEQ ID NO: 8474 - protein, 16 aa, Homo Sapiens
LSALKYPANVAVDPVE

SEQ ID NO: 8475 - protein, 16 aa, Homo Sapiens
SALKYPANVAVDPVER

SEQ ID NO: 8476 - protein, 16 aa, Homo Sapiens
ALKYPANVAVDPVERF

SEQ ID NO: 8477 - protein, 16 aa, Homo Sapiens
LKYPANVAVDPVERFI

SEQ ID NO: 8478 - protein, 16 aa, Homo Sapiens
KYPANVAVDPVERFIF

SEQ ID NO: 8479 - protein, 16 aa, Homo Sapiens
YPANVAVDPVERFIFW

SEQ ID NO: 8480 - protein, 16 aa, Homo Sapiens
PANVAVDPVERFIFWS

SEQ ID NO: 8481 - protein, 16 aa, Homo Sapiens
ANVAVDPVERFIFWSS

SEQ ID NO: 8482 - protein, 16 aa, Homo Sapiens
NVAVDPVERFIFWSSE

SEQ ID NO: 8483 - protein, 16 aa, Homo Sapiens
VAVDPVERFIFWSSEV

SEQ ID NO: 8484 - protein, 16 aa, Homo Sapiens
AVDPVERFIFWSSEVA

SEQ ID NO: 8485 - protein, 16 aa, Homo Sapiens
VDPVERFIFWSSEVAG

SEQ ID NO: 8486 - protein, 16 aa, Homo Sapiens
DPVERFIFWSSEVAGS

SEQ ID NO: 8487 - protein, 16 aa, Homo Sapiens
PVERFIFWSSEVAGSL

SEQ ID NO: 8488 - protein, 16 aa, Homo Sapiens
VERFIFWSSEVAGSLY

SEQ ID NO: 8489 - protein, 16 aa, Homo Sapiens
ERFIFWSSEVAGSLYR

SEQ ID NO: 8490 - protein, 16 aa, Homo Sapiens
RFIFWSSEVAGSLYRA

SEQ ID NO: 8491 - protein, 16 aa, Homo Sapiens
FIFWSSEVAGSLYRAD

SEQ ID NO: 8492 - protein, 16 aa, Homo Sapiens
IFWSSEVAGSLYRADL

SEQ ID NO: 8493 - protein, 16 aa, Homo Sapiens
FWSSEVAGSLYRADLD

SEQ ID NO: 8494 - protein, 16 aa, Homo Sapiens
WSSEVAGSLYRADLDG

SEQ ID NO: 8495 - protein, 16 aa, Homo Sapiens
SSEVAGSLYRADLDGV

SEQ ID NO: 8496 - protein, 16 aa, Homo Sapiens
SEVAGSLYRADLDGVG

SEQ ID NO: 8497 - protein, 16 aa, Homo Sapiens
EVAGSLYRADLDGVGV

SEQ ID NO: 8498 - protein, 16 aa, Homo Sapiens
VAGSLYRADLDGVGVK

SEQ ID NO: 8499 - protein, 16 aa, Homo Sapiens
AGSLYRADLDGVGVKA

SEQ ID NO: 8500 - protein, 16 aa, Homo Sapiens
GSLYRADLDGVGVKAL

SEQ ID NO: 8501 - protein, 16 aa, Homo Sapiens
SLYRADLDGVGVKALL

SEQ ID NO: 8502 - protein, 16 aa, Homo Sapiens
LYRADLDGVGVKALLE

SEQ ID NO: 8503 - protein, 16 aa, Homo Sapiens
YRADLDGVGVKALLET

SEQ ID NO: 8504 - protein, 16 aa, Homo Sapiens
RADLDGVGVKALLETS

SEQ ID NO: 8505 - protein, 16 aa, Homo Sapiens
ADLDGVGVKALLETSE

SEQ ID NO: 8506 - protein, 16 aa, Homo Sapiens
DLDGVGVKALLETSEK

SEQ ID NO: 8507 - protein, 16 aa, Homo Sapiens
LDGVGVKALLETSEKI

SEQ ID NO: 8508 - protein, 16 aa, Homo Sapiens
DGVGVKALLETSEKIT

SEQ ID NO: 8509 - protein, 16 aa, Homo Sapiens
GVGVKALLETSEKITA

SEQ ID NO: 8510 - protein, 16 aa, Homo Sapiens
VGVKALLETSEKITAV

SEQ ID NO: 8511 - protein, 16 aa, Homo Sapiens
GVKALLETSEKITAVS

SEQ ID NO: 8512 - protein, 16 aa, Homo Sapiens
VKALLETSEKITAVSL

SEQ ID NO: 8513 - protein, 16 aa, Homo Sapiens
KALLETSEKITAVSLD

SEQ ID NO: 8514 - protein, 16 aa, Homo Sapiens
ALLETSEKITAVSLDV

SEQ ID NO: 8515 - protein, 16 aa, Homo Sapiens
LLETSEKITAVSLDVL

SEQ ID NO: 8516 - protein, 16 aa, Homo Sapiens
LETSEKITAVSLDVLD

SEQ ID NO: 8517 - protein, 16 aa, Homo Sapiens
ETSEKITAVSLDVLDK

SEQ ID NO: 8518 - protein, 16 aa, Homo Sapiens
TSEKITAVSLDVLDKR

SEQ ID NO: 8519 - protein, 16 aa, Homo Sapiens
SEKITAVSLDVLDKRL

SEQ ID NO: 8520 - protein, 16 aa, Homo Sapiens
EKITAVSLDVLDKRLF

SEQ ID NO: 8521 - protein, 16 aa, Homo Sapiens
KITAVSLDVLDKRLFW

SEQ ID NO: 8522 - protein, 16 aa, Homo Sapiens
ITAVSLDVLDKRLFWI

SEQ ID NO: 8523 - protein, 16 aa, Homo Sapiens
TAVSLDVLDKRLFWIQ

SEQ ID NO: 8524 - protein, 16 aa, Homo Sapiens
AVSLDVLDKRLFWIQY

SEQ ID NO: 8525 - protein, 16 aa, Homo Sapiens
VSLDVLDKRLFWIQYN

SEQ ID NO: 8526 - protein, 16 aa, Homo Sapiens
SLDVLDKRLFWIQYNR

SEQ ID NO: 8527 - protein, 16 aa, Homo Sapiens
LDVLDKRLFWIQYNRE

SEQ ID NO: 8528 - protein, 16 aa, Homo Sapiens
DVLDKRLFWIQYNREG

SEQ ID NO: 8529 - protein, 16 aa, Homo Sapiens
VLDKRLFWIQYNREGS

SEQ ID NO: 8530 - protein, 16 aa, Homo Sapiens
LDKRLFWIQYNREGSN

SEQ ID NO: 8531 - protein, 16 aa, Homo Sapiens
DKRLFWIQYNREGSNS

SEQ ID NO: 8532 - protein, 16 aa, Homo Sapiens
KRLFWIQYNREGSNSL

SEQ ID NO: 8533 - protein, 16 aa, Homo Sapiens
RLFWIQYNREGSNSLI

SEQ ID NO: 8534 - protein, 16 aa, Homo Sapiens
LFWIQYNREGSNSLIC

SEQ ID NO: 8535 - protein, 16 aa, Homo Sapiens
FWIQYNREGSNSLICS

SEQ ID NO: 8536 - protein, 16 aa, Homo Sapiens
WIQYNREGSNSLICSC

SEQ ID NO: 8537 - protein, 16 aa, Homo Sapiens
IQYNREGSNSLICSCD

SEQ ID NO: 8538 - protein, 16 aa, Homo Sapiens
QYNREGSNSLICSCDY

SEQ ID NO: 8539 - protein, 16 aa, Homo Sapiens
YNREGSNSLICSCDYD

SEQ ID NO: 8540 - protein, 16 aa, Homo Sapiens
NREGSNSLICSCDYDG

SEQ ID NO: 8541 - protein, 16 aa, Homo Sapiens
REGSNSLICSCDYDGG

SEQ ID NO: 8542 - protein, 16 aa, Homo Sapiens
EGSNSLICSCDYDGGS

SEQ ID NO: 8543 - protein, 16 aa, Homo Sapiens
GSNSLICSCDYDGGSV

SEQ ID NO: 8544 - protein, 16 aa, Homo Sapiens
SNSLICSCDYDGGSVH

SEQ ID NO: 8545 - protein, 16 aa, Homo Sapiens
NSLICSCDYDGGSVHI

SEQ ID NO: 8546 - protein, 16 aa, Homo Sapiens
SLICSCDYDGGSVHIS

SEQ ID NO: 8547 - protein, 16 aa, Homo Sapiens
LICSCDYDGGSVHISK

SEQ ID NO: 8548 - protein, 16 aa, Homo Sapiens
ICSCDYDGGSVHISKH

SEQ ID NO: 8549 - protein, 16 aa, Homo Sapiens
CSCDYDGGSVHISKHP

SEQ ID NO: 8550 - protein, 16 aa, Homo Sapiens
SCDYDGGSVHISKHPT

SEQ ID NO: 8551 - protein, 16 aa, Homo Sapiens
CDYDGGSVHISKHPTQ

SEQ ID NO: 8552 - protein, 16 aa, Homo Sapiens
DYDGGSVHISKHPTQH

SEQ ID NO: 8553 - protein, 16 aa, Homo Sapiens
YDGGSVHISKHPTQHN

SEQ ID NO: 8554 - protein, 16 aa, Homo Sapiens
DGGSVHISKHPTQHNL

SEQ ID NO: 8555 - protein, 16 aa, Homo Sapiens
GGSVHISKHPTQHNLF

SEQ ID NO: 8556 - protein, 16 aa, Homo Sapiens
GSVHISKHPTQHNLFA

SEQ ID NO: 8557 - protein, 16 aa, Homo Sapiens
SVHISKHPTQHNLFAM

SEQ ID NO: 8558 - protein, 16 aa, Homo Sapiens
VHISKHPTQHNLFAMS

SEQ ID NO: 8559 - protein, 16 aa, Homo Sapiens
HISKHPTQHNLFAMSL

SEQ ID NO: 8560 - protein, 16 aa, Homo Sapiens
ISKHPTQHNLFAMSLF

SEQ ID NO: 8561 - protein, 16 aa, Homo Sapiens
SKHPTQHNLFAMSLFG

SEQ ID NO: 8562 - protein, 16 aa, Homo Sapiens
KHPTQHNLFAMSLFGD

SEQ ID NO: 8563 - protein, 16 aa, Homo Sapiens
HPTQHNLFAMSLFGDR

SEQ ID NO: 8564 - protein, 16 aa, Homo Sapiens
PTQHNLFAMSLFGDRI

SEQ ID NO: 8565 - protein, 16 aa, Homo Sapiens
TQHNLFAMSLFGDRIF

SEQ ID NO: 8566 - protein, 16 aa, Homo Sapiens
QHNLFAMSLFGDRIFY

SEQ ID NO: 8567 - protein, 16 aa, Homo Sapiens
HNLFAMSLFGDRIFYS

SEQ ID NO: 8568 - protein, 16 aa, Homo Sapiens
NLFAMSLFGDRIFYST

SEQ ID NO: 8569 - protein, 16 aa, Homo Sapiens
LFAMSLFGDRIFYSTW

SEQ ID NO: 8570 - protein, 16 aa, Homo Sapiens
FAMSLFGDRIFYSTWK

SEQ ID NO: 8571 - protein, 16 aa, Homo Sapiens
AMSLFGDRIFYSTWKM

SEQ ID NO: 8572 - protein, 16 aa, Homo Sapiens
MSLFGDRIFYSTWKMK

SEQ ID NO: 8573 - protein, 16 aa, Homo Sapiens
SLFGDRIFYSTWKMKT

SEQ ID NO: 8574 - protein, 16 aa, Homo Sapiens
LFGDRIFYSTWKMKTI

SEQ ID NO: 8575 - protein, 16 aa, Homo Sapiens
FGDRIFYSTWKMKTIW

SEQ ID NO: 8576 - protein, 16 aa, Homo Sapiens
GDRIFYSTWKMKTIWI

SEQ ID NO: 8577 - protein, 16 aa, Homo Sapiens
DRIFYSTWKMKTIWIA

SEQ ID NO: 8578 - protein, 16 aa, Homo Sapiens
RIFYSTWKMKTIWIAN

SEQ ID NO: 8579 - protein, 16 aa, Homo Sapiens
IFYSTWKMKTIWIANK

SEQ ID NO: 8580 - protein, 16 aa, Homo Sapiens
FYSTWKMKTIWIANKH

SEQ ID NO: 8581 - protein, 16 aa, Homo Sapiens
YSTWKMKTIWIANKHT

SEQ ID NO: 8582 - protein, 16 aa, Homo Sapiens
STWKMKTIWIANKHTG

SEQ ID NO: 8583 - protein, 16 aa, Homo Sapiens
TWKMKTIWIANKHTGK

SEQ ID NO: 8584 - protein, 16 aa, Homo Sapiens
WKMKTIWIANKHTGKD

SEQ ID NO: 8585 - protein, 16 aa, Homo Sapiens
KMKTIWIANKHTGKDM

SEQ ID NO: 8586 - protein, 16 aa, Homo Sapiens
MKTIWIANKHTGKDMV

SEQ ID NO: 8587 - protein, 16 aa, Homo Sapiens
KTIWIANKHTGKDMVR

SEQ ID NO: 8588 - protein, 16 aa, Homo Sapiens
TIWIANKHTGKDMVRI

SEQ ID NO: 8589 - protein, 16 aa, Homo Sapiens
IWIANKHTGKDMVRIN

SEQ ID NO: 8590 - protein, 16 aa, Homo Sapiens
WIANKHTGKDMVRINL

SEQ ID NO: 8591 - protein, 16 aa, Homo Sapiens
IANKHTGKDMVRINLH

SEQ ID NO: 8592 - protein, 16 aa, Homo Sapiens
ANKHTGKDMVRINLHS

SEQ ID NO: 8593 - protein, 16 aa, Homo Sapiens
NKHTGKDMVRINLHSS

SEQ ID NO: 8594 - protein, 16 aa, Homo Sapiens
KHTGKDMVRINLHSSF

SEQ ID NO: 8595 - protein, 16 aa, Homo Sapiens
HTGKDMVRINLHSSFV

SEQ ID NO: 8596 - protein, 16 aa, Homo Sapiens
TGKDMVRINLHSSFVP

SEQ ID NO: 8597 - protein, 16 aa, Homo Sapiens
GKDMVRINLHSSFVPL

SEQ ID NO: 8598 - protein, 16 aa, Homo Sapiens
KDMVRINLHSSFVPLG

SEQ ID NO: 8599 - protein, 16 aa, Homo Sapiens
DMVRINLHSSFVPLGE

SEQ ID NO: 8600 - protein, 16 aa, Homo Sapiens
MVRINLHSSFVPLGEL

SEQ ID NO: 8601 - protein, 16 aa, Homo Sapiens
VRINLHSSFVPLGELK

SEQ ID NO: 8602 - protein, 16 aa, Homo Sapiens
RINLHSSFVPLGELKV

SEQ ID NO: 8603 - protein, 16 aa, Homo Sapiens
INLHSSFVPLGELKVV

SEQ ID NO: 8604 - protein, 16 aa, Homo Sapiens
NLHSSFVPLGELKVVH

SEQ ID NO: 8605 - protein, 16 aa, Homo Sapiens
LHSSFVPLGELKVVHP

SEQ ID NO: 8606 - protein, 16 aa, Homo Sapiens
HSSFVPLGELKVVHPL

SEQ ID NO: 8607 - protein, 16 aa, Homo Sapiens
SSFVPLGELKVVHPLA

SEQ ID NO: 8608 - protein, 16 aa, Homo Sapiens
SFVPLGELKVVHPLAQ

SEQ ID NO: 8609 - protein, 16 aa, Homo Sapiens
FVPLGELKVVHPLAQP

SEQ ID NO: 8610 - protein, 16 aa, Homo Sapiens
VPLGELKVVHPLAQPK

SEQ ID NO: 8611 - protein, 16 aa, Homo Sapiens
PLGELKVVHPLAQPKA

SEQ ID NO: 8612 - protein, 16 aa, Homo Sapiens
LGELKVVHPLAQPKAE

SEQ ID NO: 8613 - protein, 16 aa, Homo Sapiens
GELKVVHPLAQPKAED

SEQ ID NO: 8614 - protein, 16 aa, Homo Sapiens
ELKVVHPLAQPKAEDD

SEQ ID NO: 8615 - protein, 16 aa, Homo Sapiens
LKVVHPLAQPKAEDDT

SEQ ID NO: 8616 - protein, 16 aa, Homo Sapiens
KVVHPLAQPKAEDDTW

SEQ ID NO: 8617 - protein, 16 aa, Homo Sapiens
VVHPLAQPKAEDDTWE

SEQ ID NO: 8618 - protein, 16 aa, Homo Sapiens
VHPLAQPKAEDDTWEP

SEQ ID NO: 8619 - protein, 16 aa, Homo Sapiens
HPLAQPKAEDDTWEPE

SEQ ID NO: 8620 - protein, 16 aa, Homo Sapiens
PLAQPKAEDDTWEPEQ

SEQ ID NO: 8621 - protein, 16 aa, Homo Sapiens
LAQPKAEDDTWEPEQK

SEQ ID NO: 8622 - protein, 16 aa, Homo Sapiens
AQPKAEDDTWEPEQKL

SEQ ID NO: 8623 - protein, 16 aa, Homo Sapiens
QPKAEDDTWEPEQKLC

SEQ ID NO: 8624 - protein, 16 aa, Homo Sapiens
PKAEDDTWEPEQKLCK

SEQ ID NO: 8625 - protein, 16 aa, Homo Sapiens
KAEDDTWEPEQKLCKL

SEQ ID NO: 8626 - protein, 16 aa, Homo Sapiens
AEDDTWEPEQKLCKLR

SEQ ID NO: 8627 - protein, 16 aa, Homo Sapiens
EDDTWEPEQKLCKLRK

SEQ ID NO: 8628 - protein, 16 aa, Homo Sapiens
DDTWEPEQKLCKLRKG

SEQ ID NO: 8629 - protein, 16 aa, Homo Sapiens
DTWEPEQKLCKLRKGN

SEQ ID NO: 8630 - protein, 16 aa, Homo Sapiens
TWEPEQKLCKLRKGNC

SEQ ID NO: 8631 - protein, 16 aa, Homo Sapiens
WEPEQKLCKLRKGNCS

SEQ ID NO: 8632 - protein, 16 aa, Homo Sapiens
EPEQKLCKLRKGNCSS

SEQ ID NO: 8633 - protein, 16 aa, Homo Sapiens
PEQKLCKLRKGNCSST

SEQ ID NO: 8634 - protein, 16 aa, Homo Sapiens
EQKLCKLRKGNCSSTV

SEQ ID NO: 8635 - protein, 16 aa, Homo Sapiens
QKLCKLRKGNCSSTVC

SEQ ID NO: 8636 - protein, 16 aa, Homo Sapiens
KLCKLRKGNCSSTVCG

SEQ ID NO: 8637 - protein, 16 aa, Homo Sapiens
LCKLRKGNCSSTVCGQ

SEQ ID NO: 8638 - protein, 16 aa, Homo Sapiens
CKLRKGNCSSTVCGQD

SEQ ID NO: 8639 - protein, 16 aa, Homo Sapiens
KLRKGNCSSTVCGQDL

SEQ ID NO: 8640 - protein, 16 aa, Homo Sapiens
LRKGNCSSTVCGQDLQ

SEQ ID NO: 8641 - protein, 16 aa, Homo Sapiens
RKGNCSSTVCGQDLQS

SEQ ID NO: 8642 - protein, 16 aa, Homo Sapiens
KGNCSSTVCGQDLQSH

SEQ ID NO: 8643 - protein, 16 aa, Homo Sapiens
GNCSSTVCGQDLQSHL

SEQ ID NO: 8644 - protein, 16 aa, Homo Sapiens
NCSSTVCGQDLQSHLC

SEQ ID NO: 8645 - protein, 16 aa, Homo Sapiens
CSSTVCGQDLQSHLCM

SEQ ID NO: 8646 - protein, 16 aa, Homo Sapiens
SSTVCGQDLQSHLCMC

SEQ ID NO: 8647 - protein, 16 aa, Homo Sapiens
STVCGQDLQSHLCMCA

SEQ ID NO: 8648 - protein, 16 aa, Homo Sapiens
TVCGQDLQSHLCMCAE

SEQ ID NO: 8649 - protein, 16 aa, Homo Sapiens
VCGQDLQSHLCMCAEG

SEQ ID NO: 8650 - protein, 16 aa, Homo Sapiens
CGQDLQSHLCMCAEGY

SEQ ID NO: 8651 - protein, 16 aa, Homo Sapiens
GQDLQSHLCMCAEGYA

SEQ ID NO: 8652 - protein, 16 aa, Homo Sapiens
QDLQSHLCMCAEGYAL

SEQ ID NO: 8653 - protein, 16 aa, Homo Sapiens
DLQSHLCMCAEGYALS

SEQ ID NO: 8654 - protein, 16 aa, Homo Sapiens
LQSHLCMCAEGYALSR

SEQ ID NO: 8655 - protein, 16 aa, Homo Sapiens
QSHLCMCAEGYALSRD

SEQ ID NO: 8656 - protein, 16 aa, Homo Sapiens
SHLCMCAEGYALSRDR

SEQ ID NO: 8657 - protein, 16 aa, Homo Sapiens
HLCMCAEGYALSRDRK

SEQ ID NO: 8658 - protein, 16 aa, Homo Sapiens
LCMCAEGYALSRDRKY

SEQ ID NO: 8659 - protein, 16 aa, Homo Sapiens
CMCAEGYALSRDRKYC

SEQ ID NO: 8660 - protein, 16 aa, Homo Sapiens
MCAEGYALSRDRKYCE

SEQ ID NO: 8661 - protein, 16 aa, Homo Sapiens
CAEGYALSRDRKYCED

SEQ ID NO: 8662 - protein, 16 aa, Homo Sapiens
AEGYALSRDRKYCEDV

SEQ ID NO: 8663 - protein, 16 aa, Homo Sapiens
EGYALSRDRKYCEDVN

SEQ ID NO: 8664 - protein, 16 aa, Homo Sapiens
GYALSRDRKYCEDVNE

SEQ ID NO: 8665 - protein, 16 aa, Homo Sapiens
YALSRDRKYCEDVNEC

SEQ ID NO: 8666 - protein, 16 aa, Homo Sapiens
ALSRDRKYCEDVNECA

SEQ ID NO: 8667 - protein, 16 aa, Homo Sapiens
LSRDRKYCEDVNECAF

SEQ ID NO: 8668 - protein, 16 aa, Homo Sapiens
SRDRKYCEDVNECAFW

SEQ ID NO: 8669 - protein, 16 aa, Homo Sapiens
RDRKYCEDVNECAFWN

SEQ ID NO: 8670 - protein, 16 aa, Homo Sapiens
DRKYCEDVNECAFWNH

SEQ ID NO: 8671 - protein, 16 aa, Homo Sapiens
RKYCEDVNECAFWNHG

SEQ ID NO: 8672 - protein, 16 aa, Homo Sapiens
KYCEDVNECAFWNHGC

SEQ ID NO: 8673 - protein, 16 aa, Homo Sapiens
YCEDVNECAFWNHGCT

SEQ ID NO: 8674 - protein, 16 aa, Homo Sapiens
CEDVNECAFWNHGCTL

SEQ ID NO: 8675 - protein, 16 aa, Homo Sapiens
EDVNECAFWNHGCTLG

SEQ ID NO: 8676 - protein, 16 aa, Homo Sapiens
DVNECAFWNHGCTLGC

SEQ ID NO: 8677 - protein, 16 aa, Homo Sapiens
VNECAFWNHGCTLGCK

SEQ ID NO: 8678 - protein, 16 aa, Homo Sapiens
NECAFWNHGCTLGCKN

SEQ ID NO: 8679 - protein, 16 aa, Homo Sapiens
ECAFWNHGCTLGCKNT

SEQ ID NO: 8680 - protein, 16 aa, Homo Sapiens
CAFWNHGCTLGCKNTP

SEQ ID NO: 8681 - protein, 16 aa, Homo Sapiens
AFWNHGCTLGCKNTPG

SEQ ID NO: 8682 - protein, 16 aa, Homo Sapiens
FWNHGCTLGCKNTPGS

SEQ ID NO: 8683 - protein, 16 aa, Homo Sapiens
WNHGCTLGCKNTPGSY

SEQ ID NO: 8684 - protein, 16 aa, Homo Sapiens
NHGCTLGCKNTPGSYY

SEQ ID NO: 8685 - protein, 16 aa, Homo Sapiens
HGCTLGCKNTPGSYYC

SEQ ID NO: 8686 - protein, 16 aa, Homo Sapiens
GCTLGCKNTPGSYYCT

SEQ ID NO: 8687 - protein, 16 aa, Homo Sapiens
CTLGCKNTPGSYYCTC

SEQ ID NO: 8688 - protein, 16 aa, Homo Sapiens
TLGCKNTPGSYYCTCP

SEQ ID NO: 8689 - protein, 16 aa, Homo Sapiens
LGCKNTPGSYYCTCPV

SEQ ID NO: 8690 - protein, 16 aa, Homo Sapiens
GCKNTPGSYYCTCPVG

SEQ ID NO: 8691 - protein, 16 aa, Homo Sapiens
CKNTPGSYYCTCPVGF

SEQ ID NO: 8692 - protein, 16 aa, Homo Sapiens
KNTPGSYYCTCPVGFV

SEQ ID NO: 8693 - protein, 16 aa, Homo Sapiens
NTPGSYYCTCPVGFVL

SEQ ID NO: 8694 - protein, 16 aa, Homo Sapiens
TPGSYYCTCPVGFVLL

SEQ ID NO: 8695 - protein, 16 aa, Homo Sapiens
PGSYYCTCPVGFVLLP

SEQ ID NO: 8696 - protein, 16 aa, Homo Sapiens
GSYYCTCPVGFVLLPD

SEQ ID NO: 8697 - protein, 16 aa, Homo Sapiens
SYYCTCPVGFVLLPDG

SEQ ID NO: 8698 - protein, 16 aa, Homo Sapiens
YYCTCPVGFVLLPDGK

SEQ ID NO: 8699 - protein, 16 aa, Homo Sapiens
YCTCPVGFVLLPDGKR

SEQ ID NO: 8700 - protein, 16 aa, Homo Sapiens
CTCPVGFVLLPDGKRC

SEQ ID NO: 8701 - protein, 16 aa, Homo Sapiens
TCPVGFVLLPDGKRCH

SEQ ID NO: 8702 - protein, 16 aa, Homo Sapiens
CPVGFVLLPDGKRCHQ

SEQ ID NO: 8703 - protein, 16 aa, Homo Sapiens
PVGFVLLPDGKRCHQL

SEQ ID NO: 8704 - protein, 16 aa, Homo Sapiens
VGFVLLPDGKRCHQLV

SEQ ID NO: 8705 - protein, 16 aa, Homo Sapiens
GFVLLPDGKRCHQLVS

SEQ ID NO: 8706 - protein, 16 aa, Homo Sapiens
FVLLPDGKRCHQLVSC

SEQ ID NO: 8707 - protein, 16 aa, Homo Sapiens
VLLPDGKRCHQLVSCP

SEQ ID NO: 8708 - protein, 16 aa, Homo Sapiens
LLPDGKRCHQLVSCPR

SEQ ID NO: 8709 - protein, 16 aa, Homo Sapiens
LPDGKRCHQLVSCPRN

SEQ ID NO: 8710 - protein, 16 aa, Homo Sapiens
PDGKRCHQLVSCPRNV

SEQ ID NO: 8711 - protein, 16 aa, Homo Sapiens
DGKRCHQLVSCPRNVS

SEQ ID NO: 8712 - protein, 16 aa, Homo Sapiens
GKRCHQLVSCPRNVSE

SEQ ID NO: 8713 - protein, 16 aa, Homo Sapiens
KRCHQLVSCPRNVSEC

SEQ ID NO: 8714 - protein, 16 aa, Homo Sapiens
RCHQLVSCPRNVSECS

SEQ ID NO: 8715 - protein, 16 aa, Homo Sapiens
CHQLVSCPRNVSECSH

SEQ ID NO: 8716 - protein, 16 aa, Homo Sapiens
HQLVSCPRNVSECSHD

SEQ ID NO: 8717 - protein, 16 aa, Homo Sapiens
QLVSCPRNVSECSHDC

SEQ ID NO: 8718 - protein, 16 aa, Homo Sapiens
LVSCPRNVSECSHDCV

SEQ ID NO: 8719 - protein, 16 aa, Homo Sapiens
VSCPRNVSECSHDCVL

SEQ ID NO: 8720 - protein, 16 aa, Homo Sapiens
SCPRNVSECSHDCVLT

SEQ ID NO: 8721 - protein, 16 aa, Homo Sapiens
CPRNVSECSHDCVLTS

SEQ ID NO: 8722 - protein, 16 aa, Homo Sapiens
PRNVSECSHDCVLTSE

SEQ ID NO: 8723 - protein, 16 aa, Homo Sapiens
RNVSECSHDCVLTSEG

SEQ ID NO: 8724 - protein, 16 aa, Homo Sapiens
NVSECSHDCVLTSEGP

SEQ ID NO: 8725 - protein, 16 aa, Homo Sapiens
VSECSHDCVLTSEGPL

SEQ ID NO: 8726 - protein, 16 aa, Homo Sapiens
SECSHDCVLTSEGPLC

SEQ ID NO: 8727 - protein, 16 aa, Homo Sapiens
ECSHDCVLTSEGPLCF

SEQ ID NO: 8728 - protein, 16 aa, Homo Sapiens
CSHDCVLTSEGPLCFC

SEQ ID NO: 8729 - protein, 16 aa, Homo Sapiens
SHDCVLTSEGPLCFCP

SEQ ID NO: 8730 - protein, 16 aa, Homo Sapiens
HDCVLTSEGPLCFCPE

SEQ ID NO: 8731 - protein, 16 aa, Homo Sapiens
DCVLTSEGPLCFCPEG

SEQ ID NO: 8732 - protein, 16 aa, Homo Sapiens
CVLTSEGPLCFCPEGS

SEQ ID NO: 8733 - protein, 16 aa, Homo Sapiens
VLTSEGPLCFCPEGSV

SEQ ID NO: 8734 - protein, 16 aa, Homo Sapiens
LTSEGPLCFCPEGSVL

SEQ ID NO: 8735 - protein, 16 aa, Homo Sapiens
TSEGPLCFCPEGSVLE

SEQ ID NO: 8736 - protein, 16 aa, Homo Sapiens
SEGPLCFCPEGSVLER

SEQ ID NO: 8737 - protein, 16 aa, Homo Sapiens
EGPLCFCPEGSVLERD

SEQ ID NO: 8738 - protein, 16 aa, Homo Sapiens
GPLCFCPEGSVLERDG

SEQ ID NO: 8739 - protein, 16 aa, Homo Sapiens
PLCFCPEGSVLERDGK

SEQ ID NO: 8740 - protein, 16 aa, Homo Sapiens
LCFCPEGSVLERDGKT

SEQ ID NO: 8741 - protein, 16 aa, Homo Sapiens
CFCPEGSVLERDGKTC

SEQ ID NO: 8742 - protein, 16 aa, Homo Sapiens
FCPEGSVLERDGKTCS

SEQ ID NO: 8743 - protein, 16 aa, Homo Sapiens
CPEGSVLERDGKTCSG

SEQ ID NO: 8744 - protein, 16 aa, Homo Sapiens
PEGSVLERDGKTCSGC

SEQ ID NO: 8745 - protein, 16 aa, Homo Sapiens
EGSVLERDGKTCSGCS

SEQ ID NO: 8746 - protein, 16 aa, Homo Sapiens
GSVLERDGKTCSGCSS

SEQ ID NO: 8747 - protein, 16 aa, Homo Sapiens
SVLERDGKTCSGCSSP

SEQ ID NO: 8748 - protein, 16 aa, Homo Sapiens
VLERDGKTCSGCSSPD

SEQ ID NO: 8749 - protein, 16 aa, Homo Sapiens
LERDGKTCSGCSSPDN

SEQ ID NO: 8750 - protein, 16 aa, Homo Sapiens
ERDGKTCSGCSSPDNG

SEQ ID NO: 8751 - protein, 16 aa, Homo Sapiens
RDGKTCSGCSSPDNGG

SEQ ID NO: 8752 - protein, 16 aa, Homo Sapiens
DGKTCSGCSSPDNGGC

SEQ ID NO: 8753 - protein, 16 aa, Homo Sapiens
GKTCSGCSSPDNGGCS

SEQ ID NO: 8754 - protein, 16 aa, Homo Sapiens
KTCSGCSSPDNGGCSQ

SEQ ID NO: 8755 - protein, 16 aa, Homo Sapiens
TCSGCSSPDNGGCSQL

SEQ ID NO: 8756 - protein, 16 aa, Homo Sapiens
CSGCSSPDNGGCSQLC

SEQ ID NO: 8757 - protein, 16 aa, Homo Sapiens
SGCSSPDNGGCSQLCV

SEQ ID NO: 8758 - protein, 16 aa, Homo Sapiens
GCSSPDNGGCSQLCVP

SEQ ID NO: 8759 - protein, 16 aa, Homo Sapiens
CSSPDNGGCSQLCVPL

SEQ ID NO: 8760 - protein, 16 aa, Homo Sapiens
SSPDNGGCSQLCVPLS

SEQ ID NO: 8761 - protein, 16 aa, Homo Sapiens
SPDNGGCSQLCVPLSP

SEQ ID NO: 8762 - protein, 16 aa, Homo Sapiens
PDNGGCSQLCVPLSPV

SEQ ID NO: 8763 - protein, 16 aa, Homo Sapiens
DNGGCSQLCVPLSPVS

SEQ ID NO: 8764 - protein, 16 aa, Homo Sapiens
NGGCSQLCVPLSPVSW

SEQ ID NO: 8765 - protein, 16 aa, Homo Sapiens
GGCSQLCVPLSPVSWE

SEQ ID NO: 8766 - protein, 16 aa, Homo Sapiens
GCSQLCVPLSPVSWEC

SEQ ID NO: 8767 - protein, 16 aa, Homo Sapiens
CSQLCVPLSPVSWECD

SEQ ID NO: 8768 - protein, 16 aa, Homo Sapiens
SQLCVPLSPVSWECDC

SEQ ID NO: 8769 - protein, 16 aa, Homo Sapiens
QLCVPLSPVSWECDCF

SEQ ID NO: 8770 - protein, 16 aa, Homo Sapiens
LCVPLSPVSWECDCFP

SEQ ID NO: 8771 - protein, 16 aa, Homo Sapiens
CVPLSPVSWECDCFPG

SEQ ID NO: 8772 - protein, 16 aa, Homo Sapiens
VPLSPVSWECDCFPGY

SEQ ID NO: 8773 - protein, 16 aa, Homo Sapiens
PLSPVSWECDCFPGYD

SEQ ID NO: 8774 - protein, 16 aa, Homo Sapiens
LSPVSWECDCFPGYDL

SEQ ID NO: 8775 - protein, 16 aa, Homo Sapiens
SPVSWECDCFPGYDLQ

SEQ ID NO: 8776 - protein, 16 aa, Homo Sapiens
PVSWECDCFPGYDLQL

SEQ ID NO: 8777 - protein, 16 aa, Homo Sapiens
VSWECDCFPGYDLQLD

SEQ ID NO: 8778 - protein, 16 aa, Homo Sapiens
SWECDCFPGYDLQLDE

SEQ ID NO: 8779 - protein, 16 aa, Homo Sapiens
WECDCFPGYDLQLDEK

SEQ ID NO: 8780 - protein, 16 aa, Homo Sapiens
ECDCFPGYDLQLDEKS

SEQ ID NO: 8781 - protein, 16 aa, Homo Sapiens
CDCFPGYDLQLDEKSC

SEQ ID NO: 8782 - protein, 16 aa, Homo Sapiens
DCFPGYDLQLDEKSCA

SEQ ID NO: 8783 - protein, 16 aa, Homo Sapiens
CFPGYDLQLDEKSCAA

SEQ ID NO: 8784 - protein, 16 aa, Homo Sapiens
FPGYDLQLDEKSCAAS

SEQ ID NO: 8785 - protein, 16 aa, Homo Sapiens
PGYDLQLDEKSCAASG

SEQ ID NO: 8786 - protein, 16 aa, Homo Sapiens
GYDLQLDEKSCAASGP

SEQ ID NO: 8787 - protein, 16 aa, Homo Sapiens
YDLQLDEKSCAASGPQ

SEQ ID NO: 8788 - protein, 16 aa, Homo Sapiens
DLQLDEKSCAASGPQP

SEQ ID NO: 8789 - protein, 16 aa, Homo Sapiens
LQLDEKSCAASGPQPF

SEQ ID NO: 8790 - protein, 16 aa, Homo Sapiens
QLDEKSCAASGPQPFL

SEQ ID NO: 8791 - protein, 16 aa, Homo Sapiens
LDEKSCAASGPQPFLL

SEQ ID NO: 8792 - protein, 16 aa, Homo Sapiens
DEKSCAASGPQPFLLF

SEQ ID NO: 8793 - protein, 16 aa, Homo Sapiens
EKSCAASGPQPFLLFA

SEQ ID NO: 8794 - protein, 16 aa, Homo Sapiens
KSCAASGPQPFLLFAN

SEQ ID NO: 8795 - protein, 16 aa, Homo Sapiens
SCAASGPQPFLLFANS

SEQ ID NO: 8796 - protein, 16 aa, Homo Sapiens
CAASGPQPFLLFANSQ

SEQ ID NO: 8797 - protein, 16 aa, Homo Sapiens
AASGPQPFLLFANSQD

SEQ ID NO: 8798 - protein, 16 aa, Homo Sapiens
ASGPQPFLLFANSQDI

SEQ ID NO: 8799 - protein, 16 aa, Homo Sapiens
SGPQPFLLFANSQDIR

SEQ ID NO: 8800 - protein, 16 aa, Homo Sapiens
GPQPFLLFANSQDIRH

SEQ ID NO: 8801 - protein, 16 aa, Homo Sapiens
PQPFLLFANSQDIRHM

SEQ ID NO: 8802 - protein, 16 aa, Homo Sapiens
QPFLLFANSQDIRHMH

SEQ ID NO: 8803 - protein, 16 aa, Homo Sapiens
PFLLFANSQDIRHMHF

SEQ ID NO: 8804 - protein, 16 aa, Homo Sapiens
FLLFANSQDIRHMHFD

SEQ ID NO: 8805 - protein, 16 aa, Homo Sapiens
LLFANSQDIRHMHFDG

SEQ ID NO: 8806 - protein, 16 aa, Homo Sapiens
LFANSQDIRHMHFDGT

SEQ ID NO: 8807 - protein, 16 aa, Homo Sapiens
FANSQDIRHMHFDGTD

SEQ ID NO: 8808 - protein, 16 aa, Homo Sapiens
ANSQDIRHMHFDGTDY

SEQ ID NO: 8809 - protein, 16 aa, Homo Sapiens
NSQDIRHMHFDGTDYG

SEQ ID NO: 8810 - protein, 16 aa, Homo Sapiens
SQDIRHMHFDGTDYGT

SEQ ID NO: 8811 - protein, 16 aa, Homo Sapiens
QDIRHMHFDGTDYGTL

SEQ ID NO: 8812 - protein, 16 aa, Homo Sapiens
DIRHMHFDGTDYGTLL

SEQ ID NO: 8813 - protein, 16 aa, Homo Sapiens
IRHMHFDGTDYGTLLS

SEQ ID NO: 8814 - protein, 16 aa, Homo Sapiens
RHMHFDGTDYGTLLSQ

SEQ ID NO: 8815 - protein, 16 aa, Homo Sapiens
HMHFDGTDYGTLLSQQ

SEQ ID NO: 8816 - protein, 16 aa, Homo Sapiens
MHFDGTDYGTLLSQQM

SEQ ID NO: 8817 - protein, 16 aa, Homo Sapiens
HFDGTDYGTLLSQQMG

SEQ ID NO: 8818 - protein, 16 aa, Homo Sapiens
FDGTDYGTLLSQQMGM

SEQ ID NO: 8819 - protein, 16 aa, Homo Sapiens
DGTDYGTLLSQQMGMV

SEQ ID NO: 8820 - protein, 16 aa, Homo Sapiens
GTDYGTLLSQQMGMVY

SEQ ID NO: 8821 - protein, 16 aa, Homo Sapiens
TDYGTLLSQQMGMVYA

SEQ ID NO: 8822 - protein, 16 aa, Homo Sapiens
DYGTLLSQQMGMVYAL

SEQ ID NO: 8823 - protein, 16 aa, Homo Sapiens
YGTLLSQQMGMVYALD

SEQ ID NO: 8824 - protein, 16 aa, Homo Sapiens
GTLLSQQMGMVYALDH

SEQ ID NO: 8825 - protein, 16 aa, Homo Sapiens
TLLSQQMGMVYALDHD

SEQ ID NO: 8826 - protein, 16 aa, Homo Sapiens
LLSQQMGMVYALDHDP

SEQ ID NO: 8827 - protein, 16 aa, Homo Sapiens
LSQQMGMVYALDHDPV

SEQ ID NO: 8828 - protein, 16 aa, Homo Sapiens
SQQMGMVYALDHDPVE

SEQ ID NO: 8829 - protein, 16 aa, Homo Sapiens
QQMGMVYALDHDPVEN

SEQ ID NO: 8830 - protein, 16 aa, Homo Sapiens
QMGMVYALDHDPVENK

SEQ ID NO: 8831 - protein, 16 aa, Homo Sapiens
MGMVYALDHDPVENKI

SEQ ID NO: 8832 - protein, 16 aa, Homo Sapiens
GMVYALDHDPVENKIY

SEQ ID NO: 8833 - protein, 16 aa, Homo Sapiens
MVYALDHDPVENKIYF

SEQ ID NO: 8834 - protein, 16 aa, Homo Sapiens
VYALDHDPVENKIYFA

SEQ ID NO: 8835 - protein, 16 aa, Homo Sapiens
YALDHDPVENKIYFAH

SEQ ID NO: 8836 - protein, 16 aa, Homo Sapiens
ALDHDPVENKIYFAHT

SEQ ID NO: 8837 - protein, 16 aa, Homo Sapiens
LDHDPVENKIYFAHTA

SEQ ID NO: 8838 - protein, 16 aa, Homo Sapiens
DHDPVENKIYFAHTAL

SEQ ID NO: 8839 - protein, 16 aa, Homo Sapiens
HDPVENKIYFAHTALK

SEQ ID NO: 8840 - protein, 16 aa, Homo Sapiens
DPVENKIYFAHTALKW

SEQ ID NO: 8841 - protein, 16 aa, Homo Sapiens
PVENKIYFAHTALKWI

SEQ ID NO: 8842 - protein, 16 aa, Homo Sapiens
VENKIYFAHTALKWIE

SEQ ID NO: 8843 - protein, 16 aa, Homo Sapiens
ENKIYFAHTALKWIER

SEQ ID NO: 8844 - protein, 16 aa, Homo Sapiens
NKIYFAHTALKWIERA

SEQ ID NO: 8845 - protein, 16 aa, Homo Sapiens
KIYFAHTALKWIERAN

SEQ ID NO: 8846 - protein, 16 aa, Homo Sapiens
IYFAHTALKWIERANM

SEQ ID NO: 8847 - protein, 16 aa, Homo Sapiens
YFAHTALKWIERANMD

SEQ ID NO: 8848 - protein, 16 aa, Homo Sapiens
FAHTALKWIERANMDG

SEQ ID NO: 8849 - protein, 16 aa, Homo Sapiens
AHTALKWIERANMDGS

SEQ ID NO: 8850 - protein, 16 aa, Homo Sapiens
HTALKWIERANMDGSQ

SEQ ID NO: 8851 - protein, 16 aa, Homo Sapiens
TALKWIERANMDGSQR

SEQ ID NO: 8852 - protein, 16 aa, Homo Sapiens
ALKWIERANMDGSQRE

SEQ ID NO: 8853 - protein, 16 aa, Homo Sapiens
LKWIERANMDGSQRER

SEQ ID NO: 8854 - protein, 16 aa, Homo Sapiens
KWIERANMDGSQRERL

SEQ ID NO: 8855 - protein, 16 aa, Homo Sapiens
WIERANMDGSQRERLI

SEQ ID NO: 8856 - protein, 16 aa, Homo Sapiens
IERANMDGSQRERLIE

SEQ ID NO: 8857 - protein, 16 aa, Homo Sapiens
ERANMDGSQRERLIEE

SEQ ID NO: 8858 - protein, 16 aa, Homo Sapiens
RANMDGSQRERLIEEG

SEQ ID NO: 8859 - protein, 16 aa, Homo Sapiens
ANMDGSQRERLIEEGV

SEQ ID NO: 8860 - protein, 16 aa, Homo Sapiens
NMDGSQRERLIEEGVD

SEQ ID NO: 8861 - protein, 16 aa, Homo Sapiens
MDGSQRERLIEEGVDV

SEQ ID NO: 8862 - protein, 16 aa, Homo Sapiens
DGSQRERLIEEGVDVP

SEQ ID NO: 8863 - protein, 16 aa, Homo Sapiens
GSQRERLIEEGVDVPE

SEQ ID NO: 8864 - protein, 16 aa, Homo Sapiens
SQRERLIEEGVDVPEG

SEQ ID NO: 8865 - protein, 16 aa, Homo Sapiens
QRERLIEEGVDVPEGL

SEQ ID NO: 8866 - protein, 16 aa, Homo Sapiens
RERLIEEGVDVPEGLA

SEQ ID NO: 8867 - protein, 16 aa, Homo Sapiens
ERLIEEGVDVPEGLAV

SEQ ID NO: 8868 - protein, 16 aa, Homo Sapiens
RLIEEGVDVPEGLAVD

SEQ ID NO: 8869 - protein, 16 aa, Homo Sapiens
LIEEGVDVPEGLAVDW

SEQ ID NO: 8870 - protein, 16 aa, Homo Sapiens
IEEGVDVPEGLAVDWI

SEQ ID NO: 8871 - protein, 16 aa, Homo Sapiens
EEGVDVPEGLAVDWIG

SEQ ID NO: 8872 - protein, 16 aa, Homo Sapiens
EGVDVPEGLAVDWIGR

SEQ ID NO: 8873 - protein, 16 aa, Homo Sapiens
GVDVPEGLAVDWIGRR

SEQ ID NO: 8874 - protein, 16 aa, Homo Sapiens
VDVPEGLAVDWIGRRF

SEQ ID NO: 8875 - protein, 16 aa, Homo Sapiens
DVPEGLAVDWIGRRFY

SEQ ID NO: 8876 - protein, 16 aa, Homo Sapiens
VPEGLAVDWIGRRFYW

SEQ ID NO: 8877 - protein, 16 aa, Homo Sapiens
PEGLAVDWIGRRFYWT

SEQ ID NO: 8878 - protein, 16 aa, Homo Sapiens
EGLAVDWIGRRFYWTD

SEQ ID NO: 8879 - protein, 16 aa, Homo Sapiens
GLAVDWIGRRFYWTDR

SEQ ID NO: 8880 - protein, 16 aa, Homo Sapiens
LAVDWIGRRFYWTDRG

SEQ ID NO: 8881 - protein, 16 aa, Homo Sapiens
AVDWIGRRFYWTDRGK

SEQ ID NO: 8882 - protein, 16 aa, Homo Sapiens
VDWIGRRFYWTDRGKS

SEQ ID NO: 8883 - protein, 16 aa, Homo Sapiens
DWIGRRFYWTDRGKSL

SEQ ID NO: 8884 - protein, 16 aa, Homo Sapiens
WIGRRFYWTDRGKSLI

SEQ ID NO: 8885 - protein, 16 aa, Homo Sapiens
IGRRFYWTDRGKSLIG

SEQ ID NO: 8886 - protein, 16 aa, Homo Sapiens
GRRFYWTDRGKSLIGR

SEQ ID NO: 8887 - protein, 16 aa, Homo Sapiens
RRFYWTDRGKSLIGRS

SEQ ID NO: 8888 - protein, 16 aa, Homo Sapiens
RFYWTDRGKSLIGRSD

SEQ ID NO: 8889 - protein, 16 aa, Homo Sapiens
FYWTDRGKSLIGRSDL

SEQ ID NO: 8890 - protein, 16 aa, Homo Sapiens
YWTDRGKSLIGRSDLN

SEQ ID NO: 8891 - protein, 16 aa, Homo Sapiens
WTDRGKSLIGRSDLNG

SEQ ID NO: 8892 - protein, 16 aa, Homo Sapiens
TDRGKSLIGRSDLNGK

SEQ ID NO: 8893 - protein, 16 aa, Homo Sapiens
DRGKSLIGRSDLNGKR

SEQ ID NO: 8894 - protein, 16 aa, Homo Sapiens
RGKSLIGRSDLNGKRS

SEQ ID NO: 8895 - protein, 16 aa, Homo Sapiens
GKSLIGRSDLNGKRSK

SEQ ID NO: 8896 - protein, 16 aa, Homo Sapiens
KSLIGRSDLNGKRSKI

SEQ ID NO: 8897 - protein, 16 aa, Homo Sapiens
SLIGRSDLNGKRSKII

SEQ ID NO: 8898 - protein, 16 aa, Homo Sapiens
LIGRSDLNGKRSKIIT

SEQ ID NO: 8899 - protein, 16 aa, Homo Sapiens
IGRSDLNGKRSKIITK

SEQ ID NO: 8900 - protein, 16 aa, Homo Sapiens
GRSDLNGKRSKIITKE

SEQ ID NO: 8901 - protein, 16 aa, Homo Sapiens
RSDLNGKRSKIITKEN

SEQ ID NO: 8902 - protein, 16 aa, Homo Sapiens
SDLNGKRSKIITKENI

SEQ ID NO: 8903 - protein, 16 aa, Homo Sapiens
DLNGKRSKIITKENIS

SEQ ID NO: 8904 - protein, 16 aa, Homo Sapiens
LNGKRSKIITKENISQ

SEQ ID NO: 8905 - protein, 16 aa, Homo Sapiens
NGKRSKIITKENISQP

SEQ ID NO: 8906 - protein, 16 aa, Homo Sapiens
GKRSKIITKENISQPR

SEQ ID NO: 8907 - protein, 16 aa, Homo Sapiens
KRSKIITKENISQPRG

SEQ ID NO: 8908 - protein, 16 aa, Homo Sapiens
RSKIITKENISQPRGI

SEQ ID NO: 8909 - protein, 16 aa, Homo Sapiens
SKIITKENISQPRGIA

SEQ ID NO: 8910 - protein, 16 aa, Homo Sapiens
KIITKENISQPRGIAV

SEQ ID NO: 8911 - protein, 16 aa, Homo Sapiens
IITKENISQPRGIAVH

SEQ ID NO: 8912 - protein, 16 aa, Homo Sapiens
ITKENISQPRGIAVHP

SEQ ID NO: 8913 - protein, 16 aa, Homo Sapiens
TKENISQPRGIAVHPM

SEQ ID NO: 8914 - protein, 16 aa, Homo Sapiens
KENISQPRGIAVHPMA

SEQ ID NO: 8915 - protein, 16 aa, Homo Sapiens
ENISQPRGIAVHPMAK

SEQ ID NO: 8916 - protein, 16 aa, Homo Sapiens
NISQPRGIAVHPMAKR

SEQ ID NO: 8917 - protein, 16 aa, Homo Sapiens
ISQPRGIAVHPMAKRL

SEQ ID NO: 8918 - protein, 16 aa, Homo Sapiens
SQPRGIAVHPMAKRLF

SEQ ID NO: 8919 - protein, 16 aa, Homo Sapiens
QPRGIAVHPMAKRLFW

SEQ ID NO: 8920 - protein, 16 aa, Homo Sapiens
PRGIAVHPMAKRLFWT

SEQ ID NO: 8921 - protein, 16 aa, Homo Sapiens
RGIAVHPMAKRLFWTD

SEQ ID NO: 8922 - protein, 16 aa, Homo Sapiens
GIAVHPMAKRLFWTDT

SEQ ID NO: 8923 - protein, 16 aa, Homo Sapiens
IAVHPMAKRLFWTDTG

SEQ ID NO: 8924 - protein, 16 aa, Homo Sapiens
AVHPMAKRLFWTDTGI

SEQ ID NO: 8925 - protein, 16 aa, Homo Sapiens
VHPMAKRLFWTDTGIN

SEQ ID NO: 8926 - protein, 16 aa, Homo Sapiens
HPMAKRLFWTDTGINP

SEQ ID NO: 8927 - protein, 16 aa, Homo Sapiens
PMAKRLFWTDTGINPR

SEQ ID NO: 8928 - protein, 16 aa, Homo Sapiens
MAKRLFWTDTGINPRI

SEQ ID NO: 8929 - protein, 16 aa, Homo Sapiens
AKRLFWTDTGINPRIE

SEQ ID NO: 8930 - protein, 16 aa, Homo Sapiens
KRLFWTDTGINPRIES

SEQ ID NO: 8931 - protein, 16 aa, Homo Sapiens
RLFWTDTGINPRIESS

SEQ ID NO: 8932 - protein, 16 aa, Homo Sapiens
LFWTDTGINPRIESSS

SEQ ID NO: 8933 - protein, 16 aa, Homo Sapiens
FWTDTGINPRIESSSL

SEQ ID NO: 8934 - protein, 16 aa, Homo Sapiens
WTDTGINPRIESSSLQ

SEQ ID NO: 8935 - protein, 16 aa, Homo Sapiens
TDTGINPRIESSSLQG

SEQ ID NO: 8936 - protein, 16 aa, Homo Sapiens
DTGINPRIESSSLQGL

SEQ ID NO: 8937 - protein, 16 aa, Homo Sapiens
TGINPRIESSSLQGLG

SEQ ID NO: 8938 - protein, 16 aa, Homo Sapiens
GINPRIESSSLQGLGR

SEQ ID NO: 8939 - protein, 16 aa, Homo Sapiens
INPRIESSSLQGLGRL

SEQ ID NO: 8940 - protein, 16 aa, Homo Sapiens
NPRIESSSLQGLGRLV

SEQ ID NO: 8941 - protein, 16 aa, Homo Sapiens
PRIESSSLQGLGRLVI

SEQ ID NO: 8942 - protein, 16 aa, Homo Sapiens
RIESSSLQGLGRLVIA

SEQ ID NO: 8943 - protein, 16 aa, Homo Sapiens
IESSSLQGLGRLVIAS

SEQ ID NO: 8944 - protein, 16 aa, Homo Sapiens
ESSSLQGLGRLVIASS

SEQ ID NO: 8945 - protein, 16 aa, Homo Sapiens
SSSLQGLGRLVIASSD

SEQ ID NO: 8946 - protein, 16 aa, Homo Sapiens
SSLQGLGRLVIASSDL

SEQ ID NO: 8947 - protein, 16 aa, Homo Sapiens
SLQGLGRLVIASSDLI

SEQ ID NO: 8948 - protein, 16 aa, Homo Sapiens
LQGLGRLVIASSDLIW

SEQ ID NO: 8949 - protein, 16 aa, Homo Sapiens
QGLGRLVIASSDLIWP

SEQ ID NO: 8950 - protein, 16 aa, Homo Sapiens
GLGRLVIASSDLIWPS

SEQ ID NO: 8951 - protein, 16 aa, Homo Sapiens
LGRLVIASSDLIWPSG

SEQ ID NO: 8952 - protein, 16 aa, Homo Sapiens
GRLVIASSDLIWPSGI

SEQ ID NO: 8953 - protein, 16 aa, Homo Sapiens
RLVIASSDLIWPSGIT

SEQ ID NO: 8954 - protein, 16 aa, Homo Sapiens
LVIASSDLIWPSGITI

SEQ ID NO: 8955 - protein, 16 aa, Homo Sapiens
VIASSDLIWPSGITID

SEQ ID NO: 8956 - protein, 16 aa, Homo Sapiens
IASSDLIWPSGITIDF

SEQ ID NO: 8957 - protein, 16 aa, Homo Sapiens
ASSDLIWPSGITIDFL

SEQ ID NO: 8958 - protein, 16 aa, Homo Sapiens
SSDLIWPSGITIDFLT

SEQ ID NO: 8959 - protein, 16 aa, Homo Sapiens
SDLIWPSGITIDFLTD

SEQ ID NO: 8960 - protein, 16 aa, Homo Sapiens
DLIWPSGITIDFLTDK

SEQ ID NO: 8961 - protein, 16 aa, Homo Sapiens
LIWPSGITIDFLTDKL

SEQ ID NO: 8962 - protein, 16 aa, Homo Sapiens
IWPSGITIDFLTDKLY

SEQ ID NO: 8963 - protein, 16 aa, Homo Sapiens
WPSGITIDFLTDKLYW

SEQ ID NO: 8964 - protein, 16 aa, Homo Sapiens
PSGITIDFLTDKLYWC

SEQ ID NO: 8965 - protein, 16 aa, Homo Sapiens
SGITIDFLTDKLYWCD

SEQ ID NO: 8966 - protein, 16 aa, Homo Sapiens
GITIDFLTDKLYWCDA

SEQ ID NO: 8967 - protein, 16 aa, Homo Sapiens
ITIDFLTDKLYWCDAK

SEQ ID NO: 8968 - protein, 16 aa, Homo Sapiens
TIDFLTDKLYWCDAKQ

SEQ ID NO: 8969 - protein, 16 aa, Homo Sapiens
IDFLTDKLYWCDAKQS

SEQ ID NO: 8970 - protein, 16 aa, Homo Sapiens
DFLTDKLYWCDAKQSV

SEQ ID NO: 8971 - protein, 16 aa, Homo Sapiens
FLTDKLYWCDAKQSVI

SEQ ID NO: 8972 - protein, 16 aa, Homo Sapiens
LTDKLYWCDAKQSVIE

SEQ ID NO: 8973 - protein, 16 aa, Homo Sapiens
TDKLYWCDAKQSVIEM

SEQ ID NO: 8974 - protein, 16 aa, Homo Sapiens
DKLYWCDAKQSVIEMA

SEQ ID NO: 8975 - protein, 16 aa, Homo Sapiens
KLYWCDAKQSVIEMAN

SEQ ID NO: 8976 - protein, 16 aa, Homo Sapiens
LYWCDAKQSVIEMANL

SEQ ID NO: 8977 - protein, 16 aa, Homo Sapiens
YWCDAKQSVIEMANLD

SEQ ID NO: 8978 - protein, 16 aa, Homo Sapiens
WCDAKQSVIEMANLDG

SEQ ID NO: 8979 - protein, 16 aa, Homo Sapiens
CDAKQSVIEMANLDGS

SEQ ID NO: 8980 - protein, 16 aa, Homo Sapiens
DAKQSVIEMANLDGSK

SEQ ID NO: 8981 - protein, 16 aa, Homo Sapiens
AKQSVIEMANLDGSKR

SEQ ID NO: 8982 - protein, 16 aa, Homo Sapiens
KQSVIEMANLDGSKRR

SEQ ID NO: 8983 - protein, 16 aa, Homo Sapiens
QSVIEMANLDGSKRRR

SEQ ID NO: 8984 - protein, 16 aa, Homo Sapiens
SVIEMANLDGSKRRRL

SEQ ID NO: 8985 - protein, 16 aa, Homo Sapiens
VIEMANLDGSKRRRLT

SEQ ID NO: 8986 - protein, 16 aa, Homo Sapiens
IEMANLDGSKRRRLTQ

SEQ ID NO: 8987 - protein, 16 aa, Homo Sapiens
EMANLDGSKRRRLTQN

SEQ ID NO: 8988 - protein, 16 aa, Homo Sapiens
MANLDGSKRRRLTQND

SEQ ID NO: 8989 - protein, 16 aa, Homo Sapiens
ANLDGSKRRRLTQNDV

SEQ ID NO: 8990 - protein, 16 aa, Homo Sapiens
NLDGSKRRRLTQNDVG

SEQ ID NO: 8991 - protein, 16 aa, Homo Sapiens
LDGSKRRRLTQNDVGH

SEQ ID NO: 8992 - protein, 16 aa, Homo Sapiens
DGSKRRRLTQNDVGHP

SEQ ID NO: 8993 - protein, 16 aa, Homo Sapiens
GSKRRRLTQNDVGHPF

SEQ ID NO: 8994 - protein, 16 aa, Homo Sapiens
SKRRRLTQNDVGHPFA

SEQ ID NO: 8995 - protein, 16 aa, Homo Sapiens
KRRRLTQNDVGHPFAV

SEQ ID NO: 8996 - protein, 16 aa, Homo Sapiens
RRRLTQNDVGHPFAVA

SEQ ID NO: 8997 - protein, 16 aa, Homo Sapiens
RRLTQNDVGHPFAVAV

SEQ ID NO: 8998 - protein, 16 aa, Homo Sapiens
RLTQNDVGHPFAVAVF

SEQ ID NO: 8999 - protein, 16 aa, Homo Sapiens
LTQNDVGHPFAVAVFE

SEQ ID NO: 9000 - protein, 16 aa, Homo Sapiens
TQNDVGHPFAVAVFED

SEQ ID NO: 9001 - protein, 16 aa, Homo Sapiens
QNDVGHPFAVAVFEDY

SEQ ID NO: 9002 - protein, 16 aa, Homo Sapiens
NDVGHPFAVAVFEDYV

SEQ ID NO: 9003 - protein, 16 aa, Homo Sapiens
DVGHPFAVAVFEDYVW

SEQ ID NO: 9004 - protein, 16 aa, Homo Sapiens
VGHPFAVAVFEDYVWF

SEQ ID NO: 9005 - protein, 16 aa, Homo Sapiens
GHPFAVAVFEDYVWFS

SEQ ID NO: 9006 - protein, 16 aa, Homo Sapiens
HPFAVAVFEDYVWFSD

SEQ ID NO: 9007 - protein, 16 aa, Homo Sapiens
PFAVAVFEDYVWFSDW

SEQ ID NO: 9008 - protein, 16 aa, Homo Sapiens
FAVAVFEDYVWFSDWA

SEQ ID NO: 9009 - protein, 16 aa, Homo Sapiens
AVAVFEDYVWFSDWAM

SEQ ID NO: 9010 - protein, 16 aa, Homo Sapiens
VAVFEDYVWFSDWAMP

SEQ ID NO: 9011 - protein, 16 aa, Homo Sapiens
AVFEDYVWFSDWAMPS

SEQ ID NO: 9012 - protein, 16 aa, Homo Sapiens
VFEDYVWFSDWAMPSV

SEQ ID NO: 9013 - protein, 16 aa, Homo Sapiens
FEDYVWFSDWAMPSVI

SEQ ID NO: 9014 - protein, 16 aa, Homo Sapiens
EDYVWFSDWAMPSVIR

SEQ ID NO: 9015 - protein, 16 aa, Homo Sapiens
DYVWFSDWAMPSVIRV

SEQ ID NO: 9016 - protein, 16 aa, Homo Sapiens
YVWFSDWAMPSVIRVN

SEQ ID NO: 9017 - protein, 16 aa, Homo Sapiens
VWFSDWAMPSVIRVNK

SEQ ID NO: 9018 - protein, 16 aa, Homo Sapiens
WFSDWAMPSVIRVNKR

SEQ ID NO: 9019 - protein, 16 aa, Homo Sapiens
FSDWAMPSVIRVNKRT

SEQ ID NO: 9020 - protein, 16 aa, Homo Sapiens
SDWAMPSVIRVNKRTG

SEQ ID NO: 9021 - protein, 16 aa, Homo Sapiens
DWAMPSVIRVNKRTGK

SEQ ID NO: 9022 - protein, 16 aa, Homo Sapiens
WAMPSVIRVNKRTGKD

SEQ ID NO: 9023 - protein, 16 aa, Homo Sapiens
AMPSVIRVNKRTGKDR

SEQ ID NO: 9024 - protein, 16 aa, Homo Sapiens
MPSVIRVNKRTGKDRV

SEQ ID NO: 9025 - protein, 16 aa, Homo Sapiens
PSVIRVNKRTGKDRVR

SEQ ID NO: 9026 - protein, 16 aa, Homo Sapiens
SVIRVNKRTGKDRVRL

SEQ ID NO: 9027 - protein, 16 aa, Homo Sapiens
VIRVNKRTGKDRVRLQ

SEQ ID NO: 9028 - protein, 16 aa, Homo Sapiens
IRVNKRTGKDRVRLQG

SEQ ID NO: 9029 - protein, 16 aa, Homo Sapiens
RVNKRTGKDRVRLQGS

SEQ ID NO: 9030 - protein, 16 aa, Homo Sapiens
VNKRTGKDRVRLQGSM

SEQ ID NO: 9031 - protein, 16 aa, Homo Sapiens
NKRTGKDRVRLQGSML

SEQ ID NO: 9032 - protein, 16 aa, Homo Sapiens
KRTGKDRVRLQGSMLK

SEQ ID NO: 9033 - protein, 16 aa, Homo Sapiens
RTGKDRVRLQGSMLKP

SEQ ID NO: 9034 - protein, 16 aa, Homo Sapiens
TGKDRVRLQGSMLKPS

SEQ ID NO: 9035 - protein, 16 aa, Homo Sapiens
GKDRVRLQGSMLKPSS

SEQ ID NO: 9036 - protein, 16 aa, Homo Sapiens
KDRVRLQGSMLKPSSL

SEQ ID NO: 9037 - protein, 16 aa, Homo Sapiens
DRVRLQGSMLKPSSLV

SEQ ID NO: 9038 - protein, 16 aa, Homo Sapiens
RVRLQGSMLKPSSLVV

SEQ ID NO: 9039 - protein, 16 aa, Homo Sapiens
VRLQGSMLKPSSLVVV

SEQ ID NO: 9040 - protein, 16 aa, Homo Sapiens
RLQGSMLKPSSLVVVH

SEQ ID NO: 9041 - protein, 16 aa, Homo Sapiens
LQGSMLKPSSLVVVHP

SEQ ID NO: 9042 - protein, 16 aa, Homo Sapiens
QGSMLKPSSLVVVHPL

SEQ ID NO: 9043 - protein, 16 aa, Homo Sapiens
GSMLKPSSLVVVHPLA

SEQ ID NO: 9044 - protein, 16 aa, Homo Sapiens
SMLKPSSLVVVHPLAK

SEQ ID NO: 9045 - protein, 16 aa, Homo Sapiens
MLKPSSLVVVHPLAKP

SEQ ID NO: 9046 - protein, 16 aa, Homo Sapiens
LKPSSLVVVHPLAKPG

SEQ ID NO: 9047 - protein, 16 aa, Homo Sapiens
KPSSLVVVHPLAKPGA

SEQ ID NO: 9048 - protein, 16 aa, Homo Sapiens
PSSLVVVHPLAKPGAD

SEQ ID NO: 9049 - protein, 16 aa, Homo Sapiens
SSLVVVHPLAKPGADP

SEQ ID NO: 9050 - protein, 16 aa, Homo Sapiens
SLVVVHPLAKPGADPC

SEQ ID NO: 9051 - protein, 16 aa, Homo Sapiens
LVVVHPLAKPGADPCL

SEQ ID NO: 9052 - protein, 16 aa, Homo Sapiens
VVVHPLAKPGADPCLY

SEQ ID NO: 9053 - protein, 16 aa, Homo Sapiens
VVHPLAKPGADPCLYQ

SEQ ID NO: 9054 - protein, 16 aa, Homo Sapiens
VHPLAKPGADPCLYQN

SEQ ID NO: 9055 - protein, 16 aa, Homo Sapiens
HPLAKPGADPCLYQNG

SEQ ID NO: 9056 - protein, 16 aa, Homo Sapiens
PLAKPGADPCLYQNGG

SEQ ID NO: 9057 - protein, 16 aa, Homo Sapiens
LAKPGADPCLYQNGGC

SEQ ID NO: 9058 - protein, 16 aa, Homo Sapiens
AKPGADPCLYQNGGCE

SEQ ID NO: 9059 - protein, 16 aa, Homo Sapiens
KPGADPCLYQNGGCEH

SEQ ID NO: 9060 - protein, 16 aa, Homo Sapiens
PGADPCLYQNGGCEHI

SEQ ID NO: 9061 - protein, 16 aa, Homo Sapiens
GADPCLYQNGGCEHIC

SEQ ID NO: 9062 - protein, 16 aa, Homo Sapiens
ADPCLYQNGGCEHICK

SEQ ID NO: 9063 - protein, 16 aa, Homo Sapiens
DPCLYQNGGCEHICKK

SEQ ID NO: 9064 - protein, 16 aa, Homo Sapiens
PCLYQNGGCEHICKKR

SEQ ID NO: 9065 - protein, 16 aa, Homo Sapiens
CLYQNGGCEHICKKRL

SEQ ID NO: 9066 - protein, 16 aa, Homo Sapiens
LYQNGGCEHICKKRLG

SEQ ID NO: 9067 - protein, 16 aa, Homo Sapiens
YQNGGCEHICKKRLGT

SEQ ID NO: 9068 - protein, 16 aa, Homo Sapiens
QNGGCEHICKKRLGTA

SEQ ID NO: 9069 - protein, 16 aa, Homo Sapiens
NGGCEHICKKRLGTAW

SEQ ID NO: 9070 - protein, 16 aa, Homo Sapiens
GGCEHICKKRLGTAWC

SEQ ID NO: 9071 - protein, 16 aa, Homo Sapiens
GCEHICKKRLGTAWCS

SEQ ID NO: 9072 - protein, 16 aa, Homo Sapiens
CEHICKKRLGTAWCSC

SEQ ID NO: 9073 - protein, 16 aa, Homo Sapiens
EHICKKRLGTAWCSCR

SEQ ID NO: 9074 - protein, 16 aa, Homo Sapiens
HICKKRLGTAWCSCRE

SEQ ID NO: 9075 - protein, 16 aa, Homo Sapiens
ICKKRLGTAWCSCREG

SEQ ID NO: 9076 - protein, 16 aa, Homo Sapiens
CKKRLGTAWCSCREGF

SEQ ID NO: 9077 - protein, 16 aa, Homo Sapiens
KKRLGTAWCSCREGFM

SEQ ID NO: 9078 - protein, 16 aa, Homo Sapiens
KRLGTAWCSCREGFMK

SEQ ID NO: 9079 - protein, 16 aa, Homo Sapiens
RLGTAWCSCREGFMKA

SEQ ID NO: 9080 - protein, 16 aa, Homo Sapiens
LGTAWCSCREGFMKAS

SEQ ID NO: 9081 - protein, 16 aa, Homo Sapiens
GTAWCSCREGFMKASD

SEQ ID NO: 9082 - protein, 16 aa, Homo Sapiens
TAWCSCREGFMKASDG

SEQ ID NO: 9083 - protein, 16 aa, Homo Sapiens
AWCSCREGFMKASDGK

SEQ ID NO: 9084 - protein, 16 aa, Homo Sapiens
WCSCREGFMKASDGKT

SEQ ID NO: 9085 - protein, 16 aa, Homo Sapiens
CSCREGFMKASDGKTC

SEQ ID NO: 9086 - protein, 16 aa, Homo Sapiens
SCREGFMKASDGKTCL

SEQ ID NO: 9087 - protein, 16 aa, Homo Sapiens
CREGFMKASDGKTCLA

SEQ ID NO: 9088 - protein, 16 aa, Homo Sapiens
REGFMKASDGKTCLAL

SEQ ID NO: 9089 - protein, 16 aa, Homo Sapiens
EGFMKASDGKTCLALD

SEQ ID NO: 9090 - protein, 16 aa, Homo Sapiens
GFMKASDGKTCLALDG

SEQ ID NO: 9091 - protein, 16 aa, Homo Sapiens
FMKASDGKTCLALDGH

SEQ ID NO: 9092 - protein, 16 aa, Homo Sapiens
MKASDGKTCLALDGHQ

SEQ ID NO: 9093 - protein, 16 aa, Homo Sapiens
KASDGKTCLALDGHQL

SEQ ID NO: 9094 - protein, 16 aa, Homo Sapiens
ASDGKTCLALDGHQLL

SEQ ID NO: 9095 - protein, 16 aa, Homo Sapiens
SDGKTCLALDGHQLLA

SEQ ID NO: 9096 - protein, 16 aa, Homo Sapiens
DGKTCLALDGHQLLAG

SEQ ID NO: 9097 - protein, 16 aa, Homo Sapiens
GKTCLALDGHQLLAGG

SEQ ID NO: 9098 - protein, 16 aa, Homo Sapiens
KTCLALDGHQLLAGGE

SEQ ID NO: 9099 - protein, 16 aa, Homo Sapiens
TCLALDGHQLLAGGEV

SEQ ID NO: 9100 - protein, 16 aa, Homo Sapiens
CLALDGHQLLAGGEVD

SEQ ID NO: 9101 - protein, 16 aa, Homo Sapiens
LALDGHQLLAGGEVDL

SEQ ID NO: 9102 - protein, 16 aa, Homo Sapiens
ALDGHQLLAGGEVDLK

SEQ ID NO: 9103 - protein, 16 aa, Homo Sapiens
LDGHQLLAGGEVDLKN

SEQ ID NO: 9104 - protein, 16 aa, Homo Sapiens
DGHQLLAGGEVDLKNQ

SEQ ID NO: 9105 - protein, 16 aa, Homo Sapiens
GHQLLAGGEVDLKNQV

SEQ ID NO: 9106 - protein, 16 aa, Homo Sapiens
HQLLAGGEVDLKNQVT

SEQ ID NO: 9107 - protein, 16 aa, Homo Sapiens
QLLAGGEVDLKNQVTP

SEQ ID NO: 9108 - protein, 16 aa, Homo Sapiens
LLAGGEVDLKNQVTPL

SEQ ID NO: 9109 - protein, 16 aa, Homo Sapiens
LAGGEVDLKNQVTPLD

SEQ ID NO: 9110 - protein, 16 aa, Homo Sapiens
AGGEVDLKNQVTPLDI

SEQ ID NO: 9111 - protein, 16 aa, Homo Sapiens
GGEVDLKNQVTPLDIL

SEQ ID NO: 9112 - protein, 16 aa, Homo Sapiens
GEVDLKNQVTPLDILS

SEQ ID NO: 9113 - protein, 16 aa, Homo Sapiens
EVDLKNQVTPLDILSK

SEQ ID NO: 9114 - protein, 16 aa, Homo Sapiens
VDLKNQVTPLDILSKT

SEQ ID NO: 9115 - protein, 16 aa, Homo Sapiens
DLKNQVTPLDILSKTR

SEQ ID NO: 9116 - protein, 16 aa, Homo Sapiens
LKNQVTPLDILSKTRV

SEQ ID NO: 9117 - protein, 16 aa, Homo Sapiens
KNQVTPLDILSKTRVS

SEQ ID NO: 9118 - protein, 16 aa, Homo Sapiens
NQVTPLDILSKTRVSE

SEQ ID NO: 9119 - protein, 16 aa, Homo Sapiens
QVTPLDILSKTRVSED

SEQ ID NO: 9120 - protein, 16 aa, Homo Sapiens
VTPLDILSKTRVSEDN

SEQ ID NO: 9121 - protein, 16 aa, Homo Sapiens
TPLDILSKTRVSEDNI

SEQ ID NO: 9122 - protein, 16 aa, Homo Sapiens
PLDILSKTRVSEDNIT

SEQ ID NO: 9123 - protein, 16 aa, Homo Sapiens
LDILSKTRVSEDNITE

SEQ ID NO: 9124 - protein, 16 aa, Homo Sapiens
DILSKTRVSEDNITES

SEQ ID NO: 9125 - protein, 16 aa, Homo Sapiens
ILSKTRVSEDNITESQ

SEQ ID NO: 9126 - protein, 16 aa, Homo Sapiens
LSKTRVSEDNITESQH

SEQ ID NO: 9127 - protein, 16 aa, Homo Sapiens
SKTRVSEDNITESQHM

SEQ ID NO: 9128 - protein, 16 aa, Homo Sapiens
KTRVSEDNITESQHML

SEQ ID NO: 9129 - protein, 16 aa, Homo Sapiens
TRVSEDNITESQHMLV

SEQ ID NO: 9130 - protein, 16 aa, Homo Sapiens
RVSEDNITESQHMLVA

SEQ ID NO: 9131 - protein, 16 aa, Homo Sapiens
VSEDNITESQHMLVAE

SEQ ID NO: 9132 - protein, 16 aa, Homo Sapiens
SEDNITESQHMLVAEI

SEQ ID NO: 9133 - protein, 16 aa, Homo Sapiens
EDNITESQHMLVAEIM

SEQ ID NO: 9134 - protein, 16 aa, Homo Sapiens
DNITESQHMLVAEIMV

SEQ ID NO: 9135 - protein, 16 aa, Homo Sapiens
NITESQHMLVAEIMVS

SEQ ID NO: 9136 - protein, 16 aa, Homo Sapiens
ITESQHMLVAEIMVSD

SEQ ID NO: 9137 - protein, 16 aa, Homo Sapiens
TESQHMLVAEIMVSDQ

SEQ ID NO: 9138 - protein, 16 aa, Homo Sapiens
ESQHMLVAEIMVSDQD

SEQ ID NO: 9139 - protein, 16 aa, Homo Sapiens
SQHMLVAEIMVSDQDD

SEQ ID NO: 9140 - protein, 16 aa, Homo Sapiens
QHMLVAEIMVSDQDDC

SEQ ID NO: 9141 - protein, 16 aa, Homo Sapiens
HMLVAEIMVSDQDDCA

SEQ ID NO: 9142 - protein, 16 aa, Homo Sapiens
MLVAEIMVSDQDDCAP

SEQ ID NO: 9143 - protein, 16 aa, Homo Sapiens
LVAEIMVSDQDDCAPV

SEQ ID NO: 9144 - protein, 16 aa, Homo Sapiens
VAEIMVSDQDDCAPVG

SEQ ID NO: 9145 - protein, 16 aa, Homo Sapiens
AEIMVSDQDDCAPVGC

SEQ ID NO: 9146 - protein, 16 aa, Homo Sapiens
EIMVSDQDDCAPVGCS

SEQ ID NO: 9147 - protein, 16 aa, Homo Sapiens
IMVSDQDDCAPVGCSM

SEQ ID NO: 9148 - protein, 16 aa, Homo Sapiens
MVSDQDDCAPVGCSMY

SEQ ID NO: 9149 - protein, 16 aa, Homo Sapiens
VSDQDDCAPVGCSMYA

SEQ ID NO: 9150 - protein, 16 aa, Homo Sapiens
SDQDDCAPVGCSMYAR

SEQ ID NO: 9151 - protein, 16 aa, Homo Sapiens
DQDDCAPVGCSMYARC

SEQ ID NO: 9152 - protein, 16 aa, Homo Sapiens
QDDCAPVGCSMYARCI

SEQ ID NO: 9153 - protein, 16 aa, Homo Sapiens
DDCAPVGCSMYARCIS

SEQ ID NO: 9154 - protein, 16 aa, Homo Sapiens
DCAPVGCSMYARCISE

SEQ ID NO: 9155 - protein, 16 aa, Homo Sapiens
CAPVGCSMYARCISEG

SEQ ID NO: 9156 - protein, 16 aa, Homo Sapiens
APVGCSMYARCISEGE

SEQ ID NO: 9157 - protein, 16 aa, Homo Sapiens
PVGCSMYARCISEGED

SEQ ID NO: 9158 - protein, 16 aa, Homo Sapiens
VGCSMYARCISEGEDA

SEQ ID NO: 9159 - protein, 16 aa, Homo Sapiens
GCSMYARCISEGEDAT

SEQ ID NO: 9160 - protein, 16 aa, Homo Sapiens
CSMYARCISEGEDATC

SEQ ID NO: 9161 - protein, 16 aa, Homo Sapiens
SMYARCISEGEDATCQ

SEQ ID NO: 9162 - protein, 16 aa, Homo Sapiens
MYARCISEGEDATCQC

SEQ ID NO: 9163 - protein, 16 aa, Homo Sapiens
YARCISEGEDATCQCL

SEQ ID NO: 9164 - protein, 16 aa, Homo Sapiens
ARCISEGEDATCQCLK

SEQ ID NO: 9165 - protein, 16 aa, Homo Sapiens
RCISEGEDATCQCLKG

SEQ ID NO: 9166 - protein, 16 aa, Homo Sapiens
CISEGEDATCQCLKGF

SEQ ID NO: 9167 - protein, 16 aa, Homo Sapiens
ISEGEDATCQCLKGFA

SEQ ID NO: 9168 - protein, 16 aa, Homo Sapiens
SEGEDATCQCLKGFAG

SEQ ID NO: 9169 - protein, 16 aa, Homo Sapiens
EGEDATCQCLKGFAGD

SEQ ID NO: 9170 - protein, 16 aa, Homo Sapiens
GEDATCQCLKGFAGDG

SEQ ID NO: 9171 - protein, 16 aa, Homo Sapiens
EDATCQCLKGFAGDGK

SEQ ID NO: 9172 - protein, 16 aa, Homo Sapiens
DATCQCLKGFAGDGKL

SEQ ID NO: 9173 - protein, 16 aa, Homo Sapiens
ATCQCLKGFAGDGKLC

SEQ ID NO: 9174 - protein, 16 aa, Homo Sapiens
TCQCLKGFAGDGKLCS

SEQ ID NO: 9175 - protein, 16 aa, Homo Sapiens
CQCLKGFAGDGKLCSD

SEQ ID NO: 9176 - protein, 16 aa, Homo Sapiens
QCLKGFAGDGKLCSDI

SEQ ID NO: 9177 - protein, 16 aa, Homo Sapiens
CLKGFAGDGKLCSDID

SEQ ID NO: 9178 - protein, 16 aa, Homo Sapiens
LKGFAGDGKLCSDIDE

SEQ ID NO: 9179 - protein, 16 aa, Homo Sapiens
KGFAGDGKLCSDIDEC

SEQ ID NO: 9180 - protein, 16 aa, Homo Sapiens
GFAGDGKLCSDIDECE

SEQ ID NO: 9181 - protein, 16 aa, Homo Sapiens
FAGDGKLCSDIDECEM

SEQ ID NO: 9182 - protein, 16 aa, Homo Sapiens
AGDGKLCSDIDECEMG

SEQ ID NO: 9183 - protein, 16 aa, Homo Sapiens
GDGKLCSDIDECEMGV

SEQ ID NO: 9184 - protein, 16 aa, Homo Sapiens
DGKLCSDIDECEMGVP

SEQ ID NO: 9185 - protein, 16 aa, Homo Sapiens
GKLCSDIDECEMGVPV

SEQ ID NO: 9186 - protein, 16 aa, Homo Sapiens
KLCSDIDECEMGVPVC

SEQ ID NO: 9187 - protein, 16 aa, Homo Sapiens
LCSDIDECEMGVPVCP

SEQ ID NO: 9188 - protein, 16 aa, Homo Sapiens
CSDIDECEMGVPVCPP

SEQ ID NO: 9189 - protein, 16 aa, Homo Sapiens
SDIDECEMGVPVCPPA

SEQ ID NO: 9190 - protein, 16 aa, Homo Sapiens
DIDECEMGVPVCPPAS

SEQ ID NO: 9191 - protein, 16 aa, Homo Sapiens
IDECEMGVPVCPPASS

SEQ ID NO: 9192 - protein, 16 aa, Homo Sapiens
DECEMGVPVCPPASSK

SEQ ID NO: 9193 - protein, 16 aa, Homo Sapiens
ECEMGVPVCPPASSKC

SEQ ID NO: 9194 - protein, 16 aa, Homo Sapiens
CEMGVPVCPPASSKCI

SEQ ID NO: 9195 - protein, 16 aa, Homo Sapiens
EMGVPVCPPASSKCIN

SEQ ID NO: 9196 - protein, 16 aa, Homo Sapiens
MGVPVCPPASSKCINT

SEQ ID NO: 9197 - protein, 16 aa, Homo Sapiens
GVPVCPPASSKCINTE

SEQ ID NO: 9198 - protein, 16 aa, Homo Sapiens
VPVCPPASSKCINTEG

SEQ ID NO: 9199 - protein, 16 aa, Homo Sapiens
PVCPPASSKCINTEGG

SEQ ID NO: 9200 - protein, 16 aa, Homo Sapiens
VCPPASSKCINTEGGY

SEQ ID NO: 9201 - protein, 16 aa, Homo Sapiens
CPPASSKCINTEGGYV

SEQ ID NO: 9202 - protein, 16 aa, Homo Sapiens
PPASSKCINTEGGYVC

SEQ ID NO: 9203 - protein, 16 aa, Homo Sapiens
PASSKCINTEGGYVCR

SEQ ID NO: 9204 - protein, 16 aa, Homo Sapiens
ASSKCINTEGGYVCRC

SEQ ID NO: 9205 - protein, 16 aa, Homo Sapiens
SSKCINTEGGYVCRCS

SEQ ID NO: 9206 - protein, 16 aa, Homo Sapiens
SKCINTEGGYVCRCSE

SEQ ID NO: 9207 - protein, 16 aa, Homo Sapiens
KCINTEGGYVCRCSEG

SEQ ID NO: 9208 - protein, 16 aa, Homo Sapiens
CINTEGGYVCRCSEGY

SEQ ID NO: 9209 - protein, 16 aa, Homo Sapiens
INTEGGYVCRCSEGYQ

SEQ ID NO: 9210 - protein, 16 aa, Homo Sapiens
NTEGGYVCRCSEGYQG

SEQ ID NO: 9211 - protein, 16 aa, Homo Sapiens
TEGGYVCRCSEGYQGD

SEQ ID NO: 9212 - protein, 16 aa, Homo Sapiens
EGGYVCRCSEGYQGDG

SEQ ID NO: 9213 - protein, 16 aa, Homo Sapiens
GGYVCRCSEGYQGDGI

SEQ ID NO: 9214 - protein, 16 aa, Homo Sapiens
GYVCRCSEGYQGDGIH

SEQ ID NO: 9215 - protein, 16 aa, Homo Sapiens
YVCRCSEGYQGDGIHC

SEQ ID NO: 9216 - protein, 16 aa, Homo Sapiens
VCRCSEGYQGDGIHCL

SEQ ID NO: 9217 - protein, 16 aa, Homo Sapiens
CRCSEGYQGDGIHCLD

SEQ ID NO: 9218 - protein, 16 aa, Homo Sapiens
RCSEGYQGDGIHCLDI

SEQ ID NO: 9219 - protein, 16 aa, Homo Sapiens
CSEGYQGDGIHCLDID

SEQ ID NO: 9220 - protein, 16 aa, Homo Sapiens
SEGYQGDGIHCLDIDE

SEQ ID NO: 9221 - protein, 16 aa, Homo Sapiens
EGYQGDGIHCLDIDEC

SEQ ID NO: 9222 - protein, 16 aa, Homo Sapiens
GYQGDGIHCLDIDECQ

SEQ ID NO: 9223 - protein, 16 aa, Homo Sapiens
YQGDGIHCLDIDECQL

SEQ ID NO: 9224 - protein, 16 aa, Homo Sapiens
QGDGIHCLDIDECQLG

SEQ ID NO: 9225 - protein, 16 aa, Homo Sapiens
GDGIHCLDIDECQLGV

SEQ ID NO: 9226 - protein, 16 aa, Homo Sapiens
DGIHCLDIDECQLGVH

SEQ ID NO: 9227 - protein, 16 aa, Homo Sapiens
GIHCLDIDECQLGVHS

SEQ ID NO: 9228 - protein, 16 aa, Homo Sapiens
IHCLDIDECQLGVHSC

SEQ ID NO: 9229 - protein, 16 aa, Homo Sapiens
HCLDIDECQLGVHSCG

SEQ ID NO: 9230 - protein, 16 aa, Homo Sapiens
CLDIDECQLGVHSCGE

SEQ ID NO: 9231 - protein, 16 aa, Homo Sapiens
LDIDECQLGVHSCGEN

SEQ ID NO: 9232 - protein, 16 aa, Homo Sapiens
DIDECQLGVHSCGENA

SEQ ID NO: 9233 - protein, 16 aa, Homo Sapiens
IDECQLGVHSCGENAS

SEQ ID NO: 9234 - protein, 16 aa, Homo Sapiens
DECQLGVHSCGENASC

SEQ ID NO: 9235 - protein, 16 aa, Homo Sapiens
ECQLGVHSCGENASCT

SEQ ID NO: 9236 - protein, 16 aa, Homo Sapiens
CQLGVHSCGENASCTN

SEQ ID NO: 9237 - protein, 16 aa, Homo Sapiens
QLGVHSCGENASCTNT

SEQ ID NO: 9238 - protein, 16 aa, Homo Sapiens
LGVHSCGENASCTNTE

SEQ ID NO: 9239 - protein, 16 aa, Homo Sapiens
GVHSCGENASCTNTEG

SEQ ID NO: 9240 - protein, 16 aa, Homo Sapiens
VHSCGENASCTNTEGG

SEQ ID NO: 9241 - protein, 16 aa, Homo Sapiens
HSCGENASCTNTEGGY

SEQ ID NO: 9242 - protein, 16 aa, Homo Sapiens
SCGENASCTNTEGGYT

SEQ ID NO: 9243 - protein, 16 aa, Homo Sapiens
CGENASCTNTEGGYTC

SEQ ID NO: 9244 - protein, 16 aa, Homo Sapiens
GENASCTNTEGGYTCM

SEQ ID NO: 9245 - protein, 16 aa, Homo Sapiens
ENASCTNTEGGYTCMC

SEQ ID NO: 9246 - protein, 16 aa, Homo Sapiens
NASCTNTEGGYTCMCA

SEQ ID NO: 9247 - protein, 16 aa, Homo Sapiens
ASCTNTEGGYTCMCAG

SEQ ID NO: 9248 - protein, 16 aa, Homo Sapiens
SCTNTEGGYTCMCAGR

SEQ ID NO: 9249 - protein, 16 aa, Homo Sapiens
CTNTEGGYTCMCAGRL

SEQ ID NO: 9250 - protein, 16 aa, Homo Sapiens
TNTEGGYTCMCAGRLS

SEQ ID NO: 9251 - protein, 16 aa, Homo Sapiens
NTEGGYTCMCAGRLSE

SEQ ID NO: 9252 - protein, 16 aa, Homo Sapiens
TEGGYTCMCAGRLSEP

SEQ ID NO: 9253 - protein, 16 aa, Homo Sapiens
EGGYTCMCAGRLSEPG

SEQ ID NO: 9254 - protein, 16 aa, Homo Sapiens
GGYTCMCAGRLSEPGL

SEQ ID NO: 9255 - protein, 16 aa, Homo Sapiens
GYTCMCAGRLSEPGLI

SEQ ID NO: 9256 - protein, 16 aa, Homo Sapiens
YTCMCAGRLSEPGLIC

SEQ ID NO: 9257 - protein, 16 aa, Homo Sapiens
TCMCAGRLSEPGLICP

SEQ ID NO: 9258 - protein, 16 aa, Homo Sapiens
CMCAGRLSEPGLICPD

SEQ ID NO: 9259 - protein, 16 aa, Homo Sapiens
MCAGRLSEPGLICPDS

SEQ ID NO: 9260 - protein, 16 aa, Homo Sapiens
CAGRLSEPGLICPDST

SEQ ID NO: 9261 - protein, 16 aa, Homo Sapiens
AGRLSEPGLICPDSTP

SEQ ID NO: 9262 - protein, 16 aa, Homo Sapiens
GRLSEPGLICPDSTPP

SEQ ID NO: 9263 - protein, 16 aa, Homo Sapiens
RLSEPGLICPDSTPPP

SEQ ID NO: 9264 - protein, 16 aa, Homo Sapiens
LSEPGLICPDSTPPPH

SEQ ID NO: 9265 - protein, 16 aa, Homo Sapiens
SEPGLICPDSTPPPHL

SEQ ID NO: 9266 - protein, 16 aa, Homo Sapiens
EPGLICPDSTPPPHLR

SEQ ID NO: 9267 - protein, 16 aa, Homo Sapiens
PGLICPDSTPPPHLRE

SEQ ID NO: 9268 - protein, 16 aa, Homo Sapiens
GLICPDSTPPPHLRED

SEQ ID NO: 9269 - protein, 16 aa, Homo Sapiens
LICPDSTPPPHLREDD

SEQ ID NO: 9270 - protein, 16 aa, Homo Sapiens
ICPDSTPPPHLREDDH

SEQ ID NO: 9271 - protein, 16 aa, Homo Sapiens
CPDSTPPPHLREDDHH

SEQ ID NO: 9272 - protein, 16 aa, Homo Sapiens
PDSTPPPHLREDDHHY

SEQ ID NO: 9273 - protein, 16 aa, Homo Sapiens
DSTPPPHLREDDHHYS

SEQ ID NO: 9274 - protein, 16 aa, Homo Sapiens
STPPPHLREDDHHYSV

SEQ ID NO: 9275 - protein, 16 aa, Homo Sapiens
TPPPHLREDDHHYSVR

SEQ ID NO: 9276 - protein, 16 aa, Homo Sapiens
PPPHLREDDHHYSVRN

SEQ ID NO: 9277 - protein, 16 aa, Homo Sapiens
PPHLREDDHHYSVRNS

SEQ ID NO: 9278 - protein, 16 aa, Homo Sapiens
PHLREDDHHYSVRNSD

SEQ ID NO: 9279 - protein, 16 aa, Homo Sapiens
HLREDDHHYSVRNSDS

SEQ ID NO: 9280 - protein, 16 aa, Homo Sapiens
LREDDHHYSVRNSDSE

SEQ ID NO: 9281 - protein, 16 aa, Homo Sapiens
REDDHHYSVRNSDSEC

SEQ ID NO: 9282 - protein, 16 aa, Homo Sapiens
EDDHHYSVRNSDSECP

SEQ ID NO: 9283 - protein, 16 aa, Homo Sapiens
DDHHYSVRNSDSECPL

SEQ ID NO: 9284 - protein, 16 aa, Homo Sapiens
DHHYSVRNSDSECPLS

SEQ ID NO: 9285 - protein, 16 aa, Homo Sapiens
HHYSVRNSDSECPLSH

SEQ ID NO: 9286 - protein, 16 aa, Homo Sapiens
HYSVRNSDSECPLSHD

SEQ ID NO: 9287 - protein, 16 aa, Homo Sapiens
YSVRNSDSECPLSHDG

SEQ ID NO: 9288 - protein, 16 aa, Homo Sapiens
SVRNSDSECPLSHDGY

SEQ ID NO: 9289 - protein, 16 aa, Homo Sapiens
VRNSDSECPLSHDGYC

SEQ ID NO: 9290 - protein, 16 aa, Homo Sapiens
RNSDSECPLSHDGYCL

SEQ ID NO: 9291 - protein, 16 aa, Homo Sapiens
NSDSECPLSHDGYCLH

SEQ ID NO: 9292 - protein, 16 aa, Homo Sapiens
SDSECPLSHDGYCLHD

SEQ ID NO: 9293 - protein, 16 aa, Homo Sapiens
DSECPLSHDGYCLHDG

SEQ ID NO: 9294 - protein, 16 aa, Homo Sapiens
SECPLSHDGYCLHDGV

SEQ ID NO: 9295 - protein, 16 aa, Homo Sapiens
ECPLSHDGYCLHDGVC

SEQ ID NO: 9296 - protein, 16 aa, Homo Sapiens
CPLSHDGYCLHDGVCM

SEQ ID NO: 9297 - protein, 16 aa, Homo Sapiens
PLSHDGYCLHDGVCMY

SEQ ID NO: 9298 - protein, 16 aa, Homo Sapiens
LSHDGYCLHDGVCMYI

SEQ ID NO: 9299 - protein, 16 aa, Homo Sapiens
SHDGYCLHDGVCMYIE

SEQ ID NO: 9300 - protein, 16 aa, Homo Sapiens
HDGYCLHDGVCMYIEA

SEQ ID NO: 9301 - protein, 16 aa, Homo Sapiens
DGYCLHDGVCMYIEAL

SEQ ID NO: 9302 - protein, 16 aa, Homo Sapiens
GYCLHDGVCMYIEALD

SEQ ID NO: 9303 - protein, 16 aa, Homo Sapiens
YCLHDGVCMYIEALDK

SEQ ID NO: 9304 - protein, 16 aa, Homo Sapiens
CLHDGVCMYIEALDKY

SEQ ID NO: 9305 - protein, 16 aa, Homo Sapiens
LHDGVCMYIEALDKYA

SEQ ID NO: 9306 - protein, 16 aa, Homo Sapiens
HDGVCMYIEALDKYAC

SEQ ID NO: 9307 - protein, 16 aa, Homo Sapiens
DGVCMYIEALDKYACN

SEQ ID NO: 9308 - protein, 16 aa, Homo Sapiens
GVCMYIEALDKYACNC

SEQ ID NO: 9309 - protein, 16 aa, Homo Sapiens
VCMYIEALDKYACNCV

SEQ ID NO: 9310 - protein, 16 aa, Homo Sapiens
CMYIEALDKYACNCVV

SEQ ID NO: 9311 - protein, 16 aa, Homo Sapiens
MYIEALDKYACNCVVG

SEQ ID NO: 9312 - protein, 16 aa, Homo Sapiens
YIEALDKYACNCVVGY

SEQ ID NO: 9313 - protein, 16 aa, Homo Sapiens
IEALDKYACNCVVGYI

SEQ ID NO: 9314 - protein, 16 aa, Homo Sapiens
EALDKYACNCVVGYIG

SEQ ID NO: 9315 - protein, 16 aa, Homo Sapiens
ALDKYACNCVVGYIGE

SEQ ID NO: 9316 - protein, 16 aa, Homo Sapiens
LDKYACNCVVGYIGER

SEQ ID NO: 9317 - protein, 16 aa, Homo Sapiens
DKYACNCVVGYIGERC

SEQ ID NO: 9318 - protein, 16 aa, Homo Sapiens
KYACNCVVGYIGERCQ

SEQ ID NO: 9319 - protein, 16 aa, Homo Sapiens
YACNCVVGYIGERCQY

SEQ ID NO: 9320 - protein, 16 aa, Homo Sapiens
ACNCVVGYIGERCQYR

SEQ ID NO: 9321 - protein, 16 aa, Homo Sapiens
CNCVVGYIGERCQYRD

SEQ ID NO: 9322 - protein, 16 aa, Homo Sapiens
NCVVGYIGERCQYRDL

SEQ ID NO: 9323 - protein, 16 aa, Homo Sapiens
CVVGYIGERCQYRDLK

SEQ ID NO: 9324 - protein, 16 aa, Homo Sapiens
VVGYIGERCQYRDLKW

SEQ ID NO: 9325 - protein, 16 aa, Homo Sapiens
VGYIGERCQYRDLKWW

SEQ ID NO: 9326 - protein, 16 aa, Homo Sapiens
GYIGERCQYRDLKWWE

SEQ ID NO: 9327 - protein, 16 aa, Homo Sapiens
YIGERCQYRDLKWWEL

SEQ ID NO: 9328 - protein, 16 aa, Homo Sapiens
IGERCQYRDLKWWELR

SEQ ID NO: 9329 - protein, 16 aa, Homo Sapiens
GERCQYRDLKWWELRH

SEQ ID NO: 9330 - protein, 16 aa, Homo Sapiens
ERCQYRDLKWWELRHA

SEQ ID NO: 9331 - protein, 16 aa, Homo Sapiens
RCQYRDLKWWELRHAG

SEQ ID NO: 9332 - protein, 16 aa, Homo Sapiens
CQYRDLKWWELRHAGH

SEQ ID NO: 9333 - protein, 16 aa, Homo Sapiens
QYRDLKWWELRHAGHG

SEQ ID NO: 9334 - protein, 16 aa, Homo Sapiens
YRDLKWWELRHAGHGQ

SEQ ID NO: 9335 - protein, 16 aa, Homo Sapiens
RDLKWWELRHAGHGQQ

SEQ ID NO: 9336 - protein, 16 aa, Homo Sapiens
DLKWWELRHAGHGQQQ

SEQ ID NO: 9337 - protein, 16 aa, Homo Sapiens
LKWWELRHAGHGQQQK

SEQ ID NO: 9338 - protein, 16 aa, Homo Sapiens
KWWELRHAGHGQQQKV

SEQ ID NO: 9339 - protein, 16 aa, Homo Sapiens
WWELRHAGHGQQQKVI

SEQ ID NO: 9340 - protein, 16 aa, Homo Sapiens
WELRHAGHGQQQKVIV

SEQ ID NO: 9341 - protein, 16 aa, Homo Sapiens
ELRHAGHGQQQKVIVV

SEQ ID NO: 9342 - protein, 16 aa, Homo Sapiens
LRHAGHGQQQKVIVVA

SEQ ID NO: 9343 - protein, 16 aa, Homo Sapiens
RHAGHGQQQKVIVVAV

SEQ ID NO: 9344 - protein, 16 aa, Homo Sapiens
HAGHGQQQKVIVVAVC

SEQ ID NO: 9345 - protein, 16 aa, Homo Sapiens
AGHGQQQKVIVVAVCV

SEQ ID NO: 9346 - protein, 16 aa, Homo Sapiens
GHGQQQKVIVVAVCVV

SEQ ID NO: 9347 - protein, 16 aa, Homo Sapiens
HGQQQKVIVVAVCVVV

SEQ ID NO: 9348 - protein, 16 aa, Homo Sapiens
GQQQKVIVVAVCVVVL

SEQ ID NO: 9349 - protein, 16 aa, Homo Sapiens
QQQKVIVVAVCVVVLV

SEQ ID NO: 9350 - protein, 16 aa, Homo Sapiens
QQKVIVVAVCVVVLVM

SEQ ID NO: 9351 - protein, 16 aa, Homo Sapiens
QKVIVVAVCVVVLVML

SEQ ID NO: 9352 - protein, 16 aa, Homo Sapiens
KVIVVAVCVVVLVMLL

SEQ ID NO: 9353 - protein, 16 aa, Homo Sapiens
VIVVAVCVVVLVMLLL

SEQ ID NO: 9354 - protein, 16 aa, Homo Sapiens
IVVAVCVVVLVMLLLL

SEQ ID NO: 9355 - protein, 16 aa, Homo Sapiens
VVAVCVVVLVMLLLLS

SEQ ID NO: 9356 - protein, 16 aa, Homo Sapiens
VAVCVVVLVMLLLLSL

SEQ ID NO: 9357 - protein, 16 aa, Homo Sapiens
AVCVVVLVMLLLLSLW

SEQ ID NO: 9358 - protein, 16 aa, Homo Sapiens
VCVVVLVMLLLLSLWG

SEQ ID NO: 9359 - protein, 16 aa, Homo Sapiens
CVVVLVMLLLLSLWGA

SEQ ID NO: 9360 - protein, 16 aa, Homo Sapiens
VVVLVMLLLLSLWGAH

SEQ ID NO: 9361 - protein, 16 aa, Homo Sapiens
VVLVMLLLLSLWGAHY

SEQ ID NO: 9362 - protein, 16 aa, Homo Sapiens
VLVMLLLLSLWGAHYY

SEQ ID NO: 9363 - protein, 16 aa, Homo Sapiens
LVMLLLLSLWGAHYYR

SEQ ID NO: 9364 - protein, 16 aa, Homo Sapiens
VMLLLLSLWGAHYYRT

SEQ ID NO: 9365 - protein, 16 aa, Homo Sapiens
MLLLLSLWGAHYYRTQ

SEQ ID NO: 9366 - protein, 16 aa, Homo Sapiens
LLLLSLWGAHYYRTQK

SEQ ID NO: 9367 - protein, 16 aa, Homo Sapiens
LLLSLWGAHYYRTQKL

SEQ ID NO: 9368 - protein, 16 aa, Homo Sapiens
LLSLWGAHYYRTQKLL

SEQ ID NO: 9369 - protein, 16 aa, Homo Sapiens
LSLWGAHYYRTQKLLS

SEQ ID NO: 9370 - protein, 16 aa, Homo Sapiens
SLWGAHYYRTQKLLSK

SEQ ID NO: 9371 - protein, 16 aa, Homo Sapiens
LWGAHYYRTQKLLSKN

SEQ ID NO: 9372 - protein, 16 aa, Homo Sapiens
WGAHYYRTQKLLSKNP

SEQ ID NO: 9373 - protein, 16 aa, Homo Sapiens
GAHYYRTQKLLSKNPK

SEQ ID NO: 9374 - protein, 16 aa, Homo Sapiens
AHYYRTQKLLSKNPKN

SEQ ID NO: 9375 - protein, 16 aa, Homo Sapiens
HYYRTQKLLSKNPKNP

SEQ ID NO: 9376 - protein, 16 aa, Homo Sapiens
YYRTQKLLSKNPKNPY

SEQ ID NO: 9377 - protein, 16 aa, Homo Sapiens
YRTQKLLSKNPKNPYE

SEQ ID NO: 9378 - protein, 16 aa, Homo Sapiens
RTQKLLSKNPKNPYEE

SEQ ID NO: 9379 - protein, 16 aa, Homo Sapiens
TQKLLSKNPKNPYEES

SEQ ID NO: 9380 - protein, 16 aa, Homo Sapiens
QKLLSKNPKNPYEESS

SEQ ID NO: 9381 - protein, 16 aa, Homo Sapiens
KLLSKNPKNPYEESSR

SEQ ID NO: 9382 - protein, 16 aa, Homo Sapiens
LLSKNPKNPYEESSRD

SEQ ID NO: 9383 - protein, 16 aa, Homo Sapiens
LSKNPKNPYEESSRDV

SEQ ID NO: 9384 - protein, 16 aa, Homo Sapiens
SKNPKNPYEESSRDVR

SEQ ID NO: 9385 - protein, 16 aa, Homo Sapiens
KNPKNPYEESSRDVRS

SEQ ID NO: 9386 - protein, 16 aa, Homo Sapiens
NPKNPYEESSRDVRSR

SEQ ID NO: 9387 - protein, 16 aa, Homo Sapiens
PKNPYEESSRDVRSRR

SEQ ID NO: 9388 - protein, 16 aa, Homo Sapiens
KNPYEESSRDVRSRRP

SEQ ID NO: 9389 - protein, 16 aa, Homo Sapiens
NPYEESSRDVRSRRPA

SEQ ID NO: 9390 - protein, 16 aa, Homo Sapiens
PYEESSRDVRSRRPAD

SEQ ID NO: 9391 - protein, 16 aa, Homo Sapiens
YEESSRDVRSRRPADT

SEQ ID NO: 9392 - protein, 16 aa, Homo Sapiens
EESSRDVRSRRPADTE

SEQ ID NO: 9393 - protein, 16 aa, Homo Sapiens
ESSRDVRSRRPADTED

SEQ ID NO: 9394 - protein, 16 aa, Homo Sapiens
SSRDVRSRRPADTEDG

SEQ ID NO: 9395 - protein, 16 aa, Homo Sapiens
SRDVRSRRPADTEDGM

SEQ ID NO: 9396 - protein, 16 aa, Homo Sapiens
RDVRSRRPADTEDGMS

SEQ ID NO: 9397 - protein, 16 aa, Homo Sapiens
DVRSRRPADTEDGMSS

SEQ ID NO: 9398 - protein, 16 aa, Homo Sapiens
VRSRRPADTEDGMSSC

SEQ ID NO: 9399 - protein, 16 aa, Homo Sapiens
RSRRPADTEDGMSSCP

SEQ ID NO: 9400 - protein, 16 aa, Homo Sapiens
SRRPADTEDGMSSCPQ

SEQ ID NO: 9401 - protein, 16 aa, Homo Sapiens
RRPADTEDGMSSCPQP

SEQ ID NO: 9402 - protein, 16 aa, Homo Sapiens
RPADTEDGMSSCPQPW

SEQ ID NO: 9403 - protein, 16 aa, Homo Sapiens
PADTEDGMSSCPQPWF

SEQ ID NO: 9404 - protein, 16 aa, Homo Sapiens
ADTEDGMSSCPQPWFV

SEQ ID NO: 9405 - protein, 16 aa, Homo Sapiens
DTEDGMSSCPQPWFVV

SEQ ID NO: 9406 - protein, 16 aa, Homo Sapiens
TEDGMSSCPQPWFVVI

SEQ ID NO: 9407 - protein, 16 aa, Homo Sapiens
EDGMSSCPQPWFVVIK

SEQ ID NO: 9408 - protein, 16 aa, Homo Sapiens
DGMSSCPQPWFVVIKE

SEQ ID NO: 9409 - protein, 16 aa, Homo Sapiens
GMSSCPQPWFVVIKEH

SEQ ID NO: 9410 - protein, 16 aa, Homo Sapiens
MSSCPQPWFVVIKEHQ

SEQ ID NO: 9411 - protein, 16 aa, Homo Sapiens
SSCPQPWFVVIKEHQD

SEQ ID NO: 9412 - protein, 16 aa, Homo Sapiens
SCPQPWFVVIKEHQDL

SEQ ID NO: 9413 - protein, 16 aa, Homo Sapiens
CPQPWFVVIKEHQDLK

SEQ ID NO: 9414 - protein, 16 aa, Homo Sapiens
PQPWFVVIKEHQDLKN

SEQ ID NO: 9415 - protein, 16 aa, Homo Sapiens
QPWFVVIKEHQDLKNG

SEQ ID NO: 9416 - protein, 16 aa, Homo Sapiens
PWFVVIKEHQDLKNGG

SEQ ID NO: 9417 - protein, 16 aa, Homo Sapiens
WFVVIKEHQDLKNGGQ

SEQ ID NO: 9418 - protein, 16 aa, Homo Sapiens
FVVIKEHQDLKNGGQP

SEQ ID NO: 9419 - protein, 16 aa, Homo Sapiens
VVIKEHQDLKNGGQPV

SEQ ID NO: 9420 - protein, 16 aa, Homo Sapiens
VIKEHQDLKNGGQPVA

SEQ ID NO: 9421 - protein, 16 aa, Homo Sapiens
IKEHQDLKNGGQPVAG

SEQ ID NO: 9422 - protein, 16 aa, Homo Sapiens
KEHQDLKNGGQPVAGE

SEQ ID NO: 9423 - protein, 16 aa, Homo Sapiens
EHQDLKNGGQPVAGED

SEQ ID NO: 9424 - protein, 16 aa, Homo Sapiens
HQDLKNGGQPVAGEDG

SEQ ID NO: 9425 - protein, 16 aa, Homo Sapiens
QDLKNGGQPVAGEDGQ

SEQ ID NO: 9426 - protein, 16 aa, Homo Sapiens
DLKNGGQPVAGEDGQA

SEQ ID NO: 9427 - protein, 16 aa, Homo Sapiens
LKNGGQPVAGEDGQAA

SEQ ID NO: 9428 - protein, 16 aa, Homo Sapiens
KNGGQPVAGEDGQAAD

SEQ ID NO: 9429 - protein, 16 aa, Homo Sapiens
NGGQPVAGEDGQAADG

SEQ ID NO: 9430 - protein, 16 aa, Homo Sapiens
GGQPVAGEDGQAADGS

SEQ ID NO: 9431 - protein, 16 aa, Homo Sapiens
GQPVAGEDGQAADGSM

SEQ ID NO: 9432 - protein, 16 aa, Homo Sapiens
QPVAGEDGQAADGSMQ

SEQ ID NO: 9433 - protein, 16 aa, Homo Sapiens
PVAGEDGQAADGSMQP

SEQ ID NO: 9434 - protein, 16 aa, Homo Sapiens
VAGEDGQAADGSMQPT

SEQ ID NO: 9435 - protein, 16 aa, Homo Sapiens
AGEDGQAADGSMQPTS

SEQ ID NO: 9436 - protein, 16 aa, Homo Sapiens
GEDGQAADGSMQPTSW

SEQ ID NO: 9437 - protein, 16 aa, Homo Sapiens
EDGQAADGSMQPTSWR

SEQ ID NO: 9438 - protein, 16 aa, Homo Sapiens
DGQAADGSMQPTSWRQ

SEQ ID NO: 9439 - protein, 16 aa, Homo Sapiens
GQAADGSMQPTSWRQE

SEQ ID NO: 9440 - protein, 16 aa, Homo Sapiens
QAADGSMQPTSWRQEP

SEQ ID NO: 9441 - protein, 16 aa, Homo Sapiens
AADGSMQPTSWRQEPQ

SEQ ID NO: 9442 - protein, 16 aa, Homo Sapiens
ADGSMQPTSWRQEPQL

SEQ ID NO: 9443 - protein, 16 aa, Homo Sapiens
DGSMQPTSWRQEPQLC

SEQ ID NO: 9444 - protein, 16 aa, Homo Sapiens
GSMQPTSWRQEPQLCG

SEQ ID NO: 9445 - protein, 16 aa, Homo Sapiens
SMQPTSWRQEPQLCGM

SEQ ID NO: 9446 - protein, 16 aa, Homo Sapiens
MQPTSWRQEPQLCGMG

SEQ ID NO: 9447 - protein, 16 aa, Homo Sapiens
QPTSWRQEPQLCGMGT

SEQ ID NO: 9448 - protein, 16 aa, Homo Sapiens
PTSWRQEPQLCGMGTE

SEQ ID NO: 9449 - protein, 16 aa, Homo Sapiens
TSWRQEPQLCGMGTEQ

SEQ ID NO: 9450 - protein, 16 aa, Homo Sapiens
SWRQEPQLCGMGTEQG

SEQ ID NO: 9451 - protein, 16 aa, Homo Sapiens
WRQEPQLCGMGTEQGC

SEQ ID NO: 9452 - protein, 16 aa, Homo Sapiens
RQEPQLCGMGTEQGCW

SEQ ID NO: 9453 - protein, 16 aa, Homo Sapiens
QEPQLCGMGTEQGCWI

SEQ ID NO: 9454 - protein, 16 aa, Homo Sapiens
EPQLCGMGTEQGCWIP

SEQ ID NO: 9455 - protein, 16 aa, Homo Sapiens
PQLCGMGTEQGCWIPV

SEQ ID NO: 9456 - protein, 16 aa, Homo Sapiens
QLCGMGTEQGCWIPVS

SEQ ID NO: 9457 - protein, 16 aa, Homo Sapiens
LCGMGTEQGCWIPVSS

SEQ ID NO: 9458 - protein, 16 aa, Homo Sapiens
CGMGTEQGCWIPVSSD

SEQ ID NO: 9459 - protein, 16 aa, Homo Sapiens
GMGTEQGCWIPVSSDK

SEQ ID NO: 9460 - protein, 16 aa, Homo Sapiens
MGTEQGCWIPVSSDKG

SEQ ID NO: 9461 - protein, 16 aa, Homo Sapiens
GTEQGCWIPVSSDKGS

SEQ ID NO: 9462 - protein, 16 aa, Homo Sapiens
TEQGCWIPVSSDKGSC

SEQ ID NO: 9463 - protein, 16 aa, Homo Sapiens
EQGCWIPVSSDKGSCP

SEQ ID NO: 9464 - protein, 16 aa, Homo Sapiens
QGCWIPVSSDKGSCPQ

SEQ ID NO: 9465 - protein, 16 aa, Homo Sapiens
GCWIPVSSDKGSCPQV

SEQ ID NO: 9466 - protein, 16 aa, Homo Sapiens
CWIPVSSDKGSCPQVM

SEQ ID NO: 9467 - protein, 16 aa, Homo Sapiens
WIPVSSDKGSCPQVME

SEQ ID NO: 9468 - protein, 16 aa, Homo Sapiens
IPVSSDKGSCPQVMER

SEQ ID NO: 9469 - protein, 16 aa, Homo Sapiens
PVSSDKGSCPQVMERS

SEQ ID NO: 9470 - protein, 16 aa, Homo Sapiens
VSSDKGSCPQVMERSF

SEQ ID NO: 9471 - protein, 16 aa, Homo Sapiens
SSDKGSCPQVMERSFH

SEQ ID NO: 9472 - protein, 16 aa, Homo Sapiens
SDKGSCPQVMERSFHM

SEQ ID NO: 9473 - protein, 16 aa, Homo Sapiens
DKGSCPQVMERSFHMP

SEQ ID NO: 9474 - protein, 16 aa, Homo Sapiens
KGSCPQVMERSFHMPS

SEQ ID NO: 9475 - protein, 16 aa, Homo Sapiens
GSCPQVMERSFHMPSY

SEQ ID NO: 9476 - protein, 16 aa, Homo Sapiens
SCPQVMERSFHMPSYG

SEQ ID NO: 9477 - protein, 16 aa, Homo Sapiens
CPQVMERSFHMPSYGT

SEQ ID NO: 9478 - protein, 16 aa, Homo Sapiens
PQVMERSFHMPSYGTQ

SEQ ID NO: 9479 - protein, 16 aa, Homo Sapiens
QVMERSFHMPSYGTQT

SEQ ID NO: 9480 - protein, 16 aa, Homo Sapiens
VMERSFHMPSYGTQTL

SEQ ID NO: 9481 - protein, 16 aa, Homo Sapiens
MERSFHMPSYGTQTLE

SEQ ID NO: 9482 - protein, 16 aa, Homo Sapiens
ERSFHMPSYGTQTLEG

SEQ ID NO: 9483 - protein, 16 aa, Homo Sapiens
RSFHMPSYGTQTLEGG

SEQ ID NO: 9484 - protein, 16 aa, Homo Sapiens
SFHMPSYGTQTLEGGV

SEQ ID NO: 9485 - protein, 16 aa, Homo Sapiens
FHMPSYGTQTLEGGVE

SEQ ID NO: 9486 - protein, 16 aa, Homo Sapiens
HMPSYGTQTLEGGVEK

SEQ ID NO: 9487 - protein, 16 aa, Homo Sapiens
MPSYGTQTLEGGVEKP

SEQ ID NO: 9488 - protein, 16 aa, Homo Sapiens
PSYGTQTLEGGVEKPH

SEQ ID NO: 9489 - protein, 16 aa, Homo Sapiens
SYGTQTLEGGVEKPHS

SEQ ID NO: 9490 - protein, 16 aa, Homo Sapiens
YGTQTLEGGVEKPHSL

SEQ ID NO: 9491 - protein, 16 aa, Homo Sapiens
GTQTLEGGVEKPHSLL

SEQ ID NO: 9492 - protein, 16 aa, Homo Sapiens
TQTLEGGVEKPHSLLS

SEQ ID NO: 9493 - protein, 16 aa, Homo Sapiens
QTLEGGVEKPHSLLSA

SEQ ID NO: 9494 - protein, 16 aa, Homo Sapiens
TLEGGVEKPHSLLSAN

SEQ ID NO: 9495 - protein, 16 aa, Homo Sapiens
LEGGVEKPHSLLSANP

SEQ ID NO: 9496 - protein, 16 aa, Homo Sapiens
EGGVEKPHSLLSANPL

SEQ ID NO: 9497 - protein, 16 aa, Homo Sapiens
GGVEKPHSLLSANPLW

SEQ ID NO: 9498 - protein, 16 aa, Homo Sapiens
GVEKPHSLLSANPLWQ

SEQ ID NO: 9499 - protein, 16 aa, Homo Sapiens
VEKPHSLLSANPLWQQ

SEQ ID NO: 9500 - protein, 16 aa, Homo Sapiens
EKPHSLLSANPLWQQR

SEQ ID NO: 9501 - protein, 16 aa, Homo Sapiens
KPHSLLSANPLWQQRA

SEQ ID NO: 9502 - protein, 16 aa, Homo Sapiens
PHSLLSANPLWQQRAL

SEQ ID NO: 9503 - protein, 16 aa, Homo Sapiens
HSLLSANPLWQQRALD

SEQ ID NO: 9504 - protein, 16 aa, Homo Sapiens
SLLSANPLWQQRALDP

SEQ ID NO: 9505 - protein, 16 aa, Homo Sapiens
LLSANPLWQQRALDPP

SEQ ID NO: 9506 - protein, 16 aa, Homo Sapiens
LSANPLWQQRALDPPH

SEQ ID NO: 9507 - protein, 16 aa, Homo Sapiens
SANPLWQQRALDPPHQ

SEQ ID NO: 9508 - protein, 16 aa, Homo Sapiens
ANPLWQQRALDPPHQM

SEQ ID NO: 9509 - protein, 16 aa, Homo Sapiens
NPLWQQRALDPPHQME

SEQ ID NO: 9510 - protein, 16 aa, Homo Sapiens
PLWQQRALDPPHQMEL

SEQ ID NO: 9511 - protein, 16 aa, Homo Sapiens
LWQQRALDPPHQMELT

SEQ ID NO: 9512 - protein, 16 aa, Homo Sapiens
WQQRALDPPHQMELTQ

SEQ ID NO: 9513 - protein, 160 aa, Homo Sapiens
MVPSAGQLALFALGIVLAACQALENSTSPLSADPPVAAAVVSHFNDCPDSHTQFCFHGTCRFLVQEDKPACVCHSGYVGARCEHADLLAVVAASQKKQAITALVVVSIVALAVLIITCVLIHCCQVRKHCEWCRALICRHEKPSALLKGRTACCHSETVV

SEQ ID NO: 9514 - protein, 8 aa, Homo Sapiens
MVPSAGQL

SEQ ID NO: 9515 - protein, 8 aa, Homo Sapiens
VPSAGQLA

SEQ ID NO: 9516 - protein, 8 aa, Homo Sapiens
SAGQLALF

SEQ ID NO: 9517 - protein, 8 aa, Homo Sapiens
GQLALFAL

SEQ ID NO: 9518 - protein, 8 aa, Homo Sapiens
LALFALGI

SEQ ID NO: 9519 - protein, 8 aa, Homo Sapiens
ALFALGIV

SEQ ID NO: 9520 - protein, 8 aa, Homo Sapiens
FALGIVLA

SEQ ID NO: 9521 - protein, 8 aa, Homo Sapiens
ALGIVLAA

SEQ ID NO: 9522 - protein, 8 aa, Homo Sapiens
VLAACQAL

SEQ ID NO: 9523 - protein, 8 aa, Homo Sapiens
LENSTSPL

SEQ ID NO: 9524 - protein, 8 aa, Homo Sapiens
PLSADPPV

SEQ ID NO: 9525 - protein, 8 aa, Homo Sapiens
SADPPVAA

SEQ ID NO: 9526 - protein, 8 aa, Homo Sapiens
DPPVAAAV

SEQ ID NO: 9527 - protein, 8 aa, Homo Sapiens
PPVAAAVV

SEQ ID NO: 9528 - protein, 8 aa, Homo Sapiens
AAAVVSHF

SEQ ID NO: 9529 - protein, 8 aa, Homo Sapiens
CPDSHTQF

SEQ ID NO: 9530 - protein, 8 aa, Homo Sapiens
TQFCFHGT

SEQ ID NO: 9531 - protein, 8 aa, Homo Sapiens
CFHGTCRF

SEQ ID NO: 9532 - protein, 8 aa, Homo Sapiens
FHGTCRFL

SEQ ID NO: 9533 - protein, 8 aa, Homo Sapiens
HGTCRFLV

SEQ ID NO: 9534 - protein, 8 aa, Homo Sapiens
RFLVQEDK

SEQ ID NO: 9535 - protein, 8 aa, Homo Sapiens
CVCHSGYV

SEQ ID NO: 9536 - protein, 8 aa, Homo Sapiens
HSGYVGAR

SEQ ID NO: 9537 - protein, 8 aa, Homo Sapiens
HADLLAVV

SEQ ID NO: 9538 - protein, 8 aa, Homo Sapiens
DLLAVVAA

SEQ ID NO: 9539 - protein, 8 aa, Homo Sapiens
LLAVVAAS

SEQ ID NO: 9540 - protein, 8 aa, Homo Sapiens
AVVAASQK

SEQ ID NO: 9541 - protein, 8 aa, Homo Sapiens
VVAASQKK

SEQ ID NO: 9542 - protein, 8 aa, Homo Sapiens
KQAITALV

SEQ ID NO: 9543 - protein, 8 aa, Homo Sapiens
QAITALVV

SEQ ID NO: 9544 - protein, 8 aa, Homo Sapiens
AITALVVV

SEQ ID NO: 9545 - protein, 8 aa, Homo Sapiens
TALVVVSI

SEQ ID NO: 9546 - protein, 8 aa, Homo Sapiens
ALVVVSIV

SEQ ID NO: 9547 - protein, 8 aa, Homo Sapiens
VVVSIVAL

SEQ ID NO: 9548 - protein, 8 aa, Homo Sapiens
VSIVALAV

SEQ ID NO: 9549 - protein, 8 aa, Homo Sapiens
SIVALAVL

SEQ ID NO: 9550 - protein, 8 aa, Homo Sapiens
IVALAVLI

SEQ ID NO: 9551 - protein, 8 aa, Homo Sapiens
ALAVLIIT

SEQ ID NO: 9552 - protein, 8 aa, Homo Sapiens
AVLIITCV

SEQ ID NO: 9553 - protein, 8 aa, Homo Sapiens
VLIITCVL

SEQ ID NO: 9554 - protein, 8 aa, Homo Sapiens
LIITCVLI

SEQ ID NO: 9555 - protein, 8 aa, Homo Sapiens
VLIHCCQV

SEQ ID NO: 9556 - protein, 8 aa, Homo Sapiens
LIHCCQVR

SEQ ID NO: 9557 - protein, 8 aa, Homo Sapiens
ALICRHEK

SEQ ID NO: 9558 - protein, 8 aa, Homo Sapiens
RHEKPSAL

SEQ ID NO: 9559 - protein, 8 aa, Homo Sapiens
HEKPSALL

SEQ ID NO: 9560 - protein, 8 aa, Homo Sapiens
ALLKGRTA

SEQ ID NO: 9561 - protein, 8 aa, Homo Sapiens
LLKGRTAC

SEQ ID NO: 9562 - protein, 9 aa, Homo Sapiens
MVPSAGQLA

SEQ ID NO: 9563 - protein, 9 aa, Homo Sapiens
VPSAGQLAL

SEQ ID NO: 9564 - protein, 9 aa, Homo Sapiens
PSAGQLALF

SEQ ID NO: 9565 - protein, 9 aa, Homo Sapiens
QLALFALGI

SEQ ID NO: 9566 - protein, 9 aa, Homo Sapiens
LALFALGIV

SEQ ID NO: 9567 - protein, 9 aa, Homo Sapiens
ALFALGIVL

SEQ ID NO: 9568 - protein, 9 aa, Homo Sapiens
FALGIVLAA

SEQ ID NO: 9569 - protein, 9 aa, Homo Sapiens
ALGIVLAAC

SEQ ID NO: 9570 - protein, 9 aa, Homo Sapiens
IVLAACQAL

SEQ ID NO: 9571 - protein, 9 aa, Homo Sapiens
ALENSTSPL

SEQ ID NO: 9572 - protein, 9 aa, Homo Sapiens
SPLSADPPV

SEQ ID NO: 9573 - protein, 9 aa, Homo Sapiens
PLSADPPVA

SEQ ID NO: 9574 - protein, 9 aa, Homo Sapiens
LSADPPVAA

SEQ ID NO: 9575 - protein, 9 aa, Homo Sapiens
SADPPVAAA

SEQ ID NO: 9576 - protein, 9 aa, Homo Sapiens
DPPVAAAVV

SEQ ID NO: 9577 - protein, 9 aa, Homo Sapiens
VAAAVVSHF

SEQ ID NO: 9578 - protein, 9 aa, Homo Sapiens
HTQFCFHGT

SEQ ID NO: 9579 - protein, 9 aa, Homo Sapiens
TQFCFHGTC

SEQ ID NO: 9580 - protein, 9 aa, Homo Sapiens
QFCFHGTCR

SEQ ID NO: 9581 - protein, 9 aa, Homo Sapiens
FLVQEDKPA

SEQ ID NO: 9582 - protein, 9 aa, Homo Sapiens
YVGARCEHA

SEQ ID NO: 9583 - protein, 9 aa, Homo Sapiens
CEHADLLAV

SEQ ID NO: 9584 - protein, 9 aa, Homo Sapiens
EHADLLAVV

SEQ ID NO: 9585 - protein, 9 aa, Homo Sapiens
LLAVVAASQ

SEQ ID NO: 9586 - protein, 9 aa, Homo Sapiens
LAVVAASQK

SEQ ID NO: 9587 - protein, 9 aa, Homo Sapiens
AVVAASQKK

SEQ ID NO: 9588 - protein, 9 aa, Homo Sapiens
AASQKKQAI

SEQ ID NO: 9589 - protein, 9 aa, Homo Sapiens
KKQAITALV

SEQ ID NO: 9590 - protein, 9 aa, Homo Sapiens
KQAITALVV

SEQ ID NO: 9591 - protein, 9 aa, Homo Sapiens
QAITALVVV

SEQ ID NO: 9592 - protein, 9 aa, Homo Sapiens
ITALVVVSI

SEQ ID NO: 9593 - protein, 9 aa, Homo Sapiens
TALVVVSIV

SEQ ID NO: 9594 - protein, 9 aa, Homo Sapiens
ALVVVSIVA

SEQ ID NO: 9595 - protein, 9 aa, Homo Sapiens
LVVVSIVAL

SEQ ID NO: 9596 - protein, 9 aa, Homo Sapiens
VVVSIVALA

SEQ ID NO: 9597 - protein, 9 aa, Homo Sapiens
VVSIVALAV

SEQ ID NO: 9598 - protein, 9 aa, Homo Sapiens
VSIVALAVL

SEQ ID NO: 9599 - protein, 9 aa, Homo Sapiens
SIVALAVLI

SEQ ID NO: 9600 - protein, 9 aa, Homo Sapiens
ALAVLIITC

SEQ ID NO: 9601 - protein, 9 aa, Homo Sapiens
LAVLIITCV

SEQ ID NO: 9602 - protein, 9 aa, Homo Sapiens
AVLIITCVL

SEQ ID NO: 9603 - protein, 9 aa, Homo Sapiens
VLIITCVLI

SEQ ID NO: 9604 - protein, 9 aa, Homo Sapiens
CVLIHCCQV

SEQ ID NO: 9605 - protein, 9 aa, Homo Sapiens
LIHCCQVRK

SEQ ID NO: 9606 - protein, 9 aa, Homo Sapiens
CQVRKHCEW

SEQ ID NO: 9607 - protein, 9 aa, Homo Sapiens
EWCRALICR

SEQ ID NO: 9608 - protein, 9 aa, Homo Sapiens
RALICRHEK

SEQ ID NO: 9609 - protein, 9 aa, Homo Sapiens
RHEKPSALL

SEQ ID NO: 9610 - protein, 9 aa, Homo Sapiens
HEKPSALLK

SEQ ID NO: 9611 - protein, 9 aa, Homo Sapiens
ALLKGRTAC

SEQ ID NO: 9612 - protein, 9 aa, Homo Sapiens
LLKGRTACC

SEQ ID NO: 9613 - protein, 9 aa, Homo Sapiens
RTACCHSET

SEQ ID NO: 9614 - protein, 9 aa, Homo Sapiens
TACCHSETV

SEQ ID NO: 9615 - protein, 10 aa, Homo Sapiens
MVPSAGQLAL

SEQ ID NO: 9616 - protein, 10 aa, Homo Sapiens
VPSAGQLALF

SEQ ID NO: 9617 - protein, 10 aa, Homo Sapiens
SAGQLALFAL

SEQ ID NO: 9618 - protein, 10 aa, Homo Sapiens
GQLALFALGI

SEQ ID NO: 9619 - protein, 10 aa, Homo Sapiens
QLALFALGIV

SEQ ID NO: 9620 - protein, 10 aa, Homo Sapiens
LALFALGIVL

SEQ ID NO: 9621 - protein, 10 aa, Homo Sapiens
ALFALGIVLA

SEQ ID NO: 9622 - protein, 10 aa, Homo Sapiens
FALGIVLAAC

SEQ ID NO: 9623 - protein, 10 aa, Homo Sapiens
ALGIVLAACQ

SEQ ID NO: 9624 - protein, 10 aa, Homo Sapiens
QALENSTSPL

SEQ ID NO: 9625 - protein, 10 aa, Homo Sapiens
TSPLSADPPV

SEQ ID NO: 9626 - protein, 10 aa, Homo Sapiens
SPLSADPPVA

SEQ ID NO: 9627 - protein, 10 aa, Homo Sapiens
PLSADPPVAA

SEQ ID NO: 9628 - protein, 10 aa, Homo Sapiens
LSADPPVAAA

SEQ ID NO: 9629 - protein, 10 aa, Homo Sapiens
SADPPVAAAV

SEQ ID NO: 9630 - protein, 10 aa, Homo Sapiens
PVAAAVVSHF

SEQ ID NO: 9631 - protein, 10 aa, Homo Sapiens
CPDSHTQFCF

SEQ ID NO: 9632 - protein, 10 aa, Homo Sapiens
TQFCFHGTCR

SEQ ID NO: 9633 - protein, 10 aa, Homo Sapiens
QFCFHGTCRF

SEQ ID NO: 9634 - protein, 10 aa, Homo Sapiens
FCFHGTCRFL

SEQ ID NO: 9635 - protein, 10 aa, Homo Sapiens
TCRFLVQEDK

SEQ ID NO: 9636 - protein, 10 aa, Homo Sapiens
FLVQEDKPAC

SEQ ID NO: 9637 - protein, 10 aa, Homo Sapiens
LVQEDKPACV

SEQ ID NO: 9638 - protein, 10 aa, Homo Sapiens
KPACVCHSGY

SEQ ID NO: 9639 - protein, 10 aa, Homo Sapiens
DLLAVVAASQ

SEQ ID NO: 9640 - protein, 10 aa, Homo Sapiens
LLAVVAASQK

SEQ ID NO: 9641 - protein, 10 aa, Homo Sapiens
LAVVAASQKK

SEQ ID NO: 9642 - protein, 10 aa, Homo Sapiens
SQKKQAITAL

SEQ ID NO: 9643 - protein, 10 aa, Homo Sapiens
KQAITALVVV

SEQ ID NO: 9644 - protein, 10 aa, Homo Sapiens
AITALVVVSI

SEQ ID NO: 9645 - protein, 10 aa, Homo Sapiens
ITALVVVSIV

SEQ ID NO: 9646 - protein, 10 aa, Homo Sapiens
ALVVVSIVAL

SEQ ID NO: 9647 - protein, 10 aa, Homo Sapiens
LVVVSIVALA

SEQ ID NO: 9648 - protein, 10 aa, Homo Sapiens
VVVSIVALAV

SEQ ID NO: 9649 - protein, 10 aa, Homo Sapiens
VVSIVALAVL

SEQ ID NO: 9650 - protein, 10 aa, Homo Sapiens
SIVALAVLII

SEQ ID NO: 9651 - protein, 10 aa, Homo Sapiens
ALAVLIITCV

SEQ ID NO: 9652 - protein, 10 aa, Homo Sapiens
LAVLIITCVL

SEQ ID NO: 9653 - protein, 10 aa, Homo Sapiens
AVLIITCVLI

SEQ ID NO: 9654 - protein, 10 aa, Homo Sapiens
TCVLIHCCQV

SEQ ID NO: 9655 - protein, 10 aa, Homo Sapiens
CVLIHCCQVR

SEQ ID NO: 9656 - protein, 10 aa, Homo Sapiens
VLIHCCQVRK

SEQ ID NO: 9657 - protein, 10 aa, Homo Sapiens
QVRKHCEWCR

SEQ ID NO: 9658 - protein, 10 aa, Homo Sapiens
CEWCRALICR

SEQ ID NO: 9659 - protein, 10 aa, Homo Sapiens
RHEKPSALLK

SEQ ID NO: 9660 - protein, 10 aa, Homo Sapiens
ALLKGRTACC

SEQ ID NO: 9661 - protein, 10 aa, Homo Sapiens
RTACCHSETV

SEQ ID NO: 9662 - protein, 11 aa, Homo Sapiens
MVPSAGQLALF

SEQ ID NO: 9663 - protein, 11 aa, Homo Sapiens
GQLALFALGIV

SEQ ID NO: 9664 - protein, 11 aa, Homo Sapiens
QLALFALGIVL

SEQ ID NO: 9665 - protein, 11 aa, Homo Sapiens
ALFALGIVLAA

SEQ ID NO: 9666 - protein, 11 aa, Homo Sapiens
ALGIVLAACQA

SEQ ID NO: 9667 - protein, 11 aa, Homo Sapiens
VLAACQALENS

SEQ ID NO: 9668 - protein, 11 aa, Homo Sapiens
CQALENSTSPL

SEQ ID NO: 9669 - protein, 11 aa, Homo Sapiens
ALENSTSPLSA

SEQ ID NO: 9670 - protein, 11 aa, Homo Sapiens
STSPLSADPPV

SEQ ID NO: 9671 - protein, 11 aa, Homo Sapiens
SPLSADPPVAA

SEQ ID NO: 9672 - protein, 11 aa, Homo Sapiens
PLSADPPVAAA

SEQ ID NO: 9673 - protein, 11 aa, Homo Sapiens
LSADPPVAAAV

SEQ ID NO: 9674 - protein, 11 aa, Homo Sapiens
SADPPVAAAVV

SEQ ID NO: 9675 - protein, 11 aa, Homo Sapiens
DPPVAAAVVSH

SEQ ID NO: 9676 - protein, 11 aa, Homo Sapiens
PPVAAAVVSHF

SEQ ID NO: 9677 - protein, 11 aa, Homo Sapiens
HTQFCFHGTCR

SEQ ID NO: 9678 - protein, 11 aa, Homo Sapiens
TQFCFHGTCRF

SEQ ID NO: 9679 - protein, 11 aa, Homo Sapiens
FCFHGTCRFLV

SEQ ID NO: 9680 - protein, 11 aa, Homo Sapiens
GTCRFLVQEDK

SEQ ID NO: 9681 - protein, 11 aa, Homo Sapiens
FLVQEDKPACV

SEQ ID NO: 9682 - protein, 11 aa, Homo Sapiens
KPACVCHSGYV

SEQ ID NO: 9683 - protein, 11 aa, Homo Sapiens
CVCHSGYVGAR

SEQ ID NO: 9684 - protein, 11 aa, Homo Sapiens
DLLAVVAASQK

SEQ ID NO: 9685 - protein, 11 aa, Homo Sapiens
LLAVVAASQKK

SEQ ID NO: 9686 - protein, 11 aa, Homo Sapiens
SQKKQAITALV

SEQ ID NO: 9687 - protein, 11 aa, Homo Sapiens
QAITALVVVSI

SEQ ID NO: 9688 - protein, 11 aa, Homo Sapiens
AITALVVVSIV

SEQ ID NO: 9689 - protein, 11 aa, Homo Sapiens
ITALVVVSIVA

SEQ ID NO: 9690 - protein, 11 aa, Homo Sapiens
TALVVVSIVAL

SEQ ID NO: 9691 - protein, 11 aa, Homo Sapiens
ALVVVSIVALA

SEQ ID NO: 9692 - protein, 11 aa, Homo Sapiens
LVVVSIVALAV

SEQ ID NO: 9693 - protein, 11 aa, Homo Sapiens
VVVSIVALAVL

SEQ ID NO: 9694 - protein, 11 aa, Homo Sapiens
VALAVLIITCV

SEQ ID NO: 9695 - protein, 11 aa, Homo Sapiens
ALAVLIITCVL

SEQ ID NO: 9696 - protein, 11 aa, Homo Sapiens
LAVLIITCVLI

SEQ ID NO: 9697 - protein, 11 aa, Homo Sapiens
ITCVLIHCCQV

SEQ ID NO: 9698 - protein, 11 aa, Homo Sapiens
TCVLIHCCQVR

SEQ ID NO: 9699 - protein, 11 aa, Homo Sapiens
CVLIHCCQVRK

SEQ ID NO: 9700 - protein, 11 aa, Homo Sapiens
CQVRKHCEWCR

SEQ ID NO: 9701 - protein, 11 aa, Homo Sapiens
WCRALICRHEK

SEQ ID NO: 9702 - protein, 11 aa, Homo Sapiens
ALICRHEKPSA

SEQ ID NO: 9703 - protein, 11 aa, Homo Sapiens
LICRHEKPSAL

SEQ ID NO: 9704 - protein, 11 aa, Homo Sapiens
KPSALLKGRTA

SEQ ID NO: 9705 - protein, 11 aa, Homo Sapiens
RTACCHSETVV

SEQ ID NO: 9706 - protein, 13 aa, Homo Sapiens
MVPSAGQLALFAL

SEQ ID NO: 9707 - protein, 13 aa, Homo Sapiens
VPSAGQLALFALG

SEQ ID NO: 9708 - protein, 13 aa, Homo Sapiens
PSAGQLALFALGI

SEQ ID NO: 9709 - protein, 13 aa, Homo Sapiens
SAGQLALFALGIV

SEQ ID NO: 9710 - protein, 13 aa, Homo Sapiens
AGQLALFALGIVL

SEQ ID NO: 9711 - protein, 13 aa, Homo Sapiens
GQLALFALGIVLA

SEQ ID NO: 9712 - protein, 13 aa, Homo Sapiens
QLALFALGIVLAA

SEQ ID NO: 9713 - protein, 13 aa, Homo Sapiens
LALFALGIVLAAC

SEQ ID NO: 9714 - protein, 13 aa, Homo Sapiens
ALFALGIVLAACQ

SEQ ID NO: 9715 - protein, 13 aa, Homo Sapiens
LFALGIVLAACQA

SEQ ID NO: 9716 - protein, 13 aa, Homo Sapiens
FALGIVLAACQAL

SEQ ID NO: 9717 - protein, 13 aa, Homo Sapiens
ALGIVLAACQALE

SEQ ID NO: 9718 - protein, 13 aa, Homo Sapiens
LGIVLAACQALEN

SEQ ID NO: 9719 - protein, 13 aa, Homo Sapiens
GIVLAACQALENS

SEQ ID NO: 9720 - protein, 13 aa, Homo Sapiens
IVLAACQALENST

SEQ ID NO: 9721 - protein, 13 aa, Homo Sapiens
VLAACQALENSTS

SEQ ID NO: 9722 - protein, 13 aa, Homo Sapiens
LAACQALENSTSP

SEQ ID NO: 9723 - protein, 13 aa, Homo Sapiens
AACQALENSTSPL

SEQ ID NO: 9724 - protein, 13 aa, Homo Sapiens
ACQALENSTSPLS

SEQ ID NO: 9725 - protein, 13 aa, Homo Sapiens
CQALENSTSPLSA

SEQ ID NO: 9726 - protein, 13 aa, Homo Sapiens
QALENSTSPLSAD

SEQ ID NO: 9727 - protein, 13 aa, Homo Sapiens
ALENSTSPLSADP

SEQ ID NO: 9728 - protein, 13 aa, Homo Sapiens
LENSTSPLSADPP

SEQ ID NO: 9729 - protein, 13 aa, Homo Sapiens
ENSTSPLSADPPV

SEQ ID NO: 9730 - protein, 13 aa, Homo Sapiens
NSTSPLSADPPVA

SEQ ID NO: 9731 - protein, 13 aa, Homo Sapiens
STSPLSADPPVAA

SEQ ID NO: 9732 - protein, 13 aa, Homo Sapiens
TSPLSADPPVAAA

SEQ ID NO: 9733 - protein, 13 aa, Homo Sapiens
SPLSADPPVAAAV

SEQ ID NO: 9734 - protein, 13 aa, Homo Sapiens
PLSADPPVAAAVV

SEQ ID NO: 9735 - protein, 13 aa, Homo Sapiens
LSADPPVAAAVVS

SEQ ID NO: 9736 - protein, 13 aa, Homo Sapiens
SADPPVAAAVVSH

SEQ ID NO: 9737 - protein, 13 aa, Homo Sapiens
ADPPVAAAVVSHF

SEQ ID NO: 9738 - protein, 13 aa, Homo Sapiens
DPPVAAAVVSHFN

SEQ ID NO: 9739 - protein, 13 aa, Homo Sapiens
PPVAAAVVSHFND

SEQ ID NO: 9740 - protein, 13 aa, Homo Sapiens
PVAAAVVSHFNDC

SEQ ID NO: 9741 - protein, 13 aa, Homo Sapiens
VAAAVVSHFNDCP

SEQ ID NO: 9742 - protein, 13 aa, Homo Sapiens
AAAVVSHFNDCPD

SEQ ID NO: 9743 - protein, 13 aa, Homo Sapiens
AAVVSHFNDCPDS

SEQ ID NO: 9744 - protein, 13 aa, Homo Sapiens
AVVSHFNDCPDSH

SEQ ID NO: 9745 - protein, 13 aa, Homo Sapiens
VVSHFNDCPDSHT

SEQ ID NO: 9746 - protein, 13 aa, Homo Sapiens
VSHFNDCPDSHTQ

SEQ ID NO: 9747 - protein, 13 aa, Homo Sapiens
SHFNDCPDSHTQF

SEQ ID NO: 9748 - protein, 13 aa, Homo Sapiens
HFNDCPDSHTQFC

SEQ ID NO: 9749 - protein, 13 aa, Homo Sapiens
FNDCPDSHTQFCF

SEQ ID NO: 9750 - protein, 13 aa, Homo Sapiens
NDCPDSHTQFCFH

SEQ ID NO: 9751 - protein, 13 aa, Homo Sapiens
DCPDSHTQFCFHG

SEQ ID NO: 9752 - protein, 13 aa, Homo Sapiens
CPDSHTQFCFHGT

SEQ ID NO: 9753 - protein, 13 aa, Homo Sapiens
PDSHTQFCFHGTC

SEQ ID NO: 9754 - protein, 13 aa, Homo Sapiens
DSHTQFCFHGTCR

SEQ ID NO: 9755 - protein, 13 aa, Homo Sapiens
SHTQFCFHGTCRF

SEQ ID NO: 9756 - protein, 13 aa, Homo Sapiens
HTQFCFHGTCRFL

SEQ ID NO: 9757 - protein, 13 aa, Homo Sapiens
TQFCFHGTCRFLV

SEQ ID NO: 9758 - protein, 13 aa, Homo Sapiens
QFCFHGTCRFLVQ

SEQ ID NO: 9759 - protein, 13 aa, Homo Sapiens
FCFHGTCRFLVQE

SEQ ID NO: 9760 - protein, 13 aa, Homo Sapiens
CFHGTCRFLVQED

SEQ ID NO: 9761 - protein, 13 aa, Homo Sapiens
FHGTCRFLVQEDK

SEQ ID NO: 9762 - protein, 13 aa, Homo Sapiens
HGTCRFLVQEDKP

SEQ ID NO: 9763 - protein, 13 aa, Homo Sapiens
GTCRFLVQEDKPA

SEQ ID NO: 9764 - protein, 13 aa, Homo Sapiens
TCRFLVQEDKPAC

SEQ ID NO: 9765 - protein, 13 aa, Homo Sapiens
CRFLVQEDKPACV

SEQ ID NO: 9766 - protein, 13 aa, Homo Sapiens
RFLVQEDKPACVC

SEQ ID NO: 9767 - protein, 13 aa, Homo Sapiens
FLVQEDKPACVCH

SEQ ID NO: 9768 - protein, 13 aa, Homo Sapiens
LVQEDKPACVCHS

SEQ ID NO: 9769 - protein, 13 aa, Homo Sapiens
VQEDKPACVCHSG

SEQ ID NO: 9770 - protein, 13 aa, Homo Sapiens
QEDKPACVCHSGY

SEQ ID NO: 9771 - protein, 13 aa, Homo Sapiens
EDKPACVCHSGYV

SEQ ID NO: 9772 - protein, 13 aa, Homo Sapiens
DKPACVCHSGYVG

SEQ ID NO: 9773 - protein, 13 aa, Homo Sapiens
KPACVCHSGYVGA

SEQ ID NO: 9774 - protein, 13 aa, Homo Sapiens
PACVCHSGYVGAR

SEQ ID NO: 9775 - protein, 13 aa, Homo Sapiens
ACVCHSGYVGARC

SEQ ID NO: 9776 - protein, 13 aa, Homo Sapiens
CVCHSGYVGARCE

SEQ ID NO: 9777 - protein, 13 aa, Homo Sapiens
VCHSGYVGARCEH

SEQ ID NO: 9778 - protein, 13 aa, Homo Sapiens
CHSGYVGARCEHA

SEQ ID NO: 9779 - protein, 13 aa, Homo Sapiens
HSGYVGARCEHAD

SEQ ID NO: 9780 - protein, 13 aa, Homo Sapiens
SGYVGARCEHADL

SEQ ID NO: 9781 - protein, 13 aa, Homo Sapiens
GYVGARCEHADLL

SEQ ID NO: 9782 - protein, 13 aa, Homo Sapiens
YVGARCEHADLLA

SEQ ID NO: 9783 - protein, 13 aa, Homo Sapiens
VGARCEHADLLAV

SEQ ID NO: 9784 - protein, 13 aa, Homo Sapiens
GARCEHADLLAVV

SEQ ID NO: 9785 - protein, 13 aa, Homo Sapiens
ARCEHADLLAVVA

SEQ ID NO: 9786 - protein, 13 aa, Homo Sapiens
RCEHADLLAVVAA

SEQ ID NO: 9787 - protein, 13 aa, Homo Sapiens
CEHADLLAVVAAS

SEQ ID NO: 9788 - protein, 13 aa, Homo Sapiens
EHADLLAVVAASQ

SEQ ID NO: 9789 - protein, 13 aa, Homo Sapiens
HADLLAVVAASQK

SEQ ID NO: 9790 - protein, 13 aa, Homo Sapiens
ADLLAVVAASQKK

SEQ ID NO: 9791 - protein, 13 aa, Homo Sapiens
DLLAVVAASQKKQ

SEQ ID NO: 9792 - protein, 13 aa, Homo Sapiens
LLAVVAASQKKQA

SEQ ID NO: 9793 - protein, 13 aa, Homo Sapiens
LAVVAASQKKQAI

SEQ ID NO: 9794 - protein, 13 aa, Homo Sapiens
AVVAASQKKQAIT

SEQ ID NO: 9795 - protein, 13 aa, Homo Sapiens
VVAASQKKQAITA

SEQ ID NO: 9796 - protein, 13 aa, Homo Sapiens
VAASQKKQAITAL

SEQ ID NO: 9797 - protein, 13 aa, Homo Sapiens
AASQKKQAITALV

SEQ ID NO: 9798 - protein, 13 aa, Homo Sapiens
ASQKKQAITALVV

SEQ ID NO: 9799 - protein, 13 aa, Homo Sapiens
SQKKQAITALVVV

SEQ ID NO: 9800 - protein, 13 aa, Homo Sapiens
QKKQAITALVVVS

SEQ ID NO: 9801 - protein, 13 aa, Homo Sapiens
KKQAITALVVVSI

SEQ ID NO: 9802 - protein, 13 aa, Homo Sapiens
KQAITALVVVSIV

SEQ ID NO: 9803 - protein, 13 aa, Homo Sapiens
QAITALVVVSIVA

SEQ ID NO: 9804 - protein, 13 aa, Homo Sapiens
AITALVVVSIVAL

SEQ ID NO: 9805 - protein, 13 aa, Homo Sapiens
ITALVVVSIVALA

SEQ ID NO: 9806 - protein, 13 aa, Homo Sapiens
TALVVVSIVALAV

SEQ ID NO: 9807 - protein, 13 aa, Homo Sapiens
ALVVVSIVALAVL

SEQ ID NO: 9808 - protein, 13 aa, Homo Sapiens
LVVVSIVALAVLI

SEQ ID NO: 9809 - protein, 13 aa, Homo Sapiens
VVVSIVALAVLII

SEQ ID NO: 9810 - protein, 13 aa, Homo Sapiens
VVSIVALAVLIIT

SEQ ID NO: 9811 - protein, 13 aa, Homo Sapiens
VSIVALAVLIITC

SEQ ID NO: 9812 - protein, 13 aa, Homo Sapiens
SIVALAVLIITCV

SEQ ID NO: 9813 - protein, 13 aa, Homo Sapiens
IVALAVLIITCVL

SEQ ID NO: 9814 - protein, 13 aa, Homo Sapiens
VALAVLIITCVLI

SEQ ID NO: 9815 - protein, 13 aa, Homo Sapiens
ALAVLIITCVLIH

SEQ ID NO: 9816 - protein, 13 aa, Homo Sapiens
LAVLIITCVLIHC

SEQ ID NO: 9817 - protein, 13 aa, Homo Sapiens
AVLIITCVLIHCC

SEQ ID NO: 9818 - protein, 13 aa, Homo Sapiens
VLIITCVLIHCCQ

SEQ ID NO: 9819 - protein, 13 aa, Homo Sapiens
LIITCVLIHCCQV

SEQ ID NO: 9820 - protein, 13 aa, Homo Sapiens
IITCVLIHCCQVR

SEQ ID NO: 9821 - protein, 13 aa, Homo Sapiens
ITCVLIHCCQVRK

SEQ ID NO: 9822 - protein, 13 aa, Homo Sapiens
TCVLIHCCQVRKH

SEQ ID NO: 9823 - protein, 13 aa, Homo Sapiens
CVLIHCCQVRKHC

SEQ ID NO: 9824 - protein, 13 aa, Homo Sapiens
VLIHCCQVRKHCE

SEQ ID NO: 9825 - protein, 13 aa, Homo Sapiens
LIHCCQVRKHCEW

SEQ ID NO: 9826 - protein, 13 aa, Homo Sapiens
IHCCQVRKHCEWC

SEQ ID NO: 9827 - protein, 13 aa, Homo Sapiens
HCCQVRKHCEWCR

SEQ ID NO: 9828 - protein, 13 aa, Homo Sapiens
CCQVRKHCEWCRA

SEQ ID NO: 9829 - protein, 13 aa, Homo Sapiens
CQVRKHCEWCRAL

SEQ ID NO: 9830 - protein, 13 aa, Homo Sapiens
QVRKHCEWCRALI

SEQ ID NO: 9831 - protein, 13 aa, Homo Sapiens
VRKHCEWCRALIC

SEQ ID NO: 9832 - protein, 13 aa, Homo Sapiens
RKHCEWCRALICR

SEQ ID NO: 9833 - protein, 13 aa, Homo Sapiens
KHCEWCRALICRH

SEQ ID NO: 9834 - protein, 13 aa, Homo Sapiens
HCEWCRALICRHE

SEQ ID NO: 9835 - protein, 13 aa, Homo Sapiens
CEWCRALICRHEK

SEQ ID NO: 9836 - protein, 13 aa, Homo Sapiens
EWCRALICRHEKP

SEQ ID NO: 9837 - protein, 13 aa, Homo Sapiens
WCRALICRHEKPS

SEQ ID NO: 9838 - protein, 13 aa, Homo Sapiens
CRALICRHEKPSA

SEQ ID NO: 9839 - protein, 13 aa, Homo Sapiens
RALICRHEKPSAL

SEQ ID NO: 9840 - protein, 13 aa, Homo Sapiens
ALICRHEKPSALL

SEQ ID NO: 9841 - protein, 13 aa, Homo Sapiens
LICRHEKPSALLK

SEQ ID NO: 9842 - protein, 13 aa, Homo Sapiens
ICRHEKPSALLKG

SEQ ID NO: 9843 - protein, 13 aa, Homo Sapiens
CRHEKPSALLKGR

SEQ ID NO: 9844 - protein, 13 aa, Homo Sapiens
RHEKPSALLKGRT

SEQ ID NO: 9845 - protein, 13 aa, Homo Sapiens
HEKPSALLKGRTA

SEQ ID NO: 9846 - protein, 13 aa, Homo Sapiens
EKPSALLKGRTAC

SEQ ID NO: 9847 - protein, 13 aa, Homo Sapiens
KPSALLKGRTACC

SEQ ID NO: 9848 - protein, 13 aa, Homo Sapiens
PSALLKGRTACCH

SEQ ID NO: 9849 - protein, 13 aa, Homo Sapiens
SALLKGRTACCHS

SEQ ID NO: 9850 - protein, 13 aa, Homo Sapiens
ALLKGRTACCHSE

SEQ ID NO: 9851 - protein, 13 aa, Homo Sapiens
LLKGRTACCHSET

SEQ ID NO: 9852 - protein, 13 aa, Homo Sapiens
LKGRTACCHSETV

SEQ ID NO: 9853 - protein, 13 aa, Homo Sapiens
KGRTACCHSETVV

SEQ ID NO: 9854 - protein, 14 aa, Homo Sapiens
MVPSAGQLALFALG

SEQ ID NO: 9855 - protein, 14 aa, Homo Sapiens
VPSAGQLALFALGI

SEQ ID NO: 9856 - protein, 14 aa, Homo Sapiens
PSAGQLALFALGIV

SEQ ID NO: 9857 - protein, 14 aa, Homo Sapiens
SAGQLALFALGIVL

SEQ ID NO: 9858 - protein, 14 aa, Homo Sapiens
AGQLALFALGIVLA

SEQ ID NO: 9859 - protein, 14 aa, Homo Sapiens
GQLALFALGIVLAA

SEQ ID NO: 9860 - protein, 14 aa, Homo Sapiens
QLALFALGIVLAAC

SEQ ID NO: 9861 - protein, 14 aa, Homo Sapiens
LALFALGIVLAACQ

SEQ ID NO: 9862 - protein, 14 aa, Homo Sapiens
ALFALGIVLAACQA

SEQ ID NO: 9863 - protein, 14 aa, Homo Sapiens
LFALGIVLAACQAL

SEQ ID NO: 9864 - protein, 14 aa, Homo Sapiens
FALGIVLAACQALE

SEQ ID NO: 9865 - protein, 14 aa, Homo Sapiens
ALGIVLAACQALEN

SEQ ID NO: 9866 - protein, 14 aa, Homo Sapiens
LGIVLAACQALENS

SEQ ID NO: 9867 - protein, 14 aa, Homo Sapiens
GIVLAACQALENST

SEQ ID NO: 9868 - protein, 14 aa, Homo Sapiens
IVLAACQALENSTS

SEQ ID NO: 9869 - protein, 14 aa, Homo Sapiens
VLAACQALENSTSP

SEQ ID NO: 9870 - protein, 14 aa, Homo Sapiens
LAACQALENSTSPL

SEQ ID NO: 9871 - protein, 14 aa, Homo Sapiens
AACQALENSTSPLS

SEQ ID NO: 9872 - protein, 14 aa, Homo Sapiens
ACQALENSTSPLSA

SEQ ID NO: 9873 - protein, 14 aa, Homo Sapiens
CQALENSTSPLSAD

SEQ ID NO: 9874 - protein, 14 aa, Homo Sapiens
QALENSTSPLSADP

SEQ ID NO: 9875 - protein, 14 aa, Homo Sapiens
ALENSTSPLSADPP

SEQ ID NO: 9876 - protein, 14 aa, Homo Sapiens
LENSTSPLSADPPV

SEQ ID NO: 9877 - protein, 14 aa, Homo Sapiens
ENSTSPLSADPPVA

SEQ ID NO: 9878 - protein, 14 aa, Homo Sapiens
NSTSPLSADPPVAA

SEQ ID NO: 9879 - protein, 14 aa, Homo Sapiens
STSPLSADPPVAAA

SEQ ID NO: 9880 - protein, 14 aa, Homo Sapiens
TSPLSADPPVAAAV

SEQ ID NO: 9881 - protein, 14 aa, Homo Sapiens
SPLSADPPVAAAVV

SEQ ID NO: 9882 - protein, 14 aa, Homo Sapiens
PLSADPPVAAAVVS

SEQ ID NO: 9883 - protein, 14 aa, Homo Sapiens
LSADPPVAAAVVSH

SEQ ID NO: 9884 - protein, 14 aa, Homo Sapiens
SADPPVAAAVVSHF

SEQ ID NO: 9885 - protein, 14 aa, Homo Sapiens
ADPPVAAAVVSHFN

SEQ ID NO: 9886 - protein, 14 aa, Homo Sapiens
DPPVAAAVVSHFND

SEQ ID NO: 9887 - protein, 14 aa, Homo Sapiens
PPVAAAVVSHFNDC

SEQ ID NO: 9888 - protein, 14 aa, Homo Sapiens
PVAAAVVSHFNDCP

SEQ ID NO: 9889 - protein, 14 aa, Homo Sapiens
VAAAVVSHFNDCPD

SEQ ID NO: 9890 - protein, 14 aa, Homo Sapiens
AAAVVSHFNDCPDS

SEQ ID NO: 9891 - protein, 14 aa, Homo Sapiens
AAVVSHFNDCPDSH

SEQ ID NO: 9892 - protein, 14 aa, Homo Sapiens
AVVSHFNDCPDSHT

SEQ ID NO: 9893 - protein, 14 aa, Homo Sapiens
VVSHFNDCPDSHTQ

SEQ ID NO: 9894 - protein, 14 aa, Homo Sapiens
VSHFNDCPDSHTQF

SEQ ID NO: 9895 - protein, 14 aa, Homo Sapiens
SHFNDCPDSHTQFC

SEQ ID NO: 9896 - protein, 14 aa, Homo Sapiens
HFNDCPDSHTQFCF

SEQ ID NO: 9897 - protein, 14 aa, Homo Sapiens
FNDCPDSHTQFCFH

SEQ ID NO: 9898 - protein, 14 aa, Homo Sapiens
NDCPDSHTQFCFHG

SEQ ID NO: 9899 - protein, 14 aa, Homo Sapiens
DCPDSHTQFCFHGT

SEQ ID NO: 9900 - protein, 14 aa, Homo Sapiens
CPDSHTQFCFHGTC

SEQ ID NO: 9901 - protein, 14 aa, Homo Sapiens
PDSHTQFCFHGTCR

SEQ ID NO: 9902 - protein, 14 aa, Homo Sapiens
DSHTQFCFHGTCRF

SEQ ID NO: 9903 - protein, 14 aa, Homo Sapiens
SHTQFCFHGTCRFL

SEQ ID NO: 9904 - protein, 14 aa, Homo Sapiens
HTQFCFHGTCRFLV

SEQ ID NO: 9905 - protein, 14 aa, Homo Sapiens
TQFCFHGTCRFLVQ

SEQ ID NO: 9906 - protein, 14 aa, Homo Sapiens
QFCFHGTCRFLVQE

SEQ ID NO: 9907 - protein, 14 aa, Homo Sapiens
FCFHGTCRFLVQED

SEQ ID NO: 9908 - protein, 14 aa, Homo Sapiens
CFHGTCRFLVQEDK

SEQ ID NO: 9909 - protein, 14 aa, Homo Sapiens
FHGTCRFLVQEDKP

SEQ ID NO: 9910 - protein, 14 aa, Homo Sapiens
HGTCRFLVQEDKPA

SEQ ID NO: 9911 - protein, 14 aa, Homo Sapiens
GTCRFLVQEDKPAC

SEQ ID NO: 9912 - protein, 14 aa, Homo Sapiens
TCRFLVQEDKPACV

SEQ ID NO: 9913 - protein, 14 aa, Homo Sapiens
CRFLVQEDKPACVC

SEQ ID NO: 9914 - protein, 14 aa, Homo Sapiens
RFLVQEDKPACVCH

SEQ ID NO: 9915 - protein, 14 aa, Homo Sapiens
FLVQEDKPACVCHS

SEQ ID NO: 9916 - protein, 14 aa, Homo Sapiens
LVQEDKPACVCHSG

SEQ ID NO: 9917 - protein, 14 aa, Homo Sapiens
VQEDKPACVCHSGY

SEQ ID NO: 9918 - protein, 14 aa, Homo Sapiens
QEDKPACVCHSGYV

SEQ ID NO: 9919 - protein, 14 aa, Homo Sapiens
EDKPACVCHSGYVG

SEQ ID NO: 9920 - protein, 14 aa, Homo Sapiens
DKPACVCHSGYVGA

SEQ ID NO: 9921 - protein, 14 aa, Homo Sapiens
KPACVCHSGYVGAR

SEQ ID NO: 9922 - protein, 14 aa, Homo Sapiens
PACVCHSGYVGARC

SEQ ID NO: 9923 - protein, 14 aa, Homo Sapiens
ACVCHSGYVGARCE

SEQ ID NO: 9924 - protein, 14 aa, Homo Sapiens
CVCHSGYVGARCEH

SEQ ID NO: 9925 - protein, 14 aa, Homo Sapiens
VCHSGYVGARCEHA

SEQ ID NO: 9926 - protein, 14 aa, Homo Sapiens
CHSGYVGARCEHAD

SEQ ID NO: 9927 - protein, 14 aa, Homo Sapiens
HSGYVGARCEHADL

SEQ ID NO: 9928 - protein, 14 aa, Homo Sapiens
SGYVGARCEHADLL

SEQ ID NO: 9929 - protein, 14 aa, Homo Sapiens
GYVGARCEHADLLA

SEQ ID NO: 9930 - protein, 14 aa, Homo Sapiens
YVGARCEHADLLAV

SEQ ID NO: 9931 - protein, 14 aa, Homo Sapiens
VGARCEHADLLAVV

SEQ ID NO: 9932 - protein, 14 aa, Homo Sapiens
GARCEHADLLAVVA

SEQ ID NO: 9933 - protein, 14 aa, Homo Sapiens
ARCEHADLLAVVAA

SEQ ID NO: 9934 - protein, 14 aa, Homo Sapiens
RCEHADLLAVVAAS

SEQ ID NO: 9935 - protein, 14 aa, Homo Sapiens
CEHADLLAVVAASQ

SEQ ID NO: 9936 - protein, 14 aa, Homo Sapiens
EHADLLAVVAASQK

SEQ ID NO: 9937 - protein, 14 aa, Homo Sapiens
HADLLAVVAASQKK

SEQ ID NO: 9938 - protein, 14 aa, Homo Sapiens
ADLLAVVAASQKKQ

SEQ ID NO: 9939 - protein, 14 aa, Homo Sapiens
DLLAVVAASQKKQA

SEQ ID NO: 9940 - protein, 14 aa, Homo Sapiens
LLAVVAASQKKQAI

SEQ ID NO: 9941 - protein, 14 aa, Homo Sapiens
LAVVAASQKKQAIT

SEQ ID NO: 9942 - protein, 14 aa, Homo Sapiens
AVVAASQKKQAITA

SEQ ID NO: 9943 - protein, 14 aa, Homo Sapiens
VVAASQKKQAITAL

SEQ ID NO: 9944 - protein, 14 aa, Homo Sapiens
VAASQKKQAITALV

SEQ ID NO: 9945 - protein, 14 aa, Homo Sapiens
AASQKKQAITALVV

SEQ ID NO: 9946 - protein, 14 aa, Homo Sapiens
ASQKKQAITALVVV

SEQ ID NO: 9947 - protein, 14 aa, Homo Sapiens
SQKKQAITALVVVS

SEQ ID NO: 9948 - protein, 14 aa, Homo Sapiens
QKKQAITALVVVSI

SEQ ID NO: 9949 - protein, 14 aa, Homo Sapiens
KKQAITALVVVSIV

SEQ ID NO: 9950 - protein, 14 aa, Homo Sapiens
KQAITALVVVSIVA

SEQ ID NO: 9951 - protein, 14 aa, Homo Sapiens
QAITALVVVSIVAL

SEQ ID NO: 9952 - protein, 14 aa, Homo Sapiens
AITALVVVSIVALA

SEQ ID NO: 9953 - protein, 14 aa, Homo Sapiens
ITALVVVSIVALAV

SEQ ID NO: 9954 - protein, 14 aa, Homo Sapiens
TALVVVSIVALAVL

SEQ ID NO: 9955 - protein, 14 aa, Homo Sapiens
ALVVVSIVALAVLI

SEQ ID NO: 9956 - protein, 14 aa, Homo Sapiens
LVVVSIVALAVLII

SEQ ID NO: 9957 - protein, 14 aa, Homo Sapiens
VVVSIVALAVLIIT

SEQ ID NO: 9958 - protein, 14 aa, Homo Sapiens
VVSIVALAVLIITC

SEQ ID NO: 9959 - protein, 14 aa, Homo Sapiens
VSIVALAVLIITCV

SEQ ID NO: 9960 - protein, 14 aa, Homo Sapiens
SIVALAVLIITCVL

SEQ ID NO: 9961 - protein, 14 aa, Homo Sapiens
IVALAVLIITCVLI

SEQ ID NO: 9962 - protein, 14 aa, Homo Sapiens
VALAVLIITCVLIH

SEQ ID NO: 9963 - protein, 14 aa, Homo Sapiens
ALAVLIITCVLIHC

SEQ ID NO: 9964 - protein, 14 aa, Homo Sapiens
LAVLIITCVLIHCC

SEQ ID NO: 9965 - protein, 14 aa, Homo Sapiens
AVLIITCVLIHCCQ

SEQ ID NO: 9966 - protein, 14 aa, Homo Sapiens
VLIITCVLIHCCQV

SEQ ID NO: 9967 - protein, 14 aa, Homo Sapiens
LIITCVLIHCCQVR

SEQ ID NO: 9968 - protein, 14 aa, Homo Sapiens
IITCVLIHCCQVRK

SEQ ID NO: 9969 - protein, 14 aa, Homo Sapiens
ITCVLIHCCQVRKH

SEQ ID NO: 9970 - protein, 14 aa, Homo Sapiens
TCVLIHCCQVRKHC

SEQ ID NO: 9971 - protein, 14 aa, Homo Sapiens
CVLIHCCQVRKHCE

SEQ ID NO: 9972 - protein, 14 aa, Homo Sapiens
VLIHCCQVRKHCEW

SEQ ID NO: 9973 - protein, 14 aa, Homo Sapiens
LIHCCQVRKHCEWC

SEQ ID NO: 9974 - protein, 14 aa, Homo Sapiens
IHCCQVRKHCEWCR

SEQ ID NO: 9975 - protein, 14 aa, Homo Sapiens
HCCQVRKHCEWCRA

SEQ ID NO: 9976 - protein, 14 aa, Homo Sapiens
CCQVRKHCEWCRAL

SEQ ID NO: 9977 - protein, 14 aa, Homo Sapiens
CQVRKHCEWCRALI

SEQ ID NO: 9978 - protein, 14 aa, Homo Sapiens
QVRKHCEWCRALIC

SEQ ID NO: 9979 - protein, 14 aa, Homo Sapiens
VRKHCEWCRALICR

SEQ ID NO: 9980 - protein, 14 aa, Homo Sapiens
RKHCEWCRALICRH

SEQ ID NO: 9981 - protein, 14 aa, Homo Sapiens
KHCEWCRALICRHE

SEQ ID NO: 9982 - protein, 14 aa, Homo Sapiens
HCEWCRALICRHEK

SEQ ID NO: 9983 - protein, 14 aa, Homo Sapiens
CEWCRALICRHEKP

SEQ ID NO: 9984 - protein, 14 aa, Homo Sapiens
EWCRALICRHEKPS

SEQ ID NO: 9985 - protein, 14 aa, Homo Sapiens
WCRALICRHEKPSA

SEQ ID NO: 9986 - protein, 14 aa, Homo Sapiens
CRALICRHEKPSAL

SEQ ID NO: 9987 - protein, 14 aa, Homo Sapiens
RALICRHEKPSALL

SEQ ID NO: 9988 - protein, 14 aa, Homo Sapiens
ALICRHEKPSALLK

SEQ ID NO: 9989 - protein, 14 aa, Homo Sapiens
LICRHEKPSALLKG

SEQ ID NO: 9990 - protein, 14 aa, Homo Sapiens
ICRHEKPSALLKGR

SEQ ID NO: 9991 - protein, 14 aa, Homo Sapiens
CRHEKPSALLKGRT

SEQ ID NO: 9992 - protein, 14 aa, Homo Sapiens
RHEKPSALLKGRTA

SEQ ID NO: 9993 - protein, 14 aa, Homo Sapiens
HEKPSALLKGRTAC

SEQ ID NO: 9994 - protein, 14 aa, Homo Sapiens
EKPSALLKGRTACC

SEQ ID NO: 9995 - protein, 14 aa, Homo Sapiens
KPSALLKGRTACCH

SEQ ID NO: 9996 - protein, 14 aa, Homo Sapiens
PSALLKGRTACCHS

SEQ ID NO: 9997 - protein, 14 aa, Homo Sapiens
SALLKGRTACCHSE

SEQ ID NO: 9998 - protein, 14 aa, Homo Sapiens
ALLKGRTACCHSET

SEQ ID NO: 9999 - protein, 14 aa, Homo Sapiens
LLKGRTACCHSETV

SEQ ID NO: 10000 - protein, 14 aa, Homo Sapiens
LKGRTACCHSETVV

SEQ ID NO: 10001 - protein, 15 aa, Homo Sapiens
MVPSAGQLALFALGI

SEQ ID NO: 10002 - protein, 15 aa, Homo Sapiens
VPSAGQLALFALGIV

SEQ ID NO: 10003 - protein, 15 aa, Homo Sapiens
PSAGQLALFALGIVL

SEQ ID NO: 10004 - protein, 15 aa, Homo Sapiens
SAGQLALFALGIVLA

SEQ ID NO: 10005 - protein, 15 aa, Homo Sapiens
AGQLALFALGIVLAA

SEQ ID NO: 10006 - protein, 15 aa, Homo Sapiens
GQLALFALGIVLAAC

SEQ ID NO: 10007 - protein, 15 aa, Homo Sapiens
QLALFALGIVLAACQ

SEQ ID NO: 10008 - protein, 15 aa, Homo Sapiens
LALFALGIVLAACQA

SEQ ID NO: 10009 - protein, 15 aa, Homo Sapiens
ALFALGIVLAACQAL

SEQ ID NO: 10010 - protein, 15 aa, Homo Sapiens
LFALGIVLAACQALE

SEQ ID NO: 10011 - protein, 15 aa, Homo Sapiens
FALGIVLAACQALEN

SEQ ID NO: 10012 - protein, 15 aa, Homo Sapiens
ALGIVLAACQALENS

SEQ ID NO: 10013 - protein, 15 aa, Homo Sapiens
LGIVLAACQALENST

SEQ ID NO: 10014 - protein, 15 aa, Homo Sapiens
GIVLAACQALENSTS

SEQ ID NO: 10015 - protein, 15 aa, Homo Sapiens
IVLAACQALENSTSP

SEQ ID NO: 10016 - protein, 15 aa, Homo Sapiens
VLAACQALENSTSPL

SEQ ID NO: 10017 - protein, 15 aa, Homo Sapiens
LAACQALENSTSPLS

SEQ ID NO: 10018 - protein, 15 aa, Homo Sapiens
AACQALENSTSPLSA

SEQ ID NO: 10019 - protein, 15 aa, Homo Sapiens
ACQALENSTSPLSAD

SEQ ID NO: 10020 - protein, 15 aa, Homo Sapiens
CQALENSTSPLSADP

SEQ ID NO: 10021 - protein, 15 aa, Homo Sapiens
QALENSTSPLSADPP

SEQ ID NO: 10022 - protein, 15 aa, Homo Sapiens
ALENSTSPLSADPPV

SEQ ID NO: 10023 - protein, 15 aa, Homo Sapiens
LENSTSPLSADPPVA

SEQ ID NO: 10024 - protein, 15 aa, Homo Sapiens
ENSTSPLSADPPVAA

SEQ ID NO: 10025 - protein, 15 aa, Homo Sapiens
NSTSPLSADPPVAAA

SEQ ID NO: 10026 - protein, 15 aa, Homo Sapiens
STSPLSADPPVAAAV

SEQ ID NO: 10027 - protein, 15 aa, Homo Sapiens
TSPLSADPPVAAAVV

SEQ ID NO: 10028 - protein, 15 aa, Homo Sapiens
SPLSADPPVAAAVVS

SEQ ID NO: 10029 - protein, 15 aa, Homo Sapiens
PLSADPPVAAAVVSH

SEQ ID NO: 10030 - protein, 15 aa, Homo Sapiens
LSADPPVAAAVVSHF

SEQ ID NO: 10031 - protein, 15 aa, Homo Sapiens
SADPPVAAAVVSHFN

SEQ ID NO: 10032 - protein, 15 aa, Homo Sapiens
ADPPVAAAVVSHFND

SEQ ID NO: 10033 - protein, 15 aa, Homo Sapiens
DPPVAAAVVSHFNDC

SEQ ID NO: 10034 - protein, 15 aa, Homo Sapiens
PPVAAAVVSHFNDCP

SEQ ID NO: 10035 - protein, 15 aa, Homo Sapiens
PVAAAVVSHFNDCPD

SEQ ID NO: 10036 - protein, 15 aa, Homo Sapiens
VAAAVVSHFNDCPDS

SEQ ID NO: 10037 - protein, 15 aa, Homo Sapiens
AAAVVSHFNDCPDSH

SEQ ID NO: 10038 - protein, 15 aa, Homo Sapiens
AAVVSHFNDCPDSHT

SEQ ID NO: 10039 - protein, 15 aa, Homo Sapiens
AVVSHFNDCPDSHTQ

SEQ ID NO: 10040 - protein, 15 aa, Homo Sapiens
VVSHFNDCPDSHTQF

SEQ ID NO: 10041 - protein, 15 aa, Homo Sapiens
VSHFNDCPDSHTQFC

SEQ ID NO: 10042 - protein, 15 aa, Homo Sapiens
SHFNDCPDSHTQFCF

SEQ ID NO: 10043 - protein, 15 aa, Homo Sapiens
HFNDCPDSHTQFCFH

SEQ ID NO: 10044 - protein, 15 aa, Homo Sapiens
FNDCPDSHTQFCFHG

SEQ ID NO: 10045 - protein, 15 aa, Homo Sapiens
NDCPDSHTQFCFHGT

SEQ ID NO: 10046 - protein, 15 aa, Homo Sapiens
DCPDSHTQFCFHGTC

SEQ ID NO: 10047 - protein, 15 aa, Homo Sapiens
CPDSHTQFCFHGTCR

SEQ ID NO: 10048 - protein, 15 aa, Homo Sapiens
PDSHTQFCFHGTCRF

SEQ ID NO: 10049 - protein, 15 aa, Homo Sapiens
DSHTQFCFHGTCRFL

SEQ ID NO: 10050 - protein, 15 aa, Homo Sapiens
SHTQFCFHGTCRFLV

SEQ ID NO: 10051 - protein, 15 aa, Homo Sapiens
HTQFCFHGTCRFLVQ

SEQ ID NO: 10052 - protein, 15 aa, Homo Sapiens
TQFCFHGTCRFLVQE

SEQ ID NO: 10053 - protein, 15 aa, Homo Sapiens
QFCFHGTCRFLVQED

SEQ ID NO: 10054 - protein, 15 aa, Homo Sapiens
FCFHGTCRFLVQEDK

SEQ ID NO: 10055 - protein, 15 aa, Homo Sapiens
CFHGTCRFLVQEDKP

SEQ ID NO: 10056 - protein, 15 aa, Homo Sapiens
FHGTCRFLVQEDKPA

SEQ ID NO: 10057 - protein, 15 aa, Homo Sapiens
HGTCRFLVQEDKPAC

SEQ ID NO: 10058 - protein, 15 aa, Homo Sapiens
GTCRFLVQEDKPACV

SEQ ID NO: 10059 - protein, 15 aa, Homo Sapiens
TCRFLVQEDKPACVC

SEQ ID NO: 10060 - protein, 15 aa, Homo Sapiens
CRFLVQEDKPACVCH

SEQ ID NO: 10061 - protein, 15 aa, Homo Sapiens
RFLVQEDKPACVCHS

SEQ ID NO: 10062 - protein, 15 aa, Homo Sapiens
FLVQEDKPACVCHSG

SEQ ID NO: 10063 - protein, 15 aa, Homo Sapiens
LVQEDKPACVCHSGY

SEQ ID NO: 10064 - protein, 15 aa, Homo Sapiens
VQEDKPACVCHSGYV

SEQ ID NO: 10065 - protein, 15 aa, Homo Sapiens
QEDKPACVCHSGYVG

SEQ ID NO: 10066 - protein, 15 aa, Homo Sapiens
EDKPACVCHSGYVGA

SEQ ID NO: 10067 - protein, 15 aa, Homo Sapiens
DKPACVCHSGYVGAR

SEQ ID NO: 10068 - protein, 15 aa, Homo Sapiens
KPACVCHSGYVGARC

SEQ ID NO: 10069 - protein, 15 aa, Homo Sapiens
PACVCHSGYVGARCE

SEQ ID NO: 10070 - protein, 15 aa, Homo Sapiens
ACVCHSGYVGARCEH

SEQ ID NO: 10071 - protein, 15 aa, Homo Sapiens
CVCHSGYVGARCEHA

SEQ ID NO: 10072 - protein, 15 aa, Homo Sapiens
VCHSGYVGARCEHAD

SEQ ID NO: 10073 - protein, 15 aa, Homo Sapiens
CHSGYVGARCEHADL

SEQ ID NO: 10074 - protein, 15 aa, Homo Sapiens
HSGYVGARCEHADLL

SEQ ID NO: 10075 - protein, 15 aa, Homo Sapiens
SGYVGARCEHADLLA

SEQ ID NO: 10076 - protein, 15 aa, Homo Sapiens
GYVGARCEHADLLAV

SEQ ID NO: 10077 - protein, 15 aa, Homo Sapiens
YVGARCEHADLLAVV

SEQ ID NO: 10078 - protein, 15 aa, Homo Sapiens
VGARCEHADLLAVVA

SEQ ID NO: 10079 - protein, 15 aa, Homo Sapiens
GARCEHADLLAVVAA

SEQ ID NO: 10080 - protein, 15 aa, Homo Sapiens
ARCEHADLLAVVAAS

SEQ ID NO: 10081 - protein, 15 aa, Homo Sapiens
RCEHADLLAVVAASQ

SEQ ID NO: 10082 - protein, 15 aa, Homo Sapiens
CEHADLLAVVAASQK

SEQ ID NO: 10083 - protein, 15 aa, Homo Sapiens
EHADLLAVVAASQKK

SEQ ID NO: 10084 - protein, 15 aa, Homo Sapiens
HADLLAVVAASQKKQ

SEQ ID NO: 10085 - protein, 15 aa, Homo Sapiens
ADLLAVVAASQKKQA

SEQ ID NO: 10086 - protein, 15 aa, Homo Sapiens
DLLAVVAASQKKQAI

SEQ ID NO: 10087 - protein, 15 aa, Homo Sapiens
LLAVVAASQKKQAIT

SEQ ID NO: 10088 - protein, 15 aa, Homo Sapiens
LAVVAASQKKQAITA

SEQ ID NO: 10089 - protein, 15 aa, Homo Sapiens
AVVAASQKKQAITAL

SEQ ID NO: 10090 - protein, 15 aa, Homo Sapiens
VVAASQKKQAITALV

SEQ ID NO: 10091 - protein, 15 aa, Homo Sapiens
VAASQKKQAITALVV

SEQ ID NO: 10092 - protein, 15 aa, Homo Sapiens
AASQKKQAITALVVV

SEQ ID NO: 10093 - protein, 15 aa, Homo Sapiens
ASQKKQAITALVVVS

SEQ ID NO: 10094 - protein, 15 aa, Homo Sapiens
SQKKQAITALVVVSI

SEQ ID NO: 10095 - protein, 15 aa, Homo Sapiens
QKKQAITALVVVSIV

SEQ ID NO: 10096 - protein, 15 aa, Homo Sapiens
KKQAITALVVVSIVA

SEQ ID NO: 10097 - protein, 15 aa, Homo Sapiens
KQAITALVVVSIVAL

SEQ ID NO: 10098 - protein, 15 aa, Homo Sapiens
QAITALVVVSIVALA

SEQ ID NO: 10099 - protein, 15 aa, Homo Sapiens
AITALVVVSIVALAV

SEQ ID NO: 10100 - protein, 15 aa, Homo Sapiens
ITALVVVSIVALAVL

SEQ ID NO: 10101 - protein, 15 aa, Homo Sapiens
TALVVVSIVALAVLI

SEQ ID NO: 10102 - protein, 15 aa, Homo Sapiens
ALVVVSIVALAVLII

SEQ ID NO: 10103 - protein, 15 aa, Homo Sapiens
LVVVSIVALAVLIIT

SEQ ID NO: 10104 - protein, 15 aa, Homo Sapiens
VVVSIVALAVLIITC

SEQ ID NO: 10105 - protein, 15 aa, Homo Sapiens
VVSIVALAVLIITCV

SEQ ID NO: 10106 - protein, 15 aa, Homo Sapiens
VSIVALAVLIITCVL

SEQ ID NO: 10107 - protein, 15 aa, Homo Sapiens
SIVALAVLIITCVLI

SEQ ID NO: 10108 - protein, 15 aa, Homo Sapiens
IVALAVLIITCVLIH

SEQ ID NO: 10109 - protein, 15 aa, Homo Sapiens
VALAVLIITCVLIHC

SEQ ID NO: 10110 - protein, 15 aa, Homo Sapiens
ALAVLIITCVLIHCC

SEQ ID NO: 10111 - protein, 15 aa, Homo Sapiens
LAVLIITCVLIHCCQ

SEQ ID NO: 10112 - protein, 15 aa, Homo Sapiens
AVLIITCVLIHCCQV

SEQ ID NO: 10113 - protein, 15 aa, Homo Sapiens
VLIITCVLIHCCQVR

SEQ ID NO: 10114 - protein, 15 aa, Homo Sapiens
LIITCVLIHCCQVRK

SEQ ID NO: 10115 - protein, 15 aa, Homo Sapiens
IITCVLIHCCQVRKH

SEQ ID NO: 10116 - protein, 15 aa, Homo Sapiens
ITCVLIHCCQVRKHC

SEQ ID NO: 10117 - protein, 15 aa, Homo Sapiens
TCVLIHCCQVRKHCE

SEQ ID NO: 10118 - protein, 15 aa, Homo Sapiens
CVLIHCCQVRKHCEW

SEQ ID NO: 10119 - protein, 15 aa, Homo Sapiens
VLIHCCQVRKHCEWC

SEQ ID NO: 10120 - protein, 15 aa, Homo Sapiens
LIHCCQVRKHCEWCR

SEQ ID NO: 10121 - protein, 15 aa, Homo Sapiens
IHCCQVRKHCEWCRA

SEQ ID NO: 10122 - protein, 15 aa, Homo Sapiens
HCCQVRKHCEWCRAL

SEQ ID NO: 10123 - protein, 15 aa, Homo Sapiens
CCQVRKHCEWCRALI

SEQ ID NO: 10124 - protein, 15 aa, Homo Sapiens
CQVRKHCEWCRALIC

SEQ ID NO: 10125 - protein, 15 aa, Homo Sapiens
QVRKHCEWCRALICR

SEQ ID NO: 10126 - protein, 15 aa, Homo Sapiens
VRKHCEWCRALICRH

SEQ ID NO: 10127 - protein, 15 aa, Homo Sapiens
RKHCEWCRALICRHE

SEQ ID NO: 10128 - protein, 15 aa, Homo Sapiens
KHCEWCRALICRHEK

SEQ ID NO: 10129 - protein, 15 aa, Homo Sapiens
HCEWCRALICRHEKP

SEQ ID NO: 10130 - protein, 15 aa, Homo Sapiens
CEWCRALICRHEKPS

SEQ ID NO: 10131 - protein, 15 aa, Homo Sapiens
EWCRALICRHEKPSA

SEQ ID NO: 10132 - protein, 15 aa, Homo Sapiens
WCRALICRHEKPSAL

SEQ ID NO: 10133 - protein, 15 aa, Homo Sapiens
CRALICRHEKPSALL

SEQ ID NO: 10134 - protein, 15 aa, Homo Sapiens
RALICRHEKPSALLK

SEQ ID NO: 10135 - protein, 15 aa, Homo Sapiens
ALICRHEKPSALLKG

SEQ ID NO: 10136 - protein, 15 aa, Homo Sapiens
LICRHEKPSALLKGR

SEQ ID NO: 10137 - protein, 15 aa, Homo Sapiens
ICRHEKPSALLKGRT

SEQ ID NO: 10138 - protein, 15 aa, Homo Sapiens
CRHEKPSALLKGRTA

SEQ ID NO: 10139 - protein, 15 aa, Homo Sapiens
RHEKPSALLKGRTAC

SEQ ID NO: 10140 - protein, 15 aa, Homo Sapiens
HEKPSALLKGRTACC

SEQ ID NO: 10141 - protein, 15 aa, Homo Sapiens
EKPSALLKGRTACCH

SEQ ID NO: 10142 - protein, 15 aa, Homo Sapiens
KPSALLKGRTACCHS

SEQ ID NO: 10143 - protein, 15 aa, Homo Sapiens
PSALLKGRTACCHSE

SEQ ID NO: 10144 - protein, 15 aa, Homo Sapiens
SALLKGRTACCHSET

SEQ ID NO: 10145 - protein, 15 aa, Homo Sapiens
ALLKGRTACCHSETV

SEQ ID NO: 10146 - protein, 15 aa, Homo Sapiens
LLKGRTACCHSETVV

SEQ ID NO: 10147 - protein, 16 aa, Homo Sapiens
MVPSAGQLALFALGIV

SEQ ID NO: 10148 - protein, 16 aa, Homo Sapiens
VPSAGQLALFALGIVL

SEQ ID NO: 10149 - protein, 16 aa, Homo Sapiens
PSAGQLALFALGIVLA

SEQ ID NO: 10150 - protein, 16 aa, Homo Sapiens
SAGQLALFALGIVLAA

SEQ ID NO: 10151 - protein, 16 aa, Homo Sapiens
AGQLALFALGIVLAAC

SEQ ID NO: 10152 - protein, 16 aa, Homo Sapiens
GQLALFALGIVLAACQ

SEQ ID NO: 10153 - protein, 16 aa, Homo Sapiens
QLALFALGIVLAACQA

SEQ ID NO: 10154 - protein, 16 aa, Homo Sapiens
LALFALGIVLAACQAL

SEQ ID NO: 10155 - protein, 16 aa, Homo Sapiens
ALFALGIVLAACQALE

SEQ ID NO: 10156 - protein, 16 aa, Homo Sapiens
LFALGIVLAACQALEN

SEQ ID NO: 10157 - protein, 16 aa, Homo Sapiens
FALGIVLAACQALENS

SEQ ID NO: 10158 - protein, 16 aa, Homo Sapiens
ALGIVLAACQALENST

SEQ ID NO: 10159 - protein, 16 aa, Homo Sapiens
LGIVLAACQALENSTS

SEQ ID NO: 10160 - protein, 16 aa, Homo Sapiens
GIVLAACQALENSTSP

SEQ ID NO: 10161 - protein, 16 aa, Homo Sapiens
IVLAACQALENSTSPL

SEQ ID NO: 10162 - protein, 16 aa, Homo Sapiens
VLAACQALENSTSPLS

SEQ ID NO: 10163 - protein, 16 aa, Homo Sapiens
LAACQALENSTSPLSA

SEQ ID NO: 10164 - protein, 16 aa, Homo Sapiens
AACQALENSTSPLSAD

SEQ ID NO: 10165 - protein, 16 aa, Homo Sapiens
ACQALENSTSPLSADP

SEQ ID NO: 10166 - protein, 16 aa, Homo Sapiens
CQALENSTSPLSADPP

SEQ ID NO: 10167 - protein, 16 aa, Homo Sapiens
QALENSTSPLSADPPV

SEQ ID NO: 10168 - protein, 16 aa, Homo Sapiens
ALENSTSPLSADPPVA

SEQ ID NO: 10169 - protein, 16 aa, Homo Sapiens
LENSTSPLSADPPVAA

SEQ ID NO: 10170 - protein, 16 aa, Homo Sapiens
ENSTSPLSADPPVAAA

SEQ ID NO: 10171 - protein, 16 aa, Homo Sapiens
NSTSPLSADPPVAAAV

SEQ ID NO: 10172 - protein, 16 aa, Homo Sapiens
STSPLSADPPVAAAVV

SEQ ID NO: 10173 - protein, 16 aa, Homo Sapiens
TSPLSADPPVAAAVVS

SEQ ID NO: 10174 - protein, 16 aa, Homo Sapiens
SPLSADPPVAAAVVSH

SEQ ID NO: 10175 - protein, 16 aa, Homo Sapiens
PLSADPPVAAAVVSHF

SEQ ID NO: 10176 - protein, 16 aa, Homo Sapiens
LSADPPVAAAVVSHFN

SEQ ID NO: 10177 - protein, 16 aa, Homo Sapiens
SADPPVAAAVVSHFND

SEQ ID NO: 10178 - protein, 16 aa, Homo Sapiens
ADPPVAAAVVSHFNDC

SEQ ID NO: 10179 - protein, 16 aa, Homo Sapiens
DPPVAAAVVSHFNDCP

SEQ ID NO: 10180 - protein, 16 aa, Homo Sapiens
PPVAAAVVSHFNDCPD

SEQ ID NO: 10181 - protein, 16 aa, Homo Sapiens
PVAAAVVSHFNDCPDS

SEQ ID NO: 10182 - protein, 16 aa, Homo Sapiens
VAAAVVSHFNDCPDSH

SEQ ID NO: 10183 - protein, 16 aa, Homo Sapiens
AAAVVSHFNDCPDSHT

SEQ ID NO: 10184 - protein, 16 aa, Homo Sapiens
AAVVSHFNDCPDSHTQ

SEQ ID NO: 10185 - protein, 16 aa, Homo Sapiens
AVVSHFNDCPDSHTQF

SEQ ID NO: 10186 - protein, 16 aa, Homo Sapiens
VVSHFNDCPDSHTQFC

SEQ ID NO: 10187 - protein, 16 aa, Homo Sapiens
VSHFNDCPDSHTQFCF

SEQ ID NO: 10188 - protein, 16 aa, Homo Sapiens
SHFNDCPDSHTQFCFH

SEQ ID NO: 10189 - protein, 16 aa, Homo Sapiens
HFNDCPDSHTQFCFHG

SEQ ID NO: 10190 - protein, 16 aa, Homo Sapiens
FNDCPDSHTQFCFHGT

SEQ ID NO: 10191 - protein, 16 aa, Homo Sapiens
NDCPDSHTQFCFHGTC

SEQ ID NO: 10192 - protein, 16 aa, Homo Sapiens
DCPDSHTQFCFHGTCR

SEQ ID NO: 10193 - protein, 16 aa, Homo Sapiens
CPDSHTQFCFHGTCRF

SEQ ID NO: 10194 - protein, 16 aa, Homo Sapiens
PDSHTQFCFHGTCRFL

SEQ ID NO: 10195 - protein, 16 aa, Homo Sapiens
DSHTQFCFHGTCRFLV

SEQ ID NO: 10196 - protein, 16 aa, Homo Sapiens
SHTQFCFHGTCRFLVQ

SEQ ID NO: 10197 - protein, 16 aa, Homo Sapiens
HTQFCFHGTCRFLVQE

SEQ ID NO: 10198 - protein, 16 aa, Homo Sapiens
TQFCFHGTCRFLVQED

SEQ ID NO: 10199 - protein, 16 aa, Homo Sapiens
QFCFHGTCRFLVQEDK

SEQ ID NO: 10200 - protein, 16 aa, Homo Sapiens
FCFHGTCRFLVQEDKP

SEQ ID NO: 10201 - protein, 16 aa, Homo Sapiens
CFHGTCRFLVQEDKPA

SEQ ID NO: 10202 - protein, 16 aa, Homo Sapiens
FHGTCRFLVQEDKPAC

SEQ ID NO: 10203 - protein, 16 aa, Homo Sapiens
HGTCRFLVQEDKPACV

SEQ ID NO: 10204 - protein, 16 aa, Homo Sapiens
GTCRFLVQEDKPACVC

SEQ ID NO: 10205 - protein, 16 aa, Homo Sapiens
TCRFLVQEDKPACVCH

SEQ ID NO: 10206 - protein, 16 aa, Homo Sapiens
CRFLVQEDKPACVCHS

SEQ ID NO: 10207 - protein, 16 aa, Homo Sapiens
RFLVQEDKPACVCHSG

SEQ ID NO: 10208 - protein, 16 aa, Homo Sapiens
FLVQEDKPACVCHSGY

SEQ ID NO: 10209 - protein, 16 aa, Homo Sapiens
LVQEDKPACVCHSGYV

SEQ ID NO: 10210 - protein, 16 aa, Homo Sapiens
VQEDKPACVCHSGYVG

SEQ ID NO: 10211 - protein, 16 aa, Homo Sapiens
QEDKPACVCHSGYVGA

SEQ ID NO: 10212 - protein, 16 aa, Homo Sapiens
EDKPACVCHSGYVGAR

SEQ ID NO: 10213 - protein, 16 aa, Homo Sapiens
DKPACVCHSGYVGARC

SEQ ID NO: 10214 - protein, 16 aa, Homo Sapiens
KPACVCHSGYVGARCE

SEQ ID NO: 10215 - protein, 16 aa, Homo Sapiens
PACVCHSGYVGARCEH

SEQ ID NO: 10216 - protein, 16 aa, Homo Sapiens
ACVCHSGYVGARCEHA

SEQ ID NO: 10217 - protein, 16 aa, Homo Sapiens
CVCHSGYVGARCEHAD

SEQ ID NO: 10218 - protein, 16 aa, Homo Sapiens
VCHSGYVGARCEHADL

SEQ ID NO: 10219 - protein, 16 aa, Homo Sapiens
CHSGYVGARCEHADLL

SEQ ID NO: 10220 - protein, 16 aa, Homo Sapiens
HSGYVGARCEHADLLA

SEQ ID NO: 10221 - protein, 16 aa, Homo Sapiens
SGYVGARCEHADLLAV

SEQ ID NO: 10222 - protein, 16 aa, Homo Sapiens
GYVGARCEHADLLAVV

SEQ ID NO: 10223 - protein, 16 aa, Homo Sapiens
YVGARCEHADLLAVVA

SEQ ID NO: 10224 - protein, 16 aa, Homo Sapiens
VGARCEHADLLAVVAA

SEQ ID NO: 10225 - protein, 16 aa, Homo Sapiens
GARCEHADLLAVVAAS

SEQ ID NO: 10226 - protein, 16 aa, Homo Sapiens
ARCEHADLLAVVAASQ

SEQ ID NO: 10227 - protein, 16 aa, Homo Sapiens
RCEHADLLAVVAASQK

SEQ ID NO: 10228 - protein, 16 aa, Homo Sapiens
CEHADLLAVVAASQKK

SEQ ID NO: 10229 - protein, 16 aa, Homo Sapiens
EHADLLAVVAASQKKQ

SEQ ID NO: 10230 - protein, 16 aa, Homo Sapiens
HADLLAVVAASQKKQA

SEQ ID NO: 10231 - protein, 16 aa, Homo Sapiens
ADLLAVVAASQKKQAI

SEQ ID NO: 10232 - protein, 16 aa, Homo Sapiens
DLLAVVAASQKKQAIT

SEQ ID NO: 10233 - protein, 16 aa, Homo Sapiens
LLAVVAASQKKQAITA

SEQ ID NO: 10234 - protein, 16 aa, Homo Sapiens
LAVVAASQKKQAITAL

SEQ ID NO: 10235 - protein, 16 aa, Homo Sapiens
AVVAASQKKQAITALV

SEQ ID NO: 10236 - protein, 16 aa, Homo Sapiens
VVAASQKKQAITALVV

SEQ ID NO: 10237 - protein, 16 aa, Homo Sapiens
VAASQKKQAITALVVV

SEQ ID NO: 10238 - protein, 16 aa, Homo Sapiens
AASQKKQAITALVVVS

SEQ ID NO: 10239 - protein, 16 aa, Homo Sapiens
ASQKKQAITALVVVSI

SEQ ID NO: 10240 - protein, 16 aa, Homo Sapiens
SQKKQAITALVVVSIV

SEQ ID NO: 10241 - protein, 16 aa, Homo Sapiens
QKKQAITALVVVSIVA

SEQ ID NO: 10242 - protein, 16 aa, Homo Sapiens
KKQAITALVVVSIVAL

SEQ ID NO: 10243 - protein, 16 aa, Homo Sapiens
KQAITALVVVSIVALA

SEQ ID NO: 10244 - protein, 16 aa, Homo Sapiens
QAITALVVVSIVALAV

SEQ ID NO: 10245 - protein, 16 aa, Homo Sapiens
AITALVVVSIVALAVL

SEQ ID NO: 10246 - protein, 16 aa, Homo Sapiens
ITALVVVSIVALAVLI

SEQ ID NO: 10247 - protein, 16 aa, Homo Sapiens
TALVVVSIVALAVLII

SEQ ID NO: 10248 - protein, 16 aa, Homo Sapiens
ALVVVSIVALAVLIIT

SEQ ID NO: 10249 - protein, 16 aa, Homo Sapiens
LVVVSIVALAVLIITC

SEQ ID NO: 10250 - protein, 16 aa, Homo Sapiens
VVVSIVALAVLIITCV

SEQ ID NO: 10251 - protein, 16 aa, Homo Sapiens
VVSIVALAVLIITCVL

SEQ ID NO: 10252 - protein, 16 aa, Homo Sapiens
VSIVALAVLIITCVLI

SEQ ID NO: 10253 - protein, 16 aa, Homo Sapiens
SIVALAVLIITCVLIH

SEQ ID NO: 10254 - protein, 16 aa, Homo Sapiens
IVALAVLIITCVLIHC

SEQ ID NO: 10255 - protein, 16 aa, Homo Sapiens
VALAVLIITCVLIHCC

SEQ ID NO: 10256 - protein, 16 aa, Homo Sapiens
ALAVLIITCVLIHCCQ

SEQ ID NO: 10257 - protein, 16 aa, Homo Sapiens
LAVLIITCVLIHCCQV

SEQ ID NO: 10258 - protein, 16 aa, Homo Sapiens
AVLIITCVLIHCCQVR

SEQ ID NO: 10259 - protein, 16 aa, Homo Sapiens
VLIITCVLIHCCQVRK

SEQ ID NO: 10260 - protein, 16 aa, Homo Sapiens
LIITCVLIHCCQVRKH

SEQ ID NO: 10261 - protein, 16 aa, Homo Sapiens
IITCVLIHCCQVRKHC

SEQ ID NO: 10262 - protein, 16 aa, Homo Sapiens
ITCVLIHCCQVRKHCE

SEQ ID NO: 10263 - protein, 16 aa, Homo Sapiens
TCVLIHCCQVRKHCEW

SEQ ID NO: 10264 - protein, 16 aa, Homo Sapiens
CVLIHCCQVRKHCEWC

SEQ ID NO: 10265 - protein, 16 aa, Homo Sapiens
VLIHCCQVRKHCEWCR

SEQ ID NO: 10266 - protein, 16 aa, Homo Sapiens
LIHCCQVRKHCEWCRA

SEQ ID NO: 10267 - protein, 16 aa, Homo Sapiens
IHCCQVRKHCEWCRAL

SEQ ID NO: 10268 - protein, 16 aa, Homo Sapiens
HCCQVRKHCEWCRALI

SEQ ID NO: 10269 - protein, 16 aa, Homo Sapiens
CCQVRKHCEWCRALIC

SEQ ID NO: 10270 - protein, 16 aa, Homo Sapiens
CQVRKHCEWCRALICR

SEQ ID NO: 10271 - protein, 16 aa, Homo Sapiens
QVRKHCEWCRALICRH

SEQ ID NO: 10272 - protein, 16 aa, Homo Sapiens
VRKHCEWCRALICRHE

SEQ ID NO: 10273 - protein, 16 aa, Homo Sapiens
RKHCEWCRALICRHEK

SEQ ID NO: 10274 - protein, 16 aa, Homo Sapiens
KHCEWCRALICRHEKP

SEQ ID NO: 10275 - protein, 16 aa, Homo Sapiens
HCEWCRALICRHEKPS

SEQ ID NO: 10276 - protein, 16 aa, Homo Sapiens
CEWCRALICRHEKPSA

SEQ ID NO: 10277 - protein, 16 aa, Homo Sapiens
EWCRALICRHEKPSAL

SEQ ID NO: 10278 - protein, 16 aa, Homo Sapiens
WCRALICRHEKPSALL

SEQ ID NO: 10279 - protein, 16 aa, Homo Sapiens
CRALICRHEKPSALLK

SEQ ID NO: 10280 - protein, 16 aa, Homo Sapiens
RALICRHEKPSALLKG

SEQ ID NO: 10281 - protein, 16 aa, Homo Sapiens
ALICRHEKPSALLKGR

SEQ ID NO: 10282 - protein, 16 aa, Homo Sapiens
LICRHEKPSALLKGRT

SEQ ID NO: 10283 - protein, 16 aa, Homo Sapiens
ICRHEKPSALLKGRTA

SEQ ID NO: 10284 - protein, 16 aa, Homo Sapiens
CRHEKPSALLKGRTAC

SEQ ID NO: 10285 - protein, 16 aa, Homo Sapiens
RHEKPSALLKGRTACC

SEQ ID NO: 10286 - protein, 16 aa, Homo Sapiens
HEKPSALLKGRTACCH

SEQ ID NO: 10287 - protein, 16 aa, Homo Sapiens
EKPSALLKGRTACCHS

SEQ ID NO: 10288 - protein, 16 aa, Homo Sapiens
KPSALLKGRTACCHSE

SEQ ID NO: 10289 - protein, 16 aa, Homo Sapiens
PSALLKGRTACCHSET

SEQ ID NO: 10290 - protein, 16 aa, Homo Sapiens
SALLKGRTACCHSETV

SEQ ID NO: 10291 - protein, 16 aa, Homo Sapiens
ALLKGRTACCHSETVV

SEQ ID NO: 10292 - protein, 159 aa, Homo Sapiens
MVPSAGQLALFALGIVLAACQALENSTSPLSDPPVAAAVVSHFNDCPDSHTQFCFHGTCRFLVQEDKPACVCHSGYVGARCEHADLLAVVAASQKKQAITALVVVSIVALAVLIITCVLIHCCQVRKHCEWCRALICRHEKPSALLKGRTACCHSETVV

SEQ ID NO: 10293 - protein, 8 aa, Homo Sapiens
LENSTSPL

SEQ ID NO: 10294 - protein, 8 aa, Homo Sapiens
SPLSDPPV

SEQ ID NO: 10295 - protein, 8 aa, Homo Sapiens
PLSDPPVA

SEQ ID NO: 10296 - protein, 8 aa, Homo Sapiens
DPPVAAAV

SEQ ID NO: 10297 - protein, 8 aa, Homo Sapiens
PPVAAAVV

SEQ ID NO: 10298 - protein, 8 aa, Homo Sapiens
AAAVVSHF

SEQ ID NO: 10299 - protein, 9 aa, Homo Sapiens
ALENSTSPL

SEQ ID NO: 10300 - protein, 9 aa, Homo Sapiens
TSPLSDPPV

SEQ ID NO: 10301 - protein, 9 aa, Homo Sapiens
PLSDPPVAA

SEQ ID NO: 10302 - protein, 9 aa, Homo Sapiens
DPPVAAAVV

SEQ ID NO: 10303 - protein, 9 aa, Homo Sapiens
VAAAVVSHF

SEQ ID NO: 10304 - protein, 10 aa, Homo Sapiens
QALENSTSPL

SEQ ID NO: 10305 - protein, 10 aa, Homo Sapiens
STSPLSDPPV

SEQ ID NO: 10306 - protein, 10 aa, Homo Sapiens
SPLSDPPVAA

SEQ ID NO: 10307 - protein, 10 aa, Homo Sapiens
PLSDPPVAAA

SEQ ID NO: 10308 - protein, 10 aa, Homo Sapiens
LSDPPVAAAV

SEQ ID NO: 10309 - protein, 10 aa, Homo Sapiens
PVAAAVVSHF

SEQ ID NO: 10310 - protein, 11 aa, Homo Sapiens
CQALENSTSPL

SEQ ID NO: 10311 - protein, 11 aa, Homo Sapiens
NSTSPLSDPPV

SEQ ID NO: 10312 - protein, 11 aa, Homo Sapiens
SPLSDPPVAAA

SEQ ID NO: 10313 - protein, 11 aa, Homo Sapiens
PLSDPPVAAAV

SEQ ID NO: 10314 - protein, 11 aa, Homo Sapiens
LSDPPVAAAVV

SEQ ID NO: 10315 - protein, 11 aa, Homo Sapiens
DPPVAAAVVSH

SEQ ID NO: 10316 - protein, 11 aa, Homo Sapiens
PPVAAAVVSHF

SEQ ID NO: 10317 - protein, 13 aa, Homo Sapiens
MVPSAGQLALFAL

SEQ ID NO: 10318 - protein, 13 aa, Homo Sapiens
VPSAGQLALFALG

SEQ ID NO: 10319 - protein, 13 aa, Homo Sapiens
PSAGQLALFALGI

SEQ ID NO: 10320 - protein, 13 aa, Homo Sapiens
SAGQLALFALGIV

SEQ ID NO: 10321 - protein, 13 aa, Homo Sapiens
AGQLALFALGIVL

SEQ ID NO: 10322 - protein, 13 aa, Homo Sapiens
GQLALFALGIVLA

SEQ ID NO: 10323 - protein, 13 aa, Homo Sapiens
QLALFALGIVLAA

SEQ ID NO: 10324 - protein, 13 aa, Homo Sapiens
LALFALGIVLAAC

SEQ ID NO: 10325 - protein, 13 aa, Homo Sapiens
ALFALGIVLAACQ

SEQ ID NO: 10326 - protein, 13 aa, Homo Sapiens
LFALGIVLAACQA

SEQ ID NO: 10327 - protein, 13 aa, Homo Sapiens
FALGIVLAACQAL

SEQ ID NO: 10328 - protein, 13 aa, Homo Sapiens
ALGIVLAACQALE

SEQ ID NO: 10329 - protein, 13 aa, Homo Sapiens
LGIVLAACQALEN

SEQ ID NO: 10330 - protein, 13 aa, Homo Sapiens
GIVLAACQALENS

SEQ ID NO: 10331 - protein, 13 aa, Homo Sapiens
IVLAACQALENST

SEQ ID NO: 10332 - protein, 13 aa, Homo Sapiens
VLAACQALENSTS

SEQ ID NO: 10333 - protein, 13 aa, Homo Sapiens
LAACQALENSTSP

SEQ ID NO: 10334 - protein, 13 aa, Homo Sapiens
AACQALENSTSPL

SEQ ID NO: 10335 - protein, 13 aa, Homo Sapiens
ACQALENSTSPLS

SEQ ID NO: 10336 - protein, 13 aa, Homo Sapiens
CQALENSTSPLSA

SEQ ID NO: 10337 - protein, 13 aa, Homo Sapiens
QALENSTSPLSAD

SEQ ID NO: 10338 - protein, 13 aa, Homo Sapiens
ALENSTSPLSADP

SEQ ID NO: 10339 - protein, 13 aa, Homo Sapiens
LENSTSPLSADPP

SEQ ID NO: 10340 - protein, 13 aa, Homo Sapiens
ENSTSPLSADPPV

SEQ ID NO: 10341 - protein, 13 aa, Homo Sapiens
NSTSPLSADPPVA

SEQ ID NO: 10342 - protein, 13 aa, Homo Sapiens
STSPLSADPPVAA

SEQ ID NO: 10343 - protein, 13 aa, Homo Sapiens
TSPLSADPPVAAA

SEQ ID NO: 10344 - protein, 13 aa, Homo Sapiens
SPLSADPPVAAAV

SEQ ID NO: 10345 - protein, 13 aa, Homo Sapiens
PLSADPPVAAAVV

SEQ ID NO: 10346 - protein, 13 aa, Homo Sapiens
LSADPPVAAAVVS

SEQ ID NO: 10347 - protein, 13 aa, Homo Sapiens
SADPPVAAAVVSH

SEQ ID NO: 10348 - protein, 13 aa, Homo Sapiens
ADPPVAAAVVSHF

SEQ ID NO: 10349 - protein, 13 aa, Homo Sapiens
DPPVAAAVVSHFN

SEQ ID NO: 10350 - protein, 13 aa, Homo Sapiens
PPVAAAVVSHFND

SEQ ID NO: 10351 - protein, 13 aa, Homo Sapiens
PVAAAVVSHFNDC

SEQ ID NO: 10352 - protein, 13 aa, Homo Sapiens
VAAAVVSHFNDCP

SEQ ID NO: 10353 - protein, 13 aa, Homo Sapiens
AAAVVSHFNDCPD

SEQ ID NO: 10354 - protein, 13 aa, Homo Sapiens
AAVVSHFNDCPDS

SEQ ID NO: 10355 - protein, 13 aa, Homo Sapiens
AVVSHFNDCPDSH

SEQ ID NO: 10356 - protein, 13 aa, Homo Sapiens
VVSHFNDCPDSHT

SEQ ID NO: 10357 - protein, 13 aa, Homo Sapiens
VSHFNDCPDSHTQ

SEQ ID NO: 10358 - protein, 13 aa, Homo Sapiens
SHFNDCPDSHTQF

SEQ ID NO: 10359 - protein, 13 aa, Homo Sapiens
HFNDCPDSHTQFC

SEQ ID NO: 10360 - protein, 13 aa, Homo Sapiens
FNDCPDSHTQFCF

SEQ ID NO: 10361 - protein, 13 aa, Homo Sapiens
NDCPDSHTQFCFH

SEQ ID NO: 10362 - protein, 13 aa, Homo Sapiens
DCPDSHTQFCFHG

SEQ ID NO: 10363 - protein, 13 aa, Homo Sapiens
CPDSHTQFCFHGT

SEQ ID NO: 10364 - protein, 13 aa, Homo Sapiens
PDSHTQFCFHGTC

SEQ ID NO: 10365 - protein, 13 aa, Homo Sapiens
DSHTQFCFHGTCR

SEQ ID NO: 10366 - protein, 13 aa, Homo Sapiens
SHTQFCFHGTCRF

SEQ ID NO: 10367 - protein, 13 aa, Homo Sapiens
HTQFCFHGTCRFL

SEQ ID NO: 10368 - protein, 13 aa, Homo Sapiens
TQFCFHGTCRFLV

SEQ ID NO: 10369 - protein, 13 aa, Homo Sapiens
QFCFHGTCRFLVQ

SEQ ID NO: 10370 - protein, 13 aa, Homo Sapiens
FCFHGTCRFLVQE

SEQ ID NO: 10371 - protein, 13 aa, Homo Sapiens
CFHGTCRFLVQED

SEQ ID NO: 10372 - protein, 13 aa, Homo Sapiens
FHGTCRFLVQEDK

SEQ ID NO: 10373 - protein, 13 aa, Homo Sapiens
HGTCRFLVQEDKP

SEQ ID NO: 10374 - protein, 13 aa, Homo Sapiens
GTCRFLVQEDKPA

SEQ ID NO: 10375 - protein, 13 aa, Homo Sapiens
TCRFLVQEDKPAC

SEQ ID NO: 10376 - protein, 13 aa, Homo Sapiens
CRFLVQEDKPACV

SEQ ID NO: 10377 - protein, 13 aa, Homo Sapiens
RFLVQEDKPACVC

SEQ ID NO: 10378 - protein, 13 aa, Homo Sapiens
FLVQEDKPACVCH

SEQ ID NO: 10379 - protein, 13 aa, Homo Sapiens
LVQEDKPACVCHS

SEQ ID NO: 10380 - protein, 13 aa, Homo Sapiens
VQEDKPACVCHSG

SEQ ID NO: 10381 - protein, 13 aa, Homo Sapiens
QEDKPACVCHSGY

SEQ ID NO: 10382 - protein, 13 aa, Homo Sapiens
EDKPACVCHSGYV

SEQ ID NO: 10383 - protein, 13 aa, Homo Sapiens
DKPACVCHSGYVG

SEQ ID NO: 10384 - protein, 13 aa, Homo Sapiens
KPACVCHSGYVGA

SEQ ID NO: 10385 - protein, 13 aa, Homo Sapiens
PACVCHSGYVGAR

SEQ ID NO: 10386 - protein, 13 aa, Homo Sapiens
ACVCHSGYVGARC

SEQ ID NO: 10387 - protein, 13 aa, Homo Sapiens
CVCHSGYVGARCE

SEQ ID NO: 10388 - protein, 13 aa, Homo Sapiens
VCHSGYVGARCEH

SEQ ID NO: 10389 - protein, 13 aa, Homo Sapiens
CHSGYVGARCEHA

SEQ ID NO: 10390 - protein, 13 aa, Homo Sapiens
HSGYVGARCEHAD

SEQ ID NO: 10391 - protein, 13 aa, Homo Sapiens
SGYVGARCEHADL

SEQ ID NO: 10392 - protein, 13 aa, Homo Sapiens
GYVGARCEHADLL

SEQ ID NO: 10393 - protein, 13 aa, Homo Sapiens
YVGARCEHADLLA

SEQ ID NO: 10394 - protein, 13 aa, Homo Sapiens
VGARCEHADLLAV

SEQ ID NO: 10395 - protein, 13 aa, Homo Sapiens
GARCEHADLLAVV

SEQ ID NO: 10396 - protein, 13 aa, Homo Sapiens
ARCEHADLLAVVA

SEQ ID NO: 10397 - protein, 13 aa, Homo Sapiens
RCEHADLLAVVAA

SEQ ID NO: 10398 - protein, 13 aa, Homo Sapiens
CEHADLLAVVAAS

SEQ ID NO: 10399 - protein, 13 aa, Homo Sapiens
EHADLLAVVAASQ

SEQ ID NO: 10400 - protein, 13 aa, Homo Sapiens
HADLLAVVAASQK

SEQ ID NO: 10401 - protein, 13 aa, Homo Sapiens
ADLLAVVAASQKK

SEQ ID NO: 10402 - protein, 13 aa, Homo Sapiens
DLLAVVAASQKKQ

SEQ ID NO: 10403 - protein, 13 aa, Homo Sapiens
LLAVVAASQKKQA

SEQ ID NO: 10404 - protein, 13 aa, Homo Sapiens
LAVVAASQKKQAI

SEQ ID NO: 10405 - protein, 13 aa, Homo Sapiens
AVVAASQKKQAIT

SEQ ID NO: 10406 - protein, 13 aa, Homo Sapiens
VVAASQKKQAITA

SEQ ID NO: 10407 - protein, 13 aa, Homo Sapiens
VAASQKKQAITAL

SEQ ID NO: 10408 - protein, 13 aa, Homo Sapiens
AASQKKQAITALV

SEQ ID NO: 10409 - protein, 13 aa, Homo Sapiens
ASQKKQAITALVV

SEQ ID NO: 10410 - protein, 13 aa, Homo Sapiens
SQKKQAITALVVV

SEQ ID NO: 10411 - protein, 13 aa, Homo Sapiens
QKKQAITALVVVS

SEQ ID NO: 10412 - protein, 13 aa, Homo Sapiens
KKQAITALVVVSI

SEQ ID NO: 10413 - protein, 13 aa, Homo Sapiens
KQAITALVVVSIV

SEQ ID NO: 10414 - protein, 13 aa, Homo Sapiens
QAITALVVVSIVA

SEQ ID NO: 10415 - protein, 13 aa, Homo Sapiens
AITALVVVSIVAL

SEQ ID NO: 10416 - protein, 13 aa, Homo Sapiens
ITALVVVSIVALA

SEQ ID NO: 10417 - protein, 13 aa, Homo Sapiens
TALVVVSIVALAV

SEQ ID NO: 10418 - protein, 13 aa, Homo Sapiens
ALVVVSIVALAVL

SEQ ID NO: 10419 - protein, 13 aa, Homo Sapiens
LVVVSIVALAVLI

SEQ ID NO: 10420 - protein, 13 aa, Homo Sapiens
VVVSIVALAVLII

SEQ ID NO: 10421 - protein, 13 aa, Homo Sapiens
VVSIVALAVLIIT

SEQ ID NO: 10422 - protein, 13 aa, Homo Sapiens
VSIVALAVLIITC

SEQ ID NO: 10423 - protein, 13 aa, Homo Sapiens
SIVALAVLIITCV

SEQ ID NO: 10424 - protein, 13 aa, Homo Sapiens
IVALAVLIITCVL

SEQ ID NO: 10425 - protein, 13 aa, Homo Sapiens
VALAVLIITCVLI

SEQ ID NO: 10426 - protein, 13 aa, Homo Sapiens
ALAVLIITCVLIH

SEQ ID NO: 10427 - protein, 13 aa, Homo Sapiens
LAVLIITCVLIHC

SEQ ID NO: 10428 - protein, 13 aa, Homo Sapiens
AVLIITCVLIHCC

SEQ ID NO: 10429 - protein, 13 aa, Homo Sapiens
VLIITCVLIHCCQ

SEQ ID NO: 10430 - protein, 13 aa, Homo Sapiens
LIITCVLIHCCQV

SEQ ID NO: 10431 - protein, 13 aa, Homo Sapiens
IITCVLIHCCQVR

SEQ ID NO: 10432 - protein, 13 aa, Homo Sapiens
ITCVLIHCCQVRK

SEQ ID NO: 10433 - protein, 13 aa, Homo Sapiens
TCVLIHCCQVRKH

SEQ ID NO: 10434 - protein, 13 aa, Homo Sapiens
CVLIHCCQVRKHC

SEQ ID NO: 10435 - protein, 13 aa, Homo Sapiens
VLIHCCQVRKHCE

SEQ ID NO: 10436 - protein, 13 aa, Homo Sapiens
LIHCCQVRKHCEW

SEQ ID NO: 10437 - protein, 13 aa, Homo Sapiens
IHCCQVRKHCEWC

SEQ ID NO: 10438 - protein, 13 aa, Homo Sapiens
HCCQVRKHCEWCR

SEQ ID NO: 10439 - protein, 13 aa, Homo Sapiens
CCQVRKHCEWCRA

SEQ ID NO: 10440 - protein, 13 aa, Homo Sapiens
CQVRKHCEWCRAL

SEQ ID NO: 10441 - protein, 13 aa, Homo Sapiens
QVRKHCEWCRALI

SEQ ID NO: 10442 - protein, 13 aa, Homo Sapiens
VRKHCEWCRALIC

SEQ ID NO: 10443 - protein, 13 aa, Homo Sapiens
RKHCEWCRALICR

SEQ ID NO: 10444 - protein, 13 aa, Homo Sapiens
KHCEWCRALICRH

SEQ ID NO: 10445 - protein, 13 aa, Homo Sapiens
HCEWCRALICRHE

SEQ ID NO: 10446 - protein, 13 aa, Homo Sapiens
CEWCRALICRHEK

SEQ ID NO: 10447 - protein, 13 aa, Homo Sapiens
EWCRALICRHEKP

SEQ ID NO: 10448 - protein, 13 aa, Homo Sapiens
WCRALICRHEKPS

SEQ ID NO: 10449 - protein, 13 aa, Homo Sapiens
CRALICRHEKPSA

SEQ ID NO: 10450 - protein, 13 aa, Homo Sapiens
RALICRHEKPSAL

SEQ ID NO: 10451 - protein, 13 aa, Homo Sapiens
ALICRHEKPSALL

SEQ ID NO: 10452 - protein, 13 aa, Homo Sapiens
LICRHEKPSALLK

SEQ ID NO: 10453 - protein, 13 aa, Homo Sapiens
ICRHEKPSALLKG

SEQ ID NO: 10454 - protein, 13 aa, Homo Sapiens
CRHEKPSALLKGR

SEQ ID NO: 10455 - protein, 13 aa, Homo Sapiens
RHEKPSALLKGRT

SEQ ID NO: 10456 - protein, 13 aa, Homo Sapiens
HEKPSALLKGRTA

SEQ ID NO: 10457 - protein, 13 aa, Homo Sapiens
EKPSALLKGRTAC

SEQ ID NO: 10458 - protein, 13 aa, Homo Sapiens
KPSALLKGRTACC

SEQ ID NO: 10459 - protein, 13 aa, Homo Sapiens
PSALLKGRTACCH

SEQ ID NO: 10460 - protein, 13 aa, Homo Sapiens
SALLKGRTACCHS

SEQ ID NO: 10461 - protein, 13 aa, Homo Sapiens
ALLKGRTACCHSE

SEQ ID NO: 10462 - protein, 13 aa, Homo Sapiens
LLKGRTACCHSET

SEQ ID NO: 10463 - protein, 13 aa, Homo Sapiens
LKGRTACCHSETV

SEQ ID NO: 10464 - protein, 13 aa, Homo Sapiens
KGRTACCHSETVV

SEQ ID NO: 10465 - protein, 14 aa, Homo Sapiens
MVPSAGQLALFALG

SEQ ID NO: 10466 - protein, 14 aa, Homo Sapiens
VPSAGQLALFALGI

SEQ ID NO: 10467 - protein, 14 aa, Homo Sapiens
PSAGQLALFALGIV

SEQ ID NO: 10468 - protein, 14 aa, Homo Sapiens
SAGQLALFALGIVL

SEQ ID NO: 10469 - protein, 14 aa, Homo Sapiens
AGQLALFALGIVLA

SEQ ID NO: 10470 - protein, 14 aa, Homo Sapiens
GQLALFALGIVLAA

SEQ ID NO: 10471 - protein, 14 aa, Homo Sapiens
QLALFALGIVLAAC

SEQ ID NO: 10472 - protein, 14 aa, Homo Sapiens
LALFALGIVLAACQ

SEQ ID NO: 10473 - protein, 14 aa, Homo Sapiens
ALFALGIVLAACQA

SEQ ID NO: 10474 - protein, 14 aa, Homo Sapiens
LFALGIVLAACQAL

SEQ ID NO: 10475 - protein, 14 aa, Homo Sapiens
FALGIVLAACQALE

SEQ ID NO: 10476 - protein, 14 aa, Homo Sapiens
ALGIVLAACQALEN

SEQ ID NO: 10477 - protein, 14 aa, Homo Sapiens
LGIVLAACQALENS

SEQ ID NO: 10478 - protein, 14 aa, Homo Sapiens
GIVLAACQALENST

SEQ ID NO: 10479 - protein, 14 aa, Homo Sapiens
IVLAACQALENSTS

SEQ ID NO: 10480 - protein, 14 aa, Homo Sapiens
VLAACQALENSTSP

SEQ ID NO: 10481 - protein, 14 aa, Homo Sapiens
LAACQALENSTSPL

SEQ ID NO: 10482 - protein, 14 aa, Homo Sapiens
AACQALENSTSPLS

SEQ ID NO: 10483 - protein, 14 aa, Homo Sapiens
ACQALENSTSPLSA

SEQ ID NO: 10484 - protein, 14 aa, Homo Sapiens
CQALENSTSPLSAD

SEQ ID NO: 10485 - protein, 14 aa, Homo Sapiens
QALENSTSPLSADP

SEQ ID NO: 10486 - protein, 14 aa, Homo Sapiens
ALENSTSPLSADPP

SEQ ID NO: 10487 - protein, 14 aa, Homo Sapiens
LENSTSPLSADPPV

SEQ ID NO: 10488 - protein, 14 aa, Homo Sapiens
ENSTSPLSADPPVA

SEQ ID NO: 10489 - protein, 14 aa, Homo Sapiens
NSTSPLSADPPVAA

SEQ ID NO: 10490 - protein, 14 aa, Homo Sapiens
STSPLSADPPVAAA

SEQ ID NO: 10491 - protein, 14 aa, Homo Sapiens
TSPLSADPPVAAAV

SEQ ID NO: 10492 - protein, 14 aa, Homo Sapiens
SPLSADPPVAAAVV

SEQ ID NO: 10493 - protein, 14 aa, Homo Sapiens
PLSADPPVAAAVVS

SEQ ID NO: 10494 - protein, 14 aa, Homo Sapiens
LSADPPVAAAVVSH

SEQ ID NO: 10495 - protein, 14 aa, Homo Sapiens
SADPPVAAAVVSHF

SEQ ID NO: 10496 - protein, 14 aa, Homo Sapiens
ADPPVAAAVVSHFN

SEQ ID NO: 10497 - protein, 14 aa, Homo Sapiens
DPPVAAAVVSHFND

SEQ ID NO: 10498 - protein, 14 aa, Homo Sapiens
PPVAAAVVSHFNDC

SEQ ID NO: 10499 - protein, 14 aa, Homo Sapiens
PVAAAVVSHFNDCP

SEQ ID NO: 10500 - protein, 14 aa, Homo Sapiens
VAAAVVSHFNDCPD

SEQ ID NO: 10501 - protein, 14 aa, Homo Sapiens
AAAVVSHFNDCPDS

SEQ ID NO: 10502 - protein, 14 aa, Homo Sapiens
AAVVSHFNDCPDSH

SEQ ID NO: 10503 - protein, 14 aa, Homo Sapiens
AVVSHFNDCPDSHT

SEQ ID NO: 10504 - protein, 14 aa, Homo Sapiens
VVSHFNDCPDSHTQ

SEQ ID NO: 10505 - protein, 14 aa, Homo Sapiens
VSHFNDCPDSHTQF

SEQ ID NO: 10506 - protein, 14 aa, Homo Sapiens
SHFNDCPDSHTQFC

SEQ ID NO: 10507 - protein, 14 aa, Homo Sapiens
HFNDCPDSHTQFCF

SEQ ID NO: 10508 - protein, 14 aa, Homo Sapiens
FNDCPDSHTQFCFH

SEQ ID NO: 10509 - protein, 14 aa, Homo Sapiens
NDCPDSHTQFCFHG

SEQ ID NO: 10510 - protein, 14 aa, Homo Sapiens
DCPDSHTQFCFHGT

SEQ ID NO: 10511 - protein, 14 aa, Homo Sapiens
CPDSHTQFCFHGTC

SEQ ID NO: 10512 - protein, 14 aa, Homo Sapiens
PDSHTQFCFHGTCR

SEQ ID NO: 10513 - protein, 14 aa, Homo Sapiens
DSHTQFCFHGTCRF

SEQ ID NO: 10514 - protein, 14 aa, Homo Sapiens
SHTQFCFHGTCRFL

SEQ ID NO: 10515 - protein, 14 aa, Homo Sapiens
HTQFCFHGTCRFLV

SEQ ID NO: 10516 - protein, 14 aa, Homo Sapiens
TQFCFHGTCRFLVQ

SEQ ID NO: 10517 - protein, 14 aa, Homo Sapiens
QFCFHGTCRFLVQE

SEQ ID NO: 10518 - protein, 14 aa, Homo Sapiens
FCFHGTCRFLVQED

SEQ ID NO: 10519 - protein, 14 aa, Homo Sapiens
CFHGTCRFLVQEDK

SEQ ID NO: 10520 - protein, 14 aa, Homo Sapiens
FHGTCRFLVQEDKP

SEQ ID NO: 10521 - protein, 14 aa, Homo Sapiens
HGTCRFLVQEDKPA

SEQ ID NO: 10522 - protein, 14 aa, Homo Sapiens
GTCRFLVQEDKPAC

SEQ ID NO: 10523 - protein, 14 aa, Homo Sapiens
TCRFLVQEDKPACV

SEQ ID NO: 10524 - protein, 14 aa, Homo Sapiens
CRFLVQEDKPACVC

SEQ ID NO: 10525 - protein, 14 aa, Homo Sapiens
RFLVQEDKPACVCH

SEQ ID NO: 10526 - protein, 14 aa, Homo Sapiens
FLVQEDKPACVCHS

SEQ ID NO: 10527 - protein, 14 aa, Homo Sapiens
LVQEDKPACVCHSG

SEQ ID NO: 10528 - protein, 14 aa, Homo Sapiens
VQEDKPACVCHSGY

SEQ ID NO: 10529 - protein, 14 aa, Homo Sapiens
QEDKPACVCHSGYV

SEQ ID NO: 10530 - protein, 14 aa, Homo Sapiens
EDKPACVCHSGYVG

SEQ ID NO: 10531 - protein, 14 aa, Homo Sapiens
DKPACVCHSGYVGA

SEQ ID NO: 10532 - protein, 14 aa, Homo Sapiens
KPACVCHSGYVGAR

SEQ ID NO: 10533 - protein, 14 aa, Homo Sapiens
PACVCHSGYVGARC

SEQ ID NO: 10534 - protein, 14 aa, Homo Sapiens
ACVCHSGYVGARCE

SEQ ID NO: 10535 - protein, 14 aa, Homo Sapiens
CVCHSGYVGARCEH

SEQ ID NO: 10536 - protein, 14 aa, Homo Sapiens
VCHSGYVGARCEHA

SEQ ID NO: 10537 - protein, 14 aa, Homo Sapiens
CHSGYVGARCEHAD

SEQ ID NO: 10538 - protein, 14 aa, Homo Sapiens
HSGYVGARCEHADL

SEQ ID NO: 10539 - protein, 14 aa, Homo Sapiens
SGYVGARCEHADLL

SEQ ID NO: 10540 - protein, 14 aa, Homo Sapiens
GYVGARCEHADLLA

SEQ ID NO: 10541 - protein, 14 aa, Homo Sapiens
YVGARCEHADLLAV

SEQ ID NO: 10542 - protein, 14 aa, Homo Sapiens
VGARCEHADLLAVV

SEQ ID NO: 10543 - protein, 14 aa, Homo Sapiens
GARCEHADLLAVVA

SEQ ID NO: 10544 - protein, 14 aa, Homo Sapiens
ARCEHADLLAVVAA

SEQ ID NO: 10545 - protein, 14 aa, Homo Sapiens
RCEHADLLAVVAAS

SEQ ID NO: 10546 - protein, 14 aa, Homo Sapiens
CEHADLLAVVAASQ

SEQ ID NO: 10547 - protein, 14 aa, Homo Sapiens
EHADLLAVVAASQK

SEQ ID NO: 10548 - protein, 14 aa, Homo Sapiens
HADLLAVVAASQKK

SEQ ID NO: 10549 - protein, 14 aa, Homo Sapiens
ADLLAVVAASQKKQ

SEQ ID NO: 10550 - protein, 14 aa, Homo Sapiens
DLLAVVAASQKKQA

SEQ ID NO: 10551 - protein, 14 aa, Homo Sapiens
LLAVVAASQKKQAI

SEQ ID NO: 10552 - protein, 14 aa, Homo Sapiens
LAVVAASQKKQAIT

SEQ ID NO: 10553 - protein, 14 aa, Homo Sapiens
AVVAASQKKQAITA

SEQ ID NO: 10554 - protein, 14 aa, Homo Sapiens
VVAASQKKQAITAL

SEQ ID NO: 10555 - protein, 14 aa, Homo Sapiens
VAASQKKQAITALV

SEQ ID NO: 10556 - protein, 14 aa, Homo Sapiens
AASQKKQAITALVV

SEQ ID NO: 10557 - protein, 14 aa, Homo Sapiens
ASQKKQAITALVVV

SEQ ID NO: 10558 - protein, 14 aa, Homo Sapiens
SQKKQAITALVVVS

SEQ ID NO: 10559 - protein, 14 aa, Homo Sapiens
QKKQAITALVVVSI

SEQ ID NO: 10560 - protein, 14 aa, Homo Sapiens
KKQAITALVVVSIV

SEQ ID NO: 10561 - protein, 14 aa, Homo Sapiens
KQAITALVVVSIVA

SEQ ID NO: 10562 - protein, 14 aa, Homo Sapiens
QAITALVVVSIVAL

SEQ ID NO: 10563 - protein, 14 aa, Homo Sapiens
AITALVVVSIVALA

SEQ ID NO: 10564 - protein, 14 aa, Homo Sapiens
ITALVVVSIVALAV

SEQ ID NO: 10565 - protein, 14 aa, Homo Sapiens
TALVVVSIVALAVL

SEQ ID NO: 10566 - protein, 14 aa, Homo Sapiens
ALVVVSIVALAVLI

SEQ ID NO: 10567 - protein, 14 aa, Homo Sapiens
LVVVSIVALAVLII

SEQ ID NO: 10568 - protein, 14 aa, Homo Sapiens
VVVSIVALAVLIIT

SEQ ID NO: 10569 - protein, 14 aa, Homo Sapiens
VVSIVALAVLIITC

SEQ ID NO: 10570 - protein, 14 aa, Homo Sapiens
VSIVALAVLIITCV

SEQ ID NO: 10571 - protein, 14 aa, Homo Sapiens
SIVALAVLIITCVL

SEQ ID NO: 10572 - protein, 14 aa, Homo Sapiens
IVALAVLIITCVLI

SEQ ID NO: 10573 - protein, 14 aa, Homo Sapiens
VALAVLIITCVLIH

SEQ ID NO: 10574 - protein, 14 aa, Homo Sapiens
ALAVLIITCVLIHC

SEQ ID NO: 10575 - protein, 14 aa, Homo Sapiens
LAVLIITCVLIHCC

SEQ ID NO: 10576 - protein, 14 aa, Homo Sapiens
AVLIITCVLIHCCQ

SEQ ID NO: 10577 - protein, 14 aa, Homo Sapiens
VLIITCVLIHCCQV

SEQ ID NO: 10578 - protein, 14 aa, Homo Sapiens
LIITCVLIHCCQVR

SEQ ID NO: 10579 - protein, 14 aa, Homo Sapiens
IITCVLIHCCQVRK

SEQ ID NO: 10580 - protein, 14 aa, Homo Sapiens
ITCVLIHCCQVRKH

SEQ ID NO: 10581 - protein, 14 aa, Homo Sapiens
TCVLIHCCQVRKHC

SEQ ID NO: 10582 - protein, 14 aa, Homo Sapiens
CVLIHCCQVRKHCE

SEQ ID NO: 10583 - protein, 14 aa, Homo Sapiens
VLIHCCQVRKHCEW

SEQ ID NO: 10584 - protein, 14 aa, Homo Sapiens
LIHCCQVRKHCEWC

SEQ ID NO: 10585 - protein, 14 aa, Homo Sapiens
IHCCQVRKHCEWCR

SEQ ID NO: 10586 - protein, 14 aa, Homo Sapiens
HCCQVRKHCEWCRA

SEQ ID NO: 10587 - protein, 14 aa, Homo Sapiens
CCQVRKHCEWCRAL

SEQ ID NO: 10588 - protein, 14 aa, Homo Sapiens
CQVRKHCEWCRALI

SEQ ID NO: 10589 - protein, 14 aa, Homo Sapiens
QVRKHCEWCRALIC

SEQ ID NO: 10590 - protein, 14 aa, Homo Sapiens
VRKHCEWCRALICR

SEQ ID NO: 10591 - protein, 14 aa, Homo Sapiens
RKHCEWCRALICRH

SEQ ID NO: 10592 - protein, 14 aa, Homo Sapiens
KHCEWCRALICRHE

SEQ ID NO: 10593 - protein, 14 aa, Homo Sapiens
HCEWCRALICRHEK

SEQ ID NO: 10594 - protein, 14 aa, Homo Sapiens
CEWCRALICRHEKP

SEQ ID NO: 10595 - protein, 14 aa, Homo Sapiens
EWCRALICRHEKPS

SEQ ID NO: 10596 - protein, 14 aa, Homo Sapiens
WCRALICRHEKPSA

SEQ ID NO: 10597 - protein, 14 aa, Homo Sapiens
CRALICRHEKPSAL

SEQ ID NO: 10598 - protein, 14 aa, Homo Sapiens
RALICRHEKPSALL

SEQ ID NO: 10599 - protein, 14 aa, Homo Sapiens
ALICRHEKPSALLK

SEQ ID NO: 10600 - protein, 14 aa, Homo Sapiens
LICRHEKPSALLKG

SEQ ID NO: 10601 - protein, 14 aa, Homo Sapiens
ICRHEKPSALLKGR

SEQ ID NO: 10602 - protein, 14 aa, Homo Sapiens
CRHEKPSALLKGRT

SEQ ID NO: 10603 - protein, 14 aa, Homo Sapiens
RHEKPSALLKGRTA

SEQ ID NO: 10604 - protein, 14 aa, Homo Sapiens
HEKPSALLKGRTAC

SEQ ID NO: 10605 - protein, 14 aa, Homo Sapiens
EKPSALLKGRTACC

SEQ ID NO: 10606 - protein, 14 aa, Homo Sapiens
KPSALLKGRTACCH

SEQ ID NO: 10607 - protein, 14 aa, Homo Sapiens
PSALLKGRTACCHS

SEQ ID NO: 10608 - protein, 14 aa, Homo Sapiens
SALLKGRTACCHSE

SEQ ID NO: 10609 - protein, 14 aa, Homo Sapiens
ALLKGRTACCHSET

SEQ ID NO: 10610 - protein, 14 aa, Homo Sapiens
LLKGRTACCHSETV

SEQ ID NO: 10611 - protein, 14 aa, Homo Sapiens
LKGRTACCHSETVV

SEQ ID NO: 10612 - protein, 15 aa, Homo Sapiens
MVPSAGQLALFALGI

SEQ ID NO: 10613 - protein, 15 aa, Homo Sapiens
VPSAGQLALFALGIV

SEQ ID NO: 10614 - protein, 15 aa, Homo Sapiens
PSAGQLALFALGIVL

SEQ ID NO: 10615 - protein, 15 aa, Homo Sapiens
SAGQLALFALGIVLA

SEQ ID NO: 10616 - protein, 15 aa, Homo Sapiens
AGQLALFALGIVLAA

SEQ ID NO: 10617 - protein, 15 aa, Homo Sapiens
GQLALFALGIVLAAC

SEQ ID NO: 10618 - protein, 15 aa, Homo Sapiens
QLALFALGIVLAACQ

SEQ ID NO: 10619 - protein, 15 aa, Homo Sapiens
LALFALGIVLAACQA

SEQ ID NO: 10620 - protein, 15 aa, Homo Sapiens
ALFALGIVLAACQAL

SEQ ID NO: 10621 - protein, 15 aa, Homo Sapiens
LFALGIVLAACQALE

SEQ ID NO: 10622 - protein, 15 aa, Homo Sapiens
FALGIVLAACQALEN

SEQ ID NO: 10623 - protein, 15 aa, Homo Sapiens
ALGIVLAACQALENS

SEQ ID NO: 10624 - protein, 15 aa, Homo Sapiens
LGIVLAACQALENST

SEQ ID NO: 10625 - protein, 15 aa, Homo Sapiens
GIVLAACQALENSTS

SEQ ID NO: 10626 - protein, 15 aa, Homo Sapiens
IVLAACQALENSTSP

SEQ ID NO: 10627 - protein, 15 aa, Homo Sapiens
VLAACQALENSTSPL

SEQ ID NO: 10628 - protein, 15 aa, Homo Sapiens
LAACQALENSTSPLS

SEQ ID NO: 10629 - protein, 15 aa, Homo Sapiens
AACQALENSTSPLSA

SEQ ID NO: 10630 - protein, 15 aa, Homo Sapiens
ACQALENSTSPLSAD

SEQ ID NO: 10631 - protein, 15 aa, Homo Sapiens
CQALENSTSPLSADP

SEQ ID NO: 10632 - protein, 15 aa, Homo Sapiens
QALENSTSPLSADPP

SEQ ID NO: 10633 - protein, 15 aa, Homo Sapiens
ALENSTSPLSADPPV

SEQ ID NO: 10634 - protein, 15 aa, Homo Sapiens
LENSTSPLSADPPVA

SEQ ID NO: 10635 - protein, 15 aa, Homo Sapiens
ENSTSPLSADPPVAA

SEQ ID NO: 10636 - protein, 15 aa, Homo Sapiens
NSTSPLSADPPVAAA

SEQ ID NO: 10637 - protein, 15 aa, Homo Sapiens
STSPLSADPPVAAAV

SEQ ID NO: 10638 - protein, 15 aa, Homo Sapiens
TSPLSADPPVAAAVV

SEQ ID NO: 10639 - protein, 15 aa, Homo Sapiens
SPLSADPPVAAAVVS

SEQ ID NO: 10640 - protein, 15 aa, Homo Sapiens
PLSADPPVAAAVVSH

SEQ ID NO: 10641 - protein, 15 aa, Homo Sapiens
LSADPPVAAAVVSHF

SEQ ID NO: 10642 - protein, 15 aa, Homo Sapiens
SADPPVAAAVVSHFN

SEQ ID NO: 10643 - protein, 15 aa, Homo Sapiens
ADPPVAAAVVSHFND

SEQ ID NO: 10644 - protein, 15 aa, Homo Sapiens
DPPVAAAVVSHFNDC

SEQ ID NO: 10645 - protein, 15 aa, Homo Sapiens
PPVAAAVVSHFNDCP

SEQ ID NO: 10646 - protein, 15 aa, Homo Sapiens
PVAAAVVSHFNDCPD

SEQ ID NO: 10647 - protein, 15 aa, Homo Sapiens
VAAAVVSHFNDCPDS

SEQ ID NO: 10648 - protein, 15 aa, Homo Sapiens
AAAVVSHFNDCPDSH

SEQ ID NO: 10649 - protein, 15 aa, Homo Sapiens
AAVVSHFNDCPDSHT

SEQ ID NO: 10650 - protein, 15 aa, Homo Sapiens
AVVSHFNDCPDSHTQ

SEQ ID NO: 10651 - protein, 15 aa, Homo Sapiens
VVSHFNDCPDSHTQF

SEQ ID NO: 10652 - protein, 15 aa, Homo Sapiens
VSHFNDCPDSHTQFC

SEQ ID NO: 10653 - protein, 15 aa, Homo Sapiens
SHFNDCPDSHTQFCF

SEQ ID NO: 10654 - protein, 15 aa, Homo Sapiens
HFNDCPDSHTQFCFH

SEQ ID NO: 10655 - protein, 15 aa, Homo Sapiens
FNDCPDSHTQFCFHG

SEQ ID NO: 10656 - protein, 15 aa, Homo Sapiens
NDCPDSHTQFCFHGT

SEQ ID NO: 10657 - protein, 15 aa, Homo Sapiens
DCPDSHTQFCFHGTC

SEQ ID NO: 10658 - protein, 15 aa, Homo Sapiens
CPDSHTQFCFHGTCR

SEQ ID NO: 10659 - protein, 15 aa, Homo Sapiens
PDSHTQFCFHGTCRF

SEQ ID NO: 10660 - protein, 15 aa, Homo Sapiens
DSHTQFCFHGTCRFL

SEQ ID NO: 10661 - protein, 15 aa, Homo Sapiens
SHTQFCFHGTCRFLV

SEQ ID NO: 10662 - protein, 15 aa, Homo Sapiens
HTQFCFHGTCRFLVQ

SEQ ID NO: 10663 - protein, 15 aa, Homo Sapiens
TQFCFHGTCRFLVQE

SEQ ID NO: 10664 - protein, 15 aa, Homo Sapiens
QFCFHGTCRFLVQED

SEQ ID NO: 10665 - protein, 15 aa, Homo Sapiens
FCFHGTCRFLVQEDK

SEQ ID NO: 10666 - protein, 15 aa, Homo Sapiens
CFHGTCRFLVQEDKP

SEQ ID NO: 10667 - protein, 15 aa, Homo Sapiens
FHGTCRFLVQEDKPA

SEQ ID NO: 10668 - protein, 15 aa, Homo Sapiens
HGTCRFLVQEDKPAC

SEQ ID NO: 10669 - protein, 15 aa, Homo Sapiens
GTCRFLVQEDKPACV

SEQ ID NO: 10670 - protein, 15 aa, Homo Sapiens
TCRFLVQEDKPACVC

SEQ ID NO: 10671 - protein, 15 aa, Homo Sapiens
CRFLVQEDKPACVCH

SEQ ID NO: 10672 - protein, 15 aa, Homo Sapiens
RFLVQEDKPACVCHS

SEQ ID NO: 10673 - protein, 15 aa, Homo Sapiens
FLVQEDKPACVCHSG

SEQ ID NO: 10674 - protein, 15 aa, Homo Sapiens
LVQEDKPACVCHSGY

SEQ ID NO: 10675 - protein, 15 aa, Homo Sapiens
VQEDKPACVCHSGYV

SEQ ID NO: 10676 - protein, 15 aa, Homo Sapiens
QEDKPACVCHSGYVG

SEQ ID NO: 10677 - protein, 15 aa, Homo Sapiens
EDKPACVCHSGYVGA

SEQ ID NO: 10678 - protein, 15 aa, Homo Sapiens
DKPACVCHSGYVGAR

SEQ ID NO: 10679 - protein, 15 aa, Homo Sapiens
KPACVCHSGYVGARC

SEQ ID NO: 10680 - protein, 15 aa, Homo Sapiens
PACVCHSGYVGARCE

SEQ ID NO: 10681 - protein, 15 aa, Homo Sapiens
ACVCHSGYVGARCEH

SEQ ID NO: 10682 - protein, 15 aa, Homo Sapiens
CVCHSGYVGARCEHA

SEQ ID NO: 10683 - protein, 15 aa, Homo Sapiens
VCHSGYVGARCEHAD

SEQ ID NO: 10684 - protein, 15 aa, Homo Sapiens
CHSGYVGARCEHADL

SEQ ID NO: 10685 - protein, 15 aa, Homo Sapiens
HSGYVGARCEHADLL

SEQ ID NO: 10686 - protein, 15 aa, Homo Sapiens
SGYVGARCEHADLLA

SEQ ID NO: 10687 - protein, 15 aa, Homo Sapiens
GYVGARCEHADLLAV

SEQ ID NO: 10688 - protein, 15 aa, Homo Sapiens
YVGARCEHADLLAVV

SEQ ID NO: 10689 - protein, 15 aa, Homo Sapiens
VGARCEHADLLAVVA

SEQ ID NO: 10690 - protein, 15 aa, Homo Sapiens
GARCEHADLLAVVAA

SEQ ID NO: 10691 - protein, 15 aa, Homo Sapiens
ARCEHADLLAVVAAS

SEQ ID NO: 10692 - protein, 15 aa, Homo Sapiens
RCEHADLLAVVAASQ

SEQ ID NO: 10693 - protein, 15 aa, Homo Sapiens
CEHADLLAVVAASQK

SEQ ID NO: 10694 - protein, 15 aa, Homo Sapiens
EHADLLAVVAASQKK

SEQ ID NO: 10695 - protein, 15 aa, Homo Sapiens
HADLLAVVAASQKKQ

SEQ ID NO: 10696 - protein, 15 aa, Homo Sapiens
ADLLAVVAASQKKQA

SEQ ID NO: 10697 - protein, 15 aa, Homo Sapiens
DLLAVVAASQKKQAI

SEQ ID NO: 10698 - protein, 15 aa, Homo Sapiens
LLAVVAASQKKQAIT

SEQ ID NO: 10699 - protein, 15 aa, Homo Sapiens
LAVVAASQKKQAITA

SEQ ID NO: 10700 - protein, 15 aa, Homo Sapiens
AVVAASQKKQAITAL

SEQ ID NO: 10701 - protein, 15 aa, Homo Sapiens
VVAASQKKQAITALV

SEQ ID NO: 10702 - protein, 15 aa, Homo Sapiens
VAASQKKQAITALVV

SEQ ID NO: 10703 - protein, 15 aa, Homo Sapiens
AASQKKQAITALVVV

SEQ ID NO: 10704 - protein, 15 aa, Homo Sapiens
ASQKKQAITALVVVS

SEQ ID NO: 10705 - protein, 15 aa, Homo Sapiens
SQKKQAITALVVVSI

SEQ ID NO: 10706 - protein, 15 aa, Homo Sapiens
QKKQAITALVVVSIV

SEQ ID NO: 10707 - protein, 15 aa, Homo Sapiens
KKQAITALVVVSIVA

SEQ ID NO: 10708 - protein, 15 aa, Homo Sapiens
KQAITALVVVSIVAL

SEQ ID NO: 10709 - protein, 15 aa, Homo Sapiens
QAITALVVVSIVALA

SEQ ID NO: 10710 - protein, 15 aa, Homo Sapiens
AITALVVVSIVALAV

SEQ ID NO: 10711 - protein, 15 aa, Homo Sapiens
ITALVVVSIVALAVL

SEQ ID NO: 10712 - protein, 15 aa, Homo Sapiens
TALVVVSIVALAVLI

SEQ ID NO: 10713 - protein, 15 aa, Homo Sapiens
ALVVVSIVALAVLII

SEQ ID NO: 10714 - protein, 15 aa, Homo Sapiens
LVVVSIVALAVLIIT

SEQ ID NO: 10715 - protein, 15 aa, Homo Sapiens
VVVSIVALAVLIITC

SEQ ID NO: 10716 - protein, 15 aa, Homo Sapiens
VVSIVALAVLIITCV

SEQ ID NO: 10717 - protein, 15 aa, Homo Sapiens
VSIVALAVLIITCVL

SEQ ID NO: 10718 - protein, 15 aa, Homo Sapiens
SIVALAVLIITCVLI

SEQ ID NO: 10719 - protein, 15 aa, Homo Sapiens
IVALAVLIITCVLIH

SEQ ID NO: 10720 - protein, 15 aa, Homo Sapiens
VALAVLIITCVLIHC

SEQ ID NO: 10721 - protein, 15 aa, Homo Sapiens
ALAVLIITCVLIHCC

SEQ ID NO: 10722 - protein, 15 aa, Homo Sapiens
LAVLIITCVLIHCCQ

SEQ ID NO: 10723 - protein, 15 aa, Homo Sapiens
AVLIITCVLIHCCQV

SEQ ID NO: 10724 - protein, 15 aa, Homo Sapiens
VLIITCVLIHCCQVR

SEQ ID NO: 10725 - protein, 15 aa, Homo Sapiens
LIITCVLIHCCQVRK

SEQ ID NO: 10726 - protein, 15 aa, Homo Sapiens
IITCVLIHCCQVRKH

SEQ ID NO: 10727 - protein, 15 aa, Homo Sapiens
ITCVLIHCCQVRKHC

SEQ ID NO: 10728 - protein, 15 aa, Homo Sapiens
TCVLIHCCQVRKHCE

SEQ ID NO: 10729 - protein, 15 aa, Homo Sapiens
CVLIHCCQVRKHCEW

SEQ ID NO: 10730 - protein, 15 aa, Homo Sapiens
VLIHCCQVRKHCEWC

SEQ ID NO: 10731 - protein, 15 aa, Homo Sapiens
LIHCCQVRKHCEWCR

SEQ ID NO: 10732 - protein, 15 aa, Homo Sapiens
IHCCQVRKHCEWCRA

SEQ ID NO: 10733 - protein, 15 aa, Homo Sapiens
HCCQVRKHCEWCRAL

SEQ ID NO: 10734 - protein, 15 aa, Homo Sapiens
CCQVRKHCEWCRALI

SEQ ID NO: 10735 - protein, 15 aa, Homo Sapiens
CQVRKHCEWCRALIC

SEQ ID NO: 10736 - protein, 15 aa, Homo Sapiens
QVRKHCEWCRALICR

SEQ ID NO: 10737 - protein, 15 aa, Homo Sapiens
VRKHCEWCRALICRH

SEQ ID NO: 10738 - protein, 15 aa, Homo Sapiens
RKHCEWCRALICRHE

SEQ ID NO: 10739 - protein, 15 aa, Homo Sapiens
KHCEWCRALICRHEK

SEQ ID NO: 10740 - protein, 15 aa, Homo Sapiens
HCEWCRALICRHEKP

SEQ ID NO: 10741 - protein, 15 aa, Homo Sapiens
CEWCRALICRHEKPS

SEQ ID NO: 10742 - protein, 15 aa, Homo Sapiens
EWCRALICRHEKPSA

SEQ ID NO: 10743 - protein, 15 aa, Homo Sapiens
WCRALICRHEKPSAL

SEQ ID NO: 10744 - protein, 15 aa, Homo Sapiens
CRALICRHEKPSALL

SEQ ID NO: 10745 - protein, 15 aa, Homo Sapiens
RALICRHEKPSALLK

SEQ ID NO: 10746 - protein, 15 aa, Homo Sapiens
ALICRHEKPSALLKG

SEQ ID NO: 10747 - protein, 15 aa, Homo Sapiens
LICRHEKPSALLKGR

SEQ ID NO: 10748 - protein, 15 aa, Homo Sapiens
ICRHEKPSALLKGRT

SEQ ID NO: 10749 - protein, 15 aa, Homo Sapiens
CRHEKPSALLKGRTA

SEQ ID NO: 10750 - protein, 15 aa, Homo Sapiens
RHEKPSALLKGRTAC

SEQ ID NO: 10751 - protein, 15 aa, Homo Sapiens
HEKPSALLKGRTACC

SEQ ID NO: 10752 - protein, 15 aa, Homo Sapiens
EKPSALLKGRTACCH

SEQ ID NO: 10753 - protein, 15 aa, Homo Sapiens
KPSALLKGRTACCHS

SEQ ID NO: 10754 - protein, 15 aa, Homo Sapiens
PSALLKGRTACCHSE

SEQ ID NO: 10755 - protein, 15 aa, Homo Sapiens
SALLKGRTACCHSET

SEQ ID NO: 10756 - protein, 15 aa, Homo Sapiens
ALLKGRTACCHSETV

SEQ ID NO: 10757 - protein, 15 aa, Homo Sapiens
LLKGRTACCHSETVV

SEQ ID NO: 10758 - protein, 16 aa, Homo Sapiens
MVPSAGQLALFALGIV

SEQ ID NO: 10759 - protein, 16 aa, Homo Sapiens
VPSAGQLALFALGIVL

SEQ ID NO: 10760 - protein, 16 aa, Homo Sapiens
PSAGQLALFALGIVLA

SEQ ID NO: 10761 - protein, 16 aa, Homo Sapiens
SAGQLALFALGIVLAA

SEQ ID NO: 10762 - protein, 16 aa, Homo Sapiens
AGQLALFALGIVLAAC

SEQ ID NO: 10763 - protein, 16 aa, Homo Sapiens
GQLALFALGIVLAACQ

SEQ ID NO: 10764 - protein, 16 aa, Homo Sapiens
QLALFALGIVLAACQA

SEQ ID NO: 10765 - protein, 16 aa, Homo Sapiens
LALFALGIVLAACQAL

SEQ ID NO: 10766 - protein, 16 aa, Homo Sapiens
ALFALGIVLAACQALE

SEQ ID NO: 10767 - protein, 16 aa, Homo Sapiens
LFALGIVLAACQALEN

SEQ ID NO: 10768 - protein, 16 aa, Homo Sapiens
FALGIVLAACQALENS

SEQ ID NO: 10769 - protein, 16 aa, Homo Sapiens
ALGIVLAACQALENST

SEQ ID NO: 10770 - protein, 16 aa, Homo Sapiens
LGIVLAACQALENSTS

SEQ ID NO: 10771 - protein, 16 aa, Homo Sapiens
GIVLAACQALENSTSP

SEQ ID NO: 10772 - protein, 16 aa, Homo Sapiens
IVLAACQALENSTSPL

SEQ ID NO: 10773 - protein, 16 aa, Homo Sapiens
VLAACQALENSTSPLS

SEQ ID NO: 10774 - protein, 16 aa, Homo Sapiens
LAACQALENSTSPLSA

SEQ ID NO: 10775 - protein, 16 aa, Homo Sapiens
AACQALENSTSPLSAD

SEQ ID NO: 10776 - protein, 16 aa, Homo Sapiens
ACQALENSTSPLSADP

SEQ ID NO: 10777 - protein, 16 aa, Homo Sapiens
CQALENSTSPLSADPP

SEQ ID NO: 10778 - protein, 16 aa, Homo Sapiens
QALENSTSPLSADPPV

SEQ ID NO: 10779 - protein, 16 aa, Homo Sapiens
ALENSTSPLSADPPVA

SEQ ID NO: 10780 - protein, 16 aa, Homo Sapiens
LENSTSPLSADPPVAA

SEQ ID NO: 10781 - protein, 16 aa, Homo Sapiens
ENSTSPLSADPPVAAA

SEQ ID NO: 10782 - protein, 16 aa, Homo Sapiens
NSTSPLSADPPVAAAV

SEQ ID NO: 10783 - protein, 16 aa, Homo Sapiens
STSPLSADPPVAAAVV

SEQ ID NO: 10784 - protein, 16 aa, Homo Sapiens
TSPLSADPPVAAAVVS

SEQ ID NO: 10785 - protein, 16 aa, Homo Sapiens
SPLSADPPVAAAVVSH

SEQ ID NO: 10786 - protein, 16 aa, Homo Sapiens
PLSADPPVAAAVVSHF

SEQ ID NO: 10787 - protein, 16 aa, Homo Sapiens
LSADPPVAAAVVSHFN

SEQ ID NO: 10788 - protein, 16 aa, Homo Sapiens
SADPPVAAAVVSHFND

SEQ ID NO: 10789 - protein, 16 aa, Homo Sapiens
ADPPVAAAVVSHFNDC

SEQ ID NO: 10790 - protein, 16 aa, Homo Sapiens
DPPVAAAVVSHFNDCP

SEQ ID NO: 10791 - protein, 16 aa, Homo Sapiens
PPVAAAVVSHFNDCPD

SEQ ID NO: 10792 - protein, 16 aa, Homo Sapiens
PVAAAVVSHFNDCPDS

SEQ ID NO: 10793 - protein, 16 aa, Homo Sapiens
VAAAVVSHFNDCPDSH

SEQ ID NO: 10794 - protein, 16 aa, Homo Sapiens
AAAVVSHFNDCPDSHT

SEQ ID NO: 10795 - protein, 16 aa, Homo Sapiens
AAVVSHFNDCPDSHTQ

SEQ ID NO: 10796 - protein, 16 aa, Homo Sapiens
AVVSHFNDCPDSHTQF

SEQ ID NO: 10797 - protein, 16 aa, Homo Sapiens
VVSHFNDCPDSHTQFC

SEQ ID NO: 10798 - protein, 16 aa, Homo Sapiens
VSHFNDCPDSHTQFCF

SEQ ID NO: 10799 - protein, 16 aa, Homo Sapiens
SHFNDCPDSHTQFCFH

SEQ ID NO: 10800 - protein, 16 aa, Homo Sapiens
HFNDCPDSHTQFCFHG

SEQ ID NO: 10801 - protein, 16 aa, Homo Sapiens
FNDCPDSHTQFCFHGT

SEQ ID NO: 10802 - protein, 16 aa, Homo Sapiens
NDCPDSHTQFCFHGTC

SEQ ID NO: 10803 - protein, 16 aa, Homo Sapiens
DCPDSHTQFCFHGTCR

SEQ ID NO: 10804 - protein, 16 aa, Homo Sapiens
CPDSHTQFCFHGTCRF

SEQ ID NO: 10805 - protein, 16 aa, Homo Sapiens
PDSHTQFCFHGTCRFL

SEQ ID NO: 10806 - protein, 16 aa, Homo Sapiens
DSHTQFCFHGTCRFLV

SEQ ID NO: 10807 - protein, 16 aa, Homo Sapiens
SHTQFCFHGTCRFLVQ

SEQ ID NO: 10808 - protein, 16 aa, Homo Sapiens
HTQFCFHGTCRFLVQE

SEQ ID NO: 10809 - protein, 16 aa, Homo Sapiens
TQFCFHGTCRFLVQED

SEQ ID NO: 10810 - protein, 16 aa, Homo Sapiens
QFCFHGTCRFLVQEDK

SEQ ID NO: 10811 - protein, 16 aa, Homo Sapiens
FCFHGTCRFLVQEDKP

SEQ ID NO: 10812 - protein, 16 aa, Homo Sapiens
CFHGTCRFLVQEDKPA

SEQ ID NO: 10813 - protein, 16 aa, Homo Sapiens
FHGTCRFLVQEDKPAC

SEQ ID NO: 10814 - protein, 16 aa, Homo Sapiens
HGTCRFLVQEDKPACV

SEQ ID NO: 10815 - protein, 16 aa, Homo Sapiens
GTCRFLVQEDKPACVC

SEQ ID NO: 10816 - protein, 16 aa, Homo Sapiens
TCRFLVQEDKPACVCH

SEQ ID NO: 10817 - protein, 16 aa, Homo Sapiens
CRFLVQEDKPACVCHS

SEQ ID NO: 10818 - protein, 16 aa, Homo Sapiens
RFLVQEDKPACVCHSG

SEQ ID NO: 10819 - protein, 16 aa, Homo Sapiens
FLVQEDKPACVCHSGY

SEQ ID NO: 10820 - protein, 16 aa, Homo Sapiens
LVQEDKPACVCHSGYV

SEQ ID NO: 10821 - protein, 16 aa, Homo Sapiens
VQEDKPACVCHSGYVG

SEQ ID NO: 10822 - protein, 16 aa, Homo Sapiens
QEDKPACVCHSGYVGA

SEQ ID NO: 10823 - protein, 16 aa, Homo Sapiens
EDKPACVCHSGYVGAR

SEQ ID NO: 10824 - protein, 16 aa, Homo Sapiens
DKPACVCHSGYVGARC

SEQ ID NO: 10825 - protein, 16 aa, Homo Sapiens
KPACVCHSGYVGARCE

SEQ ID NO: 10826 - protein, 16 aa, Homo Sapiens
PACVCHSGYVGARCEH

SEQ ID NO: 10827 - protein, 16 aa, Homo Sapiens
ACVCHSGYVGARCEHA

SEQ ID NO: 10828 - protein, 16 aa, Homo Sapiens
CVCHSGYVGARCEHAD

SEQ ID NO: 10829 - protein, 16 aa, Homo Sapiens
VCHSGYVGARCEHADL

SEQ ID NO: 10830 - protein, 16 aa, Homo Sapiens
CHSGYVGARCEHADLL

SEQ ID NO: 10831 - protein, 16 aa, Homo Sapiens
HSGYVGARCEHADLLA

SEQ ID NO: 10832 - protein, 16 aa, Homo Sapiens
SGYVGARCEHADLLAV

SEQ ID NO: 10833 - protein, 16 aa, Homo Sapiens
GYVGARCEHADLLAVV

SEQ ID NO: 10834 - protein, 16 aa, Homo Sapiens
YVGARCEHADLLAVVA

SEQ ID NO: 10835 - protein, 16 aa, Homo Sapiens
VGARCEHADLLAVVAA

SEQ ID NO: 10836 - protein, 16 aa, Homo Sapiens
GARCEHADLLAVVAAS

SEQ ID NO: 10837 - protein, 16 aa, Homo Sapiens
ARCEHADLLAVVAASQ

SEQ ID NO: 10838 - protein, 16 aa, Homo Sapiens
RCEHADLLAVVAASQK

SEQ ID NO: 10839 - protein, 16 aa, Homo Sapiens
CEHADLLAVVAASQKK

SEQ ID NO: 10840 - protein, 16 aa, Homo Sapiens
EHADLLAVVAASQKKQ

SEQ ID NO: 10841 - protein, 16 aa, Homo Sapiens
HADLLAVVAASQKKQA

SEQ ID NO: 10842 - protein, 16 aa, Homo Sapiens
ADLLAVVAASQKKQAI

SEQ ID NO: 10843 - protein, 16 aa, Homo Sapiens
DLLAVVAASQKKQAIT

SEQ ID NO: 10844 - protein, 16 aa, Homo Sapiens
LLAVVAASQKKQAITA

SEQ ID NO: 10845 - protein, 16 aa, Homo Sapiens
LAVVAASQKKQAITAL

SEQ ID NO: 10846 - protein, 16 aa, Homo Sapiens
AVVAASQKKQAITALV

SEQ ID NO: 10847 - protein, 16 aa, Homo Sapiens
VVAASQKKQAITALVV

SEQ ID NO: 10848 - protein, 16 aa, Homo Sapiens
VAASQKKQAITALVVV

SEQ ID NO: 10849 - protein, 16 aa, Homo Sapiens
AASQKKQAITALVVVS

SEQ ID NO: 10850 - protein, 16 aa, Homo Sapiens
ASQKKQAITALVVVSI

SEQ ID NO: 10851 - protein, 16 aa, Homo Sapiens
SQKKQAITALVVVSIV

SEQ ID NO: 10852 - protein, 16 aa, Homo Sapiens
QKKQAITALVVVSIVA

SEQ ID NO: 10853 - protein, 16 aa, Homo Sapiens
KKQAITALVVVSIVAL

SEQ ID NO: 10854 - protein, 16 aa, Homo Sapiens
KQAITALVVVSIVALA

SEQ ID NO: 10855 - protein, 16 aa, Homo Sapiens
QAITALVVVSIVALAV

SEQ ID NO: 10856 - protein, 16 aa, Homo Sapiens
AITALVVVSIVALAVL

SEQ ID NO: 10857 - protein, 16 aa, Homo Sapiens
ITALVVVSIVALAVLI

SEQ ID NO: 10858 - protein, 16 aa, Homo Sapiens
TALVVVSIVALAVLII

SEQ ID NO: 10859 - protein, 16 aa, Homo Sapiens
ALVVVSIVALAVLIIT

SEQ ID NO: 10860 - protein, 16 aa, Homo Sapiens
LVVVSIVALAVLIITC

SEQ ID NO: 10861 - protein, 16 aa, Homo Sapiens
VVVSIVALAVLIITCV

SEQ ID NO: 10862 - protein, 16 aa, Homo Sapiens
VVSIVALAVLIITCVL

SEQ ID NO: 10863 - protein, 16 aa, Homo Sapiens
VSIVALAVLIITCVLI

SEQ ID NO: 10864 - protein, 16 aa, Homo Sapiens
SIVALAVLIITCVLIH

SEQ ID NO: 10865 - protein, 16 aa, Homo Sapiens
IVALAVLIITCVLIHC

SEQ ID NO: 10866 - protein, 16 aa, Homo Sapiens
VALAVLIITCVLIHCC

SEQ ID NO: 10867 - protein, 16 aa, Homo Sapiens
ALAVLIITCVLIHCCQ

SEQ ID NO: 10868 - protein, 16 aa, Homo Sapiens
LAVLIITCVLIHCCQV

SEQ ID NO: 10869 - protein, 16 aa, Homo Sapiens
AVLIITCVLIHCCQVR

SEQ ID NO: 10870 - protein, 16 aa, Homo Sapiens
VLIITCVLIHCCQVRK

SEQ ID NO: 10871 - protein, 16 aa, Homo Sapiens
LIITCVLIHCCQVRKH

SEQ ID NO: 10872 - protein, 16 aa, Homo Sapiens
IITCVLIHCCQVRKHC

SEQ ID NO: 10873 - protein, 16 aa, Homo Sapiens
ITCVLIHCCQVRKHCE

SEQ ID NO: 10874 - protein, 16 aa, Homo Sapiens
TCVLIHCCQVRKHCEW

SEQ ID NO: 10875 - protein, 16 aa, Homo Sapiens
CVLIHCCQVRKHCEWC

SEQ ID NO: 10876 - protein, 16 aa, Homo Sapiens
VLIHCCQVRKHCEWCR

SEQ ID NO: 10877 - protein, 16 aa, Homo Sapiens
LIHCCQVRKHCEWCRA

SEQ ID NO: 10878 - protein, 16 aa, Homo Sapiens
IHCCQVRKHCEWCRAL

SEQ ID NO: 10879 - protein, 16 aa, Homo Sapiens
HCCQVRKHCEWCRALI

SEQ ID NO: 10880 - protein, 16 aa, Homo Sapiens
CCQVRKHCEWCRALIC

SEQ ID NO: 10881 - protein, 16 aa, Homo Sapiens
CQVRKHCEWCRALICR

SEQ ID NO: 10882 - protein, 16 aa, Homo Sapiens
QVRKHCEWCRALICRH

SEQ ID NO: 10883 - protein, 16 aa, Homo Sapiens
VRKHCEWCRALICRHE

SEQ ID NO: 10884 - protein, 16 aa, Homo Sapiens
RKHCEWCRALICRHEK

SEQ ID NO: 10885 - protein, 16 aa, Homo Sapiens
KHCEWCRALICRHEKP

SEQ ID NO: 10886 - protein, 16 aa, Homo Sapiens
HCEWCRALICRHEKPS

SEQ ID NO: 10887 - protein, 16 aa, Homo Sapiens
CEWCRALICRHEKPSA

SEQ ID NO: 10888 - protein, 16 aa, Homo Sapiens
EWCRALICRHEKPSAL

SEQ ID NO: 10889 - protein, 16 aa, Homo Sapiens
WCRALICRHEKPSALL

SEQ ID NO: 10890 - protein, 16 aa, Homo Sapiens
CRALICRHEKPSALLK

SEQ ID NO: 10891 - protein, 16 aa, Homo Sapiens
RALICRHEKPSALLKG

SEQ ID NO: 10892 - protein, 16 aa, Homo Sapiens
ALICRHEKPSALLKGR

SEQ ID NO: 10893 - protein, 16 aa, Homo Sapiens
LICRHEKPSALLKGRT

SEQ ID NO: 10894 - protein, 16 aa, Homo Sapiens
ICRHEKPSALLKGRTA

SEQ ID NO: 10895 - protein, 16 aa, Homo Sapiens
CRHEKPSALLKGRTAC

SEQ ID NO: 10896 - protein, 16 aa, Homo Sapiens
RHEKPSALLKGRTACC

SEQ ID NO: 10897 - protein, 16 aa, Homo Sapiens
HEKPSALLKGRTACCH

SEQ ID NO: 10898 - protein, 16 aa, Homo Sapiens
EKPSALLKGRTACCHS

SEQ ID NO: 10899 - protein, 16 aa, Homo Sapiens
KPSALLKGRTACCHSE

SEQ ID NO: 10900 - protein, 16 aa, Homo Sapiens
PSALLKGRTACCHSET

SEQ ID NO: 10901 - protein, 16 aa, Homo Sapiens
SALLKGRTACCHSETV

SEQ ID NO: 10902 - protein, 16 aa, Homo Sapiens
ALLKGRTACCHSETVV

SEQ ID NO: 10903 - protein, 431 aa, Homo Sapiens
MHVRSLRAAAPHSFVALWAPLFLLRSALADFSLDNEVHSSFIHRRLRSQERREMQREILSILGLPHRPRPHLQGKHNSAPMFMLDLYNAMAVEEGGGPGGQGFSYPYKAVFSTQGPPLASLQDSHFLTDADMVMSFVNLVEHDKEFFHPRYHHREFRFDLSKIPEGEAVTAAEFRIYKDYIRERFDNETFRISVYQVLQEHLGRESDLFLLDSRTLWASEEGWLVFDITATSNHWVVNPRHNLGLQLSVETLDGQSINPKLAGLIGRHGPQNKQPFMVAFFKATEVHFRSIRSTGSKQRSQNRSKTPKNQEALRMANVAENSSSDQRQACKKHELYVSFRDLGWQDWIIAPEGYAAYYCEGECAFPLNSYMNATNHAIVQTLVHFINPETVPKPCCAPTQLNAISVLYFDDSSNVILKKYRNMVVRACGCH

SEQ ID NO: 10904 - protein, 8 aa, Homo Sapiens
HVRSLRAA

SEQ ID NO: 10905 - protein, 8 aa, Homo Sapiens
SLRAAAPH

SEQ ID NO: 10906 - protein, 8 aa, Homo Sapiens
RAAAPHSF

SEQ ID NO: 10907 - protein, 8 aa, Homo Sapiens
AAAPHSFV

SEQ ID NO: 10908 - protein, 8 aa, Homo Sapiens
APHSFVAL

SEQ ID NO: 10909 - protein, 8 aa, Homo Sapiens
FVALWAPL

SEQ ID NO: 10910 - protein, 8 aa, Homo Sapiens
VALWAPLF

SEQ ID NO: 10911 - protein, 8 aa, Homo Sapiens
ALWAPLFL

SEQ ID NO: 10912 - protein, 8 aa, Homo Sapiens
LWAPLFLL

SEQ ID NO: 10913 - protein, 8 aa, Homo Sapiens
WAPLFLLR

SEQ ID NO: 10914 - protein, 8 aa, Homo Sapiens
PLFLLRSA

SEQ ID NO: 10915 - protein, 8 aa, Homo Sapiens
FLLRSALA

SEQ ID NO: 10916 - protein, 8 aa, Homo Sapiens
SALADFSL

SEQ ID NO: 10917 - protein, 8 aa, Homo Sapiens
ALADFSLD

SEQ ID NO: 10918 - protein, 8 aa, Homo Sapiens
SLDNEVHS

SEQ ID NO: 10919 - protein, 8 aa, Homo Sapiens
NEVHSSFI

SEQ ID NO: 10920 - protein, 8 aa, Homo Sapiens
HSSFIHRR

SEQ ID NO: 10921 - protein, 8 aa, Homo Sapiens
SFIHRRLR

SEQ ID NO: 10922 - protein, 8 aa, Homo Sapiens
RRLRSQER

SEQ ID NO: 10923 - protein, 8 aa, Homo Sapiens
RLRSQERR

SEQ ID NO: 10924 - protein, 8 aa, Homo Sapiens
REMQREIL

SEQ ID NO: 10925 - protein, 8 aa, Homo Sapiens
MQREILSI

SEQ ID NO: 10926 - protein, 8 aa, Homo Sapiens
EILSILGL

SEQ ID NO: 10927 - protein, 8 aa, Homo Sapiens
SILGLPHR

SEQ ID NO: 10928 - protein, 8 aa, Homo Sapiens
LGLPHRPR

SEQ ID NO: 10929 - protein, 8 aa, Homo Sapiens
RPRPHLQG

SEQ ID NO: 10930 - protein, 8 aa, Homo Sapiens
LQGKHNSA

SEQ ID NO: 10931 - protein, 8 aa, Homo Sapiens
NSAPMFML

SEQ ID NO: 10932 - protein, 8 aa, Homo Sapiens
APMFMLDL

SEQ ID NO: 10933 - protein, 8 aa, Homo Sapiens
PMFMLDLY

SEQ ID NO: 10934 - protein, 8 aa, Homo Sapiens
FMLDLYNA

SEQ ID NO: 10935 - protein, 8 aa, Homo Sapiens
MLDLYNAM

SEQ ID NO: 10936 - protein, 8 aa, Homo Sapiens
DLYNAMAV

SEQ ID NO: 10937 - protein, 8 aa, Homo Sapiens
GQGFSYPY

SEQ ID NO: 10938 - protein, 8 aa, Homo Sapiens
QGFSYPYK

SEQ ID NO: 10939 - protein, 8 aa, Homo Sapiens
FSYPYKAV

SEQ ID NO: 10940 - protein, 8 aa, Homo Sapiens
SYPYKAVF

SEQ ID NO: 10941 - protein, 8 aa, Homo Sapiens
YPYKAVFS

SEQ ID NO: 10942 - protein, 8 aa, Homo Sapiens
ASLQDSHF

SEQ ID NO: 10943 - protein, 8 aa, Homo Sapiens
SLQDSHFL

SEQ ID NO: 10944 - protein, 8 aa, Homo Sapiens
LQDSHFLT

SEQ ID NO: 10945 - protein, 8 aa, Homo Sapiens
FLTDADMV

SEQ ID NO: 10946 - protein, 8 aa, Homo Sapiens
LTDADMVM

SEQ ID NO: 10947 - protein, 8 aa, Homo Sapiens
DADMVMSF

SEQ ID NO: 10948 - protein, 8 aa, Homo Sapiens
MVMSFVNL

SEQ ID NO: 10949 - protein, 8 aa, Homo Sapiens
VMSFVNLV

SEQ ID NO: 10950 - protein, 8 aa, Homo Sapiens
VEHDKEFF

SEQ ID NO: 10951 - protein, 8 aa, Homo Sapiens
DKEFFHPR

SEQ ID NO: 10952 - protein, 8 aa, Homo Sapiens
KEFFHPRY

SEQ ID NO: 10953 - protein, 8 aa, Homo Sapiens
HPRYHHRE

SEQ ID NO: 10954 - protein, 8 aa, Homo Sapiens
RYHHREFR

SEQ ID NO: 10955 - protein, 8 aa, Homo Sapiens
YHHREFRF

SEQ ID NO: 10956 - protein, 8 aa, Homo Sapiens
HREFRFDL

SEQ ID NO: 10957 - protein, 8 aa, Homo Sapiens
REFRFDLS

SEQ ID NO: 10958 - protein, 8 aa, Homo Sapiens
EFRFDLSK

SEQ ID NO: 10959 - protein, 8 aa, Homo Sapiens
FRFDLSKI

SEQ ID NO: 10960 - protein, 8 aa, Homo Sapiens
KIPEGEAV

SEQ ID NO: 10961 - protein, 8 aa, Homo Sapiens
IPEGEAVT

SEQ ID NO: 10962 - protein, 8 aa, Homo Sapiens
EAVTAAEF

SEQ ID NO: 10963 - protein, 8 aa, Homo Sapiens
AVTAAEFR

SEQ ID NO: 10964 - protein, 8 aa, Homo Sapiens
VTAAEFRI

SEQ ID NO: 10965 - protein, 8 aa, Homo Sapiens
TAAEFRIY

SEQ ID NO: 10966 - protein, 8 aa, Homo Sapiens
AAEFRIYK

SEQ ID NO: 10967 - protein, 8 aa, Homo Sapiens
RIYKDYIR

SEQ ID NO: 10968 - protein, 8 aa, Homo Sapiens
RFDNETFR

SEQ ID NO: 10969 - protein, 8 aa, Homo Sapiens
ETFRISVY

SEQ ID NO: 10970 - protein, 8 aa, Homo Sapiens
FRISVYQV

SEQ ID NO: 10971 - protein, 8 aa, Homo Sapiens
RISVYQVL

SEQ ID NO: 10972 - protein, 8 aa, Homo Sapiens
YQVLQEHL

SEQ ID NO: 10973 - protein, 8 aa, Homo Sapiens
VLQEHLGR

SEQ ID NO: 10974 - protein, 8 aa, Homo Sapiens
HLGRESDL

SEQ ID NO: 10975 - protein, 8 aa, Homo Sapiens
RESDLFLL

SEQ ID NO: 10976 - protein, 8 aa, Homo Sapiens
DLFLLDSR

SEQ ID NO: 10977 - protein, 8 aa, Homo Sapiens
FLLDSRTL

SEQ ID NO: 10978 - protein, 8 aa, Homo Sapiens
LLDSRTLW

SEQ ID NO: 10979 - protein, 8 aa, Homo Sapiens
ASEEGWLV

SEQ ID NO: 10980 - protein, 8 aa, Homo Sapiens
SEEGWLVF

SEQ ID NO: 10981 - protein, 8 aa, Homo Sapiens
EGWLVFDI

SEQ ID NO: 10982 - protein, 8 aa, Homo Sapiens
WLVFDITA

SEQ ID NO: 10983 - protein, 8 aa, Homo Sapiens
LVFDITAT

SEQ ID NO: 10984 - protein, 8 aa, Homo Sapiens
ITATSNHW

SEQ ID NO: 10985 - protein, 8 aa, Homo Sapiens
TATSNHWV

SEQ ID NO: 10986 - protein, 8 aa, Homo Sapiens
ATSNHWVV

SEQ ID NO: 10987 - protein, 8 aa, Homo Sapiens
NHWVVNPR

SEQ ID NO: 10988 - protein, 8 aa, Homo Sapiens
VVNPRHNL

SEQ ID NO: 10989 - protein, 8 aa, Homo Sapiens
NPRHNLGL

SEQ ID NO: 10990 - protein, 8 aa, Homo Sapiens
NLGLQLSV

SEQ ID NO: 10991 - protein, 8 aa, Homo Sapiens
LQLSVETL

SEQ ID NO: 10992 - protein, 8 aa, Homo Sapiens
ETLDGQSI

SEQ ID NO: 10993 - protein, 8 aa, Homo Sapiens
KLAGLIGR

SEQ ID NO: 10994 - protein, 8 aa, Homo Sapiens
GPQNKQPF

SEQ ID NO: 10995 - protein, 8 aa, Homo Sapiens
KQPFMVAF

SEQ ID NO: 10996 - protein, 8 aa, Homo Sapiens
QPFMVAFF

SEQ ID NO: 10997 - protein, 8 aa, Homo Sapiens
PFMVAFFK

SEQ ID NO: 10998 - protein, 8 aa, Homo Sapiens
FMVAFFKA

SEQ ID NO: 10999 - protein, 8 aa, Homo Sapiens
MVAFFKAT

SEQ ID NO: 11000 - protein, 8 aa, Homo Sapiens
AFFKATEV

SEQ ID NO: 11001 - protein, 8 aa, Homo Sapiens
KATEVHFR

SEQ ID NO: 11002 - protein, 8 aa, Homo Sapiens
TEVHFRSI

SEQ ID NO: 11003 - protein, 8 aa, Homo Sapiens
EVHFRSIR

SEQ ID NO: 11004 - protein, 8 aa, Homo Sapiens
SIRSTGSK

SEQ ID NO: 11005 - protein, 8 aa, Homo Sapiens
RSTGSKQR

SEQ ID NO: 11006 - protein, 8 aa, Homo Sapiens
QRSQNRSK

SEQ ID NO: 11007 - protein, 8 aa, Homo Sapiens
QNRSKTPK

SEQ ID NO: 11008 - protein, 8 aa, Homo Sapiens
TPKNQEAL

SEQ ID NO: 11009 - protein, 8 aa, Homo Sapiens
EALRMANV

SEQ ID NO: 11010 - protein, 8 aa, Homo Sapiens
ALRMANVA

SEQ ID NO: 11011 - protein, 8 aa, Homo Sapiens
AENSSSDQ

SEQ ID NO: 11012 - protein, 8 aa, Homo Sapiens
ENSSSDQR

SEQ ID NO: 11013 - protein, 8 aa, Homo Sapiens
HELYVSFR

SEQ ID NO: 11014 - protein, 8 aa, Homo Sapiens
LYVSFRDL

SEQ ID NO: 11015 - protein, 8 aa, Homo Sapiens
VSFRDLGW

SEQ ID NO: 11016 - protein, 8 aa, Homo Sapiens
DLGWQDWI

SEQ ID NO: 11017 - protein, 8 aa, Homo Sapiens
WQDWIIAP

SEQ ID NO: 11018 - protein, 8 aa, Homo Sapiens
WIIAPEGY

SEQ ID NO: 11019 - protein, 8 aa, Homo Sapiens
IIAPEGYA

SEQ ID NO: 11020 - protein, 8 aa, Homo Sapiens
IAPEGYAA

SEQ ID NO: 11021 - protein, 8 aa, Homo Sapiens
APEGYAAY

SEQ ID NO: 11022 - protein, 8 aa, Homo Sapiens
YCEGECAF

SEQ ID NO: 11023 - protein, 8 aa, Homo Sapiens
EGECAFPL

SEQ ID NO: 11024 - protein, 8 aa, Homo Sapiens
CAFPLNSY

SEQ ID NO: 11025 - protein, 8 aa, Homo Sapiens
AFPLNSYM

SEQ ID NO: 11026 - protein, 8 aa, Homo Sapiens
FPLNSYMN

SEQ ID NO: 11027 - protein, 8 aa, Homo Sapiens
PLNSYMNA

SEQ ID NO: 11028 - protein, 8 aa, Homo Sapiens
YMNATNHA

SEQ ID NO: 11029 - protein, 8 aa, Homo Sapiens
MNATNHAI

SEQ ID NO: 11030 - protein, 8 aa, Homo Sapiens
NHAIVQTL

SEQ ID NO: 11031 - protein, 8 aa, Homo Sapiens
HAIVQTLV

SEQ ID NO: 11032 - protein, 8 aa, Homo Sapiens
IVQTLVHF

SEQ ID NO: 11033 - protein, 8 aa, Homo Sapiens
VQTLVHFI

SEQ ID NO: 11034 - protein, 8 aa, Homo Sapiens
APTQLNAI

SEQ ID NO: 11035 - protein, 8 aa, Homo Sapiens
TQLNAISV

SEQ ID NO: 11036 - protein, 8 aa, Homo Sapiens
QLNAISVL

SEQ ID NO: 11037 - protein, 8 aa, Homo Sapiens
NAISVLYF

SEQ ID NO: 11038 - protein, 8 aa, Homo Sapiens
YFDDSSNV

SEQ ID NO: 11039 - protein, 8 aa, Homo Sapiens
DSSNVILK

SEQ ID NO: 11040 - protein, 8 aa, Homo Sapiens
SSNVILKK

SEQ ID NO: 11041 - protein, 8 aa, Homo Sapiens
NVILKKYR

SEQ ID NO: 11042 - protein, 8 aa, Homo Sapiens
KYRNMVVR

SEQ ID NO: 11043 - protein, 9 aa, Homo Sapiens
HVRSLRAAA

SEQ ID NO: 11044 - protein, 9 aa, Homo Sapiens
SLRAAAPHS

SEQ ID NO: 11045 - protein, 9 aa, Homo Sapiens
RAAAPHSFV

SEQ ID NO: 11046 - protein, 9 aa, Homo Sapiens
AAAPHSFVA

SEQ ID NO: 11047 - protein, 9 aa, Homo Sapiens
AAPHSFVAL

SEQ ID NO: 11048 - protein, 9 aa, Homo Sapiens
APHSFVALW

SEQ ID NO: 11049 - protein, 9 aa, Homo Sapiens
FVALWAPLF

SEQ ID NO: 11050 - protein, 9 aa, Homo Sapiens
VALWAPLFL

SEQ ID NO: 11051 - protein, 9 aa, Homo Sapiens
ALWAPLFLL

SEQ ID NO: 11052 - protein, 9 aa, Homo Sapiens
LWAPLFLLR

SEQ ID NO: 11053 - protein, 9 aa, Homo Sapiens
APLFLLRSA

SEQ ID NO: 11054 - protein, 9 aa, Homo Sapiens
PLFLLRSAL

SEQ ID NO: 11055 - protein, 9 aa, Homo Sapiens
RSALADFSL

SEQ ID NO: 11056 - protein, 9 aa, Homo Sapiens
ALADFSLDN

SEQ ID NO: 11057 - protein, 9 aa, Homo Sapiens
SLDNEVHSS

SEQ ID NO: 11058 - protein, 9 aa, Homo Sapiens
EVHSSFIHR

SEQ ID NO: 11059 - protein, 9 aa, Homo Sapiens
HSSFIHRRL

SEQ ID NO: 11060 - protein, 9 aa, Homo Sapiens
SSFIHRRLR

SEQ ID NO: 11061 - protein, 9 aa, Homo Sapiens
FIHRRLRSQ

SEQ ID NO: 11062 - protein, 9 aa, Homo Sapiens
HRRLRSQER

SEQ ID NO: 11063 - protein, 9 aa, Homo Sapiens
RRLRSQERR

SEQ ID NO: 11064 - protein, 9 aa, Homo Sapiens
SQERREMQR

SEQ ID NO: 11065 - protein, 9 aa, Homo Sapiens
REMQREILS

SEQ ID NO: 11066 - protein, 9 aa, Homo Sapiens
EMQREILSI

SEQ ID NO: 11067 - protein, 9 aa, Homo Sapiens
MQREILSIL

SEQ ID NO: 11068 - protein, 9 aa, Homo Sapiens
REILSILGL

SEQ ID NO: 11069 - protein, 9 aa, Homo Sapiens
LSILGLPHR

SEQ ID NO: 11070 - protein, 9 aa, Homo Sapiens
ILGLPHRPR

SEQ ID NO: 11071 - protein, 9 aa, Homo Sapiens
LPHRPRPHL

SEQ ID NO: 11072 - protein, 9 aa, Homo Sapiens
RPRPHLQGK

SEQ ID NO: 11073 - protein, 9 aa, Homo Sapiens
HLQGKHNSA

SEQ ID NO: 11074 - protein, 9 aa, Homo Sapiens
HNSAPMFML

SEQ ID NO: 11075 - protein, 9 aa, Homo Sapiens
APMFMLDLY

SEQ ID NO: 11076 - protein, 9 aa, Homo Sapiens
FMLDLYNAM

SEQ ID NO: 11077 - protein, 9 aa, Homo Sapiens
MLDLYNAMA

SEQ ID NO: 11078 - protein, 9 aa, Homo Sapiens
GPGGQGFSY

SEQ ID NO: 11079 - protein, 9 aa, Homo Sapiens
GQGFSYPYK

SEQ ID NO: 11080 - protein, 9 aa, Homo Sapiens
FSYPYKAVF

SEQ ID NO: 11081 - protein, 9 aa, Homo Sapiens
YPYKAVFST

SEQ ID NO: 11082 - protein, 9 aa, Homo Sapiens
TQGPPLASL

SEQ ID NO: 11083 - protein, 9 aa, Homo Sapiens
LASLQDSHF

SEQ ID NO: 11084 - protein, 9 aa, Homo Sapiens
SLQDSHFLT

SEQ ID NO: 11085 - protein, 9 aa, Homo Sapiens
FLTDADMVM

SEQ ID NO: 11086 - protein, 9 aa, Homo Sapiens
DADMVMSFV

SEQ ID NO: 11087 - protein, 9 aa, Homo Sapiens
MVMSFVNLV

SEQ ID NO: 11088 - protein, 9 aa, Homo Sapiens
MSFVNLVEH

SEQ ID NO: 11089 - protein, 9 aa, Homo Sapiens
FVNLVEHDK

SEQ ID NO: 11090 - protein, 9 aa, Homo Sapiens
NLVEHDKEF

SEQ ID NO: 11091 - protein, 9 aa, Homo Sapiens
HDKEFFHPR

SEQ ID NO: 11092 - protein, 9 aa, Homo Sapiens
KEFFHPRYH

SEQ ID NO: 11093 - protein, 9 aa, Homo Sapiens
FFHPRYHHR

SEQ ID NO: 11094 - protein, 9 aa, Homo Sapiens
HPRYHHREF

SEQ ID NO: 11095 - protein, 9 aa, Homo Sapiens
RYHHREFRF

SEQ ID NO: 11096 - protein, 9 aa, Homo Sapiens
HHREFRFDL

SEQ ID NO: 11097 - protein, 9 aa, Homo Sapiens
REFRFDLSK

SEQ ID NO: 11098 - protein, 9 aa, Homo Sapiens
KIPEGEAVT

SEQ ID NO: 11099 - protein, 9 aa, Homo Sapiens
IPEGEAVTA

SEQ ID NO: 11100 - protein, 9 aa, Homo Sapiens
EAVTAAEFR

SEQ ID NO: 11101 - protein, 9 aa, Homo Sapiens
AVTAAEFRI

SEQ ID NO: 11102 - protein, 9 aa, Homo Sapiens
VTAAEFRIY

SEQ ID NO: 11103 - protein, 9 aa, Homo Sapiens
TAAEFRIYK

SEQ ID NO: 11104 - protein, 9 aa, Homo Sapiens
AEFRIYKDY

SEQ ID NO: 11105 - protein, 9 aa, Homo Sapiens
IYKDYIRER

SEQ ID NO: 11106 - protein, 9 aa, Homo Sapiens
RERFDNETF

SEQ ID NO: 11107 - protein, 9 aa, Homo Sapiens
ERFDNETFR

SEQ ID NO: 11108 - protein, 9 aa, Homo Sapiens
RFDNETFRI

SEQ ID NO: 11109 - protein, 9 aa, Homo Sapiens
ETFRISVYQ

SEQ ID NO: 11110 - protein, 9 aa, Homo Sapiens
FRISVYQVL

SEQ ID NO: 11111 - protein, 9 aa, Homo Sapiens
SVYQVLQEH

SEQ ID NO: 11112 - protein, 9 aa, Homo Sapiens
VYQVLQEHL

SEQ ID NO: 11113 - protein, 9 aa, Homo Sapiens
QVLQEHLGR

SEQ ID NO: 11114 - protein, 9 aa, Homo Sapiens
FLLDSRTLW

SEQ ID NO: 11115 - protein, 9 aa, Homo Sapiens
LLDSRTLWA

SEQ ID NO: 11116 - protein, 9 aa, Homo Sapiens
TLWASEEGW

SEQ ID NO: 11117 - protein, 9 aa, Homo Sapiens
WASEEGWLV

SEQ ID NO: 11118 - protein, 9 aa, Homo Sapiens
ASEEGWLVF

SEQ ID NO: 11119 - protein, 9 aa, Homo Sapiens
EEGWLVFDI

SEQ ID NO: 11120 - protein, 9 aa, Homo Sapiens
WLVFDITAT

SEQ ID NO: 11121 - protein, 9 aa, Homo Sapiens
LVFDITATS

SEQ ID NO: 11122 - protein, 9 aa, Homo Sapiens
ITATSNHWV

SEQ ID NO: 11123 - protein, 9 aa, Homo Sapiens
TATSNHWVV

SEQ ID NO: 11124 - protein, 9 aa, Homo Sapiens
SNHWVVNPR

SEQ ID NO: 11125 - protein, 9 aa, Homo Sapiens
WVVNPRHNL

SEQ ID NO: 11126 - protein, 9 aa, Homo Sapiens
HNLGLQLSV

SEQ ID NO: 11127 - protein, 9 aa, Homo Sapiens
GLQLSVETL

SEQ ID NO: 11128 - protein, 9 aa, Homo Sapiens
TLDGQSINP

SEQ ID NO: 11129 - protein, 9 aa, Homo Sapiens
SINPKLAGL

SEQ ID NO: 11130 - protein, 9 aa, Homo Sapiens
KLAGLIGRH

SEQ ID NO: 11131 - protein, 9 aa, Homo Sapiens
GLIGRHGPQ

SEQ ID NO: 11132 - protein, 9 aa, Homo Sapiens
IGRHGPQNK

SEQ ID NO: 11133 - protein, 9 aa, Homo Sapiens
NKQPFMVAF

SEQ ID NO: 11134 - protein, 9 aa, Homo Sapiens
KQPFMVAFF

SEQ ID NO: 11135 - protein, 9 aa, Homo Sapiens
QPFMVAFFK

SEQ ID NO: 11136 - protein, 9 aa, Homo Sapiens
FMVAFFKAT

SEQ ID NO: 11137 - protein, 9 aa, Homo Sapiens
MVAFFKATE

SEQ ID NO: 11138 - protein, 9 aa, Homo Sapiens
VAFFKATEV

SEQ ID NO: 11139 - protein, 9 aa, Homo Sapiens
FFKATEVHF

SEQ ID NO: 11140 - protein, 9 aa, Homo Sapiens
FKATEVHFR

SEQ ID NO: 11141 - protein, 9 aa, Homo Sapiens
TEVHFRSIR

SEQ ID NO: 11142 - protein, 9 aa, Homo Sapiens
RSIRSTGSK

SEQ ID NO: 11143 - protein, 9 aa, Homo Sapiens
GSKQRSQNR

SEQ ID NO: 11144 - protein, 9 aa, Homo Sapiens
KQRSQNRSK

SEQ ID NO: 11145 - protein, 9 aa, Homo Sapiens
SQNRSKTPK

SEQ ID NO: 11146 - protein, 9 aa, Homo Sapiens
KTPKNQEAL

SEQ ID NO: 11147 - protein, 9 aa, Homo Sapiens
TPKNQEALR

SEQ ID NO: 11148 - protein, 9 aa, Homo Sapiens
MANVAENSS

SEQ ID NO: 11149 - protein, 9 aa, Homo Sapiens
SSDQRQACK

SEQ ID NO: 11150 - protein, 9 aa, Homo Sapiens
RQACKKHEL

SEQ ID NO: 11151 - protein, 9 aa, Homo Sapiens
ACKKHELYV

SEQ ID NO: 11152 - protein, 9 aa, Homo Sapiens
KHELYVSFR

SEQ ID NO: 11153 - protein, 9 aa, Homo Sapiens
YVSFRDLGW

SEQ ID NO: 11154 - protein, 9 aa, Homo Sapiens
DLGWQDWII

SEQ ID NO: 11155 - protein, 9 aa, Homo Sapiens
WQDWIIAPE

SEQ ID NO: 11156 - protein, 9 aa, Homo Sapiens
IIAPEGYAA

SEQ ID NO: 11157 - protein, 9 aa, Homo Sapiens
IAPEGYAAY

SEQ ID NO: 11158 - protein, 9 aa, Homo Sapiens
APEGYAAYY

SEQ ID NO: 11159 - protein, 9 aa, Homo Sapiens
YYCEGECAF

SEQ ID NO: 11160 - protein, 9 aa, Homo Sapiens
CEGECAFPL

SEQ ID NO: 11161 - protein, 9 aa, Homo Sapiens
ECAFPLNSY

SEQ ID NO: 11162 - protein, 9 aa, Homo Sapiens
CAFPLNSYM

SEQ ID NO: 11163 - protein, 9 aa, Homo Sapiens
FPLNSYMNA

SEQ ID NO: 11164 - protein, 9 aa, Homo Sapiens
YMNATNHAI

SEQ ID NO: 11165 - protein, 9 aa, Homo Sapiens
MNATNHAIV

SEQ ID NO: 11166 - protein, 9 aa, Homo Sapiens
HAIVQTLVH

SEQ ID NO: 11167 - protein, 9 aa, Homo Sapiens
AIVQTLVHF

SEQ ID NO: 11168 - protein, 9 aa, Homo Sapiens
IVQTLVHFI

SEQ ID NO: 11169 - protein, 9 aa, Homo Sapiens
FINPETVPK

SEQ ID NO: 11170 - protein, 9 aa, Homo Sapiens
ETVPKPCCA

SEQ ID NO: 11171 - protein, 9 aa, Homo Sapiens
VPKPCCAPT

SEQ ID NO: 11172 - protein, 9 aa, Homo Sapiens
KPCCAPTQL

SEQ ID NO: 11173 - protein, 9 aa, Homo Sapiens
CAPTQLNAI

SEQ ID NO: 11174 - protein, 9 aa, Homo Sapiens
TQLNAISVL

SEQ ID NO: 11175 - protein, 9 aa, Homo Sapiens
QLNAISVLY

SEQ ID NO: 11176 - protein, 9 aa, Homo Sapiens
LYFDDSSNV

SEQ ID NO: 11177 - protein, 9 aa, Homo Sapiens
YFDDSSNVI

SEQ ID NO: 11178 - protein, 9 aa, Homo Sapiens
FDDSSNVIL

SEQ ID NO: 11179 - protein, 9 aa, Homo Sapiens
DSSNVILKK

SEQ ID NO: 11180 - protein, 9 aa, Homo Sapiens
SNVILKKYR

SEQ ID NO: 11181 - protein, 9 aa, Homo Sapiens
ILKKYRNMV

SEQ ID NO: 11182 - protein, 9 aa, Homo Sapiens
KKYRNMVVR

SEQ ID NO: 11183 - protein, 10 aa, Homo Sapiens
MHVRSLRAAA

SEQ ID NO: 11184 - protein, 10 aa, Homo Sapiens
RSLRAAAPHS

SEQ ID NO: 11185 - protein, 10 aa, Homo Sapiens
SLRAAAPHSF

SEQ ID NO: 11186 - protein, 10 aa, Homo Sapiens
LRAAAPHSFV

SEQ ID NO: 11187 - protein, 10 aa, Homo Sapiens
RAAAPHSFVA

SEQ ID NO: 11188 - protein, 10 aa, Homo Sapiens
AAAPHSFVAL

SEQ ID NO: 11189 - protein, 10 aa, Homo Sapiens
HSFVALWAPL

SEQ ID NO: 11190 - protein, 10 aa, Homo Sapiens
SFVALWAPLF

SEQ ID NO: 11191 - protein, 10 aa, Homo Sapiens
FVALWAPLFL

SEQ ID NO: 11192 - protein, 10 aa, Homo Sapiens
VALWAPLFLL

SEQ ID NO: 11193 - protein, 10 aa, Homo Sapiens
ALWAPLFLLR

SEQ ID NO: 11194 - protein, 10 aa, Homo Sapiens
APLFLLRSAL

SEQ ID NO: 11195 - protein, 10 aa, Homo Sapiens
PLFLLRSALA

SEQ ID NO: 11196 - protein, 10 aa, Homo Sapiens
FLLRSALADF

SEQ ID NO: 11197 - protein, 10 aa, Homo Sapiens
LRSALADFSL

SEQ ID NO: 11198 - protein, 10 aa, Homo Sapiens
LADFSLDNEV

SEQ ID NO: 11199 - protein, 10 aa, Homo Sapiens
SLDNEVHSSF

SEQ ID NO: 11200 - protein, 10 aa, Homo Sapiens
NEVHSSFIHR

SEQ ID NO: 11201 - protein, 10 aa, Homo Sapiens
EVHSSFIHRR

SEQ ID NO: 11202 - protein, 10 aa, Homo Sapiens
HSSFIHRRLR

SEQ ID NO: 11203 - protein, 10 aa, Homo Sapiens
IHRRLRSQER

SEQ ID NO: 11204 - protein, 10 aa, Homo Sapiens
HRRLRSQERR

SEQ ID NO: 11205 - protein, 10 aa, Homo Sapiens
RSQERREMQR

SEQ ID NO: 11206 - protein, 10 aa, Homo Sapiens
REMQREILSI

SEQ ID NO: 11207 - protein, 10 aa, Homo Sapiens
EMQREILSIL

SEQ ID NO: 11208 - protein, 10 aa, Homo Sapiens
ILSILGLPHR

SEQ ID NO: 11209 - protein, 10 aa, Homo Sapiens
SILGLPHRPR

SEQ ID NO: 11210 - protein, 10 aa, Homo Sapiens
GLPHRPRPHL

SEQ ID NO: 11211 - protein, 10 aa, Homo Sapiens
RPRPHLQGKH

SEQ ID NO: 11212 - protein, 10 aa, Homo Sapiens
LQGKHNSAPM

SEQ ID NO: 11213 - protein, 10 aa, Homo Sapiens
NSAPMFMLDL

SEQ ID NO: 11214 - protein, 10 aa, Homo Sapiens
SAPMFMLDLY

SEQ ID NO: 11215 - protein, 10 aa, Homo Sapiens
PMFMLDLYNA

SEQ ID NO: 11216 - protein, 10 aa, Homo Sapiens
MFMLDLYNAM

SEQ ID NO: 11217 - protein, 10 aa, Homo Sapiens
FMLDLYNAMA

SEQ ID NO: 11218 - protein, 10 aa, Homo Sapiens
MLDLYNAMAV

SEQ ID NO: 11219 - protein, 10 aa, Homo Sapiens
GGQGFSYPYK

SEQ ID NO: 11220 - protein, 10 aa, Homo Sapiens
QGFSYPYKAV

SEQ ID NO: 11221 - protein, 10 aa, Homo Sapiens
GFSYPYKAVF

SEQ ID NO: 11222 - protein, 10 aa, Homo Sapiens
SYPYKAVFST

SEQ ID NO: 11223 - protein, 10 aa, Homo Sapiens
YPYKAVFSTQ

SEQ ID NO: 11224 - protein, 10 aa, Homo Sapiens
AVFSTQGPPL

SEQ ID NO: 11225 - protein, 10 aa, Homo Sapiens
STQGPPLASL

SEQ ID NO: 11226 - protein, 10 aa, Homo Sapiens
LASLQDSHFL

SEQ ID NO: 11227 - protein, 10 aa, Homo Sapiens
SLQDSHFLTD

SEQ ID NO: 11228 - protein, 10 aa, Homo Sapiens
LQDSHFLTDA

SEQ ID NO: 11229 - protein, 10 aa, Homo Sapiens
HFLTDADMVM

SEQ ID NO: 11230 - protein, 10 aa, Homo Sapiens
FLTDADMVMS

SEQ ID NO: 11231 - protein, 10 aa, Homo Sapiens
LTDADMVMSF

SEQ ID NO: 11232 - protein, 10 aa, Homo Sapiens
TDADMVMSFV

SEQ ID NO: 11233 - protein, 10 aa, Homo Sapiens
DMVMSFVNLV

SEQ ID NO: 11234 - protein, 10 aa, Homo Sapiens
MVMSFVNLVE

SEQ ID NO: 11235 - protein, 10 aa, Homo Sapiens
SFVNLVEHDK

SEQ ID NO: 11236 - protein, 10 aa, Homo Sapiens
NLVEHDKEFF

SEQ ID NO: 11237 - protein, 10 aa, Homo Sapiens
EFFHPRYHHR

SEQ ID NO: 11238 - protein, 10 aa, Homo Sapiens
FHPRYHHREF

SEQ ID NO: 11239 - protein, 10 aa, Homo Sapiens
HPRYHHREFR

SEQ ID NO: 11240 - protein, 10 aa, Homo Sapiens
YHHREFRFDL

SEQ ID NO: 11241 - protein, 10 aa, Homo Sapiens
REFRFDLSKI

SEQ ID NO: 11242 - protein, 10 aa, Homo Sapiens
KIPEGEAVTA

SEQ ID NO: 11243 - protein, 10 aa, Homo Sapiens
IPEGEAVTAA

SEQ ID NO: 11244 - protein, 10 aa, Homo Sapiens
EAVTAAEFRI

SEQ ID NO: 11245 - protein, 10 aa, Homo Sapiens
AVTAAEFRIY

SEQ ID NO: 11246 - protein, 10 aa, Homo Sapiens
VTAAEFRIYK

SEQ ID NO: 11247 - protein, 10 aa, Homo Sapiens
AEFRIYKDYI

SEQ ID NO: 11248 - protein, 10 aa, Homo Sapiens
EFRIYKDYIR

SEQ ID NO: 11249 - protein, 10 aa, Homo Sapiens
RIYKDYIRER

SEQ ID NO: 11250 - protein, 10 aa, Homo Sapiens
IYKDYIRERF

SEQ ID NO: 11251 - protein, 10 aa, Homo Sapiens
RERFDNETFR

SEQ ID NO: 11252 - protein, 10 aa, Homo Sapiens
ERFDNETFRI

SEQ ID NO: 11253 - protein, 10 aa, Homo Sapiens
ETFRISVYQV

SEQ ID NO: 11254 - protein, 10 aa, Homo Sapiens
TFRISVYQVL

SEQ ID NO: 11255 - protein, 10 aa, Homo Sapiens
SVYQVLQEHL

SEQ ID NO: 11256 - protein, 10 aa, Homo Sapiens
QEHLGRESDL

SEQ ID NO: 11257 - protein, 10 aa, Homo Sapiens
HLGRESDLFL

SEQ ID NO: 11258 - protein, 10 aa, Homo Sapiens
ESDLFLLDSR

SEQ ID NO: 11259 - protein, 10 aa, Homo Sapiens
DLFLLDSRTL

SEQ ID NO: 11260 - protein, 10 aa, Homo Sapiens
FLLDSRTLWA

SEQ ID NO: 11261 - protein, 10 aa, Homo Sapiens
LLDSRTLWAS

SEQ ID NO: 11262 - protein, 10 aa, Homo Sapiens
RTLWASEEGW

SEQ ID NO: 11263 - protein, 10 aa, Homo Sapiens
TLWASEEGWL

SEQ ID NO: 11264 - protein, 10 aa, Homo Sapiens
WASEEGWLVF

SEQ ID NO: 11265 - protein, 10 aa, Homo Sapiens
EGWLVFDITA

SEQ ID NO: 11266 - protein, 10 aa, Homo Sapiens
WLVFDITATS

SEQ ID NO: 11267 - protein, 10 aa, Homo Sapiens
DITATSNHWV

SEQ ID NO: 11268 - protein, 10 aa, Homo Sapiens
ITATSNHWVV

SEQ ID NO: 11269 - protein, 10 aa, Homo Sapiens
TSNHWVVNPR

SEQ ID NO: 11270 - protein, 10 aa, Homo Sapiens
HWVVNPRHNL

SEQ ID NO: 11271 - protein, 10 aa, Homo Sapiens
VVNPRHNLGL

SEQ ID NO: 11272 - protein, 10 aa, Homo Sapiens
NPRHNLGLQL

SEQ ID NO: 11273 - protein, 10 aa, Homo Sapiens
TLDGQSINPK

SEQ ID NO: 11274 - protein, 10 aa, Homo Sapiens
QSINPKLAGL

SEQ ID NO: 11275 - protein, 10 aa, Homo Sapiens
SINPKLAGLI

SEQ ID NO: 11276 - protein, 10 aa, Homo Sapiens
LIGRHGPQNK

SEQ ID NO: 11277 - protein, 10 aa, Homo Sapiens
KQPFMVAFFK

SEQ ID NO: 11278 - protein, 10 aa, Homo Sapiens
QPFMVAFFKA

SEQ ID NO: 11279 - protein, 10 aa, Homo Sapiens
FMVAFFKATE

SEQ ID NO: 11280 - protein, 10 aa, Homo Sapiens
MVAFFKATEV

SEQ ID NO: 11281 - protein, 10 aa, Homo Sapiens
AFFKATEVHF

SEQ ID NO: 11282 - protein, 10 aa, Homo Sapiens
FFKATEVHFR

SEQ ID NO: 11283 - protein, 10 aa, Homo Sapiens
KATEVHFRSI

SEQ ID NO: 11284 - protein, 10 aa, Homo Sapiens
ATEVHFRSIR

SEQ ID NO: 11285 - protein, 10 aa, Homo Sapiens
FRSIRSTGSK

SEQ ID NO: 11286 - protein, 10 aa, Homo Sapiens
RSQNRSKTPK

SEQ ID NO: 11287 - protein, 10 aa, Homo Sapiens
KTPKNQEALR

SEQ ID NO: 11288 - protein, 10 aa, Homo Sapiens
TPKNQEALRM

SEQ ID NO: 11289 - protein, 10 aa, Homo Sapiens
NQEALRMANV

SEQ ID NO: 11290 - protein, 10 aa, Homo Sapiens
VAENSSSDQR

SEQ ID NO: 11291 - protein, 10 aa, Homo Sapiens
AENSSSDQRQ

SEQ ID NO: 11292 - protein, 10 aa, Homo Sapiens
SSSDQRQACK

SEQ ID NO: 11293 - protein, 10 aa, Homo Sapiens
SSDQRQACKK

SEQ ID NO: 11294 - protein, 10 aa, Homo Sapiens
RQACKKHELY

SEQ ID NO: 11295 - protein, 10 aa, Homo Sapiens
QACKKHELYV

SEQ ID NO: 11296 - protein, 10 aa, Homo Sapiens
KKHELYVSFR

SEQ ID NO: 11297 - protein, 10 aa, Homo Sapiens
HELYVSFRDL

SEQ ID NO: 11298 - protein, 10 aa, Homo Sapiens
LYVSFRDLGW

SEQ ID NO: 11299 - protein, 10 aa, Homo Sapiens
DLGWQDWIIA

SEQ ID NO: 11300 - protein, 10 aa, Homo Sapiens
WIIAPEGYAA

SEQ ID NO: 11301 - protein, 10 aa, Homo Sapiens
IIAPEGYAAY

SEQ ID NO: 11302 - protein, 10 aa, Homo Sapiens
IAPEGYAAYY

SEQ ID NO: 11303 - protein, 10 aa, Homo Sapiens
AYYCEGECAF

SEQ ID NO: 11304 - protein, 10 aa, Homo Sapiens
ECAFPLNSYM

SEQ ID NO: 11305 - protein, 10 aa, Homo Sapiens
FPLNSYMNAT

SEQ ID NO: 11306 - protein, 10 aa, Homo Sapiens
SYMNATNHAI

SEQ ID NO: 11307 - protein, 10 aa, Homo Sapiens
YMNATNHAIV

SEQ ID NO: 11308 - protein, 10 aa, Homo Sapiens
ATNHAIVQTL

SEQ ID NO: 11309 - protein, 10 aa, Homo Sapiens
TNHAIVQTLV

SEQ ID NO: 11310 - protein, 10 aa, Homo Sapiens
HAIVQTLVHF

SEQ ID NO: 11311 - protein, 10 aa, Homo Sapiens
AIVQTLVHFI

SEQ ID NO: 11312 - protein, 10 aa, Homo Sapiens
TLVHFINPET

SEQ ID NO: 11313 - protein, 10 aa, Homo Sapiens
LVHFINPETV

SEQ ID NO: 11314 - protein, 10 aa, Homo Sapiens
HFINPETVPK

SEQ ID NO: 11315 - protein, 10 aa, Homo Sapiens
CCAPTQLNAI

SEQ ID NO: 11316 - protein, 10 aa, Homo Sapiens
APTQLNAISV

SEQ ID NO: 11317 - protein, 10 aa, Homo Sapiens
TQLNAISVLY

SEQ ID NO: 11318 - protein, 10 aa, Homo Sapiens
QLNAISVLYF

SEQ ID NO: 11319 - protein, 10 aa, Homo Sapiens
VLYFDDSSNV

SEQ ID NO: 11320 - protein, 10 aa, Homo Sapiens
LYFDDSSNVI

SEQ ID NO: 11321 - protein, 10 aa, Homo Sapiens
YFDDSSNVIL

SEQ ID NO: 11322 - protein, 10 aa, Homo Sapiens
DSSNVILKKY

SEQ ID NO: 11323 - protein, 10 aa, Homo Sapiens
SSNVILKKYR

SEQ ID NO: 11324 - protein, 10 aa, Homo Sapiens
NVILKKYRNM

SEQ ID NO: 11325 - protein, 10 aa, Homo Sapiens
VILKKYRNMV

SEQ ID NO: 11326 - protein, 10 aa, Homo Sapiens
ILKKYRNMVV

SEQ ID NO: 11327 - protein, 10 aa, Homo Sapiens
LKKYRNMVVR

SEQ ID NO: 11328 - protein, 11 aa, Homo Sapiens
RSLRAAAPHSF

SEQ ID NO: 11329 - protein, 11 aa, Homo Sapiens
SLRAAAPHSFV

SEQ ID NO: 11330 - protein, 11 aa, Homo Sapiens
RAAAPHSFVAL

SEQ ID NO: 11331 - protein, 11 aa, Homo Sapiens
AAAPHSFVALW

SEQ ID NO: 11332 - protein, 11 aa, Homo Sapiens
HSFVALWAPLF

SEQ ID NO: 11333 - protein, 11 aa, Homo Sapiens
SFVALWAPLFL

SEQ ID NO: 11334 - protein, 11 aa, Homo Sapiens
FVALWAPLFLL

SEQ ID NO: 11335 - protein, 11 aa, Homo Sapiens
VALWAPLFLLR

SEQ ID NO: 11336 - protein, 11 aa, Homo Sapiens
ALWAPLFLLRS

SEQ ID NO: 11337 - protein, 11 aa, Homo Sapiens
WAPLFLLRSAL

SEQ ID NO: 11338 - protein, 11 aa, Homo Sapiens
APLFLLRSALA

SEQ ID NO: 11339 - protein, 11 aa, Homo Sapiens
LFLLRSALADF

SEQ ID NO: 11340 - protein, 11 aa, Homo Sapiens
FLLRSALADFS

SEQ ID NO: 11341 - protein, 11 aa, Homo Sapiens
LLRSALADFSL

SEQ ID NO: 11342 - protein, 11 aa, Homo Sapiens
ALADFSLDNEV

SEQ ID NO: 11343 - protein, 11 aa, Homo Sapiens
FSLDNEVHSSF

SEQ ID NO: 11344 - protein, 11 aa, Homo Sapiens
SLDNEVHSSFI

SEQ ID NO: 11345 - protein, 11 aa, Homo Sapiens
NEVHSSFIHRR

SEQ ID NO: 11346 - protein, 11 aa, Homo Sapiens
EVHSSFIHRRL

SEQ ID NO: 11347 - protein, 11 aa, Homo Sapiens
FIHRRLRSQER

SEQ ID NO: 11348 - protein, 11 aa, Homo Sapiens
RRLRSQERREM

SEQ ID NO: 11349 - protein, 11 aa, Homo Sapiens
QERREMQREIL

SEQ ID NO: 11350 - protein, 11 aa, Homo Sapiens
RREMQREILSI

SEQ ID NO: 11351 - protein, 11 aa, Homo Sapiens
REMQREILSIL

SEQ ID NO: 11352 - protein, 11 aa, Homo Sapiens
MQREILSILGL

SEQ ID NO: 11353 - protein, 11 aa, Homo Sapiens
REILSILGLPH

SEQ ID NO: 11354 - protein, 11 aa, Homo Sapiens
EILSILGLPHR

SEQ ID NO: 11355 - protein, 11 aa, Homo Sapiens
LSILGLPHRPR

SEQ ID NO: 11356 - protein, 11 aa, Homo Sapiens
RPRPHLQGKHN

SEQ ID NO: 11357 - protein, 11 aa, Homo Sapiens
RPHLQGKHNSA

SEQ ID NO: 11358 - protein, 11 aa, Homo Sapiens
HLQGKHNSAPM

SEQ ID NO: 11359 - protein, 11 aa, Homo Sapiens
LQGKHNSAPMF

SEQ ID NO: 11360 - protein, 11 aa, Homo Sapiens
NSAPMFMLDLY

SEQ ID NO: 11361 - protein, 11 aa, Homo Sapiens
APMFMLDLYNA

SEQ ID NO: 11362 - protein, 11 aa, Homo Sapiens
PMFMLDLYNAM

SEQ ID NO: 11363 - protein, 11 aa, Homo Sapiens
FMLDLYNAMAV

SEQ ID NO: 11364 - protein, 11 aa, Homo Sapiens
EEGGGPGGQGF

SEQ ID NO: 11365 - protein, 11 aa, Homo Sapiens
GPGGQGFSYPY

SEQ ID NO: 11366 - protein, 11 aa, Homo Sapiens
GQGFSYPYKAV

SEQ ID NO: 11367 - protein, 11 aa, Homo Sapiens
YPYKAVFSTQG

SEQ ID NO: 11368 - protein, 11 aa, Homo Sapiens
KAVFSTQGPPL

SEQ ID NO: 11369 - protein, 11 aa, Homo Sapiens
FSTQGPPLASL

SEQ ID NO: 11370 - protein, 11 aa, Homo Sapiens
PPLASLQDSHF

SEQ ID NO: 11371 - protein, 11 aa, Homo Sapiens
PLASLQDSHFL

SEQ ID NO: 11372 - protein, 11 aa, Homo Sapiens
SLQDSHFLTDA

SEQ ID NO: 11373 - protein, 11 aa, Homo Sapiens
DSHFLTDADMV

SEQ ID NO: 11374 - protein, 11 aa, Homo Sapiens
FLTDADMVMSF

SEQ ID NO: 11375 - protein, 11 aa, Homo Sapiens
LTDADMVMSFV

SEQ ID NO: 11376 - protein, 11 aa, Homo Sapiens
MVMSFVNLVEH

SEQ ID NO: 11377 - protein, 11 aa, Homo Sapiens
MSFVNLVEHDK

SEQ ID NO: 11378 - protein, 11 aa, Homo Sapiens
FVNLVEHDKEF

SEQ ID NO: 11379 - protein, 11 aa, Homo Sapiens
VEHDKEFFHPR

SEQ ID NO: 11380 - protein, 11 aa, Homo Sapiens
KEFFHPRYHHR

SEQ ID NO: 11381 - protein, 11 aa, Homo Sapiens
FFHPRYHHREF

SEQ ID NO: 11382 - protein, 11 aa, Homo Sapiens
HPRYHHREFRF

SEQ ID NO: 11383 - protein, 11 aa, Homo Sapiens
RYHHREFRFDL

SEQ ID NO: 11384 - protein, 11 aa, Homo Sapiens
HHREFRFDLSK

SEQ ID NO: 11385 - protein, 11 aa, Homo Sapiens
DLSKIPEGEAV

SEQ ID NO: 11386 - protein, 11 aa, Homo Sapiens
KIPEGEAVTAA

SEQ ID NO: 11387 - protein, 11 aa, Homo Sapiens
IPEGEAVTAAE

SEQ ID NO: 11388 - protein, 11 aa, Homo Sapiens
EGEAVTAAEFR

SEQ ID NO: 11389 - protein, 11 aa, Homo Sapiens
GEAVTAAEFRI

SEQ ID NO: 11390 - protein, 11 aa, Homo Sapiens
EAVTAAEFRIY

SEQ ID NO: 11391 - protein, 11 aa, Homo Sapiens
AVTAAEFRIYK

SEQ ID NO: 11392 - protein, 11 aa, Homo Sapiens
TAAEFRIYKDY

SEQ ID NO: 11393 - protein, 11 aa, Homo Sapiens
AEFRIYKDYIR

SEQ ID NO: 11394 - protein, 11 aa, Homo Sapiens
RIYKDYIRERF

SEQ ID NO: 11395 - protein, 11 aa, Homo Sapiens
YIRERFDNETF

SEQ ID NO: 11396 - protein, 11 aa, Homo Sapiens
RERFDNETFRI

SEQ ID NO: 11397 - protein, 11 aa, Homo Sapiens
RFDNETFRISV

SEQ ID NO: 11398 - protein, 11 aa, Homo Sapiens
FDNETFRISVY

SEQ ID NO: 11399 - protein, 11 aa, Homo Sapiens
ETFRISVYQVL

SEQ ID NO: 11400 - protein, 11 aa, Homo Sapiens
ISVYQVLQEHL

SEQ ID NO: 11401 - protein, 11 aa, Homo Sapiens
VYQVLQEHLGR

SEQ ID NO: 11402 - protein, 11 aa, Homo Sapiens
QEHLGRESDLF

SEQ ID NO: 11403 - protein, 11 aa, Homo Sapiens
HLGRESDLFLL

SEQ ID NO: 11404 - protein, 11 aa, Homo Sapiens
FLLDSRTLWAS

SEQ ID NO: 11405 - protein, 11 aa, Homo Sapiens
RTLWASEEGWL

SEQ ID NO: 11406 - protein, 11 aa, Homo Sapiens
TLWASEEGWLV

SEQ ID NO: 11407 - protein, 11 aa, Homo Sapiens
LWASEEGWLVF

SEQ ID NO: 11408 - protein, 11 aa, Homo Sapiens
EEGWLVFDITA

SEQ ID NO: 11409 - protein, 11 aa, Homo Sapiens
FDITATSNHWV

SEQ ID NO: 11410 - protein, 11 aa, Homo Sapiens
DITATSNHWVV

SEQ ID NO: 11411 - protein, 11 aa, Homo Sapiens
ATSNHWVVNPR

SEQ ID NO: 11412 - protein, 11 aa, Homo Sapiens
WVVNPRHNLGL

SEQ ID NO: 11413 - protein, 11 aa, Homo Sapiens
NLGLQLSVETL

SEQ ID NO: 11414 - protein, 11 aa, Homo Sapiens
LQLSVETLDGQ

SEQ ID NO: 11415 - protein, 11 aa, Homo Sapiens
ETLDGQSINPK

SEQ ID NO: 11416 - protein, 11 aa, Homo Sapiens
TLDGQSINPKL

SEQ ID NO: 11417 - protein, 11 aa, Homo Sapiens
GQSINPKLAGL

SEQ ID NO: 11418 - protein, 11 aa, Homo Sapiens
KLAGLIGRHGP

SEQ ID NO: 11419 - protein, 11 aa, Homo Sapiens
GLIGRHGPQNK

SEQ ID NO: 11420 - protein, 11 aa, Homo Sapiens
GRHGPQNKQPF

SEQ ID NO: 11421 - protein, 11 aa, Homo Sapiens
HGPQNKQPFMV

SEQ ID NO: 11422 - protein, 11 aa, Homo Sapiens
NKQPFMVAFFK

SEQ ID NO: 11423 - protein, 11 aa, Homo Sapiens
KQPFMVAFFKA

SEQ ID NO: 11424 - protein, 11 aa, Homo Sapiens
QPFMVAFFKAT

SEQ ID NO: 11425 - protein, 11 aa, Homo Sapiens
FMVAFFKATEV

SEQ ID NO: 11426 - protein, 11 aa, Homo Sapiens
MVAFFKATEVH

SEQ ID NO: 11427 - protein, 11 aa, Homo Sapiens
VAFFKATEVHF

SEQ ID NO: 11428 - protein, 11 aa, Homo Sapiens
AFFKATEVHFR

SEQ ID NO: 11429 - protein, 11 aa, Homo Sapiens
KATEVHFRSIR

SEQ ID NO: 11430 - protein, 11 aa, Homo Sapiens
HFRSIRSTGSK

SEQ ID NO: 11431 - protein, 11 aa, Homo Sapiens
RSIRSTGSKQR

SEQ ID NO: 11432 - protein, 11 aa, Homo Sapiens
STGSKQRSQNR

SEQ ID NO: 11433 - protein, 11 aa, Homo Sapiens
GSKQRSQNRSK

SEQ ID NO: 11434 - protein, 11 aa, Homo Sapiens
QRSQNRSKTPK

SEQ ID NO: 11435 - protein, 11 aa, Homo Sapiens
KTPKNQEALRM

SEQ ID NO: 11436 - protein, 11 aa, Homo Sapiens
NVAENSSSDQR

SEQ ID NO: 11437 - protein, 11 aa, Homo Sapiens
AENSSSDQRQA

SEQ ID NO: 11438 - protein, 11 aa, Homo Sapiens
NSSSDQRQACK

SEQ ID NO: 11439 - protein, 11 aa, Homo Sapiens
SSSDQRQACKK

SEQ ID NO: 11440 - protein, 11 aa, Homo Sapiens
RQACKKHELYV

SEQ ID NO: 11441 - protein, 11 aa, Homo Sapiens
VSFRDLGWQDW

SEQ ID NO: 11442 - protein, 11 aa, Homo Sapiens
WQDWIIAPEGY

SEQ ID NO: 11443 - protein, 11 aa, Homo Sapiens
WIIAPEGYAAY

SEQ ID NO: 11444 - protein, 11 aa, Homo Sapiens
IIAPEGYAAYY

SEQ ID NO: 11445 - protein, 11 aa, Homo Sapiens
YAAYYCEGECA

SEQ ID NO: 11446 - protein, 11 aa, Homo Sapiens
AAYYCEGECAF

SEQ ID NO: 11447 - protein, 11 aa, Homo Sapiens
YYCEGECAFPL

SEQ ID NO: 11448 - protein, 11 aa, Homo Sapiens
EGECAFPLNSY

SEQ ID NO: 11449 - protein, 11 aa, Homo Sapiens
GECAFPLNSYM

SEQ ID NO: 11450 - protein, 11 aa, Homo Sapiens
CAFPLNSYMNA

SEQ ID NO: 11451 - protein, 11 aa, Homo Sapiens
FPLNSYMNATN

SEQ ID NO: 11452 - protein, 11 aa, Homo Sapiens
NSYMNATNHAI

SEQ ID NO: 11453 - protein, 11 aa, Homo Sapiens
SYMNATNHAIV

SEQ ID NO: 11454 - protein, 11 aa, Homo Sapiens
YMNATNHAIVQ

SEQ ID NO: 11455 - protein, 11 aa, Homo Sapiens
NATNHAIVQTL

SEQ ID NO: 11456 - protein, 11 aa, Homo Sapiens
ATNHAIVQTLV

SEQ ID NO: 11457 - protein, 11 aa, Homo Sapiens
HAIVQTLVHFI

SEQ ID NO: 11458 - protein, 11 aa, Homo Sapiens
QTLVHFINPET

SEQ ID NO: 11459 - protein, 11 aa, Homo Sapiens
TLVHFINPETV

SEQ ID NO: 11460 - protein, 11 aa, Homo Sapiens
ETVPKPCCAPT

SEQ ID NO: 11461 - protein, 11 aa, Homo Sapiens
VPKPCCAPTQL

SEQ ID NO: 11462 - protein, 11 aa, Homo Sapiens
CAPTQLNAISV

SEQ ID NO: 11463 - protein, 11 aa, Homo Sapiens
APTQLNAISVL

SEQ ID NO: 11464 - protein, 11 aa, Homo Sapiens
PTQLNAISVLY

SEQ ID NO: 11465 - protein, 11 aa, Homo Sapiens
TQLNAISVLYF

SEQ ID NO: 11466 - protein, 11 aa, Homo Sapiens
SVLYFDDSSNV

SEQ ID NO: 11467 - protein, 11 aa, Homo Sapiens
VLYFDDSSNVI

SEQ ID NO: 11468 - protein, 11 aa, Homo Sapiens
LYFDDSSNVIL

SEQ ID NO: 11469 - protein, 11 aa, Homo Sapiens
YFDDSSNVILK

SEQ ID NO: 11470 - protein, 11 aa, Homo Sapiens
DSSNVILKKYR

SEQ ID NO: 11471 - protein, 11 aa, Homo Sapiens
NVILKKYRNMV

SEQ ID NO: 11472 - protein, 11 aa, Homo Sapiens
VILKKYRNMVV

SEQ ID NO: 11473 - protein, 11 aa, Homo Sapiens
ILKKYRNMVVR

SEQ ID NO: 11474 - protein, 13 aa, Homo Sapiens
MHVRSLRAAAPHS

SEQ ID NO: 11475 - protein, 13 aa, Homo Sapiens
HVRSLRAAAPHSF

SEQ ID NO: 11476 - protein, 13 aa, Homo Sapiens
VRSLRAAAPHSFV

SEQ ID NO: 11477 - protein, 13 aa, Homo Sapiens
RSLRAAAPHSFVA

SEQ ID NO: 11478 - protein, 13 aa, Homo Sapiens
SLRAAAPHSFVAL

SEQ ID NO: 11479 - protein, 13 aa, Homo Sapiens
LRAAAPHSFVALW

SEQ ID NO: 11480 - protein, 13 aa, Homo Sapiens
RAAAPHSFVALWA

SEQ ID NO: 11481 - protein, 13 aa, Homo Sapiens
AAAPHSFVALWAP

SEQ ID NO: 11482 - protein, 13 aa, Homo Sapiens
AAPHSFVALWAPL

SEQ ID NO: 11483 - protein, 13 aa, Homo Sapiens
APHSFVALWAPLF

SEQ ID NO: 11484 - protein, 13 aa, Homo Sapiens
PHSFVALWAPLFL

SEQ ID NO: 11485 - protein, 13 aa, Homo Sapiens
HSFVALWAPLFLL

SEQ ID NO: 11486 - protein, 13 aa, Homo Sapiens
SFVALWAPLFLLR

SEQ ID NO: 11487 - protein, 13 aa, Homo Sapiens
FVALWAPLFLLRS

SEQ ID NO: 11488 - protein, 13 aa, Homo Sapiens
VALWAPLFLLRSA

SEQ ID NO: 11489 - protein, 13 aa, Homo Sapiens
ALWAPLFLLRSAL

SEQ ID NO: 11490 - protein, 13 aa, Homo Sapiens
LWAPLFLLRSALA

SEQ ID NO: 11491 - protein, 13 aa, Homo Sapiens
WAPLFLLRSALAD

SEQ ID NO: 11492 - protein, 13 aa, Homo Sapiens
APLFLLRSALADF

SEQ ID NO: 11493 - protein, 13 aa, Homo Sapiens
PLFLLRSALADFS

SEQ ID NO: 11494 - protein, 13 aa, Homo Sapiens
LFLLRSALADFSL

SEQ ID NO: 11495 - protein, 13 aa, Homo Sapiens
FLLRSALADFSLD

SEQ ID NO: 11496 - protein, 13 aa, Homo Sapiens
LLRSALADFSLDN

SEQ ID NO: 11497 - protein, 13 aa, Homo Sapiens
LRSALADFSLDNE

SEQ ID NO: 11498 - protein, 13 aa, Homo Sapiens
RSALADFSLDNEV

SEQ ID NO: 11499 - protein, 13 aa, Homo Sapiens
SALADFSLDNEVH

SEQ ID NO: 11500 - protein, 13 aa, Homo Sapiens
ALADFSLDNEVHS

SEQ ID NO: 11501 - protein, 13 aa, Homo Sapiens
LADFSLDNEVHSS

SEQ ID NO: 11502 - protein, 13 aa, Homo Sapiens
ADFSLDNEVHSSF

SEQ ID NO: 11503 - protein, 13 aa, Homo Sapiens
DFSLDNEVHSSFI

SEQ ID NO: 11504 - protein, 13 aa, Homo Sapiens
FSLDNEVHSSFIH

SEQ ID NO: 11505 - protein, 13 aa, Homo Sapiens
SLDNEVHSSFIHR

SEQ ID NO: 11506 - protein, 13 aa, Homo Sapiens
LDNEVHSSFIHRR

SEQ ID NO: 11507 - protein, 13 aa, Homo Sapiens
DNEVHSSFIHRRL

SEQ ID NO: 11508 - protein, 13 aa, Homo Sapiens
NEVHSSFIHRRLR

SEQ ID NO: 11509 - protein, 13 aa, Homo Sapiens
EVHSSFIHRRLRS

SEQ ID NO: 11510 - protein, 13 aa, Homo Sapiens
VHSSFIHRRLRSQ

SEQ ID NO: 11511 - protein, 13 aa, Homo Sapiens
HSSFIHRRLRSQE

SEQ ID NO: 11512 - protein, 13 aa, Homo Sapiens
SSFIHRRLRSQER

SEQ ID NO: 11513 - protein, 13 aa, Homo Sapiens
SFIHRRLRSQERR

SEQ ID NO: 11514 - protein, 13 aa, Homo Sapiens
FIHRRLRSQERRE

SEQ ID NO: 11515 - protein, 13 aa, Homo Sapiens
IHRRLRSQERREM

SEQ ID NO: 11516 - protein, 13 aa, Homo Sapiens
HRRLRSQERREMQ

SEQ ID NO: 11517 - protein, 13 aa, Homo Sapiens
RRLRSQERREMQR

SEQ ID NO: 11518 - protein, 13 aa, Homo Sapiens
RLRSQERREMQRE

SEQ ID NO: 11519 - protein, 13 aa, Homo Sapiens
LRSQERREMQREI

SEQ ID NO: 11520 - protein, 13 aa, Homo Sapiens
RSQERREMQREIL

SEQ ID NO: 11521 - protein, 13 aa, Homo Sapiens
SQERREMQREILS

SEQ ID NO: 11522 - protein, 13 aa, Homo Sapiens
QERREMQREILSI

SEQ ID NO: 11523 - protein, 13 aa, Homo Sapiens
ERREMQREILSIL

SEQ ID NO: 11524 - protein, 13 aa, Homo Sapiens
RREMQREILSILG

SEQ ID NO: 11525 - protein, 13 aa, Homo Sapiens
REMQREILSILGL

SEQ ID NO: 11526 - protein, 13 aa, Homo Sapiens
EMQREILSILGLP

SEQ ID NO: 11527 - protein, 13 aa, Homo Sapiens
MQREILSILGLPH

SEQ ID NO: 11528 - protein, 13 aa, Homo Sapiens
QREILSILGLPHR

SEQ ID NO: 11529 - protein, 13 aa, Homo Sapiens
REILSILGLPHRP

SEQ ID NO: 11530 - protein, 13 aa, Homo Sapiens
EILSILGLPHRPR

SEQ ID NO: 11531 - protein, 13 aa, Homo Sapiens
ILSILGLPHRPRP

SEQ ID NO: 11532 - protein, 13 aa, Homo Sapiens
LSILGLPHRPRPH

SEQ ID NO: 11533 - protein, 13 aa, Homo Sapiens
SILGLPHRPRPHL

SEQ ID NO: 11534 - protein, 13 aa, Homo Sapiens
ILGLPHRPRPHLQ

SEQ ID NO: 11535 - protein, 13 aa, Homo Sapiens
LGLPHRPRPHLQG

SEQ ID NO: 11536 - protein, 13 aa, Homo Sapiens
GLPHRPRPHLQGK

SEQ ID NO: 11537 - protein, 13 aa, Homo Sapiens
LPHRPRPHLQGKH

SEQ ID NO: 11538 - protein, 13 aa, Homo Sapiens
PHRPRPHLQGKHN

SEQ ID NO: 11539 - protein, 13 aa, Homo Sapiens
HRPRPHLQGKHNS

SEQ ID NO: 11540 - protein, 13 aa, Homo Sapiens
RPRPHLQGKHNSA

SEQ ID NO: 11541 - protein, 13 aa, Homo Sapiens
PRPHLQGKHNSAP

SEQ ID NO: 11542 - protein, 13 aa, Homo Sapiens
RPHLQGKHNSAPM

SEQ ID NO: 11543 - protein, 13 aa, Homo Sapiens
PHLQGKHNSAPMF

SEQ ID NO: 11544 - protein, 13 aa, Homo Sapiens
HLQGKHNSAPMFM

SEQ ID NO: 11545 - protein, 13 aa, Homo Sapiens
LQGKHNSAPMFML

SEQ ID NO: 11546 - protein, 13 aa, Homo Sapiens
QGKHNSAPMFMLD

SEQ ID NO: 11547 - protein, 13 aa, Homo Sapiens
GKHNSAPMFMLDL

SEQ ID NO: 11548 - protein, 13 aa, Homo Sapiens
KHNSAPMFMLDLY

SEQ ID NO: 11549 - protein, 13 aa, Homo Sapiens
HNSAPMFMLDLYN

SEQ ID NO: 11550 - protein, 13 aa, Homo Sapiens
NSAPMFMLDLYNA

SEQ ID NO: 11551 - protein, 13 aa, Homo Sapiens
SAPMFMLDLYNAM

SEQ ID NO: 11552 - protein, 13 aa, Homo Sapiens
APMFMLDLYNAMA

SEQ ID NO: 11553 - protein, 13 aa, Homo Sapiens
PMFMLDLYNAMAV

SEQ ID NO: 11554 - protein, 13 aa, Homo Sapiens
MFMLDLYNAMAVE

SEQ ID NO: 11555 - protein, 13 aa, Homo Sapiens
FMLDLYNAMAVEE

SEQ ID NO: 11556 - protein, 13 aa, Homo Sapiens
MLDLYNAMAVEEG

SEQ ID NO: 11557 - protein, 13 aa, Homo Sapiens
LDLYNAMAVEEGG

SEQ ID NO: 11558 - protein, 13 aa, Homo Sapiens
DLYNAMAVEEGGG

SEQ ID NO: 11559 - protein, 13 aa, Homo Sapiens
LYNAMAVEEGGGP

SEQ ID NO: 11560 - protein, 13 aa, Homo Sapiens
YNAMAVEEGGGPG

SEQ ID NO: 11561 - protein, 13 aa, Homo Sapiens
NAMAVEEGGGPGG

SEQ ID NO: 11562 - protein, 13 aa, Homo Sapiens
AMAVEEGGGPGGQ

SEQ ID NO: 11563 - protein, 13 aa, Homo Sapiens
MAVEEGGGPGGQG

SEQ ID NO: 11564 - protein, 13 aa, Homo Sapiens
AVEEGGGPGGQGF

SEQ ID NO: 11565 - protein, 13 aa, Homo Sapiens
VEEGGGPGGQGFS

SEQ ID NO: 11566 - protein, 13 aa, Homo Sapiens
EEGGGPGGQGFSY

SEQ ID NO: 11567 - protein, 13 aa, Homo Sapiens
EGGGPGGQGFSYP

SEQ ID NO: 11568 - protein, 13 aa, Homo Sapiens
GGGPGGQGFSYPY

SEQ ID NO: 11569 - protein, 13 aa, Homo Sapiens
GGPGGQGFSYPYK

SEQ ID NO: 11570 - protein, 13 aa, Homo Sapiens
GPGGQGFSYPYKA

SEQ ID NO: 11571 - protein, 13 aa, Homo Sapiens
PGGQGFSYPYKAV

SEQ ID NO: 11572 - protein, 13 aa, Homo Sapiens
GGQGFSYPYKAVF

SEQ ID NO: 11573 - protein, 13 aa, Homo Sapiens
GQGFSYPYKAVFS

SEQ ID NO: 11574 - protein, 13 aa, Homo Sapiens
QGFSYPYKAVFST

SEQ ID NO: 11575 - protein, 13 aa, Homo Sapiens
GFSYPYKAVFSTQ

SEQ ID NO: 11576 - protein, 13 aa, Homo Sapiens
FSYPYKAVFSTQG

SEQ ID NO: 11577 - protein, 13 aa, Homo Sapiens
SYPYKAVFSTQGP

SEQ ID NO: 11578 - protein, 13 aa, Homo Sapiens
YPYKAVFSTQGPP

SEQ ID NO: 11579 - protein, 13 aa, Homo Sapiens
PYKAVFSTQGPPL

SEQ ID NO: 11580 - protein, 13 aa, Homo Sapiens
YKAVFSTQGPPLA

SEQ ID NO: 11581 - protein, 13 aa, Homo Sapiens
KAVFSTQGPPLAS

SEQ ID NO: 11582 - protein, 13 aa, Homo Sapiens
AVFSTQGPPLASL

SEQ ID NO: 11583 - protein, 13 aa, Homo Sapiens
VFSTQGPPLASLQ

SEQ ID NO: 11584 - protein, 13 aa, Homo Sapiens
FSTQGPPLASLQD

SEQ ID NO: 11585 - protein, 13 aa, Homo Sapiens
STQGPPLASLQDS

SEQ ID NO: 11586 - protein, 13 aa, Homo Sapiens
TQGPPLASLQDSH

SEQ ID NO: 11587 - protein, 13 aa, Homo Sapiens
QGPPLASLQDSHF

SEQ ID NO: 11588 - protein, 13 aa, Homo Sapiens
GPPLASLQDSHFL

SEQ ID NO: 11589 - protein, 13 aa, Homo Sapiens
PPLASLQDSHFLT

SEQ ID NO: 11590 - protein, 13 aa, Homo Sapiens
PLASLQDSHFLTD

SEQ ID NO: 11591 - protein, 13 aa, Homo Sapiens
LASLQDSHFLTDA

SEQ ID NO: 11592 - protein, 13 aa, Homo Sapiens
ASLQDSHFLTDAD

SEQ ID NO: 11593 - protein, 13 aa, Homo Sapiens
SLQDSHFLTDADM

SEQ ID NO: 11594 - protein, 13 aa, Homo Sapiens
LQDSHFLTDADMV

SEQ ID NO: 11595 - protein, 13 aa, Homo Sapiens
QDSHFLTDADMVM

SEQ ID NO: 11596 - protein, 13 aa, Homo Sapiens
DSHFLTDADMVMS

SEQ ID NO: 11597 - protein, 13 aa, Homo Sapiens
SHFLTDADMVMSF

SEQ ID NO: 11598 - protein, 13 aa, Homo Sapiens
HFLTDADMVMSFV

SEQ ID NO: 11599 - protein, 13 aa, Homo Sapiens
FLTDADMVMSFVN

SEQ ID NO: 11600 - protein, 13 aa, Homo Sapiens
LTDADMVMSFVNL

SEQ ID NO: 11601 - protein, 13 aa, Homo Sapiens
TDADMVMSFVNLV

SEQ ID NO: 11602 - protein, 13 aa, Homo Sapiens
DADMVMSFVNLVE

SEQ ID NO: 11603 - protein, 13 aa, Homo Sapiens
ADMVMSFVNLVEH

SEQ ID NO: 11604 - protein, 13 aa, Homo Sapiens
DMVMSFVNLVEHD

SEQ ID NO: 11605 - protein, 13 aa, Homo Sapiens
MVMSFVNLVEHDK

SEQ ID NO: 11606 - protein, 13 aa, Homo Sapiens
VMSFVNLVEHDKE

SEQ ID NO: 11607 - protein, 13 aa, Homo Sapiens
MSFVNLVEHDKEF

SEQ ID NO: 11608 - protein, 13 aa, Homo Sapiens
SFVNLVEHDKEFF

SEQ ID NO: 11609 - protein, 13 aa, Homo Sapiens
FVNLVEHDKEFFH

SEQ ID NO: 11610 - protein, 13 aa, Homo Sapiens
VNLVEHDKEFFHP

SEQ ID NO: 11611 - protein, 13 aa, Homo Sapiens
NLVEHDKEFFHPR

SEQ ID NO: 11612 - protein, 13 aa, Homo Sapiens
LVEHDKEFFHPRY

SEQ ID NO: 11613 - protein, 13 aa, Homo Sapiens
VEHDKEFFHPRYH

SEQ ID NO: 11614 - protein, 13 aa, Homo Sapiens
EHDKEFFHPRYHH

SEQ ID NO: 11615 - protein, 13 aa, Homo Sapiens
HDKEFFHPRYHHR

SEQ ID NO: 11616 - protein, 13 aa, Homo Sapiens
DKEFFHPRYHHRE

SEQ ID NO: 11617 - protein, 13 aa, Homo Sapiens
KEFFHPRYHHREF

SEQ ID NO: 11618 - protein, 13 aa, Homo Sapiens
EFFHPRYHHREFR

SEQ ID NO: 11619 - protein, 13 aa, Homo Sapiens
FFHPRYHHREFRF

SEQ ID NO: 11620 - protein, 13 aa, Homo Sapiens
FHPRYHHREFRFD

SEQ ID NO: 11621 - protein, 13 aa, Homo Sapiens
HPRYHHREFRFDL

SEQ ID NO: 11622 - protein, 13 aa, Homo Sapiens
PRYHHREFRFDLS

SEQ ID NO: 11623 - protein, 13 aa, Homo Sapiens
RYHHREFRFDLSK

SEQ ID NO: 11624 - protein, 13 aa, Homo Sapiens
YHHREFRFDLSKI

SEQ ID NO: 11625 - protein, 13 aa, Homo Sapiens
HHREFRFDLSKIP

SEQ ID NO: 11626 - protein, 13 aa, Homo Sapiens
HREFRFDLSKIPE

SEQ ID NO: 11627 - protein, 13 aa, Homo Sapiens
REFRFDLSKIPEG

SEQ ID NO: 11628 - protein, 13 aa, Homo Sapiens
EFRFDLSKIPEGE

SEQ ID NO: 11629 - protein, 13 aa, Homo Sapiens
FRFDLSKIPEGEA

SEQ ID NO: 11630 - protein, 13 aa, Homo Sapiens
RFDLSKIPEGEAV

SEQ ID NO: 11631 - protein, 13 aa, Homo Sapiens
FDLSKIPEGEAVT

SEQ ID NO: 11632 - protein, 13 aa, Homo Sapiens
DLSKIPEGEAVTA

SEQ ID NO: 11633 - protein, 13 aa, Homo Sapiens
LSKIPEGEAVTAA

SEQ ID NO: 11634 - protein, 13 aa, Homo Sapiens
SKIPEGEAVTAAE

SEQ ID NO: 11635 - protein, 13 aa, Homo Sapiens
KIPEGEAVTAAEF

SEQ ID NO: 11636 - protein, 13 aa, Homo Sapiens
IPEGEAVTAAEFR

SEQ ID NO: 11637 - protein, 13 aa, Homo Sapiens
PEGEAVTAAEFRI

SEQ ID NO: 11638 - protein, 13 aa, Homo Sapiens
EGEAVTAAEFRIY

SEQ ID NO: 11639 - protein, 13 aa, Homo Sapiens
GEAVTAAEFRIYK

SEQ ID NO: 11640 - protein, 13 aa, Homo Sapiens
EAVTAAEFRIYKD

SEQ ID NO: 11641 - protein, 13 aa, Homo Sapiens
AVTAAEFRIYKDY

SEQ ID NO: 11642 - protein, 13 aa, Homo Sapiens
VTAAEFRIYKDYI

SEQ ID NO: 11643 - protein, 13 aa, Homo Sapiens
TAAEFRIYKDYIR

SEQ ID NO: 11644 - protein, 13 aa, Homo Sapiens
AAEFRIYKDYIRE

SEQ ID NO: 11645 - protein, 13 aa, Homo Sapiens
AEFRIYKDYIRER

SEQ ID NO: 11646 - protein, 13 aa, Homo Sapiens
EFRIYKDYIRERF

SEQ ID NO: 11647 - protein, 13 aa, Homo Sapiens
FRIYKDYIRERFD

SEQ ID NO: 11648 - protein, 13 aa, Homo Sapiens
RIYKDYIRERFDN

SEQ ID NO: 11649 - protein, 13 aa, Homo Sapiens
IYKDYIRERFDNE

SEQ ID NO: 11650 - protein, 13 aa, Homo Sapiens
YKDYIRERFDNET

SEQ ID NO: 11651 - protein, 13 aa, Homo Sapiens
KDYIRERFDNETF

SEQ ID NO: 11652 - protein, 13 aa, Homo Sapiens
DYIRERFDNETFR

SEQ ID NO: 11653 - protein, 13 aa, Homo Sapiens
YIRERFDNETFRI

SEQ ID NO: 11654 - protein, 13 aa, Homo Sapiens
IRERFDNETFRIS

SEQ ID NO: 11655 - protein, 13 aa, Homo Sapiens
RERFDNETFRISV

SEQ ID NO: 11656 - protein, 13 aa, Homo Sapiens
ERFDNETFRISVY

SEQ ID NO: 11657 - protein, 13 aa, Homo Sapiens
RFDNETFRISVYQ

SEQ ID NO: 11658 - protein, 13 aa, Homo Sapiens
FDNETFRISVYQV

SEQ ID NO: 11659 - protein, 13 aa, Homo Sapiens
DNETFRISVYQVL

SEQ ID NO: 11660 - protein, 13 aa, Homo Sapiens
NETFRISVYQVLQ

SEQ ID NO: 11661 - protein, 13 aa, Homo Sapiens
ETFRISVYQVLQE

SEQ ID NO: 11662 - protein, 13 aa, Homo Sapiens
TFRISVYQVLQEH

SEQ ID NO: 11663 - protein, 13 aa, Homo Sapiens
FRISVYQVLQEHL

SEQ ID NO: 11664 - protein, 13 aa, Homo Sapiens
RISVYQVLQEHLG

SEQ ID NO: 11665 - protein, 13 aa, Homo Sapiens
ISVYQVLQEHLGR

SEQ ID NO: 11666 - protein, 13 aa, Homo Sapiens
SVYQVLQEHLGRE

SEQ ID NO: 11667 - protein, 13 aa, Homo Sapiens
VYQVLQEHLGRES

SEQ ID NO: 11668 - protein, 13 aa, Homo Sapiens
YQVLQEHLGRESD

SEQ ID NO: 11669 - protein, 13 aa, Homo Sapiens
QVLQEHLGRESDL

SEQ ID NO: 11670 - protein, 13 aa, Homo Sapiens
VLQEHLGRESDLF

SEQ ID NO: 11671 - protein, 13 aa, Homo Sapiens
LQEHLGRESDLFL

SEQ ID NO: 11672 - protein, 13 aa, Homo Sapiens
QEHLGRESDLFLL

SEQ ID NO: 11673 - protein, 13 aa, Homo Sapiens
EHLGRESDLFLLD

SEQ ID NO: 11674 - protein, 13 aa, Homo Sapiens
HLGRESDLFLLDS

SEQ ID NO: 11675 - protein, 13 aa, Homo Sapiens
LGRESDLFLLDSR

SEQ ID NO: 11676 - protein, 13 aa, Homo Sapiens
GRESDLFLLDSRT

SEQ ID NO: 11677 - protein, 13 aa, Homo Sapiens
RESDLFLLDSRTL

SEQ ID NO: 11678 - protein, 13 aa, Homo Sapiens
ESDLFLLDSRTLW

SEQ ID NO: 11679 - protein, 13 aa, Homo Sapiens
SDLFLLDSRTLWA

SEQ ID NO: 11680 - protein, 13 aa, Homo Sapiens
DLFLLDSRTLWAS

SEQ ID NO: 11681 - protein, 13 aa, Homo Sapiens
LFLLDSRTLWASE

SEQ ID NO: 11682 - protein, 13 aa, Homo Sapiens
FLLDSRTLWASEE

SEQ ID NO: 11683 - protein, 13 aa, Homo Sapiens
LLDSRTLWASEEG

SEQ ID NO: 11684 - protein, 13 aa, Homo Sapiens
LDSRTLWASEEGW

SEQ ID NO: 11685 - protein, 13 aa, Homo Sapiens
DSRTLWASEEGWL

SEQ ID NO: 11686 - protein, 13 aa, Homo Sapiens
SRTLWASEEGWLV

SEQ ID NO: 11687 - protein, 13 aa, Homo Sapiens
RTLWASEEGWLVF

SEQ ID NO: 11688 - protein, 13 aa, Homo Sapiens
TLWASEEGWLVFD

SEQ ID NO: 11689 - protein, 13 aa, Homo Sapiens
LWASEEGWLVFDI

SEQ ID NO: 11690 - protein, 13 aa, Homo Sapiens
WASEEGWLVFDIT

SEQ ID NO: 11691 - protein, 13 aa, Homo Sapiens
ASEEGWLVFDITA

SEQ ID NO: 11692 - protein, 13 aa, Homo Sapiens
SEEGWLVFDITAT

SEQ ID NO: 11693 - protein, 13 aa, Homo Sapiens
EEGWLVFDITATS

SEQ ID NO: 11694 - protein, 13 aa, Homo Sapiens
EGWLVFDITATSN

SEQ ID NO: 11695 - protein, 13 aa, Homo Sapiens
GWLVFDITATSNH

SEQ ID NO: 11696 - protein, 13 aa, Homo Sapiens
WLVFDITATSNHW

SEQ ID NO: 11697 - protein, 13 aa, Homo Sapiens
LVFDITATSNHWV

SEQ ID NO: 11698 - protein, 13 aa, Homo Sapiens
VFDITATSNHWVV

SEQ ID NO: 11699 - protein, 13 aa, Homo Sapiens
FDITATSNHWVVN

SEQ ID NO: 11700 - protein, 13 aa, Homo Sapiens
DITATSNHWVVNP

SEQ ID NO: 11701 - protein, 13 aa, Homo Sapiens
ITATSNHWVVNPR

SEQ ID NO: 11702 - protein, 13 aa, Homo Sapiens
TATSNHWVVNPRH

SEQ ID NO: 11703 - protein, 13 aa, Homo Sapiens
ATSNHWVVNPRHN

SEQ ID NO: 11704 - protein, 13 aa, Homo Sapiens
TSNHWVVNPRHNL

SEQ ID NO: 11705 - protein, 13 aa, Homo Sapiens
SNHWVVNPRHNLG

SEQ ID NO: 11706 - protein, 13 aa, Homo Sapiens
NHWVVNPRHNLGL

SEQ ID NO: 11707 - protein, 13 aa, Homo Sapiens
HWVVNPRHNLGLQ

SEQ ID NO: 11708 - protein, 13 aa, Homo Sapiens
WVVNPRHNLGLQL

SEQ ID NO: 11709 - protein, 13 aa, Homo Sapiens
VVNPRHNLGLQLS

SEQ ID NO: 11710 - protein, 13 aa, Homo Sapiens
VNPRHNLGLQLSV

SEQ ID NO: 11711 - protein, 13 aa, Homo Sapiens
NPRHNLGLQLSVE

SEQ ID NO: 11712 - protein, 13 aa, Homo Sapiens
PRHNLGLQLSVET

SEQ ID NO: 11713 - protein, 13 aa, Homo Sapiens
RHNLGLQLSVETL

SEQ ID NO: 11714 - protein, 13 aa, Homo Sapiens
HNLGLQLSVETLD

SEQ ID NO: 11715 - protein, 13 aa, Homo Sapiens
NLGLQLSVETLDG

SEQ ID NO: 11716 - protein, 13 aa, Homo Sapiens
LGLQLSVETLDGQ

SEQ ID NO: 11717 - protein, 13 aa, Homo Sapiens
GLQLSVETLDGQS

SEQ ID NO: 11718 - protein, 13 aa, Homo Sapiens
LQLSVETLDGQSI

SEQ ID NO: 11719 - protein, 13 aa, Homo Sapiens
QLSVETLDGQSIN

SEQ ID NO: 11720 - protein, 13 aa, Homo Sapiens
LSVETLDGQSINP

SEQ ID NO: 11721 - protein, 13 aa, Homo Sapiens
SVETLDGQSINPK

SEQ ID NO: 11722 - protein, 13 aa, Homo Sapiens
VETLDGQSINPKL

SEQ ID NO: 11723 - protein, 13 aa, Homo Sapiens
ETLDGQSINPKLA

SEQ ID NO: 11724 - protein, 13 aa, Homo Sapiens
TLDGQSINPKLAG

SEQ ID NO: 11725 - protein, 13 aa, Homo Sapiens
LDGQSINPKLAGL

SEQ ID NO: 11726 - protein, 13 aa, Homo Sapiens
DGQSINPKLAGLI

SEQ ID NO: 11727 - protein, 13 aa, Homo Sapiens
GQSINPKLAGLIG

SEQ ID NO: 11728 - protein, 13 aa, Homo Sapiens
QSINPKLAGLIGR

SEQ ID NO: 11729 - protein, 13 aa, Homo Sapiens
SINPKLAGLIGRH

SEQ ID NO: 11730 - protein, 13 aa, Homo Sapiens
INPKLAGLIGRHG

SEQ ID NO: 11731 - protein, 13 aa, Homo Sapiens
NPKLAGLIGRHGP

SEQ ID NO: 11732 - protein, 13 aa, Homo Sapiens
PKLAGLIGRHGPQ

SEQ ID NO: 11733 - protein, 13 aa, Homo Sapiens
KLAGLIGRHGPQN

SEQ ID NO: 11734 - protein, 13 aa, Homo Sapiens
LAGLIGRHGPQNK

SEQ ID NO: 11735 - protein, 13 aa, Homo Sapiens
AGLIGRHGPQNKQ

SEQ ID NO: 11736 - protein, 13 aa, Homo Sapiens
GLIGRHGPQNKQP

SEQ ID NO: 11737 - protein, 13 aa, Homo Sapiens
LIGRHGPQNKQPF

SEQ ID NO: 11738 - protein, 13 aa, Homo Sapiens
IGRHGPQNKQPFM

SEQ ID NO: 11739 - protein, 13 aa, Homo Sapiens
GRHGPQNKQPFMV

SEQ ID NO: 11740 - protein, 13 aa, Homo Sapiens
RHGPQNKQPFMVA

SEQ ID NO: 11741 - protein, 13 aa, Homo Sapiens
HGPQNKQPFMVAF

SEQ ID NO: 11742 - protein, 13 aa, Homo Sapiens
GPQNKQPFMVAFF

SEQ ID NO: 11743 - protein, 13 aa, Homo Sapiens
PQNKQPFMVAFFK

SEQ ID NO: 11744 - protein, 13 aa, Homo Sapiens
QNKQPFMVAFFKA

SEQ ID NO: 11745 - protein, 13 aa, Homo Sapiens
NKQPFMVAFFKAT

SEQ ID NO: 11746 - protein, 13 aa, Homo Sapiens
KQPFMVAFFKATE

SEQ ID NO: 11747 - protein, 13 aa, Homo Sapiens
QPFMVAFFKATEV

SEQ ID NO: 11748 - protein, 13 aa, Homo Sapiens
PFMVAFFKATEVH

SEQ ID NO: 11749 - protein, 13 aa, Homo Sapiens
FMVAFFKATEVHF

SEQ ID NO: 11750 - protein, 13 aa, Homo Sapiens
MVAFFKATEVHFR

SEQ ID NO: 11751 - protein, 13 aa, Homo Sapiens
VAFFKATEVHFRS

SEQ ID NO: 11752 - protein, 13 aa, Homo Sapiens
AFFKATEVHFRSI

SEQ ID NO: 11753 - protein, 13 aa, Homo Sapiens
FFKATEVHFRSIR

SEQ ID NO: 11754 - protein, 13 aa, Homo Sapiens
FKATEVHFRSIRS

SEQ ID NO: 11755 - protein, 13 aa, Homo Sapiens
KATEVHFRSIRST

SEQ ID NO: 11756 - protein, 13 aa, Homo Sapiens
ATEVHFRSIRSTG

SEQ ID NO: 11757 - protein, 13 aa, Homo Sapiens
TEVHFRSIRSTGS

SEQ ID NO: 11758 - protein, 13 aa, Homo Sapiens
EVHFRSIRSTGSK

SEQ ID NO: 11759 - protein, 13 aa, Homo Sapiens
VHFRSIRSTGSKQ

SEQ ID NO: 11760 - protein, 13 aa, Homo Sapiens
HFRSIRSTGSKQR

SEQ ID NO: 11761 - protein, 13 aa, Homo Sapiens
FRSIRSTGSKQRS

SEQ ID NO: 11762 - protein, 13 aa, Homo Sapiens
RSIRSTGSKQRSQ

SEQ ID NO: 11763 - protein, 13 aa, Homo Sapiens
SIRSTGSKQRSQN

SEQ ID NO: 11764 - protein, 13 aa, Homo Sapiens
IRSTGSKQRSQNR

SEQ ID NO: 11765 - protein, 13 aa, Homo Sapiens
RSTGSKQRSQNRS

SEQ ID NO: 11766 - protein, 13 aa, Homo Sapiens
STGSKQRSQNRSK

SEQ ID NO: 11767 - protein, 13 aa, Homo Sapiens
TGSKQRSQNRSKT

SEQ ID NO: 11768 - protein, 13 aa, Homo Sapiens
GSKQRSQNRSKTP

SEQ ID NO: 11769 - protein, 13 aa, Homo Sapiens
SKQRSQNRSKTPK

SEQ ID NO: 11770 - protein, 13 aa, Homo Sapiens
KQRSQNRSKTPKN

SEQ ID NO: 11771 - protein, 13 aa, Homo Sapiens
QRSQNRSKTPKNQ

SEQ ID NO: 11772 - protein, 13 aa, Homo Sapiens
RSQNRSKTPKNQE

SEQ ID NO: 11773 - protein, 13 aa, Homo Sapiens
SQNRSKTPKNQEA

SEQ ID NO: 11774 - protein, 13 aa, Homo Sapiens
QNRSKTPKNQEAL

SEQ ID NO: 11775 - protein, 13 aa, Homo Sapiens
NRSKTPKNQEALR

SEQ ID NO: 11776 - protein, 13 aa, Homo Sapiens
RSKTPKNQEALRM

SEQ ID NO: 11777 - protein, 13 aa, Homo Sapiens
SKTPKNQEALRMA

SEQ ID NO: 11778 - protein, 13 aa, Homo Sapiens
KTPKNQEALRMAN

SEQ ID NO: 11779 - protein, 13 aa, Homo Sapiens
TPKNQEALRMANV

SEQ ID NO: 11780 - protein, 13 aa, Homo Sapiens
PKNQEALRMANVA

SEQ ID NO: 11781 - protein, 13 aa, Homo Sapiens
KNQEALRMANVAE

SEQ ID NO: 11782 - protein, 13 aa, Homo Sapiens
NQEALRMANVAEN

SEQ ID NO: 11783 - protein, 13 aa, Homo Sapiens
QEALRMANVAENS

SEQ ID NO: 11784 - protein, 13 aa, Homo Sapiens
EALRMANVAENSS

SEQ ID NO: 11785 - protein, 13 aa, Homo Sapiens
ALRMANVAENSSS

SEQ ID NO: 11786 - protein, 13 aa, Homo Sapiens
LRMANVAENSSSD

SEQ ID NO: 11787 - protein, 13 aa, Homo Sapiens
RMANVAENSSSDQ

SEQ ID NO: 11788 - protein, 13 aa, Homo Sapiens
MANVAENSSSDQR

SEQ ID NO: 11789 - protein, 13 aa, Homo Sapiens
ANVAENSSSDQRQ

SEQ ID NO: 11790 - protein, 13 aa, Homo Sapiens
NVAENSSSDQRQA

SEQ ID NO: 11791 - protein, 13 aa, Homo Sapiens
VAENSSSDQRQAC

SEQ ID NO: 11792 - protein, 13 aa, Homo Sapiens
AENSSSDQRQACK

SEQ ID NO: 11793 - protein, 13 aa, Homo Sapiens
ENSSSDQRQACKK

SEQ ID NO: 11794 - protein, 13 aa, Homo Sapiens
NSSSDQRQACKKH

SEQ ID NO: 11795 - protein, 13 aa, Homo Sapiens
SSSDQRQACKKHE

SEQ ID NO: 11796 - protein, 13 aa, Homo Sapiens
SSDQRQACKKHEL

SEQ ID NO: 11797 - protein, 13 aa, Homo Sapiens
SDQRQACKKHELY

SEQ ID NO: 11798 - protein, 13 aa, Homo Sapiens
DQRQACKKHELYV

SEQ ID NO: 11799 - protein, 13 aa, Homo Sapiens
QRQACKKHELYVS

SEQ ID NO: 11800 - protein, 13 aa, Homo Sapiens
RQACKKHELYVSF

SEQ ID NO: 11801 - protein, 13 aa, Homo Sapiens
QACKKHELYVSFR

SEQ ID NO: 11802 - protein, 13 aa, Homo Sapiens
ACKKHELYVSFRD

SEQ ID NO: 11803 - protein, 13 aa, Homo Sapiens
CKKHELYVSFRDL

SEQ ID NO: 11804 - protein, 13 aa, Homo Sapiens
KKHELYVSFRDLG

SEQ ID NO: 11805 - protein, 13 aa, Homo Sapiens
KHELYVSFRDLGW

SEQ ID NO: 11806 - protein, 13 aa, Homo Sapiens
HELYVSFRDLGWQ

SEQ ID NO: 11807 - protein, 13 aa, Homo Sapiens
ELYVSFRDLGWQD

SEQ ID NO: 11808 - protein, 13 aa, Homo Sapiens
LYVSFRDLGWQDW

SEQ ID NO: 11809 - protein, 13 aa, Homo Sapiens
YVSFRDLGWQDWI

SEQ ID NO: 11810 - protein, 13 aa, Homo Sapiens
VSFRDLGWQDWII

SEQ ID NO: 11811 - protein, 13 aa, Homo Sapiens
SFRDLGWQDWIIA

SEQ ID NO: 11812 - protein, 13 aa, Homo Sapiens
FRDLGWQDWIIAP

SEQ ID NO: 11813 - protein, 13 aa, Homo Sapiens
RDLGWQDWIIAPE

SEQ ID NO: 11814 - protein, 13 aa, Homo Sapiens
DLGWQDWIIAPEG

SEQ ID NO: 11815 - protein, 13 aa, Homo Sapiens
LGWQDWIIAPEGY

SEQ ID NO: 11816 - protein, 13 aa, Homo Sapiens
GWQDWIIAPEGYA

SEQ ID NO: 11817 - protein, 13 aa, Homo Sapiens
WQDWIIAPEGYAA

SEQ ID NO: 11818 - protein, 13 aa, Homo Sapiens
QDWIIAPEGYAAY

SEQ ID NO: 11819 - protein, 13 aa, Homo Sapiens
DWIIAPEGYAAYY

SEQ ID NO: 11820 - protein, 13 aa, Homo Sapiens
WIIAPEGYAAYYC

SEQ ID NO: 11821 - protein, 13 aa, Homo Sapiens
IIAPEGYAAYYCE

SEQ ID NO: 11822 - protein, 13 aa, Homo Sapiens
IAPEGYAAYYCEG

SEQ ID NO: 11823 - protein, 13 aa, Homo Sapiens
APEGYAAYYCEGE

SEQ ID NO: 11824 - protein, 13 aa, Homo Sapiens
PEGYAAYYCEGEC

SEQ ID NO: 11825 - protein, 13 aa, Homo Sapiens
EGYAAYYCEGECA

SEQ ID NO: 11826 - protein, 13 aa, Homo Sapiens
GYAAYYCEGECAF

SEQ ID NO: 11827 - protein, 13 aa, Homo Sapiens
YAAYYCEGECAFP

SEQ ID NO: 11828 - protein, 13 aa, Homo Sapiens
AAYYCEGECAFPL

SEQ ID NO: 11829 - protein, 13 aa, Homo Sapiens
AYYCEGECAFPLN

SEQ ID NO: 11830 - protein, 13 aa, Homo Sapiens
YYCEGECAFPLNS

SEQ ID NO: 11831 - protein, 13 aa, Homo Sapiens
YCEGECAFPLNSY

SEQ ID NO: 11832 - protein, 13 aa, Homo Sapiens
CEGECAFPLNSYM

SEQ ID NO: 11833 - protein, 13 aa, Homo Sapiens
EGECAFPLNSYMN

SEQ ID NO: 11834 - protein, 13 aa, Homo Sapiens
GECAFPLNSYMNA

SEQ ID NO: 11835 - protein, 13 aa, Homo Sapiens
ECAFPLNSYMNAT

SEQ ID NO: 11836 - protein, 13 aa, Homo Sapiens
CAFPLNSYMNATN

SEQ ID NO: 11837 - protein, 13 aa, Homo Sapiens
AFPLNSYMNATNH

SEQ ID NO: 11838 - protein, 13 aa, Homo Sapiens
FPLNSYMNATNHA

SEQ ID NO: 11839 - protein, 13 aa, Homo Sapiens
PLNSYMNATNHAI

SEQ ID NO: 11840 - protein, 13 aa, Homo Sapiens
LNSYMNATNHAIV

SEQ ID NO: 11841 - protein, 13 aa, Homo Sapiens
NSYMNATNHAIVQ

SEQ ID NO: 11842 - protein, 13 aa, Homo Sapiens
SYMNATNHAIVQT

SEQ ID NO: 11843 - protein, 13 aa, Homo Sapiens
YMNATNHAIVQTL

SEQ ID NO: 11844 - protein, 13 aa, Homo Sapiens
MNATNHAIVQTLV

SEQ ID NO: 11845 - protein, 13 aa, Homo Sapiens
NATNHAIVQTLVH

SEQ ID NO: 11846 - protein, 13 aa, Homo Sapiens
ATNHAIVQTLVHF

SEQ ID NO: 11847 - protein, 13 aa, Homo Sapiens
TNHAIVQTLVHFI

SEQ ID NO: 11848 - protein, 13 aa, Homo Sapiens
NHAIVQTLVHFIN

SEQ ID NO: 11849 - protein, 13 aa, Homo Sapiens
HAIVQTLVHFINP

SEQ ID NO: 11850 - protein, 13 aa, Homo Sapiens
AIVQTLVHFINPE

SEQ ID NO: 11851 - protein, 13 aa, Homo Sapiens
IVQTLVHFINPET

SEQ ID NO: 11852 - protein, 13 aa, Homo Sapiens
VQTLVHFINPETV

SEQ ID NO: 11853 - protein, 13 aa, Homo Sapiens
QTLVHFINPETVP

SEQ ID NO: 11854 - protein, 13 aa, Homo Sapiens
TLVHFINPETVPK

SEQ ID NO: 11855 - protein, 13 aa, Homo Sapiens
LVHFINPETVPKP

SEQ ID NO: 11856 - protein, 13 aa, Homo Sapiens
VHFINPETVPKPC

SEQ ID NO: 11857 - protein, 13 aa, Homo Sapiens
HFINPETVPKPCC

SEQ ID NO: 11858 - protein, 13 aa, Homo Sapiens
FINPETVPKPCCA

SEQ ID NO: 11859 - protein, 13 aa, Homo Sapiens
INPETVPKPCCAP

SEQ ID NO: 11860 - protein, 13 aa, Homo Sapiens
NPETVPKPCCAPT

SEQ ID NO: 11861 - protein, 13 aa, Homo Sapiens
PETVPKPCCAPTQ

SEQ ID NO: 11862 - protein, 13 aa, Homo Sapiens
ETVPKPCCAPTQL

SEQ ID NO: 11863 - protein, 13 aa, Homo Sapiens
TVPKPCCAPTQLN

SEQ ID NO: 11864 - protein, 13 aa, Homo Sapiens
VPKPCCAPTQLNA

SEQ ID NO: 11865 - protein, 13 aa, Homo Sapiens
PKPCCAPTQLNAI

SEQ ID NO: 11866 - protein, 13 aa, Homo Sapiens
KPCCAPTQLNAIS

SEQ ID NO: 11867 - protein, 13 aa, Homo Sapiens
PCCAPTQLNAISV

SEQ ID NO: 11868 - protein, 13 aa, Homo Sapiens
CCAPTQLNAISVL

SEQ ID NO: 11869 - protein, 13 aa, Homo Sapiens
CAPTQLNAISVLY

SEQ ID NO: 11870 - protein, 13 aa, Homo Sapiens
APTQLNAISVLYF

SEQ ID NO: 11871 - protein, 13 aa, Homo Sapiens
PTQLNAISVLYFD

SEQ ID NO: 11872 - protein, 13 aa, Homo Sapiens
TQLNAISVLYFDD

SEQ ID NO: 11873 - protein, 13 aa, Homo Sapiens
QLNAISVLYFDDS

SEQ ID NO: 11874 - protein, 13 aa, Homo Sapiens
LNAISVLYFDDSS

SEQ ID NO: 11875 - protein, 13 aa, Homo Sapiens
NAISVLYFDDSSN

SEQ ID NO: 11876 - protein, 13 aa, Homo Sapiens
AISVLYFDDSSNV

SEQ ID NO: 11877 - protein, 13 aa, Homo Sapiens
ISVLYFDDSSNVI

SEQ ID NO: 11878 - protein, 13 aa, Homo Sapiens
SVLYFDDSSNVIL

SEQ ID NO: 11879 - protein, 13 aa, Homo Sapiens
VLYFDDSSNVILK

SEQ ID NO: 11880 - protein, 13 aa, Homo Sapiens
LYFDDSSNVILKK

SEQ ID NO: 11881 - protein, 13 aa, Homo Sapiens
YFDDSSNVILKKY

SEQ ID NO: 11882 - protein, 13 aa, Homo Sapiens
FDDSSNVILKKYR

SEQ ID NO: 11883 - protein, 13 aa, Homo Sapiens
DDSSNVILKKYRN

SEQ ID NO: 11884 - protein, 13 aa, Homo Sapiens
DSSNVILKKYRNM

SEQ ID NO: 11885 - protein, 13 aa, Homo Sapiens
SSNVILKKYRNMV

SEQ ID NO: 11886 - protein, 13 aa, Homo Sapiens
SNVILKKYRNMVV

SEQ ID NO: 11887 - protein, 13 aa, Homo Sapiens
NVILKKYRNMVVR

SEQ ID NO: 11888 - protein, 13 aa, Homo Sapiens
VILKKYRNMVVRA

SEQ ID NO: 11889 - protein, 13 aa, Homo Sapiens
ILKKYRNMVVRAC

SEQ ID NO: 11890 - protein, 13 aa, Homo Sapiens
LKKYRNMVVRACG

SEQ ID NO: 11891 - protein, 13 aa, Homo Sapiens
KKYRNMVVRACGC

SEQ ID NO: 11892 - protein, 13 aa, Homo Sapiens
KYRNMVVRACGCH

SEQ ID NO: 11893 - protein, 14 aa, Homo Sapiens
MHVRSLRAAAPHSF

SEQ ID NO: 11894 - protein, 14 aa, Homo Sapiens
HVRSLRAAAPHSFV

SEQ ID NO: 11895 - protein, 14 aa, Homo Sapiens
VRSLRAAAPHSFVA

SEQ ID NO: 11896 - protein, 14 aa, Homo Sapiens
RSLRAAAPHSFVAL

SEQ ID NO: 11897 - protein, 14 aa, Homo Sapiens
SLRAAAPHSFVALW

SEQ ID NO: 11898 - protein, 14 aa, Homo Sapiens
LRAAAPHSFVALWA

SEQ ID NO: 11899 - protein, 14 aa, Homo Sapiens
RAAAPHSFVALWAP

SEQ ID NO: 11900 - protein, 14 aa, Homo Sapiens
AAAPHSFVALWAPL

SEQ ID NO: 11901 - protein, 14 aa, Homo Sapiens
AAPHSFVALWAPLF

SEQ ID NO: 11902 - protein, 14 aa, Homo Sapiens
APHSFVALWAPLFL

SEQ ID NO: 11903 - protein, 14 aa, Homo Sapiens
PHSFVALWAPLFLL

SEQ ID NO: 11904 - protein, 14 aa, Homo Sapiens
HSFVALWAPLFLLR

SEQ ID NO: 11905 - protein, 14 aa, Homo Sapiens
SFVALWAPLFLLRS

SEQ ID NO: 11906 - protein, 14 aa, Homo Sapiens
FVALWAPLFLLRSA

SEQ ID NO: 11907 - protein, 14 aa, Homo Sapiens
VALWAPLFLLRSAL

SEQ ID NO: 11908 - protein, 14 aa, Homo Sapiens
ALWAPLFLLRSALA

SEQ ID NO: 11909 - protein, 14 aa, Homo Sapiens
LWAPLFLLRSALAD

SEQ ID NO: 11910 - protein, 14 aa, Homo Sapiens
WAPLFLLRSALADF

SEQ ID NO: 11911 - protein, 14 aa, Homo Sapiens
APLFLLRSALADFS

SEQ ID NO: 11912 - protein, 14 aa, Homo Sapiens
PLFLLRSALADFSL

SEQ ID NO: 11913 - protein, 14 aa, Homo Sapiens
LFLLRSALADFSLD

SEQ ID NO: 11914 - protein, 14 aa, Homo Sapiens
FLLRSALADFSLDN

SEQ ID NO: 11915 - protein, 14 aa, Homo Sapiens
LLRSALADFSLDNE

SEQ ID NO: 11916 - protein, 14 aa, Homo Sapiens
LRSALADFSLDNEV

SEQ ID NO: 11917 - protein, 14 aa, Homo Sapiens
RSALADFSLDNEVH

SEQ ID NO: 11918 - protein, 14 aa, Homo Sapiens
SALADFSLDNEVHS

SEQ ID NO: 11919 - protein, 14 aa, Homo Sapiens
ALADFSLDNEVHSS

SEQ ID NO: 11920 - protein, 14 aa, Homo Sapiens
LADFSLDNEVHSSF

SEQ ID NO: 11921 - protein, 14 aa, Homo Sapiens
ADFSLDNEVHSSFI

SEQ ID NO: 11922 - protein, 14 aa, Homo Sapiens
DFSLDNEVHSSFIH

SEQ ID NO: 11923 - protein, 14 aa, Homo Sapiens
FSLDNEVHSSFIHR

SEQ ID NO: 11924 - protein, 14 aa, Homo Sapiens
SLDNEVHSSFIHRR

SEQ ID NO: 11925 - protein, 14 aa, Homo Sapiens
LDNEVHSSFIHRRL

SEQ ID NO: 11926 - protein, 14 aa, Homo Sapiens
DNEVHSSFIHRRLR

SEQ ID NO: 11927 - protein, 14 aa, Homo Sapiens
NEVHSSFIHRRLRS

SEQ ID NO: 11928 - protein, 14 aa, Homo Sapiens
EVHSSFIHRRLRSQ

SEQ ID NO: 11929 - protein, 14 aa, Homo Sapiens
VHSSFIHRRLRSQE

SEQ ID NO: 11930 - protein, 14 aa, Homo Sapiens
HSSFIHRRLRSQER

SEQ ID NO: 11931 - protein, 14 aa, Homo Sapiens
SSFIHRRLRSQERR

SEQ ID NO: 11932 - protein, 14 aa, Homo Sapiens
SFIHRRLRSQERRE

SEQ ID NO: 11933 - protein, 14 aa, Homo Sapiens
FIHRRLRSQERREM

SEQ ID NO: 11934 - protein, 14 aa, Homo Sapiens
IHRRLRSQERREMQ

SEQ ID NO: 11935 - protein, 14 aa, Homo Sapiens
HRRLRSQERREMQR

SEQ ID NO: 11936 - protein, 14 aa, Homo Sapiens
RRLRSQERREMQRE

SEQ ID NO: 11937 - protein, 14 aa, Homo Sapiens
RLRSQERREMQREI

SEQ ID NO: 11938 - protein, 14 aa, Homo Sapiens
LRSQERREMQREIL

SEQ ID NO: 11939 - protein, 14 aa, Homo Sapiens
RSQERREMQREILS

SEQ ID NO: 11940 - protein, 14 aa, Homo Sapiens
SQERREMQREILSI

SEQ ID NO: 11941 - protein, 14 aa, Homo Sapiens
QERREMQREILSIL

SEQ ID NO: 11942 - protein, 14 aa, Homo Sapiens
ERREMQREILSILG

SEQ ID NO: 11943 - protein, 14 aa, Homo Sapiens
RREMQREILSILGL

SEQ ID NO: 11944 - protein, 14 aa, Homo Sapiens
REMQREILSILGLP

SEQ ID NO: 11945 - protein, 14 aa, Homo Sapiens
EMQREILSILGLPH

SEQ ID NO: 11946 - protein, 14 aa, Homo Sapiens
MQREILSILGLPHR

SEQ ID NO: 11947 - protein, 14 aa, Homo Sapiens
QREILSILGLPHRP

SEQ ID NO: 11948 - protein, 14 aa, Homo Sapiens
REILSILGLPHRPR

SEQ ID NO: 11949 - protein, 14 aa, Homo Sapiens
EILSILGLPHRPRP

SEQ ID NO: 11950 - protein, 14 aa, Homo Sapiens
ILSILGLPHRPRPH

SEQ ID NO: 11951 - protein, 14 aa, Homo Sapiens
LSILGLPHRPRPHL

SEQ ID NO: 11952 - protein, 14 aa, Homo Sapiens
SILGLPHRPRPHLQ

SEQ ID NO: 11953 - protein, 14 aa, Homo Sapiens
ILGLPHRPRPHLQG

SEQ ID NO: 11954 - protein, 14 aa, Homo Sapiens
LGLPHRPRPHLQGK

SEQ ID NO: 11955 - protein, 14 aa, Homo Sapiens
GLPHRPRPHLQGKH

SEQ ID NO: 11956 - protein, 14 aa, Homo Sapiens
LPHRPRPHLQGKHN

SEQ ID NO: 11957 - protein, 14 aa, Homo Sapiens
PHRPRPHLQGKHNS

SEQ ID NO: 11958 - protein, 14 aa, Homo Sapiens
HRPRPHLQGKHNSA

SEQ ID NO: 11959 - protein, 14 aa, Homo Sapiens
RPRPHLQGKHNSAP

SEQ ID NO: 11960 - protein, 14 aa, Homo Sapiens
PRPHLQGKHNSAPM

SEQ ID NO: 11961 - protein, 14 aa, Homo Sapiens
RPHLQGKHNSAPMF

SEQ ID NO: 11962 - protein, 14 aa, Homo Sapiens
PHLQGKHNSAPMFM

SEQ ID NO: 11963 - protein, 14 aa, Homo Sapiens
HLQGKHNSAPMFML

SEQ ID NO: 11964 - protein, 14 aa, Homo Sapiens
LQGKHNSAPMFMLD

SEQ ID NO: 11965 - protein, 14 aa, Homo Sapiens
QGKHNSAPMFMLDL

SEQ ID NO: 11966 - protein, 14 aa, Homo Sapiens
GKHNSAPMFMLDLY

SEQ ID NO: 11967 - protein, 14 aa, Homo Sapiens
KHNSAPMFMLDLYN

SEQ ID NO: 11968 - protein, 14 aa, Homo Sapiens
HNSAPMFMLDLYNA

SEQ ID NO: 11969 - protein, 14 aa, Homo Sapiens
NSAPMFMLDLYNAM

SEQ ID NO: 11970 - protein, 14 aa, Homo Sapiens
SAPMFMLDLYNAMA

SEQ ID NO: 11971 - protein, 14 aa, Homo Sapiens
APMFMLDLYNAMAV

SEQ ID NO: 11972 - protein, 14 aa, Homo Sapiens
PMFMLDLYNAMAVE

SEQ ID NO: 11973 - protein, 14 aa, Homo Sapiens
MFMLDLYNAMAVEE

SEQ ID NO: 11974 - protein, 14 aa, Homo Sapiens
FMLDLYNAMAVEEG

SEQ ID NO: 11975 - protein, 14 aa, Homo Sapiens
MLDLYNAMAVEEGG

SEQ ID NO: 11976 - protein, 14 aa, Homo Sapiens
LDLYNAMAVEEGGG

SEQ ID NO: 11977 - protein, 14 aa, Homo Sapiens
DLYNAMAVEEGGGP

SEQ ID NO: 11978 - protein, 14 aa, Homo Sapiens
LYNAMAVEEGGGPG

SEQ ID NO: 11979 - protein, 14 aa, Homo Sapiens
YNAMAVEEGGGPGG

SEQ ID NO: 11980 - protein, 14 aa, Homo Sapiens
NAMAVEEGGGPGGQ

SEQ ID NO: 11981 - protein, 14 aa, Homo Sapiens
AMAVEEGGGPGGQG

SEQ ID NO: 11982 - protein, 14 aa, Homo Sapiens
MAVEEGGGPGGQGF

SEQ ID NO: 11983 - protein, 14 aa, Homo Sapiens
AVEEGGGPGGQGFS

SEQ ID NO: 11984 - protein, 14 aa, Homo Sapiens
VEEGGGPGGQGFSY

SEQ ID NO: 11985 - protein, 14 aa, Homo Sapiens
EEGGGPGGQGFSYP

SEQ ID NO: 11986 - protein, 14 aa, Homo Sapiens
EGGGPGGQGFSYPY

SEQ ID NO: 11987 - protein, 14 aa, Homo Sapiens
GGGPGGQGFSYPYK

SEQ ID NO: 11988 - protein, 14 aa, Homo Sapiens
GGPGGQGFSYPYKA

SEQ ID NO: 11989 - protein, 14 aa, Homo Sapiens
GPGGQGFSYPYKAV

SEQ ID NO: 11990 - protein, 14 aa, Homo Sapiens
PGGQGFSYPYKAVF

SEQ ID NO: 11991 - protein, 14 aa, Homo Sapiens
GGQGFSYPYKAVFS

SEQ ID NO: 11992 - protein, 14 aa, Homo Sapiens
GQGFSYPYKAVFST

SEQ ID NO: 11993 - protein, 14 aa, Homo Sapiens
QGFSYPYKAVFSTQ

SEQ ID NO: 11994 - protein, 14 aa, Homo Sapiens
GFSYPYKAVFSTQG

SEQ ID NO: 11995 - protein, 14 aa, Homo Sapiens
FSYPYKAVFSTQGP

SEQ ID NO: 11996 - protein, 14 aa, Homo Sapiens
SYPYKAVFSTQGPP

SEQ ID NO: 11997 - protein, 14 aa, Homo Sapiens
YPYKAVFSTQGPPL

SEQ ID NO: 11998 - protein, 14 aa, Homo Sapiens
PYKAVFSTQGPPLA

SEQ ID NO: 11999 - protein, 14 aa, Homo Sapiens
YKAVFSTQGPPLAS

SEQ ID NO: 12000 - protein, 14 aa, Homo Sapiens
KAVFSTQGPPLASL

SEQ ID NO: 12001 - protein, 14 aa, Homo Sapiens
AVFSTQGPPLASLQ

SEQ ID NO: 12002 - protein, 14 aa, Homo Sapiens
VFSTQGPPLASLQD

SEQ ID NO: 12003 - protein, 14 aa, Homo Sapiens
FSTQGPPLASLQDS

SEQ ID NO: 12004 - protein, 14 aa, Homo Sapiens
STQGPPLASLQDSH

SEQ ID NO: 12005 - protein, 14 aa, Homo Sapiens
TQGPPLASLQDSHF

SEQ ID NO: 12006 - protein, 14 aa, Homo Sapiens
QGPPLASLQDSHFL

SEQ ID NO: 12007 - protein, 14 aa, Homo Sapiens
GPPLASLQDSHFLT

SEQ ID NO: 12008 - protein, 14 aa, Homo Sapiens
PPLASLQDSHFLTD

SEQ ID NO: 12009 - protein, 14 aa, Homo Sapiens
PLASLQDSHFLTDA

SEQ ID NO: 12010 - protein, 14 aa, Homo Sapiens
LASLQDSHFLTDAD

SEQ ID NO: 12011 - protein, 14 aa, Homo Sapiens
ASLQDSHFLTDADM

SEQ ID NO: 12012 - protein, 14 aa, Homo Sapiens
SLQDSHFLTDADMV

SEQ ID NO: 12013 - protein, 14 aa, Homo Sapiens
LQDSHFLTDADMVM

SEQ ID NO: 12014 - protein, 14 aa, Homo Sapiens
QDSHFLTDADMVMS

SEQ ID NO: 12015 - protein, 14 aa, Homo Sapiens
DSHFLTDADMVMSF

SEQ ID NO: 12016 - protein, 14 aa, Homo Sapiens
SHFLTDADMVMSFV

SEQ ID NO: 12017 - protein, 14 aa, Homo Sapiens
HFLTDADMVMSFVN

SEQ ID NO: 12018 - protein, 14 aa, Homo Sapiens
FLTDADMVMSFVNL

SEQ ID NO: 12019 - protein, 14 aa, Homo Sapiens
LTDADMVMSFVNLV

SEQ ID NO: 12020 - protein, 14 aa, Homo Sapiens
TDADMVMSFVNLVE

SEQ ID NO: 12021 - protein, 14 aa, Homo Sapiens
DADMVMSFVNLVEH

SEQ ID NO: 12022 - protein, 14 aa, Homo Sapiens
ADMVMSFVNLVEHD

SEQ ID NO: 12023 - protein, 14 aa, Homo Sapiens
DMVMSFVNLVEHDK

SEQ ID NO: 12024 - protein, 14 aa, Homo Sapiens
MVMSFVNLVEHDKE

SEQ ID NO: 12025 - protein, 14 aa, Homo Sapiens
VMSFVNLVEHDKEF

SEQ ID NO: 12026 - protein, 14 aa, Homo Sapiens
MSFVNLVEHDKEFF

SEQ ID NO: 12027 - protein, 14 aa, Homo Sapiens
SFVNLVEHDKEFFH

SEQ ID NO: 12028 - protein, 14 aa, Homo Sapiens
FVNLVEHDKEFFHP

SEQ ID NO: 12029 - protein, 14 aa, Homo Sapiens
VNLVEHDKEFFHPR

SEQ ID NO: 12030 - protein, 14 aa, Homo Sapiens
NLVEHDKEFFHPRY

SEQ ID NO: 12031 - protein, 14 aa, Homo Sapiens
LVEHDKEFFHPRYH

SEQ ID NO: 12032 - protein, 14 aa, Homo Sapiens
VEHDKEFFHPRYHH

SEQ ID NO: 12033 - protein, 14 aa, Homo Sapiens
EHDKEFFHPRYHHR

SEQ ID NO: 12034 - protein, 14 aa, Homo Sapiens
HDKEFFHPRYHHRE

SEQ ID NO: 12035 - protein, 14 aa, Homo Sapiens
DKEFFHPRYHHREF

SEQ ID NO: 12036 - protein, 14 aa, Homo Sapiens
KEFFHPRYHHREFR

SEQ ID NO: 12037 - protein, 14 aa, Homo Sapiens
EFFHPRYHHREFRF

SEQ ID NO: 12038 - protein, 14 aa, Homo Sapiens
FFHPRYHHREFRFD

SEQ ID NO: 12039 - protein, 14 aa, Homo Sapiens
FHPRYHHREFRFDL

SEQ ID NO: 12040 - protein, 14 aa, Homo Sapiens
HPRYHHREFRFDLS

SEQ ID NO: 12041 - protein, 14 aa, Homo Sapiens
PRYHHREFRFDLSK

SEQ ID NO: 12042 - protein, 14 aa, Homo Sapiens
RYHHREFRFDLSKI

SEQ ID NO: 12043 - protein, 14 aa, Homo Sapiens
YHHREFRFDLSKIP

SEQ ID NO: 12044 - protein, 14 aa, Homo Sapiens
HHREFRFDLSKIPE

SEQ ID NO: 12045 - protein, 14 aa, Homo Sapiens
HREFRFDLSKIPEG

SEQ ID NO: 12046 - protein, 14 aa, Homo Sapiens
REFRFDLSKIPEGE

SEQ ID NO: 12047 - protein, 14 aa, Homo Sapiens
EFRFDLSKIPEGEA

SEQ ID NO: 12048 - protein, 14 aa, Homo Sapiens
FRFDLSKIPEGEAV

SEQ ID NO: 12049 - protein, 14 aa, Homo Sapiens
RFDLSKIPEGEAVT

SEQ ID NO: 12050 - protein, 14 aa, Homo Sapiens
FDLSKIPEGEAVTA

SEQ ID NO: 12051 - protein, 14 aa, Homo Sapiens
DLSKIPEGEAVTAA

SEQ ID NO: 12052 - protein, 14 aa, Homo Sapiens
LSKIPEGEAVTAAE

SEQ ID NO: 12053 - protein, 14 aa, Homo Sapiens
SKIPEGEAVTAAEF

SEQ ID NO: 12054 - protein, 14 aa, Homo Sapiens
KIPEGEAVTAAEFR

SEQ ID NO: 12055 - protein, 14 aa, Homo Sapiens
IPEGEAVTAAEFRI

SEQ ID NO: 12056 - protein, 14 aa, Homo Sapiens
PEGEAVTAAEFRIY

SEQ ID NO: 12057 - protein, 14 aa, Homo Sapiens
EGEAVTAAEFRIYK

SEQ ID NO: 12058 - protein, 14 aa, Homo Sapiens
GEAVTAAEFRIYKD

SEQ ID NO: 12059 - protein, 14 aa, Homo Sapiens
EAVTAAEFRIYKDY

SEQ ID NO: 12060 - protein, 14 aa, Homo Sapiens
AVTAAEFRIYKDYI

SEQ ID NO: 12061 - protein, 14 aa, Homo Sapiens
VTAAEFRIYKDYIR

SEQ ID NO: 12062 - protein, 14 aa, Homo Sapiens
TAAEFRIYKDYIRE

SEQ ID NO: 12063 - protein, 14 aa, Homo Sapiens
AAEFRIYKDYIRER

SEQ ID NO: 12064 - protein, 14 aa, Homo Sapiens
AEFRIYKDYIRERF

SEQ ID NO: 12065 - protein, 14 aa, Homo Sapiens
EFRIYKDYIRERFD

SEQ ID NO: 12066 - protein, 14 aa, Homo Sapiens
FRIYKDYIRERFDN

SEQ ID NO: 12067 - protein, 14 aa, Homo Sapiens
RIYKDYIRERFDNE

SEQ ID NO: 12068 - protein, 14 aa, Homo Sapiens
IYKDYIRERFDNET

SEQ ID NO: 12069 - protein, 14 aa, Homo Sapiens
YKDYIRERFDNETF

SEQ ID NO: 12070 - protein, 14 aa, Homo Sapiens
KDYIRERFDNETFR

SEQ ID NO: 12071 - protein, 14 aa, Homo Sapiens
DYIRERFDNETFRI

SEQ ID NO: 12072 - protein, 14 aa, Homo Sapiens
YIRERFDNETFRIS

SEQ ID NO: 12073 - protein, 14 aa, Homo Sapiens
IRERFDNETFRISV

SEQ ID NO: 12074 - protein, 14 aa, Homo Sapiens
RERFDNETFRISVY

SEQ ID NO: 12075 - protein, 14 aa, Homo Sapiens
ERFDNETFRISVYQ

SEQ ID NO: 12076 - protein, 14 aa, Homo Sapiens
RFDNETFRISVYQV

SEQ ID NO: 12077 - protein, 14 aa, Homo Sapiens
FDNETFRISVYQVL

SEQ ID NO: 12078 - protein, 14 aa, Homo Sapiens
DNETFRISVYQVLQ

SEQ ID NO: 12079 - protein, 14 aa, Homo Sapiens
NETFRISVYQVLQE

SEQ ID NO: 12080 - protein, 14 aa, Homo Sapiens
ETFRISVYQVLQEH

SEQ ID NO: 12081 - protein, 14 aa, Homo Sapiens
TFRISVYQVLQEHL

SEQ ID NO: 12082 - protein, 14 aa, Homo Sapiens
FRISVYQVLQEHLG

SEQ ID NO: 12083 - protein, 14 aa, Homo Sapiens
RISVYQVLQEHLGR

SEQ ID NO: 12084 - protein, 14 aa, Homo Sapiens
ISVYQVLQEHLGRE

SEQ ID NO: 12085 - protein, 14 aa, Homo Sapiens
SVYQVLQEHLGRES

SEQ ID NO: 12086 - protein, 14 aa, Homo Sapiens
VYQVLQEHLGRESD

SEQ ID NO: 12087 - protein, 14 aa, Homo Sapiens
YQVLQEHLGRESDL

SEQ ID NO: 12088 - protein, 14 aa, Homo Sapiens
QVLQEHLGRESDLF

SEQ ID NO: 12089 - protein, 14 aa, Homo Sapiens
VLQEHLGRESDLFL

SEQ ID NO: 12090 - protein, 14 aa, Homo Sapiens
LQEHLGRESDLFLL

SEQ ID NO: 12091 - protein, 14 aa, Homo Sapiens
QEHLGRESDLFLLD

SEQ ID NO: 12092 - protein, 14 aa, Homo Sapiens
EHLGRESDLFLLDS

SEQ ID NO: 12093 - protein, 14 aa, Homo Sapiens
HLGRESDLFLLDSR

SEQ ID NO: 12094 - protein, 14 aa, Homo Sapiens
LGRESDLFLLDSRT

SEQ ID NO: 12095 - protein, 14 aa, Homo Sapiens
GRESDLFLLDSRTL

SEQ ID NO: 12096 - protein, 14 aa, Homo Sapiens
RESDLFLLDSRTLW

SEQ ID NO: 12097 - protein, 14 aa, Homo Sapiens
ESDLFLLDSRTLWA

SEQ ID NO: 12098 - protein, 14 aa, Homo Sapiens
SDLFLLDSRTLWAS

SEQ ID NO: 12099 - protein, 14 aa, Homo Sapiens
DLFLLDSRTLWASE

SEQ ID NO: 12100 - protein, 14 aa, Homo Sapiens
LFLLDSRTLWASEE

SEQ ID NO: 12101 - protein, 14 aa, Homo Sapiens
FLLDSRTLWASEEG

SEQ ID NO: 12102 - protein, 14 aa, Homo Sapiens
LLDSRTLWASEEGW

SEQ ID NO: 12103 - protein, 14 aa, Homo Sapiens
LDSRTLWASEEGWL

SEQ ID NO: 12104 - protein, 14 aa, Homo Sapiens
DSRTLWASEEGWLV

SEQ ID NO: 12105 - protein, 14 aa, Homo Sapiens
SRTLWASEEGWLVF

SEQ ID NO: 12106 - protein, 14 aa, Homo Sapiens
RTLWASEEGWLVFD

SEQ ID NO: 12107 - protein, 14 aa, Homo Sapiens
TLWASEEGWLVFDI

SEQ ID NO: 12108 - protein, 14 aa, Homo Sapiens
LWASEEGWLVFDIT

SEQ ID NO: 12109 - protein, 14 aa, Homo Sapiens
WASEEGWLVFDITA

SEQ ID NO: 12110 - protein, 14 aa, Homo Sapiens
ASEEGWLVFDITAT

SEQ ID NO: 12111 - protein, 14 aa, Homo Sapiens
SEEGWLVFDITATS

SEQ ID NO: 12112 - protein, 14 aa, Homo Sapiens
EEGWLVFDITATSN

SEQ ID NO: 12113 - protein, 14 aa, Homo Sapiens
EGWLVFDITATSNH

SEQ ID NO: 12114 - protein, 14 aa, Homo Sapiens
GWLVFDITATSNHW

SEQ ID NO: 12115 - protein, 14 aa, Homo Sapiens
WLVFDITATSNHWV

SEQ ID NO: 12116 - protein, 14 aa, Homo Sapiens
LVFDITATSNHWVV

SEQ ID NO: 12117 - protein, 14 aa, Homo Sapiens
VFDITATSNHWVVN

SEQ ID NO: 12118 - protein, 14 aa, Homo Sapiens
FDITATSNHWVVNP

SEQ ID NO: 12119 - protein, 14 aa, Homo Sapiens
DITATSNHWVVNPR

SEQ ID NO: 12120 - protein, 14 aa, Homo Sapiens
ITATSNHWVVNPRH

SEQ ID NO: 12121 - protein, 14 aa, Homo Sapiens
TATSNHWVVNPRHN

SEQ ID NO: 12122 - protein, 14 aa, Homo Sapiens
ATSNHWVVNPRHNL

SEQ ID NO: 12123 - protein, 14 aa, Homo Sapiens
TSNHWVVNPRHNLG

SEQ ID NO: 12124 - protein, 14 aa, Homo Sapiens
SNHWVVNPRHNLGL

SEQ ID NO: 12125 - protein, 14 aa, Homo Sapiens
NHWVVNPRHNLGLQ

SEQ ID NO: 12126 - protein, 14 aa, Homo Sapiens
HWVVNPRHNLGLQL

SEQ ID NO: 12127 - protein, 14 aa, Homo Sapiens
WVVNPRHNLGLQLS

SEQ ID NO: 12128 - protein, 14 aa, Homo Sapiens
VVNPRHNLGLQLSV

SEQ ID NO: 12129 - protein, 14 aa, Homo Sapiens
VNPRHNLGLQLSVE

SEQ ID NO: 12130 - protein, 14 aa, Homo Sapiens
NPRHNLGLQLSVET

SEQ ID NO: 12131 - protein, 14 aa, Homo Sapiens
PRHNLGLQLSVETL

SEQ ID NO: 12132 - protein, 14 aa, Homo Sapiens
RHNLGLQLSVETLD

SEQ ID NO: 12133 - protein, 14 aa, Homo Sapiens
HNLGLQLSVETLDG

SEQ ID NO: 12134 - protein, 14 aa, Homo Sapiens
NLGLQLSVETLDGQ

SEQ ID NO: 12135 - protein, 14 aa, Homo Sapiens
LGLQLSVETLDGQS

SEQ ID NO: 12136 - protein, 14 aa, Homo Sapiens
GLQLSVETLDGQSI

SEQ ID NO: 12137 - protein, 14 aa, Homo Sapiens
LQLSVETLDGQSIN

SEQ ID NO: 12138 - protein, 14 aa, Homo Sapiens
QLSVETLDGQSINP

SEQ ID NO: 12139 - protein, 14 aa, Homo Sapiens
LSVETLDGQSINPK

SEQ ID NO: 12140 - protein, 14 aa, Homo Sapiens
SVETLDGQSINPKL

SEQ ID NO: 12141 - protein, 14 aa, Homo Sapiens
VETLDGQSINPKLA

SEQ ID NO: 12142 - protein, 14 aa, Homo Sapiens
ETLDGQSINPKLAG

SEQ ID NO: 12143 - protein, 14 aa, Homo Sapiens
TLDGQSINPKLAGL

SEQ ID NO: 12144 - protein, 14 aa, Homo Sapiens
LDGQSINPKLAGLI

SEQ ID NO: 12145 - protein, 14 aa, Homo Sapiens
DGQSINPKLAGLIG

SEQ ID NO: 12146 - protein, 14 aa, Homo Sapiens
GQSINPKLAGLIGR

SEQ ID NO: 12147 - protein, 14 aa, Homo Sapiens
QSINPKLAGLIGRH

SEQ ID NO: 12148 - protein, 14 aa, Homo Sapiens
SINPKLAGLIGRHG

SEQ ID NO: 12149 - protein, 14 aa, Homo Sapiens
INPKLAGLIGRHGP

SEQ ID NO: 12150 - protein, 14 aa, Homo Sapiens
NPKLAGLIGRHGPQ

SEQ ID NO: 12151 - protein, 14 aa, Homo Sapiens
PKLAGLIGRHGPQN

SEQ ID NO: 12152 - protein, 14 aa, Homo Sapiens
KLAGLIGRHGPQNK

SEQ ID NO: 12153 - protein, 14 aa, Homo Sapiens
LAGLIGRHGPQNKQ

SEQ ID NO: 12154 - protein, 14 aa, Homo Sapiens
AGLIGRHGPQNKQP

SEQ ID NO: 12155 - protein, 14 aa, Homo Sapiens
GLIGRHGPQNKQPF

SEQ ID NO: 12156 - protein, 14 aa, Homo Sapiens
LIGRHGPQNKQPFM

SEQ ID NO: 12157 - protein, 14 aa, Homo Sapiens
IGRHGPQNKQPFMV

SEQ ID NO: 12158 - protein, 14 aa, Homo Sapiens
GRHGPQNKQPFMVA

SEQ ID NO: 12159 - protein, 14 aa, Homo Sapiens
RHGPQNKQPFMVAF

SEQ ID NO: 12160 - protein, 14 aa, Homo Sapiens
HGPQNKQPFMVAFF

SEQ ID NO: 12161 - protein, 14 aa, Homo Sapiens
GPQNKQPFMVAFFK

SEQ ID NO: 12162 - protein, 14 aa, Homo Sapiens
PQNKQPFMVAFFKA

SEQ ID NO: 12163 - protein, 14 aa, Homo Sapiens
QNKQPFMVAFFKAT

SEQ ID NO: 12164 - protein, 14 aa, Homo Sapiens
NKQPFMVAFFKATE

SEQ ID NO: 12165 - protein, 14 aa, Homo Sapiens
KQPFMVAFFKATEV

SEQ ID NO: 12166 - protein, 14 aa, Homo Sapiens
QPFMVAFFKATEVH

SEQ ID NO: 12167 - protein, 14 aa, Homo Sapiens
PFMVAFFKATEVHF

SEQ ID NO: 12168 - protein, 14 aa, Homo Sapiens
FMVAFFKATEVHFR

SEQ ID NO: 12169 - protein, 14 aa, Homo Sapiens
MVAFFKATEVHFRS

SEQ ID NO: 12170 - protein, 14 aa, Homo Sapiens
VAFFKATEVHFRSI

SEQ ID NO: 12171 - protein, 14 aa, Homo Sapiens
AFFKATEVHFRSIR

SEQ ID NO: 12172 - protein, 14 aa, Homo Sapiens
FFKATEVHFRSIRS

SEQ ID NO: 12173 - protein, 14 aa, Homo Sapiens
FKATEVHFRSIRST

SEQ ID NO: 12174 - protein, 14 aa, Homo Sapiens
KATEVHFRSIRSTG

SEQ ID NO: 12175 - protein, 14 aa, Homo Sapiens
ATEVHFRSIRSTGS

SEQ ID NO: 12176 - protein, 14 aa, Homo Sapiens
TEVHFRSIRSTGSK

SEQ ID NO: 12177 - protein, 14 aa, Homo Sapiens
EVHFRSIRSTGSKQ

SEQ ID NO: 12178 - protein, 14 aa, Homo Sapiens
VHFRSIRSTGSKQR

SEQ ID NO: 12179 - protein, 14 aa, Homo Sapiens
HFRSIRSTGSKQRS

SEQ ID NO: 12180 - protein, 14 aa, Homo Sapiens
FRSIRSTGSKQRSQ

SEQ ID NO: 12181 - protein, 14 aa, Homo Sapiens
RSIRSTGSKQRSQN

SEQ ID NO: 12182 - protein, 14 aa, Homo Sapiens
SIRSTGSKQRSQNR

SEQ ID NO: 12183 - protein, 14 aa, Homo Sapiens
IRSTGSKQRSQNRS

SEQ ID NO: 12184 - protein, 14 aa, Homo Sapiens
RSTGSKQRSQNRSK

SEQ ID NO: 12185 - protein, 14 aa, Homo Sapiens
STGSKQRSQNRSKT

SEQ ID NO: 12186 - protein, 14 aa, Homo Sapiens
TGSKQRSQNRSKTP

SEQ ID NO: 12187 - protein, 14 aa, Homo Sapiens
GSKQRSQNRSKTPK

SEQ ID NO: 12188 - protein, 14 aa, Homo Sapiens
SKQRSQNRSKTPKN

SEQ ID NO: 12189 - protein, 14 aa, Homo Sapiens
KQRSQNRSKTPKNQ

SEQ ID NO: 12190 - protein, 14 aa, Homo Sapiens
QRSQNRSKTPKNQE

SEQ ID NO: 12191 - protein, 14 aa, Homo Sapiens
RSQNRSKTPKNQEA

SEQ ID NO: 12192 - protein, 14 aa, Homo Sapiens
SQNRSKTPKNQEAL

SEQ ID NO: 12193 - protein, 14 aa, Homo Sapiens
QNRSKTPKNQEALR

SEQ ID NO: 12194 - protein, 14 aa, Homo Sapiens
NRSKTPKNQEALRM

SEQ ID NO: 12195 - protein, 14 aa, Homo Sapiens
RSKTPKNQEALRMA

SEQ ID NO: 12196 - protein, 14 aa, Homo Sapiens
SKTPKNQEALRMAN

SEQ ID NO: 12197 - protein, 14 aa, Homo Sapiens
KTPKNQEALRMANV

SEQ ID NO: 12198 - protein, 14 aa, Homo Sapiens
TPKNQEALRMANVA

SEQ ID NO: 12199 - protein, 14 aa, Homo Sapiens
PKNQEALRMANVAE

SEQ ID NO: 12200 - protein, 14 aa, Homo Sapiens
KNQEALRMANVAEN

SEQ ID NO: 12201 - protein, 14 aa, Homo Sapiens
NQEALRMANVAENS

SEQ ID NO: 12202 - protein, 14 aa, Homo Sapiens
QEALRMANVAENSS

SEQ ID NO: 12203 - protein, 14 aa, Homo Sapiens
EALRMANVAENSSS

SEQ ID NO: 12204 - protein, 14 aa, Homo Sapiens
ALRMANVAENSSSD

SEQ ID NO: 12205 - protein, 14 aa, Homo Sapiens
LRMANVAENSSSDQ

SEQ ID NO: 12206 - protein, 14 aa, Homo Sapiens
RMANVAENSSSDQR

SEQ ID NO: 12207 - protein, 14 aa, Homo Sapiens
MANVAENSSSDQRQ

SEQ ID NO: 12208 - protein, 14 aa, Homo Sapiens
ANVAENSSSDQRQA

SEQ ID NO: 12209 - protein, 14 aa, Homo Sapiens
NVAENSSSDQRQAC

SEQ ID NO: 12210 - protein, 14 aa, Homo Sapiens
VAENSSSDQRQACK

SEQ ID NO: 12211 - protein, 14 aa, Homo Sapiens
AENSSSDQRQACKK

SEQ ID NO: 12212 - protein, 14 aa, Homo Sapiens
ENSSSDQRQACKKH

SEQ ID NO: 12213 - protein, 14 aa, Homo Sapiens
NSSSDQRQACKKHE

SEQ ID NO: 12214 - protein, 14 aa, Homo Sapiens
SSSDQRQACKKHEL

SEQ ID NO: 12215 - protein, 14 aa, Homo Sapiens
SSDQRQACKKHELY

SEQ ID NO: 12216 - protein, 14 aa, Homo Sapiens
SDQRQACKKHELYV

SEQ ID NO: 12217 - protein, 14 aa, Homo Sapiens
DQRQACKKHELYVS

SEQ ID NO: 12218 - protein, 14 aa, Homo Sapiens
QRQACKKHELYVSF

SEQ ID NO: 12219 - protein, 14 aa, Homo Sapiens
RQACKKHELYVSFR

SEQ ID NO: 12220 - protein, 14 aa, Homo Sapiens
QACKKHELYVSFRD

SEQ ID NO: 12221 - protein, 14 aa, Homo Sapiens
ACKKHELYVSFRDL

SEQ ID NO: 12222 - protein, 14 aa, Homo Sapiens
CKKHELYVSFRDLG

SEQ ID NO: 12223 - protein, 14 aa, Homo Sapiens
KKHELYVSFRDLGW

SEQ ID NO: 12224 - protein, 14 aa, Homo Sapiens
KHELYVSFRDLGWQ

SEQ ID NO: 12225 - protein, 14 aa, Homo Sapiens
HELYVSFRDLGWQD

SEQ ID NO: 12226 - protein, 14 aa, Homo Sapiens
ELYVSFRDLGWQDW

SEQ ID NO: 12227 - protein, 14 aa, Homo Sapiens
LYVSFRDLGWQDWI

SEQ ID NO: 12228 - protein, 14 aa, Homo Sapiens
YVSFRDLGWQDWII

SEQ ID NO: 12229 - protein, 14 aa, Homo Sapiens
VSFRDLGWQDWIIA

SEQ ID NO: 12230 - protein, 14 aa, Homo Sapiens
SFRDLGWQDWIIAP

SEQ ID NO: 12231 - protein, 14 aa, Homo Sapiens
FRDLGWQDWIIAPE

SEQ ID NO: 12232 - protein, 14 aa, Homo Sapiens
RDLGWQDWIIAPEG

SEQ ID NO: 12233 - protein, 14 aa, Homo Sapiens
DLGWQDWIIAPEGY

SEQ ID NO: 12234 - protein, 14 aa, Homo Sapiens
LGWQDWIIAPEGYA

SEQ ID NO: 12235 - protein, 14 aa, Homo Sapiens
GWQDWIIAPEGYAA

SEQ ID NO: 12236 - protein, 14 aa, Homo Sapiens
WQDWIIAPEGYAAY

SEQ ID NO: 12237 - protein, 14 aa, Homo Sapiens
QDWIIAPEGYAAYY

SEQ ID NO: 12238 - protein, 14 aa, Homo Sapiens
DWIIAPEGYAAYYC

SEQ ID NO: 12239 - protein, 14 aa, Homo Sapiens
WIIAPEGYAAYYCE

SEQ ID NO: 12240 - protein, 14 aa, Homo Sapiens
IIAPEGYAAYYCEG

SEQ ID NO: 12241 - protein, 14 aa, Homo Sapiens
IAPEGYAAYYCEGE

SEQ ID NO: 12242 - protein, 14 aa, Homo Sapiens
APEGYAAYYCEGEC

SEQ ID NO: 12243 - protein, 14 aa, Homo Sapiens
PEGYAAYYCEGECA

SEQ ID NO: 12244 - protein, 14 aa, Homo Sapiens
EGYAAYYCEGECAF

SEQ ID NO: 12245 - protein, 14 aa, Homo Sapiens
GYAAYYCEGECAFP

SEQ ID NO: 12246 - protein, 14 aa, Homo Sapiens
YAAYYCEGECAFPL

SEQ ID NO: 12247 - protein, 14 aa, Homo Sapiens
AAYYCEGECAFPLN

SEQ ID NO: 12248 - protein, 14 aa, Homo Sapiens
AYYCEGECAFPLNS

SEQ ID NO: 12249 - protein, 14 aa, Homo Sapiens
YYCEGECAFPLNSY

SEQ ID NO: 12250 - protein, 14 aa, Homo Sapiens
YCEGECAFPLNSYM

SEQ ID NO: 12251 - protein, 14 aa, Homo Sapiens
CEGECAFPLNSYMN

SEQ ID NO: 12252 - protein, 14 aa, Homo Sapiens
EGECAFPLNSYMNA

SEQ ID NO: 12253 - protein, 14 aa, Homo Sapiens
GECAFPLNSYMNAT

SEQ ID NO: 12254 - protein, 14 aa, Homo Sapiens
ECAFPLNSYMNATN

SEQ ID NO: 12255 - protein, 14 aa, Homo Sapiens
CAFPLNSYMNATNH

SEQ ID NO: 12256 - protein, 14 aa, Homo Sapiens
AFPLNSYMNATNHA

SEQ ID NO: 12257 - protein, 14 aa, Homo Sapiens
FPLNSYMNATNHAI

SEQ ID NO: 12258 - protein, 14 aa, Homo Sapiens
PLNSYMNATNHAIV

SEQ ID NO: 12259 - protein, 14 aa, Homo Sapiens
LNSYMNATNHAIVQ

SEQ ID NO: 12260 - protein, 14 aa, Homo Sapiens
NSYMNATNHAIVQT

SEQ ID NO: 12261 - protein, 14 aa, Homo Sapiens
SYMNATNHAIVQTL

SEQ ID NO: 12262 - protein, 14 aa, Homo Sapiens
YMNATNHAIVQTLV

SEQ ID NO: 12263 - protein, 14 aa, Homo Sapiens
MNATNHAIVQTLVH

SEQ ID NO: 12264 - protein, 14 aa, Homo Sapiens
NATNHAIVQTLVHF

SEQ ID NO: 12265 - protein, 14 aa, Homo Sapiens
ATNHAIVQTLVHFI

SEQ ID NO: 12266 - protein, 14 aa, Homo Sapiens
TNHAIVQTLVHFIN

SEQ ID NO: 12267 - protein, 14 aa, Homo Sapiens
NHAIVQTLVHFINP

SEQ ID NO: 12268 - protein, 14 aa, Homo Sapiens
HAIVQTLVHFINPE

SEQ ID NO: 12269 - protein, 14 aa, Homo Sapiens
AIVQTLVHFINPET

SEQ ID NO: 12270 - protein, 14 aa, Homo Sapiens
IVQTLVHFINPETV

SEQ ID NO: 12271 - protein, 14 aa, Homo Sapiens
VQTLVHFINPETVP

SEQ ID NO: 12272 - protein, 14 aa, Homo Sapiens
QTLVHFINPETVPK

SEQ ID NO: 12273 - protein, 14 aa, Homo Sapiens
TLVHFINPETVPKP

SEQ ID NO: 12274 - protein, 14 aa, Homo Sapiens
LVHFINPETVPKPC

SEQ ID NO: 12275 - protein, 14 aa, Homo Sapiens
VHFINPETVPKPCC

SEQ ID NO: 12276 - protein, 14 aa, Homo Sapiens
HFINPETVPKPCCA

SEQ ID NO: 12277 - protein, 14 aa, Homo Sapiens
FINPETVPKPCCAP

SEQ ID NO: 12278 - protein, 14 aa, Homo Sapiens
INPETVPKPCCAPT

SEQ ID NO: 12279 - protein, 14 aa, Homo Sapiens
NPETVPKPCCAPTQ

SEQ ID NO: 12280 - protein, 14 aa, Homo Sapiens
PETVPKPCCAPTQL

SEQ ID NO: 12281 - protein, 14 aa, Homo Sapiens
ETVPKPCCAPTQLN

SEQ ID NO: 12282 - protein, 14 aa, Homo Sapiens
TVPKPCCAPTQLNA

SEQ ID NO: 12283 - protein, 14 aa, Homo Sapiens
VPKPCCAPTQLNAI

SEQ ID NO: 12284 - protein, 14 aa, Homo Sapiens
PKPCCAPTQLNAIS

SEQ ID NO: 12285 - protein, 14 aa, Homo Sapiens
KPCCAPTQLNAISV

SEQ ID NO: 12286 - protein, 14 aa, Homo Sapiens
PCCAPTQLNAISVL

SEQ ID NO: 12287 - protein, 14 aa, Homo Sapiens
CCAPTQLNAISVLY

SEQ ID NO: 12288 - protein, 14 aa, Homo Sapiens
CAPTQLNAISVLYF

SEQ ID NO: 12289 - protein, 14 aa, Homo Sapiens
APTQLNAISVLYFD

SEQ ID NO: 12290 - protein, 14 aa, Homo Sapiens
PTQLNAISVLYFDD

SEQ ID NO: 12291 - protein, 14 aa, Homo Sapiens
TQLNAISVLYFDDS

SEQ ID NO: 12292 - protein, 14 aa, Homo Sapiens
QLNAISVLYFDDSS

SEQ ID NO: 12293 - protein, 14 aa, Homo Sapiens
LNAISVLYFDDSSN

SEQ ID NO: 12294 - protein, 14 aa, Homo Sapiens
NAISVLYFDDSSNV

SEQ ID NO: 12295 - protein, 14 aa, Homo Sapiens
AISVLYFDDSSNVI

SEQ ID NO: 12296 - protein, 14 aa, Homo Sapiens
ISVLYFDDSSNVIL

SEQ ID NO: 12297 - protein, 14 aa, Homo Sapiens
SVLYFDDSSNVILK

SEQ ID NO: 12298 - protein, 14 aa, Homo Sapiens
VLYFDDSSNVILKK

SEQ ID NO: 12299 - protein, 14 aa, Homo Sapiens
LYFDDSSNVILKKY

SEQ ID NO: 12300 - protein, 14 aa, Homo Sapiens
YFDDSSNVILKKYR

SEQ ID NO: 12301 - protein, 14 aa, Homo Sapiens
FDDSSNVILKKYRN

SEQ ID NO: 12302 - protein, 14 aa, Homo Sapiens
DDSSNVILKKYRNM

SEQ ID NO: 12303 - protein, 14 aa, Homo Sapiens
DSSNVILKKYRNMV

SEQ ID NO: 12304 - protein, 14 aa, Homo Sapiens
SSNVILKKYRNMVV

SEQ ID NO: 12305 - protein, 14 aa, Homo Sapiens
SNVILKKYRNMVVR

SEQ ID NO: 12306 - protein, 14 aa, Homo Sapiens
NVILKKYRNMVVRA

SEQ ID NO: 12307 - protein, 14 aa, Homo Sapiens
VILKKYRNMVVRAC

SEQ ID NO: 12308 - protein, 14 aa, Homo Sapiens
ILKKYRNMVVRACG

SEQ ID NO: 12309 - protein, 14 aa, Homo Sapiens
LKKYRNMVVRACGC

SEQ ID NO: 12310 - protein, 14 aa, Homo Sapiens
KKYRNMVVRACGCH

SEQ ID NO: 12311 - protein, 15 aa, Homo Sapiens
MHVRSLRAAAPHSFV

SEQ ID NO: 12312 - protein, 15 aa, Homo Sapiens
HVRSLRAAAPHSFVA

SEQ ID NO: 12313 - protein, 15 aa, Homo Sapiens
VRSLRAAAPHSFVAL

SEQ ID NO: 12314 - protein, 15 aa, Homo Sapiens
RSLRAAAPHSFVALW

SEQ ID NO: 12315 - protein, 15 aa, Homo Sapiens
SLRAAAPHSFVALWA

SEQ ID NO: 12316 - protein, 15 aa, Homo Sapiens
LRAAAPHSFVALWAP

SEQ ID NO: 12317 - protein, 15 aa, Homo Sapiens
RAAAPHSFVALWAPL

SEQ ID NO: 12318 - protein, 15 aa, Homo Sapiens
AAAPHSFVALWAPLF

SEQ ID NO: 12319 - protein, 15 aa, Homo Sapiens
AAPHSFVALWAPLFL

SEQ ID NO: 12320 - protein, 15 aa, Homo Sapiens
APHSFVALWAPLFLL

SEQ ID NO: 12321 - protein, 15 aa, Homo Sapiens
PHSFVALWAPLFLLR

SEQ ID NO: 12322 - protein, 15 aa, Homo Sapiens
HSFVALWAPLFLLRS

SEQ ID NO: 12323 - protein, 15 aa, Homo Sapiens
SFVALWAPLFLLRSA

SEQ ID NO: 12324 - protein, 15 aa, Homo Sapiens
FVALWAPLFLLRSAL

SEQ ID NO: 12325 - protein, 15 aa, Homo Sapiens
VALWAPLFLLRSALA

SEQ ID NO: 12326 - protein, 15 aa, Homo Sapiens
ALWAPLFLLRSALAD

SEQ ID NO: 12327 - protein, 15 aa, Homo Sapiens
LWAPLFLLRSALADF

SEQ ID NO: 12328 - protein, 15 aa, Homo Sapiens
WAPLFLLRSALADFS

SEQ ID NO: 12329 - protein, 15 aa, Homo Sapiens
APLFLLRSALADFSL

SEQ ID NO: 12330 - protein, 15 aa, Homo Sapiens
PLFLLRSALADFSLD

SEQ ID NO: 12331 - protein, 15 aa, Homo Sapiens
LFLLRSALADFSLDN

SEQ ID NO: 12332 - protein, 15 aa, Homo Sapiens
FLLRSALADFSLDNE

SEQ ID NO: 12333 - protein, 15 aa, Homo Sapiens
LLRSALADFSLDNEV

SEQ ID NO: 12334 - protein, 15 aa, Homo Sapiens
LRSALADFSLDNEVH

SEQ ID NO: 12335 - protein, 15 aa, Homo Sapiens
RSALADFSLDNEVHS

SEQ ID NO: 12336 - protein, 15 aa, Homo Sapiens
SALADFSLDNEVHSS

SEQ ID NO: 12337 - protein, 15 aa, Homo Sapiens
ALADFSLDNEVHSSF

SEQ ID NO: 12338 - protein, 15 aa, Homo Sapiens
LADFSLDNEVHSSFI

SEQ ID NO: 12339 - protein, 15 aa, Homo Sapiens
ADFSLDNEVHSSFIH

SEQ ID NO: 12340 - protein, 15 aa, Homo Sapiens
DFSLDNEVHSSFIHR

SEQ ID NO: 12341 - protein, 15 aa, Homo Sapiens
FSLDNEVHSSFIHRR

SEQ ID NO: 12342 - protein, 15 aa, Homo Sapiens
SLDNEVHSSFIHRRL

SEQ ID NO: 12343 - protein, 15 aa, Homo Sapiens
LDNEVHSSFIHRRLR

SEQ ID NO: 12344 - protein, 15 aa, Homo Sapiens
DNEVHSSFIHRRLRS

SEQ ID NO: 12345 - protein, 15 aa, Homo Sapiens
NEVHSSFIHRRLRSQ

SEQ ID NO: 12346 - protein, 15 aa, Homo Sapiens
EVHSSFIHRRLRSQE

SEQ ID NO: 12347 - protein, 15 aa, Homo Sapiens
VHSSFIHRRLRSQER

SEQ ID NO: 12348 - protein, 15 aa, Homo Sapiens
HSSFIHRRLRSQERR

SEQ ID NO: 12349 - protein, 15 aa, Homo Sapiens
SSFIHRRLRSQERRE

SEQ ID NO: 12350 - protein, 15 aa, Homo Sapiens
SFIHRRLRSQERREM

SEQ ID NO: 12351 - protein, 15 aa, Homo Sapiens
FIHRRLRSQERREMQ

SEQ ID NO: 12352 - protein, 15 aa, Homo Sapiens
IHRRLRSQERREMQR

SEQ ID NO: 12353 - protein, 15 aa, Homo Sapiens
HRRLRSQERREMQRE

SEQ ID NO: 12354 - protein, 15 aa, Homo Sapiens
RRLRSQERREMQREI

SEQ ID NO: 12355 - protein, 15 aa, Homo Sapiens
RLRSQERREMQREIL

SEQ ID NO: 12356 - protein, 15 aa, Homo Sapiens
LRSQERREMQREILS

SEQ ID NO: 12357 - protein, 15 aa, Homo Sapiens
RSQERREMQREILSI

SEQ ID NO: 12358 - protein, 15 aa, Homo Sapiens
SQERREMQREILSIL

SEQ ID NO: 12359 - protein, 15 aa, Homo Sapiens
QERREMQREILSILG

SEQ ID NO: 12360 - protein, 15 aa, Homo Sapiens
ERREMQREILSILGL

SEQ ID NO: 12361 - protein, 15 aa, Homo Sapiens
RREMQREILSILGLP

SEQ ID NO: 12362 - protein, 15 aa, Homo Sapiens
REMQREILSILGLPH

SEQ ID NO: 12363 - protein, 15 aa, Homo Sapiens
EMQREILSILGLPHR

SEQ ID NO: 12364 - protein, 15 aa, Homo Sapiens
MQREILSILGLPHRP

SEQ ID NO: 12365 - protein, 15 aa, Homo Sapiens
QREILSILGLPHRPR

SEQ ID NO: 12366 - protein, 15 aa, Homo Sapiens
REILSILGLPHRPRP

SEQ ID NO: 12367 - protein, 15 aa, Homo Sapiens
EILSILGLPHRPRPH

SEQ ID NO: 12368 - protein, 15 aa, Homo Sapiens
ILSILGLPHRPRPHL

SEQ ID NO: 12369 - protein, 15 aa, Homo Sapiens
LSILGLPHRPRPHLQ

SEQ ID NO: 12370 - protein, 15 aa, Homo Sapiens
SILGLPHRPRPHLQG

SEQ ID NO: 12371 - protein, 15 aa, Homo Sapiens
ILGLPHRPRPHLQGK

SEQ ID NO: 12372 - protein, 15 aa, Homo Sapiens
LGLPHRPRPHLQGKH

SEQ ID NO: 12373 - protein, 15 aa, Homo Sapiens
GLPHRPRPHLQGKHN

SEQ ID NO: 12374 - protein, 15 aa, Homo Sapiens
LPHRPRPHLQGKHNS

SEQ ID NO: 12375 - protein, 15 aa, Homo Sapiens
PHRPRPHLQGKHNSA

SEQ ID NO: 12376 - protein, 15 aa, Homo Sapiens
HRPRPHLQGKHNSAP

SEQ ID NO: 12377 - protein, 15 aa, Homo Sapiens
RPRPHLQGKHNSAPM

SEQ ID NO: 12378 - protein, 15 aa, Homo Sapiens
PRPHLQGKHNSAPMF

SEQ ID NO: 12379 - protein, 15 aa, Homo Sapiens
RPHLQGKHNSAPMFM

SEQ ID NO: 12380 - protein, 15 aa, Homo Sapiens
PHLQGKHNSAPMFML

SEQ ID NO: 12381 - protein, 15 aa, Homo Sapiens
HLQGKHNSAPMFMLD

SEQ ID NO: 12382 - protein, 15 aa, Homo Sapiens
LQGKHNSAPMFMLDL

SEQ ID NO: 12383 - protein, 15 aa, Homo Sapiens
QGKHNSAPMFMLDLY

SEQ ID NO: 12384 - protein, 15 aa, Homo Sapiens
GKHNSAPMFMLDLYN

SEQ ID NO: 12385 - protein, 15 aa, Homo Sapiens
KHNSAPMFMLDLYNA

SEQ ID NO: 12386 - protein, 15 aa, Homo Sapiens
HNSAPMFMLDLYNAM

SEQ ID NO: 12387 - protein, 15 aa, Homo Sapiens
NSAPMFMLDLYNAMA

SEQ ID NO: 12388 - protein, 15 aa, Homo Sapiens
SAPMFMLDLYNAMAV

SEQ ID NO: 12389 - protein, 15 aa, Homo Sapiens
APMFMLDLYNAMAVE

SEQ ID NO: 12390 - protein, 15 aa, Homo Sapiens
PMFMLDLYNAMAVEE

SEQ ID NO: 12391 - protein, 15 aa, Homo Sapiens
MFMLDLYNAMAVEEG

SEQ ID NO: 12392 - protein, 15 aa, Homo Sapiens
FMLDLYNAMAVEEGG

SEQ ID NO: 12393 - protein, 15 aa, Homo Sapiens
MLDLYNAMAVEEGGG

SEQ ID NO: 12394 - protein, 15 aa, Homo Sapiens
LDLYNAMAVEEGGGP

SEQ ID NO: 12395 - protein, 15 aa, Homo Sapiens
DLYNAMAVEEGGGPG

SEQ ID NO: 12396 - protein, 15 aa, Homo Sapiens
LYNAMAVEEGGGPGG

SEQ ID NO: 12397 - protein, 15 aa, Homo Sapiens
YNAMAVEEGGGPGGQ

SEQ ID NO: 12398 - protein, 15 aa, Homo Sapiens
NAMAVEEGGGPGGQG

SEQ ID NO: 12399 - protein, 15 aa, Homo Sapiens
AMAVEEGGGPGGQGF

SEQ ID NO: 12400 - protein, 15 aa, Homo Sapiens
MAVEEGGGPGGQGFS

SEQ ID NO: 12401 - protein, 15 aa, Homo Sapiens
AVEEGGGPGGQGFSY

SEQ ID NO: 12402 - protein, 15 aa, Homo Sapiens
VEEGGGPGGQGFSYP

SEQ ID NO: 12403 - protein, 15 aa, Homo Sapiens
EEGGGPGGQGFSYPY

SEQ ID NO: 12404 - protein, 15 aa, Homo Sapiens
EGGGPGGQGFSYPYK

SEQ ID NO: 12405 - protein, 15 aa, Homo Sapiens
GGGPGGQGFSYPYKA

SEQ ID NO: 12406 - protein, 15 aa, Homo Sapiens
GGPGGQGFSYPYKAV

SEQ ID NO: 12407 - protein, 15 aa, Homo Sapiens
GPGGQGFSYPYKAVF

SEQ ID NO: 12408 - protein, 15 aa, Homo Sapiens
PGGQGFSYPYKAVFS

SEQ ID NO: 12409 - protein, 15 aa, Homo Sapiens
GGQGFSYPYKAVFST

SEQ ID NO: 12410 - protein, 15 aa, Homo Sapiens
GQGFSYPYKAVFSTQ

SEQ ID NO: 12411 - protein, 15 aa, Homo Sapiens
QGFSYPYKAVFSTQG

SEQ ID NO: 12412 - protein, 15 aa, Homo Sapiens
GFSYPYKAVFSTQGP

SEQ ID NO: 12413 - protein, 15 aa, Homo Sapiens
FSYPYKAVFSTQGPP

SEQ ID NO: 12414 - protein, 15 aa, Homo Sapiens
SYPYKAVFSTQGPPL

SEQ ID NO: 12415 - protein, 15 aa, Homo Sapiens
YPYKAVFSTQGPPLA

SEQ ID NO: 12416 - protein, 15 aa, Homo Sapiens
PYKAVFSTQGPPLAS

SEQ ID NO: 12417 - protein, 15 aa, Homo Sapiens
YKAVFSTQGPPLASL

SEQ ID NO: 12418 - protein, 15 aa, Homo Sapiens
KAVFSTQGPPLASLQ

SEQ ID NO: 12419 - protein, 15 aa, Homo Sapiens
AVFSTQGPPLASLQD

SEQ ID NO: 12420 - protein, 15 aa, Homo Sapiens
VFSTQGPPLASLQDS

SEQ ID NO: 12421 - protein, 15 aa, Homo Sapiens
FSTQGPPLASLQDSH

SEQ ID NO: 12422 - protein, 15 aa, Homo Sapiens
STQGPPLASLQDSHF

SEQ ID NO: 12423 - protein, 15 aa, Homo Sapiens
TQGPPLASLQDSHFL

SEQ ID NO: 12424 - protein, 15 aa, Homo Sapiens
QGPPLASLQDSHFLT

SEQ ID NO: 12425 - protein, 15 aa, Homo Sapiens
GPPLASLQDSHFLTD

SEQ ID NO: 12426 - protein, 15 aa, Homo Sapiens
PPLASLQDSHFLTDA

SEQ ID NO: 12427 - protein, 15 aa, Homo Sapiens
PLASLQDSHFLTDAD

SEQ ID NO: 12428 - protein, 15 aa, Homo Sapiens
LASLQDSHFLTDADM

SEQ ID NO: 12429 - protein, 15 aa, Homo Sapiens
ASLQDSHFLTDADMV

SEQ ID NO: 12430 - protein, 15 aa, Homo Sapiens
SLQDSHFLTDADMVM

SEQ ID NO: 12431 - protein, 15 aa, Homo Sapiens
LQDSHFLTDADMVMS

SEQ ID NO: 12432 - protein, 15 aa, Homo Sapiens
QDSHFLTDADMVMSF

SEQ ID NO: 12433 - protein, 15 aa, Homo Sapiens
DSHFLTDADMVMSFV

SEQ ID NO: 12434 - protein, 15 aa, Homo Sapiens
SHFLTDADMVMSFVN

SEQ ID NO: 12435 - protein, 15 aa, Homo Sapiens
HFLTDADMVMSFVNL

SEQ ID NO: 12436 - protein, 15 aa, Homo Sapiens
FLTDADMVMSFVNLV

SEQ ID NO: 12437 - protein, 15 aa, Homo Sapiens
LTDADMVMSFVNLVE

SEQ ID NO: 12438 - protein, 15 aa, Homo Sapiens
TDADMVMSFVNLVEH

SEQ ID NO: 12439 - protein, 15 aa, Homo Sapiens
DADMVMSFVNLVEHD

SEQ ID NO: 12440 - protein, 15 aa, Homo Sapiens
ADMVMSFVNLVEHDK

SEQ ID NO: 12441 - protein, 15 aa, Homo Sapiens
DMVMSFVNLVEHDKE

SEQ ID NO: 12442 - protein, 15 aa, Homo Sapiens
MVMSFVNLVEHDKEF

SEQ ID NO: 12443 - protein, 15 aa, Homo Sapiens
VMSFVNLVEHDKEFF

SEQ ID NO: 12444 - protein, 15 aa, Homo Sapiens
MSFVNLVEHDKEFFH

SEQ ID NO: 12445 - protein, 15 aa, Homo Sapiens
SFVNLVEHDKEFFHP

SEQ ID NO: 12446 - protein, 15 aa, Homo Sapiens
FVNLVEHDKEFFHPR

SEQ ID NO: 12447 - protein, 15 aa, Homo Sapiens
VNLVEHDKEFFHPRY

SEQ ID NO: 12448 - protein, 15 aa, Homo Sapiens
NLVEHDKEFFHPRYH

SEQ ID NO: 12449 - protein, 15 aa, Homo Sapiens
LVEHDKEFFHPRYHH

SEQ ID NO: 12450 - protein, 15 aa, Homo Sapiens
VEHDKEFFHPRYHHR

SEQ ID NO: 12451 - protein, 15 aa, Homo Sapiens
EHDKEFFHPRYHHRE

SEQ ID NO: 12452 - protein, 15 aa, Homo Sapiens
HDKEFFHPRYHHREF

SEQ ID NO: 12453 - protein, 15 aa, Homo Sapiens
DKEFFHPRYHHREFR

SEQ ID NO: 12454 - protein, 15 aa, Homo Sapiens
KEFFHPRYHHREFRF

SEQ ID NO: 12455 - protein, 15 aa, Homo Sapiens
EFFHPRYHHREFRFD

SEQ ID NO: 12456 - protein, 15 aa, Homo Sapiens
FFHPRYHHREFRFDL

SEQ ID NO: 12457 - protein, 15 aa, Homo Sapiens
FHPRYHHREFRFDLS

SEQ ID NO: 12458 - protein, 15 aa, Homo Sapiens
HPRYHHREFRFDLSK

SEQ ID NO: 12459 - protein, 15 aa, Homo Sapiens
PRYHHREFRFDLSKI

SEQ ID NO: 12460 - protein, 15 aa, Homo Sapiens
RYHHREFRFDLSKIP

SEQ ID NO: 12461 - protein, 15 aa, Homo Sapiens
YHHREFRFDLSKIPE

SEQ ID NO: 12462 - protein, 15 aa, Homo Sapiens
HHREFRFDLSKIPEG

SEQ ID NO: 12463 - protein, 15 aa, Homo Sapiens
HREFRFDLSKIPEGE

SEQ ID NO: 12464 - protein, 15 aa, Homo Sapiens
REFRFDLSKIPEGEA

SEQ ID NO: 12465 - protein, 15 aa, Homo Sapiens
EFRFDLSKIPEGEAV

SEQ ID NO: 12466 - protein, 15 aa, Homo Sapiens
FRFDLSKIPEGEAVT

SEQ ID NO: 12467 - protein, 15 aa, Homo Sapiens
RFDLSKIPEGEAVTA

SEQ ID NO: 12468 - protein, 15 aa, Homo Sapiens
FDLSKIPEGEAVTAA

SEQ ID NO: 12469 - protein, 15 aa, Homo Sapiens
DLSKIPEGEAVTAAE

SEQ ID NO: 12470 - protein, 15 aa, Homo Sapiens
LSKIPEGEAVTAAEF

SEQ ID NO: 12471 - protein, 15 aa, Homo Sapiens
SKIPEGEAVTAAEFR

SEQ ID NO: 12472 - protein, 15 aa, Homo Sapiens
KIPEGEAVTAAEFRI

SEQ ID NO: 12473 - protein, 15 aa, Homo Sapiens
IPEGEAVTAAEFRIY

SEQ ID NO: 12474 - protein, 15 aa, Homo Sapiens
PEGEAVTAAEFRIYK

SEQ ID NO: 12475 - protein, 15 aa, Homo Sapiens
EGEAVTAAEFRIYKD

SEQ ID NO: 12476 - protein, 15 aa, Homo Sapiens
GEAVTAAEFRIYKDY

SEQ ID NO: 12477 - protein, 15 aa, Homo Sapiens
EAVTAAEFRIYKDYI

SEQ ID NO: 12478 - protein, 15 aa, Homo Sapiens
AVTAAEFRIYKDYIR

SEQ ID NO: 12479 - protein, 15 aa, Homo Sapiens
VTAAEFRIYKDYIRE

SEQ ID NO: 12480 - protein, 15 aa, Homo Sapiens
TAAEFRIYKDYIRER

SEQ ID NO: 12481 - protein, 15 aa, Homo Sapiens
AAEFRIYKDYIRERF

SEQ ID NO: 12482 - protein, 15 aa, Homo Sapiens
AEFRIYKDYIRERFD

SEQ ID NO: 12483 - protein, 15 aa, Homo Sapiens
EFRIYKDYIRERFDN

SEQ ID NO: 12484 - protein, 15 aa, Homo Sapiens
FRIYKDYIRERFDNE

SEQ ID NO: 12485 - protein, 15 aa, Homo Sapiens
RIYKDYIRERFDNET

SEQ ID NO: 12486 - protein, 15 aa, Homo Sapiens
IYKDYIRERFDNETF

SEQ ID NO: 12487 - protein, 15 aa, Homo Sapiens
YKDYIRERFDNETFR

SEQ ID NO: 12488 - protein, 15 aa, Homo Sapiens
KDYIRERFDNETFRI

SEQ ID NO: 12489 - protein, 15 aa, Homo Sapiens
DYIRERFDNETFRIS

SEQ ID NO: 12490 - protein, 15 aa, Homo Sapiens
YIRERFDNETFRISV

SEQ ID NO: 12491 - protein, 15 aa, Homo Sapiens
IRERFDNETFRISVY

SEQ ID NO: 12492 - protein, 15 aa, Homo Sapiens
RERFDNETFRISVYQ

SEQ ID NO: 12493 - protein, 15 aa, Homo Sapiens
ERFDNETFRISVYQV

SEQ ID NO: 12494 - protein, 15 aa, Homo Sapiens
RFDNETFRISVYQVL

SEQ ID NO: 12495 - protein, 15 aa, Homo Sapiens
FDNETFRISVYQVLQ

SEQ ID NO: 12496 - protein, 15 aa, Homo Sapiens
DNETFRISVYQVLQE

SEQ ID NO: 12497 - protein, 15 aa, Homo Sapiens
NETFRISVYQVLQEH

SEQ ID NO: 12498 - protein, 15 aa, Homo Sapiens
ETFRISVYQVLQEHL

SEQ ID NO: 12499 - protein, 15 aa, Homo Sapiens
TFRISVYQVLQEHLG

SEQ ID NO: 12500 - protein, 15 aa, Homo Sapiens
FRISVYQVLQEHLGR

SEQ ID NO: 12501 - protein, 15 aa, Homo Sapiens
RISVYQVLQEHLGRE

SEQ ID NO: 12502 - protein, 15 aa, Homo Sapiens
ISVYQVLQEHLGRES

SEQ ID NO: 12503 - protein, 15 aa, Homo Sapiens
SVYQVLQEHLGRESD

SEQ ID NO: 12504 - protein, 15 aa, Homo Sapiens
VYQVLQEHLGRESDL

SEQ ID NO: 12505 - protein, 15 aa, Homo Sapiens
YQVLQEHLGRESDLF

SEQ ID NO: 12506 - protein, 15 aa, Homo Sapiens
QVLQEHLGRESDLFL

SEQ ID NO: 12507 - protein, 15 aa, Homo Sapiens
VLQEHLGRESDLFLL

SEQ ID NO: 12508 - protein, 15 aa, Homo Sapiens
LQEHLGRESDLFLLD

SEQ ID NO: 12509 - protein, 15 aa, Homo Sapiens
QEHLGRESDLFLLDS

SEQ ID NO: 12510 - protein, 15 aa, Homo Sapiens
EHLGRESDLFLLDSR

SEQ ID NO: 12511 - protein, 15 aa, Homo Sapiens
HLGRESDLFLLDSRT

SEQ ID NO: 12512 - protein, 15 aa, Homo Sapiens
LGRESDLFLLDSRTL

SEQ ID NO: 12513 - protein, 15 aa, Homo Sapiens
GRESDLFLLDSRTLW

SEQ ID NO: 12514 - protein, 15 aa, Homo Sapiens
RESDLFLLDSRTLWA

SEQ ID NO: 12515 - protein, 15 aa, Homo Sapiens
ESDLFLLDSRTLWAS

SEQ ID NO: 12516 - protein, 15 aa, Homo Sapiens
SDLFLLDSRTLWASE

SEQ ID NO: 12517 - protein, 15 aa, Homo Sapiens
DLFLLDSRTLWASEE

SEQ ID NO: 12518 - protein, 15 aa, Homo Sapiens
LFLLDSRTLWASEEG

SEQ ID NO: 12519 - protein, 15 aa, Homo Sapiens
FLLDSRTLWASEEGW

SEQ ID NO: 12520 - protein, 15 aa, Homo Sapiens
LLDSRTLWASEEGWL

SEQ ID NO: 12521 - protein, 15 aa, Homo Sapiens
LDSRTLWASEEGWLV

SEQ ID NO: 12522 - protein, 15 aa, Homo Sapiens
DSRTLWASEEGWLVF

SEQ ID NO: 12523 - protein, 15 aa, Homo Sapiens
SRTLWASEEGWLVFD

SEQ ID NO: 12524 - protein, 15 aa, Homo Sapiens
RTLWASEEGWLVFDI

SEQ ID NO: 12525 - protein, 15 aa, Homo Sapiens
TLWASEEGWLVFDIT

SEQ ID NO: 12526 - protein, 15 aa, Homo Sapiens
LWASEEGWLVFDITA

SEQ ID NO: 12527 - protein, 15 aa, Homo Sapiens
WASEEGWLVFDITAT

SEQ ID NO: 12528 - protein, 15 aa, Homo Sapiens
ASEEGWLVFDITATS

SEQ ID NO: 12529 - protein, 15 aa, Homo Sapiens
SEEGWLVFDITATSN

SEQ ID NO: 12530 - protein, 15 aa, Homo Sapiens
EEGWLVFDITATSNH

SEQ ID NO: 12531 - protein, 15 aa, Homo Sapiens
EGWLVFDITATSNHW

SEQ ID NO: 12532 - protein, 15 aa, Homo Sapiens
GWLVFDITATSNHWV

SEQ ID NO: 12533 - protein, 15 aa, Homo Sapiens
WLVFDITATSNHWVV

SEQ ID NO: 12534 - protein, 15 aa, Homo Sapiens
LVFDITATSNHWVVN

SEQ ID NO: 12535 - protein, 15 aa, Homo Sapiens
VFDITATSNHWVVNP

SEQ ID NO: 12536 - protein, 15 aa, Homo Sapiens
FDITATSNHWVVNPR

SEQ ID NO: 12537 - protein, 15 aa, Homo Sapiens
DITATSNHWVVNPRH

SEQ ID NO: 12538 - protein, 15 aa, Homo Sapiens
ITATSNHWVVNPRHN

SEQ ID NO: 12539 - protein, 15 aa, Homo Sapiens
TATSNHWVVNPRHNL

SEQ ID NO: 12540 - protein, 15 aa, Homo Sapiens
ATSNHWVVNPRHNLG

SEQ ID NO: 12541 - protein, 15 aa, Homo Sapiens
TSNHWVVNPRHNLGL

SEQ ID NO: 12542 - protein, 15 aa, Homo Sapiens
SNHWVVNPRHNLGLQ

SEQ ID NO: 12543 - protein, 15 aa, Homo Sapiens
NHWVVNPRHNLGLQL

SEQ ID NO: 12544 - protein, 15 aa, Homo Sapiens
HWVVNPRHNLGLQLS

SEQ ID NO: 12545 - protein, 15 aa, Homo Sapiens
WVVNPRHNLGLQLSV

SEQ ID NO: 12546 - protein, 15 aa, Homo Sapiens
VVNPRHNLGLQLSVE

SEQ ID NO: 12547 - protein, 15 aa, Homo Sapiens
VNPRHNLGLQLSVET

SEQ ID NO: 12548 - protein, 15 aa, Homo Sapiens
NPRHNLGLQLSVETL

SEQ ID NO: 12549 - protein, 15 aa, Homo Sapiens
PRHNLGLQLSVETLD

SEQ ID NO: 12550 - protein, 15 aa, Homo Sapiens
RHNLGLQLSVETLDG

SEQ ID NO: 12551 - protein, 15 aa, Homo Sapiens
HNLGLQLSVETLDGQ

SEQ ID NO: 12552 - protein, 15 aa, Homo Sapiens
NLGLQLSVETLDGQS

SEQ ID NO: 12553 - protein, 15 aa, Homo Sapiens
LGLQLSVETLDGQSI

SEQ ID NO: 12554 - protein, 15 aa, Homo Sapiens
GLQLSVETLDGQSIN

SEQ ID NO: 12555 - protein, 15 aa, Homo Sapiens
LQLSVETLDGQSINP

SEQ ID NO: 12556 - protein, 15 aa, Homo Sapiens
QLSVETLDGQSINPK

SEQ ID NO: 12557 - protein, 15 aa, Homo Sapiens
LSVETLDGQSINPKL

SEQ ID NO: 12558 - protein, 15 aa, Homo Sapiens
SVETLDGQSINPKLA

SEQ ID NO: 12559 - protein, 15 aa, Homo Sapiens
VETLDGQSINPKLAG

SEQ ID NO: 12560 - protein, 15 aa, Homo Sapiens
ETLDGQSINPKLAGL

SEQ ID NO: 12561 - protein, 15 aa, Homo Sapiens
TLDGQSINPKLAGLI

SEQ ID NO: 12562 - protein, 15 aa, Homo Sapiens
LDGQSINPKLAGLIG

SEQ ID NO: 12563 - protein, 15 aa, Homo Sapiens
DGQSINPKLAGLIGR

SEQ ID NO: 12564 - protein, 15 aa, Homo Sapiens
GQSINPKLAGLIGRH

SEQ ID NO: 12565 - protein, 15 aa, Homo Sapiens
QSINPKLAGLIGRHG

SEQ ID NO: 12566 - protein, 15 aa, Homo Sapiens
SINPKLAGLIGRHGP

SEQ ID NO: 12567 - protein, 15 aa, Homo Sapiens
INPKLAGLIGRHGPQ

SEQ ID NO: 12568 - protein, 15 aa, Homo Sapiens
NPKLAGLIGRHGPQN

SEQ ID NO: 12569 - protein, 15 aa, Homo Sapiens
PKLAGLIGRHGPQNK

SEQ ID NO: 12570 - protein, 15 aa, Homo Sapiens
KLAGLIGRHGPQNKQ

SEQ ID NO: 12571 - protein, 15 aa, Homo Sapiens
LAGLIGRHGPQNKQP

SEQ ID NO: 12572 - protein, 15 aa, Homo Sapiens
AGLIGRHGPQNKQPF

SEQ ID NO: 12573 - protein, 15 aa, Homo Sapiens
GLIGRHGPQNKQPFM

SEQ ID NO: 12574 - protein, 15 aa, Homo Sapiens
LIGRHGPQNKQPFMV

SEQ ID NO: 12575 - protein, 15 aa, Homo Sapiens
IGRHGPQNKQPFMVA

SEQ ID NO: 12576 - protein, 15 aa, Homo Sapiens
GRHGPQNKQPFMVAF

SEQ ID NO: 12577 - protein, 15 aa, Homo Sapiens
RHGPQNKQPFMVAFF

SEQ ID NO: 12578 - protein, 15 aa, Homo Sapiens
HGPQNKQPFMVAFFK

SEQ ID NO: 12579 - protein, 15 aa, Homo Sapiens
GPQNKQPFMVAFFKA

SEQ ID NO: 12580 - protein, 15 aa, Homo Sapiens
PQNKQPFMVAFFKAT

SEQ ID NO: 12581 - protein, 15 aa, Homo Sapiens
QNKQPFMVAFFKATE

SEQ ID NO: 12582 - protein, 15 aa, Homo Sapiens
NKQPFMVAFFKATEV

SEQ ID NO: 12583 - protein, 15 aa, Homo Sapiens
KQPFMVAFFKATEVH

SEQ ID NO: 12584 - protein, 15 aa, Homo Sapiens
QPFMVAFFKATEVHF

SEQ ID NO: 12585 - protein, 15 aa, Homo Sapiens
PFMVAFFKATEVHFR

SEQ ID NO: 12586 - protein, 15 aa, Homo Sapiens
FMVAFFKATEVHFRS

SEQ ID NO: 12587 - protein, 15 aa, Homo Sapiens
MVAFFKATEVHFRSI

SEQ ID NO: 12588 - protein, 15 aa, Homo Sapiens
VAFFKATEVHFRSIR

SEQ ID NO: 12589 - protein, 15 aa, Homo Sapiens
AFFKATEVHFRSIRS

SEQ ID NO: 12590 - protein, 15 aa, Homo Sapiens
FFKATEVHFRSIRST

SEQ ID NO: 12591 - protein, 15 aa, Homo Sapiens
FKATEVHFRSIRSTG

SEQ ID NO: 12592 - protein, 15 aa, Homo Sapiens
KATEVHFRSIRSTGS

SEQ ID NO: 12593 - protein, 15 aa, Homo Sapiens
ATEVHFRSIRSTGSK

SEQ ID NO: 12594 - protein, 15 aa, Homo Sapiens
TEVHFRSIRSTGSKQ

SEQ ID NO: 12595 - protein, 15 aa, Homo Sapiens
EVHFRSIRSTGSKQR

SEQ ID NO: 12596 - protein, 15 aa, Homo Sapiens
VHFRSIRSTGSKQRS

SEQ ID NO: 12597 - protein, 15 aa, Homo Sapiens
HFRSIRSTGSKQRSQ

SEQ ID NO: 12598 - protein, 15 aa, Homo Sapiens
FRSIRSTGSKQRSQN

SEQ ID NO: 12599 - protein, 15 aa, Homo Sapiens
RSIRSTGSKQRSQNR

SEQ ID NO: 12600 - protein, 15 aa, Homo Sapiens
SIRSTGSKQRSQNRS

SEQ ID NO: 12601 - protein, 15 aa, Homo Sapiens
IRSTGSKQRSQNRSK

SEQ ID NO: 12602 - protein, 15 aa, Homo Sapiens
RSTGSKQRSQNRSKT

SEQ ID NO: 12603 - protein, 15 aa, Homo Sapiens
STGSKQRSQNRSKTP

SEQ ID NO: 12604 - protein, 15 aa, Homo Sapiens
TGSKQRSQNRSKTPK

SEQ ID NO: 12605 - protein, 15 aa, Homo Sapiens
GSKQRSQNRSKTPKN

SEQ ID NO: 12606 - protein, 15 aa, Homo Sapiens
SKQRSQNRSKTPKNQ

SEQ ID NO: 12607 - protein, 15 aa, Homo Sapiens
KQRSQNRSKTPKNQE

SEQ ID NO: 12608 - protein, 15 aa, Homo Sapiens
QRSQNRSKTPKNQEA

SEQ ID NO: 12609 - protein, 15 aa, Homo Sapiens
RSQNRSKTPKNQEAL

SEQ ID NO: 12610 - protein, 15 aa, Homo Sapiens
SQNRSKTPKNQEALR

SEQ ID NO: 12611 - protein, 15 aa, Homo Sapiens
QNRSKTPKNQEALRM

SEQ ID NO: 12612 - protein, 15 aa, Homo Sapiens
NRSKTPKNQEALRMA

SEQ ID NO: 12613 - protein, 15 aa, Homo Sapiens
RSKTPKNQEALRMAN

SEQ ID NO: 12614 - protein, 15 aa, Homo Sapiens
SKTPKNQEALRMANV

SEQ ID NO: 12615 - protein, 15 aa, Homo Sapiens
KTPKNQEALRMANVA

SEQ ID NO: 12616 - protein, 15 aa, Homo Sapiens
TPKNQEALRMANVAE

SEQ ID NO: 12617 - protein, 15 aa, Homo Sapiens
PKNQEALRMANVAEN

SEQ ID NO: 12618 - protein, 15 aa, Homo Sapiens
KNQEALRMANVAENS

SEQ ID NO: 12619 - protein, 15 aa, Homo Sapiens
NQEALRMANVAENSS

SEQ ID NO: 12620 - protein, 15 aa, Homo Sapiens
QEALRMANVAENSSS

SEQ ID NO: 12621 - protein, 15 aa, Homo Sapiens
EALRMANVAENSSSD

SEQ ID NO: 12622 - protein, 15 aa, Homo Sapiens
ALRMANVAENSSSDQ

SEQ ID NO: 12623 - protein, 15 aa, Homo Sapiens
LRMANVAENSSSDQR

SEQ ID NO: 12624 - protein, 15 aa, Homo Sapiens
RMANVAENSSSDQRQ

SEQ ID NO: 12625 - protein, 15 aa, Homo Sapiens
MANVAENSSSDQRQA

SEQ ID NO: 12626 - protein, 15 aa, Homo Sapiens
ANVAENSSSDQRQAC

SEQ ID NO: 12627 - protein, 15 aa, Homo Sapiens
NVAENSSSDQRQACK

SEQ ID NO: 12628 - protein, 15 aa, Homo Sapiens
VAENSSSDQRQACKK

SEQ ID NO: 12629 - protein, 15 aa, Homo Sapiens
AENSSSDQRQACKKH

SEQ ID NO: 12630 - protein, 15 aa, Homo Sapiens
ENSSSDQRQACKKHE

SEQ ID NO: 12631 - protein, 15 aa, Homo Sapiens
NSSSDQRQACKKHEL

SEQ ID NO: 12632 - protein, 15 aa, Homo Sapiens
SSSDQRQACKKHELY

SEQ ID NO: 12633 - protein, 15 aa, Homo Sapiens
SSDQRQACKKHELYV

SEQ ID NO: 12634 - protein, 15 aa, Homo Sapiens
SDQRQACKKHELYVS

SEQ ID NO: 12635 - protein, 15 aa, Homo Sapiens
DQRQACKKHELYVSF

SEQ ID NO: 12636 - protein, 15 aa, Homo Sapiens
QRQACKKHELYVSFR

SEQ ID NO: 12637 - protein, 15 aa, Homo Sapiens
RQACKKHELYVSFRD

SEQ ID NO: 12638 - protein, 15 aa, Homo Sapiens
QACKKHELYVSFRDL

SEQ ID NO: 12639 - protein, 15 aa, Homo Sapiens
ACKKHELYVSFRDLG

SEQ ID NO: 12640 - protein, 15 aa, Homo Sapiens
CKKHELYVSFRDLGW

SEQ ID NO: 12641 - protein, 15 aa, Homo Sapiens
KKHELYVSFRDLGWQ

SEQ ID NO: 12642 - protein, 15 aa, Homo Sapiens
KHELYVSFRDLGWQD

SEQ ID NO: 12643 - protein, 15 aa, Homo Sapiens
HELYVSFRDLGWQDW

SEQ ID NO: 12644 - protein, 15 aa, Homo Sapiens
ELYVSFRDLGWQDWI

SEQ ID NO: 12645 - protein, 15 aa, Homo Sapiens
LYVSFRDLGWQDWII

SEQ ID NO: 12646 - protein, 15 aa, Homo Sapiens
YVSFRDLGWQDWIIA

SEQ ID NO: 12647 - protein, 15 aa, Homo Sapiens
VSFRDLGWQDWIIAP

SEQ ID NO: 12648 - protein, 15 aa, Homo Sapiens
SFRDLGWQDWIIAPE

SEQ ID NO: 12649 - protein, 15 aa, Homo Sapiens
FRDLGWQDWIIAPEG

SEQ ID NO: 12650 - protein, 15 aa, Homo Sapiens
RDLGWQDWIIAPEGY

SEQ ID NO: 12651 - protein, 15 aa, Homo Sapiens
DLGWQDWIIAPEGYA

SEQ ID NO: 12652 - protein, 15 aa, Homo Sapiens
LGWQDWIIAPEGYAA

SEQ ID NO: 12653 - protein, 15 aa, Homo Sapiens
GWQDWIIAPEGYAAY

SEQ ID NO: 12654 - protein, 15 aa, Homo Sapiens
WQDWIIAPEGYAAYY

SEQ ID NO: 12655 - protein, 15 aa, Homo Sapiens
QDWIIAPEGYAAYYC

SEQ ID NO: 12656 - protein, 15 aa, Homo Sapiens
DWIIAPEGYAAYYCE

SEQ ID NO: 12657 - protein, 15 aa, Homo Sapiens
WIIAPEGYAAYYCEG

SEQ ID NO: 12658 - protein, 15 aa, Homo Sapiens
IIAPEGYAAYYCEGE

SEQ ID NO: 12659 - protein, 15 aa, Homo Sapiens
IAPEGYAAYYCEGEC

SEQ ID NO: 12660 - protein, 15 aa, Homo Sapiens
APEGYAAYYCEGECA

SEQ ID NO: 12661 - protein, 15 aa, Homo Sapiens
PEGYAAYYCEGECAF

SEQ ID NO: 12662 - protein, 15 aa, Homo Sapiens
EGYAAYYCEGECAFP

SEQ ID NO: 12663 - protein, 15 aa, Homo Sapiens
GYAAYYCEGECAFPL

SEQ ID NO: 12664 - protein, 15 aa, Homo Sapiens
YAAYYCEGECAFPLN

SEQ ID NO: 12665 - protein, 15 aa, Homo Sapiens
AAYYCEGECAFPLNS

SEQ ID NO: 12666 - protein, 15 aa, Homo Sapiens
AYYCEGECAFPLNSY

SEQ ID NO: 12667 - protein, 15 aa, Homo Sapiens
YYCEGECAFPLNSYM

SEQ ID NO: 12668 - protein, 15 aa, Homo Sapiens
YCEGECAFPLNSYMN

SEQ ID NO: 12669 - protein, 15 aa, Homo Sapiens
CEGECAFPLNSYMNA

SEQ ID NO: 12670 - protein, 15 aa, Homo Sapiens
EGECAFPLNSYMNAT

SEQ ID NO: 12671 - protein, 15 aa, Homo Sapiens
GECAFPLNSYMNATN

SEQ ID NO: 12672 - protein, 15 aa, Homo Sapiens
ECAFPLNSYMNATNH

SEQ ID NO: 12673 - protein, 15 aa, Homo Sapiens
CAFPLNSYMNATNHA

SEQ ID NO: 12674 - protein, 15 aa, Homo Sapiens
AFPLNSYMNATNHAI

SEQ ID NO: 12675 - protein, 15 aa, Homo Sapiens
FPLNSYMNATNHAIV

SEQ ID NO: 12676 - protein, 15 aa, Homo Sapiens
PLNSYMNATNHAIVQ

SEQ ID NO: 12677 - protein, 15 aa, Homo Sapiens
LNSYMNATNHAIVQT

SEQ ID NO: 12678 - protein, 15 aa, Homo Sapiens
NSYMNATNHAIVQTL

SEQ ID NO: 12679 - protein, 15 aa, Homo Sapiens
SYMNATNHAIVQTLV

SEQ ID NO: 12680 - protein, 15 aa, Homo Sapiens
YMNATNHAIVQTLVH

SEQ ID NO: 12681 - protein, 15 aa, Homo Sapiens
MNATNHAIVQTLVHF

SEQ ID NO: 12682 - protein, 15 aa, Homo Sapiens
NATNHAIVQTLVHFI

SEQ ID NO: 12683 - protein, 15 aa, Homo Sapiens
ATNHAIVQTLVHFIN

SEQ ID NO: 12684 - protein, 15 aa, Homo Sapiens
TNHAIVQTLVHFINP

SEQ ID NO: 12685 - protein, 15 aa, Homo Sapiens
NHAIVQTLVHFINPE

SEQ ID NO: 12686 - protein, 15 aa, Homo Sapiens
HAIVQTLVHFINPET

SEQ ID NO: 12687 - protein, 15 aa, Homo Sapiens
AIVQTLVHFINPETV

SEQ ID NO: 12688 - protein, 15 aa, Homo Sapiens
IVQTLVHFINPETVP

SEQ ID NO: 12689 - protein, 15 aa, Homo Sapiens
VQTLVHFINPETVPK

SEQ ID NO: 12690 - protein, 15 aa, Homo Sapiens
QTLVHFINPETVPKP

SEQ ID NO: 12691 - protein, 15 aa, Homo Sapiens
TLVHFINPETVPKPC

SEQ ID NO: 12692 - protein, 15 aa, Homo Sapiens
LVHFINPETVPKPCC

SEQ ID NO: 12693 - protein, 15 aa, Homo Sapiens
VHFINPETVPKPCCA

SEQ ID NO: 12694 - protein, 15 aa, Homo Sapiens
HFINPETVPKPCCAP

SEQ ID NO: 12695 - protein, 15 aa, Homo Sapiens
FINPETVPKPCCAPT

SEQ ID NO: 12696 - protein, 15 aa, Homo Sapiens
INPETVPKPCCAPTQ

SEQ ID NO: 12697 - protein, 15 aa, Homo Sapiens
NPETVPKPCCAPTQL

SEQ ID NO: 12698 - protein, 15 aa, Homo Sapiens
PETVPKPCCAPTQLN

SEQ ID NO: 12699 - protein, 15 aa, Homo Sapiens
ETVPKPCCAPTQLNA

SEQ ID NO: 12700 - protein, 15 aa, Homo Sapiens
TVPKPCCAPTQLNAI

SEQ ID NO: 12701 - protein, 15 aa, Homo Sapiens
VPKPCCAPTQLNAIS

SEQ ID NO: 12702 - protein, 15 aa, Homo Sapiens
PKPCCAPTQLNAISV

SEQ ID NO: 12703 - protein, 15 aa, Homo Sapiens
KPCCAPTQLNAISVL

SEQ ID NO: 12704 - protein, 15 aa, Homo Sapiens
PCCAPTQLNAISVLY

SEQ ID NO: 12705 - protein, 15 aa, Homo Sapiens
CCAPTQLNAISVLYF

SEQ ID NO: 12706 - protein, 15 aa, Homo Sapiens
CAPTQLNAISVLYFD

SEQ ID NO: 12707 - protein, 15 aa, Homo Sapiens
APTQLNAISVLYFDD

SEQ ID NO: 12708 - protein, 15 aa, Homo Sapiens
PTQLNAISVLYFDDS

SEQ ID NO: 12709 - protein, 15 aa, Homo Sapiens
TQLNAISVLYFDDSS

SEQ ID NO: 12710 - protein, 15 aa, Homo Sapiens
QLNAISVLYFDDSSN

SEQ ID NO: 12711 - protein, 15 aa, Homo Sapiens
LNAISVLYFDDSSNV

SEQ ID NO: 12712 - protein, 15 aa, Homo Sapiens
NAISVLYFDDSSNVI

SEQ ID NO: 12713 - protein, 15 aa, Homo Sapiens
AISVLYFDDSSNVIL

SEQ ID NO: 12714 - protein, 15 aa, Homo Sapiens
ISVLYFDDSSNVILK

SEQ ID NO: 12715 - protein, 15 aa, Homo Sapiens
SVLYFDDSSNVILKK

SEQ ID NO: 12716 - protein, 15 aa, Homo Sapiens
VLYFDDSSNVILKKY

SEQ ID NO: 12717 - protein, 15 aa, Homo Sapiens
LYFDDSSNVILKKYR

SEQ ID NO: 12718 - protein, 15 aa, Homo Sapiens
YFDDSSNVILKKYRN

SEQ ID NO: 12719 - protein, 15 aa, Homo Sapiens
FDDSSNVILKKYRNM

SEQ ID NO: 12720 - protein, 15 aa, Homo Sapiens
DDSSNVILKKYRNMV

SEQ ID NO: 12721 - protein, 15 aa, Homo Sapiens
DSSNVILKKYRNMVV

SEQ ID NO: 12722 - protein, 15 aa, Homo Sapiens
SSNVILKKYRNMVVR

SEQ ID NO: 12723 - protein, 15 aa, Homo Sapiens
SNVILKKYRNMVVRA

SEQ ID NO: 12724 - protein, 15 aa, Homo Sapiens
NVILKKYRNMVVRAC

SEQ ID NO: 12725 - protein, 15 aa, Homo Sapiens
VILKKYRNMVVRACG

SEQ ID NO: 12726 - protein, 15 aa, Homo Sapiens
ILKKYRNMVVRACGC

SEQ ID NO: 12727 - protein, 15 aa, Homo Sapiens
LKKYRNMVVRACGCH

SEQ ID NO: 12728 - protein, 16 aa, Homo Sapiens
MHVRSLRAAAPHSFVA

SEQ ID NO: 12729 - protein, 16 aa, Homo Sapiens
HVRSLRAAAPHSFVAL

SEQ ID NO: 12730 - protein, 16 aa, Homo Sapiens
VRSLRAAAPHSFVALW

SEQ ID NO: 12731 - protein, 16 aa, Homo Sapiens
RSLRAAAPHSFVALWA

SEQ ID NO: 12732 - protein, 16 aa, Homo Sapiens
SLRAAAPHSFVALWAP

SEQ ID NO: 12733 - protein, 16 aa, Homo Sapiens
LRAAAPHSFVALWAPL

SEQ ID NO: 12734 - protein, 16 aa, Homo Sapiens
RAAAPHSFVALWAPLF

SEQ ID NO: 12735 - protein, 16 aa, Homo Sapiens
AAAPHSFVALWAPLFL

SEQ ID NO: 12736 - protein, 16 aa, Homo Sapiens
AAPHSFVALWAPLFLL

SEQ ID NO: 12737 - protein, 16 aa, Homo Sapiens
APHSFVALWAPLFLLR

SEQ ID NO: 12738 - protein, 16 aa, Homo Sapiens
PHSFVALWAPLFLLRS

SEQ ID NO: 12739 - protein, 16 aa, Homo Sapiens
HSFVALWAPLFLLRSA

SEQ ID NO: 12740 - protein, 16 aa, Homo Sapiens
SFVALWAPLFLLRSAL

SEQ ID NO: 12741 - protein, 16 aa, Homo Sapiens
FVALWAPLFLLRSALA

SEQ ID NO: 12742 - protein, 16 aa, Homo Sapiens
VALWAPLFLLRSALAD

SEQ ID NO: 12743 - protein, 16 aa, Homo Sapiens
ALWAPLFLLRSALADF

SEQ ID NO: 12744 - protein, 16 aa, Homo Sapiens
LWAPLFLLRSALADFS

SEQ ID NO: 12745 - protein, 16 aa, Homo Sapiens
WAPLFLLRSALADFSL

SEQ ID NO: 12746 - protein, 16 aa, Homo Sapiens
APLFLLRSALADFSLD

SEQ ID NO: 12747 - protein, 16 aa, Homo Sapiens
PLFLLRSALADFSLDN

SEQ ID NO: 12748 - protein, 16 aa, Homo Sapiens
LFLLRSALADFSLDNE

SEQ ID NO: 12749 - protein, 16 aa, Homo Sapiens
FLLRSALADFSLDNEV

SEQ ID NO: 12750 - protein, 16 aa, Homo Sapiens
LLRSALADFSLDNEVH

SEQ ID NO: 12751 - protein, 16 aa, Homo Sapiens
LRSALADFSLDNEVHS

SEQ ID NO: 12752 - protein, 16 aa, Homo Sapiens
RSALADFSLDNEVHSS

SEQ ID NO: 12753 - protein, 16 aa, Homo Sapiens
SALADFSLDNEVHSSF

SEQ ID NO: 12754 - protein, 16 aa, Homo Sapiens
ALADFSLDNEVHSSFI

SEQ ID NO: 12755 - protein, 16 aa, Homo Sapiens
LADFSLDNEVHSSFIH

SEQ ID NO: 12756 - protein, 16 aa, Homo Sapiens
ADFSLDNEVHSSFIHR

SEQ ID NO: 12757 - protein, 16 aa, Homo Sapiens
DFSLDNEVHSSFIHRR

SEQ ID NO: 12758 - protein, 16 aa, Homo Sapiens
FSLDNEVHSSFIHRRL

SEQ ID NO: 12759 - protein, 16 aa, Homo Sapiens
SLDNEVHSSFIHRRLR

SEQ ID NO: 12760 - protein, 16 aa, Homo Sapiens
LDNEVHSSFIHRRLRS

SEQ ID NO: 12761 - protein, 16 aa, Homo Sapiens
DNEVHSSFIHRRLRSQ

SEQ ID NO: 12762 - protein, 16 aa, Homo Sapiens
NEVHSSFIHRRLRSQE

SEQ ID NO: 12763 - protein, 16 aa, Homo Sapiens
EVHSSFIHRRLRSQER

SEQ ID NO: 12764 - protein, 16 aa, Homo Sapiens
VHSSFIHRRLRSQERR

SEQ ID NO: 12765 - protein, 16 aa, Homo Sapiens
HSSFIHRRLRSQERRE

SEQ ID NO: 12766 - protein, 16 aa, Homo Sapiens
SSFIHRRLRSQERREM

SEQ ID NO: 12767 - protein, 16 aa, Homo Sapiens
SFIHRRLRSQERREMQ

SEQ ID NO: 12768 - protein, 16 aa, Homo Sapiens
FIHRRLRSQERREMQR

SEQ ID NO: 12769 - protein, 16 aa, Homo Sapiens
IHRRLRSQERREMQRE

SEQ ID NO: 12770 - protein, 16 aa, Homo Sapiens
HRRLRSQERREMQREI

SEQ ID NO: 12771 - protein, 16 aa, Homo Sapiens
RRLRSQERREMQREIL

SEQ ID NO: 12772 - protein, 16 aa, Homo Sapiens
RLRSQERREMQREILS

SEQ ID NO: 12773 - protein, 16 aa, Homo Sapiens
LRSQERREMQREILSI

SEQ ID NO: 12774 - protein, 16 aa, Homo Sapiens
RSQERREMQREILSIL

SEQ ID NO: 12775 - protein, 16 aa, Homo Sapiens
SQERREMQREILSILG

SEQ ID NO: 12776 - protein, 16 aa, Homo Sapiens
QERREMQREILSILGL

SEQ ID NO: 12777 - protein, 16 aa, Homo Sapiens
ERREMQREILSILGLP

SEQ ID NO: 12778 - protein, 16 aa, Homo Sapiens
RREMQREILSILGLPH

SEQ ID NO: 12779 - protein, 16 aa, Homo Sapiens
REMQREILSILGLPHR

SEQ ID NO: 12780 - protein, 16 aa, Homo Sapiens
EMQREILSILGLPHRP

SEQ ID NO: 12781 - protein, 16 aa, Homo Sapiens
MQREILSILGLPHRPR

SEQ ID NO: 12782 - protein, 16 aa, Homo Sapiens
QREILSILGLPHRPRP

SEQ ID NO: 12783 - protein, 16 aa, Homo Sapiens
REILSILGLPHRPRPH

SEQ ID NO: 12784 - protein, 16 aa, Homo Sapiens
EILSILGLPHRPRPHL

SEQ ID NO: 12785 - protein, 16 aa, Homo Sapiens
ILSILGLPHRPRPHLQ

SEQ ID NO: 12786 - protein, 16 aa, Homo Sapiens
LSILGLPHRPRPHLQG

SEQ ID NO: 12787 - protein, 16 aa, Homo Sapiens
SILGLPHRPRPHLQGK

SEQ ID NO: 12788 - protein, 16 aa, Homo Sapiens
ILGLPHRPRPHLQGKH

SEQ ID NO: 12789 - protein, 16 aa, Homo Sapiens
LGLPHRPRPHLQGKHN

SEQ ID NO: 12790 - protein, 16 aa, Homo Sapiens
GLPHRPRPHLQGKHNS

SEQ ID NO: 12791 - protein, 16 aa, Homo Sapiens
LPHRPRPHLQGKHNSA

SEQ ID NO: 12792 - protein, 16 aa, Homo Sapiens
PHRPRPHLQGKHNSAP

SEQ ID NO: 12793 - protein, 16 aa, Homo Sapiens
HRPRPHLQGKHNSAPM

SEQ ID NO: 12794 - protein, 16 aa, Homo Sapiens
RPRPHLQGKHNSAPMF

SEQ ID NO: 12795 - protein, 16 aa, Homo Sapiens
PRPHLQGKHNSAPMFM

SEQ ID NO: 12796 - protein, 16 aa, Homo Sapiens
RPHLQGKHNSAPMFML

SEQ ID NO: 12797 - protein, 16 aa, Homo Sapiens
PHLQGKHNSAPMFMLD

SEQ ID NO: 12798 - protein, 16 aa, Homo Sapiens
HLQGKHNSAPMFMLDL

SEQ ID NO: 12799 - protein, 16 aa, Homo Sapiens
LQGKHNSAPMFMLDLY

SEQ ID NO: 12800 - protein, 16 aa, Homo Sapiens
QGKHNSAPMFMLDLYN

SEQ ID NO: 12801 - protein, 16 aa, Homo Sapiens
GKHNSAPMFMLDLYNA

SEQ ID NO: 12802 - protein, 16 aa, Homo Sapiens
KHNSAPMFMLDLYNAM

SEQ ID NO: 12803 - protein, 16 aa, Homo Sapiens
HNSAPMFMLDLYNAMA

SEQ ID NO: 12804 - protein, 16 aa, Homo Sapiens
NSAPMFMLDLYNAMAV

SEQ ID NO: 12805 - protein, 16 aa, Homo Sapiens
SAPMFMLDLYNAMAVE

SEQ ID NO: 12806 - protein, 16 aa, Homo Sapiens
APMFMLDLYNAMAVEE

SEQ ID NO: 12807 - protein, 16 aa, Homo Sapiens
PMFMLDLYNAMAVEEG

SEQ ID NO: 12808 - protein, 16 aa, Homo Sapiens
MFMLDLYNAMAVEEGG

SEQ ID NO: 12809 - protein, 16 aa, Homo Sapiens
FMLDLYNAMAVEEGGG

SEQ ID NO: 12810 - protein, 16 aa, Homo Sapiens
MLDLYNAMAVEEGGGP

SEQ ID NO: 12811 - protein, 16 aa, Homo Sapiens
LDLYNAMAVEEGGGPG

SEQ ID NO: 12812 - protein, 16 aa, Homo Sapiens
DLYNAMAVEEGGGPGG

SEQ ID NO: 12813 - protein, 16 aa, Homo Sapiens
LYNAMAVEEGGGPGGQ

SEQ ID NO: 12814 - protein, 16 aa, Homo Sapiens
YNAMAVEEGGGPGGQG

SEQ ID NO: 12815 - protein, 16 aa, Homo Sapiens
NAMAVEEGGGPGGQGF

SEQ ID NO: 12816 - protein, 16 aa, Homo Sapiens
AMAVEEGGGPGGQGFS

SEQ ID NO: 12817 - protein, 16 aa, Homo Sapiens
MAVEEGGGPGGQGFSY

SEQ ID NO: 12818 - protein, 16 aa, Homo Sapiens
AVEEGGGPGGQGFSYP

SEQ ID NO: 12819 - protein, 16 aa, Homo Sapiens
VEEGGGPGGQGFSYPY

SEQ ID NO: 12820 - protein, 16 aa, Homo Sapiens
EEGGGPGGQGFSYPYK

SEQ ID NO: 12821 - protein, 16 aa, Homo Sapiens
EGGGPGGQGFSYPYKA

SEQ ID NO: 12822 - protein, 16 aa, Homo Sapiens
GGGPGGQGFSYPYKAV

SEQ ID NO: 12823 - protein, 16 aa, Homo Sapiens
GGPGGQGFSYPYKAVF

SEQ ID NO: 12824 - protein, 16 aa, Homo Sapiens
GPGGQGFSYPYKAVFS

SEQ ID NO: 12825 - protein, 16 aa, Homo Sapiens
PGGQGFSYPYKAVFST

SEQ ID NO: 12826 - protein, 16 aa, Homo Sapiens
GGQGFSYPYKAVFSTQ

SEQ ID NO: 12827 - protein, 16 aa, Homo Sapiens
GQGFSYPYKAVFSTQG

SEQ ID NO: 12828 - protein, 16 aa, Homo Sapiens
QGFSYPYKAVFSTQGP

SEQ ID NO: 12829 - protein, 16 aa, Homo Sapiens
GFSYPYKAVFSTQGPP

SEQ ID NO: 12830 - protein, 16 aa, Homo Sapiens
FSYPYKAVFSTQGPPL

SEQ ID NO: 12831 - protein, 16 aa, Homo Sapiens
SYPYKAVFSTQGPPLA

SEQ ID NO: 12832 - protein, 16 aa, Homo Sapiens
YPYKAVFSTQGPPLAS

SEQ ID NO: 12833 - protein, 16 aa, Homo Sapiens
PYKAVFSTQGPPLASL

SEQ ID NO: 12834 - protein, 16 aa, Homo Sapiens
YKAVFSTQGPPLASLQ

SEQ ID NO: 12835 - protein, 16 aa, Homo Sapiens
KAVFSTQGPPLASLQD

SEQ ID NO: 12836 - protein, 16 aa, Homo Sapiens
AVFSTQGPPLASLQDS

SEQ ID NO: 12837 - protein, 16 aa, Homo Sapiens
VFSTQGPPLASLQDSH

SEQ ID NO: 12838 - protein, 16 aa, Homo Sapiens
FSTQGPPLASLQDSHF

SEQ ID NO: 12839 - protein, 16 aa, Homo Sapiens
STQGPPLASLQDSHFL

SEQ ID NO: 12840 - protein, 16 aa, Homo Sapiens
TQGPPLASLQDSHFLT

SEQ ID NO: 12841 - protein, 16 aa, Homo Sapiens
QGPPLASLQDSHFLTD

SEQ ID NO: 12842 - protein, 16 aa, Homo Sapiens
GPPLASLQDSHFLTDA

SEQ ID NO: 12843 - protein, 16 aa, Homo Sapiens
PPLASLQDSHFLTDAD

SEQ ID NO: 12844 - protein, 16 aa, Homo Sapiens
PLASLQDSHFLTDADM

SEQ ID NO: 12845 - protein, 16 aa, Homo Sapiens
LASLQDSHFLTDADMV

SEQ ID NO: 12846 - protein, 16 aa, Homo Sapiens
ASLQDSHFLTDADMVM

SEQ ID NO: 12847 - protein, 16 aa, Homo Sapiens
SLQDSHFLTDADMVMS

SEQ ID NO: 12848 - protein, 16 aa, Homo Sapiens
LQDSHFLTDADMVMSF

SEQ ID NO: 12849 - protein, 16 aa, Homo Sapiens
QDSHFLTDADMVMSFV

SEQ ID NO: 12850 - protein, 16 aa, Homo Sapiens
DSHFLTDADMVMSFVN

SEQ ID NO: 12851 - protein, 16 aa, Homo Sapiens
SHFLTDADMVMSFVNL

SEQ ID NO: 12852 - protein, 16 aa, Homo Sapiens
HFLTDADMVMSFVNLV

SEQ ID NO: 12853 - protein, 16 aa, Homo Sapiens
FLTDADMVMSFVNLVE

SEQ ID NO: 12854 - protein, 16 aa, Homo Sapiens
LTDADMVMSFVNLVEH

SEQ ID NO: 12855 - protein, 16 aa, Homo Sapiens
TDADMVMSFVNLVEHD

SEQ ID NO: 12856 - protein, 16 aa, Homo Sapiens
DADMVMSFVNLVEHDK

SEQ ID NO: 12857 - protein, 16 aa, Homo Sapiens
ADMVMSFVNLVEHDKE

SEQ ID NO: 12858 - protein, 16 aa, Homo Sapiens
DMVMSFVNLVEHDKEF

SEQ ID NO: 12859 - protein, 16 aa, Homo Sapiens
MVMSFVNLVEHDKEFF

SEQ ID NO: 12860 - protein, 16 aa, Homo Sapiens
VMSFVNLVEHDKEFFH

SEQ ID NO: 12861 - protein, 16 aa, Homo Sapiens
MSFVNLVEHDKEFFHP

SEQ ID NO: 12862 - protein, 16 aa, Homo Sapiens
SFVNLVEHDKEFFHPR

SEQ ID NO: 12863 - protein, 16 aa, Homo Sapiens
FVNLVEHDKEFFHPRY

SEQ ID NO: 12864 - protein, 16 aa, Homo Sapiens
VNLVEHDKEFFHPRYH

SEQ ID NO: 12865 - protein, 16 aa, Homo Sapiens
NLVEHDKEFFHPRYHH

SEQ ID NO: 12866 - protein, 16 aa, Homo Sapiens
LVEHDKEFFHPRYHHR

SEQ ID NO: 12867 - protein, 16 aa, Homo Sapiens
VEHDKEFFHPRYHHRE

SEQ ID NO: 12868 - protein, 16 aa, Homo Sapiens
EHDKEFFHPRYHHREF

SEQ ID NO: 12869 - protein, 16 aa, Homo Sapiens
HDKEFFHPRYHHREFR

SEQ ID NO: 12870 - protein, 16 aa, Homo Sapiens
DKEFFHPRYHHREFRF

SEQ ID NO: 12871 - protein, 16 aa, Homo Sapiens
KEFFHPRYHHREFRFD

SEQ ID NO: 12872 - protein, 16 aa, Homo Sapiens
EFFHPRYHHREFRFDL

SEQ ID NO: 12873 - protein, 16 aa, Homo Sapiens
FFHPRYHHREFRFDLS

SEQ ID NO: 12874 - protein, 16 aa, Homo Sapiens
FHPRYHHREFRFDLSK

SEQ ID NO: 12875 - protein, 16 aa, Homo Sapiens
HPRYHHREFRFDLSKI

SEQ ID NO: 12876 - protein, 16 aa, Homo Sapiens
PRYHHREFRFDLSKIP

SEQ ID NO: 12877 - protein, 16 aa, Homo Sapiens
RYHHREFRFDLSKIPE

SEQ ID NO: 12878 - protein, 16 aa, Homo Sapiens
YHHREFRFDLSKIPEG

SEQ ID NO: 12879 - protein, 16 aa, Homo Sapiens
HHREFRFDLSKIPEGE

SEQ ID NO: 12880 - protein, 16 aa, Homo Sapiens
HREFRFDLSKIPEGEA

SEQ ID NO: 12881 - protein, 16 aa, Homo Sapiens
REFRFDLSKIPEGEAV

SEQ ID NO: 12882 - protein, 16 aa, Homo Sapiens
EFRFDLSKIPEGEAVT

SEQ ID NO: 12883 - protein, 16 aa, Homo Sapiens
FRFDLSKIPEGEAVTA

SEQ ID NO: 12884 - protein, 16 aa, Homo Sapiens
RFDLSKIPEGEAVTAA

SEQ ID NO: 12885 - protein, 16 aa, Homo Sapiens
FDLSKIPEGEAVTAAE

SEQ ID NO: 12886 - protein, 16 aa, Homo Sapiens
DLSKIPEGEAVTAAEF

SEQ ID NO: 12887 - protein, 16 aa, Homo Sapiens
LSKIPEGEAVTAAEFR

SEQ ID NO: 12888 - protein, 16 aa, Homo Sapiens
SKIPEGEAVTAAEFRI

SEQ ID NO: 12889 - protein, 16 aa, Homo Sapiens
KIPEGEAVTAAEFRIY

SEQ ID NO: 12890 - protein, 16 aa, Homo Sapiens
IPEGEAVTAAEFRIYK

SEQ ID NO: 12891 - protein, 16 aa, Homo Sapiens
PEGEAVTAAEFRIYKD

SEQ ID NO: 12892 - protein, 16 aa, Homo Sapiens
EGEAVTAAEFRIYKDY

SEQ ID NO: 12893 - protein, 16 aa, Homo Sapiens
GEAVTAAEFRIYKDYI

SEQ ID NO: 12894 - protein, 16 aa, Homo Sapiens
EAVTAAEFRIYKDYIR

SEQ ID NO: 12895 - protein, 16 aa, Homo Sapiens
AVTAAEFRIYKDYIRE

SEQ ID NO: 12896 - protein, 16 aa, Homo Sapiens
VTAAEFRIYKDYIRER

SEQ ID NO: 12897 - protein, 16 aa, Homo Sapiens
TAAEFRIYKDYIRERF

SEQ ID NO: 12898 - protein, 16 aa, Homo Sapiens
AAEFRIYKDYIRERFD

SEQ ID NO: 12899 - protein, 16 aa, Homo Sapiens
AEFRIYKDYIRERFDN

SEQ ID NO: 12900 - protein, 16 aa, Homo Sapiens
EFRIYKDYIRERFDNE

SEQ ID NO: 12901 - protein, 16 aa, Homo Sapiens
FRIYKDYIRERFDNET

SEQ ID NO: 12902 - protein, 16 aa, Homo Sapiens
RIYKDYIRERFDNETF

SEQ ID NO: 12903 - protein, 16 aa, Homo Sapiens
IYKDYIRERFDNETFR

SEQ ID NO: 12904 - protein, 16 aa, Homo Sapiens
YKDYIRERFDNETFRI

SEQ ID NO: 12905 - protein, 16 aa, Homo Sapiens
KDYIRERFDNETFRIS

SEQ ID NO: 12906 - protein, 16 aa, Homo Sapiens
DYIRERFDNETFRISV

SEQ ID NO: 12907 - protein, 16 aa, Homo Sapiens
YIRERFDNETFRISVY

SEQ ID NO: 12908 - protein, 16 aa, Homo Sapiens
IRERFDNETFRISVYQ

SEQ ID NO: 12909 - protein, 16 aa, Homo Sapiens
RERFDNETFRISVYQV

SEQ ID NO: 12910 - protein, 16 aa, Homo Sapiens
ERFDNETFRISVYQVL

SEQ ID NO: 12911 - protein, 16 aa, Homo Sapiens
RFDNETFRISVYQVLQ

SEQ ID NO: 12912 - protein, 16 aa, Homo Sapiens
FDNETFRISVYQVLQE

SEQ ID NO: 12913 - protein, 16 aa, Homo Sapiens
DNETFRISVYQVLQEH

SEQ ID NO: 12914 - protein, 16 aa, Homo Sapiens
NETFRISVYQVLQEHL

SEQ ID NO: 12915 - protein, 16 aa, Homo Sapiens
ETFRISVYQVLQEHLG

SEQ ID NO: 12916 - protein, 16 aa, Homo Sapiens
TFRISVYQVLQEHLGR

SEQ ID NO: 12917 - protein, 16 aa, Homo Sapiens
FRISVYQVLQEHLGRE

SEQ ID NO: 12918 - protein, 16 aa, Homo Sapiens
RISVYQVLQEHLGRES

SEQ ID NO: 12919 - protein, 16 aa, Homo Sapiens
ISVYQVLQEHLGRESD

SEQ ID NO: 12920 - protein, 16 aa, Homo Sapiens
SVYQVLQEHLGRESDL

SEQ ID NO: 12921 - protein, 16 aa, Homo Sapiens
VYQVLQEHLGRESDLF

SEQ ID NO: 12922 - protein, 16 aa, Homo Sapiens
YQVLQEHLGRESDLFL

SEQ ID NO: 12923 - protein, 16 aa, Homo Sapiens
QVLQEHLGRESDLFLL

SEQ ID NO: 12924 - protein, 16 aa, Homo Sapiens
VLQEHLGRESDLFLLD

SEQ ID NO: 12925 - protein, 16 aa, Homo Sapiens
LQEHLGRESDLFLLDS

SEQ ID NO: 12926 - protein, 16 aa, Homo Sapiens
QEHLGRESDLFLLDSR

SEQ ID NO: 12927 - protein, 16 aa, Homo Sapiens
EHLGRESDLFLLDSRT

SEQ ID NO: 12928 - protein, 16 aa, Homo Sapiens
HLGRESDLFLLDSRTL

SEQ ID NO: 12929 - protein, 16 aa, Homo Sapiens
LGRESDLFLLDSRTLW

SEQ ID NO: 12930 - protein, 16 aa, Homo Sapiens
GRESDLFLLDSRTLWA

SEQ ID NO: 12931 - protein, 16 aa, Homo Sapiens
RESDLFLLDSRTLWAS

SEQ ID NO: 12932 - protein, 16 aa, Homo Sapiens
ESDLFLLDSRTLWASE

SEQ ID NO: 12933 - protein, 16 aa, Homo Sapiens
SDLFLLDSRTLWASEE

SEQ ID NO: 12934 - protein, 16 aa, Homo Sapiens
DLFLLDSRTLWASEEG

SEQ ID NO: 12935 - protein, 16 aa, Homo Sapiens
LFLLDSRTLWASEEGW

SEQ ID NO: 12936 - protein, 16 aa, Homo Sapiens
FLLDSRTLWASEEGWL

SEQ ID NO: 12937 - protein, 16 aa, Homo Sapiens
LLDSRTLWASEEGWLV

SEQ ID NO: 12938 - protein, 16 aa, Homo Sapiens
LDSRTLWASEEGWLVF

SEQ ID NO: 12939 - protein, 16 aa, Homo Sapiens
DSRTLWASEEGWLVFD

SEQ ID NO: 12940 - protein, 16 aa, Homo Sapiens
SRTLWASEEGWLVFDI

SEQ ID NO: 12941 - protein, 16 aa, Homo Sapiens
RTLWASEEGWLVFDIT

SEQ ID NO: 12942 - protein, 16 aa, Homo Sapiens
TLWASEEGWLVFDITA

SEQ ID NO: 12943 - protein, 16 aa, Homo Sapiens
LWASEEGWLVFDITAT

SEQ ID NO: 12944 - protein, 16 aa, Homo Sapiens
WASEEGWLVFDITATS

SEQ ID NO: 12945 - protein, 16 aa, Homo Sapiens
ASEEGWLVFDITATSN

SEQ ID NO: 12946 - protein, 16 aa, Homo Sapiens
SEEGWLVFDITATSNH

SEQ ID NO: 12947 - protein, 16 aa, Homo Sapiens
EEGWLVFDITATSNHW

SEQ ID NO: 12948 - protein, 16 aa, Homo Sapiens
EGWLVFDITATSNHWV

SEQ ID NO: 12949 - protein, 16 aa, Homo Sapiens
GWLVFDITATSNHWVV

SEQ ID NO: 12950 - protein, 16 aa, Homo Sapiens
WLVFDITATSNHWVVN

SEQ ID NO: 12951 - protein, 16 aa, Homo Sapiens
LVFDITATSNHWVVNP

SEQ ID NO: 12952 - protein, 16 aa, Homo Sapiens
VFDITATSNHWVVNPR

SEQ ID NO: 12953 - protein, 16 aa, Homo Sapiens
FDITATSNHWVVNPRH

SEQ ID NO: 12954 - protein, 16 aa, Homo Sapiens
DITATSNHWVVNPRHN

SEQ ID NO: 12955 - protein, 16 aa, Homo Sapiens
ITATSNHWVVNPRHNL

SEQ ID NO: 12956 - protein, 16 aa, Homo Sapiens
TATSNHWVVNPRHNLG

SEQ ID NO: 12957 - protein, 16 aa, Homo Sapiens
ATSNHWVVNPRHNLGL

SEQ ID NO: 12958 - protein, 16 aa, Homo Sapiens
TSNHWVVNPRHNLGLQ

SEQ ID NO: 12959 - protein, 16 aa, Homo Sapiens
SNHWVVNPRHNLGLQL

SEQ ID NO: 12960 - protein, 16 aa, Homo Sapiens
NHWVVNPRHNLGLQLS

SEQ ID NO: 12961 - protein, 16 aa, Homo Sapiens
HWVVNPRHNLGLQLSV

SEQ ID NO: 12962 - protein, 16 aa, Homo Sapiens
WVVNPRHNLGLQLSVE

SEQ ID NO: 12963 - protein, 16 aa, Homo Sapiens
VVNPRHNLGLQLSVET

SEQ ID NO: 12964 - protein, 16 aa, Homo Sapiens
VNPRHNLGLQLSVETL

SEQ ID NO: 12965 - protein, 16 aa, Homo Sapiens
NPRHNLGLQLSVETLD

SEQ ID NO: 12966 - protein, 16 aa, Homo Sapiens
PRHNLGLQLSVETLDG

SEQ ID NO: 12967 - protein, 16 aa, Homo Sapiens
RHNLGLQLSVETLDGQ

SEQ ID NO: 12968 - protein, 16 aa, Homo Sapiens
HNLGLQLSVETLDGQS

SEQ ID NO: 12969 - protein, 16 aa, Homo Sapiens
NLGLQLSVETLDGQSI

SEQ ID NO: 12970 - protein, 16 aa, Homo Sapiens
LGLQLSVETLDGQSIN

SEQ ID NO: 12971 - protein, 16 aa, Homo Sapiens
GLQLSVETLDGQSINP

SEQ ID NO: 12972 - protein, 16 aa, Homo Sapiens
LQLSVETLDGQSINPK

SEQ ID NO: 12973 - protein, 16 aa, Homo Sapiens
QLSVETLDGQSINPKL

SEQ ID NO: 12974 - protein, 16 aa, Homo Sapiens
LSVETLDGQSINPKLA

SEQ ID NO: 12975 - protein, 16 aa, Homo Sapiens
SVETLDGQSINPKLAG

SEQ ID NO: 12976 - protein, 16 aa, Homo Sapiens
VETLDGQSINPKLAGL

SEQ ID NO: 12977 - protein, 16 aa, Homo Sapiens
ETLDGQSINPKLAGLI

SEQ ID NO: 12978 - protein, 16 aa, Homo Sapiens
TLDGQSINPKLAGLIG

SEQ ID NO: 12979 - protein, 16 aa, Homo Sapiens
LDGQSINPKLAGLIGR

SEQ ID NO: 12980 - protein, 16 aa, Homo Sapiens
DGQSINPKLAGLIGRH

SEQ ID NO: 12981 - protein, 16 aa, Homo Sapiens
GQSINPKLAGLIGRHG

SEQ ID NO: 12982 - protein, 16 aa, Homo Sapiens
QSINPKLAGLIGRHGP

SEQ ID NO: 12983 - protein, 16 aa, Homo Sapiens
SINPKLAGLIGRHGPQ

SEQ ID NO: 12984 - protein, 16 aa, Homo Sapiens
INPKLAGLIGRHGPQN

SEQ ID NO: 12985 - protein, 16 aa, Homo Sapiens
NPKLAGLIGRHGPQNK

SEQ ID NO: 12986 - protein, 16 aa, Homo Sapiens
PKLAGLIGRHGPQNKQ

SEQ ID NO: 12987 - protein, 16 aa, Homo Sapiens
KLAGLIGRHGPQNKQP

SEQ ID NO: 12988 - protein, 16 aa, Homo Sapiens
LAGLIGRHGPQNKQPF

SEQ ID NO: 12989 - protein, 16 aa, Homo Sapiens
AGLIGRHGPQNKQPFM

SEQ ID NO: 12990 - protein, 16 aa, Homo Sapiens
GLIGRHGPQNKQPFMV

SEQ ID NO: 12991 - protein, 16 aa, Homo Sapiens
LIGRHGPQNKQPFMVA

SEQ ID NO: 12992 - protein, 16 aa, Homo Sapiens
IGRHGPQNKQPFMVAF

SEQ ID NO: 12993 - protein, 16 aa, Homo Sapiens
GRHGPQNKQPFMVAFF

SEQ ID NO: 12994 - protein, 16 aa, Homo Sapiens
RHGPQNKQPFMVAFFK

SEQ ID NO: 12995 - protein, 16 aa, Homo Sapiens
HGPQNKQPFMVAFFKA

SEQ ID NO: 12996 - protein, 16 aa, Homo Sapiens
GPQNKQPFMVAFFKAT

SEQ ID NO: 12997 - protein, 16 aa, Homo Sapiens
PQNKQPFMVAFFKATE

SEQ ID NO: 12998 - protein, 16 aa, Homo Sapiens
QNKQPFMVAFFKATEV

SEQ ID NO: 12999 - protein, 16 aa, Homo Sapiens
NKQPFMVAFFKATEVH

SEQ ID NO: 13000 - protein, 16 aa, Homo Sapiens
KQPFMVAFFKATEVHF

SEQ ID NO: 13001 - protein, 16 aa, Homo Sapiens
QPFMVAFFKATEVHFR

SEQ ID NO: 13002 - protein, 16 aa, Homo Sapiens
PFMVAFFKATEVHFRS

SEQ ID NO: 13003 - protein, 16 aa, Homo Sapiens
FMVAFFKATEVHFRSI

SEQ ID NO: 13004 - protein, 16 aa, Homo Sapiens
MVAFFKATEVHFRSIR

SEQ ID NO: 13005 - protein, 16 aa, Homo Sapiens
VAFFKATEVHFRSIRS

SEQ ID NO: 13006 - protein, 16 aa, Homo Sapiens
AFFKATEVHFRSIRST

SEQ ID NO: 13007 - protein, 16 aa, Homo Sapiens
FFKATEVHFRSIRSTG

SEQ ID NO: 13008 - protein, 16 aa, Homo Sapiens
FKATEVHFRSIRSTGS

SEQ ID NO: 13009 - protein, 16 aa, Homo Sapiens
KATEVHFRSIRSTGSK

SEQ ID NO: 13010 - protein, 16 aa, Homo Sapiens
ATEVHFRSIRSTGSKQ

SEQ ID NO: 13011 - protein, 16 aa, Homo Sapiens
TEVHFRSIRSTGSKQR

SEQ ID NO: 13012 - protein, 16 aa, Homo Sapiens
EVHFRSIRSTGSKQRS

SEQ ID NO: 13013 - protein, 16 aa, Homo Sapiens
VHFRSIRSTGSKQRSQ

SEQ ID NO: 13014 - protein, 16 aa, Homo Sapiens
HFRSIRSTGSKQRSQN

SEQ ID NO: 13015 - protein, 16 aa, Homo Sapiens
FRSIRSTGSKQRSQNR

SEQ ID NO: 13016 - protein, 16 aa, Homo Sapiens
RSIRSTGSKQRSQNRS

SEQ ID NO: 13017 - protein, 16 aa, Homo Sapiens
SIRSTGSKQRSQNRSK

SEQ ID NO: 13018 - protein, 16 aa, Homo Sapiens
IRSTGSKQRSQNRSKT

SEQ ID NO: 13019 - protein, 16 aa, Homo Sapiens
RSTGSKQRSQNRSKTP

SEQ ID NO: 13020 - protein, 16 aa, Homo Sapiens
STGSKQRSQNRSKTPK

SEQ ID NO: 13021 - protein, 16 aa, Homo Sapiens
TGSKQRSQNRSKTPKN

SEQ ID NO: 13022 - protein, 16 aa, Homo Sapiens
GSKQRSQNRSKTPKNQ

SEQ ID NO: 13023 - protein, 16 aa, Homo Sapiens
SKQRSQNRSKTPKNQE

SEQ ID NO: 13024 - protein, 16 aa, Homo Sapiens
KQRSQNRSKTPKNQEA

SEQ ID NO: 13025 - protein, 16 aa, Homo Sapiens
QRSQNRSKTPKNQEAL

SEQ ID NO: 13026 - protein, 16 aa, Homo Sapiens
RSQNRSKTPKNQEALR

SEQ ID NO: 13027 - protein, 16 aa, Homo Sapiens
SQNRSKTPKNQEALRM

SEQ ID NO: 13028 - protein, 16 aa, Homo Sapiens
QNRSKTPKNQEALRMA

SEQ ID NO: 13029 - protein, 16 aa, Homo Sapiens
NRSKTPKNQEALRMAN

SEQ ID NO: 13030 - protein, 16 aa, Homo Sapiens
RSKTPKNQEALRMANV

SEQ ID NO: 13031 - protein, 16 aa, Homo Sapiens
SKTPKNQEALRMANVA

SEQ ID NO: 13032 - protein, 16 aa, Homo Sapiens
KTPKNQEALRMANVAE

SEQ ID NO: 13033 - protein, 16 aa, Homo Sapiens
TPKNQEALRMANVAEN

SEQ ID NO: 13034 - protein, 16 aa, Homo Sapiens
PKNQEALRMANVAENS

SEQ ID NO: 13035 - protein, 16 aa, Homo Sapiens
KNQEALRMANVAENSS

SEQ ID NO: 13036 - protein, 16 aa, Homo Sapiens
NQEALRMANVAENSSS

SEQ ID NO: 13037 - protein, 16 aa, Homo Sapiens
QEALRMANVAENSSSD

SEQ ID NO: 13038 - protein, 16 aa, Homo Sapiens
EALRMANVAENSSSDQ

SEQ ID NO: 13039 - protein, 16 aa, Homo Sapiens
ALRMANVAENSSSDQR

SEQ ID NO: 13040 - protein, 16 aa, Homo Sapiens
LRMANVAENSSSDQRQ

SEQ ID NO: 13041 - protein, 16 aa, Homo Sapiens
RMANVAENSSSDQRQA

SEQ ID NO: 13042 - protein, 16 aa, Homo Sapiens
MANVAENSSSDQRQAC

SEQ ID NO: 13043 - protein, 16 aa, Homo Sapiens
ANVAENSSSDQRQACK

SEQ ID NO: 13044 - protein, 16 aa, Homo Sapiens
NVAENSSSDQRQACKK

SEQ ID NO: 13045 - protein, 16 aa, Homo Sapiens
VAENSSSDQRQACKKH

SEQ ID NO: 13046 - protein, 16 aa, Homo Sapiens
AENSSSDQRQACKKHE

SEQ ID NO: 13047 - protein, 16 aa, Homo Sapiens
ENSSSDQRQACKKHEL

SEQ ID NO: 13048 - protein, 16 aa, Homo Sapiens
NSSSDQRQACKKHELY

SEQ ID NO: 13049 - protein, 16 aa, Homo Sapiens
SSSDQRQACKKHELYV

SEQ ID NO: 13050 - protein, 16 aa, Homo Sapiens
SSDQRQACKKHELYVS

SEQ ID NO: 13051 - protein, 16 aa, Homo Sapiens
SDQRQACKKHELYVSF

SEQ ID NO: 13052 - protein, 16 aa, Homo Sapiens
DQRQACKKHELYVSFR

SEQ ID NO: 13053 - protein, 16 aa, Homo Sapiens
QRQACKKHELYVSFRD

SEQ ID NO: 13054 - protein, 16 aa, Homo Sapiens
RQACKKHELYVSFRDL

SEQ ID NO: 13055 - protein, 16 aa, Homo Sapiens
QACKKHELYVSFRDLG

SEQ ID NO: 13056 - protein, 16 aa, Homo Sapiens
ACKKHELYVSFRDLGW

SEQ ID NO: 13057 - protein, 16 aa, Homo Sapiens
CKKHELYVSFRDLGWQ

SEQ ID NO: 13058 - protein, 16 aa, Homo Sapiens
KKHELYVSFRDLGWQD

SEQ ID NO: 13059 - protein, 16 aa, Homo Sapiens
KHELYVSFRDLGWQDW

SEQ ID NO: 13060 - protein, 16 aa, Homo Sapiens
HELYVSFRDLGWQDWI

SEQ ID NO: 13061 - protein, 16 aa, Homo Sapiens
ELYVSFRDLGWQDWII

SEQ ID NO: 13062 - protein, 16 aa, Homo Sapiens
LYVSFRDLGWQDWIIA

SEQ ID NO: 13063 - protein, 16 aa, Homo Sapiens
YVSFRDLGWQDWIIAP

SEQ ID NO: 13064 - protein, 16 aa, Homo Sapiens
VSFRDLGWQDWIIAPE

SEQ ID NO: 13065 - protein, 16 aa, Homo Sapiens
SFRDLGWQDWIIAPEG

SEQ ID NO: 13066 - protein, 16 aa, Homo Sapiens
FRDLGWQDWIIAPEGY

SEQ ID NO: 13067 - protein, 16 aa, Homo Sapiens
RDLGWQDWIIAPEGYA

SEQ ID NO: 13068 - protein, 16 aa, Homo Sapiens
DLGWQDWIIAPEGYAA

SEQ ID NO: 13069 - protein, 16 aa, Homo Sapiens
LGWQDWIIAPEGYAAY

SEQ ID NO: 13070 - protein, 16 aa, Homo Sapiens
GWQDWIIAPEGYAAYY

SEQ ID NO: 13071 - protein, 16 aa, Homo Sapiens
WQDWIIAPEGYAAYYC

SEQ ID NO: 13072 - protein, 16 aa, Homo Sapiens
QDWIIAPEGYAAYYCE

SEQ ID NO: 13073 - protein, 16 aa, Homo Sapiens
DWIIAPEGYAAYYCEG

SEQ ID NO: 13074 - protein, 16 aa, Homo Sapiens
WIIAPEGYAAYYCEGE

SEQ ID NO: 13075 - protein, 16 aa, Homo Sapiens
IIAPEGYAAYYCEGEC

SEQ ID NO: 13076 - protein, 16 aa, Homo Sapiens
IAPEGYAAYYCEGECA

SEQ ID NO: 13077 - protein, 16 aa, Homo Sapiens
APEGYAAYYCEGECAF

SEQ ID NO: 13078 - protein, 16 aa, Homo Sapiens
PEGYAAYYCEGECAFP

SEQ ID NO: 13079 - protein, 16 aa, Homo Sapiens
EGYAAYYCEGECAFPL

SEQ ID NO: 13080 - protein, 16 aa, Homo Sapiens
GYAAYYCEGECAFPLN

SEQ ID NO: 13081 - protein, 16 aa, Homo Sapiens
YAAYYCEGECAFPLNS

SEQ ID NO: 13082 - protein, 16 aa, Homo Sapiens
AAYYCEGECAFPLNSY

SEQ ID NO: 13083 - protein, 16 aa, Homo Sapiens
AYYCEGECAFPLNSYM

SEQ ID NO: 13084 - protein, 16 aa, Homo Sapiens
YYCEGECAFPLNSYMN

SEQ ID NO: 13085 - protein, 16 aa, Homo Sapiens
YCEGECAFPLNSYMNA

SEQ ID NO: 13086 - protein, 16 aa, Homo Sapiens
CEGECAFPLNSYMNAT

SEQ ID NO: 13087 - protein, 16 aa, Homo Sapiens
EGECAFPLNSYMNATN

SEQ ID NO: 13088 - protein, 16 aa, Homo Sapiens
GECAFPLNSYMNATNH

SEQ ID NO: 13089 - protein, 16 aa, Homo Sapiens
ECAFPLNSYMNATNHA

SEQ ID NO: 13090 - protein, 16 aa, Homo Sapiens
CAFPLNSYMNATNHAI

SEQ ID NO: 13091 - protein, 16 aa, Homo Sapiens
AFPLNSYMNATNHAIV

SEQ ID NO: 13092 - protein, 16 aa, Homo Sapiens
FPLNSYMNATNHAIVQ

SEQ ID NO: 13093 - protein, 16 aa, Homo Sapiens
PLNSYMNATNHAIVQT

SEQ ID NO: 13094 - protein, 16 aa, Homo Sapiens
LNSYMNATNHAIVQTL

SEQ ID NO: 13095 - protein, 16 aa, Homo Sapiens
NSYMNATNHAIVQTLV

SEQ ID NO: 13096 - protein, 16 aa, Homo Sapiens
SYMNATNHAIVQTLVH

SEQ ID NO: 13097 - protein, 16 aa, Homo Sapiens
YMNATNHAIVQTLVHF

SEQ ID NO: 13098 - protein, 16 aa, Homo Sapiens
MNATNHAIVQTLVHFI

SEQ ID NO: 13099 - protein, 16 aa, Homo Sapiens
NATNHAIVQTLVHFIN

SEQ ID NO: 13100 - protein, 16 aa, Homo Sapiens
ATNHAIVQTLVHFINP

SEQ ID NO: 13101 - protein, 16 aa, Homo Sapiens
TNHAIVQTLVHFINPE

SEQ ID NO: 13102 - protein, 16 aa, Homo Sapiens
NHAIVQTLVHFINPET

SEQ ID NO: 13103 - protein, 16 aa, Homo Sapiens
HAIVQTLVHFINPETV

SEQ ID NO: 13104 - protein, 16 aa, Homo Sapiens
AIVQTLVHFINPETVP

SEQ ID NO: 13105 - protein, 16 aa, Homo Sapiens
IVQTLVHFINPETVPK

SEQ ID NO: 13106 - protein, 16 aa, Homo Sapiens
VQTLVHFINPETVPKP

SEQ ID NO: 13107 - protein, 16 aa, Homo Sapiens
QTLVHFINPETVPKPC

SEQ ID NO: 13108 - protein, 16 aa, Homo Sapiens
TLVHFINPETVPKPCC

SEQ ID NO: 13109 - protein, 16 aa, Homo Sapiens
LVHFINPETVPKPCCA

SEQ ID NO: 13110 - protein, 16 aa, Homo Sapiens
VHFINPETVPKPCCAP

SEQ ID NO: 13111 - protein, 16 aa, Homo Sapiens
HFINPETVPKPCCAPT

SEQ ID NO: 13112 - protein, 16 aa, Homo Sapiens
FINPETVPKPCCAPTQ

SEQ ID NO: 13113 - protein, 16 aa, Homo Sapiens
INPETVPKPCCAPTQL

SEQ ID NO: 13114 - protein, 16 aa, Homo Sapiens
NPETVPKPCCAPTQLN

SEQ ID NO: 13115 - protein, 16 aa, Homo Sapiens
PETVPKPCCAPTQLNA

SEQ ID NO: 13116 - protein, 16 aa, Homo Sapiens
ETVPKPCCAPTQLNAI

SEQ ID NO: 13117 - protein, 16 aa, Homo Sapiens
TVPKPCCAPTQLNAIS

SEQ ID NO: 13118 - protein, 16 aa, Homo Sapiens
VPKPCCAPTQLNAISV

SEQ ID NO: 13119 - protein, 16 aa, Homo Sapiens
PKPCCAPTQLNAISVL

SEQ ID NO: 13120 - protein, 16 aa, Homo Sapiens
KPCCAPTQLNAISVLY

SEQ ID NO: 13121 - protein, 16 aa, Homo Sapiens
PCCAPTQLNAISVLYF

SEQ ID NO: 13122 - protein, 16 aa, Homo Sapiens
CCAPTQLNAISVLYFD

SEQ ID NO: 13123 - protein, 16 aa, Homo Sapiens
CAPTQLNAISVLYFDD

SEQ ID NO: 13124 - protein, 16 aa, Homo Sapiens
APTQLNAISVLYFDDS

SEQ ID NO: 13125 - protein, 16 aa, Homo Sapiens
PTQLNAISVLYFDDSS

SEQ ID NO: 13126 - protein, 16 aa, Homo Sapiens
TQLNAISVLYFDDSSN

SEQ ID NO: 13127 - protein, 16 aa, Homo Sapiens
QLNAISVLYFDDSSNV

SEQ ID NO: 13128 - protein, 16 aa, Homo Sapiens
LNAISVLYFDDSSNVI

SEQ ID NO: 13129 - protein, 16 aa, Homo Sapiens
NAISVLYFDDSSNVIL

SEQ ID NO: 13130 - protein, 16 aa, Homo Sapiens
AISVLYFDDSSNVILK

SEQ ID NO: 13131 - protein, 16 aa, Homo Sapiens
ISVLYFDDSSNVILKK

SEQ ID NO: 13132 - protein, 16 aa, Homo Sapiens
SVLYFDDSSNVILKKY

SEQ ID NO: 13133 - protein, 16 aa, Homo Sapiens
VLYFDDSSNVILKKYR

SEQ ID NO: 13134 - protein, 16 aa, Homo Sapiens
LYFDDSSNVILKKYRN

SEQ ID NO: 13135 - protein, 16 aa, Homo Sapiens
YFDDSSNVILKKYRNM

SEQ ID NO: 13136 - protein, 16 aa, Homo Sapiens
FDDSSNVILKKYRNMV

SEQ ID NO: 13137 - protein, 16 aa, Homo Sapiens
DDSSNVILKKYRNMVV

SEQ ID NO: 13138 - protein, 16 aa, Homo Sapiens
DSSNVILKKYRNMVVR

SEQ ID NO: 13139 - protein, 16 aa, Homo Sapiens
SSNVILKKYRNMVVRA

SEQ ID NO: 13140 - protein, 16 aa, Homo Sapiens
SNVILKKYRNMVVRAC

SEQ ID NO: 13141 - protein, 16 aa, Homo Sapiens
NVILKKYRNMVVRACG

SEQ ID NO: 13142 - protein, 16 aa, Homo Sapiens
VILKKYRNMVVRACGC

SEQ ID NO: 13143 - protein, 16 aa, Homo Sapiens
ILKKYRNMVVRACGCH

SEQ ID NO: 13144 - protein, 661 aa, Homo Sapiens
MDLVLKRCLLHLAVIGALLAVGATKVPRNQDWLGVSRQLRTKAWNRQLYPEWTEAQRLDCWRGGQVSLKVSNDGPTLIGANASFSIALNFPGSQKVLPDGQVIWVNNTIINGSQVWGGQPVYPQETDDACIFPDGGPCPSGSWSQKRSFVYVWKTWGQYWQVLGGPVSGLSIGTGRAMLGTHTMEVTVYHRRGSRSYVPLAHSSSAFTITDQVPFSVSVSQLRALDGGNKHFLRNQPLTFALQLHDPSGYLAEADLSYTWDFGDSSGTLISRALVVTHTYLEPGPVTAQVVLQAAIPLTSCGSSPVPGTTDGHRPTAEAPNTTAGQVPTTEVVGTTPGQAPTAEPSGTTSVQVPTTEVISTAPVQMPTAESTGMTPEKVPVSEVMGTTLAEMSTPEATGMTPAEVSIVVLSGTTAAQVTTTEWVETTARELPIPEPEGPDASSIMSTESITGSLGPLLDGTATLRLVKRQVPLDCVLYRYGSFSVTLDIVQGIESAEILQAVPSGEGDAFELTVSCQGGLPKEACMEISSPGCQPPAQRLCQPVLPSPACQLVLHQILKGGSGTYCLNVSLADTNSLAVVSTQLIMPGQEAGLGQVPLIVGILLVLMAVVLASLIYRRRLMKQDFSVPQLPHSSSHWLRLPRIFCSCPIGENSPLLSGQQV

SEQ ID NO: 13145 - protein, 8 aa, Homo Sapiens
LVLKRCLL

SEQ ID NO: 13146 - protein, 8 aa, Homo Sapiens
RCLLHLAV

SEQ ID NO: 13147 - protein, 8 aa, Homo Sapiens
CLLHLAVI

SEQ ID NO: 13148 - protein, 8 aa, Homo Sapiens
HLAVIGAL

SEQ ID NO: 13149 - protein, 8 aa, Homo Sapiens
LAVIGALL

SEQ ID NO: 13150 - protein, 8 aa, Homo Sapiens
AVIGALLA

SEQ ID NO: 13151 - protein, 8 aa, Homo Sapiens
VIGALLAV

SEQ ID NO: 13152 - protein, 8 aa, Homo Sapiens
ALLAVGAT

SEQ ID NO: 13153 - protein, 8 aa, Homo Sapiens
LLAVGATK

SEQ ID NO: 13154 - protein, 8 aa, Homo Sapiens
LAVGATKV

SEQ ID NO: 13155 - protein, 8 aa, Homo Sapiens
VPRNQDWL

SEQ ID NO: 13156 - protein, 8 aa, Homo Sapiens
WLGVSRQL

SEQ ID NO: 13157 - protein, 8 aa, Homo Sapiens
VSRQLRTK

SEQ ID NO: 13158 - protein, 8 aa, Homo Sapiens
RQLRTKAW

SEQ ID NO: 13159 - protein, 8 aa, Homo Sapiens
RTKAWNRQ

SEQ ID NO: 13160 - protein, 8 aa, Homo Sapiens
KAWNRQLY

SEQ ID NO: 13161 - protein, 8 aa, Homo Sapiens
RQLYPEWT

SEQ ID NO: 13162 - protein, 8 aa, Homo Sapiens
QLYPEWTE

SEQ ID NO: 13163 - protein, 8 aa, Homo Sapiens
YPEWTEAQ

SEQ ID NO: 13164 - protein, 8 aa, Homo Sapiens
AQRLDCWR

SEQ ID NO: 13165 - protein, 8 aa, Homo Sapiens
DCWRGGQV

SEQ ID NO: 13166 - protein, 8 aa, Homo Sapiens
WRGGQVSL

SEQ ID NO: 13167 - protein, 8 aa, Homo Sapiens
RGGQVSLK

SEQ ID NO: 13168 - protein, 8 aa, Homo Sapiens
GANASFSI

SEQ ID NO: 13169 - protein, 8 aa, Homo Sapiens
NASFSIAL

SEQ ID NO: 13170 - protein, 8 aa, Homo Sapiens
SFSIALNF

SEQ ID NO: 13171 - protein, 8 aa, Homo Sapiens
NFPGSQKV

SEQ ID NO: 13172 - protein, 8 aa, Homo Sapiens
FPGSQKVL

SEQ ID NO: 13173 - protein, 8 aa, Homo Sapiens
KVLPDGQV

SEQ ID NO: 13174 - protein, 8 aa, Homo Sapiens
VLPDGQVI

SEQ ID NO: 13175 - protein, 8 aa, Homo Sapiens
LPDGQVIW

SEQ ID NO: 13176 - protein, 8 aa, Homo Sapiens
QVIWVNNT

SEQ ID NO: 13177 - protein, 8 aa, Homo Sapiens
VIWVNNTI

SEQ ID NO: 13178 - protein, 8 aa, Homo Sapiens
IWVNNTII

SEQ ID NO: 13179 - protein, 8 aa, Homo Sapiens
TIINGSQV

SEQ ID NO: 13180 - protein, 8 aa, Homo Sapiens
IINGSQVW

SEQ ID NO: 13181 - protein, 8 aa, Homo Sapiens
QVWGGQPV

SEQ ID NO: 13182 - protein, 8 aa, Homo Sapiens
VWGGQPVY

SEQ ID NO: 13183 - protein, 8 aa, Homo Sapiens
YPQETDDA

SEQ ID NO: 13184 - protein, 8 aa, Homo Sapiens
ETDDACIF

SEQ ID NO: 13185 - protein, 8 aa, Homo Sapiens
GPCPSGSW

SEQ ID NO: 13186 - protein, 8 aa, Homo Sapiens
SWSQKRSF

SEQ ID NO: 13187 - protein, 8 aa, Homo Sapiens
WSQKRSFV

SEQ ID NO: 13188 - protein, 8 aa, Homo Sapiens
SQKRSFVY

SEQ ID NO: 13189 - protein, 8 aa, Homo Sapiens
KRSFVYVW

SEQ ID NO: 13190 - protein, 8 aa, Homo Sapiens
RSFVYVWK

SEQ ID NO: 13191 - protein, 8 aa, Homo Sapiens
FVYVWKTW

SEQ ID NO: 13192 - protein, 8 aa, Homo Sapiens
YVWKTWGQ

SEQ ID NO: 13193 - protein, 8 aa, Homo Sapiens
VWKTWGQY

SEQ ID NO: 13194 - protein, 8 aa, Homo Sapiens
KTWGQYWQ

SEQ ID NO: 13195 - protein, 8 aa, Homo Sapiens
WQVLGGPV

SEQ ID NO: 13196 - protein, 8 aa, Homo Sapiens
GPVSGLSI

SEQ ID NO: 13197 - protein, 8 aa, Homo Sapiens
AMLGTHTM

SEQ ID NO: 13198 - protein, 8 aa, Homo Sapiens
HTMEVTVY

SEQ ID NO: 13199 - protein, 8 aa, Homo Sapiens
MEVTVYHR

SEQ ID NO: 13200 - protein, 8 aa, Homo Sapiens
EVTVYHRR

SEQ ID NO: 13201 - protein, 8 aa, Homo Sapiens
VYHRRGSR

SEQ ID NO: 13202 - protein, 8 aa, Homo Sapiens
HRRGSRSY

SEQ ID NO: 13203 - protein, 8 aa, Homo Sapiens
RRGSRSYV

SEQ ID NO: 13204 - protein, 8 aa, Homo Sapiens
RSYVPLAH

SEQ ID NO: 13205 - protein, 8 aa, Homo Sapiens
PLAHSSSA

SEQ ID NO: 13206 - protein, 8 aa, Homo Sapiens
LAHSSSAF

SEQ ID NO: 13207 - protein, 8 aa, Homo Sapiens
HSSSAFTI

SEQ ID NO: 13208 - protein, 8 aa, Homo Sapiens
TITDQVPF

SEQ ID NO: 13209 - protein, 8 aa, Homo Sapiens
QVPFSVSV

SEQ ID NO: 13210 - protein, 8 aa, Homo Sapiens
VPFSVSVS

SEQ ID NO: 13211 - protein, 8 aa, Homo Sapiens
FSVSVSQL

SEQ ID NO: 13212 - protein, 8 aa, Homo Sapiens
SVSVSQLR

SEQ ID NO: 13213 - protein, 8 aa, Homo Sapiens
SVSQLRAL

SEQ ID NO: 13214 - protein, 8 aa, Homo Sapiens
RALDGGNK

SEQ ID NO: 13215 - protein, 8 aa, Homo Sapiens
GGNKHFLR

SEQ ID NO: 13216 - protein, 8 aa, Homo Sapiens
FLRNQPLT

SEQ ID NO: 13217 - protein, 8 aa, Homo Sapiens
NQPLTFAL

SEQ ID NO: 13218 - protein, 8 aa, Homo Sapiens
PLTFALQL

SEQ ID NO: 13219 - protein, 8 aa, Homo Sapiens
QLHDPSGY

SEQ ID NO: 13220 - protein, 8 aa, Homo Sapiens
LHDPSGYL

SEQ ID NO: 13221 - protein, 8 aa, Homo Sapiens
GYLAEADL

SEQ ID NO: 13222 - protein, 8 aa, Homo Sapiens
YLAEADLS

SEQ ID NO: 13223 - protein, 8 aa, Homo Sapiens
LAEADLSY

SEQ ID NO: 13224 - protein, 8 aa, Homo Sapiens
AEADLSYT

SEQ ID NO: 13225 - protein, 8 aa, Homo Sapiens
EADLSYTW

SEQ ID NO: 13226 - protein, 8 aa, Homo Sapiens
DLSYTWDF

SEQ ID NO: 13227 - protein, 8 aa, Homo Sapiens
SSGTLISR

SEQ ID NO: 13228 - protein, 8 aa, Homo Sapiens
TLISRALV

SEQ ID NO: 13229 - protein, 8 aa, Homo Sapiens
LISRALVV

SEQ ID NO: 13230 - protein, 8 aa, Homo Sapiens
ALVVTHTY

SEQ ID NO: 13231 - protein, 8 aa, Homo Sapiens
LVVTHTYL

SEQ ID NO: 13232 - protein, 8 aa, Homo Sapiens
YLEPGPVT

SEQ ID NO: 13233 - protein, 8 aa, Homo Sapiens
GPVTAQVV

SEQ ID NO: 13234 - protein, 8 aa, Homo Sapiens
AQVVLQAA

SEQ ID NO: 13235 - protein, 8 aa, Homo Sapiens
QVVLQAAI

SEQ ID NO: 13236 - protein, 8 aa, Homo Sapiens
VLQAAIPL

SEQ ID NO: 13237 - protein, 8 aa, Homo Sapiens
LQAAIPLT

SEQ ID NO: 13238 - protein, 8 aa, Homo Sapiens
AAIPLTSC

SEQ ID NO: 13239 - protein, 8 aa, Homo Sapiens
IPLTSCGS

SEQ ID NO: 13240 - protein, 8 aa, Homo Sapiens
TSCGSSPV

SEQ ID NO: 13241 - protein, 8 aa, Homo Sapiens
AEAPNTTA

SEQ ID NO: 13242 - protein, 8 aa, Homo Sapiens
TTAGQVPT

SEQ ID NO: 13243 - protein, 8 aa, Homo Sapiens
GQVPTTEV

SEQ ID NO: 13244 - protein, 8 aa, Homo Sapiens
QVPTTEVV

SEQ ID NO: 13245 - protein, 8 aa, Homo Sapiens
TTPGQAPT

SEQ ID NO: 13246 - protein, 8 aa, Homo Sapiens
TPGQAPTA

SEQ ID NO: 13247 - protein, 8 aa, Homo Sapiens
EPSGTTSV

SEQ ID NO: 13248 - protein, 8 aa, Homo Sapiens
TTSVQVPT

SEQ ID NO: 13249 - protein, 8 aa, Homo Sapiens
VQVPTTEV

SEQ ID NO: 13250 - protein, 8 aa, Homo Sapiens
QVPTTEVI

SEQ ID NO: 13251 - protein, 8 aa, Homo Sapiens
EVISTAPV

SEQ ID NO: 13252 - protein, 8 aa, Homo Sapiens
APVQMPTA

SEQ ID NO: 13253 - protein, 8 aa, Homo Sapiens
VQMPTAES

SEQ ID NO: 13254 - protein, 8 aa, Homo Sapiens
PTAESTGM

SEQ ID NO: 13255 - protein, 8 aa, Homo Sapiens
STGMTPEK

SEQ ID NO: 13256 - protein, 8 aa, Homo Sapiens
TGMTPEKV

SEQ ID NO: 13257 - protein, 8 aa, Homo Sapiens
MTPEKVPV

SEQ ID NO: 13258 - protein, 8 aa, Homo Sapiens
EKVPVSEV

SEQ ID NO: 13259 - protein, 8 aa, Homo Sapiens
KVPVSEVM

SEQ ID NO: 13260 - protein, 8 aa, Homo Sapiens
SEVMGTTL

SEQ ID NO: 13261 - protein, 8 aa, Homo Sapiens
EVMGTTLA

SEQ ID NO: 13262 - protein, 8 aa, Homo Sapiens
AEMSTPEA

SEQ ID NO: 13263 - protein, 8 aa, Homo Sapiens
STPEATGM

SEQ ID NO: 13264 - protein, 8 aa, Homo Sapiens
EATGMTPA

SEQ ID NO: 13265 - protein, 8 aa, Homo Sapiens
TGMTPAEV

SEQ ID NO: 13266 - protein, 8 aa, Homo Sapiens
MTPAEVSI

SEQ ID NO: 13267 - protein, 8 aa, Homo Sapiens
TPAEVSIV

SEQ ID NO: 13268 - protein, 8 aa, Homo Sapiens
AEVSIVVL

SEQ ID NO: 13269 - protein, 8 aa, Homo Sapiens
VVLSGTTA

SEQ ID NO: 13270 - protein, 8 aa, Homo Sapiens
VLSGTTAA

SEQ ID NO: 13271 - protein, 8 aa, Homo Sapiens
TTAAQVTT

SEQ ID NO: 13272 - protein, 8 aa, Homo Sapiens
QVTTTEWV

SEQ ID NO: 13273 - protein, 8 aa, Homo Sapiens
EWVETTAR

SEQ ID NO: 13274 - protein, 8 aa, Homo Sapiens
VETTAREL

SEQ ID NO: 13275 - protein, 8 aa, Homo Sapiens
TTARELPI

SEQ ID NO: 13276 - protein, 8 aa, Homo Sapiens
EPEGPDAS

SEQ ID NO: 13277 - protein, 8 aa, Homo Sapiens
EGPDASSI

SEQ ID NO: 13278 - protein, 8 aa, Homo Sapiens
GPDASSIM

SEQ ID NO: 13279 - protein, 8 aa, Homo Sapiens
SIMSTESI

SEQ ID NO: 13280 - protein, 8 aa, Homo Sapiens
PLLDGTAT

SEQ ID NO: 13281 - protein, 8 aa, Homo Sapiens
LLDGTATL

SEQ ID NO: 13282 - protein, 8 aa, Homo Sapiens
GTATLRLV

SEQ ID NO: 13283 - protein, 8 aa, Homo Sapiens
TATLRLVK

SEQ ID NO: 13284 - protein, 8 aa, Homo Sapiens
ATLRLVKR

SEQ ID NO: 13285 - protein, 8 aa, Homo Sapiens
LVKRQVPL

SEQ ID NO: 13286 - protein, 8 aa, Homo Sapiens
RQVPLDCV

SEQ ID NO: 13287 - protein, 8 aa, Homo Sapiens
QVPLDCVL

SEQ ID NO: 13288 - protein, 8 aa, Homo Sapiens
VPLDCVLY

SEQ ID NO: 13289 - protein, 8 aa, Homo Sapiens
VLYRYGSF

SEQ ID NO: 13290 - protein, 8 aa, Homo Sapiens
YRYGSFSV

SEQ ID NO: 13291 - protein, 8 aa, Homo Sapiens
FSVTLDIV

SEQ ID NO: 13292 - protein, 8 aa, Homo Sapiens
TLDIVQGI

SEQ ID NO: 13293 - protein, 8 aa, Homo Sapiens
ESAEILQA

SEQ ID NO: 13294 - protein, 8 aa, Homo Sapiens
SAEILQAV

SEQ ID NO: 13295 - protein, 8 aa, Homo Sapiens
AEILQAVP

SEQ ID NO: 13296 - protein, 8 aa, Homo Sapiens
GEGDAFEL

SEQ ID NO: 13297 - protein, 8 aa, Homo Sapiens
TVSCQGGL

SEQ ID NO: 13298 - protein, 8 aa, Homo Sapiens
SCQGGLPK

SEQ ID NO: 13299 - protein, 8 aa, Homo Sapiens
GLPKEACM

SEQ ID NO: 13300 - protein, 8 aa, Homo Sapiens
AQRLCQPV

SEQ ID NO: 13301 - protein, 8 aa, Homo Sapiens
QRLCQPVL

SEQ ID NO: 13302 - protein, 8 aa, Homo Sapiens
QPVLPSPA

SEQ ID NO: 13303 - protein, 8 aa, Homo Sapiens
VLPSPACQ

SEQ ID NO: 13304 - protein, 8 aa, Homo Sapiens
LPSPACQL

SEQ ID NO: 13305 - protein, 8 aa, Homo Sapiens
SPACQLVL

SEQ ID NO: 13306 - protein, 8 aa, Homo Sapiens
CQLVLHQI

SEQ ID NO: 13307 - protein, 8 aa, Homo Sapiens
QLVLHQIL

SEQ ID NO: 13308 - protein, 8 aa, Homo Sapiens
LVLHQILK

SEQ ID NO: 13309 - protein, 8 aa, Homo Sapiens
ILKGGSGT

SEQ ID NO: 13310 - protein, 8 aa, Homo Sapiens
TYCLNVSL

SEQ ID NO: 13311 - protein, 8 aa, Homo Sapiens
SLADTNSL

SEQ ID NO: 13312 - protein, 8 aa, Homo Sapiens
DTNSLAVV

SEQ ID NO: 13313 - protein, 8 aa, Homo Sapiens
SLAVVSTQ

SEQ ID NO: 13314 - protein, 8 aa, Homo Sapiens
LAVVSTQL

SEQ ID NO: 13315 - protein, 8 aa, Homo Sapiens
AVVSTQLI

SEQ ID NO: 13316 - protein, 8 aa, Homo Sapiens
VVSTQLIM

SEQ ID NO: 13317 - protein, 8 aa, Homo Sapiens
LIMPGQEA

SEQ ID NO: 13318 - protein, 8 aa, Homo Sapiens
MPGQEAGL

SEQ ID NO: 13319 - protein, 8 aa, Homo Sapiens
GLGQVPLI

SEQ ID NO: 13320 - protein, 8 aa, Homo Sapiens
QVPLIVGI

SEQ ID NO: 13321 - protein, 8 aa, Homo Sapiens
VPLIVGIL

SEQ ID NO: 13322 - protein, 8 aa, Homo Sapiens
PLIVGILL

SEQ ID NO: 13323 - protein, 8 aa, Homo Sapiens
LIVGILLV

SEQ ID NO: 13324 - protein, 8 aa, Homo Sapiens
GILLVLMA

SEQ ID NO: 13325 - protein, 8 aa, Homo Sapiens
ILLVLMAV

SEQ ID NO: 13326 - protein, 8 aa, Homo Sapiens
LLVLMAVV

SEQ ID NO: 13327 - protein, 8 aa, Homo Sapiens
LVLMAVVL

SEQ ID NO: 13328 - protein, 8 aa, Homo Sapiens
VLMAVVLA

SEQ ID NO: 13329 - protein, 8 aa, Homo Sapiens
LMAVVLAS

SEQ ID NO: 13330 - protein, 8 aa, Homo Sapiens
MAVVLASL

SEQ ID NO: 13331 - protein, 8 aa, Homo Sapiens
AVVLASLI

SEQ ID NO: 13332 - protein, 8 aa, Homo Sapiens
VVLASLIY

SEQ ID NO: 13333 - protein, 8 aa, Homo Sapiens
VLASLIYR

SEQ ID NO: 13334 - protein, 8 aa, Homo Sapiens
LASLIYRR

SEQ ID NO: 13335 - protein, 8 aa, Homo Sapiens
ASLIYRRR

SEQ ID NO: 13336 - protein, 8 aa, Homo Sapiens
SLIYRRRL

SEQ ID NO: 13337 - protein, 8 aa, Homo Sapiens
LIYRRRLM

SEQ ID NO: 13338 - protein, 8 aa, Homo Sapiens
IYRRRLMK

SEQ ID NO: 13339 - protein, 8 aa, Homo Sapiens
RRLMKQDF

SEQ ID NO: 13340 - protein, 8 aa, Homo Sapiens
RLMKQDFS

SEQ ID NO: 13341 - protein, 8 aa, Homo Sapiens
LMKQDFSV

SEQ ID NO: 13342 - protein, 8 aa, Homo Sapiens
LPHSSSHW

SEQ ID NO: 13343 - protein, 8 aa, Homo Sapiens
HSSSHWLR

SEQ ID NO: 13344 - protein, 8 aa, Homo Sapiens
SHWLRLPR

SEQ ID NO: 13345 - protein, 8 aa, Homo Sapiens
HWLRLPRI

SEQ ID NO: 13346 - protein, 8 aa, Homo Sapiens
WLRLPRIF

SEQ ID NO: 13347 - protein, 8 aa, Homo Sapiens
LPRIFCSC

SEQ ID NO: 13348 - protein, 8 aa, Homo Sapiens
RIFCSCPI

SEQ ID NO: 13349 - protein, 8 aa, Homo Sapiens
PIGENSPL

SEQ ID NO: 13350 - protein, 8 aa, Homo Sapiens
PLLSGQQV

SEQ ID NO: 13351 - protein, 9 aa, Homo Sapiens
DLVLKRCLL

SEQ ID NO: 13352 - protein, 9 aa, Homo Sapiens
LVLKRCLLH

SEQ ID NO: 13353 - protein, 9 aa, Homo Sapiens
VLKRCLLHL

SEQ ID NO: 13354 - protein, 9 aa, Homo Sapiens
LLHLAVIGA

SEQ ID NO: 13355 - protein, 9 aa, Homo Sapiens
HLAVIGALL

SEQ ID NO: 13356 - protein, 9 aa, Homo Sapiens
AVIGALLAV

SEQ ID NO: 13357 - protein, 9 aa, Homo Sapiens
ALLAVGATK

SEQ ID NO: 13358 - protein, 9 aa, Homo Sapiens
LLAVGATKV

SEQ ID NO: 13359 - protein, 9 aa, Homo Sapiens
AVGATKVPR

SEQ ID NO: 13360 - protein, 9 aa, Homo Sapiens
KVPRNQDWL

SEQ ID NO: 13361 - protein, 9 aa, Homo Sapiens
WLGVSRQLR

SEQ ID NO: 13362 - protein, 9 aa, Homo Sapiens
GVSRQLRTK

SEQ ID NO: 13363 - protein, 9 aa, Homo Sapiens
QLRTKAWNR

SEQ ID NO: 13364 - protein, 9 aa, Homo Sapiens
RQLYPEWTE

SEQ ID NO: 13365 - protein, 9 aa, Homo Sapiens
QLYPEWTEA

SEQ ID NO: 13366 - protein, 9 aa, Homo Sapiens
YPEWTEAQR

SEQ ID NO: 13367 - protein, 9 aa, Homo Sapiens
PEWTEAQRL

SEQ ID NO: 13368 - protein, 9 aa, Homo Sapiens
EAQRLDCWR

SEQ ID NO: 13369 - protein, 9 aa, Homo Sapiens
RLDCWRGGQ

SEQ ID NO: 13370 - protein, 9 aa, Homo Sapiens
WRGGQVSLK

SEQ ID NO: 13371 - protein, 9 aa, Homo Sapiens
KVSNDGPTL

SEQ ID NO: 13372 - protein, 9 aa, Homo Sapiens
GPTLIGANA

SEQ ID NO: 13373 - protein, 9 aa, Homo Sapiens
TLIGANASF

SEQ ID NO: 13374 - protein, 9 aa, Homo Sapiens
IGANASFSI

SEQ ID NO: 13375 - protein, 9 aa, Homo Sapiens
ASFSIALNF

SEQ ID NO: 13376 - protein, 9 aa, Homo Sapiens
ALNFPGSQK

SEQ ID NO: 13377 - protein, 9 aa, Homo Sapiens
LNFPGSQKV

SEQ ID NO: 13378 - protein, 9 aa, Homo Sapiens
FPGSQKVLP

SEQ ID NO: 13379 - protein, 9 aa, Homo Sapiens
KVLPDGQVI

SEQ ID NO: 13380 - protein, 9 aa, Homo Sapiens
VLPDGQVIW

SEQ ID NO: 13381 - protein, 9 aa, Homo Sapiens
LPDGQVIWV

SEQ ID NO: 13382 - protein, 9 aa, Homo Sapiens
GQVIWVNNT

SEQ ID NO: 13383 - protein, 9 aa, Homo Sapiens
QVIWVNNTI

SEQ ID NO: 13384 - protein, 9 aa, Homo Sapiens
VIWVNNTII

SEQ ID NO: 13385 - protein, 9 aa, Homo Sapiens
NTIINGSQV

SEQ ID NO: 13386 - protein, 9 aa, Homo Sapiens
TIINGSQVW

SEQ ID NO: 13387 - protein, 9 aa, Homo Sapiens
SQVWGGQPV

SEQ ID NO: 13388 - protein, 9 aa, Homo Sapiens
QVWGGQPVY

SEQ ID NO: 13389 - protein, 9 aa, Homo Sapiens
YPQETDDAC

SEQ ID NO: 13390 - protein, 9 aa, Homo Sapiens
QETDDACIF

SEQ ID NO: 13391 - protein, 9 aa, Homo Sapiens
FPDGGPCPS

SEQ ID NO: 13392 - protein, 9 aa, Homo Sapiens
CPSGSWSQK

SEQ ID NO: 13393 - protein, 9 aa, Homo Sapiens
WSQKRSFVY

SEQ ID NO: 13394 - protein, 9 aa, Homo Sapiens
SQKRSFVYV

SEQ ID NO: 13395 - protein, 9 aa, Homo Sapiens
KRSFVYVWK

SEQ ID NO: 13396 - protein, 9 aa, Homo Sapiens
YVWKTWGQY

SEQ ID NO: 13397 - protein, 9 aa, Homo Sapiens
KTWGQYWQV

SEQ ID NO: 13398 - protein, 9 aa, Homo Sapiens
TWGQYWQVL

SEQ ID NO: 13399 - protein, 9 aa, Homo Sapiens
WQVLGGPVS

SEQ ID NO: 13400 - protein, 9 aa, Homo Sapiens
VLGGPVSGL

SEQ ID NO: 13401 - protein, 9 aa, Homo Sapiens
GLSIGTGRA

SEQ ID NO: 13402 - protein, 9 aa, Homo Sapiens
LSIGTGRAM

SEQ ID NO: 13403 - protein, 9 aa, Homo Sapiens
SIGTGRAML

SEQ ID NO: 13404 - protein, 9 aa, Homo Sapiens
RAMLGTHTM

SEQ ID NO: 13405 - protein, 9 aa, Homo Sapiens
MLGTHTMEV

SEQ ID NO: 13406 - protein, 9 aa, Homo Sapiens
GTHTMEVTV

SEQ ID NO: 13407 - protein, 9 aa, Homo Sapiens
HTMEVTVYH

SEQ ID NO: 13408 - protein, 9 aa, Homo Sapiens
TMEVTVYHR

SEQ ID NO: 13409 - protein, 9 aa, Homo Sapiens
MEVTVYHRR

SEQ ID NO: 13410 - protein, 9 aa, Homo Sapiens
TVYHRRGSR

SEQ ID NO: 13411 - protein, 9 aa, Homo Sapiens
YHRRGSRSY

SEQ ID NO: 13412 - protein, 9 aa, Homo Sapiens
GSRSYVPLA

SEQ ID NO: 13413 - protein, 9 aa, Homo Sapiens
VPLAHSSSA

SEQ ID NO: 13414 - protein, 9 aa, Homo Sapiens
PLAHSSSAF

SEQ ID NO: 13415 - protein, 9 aa, Homo Sapiens
SAFTITDQV

SEQ ID NO: 13416 - protein, 9 aa, Homo Sapiens
FTITDQVPF

SEQ ID NO: 13417 - protein, 9 aa, Homo Sapiens
ITDQVPFSV

SEQ ID NO: 13418 - protein, 9 aa, Homo Sapiens
DQVPFSVSV

SEQ ID NO: 13419 - protein, 9 aa, Homo Sapiens
FSVSVSQLR

SEQ ID NO: 13420 - protein, 9 aa, Homo Sapiens
ALDGGNKHF

SEQ ID NO: 13421 - protein, 9 aa, Homo Sapiens
FLRNQPLTF

SEQ ID NO: 13422 - protein, 9 aa, Homo Sapiens
QPLTFALQL

SEQ ID NO: 13423 - protein, 9 aa, Homo Sapiens
FALQLHDPS

SEQ ID NO: 13424 - protein, 9 aa, Homo Sapiens
LQLHDPSGY

SEQ ID NO: 13425 - protein, 9 aa, Homo Sapiens
QLHDPSGYL

SEQ ID NO: 13426 - protein, 9 aa, Homo Sapiens
DPSGYLAEA

SEQ ID NO: 13427 - protein, 9 aa, Homo Sapiens
YLAEADLSY

SEQ ID NO: 13428 - protein, 9 aa, Homo Sapiens
AEADLSYTW

SEQ ID NO: 13429 - protein, 9 aa, Homo Sapiens
ADLSYTWDF

SEQ ID NO: 13430 - protein, 9 aa, Homo Sapiens
YTWDFGDSS

SEQ ID NO: 13431 - protein, 9 aa, Homo Sapiens
DSSGTLISR

SEQ ID NO: 13432 - protein, 9 aa, Homo Sapiens
GTLISRALV

SEQ ID NO: 13433 - protein, 9 aa, Homo Sapiens
TLISRALVV

SEQ ID NO: 13434 - protein, 9 aa, Homo Sapiens
RALVVTHTY

SEQ ID NO: 13435 - protein, 9 aa, Homo Sapiens
ALVVTHTYL

SEQ ID NO: 13436 - protein, 9 aa, Homo Sapiens
HTYLEPGPV

SEQ ID NO: 13437 - protein, 9 aa, Homo Sapiens
YLEPGPVTA

SEQ ID NO: 13438 - protein, 9 aa, Homo Sapiens
EPGPVTAQV

SEQ ID NO: 13439 - protein, 9 aa, Homo Sapiens
GPVTAQVVL

SEQ ID NO: 13440 - protein, 9 aa, Homo Sapiens
AQVVLQAAI

SEQ ID NO: 13441 - protein, 9 aa, Homo Sapiens
VVLQAAIPL

SEQ ID NO: 13442 - protein, 9 aa, Homo Sapiens
VLQAAIPLT

SEQ ID NO: 13443 - protein, 9 aa, Homo Sapiens
IPLTSCGSS

SEQ ID NO: 13444 - protein, 9 aa, Homo Sapiens
LTSCGSSPV

SEQ ID NO: 13445 - protein, 9 aa, Homo Sapiens
TTDGHRPTA

SEQ ID NO: 13446 - protein, 9 aa, Homo Sapiens
APNTTAGQV

SEQ ID NO: 13447 - protein, 9 aa, Homo Sapiens
NTTAGQVPT

SEQ ID NO: 13448 - protein, 9 aa, Homo Sapiens
GQVPTTEVV

SEQ ID NO: 13449 - protein, 9 aa, Homo Sapiens
VPTTEVVGT

SEQ ID NO: 13450 - protein, 9 aa, Homo Sapiens
TPGQAPTAE

SEQ ID NO: 13451 - protein, 9 aa, Homo Sapiens
GQAPTAEPS

SEQ ID NO: 13452 - protein, 9 aa, Homo Sapiens
AEPSGTTSV

SEQ ID NO: 13453 - protein, 9 aa, Homo Sapiens
SVQVPTTEV

SEQ ID NO: 13454 - protein, 9 aa, Homo Sapiens
VQVPTTEVI

SEQ ID NO: 13455 - protein, 9 aa, Homo Sapiens
VPTTEVIST

SEQ ID NO: 13456 - protein, 9 aa, Homo Sapiens
TEVISTAPV

SEQ ID NO: 13457 - protein, 9 aa, Homo Sapiens
EVISTAPVQ

SEQ ID NO: 13458 - protein, 9 aa, Homo Sapiens
STAPVQMPT

SEQ ID NO: 13459 - protein, 9 aa, Homo Sapiens
APVQMPTAE

SEQ ID NO: 13460 - protein, 9 aa, Homo Sapiens
VQMPTAEST

SEQ ID NO: 13461 - protein, 9 aa, Homo Sapiens
MPTAESTGM

SEQ ID NO: 13462 - protein, 9 aa, Homo Sapiens
ESTGMTPEK

SEQ ID NO: 13463 - protein, 9 aa, Homo Sapiens
STGMTPEKV

SEQ ID NO: 13464 - protein, 9 aa, Homo Sapiens
GMTPEKVPV

SEQ ID NO: 13465 - protein, 9 aa, Homo Sapiens
SEVMGTTLA

SEQ ID NO: 13466 - protein, 9 aa, Homo Sapiens
VMGTTLAEM

SEQ ID NO: 13467 - protein, 9 aa, Homo Sapiens
TLAEMSTPE

SEQ ID NO: 13468 - protein, 9 aa, Homo Sapiens
AEMSTPEAT

SEQ ID NO: 13469 - protein, 9 aa, Homo Sapiens
ATGMTPAEV

SEQ ID NO: 13470 - protein, 9 aa, Homo Sapiens
GMTPAEVSI

SEQ ID NO: 13471 - protein, 9 aa, Homo Sapiens
MTPAEVSIV

SEQ ID NO: 13472 - protein, 9 aa, Homo Sapiens
TPAEVSIVV

SEQ ID NO: 13473 - protein, 9 aa, Homo Sapiens
AEVSIVVLS

SEQ ID NO: 13474 - protein, 9 aa, Homo Sapiens
VVLSGTTAA

SEQ ID NO: 13475 - protein, 9 aa, Homo Sapiens
VLSGTTAAQ

SEQ ID NO: 13476 - protein, 9 aa, Homo Sapiens
TTAAQVTTT

SEQ ID NO: 13477 - protein, 9 aa, Homo Sapiens
AAQVTTTEW

SEQ ID NO: 13478 - protein, 9 aa, Homo Sapiens
AQVTTTEWV

SEQ ID NO: 13479 - protein, 9 aa, Homo Sapiens
TTTEWVETT

SEQ ID NO: 13480 - protein, 9 aa, Homo Sapiens
ETTARELPI

SEQ ID NO: 13481 - protein, 9 aa, Homo Sapiens
EGPDASSIM

SEQ ID NO: 13482 - protein, 9 aa, Homo Sapiens
SSIMSTESI

SEQ ID NO: 13483 - protein, 9 aa, Homo Sapiens
STESITGSL

SEQ ID NO: 13484 - protein, 9 aa, Homo Sapiens
SITGSLGPL

SEQ ID NO: 13485 - protein, 9 aa, Homo Sapiens
SLGPLLDGT

SEQ ID NO: 13486 - protein, 9 aa, Homo Sapiens
GPLLDGTAT

SEQ ID NO: 13487 - protein, 9 aa, Homo Sapiens
PLLDGTATL

SEQ ID NO: 13488 - protein, 9 aa, Homo Sapiens
LLDGTATLR

SEQ ID NO: 13489 - protein, 9 aa, Homo Sapiens
GTATLRLVK

SEQ ID NO: 13490 - protein, 9 aa, Homo Sapiens
TATLRLVKR

SEQ ID NO: 13491 - protein, 9 aa, Homo Sapiens
TLRLVKRQV

SEQ ID NO: 13492 - protein, 9 aa, Homo Sapiens
RLVKRQVPL

SEQ ID NO: 13493 - protein, 9 aa, Homo Sapiens
RQVPLDCVL

SEQ ID NO: 13494 - protein, 9 aa, Homo Sapiens
QVPLDCVLY

SEQ ID NO: 13495 - protein, 9 aa, Homo Sapiens
PLDCVLYRY

SEQ ID NO: 13496 - protein, 9 aa, Homo Sapiens
CVLYRYGSF

SEQ ID NO: 13497 - protein, 9 aa, Homo Sapiens
VLYRYGSFS

SEQ ID NO: 13498 - protein, 9 aa, Homo Sapiens
LYRYGSFSV

SEQ ID NO: 13499 - protein, 9 aa, Homo Sapiens
YRYGSFSVT

SEQ ID NO: 13500 - protein, 9 aa, Homo Sapiens
RYGSFSVTL

SEQ ID NO: 13501 - protein, 9 aa, Homo Sapiens
VTLDIVQGI

SEQ ID NO: 13502 - protein, 9 aa, Homo Sapiens
VQGIESAEI

SEQ ID NO: 13503 - protein, 9 aa, Homo Sapiens
ESAEILQAV

SEQ ID NO: 13504 - protein, 9 aa, Homo Sapiens
AEILQAVPS

SEQ ID NO: 13505 - protein, 9 aa, Homo Sapiens
VPSGEGDAF

SEQ ID NO: 13506 - protein, 9 aa, Homo Sapiens
EGDAFELTV

SEQ ID NO: 13507 - protein, 9 aa, Homo Sapiens
LTVSCQGGL

SEQ ID NO: 13508 - protein, 9 aa, Homo Sapiens
VSCQGGLPK

SEQ ID NO: 13509 - protein, 9 aa, Homo Sapiens
LPKEACMEI

SEQ ID NO: 13510 - protein, 9 aa, Homo Sapiens
AQRLCQPVL

SEQ ID NO: 13511 - protein, 9 aa, Homo Sapiens
VLPSPACQL

SEQ ID NO: 13512 - protein, 9 aa, Homo Sapiens
LPSPACQLV

SEQ ID NO: 13513 - protein, 9 aa, Homo Sapiens
SPACQLVLH

SEQ ID NO: 13514 - protein, 9 aa, Homo Sapiens
QLVLHQILK

SEQ ID NO: 13515 - protein, 9 aa, Homo Sapiens
ILKGGSGTY

SEQ ID NO: 13516 - protein, 9 aa, Homo Sapiens
GTYCLNVSL

SEQ ID NO: 13517 - protein, 9 aa, Homo Sapiens
CLNVSLADT

SEQ ID NO: 13518 - protein, 9 aa, Homo Sapiens
SLADTNSLA

SEQ ID NO: 13519 - protein, 9 aa, Homo Sapiens
LADTNSLAV

SEQ ID NO: 13520 - protein, 9 aa, Homo Sapiens
SLAVVSTQL

SEQ ID NO: 13521 - protein, 9 aa, Homo Sapiens
LAVVSTQLI

SEQ ID NO: 13522 - protein, 9 aa, Homo Sapiens
AVVSTQLIM

SEQ ID NO: 13523 - protein, 9 aa, Homo Sapiens
QLIMPGQEA

SEQ ID NO: 13524 - protein, 9 aa, Homo Sapiens
IMPGQEAGL

SEQ ID NO: 13525 - protein, 9 aa, Homo Sapiens
GQEAGLGQV

SEQ ID NO: 13526 - protein, 9 aa, Homo Sapiens
EAGLGQVPL

SEQ ID NO: 13527 - protein, 9 aa, Homo Sapiens
GLGQVPLIV

SEQ ID NO: 13528 - protein, 9 aa, Homo Sapiens
GQVPLIVGI

SEQ ID NO: 13529 - protein, 9 aa, Homo Sapiens
QVPLIVGIL

SEQ ID NO: 13530 - protein, 9 aa, Homo Sapiens
VPLIVGILL

SEQ ID NO: 13531 - protein, 9 aa, Homo Sapiens
PLIVGILLV

SEQ ID NO: 13532 - protein, 9 aa, Homo Sapiens
LIVGILLVL

SEQ ID NO: 13533 - protein, 9 aa, Homo Sapiens
GILLVLMAV

SEQ ID NO: 13534 - protein, 9 aa, Homo Sapiens
ILLVLMAVV

SEQ ID NO: 13535 - protein, 9 aa, Homo Sapiens
LLVLMAVVL

SEQ ID NO: 13536 - protein, 9 aa, Homo Sapiens
VLMAVVLAS

SEQ ID NO: 13537 - protein, 9 aa, Homo Sapiens
LMAVVLASL

SEQ ID NO: 13538 - protein, 9 aa, Homo Sapiens
MAVVLASLI

SEQ ID NO: 13539 - protein, 9 aa, Homo Sapiens
AVVLASLIY

SEQ ID NO: 13540 - protein, 9 aa, Homo Sapiens
VVLASLIYR

SEQ ID NO: 13541 - protein, 9 aa, Homo Sapiens
VLASLIYRR

SEQ ID NO: 13542 - protein, 9 aa, Homo Sapiens
LASLIYRRR

SEQ ID NO: 13543 - protein, 9 aa, Homo Sapiens
LIYRRRLMK

SEQ ID NO: 13544 - protein, 9 aa, Homo Sapiens
RRRLMKQDF

SEQ ID NO: 13545 - protein, 9 aa, Homo Sapiens
RLMKQDFSV

SEQ ID NO: 13546 - protein, 9 aa, Homo Sapiens
KQDFSVPQL

SEQ ID NO: 13547 - protein, 9 aa, Homo Sapiens
VPQLPHSSS

SEQ ID NO: 13548 - protein, 9 aa, Homo Sapiens
LPHSSSHWL

SEQ ID NO: 13549 - protein, 9 aa, Homo Sapiens
HSSSHWLRL

SEQ ID NO: 13550 - protein, 9 aa, Homo Sapiens
SSHWLRLPR

SEQ ID NO: 13551 - protein, 9 aa, Homo Sapiens
HWLRLPRIF

SEQ ID NO: 13552 - protein, 9 aa, Homo Sapiens
RLPRIFCSC

SEQ ID NO: 13553 - protein, 9 aa, Homo Sapiens
CPIGENSPL

SEQ ID NO: 13554 - protein, 9 aa, Homo Sapiens
PIGENSPLL

SEQ ID NO: 13555 - protein, 9 aa, Homo Sapiens
SPLLSGQQV

SEQ ID NO: 13556 - protein, 10 aa, Homo Sapiens
LVLKRCLLHL

SEQ ID NO: 13557 - protein, 10 aa, Homo Sapiens
VLKRCLLHLA

SEQ ID NO: 13558 - protein, 10 aa, Homo Sapiens
CLLHLAVIGA

SEQ ID NO: 13559 - protein, 10 aa, Homo Sapiens
LLHLAVIGAL

SEQ ID NO: 13560 - protein, 10 aa, Homo Sapiens
HLAVIGALLA

SEQ ID NO: 13561 - protein, 10 aa, Homo Sapiens
LAVIGALLAV

SEQ ID NO: 13562 - protein, 10 aa, Homo Sapiens
VIGALLAVGA

SEQ ID NO: 13563 - protein, 10 aa, Homo Sapiens
GALLAVGATK

SEQ ID NO: 13564 - protein, 10 aa, Homo Sapiens
ALLAVGATKV

SEQ ID NO: 13565 - protein, 10 aa, Homo Sapiens
LAVGATKVPR

SEQ ID NO: 13566 - protein, 10 aa, Homo Sapiens
VPRNQDWLGV

SEQ ID NO: 13567 - protein, 10 aa, Homo Sapiens
DWLGVSRQLR

SEQ ID NO: 13568 - protein, 10 aa, Homo Sapiens
WLGVSRQLRT

SEQ ID NO: 13569 - protein, 10 aa, Homo Sapiens
VSRQLRTKAW

SEQ ID NO: 13570 - protein, 10 aa, Homo Sapiens
RQLRTKAWNR

SEQ ID NO: 13571 - protein, 10 aa, Homo Sapiens
RTKAWNRQLY

SEQ ID NO: 13572 - protein, 10 aa, Homo Sapiens
AWNRQLYPEW

SEQ ID NO: 13573 - protein, 10 aa, Homo Sapiens
RQLYPEWTEA

SEQ ID NO: 13574 - protein, 10 aa, Homo Sapiens
QLYPEWTEAQ

SEQ ID NO: 13575 - protein, 10 aa, Homo Sapiens
LYPEWTEAQR

SEQ ID NO: 13576 - protein, 10 aa, Homo Sapiens
YPEWTEAQRL

SEQ ID NO: 13577 - protein, 10 aa, Homo Sapiens
RLDCWRGGQV

SEQ ID NO: 13578 - protein, 10 aa, Homo Sapiens
DCWRGGQVSL

SEQ ID NO: 13579 - protein, 10 aa, Homo Sapiens
CWRGGQVSLK

SEQ ID NO: 13580 - protein, 10 aa, Homo Sapiens
KVSNDGPTLI

SEQ ID NO: 13581 - protein, 10 aa, Homo Sapiens
GPTLIGANAS

SEQ ID NO: 13582 - protein, 10 aa, Homo Sapiens
TLIGANASFS

SEQ ID NO: 13583 - protein, 10 aa, Homo Sapiens
LIGANASFSI

SEQ ID NO: 13584 - protein, 10 aa, Homo Sapiens
NASFSIALNF

SEQ ID NO: 13585 - protein, 10 aa, Homo Sapiens
IALNFPGSQK

SEQ ID NO: 13586 - protein, 10 aa, Homo Sapiens
ALNFPGSQKV

SEQ ID NO: 13587 - protein, 10 aa, Homo Sapiens
FPGSQKVLPD

SEQ ID NO: 13588 - protein, 10 aa, Homo Sapiens
KVLPDGQVIW

SEQ ID NO: 13589 - protein, 10 aa, Homo Sapiens
VLPDGQVIWV

SEQ ID NO: 13590 - protein, 10 aa, Homo Sapiens
GQVIWVNNTI

SEQ ID NO: 13591 - protein, 10 aa, Homo Sapiens
QVIWVNNTII

SEQ ID NO: 13592 - protein, 10 aa, Homo Sapiens
NTIINGSQVW

SEQ ID NO: 13593 - protein, 10 aa, Homo Sapiens
SQVWGGQPVY

SEQ ID NO: 13594 - protein, 10 aa, Homo Sapiens
YPQETDDACI

SEQ ID NO: 13595 - protein, 10 aa, Homo Sapiens
FPDGGPCPSG

SEQ ID NO: 13596 - protein, 10 aa, Homo Sapiens
CPSGSWSQKR

SEQ ID NO: 13597 - protein, 10 aa, Homo Sapiens
GSWSQKRSFV

SEQ ID NO: 13598 - protein, 10 aa, Homo Sapiens
SWSQKRSFVY

SEQ ID NO: 13599 - protein, 10 aa, Homo Sapiens
WSQKRSFVYV

SEQ ID NO: 13600 - protein, 10 aa, Homo Sapiens
QKRSFVYVWK

SEQ ID NO: 13601 - protein, 10 aa, Homo Sapiens
RSFVYVWKTW

SEQ ID NO: 13602 - protein, 10 aa, Homo Sapiens
FVYVWKTWGQ

SEQ ID NO: 13603 - protein, 10 aa, Homo Sapiens
VYVWKTWGQY

SEQ ID NO: 13604 - protein, 10 aa, Homo Sapiens
YVWKTWGQYW

SEQ ID NO: 13605 - protein, 10 aa, Homo Sapiens
WKTWGQYWQV

SEQ ID NO: 13606 - protein, 10 aa, Homo Sapiens
KTWGQYWQVL

SEQ ID NO: 13607 - protein, 10 aa, Homo Sapiens
QVLGGPVSGL

SEQ ID NO: 13608 - protein, 10 aa, Homo Sapiens
VSGLSIGTGR

SEQ ID NO: 13609 - protein, 10 aa, Homo Sapiens
GLSIGTGRAM

SEQ ID NO: 13610 - protein, 10 aa, Homo Sapiens
AMLGTHTMEV

SEQ ID NO: 13611 - protein, 10 aa, Homo Sapiens
MLGTHTMEVT

SEQ ID NO: 13612 - protein, 10 aa, Homo Sapiens
GTHTMEVTVY

SEQ ID NO: 13613 - protein, 10 aa, Homo Sapiens
HTMEVTVYHR

SEQ ID NO: 13614 - protein, 10 aa, Homo Sapiens
TMEVTVYHRR

SEQ ID NO: 13615 - protein, 10 aa, Homo Sapiens
VTVYHRRGSR

SEQ ID NO: 13616 - protein, 10 aa, Homo Sapiens
RRGSRSYVPL

SEQ ID NO: 13617 - protein, 10 aa, Homo Sapiens
YVPLAHSSSA

SEQ ID NO: 13618 - protein, 10 aa, Homo Sapiens
VPLAHSSSAF

SEQ ID NO: 13619 - protein, 10 aa, Homo Sapiens
SSAFTITDQV

SEQ ID NO: 13620 - protein, 10 aa, Homo Sapiens
AFTITDQVPF

SEQ ID NO: 13621 - protein, 10 aa, Homo Sapiens
TITDQVPFSV

SEQ ID NO: 13622 - protein, 10 aa, Homo Sapiens
VPFSVSVSQL

SEQ ID NO: 13623 - protein, 10 aa, Homo Sapiens
PFSVSVSQLR

SEQ ID NO: 13624 - protein, 10 aa, Homo Sapiens
SVSVSQLRAL

SEQ ID NO: 13625 - protein, 10 aa, Homo Sapiens
QLRALDGGNK

SEQ ID NO: 13626 - protein, 10 aa, Homo Sapiens
RALDGGNKHF

SEQ ID NO: 13627 - protein, 10 aa, Homo Sapiens
ALDGGNKHFL

SEQ ID NO: 13628 - protein, 10 aa, Homo Sapiens
HFLRNQPLTF

SEQ ID NO: 13629 - protein, 10 aa, Homo Sapiens
FLRNQPLTFA

SEQ ID NO: 13630 - protein, 10 aa, Homo Sapiens
NQPLTFALQL

SEQ ID NO: 13631 - protein, 10 aa, Homo Sapiens
QPLTFALQLH

SEQ ID NO: 13632 - protein, 10 aa, Homo Sapiens
ALQLHDPSGY

SEQ ID NO: 13633 - protein, 10 aa, Homo Sapiens
LQLHDPSGYL

SEQ ID NO: 13634 - protein, 10 aa, Homo Sapiens
QLHDPSGYLA

SEQ ID NO: 13635 - protein, 10 aa, Homo Sapiens
GYLAEADLSY

SEQ ID NO: 13636 - protein, 10 aa, Homo Sapiens
YLAEADLSYT

SEQ ID NO: 13637 - protein, 10 aa, Homo Sapiens
LAEADLSYTW

SEQ ID NO: 13638 - protein, 10 aa, Homo Sapiens
EADLSYTWDF

SEQ ID NO: 13639 - protein, 10 aa, Homo Sapiens
SGTLISRALV

SEQ ID NO: 13640 - protein, 10 aa, Homo Sapiens
SRALVVTHTY

SEQ ID NO: 13641 - protein, 10 aa, Homo Sapiens
RALVVTHTYL

SEQ ID NO: 13642 - protein, 10 aa, Homo Sapiens
YLEPGPVTAQ

SEQ ID NO: 13643 - protein, 10 aa, Homo Sapiens
LEPGPVTAQV

SEQ ID NO: 13644 - protein, 10 aa, Homo Sapiens
EPGPVTAQVV

SEQ ID NO: 13645 - protein, 10 aa, Homo Sapiens
VTAQVVLQAA

SEQ ID NO: 13646 - protein, 10 aa, Homo Sapiens
TAQVVLQAAI

SEQ ID NO: 13647 - protein, 10 aa, Homo Sapiens
QVVLQAAIPL

SEQ ID NO: 13648 - protein, 10 aa, Homo Sapiens
LQAAIPLTSC

SEQ ID NO: 13649 - protein, 10 aa, Homo Sapiens
IPLTSCGSSP

SEQ ID NO: 13650 - protein, 10 aa, Homo Sapiens
PLTSCGSSPV

SEQ ID NO: 13651 - protein, 10 aa, Homo Sapiens
SPVPGTTDGH

SEQ ID NO: 13652 - protein, 10 aa, Homo Sapiens
GTTDGHRPTA

SEQ ID NO: 13653 - protein, 10 aa, Homo Sapiens
RPTAEAPNTT

SEQ ID NO: 13654 - protein, 10 aa, Homo Sapiens
PTAEAPNTTA

SEQ ID NO: 13655 - protein, 10 aa, Homo Sapiens
EAPNTTAGQV

SEQ ID NO: 13656 - protein, 10 aa, Homo Sapiens
TAGQVPTTEV

SEQ ID NO: 13657 - protein, 10 aa, Homo Sapiens
VPTTEVVGTT

SEQ ID NO: 13658 - protein, 10 aa, Homo Sapiens
EVVGTTPGQA

SEQ ID NO: 13659 - protein, 10 aa, Homo Sapiens
GTTPGQAPTA

SEQ ID NO: 13660 - protein, 10 aa, Homo Sapiens
APTAEPSGTT

SEQ ID NO: 13661 - protein, 10 aa, Homo Sapiens
TAEPSGTTSV

SEQ ID NO: 13662 - protein, 10 aa, Homo Sapiens
EPSGTTSVQV

SEQ ID NO: 13663 - protein, 10 aa, Homo Sapiens
TSVQVPTTEV

SEQ ID NO: 13664 - protein, 10 aa, Homo Sapiens
SVQVPTTEVI

SEQ ID NO: 13665 - protein, 10 aa, Homo Sapiens
VPTTEVISTA

SEQ ID NO: 13666 - protein, 10 aa, Homo Sapiens
TTEVISTAPV

SEQ ID NO: 13667 - protein, 10 aa, Homo Sapiens
EVISTAPVQM

SEQ ID NO: 13668 - protein, 10 aa, Homo Sapiens
STAPVQMPTA

SEQ ID NO: 13669 - protein, 10 aa, Homo Sapiens
APVQMPTAES

SEQ ID NO: 13670 - protein, 10 aa, Homo Sapiens
QMPTAESTGM

SEQ ID NO: 13671 - protein, 10 aa, Homo Sapiens
MPTAESTGMT

SEQ ID NO: 13672 - protein, 10 aa, Homo Sapiens
ESTGMTPEKV

SEQ ID NO: 13673 - protein, 10 aa, Homo Sapiens
TGMTPEKVPV

SEQ ID NO: 13674 - protein, 10 aa, Homo Sapiens
VPVSEVMGTT

SEQ ID NO: 13675 - protein, 10 aa, Homo Sapiens
EVMGTTLAEM

SEQ ID NO: 13676 - protein, 10 aa, Homo Sapiens
TLAEMSTPEA

SEQ ID NO: 13677 - protein, 10 aa, Homo Sapiens
AEMSTPEATG

SEQ ID NO: 13678 - protein, 10 aa, Homo Sapiens
EMSTPEATGM

SEQ ID NO: 13679 - protein, 10 aa, Homo Sapiens
TPEATGMTPA

SEQ ID NO: 13680 - protein, 10 aa, Homo Sapiens
EATGMTPAEV

SEQ ID NO: 13681 - protein, 10 aa, Homo Sapiens
TGMTPAEVSI

SEQ ID NO: 13682 - protein, 10 aa, Homo Sapiens
GMTPAEVSIV

SEQ ID NO: 13683 - protein, 10 aa, Homo Sapiens
MTPAEVSIVV

SEQ ID NO: 13684 - protein, 10 aa, Homo Sapiens
TPAEVSIVVL

SEQ ID NO: 13685 - protein, 10 aa, Homo Sapiens
EVSIVVLSGT

SEQ ID NO: 13686 - protein, 10 aa, Homo Sapiens
IVVLSGTTAA

SEQ ID NO: 13687 - protein, 10 aa, Homo Sapiens
VLSGTTAAQV

SEQ ID NO: 13688 - protein, 10 aa, Homo Sapiens
TTAAQVTTTE

SEQ ID NO: 13689 - protein, 10 aa, Homo Sapiens
TAAQVTTTEW

SEQ ID NO: 13690 - protein, 10 aa, Homo Sapiens
AAQVTTTEWV

SEQ ID NO: 13691 - protein, 10 aa, Homo Sapiens
AQVTTTEWVE

SEQ ID NO: 13692 - protein, 10 aa, Homo Sapiens
TTTEWVETTA

SEQ ID NO: 13693 - protein, 10 aa, Homo Sapiens
TTEWVETTAR

SEQ ID NO: 13694 - protein, 10 aa, Homo Sapiens
EWVETTAREL

SEQ ID NO: 13695 - protein, 10 aa, Homo Sapiens
IPEPEGPDAS

SEQ ID NO: 13696 - protein, 10 aa, Homo Sapiens
EPEGPDASSI

SEQ ID NO: 13697 - protein, 10 aa, Homo Sapiens
MSTESITGSL

SEQ ID NO: 13698 - protein, 10 aa, Homo Sapiens
ESITGSLGPL

SEQ ID NO: 13699 - protein, 10 aa, Homo Sapiens
SITGSLGPLL

SEQ ID NO: 13700 - protein, 10 aa, Homo Sapiens
SLGPLLDGTA

SEQ ID NO: 13701 - protein, 10 aa, Homo Sapiens
GPLLDGTATL

SEQ ID NO: 13702 - protein, 10 aa, Homo Sapiens
PLLDGTATLR

SEQ ID NO: 13703 - protein, 10 aa, Homo Sapiens
LLDGTATLRL

SEQ ID NO: 13704 - protein, 10 aa, Homo Sapiens
GTATLRLVKR

SEQ ID NO: 13705 - protein, 10 aa, Homo Sapiens
ATLRLVKRQV

SEQ ID NO: 13706 - protein, 10 aa, Homo Sapiens
LRLVKRQVPL

SEQ ID NO: 13707 - protein, 10 aa, Homo Sapiens
RQVPLDCVLY

SEQ ID NO: 13708 - protein, 10 aa, Homo Sapiens
QVPLDCVLYR

SEQ ID NO: 13709 - protein, 10 aa, Homo Sapiens
VPLDCVLYRY

SEQ ID NO: 13710 - protein, 10 aa, Homo Sapiens
VLYRYGSFSV

SEQ ID NO: 13711 - protein, 10 aa, Homo Sapiens
YRYGSFSVTL

SEQ ID NO: 13712 - protein, 10 aa, Homo Sapiens
GSFSVTLDIV

SEQ ID NO: 13713 - protein, 10 aa, Homo Sapiens
SVTLDIVQGI

SEQ ID NO: 13714 - protein, 10 aa, Homo Sapiens
AEILQAVPSG

SEQ ID NO: 13715 - protein, 10 aa, Homo Sapiens
AVPSGEGDAF

SEQ ID NO: 13716 - protein, 10 aa, Homo Sapiens
GEGDAFELTV

SEQ ID NO: 13717 - protein, 10 aa, Homo Sapiens
ELTVSCQGGL

SEQ ID NO: 13718 - protein, 10 aa, Homo Sapiens
TVSCQGGLPK

SEQ ID NO: 13719 - protein, 10 aa, Homo Sapiens
GLPKEACMEI

SEQ ID NO: 13720 - protein, 10 aa, Homo Sapiens
PPAQRLCQPV

SEQ ID NO: 13721 - protein, 10 aa, Homo Sapiens
PVLPSPACQL

SEQ ID NO: 13722 - protein, 10 aa, Homo Sapiens
VLPSPACQLV

SEQ ID NO: 13723 - protein, 10 aa, Homo Sapiens
LPSPACQLVL

SEQ ID NO: 13724 - protein, 10 aa, Homo Sapiens
CQLVLHQILK

SEQ ID NO: 13725 - protein, 10 aa, Homo Sapiens
QILKGGSGTY

SEQ ID NO: 13726 - protein, 10 aa, Homo Sapiens
ILKGGSGTYC

SEQ ID NO: 13727 - protein, 10 aa, Homo Sapiens
GTYCLNVSLA

SEQ ID NO: 13728 - protein, 10 aa, Homo Sapiens
NVSLADTNSL

SEQ ID NO: 13729 - protein, 10 aa, Homo Sapiens
SLADTNSLAV

SEQ ID NO: 13730 - protein, 10 aa, Homo Sapiens
LADTNSLAVV

SEQ ID NO: 13731 - protein, 10 aa, Homo Sapiens
SLAVVSTQLI

SEQ ID NO: 13732 - protein, 10 aa, Homo Sapiens
LAVVSTQLIM

SEQ ID NO: 13733 - protein, 10 aa, Homo Sapiens
LIMPGQEAGL

SEQ ID NO: 13734 - protein, 10 aa, Homo Sapiens
QEAGLGQVPL

SEQ ID NO: 13735 - protein, 10 aa, Homo Sapiens
EAGLGQVPLI

SEQ ID NO: 13736 - protein, 10 aa, Homo Sapiens
GQVPLIVGIL

SEQ ID NO: 13737 - protein, 10 aa, Homo Sapiens
QVPLIVGILL

SEQ ID NO: 13738 - protein, 10 aa, Homo Sapiens
VPLIVGILLV

SEQ ID NO: 13739 - protein, 10 aa, Homo Sapiens
PLIVGILLVL

SEQ ID NO: 13740 - protein, 10 aa, Homo Sapiens
LIVGILLVLM

SEQ ID NO: 13741 - protein, 10 aa, Homo Sapiens
GILLVLMAVV

SEQ ID NO: 13742 - protein, 10 aa, Homo Sapiens
ILLVLMAVVL

SEQ ID NO: 13743 - protein, 10 aa, Homo Sapiens
LLVLMAVVLA

SEQ ID NO: 13744 - protein, 10 aa, Homo Sapiens
VLMAVVLASL

SEQ ID NO: 13745 - protein, 10 aa, Homo Sapiens
LMAVVLASLI

SEQ ID NO: 13746 - protein, 10 aa, Homo Sapiens
MAVVLASLIY

SEQ ID NO: 13747 - protein, 10 aa, Homo Sapiens
AVVLASLIYR

SEQ ID NO: 13748 - protein, 10 aa, Homo Sapiens
VVLASLIYRR

SEQ ID NO: 13749 - protein, 10 aa, Homo Sapiens
VLASLIYRRR

SEQ ID NO: 13750 - protein, 10 aa, Homo Sapiens
SLIYRRRLMK

SEQ ID NO: 13751 - protein, 10 aa, Homo Sapiens
LIYRRRLMKQ

SEQ ID NO: 13752 - protein, 10 aa, Homo Sapiens
YRRRLMKQDF

SEQ ID NO: 13753 - protein, 10 aa, Homo Sapiens
RRLMKQDFSV

SEQ ID NO: 13754 - protein, 10 aa, Homo Sapiens
QLPHSSSHWL

SEQ ID NO: 13755 - protein, 10 aa, Homo Sapiens
LPHSSSHWLR

SEQ ID NO: 13756 - protein, 10 aa, Homo Sapiens
SSSHWLRLPR

SEQ ID NO: 13757 - protein, 10 aa, Homo Sapiens
LPRIFCSCPI

SEQ ID NO: 13758 - protein, 10 aa, Homo Sapiens
CPIGENSPLL

SEQ ID NO: 13759 - protein, 11 aa, Homo Sapiens
DLVLKRCLLHL

SEQ ID NO: 13760 - protein, 11 aa, Homo Sapiens
LVLKRCLLHLA

SEQ ID NO: 13761 - protein, 11 aa, Homo Sapiens
VLKRCLLHLAV

SEQ ID NO: 13762 - protein, 11 aa, Homo Sapiens
CLLHLAVIGAL

SEQ ID NO: 13763 - protein, 11 aa, Homo Sapiens
LLHLAVIGALL

SEQ ID NO: 13764 - protein, 11 aa, Homo Sapiens
HLAVIGALLAV

SEQ ID NO: 13765 - protein, 11 aa, Homo Sapiens
AVIGALLAVGA

SEQ ID NO: 13766 - protein, 11 aa, Homo Sapiens
LLAVGATKVPR

SEQ ID NO: 13767 - protein, 11 aa, Homo Sapiens
GATKVPRNQDW

SEQ ID NO: 13768 - protein, 11 aa, Homo Sapiens
KVPRNQDWLGV

SEQ ID NO: 13769 - protein, 11 aa, Homo Sapiens
QLRTKAWNRQL

SEQ ID NO: 13770 - protein, 11 aa, Homo Sapiens
RTKAWNRQLYP

SEQ ID NO: 13771 - protein, 11 aa, Homo Sapiens
KAWNRQLYPEW

SEQ ID NO: 13772 - protein, 11 aa, Homo Sapiens
RQLYPEWTEAQ

SEQ ID NO: 13773 - protein, 11 aa, Homo Sapiens
QLYPEWTEAQR

SEQ ID NO: 13774 - protein, 11 aa, Homo Sapiens
LYPEWTEAQRL

SEQ ID NO: 13775 - protein, 11 aa, Homo Sapiens
WTEAQRLDCWR

SEQ ID NO: 13776 - protein, 11 aa, Homo Sapiens
RLDCWRGGQVS

SEQ ID NO: 13777 - protein, 11 aa, Homo Sapiens
SLKVSNDGPTL

SEQ ID NO: 13778 - protein, 11 aa, Homo Sapiens
GPTLIGANASF

SEQ ID NO: 13779 - protein, 11 aa, Homo Sapiens
TLIGANASFSI

SEQ ID NO: 13780 - protein, 11 aa, Homo Sapiens
LIGANASFSIA

SEQ ID NO: 13781 - protein, 11 aa, Homo Sapiens
SIALNFPGSQK

SEQ ID NO: 13782 - protein, 11 aa, Homo Sapiens
IALNFPGSQKV

SEQ ID NO: 13783 - protein, 11 aa, Homo Sapiens
ALNFPGSQKVL

SEQ ID NO: 13784 - protein, 11 aa, Homo Sapiens
KVLPDGQVIWV

SEQ ID NO: 13785 - protein, 11 aa, Homo Sapiens
VLPDGQVIWVN

SEQ ID NO: 13786 - protein, 11 aa, Homo Sapiens
GQVIWVNNTII

SEQ ID NO: 13787 - protein, 11 aa, Homo Sapiens
NGSQVWGGQPV

SEQ ID NO: 13788 - protein, 11 aa, Homo Sapiens
GSQVWGGQPVY

SEQ ID NO: 13789 - protein, 11 aa, Homo Sapiens
SQVWGGQPVYP

SEQ ID NO: 13790 - protein, 11 aa, Homo Sapiens
QVWGGQPVYPQ

SEQ ID NO: 13791 - protein, 11 aa, Homo Sapiens
VYPQETDDACI

SEQ ID NO: 13792 - protein, 11 aa, Homo Sapiens
YPQETDDACIF

SEQ ID NO: 13793 - protein, 11 aa, Homo Sapiens
FPDGGPCPSGS

SEQ ID NO: 13794 - protein, 11 aa, Homo Sapiens
SGSWSQKRSFV

SEQ ID NO: 13795 - protein, 11 aa, Homo Sapiens
WSQKRSFVYVW

SEQ ID NO: 13796 - protein, 11 aa, Homo Sapiens
SQKRSFVYVWK

SEQ ID NO: 13797 - protein, 11 aa, Homo Sapiens
FVYVWKTWGQY

SEQ ID NO: 13798 - protein, 11 aa, Homo Sapiens
VYVWKTWGQYW

SEQ ID NO: 13799 - protein, 11 aa, Homo Sapiens
YVWKTWGQYWQ

SEQ ID NO: 13800 - protein, 11 aa, Homo Sapiens
WKTWGQYWQVL

SEQ ID NO: 13801 - protein, 11 aa, Homo Sapiens
GQYWQVLGGPV

SEQ ID NO: 13802 - protein, 11 aa, Homo Sapiens
WQVLGGPVSGL

SEQ ID NO: 13803 - protein, 11 aa, Homo Sapiens
VLGGPVSGLSI

SEQ ID NO: 13804 - protein, 11 aa, Homo Sapiens
GLSIGTGRAML

SEQ ID NO: 13805 - protein, 11 aa, Homo Sapiens
RAMLGTHTMEV

SEQ ID NO: 13806 - protein, 11 aa, Homo Sapiens
AMLGTHTMEVT

SEQ ID NO: 13807 - protein, 11 aa, Homo Sapiens
MLGTHTMEVTV

SEQ ID NO: 13808 - protein, 11 aa, Homo Sapiens
THTMEVTVYHR

SEQ ID NO: 13809 - protein, 11 aa, Homo Sapiens
HTMEVTVYHRR

SEQ ID NO: 13810 - protein, 11 aa, Homo Sapiens
EVTVYHRRGSR

SEQ ID NO: 13811 - protein, 11 aa, Homo Sapiens
TVYHRRGSRSY

SEQ ID NO: 13812 - protein, 11 aa, Homo Sapiens
VYHRRGSRSYV

SEQ ID NO: 13813 - protein, 11 aa, Homo Sapiens
HRRGSRSYVPL

SEQ ID NO: 13814 - protein, 11 aa, Homo Sapiens
YVPLAHSSSAF

SEQ ID NO: 13815 - protein, 11 aa, Homo Sapiens
PLAHSSSAFTI

SEQ ID NO: 13816 - protein, 11 aa, Homo Sapiens
SSSAFTITDQV

SEQ ID NO: 13817 - protein, 11 aa, Homo Sapiens
SAFTITDQVPF

SEQ ID NO: 13818 - protein, 11 aa, Homo Sapiens
FTITDQVPFSV

SEQ ID NO: 13819 - protein, 11 aa, Homo Sapiens
ITDQVPFSVSV

SEQ ID NO: 13820 - protein, 11 aa, Homo Sapiens
QVPFSVSVSQL

SEQ ID NO: 13821 - protein, 11 aa, Homo Sapiens
VPFSVSVSQLR

SEQ ID NO: 13822 - protein, 11 aa, Homo Sapiens
FSVSVSQLRAL

SEQ ID NO: 13823 - protein, 11 aa, Homo Sapiens
SQLRALDGGNK

SEQ ID NO: 13824 - protein, 11 aa, Homo Sapiens
RALDGGNKHFL

SEQ ID NO: 13825 - protein, 11 aa, Homo Sapiens
ALDGGNKHFLR

SEQ ID NO: 13826 - protein, 11 aa, Homo Sapiens
FLRNQPLTFAL

SEQ ID NO: 13827 - protein, 11 aa, Homo Sapiens
FALQLHDPSGY

SEQ ID NO: 13828 - protein, 11 aa, Homo Sapiens
ALQLHDPSGYL

SEQ ID NO: 13829 - protein, 11 aa, Homo Sapiens
LQLHDPSGYLA

SEQ ID NO: 13830 - protein, 11 aa, Homo Sapiens
DPSGYLAEADL

SEQ ID NO: 13831 - protein, 11 aa, Homo Sapiens
YLAEADLSYTW

SEQ ID NO: 13832 - protein, 11 aa, Homo Sapiens
AEADLSYTWDF

SEQ ID NO: 13833 - protein, 11 aa, Homo Sapiens
YTWDFGDSSGT

SEQ ID NO: 13834 - protein, 11 aa, Homo Sapiens
ISRALVVTHTY

SEQ ID NO: 13835 - protein, 11 aa, Homo Sapiens
VTHTYLEPGPV

SEQ ID NO: 13836 - protein, 11 aa, Homo Sapiens
HTYLEPGPVTA

SEQ ID NO: 13837 - protein, 11 aa, Homo Sapiens
YLEPGPVTAQV

SEQ ID NO: 13838 - protein, 11 aa, Homo Sapiens
EPGPVTAQVVL

SEQ ID NO: 13839 - protein, 11 aa, Homo Sapiens
GPVTAQVVLQA

SEQ ID NO: 13840 - protein, 11 aa, Homo Sapiens
VTAQVVLQAAI

SEQ ID NO: 13841 - protein, 11 aa, Homo Sapiens
AQVVLQAAIPL

SEQ ID NO: 13842 - protein, 11 aa, Homo Sapiens
VLQAAIPLTSC

SEQ ID NO: 13843 - protein, 11 aa, Homo Sapiens
IPLTSCGSSPV

SEQ ID NO: 13844 - protein, 11 aa, Homo Sapiens
TTDGHRPTAEA

SEQ ID NO: 13845 - protein, 11 aa, Homo Sapiens
RPTAEAPNTTA

SEQ ID NO: 13846 - protein, 11 aa, Homo Sapiens
AEAPNTTAGQV

SEQ ID NO: 13847 - protein, 11 aa, Homo Sapiens
APNTTAGQVPT

SEQ ID NO: 13848 - protein, 11 aa, Homo Sapiens
TTAGQVPTTEV

SEQ ID NO: 13849 - protein, 11 aa, Homo Sapiens
TAGQVPTTEVV

SEQ ID NO: 13850 - protein, 11 aa, Homo Sapiens
GQVPTTEVVGT

SEQ ID NO: 13851 - protein, 11 aa, Homo Sapiens
TPGQAPTAEPS

SEQ ID NO: 13852 - protein, 11 aa, Homo Sapiens
GQAPTAEPSGT

SEQ ID NO: 13853 - protein, 11 aa, Homo Sapiens
PTAEPSGTTSV

SEQ ID NO: 13854 - protein, 11 aa, Homo Sapiens
AEPSGTTSVQV

SEQ ID NO: 13855 - protein, 11 aa, Homo Sapiens
TTSVQVPTTEV

SEQ ID NO: 13856 - protein, 11 aa, Homo Sapiens
TSVQVPTTEVI

SEQ ID NO: 13857 - protein, 11 aa, Homo Sapiens
VQVPTTEVIST

SEQ ID NO: 13858 - protein, 11 aa, Homo Sapiens
PTTEVISTAPV

SEQ ID NO: 13859 - protein, 11 aa, Homo Sapiens
TEVISTAPVQM

SEQ ID NO: 13860 - protein, 11 aa, Homo Sapiens
APVQMPTAEST

SEQ ID NO: 13861 - protein, 11 aa, Homo Sapiens
VQMPTAESTGM

SEQ ID NO: 13862 - protein, 11 aa, Homo Sapiens
MPTAESTGMTP

SEQ ID NO: 13863 - protein, 11 aa, Homo Sapiens
TAESTGMTPEK

SEQ ID NO: 13864 - protein, 11 aa, Homo Sapiens
AESTGMTPEKV

SEQ ID NO: 13865 - protein, 11 aa, Homo Sapiens
STGMTPEKVPV

SEQ ID NO: 13866 - protein, 11 aa, Homo Sapiens
MTPEKVPVSEV

SEQ ID NO: 13867 - protein, 11 aa, Homo Sapiens
TPEKVPVSEVM

SEQ ID NO: 13868 - protein, 11 aa, Homo Sapiens
VPVSEVMGTTL

SEQ ID NO: 13869 - protein, 11 aa, Homo Sapiens
SEVMGTTLAEM

SEQ ID NO: 13870 - protein, 11 aa, Homo Sapiens
EVMGTTLAEMS

SEQ ID NO: 13871 - protein, 11 aa, Homo Sapiens
VMGTTLAEMST

SEQ ID NO: 13872 - protein, 11 aa, Homo Sapiens
TTLAEMSTPEA

SEQ ID NO: 13873 - protein, 11 aa, Homo Sapiens
TLAEMSTPEAT

SEQ ID NO: 13874 - protein, 11 aa, Homo Sapiens
AEMSTPEATGM

SEQ ID NO: 13875 - protein, 11 aa, Homo Sapiens
STPEATGMTPA

SEQ ID NO: 13876 - protein, 11 aa, Homo Sapiens
TPEATGMTPAE

SEQ ID NO: 13877 - protein, 11 aa, Homo Sapiens
TGMTPAEVSIV

SEQ ID NO: 13878 - protein, 11 aa, Homo Sapiens
GMTPAEVSIVV

SEQ ID NO: 13879 - protein, 11 aa, Homo Sapiens
MTPAEVSIVVL

SEQ ID NO: 13880 - protein, 11 aa, Homo Sapiens
TPAEVSIVVLS

SEQ ID NO: 13881 - protein, 11 aa, Homo Sapiens
AEVSIVVLSGT

SEQ ID NO: 13882 - protein, 11 aa, Homo Sapiens
SIVVLSGTTAA

SEQ ID NO: 13883 - protein, 11 aa, Homo Sapiens
VVLSGTTAAQV

SEQ ID NO: 13884 - protein, 11 aa, Homo Sapiens
VLSGTTAAQVT

SEQ ID NO: 13885 - protein, 11 aa, Homo Sapiens
TTAAQVTTTEW

SEQ ID NO: 13886 - protein, 11 aa, Homo Sapiens
TAAQVTTTEWV

SEQ ID NO: 13887 - protein, 11 aa, Homo Sapiens
AQVTTTEWVET

SEQ ID NO: 13888 - protein, 11 aa, Homo Sapiens
TTTEWVETTAR

SEQ ID NO: 13889 - protein, 11 aa, Homo Sapiens
TEWVETTAREL

SEQ ID NO: 13890 - protein, 11 aa, Homo Sapiens
LPIPEPEGPDA

SEQ ID NO: 13891 - protein, 11 aa, Homo Sapiens
EPEGPDASSIM

SEQ ID NO: 13892 - protein, 11 aa, Homo Sapiens
DASSIMSTESI

SEQ ID NO: 13893 - protein, 11 aa, Homo Sapiens
IMSTESITGSL

SEQ ID NO: 13894 - protein, 11 aa, Homo Sapiens
ESITGSLGPLL

SEQ ID NO: 13895 - protein, 11 aa, Homo Sapiens
SLGPLLDGTAT

SEQ ID NO: 13896 - protein, 11 aa, Homo Sapiens
PLLDGTATLRL

SEQ ID NO: 13897 - protein, 11 aa, Homo Sapiens
LLDGTATLRLV

SEQ ID NO: 13898 - protein, 11 aa, Homo Sapiens
TLRLVKRQVPL

SEQ ID NO: 13899 - protein, 11 aa, Homo Sapiens
LVKRQVPLDCV

SEQ ID NO: 13900 - protein, 11 aa, Homo Sapiens
RQVPLDCVLYR

SEQ ID NO: 13901 - protein, 11 aa, Homo Sapiens
QVPLDCVLYRY

SEQ ID NO: 13902 - protein, 11 aa, Homo Sapiens
PLDCVLYRYGS

SEQ ID NO: 13903 - protein, 11 aa, Homo Sapiens
CVLYRYGSFSV

SEQ ID NO: 13904 - protein, 11 aa, Homo Sapiens
VLYRYGSFSVT

SEQ ID NO: 13905 - protein, 11 aa, Homo Sapiens
LYRYGSFSVTL

SEQ ID NO: 13906 - protein, 11 aa, Homo Sapiens
RYGSFSVTLDI

SEQ ID NO: 13907 - protein, 11 aa, Homo Sapiens
YGSFSVTLDIV

SEQ ID NO: 13908 - protein, 11 aa, Homo Sapiens
FSVTLDIVQGI

SEQ ID NO: 13909 - protein, 11 aa, Homo Sapiens
TLDIVQGIESA

SEQ ID NO: 13910 - protein, 11 aa, Homo Sapiens
GIESAEILQAV

SEQ ID NO: 13911 - protein, 11 aa, Homo Sapiens
ESAEILQAVPS

SEQ ID NO: 13912 - protein, 11 aa, Homo Sapiens
AEILQAVPSGE

SEQ ID NO: 13913 - protein, 11 aa, Homo Sapiens
QAVPSGEGDAF

SEQ ID NO: 13914 - protein, 11 aa, Homo Sapiens
VPSGEGDAFEL

SEQ ID NO: 13915 - protein, 11 aa, Homo Sapiens
SGEGDAFELTV

SEQ ID NO: 13916 - protein, 11 aa, Homo Sapiens
FELTVSCQGGL

SEQ ID NO: 13917 - protein, 11 aa, Homo Sapiens
LTVSCQGGLPK

SEQ ID NO: 13918 - protein, 11 aa, Homo Sapiens
LPKEACMEISS

SEQ ID NO: 13919 - protein, 11 aa, Homo Sapiens
EISSPGCQPPA

SEQ ID NO: 13920 - protein, 11 aa, Homo Sapiens
SSPGCQPPAQR

SEQ ID NO: 13921 - protein, 11 aa, Homo Sapiens
QPPAQRLCQPV

SEQ ID NO: 13922 - protein, 11 aa, Homo Sapiens
PPAQRLCQPVL

SEQ ID NO: 13923 - protein, 11 aa, Homo Sapiens
RLCQPVLPSPA

SEQ ID NO: 13924 - protein, 11 aa, Homo Sapiens
QPVLPSPACQL

SEQ ID NO: 13925 - protein, 11 aa, Homo Sapiens
PVLPSPACQLV

SEQ ID NO: 13926 - protein, 11 aa, Homo Sapiens
VLPSPACQLVL

SEQ ID NO: 13927 - protein, 11 aa, Homo Sapiens
LPSPACQLVLH

SEQ ID NO: 13928 - protein, 11 aa, Homo Sapiens
SPACQLVLHQI

SEQ ID NO: 13929 - protein, 11 aa, Homo Sapiens
ACQLVLHQILK

SEQ ID NO: 13930 - protein, 11 aa, Homo Sapiens
HQILKGGSGTY

SEQ ID NO: 13931 - protein, 11 aa, Homo Sapiens
ILKGGSGTYCL

SEQ ID NO: 13932 - protein, 11 aa, Homo Sapiens
NVSLADTNSLA

SEQ ID NO: 13933 - protein, 11 aa, Homo Sapiens
SLADTNSLAVV

SEQ ID NO: 13934 - protein, 11 aa, Homo Sapiens
DTNSLAVVSTQ

SEQ ID NO: 13935 - protein, 11 aa, Homo Sapiens
NSLAVVSTQLI

SEQ ID NO: 13936 - protein, 11 aa, Homo Sapiens
SLAVVSTQLIM

SEQ ID NO: 13937 - protein, 11 aa, Homo Sapiens
STQLIMPGQEA

SEQ ID NO: 13938 - protein, 11 aa, Homo Sapiens
QLIMPGQEAGL

SEQ ID NO: 13939 - protein, 11 aa, Homo Sapiens
IMPGQEAGLGQ

SEQ ID NO: 13940 - protein, 11 aa, Homo Sapiens
MPGQEAGLGQV

SEQ ID NO: 13941 - protein, 11 aa, Homo Sapiens
GQEAGLGQVPL

SEQ ID NO: 13942 - protein, 11 aa, Homo Sapiens
EAGLGQVPLIV

SEQ ID NO: 13943 - protein, 11 aa, Homo Sapiens
GLGQVPLIVGI

SEQ ID NO: 13944 - protein, 11 aa, Homo Sapiens
GQVPLIVGILL

SEQ ID NO: 13945 - protein, 11 aa, Homo Sapiens
QVPLIVGILLV

SEQ ID NO: 13946 - protein, 11 aa, Homo Sapiens
VPLIVGILLVL

SEQ ID NO: 13947 - protein, 11 aa, Homo Sapiens
PLIVGILLVLM

SEQ ID NO: 13948 - protein, 11 aa, Homo Sapiens
LIVGILLVLMA

SEQ ID NO: 13949 - protein, 11 aa, Homo Sapiens
IVGILLVLMAV

SEQ ID NO: 13950 - protein, 11 aa, Homo Sapiens
GILLVLMAVVL

SEQ ID NO: 13951 - protein, 11 aa, Homo Sapiens
ILLVLMAVVLA

SEQ ID NO: 13952 - protein, 11 aa, Homo Sapiens
LVLMAVVLASL

SEQ ID NO: 13953 - protein, 11 aa, Homo Sapiens
VLMAVVLASLI

SEQ ID NO: 13954 - protein, 11 aa, Homo Sapiens
LMAVVLASLIY

SEQ ID NO: 13955 - protein, 11 aa, Homo Sapiens
MAVVLASLIYR

SEQ ID NO: 13956 - protein, 11 aa, Homo Sapiens
AVVLASLIYRR

SEQ ID NO: 13957 - protein, 11 aa, Homo Sapiens
VVLASLIYRRR

SEQ ID NO: 13958 - protein, 11 aa, Homo Sapiens
VLASLIYRRRL

SEQ ID NO: 13959 - protein, 11 aa, Homo Sapiens
ASLIYRRRLMK

SEQ ID NO: 13960 - protein, 11 aa, Homo Sapiens
IYRRRLMKQDF

SEQ ID NO: 13961 - protein, 11 aa, Homo Sapiens
RRRLMKQDFSV

SEQ ID NO: 13962 - protein, 11 aa, Homo Sapiens
RLMKQDFSVPQ

SEQ ID NO: 13963 - protein, 11 aa, Homo Sapiens
LMKQDFSVPQL

SEQ ID NO: 13964 - protein, 11 aa, Homo Sapiens
VPQLPHSSSHW

SEQ ID NO: 13965 - protein, 11 aa, Homo Sapiens
PQLPHSSSHWL

SEQ ID NO: 13966 - protein, 11 aa, Homo Sapiens
QLPHSSSHWLR

SEQ ID NO: 13967 - protein, 11 aa, Homo Sapiens
LPHSSSHWLRL

SEQ ID NO: 13968 - protein, 11 aa, Homo Sapiens
HSSSHWLRLPR

SEQ ID NO: 13969 - protein, 11 aa, Homo Sapiens
RLPRIFCSCPI

SEQ ID NO: 13970 - protein, 11 aa, Homo Sapiens
CSCPIGENSPL

SEQ ID NO: 13971 - protein, 13 aa, Homo Sapiens
MDLVLKRCLLHLA

SEQ ID NO: 13972 - protein, 13 aa, Homo Sapiens
DLVLKRCLLHLAV

SEQ ID NO: 13973 - protein, 13 aa, Homo Sapiens
LVLKRCLLHLAVI

SEQ ID NO: 13974 - protein, 13 aa, Homo Sapiens
VLKRCLLHLAVIG

SEQ ID NO: 13975 - protein, 13 aa, Homo Sapiens
LKRCLLHLAVIGA

SEQ ID NO: 13976 - protein, 13 aa, Homo Sapiens
KRCLLHLAVIGAL

SEQ ID NO: 13977 - protein, 13 aa, Homo Sapiens
RCLLHLAVIGALL

SEQ ID NO: 13978 - protein, 13 aa, Homo Sapiens
CLLHLAVIGALLA

SEQ ID NO: 13979 - protein, 13 aa, Homo Sapiens
LLHLAVIGALLAV

SEQ ID NO: 13980 - protein, 13 aa, Homo Sapiens
LHLAVIGALLAVG

SEQ ID NO: 13981 - protein, 13 aa, Homo Sapiens
HLAVIGALLAVGA

SEQ ID NO: 13982 - protein, 13 aa, Homo Sapiens
LAVIGALLAVGAT

SEQ ID NO: 13983 - protein, 13 aa, Homo Sapiens
AVIGALLAVGATK

SEQ ID NO: 13984 - protein, 13 aa, Homo Sapiens
VIGALLAVGATKV

SEQ ID NO: 13985 - protein, 13 aa, Homo Sapiens
IGALLAVGATKVP

SEQ ID NO: 13986 - protein, 13 aa, Homo Sapiens
GALLAVGATKVPR

SEQ ID NO: 13987 - protein, 13 aa, Homo Sapiens
ALLAVGATKVPRN

SEQ ID NO: 13988 - protein, 13 aa, Homo Sapiens
LLAVGATKVPRNQ

SEQ ID NO: 13989 - protein, 13 aa, Homo Sapiens
LAVGATKVPRNQD

SEQ ID NO: 13990 - protein, 13 aa, Homo Sapiens
AVGATKVPRNQDW

SEQ ID NO: 13991 - protein, 13 aa, Homo Sapiens
VGATKVPRNQDWL

SEQ ID NO: 13992 - protein, 13 aa, Homo Sapiens
GATKVPRNQDWLG

SEQ ID NO: 13993 - protein, 13 aa, Homo Sapiens
ATKVPRNQDWLGV

SEQ ID NO: 13994 - protein, 13 aa, Homo Sapiens
TKVPRNQDWLGVS

SEQ ID NO: 13995 - protein, 13 aa, Homo Sapiens
KVPRNQDWLGVSR

SEQ ID NO: 13996 - protein, 13 aa, Homo Sapiens
VPRNQDWLGVSRQ

SEQ ID NO: 13997 - protein, 13 aa, Homo Sapiens
PRNQDWLGVSRQL

SEQ ID NO: 13998 - protein, 13 aa, Homo Sapiens
RNQDWLGVSRQLR

SEQ ID NO: 13999 - protein, 13 aa, Homo Sapiens
NQDWLGVSRQLRT

SEQ ID NO: 14000 - protein, 13 aa, Homo Sapiens
QDWLGVSRQLRTK

SEQ ID NO: 14001 - protein, 13 aa, Homo Sapiens
DWLGVSRQLRTKA

SEQ ID NO: 14002 - protein, 13 aa, Homo Sapiens
WLGVSRQLRTKAW

SEQ ID NO: 14003 - protein, 13 aa, Homo Sapiens
LGVSRQLRTKAWN

SEQ ID NO: 14004 - protein, 13 aa, Homo Sapiens
GVSRQLRTKAWNR

SEQ ID NO: 14005 - protein, 13 aa, Homo Sapiens
VSRQLRTKAWNRQ

SEQ ID NO: 14006 - protein, 13 aa, Homo Sapiens
SRQLRTKAWNRQL

SEQ ID NO: 14007 - protein, 13 aa, Homo Sapiens
RQLRTKAWNRQLY

SEQ ID NO: 14008 - protein, 13 aa, Homo Sapiens
QLRTKAWNRQLYP

SEQ ID NO: 14009 - protein, 13 aa, Homo Sapiens
LRTKAWNRQLYPE

SEQ ID NO: 14010 - protein, 13 aa, Homo Sapiens
RTKAWNRQLYPEW

SEQ ID NO: 14011 - protein, 13 aa, Homo Sapiens
TKAWNRQLYPEWT

SEQ ID NO: 14012 - protein, 13 aa, Homo Sapiens
KAWNRQLYPEWTE

SEQ ID NO: 14013 - protein, 13 aa, Homo Sapiens
AWNRQLYPEWTEA

SEQ ID NO: 14014 - protein, 13 aa, Homo Sapiens
WNRQLYPEWTEAQ

SEQ ID NO: 14015 - protein, 13 aa, Homo Sapiens
NRQLYPEWTEAQR

SEQ ID NO: 14016 - protein, 13 aa, Homo Sapiens
RQLYPEWTEAQRL

SEQ ID NO: 14017 - protein, 13 aa, Homo Sapiens
QLYPEWTEAQRLD

SEQ ID NO: 14018 - protein, 13 aa, Homo Sapiens
LYPEWTEAQRLDC

SEQ ID NO: 14019 - protein, 13 aa, Homo Sapiens
YPEWTEAQRLDCW

SEQ ID NO: 14020 - protein, 13 aa, Homo Sapiens
PEWTEAQRLDCWR

SEQ ID NO: 14021 - protein, 13 aa, Homo Sapiens
EWTEAQRLDCWRG

SEQ ID NO: 14022 - protein, 13 aa, Homo Sapiens
WTEAQRLDCWRGG

SEQ ID NO: 14023 - protein, 13 aa, Homo Sapiens
TEAQRLDCWRGGQ

SEQ ID NO: 14024 - protein, 13 aa, Homo Sapiens
EAQRLDCWRGGQV

SEQ ID NO: 14025 - protein, 13 aa, Homo Sapiens
AQRLDCWRGGQVS

SEQ ID NO: 14026 - protein, 13 aa, Homo Sapiens
QRLDCWRGGQVSL

SEQ ID NO: 14027 - protein, 13 aa, Homo Sapiens
RLDCWRGGQVSLK

SEQ ID NO: 14028 - protein, 13 aa, Homo Sapiens
LDCWRGGQVSLKV

SEQ ID NO: 14029 - protein, 13 aa, Homo Sapiens
DCWRGGQVSLKVS

SEQ ID NO: 14030 - protein, 13 aa, Homo Sapiens
CWRGGQVSLKVSN

SEQ ID NO: 14031 - protein, 13 aa, Homo Sapiens
WRGGQVSLKVSND

SEQ ID NO: 14032 - protein, 13 aa, Homo Sapiens
RGGQVSLKVSNDG

SEQ ID NO: 14033 - protein, 13 aa, Homo Sapiens
GGQVSLKVSNDGP

SEQ ID NO: 14034 - protein, 13 aa, Homo Sapiens
GQVSLKVSNDGPT

SEQ ID NO: 14035 - protein, 13 aa, Homo Sapiens
QVSLKVSNDGPTL

SEQ ID NO: 14036 - protein, 13 aa, Homo Sapiens
VSLKVSNDGPTLI

SEQ ID NO: 14037 - protein, 13 aa, Homo Sapiens
SLKVSNDGPTLIG

SEQ ID NO: 14038 - protein, 13 aa, Homo Sapiens
LKVSNDGPTLIGA

SEQ ID NO: 14039 - protein, 13 aa, Homo Sapiens
KVSNDGPTLIGAN

SEQ ID NO: 14040 - protein, 13 aa, Homo Sapiens
VSNDGPTLIGANA

SEQ ID NO: 14041 - protein, 13 aa, Homo Sapiens
SNDGPTLIGANAS

SEQ ID NO: 14042 - protein, 13 aa, Homo Sapiens
NDGPTLIGANASF

SEQ ID NO: 14043 - protein, 13 aa, Homo Sapiens
DGPTLIGANASFS

SEQ ID NO: 14044 - protein, 13 aa, Homo Sapiens
GPTLIGANASFSI

SEQ ID NO: 14045 - protein, 13 aa, Homo Sapiens
PTLIGANASFSIA

SEQ ID NO: 14046 - protein, 13 aa, Homo Sapiens
TLIGANASFSIAL

SEQ ID NO: 14047 - protein, 13 aa, Homo Sapiens
LIGANASFSIALN

SEQ ID NO: 14048 - protein, 13 aa, Homo Sapiens
IGANASFSIALNF

SEQ ID NO: 14049 - protein, 13 aa, Homo Sapiens
GANASFSIALNFP

SEQ ID NO: 14050 - protein, 13 aa, Homo Sapiens
ANASFSIALNFPG

SEQ ID NO: 14051 - protein, 13 aa, Homo Sapiens
NASFSIALNFPGS

SEQ ID NO: 14052 - protein, 13 aa, Homo Sapiens
ASFSIALNFPGSQ

SEQ ID NO: 14053 - protein, 13 aa, Homo Sapiens
SFSIALNFPGSQK

SEQ ID NO: 14054 - protein, 13 aa, Homo Sapiens
FSIALNFPGSQKV

SEQ ID NO: 14055 - protein, 13 aa, Homo Sapiens
SIALNFPGSQKVL

SEQ ID NO: 14056 - protein, 13 aa, Homo Sapiens
IALNFPGSQKVLP

SEQ ID NO: 14057 - protein, 13 aa, Homo Sapiens
ALNFPGSQKVLPD

SEQ ID NO: 14058 - protein, 13 aa, Homo Sapiens
LNFPGSQKVLPDG

SEQ ID NO: 14059 - protein, 13 aa, Homo Sapiens
NFPGSQKVLPDGQ

SEQ ID NO: 14060 - protein, 13 aa, Homo Sapiens
FPGSQKVLPDGQV

SEQ ID NO: 14061 - protein, 13 aa, Homo Sapiens
PGSQKVLPDGQVI

SEQ ID NO: 14062 - protein, 13 aa, Homo Sapiens
GSQKVLPDGQVIW

SEQ ID NO: 14063 - protein, 13 aa, Homo Sapiens
SQKVLPDGQVIWV

SEQ ID NO: 14064 - protein, 13 aa, Homo Sapiens
QKVLPDGQVIWVN

SEQ ID NO: 14065 - protein, 13 aa, Homo Sapiens
KVLPDGQVIWVNN

SEQ ID NO: 14066 - protein, 13 aa, Homo Sapiens
VLPDGQVIWVNNT

SEQ ID NO: 14067 - protein, 13 aa, Homo Sapiens
LPDGQVIWVNNTI

SEQ ID NO: 14068 - protein, 13 aa, Homo Sapiens
PDGQVIWVNNTII

SEQ ID NO: 14069 - protein, 13 aa, Homo Sapiens
DGQVIWVNNTIIN

SEQ ID NO: 14070 - protein, 13 aa, Homo Sapiens
GQVIWVNNTIING

SEQ ID NO: 14071 - protein, 13 aa, Homo Sapiens
QVIWVNNTIINGS

SEQ ID NO: 14072 - protein, 13 aa, Homo Sapiens
VIWVNNTIINGSQ

SEQ ID NO: 14073 - protein, 13 aa, Homo Sapiens
IWVNNTIINGSQV

SEQ ID NO: 14074 - protein, 13 aa, Homo Sapiens
WVNNTIINGSQVW

SEQ ID NO: 14075 - protein, 13 aa, Homo Sapiens
VNNTIINGSQVWG

SEQ ID NO: 14076 - protein, 13 aa, Homo Sapiens
NNTIINGSQVWGG

SEQ ID NO: 14077 - protein, 13 aa, Homo Sapiens
NTIINGSQVWGGQ

SEQ ID NO: 14078 - protein, 13 aa, Homo Sapiens
TIINGSQVWGGQP

SEQ ID NO: 14079 - protein, 13 aa, Homo Sapiens
IINGSQVWGGQPV

SEQ ID NO: 14080 - protein, 13 aa, Homo Sapiens
INGSQVWGGQPVY

SEQ ID NO: 14081 - protein, 13 aa, Homo Sapiens
NGSQVWGGQPVYP

SEQ ID NO: 14082 - protein, 13 aa, Homo Sapiens
GSQVWGGQPVYPQ

SEQ ID NO: 14083 - protein, 13 aa, Homo Sapiens
SQVWGGQPVYPQE

SEQ ID NO: 14084 - protein, 13 aa, Homo Sapiens
QVWGGQPVYPQET

SEQ ID NO: 14085 - protein, 13 aa, Homo Sapiens
VWGGQPVYPQETD

SEQ ID NO: 14086 - protein, 13 aa, Homo Sapiens
WGGQPVYPQETDD

SEQ ID NO: 14087 - protein, 13 aa, Homo Sapiens
GGQPVYPQETDDA

SEQ ID NO: 14088 - protein, 13 aa, Homo Sapiens
GQPVYPQETDDAC

SEQ ID NO: 14089 - protein, 13 aa, Homo Sapiens
QPVYPQETDDACI

SEQ ID NO: 14090 - protein, 13 aa, Homo Sapiens
PVYPQETDDACIF

SEQ ID NO: 14091 - protein, 13 aa, Homo Sapiens
VYPQETDDACIFP

SEQ ID NO: 14092 - protein, 13 aa, Homo Sapiens
YPQETDDACIFPD

SEQ ID NO: 14093 - protein, 13 aa, Homo Sapiens
PQETDDACIFPDG

SEQ ID NO: 14094 - protein, 13 aa, Homo Sapiens
QETDDACIFPDGG

SEQ ID NO: 14095 - protein, 13 aa, Homo Sapiens
ETDDACIFPDGGP

SEQ ID NO: 14096 - protein, 13 aa, Homo Sapiens
TDDACIFPDGGPC

SEQ ID NO: 14097 - protein, 13 aa, Homo Sapiens
DDACIFPDGGPCP

SEQ ID NO: 14098 - protein, 13 aa, Homo Sapiens
DACIFPDGGPCPS

SEQ ID NO: 14099 - protein, 13 aa, Homo Sapiens
ACIFPDGGPCPSG

SEQ ID NO: 14100 - protein, 13 aa, Homo Sapiens
CIFPDGGPCPSGS

SEQ ID NO: 14101 - protein, 13 aa, Homo Sapiens
IFPDGGPCPSGSW

SEQ ID NO: 14102 - protein, 13 aa, Homo Sapiens
FPDGGPCPSGSWS

SEQ ID NO: 14103 - protein, 13 aa, Homo Sapiens
PDGGPCPSGSWSQ

SEQ ID NO: 14104 - protein, 13 aa, Homo Sapiens
DGGPCPSGSWSQK

SEQ ID NO: 14105 - protein, 13 aa, Homo Sapiens
GGPCPSGSWSQKR

SEQ ID NO: 14106 - protein, 13 aa, Homo Sapiens
GPCPSGSWSQKRS

SEQ ID NO: 14107 - protein, 13 aa, Homo Sapiens
PCPSGSWSQKRSF

SEQ ID NO: 14108 - protein, 13 aa, Homo Sapiens
CPSGSWSQKRSFV

SEQ ID NO: 14109 - protein, 13 aa, Homo Sapiens
PSGSWSQKRSFVY

SEQ ID NO: 14110 - protein, 13 aa, Homo Sapiens
SGSWSQKRSFVYV

SEQ ID NO: 14111 - protein, 13 aa, Homo Sapiens
GSWSQKRSFVYVW

SEQ ID NO: 14112 - protein, 13 aa, Homo Sapiens
SWSQKRSFVYVWK

SEQ ID NO: 14113 - protein, 13 aa, Homo Sapiens
WSQKRSFVYVWKT

SEQ ID NO: 14114 - protein, 13 aa, Homo Sapiens
SQKRSFVYVWKTW

SEQ ID NO: 14115 - protein, 13 aa, Homo Sapiens
QKRSFVYVWKTWG

SEQ ID NO: 14116 - protein, 13 aa, Homo Sapiens
KRSFVYVWKTWGQ

SEQ ID NO: 14117 - protein, 13 aa, Homo Sapiens
RSFVYVWKTWGQY

SEQ ID NO: 14118 - protein, 13 aa, Homo Sapiens
SFVYVWKTWGQYW

SEQ ID NO: 14119 - protein, 13 aa, Homo Sapiens
FVYVWKTWGQYWQ

SEQ ID NO: 14120 - protein, 13 aa, Homo Sapiens
VYVWKTWGQYWQV

SEQ ID NO: 14121 - protein, 13 aa, Homo Sapiens
YVWKTWGQYWQVL

SEQ ID NO: 14122 - protein, 13 aa, Homo Sapiens
VWKTWGQYWQVLG

SEQ ID NO: 14123 - protein, 13 aa, Homo Sapiens
WKTWGQYWQVLGG

SEQ ID NO: 14124 - protein, 13 aa, Homo Sapiens
KTWGQYWQVLGGP

SEQ ID NO: 14125 - protein, 13 aa, Homo Sapiens
TWGQYWQVLGGPV

SEQ ID NO: 14126 - protein, 13 aa, Homo Sapiens
WGQYWQVLGGPVS

SEQ ID NO: 14127 - protein, 13 aa, Homo Sapiens
GQYWQVLGGPVSG

SEQ ID NO: 14128 - protein, 13 aa, Homo Sapiens
QYWQVLGGPVSGL

SEQ ID NO: 14129 - protein, 13 aa, Homo Sapiens
YWQVLGGPVSGLS

SEQ ID NO: 14130 - protein, 13 aa, Homo Sapiens
WQVLGGPVSGLSI

SEQ ID NO: 14131 - protein, 13 aa, Homo Sapiens
QVLGGPVSGLSIG

SEQ ID NO: 14132 - protein, 13 aa, Homo Sapiens
VLGGPVSGLSIGT

SEQ ID NO: 14133 - protein, 13 aa, Homo Sapiens
LGGPVSGLSIGTG

SEQ ID NO: 14134 - protein, 13 aa, Homo Sapiens
GGPVSGLSIGTGR

SEQ ID NO: 14135 - protein, 13 aa, Homo Sapiens
GPVSGLSIGTGRA

SEQ ID NO: 14136 - protein, 13 aa, Homo Sapiens
PVSGLSIGTGRAM

SEQ ID NO: 14137 - protein, 13 aa, Homo Sapiens
VSGLSIGTGRAML

SEQ ID NO: 14138 - protein, 13 aa, Homo Sapiens
SGLSIGTGRAMLG

SEQ ID NO: 14139 - protein, 13 aa, Homo Sapiens
GLSIGTGRAMLGT

SEQ ID NO: 14140 - protein, 13 aa, Homo Sapiens
LSIGTGRAMLGTH

SEQ ID NO: 14141 - protein, 13 aa, Homo Sapiens
SIGTGRAMLGTHT

SEQ ID NO: 14142 - protein, 13 aa, Homo Sapiens
IGTGRAMLGTHTM

SEQ ID NO: 14143 - protein, 13 aa, Homo Sapiens
GTGRAMLGTHTME

SEQ ID NO: 14144 - protein, 13 aa, Homo Sapiens
TGRAMLGTHTMEV

SEQ ID NO: 14145 - protein, 13 aa, Homo Sapiens
GRAMLGTHTMEVT

SEQ ID NO: 14146 - protein, 13 aa, Homo Sapiens
RAMLGTHTMEVTV

SEQ ID NO: 14147 - protein, 13 aa, Homo Sapiens
AMLGTHTMEVTVY

SEQ ID NO: 14148 - protein, 13 aa, Homo Sapiens
MLGTHTMEVTVYH

SEQ ID NO: 14149 - protein, 13 aa, Homo Sapiens
LGTHTMEVTVYHR

SEQ ID NO: 14150 - protein, 13 aa, Homo Sapiens
GTHTMEVTVYHRR

SEQ ID NO: 14151 - protein, 13 aa, Homo Sapiens
THTMEVTVYHRRG

SEQ ID NO: 14152 - protein, 13 aa, Homo Sapiens
HTMEVTVYHRRGS

SEQ ID NO: 14153 - protein, 13 aa, Homo Sapiens
TMEVTVYHRRGSR

SEQ ID NO: 14154 - protein, 13 aa, Homo Sapiens
MEVTVYHRRGSRS

SEQ ID NO: 14155 - protein, 13 aa, Homo Sapiens
EVTVYHRRGSRSY

SEQ ID NO: 14156 - protein, 13 aa, Homo Sapiens
VTVYHRRGSRSYV

SEQ ID NO: 14157 - protein, 13 aa, Homo Sapiens
TVYHRRGSRSYVP

SEQ ID NO: 14158 - protein, 13 aa, Homo Sapiens
VYHRRGSRSYVPL

SEQ ID NO: 14159 - protein, 13 aa, Homo Sapiens
YHRRGSRSYVPLA

SEQ ID NO: 14160 - protein, 13 aa, Homo Sapiens
HRRGSRSYVPLAH

SEQ ID NO: 14161 - protein, 13 aa, Homo Sapiens
RRGSRSYVPLAHS

SEQ ID NO: 14162 - protein, 13 aa, Homo Sapiens
RGSRSYVPLAHSS

SEQ ID NO: 14163 - protein, 13 aa, Homo Sapiens
GSRSYVPLAHSSS

SEQ ID NO: 14164 - protein, 13 aa, Homo Sapiens
SRSYVPLAHSSSA

SEQ ID NO: 14165 - protein, 13 aa, Homo Sapiens
RSYVPLAHSSSAF

SEQ ID NO: 14166 - protein, 13 aa, Homo Sapiens
SYVPLAHSSSAFT

SEQ ID NO: 14167 - protein, 13 aa, Homo Sapiens
YVPLAHSSSAFTI

SEQ ID NO: 14168 - protein, 13 aa, Homo Sapiens
VPLAHSSSAFTIT

SEQ ID NO: 14169 - protein, 13 aa, Homo Sapiens
PLAHSSSAFTITD

SEQ ID NO: 14170 - protein, 13 aa, Homo Sapiens
LAHSSSAFTITDQ

SEQ ID NO: 14171 - protein, 13 aa, Homo Sapiens
AHSSSAFTITDQV

SEQ ID NO: 14172 - protein, 13 aa, Homo Sapiens
HSSSAFTITDQVP

SEQ ID NO: 14173 - protein, 13 aa, Homo Sapiens
SSSAFTITDQVPF

SEQ ID NO: 14174 - protein, 13 aa, Homo Sapiens
SSAFTITDQVPFS

SEQ ID NO: 14175 - protein, 13 aa, Homo Sapiens
SAFTITDQVPFSV

SEQ ID NO: 14176 - protein, 13 aa, Homo Sapiens
AFTITDQVPFSVS

SEQ ID NO: 14177 - protein, 13 aa, Homo Sapiens
FTITDQVPFSVSV

SEQ ID NO: 14178 - protein, 13 aa, Homo Sapiens
TITDQVPFSVSVS

SEQ ID NO: 14179 - protein, 13 aa, Homo Sapiens
ITDQVPFSVSVSQ

SEQ ID NO: 14180 - protein, 13 aa, Homo Sapiens
TDQVPFSVSVSQL

SEQ ID NO: 14181 - protein, 13 aa, Homo Sapiens
DQVPFSVSVSQLR

SEQ ID NO: 14182 - protein, 13 aa, Homo Sapiens
QVPFSVSVSQLRA

SEQ ID NO: 14183 - protein, 13 aa, Homo Sapiens
VPFSVSVSQLRAL

SEQ ID NO: 14184 - protein, 13 aa, Homo Sapiens
PFSVSVSQLRALD

SEQ ID NO: 14185 - protein, 13 aa, Homo Sapiens
FSVSVSQLRALDG

SEQ ID NO: 14186 - protein, 13 aa, Homo Sapiens
SVSVSQLRALDGG

SEQ ID NO: 14187 - protein, 13 aa, Homo Sapiens
VSVSQLRALDGGN

SEQ ID NO: 14188 - protein, 13 aa, Homo Sapiens
SVSQLRALDGGNK

SEQ ID NO: 14189 - protein, 13 aa, Homo Sapiens
VSQLRALDGGNKH

SEQ ID NO: 14190 - protein, 13 aa, Homo Sapiens
SQLRALDGGNKHF

SEQ ID NO: 14191 - protein, 13 aa, Homo Sapiens
QLRALDGGNKHFL

SEQ ID NO: 14192 - protein, 13 aa, Homo Sapiens
LRALDGGNKHFLR

SEQ ID NO: 14193 - protein, 13 aa, Homo Sapiens
RALDGGNKHFLRN

SEQ ID NO: 14194 - protein, 13 aa, Homo Sapiens
ALDGGNKHFLRNQ

SEQ ID NO: 14195 - protein, 13 aa, Homo Sapiens
LDGGNKHFLRNQP

SEQ ID NO: 14196 - protein, 13 aa, Homo Sapiens
DGGNKHFLRNQPL

SEQ ID NO: 14197 - protein, 13 aa, Homo Sapiens
GGNKHFLRNQPLT

SEQ ID NO: 14198 - protein, 13 aa, Homo Sapiens
GNKHFLRNQPLTF

SEQ ID NO: 14199 - protein, 13 aa, Homo Sapiens
NKHFLRNQPLTFA

SEQ ID NO: 14200 - protein, 13 aa, Homo Sapiens
KHFLRNQPLTFAL

SEQ ID NO: 14201 - protein, 13 aa, Homo Sapiens
HFLRNQPLTFALQ

SEQ ID NO: 14202 - protein, 13 aa, Homo Sapiens
FLRNQPLTFALQL

SEQ ID NO: 14203 - protein, 13 aa, Homo Sapiens
LRNQPLTFALQLH

SEQ ID NO: 14204 - protein, 13 aa, Homo Sapiens
RNQPLTFALQLHD

SEQ ID NO: 14205 - protein, 13 aa, Homo Sapiens
NQPLTFALQLHDP

SEQ ID NO: 14206 - protein, 13 aa, Homo Sapiens
QPLTFALQLHDPS

SEQ ID NO: 14207 - protein, 13 aa, Homo Sapiens
PLTFALQLHDPSG

SEQ ID NO: 14208 - protein, 13 aa, Homo Sapiens
LTFALQLHDPSGY

SEQ ID NO: 14209 - protein, 13 aa, Homo Sapiens
TFALQLHDPSGYL

SEQ ID NO: 14210 - protein, 13 aa, Homo Sapiens
FALQLHDPSGYLA

SEQ ID NO: 14211 - protein, 13 aa, Homo Sapiens
ALQLHDPSGYLAE

SEQ ID NO: 14212 - protein, 13 aa, Homo Sapiens
LQLHDPSGYLAEA

SEQ ID NO: 14213 - protein, 13 aa, Homo Sapiens
QLHDPSGYLAEAD

SEQ ID NO: 14214 - protein, 13 aa, Homo Sapiens
LHDPSGYLAEADL

SEQ ID NO: 14215 - protein, 13 aa, Homo Sapiens
HDPSGYLAEADLS

SEQ ID NO: 14216 - protein, 13 aa, Homo Sapiens
DPSGYLAEADLSY

SEQ ID NO: 14217 - protein, 13 aa, Homo Sapiens
PSGYLAEADLSYT

SEQ ID NO: 14218 - protein, 13 aa, Homo Sapiens
SGYLAEADLSYTW

SEQ ID NO: 14219 - protein, 13 aa, Homo Sapiens
GYLAEADLSYTWD

SEQ ID NO: 14220 - protein, 13 aa, Homo Sapiens
YLAEADLSYTWDF

SEQ ID NO: 14221 - protein, 13 aa, Homo Sapiens
LAEADLSYTWDFG

SEQ ID NO: 14222 - protein, 13 aa, Homo Sapiens
AEADLSYTWDFGD

SEQ ID NO: 14223 - protein, 13 aa, Homo Sapiens
EADLSYTWDFGDS

SEQ ID NO: 14224 - protein, 13 aa, Homo Sapiens
ADLSYTWDFGDSS

SEQ ID NO: 14225 - protein, 13 aa, Homo Sapiens
DLSYTWDFGDSSG

SEQ ID NO: 14226 - protein, 13 aa, Homo Sapiens
LSYTWDFGDSSGT

SEQ ID NO: 14227 - protein, 13 aa, Homo Sapiens
SYTWDFGDSSGTL

SEQ ID NO: 14228 - protein, 13 aa, Homo Sapiens
YTWDFGDSSGTLI

SEQ ID NO: 14229 - protein, 13 aa, Homo Sapiens
TWDFGDSSGTLIS

SEQ ID NO: 14230 - protein, 13 aa, Homo Sapiens
WDFGDSSGTLISR

SEQ ID NO: 14231 - protein, 13 aa, Homo Sapiens
DFGDSSGTLISRA

SEQ ID NO: 14232 - protein, 13 aa, Homo Sapiens
FGDSSGTLISRAL

SEQ ID NO: 14233 - protein, 13 aa, Homo Sapiens
GDSSGTLISRALV

SEQ ID NO: 14234 - protein, 13 aa, Homo Sapiens
DSSGTLISRALVV

SEQ ID NO: 14235 - protein, 13 aa, Homo Sapiens
SSGTLISRALVVT

SEQ ID NO: 14236 - protein, 13 aa, Homo Sapiens
SGTLISRALVVTH

SEQ ID NO: 14237 - protein, 13 aa, Homo Sapiens
GTLISRALVVTHT

SEQ ID NO: 14238 - protein, 13 aa, Homo Sapiens
TLISRALVVTHTY

SEQ ID NO: 14239 - protein, 13 aa, Homo Sapiens
LISRALVVTHTYL

SEQ ID NO: 14240 - protein, 13 aa, Homo Sapiens
ISRALVVTHTYLE

SEQ ID NO: 14241 - protein, 13 aa, Homo Sapiens
SRALVVTHTYLEP

SEQ ID NO: 14242 - protein, 13 aa, Homo Sapiens
RALVVTHTYLEPG

SEQ ID NO: 14243 - protein, 13 aa, Homo Sapiens
ALVVTHTYLEPGP

SEQ ID NO: 14244 - protein, 13 aa, Homo Sapiens
LVVTHTYLEPGPV

SEQ ID NO: 14245 - protein, 13 aa, Homo Sapiens
VVTHTYLEPGPVT

SEQ ID NO: 14246 - protein, 13 aa, Homo Sapiens
VTHTYLEPGPVTA

SEQ ID NO: 14247 - protein, 13 aa, Homo Sapiens
THTYLEPGPVTAQ

SEQ ID NO: 14248 - protein, 13 aa, Homo Sapiens
HTYLEPGPVTAQV

SEQ ID NO: 14249 - protein, 13 aa, Homo Sapiens
TYLEPGPVTAQVV

SEQ ID NO: 14250 - protein, 13 aa, Homo Sapiens
YLEPGPVTAQVVL

SEQ ID NO: 14251 - protein, 13 aa, Homo Sapiens
LEPGPVTAQVVLQ

SEQ ID NO: 14252 - protein, 13 aa, Homo Sapiens
EPGPVTAQVVLQA

SEQ ID NO: 14253 - protein, 13 aa, Homo Sapiens
PGPVTAQVVLQAA

SEQ ID NO: 14254 - protein, 13 aa, Homo Sapiens
GPVTAQVVLQAAI

SEQ ID NO: 14255 - protein, 13 aa, Homo Sapiens
PVTAQVVLQAAIP

SEQ ID NO: 14256 - protein, 13 aa, Homo Sapiens
VTAQVVLQAAIPL

SEQ ID NO: 14257 - protein, 13 aa, Homo Sapiens
TAQVVLQAAIPLT

SEQ ID NO: 14258 - protein, 13 aa, Homo Sapiens
AQVVLQAAIPLTS

SEQ ID NO: 14259 - protein, 13 aa, Homo Sapiens
QVVLQAAIPLTSC

SEQ ID NO: 14260 - protein, 13 aa, Homo Sapiens
VVLQAAIPLTSCG

SEQ ID NO: 14261 - protein, 13 aa, Homo Sapiens
VLQAAIPLTSCGS

SEQ ID NO: 14262 - protein, 13 aa, Homo Sapiens
LQAAIPLTSCGSS

SEQ ID NO: 14263 - protein, 13 aa, Homo Sapiens
QAAIPLTSCGSSP

SEQ ID NO: 14264 - protein, 13 aa, Homo Sapiens
AAIPLTSCGSSPV

SEQ ID NO: 14265 - protein, 13 aa, Homo Sapiens
AIPLTSCGSSPVP

SEQ ID NO: 14266 - protein, 13 aa, Homo Sapiens
IPLTSCGSSPVPG

SEQ ID NO: 14267 - protein, 13 aa, Homo Sapiens
PLTSCGSSPVPGT

SEQ ID NO: 14268 - protein, 13 aa, Homo Sapiens
LTSCGSSPVPGTT

SEQ ID NO: 14269 - protein, 13 aa, Homo Sapiens
TSCGSSPVPGTTD

SEQ ID NO: 14270 - protein, 13 aa, Homo Sapiens
SCGSSPVPGTTDG

SEQ ID NO: 14271 - protein, 13 aa, Homo Sapiens
CGSSPVPGTTDGH

SEQ ID NO: 14272 - protein, 13 aa, Homo Sapiens
GSSPVPGTTDGHR

SEQ ID NO: 14273 - protein, 13 aa, Homo Sapiens
SSPVPGTTDGHRP

SEQ ID NO: 14274 - protein, 13 aa, Homo Sapiens
SPVPGTTDGHRPT

SEQ ID NO: 14275 - protein, 13 aa, Homo Sapiens
PVPGTTDGHRPTA

SEQ ID NO: 14276 - protein, 13 aa, Homo Sapiens
VPGTTDGHRPTAE

SEQ ID NO: 14277 - protein, 13 aa, Homo Sapiens
PGTTDGHRPTAEA

SEQ ID NO: 14278 - protein, 13 aa, Homo Sapiens
GTTDGHRPTAEAP

SEQ ID NO: 14279 - protein, 13 aa, Homo Sapiens
TTDGHRPTAEAPN

SEQ ID NO: 14280 - protein, 13 aa, Homo Sapiens
TDGHRPTAEAPNT

SEQ ID NO: 14281 - protein, 13 aa, Homo Sapiens
DGHRPTAEAPNTT

SEQ ID NO: 14282 - protein, 13 aa, Homo Sapiens
GHRPTAEAPNTTA

SEQ ID NO: 14283 - protein, 13 aa, Homo Sapiens
HRPTAEAPNTTAG

SEQ ID NO: 14284 - protein, 13 aa, Homo Sapiens
RPTAEAPNTTAGQ

SEQ ID NO: 14285 - protein, 13 aa, Homo Sapiens
PTAEAPNTTAGQV

SEQ ID NO: 14286 - protein, 13 aa, Homo Sapiens
TAEAPNTTAGQVP

SEQ ID NO: 14287 - protein, 13 aa, Homo Sapiens
AEAPNTTAGQVPT

SEQ ID NO: 14288 - protein, 13 aa, Homo Sapiens
EAPNTTAGQVPTT

SEQ ID NO: 14289 - protein, 13 aa, Homo Sapiens
APNTTAGQVPTTE

SEQ ID NO: 14290 - protein, 13 aa, Homo Sapiens
PNTTAGQVPTTEV

SEQ ID NO: 14291 - protein, 13 aa, Homo Sapiens
NTTAGQVPTTEVV

SEQ ID NO: 14292 - protein, 13 aa, Homo Sapiens
TTAGQVPTTEVVG

SEQ ID NO: 14293 - protein, 13 aa, Homo Sapiens
TAGQVPTTEVVGT

SEQ ID NO: 14294 - protein, 13 aa, Homo Sapiens
AGQVPTTEVVGTT

SEQ ID NO: 14295 - protein, 13 aa, Homo Sapiens
GQVPTTEVVGTTP

SEQ ID NO: 14296 - protein, 13 aa, Homo Sapiens
QVPTTEVVGTTPG

SEQ ID NO: 14297 - protein, 13 aa, Homo Sapiens
VPTTEVVGTTPGQ

SEQ ID NO: 14298 - protein, 13 aa, Homo Sapiens
PTTEVVGTTPGQA

SEQ ID NO: 14299 - protein, 13 aa, Homo Sapiens
TTEVVGTTPGQAP

SEQ ID NO: 14300 - protein, 13 aa, Homo Sapiens
TEVVGTTPGQAPT

SEQ ID NO: 14301 - protein, 13 aa, Homo Sapiens
EVVGTTPGQAPTA

SEQ ID NO: 14302 - protein, 13 aa, Homo Sapiens
VVGTTPGQAPTAE

SEQ ID NO: 14303 - protein, 13 aa, Homo Sapiens
VGTTPGQAPTAEP

SEQ ID NO: 14304 - protein, 13 aa, Homo Sapiens
GTTPGQAPTAEPS

SEQ ID NO: 14305 - protein, 13 aa, Homo Sapiens
TTPGQAPTAEPSG

SEQ ID NO: 14306 - protein, 13 aa, Homo Sapiens
TPGQAPTAEPSGT

SEQ ID NO: 14307 - protein, 13 aa, Homo Sapiens
PGQAPTAEPSGTT

SEQ ID NO: 14308 - protein, 13 aa, Homo Sapiens
GQAPTAEPSGTTS

SEQ ID NO: 14309 - protein, 13 aa, Homo Sapiens
QAPTAEPSGTTSV

SEQ ID NO: 14310 - protein, 13 aa, Homo Sapiens
APTAEPSGTTSVQ

SEQ ID NO: 14311 - protein, 13 aa, Homo Sapiens
PTAEPSGTTSVQV

SEQ ID NO: 14312 - protein, 13 aa, Homo Sapiens
TAEPSGTTSVQVP

SEQ ID NO: 14313 - protein, 13 aa, Homo Sapiens
AEPSGTTSVQVPT

SEQ ID NO: 14314 - protein, 13 aa, Homo Sapiens
EPSGTTSVQVPTT

SEQ ID NO: 14315 - protein, 13 aa, Homo Sapiens
PSGTTSVQVPTTE

SEQ ID NO: 14316 - protein, 13 aa, Homo Sapiens
SGTTSVQVPTTEV

SEQ ID NO: 14317 - protein, 13 aa, Homo Sapiens
GTTSVQVPTTEVI

SEQ ID NO: 14318 - protein, 13 aa, Homo Sapiens
TTSVQVPTTEVIS

SEQ ID NO: 14319 - protein, 13 aa, Homo Sapiens
TSVQVPTTEVIST

SEQ ID NO: 14320 - protein, 13 aa, Homo Sapiens
SVQVPTTEVISTA

SEQ ID NO: 14321 - protein, 13 aa, Homo Sapiens
VQVPTTEVISTAP

SEQ ID NO: 14322 - protein, 13 aa, Homo Sapiens
QVPTTEVISTAPV

SEQ ID NO: 14323 - protein, 13 aa, Homo Sapiens
VPTTEVISTAPVQ

SEQ ID NO: 14324 - protein, 13 aa, Homo Sapiens
PTTEVISTAPVQM

SEQ ID NO: 14325 - protein, 13 aa, Homo Sapiens
TTEVISTAPVQMP

SEQ ID NO: 14326 - protein, 13 aa, Homo Sapiens
TEVISTAPVQMPT

SEQ ID NO: 14327 - protein, 13 aa, Homo Sapiens
EVISTAPVQMPTA

SEQ ID NO: 14328 - protein, 13 aa, Homo Sapiens
VISTAPVQMPTAE

SEQ ID NO: 14329 - protein, 13 aa, Homo Sapiens
ISTAPVQMPTAES

SEQ ID NO: 14330 - protein, 13 aa, Homo Sapiens
STAPVQMPTAEST

SEQ ID NO: 14331 - protein, 13 aa, Homo Sapiens
TAPVQMPTAESTG

SEQ ID NO: 14332 - protein, 13 aa, Homo Sapiens
APVQMPTAESTGM

SEQ ID NO: 14333 - protein, 13 aa, Homo Sapiens
PVQMPTAESTGMT

SEQ ID NO: 14334 - protein, 13 aa, Homo Sapiens
VQMPTAESTGMTP

SEQ ID NO: 14335 - protein, 13 aa, Homo Sapiens
QMPTAESTGMTPE

SEQ ID NO: 14336 - protein, 13 aa, Homo Sapiens
MPTAESTGMTPEK

SEQ ID NO: 14337 - protein, 13 aa, Homo Sapiens
PTAESTGMTPEKV

SEQ ID NO: 14338 - protein, 13 aa, Homo Sapiens
TAESTGMTPEKVP

SEQ ID NO: 14339 - protein, 13 aa, Homo Sapiens
AESTGMTPEKVPV

SEQ ID NO: 14340 - protein, 13 aa, Homo Sapiens
ESTGMTPEKVPVS

SEQ ID NO: 14341 - protein, 13 aa, Homo Sapiens
STGMTPEKVPVSE

SEQ ID NO: 14342 - protein, 13 aa, Homo Sapiens
TGMTPEKVPVSEV

SEQ ID NO: 14343 - protein, 13 aa, Homo Sapiens
GMTPEKVPVSEVM

SEQ ID NO: 14344 - protein, 13 aa, Homo Sapiens
MTPEKVPVSEVMG

SEQ ID NO: 14345 - protein, 13 aa, Homo Sapiens
TPEKVPVSEVMGT

SEQ ID NO: 14346 - protein, 13 aa, Homo Sapiens
PEKVPVSEVMGTT

SEQ ID NO: 14347 - protein, 13 aa, Homo Sapiens
EKVPVSEVMGTTL

SEQ ID NO: 14348 - protein, 13 aa, Homo Sapiens
KVPVSEVMGTTLA

SEQ ID NO: 14349 - protein, 13 aa, Homo Sapiens
VPVSEVMGTTLAE

SEQ ID NO: 14350 - protein, 13 aa, Homo Sapiens
PVSEVMGTTLAEM

SEQ ID NO: 14351 - protein, 13 aa, Homo Sapiens
VSEVMGTTLAEMS

SEQ ID NO: 14352 - protein, 13 aa, Homo Sapiens
SEVMGTTLAEMST

SEQ ID NO: 14353 - protein, 13 aa, Homo Sapiens
EVMGTTLAEMSTP

SEQ ID NO: 14354 - protein, 13 aa, Homo Sapiens
VMGTTLAEMSTPE

SEQ ID NO: 14355 - protein, 13 aa, Homo Sapiens
MGTTLAEMSTPEA

SEQ ID NO: 14356 - protein, 13 aa, Homo Sapiens
GTTLAEMSTPEAT

SEQ ID NO: 14357 - protein, 13 aa, Homo Sapiens
TTLAEMSTPEATG

SEQ ID NO: 14358 - protein, 13 aa, Homo Sapiens
TLAEMSTPEATGM

SEQ ID NO: 14359 - protein, 13 aa, Homo Sapiens
LAEMSTPEATGMT

SEQ ID NO: 14360 - protein, 13 aa, Homo Sapiens
AEMSTPEATGMTP

SEQ ID NO: 14361 - protein, 13 aa, Homo Sapiens
EMSTPEATGMTPA

SEQ ID NO: 14362 - protein, 13 aa, Homo Sapiens
MSTPEATGMTPAE

SEQ ID NO: 14363 - protein, 13 aa, Homo Sapiens
STPEATGMTPAEV

SEQ ID NO: 14364 - protein, 13 aa, Homo Sapiens
TPEATGMTPAEVS

SEQ ID NO: 14365 - protein, 13 aa, Homo Sapiens
PEATGMTPAEVSI

SEQ ID NO: 14366 - protein, 13 aa, Homo Sapiens
EATGMTPAEVSIV

SEQ ID NO: 14367 - protein, 13 aa, Homo Sapiens
ATGMTPAEVSIVV

SEQ ID NO: 14368 - protein, 13 aa, Homo Sapiens
TGMTPAEVSIVVL

SEQ ID NO: 14369 - protein, 13 aa, Homo Sapiens
GMTPAEVSIVVLS

SEQ ID NO: 14370 - protein, 13 aa, Homo Sapiens
MTPAEVSIVVLSG

SEQ ID NO: 14371 - protein, 13 aa, Homo Sapiens
TPAEVSIVVLSGT

SEQ ID NO: 14372 - protein, 13 aa, Homo Sapiens
PAEVSIVVLSGTT

SEQ ID NO: 14373 - protein, 13 aa, Homo Sapiens
AEVSIVVLSGTTA

SEQ ID NO: 14374 - protein, 13 aa, Homo Sapiens
EVSIVVLSGTTAA

SEQ ID NO: 14375 - protein, 13 aa, Homo Sapiens
VSIVVLSGTTAAQ

SEQ ID NO: 14376 - protein, 13 aa, Homo Sapiens
SIVVLSGTTAAQV

SEQ ID NO: 14377 - protein, 13 aa, Homo Sapiens
IVVLSGTTAAQVT

SEQ ID NO: 14378 - protein, 13 aa, Homo Sapiens
VVLSGTTAAQVTT

SEQ ID NO: 14379 - protein, 13 aa, Homo Sapiens
VLSGTTAAQVTTT

SEQ ID NO: 14380 - protein, 13 aa, Homo Sapiens
LSGTTAAQVTTTE

SEQ ID NO: 14381 - protein, 13 aa, Homo Sapiens
SGTTAAQVTTTEW

SEQ ID NO: 14382 - protein, 13 aa, Homo Sapiens
GTTAAQVTTTEWV

SEQ ID NO: 14383 - protein, 13 aa, Homo Sapiens
TTAAQVTTTEWVE

SEQ ID NO: 14384 - protein, 13 aa, Homo Sapiens
TAAQVTTTEWVET

SEQ ID NO: 14385 - protein, 13 aa, Homo Sapiens
AAQVTTTEWVETT

SEQ ID NO: 14386 - protein, 13 aa, Homo Sapiens
AQVTTTEWVETTA

SEQ ID NO: 14387 - protein, 13 aa, Homo Sapiens
QVTTTEWVETTAR

SEQ ID NO: 14388 - protein, 13 aa, Homo Sapiens
VTTTEWVETTARE

SEQ ID NO: 14389 - protein, 13 aa, Homo Sapiens
TTTEWVETTAREL

SEQ ID NO: 14390 - protein, 13 aa, Homo Sapiens
TTEWVETTARELP

SEQ ID NO: 14391 - protein, 13 aa, Homo Sapiens
TEWVETTARELPI

SEQ ID NO: 14392 - protein, 13 aa, Homo Sapiens
EWVETTARELPIP

SEQ ID NO: 14393 - protein, 13 aa, Homo Sapiens
WVETTARELPIPE

SEQ ID NO: 14394 - protein, 13 aa, Homo Sapiens
VETTARELPIPEP

SEQ ID NO: 14395 - protein, 13 aa, Homo Sapiens
ETTARELPIPEPE

SEQ ID NO: 14396 - protein, 13 aa, Homo Sapiens
TTARELPIPEPEG

SEQ ID NO: 14397 - protein, 13 aa, Homo Sapiens
TARELPIPEPEGP

SEQ ID NO: 14398 - protein, 13 aa, Homo Sapiens
ARELPIPEPEGPD

SEQ ID NO: 14399 - protein, 13 aa, Homo Sapiens
RELPIPEPEGPDA

SEQ ID NO: 14400 - protein, 13 aa, Homo Sapiens
ELPIPEPEGPDAS

SEQ ID NO: 14401 - protein, 13 aa, Homo Sapiens
LPIPEPEGPDASS

SEQ ID NO: 14402 - protein, 13 aa, Homo Sapiens
PIPEPEGPDASSI

SEQ ID NO: 14403 - protein, 13 aa, Homo Sapiens
IPEPEGPDASSIM

SEQ ID NO: 14404 - protein, 13 aa, Homo Sapiens
PEPEGPDASSIMS

SEQ ID NO: 14405 - protein, 13 aa, Homo Sapiens
EPEGPDASSIMST

SEQ ID NO: 14406 - protein, 13 aa, Homo Sapiens
PEGPDASSIMSTE

SEQ ID NO: 14407 - protein, 13 aa, Homo Sapiens
EGPDASSIMSTES

SEQ ID NO: 14408 - protein, 13 aa, Homo Sapiens
GPDASSIMSTESI

SEQ ID NO: 14409 - protein, 13 aa, Homo Sapiens
PDASSIMSTESIT

SEQ ID NO: 14410 - protein, 13 aa, Homo Sapiens
DASSIMSTESITG

SEQ ID NO: 14411 - protein, 13 aa, Homo Sapiens
ASSIMSTESITGS

SEQ ID NO: 14412 - protein, 13 aa, Homo Sapiens
SSIMSTESITGSL

SEQ ID NO: 14413 - protein, 13 aa, Homo Sapiens
SIMSTESITGSLG

SEQ ID NO: 14414 - protein, 13 aa, Homo Sapiens
IMSTESITGSLGP

SEQ ID NO: 14415 - protein, 13 aa, Homo Sapiens
MSTESITGSLGPL

SEQ ID NO: 14416 - protein, 13 aa, Homo Sapiens
STESITGSLGPLL

SEQ ID NO: 14417 - protein, 13 aa, Homo Sapiens
TESITGSLGPLLD

SEQ ID NO: 14418 - protein, 13 aa, Homo Sapiens
ESITGSLGPLLDG

SEQ ID NO: 14419 - protein, 13 aa, Homo Sapiens
SITGSLGPLLDGT

SEQ ID NO: 14420 - protein, 13 aa, Homo Sapiens
ITGSLGPLLDGTA

SEQ ID NO: 14421 - protein, 13 aa, Homo Sapiens
TGSLGPLLDGTAT

SEQ ID NO: 14422 - protein, 13 aa, Homo Sapiens
GSLGPLLDGTATL

SEQ ID NO: 14423 - protein, 13 aa, Homo Sapiens
SLGPLLDGTATLR

SEQ ID NO: 14424 - protein, 13 aa, Homo Sapiens
LGPLLDGTATLRL

SEQ ID NO: 14425 - protein, 13 aa, Homo Sapiens
GPLLDGTATLRLV

SEQ ID NO: 14426 - protein, 13 aa, Homo Sapiens
PLLDGTATLRLVK

SEQ ID NO: 14427 - protein, 13 aa, Homo Sapiens
LLDGTATLRLVKR

SEQ ID NO: 14428 - protein, 13 aa, Homo Sapiens
LDGTATLRLVKRQ

SEQ ID NO: 14429 - protein, 13 aa, Homo Sapiens
DGTATLRLVKRQV

SEQ ID NO: 14430 - protein, 13 aa, Homo Sapiens
GTATLRLVKRQVP

SEQ ID NO: 14431 - protein, 13 aa, Homo Sapiens
TATLRLVKRQVPL

SEQ ID NO: 14432 - protein, 13 aa, Homo Sapiens
ATLRLVKRQVPLD

SEQ ID NO: 14433 - protein, 13 aa, Homo Sapiens
TLRLVKRQVPLDC

SEQ ID NO: 14434 - protein, 13 aa, Homo Sapiens
LRLVKRQVPLDCV

SEQ ID NO: 14435 - protein, 13 aa, Homo Sapiens
RLVKRQVPLDCVL

SEQ ID NO: 14436 - protein, 13 aa, Homo Sapiens
LVKRQVPLDCVLY

SEQ ID NO: 14437 - protein, 13 aa, Homo Sapiens
VKRQVPLDCVLYR

SEQ ID NO: 14438 - protein, 13 aa, Homo Sapiens
KRQVPLDCVLYRY

SEQ ID NO: 14439 - protein, 13 aa, Homo Sapiens
RQVPLDCVLYRYG

SEQ ID NO: 14440 - protein, 13 aa, Homo Sapiens
QVPLDCVLYRYGS

SEQ ID NO: 14441 - protein, 13 aa, Homo Sapiens
VPLDCVLYRYGSF

SEQ ID NO: 14442 - protein, 13 aa, Homo Sapiens
PLDCVLYRYGSFS

SEQ ID NO: 14443 - protein, 13 aa, Homo Sapiens
LDCVLYRYGSFSV

SEQ ID NO: 14444 - protein, 13 aa, Homo Sapiens
DCVLYRYGSFSVT

SEQ ID NO: 14445 - protein, 13 aa, Homo Sapiens
CVLYRYGSFSVTL

SEQ ID NO: 14446 - protein, 13 aa, Homo Sapiens
VLYRYGSFSVTLD

SEQ ID NO: 14447 - protein, 13 aa, Homo Sapiens
LYRYGSFSVTLDI

SEQ ID NO: 14448 - protein, 13 aa, Homo Sapiens
YRYGSFSVTLDIV

SEQ ID NO: 14449 - protein, 13 aa, Homo Sapiens
RYGSFSVTLDIVQ

SEQ ID NO: 14450 - protein, 13 aa, Homo Sapiens
YGSFSVTLDIVQG

SEQ ID NO: 14451 - protein, 13 aa, Homo Sapiens
GSFSVTLDIVQGI

SEQ ID NO: 14452 - protein, 13 aa, Homo Sapiens
SFSVTLDIVQGIE

SEQ ID NO: 14453 - protein, 13 aa, Homo Sapiens
FSVTLDIVQGIES

SEQ ID NO: 14454 - protein, 13 aa, Homo Sapiens
SVTLDIVQGIESA

SEQ ID NO: 14455 - protein, 13 aa, Homo Sapiens
VTLDIVQGIESAE

SEQ ID NO: 14456 - protein, 13 aa, Homo Sapiens
TLDIVQGIESAEI

SEQ ID NO: 14457 - protein, 13 aa, Homo Sapiens
LDIVQGIESAEIL

SEQ ID NO: 14458 - protein, 13 aa, Homo Sapiens
DIVQGIESAEILQ

SEQ ID NO: 14459 - protein, 13 aa, Homo Sapiens
IVQGIESAEILQA

SEQ ID NO: 14460 - protein, 13 aa, Homo Sapiens
VQGIESAEILQAV

SEQ ID NO: 14461 - protein, 13 aa, Homo Sapiens
QGIESAEILQAVP

SEQ ID NO: 14462 - protein, 13 aa, Homo Sapiens
GIESAEILQAVPS

SEQ ID NO: 14463 - protein, 13 aa, Homo Sapiens
IESAEILQAVPSG

SEQ ID NO: 14464 - protein, 13 aa, Homo Sapiens
ESAEILQAVPSGE

SEQ ID NO: 14465 - protein, 13 aa, Homo Sapiens
SAEILQAVPSGEG

SEQ ID NO: 14466 - protein, 13 aa, Homo Sapiens
AEILQAVPSGEGD

SEQ ID NO: 14467 - protein, 13 aa, Homo Sapiens
EILQAVPSGEGDA

SEQ ID NO: 14468 - protein, 13 aa, Homo Sapiens
ILQAVPSGEGDAF

SEQ ID NO: 14469 - protein, 13 aa, Homo Sapiens
LQAVPSGEGDAFE

SEQ ID NO: 14470 - protein, 13 aa, Homo Sapiens
QAVPSGEGDAFEL

SEQ ID NO: 14471 - protein, 13 aa, Homo Sapiens
AVPSGEGDAFELT

SEQ ID NO: 14472 - protein, 13 aa, Homo Sapiens
VPSGEGDAFELTV

SEQ ID NO: 14473 - protein, 13 aa, Homo Sapiens
PSGEGDAFELTVS

SEQ ID NO: 14474 - protein, 13 aa, Homo Sapiens
SGEGDAFELTVSC

SEQ ID NO: 14475 - protein, 13 aa, Homo Sapiens
GEGDAFELTVSCQ

SEQ ID NO: 14476 - protein, 13 aa, Homo Sapiens
EGDAFELTVSCQG

SEQ ID NO: 14477 - protein, 13 aa, Homo Sapiens
GDAFELTVSCQGG

SEQ ID NO: 14478 - protein, 13 aa, Homo Sapiens
DAFELTVSCQGGL

SEQ ID NO: 14479 - protein, 13 aa, Homo Sapiens
AFELTVSCQGGLP

SEQ ID NO: 14480 - protein, 13 aa, Homo Sapiens
FELTVSCQGGLPK

SEQ ID NO: 14481 - protein, 13 aa, Homo Sapiens
ELTVSCQGGLPKE

SEQ ID NO: 14482 - protein, 13 aa, Homo Sapiens
LTVSCQGGLPKEA

SEQ ID NO: 14483 - protein, 13 aa, Homo Sapiens
TVSCQGGLPKEAC

SEQ ID NO: 14484 - protein, 13 aa, Homo Sapiens
VSCQGGLPKEACM

SEQ ID NO: 14485 - protein, 13 aa, Homo Sapiens
SCQGGLPKEACME

SEQ ID NO: 14486 - protein, 13 aa, Homo Sapiens
CQGGLPKEACMEI

SEQ ID NO: 14487 - protein, 13 aa, Homo Sapiens
QGGLPKEACMEIS

SEQ ID NO: 14488 - protein, 13 aa, Homo Sapiens
GGLPKEACMEISS

SEQ ID NO: 14489 - protein, 13 aa, Homo Sapiens
GLPKEACMEISSP

SEQ ID NO: 14490 - protein, 13 aa, Homo Sapiens
LPKEACMEISSPG

SEQ ID NO: 14491 - protein, 13 aa, Homo Sapiens
PKEACMEISSPGC

SEQ ID NO: 14492 - protein, 13 aa, Homo Sapiens
KEACMEISSPGCQ

SEQ ID NO: 14493 - protein, 13 aa, Homo Sapiens
EACMEISSPGCQP

SEQ ID NO: 14494 - protein, 13 aa, Homo Sapiens
ACMEISSPGCQPP

SEQ ID NO: 14495 - protein, 13 aa, Homo Sapiens
CMEISSPGCQPPA

SEQ ID NO: 14496 - protein, 13 aa, Homo Sapiens
MEISSPGCQPPAQ

SEQ ID NO: 14497 - protein, 13 aa, Homo Sapiens
EISSPGCQPPAQR

SEQ ID NO: 14498 - protein, 13 aa, Homo Sapiens
ISSPGCQPPAQRL

SEQ ID NO: 14499 - protein, 13 aa, Homo Sapiens
SSPGCQPPAQRLC

SEQ ID NO: 14500 - protein, 13 aa, Homo Sapiens
SPGCQPPAQRLCQ

SEQ ID NO: 14501 - protein, 13 aa, Homo Sapiens
PGCQPPAQRLCQP

SEQ ID NO: 14502 - protein, 13 aa, Homo Sapiens
GCQPPAQRLCQPV

SEQ ID NO: 14503 - protein, 13 aa, Homo Sapiens
CQPPAQRLCQPVL

SEQ ID NO: 14504 - protein, 13 aa, Homo Sapiens
QPPAQRLCQPVLP

SEQ ID NO: 14505 - protein, 13 aa, Homo Sapiens
PPAQRLCQPVLPS

SEQ ID NO: 14506 - protein, 13 aa, Homo Sapiens
PAQRLCQPVLPSP

SEQ ID NO: 14507 - protein, 13 aa, Homo Sapiens
AQRLCQPVLPSPA

SEQ ID NO: 14508 - protein, 13 aa, Homo Sapiens
QRLCQPVLPSPAC

SEQ ID NO: 14509 - protein, 13 aa, Homo Sapiens
RLCQPVLPSPACQ

SEQ ID NO: 14510 - protein, 13 aa, Homo Sapiens
LCQPVLPSPACQL

SEQ ID NO: 14511 - protein, 13 aa, Homo Sapiens
CQPVLPSPACQLV

SEQ ID NO: 14512 - protein, 13 aa, Homo Sapiens
QPVLPSPACQLVL

SEQ ID NO: 14513 - protein, 13 aa, Homo Sapiens
PVLPSPACQLVLH

SEQ ID NO: 14514 - protein, 13 aa, Homo Sapiens
VLPSPACQLVLHQ

SEQ ID NO: 14515 - protein, 13 aa, Homo Sapiens
LPSPACQLVLHQI

SEQ ID NO: 14516 - protein, 13 aa, Homo Sapiens
PSPACQLVLHQIL

SEQ ID NO: 14517 - protein, 13 aa, Homo Sapiens
SPACQLVLHQILK

SEQ ID NO: 14518 - protein, 13 aa, Homo Sapiens
PACQLVLHQILKG

SEQ ID NO: 14519 - protein, 13 aa, Homo Sapiens
ACQLVLHQILKGG

SEQ ID NO: 14520 - protein, 13 aa, Homo Sapiens
CQLVLHQILKGGS

SEQ ID NO: 14521 - protein, 13 aa, Homo Sapiens
QLVLHQILKGGSG

SEQ ID NO: 14522 - protein, 13 aa, Homo Sapiens
LVLHQILKGGSGT

SEQ ID NO: 14523 - protein, 13 aa, Homo Sapiens
VLHQILKGGSGTY

SEQ ID NO: 14524 - protein, 13 aa, Homo Sapiens
LHQILKGGSGTYC

SEQ ID NO: 14525 - protein, 13 aa, Homo Sapiens
HQILKGGSGTYCL

SEQ ID NO: 14526 - protein, 13 aa, Homo Sapiens
QILKGGSGTYCLN

SEQ ID NO: 14527 - protein, 13 aa, Homo Sapiens
ILKGGSGTYCLNV

SEQ ID NO: 14528 - protein, 13 aa, Homo Sapiens
LKGGSGTYCLNVS

SEQ ID NO: 14529 - protein, 13 aa, Homo Sapiens
KGGSGTYCLNVSL

SEQ ID NO: 14530 - protein, 13 aa, Homo Sapiens
GGSGTYCLNVSLA

SEQ ID NO: 14531 - protein, 13 aa, Homo Sapiens
GSGTYCLNVSLAD

SEQ ID NO: 14532 - protein, 13 aa, Homo Sapiens
SGTYCLNVSLADT

SEQ ID NO: 14533 - protein, 13 aa, Homo Sapiens
GTYCLNVSLADTN

SEQ ID NO: 14534 - protein, 13 aa, Homo Sapiens
TYCLNVSLADTNS

SEQ ID NO: 14535 - protein, 13 aa, Homo Sapiens
YCLNVSLADTNSL

SEQ ID NO: 14536 - protein, 13 aa, Homo Sapiens
CLNVSLADTNSLA

SEQ ID NO: 14537 - protein, 13 aa, Homo Sapiens
LNVSLADTNSLAV

SEQ ID NO: 14538 - protein, 13 aa, Homo Sapiens
NVSLADTNSLAVV

SEQ ID NO: 14539 - protein, 13 aa, Homo Sapiens
VSLADTNSLAVVS

SEQ ID NO: 14540 - protein, 13 aa, Homo Sapiens
SLADTNSLAVVST

SEQ ID NO: 14541 - protein, 13 aa, Homo Sapiens
LADTNSLAVVSTQ

SEQ ID NO: 14542 - protein, 13 aa, Homo Sapiens
ADTNSLAVVSTQL

SEQ ID NO: 14543 - protein, 13 aa, Homo Sapiens
DTNSLAVVSTQLI

SEQ ID NO: 14544 - protein, 13 aa, Homo Sapiens
TNSLAVVSTQLIM

SEQ ID NO: 14545 - protein, 13 aa, Homo Sapiens
NSLAVVSTQLIMP

SEQ ID NO: 14546 - protein, 13 aa, Homo Sapiens
SLAVVSTQLIMPG

SEQ ID NO: 14547 - protein, 13 aa, Homo Sapiens
LAVVSTQLIMPGQ

SEQ ID NO: 14548 - protein, 13 aa, Homo Sapiens
AVVSTQLIMPGQE

SEQ ID NO: 14549 - protein, 13 aa, Homo Sapiens
VVSTQLIMPGQEA

SEQ ID NO: 14550 - protein, 13 aa, Homo Sapiens
VSTQLIMPGQEAG

SEQ ID NO: 14551 - protein, 13 aa, Homo Sapiens
STQLIMPGQEAGL

SEQ ID NO: 14552 - protein, 13 aa, Homo Sapiens
TQLIMPGQEAGLG

SEQ ID NO: 14553 - protein, 13 aa, Homo Sapiens
QLIMPGQEAGLGQ

SEQ ID NO: 14554 - protein, 13 aa, Homo Sapiens
LIMPGQEAGLGQV

SEQ ID NO: 14555 - protein, 13 aa, Homo Sapiens
IMPGQEAGLGQVP

SEQ ID NO: 14556 - protein, 13 aa, Homo Sapiens
MPGQEAGLGQVPL

SEQ ID NO: 14557 - protein, 13 aa, Homo Sapiens
PGQEAGLGQVPLI

SEQ ID NO: 14558 - protein, 13 aa, Homo Sapiens
GQEAGLGQVPLIV

SEQ ID NO: 14559 - protein, 13 aa, Homo Sapiens
QEAGLGQVPLIVG

SEQ ID NO: 14560 - protein, 13 aa, Homo Sapiens
EAGLGQVPLIVGI

SEQ ID NO: 14561 - protein, 13 aa, Homo Sapiens
AGLGQVPLIVGIL

SEQ ID NO: 14562 - protein, 13 aa, Homo Sapiens
GLGQVPLIVGILL

SEQ ID NO: 14563 - protein, 13 aa, Homo Sapiens
LGQVPLIVGILLV

SEQ ID NO: 14564 - protein, 13 aa, Homo Sapiens
GQVPLIVGILLVL

SEQ ID NO: 14565 - protein, 13 aa, Homo Sapiens
QVPLIVGILLVLM

SEQ ID NO: 14566 - protein, 13 aa, Homo Sapiens
VPLIVGILLVLMA

SEQ ID NO: 14567 - protein, 13 aa, Homo Sapiens
PLIVGILLVLMAV

SEQ ID NO: 14568 - protein, 13 aa, Homo Sapiens
LIVGILLVLMAVV

SEQ ID NO: 14569 - protein, 13 aa, Homo Sapiens
IVGILLVLMAVVL

SEQ ID NO: 14570 - protein, 13 aa, Homo Sapiens
VGILLVLMAVVLA

SEQ ID NO: 14571 - protein, 13 aa, Homo Sapiens
GILLVLMAVVLAS

SEQ ID NO: 14572 - protein, 13 aa, Homo Sapiens
ILLVLMAVVLASL

SEQ ID NO: 14573 - protein, 13 aa, Homo Sapiens
LLVLMAVVLASLI

SEQ ID NO: 14574 - protein, 13 aa, Homo Sapiens
LVLMAVVLASLIY

SEQ ID NO: 14575 - protein, 13 aa, Homo Sapiens
VLMAVVLASLIYR

SEQ ID NO: 14576 - protein, 13 aa, Homo Sapiens
LMAVVLASLIYRR

SEQ ID NO: 14577 - protein, 13 aa, Homo Sapiens
MAVVLASLIYRRR

SEQ ID NO: 14578 - protein, 13 aa, Homo Sapiens
AVVLASLIYRRRL

SEQ ID NO: 14579 - protein, 13 aa, Homo Sapiens
VVLASLIYRRRLM

SEQ ID NO: 14580 - protein, 13 aa, Homo Sapiens
VLASLIYRRRLMK

SEQ ID NO: 14581 - protein, 13 aa, Homo Sapiens
LASLIYRRRLMKQ

SEQ ID NO: 14582 - protein, 13 aa, Homo Sapiens
ASLIYRRRLMKQD

SEQ ID NO: 14583 - protein, 13 aa, Homo Sapiens
SLIYRRRLMKQDF

SEQ ID NO: 14584 - protein, 13 aa, Homo Sapiens
LIYRRRLMKQDFS

SEQ ID NO: 14585 - protein, 13 aa, Homo Sapiens
IYRRRLMKQDFSV

SEQ ID NO: 14586 - protein, 13 aa, Homo Sapiens
YRRRLMKQDFSVP

SEQ ID NO: 14587 - protein, 13 aa, Homo Sapiens
RRRLMKQDFSVPQ

SEQ ID NO: 14588 - protein, 13 aa, Homo Sapiens
RRLMKQDFSVPQL

SEQ ID NO: 14589 - protein, 13 aa, Homo Sapiens
RLMKQDFSVPQLP

SEQ ID NO: 14590 - protein, 13 aa, Homo Sapiens
LMKQDFSVPQLPH

SEQ ID NO: 14591 - protein, 13 aa, Homo Sapiens
MKQDFSVPQLPHS

SEQ ID NO: 14592 - protein, 13 aa, Homo Sapiens
KQDFSVPQLPHSS

SEQ ID NO: 14593 - protein, 13 aa, Homo Sapiens
QDFSVPQLPHSSS

SEQ ID NO: 14594 - protein, 13 aa, Homo Sapiens
DFSVPQLPHSSSH

SEQ ID NO: 14595 - protein, 13 aa, Homo Sapiens
FSVPQLPHSSSHW

SEQ ID NO: 14596 - protein, 13 aa, Homo Sapiens
SVPQLPHSSSHWL

SEQ ID NO: 14597 - protein, 13 aa, Homo Sapiens
VPQLPHSSSHWLR

SEQ ID NO: 14598 - protein, 13 aa, Homo Sapiens
PQLPHSSSHWLRL

SEQ ID NO: 14599 - protein, 13 aa, Homo Sapiens
QLPHSSSHWLRLP

SEQ ID NO: 14600 - protein, 13 aa, Homo Sapiens
LPHSSSHWLRLPR

SEQ ID NO: 14601 - protein, 13 aa, Homo Sapiens
PHSSSHWLRLPRI

SEQ ID NO: 14602 - protein, 13 aa, Homo Sapiens
HSSSHWLRLPRIF

SEQ ID NO: 14603 - protein, 13 aa, Homo Sapiens
SSSHWLRLPRIFC

SEQ ID NO: 14604 - protein, 13 aa, Homo Sapiens
SSHWLRLPRIFCS

SEQ ID NO: 14605 - protein, 13 aa, Homo Sapiens
SHWLRLPRIFCSC

SEQ ID NO: 14606 - protein, 13 aa, Homo Sapiens
HWLRLPRIFCSCP

SEQ ID NO: 14607 - protein, 13 aa, Homo Sapiens
WLRLPRIFCSCPI

SEQ ID NO: 14608 - protein, 13 aa, Homo Sapiens
LRLPRIFCSCPIG

SEQ ID NO: 14609 - protein, 13 aa, Homo Sapiens
RLPRIFCSCPIGE

SEQ ID NO: 14610 - protein, 13 aa, Homo Sapiens
LPRIFCSCPIGEN

SEQ ID NO: 14611 - protein, 13 aa, Homo Sapiens
PRIFCSCPIGENS

SEQ ID NO: 14612 - protein, 13 aa, Homo Sapiens
RIFCSCPIGENSP

SEQ ID NO: 14613 - protein, 13 aa, Homo Sapiens
IFCSCPIGENSPL

SEQ ID NO: 14614 - protein, 13 aa, Homo Sapiens
FCSCPIGENSPLL

SEQ ID NO: 14615 - protein, 13 aa, Homo Sapiens
CSCPIGENSPLLS

SEQ ID NO: 14616 - protein, 13 aa, Homo Sapiens
SCPIGENSPLLSG

SEQ ID NO: 14617 - protein, 13 aa, Homo Sapiens
CPIGENSPLLSGQ

SEQ ID NO: 14618 - protein, 13 aa, Homo Sapiens
PIGENSPLLSGQQ

SEQ ID NO: 14619 - protein, 13 aa, Homo Sapiens
IGENSPLLSGQQV

SEQ ID NO: 14620 - protein, 14 aa, Homo Sapiens
MDLVLKRCLLHLAV

SEQ ID NO: 14621 - protein, 14 aa, Homo Sapiens
DLVLKRCLLHLAVI

SEQ ID NO: 14622 - protein, 14 aa, Homo Sapiens
LVLKRCLLHLAVIG

SEQ ID NO: 14623 - protein, 14 aa, Homo Sapiens
VLKRCLLHLAVIGA

SEQ ID NO: 14624 - protein, 14 aa, Homo Sapiens
LKRCLLHLAVIGAL

SEQ ID NO: 14625 - protein, 14 aa, Homo Sapiens
KRCLLHLAVIGALL

SEQ ID NO: 14626 - protein, 14 aa, Homo Sapiens
RCLLHLAVIGALLA

SEQ ID NO: 14627 - protein, 14 aa, Homo Sapiens
CLLHLAVIGALLAV

SEQ ID NO: 14628 - protein, 14 aa, Homo Sapiens
LLHLAVIGALLAVG

SEQ ID NO: 14629 - protein, 14 aa, Homo Sapiens
LHLAVIGALLAVGA

SEQ ID NO: 14630 - protein, 14 aa, Homo Sapiens
HLAVIGALLAVGAT

SEQ ID NO: 14631 - protein, 14 aa, Homo Sapiens
LAVIGALLAVGATK

SEQ ID NO: 14632 - protein, 14 aa, Homo Sapiens
AVIGALLAVGATKV

SEQ ID NO: 14633 - protein, 14 aa, Homo Sapiens
VIGALLAVGATKVP

SEQ ID NO: 14634 - protein, 14 aa, Homo Sapiens
IGALLAVGATKVPR

SEQ ID NO: 14635 - protein, 14 aa, Homo Sapiens
GALLAVGATKVPRN

SEQ ID NO: 14636 - protein, 14 aa, Homo Sapiens
ALLAVGATKVPRNQ

SEQ ID NO: 14637 - protein, 14 aa, Homo Sapiens
LLAVGATKVPRNQD

SEQ ID NO: 14638 - protein, 14 aa, Homo Sapiens
LAVGATKVPRNQDW

SEQ ID NO: 14639 - protein, 14 aa, Homo Sapiens
AVGATKVPRNQDWL

SEQ ID NO: 14640 - protein, 14 aa, Homo Sapiens
VGATKVPRNQDWLG

SEQ ID NO: 14641 - protein, 14 aa, Homo Sapiens
GATKVPRNQDWLGV

SEQ ID NO: 14642 - protein, 14 aa, Homo Sapiens
ATKVPRNQDWLGVS

SEQ ID NO: 14643 - protein, 14 aa, Homo Sapiens
TKVPRNQDWLGVSR

SEQ ID NO: 14644 - protein, 14 aa, Homo Sapiens
KVPRNQDWLGVSRQ

SEQ ID NO: 14645 - protein, 14 aa, Homo Sapiens
VPRNQDWLGVSRQL

SEQ ID NO: 14646 - protein, 14 aa, Homo Sapiens
PRNQDWLGVSRQLR

SEQ ID NO: 14647 - protein, 14 aa, Homo Sapiens
RNQDWLGVSRQLRT

SEQ ID NO: 14648 - protein, 14 aa, Homo Sapiens
NQDWLGVSRQLRTK

SEQ ID NO: 14649 - protein, 14 aa, Homo Sapiens
QDWLGVSRQLRTKA

SEQ ID NO: 14650 - protein, 14 aa, Homo Sapiens
DWLGVSRQLRTKAW

SEQ ID NO: 14651 - protein, 14 aa, Homo Sapiens
WLGVSRQLRTKAWN

SEQ ID NO: 14652 - protein, 14 aa, Homo Sapiens
LGVSRQLRTKAWNR

SEQ ID NO: 14653 - protein, 14 aa, Homo Sapiens
GVSRQLRTKAWNRQ

SEQ ID NO: 14654 - protein, 14 aa, Homo Sapiens
VSRQLRTKAWNRQL

SEQ ID NO: 14655 - protein, 14 aa, Homo Sapiens
SRQLRTKAWNRQLY

SEQ ID NO: 14656 - protein, 14 aa, Homo Sapiens
RQLRTKAWNRQLYP

SEQ ID NO: 14657 - protein, 14 aa, Homo Sapiens
QLRTKAWNRQLYPE

SEQ ID NO: 14658 - protein, 14 aa, Homo Sapiens
LRTKAWNRQLYPEW

SEQ ID NO: 14659 - protein, 14 aa, Homo Sapiens
RTKAWNRQLYPEWT

SEQ ID NO: 14660 - protein, 14 aa, Homo Sapiens
TKAWNRQLYPEWTE

SEQ ID NO: 14661 - protein, 14 aa, Homo Sapiens
KAWNRQLYPEWTEA

SEQ ID NO: 14662 - protein, 14 aa, Homo Sapiens
AWNRQLYPEWTEAQ

SEQ ID NO: 14663 - protein, 14 aa, Homo Sapiens
WNRQLYPEWTEAQR

SEQ ID NO: 14664 - protein, 14 aa, Homo Sapiens
NRQLYPEWTEAQRL

SEQ ID NO: 14665 - protein, 14 aa, Homo Sapiens
RQLYPEWTEAQRLD

SEQ ID NO: 14666 - protein, 14 aa, Homo Sapiens
QLYPEWTEAQRLDC

SEQ ID NO: 14667 - protein, 14 aa, Homo Sapiens
LYPEWTEAQRLDCW

SEQ ID NO: 14668 - protein, 14 aa, Homo Sapiens
YPEWTEAQRLDCWR

SEQ ID NO: 14669 - protein, 14 aa, Homo Sapiens
PEWTEAQRLDCWRG

SEQ ID NO: 14670 - protein, 14 aa, Homo Sapiens
EWTEAQRLDCWRGG

SEQ ID NO: 14671 - protein, 14 aa, Homo Sapiens
WTEAQRLDCWRGGQ

SEQ ID NO: 14672 - protein, 14 aa, Homo Sapiens
TEAQRLDCWRGGQV

SEQ ID NO: 14673 - protein, 14 aa, Homo Sapiens
EAQRLDCWRGGQVS

SEQ ID NO: 14674 - protein, 14 aa, Homo Sapiens
AQRLDCWRGGQVSL

SEQ ID NO: 14675 - protein, 14 aa, Homo Sapiens
QRLDCWRGGQVSLK

SEQ ID NO: 14676 - protein, 14 aa, Homo Sapiens
RLDCWRGGQVSLKV

SEQ ID NO: 14677 - protein, 14 aa, Homo Sapiens
LDCWRGGQVSLKVS

SEQ ID NO: 14678 - protein, 14 aa, Homo Sapiens
DCWRGGQVSLKVSN

SEQ ID NO: 14679 - protein, 14 aa, Homo Sapiens
CWRGGQVSLKVSND

SEQ ID NO: 14680 - protein, 14 aa, Homo Sapiens
WRGGQVSLKVSNDG

SEQ ID NO: 14681 - protein, 14 aa, Homo Sapiens
RGGQVSLKVSNDGP

SEQ ID NO: 14682 - protein, 14 aa, Homo Sapiens
GGQVSLKVSNDGPT

SEQ ID NO: 14683 - protein, 14 aa, Homo Sapiens
GQVSLKVSNDGPTL

SEQ ID NO: 14684 - protein, 14 aa, Homo Sapiens
QVSLKVSNDGPTLI

SEQ ID NO: 14685 - protein, 14 aa, Homo Sapiens
VSLKVSNDGPTLIG

SEQ ID NO: 14686 - protein, 14 aa, Homo Sapiens
SLKVSNDGPTLIGA

SEQ ID NO: 14687 - protein, 14 aa, Homo Sapiens
LKVSNDGPTLIGAN

SEQ ID NO: 14688 - protein, 14 aa, Homo Sapiens
KVSNDGPTLIGANA

SEQ ID NO: 14689 - protein, 14 aa, Homo Sapiens
VSNDGPTLIGANAS

SEQ ID NO: 14690 - protein, 14 aa, Homo Sapiens
SNDGPTLIGANASF

SEQ ID NO: 14691 - protein, 14 aa, Homo Sapiens
NDGPTLIGANASFS

SEQ ID NO: 14692 - protein, 14 aa, Homo Sapiens
DGPTLIGANASFSI

SEQ ID NO: 14693 - protein, 14 aa, Homo Sapiens
GPTLIGANASFSIA

SEQ ID NO: 14694 - protein, 14 aa, Homo Sapiens
PTLIGANASFSIAL

SEQ ID NO: 14695 - protein, 14 aa, Homo Sapiens
TLIGANASFSIALN

SEQ ID NO: 14696 - protein, 14 aa, Homo Sapiens
LIGANASFSIALNF

SEQ ID NO: 14697 - protein, 14 aa, Homo Sapiens
IGANASFSIALNFP

SEQ ID NO: 14698 - protein, 14 aa, Homo Sapiens
GANASFSIALNFPG

SEQ ID NO: 14699 - protein, 14 aa, Homo Sapiens
ANASFSIALNFPGS

SEQ ID NO: 14700 - protein, 14 aa, Homo Sapiens
NASFSIALNFPGSQ

SEQ ID NO: 14701 - protein, 14 aa, Homo Sapiens
ASFSIALNFPGSQK

SEQ ID NO: 14702 - protein, 14 aa, Homo Sapiens
SFSIALNFPGSQKV

SEQ ID NO: 14703 - protein, 14 aa, Homo Sapiens
FSIALNFPGSQKVL

SEQ ID NO: 14704 - protein, 14 aa, Homo Sapiens
SIALNFPGSQKVLP

SEQ ID NO: 14705 - protein, 14 aa, Homo Sapiens
IALNFPGSQKVLPD

SEQ ID NO: 14706 - protein, 14 aa, Homo Sapiens
ALNFPGSQKVLPDG

SEQ ID NO: 14707 - protein, 14 aa, Homo Sapiens
LNFPGSQKVLPDGQ

SEQ ID NO: 14708 - protein, 14 aa, Homo Sapiens
NFPGSQKVLPDGQV

SEQ ID NO: 14709 - protein, 14 aa, Homo Sapiens
FPGSQKVLPDGQVI

SEQ ID NO: 14710 - protein, 14 aa, Homo Sapiens
PGSQKVLPDGQVIW

SEQ ID NO: 14711 - protein, 14 aa, Homo Sapiens
GSQKVLPDGQVIWV

SEQ ID NO: 14712 - protein, 14 aa, Homo Sapiens
SQKVLPDGQVIWVN

SEQ ID NO: 14713 - protein, 14 aa, Homo Sapiens
QKVLPDGQVIWVNN

SEQ ID NO: 14714 - protein, 14 aa, Homo Sapiens
KVLPDGQVIWVNNT

SEQ ID NO: 14715 - protein, 14 aa, Homo Sapiens
VLPDGQVIWVNNTI

SEQ ID NO: 14716 - protein, 14 aa, Homo Sapiens
LPDGQVIWVNNTII

SEQ ID NO: 14717 - protein, 14 aa, Homo Sapiens
PDGQVIWVNNTIIN

SEQ ID NO: 14718 - protein, 14 aa, Homo Sapiens
DGQVIWVNNTIING

SEQ ID NO: 14719 - protein, 14 aa, Homo Sapiens
GQVIWVNNTIINGS

SEQ ID NO: 14720 - protein, 14 aa, Homo Sapiens
QVIWVNNTIINGSQ

SEQ ID NO: 14721 - protein, 14 aa, Homo Sapiens
VIWVNNTIINGSQV

SEQ ID NO: 14722 - protein, 14 aa, Homo Sapiens
IWVNNTIINGSQVW

SEQ ID NO: 14723 - protein, 14 aa, Homo Sapiens
WVNNTIINGSQVWG

SEQ ID NO: 14724 - protein, 14 aa, Homo Sapiens
VNNTIINGSQVWGG

SEQ ID NO: 14725 - protein, 14 aa, Homo Sapiens
NNTIINGSQVWGGQ

SEQ ID NO: 14726 - protein, 14 aa, Homo Sapiens
NTIINGSQVWGGQP

SEQ ID NO: 14727 - protein, 14 aa, Homo Sapiens
TIINGSQVWGGQPV

SEQ ID NO: 14728 - protein, 14 aa, Homo Sapiens
IINGSQVWGGQPVY

SEQ ID NO: 14729 - protein, 14 aa, Homo Sapiens
INGSQVWGGQPVYP

SEQ ID NO: 14730 - protein, 14 aa, Homo Sapiens
NGSQVWGGQPVYPQ

SEQ ID NO: 14731 - protein, 14 aa, Homo Sapiens
GSQVWGGQPVYPQE

SEQ ID NO: 14732 - protein, 14 aa, Homo Sapiens
SQVWGGQPVYPQET

SEQ ID NO: 14733 - protein, 14 aa, Homo Sapiens
QVWGGQPVYPQETD

SEQ ID NO: 14734 - protein, 14 aa, Homo Sapiens
VWGGQPVYPQETDD

SEQ ID NO: 14735 - protein, 14 aa, Homo Sapiens
WGGQPVYPQETDDA

SEQ ID NO: 14736 - protein, 14 aa, Homo Sapiens
GGQPVYPQETDDAC

SEQ ID NO: 14737 - protein, 14 aa, Homo Sapiens
GQPVYPQETDDACI

SEQ ID NO: 14738 - protein, 14 aa, Homo Sapiens
QPVYPQETDDACIF

SEQ ID NO: 14739 - protein, 14 aa, Homo Sapiens
PVYPQETDDACIFP

SEQ ID NO: 14740 - protein, 14 aa, Homo Sapiens
VYPQETDDACIFPD

SEQ ID NO: 14741 - protein, 14 aa, Homo Sapiens
YPQETDDACIFPDG

SEQ ID NO: 14742 - protein, 14 aa, Homo Sapiens
PQETDDACIFPDGG

SEQ ID NO: 14743 - protein, 14 aa, Homo Sapiens
QETDDACIFPDGGP

SEQ ID NO: 14744 - protein, 14 aa, Homo Sapiens
ETDDACIFPDGGPC

SEQ ID NO: 14745 - protein, 14 aa, Homo Sapiens
TDDACIFPDGGPCP

SEQ ID NO: 14746 - protein, 14 aa, Homo Sapiens
DDACIFPDGGPCPS

SEQ ID NO: 14747 - protein, 14 aa, Homo Sapiens
DACIFPDGGPCPSG

SEQ ID NO: 14748 - protein, 14 aa, Homo Sapiens
ACIFPDGGPCPSGS

SEQ ID NO: 14749 - protein, 14 aa, Homo Sapiens
CIFPDGGPCPSGSW

SEQ ID NO: 14750 - protein, 14 aa, Homo Sapiens
IFPDGGPCPSGSWS

SEQ ID NO: 14751 - protein, 14 aa, Homo Sapiens
FPDGGPCPSGSWSQ

SEQ ID NO: 14752 - protein, 14 aa, Homo Sapiens
PDGGPCPSGSWSQK

SEQ ID NO: 14753 - protein, 14 aa, Homo Sapiens
DGGPCPSGSWSQKR

SEQ ID NO: 14754 - protein, 14 aa, Homo Sapiens
GGPCPSGSWSQKRS

SEQ ID NO: 14755 - protein, 14 aa, Homo Sapiens
GPCPSGSWSQKRSF

SEQ ID NO: 14756 - protein, 14 aa, Homo Sapiens
PCPSGSWSQKRSFV

SEQ ID NO: 14757 - protein, 14 aa, Homo Sapiens
CPSGSWSQKRSFVY

SEQ ID NO: 14758 - protein, 14 aa, Homo Sapiens
PSGSWSQKRSFVYV

SEQ ID NO: 14759 - protein, 14 aa, Homo Sapiens
SGSWSQKRSFVYVW

SEQ ID NO: 14760 - protein, 14 aa, Homo Sapiens
GSWSQKRSFVYVWK

SEQ ID NO: 14761 - protein, 14 aa, Homo Sapiens
SWSQKRSFVYVWKT

SEQ ID NO: 14762 - protein, 14 aa, Homo Sapiens
WSQKRSFVYVWKTW

SEQ ID NO: 14763 - protein, 14 aa, Homo Sapiens
SQKRSFVYVWKTWG

SEQ ID NO: 14764 - protein, 14 aa, Homo Sapiens
QKRSFVYVWKTWGQ

SEQ ID NO: 14765 - protein, 14 aa, Homo Sapiens
KRSFVYVWKTWGQY

SEQ ID NO: 14766 - protein, 14 aa, Homo Sapiens
RSFVYVWKTWGQYW

SEQ ID NO: 14767 - protein, 14 aa, Homo Sapiens
SFVYVWKTWGQYWQ

SEQ ID NO: 14768 - protein, 14 aa, Homo Sapiens
FVYVWKTWGQYWQV

SEQ ID NO: 14769 - protein, 14 aa, Homo Sapiens
VYVWKTWGQYWQVL

SEQ ID NO: 14770 - protein, 14 aa, Homo Sapiens
YVWKTWGQYWQVLG

SEQ ID NO: 14771 - protein, 14 aa, Homo Sapiens
VWKTWGQYWQVLGG

SEQ ID NO: 14772 - protein, 14 aa, Homo Sapiens
WKTWGQYWQVLGGP

SEQ ID NO: 14773 - protein, 14 aa, Homo Sapiens
KTWGQYWQVLGGPV

SEQ ID NO: 14774 - protein, 14 aa, Homo Sapiens
TWGQYWQVLGGPVS

SEQ ID NO: 14775 - protein, 14 aa, Homo Sapiens
WGQYWQVLGGPVSG

SEQ ID NO: 14776 - protein, 14 aa, Homo Sapiens
GQYWQVLGGPVSGL

SEQ ID NO: 14777 - protein, 14 aa, Homo Sapiens
QYWQVLGGPVSGLS

SEQ ID NO: 14778 - protein, 14 aa, Homo Sapiens
YWQVLGGPVSGLSI

SEQ ID NO: 14779 - protein, 14 aa, Homo Sapiens
WQVLGGPVSGLSIG

SEQ ID NO: 14780 - protein, 14 aa, Homo Sapiens
QVLGGPVSGLSIGT

SEQ ID NO: 14781 - protein, 14 aa, Homo Sapiens
VLGGPVSGLSIGTG

SEQ ID NO: 14782 - protein, 14 aa, Homo Sapiens
LGGPVSGLSIGTGR

SEQ ID NO: 14783 - protein, 14 aa, Homo Sapiens
GGPVSGLSIGTGRA

SEQ ID NO: 14784 - protein, 14 aa, Homo Sapiens
GPVSGLSIGTGRAM

SEQ ID NO: 14785 - protein, 14 aa, Homo Sapiens
PVSGLSIGTGRAML

SEQ ID NO: 14786 - protein, 14 aa, Homo Sapiens
VSGLSIGTGRAMLG

SEQ ID NO: 14787 - protein, 14 aa, Homo Sapiens
SGLSIGTGRAMLGT

SEQ ID NO: 14788 - protein, 14 aa, Homo Sapiens
GLSIGTGRAMLGTH

SEQ ID NO: 14789 - protein, 14 aa, Homo Sapiens
LSIGTGRAMLGTHT

SEQ ID NO: 14790 - protein, 14 aa, Homo Sapiens
SIGTGRAMLGTHTM

SEQ ID NO: 14791 - protein, 14 aa, Homo Sapiens
IGTGRAMLGTHTME

SEQ ID NO: 14792 - protein, 14 aa, Homo Sapiens
GTGRAMLGTHTMEV

SEQ ID NO: 14793 - protein, 14 aa, Homo Sapiens
TGRAMLGTHTMEVT

SEQ ID NO: 14794 - protein, 14 aa, Homo Sapiens
GRAMLGTHTMEVTV

SEQ ID NO: 14795 - protein, 14 aa, Homo Sapiens
RAMLGTHTMEVTVY

SEQ ID NO: 14796 - protein, 14 aa, Homo Sapiens
AMLGTHTMEVTVYH

SEQ ID NO: 14797 - protein, 14 aa, Homo Sapiens
MLGTHTMEVTVYHR

SEQ ID NO: 14798 - protein, 14 aa, Homo Sapiens
LGTHTMEVTVYHRR

SEQ ID NO: 14799 - protein, 14 aa, Homo Sapiens
GTHTMEVTVYHRRG

SEQ ID NO: 14800 - protein, 14 aa, Homo Sapiens
THTMEVTVYHRRGS

SEQ ID NO: 14801 - protein, 14 aa, Homo Sapiens
HTMEVTVYHRRGSR

SEQ ID NO: 14802 - protein, 14 aa, Homo Sapiens
TMEVTVYHRRGSRS

SEQ ID NO: 14803 - protein, 14 aa, Homo Sapiens
MEVTVYHRRGSRSY

SEQ ID NO: 14804 - protein, 14 aa, Homo Sapiens
EVTVYHRRGSRSYV

SEQ ID NO: 14805 - protein, 14 aa, Homo Sapiens
VTVYHRRGSRSYVP

SEQ ID NO: 14806 - protein, 14 aa, Homo Sapiens
TVYHRRGSRSYVPL

SEQ ID NO: 14807 - protein, 14 aa, Homo Sapiens
VYHRRGSRSYVPLA

SEQ ID NO: 14808 - protein, 14 aa, Homo Sapiens
YHRRGSRSYVPLAH

SEQ ID NO: 14809 - protein, 14 aa, Homo Sapiens
HRRGSRSYVPLAHS

SEQ ID NO: 14810 - protein, 14 aa, Homo Sapiens
RRGSRSYVPLAHSS

SEQ ID NO: 14811 - protein, 14 aa, Homo Sapiens
RGSRSYVPLAHSSS

SEQ ID NO: 14812 - protein, 14 aa, Homo Sapiens
GSRSYVPLAHSSSA

SEQ ID NO: 14813 - protein, 14 aa, Homo Sapiens
SRSYVPLAHSSSAF

SEQ ID NO: 14814 - protein, 14 aa, Homo Sapiens
RSYVPLAHSSSAFT

SEQ ID NO: 14815 - protein, 14 aa, Homo Sapiens
SYVPLAHSSSAFTI

SEQ ID NO: 14816 - protein, 14 aa, Homo Sapiens
YVPLAHSSSAFTIT

SEQ ID NO: 14817 - protein, 14 aa, Homo Sapiens
VPLAHSSSAFTITD

SEQ ID NO: 14818 - protein, 14 aa, Homo Sapiens
PLAHSSSAFTITDQ

SEQ ID NO: 14819 - protein, 14 aa, Homo Sapiens
LAHSSSAFTITDQV

SEQ ID NO: 14820 - protein, 14 aa, Homo Sapiens
AHSSSAFTITDQVP

SEQ ID NO: 14821 - protein, 14 aa, Homo Sapiens
HSSSAFTITDQVPF

SEQ ID NO: 14822 - protein, 14 aa, Homo Sapiens
SSSAFTITDQVPFS

SEQ ID NO: 14823 - protein, 14 aa, Homo Sapiens
SSAFTITDQVPFSV

SEQ ID NO: 14824 - protein, 14 aa, Homo Sapiens
SAFTITDQVPFSVS

SEQ ID NO: 14825 - protein, 14 aa, Homo Sapiens
AFTITDQVPFSVSV

SEQ ID NO: 14826 - protein, 14 aa, Homo Sapiens
FTITDQVPFSVSVS

SEQ ID NO: 14827 - protein, 14 aa, Homo Sapiens
TITDQVPFSVSVSQ

SEQ ID NO: 14828 - protein, 14 aa, Homo Sapiens
ITDQVPFSVSVSQL

SEQ ID NO: 14829 - protein, 14 aa, Homo Sapiens
TDQVPFSVSVSQLR

SEQ ID NO: 14830 - protein, 14 aa, Homo Sapiens
DQVPFSVSVSQLRA

SEQ ID NO: 14831 - protein, 14 aa, Homo Sapiens
QVPFSVSVSQLRAL

SEQ ID NO: 14832 - protein, 14 aa, Homo Sapiens
VPFSVSVSQLRALD

SEQ ID NO: 14833 - protein, 14 aa, Homo Sapiens
PFSVSVSQLRALDG

SEQ ID NO: 14834 - protein, 14 aa, Homo Sapiens
FSVSVSQLRALDGG

SEQ ID NO: 14835 - protein, 14 aa, Homo Sapiens
SVSVSQLRALDGGN

SEQ ID NO: 14836 - protein, 14 aa, Homo Sapiens
VSVSQLRALDGGNK

SEQ ID NO: 14837 - protein, 14 aa, Homo Sapiens
SVSQLRALDGGNKH

SEQ ID NO: 14838 - protein, 14 aa, Homo Sapiens
VSQLRALDGGNKHF

SEQ ID NO: 14839 - protein, 14 aa, Homo Sapiens
SQLRALDGGNKHFL

SEQ ID NO: 14840 - protein, 14 aa, Homo Sapiens
QLRALDGGNKHFLR

SEQ ID NO: 14841 - protein, 14 aa, Homo Sapiens
LRALDGGNKHFLRN

SEQ ID NO: 14842 - protein, 14 aa, Homo Sapiens
RALDGGNKHFLRNQ

SEQ ID NO: 14843 - protein, 14 aa, Homo Sapiens
ALDGGNKHFLRNQP

SEQ ID NO: 14844 - protein, 14 aa, Homo Sapiens
LDGGNKHFLRNQPL

SEQ ID NO: 14845 - protein, 14 aa, Homo Sapiens
DGGNKHFLRNQPLT

SEQ ID NO: 14846 - protein, 14 aa, Homo Sapiens
GGNKHFLRNQPLTF

SEQ ID NO: 14847 - protein, 14 aa, Homo Sapiens
GNKHFLRNQPLTFA

SEQ ID NO: 14848 - protein, 14 aa, Homo Sapiens
NKHFLRNQPLTFAL

SEQ ID NO: 14849 - protein, 14 aa, Homo Sapiens
KHFLRNQPLTFALQ

SEQ ID NO: 14850 - protein, 14 aa, Homo Sapiens
HFLRNQPLTFALQL

SEQ ID NO: 14851 - protein, 14 aa, Homo Sapiens
FLRNQPLTFALQLH

SEQ ID NO: 14852 - protein, 14 aa, Homo Sapiens
LRNQPLTFALQLHD

SEQ ID NO: 14853 - protein, 14 aa, Homo Sapiens
RNQPLTFALQLHDP

SEQ ID NO: 14854 - protein, 14 aa, Homo Sapiens
NQPLTFALQLHDPS

SEQ ID NO: 14855 - protein, 14 aa, Homo Sapiens
QPLTFALQLHDPSG

SEQ ID NO: 14856 - protein, 14 aa, Homo Sapiens
PLTFALQLHDPSGY

SEQ ID NO: 14857 - protein, 14 aa, Homo Sapiens
LTFALQLHDPSGYL

SEQ ID NO: 14858 - protein, 14 aa, Homo Sapiens
TFALQLHDPSGYLA

SEQ ID NO: 14859 - protein, 14 aa, Homo Sapiens
FALQLHDPSGYLAE

SEQ ID NO: 14860 - protein, 14 aa, Homo Sapiens
ALQLHDPSGYLAEA

SEQ ID NO: 14861 - protein, 14 aa, Homo Sapiens
LQLHDPSGYLAEAD

SEQ ID NO: 14862 - protein, 14 aa, Homo Sapiens
QLHDPSGYLAEADL

SEQ ID NO: 14863 - protein, 14 aa, Homo Sapiens
LHDPSGYLAEADLS

SEQ ID NO: 14864 - protein, 14 aa, Homo Sapiens
HDPSGYLAEADLSY

SEQ ID NO: 14865 - protein, 14 aa, Homo Sapiens
DPSGYLAEADLSYT

SEQ ID NO: 14866 - protein, 14 aa, Homo Sapiens
PSGYLAEADLSYTW

SEQ ID NO: 14867 - protein, 14 aa, Homo Sapiens
SGYLAEADLSYTWD

SEQ ID NO: 14868 - protein, 14 aa, Homo Sapiens
GYLAEADLSYTWDF

SEQ ID NO: 14869 - protein, 14 aa, Homo Sapiens
YLAEADLSYTWDFG

SEQ ID NO: 14870 - protein, 14 aa, Homo Sapiens
LAEADLSYTWDFGD

SEQ ID NO: 14871 - protein, 14 aa, Homo Sapiens
AEADLSYTWDFGDS

SEQ ID NO: 14872 - protein, 14 aa, Homo Sapiens
EADLSYTWDFGDSS

SEQ ID NO: 14873 - protein, 14 aa, Homo Sapiens
ADLSYTWDFGDSSG

SEQ ID NO: 14874 - protein, 14 aa, Homo Sapiens
DLSYTWDFGDSSGT

SEQ ID NO: 14875 - protein, 14 aa, Homo Sapiens
LSYTWDFGDSSGTL

SEQ ID NO: 14876 - protein, 14 aa, Homo Sapiens
SYTWDFGDSSGTLI

SEQ ID NO: 14877 - protein, 14 aa, Homo Sapiens
YTWDFGDSSGTLIS

SEQ ID NO: 14878 - protein, 14 aa, Homo Sapiens
TWDFGDSSGTLISR

SEQ ID NO: 14879 - protein, 14 aa, Homo Sapiens
WDFGDSSGTLISRA

SEQ ID NO: 14880 - protein, 14 aa, Homo Sapiens
DFGDSSGTLISRAL

SEQ ID NO: 14881 - protein, 14 aa, Homo Sapiens
FGDSSGTLISRALV

SEQ ID NO: 14882 - protein, 14 aa, Homo Sapiens
GDSSGTLISRALVV

SEQ ID NO: 14883 - protein, 14 aa, Homo Sapiens
DSSGTLISRALVVT

SEQ ID NO: 14884 - protein, 14 aa, Homo Sapiens
SSGTLISRALVVTH

SEQ ID NO: 14885 - protein, 14 aa, Homo Sapiens
SGTLISRALVVTHT

SEQ ID NO: 14886 - protein, 14 aa, Homo Sapiens
GTLISRALVVTHTY

SEQ ID NO: 14887 - protein, 14 aa, Homo Sapiens
TLISRALVVTHTYL

SEQ ID NO: 14888 - protein, 14 aa, Homo Sapiens
LISRALVVTHTYLE

SEQ ID NO: 14889 - protein, 14 aa, Homo Sapiens
ISRALVVTHTYLEP

SEQ ID NO: 14890 - protein, 14 aa, Homo Sapiens
SRALVVTHTYLEPG

SEQ ID NO: 14891 - protein, 14 aa, Homo Sapiens
RALVVTHTYLEPGP

SEQ ID NO: 14892 - protein, 14 aa, Homo Sapiens
ALVVTHTYLEPGPV

SEQ ID NO: 14893 - protein, 14 aa, Homo Sapiens
LVVTHTYLEPGPVT

SEQ ID NO: 14894 - protein, 14 aa, Homo Sapiens
VVTHTYLEPGPVTA

SEQ ID NO: 14895 - protein, 14 aa, Homo Sapiens
VTHTYLEPGPVTAQ

SEQ ID NO: 14896 - protein, 14 aa, Homo Sapiens
THTYLEPGPVTAQV

SEQ ID NO: 14897 - protein, 14 aa, Homo Sapiens
HTYLEPGPVTAQVV

SEQ ID NO: 14898 - protein, 14 aa, Homo Sapiens
TYLEPGPVTAQVVL

SEQ ID NO: 14899 - protein, 14 aa, Homo Sapiens
YLEPGPVTAQVVLQ

SEQ ID NO: 14900 - protein, 14 aa, Homo Sapiens
LEPGPVTAQVVLQA

SEQ ID NO: 14901 - protein, 14 aa, Homo Sapiens
EPGPVTAQVVLQAA

SEQ ID NO: 14902 - protein, 14 aa, Homo Sapiens
PGPVTAQVVLQAAI

SEQ ID NO: 14903 - protein, 14 aa, Homo Sapiens
GPVTAQVVLQAAIP

SEQ ID NO: 14904 - protein, 14 aa, Homo Sapiens
PVTAQVVLQAAIPL

SEQ ID NO: 14905 - protein, 14 aa, Homo Sapiens
VTAQVVLQAAIPLT

SEQ ID NO: 14906 - protein, 14 aa, Homo Sapiens
TAQVVLQAAIPLTS

SEQ ID NO: 14907 - protein, 14 aa, Homo Sapiens
AQVVLQAAIPLTSC

SEQ ID NO: 14908 - protein, 14 aa, Homo Sapiens
QVVLQAAIPLTSCG

SEQ ID NO: 14909 - protein, 14 aa, Homo Sapiens
VVLQAAIPLTSCGS

SEQ ID NO: 14910 - protein, 14 aa, Homo Sapiens
VLQAAIPLTSCGSS

SEQ ID NO: 14911 - protein, 14 aa, Homo Sapiens
LQAAIPLTSCGSSP

SEQ ID NO: 14912 - protein, 14 aa, Homo Sapiens
QAAIPLTSCGSSPV

SEQ ID NO: 14913 - protein, 14 aa, Homo Sapiens
AAIPLTSCGSSPVP

SEQ ID NO: 14914 - protein, 14 aa, Homo Sapiens
AIPLTSCGSSPVPG

SEQ ID NO: 14915 - protein, 14 aa, Homo Sapiens
IPLTSCGSSPVPGT

SEQ ID NO: 14916 - protein, 14 aa, Homo Sapiens
PLTSCGSSPVPGTT

SEQ ID NO: 14917 - protein, 14 aa, Homo Sapiens
LTSCGSSPVPGTTD

SEQ ID NO: 14918 - protein, 14 aa, Homo Sapiens
TSCGSSPVPGTTDG

SEQ ID NO: 14919 - protein, 14 aa, Homo Sapiens
SCGSSPVPGTTDGH

SEQ ID NO: 14920 - protein, 14 aa, Homo Sapiens
CGSSPVPGTTDGHR

SEQ ID NO: 14921 - protein, 14 aa, Homo Sapiens
GSSPVPGTTDGHRP

SEQ ID NO: 14922 - protein, 14 aa, Homo Sapiens
SSPVPGTTDGHRPT

SEQ ID NO: 14923 - protein, 14 aa, Homo Sapiens
SPVPGTTDGHRPTA

SEQ ID NO: 14924 - protein, 14 aa, Homo Sapiens
PVPGTTDGHRPTAE

SEQ ID NO: 14925 - protein, 14 aa, Homo Sapiens
VPGTTDGHRPTAEA

SEQ ID NO: 14926 - protein, 14 aa, Homo Sapiens
PGTTDGHRPTAEAP

SEQ ID NO: 14927 - protein, 14 aa, Homo Sapiens
GTTDGHRPTAEAPN

SEQ ID NO: 14928 - protein, 14 aa, Homo Sapiens
TTDGHRPTAEAPNT

SEQ ID NO: 14929 - protein, 14 aa, Homo Sapiens
TDGHRPTAEAPNTT

SEQ ID NO: 14930 - protein, 14 aa, Homo Sapiens
DGHRPTAEAPNTTA

SEQ ID NO: 14931 - protein, 14 aa, Homo Sapiens
GHRPTAEAPNTTAG

SEQ ID NO: 14932 - protein, 14 aa, Homo Sapiens
HRPTAEAPNTTAGQ

SEQ ID NO: 14933 - protein, 14 aa, Homo Sapiens
RPTAEAPNTTAGQV

SEQ ID NO: 14934 - protein, 14 aa, Homo Sapiens
PTAEAPNTTAGQVP

SEQ ID NO: 14935 - protein, 14 aa, Homo Sapiens
TAEAPNTTAGQVPT

SEQ ID NO: 14936 - protein, 14 aa, Homo Sapiens
AEAPNTTAGQVPTT

SEQ ID NO: 14937 - protein, 14 aa, Homo Sapiens
EAPNTTAGQVPTTE

SEQ ID NO: 14938 - protein, 14 aa, Homo Sapiens
APNTTAGQVPTTEV

SEQ ID NO: 14939 - protein, 14 aa, Homo Sapiens
PNTTAGQVPTTEVV

SEQ ID NO: 14940 - protein, 14 aa, Homo Sapiens
NTTAGQVPTTEVVG

SEQ ID NO: 14941 - protein, 14 aa, Homo Sapiens
TTAGQVPTTEVVGT

SEQ ID NO: 14942 - protein, 14 aa, Homo Sapiens
TAGQVPTTEVVGTT

SEQ ID NO: 14943 - protein, 14 aa, Homo Sapiens
AGQVPTTEVVGTTP

SEQ ID NO: 14944 - protein, 14 aa, Homo Sapiens
GQVPTTEVVGTTPG

SEQ ID NO: 14945 - protein, 14 aa, Homo Sapiens
QVPTTEVVGTTPGQ

SEQ ID NO: 14946 - protein, 14 aa, Homo Sapiens
VPTTEVVGTTPGQA

SEQ ID NO: 14947 - protein, 14 aa, Homo Sapiens
PTTEVVGTTPGQAP

SEQ ID NO: 14948 - protein, 14 aa, Homo Sapiens
TTEVVGTTPGQAPT

SEQ ID NO: 14949 - protein, 14 aa, Homo Sapiens
TEVVGTTPGQAPTA

SEQ ID NO: 14950 - protein, 14 aa, Homo Sapiens
EVVGTTPGQAPTAE

SEQ ID NO: 14951 - protein, 14 aa, Homo Sapiens
VVGTTPGQAPTAEP

SEQ ID NO: 14952 - protein, 14 aa, Homo Sapiens
VGTTPGQAPTAEPS

SEQ ID NO: 14953 - protein, 14 aa, Homo Sapiens
GTTPGQAPTAEPSG

SEQ ID NO: 14954 - protein, 14 aa, Homo Sapiens
TTPGQAPTAEPSGT

SEQ ID NO: 14955 - protein, 14 aa, Homo Sapiens
TPGQAPTAEPSGTT

SEQ ID NO: 14956 - protein, 14 aa, Homo Sapiens
PGQAPTAEPSGTTS

SEQ ID NO: 14957 - protein, 14 aa, Homo Sapiens
GQAPTAEPSGTTSV

SEQ ID NO: 14958 - protein, 14 aa, Homo Sapiens
QAPTAEPSGTTSVQ

SEQ ID NO: 14959 - protein, 14 aa, Homo Sapiens
APTAEPSGTTSVQV

SEQ ID NO: 14960 - protein, 14 aa, Homo Sapiens
PTAEPSGTTSVQVP

SEQ ID NO: 14961 - protein, 14 aa, Homo Sapiens
TAEPSGTTSVQVPT

SEQ ID NO: 14962 - protein, 14 aa, Homo Sapiens
AEPSGTTSVQVPTT

SEQ ID NO: 14963 - protein, 14 aa, Homo Sapiens
EPSGTTSVQVPTTE

SEQ ID NO: 14964 - protein, 14 aa, Homo Sapiens
PSGTTSVQVPTTEV

SEQ ID NO: 14965 - protein, 14 aa, Homo Sapiens
SGTTSVQVPTTEVI

SEQ ID NO: 14966 - protein, 14 aa, Homo Sapiens
GTTSVQVPTTEVIS

SEQ ID NO: 14967 - protein, 14 aa, Homo Sapiens
TTSVQVPTTEVIST

SEQ ID NO: 14968 - protein, 14 aa, Homo Sapiens
TSVQVPTTEVISTA

SEQ ID NO: 14969 - protein, 14 aa, Homo Sapiens
SVQVPTTEVISTAP

SEQ ID NO: 14970 - protein, 14 aa, Homo Sapiens
VQVPTTEVISTAPV

SEQ ID NO: 14971 - protein, 14 aa, Homo Sapiens
QVPTTEVISTAPVQ

SEQ ID NO: 14972 - protein, 14 aa, Homo Sapiens
VPTTEVISTAPVQM

SEQ ID NO: 14973 - protein, 14 aa, Homo Sapiens
PTTEVISTAPVQMP

SEQ ID NO: 14974 - protein, 14 aa, Homo Sapiens
TTEVISTAPVQMPT

SEQ ID NO: 14975 - protein, 14 aa, Homo Sapiens
TEVISTAPVQMPTA

SEQ ID NO: 14976 - protein, 14 aa, Homo Sapiens
EVISTAPVQMPTAE

SEQ ID NO: 14977 - protein, 14 aa, Homo Sapiens
VISTAPVQMPTAES

SEQ ID NO: 14978 - protein, 14 aa, Homo Sapiens
ISTAPVQMPTAEST

SEQ ID NO: 14979 - protein, 14 aa, Homo Sapiens
STAPVQMPTAESTG

SEQ ID NO: 14980 - protein, 14 aa, Homo Sapiens
TAPVQMPTAESTGM

SEQ ID NO: 14981 - protein, 14 aa, Homo Sapiens
APVQMPTAESTGMT

SEQ ID NO: 14982 - protein, 14 aa, Homo Sapiens
PVQMPTAESTGMTP

SEQ ID NO: 14983 - protein, 14 aa, Homo Sapiens
VQMPTAESTGMTPE

SEQ ID NO: 14984 - protein, 14 aa, Homo Sapiens
QMPTAESTGMTPEK

SEQ ID NO: 14985 - protein, 14 aa, Homo Sapiens
MPTAESTGMTPEKV

SEQ ID NO: 14986 - protein, 14 aa, Homo Sapiens
PTAESTGMTPEKVP

SEQ ID NO: 14987 - protein, 14 aa, Homo Sapiens
TAESTGMTPEKVPV

SEQ ID NO: 14988 - protein, 14 aa, Homo Sapiens
AESTGMTPEKVPVS

SEQ ID NO: 14989 - protein, 14 aa, Homo Sapiens
ESTGMTPEKVPVSE

SEQ ID NO: 14990 - protein, 14 aa, Homo Sapiens
STGMTPEKVPVSEV

SEQ ID NO: 14991 - protein, 14 aa, Homo Sapiens
TGMTPEKVPVSEVM

SEQ ID NO: 14992 - protein, 14 aa, Homo Sapiens
GMTPEKVPVSEVMG

SEQ ID NO: 14993 - protein, 14 aa, Homo Sapiens
MTPEKVPVSEVMGT

SEQ ID NO: 14994 - protein, 14 aa, Homo Sapiens
TPEKVPVSEVMGTT

SEQ ID NO: 14995 - protein, 14 aa, Homo Sapiens
PEKVPVSEVMGTTL

SEQ ID NO: 14996 - protein, 14 aa, Homo Sapiens
EKVPVSEVMGTTLA

SEQ ID NO: 14997 - protein, 14 aa, Homo Sapiens
KVPVSEVMGTTLAE

SEQ ID NO: 14998 - protein, 14 aa, Homo Sapiens
VPVSEVMGTTLAEM

SEQ ID NO: 14999 - protein, 14 aa, Homo Sapiens
PVSEVMGTTLAEMS

SEQ ID NO: 15000 - protein, 14 aa, Homo Sapiens
VSEVMGTTLAEMST

SEQ ID NO: 15001 - protein, 14 aa, Homo Sapiens
SEVMGTTLAEMSTP

SEQ ID NO: 15002 - protein, 14 aa, Homo Sapiens
EVMGTTLAEMSTPE

SEQ ID NO: 15003 - protein, 14 aa, Homo Sapiens
VMGTTLAEMSTPEA

SEQ ID NO: 15004 - protein, 14 aa, Homo Sapiens
MGTTLAEMSTPEAT

SEQ ID NO: 15005 - protein, 14 aa, Homo Sapiens
GTTLAEMSTPEATG

SEQ ID NO: 15006 - protein, 14 aa, Homo Sapiens
TTLAEMSTPEATGM

SEQ ID NO: 15007 - protein, 14 aa, Homo Sapiens
TLAEMSTPEATGMT

SEQ ID NO: 15008 - protein, 14 aa, Homo Sapiens
LAEMSTPEATGMTP

SEQ ID NO: 15009 - protein, 14 aa, Homo Sapiens
AEMSTPEATGMTPA

SEQ ID NO: 15010 - protein, 14 aa, Homo Sapiens
EMSTPEATGMTPAE

SEQ ID NO: 15011 - protein, 14 aa, Homo Sapiens
MSTPEATGMTPAEV

SEQ ID NO: 15012 - protein, 14 aa, Homo Sapiens
STPEATGMTPAEVS

SEQ ID NO: 15013 - protein, 14 aa, Homo Sapiens
TPEATGMTPAEVSI

SEQ ID NO: 15014 - protein, 14 aa, Homo Sapiens
PEATGMTPAEVSIV

SEQ ID NO: 15015 - protein, 14 aa, Homo Sapiens
EATGMTPAEVSIVV

SEQ ID NO: 15016 - protein, 14 aa, Homo Sapiens
ATGMTPAEVSIVVL

SEQ ID NO: 15017 - protein, 14 aa, Homo Sapiens
TGMTPAEVSIVVLS

SEQ ID NO: 15018 - protein, 14 aa, Homo Sapiens
GMTPAEVSIVVLSG

SEQ ID NO: 15019 - protein, 14 aa, Homo Sapiens
MTPAEVSIVVLSGT

SEQ ID NO: 15020 - protein, 14 aa, Homo Sapiens
TPAEVSIVVLSGTT

SEQ ID NO: 15021 - protein, 14 aa, Homo Sapiens
PAEVSIVVLSGTTA

SEQ ID NO: 15022 - protein, 14 aa, Homo Sapiens
AEVSIVVLSGTTAA

SEQ ID NO: 15023 - protein, 14 aa, Homo Sapiens
EVSIVVLSGTTAAQ

SEQ ID NO: 15024 - protein, 14 aa, Homo Sapiens
VSIVVLSGTTAAQV

SEQ ID NO: 15025 - protein, 14 aa, Homo Sapiens
SIVVLSGTTAAQVT

SEQ ID NO: 15026 - protein, 14 aa, Homo Sapiens
IVVLSGTTAAQVTT

SEQ ID NO: 15027 - protein, 14 aa, Homo Sapiens
VVLSGTTAAQVTTT

SEQ ID NO: 15028 - protein, 14 aa, Homo Sapiens
VLSGTTAAQVTTTE

SEQ ID NO: 15029 - protein, 14 aa, Homo Sapiens
LSGTTAAQVTTTEW

SEQ ID NO: 15030 - protein, 14 aa, Homo Sapiens
SGTTAAQVTTTEWV

SEQ ID NO: 15031 - protein, 14 aa, Homo Sapiens
GTTAAQVTTTEWVE

SEQ ID NO: 15032 - protein, 14 aa, Homo Sapiens
TTAAQVTTTEWVET

SEQ ID NO: 15033 - protein, 14 aa, Homo Sapiens
TAAQVTTTEWVETT

SEQ ID NO: 15034 - protein, 14 aa, Homo Sapiens
AAQVTTTEWVETTA

SEQ ID NO: 15035 - protein, 14 aa, Homo Sapiens
AQVTTTEWVETTAR

SEQ ID NO: 15036 - protein, 14 aa, Homo Sapiens
QVTTTEWVETTARE

SEQ ID NO: 15037 - protein, 14 aa, Homo Sapiens
VTTTEWVETTAREL

SEQ ID NO: 15038 - protein, 14 aa, Homo Sapiens
TTTEWVETTARELP

SEQ ID NO: 15039 - protein, 14 aa, Homo Sapiens
TTEWVETTARELPI

SEQ ID NO: 15040 - protein, 14 aa, Homo Sapiens
TEWVETTARELPIP

SEQ ID NO: 15041 - protein, 14 aa, Homo Sapiens
EWVETTARELPIPE

SEQ ID NO: 15042 - protein, 14 aa, Homo Sapiens
WVETTARELPIPEP

SEQ ID NO: 15043 - protein, 14 aa, Homo Sapiens
VETTARELPIPEPE

SEQ ID NO: 15044 - protein, 14 aa, Homo Sapiens
ETTARELPIPEPEG

SEQ ID NO: 15045 - protein, 14 aa, Homo Sapiens
TTARELPIPEPEGP

SEQ ID NO: 15046 - protein, 14 aa, Homo Sapiens
TARELPIPEPEGPD

SEQ ID NO: 15047 - protein, 14 aa, Homo Sapiens
ARELPIPEPEGPDA

SEQ ID NO: 15048 - protein, 14 aa, Homo Sapiens
RELPIPEPEGPDAS

SEQ ID NO: 15049 - protein, 14 aa, Homo Sapiens
ELPIPEPEGPDASS

SEQ ID NO: 15050 - protein, 14 aa, Homo Sapiens
LPIPEPEGPDASSI

SEQ ID NO: 15051 - protein, 14 aa, Homo Sapiens
PIPEPEGPDASSIM

SEQ ID NO: 15052 - protein, 14 aa, Homo Sapiens
IPEPEGPDASSIMS

SEQ ID NO: 15053 - protein, 14 aa, Homo Sapiens
PEPEGPDASSIMST

SEQ ID NO: 15054 - protein, 14 aa, Homo Sapiens
EPEGPDASSIMSTE

SEQ ID NO: 15055 - protein, 14 aa, Homo Sapiens
PEGPDASSIMSTES

SEQ ID NO: 15056 - protein, 14 aa, Homo Sapiens
EGPDASSIMSTESI

SEQ ID NO: 15057 - protein, 14 aa, Homo Sapiens
GPDASSIMSTESIT

SEQ ID NO: 15058 - protein, 14 aa, Homo Sapiens
PDASSIMSTESITG

SEQ ID NO: 15059 - protein, 14 aa, Homo Sapiens
DASSIMSTESITGS

SEQ ID NO: 15060 - protein, 14 aa, Homo Sapiens
ASSIMSTESITGSL

SEQ ID NO: 15061 - protein, 14 aa, Homo Sapiens
SSIMSTESITGSLG

SEQ ID NO: 15062 - protein, 14 aa, Homo Sapiens
SIMSTESITGSLGP

SEQ ID NO: 15063 - protein, 14 aa, Homo Sapiens
IMSTESITGSLGPL

SEQ ID NO: 15064 - protein, 14 aa, Homo Sapiens
MSTESITGSLGPLL

SEQ ID NO: 15065 - protein, 14 aa, Homo Sapiens
STESITGSLGPLLD

SEQ ID NO: 15066 - protein, 14 aa, Homo Sapiens
TESITGSLGPLLDG

SEQ ID NO: 15067 - protein, 14 aa, Homo Sapiens
ESITGSLGPLLDGT

SEQ ID NO: 15068 - protein, 14 aa, Homo Sapiens
SITGSLGPLLDGTA

SEQ ID NO: 15069 - protein, 14 aa, Homo Sapiens
ITGSLGPLLDGTAT

SEQ ID NO: 15070 - protein, 14 aa, Homo Sapiens
TGSLGPLLDGTATL

SEQ ID NO: 15071 - protein, 14 aa, Homo Sapiens
GSLGPLLDGTATLR

SEQ ID NO: 15072 - protein, 14 aa, Homo Sapiens
SLGPLLDGTATLRL

SEQ ID NO: 15073 - protein, 14 aa, Homo Sapiens
LGPLLDGTATLRLV

SEQ ID NO: 15074 - protein, 14 aa, Homo Sapiens
GPLLDGTATLRLVK

SEQ ID NO: 15075 - protein, 14 aa, Homo Sapiens
PLLDGTATLRLVKR

SEQ ID NO: 15076 - protein, 14 aa, Homo Sapiens
LLDGTATLRLVKRQ

SEQ ID NO: 15077 - protein, 14 aa, Homo Sapiens
LDGTATLRLVKRQV

SEQ ID NO: 15078 - protein, 14 aa, Homo Sapiens
DGTATLRLVKRQVP

SEQ ID NO: 15079 - protein, 14 aa, Homo Sapiens
GTATLRLVKRQVPL

SEQ ID NO: 15080 - protein, 14 aa, Homo Sapiens
TATLRLVKRQVPLD

SEQ ID NO: 15081 - protein, 14 aa, Homo Sapiens
ATLRLVKRQVPLDC

SEQ ID NO: 15082 - protein, 14 aa, Homo Sapiens
TLRLVKRQVPLDCV

SEQ ID NO: 15083 - protein, 14 aa, Homo Sapiens
LRLVKRQVPLDCVL

SEQ ID NO: 15084 - protein, 14 aa, Homo Sapiens
RLVKRQVPLDCVLY

SEQ ID NO: 15085 - protein, 14 aa, Homo Sapiens
LVKRQVPLDCVLYR

SEQ ID NO: 15086 - protein, 14 aa, Homo Sapiens
VKRQVPLDCVLYRY

SEQ ID NO: 15087 - protein, 14 aa, Homo Sapiens
KRQVPLDCVLYRYG

SEQ ID NO: 15088 - protein, 14 aa, Homo Sapiens
RQVPLDCVLYRYGS

SEQ ID NO: 15089 - protein, 14 aa, Homo Sapiens
QVPLDCVLYRYGSF

SEQ ID NO: 15090 - protein, 14 aa, Homo Sapiens
VPLDCVLYRYGSFS

SEQ ID NO: 15091 - protein, 14 aa, Homo Sapiens
PLDCVLYRYGSFSV

SEQ ID NO: 15092 - protein, 14 aa, Homo Sapiens
LDCVLYRYGSFSVT

SEQ ID NO: 15093 - protein, 14 aa, Homo Sapiens
DCVLYRYGSFSVTL

SEQ ID NO: 15094 - protein, 14 aa, Homo Sapiens
CVLYRYGSFSVTLD

SEQ ID NO: 15095 - protein, 14 aa, Homo Sapiens
VLYRYGSFSVTLDI

SEQ ID NO: 15096 - protein, 14 aa, Homo Sapiens
LYRYGSFSVTLDIV

SEQ ID NO: 15097 - protein, 14 aa, Homo Sapiens
YRYGSFSVTLDIVQ

SEQ ID NO: 15098 - protein, 14 aa, Homo Sapiens
RYGSFSVTLDIVQG

SEQ ID NO: 15099 - protein, 14 aa, Homo Sapiens
YGSFSVTLDIVQGI

SEQ ID NO: 15100 - protein, 14 aa, Homo Sapiens
GSFSVTLDIVQGIE

SEQ ID NO: 15101 - protein, 14 aa, Homo Sapiens
SFSVTLDIVQGIES

SEQ ID NO: 15102 - protein, 14 aa, Homo Sapiens
FSVTLDIVQGIESA

SEQ ID NO: 15103 - protein, 14 aa, Homo Sapiens
SVTLDIVQGIESAE

SEQ ID NO: 15104 - protein, 14 aa, Homo Sapiens
VTLDIVQGIESAEI

SEQ ID NO: 15105 - protein, 14 aa, Homo Sapiens
TLDIVQGIESAEIL

SEQ ID NO: 15106 - protein, 14 aa, Homo Sapiens
LDIVQGIESAEILQ

SEQ ID NO: 15107 - protein, 14 aa, Homo Sapiens
DIVQGIESAEILQA

SEQ ID NO: 15108 - protein, 14 aa, Homo Sapiens
IVQGIESAEILQAV

SEQ ID NO: 15109 - protein, 14 aa, Homo Sapiens
VQGIESAEILQAVP

SEQ ID NO: 15110 - protein, 14 aa, Homo Sapiens
QGIESAEILQAVPS

SEQ ID NO: 15111 - protein, 14 aa, Homo Sapiens
GIESAEILQAVPSG

SEQ ID NO: 15112 - protein, 14 aa, Homo Sapiens
IESAEILQAVPSGE

SEQ ID NO: 15113 - protein, 14 aa, Homo Sapiens
ESAEILQAVPSGEG

SEQ ID NO: 15114 - protein, 14 aa, Homo Sapiens
SAEILQAVPSGEGD

SEQ ID NO: 15115 - protein, 14 aa, Homo Sapiens
AEILQAVPSGEGDA

SEQ ID NO: 15116 - protein, 14 aa, Homo Sapiens
EILQAVPSGEGDAF

SEQ ID NO: 15117 - protein, 14 aa, Homo Sapiens
ILQAVPSGEGDAFE

SEQ ID NO: 15118 - protein, 14 aa, Homo Sapiens
LQAVPSGEGDAFEL

SEQ ID NO: 15119 - protein, 14 aa, Homo Sapiens
QAVPSGEGDAFELT

SEQ ID NO: 15120 - protein, 14 aa, Homo Sapiens
AVPSGEGDAFELTV

SEQ ID NO: 15121 - protein, 14 aa, Homo Sapiens
VPSGEGDAFELTVS

SEQ ID NO: 15122 - protein, 14 aa, Homo Sapiens
PSGEGDAFELTVSC

SEQ ID NO: 15123 - protein, 14 aa, Homo Sapiens
SGEGDAFELTVSCQ

SEQ ID NO: 15124 - protein, 14 aa, Homo Sapiens
GEGDAFELTVSCQG

SEQ ID NO: 15125 - protein, 14 aa, Homo Sapiens
EGDAFELTVSCQGG

SEQ ID NO: 15126 - protein, 14 aa, Homo Sapiens
GDAFELTVSCQGGL

SEQ ID NO: 15127 - protein, 14 aa, Homo Sapiens
DAFELTVSCQGGLP

SEQ ID NO: 15128 - protein, 14 aa, Homo Sapiens
AFELTVSCQGGLPK

SEQ ID NO: 15129 - protein, 14 aa, Homo Sapiens
FELTVSCQGGLPKE

SEQ ID NO: 15130 - protein, 14 aa, Homo Sapiens
ELTVSCQGGLPKEA

SEQ ID NO: 15131 - protein, 14 aa, Homo Sapiens
LTVSCQGGLPKEAC

SEQ ID NO: 15132 - protein, 14 aa, Homo Sapiens
TVSCQGGLPKEACM

SEQ ID NO: 15133 - protein, 14 aa, Homo Sapiens
VSCQGGLPKEACME

SEQ ID NO: 15134 - protein, 14 aa, Homo Sapiens
SCQGGLPKEACMEI

SEQ ID NO: 15135 - protein, 14 aa, Homo Sapiens
CQGGLPKEACMEIS

SEQ ID NO: 15136 - protein, 14 aa, Homo Sapiens
QGGLPKEACMEISS

SEQ ID NO: 15137 - protein, 14 aa, Homo Sapiens
GGLPKEACMEISSP

SEQ ID NO: 15138 - protein, 14 aa, Homo Sapiens
GLPKEACMEISSPG

SEQ ID NO: 15139 - protein, 14 aa, Homo Sapiens
LPKEACMEISSPGC

SEQ ID NO: 15140 - protein, 14 aa, Homo Sapiens
PKEACMEISSPGCQ

SEQ ID NO: 15141 - protein, 14 aa, Homo Sapiens
KEACMEISSPGCQP

SEQ ID NO: 15142 - protein, 14 aa, Homo Sapiens
EACMEISSPGCQPP

SEQ ID NO: 15143 - protein, 14 aa, Homo Sapiens
ACMEISSPGCQPPA

SEQ ID NO: 15144 - protein, 14 aa, Homo Sapiens
CMEISSPGCQPPAQ

SEQ ID NO: 15145 - protein, 14 aa, Homo Sapiens
MEISSPGCQPPAQR

SEQ ID NO: 15146 - protein, 14 aa, Homo Sapiens
EISSPGCQPPAQRL

SEQ ID NO: 15147 - protein, 14 aa, Homo Sapiens
ISSPGCQPPAQRLC

SEQ ID NO: 15148 - protein, 14 aa, Homo Sapiens
SSPGCQPPAQRLCQ

SEQ ID NO: 15149 - protein, 14 aa, Homo Sapiens
SPGCQPPAQRLCQP

SEQ ID NO: 15150 - protein, 14 aa, Homo Sapiens
PGCQPPAQRLCQPV

SEQ ID NO: 15151 - protein, 14 aa, Homo Sapiens
GCQPPAQRLCQPVL

SEQ ID NO: 15152 - protein, 14 aa, Homo Sapiens
CQPPAQRLCQPVLP

SEQ ID NO: 15153 - protein, 14 aa, Homo Sapiens
QPPAQRLCQPVLPS

SEQ ID NO: 15154 - protein, 14 aa, Homo Sapiens
PPAQRLCQPVLPSP

SEQ ID NO: 15155 - protein, 14 aa, Homo Sapiens
PAQRLCQPVLPSPA

SEQ ID NO: 15156 - protein, 14 aa, Homo Sapiens
AQRLCQPVLPSPAC

SEQ ID NO: 15157 - protein, 14 aa, Homo Sapiens
QRLCQPVLPSPACQ

SEQ ID NO: 15158 - protein, 14 aa, Homo Sapiens
RLCQPVLPSPACQL

SEQ ID NO: 15159 - protein, 14 aa, Homo Sapiens
LCQPVLPSPACQLV

SEQ ID NO: 15160 - protein, 14 aa, Homo Sapiens
CQPVLPSPACQLVL

SEQ ID NO: 15161 - protein, 14 aa, Homo Sapiens
QPVLPSPACQLVLH

SEQ ID NO: 15162 - protein, 14 aa, Homo Sapiens
PVLPSPACQLVLHQ

SEQ ID NO: 15163 - protein, 14 aa, Homo Sapiens
VLPSPACQLVLHQI

SEQ ID NO: 15164 - protein, 14 aa, Homo Sapiens
LPSPACQLVLHQIL

SEQ ID NO: 15165 - protein, 14 aa, Homo Sapiens
PSPACQLVLHQILK

SEQ ID NO: 15166 - protein, 14 aa, Homo Sapiens
SPACQLVLHQILKG

SEQ ID NO: 15167 - protein, 14 aa, Homo Sapiens
PACQLVLHQILKGG

SEQ ID NO: 15168 - protein, 14 aa, Homo Sapiens
ACQLVLHQILKGGS

SEQ ID NO: 15169 - protein, 14 aa, Homo Sapiens
CQLVLHQILKGGSG

SEQ ID NO: 15170 - protein, 14 aa, Homo Sapiens
QLVLHQILKGGSGT

SEQ ID NO: 15171 - protein, 14 aa, Homo Sapiens
LVLHQILKGGSGTY

SEQ ID NO: 15172 - protein, 14 aa, Homo Sapiens
VLHQILKGGSGTYC

SEQ ID NO: 15173 - protein, 14 aa, Homo Sapiens
LHQILKGGSGTYCL

SEQ ID NO: 15174 - protein, 14 aa, Homo Sapiens
HQILKGGSGTYCLN

SEQ ID NO: 15175 - protein, 14 aa, Homo Sapiens
QILKGGSGTYCLNV

SEQ ID NO: 15176 - protein, 14 aa, Homo Sapiens
ILKGGSGTYCLNVS

SEQ ID NO: 15177 - protein, 14 aa, Homo Sapiens
LKGGSGTYCLNVSL

SEQ ID NO: 15178 - protein, 14 aa, Homo Sapiens
KGGSGTYCLNVSLA

SEQ ID NO: 15179 - protein, 14 aa, Homo Sapiens
GGSGTYCLNVSLAD

SEQ ID NO: 15180 - protein, 14 aa, Homo Sapiens
GSGTYCLNVSLADT

SEQ ID NO: 15181 - protein, 14 aa, Homo Sapiens
SGTYCLNVSLADTN

SEQ ID NO: 15182 - protein, 14 aa, Homo Sapiens
GTYCLNVSLADTNS

SEQ ID NO: 15183 - protein, 14 aa, Homo Sapiens
TYCLNVSLADTNSL

SEQ ID NO: 15184 - protein, 14 aa, Homo Sapiens
YCLNVSLADTNSLA

SEQ ID NO: 15185 - protein, 14 aa, Homo Sapiens
CLNVSLADTNSLAV

SEQ ID NO: 15186 - protein, 14 aa, Homo Sapiens
LNVSLADTNSLAVV

SEQ ID NO: 15187 - protein, 14 aa, Homo Sapiens
NVSLADTNSLAVVS

SEQ ID NO: 15188 - protein, 14 aa, Homo Sapiens
VSLADTNSLAVVST

SEQ ID NO: 15189 - protein, 14 aa, Homo Sapiens
SLADTNSLAVVSTQ

SEQ ID NO: 15190 - protein, 14 aa, Homo Sapiens
LADTNSLAVVSTQL

SEQ ID NO: 15191 - protein, 14 aa, Homo Sapiens
ADTNSLAVVSTQLI

SEQ ID NO: 15192 - protein, 14 aa, Homo Sapiens
DTNSLAVVSTQLIM

SEQ ID NO: 15193 - protein, 14 aa, Homo Sapiens
TNSLAVVSTQLIMP

SEQ ID NO: 15194 - protein, 14 aa, Homo Sapiens
NSLAVVSTQLIMPG

SEQ ID NO: 15195 - protein, 14 aa, Homo Sapiens
SLAVVSTQLIMPGQ

SEQ ID NO: 15196 - protein, 14 aa, Homo Sapiens
LAVVSTQLIMPGQE

SEQ ID NO: 15197 - protein, 14 aa, Homo Sapiens
AVVSTQLIMPGQEA

SEQ ID NO: 15198 - protein, 14 aa, Homo Sapiens
VVSTQLIMPGQEAG

SEQ ID NO: 15199 - protein, 14 aa, Homo Sapiens
VSTQLIMPGQEAGL

SEQ ID NO: 15200 - protein, 14 aa, Homo Sapiens
STQLIMPGQEAGLG

SEQ ID NO: 15201 - protein, 14 aa, Homo Sapiens
TQLIMPGQEAGLGQ

SEQ ID NO: 15202 - protein, 14 aa, Homo Sapiens
QLIMPGQEAGLGQV

SEQ ID NO: 15203 - protein, 14 aa, Homo Sapiens
LIMPGQEAGLGQVP

SEQ ID NO: 15204 - protein, 14 aa, Homo Sapiens
IMPGQEAGLGQVPL

SEQ ID NO: 15205 - protein, 14 aa, Homo Sapiens
MPGQEAGLGQVPLI

SEQ ID NO: 15206 - protein, 14 aa, Homo Sapiens
PGQEAGLGQVPLIV

SEQ ID NO: 15207 - protein, 14 aa, Homo Sapiens
GQEAGLGQVPLIVG

SEQ ID NO: 15208 - protein, 14 aa, Homo Sapiens
QEAGLGQVPLIVGI

SEQ ID NO: 15209 - protein, 14 aa, Homo Sapiens
EAGLGQVPLIVGIL

SEQ ID NO: 15210 - protein, 14 aa, Homo Sapiens
AGLGQVPLIVGILL

SEQ ID NO: 15211 - protein, 14 aa, Homo Sapiens
GLGQVPLIVGILLV

SEQ ID NO: 15212 - protein, 14 aa, Homo Sapiens
LGQVPLIVGILLVL

SEQ ID NO: 15213 - protein, 14 aa, Homo Sapiens
GQVPLIVGILLVLM

SEQ ID NO: 15214 - protein, 14 aa, Homo Sapiens
QVPLIVGILLVLMA

SEQ ID NO: 15215 - protein, 14 aa, Homo Sapiens
VPLIVGILLVLMAV

SEQ ID NO: 15216 - protein, 14 aa, Homo Sapiens
PLIVGILLVLMAVV

SEQ ID NO: 15217 - protein, 14 aa, Homo Sapiens
LIVGILLVLMAVVL

SEQ ID NO: 15218 - protein, 14 aa, Homo Sapiens
IVGILLVLMAVVLA

SEQ ID NO: 15219 - protein, 14 aa, Homo Sapiens
VGILLVLMAVVLAS

SEQ ID NO: 15220 - protein, 14 aa, Homo Sapiens
GILLVLMAVVLASL

SEQ ID NO: 15221 - protein, 14 aa, Homo Sapiens
ILLVLMAVVLASLI

SEQ ID NO: 15222 - protein, 14 aa, Homo Sapiens
LLVLMAVVLASLIY

SEQ ID NO: 15223 - protein, 14 aa, Homo Sapiens
LVLMAVVLASLIYR

SEQ ID NO: 15224 - protein, 14 aa, Homo Sapiens
VLMAVVLASLIYRR

SEQ ID NO: 15225 - protein, 14 aa, Homo Sapiens
LMAVVLASLIYRRR

SEQ ID NO: 15226 - protein, 14 aa, Homo Sapiens
MAVVLASLIYRRRL

SEQ ID NO: 15227 - protein, 14 aa, Homo Sapiens
AVVLASLIYRRRLM

SEQ ID NO: 15228 - protein, 14 aa, Homo Sapiens
VVLASLIYRRRLMK

SEQ ID NO: 15229 - protein, 14 aa, Homo Sapiens
VLASLIYRRRLMKQ

SEQ ID NO: 15230 - protein, 14 aa, Homo Sapiens
LASLIYRRRLMKQD

SEQ ID NO: 15231 - protein, 14 aa, Homo Sapiens
ASLIYRRRLMKQDF

SEQ ID NO: 15232 - protein, 14 aa, Homo Sapiens
SLIYRRRLMKQDFS

SEQ ID NO: 15233 - protein, 14 aa, Homo Sapiens
LIYRRRLMKQDFSV

SEQ ID NO: 15234 - protein, 14 aa, Homo Sapiens
IYRRRLMKQDFSVP

SEQ ID NO: 15235 - protein, 14 aa, Homo Sapiens
YRRRLMKQDFSVPQ

SEQ ID NO: 15236 - protein, 14 aa, Homo Sapiens
RRRLMKQDFSVPQL

SEQ ID NO: 15237 - protein, 14 aa, Homo Sapiens
RRLMKQDFSVPQLP

SEQ ID NO: 15238 - protein, 14 aa, Homo Sapiens
RLMKQDFSVPQLPH

SEQ ID NO: 15239 - protein, 14 aa, Homo Sapiens
LMKQDFSVPQLPHS

SEQ ID NO: 15240 - protein, 14 aa, Homo Sapiens
MKQDFSVPQLPHSS

SEQ ID NO: 15241 - protein, 14 aa, Homo Sapiens
KQDFSVPQLPHSSS

SEQ ID NO: 15242 - protein, 14 aa, Homo Sapiens
QDFSVPQLPHSSSH

SEQ ID NO: 15243 - protein, 14 aa, Homo Sapiens
DFSVPQLPHSSSHW

SEQ ID NO: 15244 - protein, 14 aa, Homo Sapiens
FSVPQLPHSSSHWL

SEQ ID NO: 15245 - protein, 14 aa, Homo Sapiens
SVPQLPHSSSHWLR

SEQ ID NO: 15246 - protein, 14 aa, Homo Sapiens
VPQLPHSSSHWLRL

SEQ ID NO: 15247 - protein, 14 aa, Homo Sapiens
PQLPHSSSHWLRLP

SEQ ID NO: 15248 - protein, 14 aa, Homo Sapiens
QLPHSSSHWLRLPR

SEQ ID NO: 15249 - protein, 14 aa, Homo Sapiens
LPHSSSHWLRLPRI

SEQ ID NO: 15250 - protein, 14 aa, Homo Sapiens
PHSSSHWLRLPRIF

SEQ ID NO: 15251 - protein, 14 aa, Homo Sapiens
HSSSHWLRLPRIFC

SEQ ID NO: 15252 - protein, 14 aa, Homo Sapiens
SSSHWLRLPRIFCS

SEQ ID NO: 15253 - protein, 14 aa, Homo Sapiens
SSHWLRLPRIFCSC

SEQ ID NO: 15254 - protein, 14 aa, Homo Sapiens
SHWLRLPRIFCSCP

SEQ ID NO: 15255 - protein, 14 aa, Homo Sapiens
HWLRLPRIFCSCPI

SEQ ID NO: 15256 - protein, 14 aa, Homo Sapiens
WLRLPRIFCSCPIG

SEQ ID NO: 15257 - protein, 14 aa, Homo Sapiens
LRLPRIFCSCPIGE

SEQ ID NO: 15258 - protein, 14 aa, Homo Sapiens
RLPRIFCSCPIGEN

SEQ ID NO: 15259 - protein, 14 aa, Homo Sapiens
LPRIFCSCPIGENS

SEQ ID NO: 15260 - protein, 14 aa, Homo Sapiens
PRIFCSCPIGENSP

SEQ ID NO: 15261 - protein, 14 aa, Homo Sapiens
RIFCSCPIGENSPL

SEQ ID NO: 15262 - protein, 14 aa, Homo Sapiens
IFCSCPIGENSPLL

SEQ ID NO: 15263 - protein, 14 aa, Homo Sapiens
FCSCPIGENSPLLS

SEQ ID NO: 15264 - protein, 14 aa, Homo Sapiens
CSCPIGENSPLLSG

SEQ ID NO: 15265 - protein, 14 aa, Homo Sapiens
SCPIGENSPLLSGQ

SEQ ID NO: 15266 - protein, 14 aa, Homo Sapiens
CPIGENSPLLSGQQ

SEQ ID NO: 15267 - protein, 14 aa, Homo Sapiens
PIGENSPLLSGQQV

SEQ ID NO: 15268 - protein, 15 aa, Homo Sapiens
MDLVLKRCLLHLAVI

SEQ ID NO: 15269 - protein, 15 aa, Homo Sapiens
DLVLKRCLLHLAVIG

SEQ ID NO: 15270 - protein, 15 aa, Homo Sapiens
LVLKRCLLHLAVIGA

SEQ ID NO: 15271 - protein, 15 aa, Homo Sapiens
VLKRCLLHLAVIGAL

SEQ ID NO: 15272 - protein, 15 aa, Homo Sapiens
LKRCLLHLAVIGALL

SEQ ID NO: 15273 - protein, 15 aa, Homo Sapiens
KRCLLHLAVIGALLA

SEQ ID NO: 15274 - protein, 15 aa, Homo Sapiens
RCLLHLAVIGALLAV

SEQ ID NO: 15275 - protein, 15 aa, Homo Sapiens
CLLHLAVIGALLAVG

SEQ ID NO: 15276 - protein, 15 aa, Homo Sapiens
LLHLAVIGALLAVGA

SEQ ID NO: 15277 - protein, 15 aa, Homo Sapiens
LHLAVIGALLAVGAT

SEQ ID NO: 15278 - protein, 15 aa, Homo Sapiens
HLAVIGALLAVGATK

SEQ ID NO: 15279 - protein, 15 aa, Homo Sapiens
LAVIGALLAVGATKV

SEQ ID NO: 15280 - protein, 15 aa, Homo Sapiens
AVIGALLAVGATKVP

SEQ ID NO: 15281 - protein, 15 aa, Homo Sapiens
VIGALLAVGATKVPR

SEQ ID NO: 15282 - protein, 15 aa, Homo Sapiens
IGALLAVGATKVPRN

SEQ ID NO: 15283 - protein, 15 aa, Homo Sapiens
GALLAVGATKVPRNQ

SEQ ID NO: 15284 - protein, 15 aa, Homo Sapiens
ALLAVGATKVPRNQD

SEQ ID NO: 15285 - protein, 15 aa, Homo Sapiens
LLAVGATKVPRNQDW

SEQ ID NO: 15286 - protein, 15 aa, Homo Sapiens
LAVGATKVPRNQDWL

SEQ ID NO: 15287 - protein, 15 aa, Homo Sapiens
AVGATKVPRNQDWLG

SEQ ID NO: 15288 - protein, 15 aa, Homo Sapiens
VGATKVPRNQDWLGV

SEQ ID NO: 15289 - protein, 15 aa, Homo Sapiens
GATKVPRNQDWLGVS

SEQ ID NO: 15290 - protein, 15 aa, Homo Sapiens
ATKVPRNQDWLGVSR

SEQ ID NO: 15291 - protein, 15 aa, Homo Sapiens
TKVPRNQDWLGVSRQ

SEQ ID NO: 15292 - protein, 15 aa, Homo Sapiens
KVPRNQDWLGVSRQL

SEQ ID NO: 15293 - protein, 15 aa, Homo Sapiens
VPRNQDWLGVSRQLR

SEQ ID NO: 15294 - protein, 15 aa, Homo Sapiens
PRNQDWLGVSRQLRT

SEQ ID NO: 15295 - protein, 15 aa, Homo Sapiens
RNQDWLGVSRQLRTK

SEQ ID NO: 15296 - protein, 15 aa, Homo Sapiens
NQDWLGVSRQLRTKA

SEQ ID NO: 15297 - protein, 15 aa, Homo Sapiens
QDWLGVSRQLRTKAW

SEQ ID NO: 15298 - protein, 15 aa, Homo Sapiens
DWLGVSRQLRTKAWN

SEQ ID NO: 15299 - protein, 15 aa, Homo Sapiens
WLGVSRQLRTKAWNR

SEQ ID NO: 15300 - protein, 15 aa, Homo Sapiens
LGVSRQLRTKAWNRQ

SEQ ID NO: 15301 - protein, 15 aa, Homo Sapiens
GVSRQLRTKAWNRQL

SEQ ID NO: 15302 - protein, 15 aa, Homo Sapiens
VSRQLRTKAWNRQLY

SEQ ID NO: 15303 - protein, 15 aa, Homo Sapiens
SRQLRTKAWNRQLYP

SEQ ID NO: 15304 - protein, 15 aa, Homo Sapiens
RQLRTKAWNRQLYPE

SEQ ID NO: 15305 - protein, 15 aa, Homo Sapiens
QLRTKAWNRQLYPEW

SEQ ID NO: 15306 - protein, 15 aa, Homo Sapiens
LRTKAWNRQLYPEWT

SEQ ID NO: 15307 - protein, 15 aa, Homo Sapiens
RTKAWNRQLYPEWTE

SEQ ID NO: 15308 - protein, 15 aa, Homo Sapiens
TKAWNRQLYPEWTEA

SEQ ID NO: 15309 - protein, 15 aa, Homo Sapiens
KAWNRQLYPEWTEAQ

SEQ ID NO: 15310 - protein, 15 aa, Homo Sapiens
AWNRQLYPEWTEAQR

SEQ ID NO: 15311 - protein, 15 aa, Homo Sapiens
WNRQLYPEWTEAQRL

SEQ ID NO: 15312 - protein, 15 aa, Homo Sapiens
NRQLYPEWTEAQRLD

SEQ ID NO: 15313 - protein, 15 aa, Homo Sapiens
RQLYPEWTEAQRLDC

SEQ ID NO: 15314 - protein, 15 aa, Homo Sapiens
QLYPEWTEAQRLDCW

SEQ ID NO: 15315 - protein, 15 aa, Homo Sapiens
LYPEWTEAQRLDCWR

SEQ ID NO: 15316 - protein, 15 aa, Homo Sapiens
YPEWTEAQRLDCWRG

SEQ ID NO: 15317 - protein, 15 aa, Homo Sapiens
PEWTEAQRLDCWRGG

SEQ ID NO: 15318 - protein, 15 aa, Homo Sapiens
EWTEAQRLDCWRGGQ

SEQ ID NO: 15319 - protein, 15 aa, Homo Sapiens
WTEAQRLDCWRGGQV

SEQ ID NO: 15320 - protein, 15 aa, Homo Sapiens
TEAQRLDCWRGGQVS

SEQ ID NO: 15321 - protein, 15 aa, Homo Sapiens
EAQRLDCWRGGQVSL

SEQ ID NO: 15322 - protein, 15 aa, Homo Sapiens
AQRLDCWRGGQVSLK

SEQ ID NO: 15323 - protein, 15 aa, Homo Sapiens
QRLDCWRGGQVSLKV

SEQ ID NO: 15324 - protein, 15 aa, Homo Sapiens
RLDCWRGGQVSLKVS

SEQ ID NO: 15325 - protein, 15 aa, Homo Sapiens
LDCWRGGQVSLKVSN

SEQ ID NO: 15326 - protein, 15 aa, Homo Sapiens
DCWRGGQVSLKVSND

SEQ ID NO: 15327 - protein, 15 aa, Homo Sapiens
CWRGGQVSLKVSNDG

SEQ ID NO: 15328 - protein, 15 aa, Homo Sapiens
WRGGQVSLKVSNDGP

SEQ ID NO: 15329 - protein, 15 aa, Homo Sapiens
RGGQVSLKVSNDGPT

SEQ ID NO: 15330 - protein, 15 aa, Homo Sapiens
GGQVSLKVSNDGPTL

SEQ ID NO: 15331 - protein, 15 aa, Homo Sapiens
GQVSLKVSNDGPTLI

SEQ ID NO: 15332 - protein, 15 aa, Homo Sapiens
QVSLKVSNDGPTLIG

SEQ ID NO: 15333 - protein, 15 aa, Homo Sapiens
VSLKVSNDGPTLIGA

SEQ ID NO: 15334 - protein, 15 aa, Homo Sapiens
SLKVSNDGPTLIGAN

SEQ ID NO: 15335 - protein, 15 aa, Homo Sapiens
LKVSNDGPTLIGANA

SEQ ID NO: 15336 - protein, 15 aa, Homo Sapiens
KVSNDGPTLIGANAS

SEQ ID NO: 15337 - protein, 15 aa, Homo Sapiens
VSNDGPTLIGANASF

SEQ ID NO: 15338 - protein, 15 aa, Homo Sapiens
SNDGPTLIGANASFS

SEQ ID NO: 15339 - protein, 15 aa, Homo Sapiens
NDGPTLIGANASFSI

SEQ ID NO: 15340 - protein, 15 aa, Homo Sapiens
DGPTLIGANASFSIA

SEQ ID NO: 15341 - protein, 15 aa, Homo Sapiens
GPTLIGANASFSIAL

SEQ ID NO: 15342 - protein, 15 aa, Homo Sapiens
PTLIGANASFSIALN

SEQ ID NO: 15343 - protein, 15 aa, Homo Sapiens
TLIGANASFSIALNF

SEQ ID NO: 15344 - protein, 15 aa, Homo Sapiens
LIGANASFSIALNFP

SEQ ID NO: 15345 - protein, 15 aa, Homo Sapiens
IGANASFSIALNFPG

SEQ ID NO: 15346 - protein, 15 aa, Homo Sapiens
GANASFSIALNFPGS

SEQ ID NO: 15347 - protein, 15 aa, Homo Sapiens
ANASFSIALNFPGSQ

SEQ ID NO: 15348 - protein, 15 aa, Homo Sapiens
NASFSIALNFPGSQK

SEQ ID NO: 15349 - protein, 15 aa, Homo Sapiens
ASFSIALNFPGSQKV

SEQ ID NO: 15350 - protein, 15 aa, Homo Sapiens
SFSIALNFPGSQKVL

SEQ ID NO: 15351 - protein, 15 aa, Homo Sapiens
FSIALNFPGSQKVLP

SEQ ID NO: 15352 - protein, 15 aa, Homo Sapiens
SIALNFPGSQKVLPD

SEQ ID NO: 15353 - protein, 15 aa, Homo Sapiens
IALNFPGSQKVLPDG

SEQ ID NO: 15354 - protein, 15 aa, Homo Sapiens
ALNFPGSQKVLPDGQ

SEQ ID NO: 15355 - protein, 15 aa, Homo Sapiens
LNFPGSQKVLPDGQV

SEQ ID NO: 15356 - protein, 15 aa, Homo Sapiens
NFPGSQKVLPDGQVI

SEQ ID NO: 15357 - protein, 15 aa, Homo Sapiens
FPGSQKVLPDGQVIW

SEQ ID NO: 15358 - protein, 15 aa, Homo Sapiens
PGSQKVLPDGQVIWV

SEQ ID NO: 15359 - protein, 15 aa, Homo Sapiens
GSQKVLPDGQVIWVN

SEQ ID NO: 15360 - protein, 15 aa, Homo Sapiens
SQKVLPDGQVIWVNN

SEQ ID NO: 15361 - protein, 15 aa, Homo Sapiens
QKVLPDGQVIWVNNT

SEQ ID NO: 15362 - protein, 15 aa, Homo Sapiens
KVLPDGQVIWVNNTI

SEQ ID NO: 15363 - protein, 15 aa, Homo Sapiens
VLPDGQVIWVNNTII

SEQ ID NO: 15364 - protein, 15 aa, Homo Sapiens
LPDGQVIWVNNTIIN

SEQ ID NO: 15365 - protein, 15 aa, Homo Sapiens
PDGQVIWVNNTIING

SEQ ID NO: 15366 - protein, 15 aa, Homo Sapiens
DGQVIWVNNTIINGS

SEQ ID NO: 15367 - protein, 15 aa, Homo Sapiens
GQVIWVNNTIINGSQ

SEQ ID NO: 15368 - protein, 15 aa, Homo Sapiens
QVIWVNNTIINGSQV

SEQ ID NO: 15369 - protein, 15 aa, Homo Sapiens
VIWVNNTIINGSQVW

SEQ ID NO: 15370 - protein, 15 aa, Homo Sapiens
IWVNNTIINGSQVWG

SEQ ID NO: 15371 - protein, 15 aa, Homo Sapiens
WVNNTIINGSQVWGG

SEQ ID NO: 15372 - protein, 15 aa, Homo Sapiens
VNNTIINGSQVWGGQ

SEQ ID NO: 15373 - protein, 15 aa, Homo Sapiens
NNTIINGSQVWGGQP

SEQ ID NO: 15374 - protein, 15 aa, Homo Sapiens
NTIINGSQVWGGQPV

SEQ ID NO: 15375 - protein, 15 aa, Homo Sapiens
TIINGSQVWGGQPVY

SEQ ID NO: 15376 - protein, 15 aa, Homo Sapiens
IINGSQVWGGQPVYP

SEQ ID NO: 15377 - protein, 15 aa, Homo Sapiens
INGSQVWGGQPVYPQ

SEQ ID NO: 15378 - protein, 15 aa, Homo Sapiens
NGSQVWGGQPVYPQE

SEQ ID NO: 15379 - protein, 15 aa, Homo Sapiens
GSQVWGGQPVYPQET

SEQ ID NO: 15380 - protein, 15 aa, Homo Sapiens
SQVWGGQPVYPQETD

SEQ ID NO: 15381 - protein, 15 aa, Homo Sapiens
QVWGGQPVYPQETDD

SEQ ID NO: 15382 - protein, 15 aa, Homo Sapiens
VWGGQPVYPQETDDA

SEQ ID NO: 15383 - protein, 15 aa, Homo Sapiens
WGGQPVYPQETDDAC

SEQ ID NO: 15384 - protein, 15 aa, Homo Sapiens
GGQPVYPQETDDACI

SEQ ID NO: 15385 - protein, 15 aa, Homo Sapiens
GQPVYPQETDDACIF

SEQ ID NO: 15386 - protein, 15 aa, Homo Sapiens
QPVYPQETDDACIFP

SEQ ID NO: 15387 - protein, 15 aa, Homo Sapiens
PVYPQETDDACIFPD

SEQ ID NO: 15388 - protein, 15 aa, Homo Sapiens
VYPQETDDACIFPDG

SEQ ID NO: 15389 - protein, 15 aa, Homo Sapiens
YPQETDDACIFPDGG

SEQ ID NO: 15390 - protein, 15 aa, Homo Sapiens
PQETDDACIFPDGGP

SEQ ID NO: 15391 - protein, 15 aa, Homo Sapiens
QETDDACIFPDGGPC

SEQ ID NO: 15392 - protein, 15 aa, Homo Sapiens
ETDDACIFPDGGPCP

SEQ ID NO: 15393 - protein, 15 aa, Homo Sapiens
TDDACIFPDGGPCPS

SEQ ID NO: 15394 - protein, 15 aa, Homo Sapiens
DDACIFPDGGPCPSG

SEQ ID NO: 15395 - protein, 15 aa, Homo Sapiens
DACIFPDGGPCPSGS

SEQ ID NO: 15396 - protein, 15 aa, Homo Sapiens
ACIFPDGGPCPSGSW

SEQ ID NO: 15397 - protein, 15 aa, Homo Sapiens
CIFPDGGPCPSGSWS

SEQ ID NO: 15398 - protein, 15 aa, Homo Sapiens
IFPDGGPCPSGSWSQ

SEQ ID NO: 15399 - protein, 15 aa, Homo Sapiens
FPDGGPCPSGSWSQK

SEQ ID NO: 15400 - protein, 15 aa, Homo Sapiens
PDGGPCPSGSWSQKR

SEQ ID NO: 15401 - protein, 15 aa, Homo Sapiens
DGGPCPSGSWSQKRS

SEQ ID NO: 15402 - protein, 15 aa, Homo Sapiens
GGPCPSGSWSQKRSF

SEQ ID NO: 15403 - protein, 15 aa, Homo Sapiens
GPCPSGSWSQKRSFV

SEQ ID NO: 15404 - protein, 15 aa, Homo Sapiens
PCPSGSWSQKRSFVY

SEQ ID NO: 15405 - protein, 15 aa, Homo Sapiens
CPSGSWSQKRSFVYV

SEQ ID NO: 15406 - protein, 15 aa, Homo Sapiens
PSGSWSQKRSFVYVW

SEQ ID NO: 15407 - protein, 15 aa, Homo Sapiens
SGSWSQKRSFVYVWK

SEQ ID NO: 15408 - protein, 15 aa, Homo Sapiens
GSWSQKRSFVYVWKT

SEQ ID NO: 15409 - protein, 15 aa, Homo Sapiens
SWSQKRSFVYVWKTW

SEQ ID NO: 15410 - protein, 15 aa, Homo Sapiens
WSQKRSFVYVWKTWG

SEQ ID NO: 15411 - protein, 15 aa, Homo Sapiens
SQKRSFVYVWKTWGQ

SEQ ID NO: 15412 - protein, 15 aa, Homo Sapiens
QKRSFVYVWKTWGQY

SEQ ID NO: 15413 - protein, 15 aa, Homo Sapiens
KRSFVYVWKTWGQYW

SEQ ID NO: 15414 - protein, 15 aa, Homo Sapiens
RSFVYVWKTWGQYWQ

SEQ ID NO: 15415 - protein, 15 aa, Homo Sapiens
SFVYVWKTWGQYWQV

SEQ ID NO: 15416 - protein, 15 aa, Homo Sapiens
FVYVWKTWGQYWQVL

SEQ ID NO: 15417 - protein, 15 aa, Homo Sapiens
VYVWKTWGQYWQVLG

SEQ ID NO: 15418 - protein, 15 aa, Homo Sapiens
YVWKTWGQYWQVLGG

SEQ ID NO: 15419 - protein, 15 aa, Homo Sapiens
VWKTWGQYWQVLGGP

SEQ ID NO: 15420 - protein, 15 aa, Homo Sapiens
WKTWGQYWQVLGGPV

SEQ ID NO: 15421 - protein, 15 aa, Homo Sapiens
KTWGQYWQVLGGPVS

SEQ ID NO: 15422 - protein, 15 aa, Homo Sapiens
TWGQYWQVLGGPVSG

SEQ ID NO: 15423 - protein, 15 aa, Homo Sapiens
WGQYWQVLGGPVSGL

SEQ ID NO: 15424 - protein, 15 aa, Homo Sapiens
GQYWQVLGGPVSGLS

SEQ ID NO: 15425 - protein, 15 aa, Homo Sapiens
QYWQVLGGPVSGLSI

SEQ ID NO: 15426 - protein, 15 aa, Homo Sapiens
YWQVLGGPVSGLSIG

SEQ ID NO: 15427 - protein, 15 aa, Homo Sapiens
WQVLGGPVSGLSIGT

SEQ ID NO: 15428 - protein, 15 aa, Homo Sapiens
QVLGGPVSGLSIGTG

SEQ ID NO: 15429 - protein, 15 aa, Homo Sapiens
VLGGPVSGLSIGTGR

SEQ ID NO: 15430 - protein, 15 aa, Homo Sapiens
LGGPVSGLSIGTGRA

SEQ ID NO: 15431 - protein, 15 aa, Homo Sapiens
GGPVSGLSIGTGRAM

SEQ ID NO: 15432 - protein, 15 aa, Homo Sapiens
GPVSGLSIGTGRAML

SEQ ID NO: 15433 - protein, 15 aa, Homo Sapiens
PVSGLSIGTGRAMLG

SEQ ID NO: 15434 - protein, 15 aa, Homo Sapiens
VSGLSIGTGRAMLGT

SEQ ID NO: 15435 - protein, 15 aa, Homo Sapiens
SGLSIGTGRAMLGTH

SEQ ID NO: 15436 - protein, 15 aa, Homo Sapiens
GLSIGTGRAMLGTHT

SEQ ID NO: 15437 - protein, 15 aa, Homo Sapiens
LSIGTGRAMLGTHTM

SEQ ID NO: 15438 - protein, 15 aa, Homo Sapiens
SIGTGRAMLGTHTME

SEQ ID NO: 15439 - protein, 15 aa, Homo Sapiens
IGTGRAMLGTHTMEV

SEQ ID NO: 15440 - protein, 15 aa, Homo Sapiens
GTGRAMLGTHTMEVT

SEQ ID NO: 15441 - protein, 15 aa, Homo Sapiens
TGRAMLGTHTMEVTV

SEQ ID NO: 15442 - protein, 15 aa, Homo Sapiens
GRAMLGTHTMEVTVY

SEQ ID NO: 15443 - protein, 15 aa, Homo Sapiens
RAMLGTHTMEVTVYH

SEQ ID NO: 15444 - protein, 15 aa, Homo Sapiens
AMLGTHTMEVTVYHR

SEQ ID NO: 15445 - protein, 15 aa, Homo Sapiens
MLGTHTMEVTVYHRR

SEQ ID NO: 15446 - protein, 15 aa, Homo Sapiens
LGTHTMEVTVYHRRG

SEQ ID NO: 15447 - protein, 15 aa, Homo Sapiens
GTHTMEVTVYHRRGS

SEQ ID NO: 15448 - protein, 15 aa, Homo Sapiens
THTMEVTVYHRRGSR

SEQ ID NO: 15449 - protein, 15 aa, Homo Sapiens
HTMEVTVYHRRGSRS

SEQ ID NO: 15450 - protein, 15 aa, Homo Sapiens
TMEVTVYHRRGSRSY

SEQ ID NO: 15451 - protein, 15 aa, Homo Sapiens
MEVTVYHRRGSRSYV

SEQ ID NO: 15452 - protein, 15 aa, Homo Sapiens
EVTVYHRRGSRSYVP

SEQ ID NO: 15453 - protein, 15 aa, Homo Sapiens
VTVYHRRGSRSYVPL

SEQ ID NO: 15454 - protein, 15 aa, Homo Sapiens
TVYHRRGSRSYVPLA

SEQ ID NO: 15455 - protein, 15 aa, Homo Sapiens
VYHRRGSRSYVPLAH

SEQ ID NO: 15456 - protein, 15 aa, Homo Sapiens
YHRRGSRSYVPLAHS

SEQ ID NO: 15457 - protein, 15 aa, Homo Sapiens
HRRGSRSYVPLAHSS

SEQ ID NO: 15458 - protein, 15 aa, Homo Sapiens
RRGSRSYVPLAHSSS

SEQ ID NO: 15459 - protein, 15 aa, Homo Sapiens
RGSRSYVPLAHSSSA

SEQ ID NO: 15460 - protein, 15 aa, Homo Sapiens
GSRSYVPLAHSSSAF

SEQ ID NO: 15461 - protein, 15 aa, Homo Sapiens
SRSYVPLAHSSSAFT

SEQ ID NO: 15462 - protein, 15 aa, Homo Sapiens
RSYVPLAHSSSAFTI

SEQ ID NO: 15463 - protein, 15 aa, Homo Sapiens
SYVPLAHSSSAFTIT

SEQ ID NO: 15464 - protein, 15 aa, Homo Sapiens
YVPLAHSSSAFTITD

SEQ ID NO: 15465 - protein, 15 aa, Homo Sapiens
VPLAHSSSAFTITDQ

SEQ ID NO: 15466 - protein, 15 aa, Homo Sapiens
PLAHSSSAFTITDQV

SEQ ID NO: 15467 - protein, 15 aa, Homo Sapiens
LAHSSSAFTITDQVP

SEQ ID NO: 15468 - protein, 15 aa, Homo Sapiens
AHSSSAFTITDQVPF

SEQ ID NO: 15469 - protein, 15 aa, Homo Sapiens
HSSSAFTITDQVPFS

SEQ ID NO: 15470 - protein, 15 aa, Homo Sapiens
SSSAFTITDQVPFSV

SEQ ID NO: 15471 - protein, 15 aa, Homo Sapiens
SSAFTITDQVPFSVS

SEQ ID NO: 15472 - protein, 15 aa, Homo Sapiens
SAFTITDQVPFSVSV

SEQ ID NO: 15473 - protein, 15 aa, Homo Sapiens
AFTITDQVPFSVSVS

SEQ ID NO: 15474 - protein, 15 aa, Homo Sapiens
FTITDQVPFSVSVSQ

SEQ ID NO: 15475 - protein, 15 aa, Homo Sapiens
TITDQVPFSVSVSQL

SEQ ID NO: 15476 - protein, 15 aa, Homo Sapiens
ITDQVPFSVSVSQLR

SEQ ID NO: 15477 - protein, 15 aa, Homo Sapiens
TDQVPFSVSVSQLRA

SEQ ID NO: 15478 - protein, 15 aa, Homo Sapiens
DQVPFSVSVSQLRAL

SEQ ID NO: 15479 - protein, 15 aa, Homo Sapiens
QVPFSVSVSQLRALD

SEQ ID NO: 15480 - protein, 15 aa, Homo Sapiens
VPFSVSVSQLRALDG

SEQ ID NO: 15481 - protein, 15 aa, Homo Sapiens
PFSVSVSQLRALDGG

SEQ ID NO: 15482 - protein, 15 aa, Homo Sapiens
FSVSVSQLRALDGGN

SEQ ID NO: 15483 - protein, 15 aa, Homo Sapiens
SVSVSQLRALDGGNK

SEQ ID NO: 15484 - protein, 15 aa, Homo Sapiens
VSVSQLRALDGGNKH

SEQ ID NO: 15485 - protein, 15 aa, Homo Sapiens
SVSQLRALDGGNKHF

SEQ ID NO: 15486 - protein, 15 aa, Homo Sapiens
VSQLRALDGGNKHFL

SEQ ID NO: 15487 - protein, 15 aa, Homo Sapiens
SQLRALDGGNKHFLR

SEQ ID NO: 15488 - protein, 15 aa, Homo Sapiens
QLRALDGGNKHFLRN

SEQ ID NO: 15489 - protein, 15 aa, Homo Sapiens
LRALDGGNKHFLRNQ

SEQ ID NO: 15490 - protein, 15 aa, Homo Sapiens
RALDGGNKHFLRNQP

SEQ ID NO: 15491 - protein, 15 aa, Homo Sapiens
ALDGGNKHFLRNQPL

SEQ ID NO: 15492 - protein, 15 aa, Homo Sapiens
LDGGNKHFLRNQPLT

SEQ ID NO: 15493 - protein, 15 aa, Homo Sapiens
DGGNKHFLRNQPLTF

SEQ ID NO: 15494 - protein, 15 aa, Homo Sapiens
GGNKHFLRNQPLTFA

SEQ ID NO: 15495 - protein, 15 aa, Homo Sapiens
GNKHFLRNQPLTFAL

SEQ ID NO: 15496 - protein, 15 aa, Homo Sapiens
NKHFLRNQPLTFALQ

SEQ ID NO: 15497 - protein, 15 aa, Homo Sapiens
KHFLRNQPLTFALQL

SEQ ID NO: 15498 - protein, 15 aa, Homo Sapiens
HFLRNQPLTFALQLH

SEQ ID NO: 15499 - protein, 15 aa, Homo Sapiens
FLRNQPLTFALQLHD

SEQ ID NO: 15500 - protein, 15 aa, Homo Sapiens
LRNQPLTFALQLHDP

SEQ ID NO: 15501 - protein, 15 aa, Homo Sapiens
RNQPLTFALQLHDPS

SEQ ID NO: 15502 - protein, 15 aa, Homo Sapiens
NQPLTFALQLHDPSG

SEQ ID NO: 15503 - protein, 15 aa, Homo Sapiens
QPLTFALQLHDPSGY

SEQ ID NO: 15504 - protein, 15 aa, Homo Sapiens
PLTFALQLHDPSGYL

SEQ ID NO: 15505 - protein, 15 aa, Homo Sapiens
LTFALQLHDPSGYLA

SEQ ID NO: 15506 - protein, 15 aa, Homo Sapiens
TFALQLHDPSGYLAE

SEQ ID NO: 15507 - protein, 15 aa, Homo Sapiens
FALQLHDPSGYLAEA

SEQ ID NO: 15508 - protein, 15 aa, Homo Sapiens
ALQLHDPSGYLAEAD

SEQ ID NO: 15509 - protein, 15 aa, Homo Sapiens
LQLHDPSGYLAEADL

SEQ ID NO: 15510 - protein, 15 aa, Homo Sapiens
QLHDPSGYLAEADLS

SEQ ID NO: 15511 - protein, 15 aa, Homo Sapiens
LHDPSGYLAEADLSY

SEQ ID NO: 15512 - protein, 15 aa, Homo Sapiens
HDPSGYLAEADLSYT

SEQ ID NO: 15513 - protein, 15 aa, Homo Sapiens
DPSGYLAEADLSYTW

SEQ ID NO: 15514 - protein, 15 aa, Homo Sapiens
PSGYLAEADLSYTWD

SEQ ID NO: 15515 - protein, 15 aa, Homo Sapiens
SGYLAEADLSYTWDF

SEQ ID NO: 15516 - protein, 15 aa, Homo Sapiens
GYLAEADLSYTWDFG

SEQ ID NO: 15517 - protein, 15 aa, Homo Sapiens
YLAEADLSYTWDFGD

SEQ ID NO: 15518 - protein, 15 aa, Homo Sapiens
LAEADLSYTWDFGDS

SEQ ID NO: 15519 - protein, 15 aa, Homo Sapiens
AEADLSYTWDFGDSS

SEQ ID NO: 15520 - protein, 15 aa, Homo Sapiens
EADLSYTWDFGDSSG

SEQ ID NO: 15521 - protein, 15 aa, Homo Sapiens
ADLSYTWDFGDSSGT

SEQ ID NO: 15522 - protein, 15 aa, Homo Sapiens
DLSYTWDFGDSSGTL

SEQ ID NO: 15523 - protein, 15 aa, Homo Sapiens
LSYTWDFGDSSGTLI

SEQ ID NO: 15524 - protein, 15 aa, Homo Sapiens
SYTWDFGDSSGTLIS

SEQ ID NO: 15525 - protein, 15 aa, Homo Sapiens
YTWDFGDSSGTLISR

SEQ ID NO: 15526 - protein, 15 aa, Homo Sapiens
TWDFGDSSGTLISRA

SEQ ID NO: 15527 - protein, 15 aa, Homo Sapiens
WDFGDSSGTLISRAL

SEQ ID NO: 15528 - protein, 15 aa, Homo Sapiens
DFGDSSGTLISRALV

SEQ ID NO: 15529 - protein, 15 aa, Homo Sapiens
FGDSSGTLISRALVV

SEQ ID NO: 15530 - protein, 15 aa, Homo Sapiens
GDSSGTLISRALVVT

SEQ ID NO: 15531 - protein, 15 aa, Homo Sapiens
DSSGTLISRALVVTH

SEQ ID NO: 15532 - protein, 15 aa, Homo Sapiens
SSGTLISRALVVTHT

SEQ ID NO: 15533 - protein, 15 aa, Homo Sapiens
SGTLISRALVVTHTY

SEQ ID NO: 15534 - protein, 15 aa, Homo Sapiens
GTLISRALVVTHTYL

SEQ ID NO: 15535 - protein, 15 aa, Homo Sapiens
TLISRALVVTHTYLE

SEQ ID NO: 15536 - protein, 15 aa, Homo Sapiens
LISRALVVTHTYLEP

SEQ ID NO: 15537 - protein, 15 aa, Homo Sapiens
ISRALVVTHTYLEPG

SEQ ID NO: 15538 - protein, 15 aa, Homo Sapiens
SRALVVTHTYLEPGP

SEQ ID NO: 15539 - protein, 15 aa, Homo Sapiens
RALVVTHTYLEPGPV

SEQ ID NO: 15540 - protein, 15 aa, Homo Sapiens
ALVVTHTYLEPGPVT

SEQ ID NO: 15541 - protein, 15 aa, Homo Sapiens
LVVTHTYLEPGPVTA

SEQ ID NO: 15542 - protein, 15 aa, Homo Sapiens
VVTHTYLEPGPVTAQ

SEQ ID NO: 15543 - protein, 15 aa, Homo Sapiens
VTHTYLEPGPVTAQV

SEQ ID NO: 15544 - protein, 15 aa, Homo Sapiens
THTYLEPGPVTAQVV

SEQ ID NO: 15545 - protein, 15 aa, Homo Sapiens
HTYLEPGPVTAQVVL

SEQ ID NO: 15546 - protein, 15 aa, Homo Sapiens
TYLEPGPVTAQVVLQ

SEQ ID NO: 15547 - protein, 15 aa, Homo Sapiens
YLEPGPVTAQVVLQA

SEQ ID NO: 15548 - protein, 15 aa, Homo Sapiens
LEPGPVTAQVVLQAA

SEQ ID NO: 15549 - protein, 15 aa, Homo Sapiens
EPGPVTAQVVLQAAI

SEQ ID NO: 15550 - protein, 15 aa, Homo Sapiens
PGPVTAQVVLQAAIP

SEQ ID NO: 15551 - protein, 15 aa, Homo Sapiens
GPVTAQVVLQAAIPL

SEQ ID NO: 15552 - protein, 15 aa, Homo Sapiens
PVTAQVVLQAAIPLT

SEQ ID NO: 15553 - protein, 15 aa, Homo Sapiens
VTAQVVLQAAIPLTS

SEQ ID NO: 15554 - protein, 15 aa, Homo Sapiens
TAQVVLQAAIPLTSC

SEQ ID NO: 15555 - protein, 15 aa, Homo Sapiens
AQVVLQAAIPLTSCG

SEQ ID NO: 15556 - protein, 15 aa, Homo Sapiens
QVVLQAAIPLTSCGS

SEQ ID NO: 15557 - protein, 15 aa, Homo Sapiens
VVLQAAIPLTSCGSS

SEQ ID NO: 15558 - protein, 15 aa, Homo Sapiens
VLQAAIPLTSCGSSP

SEQ ID NO: 15559 - protein, 15 aa, Homo Sapiens
LQAAIPLTSCGSSPV

SEQ ID NO: 15560 - protein, 15 aa, Homo Sapiens
QAAIPLTSCGSSPVP

SEQ ID NO: 15561 - protein, 15 aa, Homo Sapiens
AAIPLTSCGSSPVPG

SEQ ID NO: 15562 - protein, 15 aa, Homo Sapiens
AIPLTSCGSSPVPGT

SEQ ID NO: 15563 - protein, 15 aa, Homo Sapiens
IPLTSCGSSPVPGTT

SEQ ID NO: 15564 - protein, 15 aa, Homo Sapiens
PLTSCGSSPVPGTTD

SEQ ID NO: 15565 - protein, 15 aa, Homo Sapiens
LTSCGSSPVPGTTDG

SEQ ID NO: 15566 - protein, 15 aa, Homo Sapiens
TSCGSSPVPGTTDGH

SEQ ID NO: 15567 - protein, 15 aa, Homo Sapiens
SCGSSPVPGTTDGHR

SEQ ID NO: 15568 - protein, 15 aa, Homo Sapiens
CGSSPVPGTTDGHRP

SEQ ID NO: 15569 - protein, 15 aa, Homo Sapiens
GSSPVPGTTDGHRPT

SEQ ID NO: 15570 - protein, 15 aa, Homo Sapiens
SSPVPGTTDGHRPTA

SEQ ID NO: 15571 - protein, 15 aa, Homo Sapiens
SPVPGTTDGHRPTAE

SEQ ID NO: 15572 - protein, 15 aa, Homo Sapiens
PVPGTTDGHRPTAEA

SEQ ID NO: 15573 - protein, 15 aa, Homo Sapiens
VPGTTDGHRPTAEAP

SEQ ID NO: 15574 - protein, 15 aa, Homo Sapiens
PGTTDGHRPTAEAPN

SEQ ID NO: 15575 - protein, 15 aa, Homo Sapiens
GTTDGHRPTAEAPNT

SEQ ID NO: 15576 - protein, 15 aa, Homo Sapiens
TTDGHRPTAEAPNTT

SEQ ID NO: 15577 - protein, 15 aa, Homo Sapiens
TDGHRPTAEAPNTTA

SEQ ID NO: 15578 - protein, 15 aa, Homo Sapiens
DGHRPTAEAPNTTAG

SEQ ID NO: 15579 - protein, 15 aa, Homo Sapiens
GHRPTAEAPNTTAGQ

SEQ ID NO: 15580 - protein, 15 aa, Homo Sapiens
HRPTAEAPNTTAGQV

SEQ ID NO: 15581 - protein, 15 aa, Homo Sapiens
RPTAEAPNTTAGQVP

SEQ ID NO: 15582 - protein, 15 aa, Homo Sapiens
PTAEAPNTTAGQVPT

SEQ ID NO: 15583 - protein, 15 aa, Homo Sapiens
TAEAPNTTAGQVPTT

SEQ ID NO: 15584 - protein, 15 aa, Homo Sapiens
AEAPNTTAGQVPTTE

SEQ ID NO: 15585 - protein, 15 aa, Homo Sapiens
EAPNTTAGQVPTTEV

SEQ ID NO: 15586 - protein, 15 aa, Homo Sapiens
APNTTAGQVPTTEVV

SEQ ID NO: 15587 - protein, 15 aa, Homo Sapiens
PNTTAGQVPTTEVVG

SEQ ID NO: 15588 - protein, 15 aa, Homo Sapiens
NTTAGQVPTTEVVGT

SEQ ID NO: 15589 - protein, 15 aa, Homo Sapiens
TTAGQVPTTEVVGTT

SEQ ID NO: 15590 - protein, 15 aa, Homo Sapiens
TAGQVPTTEVVGTTP

SEQ ID NO: 15591 - protein, 15 aa, Homo Sapiens
AGQVPTTEVVGTTPG

SEQ ID NO: 15592 - protein, 15 aa, Homo Sapiens
GQVPTTEVVGTTPGQ

SEQ ID NO: 15593 - protein, 15 aa, Homo Sapiens
QVPTTEVVGTTPGQA

SEQ ID NO: 15594 - protein, 15 aa, Homo Sapiens
VPTTEVVGTTPGQAP

SEQ ID NO: 15595 - protein, 15 aa, Homo Sapiens
PTTEVVGTTPGQAPT

SEQ ID NO: 15596 - protein, 15 aa, Homo Sapiens
TTEVVGTTPGQAPTA

SEQ ID NO: 15597 - protein, 15 aa, Homo Sapiens
TEVVGTTPGQAPTAE

SEQ ID NO: 15598 - protein, 15 aa, Homo Sapiens
EVVGTTPGQAPTAEP

SEQ ID NO: 15599 - protein, 15 aa, Homo Sapiens
VVGTTPGQAPTAEPS

SEQ ID NO: 15600 - protein, 15 aa, Homo Sapiens
VGTTPGQAPTAEPSG

SEQ ID NO: 15601 - protein, 15 aa, Homo Sapiens
GTTPGQAPTAEPSGT

SEQ ID NO: 15602 - protein, 15 aa, Homo Sapiens
TTPGQAPTAEPSGTT

SEQ ID NO: 15603 - protein, 15 aa, Homo Sapiens
TPGQAPTAEPSGTTS

SEQ ID NO: 15604 - protein, 15 aa, Homo Sapiens
PGQAPTAEPSGTTSV

SEQ ID NO: 15605 - protein, 15 aa, Homo Sapiens
GQAPTAEPSGTTSVQ

SEQ ID NO: 15606 - protein, 15 aa, Homo Sapiens
QAPTAEPSGTTSVQV

SEQ ID NO: 15607 - protein, 15 aa, Homo Sapiens
APTAEPSGTTSVQVP

SEQ ID NO: 15608 - protein, 15 aa, Homo Sapiens
PTAEPSGTTSVQVPT

SEQ ID NO: 15609 - protein, 15 aa, Homo Sapiens
TAEPSGTTSVQVPTT

SEQ ID NO: 15610 - protein, 15 aa, Homo Sapiens
AEPSGTTSVQVPTTE

SEQ ID NO: 15611 - protein, 15 aa, Homo Sapiens
EPSGTTSVQVPTTEV

SEQ ID NO: 15612 - protein, 15 aa, Homo Sapiens
PSGTTSVQVPTTEVI

SEQ ID NO: 15613 - protein, 15 aa, Homo Sapiens
SGTTSVQVPTTEVIS

SEQ ID NO: 15614 - protein, 15 aa, Homo Sapiens
GTTSVQVPTTEVIST

SEQ ID NO: 15615 - protein, 15 aa, Homo Sapiens
TTSVQVPTTEVISTA

SEQ ID NO: 15616 - protein, 15 aa, Homo Sapiens
TSVQVPTTEVISTAP

SEQ ID NO: 15617 - protein, 15 aa, Homo Sapiens
SVQVPTTEVISTAPV

SEQ ID NO: 15618 - protein, 15 aa, Homo Sapiens
VQVPTTEVISTAPVQ

SEQ ID NO: 15619 - protein, 15 aa, Homo Sapiens
QVPTTEVISTAPVQM

SEQ ID NO: 15620 - protein, 15 aa, Homo Sapiens
VPTTEVISTAPVQMP

SEQ ID NO: 15621 - protein, 15 aa, Homo Sapiens
PTTEVISTAPVQMPT

SEQ ID NO: 15622 - protein, 15 aa, Homo Sapiens
TTEVISTAPVQMPTA

SEQ ID NO: 15623 - protein, 15 aa, Homo Sapiens
TEVISTAPVQMPTAE

SEQ ID NO: 15624 - protein, 15 aa, Homo Sapiens
EVISTAPVQMPTAES

SEQ ID NO: 15625 - protein, 15 aa, Homo Sapiens
VISTAPVQMPTAEST

SEQ ID NO: 15626 - protein, 15 aa, Homo Sapiens
ISTAPVQMPTAESTG

SEQ ID NO: 15627 - protein, 15 aa, Homo Sapiens
STAPVQMPTAESTGM

SEQ ID NO: 15628 - protein, 15 aa, Homo Sapiens
TAPVQMPTAESTGMT

SEQ ID NO: 15629 - protein, 15 aa, Homo Sapiens
APVQMPTAESTGMTP

SEQ ID NO: 15630 - protein, 15 aa, Homo Sapiens
PVQMPTAESTGMTPE

SEQ ID NO: 15631 - protein, 15 aa, Homo Sapiens
VQMPTAESTGMTPEK

SEQ ID NO: 15632 - protein, 15 aa, Homo Sapiens
QMPTAESTGMTPEKV

SEQ ID NO: 15633 - protein, 15 aa, Homo Sapiens
MPTAESTGMTPEKVP

SEQ ID NO: 15634 - protein, 15 aa, Homo Sapiens
PTAESTGMTPEKVPV

SEQ ID NO: 15635 - protein, 15 aa, Homo Sapiens
TAESTGMTPEKVPVS

SEQ ID NO: 15636 - protein, 15 aa, Homo Sapiens
AESTGMTPEKVPVSE

SEQ ID NO: 15637 - protein, 15 aa, Homo Sapiens
ESTGMTPEKVPVSEV

SEQ ID NO: 15638 - protein, 15 aa, Homo Sapiens
STGMTPEKVPVSEVM

SEQ ID NO: 15639 - protein, 15 aa, Homo Sapiens
TGMTPEKVPVSEVMG

SEQ ID NO: 15640 - protein, 15 aa, Homo Sapiens
GMTPEKVPVSEVMGT

SEQ ID NO: 15641 - protein, 15 aa, Homo Sapiens
MTPEKVPVSEVMGTT

SEQ ID NO: 15642 - protein, 15 aa, Homo Sapiens
TPEKVPVSEVMGTTL

SEQ ID NO: 15643 - protein, 15 aa, Homo Sapiens
PEKVPVSEVMGTTLA

SEQ ID NO: 15644 - protein, 15 aa, Homo Sapiens
EKVPVSEVMGTTLAE

SEQ ID NO: 15645 - protein, 15 aa, Homo Sapiens
KVPVSEVMGTTLAEM

SEQ ID NO: 15646 - protein, 15 aa, Homo Sapiens
VPVSEVMGTTLAEMS

SEQ ID NO: 15647 - protein, 15 aa, Homo Sapiens
PVSEVMGTTLAEMST

SEQ ID NO: 15648 - protein, 15 aa, Homo Sapiens
VSEVMGTTLAEMSTP

SEQ ID NO: 15649 - protein, 15 aa, Homo Sapiens
SEVMGTTLAEMSTPE

SEQ ID NO: 15650 - protein, 15 aa, Homo Sapiens
EVMGTTLAEMSTPEA

SEQ ID NO: 15651 - protein, 15 aa, Homo Sapiens
VMGTTLAEMSTPEAT

SEQ ID NO: 15652 - protein, 15 aa, Homo Sapiens
MGTTLAEMSTPEATG

SEQ ID NO: 15653 - protein, 15 aa, Homo Sapiens
GTTLAEMSTPEATGM

SEQ ID NO: 15654 - protein, 15 aa, Homo Sapiens
TTLAEMSTPEATGMT

SEQ ID NO: 15655 - protein, 15 aa, Homo Sapiens
TLAEMSTPEATGMTP

SEQ ID NO: 15656 - protein, 15 aa, Homo Sapiens
LAEMSTPEATGMTPA

SEQ ID NO: 15657 - protein, 15 aa, Homo Sapiens
AEMSTPEATGMTPAE

SEQ ID NO: 15658 - protein, 15 aa, Homo Sapiens
EMSTPEATGMTPAEV

SEQ ID NO: 15659 - protein, 15 aa, Homo Sapiens
MSTPEATGMTPAEVS

SEQ ID NO: 15660 - protein, 15 aa, Homo Sapiens
STPEATGMTPAEVSI

SEQ ID NO: 15661 - protein, 15 aa, Homo Sapiens
TPEATGMTPAEVSIV

SEQ ID NO: 15662 - protein, 15 aa, Homo Sapiens
PEATGMTPAEVSIVV

SEQ ID NO: 15663 - protein, 15 aa, Homo Sapiens
EATGMTPAEVSIVVL

SEQ ID NO: 15664 - protein, 15 aa, Homo Sapiens
ATGMTPAEVSIVVLS

SEQ ID NO: 15665 - protein, 15 aa, Homo Sapiens
TGMTPAEVSIVVLSG

SEQ ID NO: 15666 - protein, 15 aa, Homo Sapiens
GMTPAEVSIVVLSGT

SEQ ID NO: 15667 - protein, 15 aa, Homo Sapiens
MTPAEVSIVVLSGTT

SEQ ID NO: 15668 - protein, 15 aa, Homo Sapiens
TPAEVSIVVLSGTTA

SEQ ID NO: 15669 - protein, 15 aa, Homo Sapiens
PAEVSIVVLSGTTAA

SEQ ID NO: 15670 - protein, 15 aa, Homo Sapiens
AEVSIVVLSGTTAAQ

SEQ ID NO: 15671 - protein, 15 aa, Homo Sapiens
EVSIVVLSGTTAAQV

SEQ ID NO: 15672 - protein, 15 aa, Homo Sapiens
VSIVVLSGTTAAQVT

SEQ ID NO: 15673 - protein, 15 aa, Homo Sapiens
SIVVLSGTTAAQVTT

SEQ ID NO: 15674 - protein, 15 aa, Homo Sapiens
IVVLSGTTAAQVTTT

SEQ ID NO: 15675 - protein, 15 aa, Homo Sapiens
VVLSGTTAAQVTTTE

SEQ ID NO: 15676 - protein, 15 aa, Homo Sapiens
VLSGTTAAQVTTTEW

SEQ ID NO: 15677 - protein, 15 aa, Homo Sapiens
LSGTTAAQVTTTEWV

SEQ ID NO: 15678 - protein, 15 aa, Homo Sapiens
SGTTAAQVTTTEWVE

SEQ ID NO: 15679 - protein, 15 aa, Homo Sapiens
GTTAAQVTTTEWVET

SEQ ID NO: 15680 - protein, 15 aa, Homo Sapiens
TTAAQVTTTEWVETT

SEQ ID NO: 15681 - protein, 15 aa, Homo Sapiens
TAAQVTTTEWVETTA

SEQ ID NO: 15682 - protein, 15 aa, Homo Sapiens
AAQVTTTEWVETTAR

SEQ ID NO: 15683 - protein, 15 aa, Homo Sapiens
AQVTTTEWVETTARE

SEQ ID NO: 15684 - protein, 15 aa, Homo Sapiens
QVTTTEWVETTAREL

SEQ ID NO: 15685 - protein, 15 aa, Homo Sapiens
VTTTEWVETTARELP

SEQ ID NO: 15686 - protein, 15 aa, Homo Sapiens
TTTEWVETTARELPI

SEQ ID NO: 15687 - protein, 15 aa, Homo Sapiens
TTEWVETTARELPIP

SEQ ID NO: 15688 - protein, 15 aa, Homo Sapiens
TEWVETTARELPIPE

SEQ ID NO: 15689 - protein, 15 aa, Homo Sapiens
EWVETTARELPIPEP

SEQ ID NO: 15690 - protein, 15 aa, Homo Sapiens
WVETTARELPIPEPE

SEQ ID NO: 15691 - protein, 15 aa, Homo Sapiens
VETTARELPIPEPEG

SEQ ID NO: 15692 - protein, 15 aa, Homo Sapiens
ETTARELPIPEPEGP

SEQ ID NO: 15693 - protein, 15 aa, Homo Sapiens
TTARELPIPEPEGPD

SEQ ID NO: 15694 - protein, 15 aa, Homo Sapiens
TARELPIPEPEGPDA

SEQ ID NO: 15695 - protein, 15 aa, Homo Sapiens
ARELPIPEPEGPDAS

SEQ ID NO: 15696 - protein, 15 aa, Homo Sapiens
RELPIPEPEGPDASS

SEQ ID NO: 15697 - protein, 15 aa, Homo Sapiens
ELPIPEPEGPDASSI

SEQ ID NO: 15698 - protein, 15 aa, Homo Sapiens
LPIPEPEGPDASSIM

SEQ ID NO: 15699 - protein, 15 aa, Homo Sapiens
PIPEPEGPDASSIMS

SEQ ID NO: 15700 - protein, 15 aa, Homo Sapiens
IPEPEGPDASSIMST

SEQ ID NO: 15701 - protein, 15 aa, Homo Sapiens
PEPEGPDASSIMSTE

SEQ ID NO: 15702 - protein, 15 aa, Homo Sapiens
EPEGPDASSIMSTES

SEQ ID NO: 15703 - protein, 15 aa, Homo Sapiens
PEGPDASSIMSTESI

SEQ ID NO: 15704 - protein, 15 aa, Homo Sapiens
EGPDASSIMSTESIT

SEQ ID NO: 15705 - protein, 15 aa, Homo Sapiens
GPDASSIMSTESITG

SEQ ID NO: 15706 - protein, 15 aa, Homo Sapiens
PDASSIMSTESITGS

SEQ ID NO: 15707 - protein, 15 aa, Homo Sapiens
DASSIMSTESITGSL

SEQ ID NO: 15708 - protein, 15 aa, Homo Sapiens
ASSIMSTESITGSLG

SEQ ID NO: 15709 - protein, 15 aa, Homo Sapiens
SSIMSTESITGSLGP

SEQ ID NO: 15710 - protein, 15 aa, Homo Sapiens
SIMSTESITGSLGPL

SEQ ID NO: 15711 - protein, 15 aa, Homo Sapiens
IMSTESITGSLGPLL

SEQ ID NO: 15712 - protein, 15 aa, Homo Sapiens
MSTESITGSLGPLLD

SEQ ID NO: 15713 - protein, 15 aa, Homo Sapiens
STESITGSLGPLLDG

SEQ ID NO: 15714 - protein, 15 aa, Homo Sapiens
TESITGSLGPLLDGT

SEQ ID NO: 15715 - protein, 15 aa, Homo Sapiens
ESITGSLGPLLDGTA

SEQ ID NO: 15716 - protein, 15 aa, Homo Sapiens
SITGSLGPLLDGTAT

SEQ ID NO: 15717 - protein, 15 aa, Homo Sapiens
ITGSLGPLLDGTATL

SEQ ID NO: 15718 - protein, 15 aa, Homo Sapiens
TGSLGPLLDGTATLR

SEQ ID NO: 15719 - protein, 15 aa, Homo Sapiens
GSLGPLLDGTATLRL

SEQ ID NO: 15720 - protein, 15 aa, Homo Sapiens
SLGPLLDGTATLRLV

SEQ ID NO: 15721 - protein, 15 aa, Homo Sapiens
LGPLLDGTATLRLVK

SEQ ID NO: 15722 - protein, 15 aa, Homo Sapiens
GPLLDGTATLRLVKR

SEQ ID NO: 15723 - protein, 15 aa, Homo Sapiens
PLLDGTATLRLVKRQ

SEQ ID NO: 15724 - protein, 15 aa, Homo Sapiens
LLDGTATLRLVKRQV

SEQ ID NO: 15725 - protein, 15 aa, Homo Sapiens
LDGTATLRLVKRQVP

SEQ ID NO: 15726 - protein, 15 aa, Homo Sapiens
DGTATLRLVKRQVPL

SEQ ID NO: 15727 - protein, 15 aa, Homo Sapiens
GTATLRLVKRQVPLD

SEQ ID NO: 15728 - protein, 15 aa, Homo Sapiens
TATLRLVKRQVPLDC

SEQ ID NO: 15729 - protein, 15 aa, Homo Sapiens
ATLRLVKRQVPLDCV

SEQ ID NO: 15730 - protein, 15 aa, Homo Sapiens
TLRLVKRQVPLDCVL

SEQ ID NO: 15731 - protein, 15 aa, Homo Sapiens
LRLVKRQVPLDCVLY

SEQ ID NO: 15732 - protein, 15 aa, Homo Sapiens
RLVKRQVPLDCVLYR

SEQ ID NO: 15733 - protein, 15 aa, Homo Sapiens
LVKRQVPLDCVLYRY

SEQ ID NO: 15734 - protein, 15 aa, Homo Sapiens
VKRQVPLDCVLYRYG

SEQ ID NO: 15735 - protein, 15 aa, Homo Sapiens
KRQVPLDCVLYRYGS

SEQ ID NO: 15736 - protein, 15 aa, Homo Sapiens
RQVPLDCVLYRYGSF

SEQ ID NO: 15737 - protein, 15 aa, Homo Sapiens
QVPLDCVLYRYGSFS

SEQ ID NO: 15738 - protein, 15 aa, Homo Sapiens
VPLDCVLYRYGSFSV

SEQ ID NO: 15739 - protein, 15 aa, Homo Sapiens
PLDCVLYRYGSFSVT

SEQ ID NO: 15740 - protein, 15 aa, Homo Sapiens
LDCVLYRYGSFSVTL

SEQ ID NO: 15741 - protein, 15 aa, Homo Sapiens
DCVLYRYGSFSVTLD

SEQ ID NO: 15742 - protein, 15 aa, Homo Sapiens
CVLYRYGSFSVTLDI

SEQ ID NO: 15743 - protein, 15 aa, Homo Sapiens
VLYRYGSFSVTLDIV

SEQ ID NO: 15744 - protein, 15 aa, Homo Sapiens
LYRYGSFSVTLDIVQ

SEQ ID NO: 15745 - protein, 15 aa, Homo Sapiens
YRYGSFSVTLDIVQG

SEQ ID NO: 15746 - protein, 15 aa, Homo Sapiens
RYGSFSVTLDIVQGI

SEQ ID NO: 15747 - protein, 15 aa, Homo Sapiens
YGSFSVTLDIVQGIE

SEQ ID NO: 15748 - protein, 15 aa, Homo Sapiens
GSFSVTLDIVQGIES

SEQ ID NO: 15749 - protein, 15 aa, Homo Sapiens
SFSVTLDIVQGIESA

SEQ ID NO: 15750 - protein, 15 aa, Homo Sapiens
FSVTLDIVQGIESAE

SEQ ID NO: 15751 - protein, 15 aa, Homo Sapiens
SVTLDIVQGIESAEI

SEQ ID NO: 15752 - protein, 15 aa, Homo Sapiens
VTLDIVQGIESAEIL

SEQ ID NO: 15753 - protein, 15 aa, Homo Sapiens
TLDIVQGIESAEILQ

SEQ ID NO: 15754 - protein, 15 aa, Homo Sapiens
LDIVQGIESAEILQA

SEQ ID NO: 15755 - protein, 15 aa, Homo Sapiens
DIVQGIESAEILQAV

SEQ ID NO: 15756 - protein, 15 aa, Homo Sapiens
IVQGIESAEILQAVP

SEQ ID NO: 15757 - protein, 15 aa, Homo Sapiens
VQGIESAEILQAVPS

SEQ ID NO: 15758 - protein, 15 aa, Homo Sapiens
QGIESAEILQAVPSG

SEQ ID NO: 15759 - protein, 15 aa, Homo Sapiens
GIESAEILQAVPSGE

SEQ ID NO: 15760 - protein, 15 aa, Homo Sapiens
IESAEILQAVPSGEG

SEQ ID NO: 15761 - protein, 15 aa, Homo Sapiens
ESAEILQAVPSGEGD

SEQ ID NO: 15762 - protein, 15 aa, Homo Sapiens
SAEILQAVPSGEGDA

SEQ ID NO: 15763 - protein, 15 aa, Homo Sapiens
AEILQAVPSGEGDAF

SEQ ID NO: 15764 - protein, 15 aa, Homo Sapiens
EILQAVPSGEGDAFE

SEQ ID NO: 15765 - protein, 15 aa, Homo Sapiens
ILQAVPSGEGDAFEL

SEQ ID NO: 15766 - protein, 15 aa, Homo Sapiens
LQAVPSGEGDAFELT

SEQ ID NO: 15767 - protein, 15 aa, Homo Sapiens
QAVPSGEGDAFELTV

SEQ ID NO: 15768 - protein, 15 aa, Homo Sapiens
AVPSGEGDAFELTVS

SEQ ID NO: 15769 - protein, 15 aa, Homo Sapiens
VPSGEGDAFELTVSC

SEQ ID NO: 15770 - protein, 15 aa, Homo Sapiens
PSGEGDAFELTVSCQ

SEQ ID NO: 15771 - protein, 15 aa, Homo Sapiens
SGEGDAFELTVSCQG

SEQ ID NO: 15772 - protein, 15 aa, Homo Sapiens
GEGDAFELTVSCQGG

SEQ ID NO: 15773 - protein, 15 aa, Homo Sapiens
EGDAFELTVSCQGGL

SEQ ID NO: 15774 - protein, 15 aa, Homo Sapiens
GDAFELTVSCQGGLP

SEQ ID NO: 15775 - protein, 15 aa, Homo Sapiens
DAFELTVSCQGGLPK

SEQ ID NO: 15776 - protein, 15 aa, Homo Sapiens
AFELTVSCQGGLPKE

SEQ ID NO: 15777 - protein, 15 aa, Homo Sapiens
FELTVSCQGGLPKEA

SEQ ID NO: 15778 - protein, 15 aa, Homo Sapiens
ELTVSCQGGLPKEAC

SEQ ID NO: 15779 - protein, 15 aa, Homo Sapiens
LTVSCQGGLPKEACM

SEQ ID NO: 15780 - protein, 15 aa, Homo Sapiens
TVSCQGGLPKEACME

SEQ ID NO: 15781 - protein, 15 aa, Homo Sapiens
VSCQGGLPKEACMEI

SEQ ID NO: 15782 - protein, 15 aa, Homo Sapiens
SCQGGLPKEACMEIS

SEQ ID NO: 15783 - protein, 15 aa, Homo Sapiens
CQGGLPKEACMEISS

SEQ ID NO: 15784 - protein, 15 aa, Homo Sapiens
QGGLPKEACMEISSP

SEQ ID NO: 15785 - protein, 15 aa, Homo Sapiens
GGLPKEACMEISSPG

SEQ ID NO: 15786 - protein, 15 aa, Homo Sapiens
GLPKEACMEISSPGC

SEQ ID NO: 15787 - protein, 15 aa, Homo Sapiens
LPKEACMEISSPGCQ

SEQ ID NO: 15788 - protein, 15 aa, Homo Sapiens
PKEACMEISSPGCQP

SEQ ID NO: 15789 - protein, 15 aa, Homo Sapiens
KEACMEISSPGCQPP

SEQ ID NO: 15790 - protein, 15 aa, Homo Sapiens
EACMEISSPGCQPPA

SEQ ID NO: 15791 - protein, 15 aa, Homo Sapiens
ACMEISSPGCQPPAQ

SEQ ID NO: 15792 - protein, 15 aa, Homo Sapiens
CMEISSPGCQPPAQR

SEQ ID NO: 15793 - protein, 15 aa, Homo Sapiens
MEISSPGCQPPAQRL

SEQ ID NO: 15794 - protein, 15 aa, Homo Sapiens
EISSPGCQPPAQRLC

SEQ ID NO: 15795 - protein, 15 aa, Homo Sapiens
ISSPGCQPPAQRLCQ

SEQ ID NO: 15796 - protein, 15 aa, Homo Sapiens
SSPGCQPPAQRLCQP

SEQ ID NO: 15797 - protein, 15 aa, Homo Sapiens
SPGCQPPAQRLCQPV

SEQ ID NO: 15798 - protein, 15 aa, Homo Sapiens
PGCQPPAQRLCQPVL

SEQ ID NO: 15799 - protein, 15 aa, Homo Sapiens
GCQPPAQRLCQPVLP

SEQ ID NO: 15800 - protein, 15 aa, Homo Sapiens
CQPPAQRLCQPVLPS

SEQ ID NO: 15801 - protein, 15 aa, Homo Sapiens
QPPAQRLCQPVLPSP

SEQ ID NO: 15802 - protein, 15 aa, Homo Sapiens
PPAQRLCQPVLPSPA

SEQ ID NO: 15803 - protein, 15 aa, Homo Sapiens
PAQRLCQPVLPSPAC

SEQ ID NO: 15804 - protein, 15 aa, Homo Sapiens
AQRLCQPVLPSPACQ

SEQ ID NO: 15805 - protein, 15 aa, Homo Sapiens
QRLCQPVLPSPACQL

SEQ ID NO: 15806 - protein, 15 aa, Homo Sapiens
RLCQPVLPSPACQLV

SEQ ID NO: 15807 - protein, 15 aa, Homo Sapiens
LCQPVLPSPACQLVL

SEQ ID NO: 15808 - protein, 15 aa, Homo Sapiens
CQPVLPSPACQLVLH

SEQ ID NO: 15809 - protein, 15 aa, Homo Sapiens
QPVLPSPACQLVLHQ

SEQ ID NO: 15810 - protein, 15 aa, Homo Sapiens
PVLPSPACQLVLHQI

SEQ ID NO: 15811 - protein, 15 aa, Homo Sapiens
VLPSPACQLVLHQIL

SEQ ID NO: 15812 - protein, 15 aa, Homo Sapiens
LPSPACQLVLHQILK

SEQ ID NO: 15813 - protein, 15 aa, Homo Sapiens
PSPACQLVLHQILKG

SEQ ID NO: 15814 - protein, 15 aa, Homo Sapiens
SPACQLVLHQILKGG

SEQ ID NO: 15815 - protein, 15 aa, Homo Sapiens
PACQLVLHQILKGGS

SEQ ID NO: 15816 - protein, 15 aa, Homo Sapiens
ACQLVLHQILKGGSG

SEQ ID NO: 15817 - protein, 15 aa, Homo Sapiens
CQLVLHQILKGGSGT

SEQ ID NO: 15818 - protein, 15 aa, Homo Sapiens
QLVLHQILKGGSGTY

SEQ ID NO: 15819 - protein, 15 aa, Homo Sapiens
LVLHQILKGGSGTYC

SEQ ID NO: 15820 - protein, 15 aa, Homo Sapiens
VLHQILKGGSGTYCL

SEQ ID NO: 15821 - protein, 15 aa, Homo Sapiens
LHQILKGGSGTYCLN

SEQ ID NO: 15822 - protein, 15 aa, Homo Sapiens
HQILKGGSGTYCLNV

SEQ ID NO: 15823 - protein, 15 aa, Homo Sapiens
QILKGGSGTYCLNVS

SEQ ID NO: 15824 - protein, 15 aa, Homo Sapiens
ILKGGSGTYCLNVSL

SEQ ID NO: 15825 - protein, 15 aa, Homo Sapiens
LKGGSGTYCLNVSLA

SEQ ID NO: 15826 - protein, 15 aa, Homo Sapiens
KGGSGTYCLNVSLAD

SEQ ID NO: 15827 - protein, 15 aa, Homo Sapiens
GGSGTYCLNVSLADT

SEQ ID NO: 15828 - protein, 15 aa, Homo Sapiens
GSGTYCLNVSLADTN

SEQ ID NO: 15829 - protein, 15 aa, Homo Sapiens
SGTYCLNVSLADTNS

SEQ ID NO: 15830 - protein, 15 aa, Homo Sapiens
GTYCLNVSLADTNSL

SEQ ID NO: 15831 - protein, 15 aa, Homo Sapiens
TYCLNVSLADTNSLA

SEQ ID NO: 15832 - protein, 15 aa, Homo Sapiens
YCLNVSLADTNSLAV

SEQ ID NO: 15833 - protein, 15 aa, Homo Sapiens
CLNVSLADTNSLAVV

SEQ ID NO: 15834 - protein, 15 aa, Homo Sapiens
LNVSLADTNSLAVVS

SEQ ID NO: 15835 - protein, 15 aa, Homo Sapiens
NVSLADTNSLAVVST

SEQ ID NO: 15836 - protein, 15 aa, Homo Sapiens
VSLADTNSLAVVSTQ

SEQ ID NO: 15837 - protein, 15 aa, Homo Sapiens
SLADTNSLAVVSTQL

SEQ ID NO: 15838 - protein, 15 aa, Homo Sapiens
LADTNSLAVVSTQLI

SEQ ID NO: 15839 - protein, 15 aa, Homo Sapiens
ADTNSLAVVSTQLIM

SEQ ID NO: 15840 - protein, 15 aa, Homo Sapiens
DTNSLAVVSTQLIMP

SEQ ID NO: 15841 - protein, 15 aa, Homo Sapiens
TNSLAVVSTQLIMPG

SEQ ID NO: 15842 - protein, 15 aa, Homo Sapiens
NSLAVVSTQLIMPGQ

SEQ ID NO: 15843 - protein, 15 aa, Homo Sapiens
SLAVVSTQLIMPGQE

SEQ ID NO: 15844 - protein, 15 aa, Homo Sapiens
LAVVSTQLIMPGQEA

SEQ ID NO: 15845 - protein, 15 aa, Homo Sapiens
AVVSTQLIMPGQEAG

SEQ ID NO: 15846 - protein, 15 aa, Homo Sapiens
VVSTQLIMPGQEAGL

SEQ ID NO: 15847 - protein, 15 aa, Homo Sapiens
VSTQLIMPGQEAGLG

SEQ ID NO: 15848 - protein, 15 aa, Homo Sapiens
STQLIMPGQEAGLGQ

SEQ ID NO: 15849 - protein, 15 aa, Homo Sapiens
TQLIMPGQEAGLGQV

SEQ ID NO: 15850 - protein, 15 aa, Homo Sapiens
QLIMPGQEAGLGQVP

SEQ ID NO: 15851 - protein, 15 aa, Homo Sapiens
LIMPGQEAGLGQVPL

SEQ ID NO: 15852 - protein, 15 aa, Homo Sapiens
IMPGQEAGLGQVPLI

SEQ ID NO: 15853 - protein, 15 aa, Homo Sapiens
MPGQEAGLGQVPLIV

SEQ ID NO: 15854 - protein, 15 aa, Homo Sapiens
PGQEAGLGQVPLIVG

SEQ ID NO: 15855 - protein, 15 aa, Homo Sapiens
GQEAGLGQVPLIVGI

SEQ ID NO: 15856 - protein, 15 aa, Homo Sapiens
QEAGLGQVPLIVGIL

SEQ ID NO: 15857 - protein, 15 aa, Homo Sapiens
EAGLGQVPLIVGILL

SEQ ID NO: 15858 - protein, 15 aa, Homo Sapiens
AGLGQVPLIVGILLV

SEQ ID NO: 15859 - protein, 15 aa, Homo Sapiens
GLGQVPLIVGILLVL

SEQ ID NO: 15860 - protein, 15 aa, Homo Sapiens
LGQVPLIVGILLVLM

SEQ ID NO: 15861 - protein, 15 aa, Homo Sapiens
GQVPLIVGILLVLMA

SEQ ID NO: 15862 - protein, 15 aa, Homo Sapiens
QVPLIVGILLVLMAV

SEQ ID NO: 15863 - protein, 15 aa, Homo Sapiens
VPLIVGILLVLMAVV

SEQ ID NO: 15864 - protein, 15 aa, Homo Sapiens
PLIVGILLVLMAVVL

SEQ ID NO: 15865 - protein, 15 aa, Homo Sapiens
LIVGILLVLMAVVLA

SEQ ID NO: 15866 - protein, 15 aa, Homo Sapiens
IVGILLVLMAVVLAS

SEQ ID NO: 15867 - protein, 15 aa, Homo Sapiens
VGILLVLMAVVLASL

SEQ ID NO: 15868 - protein, 15 aa, Homo Sapiens
GILLVLMAVVLASLI

SEQ ID NO: 15869 - protein, 15 aa, Homo Sapiens
ILLVLMAVVLASLIY

SEQ ID NO: 15870 - protein, 15 aa, Homo Sapiens
LLVLMAVVLASLIYR

SEQ ID NO: 15871 - protein, 15 aa, Homo Sapiens
LVLMAVVLASLIYRR

SEQ ID NO: 15872 - protein, 15 aa, Homo Sapiens
VLMAVVLASLIYRRR

SEQ ID NO: 15873 - protein, 15 aa, Homo Sapiens
LMAVVLASLIYRRRL

SEQ ID NO: 15874 - protein, 15 aa, Homo Sapiens
MAVVLASLIYRRRLM

SEQ ID NO: 15875 - protein, 15 aa, Homo Sapiens
AVVLASLIYRRRLMK

SEQ ID NO: 15876 - protein, 15 aa, Homo Sapiens
VVLASLIYRRRLMKQ

SEQ ID NO: 15877 - protein, 15 aa, Homo Sapiens
VLASLIYRRRLMKQD

SEQ ID NO: 15878 - protein, 15 aa, Homo Sapiens
LASLIYRRRLMKQDF

SEQ ID NO: 15879 - protein, 15 aa, Homo Sapiens
ASLIYRRRLMKQDFS

SEQ ID NO: 15880 - protein, 15 aa, Homo Sapiens
SLIYRRRLMKQDFSV

SEQ ID NO: 15881 - protein, 15 aa, Homo Sapiens
LIYRRRLMKQDFSVP

SEQ ID NO: 15882 - protein, 15 aa, Homo Sapiens
IYRRRLMKQDFSVPQ

SEQ ID NO: 15883 - protein, 15 aa, Homo Sapiens
YRRRLMKQDFSVPQL

SEQ ID NO: 15884 - protein, 15 aa, Homo Sapiens
RRRLMKQDFSVPQLP

SEQ ID NO: 15885 - protein, 15 aa, Homo Sapiens
RRLMKQDFSVPQLPH

SEQ ID NO: 15886 - protein, 15 aa, Homo Sapiens
RLMKQDFSVPQLPHS

SEQ ID NO: 15887 - protein, 15 aa, Homo Sapiens
LMKQDFSVPQLPHSS

SEQ ID NO: 15888 - protein, 15 aa, Homo Sapiens
MKQDFSVPQLPHSSS

SEQ ID NO: 15889 - protein, 15 aa, Homo Sapiens
KQDFSVPQLPHSSSH

SEQ ID NO: 15890 - protein, 15 aa, Homo Sapiens
QDFSVPQLPHSSSHW

SEQ ID NO: 15891 - protein, 15 aa, Homo Sapiens
DFSVPQLPHSSSHWL

SEQ ID NO: 15892 - protein, 15 aa, Homo Sapiens
FSVPQLPHSSSHWLR

SEQ ID NO: 15893 - protein, 15 aa, Homo Sapiens
SVPQLPHSSSHWLRL

SEQ ID NO: 15894 - protein, 15 aa, Homo Sapiens
VPQLPHSSSHWLRLP

SEQ ID NO: 15895 - protein, 15 aa, Homo Sapiens
PQLPHSSSHWLRLPR

SEQ ID NO: 15896 - protein, 15 aa, Homo Sapiens
QLPHSSSHWLRLPRI

SEQ ID NO: 15897 - protein, 15 aa, Homo Sapiens
LPHSSSHWLRLPRIF

SEQ ID NO: 15898 - protein, 15 aa, Homo Sapiens
PHSSSHWLRLPRIFC

SEQ ID NO: 15899 - protein, 15 aa, Homo Sapiens
HSSSHWLRLPRIFCS

SEQ ID NO: 15900 - protein, 15 aa, Homo Sapiens
SSSHWLRLPRIFCSC

SEQ ID NO: 15901 - protein, 15 aa, Homo Sapiens
SSHWLRLPRIFCSCP

SEQ ID NO: 15902 - protein, 15 aa, Homo Sapiens
SHWLRLPRIFCSCPI

SEQ ID NO: 15903 - protein, 15 aa, Homo Sapiens
HWLRLPRIFCSCPIG

SEQ ID NO: 15904 - protein, 15 aa, Homo Sapiens
WLRLPRIFCSCPIGE

SEQ ID NO: 15905 - protein, 15 aa, Homo Sapiens
LRLPRIFCSCPIGEN

SEQ ID NO: 15906 - protein, 15 aa, Homo Sapiens
RLPRIFCSCPIGENS

SEQ ID NO: 15907 - protein, 15 aa, Homo Sapiens
LPRIFCSCPIGENSP

SEQ ID NO: 15908 - protein, 15 aa, Homo Sapiens
PRIFCSCPIGENSPL

SEQ ID NO: 15909 - protein, 15 aa, Homo Sapiens
RIFCSCPIGENSPLL

SEQ ID NO: 15910 - protein, 15 aa, Homo Sapiens
IFCSCPIGENSPLLS

SEQ ID NO: 15911 - protein, 15 aa, Homo Sapiens
FCSCPIGENSPLLSG

SEQ ID NO: 15912 - protein, 15 aa, Homo Sapiens
CSCPIGENSPLLSGQ

SEQ ID NO: 15913 - protein, 15 aa, Homo Sapiens
SCPIGENSPLLSGQQ

SEQ ID NO: 15914 - protein, 15 aa, Homo Sapiens
CPIGENSPLLSGQQV

SEQ ID NO: 15915 - protein, 16 aa, Homo Sapiens
MDLVLKRCLLHLAVIG

SEQ ID NO: 15916 - protein, 16 aa, Homo Sapiens
DLVLKRCLLHLAVIGA

SEQ ID NO: 15917 - protein, 16 aa, Homo Sapiens
LVLKRCLLHLAVIGAL

SEQ ID NO: 15918 - protein, 16 aa, Homo Sapiens
VLKRCLLHLAVIGALL

SEQ ID NO: 15919 - protein, 16 aa, Homo Sapiens
LKRCLLHLAVIGALLA

SEQ ID NO: 15920 - protein, 16 aa, Homo Sapiens
KRCLLHLAVIGALLAV

SEQ ID NO: 15921 - protein, 16 aa, Homo Sapiens
RCLLHLAVIGALLAVG

SEQ ID NO: 15922 - protein, 16 aa, Homo Sapiens
CLLHLAVIGALLAVGA

SEQ ID NO: 15923 - protein, 16 aa, Homo Sapiens
LLHLAVIGALLAVGAT

SEQ ID NO: 15924 - protein, 16 aa, Homo Sapiens
LHLAVIGALLAVGATK

SEQ ID NO: 15925 - protein, 16 aa, Homo Sapiens
HLAVIGALLAVGATKV

SEQ ID NO: 15926 - protein, 16 aa, Homo Sapiens
LAVIGALLAVGATKVP

SEQ ID NO: 15927 - protein, 16 aa, Homo Sapiens
AVIGALLAVGATKVPR

SEQ ID NO: 15928 - protein, 16 aa, Homo Sapiens
VIGALLAVGATKVPRN

SEQ ID NO: 15929 - protein, 16 aa, Homo Sapiens
IGALLAVGATKVPRNQ

SEQ ID NO: 15930 - protein, 16 aa, Homo Sapiens
GALLAVGATKVPRNQD

SEQ ID NO: 15931 - protein, 16 aa, Homo Sapiens
ALLAVGATKVPRNQDW

SEQ ID NO: 15932 - protein, 16 aa, Homo Sapiens
LLAVGATKVPRNQDWL

SEQ ID NO: 15933 - protein, 16 aa, Homo Sapiens
LAVGATKVPRNQDWLG

SEQ ID NO: 15934 - protein, 16 aa, Homo Sapiens
AVGATKVPRNQDWLGV

SEQ ID NO: 15935 - protein, 16 aa, Homo Sapiens
VGATKVPRNQDWLGVS

SEQ ID NO: 15936 - protein, 16 aa, Homo Sapiens
GATKVPRNQDWLGVSR

SEQ ID NO: 15937 - protein, 16 aa, Homo Sapiens
ATKVPRNQDWLGVSRQ

SEQ ID NO: 15938 - protein, 16 aa, Homo Sapiens
TKVPRNQDWLGVSRQL

SEQ ID NO: 15939 - protein, 16 aa, Homo Sapiens
KVPRNQDWLGVSRQLR

SEQ ID NO: 15940 - protein, 16 aa, Homo Sapiens
VPRNQDWLGVSRQLRT

SEQ ID NO: 15941 - protein, 16 aa, Homo Sapiens
PRNQDWLGVSRQLRTK

SEQ ID NO: 15942 - protein, 16 aa, Homo Sapiens
RNQDWLGVSRQLRTKA

SEQ ID NO: 15943 - protein, 16 aa, Homo Sapiens
NQDWLGVSRQLRTKAW

SEQ ID NO: 15944 - protein, 16 aa, Homo Sapiens
QDWLGVSRQLRTKAWN

SEQ ID NO: 15945 - protein, 16 aa, Homo Sapiens
DWLGVSRQLRTKAWNR

SEQ ID NO: 15946 - protein, 16 aa, Homo Sapiens
WLGVSRQLRTKAWNRQ

SEQ ID NO: 15947 - protein, 16 aa, Homo Sapiens
LGVSRQLRTKAWNRQL

SEQ ID NO: 15948 - protein, 16 aa, Homo Sapiens
GVSRQLRTKAWNRQLY

SEQ ID NO: 15949 - protein, 16 aa, Homo Sapiens
VSRQLRTKAWNRQLYP

SEQ ID NO: 15950 - protein, 16 aa, Homo Sapiens
SRQLRTKAWNRQLYPE

SEQ ID NO: 15951 - protein, 16 aa, Homo Sapiens
RQLRTKAWNRQLYPEW

SEQ ID NO: 15952 - protein, 16 aa, Homo Sapiens
QLRTKAWNRQLYPEWT

SEQ ID NO: 15953 - protein, 16 aa, Homo Sapiens
LRTKAWNRQLYPEWTE

SEQ ID NO: 15954 - protein, 16 aa, Homo Sapiens
RTKAWNRQLYPEWTEA

SEQ ID NO: 15955 - protein, 16 aa, Homo Sapiens
TKAWNRQLYPEWTEAQ

SEQ ID NO: 15956 - protein, 16 aa, Homo Sapiens
KAWNRQLYPEWTEAQR

SEQ ID NO: 15957 - protein, 16 aa, Homo Sapiens
AWNRQLYPEWTEAQRL

SEQ ID NO: 15958 - protein, 16 aa, Homo Sapiens
WNRQLYPEWTEAQRLD

SEQ ID NO: 15959 - protein, 16 aa, Homo Sapiens
NRQLYPEWTEAQRLDC

SEQ ID NO: 15960 - protein, 16 aa, Homo Sapiens
RQLYPEWTEAQRLDCW

SEQ ID NO: 15961 - protein, 16 aa, Homo Sapiens
QLYPEWTEAQRLDCWR

SEQ ID NO: 15962 - protein, 16 aa, Homo Sapiens
LYPEWTEAQRLDCWRG

SEQ ID NO: 15963 - protein, 16 aa, Homo Sapiens
YPEWTEAQRLDCWRGG

SEQ ID NO: 15964 - protein, 16 aa, Homo Sapiens
PEWTEAQRLDCWRGGQ

SEQ ID NO: 15965 - protein, 16 aa, Homo Sapiens
EWTEAQRLDCWRGGQV

SEQ ID NO: 15966 - protein, 16 aa, Homo Sapiens
WTEAQRLDCWRGGQVS

SEQ ID NO: 15967 - protein, 16 aa, Homo Sapiens
TEAQRLDCWRGGQVSL

SEQ ID NO: 15968 - protein, 16 aa, Homo Sapiens
EAQRLDCWRGGQVSLK

SEQ ID NO: 15969 - protein, 16 aa, Homo Sapiens
AQRLDCWRGGQVSLKV

SEQ ID NO: 15970 - protein, 16 aa, Homo Sapiens
QRLDCWRGGQVSLKVS

SEQ ID NO: 15971 - protein, 16 aa, Homo Sapiens
RLDCWRGGQVSLKVSN

SEQ ID NO: 15972 - protein, 16 aa, Homo Sapiens
LDCWRGGQVSLKVSND

SEQ ID NO: 15973 - protein, 16 aa, Homo Sapiens
DCWRGGQVSLKVSNDG

SEQ ID NO: 15974 - protein, 16 aa, Homo Sapiens
CWRGGQVSLKVSNDGP

SEQ ID NO: 15975 - protein, 16 aa, Homo Sapiens
WRGGQVSLKVSNDGPT

SEQ ID NO: 15976 - protein, 16 aa, Homo Sapiens
RGGQVSLKVSNDGPTL

SEQ ID NO: 15977 - protein, 16 aa, Homo Sapiens
GGQVSLKVSNDGPTLI

SEQ ID NO: 15978 - protein, 16 aa, Homo Sapiens
GQVSLKVSNDGPTLIG

SEQ ID NO: 15979 - protein, 16 aa, Homo Sapiens
QVSLKVSNDGPTLIGA

SEQ ID NO: 15980 - protein, 16 aa, Homo Sapiens
VSLKVSNDGPTLIGAN

SEQ ID NO: 15981 - protein, 16 aa, Homo Sapiens
SLKVSNDGPTLIGANA

SEQ ID NO: 15982 - protein, 16 aa, Homo Sapiens
LKVSNDGPTLIGANAS

SEQ ID NO: 15983 - protein, 16 aa, Homo Sapiens
KVSNDGPTLIGANASF

SEQ ID NO: 15984 - protein, 16 aa, Homo Sapiens
VSNDGPTLIGANASFS

SEQ ID NO: 15985 - protein, 16 aa, Homo Sapiens
SNDGPTLIGANASFSI

SEQ ID NO: 15986 - protein, 16 aa, Homo Sapiens
NDGPTLIGANASFSIA

SEQ ID NO: 15987 - protein, 16 aa, Homo Sapiens
DGPTLIGANASFSIAL

SEQ ID NO: 15988 - protein, 16 aa, Homo Sapiens
GPTLIGANASFSIALN

SEQ ID NO: 15989 - protein, 16 aa, Homo Sapiens
PTLIGANASFSIALNF

SEQ ID NO: 15990 - protein, 16 aa, Homo Sapiens
TLIGANASFSIALNFP

SEQ ID NO: 15991 - protein, 16 aa, Homo Sapiens
LIGANASFSIALNFPG

SEQ ID NO: 15992 - protein, 16 aa, Homo Sapiens
IGANASFSIALNFPGS

SEQ ID NO: 15993 - protein, 16 aa, Homo Sapiens
GANASFSIALNFPGSQ

SEQ ID NO: 15994 - protein, 16 aa, Homo Sapiens
ANASFSIALNFPGSQK

SEQ ID NO: 15995 - protein, 16 aa, Homo Sapiens
NASFSIALNFPGSQKV

SEQ ID NO: 15996 - protein, 16 aa, Homo Sapiens
ASFSIALNFPGSQKVL

SEQ ID NO: 15997 - protein, 16 aa, Homo Sapiens
SFSIALNFPGSQKVLP

SEQ ID NO: 15998 - protein, 16 aa, Homo Sapiens
FSIALNFPGSQKVLPD

SEQ ID NO: 15999 - protein, 16 aa, Homo Sapiens
SIALNFPGSQKVLPDG

SEQ ID NO: 16000 - protein, 16 aa, Homo Sapiens
IALNFPGSQKVLPDGQ

SEQ ID NO: 16001 - protein, 16 aa, Homo Sapiens
ALNFPGSQKVLPDGQV

SEQ ID NO: 16002 - protein, 16 aa, Homo Sapiens
LNFPGSQKVLPDGQVI

SEQ ID NO: 16003 - protein, 16 aa, Homo Sapiens
NFPGSQKVLPDGQVIW

SEQ ID NO: 16004 - protein, 16 aa, Homo Sapiens
FPGSQKVLPDGQVIWV

SEQ ID NO: 16005 - protein, 16 aa, Homo Sapiens
PGSQKVLPDGQVIWVN

SEQ ID NO: 16006 - protein, 16 aa, Homo Sapiens
GSQKVLPDGQVIWVNN

SEQ ID NO: 16007 - protein, 16 aa, Homo Sapiens
SQKVLPDGQVIWVNNT

SEQ ID NO: 16008 - protein, 16 aa, Homo Sapiens
QKVLPDGQVIWVNNTI

SEQ ID NO: 16009 - protein, 16 aa, Homo Sapiens
KVLPDGQVIWVNNTII

SEQ ID NO: 16010 - protein, 16 aa, Homo Sapiens
VLPDGQVIWVNNTIIN

SEQ ID NO: 16011 - protein, 16 aa, Homo Sapiens
LPDGQVIWVNNTIING

SEQ ID NO: 16012 - protein, 16 aa, Homo Sapiens
PDGQVIWVNNTIINGS

SEQ ID NO: 16013 - protein, 16 aa, Homo Sapiens
DGQVIWVNNTIINGSQ

SEQ ID NO: 16014 - protein, 16 aa, Homo Sapiens
GQVIWVNNTIINGSQV

SEQ ID NO: 16015 - protein, 16 aa, Homo Sapiens
QVIWVNNTIINGSQVW

SEQ ID NO: 16016 - protein, 16 aa, Homo Sapiens
VIWVNNTIINGSQVWG

SEQ ID NO: 16017 - protein, 16 aa, Homo Sapiens
IWVNNTIINGSQVWGG

SEQ ID NO: 16018 - protein, 16 aa, Homo Sapiens
WVNNTIINGSQVWGGQ

SEQ ID NO: 16019 - protein, 16 aa, Homo Sapiens
VNNTIINGSQVWGGQP

SEQ ID NO: 16020 - protein, 16 aa, Homo Sapiens
NNTIINGSQVWGGQPV

SEQ ID NO: 16021 - protein, 16 aa, Homo Sapiens
NTIINGSQVWGGQPVY

SEQ ID NO: 16022 - protein, 16 aa, Homo Sapiens
TIINGSQVWGGQPVYP

SEQ ID NO: 16023 - protein, 16 aa, Homo Sapiens
IINGSQVWGGQPVYPQ

SEQ ID NO: 16024 - protein, 16 aa, Homo Sapiens
INGSQVWGGQPVYPQE

SEQ ID NO: 16025 - protein, 16 aa, Homo Sapiens
NGSQVWGGQPVYPQET

SEQ ID NO: 16026 - protein, 16 aa, Homo Sapiens
GSQVWGGQPVYPQETD

SEQ ID NO: 16027 - protein, 16 aa, Homo Sapiens
SQVWGGQPVYPQETDD

SEQ ID NO: 16028 - protein, 16 aa, Homo Sapiens
QVWGGQPVYPQETDDA

SEQ ID NO: 16029 - protein, 16 aa, Homo Sapiens
VWGGQPVYPQETDDAC

SEQ ID NO: 16030 - protein, 16 aa, Homo Sapiens
WGGQPVYPQETDDACI

SEQ ID NO: 16031 - protein, 16 aa, Homo Sapiens
GGQPVYPQETDDACIF

SEQ ID NO: 16032 - protein, 16 aa, Homo Sapiens
GQPVYPQETDDACIFP

SEQ ID NO: 16033 - protein, 16 aa, Homo Sapiens
QPVYPQETDDACIFPD

SEQ ID NO: 16034 - protein, 16 aa, Homo Sapiens
PVYPQETDDACIFPDG

SEQ ID NO: 16035 - protein, 16 aa, Homo Sapiens
VYPQETDDACIFPDGG

SEQ ID NO: 16036 - protein, 16 aa, Homo Sapiens
YPQETDDACIFPDGGP

SEQ ID NO: 16037 - protein, 16 aa, Homo Sapiens
PQETDDACIFPDGGPC

SEQ ID NO: 16038 - protein, 16 aa, Homo Sapiens
QETDDACIFPDGGPCP

SEQ ID NO: 16039 - protein, 16 aa, Homo Sapiens
ETDDACIFPDGGPCPS

SEQ ID NO: 16040 - protein, 16 aa, Homo Sapiens
TDDACIFPDGGPCPSG

SEQ ID NO: 16041 - protein, 16 aa, Homo Sapiens
DDACIFPDGGPCPSGS

SEQ ID NO: 16042 - protein, 16 aa, Homo Sapiens
DACIFPDGGPCPSGSW

SEQ ID NO: 16043 - protein, 16 aa, Homo Sapiens
ACIFPDGGPCPSGSWS

SEQ ID NO: 16044 - protein, 16 aa, Homo Sapiens
CIFPDGGPCPSGSWSQ

SEQ ID NO: 16045 - protein, 16 aa, Homo Sapiens
IFPDGGPCPSGSWSQK

SEQ ID NO: 16046 - protein, 16 aa, Homo Sapiens
FPDGGPCPSGSWSQKR

SEQ ID NO: 16047 - protein, 16 aa, Homo Sapiens
PDGGPCPSGSWSQKRS

SEQ ID NO: 16048 - protein, 16 aa, Homo Sapiens
DGGPCPSGSWSQKRSF

SEQ ID NO: 16049 - protein, 16 aa, Homo Sapiens
GGPCPSGSWSQKRSFV

SEQ ID NO: 16050 - protein, 16 aa, Homo Sapiens
GPCPSGSWSQKRSFVY

SEQ ID NO: 16051 - protein, 16 aa, Homo Sapiens
PCPSGSWSQKRSFVYV

SEQ ID NO: 16052 - protein, 16 aa, Homo Sapiens
CPSGSWSQKRSFVYVW

SEQ ID NO: 16053 - protein, 16 aa, Homo Sapiens
PSGSWSQKRSFVYVWK

SEQ ID NO: 16054 - protein, 16 aa, Homo Sapiens
SGSWSQKRSFVYVWKT

SEQ ID NO: 16055 - protein, 16 aa, Homo Sapiens
GSWSQKRSFVYVWKTW

SEQ ID NO: 16056 - protein, 16 aa, Homo Sapiens
SWSQKRSFVYVWKTWG

SEQ ID NO: 16057 - protein, 16 aa, Homo Sapiens
WSQKRSFVYVWKTWGQ

SEQ ID NO: 16058 - protein, 16 aa, Homo Sapiens
SQKRSFVYVWKTWGQY

SEQ ID NO: 16059 - protein, 16 aa, Homo Sapiens
QKRSFVYVWKTWGQYW

SEQ ID NO: 16060 - protein, 16 aa, Homo Sapiens
KRSFVYVWKTWGQYWQ

SEQ ID NO: 16061 - protein, 16 aa, Homo Sapiens
RSFVYVWKTWGQYWQV

SEQ ID NO: 16062 - protein, 16 aa, Homo Sapiens
SFVYVWKTWGQYWQVL

SEQ ID NO: 16063 - protein, 16 aa, Homo Sapiens
FVYVWKTWGQYWQVLG

SEQ ID NO: 16064 - protein, 16 aa, Homo Sapiens
VYVWKTWGQYWQVLGG

SEQ ID NO: 16065 - protein, 16 aa, Homo Sapiens
YVWKTWGQYWQVLGGP

SEQ ID NO: 16066 - protein, 16 aa, Homo Sapiens
VWKTWGQYWQVLGGPV

SEQ ID NO: 16067 - protein, 16 aa, Homo Sapiens
WKTWGQYWQVLGGPVS

SEQ ID NO: 16068 - protein, 16 aa, Homo Sapiens
KTWGQYWQVLGGPVSG

SEQ ID NO: 16069 - protein, 16 aa, Homo Sapiens
TWGQYWQVLGGPVSGL

SEQ ID NO: 16070 - protein, 16 aa, Homo Sapiens
WGQYWQVLGGPVSGLS

SEQ ID NO: 16071 - protein, 16 aa, Homo Sapiens
GQYWQVLGGPVSGLSI

SEQ ID NO: 16072 - protein, 16 aa, Homo Sapiens
QYWQVLGGPVSGLSIG

SEQ ID NO: 16073 - protein, 16 aa, Homo Sapiens
YWQVLGGPVSGLSIGT

SEQ ID NO: 16074 - protein, 16 aa, Homo Sapiens
WQVLGGPVSGLSIGTG

SEQ ID NO: 16075 - protein, 16 aa, Homo Sapiens
QVLGGPVSGLSIGTGR

SEQ ID NO: 16076 - protein, 16 aa, Homo Sapiens
VLGGPVSGLSIGTGRA

SEQ ID NO: 16077 - protein, 16 aa, Homo Sapiens
LGGPVSGLSIGTGRAM

SEQ ID NO: 16078 - protein, 16 aa, Homo Sapiens
GGPVSGLSIGTGRAML

SEQ ID NO: 16079 - protein, 16 aa, Homo Sapiens
GPVSGLSIGTGRAMLG

SEQ ID NO: 16080 - protein, 16 aa, Homo Sapiens
PVSGLSIGTGRAMLGT

SEQ ID NO: 16081 - protein, 16 aa, Homo Sapiens
VSGLSIGTGRAMLGTH

SEQ ID NO: 16082 - protein, 16 aa, Homo Sapiens
SGLSIGTGRAMLGTHT

SEQ ID NO: 16083 - protein, 16 aa, Homo Sapiens
GLSIGTGRAMLGTHTM

SEQ ID NO: 16084 - protein, 16 aa, Homo Sapiens
LSIGTGRAMLGTHTME

SEQ ID NO: 16085 - protein, 16 aa, Homo Sapiens
SIGTGRAMLGTHTMEV

SEQ ID NO: 16086 - protein, 16 aa, Homo Sapiens
IGTGRAMLGTHTMEVT

SEQ ID NO: 16087 - protein, 16 aa, Homo Sapiens
GTGRAMLGTHTMEVTV

SEQ ID NO: 16088 - protein, 16 aa, Homo Sapiens
TGRAMLGTHTMEVTVY

SEQ ID NO: 16089 - protein, 16 aa, Homo Sapiens
GRAMLGTHTMEVTVYH

SEQ ID NO: 16090 - protein, 16 aa, Homo Sapiens
RAMLGTHTMEVTVYHR

SEQ ID NO: 16091 - protein, 16 aa, Homo Sapiens
AMLGTHTMEVTVYHRR

SEQ ID NO: 16092 - protein, 16 aa, Homo Sapiens
MLGTHTMEVTVYHRRG

SEQ ID NO: 16093 - protein, 16 aa, Homo Sapiens
LGTHTMEVTVYHRRGS

SEQ ID NO: 16094 - protein, 16 aa, Homo Sapiens
GTHTMEVTVYHRRGSR

SEQ ID NO: 16095 - protein, 16 aa, Homo Sapiens
THTMEVTVYHRRGSRS

SEQ ID NO: 16096 - protein, 16 aa, Homo Sapiens
HTMEVTVYHRRGSRSY

SEQ ID NO: 16097 - protein, 16 aa, Homo Sapiens
TMEVTVYHRRGSRSYV

SEQ ID NO: 16098 - protein, 16 aa, Homo Sapiens
MEVTVYHRRGSRSYVP

SEQ ID NO: 16099 - protein, 16 aa, Homo Sapiens
EVTVYHRRGSRSYVPL

SEQ ID NO: 16100 - protein, 16 aa, Homo Sapiens
VTVYHRRGSRSYVPLA

SEQ ID NO: 16101 - protein, 16 aa, Homo Sapiens
TVYHRRGSRSYVPLAH

SEQ ID NO: 16102 - protein, 16 aa, Homo Sapiens
VYHRRGSRSYVPLAHS

SEQ ID NO: 16103 - protein, 16 aa, Homo Sapiens
YHRRGSRSYVPLAHSS

SEQ ID NO: 16104 - protein, 16 aa, Homo Sapiens
HRRGSRSYVPLAHSSS

SEQ ID NO: 16105 - protein, 16 aa, Homo Sapiens
RRGSRSYVPLAHSSSA

SEQ ID NO: 16106 - protein, 16 aa, Homo Sapiens
RGSRSYVPLAHSSSAF

SEQ ID NO: 16107 - protein, 16 aa, Homo Sapiens
GSRSYVPLAHSSSAFT

SEQ ID NO: 16108 - protein, 16 aa, Homo Sapiens
SRSYVPLAHSSSAFTI

SEQ ID NO: 16109 - protein, 16 aa, Homo Sapiens
RSYVPLAHSSSAFTIT

SEQ ID NO: 16110 - protein, 16 aa, Homo Sapiens
SYVPLAHSSSAFTITD

SEQ ID NO: 16111 - protein, 16 aa, Homo Sapiens
YVPLAHSSSAFTITDQ

SEQ ID NO: 16112 - protein, 16 aa, Homo Sapiens
VPLAHSSSAFTITDQV

SEQ ID NO: 16113 - protein, 16 aa, Homo Sapiens
PLAHSSSAFTITDQVP

SEQ ID NO: 16114 - protein, 16 aa, Homo Sapiens
LAHSSSAFTITDQVPF

SEQ ID NO: 16115 - protein, 16 aa, Homo Sapiens
AHSSSAFTITDQVPFS

SEQ ID NO: 16116 - protein, 16 aa, Homo Sapiens
HSSSAFTITDQVPFSV

SEQ ID NO: 16117 - protein, 16 aa, Homo Sapiens
SSSAFTITDQVPFSVS

SEQ ID NO: 16118 - protein, 16 aa, Homo Sapiens
SSAFTITDQVPFSVSV

SEQ ID NO: 16119 - protein, 16 aa, Homo Sapiens
SAFTITDQVPFSVSVS

SEQ ID NO: 16120 - protein, 16 aa, Homo Sapiens
AFTITDQVPFSVSVSQ

SEQ ID NO: 16121 - protein, 16 aa, Homo Sapiens
FTITDQVPFSVSVSQL

SEQ ID NO: 16122 - protein, 16 aa, Homo Sapiens
TITDQVPFSVSVSQLR

SEQ ID NO: 16123 - protein, 16 aa, Homo Sapiens
ITDQVPFSVSVSQLRA

SEQ ID NO: 16124 - protein, 16 aa, Homo Sapiens
TDQVPFSVSVSQLRAL

SEQ ID NO: 16125 - protein, 16 aa, Homo Sapiens
DQVPFSVSVSQLRALD

SEQ ID NO: 16126 - protein, 16 aa, Homo Sapiens
QVPFSVSVSQLRALDG

SEQ ID NO: 16127 - protein, 16 aa, Homo Sapiens
VPFSVSVSQLRALDGG

SEQ ID NO: 16128 - protein, 16 aa, Homo Sapiens
PFSVSVSQLRALDGGN

SEQ ID NO: 16129 - protein, 16 aa, Homo Sapiens
FSVSVSQLRALDGGNK

SEQ ID NO: 16130 - protein, 16 aa, Homo Sapiens
SVSVSQLRALDGGNKH

SEQ ID NO: 16131 - protein, 16 aa, Homo Sapiens
VSVSQLRALDGGNKHF

SEQ ID NO: 16132 - protein, 16 aa, Homo Sapiens
SVSQLRALDGGNKHFL

SEQ ID NO: 16133 - protein, 16 aa, Homo Sapiens
VSQLRALDGGNKHFLR

SEQ ID NO: 16134 - protein, 16 aa, Homo Sapiens
SQLRALDGGNKHFLRN

SEQ ID NO: 16135 - protein, 16 aa, Homo Sapiens
QLRALDGGNKHFLRNQ

SEQ ID NO: 16136 - protein, 16 aa, Homo Sapiens
LRALDGGNKHFLRNQP

SEQ ID NO: 16137 - protein, 16 aa, Homo Sapiens
RALDGGNKHFLRNQPL

SEQ ID NO: 16138 - protein, 16 aa, Homo Sapiens
ALDGGNKHFLRNQPLT

SEQ ID NO: 16139 - protein, 16 aa, Homo Sapiens
LDGGNKHFLRNQPLTF

SEQ ID NO: 16140 - protein, 16 aa, Homo Sapiens
DGGNKHFLRNQPLTFA

SEQ ID NO: 16141 - protein, 16 aa, Homo Sapiens
GGNKHFLRNQPLTFAL

SEQ ID NO: 16142 - protein, 16 aa, Homo Sapiens
GNKHFLRNQPLTFALQ

SEQ ID NO: 16143 - protein, 16 aa, Homo Sapiens
NKHFLRNQPLTFALQL

SEQ ID NO: 16144 - protein, 16 aa, Homo Sapiens
KHFLRNQPLTFALQLH

SEQ ID NO: 16145 - protein, 16 aa, Homo Sapiens
HFLRNQPLTFALQLHD

SEQ ID NO: 16146 - protein, 16 aa, Homo Sapiens
FLRNQPLTFALQLHDP

SEQ ID NO: 16147 - protein, 16 aa, Homo Sapiens
LRNQPLTFALQLHDPS

SEQ ID NO: 16148 - protein, 16 aa, Homo Sapiens
RNQPLTFALQLHDPSG

SEQ ID NO: 16149 - protein, 16 aa, Homo Sapiens
NQPLTFALQLHDPSGY

SEQ ID NO: 16150 - protein, 16 aa, Homo Sapiens
QPLTFALQLHDPSGYL

SEQ ID NO: 16151 - protein, 16 aa, Homo Sapiens
PLTFALQLHDPSGYLA

SEQ ID NO: 16152 - protein, 16 aa, Homo Sapiens
LTFALQLHDPSGYLAE

SEQ ID NO: 16153 - protein, 16 aa, Homo Sapiens
TFALQLHDPSGYLAEA

SEQ ID NO: 16154 - protein, 16 aa, Homo Sapiens
FALQLHDPSGYLAEAD

SEQ ID NO: 16155 - protein, 16 aa, Homo Sapiens
ALQLHDPSGYLAEADL

SEQ ID NO: 16156 - protein, 16 aa, Homo Sapiens
LQLHDPSGYLAEADLS

SEQ ID NO: 16157 - protein, 16 aa, Homo Sapiens
QLHDPSGYLAEADLSY

SEQ ID NO: 16158 - protein, 16 aa, Homo Sapiens
LHDPSGYLAEADLSYT

SEQ ID NO: 16159 - protein, 16 aa, Homo Sapiens
HDPSGYLAEADLSYTW

SEQ ID NO: 16160 - protein, 16 aa, Homo Sapiens
DPSGYLAEADLSYTWD

SEQ ID NO: 16161 - protein, 16 aa, Homo Sapiens
PSGYLAEADLSYTWDF

SEQ ID NO: 16162 - protein, 16 aa, Homo Sapiens
SGYLAEADLSYTWDFG

SEQ ID NO: 16163 - protein, 16 aa, Homo Sapiens
GYLAEADLSYTWDFGD

SEQ ID NO: 16164 - protein, 16 aa, Homo Sapiens
YLAEADLSYTWDFGDS

SEQ ID NO: 16165 - protein, 16 aa, Homo Sapiens
LAEADLSYTWDFGDSS

SEQ ID NO: 16166 - protein, 16 aa, Homo Sapiens
AEADLSYTWDFGDSSG

SEQ ID NO: 16167 - protein, 16 aa, Homo Sapiens
EADLSYTWDFGDSSGT

SEQ ID NO: 16168 - protein, 16 aa, Homo Sapiens
ADLSYTWDFGDSSGTL

SEQ ID NO: 16169 - protein, 16 aa, Homo Sapiens
DLSYTWDFGDSSGTLI

SEQ ID NO: 16170 - protein, 16 aa, Homo Sapiens
LSYTWDFGDSSGTLIS

SEQ ID NO: 16171 - protein, 16 aa, Homo Sapiens
SYTWDFGDSSGTLISR

SEQ ID NO: 16172 - protein, 16 aa, Homo Sapiens
YTWDFGDSSGTLISRA

SEQ ID NO: 16173 - protein, 16 aa, Homo Sapiens
TWDFGDSSGTLISRAL

SEQ ID NO: 16174 - protein, 16 aa, Homo Sapiens
WDFGDSSGTLISRALV

SEQ ID NO: 16175 - protein, 16 aa, Homo Sapiens
DFGDSSGTLISRALVV

SEQ ID NO: 16176 - protein, 16 aa, Homo Sapiens
FGDSSGTLISRALVVT

SEQ ID NO: 16177 - protein, 16 aa, Homo Sapiens
GDSSGTLISRALVVTH

SEQ ID NO: 16178 - protein, 16 aa, Homo Sapiens
DSSGTLISRALVVTHT

SEQ ID NO: 16179 - protein, 16 aa, Homo Sapiens
SSGTLISRALVVTHTY

SEQ ID NO: 16180 - protein, 16 aa, Homo Sapiens
SGTLISRALVVTHTYL

SEQ ID NO: 16181 - protein, 16 aa, Homo Sapiens
GTLISRALVVTHTYLE

SEQ ID NO: 16182 - protein, 16 aa, Homo Sapiens
TLISRALVVTHTYLEP

SEQ ID NO: 16183 - protein, 16 aa, Homo Sapiens
LISRALVVTHTYLEPG

SEQ ID NO: 16184 - protein, 16 aa, Homo Sapiens
ISRALVVTHTYLEPGP

SEQ ID NO: 16185 - protein, 16 aa, Homo Sapiens
SRALVVTHTYLEPGPV

SEQ ID NO: 16186 - protein, 16 aa, Homo Sapiens
RALVVTHTYLEPGPVT

SEQ ID NO: 16187 - protein, 16 aa, Homo Sapiens
ALVVTHTYLEPGPVTA

SEQ ID NO: 16188 - protein, 16 aa, Homo Sapiens
LVVTHTYLEPGPVTAQ

SEQ ID NO: 16189 - protein, 16 aa, Homo Sapiens
VVTHTYLEPGPVTAQV

SEQ ID NO: 16190 - protein, 16 aa, Homo Sapiens
VTHTYLEPGPVTAQVV

SEQ ID NO: 16191 - protein, 16 aa, Homo Sapiens
THTYLEPGPVTAQVVL

SEQ ID NO: 16192 - protein, 16 aa, Homo Sapiens
HTYLEPGPVTAQVVLQ

SEQ ID NO: 16193 - protein, 16 aa, Homo Sapiens
TYLEPGPVTAQVVLQA

SEQ ID NO: 16194 - protein, 16 aa, Homo Sapiens
YLEPGPVTAQVVLQAA

SEQ ID NO: 16195 - protein, 16 aa, Homo Sapiens
LEPGPVTAQVVLQAAI

SEQ ID NO: 16196 - protein, 16 aa, Homo Sapiens
EPGPVTAQVVLQAAIP

SEQ ID NO: 16197 - protein, 16 aa, Homo Sapiens
PGPVTAQVVLQAAIPL

SEQ ID NO: 16198 - protein, 16 aa, Homo Sapiens
GPVTAQVVLQAAIPLT

SEQ ID NO: 16199 - protein, 16 aa, Homo Sapiens
PVTAQVVLQAAIPLTS

SEQ ID NO: 16200 - protein, 16 aa, Homo Sapiens
VTAQVVLQAAIPLTSC

SEQ ID NO: 16201 - protein, 16 aa, Homo Sapiens
TAQVVLQAAIPLTSCG

SEQ ID NO: 16202 - protein, 16 aa, Homo Sapiens
AQVVLQAAIPLTSCGS

SEQ ID NO: 16203 - protein, 16 aa, Homo Sapiens
QVVLQAAIPLTSCGSS

SEQ ID NO: 16204 - protein, 16 aa, Homo Sapiens
VVLQAAIPLTSCGSSP

SEQ ID NO: 16205 - protein, 16 aa, Homo Sapiens
VLQAAIPLTSCGSSPV

SEQ ID NO: 16206 - protein, 16 aa, Homo Sapiens
LQAAIPLTSCGSSPVP

SEQ ID NO: 16207 - protein, 16 aa, Homo Sapiens
QAAIPLTSCGSSPVPG

SEQ ID NO: 16208 - protein, 16 aa, Homo Sapiens
AAIPLTSCGSSPVPGT

SEQ ID NO: 16209 - protein, 16 aa, Homo Sapiens
AIPLTSCGSSPVPGTT

SEQ ID NO: 16210 - protein, 16 aa, Homo Sapiens
IPLTSCGSSPVPGTTD

SEQ ID NO: 16211 - protein, 16 aa, Homo Sapiens
PLTSCGSSPVPGTTDG

SEQ ID NO: 16212 - protein, 16 aa, Homo Sapiens
LTSCGSSPVPGTTDGH

SEQ ID NO: 16213 - protein, 16 aa, Homo Sapiens
TSCGSSPVPGTTDGHR

SEQ ID NO: 16214 - protein, 16 aa, Homo Sapiens
SCGSSPVPGTTDGHRP

SEQ ID NO: 16215 - protein, 16 aa, Homo Sapiens
CGSSPVPGTTDGHRPT

SEQ ID NO: 16216 - protein, 16 aa, Homo Sapiens
GSSPVPGTTDGHRPTA

SEQ ID NO: 16217 - protein, 16 aa, Homo Sapiens
SSPVPGTTDGHRPTAE

SEQ ID NO: 16218 - protein, 16 aa, Homo Sapiens
SPVPGTTDGHRPTAEA

SEQ ID NO: 16219 - protein, 16 aa, Homo Sapiens
PVPGTTDGHRPTAEAP

SEQ ID NO: 16220 - protein, 16 aa, Homo Sapiens
VPGTTDGHRPTAEAPN

SEQ ID NO: 16221 - protein, 16 aa, Homo Sapiens
PGTTDGHRPTAEAPNT

SEQ ID NO: 16222 - protein, 16 aa, Homo Sapiens
GTTDGHRPTAEAPNTT

SEQ ID NO: 16223 - protein, 16 aa, Homo Sapiens
TTDGHRPTAEAPNTTA

SEQ ID NO: 16224 - protein, 16 aa, Homo Sapiens
TDGHRPTAEAPNTTAG

SEQ ID NO: 16225 - protein, 16 aa, Homo Sapiens
DGHRPTAEAPNTTAGQ

SEQ ID NO: 16226 - protein, 16 aa, Homo Sapiens
GHRPTAEAPNTTAGQV

SEQ ID NO: 16227 - protein, 16 aa, Homo Sapiens
HRPTAEAPNTTAGQVP

SEQ ID NO: 16228 - protein, 16 aa, Homo Sapiens
RPTAEAPNTTAGQVPT

SEQ ID NO: 16229 - protein, 16 aa, Homo Sapiens
PTAEAPNTTAGQVPTT

SEQ ID NO: 16230 - protein, 16 aa, Homo Sapiens
TAEAPNTTAGQVPTTE

SEQ ID NO: 16231 - protein, 16 aa, Homo Sapiens
AEAPNTTAGQVPTTEV

SEQ ID NO: 16232 - protein, 16 aa, Homo Sapiens
EAPNTTAGQVPTTEVV

SEQ ID NO: 16233 - protein, 16 aa, Homo Sapiens
APNTTAGQVPTTEVVG

SEQ ID NO: 16234 - protein, 16 aa, Homo Sapiens
PNTTAGQVPTTEVVGT

SEQ ID NO: 16235 - protein, 16 aa, Homo Sapiens
NTTAGQVPTTEVVGTT

SEQ ID NO: 16236 - protein, 16 aa, Homo Sapiens
TTAGQVPTTEVVGTTP

SEQ ID NO: 16237 - protein, 16 aa, Homo Sapiens
TAGQVPTTEVVGTTPG

SEQ ID NO: 16238 - protein, 16 aa, Homo Sapiens
AGQVPTTEVVGTTPGQ

SEQ ID NO: 16239 - protein, 16 aa, Homo Sapiens
GQVPTTEVVGTTPGQA

SEQ ID NO: 16240 - protein, 16 aa, Homo Sapiens
QVPTTEVVGTTPGQAP

SEQ ID NO: 16241 - protein, 16 aa, Homo Sapiens
VPTTEVVGTTPGQAPT

SEQ ID NO: 16242 - protein, 16 aa, Homo Sapiens
PTTEVVGTTPGQAPTA

SEQ ID NO: 16243 - protein, 16 aa, Homo Sapiens
TTEVVGTTPGQAPTAE

SEQ ID NO: 16244 - protein, 16 aa, Homo Sapiens
TEVVGTTPGQAPTAEP

SEQ ID NO: 16245 - protein, 16 aa, Homo Sapiens
EVVGTTPGQAPTAEPS

SEQ ID NO: 16246 - protein, 16 aa, Homo Sapiens
VVGTTPGQAPTAEPSG

SEQ ID NO: 16247 - protein, 16 aa, Homo Sapiens
VGTTPGQAPTAEPSGT

SEQ ID NO: 16248 - protein, 16 aa, Homo Sapiens
GTTPGQAPTAEPSGTT

SEQ ID NO: 16249 - protein, 16 aa, Homo Sapiens
TTPGQAPTAEPSGTTS

SEQ ID NO: 16250 - protein, 16 aa, Homo Sapiens
TPGQAPTAEPSGTTSV

SEQ ID NO: 16251 - protein, 16 aa, Homo Sapiens
PGQAPTAEPSGTTSVQ

SEQ ID NO: 16252 - protein, 16 aa, Homo Sapiens
GQAPTAEPSGTTSVQV

SEQ ID NO: 16253 - protein, 16 aa, Homo Sapiens
QAPTAEPSGTTSVQVP

SEQ ID NO: 16254 - protein, 16 aa, Homo Sapiens
APTAEPSGTTSVQVPT

SEQ ID NO: 16255 - protein, 16 aa, Homo Sapiens
PTAEPSGTTSVQVPTT

SEQ ID NO: 16256 - protein, 16 aa, Homo Sapiens
TAEPSGTTSVQVPTTE

SEQ ID NO: 16257 - protein, 16 aa, Homo Sapiens
AEPSGTTSVQVPTTEV

SEQ ID NO: 16258 - protein, 16 aa, Homo Sapiens
EPSGTTSVQVPTTEVI

SEQ ID NO: 16259 - protein, 16 aa, Homo Sapiens
PSGTTSVQVPTTEVIS

SEQ ID NO: 16260 - protein, 16 aa, Homo Sapiens
SGTTSVQVPTTEVIST

SEQ ID NO: 16261 - protein, 16 aa, Homo Sapiens
GTTSVQVPTTEVISTA

SEQ ID NO: 16262 - protein, 16 aa, Homo Sapiens
TTSVQVPTTEVISTAP

SEQ ID NO: 16263 - protein, 16 aa, Homo Sapiens
TSVQVPTTEVISTAPV

SEQ ID NO: 16264 - protein, 16 aa, Homo Sapiens
SVQVPTTEVISTAPVQ

SEQ ID NO: 16265 - protein, 16 aa, Homo Sapiens
VQVPTTEVISTAPVQM

SEQ ID NO: 16266 - protein, 16 aa, Homo Sapiens
QVPTTEVISTAPVQMP

SEQ ID NO: 16267 - protein, 16 aa, Homo Sapiens
VPTTEVISTAPVQMPT

SEQ ID NO: 16268 - protein, 16 aa, Homo Sapiens
PTTEVISTAPVQMPTA

SEQ ID NO: 16269 - protein, 16 aa, Homo Sapiens
TTEVISTAPVQMPTAE

SEQ ID NO: 16270 - protein, 16 aa, Homo Sapiens
TEVISTAPVQMPTAES

SEQ ID NO: 16271 - protein, 16 aa, Homo Sapiens
EVISTAPVQMPTAEST

SEQ ID NO: 16272 - protein, 16 aa, Homo Sapiens
VISTAPVQMPTAESTG

SEQ ID NO: 16273 - protein, 16 aa, Homo Sapiens
ISTAPVQMPTAESTGM

SEQ ID NO: 16274 - protein, 16 aa, Homo Sapiens
STAPVQMPTAESTGMT

SEQ ID NO: 16275 - protein, 16 aa, Homo Sapiens
TAPVQMPTAESTGMTP

SEQ ID NO: 16276 - protein, 16 aa, Homo Sapiens
APVQMPTAESTGMTPE

SEQ ID NO: 16277 - protein, 16 aa, Homo Sapiens
PVQMPTAESTGMTPEK

SEQ ID NO: 16278 - protein, 16 aa, Homo Sapiens
VQMPTAESTGMTPEKV

SEQ ID NO: 16279 - protein, 16 aa, Homo Sapiens
QMPTAESTGMTPEKVP

SEQ ID NO: 16280 - protein, 16 aa, Homo Sapiens
MPTAESTGMTPEKVPV

SEQ ID NO: 16281 - protein, 16 aa, Homo Sapiens
PTAESTGMTPEKVPVS

SEQ ID NO: 16282 - protein, 16 aa, Homo Sapiens
TAESTGMTPEKVPVSE

SEQ ID NO: 16283 - protein, 16 aa, Homo Sapiens
AESTGMTPEKVPVSEV

SEQ ID NO: 16284 - protein, 16 aa, Homo Sapiens
ESTGMTPEKVPVSEVM

SEQ ID NO: 16285 - protein, 16 aa, Homo Sapiens
STGMTPEKVPVSEVMG

SEQ ID NO: 16286 - protein, 16 aa, Homo Sapiens
TGMTPEKVPVSEVMGT

SEQ ID NO: 16287 - protein, 16 aa, Homo Sapiens
GMTPEKVPVSEVMGTT

SEQ ID NO: 16288 - protein, 16 aa, Homo Sapiens
MTPEKVPVSEVMGTTL

SEQ ID NO: 16289 - protein, 16 aa, Homo Sapiens
TPEKVPVSEVMGTTLA

SEQ ID NO: 16290 - protein, 16 aa, Homo Sapiens
PEKVPVSEVMGTTLAE

SEQ ID NO: 16291 - protein, 16 aa, Homo Sapiens
EKVPVSEVMGTTLAEM

SEQ ID NO: 16292 - protein, 16 aa, Homo Sapiens
KVPVSEVMGTTLAEMS

SEQ ID NO: 16293 - protein, 16 aa, Homo Sapiens
VPVSEVMGTTLAEMST

SEQ ID NO: 16294 - protein, 16 aa, Homo Sapiens
PVSEVMGTTLAEMSTP

SEQ ID NO: 16295 - protein, 16 aa, Homo Sapiens
VSEVMGTTLAEMSTPE

SEQ ID NO: 16296 - protein, 16 aa, Homo Sapiens
SEVMGTTLAEMSTPEA

SEQ ID NO: 16297 - protein, 16 aa, Homo Sapiens
EVMGTTLAEMSTPEAT

SEQ ID NO: 16298 - protein, 16 aa, Homo Sapiens
VMGTTLAEMSTPEATG

SEQ ID NO: 16299 - protein, 16 aa, Homo Sapiens
MGTTLAEMSTPEATGM

SEQ ID NO: 16300 - protein, 16 aa, Homo Sapiens
GTTLAEMSTPEATGMT

SEQ ID NO: 16301 - protein, 16 aa, Homo Sapiens
TTLAEMSTPEATGMTP

SEQ ID NO: 16302 - protein, 16 aa, Homo Sapiens
TLAEMSTPEATGMTPA

SEQ ID NO: 16303 - protein, 16 aa, Homo Sapiens
LAEMSTPEATGMTPAE

SEQ ID NO: 16304 - protein, 16 aa, Homo Sapiens
AEMSTPEATGMTPAEV

SEQ ID NO: 16305 - protein, 16 aa, Homo Sapiens
EMSTPEATGMTPAEVS

SEQ ID NO: 16306 - protein, 16 aa, Homo Sapiens
MSTPEATGMTPAEVSI

SEQ ID NO: 16307 - protein, 16 aa, Homo Sapiens
STPEATGMTPAEVSIV

SEQ ID NO: 16308 - protein, 16 aa, Homo Sapiens
TPEATGMTPAEVSIVV

SEQ ID NO: 16309 - protein, 16 aa, Homo Sapiens
PEATGMTPAEVSIVVL

SEQ ID NO: 16310 - protein, 16 aa, Homo Sapiens
EATGMTPAEVSIVVLS

SEQ ID NO: 16311 - protein, 16 aa, Homo Sapiens
ATGMTPAEVSIVVLSG

SEQ ID NO: 16312 - protein, 16 aa, Homo Sapiens
TGMTPAEVSIVVLSGT

SEQ ID NO: 16313 - protein, 16 aa, Homo Sapiens
GMTPAEVSIVVLSGTT

SEQ ID NO: 16314 - protein, 16 aa, Homo Sapiens
MTPAEVSIVVLSGTTA

SEQ ID NO: 16315 - protein, 16 aa, Homo Sapiens
TPAEVSIVVLSGTTAA

SEQ ID NO: 16316 - protein, 16 aa, Homo Sapiens
PAEVSIVVLSGTTAAQ

SEQ ID NO: 16317 - protein, 16 aa, Homo Sapiens
AEVSIVVLSGTTAAQV

SEQ ID NO: 16318 - protein, 16 aa, Homo Sapiens
EVSIVVLSGTTAAQVT

SEQ ID NO: 16319 - protein, 16 aa, Homo Sapiens
VSIVVLSGTTAAQVTT

SEQ ID NO: 16320 - protein, 16 aa, Homo Sapiens
SIVVLSGTTAAQVTTT

SEQ ID NO: 16321 - protein, 16 aa, Homo Sapiens
IVVLSGTTAAQVTTTE

SEQ ID NO: 16322 - protein, 16 aa, Homo Sapiens
VVLSGTTAAQVTTTEW

SEQ ID NO: 16323 - protein, 16 aa, Homo Sapiens
VLSGTTAAQVTTTEWV

SEQ ID NO: 16324 - protein, 16 aa, Homo Sapiens
LSGTTAAQVTTTEWVE

SEQ ID NO: 16325 - protein, 16 aa, Homo Sapiens
SGTTAAQVTTTEWVET

SEQ ID NO: 16326 - protein, 16 aa, Homo Sapiens
GTTAAQVTTTEWVETT

SEQ ID NO: 16327 - protein, 16 aa, Homo Sapiens
TTAAQVTTTEWVETTA

SEQ ID NO: 16328 - protein, 16 aa, Homo Sapiens
TAAQVTTTEWVETTAR

SEQ ID NO: 16329 - protein, 16 aa, Homo Sapiens
AAQVTTTEWVETTARE

SEQ ID NO: 16330 - protein, 16 aa, Homo Sapiens
AQVTTTEWVETTAREL

SEQ ID NO: 16331 - protein, 16 aa, Homo Sapiens
QVTTTEWVETTARELP

SEQ ID NO: 16332 - protein, 16 aa, Homo Sapiens
VTTTEWVETTARELPI

SEQ ID NO: 16333 - protein, 16 aa, Homo Sapiens
TTTEWVETTARELPIP

SEQ ID NO: 16334 - protein, 16 aa, Homo Sapiens
TTEWVETTARELPIPE

SEQ ID NO: 16335 - protein, 16 aa, Homo Sapiens
TEWVETTARELPIPEP

SEQ ID NO: 16336 - protein, 16 aa, Homo Sapiens
EWVETTARELPIPEPE

SEQ ID NO: 16337 - protein, 16 aa, Homo Sapiens
WVETTARELPIPEPEG

SEQ ID NO: 16338 - protein, 16 aa, Homo Sapiens
VETTARELPIPEPEGP

SEQ ID NO: 16339 - protein, 16 aa, Homo Sapiens
ETTARELPIPEPEGPD

SEQ ID NO: 16340 - protein, 16 aa, Homo Sapiens
TTARELPIPEPEGPDA

SEQ ID NO: 16341 - protein, 16 aa, Homo Sapiens
TARELPIPEPEGPDAS

SEQ ID NO: 16342 - protein, 16 aa, Homo Sapiens
ARELPIPEPEGPDASS

SEQ ID NO: 16343 - protein, 16 aa, Homo Sapiens
RELPIPEPEGPDASSI

SEQ ID NO: 16344 - protein, 16 aa, Homo Sapiens
ELPIPEPEGPDASSIM

SEQ ID NO: 16345 - protein, 16 aa, Homo Sapiens
LPIPEPEGPDASSIMS

SEQ ID NO: 16346 - protein, 16 aa, Homo Sapiens
PIPEPEGPDASSIMST

SEQ ID NO: 16347 - protein, 16 aa, Homo Sapiens
IPEPEGPDASSIMSTE

SEQ ID NO: 16348 - protein, 16 aa, Homo Sapiens
PEPEGPDASSIMSTES

SEQ ID NO: 16349 - protein, 16 aa, Homo Sapiens
EPEGPDASSIMSTESI

SEQ ID NO: 16350 - protein, 16 aa, Homo Sapiens
PEGPDASSIMSTESIT

SEQ ID NO: 16351 - protein, 16 aa, Homo Sapiens
EGPDASSIMSTESITG

SEQ ID NO: 16352 - protein, 16 aa, Homo Sapiens
GPDASSIMSTESITGS

SEQ ID NO: 16353 - protein, 16 aa, Homo Sapiens
PDASSIMSTESITGSL

SEQ ID NO: 16354 - protein, 16 aa, Homo Sapiens
DASSIMSTESITGSLG

SEQ ID NO: 16355 - protein, 16 aa, Homo Sapiens
ASSIMSTESITGSLGP

SEQ ID NO: 16356 - protein, 16 aa, Homo Sapiens
SSIMSTESITGSLGPL

SEQ ID NO: 16357 - protein, 16 aa, Homo Sapiens
SIMSTESITGSLGPLL

SEQ ID NO: 16358 - protein, 16 aa, Homo Sapiens
IMSTESITGSLGPLLD

SEQ ID NO: 16359 - protein, 16 aa, Homo Sapiens
MSTESITGSLGPLLDG

SEQ ID NO: 16360 - protein, 16 aa, Homo Sapiens
STESITGSLGPLLDGT

SEQ ID NO: 16361 - protein, 16 aa, Homo Sapiens
TESITGSLGPLLDGTA

SEQ ID NO: 16362 - protein, 16 aa, Homo Sapiens
ESITGSLGPLLDGTAT

SEQ ID NO: 16363 - protein, 16 aa, Homo Sapiens
SITGSLGPLLDGTATL

SEQ ID NO: 16364 - protein, 16 aa, Homo Sapiens
ITGSLGPLLDGTATLR

SEQ ID NO: 16365 - protein, 16 aa, Homo Sapiens
TGSLGPLLDGTATLRL

SEQ ID NO: 16366 - protein, 16 aa, Homo Sapiens
GSLGPLLDGTATLRLV

SEQ ID NO: 16367 - protein, 16 aa, Homo Sapiens
SLGPLLDGTATLRLVK

SEQ ID NO: 16368 - protein, 16 aa, Homo Sapiens
LGPLLDGTATLRLVKR

SEQ ID NO: 16369 - protein, 16 aa, Homo Sapiens
GPLLDGTATLRLVKRQ

SEQ ID NO: 16370 - protein, 16 aa, Homo Sapiens
PLLDGTATLRLVKRQV

SEQ ID NO: 16371 - protein, 16 aa, Homo Sapiens
LLDGTATLRLVKRQVP

SEQ ID NO: 16372 - protein, 16 aa, Homo Sapiens
LDGTATLRLVKRQVPL

SEQ ID NO: 16373 - protein, 16 aa, Homo Sapiens
DGTATLRLVKRQVPLD

SEQ ID NO: 16374 - protein, 16 aa, Homo Sapiens
GTATLRLVKRQVPLDC

SEQ ID NO: 16375 - protein, 16 aa, Homo Sapiens
TATLRLVKRQVPLDCV

SEQ ID NO: 16376 - protein, 16 aa, Homo Sapiens
ATLRLVKRQVPLDCVL

SEQ ID NO: 16377 - protein, 16 aa, Homo Sapiens
TLRLVKRQVPLDCVLY

SEQ ID NO: 16378 - protein, 16 aa, Homo Sapiens
LRLVKRQVPLDCVLYR

SEQ ID NO: 16379 - protein, 16 aa, Homo Sapiens
RLVKRQVPLDCVLYRY

SEQ ID NO: 16380 - protein, 16 aa, Homo Sapiens
LVKRQVPLDCVLYRYG

SEQ ID NO: 16381 - protein, 16 aa, Homo Sapiens
VKRQVPLDCVLYRYGS

SEQ ID NO: 16382 - protein, 16 aa, Homo Sapiens
KRQVPLDCVLYRYGSF

SEQ ID NO: 16383 - protein, 16 aa, Homo Sapiens
RQVPLDCVLYRYGSFS

SEQ ID NO: 16384 - protein, 16 aa, Homo Sapiens
QVPLDCVLYRYGSFSV

SEQ ID NO: 16385 - protein, 16 aa, Homo Sapiens
VPLDCVLYRYGSFSVT

SEQ ID NO: 16386 - protein, 16 aa, Homo Sapiens
PLDCVLYRYGSFSVTL

SEQ ID NO: 16387 - protein, 16 aa, Homo Sapiens
LDCVLYRYGSFSVTLD

SEQ ID NO: 16388 - protein, 16 aa, Homo Sapiens
DCVLYRYGSFSVTLDI

SEQ ID NO: 16389 - protein, 16 aa, Homo Sapiens
CVLYRYGSFSVTLDIV

SEQ ID NO: 16390 - protein, 16 aa, Homo Sapiens
VLYRYGSFSVTLDIVQ

SEQ ID NO: 16391 - protein, 16 aa, Homo Sapiens
LYRYGSFSVTLDIVQG

SEQ ID NO: 16392 - protein, 16 aa, Homo Sapiens
YRYGSFSVTLDIVQGI

SEQ ID NO: 16393 - protein, 16 aa, Homo Sapiens
RYGSFSVTLDIVQGIE

SEQ ID NO: 16394 - protein, 16 aa, Homo Sapiens
YGSFSVTLDIVQGIES

SEQ ID NO: 16395 - protein, 16 aa, Homo Sapiens
GSFSVTLDIVQGIESA

SEQ ID NO: 16396 - protein, 16 aa, Homo Sapiens
SFSVTLDIVQGIESAE

SEQ ID NO: 16397 - protein, 16 aa, Homo Sapiens
FSVTLDIVQGIESAEI

SEQ ID NO: 16398 - protein, 16 aa, Homo Sapiens
SVTLDIVQGIESAEIL

SEQ ID NO: 16399 - protein, 16 aa, Homo Sapiens
VTLDIVQGIESAEILQ

SEQ ID NO: 16400 - protein, 16 aa, Homo Sapiens
TLDIVQGIESAEILQA

SEQ ID NO: 16401 - protein, 16 aa, Homo Sapiens
LDIVQGIESAEILQAV

SEQ ID NO: 16402 - protein, 16 aa, Homo Sapiens
DIVQGIESAEILQAVP

SEQ ID NO: 16403 - protein, 16 aa, Homo Sapiens
IVQGIESAEILQAVPS

SEQ ID NO: 16404 - protein, 16 aa, Homo Sapiens
VQGIESAEILQAVPSG

SEQ ID NO: 16405 - protein, 16 aa, Homo Sapiens
QGIESAEILQAVPSGE

SEQ ID NO: 16406 - protein, 16 aa, Homo Sapiens
GIESAEILQAVPSGEG

SEQ ID NO: 16407 - protein, 16 aa, Homo Sapiens
IESAEILQAVPSGEGD

SEQ ID NO: 16408 - protein, 16 aa, Homo Sapiens
ESAEILQAVPSGEGDA

SEQ ID NO: 16409 - protein, 16 aa, Homo Sapiens
SAEILQAVPSGEGDAF

SEQ ID NO: 16410 - protein, 16 aa, Homo Sapiens
AEILQAVPSGEGDAFE

SEQ ID NO: 16411 - protein, 16 aa, Homo Sapiens
EILQAVPSGEGDAFEL

SEQ ID NO: 16412 - protein, 16 aa, Homo Sapiens
ILQAVPSGEGDAFELT

SEQ ID NO: 16413 - protein, 16 aa, Homo Sapiens
LQAVPSGEGDAFELTV

SEQ ID NO: 16414 - protein, 16 aa, Homo Sapiens
QAVPSGEGDAFELTVS

SEQ ID NO: 16415 - protein, 16 aa, Homo Sapiens
AVPSGEGDAFELTVSC

SEQ ID NO: 16416 - protein, 16 aa, Homo Sapiens
VPSGEGDAFELTVSCQ

SEQ ID NO: 16417 - protein, 16 aa, Homo Sapiens
PSGEGDAFELTVSCQG

SEQ ID NO: 16418 - protein, 16 aa, Homo Sapiens
SGEGDAFELTVSCQGG

SEQ ID NO: 16419 - protein, 16 aa, Homo Sapiens
GEGDAFELTVSCQGGL

SEQ ID NO: 16420 - protein, 16 aa, Homo Sapiens
EGDAFELTVSCQGGLP

SEQ ID NO: 16421 - protein, 16 aa, Homo Sapiens
GDAFELTVSCQGGLPK

SEQ ID NO: 16422 - protein, 16 aa, Homo Sapiens
DAFELTVSCQGGLPKE

SEQ ID NO: 16423 - protein, 16 aa, Homo Sapiens
AFELTVSCQGGLPKEA

SEQ ID NO: 16424 - protein, 16 aa, Homo Sapiens
FELTVSCQGGLPKEAC

SEQ ID NO: 16425 - protein, 16 aa, Homo Sapiens
ELTVSCQGGLPKEACM

SEQ ID NO: 16426 - protein, 16 aa, Homo Sapiens
LTVSCQGGLPKEACME

SEQ ID NO: 16427 - protein, 16 aa, Homo Sapiens
TVSCQGGLPKEACMEI

SEQ ID NO: 16428 - protein, 16 aa, Homo Sapiens
VSCQGGLPKEACMEIS

SEQ ID NO: 16429 - protein, 16 aa, Homo Sapiens
SCQGGLPKEACMEISS

SEQ ID NO: 16430 - protein, 16 aa, Homo Sapiens
CQGGLPKEACMEISSP

SEQ ID NO: 16431 - protein, 16 aa, Homo Sapiens
QGGLPKEACMEISSPG

SEQ ID NO: 16432 - protein, 16 aa, Homo Sapiens
GGLPKEACMEISSPGC

SEQ ID NO: 16433 - protein, 16 aa, Homo Sapiens
GLPKEACMEISSPGCQ

SEQ ID NO: 16434 - protein, 16 aa, Homo Sapiens
LPKEACMEISSPGCQP

SEQ ID NO: 16435 - protein, 16 aa, Homo Sapiens
PKEACMEISSPGCQPP

SEQ ID NO: 16436 - protein, 16 aa, Homo Sapiens
KEACMEISSPGCQPPA

SEQ ID NO: 16437 - protein, 16 aa, Homo Sapiens
EACMEISSPGCQPPAQ

SEQ ID NO: 16438 - protein, 16 aa, Homo Sapiens
ACMEISSPGCQPPAQR

SEQ ID NO: 16439 - protein, 16 aa, Homo Sapiens
CMEISSPGCQPPAQRL

SEQ ID NO: 16440 - protein, 16 aa, Homo Sapiens
MEISSPGCQPPAQRLC

SEQ ID NO: 16441 - protein, 16 aa, Homo Sapiens
EISSPGCQPPAQRLCQ

SEQ ID NO: 16442 - protein, 16 aa, Homo Sapiens
ISSPGCQPPAQRLCQP

SEQ ID NO: 16443 - protein, 16 aa, Homo Sapiens
SSPGCQPPAQRLCQPV

SEQ ID NO: 16444 - protein, 16 aa, Homo Sapiens
SPGCQPPAQRLCQPVL

SEQ ID NO: 16445 - protein, 16 aa, Homo Sapiens
PGCQPPAQRLCQPVLP

SEQ ID NO: 16446 - protein, 16 aa, Homo Sapiens
GCQPPAQRLCQPVLPS

SEQ ID NO: 16447 - protein, 16 aa, Homo Sapiens
CQPPAQRLCQPVLPSP

SEQ ID NO: 16448 - protein, 16 aa, Homo Sapiens
QPPAQRLCQPVLPSPA

SEQ ID NO: 16449 - protein, 16 aa, Homo Sapiens
PPAQRLCQPVLPSPAC

SEQ ID NO: 16450 - protein, 16 aa, Homo Sapiens
PAQRLCQPVLPSPACQ

SEQ ID NO: 16451 - protein, 16 aa, Homo Sapiens
AQRLCQPVLPSPACQL

SEQ ID NO: 16452 - protein, 16 aa, Homo Sapiens
QRLCQPVLPSPACQLV

SEQ ID NO: 16453 - protein, 16 aa, Homo Sapiens
RLCQPVLPSPACQLVL

SEQ ID NO: 16454 - protein, 16 aa, Homo Sapiens
LCQPVLPSPACQLVLH

SEQ ID NO: 16455 - protein, 16 aa, Homo Sapiens
CQPVLPSPACQLVLHQ

SEQ ID NO: 16456 - protein, 16 aa, Homo Sapiens
QPVLPSPACQLVLHQI

SEQ ID NO: 16457 - protein, 16 aa, Homo Sapiens
PVLPSPACQLVLHQIL

SEQ ID NO: 16458 - protein, 16 aa, Homo Sapiens
VLPSPACQLVLHQILK

SEQ ID NO: 16459 - protein, 16 aa, Homo Sapiens
LPSPACQLVLHQILKG

SEQ ID NO: 16460 - protein, 16 aa, Homo Sapiens
PSPACQLVLHQILKGG

SEQ ID NO: 16461 - protein, 16 aa, Homo Sapiens
SPACQLVLHQILKGGS

SEQ ID NO: 16462 - protein, 16 aa, Homo Sapiens
PACQLVLHQILKGGSG

SEQ ID NO: 16463 - protein, 16 aa, Homo Sapiens
ACQLVLHQILKGGSGT

SEQ ID NO: 16464 - protein, 16 aa, Homo Sapiens
CQLVLHQILKGGSGTY

SEQ ID NO: 16465 - protein, 16 aa, Homo Sapiens
QLVLHQILKGGSGTYC

SEQ ID NO: 16466 - protein, 16 aa, Homo Sapiens
LVLHQILKGGSGTYCL

SEQ ID NO: 16467 - protein, 16 aa, Homo Sapiens
VLHQILKGGSGTYCLN

SEQ ID NO: 16468 - protein, 16 aa, Homo Sapiens
LHQILKGGSGTYCLNV

SEQ ID NO: 16469 - protein, 16 aa, Homo Sapiens
HQILKGGSGTYCLNVS

SEQ ID NO: 16470 - protein, 16 aa, Homo Sapiens
QILKGGSGTYCLNVSL

SEQ ID NO: 16471 - protein, 16 aa, Homo Sapiens
ILKGGSGTYCLNVSLA

SEQ ID NO: 16472 - protein, 16 aa, Homo Sapiens
LKGGSGTYCLNVSLAD

SEQ ID NO: 16473 - protein, 16 aa, Homo Sapiens
KGGSGTYCLNVSLADT

SEQ ID NO: 16474 - protein, 16 aa, Homo Sapiens
GGSGTYCLNVSLADTN

SEQ ID NO: 16475 - protein, 16 aa, Homo Sapiens
GSGTYCLNVSLADTNS

SEQ ID NO: 16476 - protein, 16 aa, Homo Sapiens
SGTYCLNVSLADTNSL

SEQ ID NO: 16477 - protein, 16 aa, Homo Sapiens
GTYCLNVSLADTNSLA

SEQ ID NO: 16478 - protein, 16 aa, Homo Sapiens
TYCLNVSLADTNSLAV

SEQ ID NO: 16479 - protein, 16 aa, Homo Sapiens
YCLNVSLADTNSLAVV

SEQ ID NO: 16480 - protein, 16 aa, Homo Sapiens
CLNVSLADTNSLAVVS

SEQ ID NO: 16481 - protein, 16 aa, Homo Sapiens
LNVSLADTNSLAVVST

SEQ ID NO: 16482 - protein, 16 aa, Homo Sapiens
NVSLADTNSLAVVSTQ

SEQ ID NO: 16483 - protein, 16 aa, Homo Sapiens
VSLADTNSLAVVSTQL

SEQ ID NO: 16484 - protein, 16 aa, Homo Sapiens
SLADTNSLAVVSTQLI

SEQ ID NO: 16485 - protein, 16 aa, Homo Sapiens
LADTNSLAVVSTQLIM

SEQ ID NO: 16486 - protein, 16 aa, Homo Sapiens
ADTNSLAVVSTQLIMP

SEQ ID NO: 16487 - protein, 16 aa, Homo Sapiens
DTNSLAVVSTQLIMPG

SEQ ID NO: 16488 - protein, 16 aa, Homo Sapiens
TNSLAVVSTQLIMPGQ

SEQ ID NO: 16489 - protein, 16 aa, Homo Sapiens
NSLAVVSTQLIMPGQE

SEQ ID NO: 16490 - protein, 16 aa, Homo Sapiens
SLAVVSTQLIMPGQEA

SEQ ID NO: 16491 - protein, 16 aa, Homo Sapiens
LAVVSTQLIMPGQEAG

SEQ ID NO: 16492 - protein, 16 aa, Homo Sapiens
AVVSTQLIMPGQEAGL

SEQ ID NO: 16493 - protein, 16 aa, Homo Sapiens
VVSTQLIMPGQEAGLG

SEQ ID NO: 16494 - protein, 16 aa, Homo Sapiens
VSTQLIMPGQEAGLGQ

SEQ ID NO: 16495 - protein, 16 aa, Homo Sapiens
STQLIMPGQEAGLGQV

SEQ ID NO: 16496 - protein, 16 aa, Homo Sapiens
TQLIMPGQEAGLGQVP

SEQ ID NO: 16497 - protein, 16 aa, Homo Sapiens
QLIMPGQEAGLGQVPL

SEQ ID NO: 16498 - protein, 16 aa, Homo Sapiens
LIMPGQEAGLGQVPLI

SEQ ID NO: 16499 - protein, 16 aa, Homo Sapiens
IMPGQEAGLGQVPLIV

SEQ ID NO: 16500 - protein, 16 aa, Homo Sapiens
MPGQEAGLGQVPLIVG

SEQ ID NO: 16501 - protein, 16 aa, Homo Sapiens
PGQEAGLGQVPLIVGI

SEQ ID NO: 16502 - protein, 16 aa, Homo Sapiens
GQEAGLGQVPLIVGIL

SEQ ID NO: 16503 - protein, 16 aa, Homo Sapiens
QEAGLGQVPLIVGILL

SEQ ID NO: 16504 - protein, 16 aa, Homo Sapiens
EAGLGQVPLIVGILLV

SEQ ID NO: 16505 - protein, 16 aa, Homo Sapiens
AGLGQVPLIVGILLVL

SEQ ID NO: 16506 - protein, 16 aa, Homo Sapiens
GLGQVPLIVGILLVLM

SEQ ID NO: 16507 - protein, 16 aa, Homo Sapiens
LGQVPLIVGILLVLMA

SEQ ID NO: 16508 - protein, 16 aa, Homo Sapiens
GQVPLIVGILLVLMAV

SEQ ID NO: 16509 - protein, 16 aa, Homo Sapiens
QVPLIVGILLVLMAVV

SEQ ID NO: 16510 - protein, 16 aa, Homo Sapiens
VPLIVGILLVLMAVVL

SEQ ID NO: 16511 - protein, 16 aa, Homo Sapiens
PLIVGILLVLMAVVLA

SEQ ID NO: 16512 - protein, 16 aa, Homo Sapiens
LIVGILLVLMAVVLAS

SEQ ID NO: 16513 - protein, 16 aa, Homo Sapiens
IVGILLVLMAVVLASL

SEQ ID NO: 16514 - protein, 16 aa, Homo Sapiens
VGILLVLMAVVLASLI

SEQ ID NO: 16515 - protein, 16 aa, Homo Sapiens
GILLVLMAVVLASLIY

SEQ ID NO: 16516 - protein, 16 aa, Homo Sapiens
ILLVLMAVVLASLIYR

SEQ ID NO: 16517 - protein, 16 aa, Homo Sapiens
LLVLMAVVLASLIYRR

SEQ ID NO: 16518 - protein, 16 aa, Homo Sapiens
LVLMAVVLASLIYRRR

SEQ ID NO: 16519 - protein, 16 aa, Homo Sapiens
VLMAVVLASLIYRRRL

SEQ ID NO: 16520 - protein, 16 aa, Homo Sapiens
LMAVVLASLIYRRRLM

SEQ ID NO: 16521 - protein, 16 aa, Homo Sapiens
MAVVLASLIYRRRLMK

SEQ ID NO: 16522 - protein, 16 aa, Homo Sapiens
AVVLASLIYRRRLMKQ

SEQ ID NO: 16523 - protein, 16 aa, Homo Sapiens
VVLASLIYRRRLMKQD

SEQ ID NO: 16524 - protein, 16 aa, Homo Sapiens
VLASLIYRRRLMKQDF

SEQ ID NO: 16525 - protein, 16 aa, Homo Sapiens
LASLIYRRRLMKQDFS

SEQ ID NO: 16526 - protein, 16 aa, Homo Sapiens
ASLIYRRRLMKQDFSV

SEQ ID NO: 16527 - protein, 16 aa, Homo Sapiens
SLIYRRRLMKQDFSVP

SEQ ID NO: 16528 - protein, 16 aa, Homo Sapiens
LIYRRRLMKQDFSVPQ

SEQ ID NO: 16529 - protein, 16 aa, Homo Sapiens
IYRRRLMKQDFSVPQL

SEQ ID NO: 16530 - protein, 16 aa, Homo Sapiens
YRRRLMKQDFSVPQLP

SEQ ID NO: 16531 - protein, 16 aa, Homo Sapiens
RRRLMKQDFSVPQLPH

SEQ ID NO: 16532 - protein, 16 aa, Homo Sapiens
RRLMKQDFSVPQLPHS

SEQ ID NO: 16533 - protein, 16 aa, Homo Sapiens
RLMKQDFSVPQLPHSS

SEQ ID NO: 16534 - protein, 16 aa, Homo Sapiens
LMKQDFSVPQLPHSSS

SEQ ID NO: 16535 - protein, 16 aa, Homo Sapiens
MKQDFSVPQLPHSSSH

SEQ ID NO: 16536 - protein, 16 aa, Homo Sapiens
KQDFSVPQLPHSSSHW

SEQ ID NO: 16537 - protein, 16 aa, Homo Sapiens
QDFSVPQLPHSSSHWL

SEQ ID NO: 16538 - protein, 16 aa, Homo Sapiens
DFSVPQLPHSSSHWLR

SEQ ID NO: 16539 - protein, 16 aa, Homo Sapiens
FSVPQLPHSSSHWLRL

SEQ ID NO: 16540 - protein, 16 aa, Homo Sapiens
SVPQLPHSSSHWLRLP

SEQ ID NO: 16541 - protein, 16 aa, Homo Sapiens
VPQLPHSSSHWLRLPR

SEQ ID NO: 16542 - protein, 16 aa, Homo Sapiens
PQLPHSSSHWLRLPRI

SEQ ID NO: 16543 - protein, 16 aa, Homo Sapiens
QLPHSSSHWLRLPRIF

SEQ ID NO: 16544 - protein, 16 aa, Homo Sapiens
LPHSSSHWLRLPRIFC

SEQ ID NO: 16545 - protein, 16 aa, Homo Sapiens
PHSSSHWLRLPRIFCS

SEQ ID NO: 16546 - protein, 16 aa, Homo Sapiens
HSSSHWLRLPRIFCSC

SEQ ID NO: 16547 - protein, 16 aa, Homo Sapiens
SSSHWLRLPRIFCSCP

SEQ ID NO: 16548 - protein, 16 aa, Homo Sapiens
SSHWLRLPRIFCSCPI

SEQ ID NO: 16549 - protein, 16 aa, Homo Sapiens
SHWLRLPRIFCSCPIG

SEQ ID NO: 16550 - protein, 16 aa, Homo Sapiens
HWLRLPRIFCSCPIGE

SEQ ID NO: 16551 - protein, 16 aa, Homo Sapiens
WLRLPRIFCSCPIGEN

SEQ ID NO: 16552 - protein, 16 aa, Homo Sapiens
LRLPRIFCSCPIGENS

SEQ ID NO: 16553 - protein, 16 aa, Homo Sapiens
RLPRIFCSCPIGENSP

SEQ ID NO: 16554 - protein, 16 aa, Homo Sapiens
LPRIFCSCPIGENSPL

SEQ ID NO: 16555 - protein, 16 aa, Homo Sapiens
PRIFCSCPIGENSPLL

SEQ ID NO: 16556 - protein, 16 aa, Homo Sapiens
RIFCSCPIGENSPLLS

SEQ ID NO: 16557 - protein, 16 aa, Homo Sapiens
IFCSCPIGENSPLLSG

SEQ ID NO: 16558 - protein, 16 aa, Homo Sapiens
FCSCPIGENSPLLSGQ

SEQ ID NO: 16559 - protein, 16 aa, Homo Sapiens
CSCPIGENSPLLSGQQ

SEQ ID NO: 16560 - protein, 16 aa, Homo Sapiens
SCPIGENSPLLSGQQV

SEQ ID NO: 16561 - protein, 118 aa, Homo Sapiens
MPREDAHFIYGYPKKGHGHSYTTAEEAAGIGILTVILGVLLLIGCWYCRRRNGYRALMDKSLHVGTQCALTRRCPQEGFDHRDSKVSLQEKNCEPVVPNAPPAYEKLSAEQSPPPYSP

SEQ ID NO: 16562 - protein, 8 aa, Homo Sapiens
MPREDAHF

SEQ ID NO: 16563 - protein, 8 aa, Homo Sapiens
REDAHFIY

SEQ ID NO: 16564 - protein, 8 aa, Homo Sapiens
DAHFIYGY

SEQ ID NO: 16565 - protein, 8 aa, Homo Sapiens
HFIYGYPK

SEQ ID NO: 16566 - protein, 8 aa, Homo Sapiens
FIYGYPKK

SEQ ID NO: 16567 - protein, 8 aa, Homo Sapiens
YTTAEEAA

SEQ ID NO: 16568 - protein, 8 aa, Homo Sapiens
EEAAGIGI

SEQ ID NO: 16569 - protein, 8 aa, Homo Sapiens
EAAGIGIL

SEQ ID NO: 16570 - protein, 8 aa, Homo Sapiens
AGIGILTV

SEQ ID NO: 16571 - protein, 8 aa, Homo Sapiens
ILTVILGV

SEQ ID NO: 16572 - protein, 8 aa, Homo Sapiens
TVILGVLL

SEQ ID NO: 16573 - protein, 8 aa, Homo Sapiens
VILGVLLL

SEQ ID NO: 16574 - protein, 8 aa, Homo Sapiens
ILGVLLLI

SEQ ID NO: 16575 - protein, 8 aa, Homo Sapiens
LLLIGCWY

SEQ ID NO: 16576 - protein, 8 aa, Homo Sapiens
LLIGCWYC

SEQ ID NO: 16577 - protein, 8 aa, Homo Sapiens
LIGCWYCR

SEQ ID NO: 16578 - protein, 8 aa, Homo Sapiens
IGCWYCRR

SEQ ID NO: 16579 - protein, 8 aa, Homo Sapiens
GCWYCRRR

SEQ ID NO: 16580 - protein, 8 aa, Homo Sapiens
RRNGYRAL

SEQ ID NO: 16581 - protein, 8 aa, Homo Sapiens
GYRALMDK

SEQ ID NO: 16582 - protein, 8 aa, Homo Sapiens
LMDKSLHV

SEQ ID NO: 16583 - protein, 8 aa, Homo Sapiens
SLHVGTQC

SEQ ID NO: 16584 - protein, 8 aa, Homo Sapiens
HVGTQCAL

SEQ ID NO: 16585 - protein, 8 aa, Homo Sapiens
GTQCALTR

SEQ ID NO: 16586 - protein, 8 aa, Homo Sapiens
TQCALTRR

SEQ ID NO: 16587 - protein, 8 aa, Homo Sapiens
ALTRRCPQ

SEQ ID NO: 16588 - protein, 8 aa, Homo Sapiens
RRCPQEGF

SEQ ID NO: 16589 - protein, 8 aa, Homo Sapiens
HRDSKVSL

SEQ ID NO: 16590 - protein, 8 aa, Homo Sapiens
VPNAPPAY

SEQ ID NO: 16591 - protein, 8 aa, Homo Sapiens
NAPPAYEK

SEQ ID NO: 16592 - protein, 8 aa, Homo Sapiens
AEQSPPPY

SEQ ID NO: 16593 - protein, 9 aa, Homo Sapiens
MPREDAHFI

SEQ ID NO: 16594 - protein, 9 aa, Homo Sapiens
EDAHFIYGY

SEQ ID NO: 16595 - protein, 9 aa, Homo Sapiens
AHFIYGYPK

SEQ ID NO: 16596 - protein, 9 aa, Homo Sapiens
HFIYGYPKK

SEQ ID NO: 16597 - protein, 9 aa, Homo Sapiens
TTAEEAAGI

SEQ ID NO: 16598 - protein, 9 aa, Homo Sapiens
AEEAAGIGI

SEQ ID NO: 16599 - protein, 9 aa, Homo Sapiens
EEAAGIGIL

SEQ ID NO: 16600 - protein, 9 aa, Homo Sapiens
EAAGIGILT

SEQ ID NO: 16601 - protein, 9 aa, Homo Sapiens
AAGIGILTV

SEQ ID NO: 16602 - protein, 9 aa, Homo Sapiens
GIGILTVIL

SEQ ID NO: 16603 - protein, 9 aa, Homo Sapiens
GILTVILGV

SEQ ID NO: 16604 - protein, 9 aa, Homo Sapiens
ILTVILGVL

SEQ ID NO: 16605 - protein, 9 aa, Homo Sapiens
TVILGVLLL

SEQ ID NO: 16606 - protein, 9 aa, Homo Sapiens
VILGVLLLI

SEQ ID NO: 16607 - protein, 9 aa, Homo Sapiens
VLLLIGCWY

SEQ ID NO: 16608 - protein, 9 aa, Homo Sapiens
LLLIGCWYC

SEQ ID NO: 16609 - protein, 9 aa, Homo Sapiens
LLIGCWYCR

SEQ ID NO: 16610 - protein, 9 aa, Homo Sapiens
LIGCWYCRR

SEQ ID NO: 16611 - protein, 9 aa, Homo Sapiens
YCRRRNGYR

SEQ ID NO: 16612 - protein, 9 aa, Homo Sapiens
RRRNGYRAL

SEQ ID NO: 16613 - protein, 9 aa, Homo Sapiens
RRNGYRALM

SEQ ID NO: 16614 - protein, 9 aa, Homo Sapiens
YRALMDKSL

SEQ ID NO: 16615 - protein, 9 aa, Homo Sapiens
ALMDKSLHV

SEQ ID NO: 16616 - protein, 9 aa, Homo Sapiens
SLHVGTQCA

SEQ ID NO: 16617 - protein, 9 aa, Homo Sapiens
LHVGTQCAL

SEQ ID NO: 16618 - protein, 9 aa, Homo Sapiens
GTQCALTRR

SEQ ID NO: 16619 - protein, 9 aa, Homo Sapiens
EGFDHRDSK

SEQ ID NO: 16620 - protein, 9 aa, Homo Sapiens
DSKVSLQEK

SEQ ID NO: 16621 - protein, 9 aa, Homo Sapiens
LQEKNCEPV

SEQ ID NO: 16622 - protein, 9 aa, Homo Sapiens
QEKNCEPVV

SEQ ID NO: 16623 - protein, 9 aa, Homo Sapiens
VVPNAPPAY

SEQ ID NO: 16624 - protein, 9 aa, Homo Sapiens
NAPPAYEKL

SEQ ID NO: 16625 - protein, 9 aa, Homo Sapiens
SAEQSPPPY

SEQ ID NO: 16626 - protein, 9 aa, Homo Sapiens
AEQSPPPYS

SEQ ID NO: 16627 - protein, 10 aa, Homo Sapiens
MPREDAHFIY

SEQ ID NO: 16628 - protein, 10 aa, Homo Sapiens
REDAHFIYGY

SEQ ID NO: 16629 - protein, 10 aa, Homo Sapiens
DAHFIYGYPK

SEQ ID NO: 16630 - protein, 10 aa, Homo Sapiens
AHFIYGYPKK

SEQ ID NO: 16631 - protein, 10 aa, Homo Sapiens
YPKKGHGHSY

SEQ ID NO: 16632 - protein, 10 aa, Homo Sapiens
YTTAEEAAGI

SEQ ID NO: 16633 - protein, 10 aa, Homo Sapiens
AEEAAGIGIL

SEQ ID NO: 16634 - protein, 10 aa, Homo Sapiens
EAAGIGILTV

SEQ ID NO: 16635 - protein, 10 aa, Homo Sapiens
GILTVILGVL

SEQ ID NO: 16636 - protein, 10 aa, Homo Sapiens
ILTVILGVLL

SEQ ID NO: 16637 - protein, 10 aa, Homo Sapiens
LTVILGVLLL

SEQ ID NO: 16638 - protein, 10 aa, Homo Sapiens
TVILGVLLLI

SEQ ID NO: 16639 - protein, 10 aa, Homo Sapiens
ILGVLLLIGC

SEQ ID NO: 16640 - protein, 10 aa, Homo Sapiens
GVLLLIGCWY

SEQ ID NO: 16641 - protein, 10 aa, Homo Sapiens
VLLLIGCWYC

SEQ ID NO: 16642 - protein, 10 aa, Homo Sapiens
LLLIGCWYCR

SEQ ID NO: 16643 - protein, 10 aa, Homo Sapiens
LLIGCWYCRR

SEQ ID NO: 16644 - protein, 10 aa, Homo Sapiens
LIGCWYCRRR

SEQ ID NO: 16645 - protein, 10 aa, Homo Sapiens
CWYCRRRNGY

SEQ ID NO: 16646 - protein, 10 aa, Homo Sapiens
WYCRRRNGYR

SEQ ID NO: 16647 - protein, 10 aa, Homo Sapiens
RRRNGYRALM

SEQ ID NO: 16648 - protein, 10 aa, Homo Sapiens
RRNGYRALMD

SEQ ID NO: 16649 - protein, 10 aa, Homo Sapiens
RNGYRALMDK

SEQ ID NO: 16650 - protein, 10 aa, Homo Sapiens
GYRALMDKSL

SEQ ID NO: 16651 - protein, 10 aa, Homo Sapiens
RALMDKSLHV

SEQ ID NO: 16652 - protein, 10 aa, Homo Sapiens
ALMDKSLHVG

SEQ ID NO: 16653 - protein, 10 aa, Homo Sapiens
LMDKSLHVGT

SEQ ID NO: 16654 - protein, 10 aa, Homo Sapiens
SLHVGTQCAL

SEQ ID NO: 16655 - protein, 10 aa, Homo Sapiens
HVGTQCALTR

SEQ ID NO: 16656 - protein, 10 aa, Homo Sapiens
EGFDHRDSKV

SEQ ID NO: 16657 - protein, 10 aa, Homo Sapiens
SLQEKNCEPV

SEQ ID NO: 16658 - protein, 10 aa, Homo Sapiens
LQEKNCEPVV

SEQ ID NO: 16659 - protein, 10 aa, Homo Sapiens
EPVVPNAPPA

SEQ ID NO: 16660 - protein, 10 aa, Homo Sapiens
PVVPNAPPAY

SEQ ID NO: 16661 - protein, 10 aa, Homo Sapiens
VPNAPPAYEK

SEQ ID NO: 16662 - protein, 10 aa, Homo Sapiens
LSAEQSPPPY

SEQ ID NO: 16663 - protein, 11 aa, Homo Sapiens
EDAHFIYGYPK

SEQ ID NO: 16664 - protein, 11 aa, Homo Sapiens
DAHFIYGYPKK

SEQ ID NO: 16665 - protein, 11 aa, Homo Sapiens
GYPKKGHGHSY

SEQ ID NO: 16666 - protein, 11 aa, Homo Sapiens
YPKKGHGHSYT

SEQ ID NO: 16667 - protein, 11 aa, Homo Sapiens
SYTTAEEAAGI

SEQ ID NO: 16668 - protein, 11 aa, Homo Sapiens
TTAEEAAGIGI

SEQ ID NO: 16669 - protein, 11 aa, Homo Sapiens
TAEEAAGIGIL

SEQ ID NO: 16670 - protein, 11 aa, Homo Sapiens
AEEAAGIGILT

SEQ ID NO: 16671 - protein, 11 aa, Homo Sapiens
EEAAGIGILTV

SEQ ID NO: 16672 - protein, 11 aa, Homo Sapiens
EAAGIGILTVI

SEQ ID NO: 16673 - protein, 11 aa, Homo Sapiens
GIGILTVILGV

SEQ ID NO: 16674 - protein, 11 aa, Homo Sapiens
GILTVILGVLL

SEQ ID NO: 16675 - protein, 11 aa, Homo Sapiens
ILTVILGVLLL

SEQ ID NO: 16676 - protein, 11 aa, Homo Sapiens
LTVILGVLLLI

SEQ ID NO: 16677 - protein, 11 aa, Homo Sapiens
VILGVLLLIGC

SEQ ID NO: 16678 - protein, 11 aa, Homo Sapiens
VLLLIGCWYCR

SEQ ID NO: 16679 - protein, 11 aa, Homo Sapiens
LLLIGCWYCRR

SEQ ID NO: 16680 - protein, 11 aa, Homo Sapiens
LLIGCWYCRRR

SEQ ID NO: 16681 - protein, 11 aa, Homo Sapiens
CWYCRRRNGYR

SEQ ID NO: 16682 - protein, 11 aa, Homo Sapiens
YCRRRNGYRAL

SEQ ID NO: 16683 - protein, 11 aa, Homo Sapiens
RRNGYRALMDK

SEQ ID NO: 16684 - protein, 11 aa, Homo Sapiens
ALMDKSLHVGT

SEQ ID NO: 16685 - protein, 11 aa, Homo Sapiens
LMDKSLHVGTQ

SEQ ID NO: 16686 - protein, 11 aa, Homo Sapiens
KSLHVGTQCAL

SEQ ID NO: 16687 - protein, 11 aa, Homo Sapiens
SLHVGTQCALT

SEQ ID NO: 16688 - protein, 11 aa, Homo Sapiens
HVGTQCALTRR

SEQ ID NO: 16689 - protein, 11 aa, Homo Sapiens
SLQEKNCEPVV

SEQ ID NO: 16690 - protein, 11 aa, Homo Sapiens
EPVVPNAPPAY

SEQ ID NO: 16691 - protein, 11 aa, Homo Sapiens
VVPNAPPAYEK

SEQ ID NO: 16692 - protein, 11 aa, Homo Sapiens
VPNAPPAYEKL

SEQ ID NO: 16693 - protein, 11 aa, Homo Sapiens
KLSAEQSPPPY

SEQ ID NO: 16694 - protein, 13 aa, Homo Sapiens
MPREDAHFIYGYP

SEQ ID NO: 16695 - protein, 13 aa, Homo Sapiens
PREDAHFIYGYPK

SEQ ID NO: 16696 - protein, 13 aa, Homo Sapiens
REDAHFIYGYPKK

SEQ ID NO: 16697 - protein, 13 aa, Homo Sapiens
EDAHFIYGYPKKG

SEQ ID NO: 16698 - protein, 13 aa, Homo Sapiens
DAHFIYGYPKKGH

SEQ ID NO: 16699 - protein, 13 aa, Homo Sapiens
AHFIYGYPKKGHG

SEQ ID NO: 16700 - protein, 13 aa, Homo Sapiens
HFIYGYPKKGHGH

SEQ ID NO: 16701 - protein, 13 aa, Homo Sapiens
FIYGYPKKGHGHS

SEQ ID NO: 16702 - protein, 13 aa, Homo Sapiens
IYGYPKKGHGHSY

SEQ ID NO: 16703 - protein, 13 aa, Homo Sapiens
YGYPKKGHGHSYT

SEQ ID NO: 16704 - protein, 13 aa, Homo Sapiens
GYPKKGHGHSYTT

SEQ ID NO: 16705 - protein, 13 aa, Homo Sapiens
YPKKGHGHSYTTA

SEQ ID NO: 16706 - protein, 13 aa, Homo Sapiens
PKKGHGHSYTTAE

SEQ ID NO: 16707 - protein, 13 aa, Homo Sapiens
KKGHGHSYTTAEE

SEQ ID NO: 16708 - protein, 13 aa, Homo Sapiens
KGHGHSYTTAEEA

SEQ ID NO: 16709 - protein, 13 aa, Homo Sapiens
GHGHSYTTAEEAA

SEQ ID NO: 16710 - protein, 13 aa, Homo Sapiens
HGHSYTTAEEAAG

SEQ ID NO: 16711 - protein, 13 aa, Homo Sapiens
GHSYTTAEEAAGI

SEQ ID NO: 16712 - protein, 13 aa, Homo Sapiens
HSYTTAEEAAGIG

SEQ ID NO: 16713 - protein, 13 aa, Homo Sapiens
SYTTAEEAAGIGI

SEQ ID NO: 16714 - protein, 13 aa, Homo Sapiens
YTTAEEAAGIGIL

SEQ ID NO: 16715 - protein, 13 aa, Homo Sapiens
TTAEEAAGIGILT

SEQ ID NO: 16716 - protein, 13 aa, Homo Sapiens
TAEEAAGIGILTV

SEQ ID NO: 16717 - protein, 13 aa, Homo Sapiens
AEEAAGIGILTVI

SEQ ID NO: 16718 - protein, 13 aa, Homo Sapiens
EEAAGIGILTVIL

SEQ ID NO: 16719 - protein, 13 aa, Homo Sapiens
EAAGIGILTVILG

SEQ ID NO: 16720 - protein, 13 aa, Homo Sapiens
AAGIGILTVILGV

SEQ ID NO: 16721 - protein, 13 aa, Homo Sapiens
AGIGILTVILGVL

SEQ ID NO: 16722 - protein, 13 aa, Homo Sapiens
GIGILTVILGVLL

SEQ ID NO: 16723 - protein, 13 aa, Homo Sapiens
IGILTVILGVLLL

SEQ ID NO: 16724 - protein, 13 aa, Homo Sapiens
GILTVILGVLLLI

SEQ ID NO: 16725 - protein, 13 aa, Homo Sapiens
ILTVILGVLLLIG

SEQ ID NO: 16726 - protein, 13 aa, Homo Sapiens
LTVILGVLLLIGC

SEQ ID NO: 16727 - protein, 13 aa, Homo Sapiens
TVILGVLLLIGCW

SEQ ID NO: 16728 - protein, 13 aa, Homo Sapiens
VILGVLLLIGCWY

SEQ ID NO: 16729 - protein, 13 aa, Homo Sapiens
ILGVLLLIGCWYC

SEQ ID NO: 16730 - protein, 13 aa, Homo Sapiens
LGVLLLIGCWYCR

SEQ ID NO: 16731 - protein, 13 aa, Homo Sapiens
GVLLLIGCWYCRR

SEQ ID NO: 16732 - protein, 13 aa, Homo Sapiens
VLLLIGCWYCRRR

SEQ ID NO: 16733 - protein, 13 aa, Homo Sapiens
LLLIGCWYCRRRN

SEQ ID NO: 16734 - protein, 13 aa, Homo Sapiens
LLIGCWYCRRRNG

SEQ ID NO: 16735 - protein, 13 aa, Homo Sapiens
LIGCWYCRRRNGY

SEQ ID NO: 16736 - protein, 13 aa, Homo Sapiens
IGCWYCRRRNGYR

SEQ ID NO: 16737 - protein, 13 aa, Homo Sapiens
GCWYCRRRNGYRA

SEQ ID NO: 16738 - protein, 13 aa, Homo Sapiens
CWYCRRRNGYRAL

SEQ ID NO: 16739 - protein, 13 aa, Homo Sapiens
WYCRRRNGYRALM

SEQ ID NO: 16740 - protein, 13 aa, Homo Sapiens
YCRRRNGYRALMD

SEQ ID NO: 16741 - protein, 13 aa, Homo Sapiens
CRRRNGYRALMDK

SEQ ID NO: 16742 - protein, 13 aa, Homo Sapiens
RRRNGYRALMDKS

SEQ ID NO: 16743 - protein, 13 aa, Homo Sapiens
RRNGYRALMDKSL

SEQ ID NO: 16744 - protein, 13 aa, Homo Sapiens
RNGYRALMDKSLH

SEQ ID NO: 16745 - protein, 13 aa, Homo Sapiens
NGYRALMDKSLHV

SEQ ID NO: 16746 - protein, 13 aa, Homo Sapiens
GYRALMDKSLHVG

SEQ ID NO: 16747 - protein, 13 aa, Homo Sapiens
YRALMDKSLHVGT

SEQ ID NO: 16748 - protein, 13 aa, Homo Sapiens
RALMDKSLHVGTQ

SEQ ID NO: 16749 - protein, 13 aa, Homo Sapiens
ALMDKSLHVGTQC

SEQ ID NO: 16750 - protein, 13 aa, Homo Sapiens
LMDKSLHVGTQCA

SEQ ID NO: 16751 - protein, 13 aa, Homo Sapiens
MDKSLHVGTQCAL

SEQ ID NO: 16752 - protein, 13 aa, Homo Sapiens
DKSLHVGTQCALT

SEQ ID NO: 16753 - protein, 13 aa, Homo Sapiens
KSLHVGTQCALTR

SEQ ID NO: 16754 - protein, 13 aa, Homo Sapiens
SLHVGTQCALTRR

SEQ ID NO: 16755 - protein, 13 aa, Homo Sapiens
LHVGTQCALTRRC

SEQ ID NO: 16756 - protein, 13 aa, Homo Sapiens
HVGTQCALTRRCP

SEQ ID NO: 16757 - protein, 13 aa, Homo Sapiens
VGTQCALTRRCPQ

SEQ ID NO: 16758 - protein, 13 aa, Homo Sapiens
GTQCALTRRCPQE

SEQ ID NO: 16759 - protein, 13 aa, Homo Sapiens
TQCALTRRCPQEG

SEQ ID NO: 16760 - protein, 13 aa, Homo Sapiens
QCALTRRCPQEGF

SEQ ID NO: 16761 - protein, 13 aa, Homo Sapiens
CALTRRCPQEGFD

SEQ ID NO: 16762 - protein, 13 aa, Homo Sapiens
ALTRRCPQEGFDH

SEQ ID NO: 16763 - protein, 13 aa, Homo Sapiens
LTRRCPQEGFDHR

SEQ ID NO: 16764 - protein, 13 aa, Homo Sapiens
TRRCPQEGFDHRD

SEQ ID NO: 16765 - protein, 13 aa, Homo Sapiens
RRCPQEGFDHRDS

SEQ ID NO: 16766 - protein, 13 aa, Homo Sapiens
RCPQEGFDHRDSK

SEQ ID NO: 16767 - protein, 13 aa, Homo Sapiens
CPQEGFDHRDSKV

SEQ ID NO: 16768 - protein, 13 aa, Homo Sapiens
PQEGFDHRDSKVS

SEQ ID NO: 16769 - protein, 13 aa, Homo Sapiens
QEGFDHRDSKVSL

SEQ ID NO: 16770 - protein, 13 aa, Homo Sapiens
EGFDHRDSKVSLQ

SEQ ID NO: 16771 - protein, 13 aa, Homo Sapiens
GFDHRDSKVSLQE

SEQ ID NO: 16772 - protein, 13 aa, Homo Sapiens
FDHRDSKVSLQEK

SEQ ID NO: 16773 - protein, 13 aa, Homo Sapiens
DHRDSKVSLQEKN

SEQ ID NO: 16774 - protein, 13 aa, Homo Sapiens
HRDSKVSLQEKNC

SEQ ID NO: 16775 - protein, 13 aa, Homo Sapiens
RDSKVSLQEKNCE

SEQ ID NO: 16776 - protein, 13 aa, Homo Sapiens
DSKVSLQEKNCEP

SEQ ID NO: 16777 - protein, 13 aa, Homo Sapiens
SKVSLQEKNCEPV

SEQ ID NO: 16778 - protein, 13 aa, Homo Sapiens
KVSLQEKNCEPVV

SEQ ID NO: 16779 - protein, 13 aa, Homo Sapiens
VSLQEKNCEPVVP

SEQ ID NO: 16780 - protein, 13 aa, Homo Sapiens
SLQEKNCEPVVPN

SEQ ID NO: 16781 - protein, 13 aa, Homo Sapiens
LQEKNCEPVVPNA

SEQ ID NO: 16782 - protein, 13 aa, Homo Sapiens
QEKNCEPVVPNAP

SEQ ID NO: 16783 - protein, 13 aa, Homo Sapiens
EKNCEPVVPNAPP

SEQ ID NO: 16784 - protein, 13 aa, Homo Sapiens
KNCEPVVPNAPPA

SEQ ID NO: 16785 - protein, 13 aa, Homo Sapiens
NCEPVVPNAPPAY

SEQ ID NO: 16786 - protein, 13 aa, Homo Sapiens
CEPVVPNAPPAYE

SEQ ID NO: 16787 - protein, 13 aa, Homo Sapiens
EPVVPNAPPAYEK

SEQ ID NO: 16788 - protein, 13 aa, Homo Sapiens
PVVPNAPPAYEKL

SEQ ID NO: 16789 - protein, 13 aa, Homo Sapiens
VVPNAPPAYEKLS

SEQ ID NO: 16790 - protein, 13 aa, Homo Sapiens
VPNAPPAYEKLSA

SEQ ID NO: 16791 - protein, 13 aa, Homo Sapiens
PNAPPAYEKLSAE

SEQ ID NO: 16792 - protein, 13 aa, Homo Sapiens
NAPPAYEKLSAEQ

SEQ ID NO: 16793 - protein, 13 aa, Homo Sapiens
APPAYEKLSAEQS

SEQ ID NO: 16794 - protein, 13 aa, Homo Sapiens
PPAYEKLSAEQSP

SEQ ID NO: 16795 - protein, 13 aa, Homo Sapiens
PAYEKLSAEQSPP

SEQ ID NO: 16796 - protein, 13 aa, Homo Sapiens
AYEKLSAEQSPPP

SEQ ID NO: 16797 - protein, 13 aa, Homo Sapiens
YEKLSAEQSPPPY

SEQ ID NO: 16798 - protein, 13 aa, Homo Sapiens
EKLSAEQSPPPYS

SEQ ID NO: 16799 - protein, 13 aa, Homo Sapiens
KLSAEQSPPPYSP

SEQ ID NO: 16800 - protein, 14 aa, Homo Sapiens
MPREDAHFIYGYPK

SEQ ID NO: 16801 - protein, 14 aa, Homo Sapiens
PREDAHFIYGYPKK

SEQ ID NO: 16802 - protein, 14 aa, Homo Sapiens
REDAHFIYGYPKKG

SEQ ID NO: 16803 - protein, 14 aa, Homo Sapiens
EDAHFIYGYPKKGH

SEQ ID NO: 16804 - protein, 14 aa, Homo Sapiens
DAHFIYGYPKKGHG

SEQ ID NO: 16805 - protein, 14 aa, Homo Sapiens
AHFIYGYPKKGHGH

SEQ ID NO: 16806 - protein, 14 aa, Homo Sapiens
HFIYGYPKKGHGHS

SEQ ID NO: 16807 - protein, 14 aa, Homo Sapiens
FIYGYPKKGHGHSY

SEQ ID NO: 16808 - protein, 14 aa, Homo Sapiens
IYGYPKKGHGHSYT

SEQ ID NO: 16809 - protein, 14 aa, Homo Sapiens
YGYPKKGHGHSYTT

SEQ ID NO: 16810 - protein, 14 aa, Homo Sapiens
GYPKKGHGHSYTTA

SEQ ID NO: 16811 - protein, 14 aa, Homo Sapiens
YPKKGHGHSYTTAE

SEQ ID NO: 16812 - protein, 14 aa, Homo Sapiens
PKKGHGHSYTTAEE

SEQ ID NO: 16813 - protein, 14 aa, Homo Sapiens
KKGHGHSYTTAEEA

SEQ ID NO: 16814 - protein, 14 aa, Homo Sapiens
KGHGHSYTTAEEAA

SEQ ID NO: 16815 - protein, 14 aa, Homo Sapiens
GHGHSYTTAEEAAG

SEQ ID NO: 16816 - protein, 14 aa, Homo Sapiens
HGHSYTTAEEAAGI

SEQ ID NO: 16817 - protein, 14 aa, Homo Sapiens
GHSYTTAEEAAGIG

SEQ ID NO: 16818 - protein, 14 aa, Homo Sapiens
HSYTTAEEAAGIGI

SEQ ID NO: 16819 - protein, 14 aa, Homo Sapiens
SYTTAEEAAGIGIL

SEQ ID NO: 16820 - protein, 14 aa, Homo Sapiens
YTTAEEAAGIGILT

SEQ ID NO: 16821 - protein, 14 aa, Homo Sapiens
TTAEEAAGIGILTV

SEQ ID NO: 16822 - protein, 14 aa, Homo Sapiens
TAEEAAGIGILTVI

SEQ ID NO: 16823 - protein, 14 aa, Homo Sapiens
AEEAAGIGILTVIL

SEQ ID NO: 16824 - protein, 14 aa, Homo Sapiens
EEAAGIGILTVILG

SEQ ID NO: 16825 - protein, 14 aa, Homo Sapiens
EAAGIGILTVILGV

SEQ ID NO: 16826 - protein, 14 aa, Homo Sapiens
AAGIGILTVILGVL

SEQ ID NO: 16827 - protein, 14 aa, Homo Sapiens
AGIGILTVILGVLL

SEQ ID NO: 16828 - protein, 14 aa, Homo Sapiens
GIGILTVILGVLLL

SEQ ID NO: 16829 - protein, 14 aa, Homo Sapiens
IGILTVILGVLLLI

SEQ ID NO: 16830 - protein, 14 aa, Homo Sapiens
GILTVILGVLLLIG

SEQ ID NO: 16831 - protein, 14 aa, Homo Sapiens
ILTVILGVLLLIGC

SEQ ID NO: 16832 - protein, 14 aa, Homo Sapiens
LTVILGVLLLIGCW

SEQ ID NO: 16833 - protein, 14 aa, Homo Sapiens
TVILGVLLLIGCWY

SEQ ID NO: 16834 - protein, 14 aa, Homo Sapiens
VILGVLLLIGCWYC

SEQ ID NO: 16835 - protein, 14 aa, Homo Sapiens
ILGVLLLIGCWYCR

SEQ ID NO: 16836 - protein, 14 aa, Homo Sapiens
LGVLLLIGCWYCRR

SEQ ID NO: 16837 - protein, 14 aa, Homo Sapiens
GVLLLIGCWYCRRR

SEQ ID NO: 16838 - protein, 14 aa, Homo Sapiens
VLLLIGCWYCRRRN

SEQ ID NO: 16839 - protein, 14 aa, Homo Sapiens
LLLIGCWYCRRRNG

SEQ ID NO: 16840 - protein, 14 aa, Homo Sapiens
LLIGCWYCRRRNGY

SEQ ID NO: 16841 - protein, 14 aa, Homo Sapiens
LIGCWYCRRRNGYR

SEQ ID NO: 16842 - protein, 14 aa, Homo Sapiens
IGCWYCRRRNGYRA

SEQ ID NO: 16843 - protein, 14 aa, Homo Sapiens
GCWYCRRRNGYRAL

SEQ ID NO: 16844 - protein, 14 aa, Homo Sapiens
CWYCRRRNGYRALM

SEQ ID NO: 16845 - protein, 14 aa, Homo Sapiens
WYCRRRNGYRALMD

SEQ ID NO: 16846 - protein, 14 aa, Homo Sapiens
YCRRRNGYRALMDK

SEQ ID NO: 16847 - protein, 14 aa, Homo Sapiens
CRRRNGYRALMDKS

SEQ ID NO: 16848 - protein, 14 aa, Homo Sapiens
RRRNGYRALMDKSL

SEQ ID NO: 16849 - protein, 14 aa, Homo Sapiens
RRNGYRALMDKSLH

SEQ ID NO: 16850 - protein, 14 aa, Homo Sapiens
RNGYRALMDKSLHV

SEQ ID NO: 16851 - protein, 14 aa, Homo Sapiens
NGYRALMDKSLHVG

SEQ ID NO: 16852 - protein, 14 aa, Homo Sapiens
GYRALMDKSLHVGT

SEQ ID NO: 16853 - protein, 14 aa, Homo Sapiens
YRALMDKSLHVGTQ

SEQ ID NO: 16854 - protein, 14 aa, Homo Sapiens
RALMDKSLHVGTQC

SEQ ID NO: 16855 - protein, 14 aa, Homo Sapiens
ALMDKSLHVGTQCA

SEQ ID NO: 16856 - protein, 14 aa, Homo Sapiens
LMDKSLHVGTQCAL

SEQ ID NO: 16857 - protein, 14 aa, Homo Sapiens
MDKSLHVGTQCALT

SEQ ID NO: 16858 - protein, 14 aa, Homo Sapiens
DKSLHVGTQCALTR

SEQ ID NO: 16859 - protein, 14 aa, Homo Sapiens
KSLHVGTQCALTRR

SEQ ID NO: 16860 - protein, 14 aa, Homo Sapiens
SLHVGTQCALTRRC

SEQ ID NO: 16861 - protein, 14 aa, Homo Sapiens
LHVGTQCALTRRCP

SEQ ID NO: 16862 - protein, 14 aa, Homo Sapiens
HVGTQCALTRRCPQ

SEQ ID NO: 16863 - protein, 14 aa, Homo Sapiens
VGTQCALTRRCPQE

SEQ ID NO: 16864 - protein, 14 aa, Homo Sapiens
GTQCALTRRCPQEG

SEQ ID NO: 16865 - protein, 14 aa, Homo Sapiens
TQCALTRRCPQEGF

SEQ ID NO: 16866 - protein, 14 aa, Homo Sapiens
QCALTRRCPQEGFD

SEQ ID NO: 16867 - protein, 14 aa, Homo Sapiens
CALTRRCPQEGFDH

SEQ ID NO: 16868 - protein, 14 aa, Homo Sapiens
ALTRRCPQEGFDHR

SEQ ID NO: 16869 - protein, 14 aa, Homo Sapiens
LTRRCPQEGFDHRD

SEQ ID NO: 16870 - protein, 14 aa, Homo Sapiens
TRRCPQEGFDHRDS

SEQ ID NO: 16871 - protein, 14 aa, Homo Sapiens
RRCPQEGFDHRDSK

SEQ ID NO: 16872 - protein, 14 aa, Homo Sapiens
RCPQEGFDHRDSKV

SEQ ID NO: 16873 - protein, 14 aa, Homo Sapiens
CPQEGFDHRDSKVS

SEQ ID NO: 16874 - protein, 14 aa, Homo Sapiens
PQEGFDHRDSKVSL

SEQ ID NO: 16875 - protein, 14 aa, Homo Sapiens
QEGFDHRDSKVSLQ

SEQ ID NO: 16876 - protein, 14 aa, Homo Sapiens
EGFDHRDSKVSLQE

SEQ ID NO: 16877 - protein, 14 aa, Homo Sapiens
GFDHRDSKVSLQEK

SEQ ID NO: 16878 - protein, 14 aa, Homo Sapiens
FDHRDSKVSLQEKN

SEQ ID NO: 16879 - protein, 14 aa, Homo Sapiens
DHRDSKVSLQEKNC

SEQ ID NO: 16880 - protein, 14 aa, Homo Sapiens
HRDSKVSLQEKNCE

SEQ ID NO: 16881 - protein, 14 aa, Homo Sapiens
RDSKVSLQEKNCEP

SEQ ID NO: 16882 - protein, 14 aa, Homo Sapiens
DSKVSLQEKNCEPV

SEQ ID NO: 16883 - protein, 14 aa, Homo Sapiens
SKVSLQEKNCEPVV

SEQ ID NO: 16884 - protein, 14 aa, Homo Sapiens
KVSLQEKNCEPVVP

SEQ ID NO: 16885 - protein, 14 aa, Homo Sapiens
VSLQEKNCEPVVPN

SEQ ID NO: 16886 - protein, 14 aa, Homo Sapiens
SLQEKNCEPVVPNA

SEQ ID NO: 16887 - protein, 14 aa, Homo Sapiens
LQEKNCEPVVPNAP

SEQ ID NO: 16888 - protein, 14 aa, Homo Sapiens
QEKNCEPVVPNAPP

SEQ ID NO: 16889 - protein, 14 aa, Homo Sapiens
EKNCEPVVPNAPPA

SEQ ID NO: 16890 - protein, 14 aa, Homo Sapiens
KNCEPVVPNAPPAY

SEQ ID NO: 16891 - protein, 14 aa, Homo Sapiens
NCEPVVPNAPPAYE

SEQ ID NO: 16892 - protein, 14 aa, Homo Sapiens
CEPVVPNAPPAYEK

SEQ ID NO: 16893 - protein, 14 aa, Homo Sapiens
EPVVPNAPPAYEKL

SEQ ID NO: 16894 - protein, 14 aa, Homo Sapiens
PVVPNAPPAYEKLS

SEQ ID NO: 16895 - protein, 14 aa, Homo Sapiens
VVPNAPPAYEKLSA

SEQ ID NO: 16896 - protein, 14 aa, Homo Sapiens
VPNAPPAYEKLSAE

SEQ ID NO: 16897 - protein, 14 aa, Homo Sapiens
PNAPPAYEKLSAEQ

SEQ ID NO: 16898 - protein, 14 aa, Homo Sapiens
NAPPAYEKLSAEQS

SEQ ID NO: 16899 - protein, 14 aa, Homo Sapiens
APPAYEKLSAEQSP

SEQ ID NO: 16900 - protein, 14 aa, Homo Sapiens
PPAYEKLSAEQSPP

SEQ ID NO: 16901 - protein, 14 aa, Homo Sapiens
PAYEKLSAEQSPPP

SEQ ID NO: 16902 - protein, 14 aa, Homo Sapiens
AYEKLSAEQSPPPY

SEQ ID NO: 16903 - protein, 14 aa, Homo Sapiens
YEKLSAEQSPPPYS

SEQ ID NO: 16904 - protein, 14 aa, Homo Sapiens
EKLSAEQSPPPYSP

SEQ ID NO: 16905 - protein, 15 aa, Homo Sapiens
MPREDAHFIYGYPKK

SEQ ID NO: 16906 - protein, 15 aa, Homo Sapiens
PREDAHFIYGYPKKG

SEQ ID NO: 16907 - protein, 15 aa, Homo Sapiens
REDAHFIYGYPKKGH

SEQ ID NO: 16908 - protein, 15 aa, Homo Sapiens
EDAHFIYGYPKKGHG

SEQ ID NO: 16909 - protein, 15 aa, Homo Sapiens
DAHFIYGYPKKGHGH

SEQ ID NO: 16910 - protein, 15 aa, Homo Sapiens
AHFIYGYPKKGHGHS

SEQ ID NO: 16911 - protein, 15 aa, Homo Sapiens
HFIYGYPKKGHGHSY

SEQ ID NO: 16912 - protein, 15 aa, Homo Sapiens
FIYGYPKKGHGHSYT

SEQ ID NO: 16913 - protein, 15 aa, Homo Sapiens
IYGYPKKGHGHSYTT

SEQ ID NO: 16914 - protein, 15 aa, Homo Sapiens
YGYPKKGHGHSYTTA

SEQ ID NO: 16915 - protein, 15 aa, Homo Sapiens
GYPKKGHGHSYTTAE

SEQ ID NO: 16916 - protein, 15 aa, Homo Sapiens
YPKKGHGHSYTTAEE

SEQ ID NO: 16917 - protein, 15 aa, Homo Sapiens
PKKGHGHSYTTAEEA

SEQ ID NO: 16918 - protein, 15 aa, Homo Sapiens
KKGHGHSYTTAEEAA

SEQ ID NO: 16919 - protein, 15 aa, Homo Sapiens
KGHGHSYTTAEEAAG

SEQ ID NO: 16920 - protein, 15 aa, Homo Sapiens
GHGHSYTTAEEAAGI

SEQ ID NO: 16921 - protein, 15 aa, Homo Sapiens
HGHSYTTAEEAAGIG

SEQ ID NO: 16922 - protein, 15 aa, Homo Sapiens
GHSYTTAEEAAGIGI

SEQ ID NO: 16923 - protein, 15 aa, Homo Sapiens
HSYTTAEEAAGIGIL

SEQ ID NO: 16924 - protein, 15 aa, Homo Sapiens
SYTTAEEAAGIGILT

SEQ ID NO: 16925 - protein, 15 aa, Homo Sapiens
YTTAEEAAGIGILTV

SEQ ID NO: 16926 - protein, 15 aa, Homo Sapiens
TTAEEAAGIGILTVI

SEQ ID NO: 16927 - protein, 15 aa, Homo Sapiens
TAEEAAGIGILTVIL

SEQ ID NO: 16928 - protein, 15 aa, Homo Sapiens
AEEAAGIGILTVILG

SEQ ID NO: 16929 - protein, 15 aa, Homo Sapiens
EEAAGIGILTVILGV

SEQ ID NO: 16930 - protein, 15 aa, Homo Sapiens
EAAGIGILTVILGVL

SEQ ID NO: 16931 - protein, 15 aa, Homo Sapiens
AAGIGILTVILGVLL

SEQ ID NO: 16932 - protein, 15 aa, Homo Sapiens
AGIGILTVILGVLLL

SEQ ID NO: 16933 - protein, 15 aa, Homo Sapiens
GIGILTVILGVLLLI

SEQ ID NO: 16934 - protein, 15 aa, Homo Sapiens
IGILTVILGVLLLIG

SEQ ID NO: 16935 - protein, 15 aa, Homo Sapiens
GILTVILGVLLLIGC

SEQ ID NO: 16936 - protein, 15 aa, Homo Sapiens
ILTVILGVLLLIGCW

SEQ ID NO: 16937 - protein, 15 aa, Homo Sapiens
LTVILGVLLLIGCWY

SEQ ID NO: 16938 - protein, 15 aa, Homo Sapiens
TVILGVLLLIGCWYC

SEQ ID NO: 16939 - protein, 15 aa, Homo Sapiens
VILGVLLLIGCWYCR

SEQ ID NO: 16940 - protein, 15 aa, Homo Sapiens
ILGVLLLIGCWYCRR

SEQ ID NO: 16941 - protein, 15 aa, Homo Sapiens
LGVLLLIGCWYCRRR

SEQ ID NO: 16942 - protein, 15 aa, Homo Sapiens
GVLLLIGCWYCRRRN

SEQ ID NO: 16943 - protein, 15 aa, Homo Sapiens
VLLLIGCWYCRRRNG

SEQ ID NO: 16944 - protein, 15 aa, Homo Sapiens
LLLIGCWYCRRRNGY

SEQ ID NO: 16945 - protein, 15 aa, Homo Sapiens
LLIGCWYCRRRNGYR

SEQ ID NO: 16946 - protein, 15 aa, Homo Sapiens
LIGCWYCRRRNGYRA

SEQ ID NO: 16947 - protein, 15 aa, Homo Sapiens
IGCWYCRRRNGYRAL

SEQ ID NO: 16948 - protein, 15 aa, Homo Sapiens
GCWYCRRRNGYRALM

SEQ ID NO: 16949 - protein, 15 aa, Homo Sapiens
CWYCRRRNGYRALMD

SEQ ID NO: 16950 - protein, 15 aa, Homo Sapiens
WYCRRRNGYRALMDK

SEQ ID NO: 16951 - protein, 15 aa, Homo Sapiens
YCRRRNGYRALMDKS

SEQ ID NO: 16952 - protein, 15 aa, Homo Sapiens
CRRRNGYRALMDKSL

SEQ ID NO: 16953 - protein, 15 aa, Homo Sapiens
RRRNGYRALMDKSLH

SEQ ID NO: 16954 - protein, 15 aa, Homo Sapiens
RRNGYRALMDKSLHV

SEQ ID NO: 16955 - protein, 15 aa, Homo Sapiens
RNGYRALMDKSLHVG

SEQ ID NO: 16956 - protein, 15 aa, Homo Sapiens
NGYRALMDKSLHVGT

SEQ ID NO: 16957 - protein, 15 aa, Homo Sapiens
GYRALMDKSLHVGTQ

SEQ ID NO: 16958 - protein, 15 aa, Homo Sapiens
YRALMDKSLHVGTQC

SEQ ID NO: 16959 - protein, 15 aa, Homo Sapiens
RALMDKSLHVGTQCA

SEQ ID NO: 16960 - protein, 15 aa, Homo Sapiens
ALMDKSLHVGTQCAL

SEQ ID NO: 16961 - protein, 15 aa, Homo Sapiens
LMDKSLHVGTQCALT

SEQ ID NO: 16962 - protein, 15 aa, Homo Sapiens
MDKSLHVGTQCALTR

SEQ ID NO: 16963 - protein, 15 aa, Homo Sapiens
DKSLHVGTQCALTRR

SEQ ID NO: 16964 - protein, 15 aa, Homo Sapiens
KSLHVGTQCALTRRC

SEQ ID NO: 16965 - protein, 15 aa, Homo Sapiens
SLHVGTQCALTRRCP

SEQ ID NO: 16966 - protein, 15 aa, Homo Sapiens
LHVGTQCALTRRCPQ

SEQ ID NO: 16967 - protein, 15 aa, Homo Sapiens
HVGTQCALTRRCPQE

SEQ ID NO: 16968 - protein, 15 aa, Homo Sapiens
VGTQCALTRRCPQEG

SEQ ID NO: 16969 - protein, 15 aa, Homo Sapiens
GTQCALTRRCPQEGF

SEQ ID NO: 16970 - protein, 15 aa, Homo Sapiens
TQCALTRRCPQEGFD

SEQ ID NO: 16971 - protein, 15 aa, Homo Sapiens
QCALTRRCPQEGFDH

SEQ ID NO: 16972 - protein, 15 aa, Homo Sapiens
CALTRRCPQEGFDHR

SEQ ID NO: 16973 - protein, 15 aa, Homo Sapiens
ALTRRCPQEGFDHRD

SEQ ID NO: 16974 - protein, 15 aa, Homo Sapiens
LTRRCPQEGFDHRDS

SEQ ID NO: 16975 - protein, 15 aa, Homo Sapiens
TRRCPQEGFDHRDSK

SEQ ID NO: 16976 - protein, 15 aa, Homo Sapiens
RRCPQEGFDHRDSKV

SEQ ID NO: 16977 - protein, 15 aa, Homo Sapiens
RCPQEGFDHRDSKVS

SEQ ID NO: 16978 - protein, 15 aa, Homo Sapiens
CPQEGFDHRDSKVSL

SEQ ID NO: 16979 - protein, 15 aa, Homo Sapiens
PQEGFDHRDSKVSLQ

SEQ ID NO: 16980 - protein, 15 aa, Homo Sapiens
QEGFDHRDSKVSLQE

SEQ ID NO: 16981 - protein, 15 aa, Homo Sapiens
EGFDHRDSKVSLQEK

SEQ ID NO: 16982 - protein, 15 aa, Homo Sapiens
GFDHRDSKVSLQEKN

SEQ ID NO: 16983 - protein, 15 aa, Homo Sapiens
FDHRDSKVSLQEKNC

SEQ ID NO: 16984 - protein, 15 aa, Homo Sapiens
DHRDSKVSLQEKNCE

SEQ ID NO: 16985 - protein, 15 aa, Homo Sapiens
HRDSKVSLQEKNCEP

SEQ ID NO: 16986 - protein, 15 aa, Homo Sapiens
RDSKVSLQEKNCEPV

SEQ ID NO: 16987 - protein, 15 aa, Homo Sapiens
DSKVSLQEKNCEPVV

SEQ ID NO: 16988 - protein, 15 aa, Homo Sapiens
SKVSLQEKNCEPVVP

SEQ ID NO: 16989 - protein, 15 aa, Homo Sapiens
KVSLQEKNCEPVVPN

SEQ ID NO: 16990 - protein, 15 aa, Homo Sapiens
VSLQEKNCEPVVPNA

SEQ ID NO: 16991 - protein, 15 aa, Homo Sapiens
SLQEKNCEPVVPNAP

SEQ ID NO: 16992 - protein, 15 aa, Homo Sapiens
LQEKNCEPVVPNAPP

SEQ ID NO: 16993 - protein, 15 aa, Homo Sapiens
QEKNCEPVVPNAPPA

SEQ ID NO: 16994 - protein, 15 aa, Homo Sapiens
EKNCEPVVPNAPPAY

SEQ ID NO: 16995 - protein, 15 aa, Homo Sapiens
KNCEPVVPNAPPAYE

SEQ ID NO: 16996 - protein, 15 aa, Homo Sapiens
NCEPVVPNAPPAYEK

SEQ ID NO: 16997 - protein, 15 aa, Homo Sapiens
CEPVVPNAPPAYEKL

SEQ ID NO: 16998 - protein, 15 aa, Homo Sapiens
EPVVPNAPPAYEKLS

SEQ ID NO: 16999 - protein, 15 aa, Homo Sapiens
PVVPNAPPAYEKLSA

SEQ ID NO: 17000 - protein, 15 aa, Homo Sapiens
VVPNAPPAYEKLSAE

SEQ ID NO: 17001 - protein, 15 aa, Homo Sapiens
VPNAPPAYEKLSAEQ

SEQ ID NO: 17002 - protein, 15 aa, Homo Sapiens
PNAPPAYEKLSAEQS

SEQ ID NO: 17003 - protein, 15 aa, Homo Sapiens
NAPPAYEKLSAEQSP

SEQ ID NO: 17004 - protein, 15 aa, Homo Sapiens
APPAYEKLSAEQSPP

SEQ ID NO: 17005 - protein, 15 aa, Homo Sapiens
PPAYEKLSAEQSPPP

SEQ ID NO: 17006 - protein, 15 aa, Homo Sapiens
PAYEKLSAEQSPPPY

SEQ ID NO: 17007 - protein, 15 aa, Homo Sapiens
AYEKLSAEQSPPPYS

SEQ ID NO: 17008 - protein, 15 aa, Homo Sapiens
YEKLSAEQSPPPYSP

SEQ ID NO: 17009 - protein, 16 aa, Homo Sapiens
MPREDAHFIYGYPKKG

SEQ ID NO: 17010 - protein, 16 aa, Homo Sapiens
PREDAHFIYGYPKKGH

SEQ ID NO: 17011 - protein, 16 aa, Homo Sapiens
REDAHFIYGYPKKGHG

SEQ ID NO: 17012 - protein, 16 aa, Homo Sapiens
EDAHFIYGYPKKGHGH

SEQ ID NO: 17013 - protein, 16 aa, Homo Sapiens
DAHFIYGYPKKGHGHS

SEQ ID NO: 17014 - protein, 16 aa, Homo Sapiens
AHFIYGYPKKGHGHSY

SEQ ID NO: 17015 - protein, 16 aa, Homo Sapiens
HFIYGYPKKGHGHSYT

SEQ ID NO: 17016 - protein, 16 aa, Homo Sapiens
FIYGYPKKGHGHSYTT

SEQ ID NO: 17017 - protein, 16 aa, Homo Sapiens
IYGYPKKGHGHSYTTA

SEQ ID NO: 17018 - protein, 16 aa, Homo Sapiens
YGYPKKGHGHSYTTAE

SEQ ID NO: 17019 - protein, 16 aa, Homo Sapiens
GYPKKGHGHSYTTAEE

SEQ ID NO: 17020 - protein, 16 aa, Homo Sapiens
YPKKGHGHSYTTAEEA

SEQ ID NO: 17021 - protein, 16 aa, Homo Sapiens
PKKGHGHSYTTAEEAA

SEQ ID NO: 17022 - protein, 16 aa, Homo Sapiens
KKGHGHSYTTAEEAAG

SEQ ID NO: 17023 - protein, 16 aa, Homo Sapiens
KGHGHSYTTAEEAAGI

SEQ ID NO: 17024 - protein, 16 aa, Homo Sapiens
GHGHSYTTAEEAAGIG

SEQ ID NO: 17025 - protein, 16 aa, Homo Sapiens
HGHSYTTAEEAAGIGI

SEQ ID NO: 17026 - protein, 16 aa, Homo Sapiens
GHSYTTAEEAAGIGIL

SEQ ID NO: 17027 - protein, 16 aa, Homo Sapiens
HSYTTAEEAAGIGILT

SEQ ID NO: 17028 - protein, 16 aa, Homo Sapiens
SYTTAEEAAGIGILTV

SEQ ID NO: 17029 - protein, 16 aa, Homo Sapiens
YTTAEEAAGIGILTVI

SEQ ID NO: 17030 - protein, 16 aa, Homo Sapiens
TTAEEAAGIGILTVIL

SEQ ID NO: 17031 - protein, 16 aa, Homo Sapiens
TAEEAAGIGILTVILG

SEQ ID NO: 17032 - protein, 16 aa, Homo Sapiens
AEEAAGIGILTVILGV

SEQ ID NO: 17033 - protein, 16 aa, Homo Sapiens
EEAAGIGILTVILGVL

SEQ ID NO: 17034 - protein, 16 aa, Homo Sapiens
EAAGIGILTVILGVLL

SEQ ID NO: 17035 - protein, 16 aa, Homo Sapiens
AAGIGILTVILGVLLL

SEQ ID NO: 17036 - protein, 16 aa, Homo Sapiens
AGIGILTVILGVLLLI

SEQ ID NO: 17037 - protein, 16 aa, Homo Sapiens
GIGILTVILGVLLLIG

SEQ ID NO: 17038 - protein, 16 aa, Homo Sapiens
IGILTVILGVLLLIGC

SEQ ID NO: 17039 - protein, 16 aa, Homo Sapiens
GILTVILGVLLLIGCW

SEQ ID NO: 17040 - protein, 16 aa, Homo Sapiens
ILTVILGVLLLIGCWY

SEQ ID NO: 17041 - protein, 16 aa, Homo Sapiens
LTVILGVLLLIGCWYC

SEQ ID NO: 17042 - protein, 16 aa, Homo Sapiens
TVILGVLLLIGCWYCR

SEQ ID NO: 17043 - protein, 16 aa, Homo Sapiens
VILGVLLLIGCWYCRR

SEQ ID NO: 17044 - protein, 16 aa, Homo Sapiens
ILGVLLLIGCWYCRRR

SEQ ID NO: 17045 - protein, 16 aa, Homo Sapiens
LGVLLLIGCWYCRRRN

SEQ ID NO: 17046 - protein, 16 aa, Homo Sapiens
GVLLLIGCWYCRRRNG

SEQ ID NO: 17047 - protein, 16 aa, Homo Sapiens
VLLLIGCWYCRRRNGY

SEQ ID NO: 17048 - protein, 16 aa, Homo Sapiens
LLLIGCWYCRRRNGYR

SEQ ID NO: 17049 - protein, 16 aa, Homo Sapiens
LLIGCWYCRRRNGYRA

SEQ ID NO: 17050 - protein, 16 aa, Homo Sapiens
LIGCWYCRRRNGYRAL

SEQ ID NO: 17051 - protein, 16 aa, Homo Sapiens
IGCWYCRRRNGYRALM

SEQ ID NO: 17052 - protein, 16 aa, Homo Sapiens
GCWYCRRRNGYRALMD

SEQ ID NO: 17053 - protein, 16 aa, Homo Sapiens
CWYCRRRNGYRALMDK

SEQ ID NO: 17054 - protein, 16 aa, Homo Sapiens
WYCRRRNGYRALMDKS

SEQ ID NO: 17055 - protein, 16 aa, Homo Sapiens
YCRRRNGYRALMDKSL

SEQ ID NO: 17056 - protein, 16 aa, Homo Sapiens
CRRRNGYRALMDKSLH

SEQ ID NO: 17057 - protein, 16 aa, Homo Sapiens
RRRNGYRALMDKSLHV

SEQ ID NO: 17058 - protein, 16 aa, Homo Sapiens
RRNGYRALMDKSLHVG

SEQ ID NO: 17059 - protein, 16 aa, Homo Sapiens
RNGYRALMDKSLHVGT

SEQ ID NO: 17060 - protein, 16 aa, Homo Sapiens
NGYRALMDKSLHVGTQ

SEQ ID NO: 17061 - protein, 16 aa, Homo Sapiens
GYRALMDKSLHVGTQC

SEQ ID NO: 17062 - protein, 16 aa, Homo Sapiens
YRALMDKSLHVGTQCA

SEQ ID NO: 17063 - protein, 16 aa, Homo Sapiens
RALMDKSLHVGTQCAL

SEQ ID NO: 17064 - protein, 16 aa, Homo Sapiens
ALMDKSLHVGTQCALT

SEQ ID NO: 17065 - protein, 16 aa, Homo Sapiens
LMDKSLHVGTQCALTR

SEQ ID NO: 17066 - protein, 16 aa, Homo Sapiens
MDKSLHVGTQCALTRR

SEQ ID NO: 17067 - protein, 16 aa, Homo Sapiens
DKSLHVGTQCALTRRC

SEQ ID NO: 17068 - protein, 16 aa, Homo Sapiens
KSLHVGTQCALTRRCP

SEQ ID NO: 17069 - protein, 16 aa, Homo Sapiens
SLHVGTQCALTRRCPQ

SEQ ID NO: 17070 - protein, 16 aa, Homo Sapiens
LHVGTQCALTRRCPQE

SEQ ID NO: 17071 - protein, 16 aa, Homo Sapiens
HVGTQCALTRRCPQEG

SEQ ID NO: 17072 - protein, 16 aa, Homo Sapiens
VGTQCALTRRCPQEGF

SEQ ID NO: 17073 - protein, 16 aa, Homo Sapiens
GTQCALTRRCPQEGFD

SEQ ID NO: 17074 - protein, 16 aa, Homo Sapiens
TQCALTRRCPQEGFDH

SEQ ID NO: 17075 - protein, 16 aa, Homo Sapiens
QCALTRRCPQEGFDHR

SEQ ID NO: 17076 - protein, 16 aa, Homo Sapiens
CALTRRCPQEGFDHRD

SEQ ID NO: 17077 - protein, 16 aa, Homo Sapiens
ALTRRCPQEGFDHRDS

SEQ ID NO: 17078 - protein, 16 aa, Homo Sapiens
LTRRCPQEGFDHRDSK

SEQ ID NO: 17079 - protein, 16 aa, Homo Sapiens
TRRCPQEGFDHRDSKV

SEQ ID NO: 17080 - protein, 16 aa, Homo Sapiens
RRCPQEGFDHRDSKVS

SEQ ID NO: 17081 - protein, 16 aa, Homo Sapiens
RCPQEGFDHRDSKVSL

SEQ ID NO: 17082 - protein, 16 aa, Homo Sapiens
CPQEGFDHRDSKVSLQ

SEQ ID NO: 17083 - protein, 16 aa, Homo Sapiens
PQEGFDHRDSKVSLQE

SEQ ID NO: 17084 - protein, 16 aa, Homo Sapiens
QEGFDHRDSKVSLQEK

SEQ ID NO: 17085 - protein, 16 aa, Homo Sapiens
EGFDHRDSKVSLQEKN

SEQ ID NO: 17086 - protein, 16 aa, Homo Sapiens
GFDHRDSKVSLQEKNC

SEQ ID NO: 17087 - protein, 16 aa, Homo Sapiens
FDHRDSKVSLQEKNCE

SEQ ID NO: 17088 - protein, 16 aa, Homo Sapiens
DHRDSKVSLQEKNCEP

SEQ ID NO: 17089 - protein, 16 aa, Homo Sapiens
HRDSKVSLQEKNCEPV

SEQ ID NO: 17090 - protein, 16 aa, Homo Sapiens
RDSKVSLQEKNCEPVV

SEQ ID NO: 17091 - protein, 16 aa, Homo Sapiens
DSKVSLQEKNCEPVVP

SEQ ID NO: 17092 - protein, 16 aa, Homo Sapiens
SKVSLQEKNCEPVVPN

SEQ ID NO: 17093 - protein, 16 aa, Homo Sapiens
KVSLQEKNCEPVVPNA

SEQ ID NO: 17094 - protein, 16 aa, Homo Sapiens
VSLQEKNCEPVVPNAP

SEQ ID NO: 17095 - protein, 16 aa, Homo Sapiens
SLQEKNCEPVVPNAPP

SEQ ID NO: 17096 - protein, 16 aa, Homo Sapiens
LQEKNCEPVVPNAPPA

SEQ ID NO: 17097 - protein, 16 aa, Homo Sapiens
QEKNCEPVVPNAPPAY

SEQ ID NO: 17098 - protein, 16 aa, Homo Sapiens
EKNCEPVVPNAPPAYE

SEQ ID NO: 17099 - protein, 16 aa, Homo Sapiens
KNCEPVVPNAPPAYEK

SEQ ID NO: 17100 - protein, 16 aa, Homo Sapiens
NCEPVVPNAPPAYEKL

SEQ ID NO: 17101 - protein, 16 aa, Homo Sapiens
CEPVVPNAPPAYEKLS

SEQ ID NO: 17102 - protein, 16 aa, Homo Sapiens
EPVVPNAPPAYEKLSA

SEQ ID NO: 17103 - protein, 16 aa, Homo Sapiens
PVVPNAPPAYEKLSAE

SEQ ID NO: 17104 - protein, 16 aa, Homo Sapiens
VVPNAPPAYEKLSAEQ

SEQ ID NO: 17105 - protein, 16 aa, Homo Sapiens
VPNAPPAYEKLSAEQS

SEQ ID NO: 17106 - protein, 16 aa, Homo Sapiens
PNAPPAYEKLSAEQSP

SEQ ID NO: 17107 - protein, 16 aa, Homo Sapiens
NAPPAYEKLSAEQSPP

SEQ ID NO: 17108 - protein, 16 aa, Homo Sapiens
APPAYEKLSAEQSPPP

SEQ ID NO: 17109 - protein, 16 aa, Homo Sapiens
PPAYEKLSAEQSPPPY

SEQ ID NO: 17110 - protein, 16 aa, Homo Sapiens
PAYEKLSAEQSPPPYS

SEQ ID NO: 17111 - protein, 16 aa, Homo Sapiens
AYEKLSAEQSPPPYSP

SEQ ID NO: 17112 - protein, 500 aa, Homo Sapiens
MQDPASTCVPEPASQHTLRSGPGCLQQPEQQGVRDPGGIWAKLGAAEASAERLQGRRSRGASGSEPQQMGSDVRDLNALLPAVPSLGGGGGCALPVSGAAQWAPVLDFAPPGASAYGSLGGPAPPPAPPPPPPPPPHSFIKQEPSWGGAEPHEEQCLSAFTVHFSGQFTGTAGACRYGPFGPPPPSQASSGQARMFPNAPYLPSCLESQPAIRNQGYSTVTFDGTPSYGHTPSHHAAQFPNHSFKHEDPMGQQGSLGEQQYSVPPPVYGCHTPTDSCTGSQALLLRTPYSSDNLYQMTSQLECMTWNQMNLGATLKGHSTGYESDNHTTPILCGAQYRIHTHGVFRGIQDVRRVPGVAPTLVRSASETSEKRPFMCAYPGCNKRYFKLSHLQMHSRKHTGEKPYQCDFKDCERRFSRSDQLKRHQRRHTGVKPFQCKTCQRKFSRSDHLKTHTRTHTGKTSEKPFSCRWPSCQKKFARSDELVRHHNMHQRNMTKLQLAL

SEQ ID NO: 17113 - protein, 8 aa, Homo Sapiens
MQDPASTC

SEQ ID NO: 17114 - protein, 8 aa, Homo Sapiens
STCVPEPA

SEQ ID NO: 17115 - protein, 8 aa, Homo Sapiens
EPASQHTL

SEQ ID NO: 17116 - protein, 8 aa, Homo Sapiens
QQPEQQGV

SEQ ID NO: 17117 - protein, 8 aa, Homo Sapiens
GVRDPGGI

SEQ ID NO: 17118 - protein, 8 aa, Homo Sapiens
GIWAKLGA

SEQ ID NO: 17119 - protein, 8 aa, Homo Sapiens
AAEASAER

SEQ ID NO: 17120 - protein, 8 aa, Homo Sapiens
AEASAERL

SEQ ID NO: 17121 - protein, 8 aa, Homo Sapiens
RLQGRRSR

SEQ ID NO: 17122 - protein, 8 aa, Homo Sapiens
DVRDLNAL

SEQ ID NO: 17123 - protein, 8 aa, Homo Sapiens
DLNALLPA

SEQ ID NO: 17124 - protein, 8 aa, Homo Sapiens
ALLPAVPS

SEQ ID NO: 17125 - protein, 8 aa, Homo Sapiens
LLPAVPSL

SEQ ID NO: 17126 - protein, 8 aa, Homo Sapiens
SLGGGGGC

SEQ ID NO: 17127 - protein, 8 aa, Homo Sapiens
ALPVSGAA

SEQ ID NO: 17128 - protein, 8 aa, Homo Sapiens
LPVSGAAQ

SEQ ID NO: 17129 - protein, 8 aa, Homo Sapiens
GAAQWAPV

SEQ ID NO: 17130 - protein, 8 aa, Homo Sapiens
QWAPVLDF

SEQ ID NO: 17131 - protein, 8 aa, Homo Sapiens
FAPPGASA

SEQ ID NO: 17132 - protein, 8 aa, Homo Sapiens
APPGASAY

SEQ ID NO: 17133 - protein, 8 aa, Homo Sapiens
GASAYGSL

SEQ ID NO: 17134 - protein, 8 aa, Homo Sapiens
PPPPHSFI

SEQ ID NO: 17135 - protein, 8 aa, Homo Sapiens
EPSWGGAE

SEQ ID NO: 17136 - protein, 8 aa, Homo Sapiens
EPHEEQCL

SEQ ID NO: 17137 - protein, 8 aa, Homo Sapiens
EEQCLSAF

SEQ ID NO: 17138 - protein, 8 aa, Homo Sapiens
QCLSAFTV

SEQ ID NO: 17139 - protein, 8 aa, Homo Sapiens
LSAFTVHF

SEQ ID NO: 17140 - protein, 8 aa, Homo Sapiens
TGTAGACR

SEQ ID NO: 17141 - protein, 8 aa, Homo Sapiens
GTAGACRY

SEQ ID NO: 17142 - protein, 8 aa, Homo Sapiens
SQASSGQA

SEQ ID NO: 17143 - protein, 8 aa, Homo Sapiens
QASSGQAR

SEQ ID NO: 17144 - protein, 8 aa, Homo Sapiens
RMFPNAPY

SEQ ID NO: 17145 - protein, 8 aa, Homo Sapiens
MFPNAPYL

SEQ ID NO: 17146 - protein, 8 aa, Homo Sapiens
FPNAPYLP

SEQ ID NO: 17147 - protein, 8 aa, Homo Sapiens
APYLPSCL

SEQ ID NO: 17148 - protein, 8 aa, Homo Sapiens
YLPSCLES

SEQ ID NO: 17149 - protein, 8 aa, Homo Sapiens
CLESQPAI

SEQ ID NO: 17150 - protein, 8 aa, Homo Sapiens
STVTFDGT

SEQ ID NO: 17151 - protein, 8 aa, Homo Sapiens
HTPSHHAA

SEQ ID NO: 17152 - protein, 8 aa, Homo Sapiens
TPSHHAAQ

SEQ ID NO: 17153 - protein, 8 aa, Homo Sapiens
AQFPNHSF

SEQ ID NO: 17154 - protein, 8 aa, Homo Sapiens
FPNHSFKH

SEQ ID NO: 17155 - protein, 8 aa, Homo Sapiens
PMGQQGSL

SEQ ID NO: 17156 - protein, 8 aa, Homo Sapiens
SLGEQQYS

SEQ ID NO: 17157 - protein, 8 aa, Homo Sapiens
YSVPPPVY

SEQ ID NO: 17158 - protein, 8 aa, Homo Sapiens
GSQALLLR

SEQ ID NO: 17159 - protein, 8 aa, Homo Sapiens
SQALLLRT

SEQ ID NO: 17160 - protein, 8 aa, Homo Sapiens
ALLLRTPY

SEQ ID NO: 17161 - protein, 8 aa, Homo Sapiens
TPYSSDNL

SEQ ID NO: 17162 - protein, 8 aa, Homo Sapiens
PYSSDNLY

SEQ ID NO: 17163 - protein, 8 aa, Homo Sapiens
NLYQMTSQ

SEQ ID NO: 17164 - protein, 8 aa, Homo Sapiens
LYQMTSQL

SEQ ID NO: 17165 - protein, 8 aa, Homo Sapiens
YQMTSQLE

SEQ ID NO: 17166 - protein, 8 aa, Homo Sapiens
MTSQLECM

SEQ ID NO: 17167 - protein, 8 aa, Homo Sapiens
SQLECMTW

SEQ ID NO: 17168 - protein, 8 aa, Homo Sapiens
MTWNQMNL

SEQ ID NO: 17169 - protein, 8 aa, Homo Sapiens
NQMNLGAT

SEQ ID NO: 17170 - protein, 8 aa, Homo Sapiens
QMNLGATL

SEQ ID NO: 17171 - protein, 8 aa, Homo Sapiens
MNLGATLK

SEQ ID NO: 17172 - protein, 8 aa, Homo Sapiens
TTPILCGA

SEQ ID NO: 17173 - protein, 8 aa, Homo Sapiens
ILCGAQYR

SEQ ID NO: 17174 - protein, 8 aa, Homo Sapiens
AQYRIHTH

SEQ ID NO: 17175 - protein, 8 aa, Homo Sapiens
YRIHTHGV

SEQ ID NO: 17176 - protein, 8 aa, Homo Sapiens
RIHTHGVF

SEQ ID NO: 17177 - protein, 8 aa, Homo Sapiens
GIQDVRRV

SEQ ID NO: 17178 - protein, 8 aa, Homo Sapiens
VPGVAPTL

SEQ ID NO: 17179 - protein, 8 aa, Homo Sapiens
GVAPTLVR

SEQ ID NO: 17180 - protein, 8 aa, Homo Sapiens
APTLVRSA

SEQ ID NO: 17181 - protein, 8 aa, Homo Sapiens
SASETSEK

SEQ ID NO: 17182 - protein, 8 aa, Homo Sapiens
ETSEKRPF

SEQ ID NO: 17183 - protein, 8 aa, Homo Sapiens
FMCAYPGC

SEQ ID NO: 17184 - protein, 8 aa, Homo Sapiens
CAYPGCNK

SEQ ID NO: 17185 - protein, 8 aa, Homo Sapiens
YPGCNKRY

SEQ ID NO: 17186 - protein, 8 aa, Homo Sapiens
GCNKRYFK

SEQ ID NO: 17187 - protein, 8 aa, Homo Sapiens
KRYFKLSH

SEQ ID NO: 17188 - protein, 8 aa, Homo Sapiens
RYFKLSHL

SEQ ID NO: 17189 - protein, 8 aa, Homo Sapiens
KLSHLQMH

SEQ ID NO: 17190 - protein, 8 aa, Homo Sapiens
HLQMHSRK

SEQ ID NO: 17191 - protein, 8 aa, Homo Sapiens
SRKHTGEK

SEQ ID NO: 17192 - protein, 8 aa, Homo Sapiens
KPYQCDFK

SEQ ID NO: 17193 - protein, 8 aa, Homo Sapiens
DFKDCERR

SEQ ID NO: 17194 - protein, 8 aa, Homo Sapiens
DCERRFSR

SEQ ID NO: 17195 - protein, 8 aa, Homo Sapiens
RRFSRSDQ

SEQ ID NO: 17196 - protein, 8 aa, Homo Sapiens
RFSRSDQL

SEQ ID NO: 17197 - protein, 8 aa, Homo Sapiens
FSRSDQLK

SEQ ID NO: 17198 - protein, 8 aa, Homo Sapiens
DQLKRHQR

SEQ ID NO: 17199 - protein, 8 aa, Homo Sapiens
QLKRHQRR

SEQ ID NO: 17200 - protein, 8 aa, Homo Sapiens
HQRRHTGV

SEQ ID NO: 17201 - protein, 8 aa, Homo Sapiens
QRRHTGVK

SEQ ID NO: 17202 - protein, 8 aa, Homo Sapiens
GVKPFQCK

SEQ ID NO: 17203 - protein, 8 aa, Homo Sapiens
FQCKTCQR

SEQ ID NO: 17204 - protein, 8 aa, Homo Sapiens
TCQRKFSR

SEQ ID NO: 17205 - protein, 8 aa, Homo Sapiens
KFSRSDHL

SEQ ID NO: 17206 - protein, 8 aa, Homo Sapiens
FSRSDHLK

SEQ ID NO: 17207 - protein, 8 aa, Homo Sapiens
DHLKTHTR

SEQ ID NO: 17208 - protein, 8 aa, Homo Sapiens
HLKTHTRT

SEQ ID NO: 17209 - protein, 8 aa, Homo Sapiens
KTHTRTHT

SEQ ID NO: 17210 - protein, 8 aa, Homo Sapiens
HTRTHTGK

SEQ ID NO: 17211 - protein, 8 aa, Homo Sapiens
HTGKTSEK

SEQ ID NO: 17212 - protein, 8 aa, Homo Sapiens
WPSCQKKF

SEQ ID NO: 17213 - protein, 8 aa, Homo Sapiens
SCQKKFAR

SEQ ID NO: 17214 - protein, 8 aa, Homo Sapiens
KFARSDEL

SEQ ID NO: 17215 - protein, 8 aa, Homo Sapiens
FARSDELV

SEQ ID NO: 17216 - protein, 8 aa, Homo Sapiens
ELVRHHNM

SEQ ID NO: 17217 - protein, 8 aa, Homo Sapiens
RHHNMHQR

SEQ ID NO: 17218 - protein, 8 aa, Homo Sapiens
NMTKLQLA

SEQ ID NO: 17219 - protein, 8 aa, Homo Sapiens
MTKLQLAL

SEQ ID NO: 17220 - protein, 9 aa, Homo Sapiens
MQDPASTCV

SEQ ID NO: 17221 - protein, 9 aa, Homo Sapiens
ASTCVPEPA

SEQ ID NO: 17222 - protein, 9 aa, Homo Sapiens
PEPASQHTL

SEQ ID NO: 17223 - protein, 9 aa, Homo Sapiens
EPASQHTLR

SEQ ID NO: 17224 - protein, 9 aa, Homo Sapiens
TLRSGPGCL

SEQ ID NO: 17225 - protein, 9 aa, Homo Sapiens
LQQPEQQGV

SEQ ID NO: 17226 - protein, 9 aa, Homo Sapiens
GIWAKLGAA

SEQ ID NO: 17227 - protein, 9 aa, Homo Sapiens
KLGAAEASA

SEQ ID NO: 17228 - protein, 9 aa, Homo Sapiens
GAAEASAER

SEQ ID NO: 17229 - protein, 9 aa, Homo Sapiens
AEASAERLQ

SEQ ID NO: 17230 - protein, 9 aa, Homo Sapiens
ASAERLQGR

SEQ ID NO: 17231 - protein, 9 aa, Homo Sapiens
RSRGASGSE

SEQ ID NO: 17232 - protein, 9 aa, Homo Sapiens
DVRDLNALL

SEQ ID NO: 17233 - protein, 9 aa, Homo Sapiens
DLNALLPAV

SEQ ID NO: 17234 - protein, 9 aa, Homo Sapiens
ALLPAVPSL

SEQ ID NO: 17235 - protein, 9 aa, Homo Sapiens
SLGGGGGCA

SEQ ID NO: 17236 - protein, 9 aa, Homo Sapiens
LPVSGAAQW

SEQ ID NO: 17237 - protein, 9 aa, Homo Sapiens
SGAAQWAPV

SEQ ID NO: 17238 - protein, 9 aa, Homo Sapiens
GAAQWAPVL

SEQ ID NO: 17239 - protein, 9 aa, Homo Sapiens
AQWAPVLDF

SEQ ID NO: 17240 - protein, 9 aa, Homo Sapiens
APVLDFAPP

SEQ ID NO: 17241 - protein, 9 aa, Homo Sapiens
VLDFAPPGA

SEQ ID NO: 17242 - protein, 9 aa, Homo Sapiens
FAPPGASAY

SEQ ID NO: 17243 - protein, 9 aa, Homo Sapiens
PPPPPPHSF

SEQ ID NO: 17244 - protein, 9 aa, Homo Sapiens
PPPPPHSFI

SEQ ID NO: 17245 - protein, 9 aa, Homo Sapiens
KQEPSWGGA

SEQ ID NO: 17246 - protein, 9 aa, Homo Sapiens
EPSWGGAEP

SEQ ID NO: 17247 - protein, 9 aa, Homo Sapiens
AEPHEEQCL

SEQ ID NO: 17248 - protein, 9 aa, Homo Sapiens
HEEQCLSAF

SEQ ID NO: 17249 - protein, 9 aa, Homo Sapiens
EEQCLSAFT

SEQ ID NO: 17250 - protein, 9 aa, Homo Sapiens
EQCLSAFTV

SEQ ID NO: 17251 - protein, 9 aa, Homo Sapiens
CLSAFTVHF

SEQ ID NO: 17252 - protein, 9 aa, Homo Sapiens
FTVHFSGQF

SEQ ID NO: 17253 - protein, 9 aa, Homo Sapiens
GQFTGTAGA

SEQ ID NO: 17254 - protein, 9 aa, Homo Sapiens
FTGTAGACR

SEQ ID NO: 17255 - protein, 9 aa, Homo Sapiens
SQASSGQAR

SEQ ID NO: 17256 - protein, 9 aa, Homo Sapiens
QASSGQARM

SEQ ID NO: 17257 - protein, 9 aa, Homo Sapiens
GQARMFPNA

SEQ ID NO: 17258 - protein, 9 aa, Homo Sapiens
ARMFPNAPY

SEQ ID NO: 17259 - protein, 9 aa, Homo Sapiens
RMFPNAPYL

SEQ ID NO: 17260 - protein, 9 aa, Homo Sapiens
FPNAPYLPS

SEQ ID NO: 17261 - protein, 9 aa, Homo Sapiens
NAPYLPSCL

SEQ ID NO: 17262 - protein, 9 aa, Homo Sapiens
YLPSCLESQ

SEQ ID NO: 17263 - protein, 9 aa, Homo Sapiens
SCLESQPAI

SEQ ID NO: 17264 - protein, 9 aa, Homo Sapiens
QPAIRNQGY

SEQ ID NO: 17265 - protein, 9 aa, Homo Sapiens
NQGYSTVTF

SEQ ID NO: 17266 - protein, 9 aa, Homo Sapiens
VTFDGTPSY

SEQ ID NO: 17267 - protein, 9 aa, Homo Sapiens
TPSYGHTPS

SEQ ID NO: 17268 - protein, 9 aa, Homo Sapiens
HTPSHHAAQ

SEQ ID NO: 17269 - protein, 9 aa, Homo Sapiens
TPSHHAAQF

SEQ ID NO: 17270 - protein, 9 aa, Homo Sapiens
AAQFPNHSF

SEQ ID NO: 17271 - protein, 9 aa, Homo Sapiens
AQFPNHSFK

SEQ ID NO: 17272 - protein, 9 aa, Homo Sapiens
DPMGQQGSL

SEQ ID NO: 17273 - protein, 9 aa, Homo Sapiens
SLGEQQYSV

SEQ ID NO: 17274 - protein, 9 aa, Homo Sapiens
QQYSVPPPV

SEQ ID NO: 17275 - protein, 9 aa, Homo Sapiens
QYSVPPPVY

SEQ ID NO: 17276 - protein, 9 aa, Homo Sapiens
SVPPPVYGC

SEQ ID NO: 17277 - protein, 9 aa, Homo Sapiens
TGSQALLLR

SEQ ID NO: 17278 - protein, 9 aa, Homo Sapiens
QALLLRTPY

SEQ ID NO: 17279 - protein, 9 aa, Homo Sapiens
LLLRTPYSS

SEQ ID NO: 17280 - protein, 9 aa, Homo Sapiens
RTPYSSDNL

SEQ ID NO: 17281 - protein, 9 aa, Homo Sapiens
TPYSSDNLY

SEQ ID NO: 17282 - protein, 9 aa, Homo Sapiens
YSSDNLYQM

SEQ ID NO: 17283 - protein, 9 aa, Homo Sapiens
NLYQMTSQL

SEQ ID NO: 17284 - protein, 9 aa, Homo Sapiens
YQMTSQLEC

SEQ ID NO: 17285 - protein, 9 aa, Homo Sapiens
QMTSQLECM

SEQ ID NO: 17286 - protein, 9 aa, Homo Sapiens
TSQLECMTW

SEQ ID NO: 17287 - protein, 9 aa, Homo Sapiens
CMTWNQMNL

SEQ ID NO: 17288 - protein, 9 aa, Homo Sapiens
NQMNLGATL

SEQ ID NO: 17289 - protein, 9 aa, Homo Sapiens
QMNLGATLK

SEQ ID NO: 17290 - protein, 9 aa, Homo Sapiens
TLKGHSTGY

SEQ ID NO: 17291 - protein, 9 aa, Homo Sapiens
ESDNHTTPI

SEQ ID NO: 17292 - protein, 9 aa, Homo Sapiens
HTTPILCGA

SEQ ID NO: 17293 - protein, 9 aa, Homo Sapiens
TPILCGAQY

SEQ ID NO: 17294 - protein, 9 aa, Homo Sapiens
ILCGAQYRI

SEQ ID NO: 17295 - protein, 9 aa, Homo Sapiens
YRIHTHGVF

SEQ ID NO: 17296 - protein, 9 aa, Homo Sapiens
RIHTHGVFR

SEQ ID NO: 17297 - protein, 9 aa, Homo Sapiens
HTHGVFRGI

SEQ ID NO: 17298 - protein, 9 aa, Homo Sapiens
GVFRGIQDV

SEQ ID NO: 17299 - protein, 9 aa, Homo Sapiens
VFRGIQDVR

SEQ ID NO: 17300 - protein, 9 aa, Homo Sapiens
RRVPGVAPT

SEQ ID NO: 17301 - protein, 9 aa, Homo Sapiens
RVPGVAPTL

SEQ ID NO: 17302 - protein, 9 aa, Homo Sapiens
VPGVAPTLV

SEQ ID NO: 17303 - protein, 9 aa, Homo Sapiens
APTLVRSAS

SEQ ID NO: 17304 - protein, 9 aa, Homo Sapiens
TLVRSASET

SEQ ID NO: 17305 - protein, 9 aa, Homo Sapiens
RSASETSEK

SEQ ID NO: 17306 - protein, 9 aa, Homo Sapiens
SASETSEKR

SEQ ID NO: 17307 - protein, 9 aa, Homo Sapiens
SETSEKRPF

SEQ ID NO: 17308 - protein, 9 aa, Homo Sapiens
ETSEKRPFM

SEQ ID NO: 17309 - protein, 9 aa, Homo Sapiens
EKRPFMCAY

SEQ ID NO: 17310 - protein, 9 aa, Homo Sapiens
RPFMCAYPG

SEQ ID NO: 17311 - protein, 9 aa, Homo Sapiens
CAYPGCNKR

SEQ ID NO: 17312 - protein, 9 aa, Homo Sapiens
AYPGCNKRY

SEQ ID NO: 17313 - protein, 9 aa, Homo Sapiens
YPGCNKRYF

SEQ ID NO: 17314 - protein, 9 aa, Homo Sapiens
KRYFKLSHL

SEQ ID NO: 17315 - protein, 9 aa, Homo Sapiens
YFKLSHLQM

SEQ ID NO: 17316 - protein, 9 aa, Homo Sapiens
LSHLQMHSR

SEQ ID NO: 17317 - protein, 9 aa, Homo Sapiens
HSRKHTGEK

SEQ ID NO: 17318 - protein, 9 aa, Homo Sapiens
GEKPYQCDF

SEQ ID NO: 17319 - protein, 9 aa, Homo Sapiens
KDCERRFSR

SEQ ID NO: 17320 - protein, 9 aa, Homo Sapiens
RRFSRSDQL

SEQ ID NO: 17321 - protein, 9 aa, Homo Sapiens
RFSRSDQLK

SEQ ID NO: 17322 - protein, 9 aa, Homo Sapiens
FSRSDQLKR

SEQ ID NO: 17323 - protein, 9 aa, Homo Sapiens
DQLKRHQRR

SEQ ID NO: 17324 - protein, 9 aa, Homo Sapiens
HQRRHTGVK

SEQ ID NO: 17325 - protein, 9 aa, Homo Sapiens
RRHTGVKPF

SEQ ID NO: 17326 - protein, 9 aa, Homo Sapiens
PFQCKTCQR

SEQ ID NO: 17327 - protein, 9 aa, Homo Sapiens
KTCQRKFSR

SEQ ID NO: 17328 - protein, 9 aa, Homo Sapiens
KFSRSDHLK

SEQ ID NO: 17329 - protein, 9 aa, Homo Sapiens
TSEKPFSCR

SEQ ID NO: 17330 - protein, 9 aa, Homo Sapiens
SEKPFSCRW

SEQ ID NO: 17331 - protein, 9 aa, Homo Sapiens
KPFSCRWPS

SEQ ID NO: 17332 - protein, 9 aa, Homo Sapiens
SCRWPSCQK

SEQ ID NO: 17333 - protein, 9 aa, Homo Sapiens
RWPSCQKKF

SEQ ID NO: 17334 - protein, 9 aa, Homo Sapiens
PSCQKKFAR

SEQ ID NO: 17335 - protein, 9 aa, Homo Sapiens
FARSDELVR

SEQ ID NO: 17336 - protein, 9 aa, Homo Sapiens
ELVRHHNMH

SEQ ID NO: 17337 - protein, 9 aa, Homo Sapiens
LVRHHNMHQ

SEQ ID NO: 17338 - protein, 9 aa, Homo Sapiens
NMHQRNMTK

SEQ ID NO: 17339 - protein, 9 aa, Homo Sapiens
QRNMTKLQL

SEQ ID NO: 17340 - protein, 9 aa, Homo Sapiens
NMTKLQLAL

SEQ ID NO: 17341 - protein, 10 aa, Homo Sapiens
MQDPASTCVP

SEQ ID NO: 17342 - protein, 10 aa, Homo Sapiens
VPEPASQHTL

SEQ ID NO: 17343 - protein, 10 aa, Homo Sapiens
HTLRSGPGCL

SEQ ID NO: 17344 - protein, 10 aa, Homo Sapiens
CLQQPEQQGV

SEQ ID NO: 17345 - protein, 10 aa, Homo Sapiens
LGAAEASAER

SEQ ID NO: 17346 - protein, 10 aa, Homo Sapiens
AEASAERLQG

SEQ ID NO: 17347 - protein, 10 aa, Homo Sapiens
EASAERLQGR

SEQ ID NO: 17348 - protein, 10 aa, Homo Sapiens
ASAERLQGRR

SEQ ID NO: 17349 - protein, 10 aa, Homo Sapiens
AERLQGRRSR

SEQ ID NO: 17350 - protein, 10 aa, Homo Sapiens
RLQGRRSRGA

SEQ ID NO: 17351 - protein, 10 aa, Homo Sapiens
RSRGASGSEP

SEQ ID NO: 17352 - protein, 10 aa, Homo Sapiens
QQMGSDVRDL

SEQ ID NO: 17353 - protein, 10 aa, Homo Sapiens
RDLNALLPAV

SEQ ID NO: 17354 - protein, 10 aa, Homo Sapiens
NALLPAVPSL

SEQ ID NO: 17355 - protein, 10 aa, Homo Sapiens
LPAVPSLGGG

SEQ ID NO: 17356 - protein, 10 aa, Homo Sapiens
SLGGGGGCAL

SEQ ID NO: 17357 - protein, 10 aa, Homo Sapiens
LPVSGAAQWA

SEQ ID NO: 17358 - protein, 10 aa, Homo Sapiens
AAQWAPVLDF

SEQ ID NO: 17359 - protein, 10 aa, Homo Sapiens
AQWAPVLDFA

SEQ ID NO: 17360 - protein, 10 aa, Homo Sapiens
APVLDFAPPG

SEQ ID NO: 17361 - protein, 10 aa, Homo Sapiens
PVLDFAPPGA

SEQ ID NO: 17362 - protein, 10 aa, Homo Sapiens
DFAPPGASAY

SEQ ID NO: 17363 - protein, 10 aa, Homo Sapiens
SAYGSLGGPA

SEQ ID NO: 17364 - protein, 10 aa, Homo Sapiens
SLGGPAPPPA

SEQ ID NO: 17365 - protein, 10 aa, Homo Sapiens
PPPPPPPHSF

SEQ ID NO: 17366 - protein, 10 aa, Homo Sapiens
PPPPPPHSFI

SEQ ID NO: 17367 - protein, 10 aa, Homo Sapiens
HSFIKQEPSW

SEQ ID NO: 17368 - protein, 10 aa, Homo Sapiens
EPSWGGAEPH

SEQ ID NO: 17369 - protein, 10 aa, Homo Sapiens
AEPHEEQCLS

SEQ ID NO: 17370 - protein, 10 aa, Homo Sapiens
EEQCLSAFTV

SEQ ID NO: 17371 - protein, 10 aa, Homo Sapiens
CLSAFTVHFS

SEQ ID NO: 17372 - protein, 10 aa, Homo Sapiens
AFTVHFSGQF

SEQ ID NO: 17373 - protein, 10 aa, Homo Sapiens
FTVHFSGQFT

SEQ ID NO: 17374 - protein, 10 aa, Homo Sapiens
GQFTGTAGAC

SEQ ID NO: 17375 - protein, 10 aa, Homo Sapiens
QFTGTAGACR

SEQ ID NO: 17376 - protein, 10 aa, Homo Sapiens
FTGTAGACRY

SEQ ID NO: 17377 - protein, 10 aa, Homo Sapiens
SQASSGQARM

SEQ ID NO: 17378 - protein, 10 aa, Homo Sapiens
QASSGQARMF

SEQ ID NO: 17379 - protein, 10 aa, Homo Sapiens
QARMFPNAPY

SEQ ID NO: 17380 - protein, 10 aa, Homo Sapiens
RMFPNAPYLP

SEQ ID NO: 17381 - protein, 10 aa, Homo Sapiens
FPNAPYLPSC

SEQ ID NO: 17382 - protein, 10 aa, Homo Sapiens
YLPSCLESQP

SEQ ID NO: 17383 - protein, 10 aa, Homo Sapiens
LPSCLESQPA

SEQ ID NO: 17384 - protein, 10 aa, Homo Sapiens
SQPAIRNQGY

SEQ ID NO: 17385 - protein, 10 aa, Homo Sapiens
AIRNQGYSTV

SEQ ID NO: 17386 - protein, 10 aa, Homo Sapiens
RNQGYSTVTF

SEQ ID NO: 17387 - protein, 10 aa, Homo Sapiens
TVTFDGTPSY

SEQ ID NO: 17388 - protein, 10 aa, Homo Sapiens
TPSYGHTPSH

SEQ ID NO: 17389 - protein, 10 aa, Homo Sapiens
HTPSHHAAQF

SEQ ID NO: 17390 - protein, 10 aa, Homo Sapiens
HAAQFPNHSF

SEQ ID NO: 17391 - protein, 10 aa, Homo Sapiens
AAQFPNHSFK

SEQ ID NO: 17392 - protein, 10 aa, Homo Sapiens
FPNHSFKHED

SEQ ID NO: 17393 - protein, 10 aa, Homo Sapiens
QQGSLGEQQY

SEQ ID NO: 17394 - protein, 10 aa, Homo Sapiens
GSLGEQQYSV

SEQ ID NO: 17395 - protein, 10 aa, Homo Sapiens
EQQYSVPPPV

SEQ ID NO: 17396 - protein, 10 aa, Homo Sapiens
QQYSVPPPVY

SEQ ID NO: 17397 - protein, 10 aa, Homo Sapiens
VPPPVYGCHT

SEQ ID NO: 17398 - protein, 10 aa, Homo Sapiens
CTGSQALLLR

SEQ ID NO: 17399 - protein, 10 aa, Homo Sapiens
SQALLLRTPY

SEQ ID NO: 17400 - protein, 10 aa, Homo Sapiens
RTPYSSDNLY

SEQ ID NO: 17401 - protein, 10 aa, Homo Sapiens
PYSSDNLYQM

SEQ ID NO: 17402 - protein, 10 aa, Homo Sapiens
YQMTSQLECM

SEQ ID NO: 17403 - protein, 10 aa, Homo Sapiens
MTSQLECMTW

SEQ ID NO: 17404 - protein, 10 aa, Homo Sapiens
SQLECMTWNQ

SEQ ID NO: 17405 - protein, 10 aa, Homo Sapiens
ECMTWNQMNL

SEQ ID NO: 17406 - protein, 10 aa, Homo Sapiens
MTWNQMNLGA

SEQ ID NO: 17407 - protein, 10 aa, Homo Sapiens
NQMNLGATLK

SEQ ID NO: 17408 - protein, 10 aa, Homo Sapiens
ATLKGHSTGY

SEQ ID NO: 17409 - protein, 10 aa, Homo Sapiens
YESDNHTTPI

SEQ ID NO: 17410 - protein, 10 aa, Homo Sapiens
ESDNHTTPIL

SEQ ID NO: 17411 - protein, 10 aa, Homo Sapiens
TTPILCGAQY

SEQ ID NO: 17412 - protein, 10 aa, Homo Sapiens
TPILCGAQYR

SEQ ID NO: 17413 - protein, 10 aa, Homo Sapiens
PILCGAQYRI

SEQ ID NO: 17414 - protein, 10 aa, Homo Sapiens
AQYRIHTHGV

SEQ ID NO: 17415 - protein, 10 aa, Homo Sapiens
QYRIHTHGVF

SEQ ID NO: 17416 - protein, 10 aa, Homo Sapiens
YRIHTHGVFR

SEQ ID NO: 17417 - protein, 10 aa, Homo Sapiens
GVFRGIQDVR

SEQ ID NO: 17418 - protein, 10 aa, Homo Sapiens
VFRGIQDVRR

SEQ ID NO: 17419 - protein, 10 aa, Homo Sapiens
IQDVRRVPGV

SEQ ID NO: 17420 - protein, 10 aa, Homo Sapiens
RRVPGVAPTL

SEQ ID NO: 17421 - protein, 10 aa, Homo Sapiens
RVPGVAPTLV

SEQ ID NO: 17422 - protein, 10 aa, Homo Sapiens
GVAPTLVRSA

SEQ ID NO: 17423 - protein, 10 aa, Homo Sapiens
APTLVRSASE

SEQ ID NO: 17424 - protein, 10 aa, Homo Sapiens
RSASETSEKR

SEQ ID NO: 17425 - protein, 10 aa, Homo Sapiens
SEKRPFMCAY

SEQ ID NO: 17426 - protein, 10 aa, Homo Sapiens
FMCAYPGCNK

SEQ ID NO: 17427 - protein, 10 aa, Homo Sapiens
AYPGCNKRYF

SEQ ID NO: 17428 - protein, 10 aa, Homo Sapiens
RYFKLSHLQM

SEQ ID NO: 17429 - protein, 10 aa, Homo Sapiens
KLSHLQMHSR

SEQ ID NO: 17430 - protein, 10 aa, Homo Sapiens
LSHLQMHSRK

SEQ ID NO: 17431 - protein, 10 aa, Homo Sapiens
YQCDFKDCER

SEQ ID NO: 17432 - protein, 10 aa, Homo Sapiens
FKDCERRFSR

SEQ ID NO: 17433 - protein, 10 aa, Homo Sapiens
RRFSRSDQLK

SEQ ID NO: 17434 - protein, 10 aa, Homo Sapiens
RFSRSDQLKR

SEQ ID NO: 17435 - protein, 10 aa, Homo Sapiens
RSDQLKRHQR

SEQ ID NO: 17436 - protein, 10 aa, Homo Sapiens
RHQRRHTGVK

SEQ ID NO: 17437 - protein, 10 aa, Homo Sapiens
HTGVKPFQCK

SEQ ID NO: 17438 - protein, 10 aa, Homo Sapiens
KPFQCKTCQR

SEQ ID NO: 17439 - protein, 10 aa, Homo Sapiens
FQCKTCQRKF

SEQ ID NO: 17440 - protein, 10 aa, Homo Sapiens
CKTCQRKFSR

SEQ ID NO: 17441 - protein, 10 aa, Homo Sapiens
RKFSRSDHLK

SEQ ID NO: 17442 - protein, 10 aa, Homo Sapiens
RSDHLKTHTR

SEQ ID NO: 17443 - protein, 10 aa, Homo Sapiens
KTHTRTHTGK

SEQ ID NO: 17444 - protein, 10 aa, Homo Sapiens
RTHTGKTSEK

SEQ ID NO: 17445 - protein, 10 aa, Homo Sapiens
KTSEKPFSCR

SEQ ID NO: 17446 - protein, 10 aa, Homo Sapiens
TSEKPFSCRW

SEQ ID NO: 17447 - protein, 10 aa, Homo Sapiens
KPFSCRWPSC

SEQ ID NO: 17448 - protein, 10 aa, Homo Sapiens
FSCRWPSCQK

SEQ ID NO: 17449 - protein, 10 aa, Homo Sapiens
SCRWPSCQKK

SEQ ID NO: 17450 - protein, 10 aa, Homo Sapiens
WPSCQKKFAR

SEQ ID NO: 17451 - protein, 10 aa, Homo Sapiens
KFARSDELVR

SEQ ID NO: 17452 - protein, 10 aa, Homo Sapiens
LVRHHNMHQR

SEQ ID NO: 17453 - protein, 10 aa, Homo Sapiens
HNMHQRNMTK

SEQ ID NO: 17454 - protein, 10 aa, Homo Sapiens
NMHQRNMTKL

SEQ ID NO: 17455 - protein, 11 aa, Homo Sapiens
MQDPASTCVPE

SEQ ID NO: 17456 - protein, 11 aa, Homo Sapiens
DPASTCVPEPA

SEQ ID NO: 17457 - protein, 11 aa, Homo Sapiens
CVPEPASQHTL

SEQ ID NO: 17458 - protein, 11 aa, Homo Sapiens
TLRSGPGCLQQ

SEQ ID NO: 17459 - protein, 11 aa, Homo Sapiens
GVRDPGGIWAK

SEQ ID NO: 17460 - protein, 11 aa, Homo Sapiens
GIWAKLGAAEA

SEQ ID NO: 17461 - protein, 11 aa, Homo Sapiens
KLGAAEASAER

SEQ ID NO: 17462 - protein, 11 aa, Homo Sapiens
EASAERLQGRR

SEQ ID NO: 17463 - protein, 11 aa, Homo Sapiens
RSRGASGSEPQ

SEQ ID NO: 17464 - protein, 11 aa, Homo Sapiens
MGSDVRDLNAL

SEQ ID NO: 17465 - protein, 11 aa, Homo Sapiens
ALLPAVPSLGG

SEQ ID NO: 17466 - protein, 11 aa, Homo Sapiens
LPAVPSLGGGG

SEQ ID NO: 17467 - protein, 11 aa, Homo Sapiens
VPSLGGGGGCA

SEQ ID NO: 17468 - protein, 11 aa, Homo Sapiens
SLGGGGGCALP

SEQ ID NO: 17469 - protein, 11 aa, Homo Sapiens
CALPVSGAAQW

SEQ ID NO: 17470 - protein, 11 aa, Homo Sapiens
ALPVSGAAQWA

SEQ ID NO: 17471 - protein, 11 aa, Homo Sapiens
LPVSGAAQWAP

SEQ ID NO: 17472 - protein, 11 aa, Homo Sapiens
PVSGAAQWAPV

SEQ ID NO: 17473 - protein, 11 aa, Homo Sapiens
GAAQWAPVLDF

SEQ ID NO: 17474 - protein, 11 aa, Homo Sapiens
APVLDFAPPGA

SEQ ID NO: 17475 - protein, 11 aa, Homo Sapiens
VLDFAPPGASA

SEQ ID NO: 17476 - protein, 11 aa, Homo Sapiens
FAPPGASAYGS

SEQ ID NO: 17477 - protein, 11 aa, Homo Sapiens
APPGASAYGSL

SEQ ID NO: 17478 - protein, 11 aa, Homo Sapiens
PPPPPPPPHSF

SEQ ID NO: 17479 - protein, 11 aa, Homo Sapiens
PPPPPPPHSFI

SEQ ID NO: 17480 - protein, 11 aa, Homo Sapiens
FIKQEPSWGGA

SEQ ID NO: 17481 - protein, 11 aa, Homo Sapiens
AEPHEEQCLSA

SEQ ID NO: 17482 - protein, 11 aa, Homo Sapiens
EPHEEQCLSAF

SEQ ID NO: 17483 - protein, 11 aa, Homo Sapiens
HEEQCLSAFTV

SEQ ID NO: 17484 - protein, 11 aa, Homo Sapiens
EQCLSAFTVHF

SEQ ID NO: 17485 - protein, 11 aa, Homo Sapiens
SAFTVHFSGQF

SEQ ID NO: 17486 - protein, 11 aa, Homo Sapiens
FSGQFTGTAGA

SEQ ID NO: 17487 - protein, 11 aa, Homo Sapiens
GQFTGTAGACR

SEQ ID NO: 17488 - protein, 11 aa, Homo Sapiens
GTAGACRYGPF

SEQ ID NO: 17489 - protein, 11 aa, Homo Sapiens
GPFGPPPPSQA

SEQ ID NO: 17490 - protein, 11 aa, Homo Sapiens
SQASSGQARMF

SEQ ID NO: 17491 - protein, 11 aa, Homo Sapiens
GQARMFPNAPY

SEQ ID NO: 17492 - protein, 11 aa, Homo Sapiens
RMFPNAPYLPS

SEQ ID NO: 17493 - protein, 11 aa, Homo Sapiens
FPNAPYLPSCL

SEQ ID NO: 17494 - protein, 11 aa, Homo Sapiens
YLPSCLESQPA

SEQ ID NO: 17495 - protein, 11 aa, Homo Sapiens
LPSCLESQPAI

SEQ ID NO: 17496 - protein, 11 aa, Homo Sapiens
ESQPAIRNQGY

SEQ ID NO: 17497 - protein, 11 aa, Homo Sapiens
PAIRNQGYSTV

SEQ ID NO: 17498 - protein, 11 aa, Homo Sapiens
IRNQGYSTVTF

SEQ ID NO: 17499 - protein, 11 aa, Homo Sapiens
STVTFDGTPSY

SEQ ID NO: 17500 - protein, 11 aa, Homo Sapiens
GHTPSHHAAQF

SEQ ID NO: 17501 - protein, 11 aa, Homo Sapiens
HHAAQFPNHSF

SEQ ID NO: 17502 - protein, 11 aa, Homo Sapiens
HAAQFPNHSFK

SEQ ID NO: 17503 - protein, 11 aa, Homo Sapiens
AQFPNHSFKHE

SEQ ID NO: 17504 - protein, 11 aa, Homo Sapiens
HEDPMGQQGSL

SEQ ID NO: 17505 - protein, 11 aa, Homo Sapiens
GQQGSLGEQQY

SEQ ID NO: 17506 - protein, 11 aa, Homo Sapiens
QGSLGEQQYSV

SEQ ID NO: 17507 - protein, 11 aa, Homo Sapiens
SLGEQQYSVPP

SEQ ID NO: 17508 - protein, 11 aa, Homo Sapiens
GEQQYSVPPPV

SEQ ID NO: 17509 - protein, 11 aa, Homo Sapiens
EQQYSVPPPVY

SEQ ID NO: 17510 - protein, 11 aa, Homo Sapiens
VPPPVYGCHTP

SEQ ID NO: 17511 - protein, 11 aa, Homo Sapiens
TPTDSCTGSQA

SEQ ID NO: 17512 - protein, 11 aa, Homo Sapiens
GSQALLLRTPY

SEQ ID NO: 17513 - protein, 11 aa, Homo Sapiens
LLRTPYSSDNL

SEQ ID NO: 17514 - protein, 11 aa, Homo Sapiens
TPYSSDNLYQM

SEQ ID NO: 17515 - protein, 11 aa, Homo Sapiens
NLYQMTSQLEC

SEQ ID NO: 17516 - protein, 11 aa, Homo Sapiens
LYQMTSQLECM

SEQ ID NO: 17517 - protein, 11 aa, Homo Sapiens
YQMTSQLECMT

SEQ ID NO: 17518 - protein, 11 aa, Homo Sapiens
QMTSQLECMTW

SEQ ID NO: 17519 - protein, 11 aa, Homo Sapiens
SQLECMTWNQM

SEQ ID NO: 17520 - protein, 11 aa, Homo Sapiens
LECMTWNQMNL

SEQ ID NO: 17521 - protein, 11 aa, Homo Sapiens
CMTWNQMNLGA

SEQ ID NO: 17522 - protein, 11 aa, Homo Sapiens
MTWNQMNLGAT

SEQ ID NO: 17523 - protein, 11 aa, Homo Sapiens
NLGATLKGHST

SEQ ID NO: 17524 - protein, 11 aa, Homo Sapiens
YESDNHTTPIL

SEQ ID NO: 17525 - protein, 11 aa, Homo Sapiens
HTTPILCGAQY

SEQ ID NO: 17526 - protein, 11 aa, Homo Sapiens
TTPILCGAQYR

SEQ ID NO: 17527 - protein, 11 aa, Homo Sapiens
TPILCGAQYRI

SEQ ID NO: 17528 - protein, 11 aa, Homo Sapiens
ILCGAQYRIHT

SEQ ID NO: 17529 - protein, 11 aa, Homo Sapiens
GAQYRIHTHGV

SEQ ID NO: 17530 - protein, 11 aa, Homo Sapiens
AQYRIHTHGVF

SEQ ID NO: 17531 - protein, 11 aa, Homo Sapiens
QYRIHTHGVFR

SEQ ID NO: 17532 - protein, 11 aa, Homo Sapiens
RIHTHGVFRGI

SEQ ID NO: 17533 - protein, 11 aa, Homo Sapiens
HGVFRGIQDVR

SEQ ID NO: 17534 - protein, 11 aa, Homo Sapiens
GVFRGIQDVRR

SEQ ID NO: 17535 - protein, 11 aa, Homo Sapiens
GIQDVRRVPGV

SEQ ID NO: 17536 - protein, 11 aa, Homo Sapiens
RVPGVAPTLVR

SEQ ID NO: 17537 - protein, 11 aa, Homo Sapiens
APTLVRSASET

SEQ ID NO: 17538 - protein, 11 aa, Homo Sapiens
LVRSASETSEK

SEQ ID NO: 17539 - protein, 11 aa, Homo Sapiens
SASETSEKRPF

SEQ ID NO: 17540 - protein, 11 aa, Homo Sapiens
ETSEKRPFMCA

SEQ ID NO: 17541 - protein, 11 aa, Homo Sapiens
TSEKRPFMCAY

SEQ ID NO: 17542 - protein, 11 aa, Homo Sapiens
PFMCAYPGCNK

SEQ ID NO: 17543 - protein, 11 aa, Homo Sapiens
FMCAYPGCNKR

SEQ ID NO: 17544 - protein, 11 aa, Homo Sapiens
AYPGCNKRYFK

SEQ ID NO: 17545 - protein, 11 aa, Homo Sapiens
YPGCNKRYFKL

SEQ ID NO: 17546 - protein, 11 aa, Homo Sapiens
KRYFKLSHLQM

SEQ ID NO: 17547 - protein, 11 aa, Homo Sapiens
RYFKLSHLQMH

SEQ ID NO: 17548 - protein, 11 aa, Homo Sapiens
KLSHLQMHSRK

SEQ ID NO: 17549 - protein, 11 aa, Homo Sapiens
QMHSRKHTGEK

SEQ ID NO: 17550 - protein, 11 aa, Homo Sapiens
HSRKHTGEKPY

SEQ ID NO: 17551 - protein, 11 aa, Homo Sapiens
YQCDFKDCERR

SEQ ID NO: 17552 - protein, 11 aa, Homo Sapiens
DFKDCERRFSR

SEQ ID NO: 17553 - protein, 11 aa, Homo Sapiens
RRFSRSDQLKR

SEQ ID NO: 17554 - protein, 11 aa, Homo Sapiens
RSDQLKRHQRR

SEQ ID NO: 17555 - protein, 11 aa, Homo Sapiens
KRHQRRHTGVK

SEQ ID NO: 17556 - protein, 11 aa, Homo Sapiens
HQRRHTGVKPF

SEQ ID NO: 17557 - protein, 11 aa, Homo Sapiens
PFQCKTCQRKF

SEQ ID NO: 17558 - protein, 11 aa, Homo Sapiens
QCKTCQRKFSR

SEQ ID NO: 17559 - protein, 11 aa, Homo Sapiens
QRKFSRSDHLK

SEQ ID NO: 17560 - protein, 11 aa, Homo Sapiens
KTHTRTHTGKT

SEQ ID NO: 17561 - protein, 11 aa, Homo Sapiens
KTSEKPFSCRW

SEQ ID NO: 17562 - protein, 11 aa, Homo Sapiens
FSCRWPSCQKK

SEQ ID NO: 17563 - protein, 11 aa, Homo Sapiens
RWPSCQKKFAR

SEQ ID NO: 17564 - protein, 11 aa, Homo Sapiens
ELVRHHNMHQR

SEQ ID NO: 17565 - protein, 11 aa, Homo Sapiens
MHQRNMTKLQL

SEQ ID NO: 17566 - protein, 11 aa, Homo Sapiens
HQRNMTKLQLA

SEQ ID NO: 17567 - protein, 11 aa, Homo Sapiens
QRNMTKLQLAL

SEQ ID NO: 17568 - protein, 13 aa, Homo Sapiens
MQDPASTCVPEPA

SEQ ID NO: 17569 - protein, 13 aa, Homo Sapiens
QDPASTCVPEPAS

SEQ ID NO: 17570 - protein, 13 aa, Homo Sapiens
DPASTCVPEPASQ

SEQ ID NO: 17571 - protein, 13 aa, Homo Sapiens
PASTCVPEPASQH

SEQ ID NO: 17572 - protein, 13 aa, Homo Sapiens
ASTCVPEPASQHT

SEQ ID NO: 17573 - protein, 13 aa, Homo Sapiens
STCVPEPASQHTL

SEQ ID NO: 17574 - protein, 13 aa, Homo Sapiens
TCVPEPASQHTLR

SEQ ID NO: 17575 - protein, 13 aa, Homo Sapiens
CVPEPASQHTLRS

SEQ ID NO: 17576 - protein, 13 aa, Homo Sapiens
VPEPASQHTLRSG

SEQ ID NO: 17577 - protein, 13 aa, Homo Sapiens
PEPASQHTLRSGP

SEQ ID NO: 17578 - protein, 13 aa, Homo Sapiens
EPASQHTLRSGPG

SEQ ID NO: 17579 - protein, 13 aa, Homo Sapiens
PASQHTLRSGPGC

SEQ ID NO: 17580 - protein, 13 aa, Homo Sapiens
ASQHTLRSGPGCL

SEQ ID NO: 17581 - protein, 13 aa, Homo Sapiens
SQHTLRSGPGCLQ

SEQ ID NO: 17582 - protein, 13 aa, Homo Sapiens
QHTLRSGPGCLQQ

SEQ ID NO: 17583 - protein, 13 aa, Homo Sapiens
HTLRSGPGCLQQP

SEQ ID NO: 17584 - protein, 13 aa, Homo Sapiens
TLRSGPGCLQQPE

SEQ ID NO: 17585 - protein, 13 aa, Homo Sapiens
LRSGPGCLQQPEQ

SEQ ID NO: 17586 - protein, 13 aa, Homo Sapiens
RSGPGCLQQPEQQ

SEQ ID NO: 17587 - protein, 13 aa, Homo Sapiens
SGPGCLQQPEQQG

SEQ ID NO: 17588 - protein, 13 aa, Homo Sapiens
GPGCLQQPEQQGV

SEQ ID NO: 17589 - protein, 13 aa, Homo Sapiens
PGCLQQPEQQGVR

SEQ ID NO: 17590 - protein, 13 aa, Homo Sapiens
GCLQQPEQQGVRD

SEQ ID NO: 17591 - protein, 13 aa, Homo Sapiens
CLQQPEQQGVRDP

SEQ ID NO: 17592 - protein, 13 aa, Homo Sapiens
LQQPEQQGVRDPG

SEQ ID NO: 17593 - protein, 13 aa, Homo Sapiens
QQPEQQGVRDPGG

SEQ ID NO: 17594 - protein, 13 aa, Homo Sapiens
QPEQQGVRDPGGI

SEQ ID NO: 17595 - protein, 13 aa, Homo Sapiens
PEQQGVRDPGGIW

SEQ ID NO: 17596 - protein, 13 aa, Homo Sapiens
EQQGVRDPGGIWA

SEQ ID NO: 17597 - protein, 13 aa, Homo Sapiens
QQGVRDPGGIWAK

SEQ ID NO: 17598 - protein, 13 aa, Homo Sapiens
QGVRDPGGIWAKL

SEQ ID NO: 17599 - protein, 13 aa, Homo Sapiens
GVRDPGGIWAKLG

SEQ ID NO: 17600 - protein, 13 aa, Homo Sapiens
VRDPGGIWAKLGA

SEQ ID NO: 17601 - protein, 13 aa, Homo Sapiens
RDPGGIWAKLGAA

SEQ ID NO: 17602 - protein, 13 aa, Homo Sapiens
DPGGIWAKLGAAE

SEQ ID NO: 17603 - protein, 13 aa, Homo Sapiens
PGGIWAKLGAAEA

SEQ ID NO: 17604 - protein, 13 aa, Homo Sapiens
GGIWAKLGAAEAS

SEQ ID NO: 17605 - protein, 13 aa, Homo Sapiens
GIWAKLGAAEASA

SEQ ID NO: 17606 - protein, 13 aa, Homo Sapiens
IWAKLGAAEASAE

SEQ ID NO: 17607 - protein, 13 aa, Homo Sapiens
WAKLGAAEASAER

SEQ ID NO: 17608 - protein, 13 aa, Homo Sapiens
AKLGAAEASAERL

SEQ ID NO: 17609 - protein, 13 aa, Homo Sapiens
KLGAAEASAERLQ

SEQ ID NO: 17610 - protein, 13 aa, Homo Sapiens
LGAAEASAERLQG

SEQ ID NO: 17611 - protein, 13 aa, Homo Sapiens
GAAEASAERLQGR

SEQ ID NO: 17612 - protein, 13 aa, Homo Sapiens
AAEASAERLQGRR

SEQ ID NO: 17613 - protein, 13 aa, Homo Sapiens
AEASAERLQGRRS

SEQ ID NO: 17614 - protein, 13 aa, Homo Sapiens
EASAERLQGRRSR

SEQ ID NO: 17615 - protein, 13 aa, Homo Sapiens
ASAERLQGRRSRG

SEQ ID NO: 17616 - protein, 13 aa, Homo Sapiens
SAERLQGRRSRGA

SEQ ID NO: 17617 - protein, 13 aa, Homo Sapiens
AERLQGRRSRGAS

SEQ ID NO: 17618 - protein, 13 aa, Homo Sapiens
ERLQGRRSRGASG

SEQ ID NO: 17619 - protein, 13 aa, Homo Sapiens
RLQGRRSRGASGS

SEQ ID NO: 17620 - protein, 13 aa, Homo Sapiens
LQGRRSRGASGSE

SEQ ID NO: 17621 - protein, 13 aa, Homo Sapiens
QGRRSRGASGSEP

SEQ ID NO: 17622 - protein, 13 aa, Homo Sapiens
GRRSRGASGSEPQ

SEQ ID NO: 17623 - protein, 13 aa, Homo Sapiens
RRSRGASGSEPQQ

SEQ ID NO: 17624 - protein, 13 aa, Homo Sapiens
RSRGASGSEPQQM

SEQ ID NO: 17625 - protein, 13 aa, Homo Sapiens
SRGASGSEPQQMG

SEQ ID NO: 17626 - protein, 13 aa, Homo Sapiens
RGASGSEPQQMGS

SEQ ID NO: 17627 - protein, 13 aa, Homo Sapiens
GASGSEPQQMGSD

SEQ ID NO: 17628 - protein, 13 aa, Homo Sapiens
ASGSEPQQMGSDV

SEQ ID NO: 17629 - protein, 13 aa, Homo Sapiens
SGSEPQQMGSDVR

SEQ ID NO: 17630 - protein, 13 aa, Homo Sapiens
GSEPQQMGSDVRD

SEQ ID NO: 17631 - protein, 13 aa, Homo Sapiens
SEPQQMGSDVRDL

SEQ ID NO: 17632 - protein, 13 aa, Homo Sapiens
EPQQMGSDVRDLN

SEQ ID NO: 17633 - protein, 13 aa, Homo Sapiens
PQQMGSDVRDLNA

SEQ ID NO: 17634 - protein, 13 aa, Homo Sapiens
QQMGSDVRDLNAL

SEQ ID NO: 17635 - protein, 13 aa, Homo Sapiens
QMGSDVRDLNALL

SEQ ID NO: 17636 - protein, 13 aa, Homo Sapiens
MGSDVRDLNALLP

SEQ ID NO: 17637 - protein, 13 aa, Homo Sapiens
GSDVRDLNALLPA

SEQ ID NO: 17638 - protein, 13 aa, Homo Sapiens
SDVRDLNALLPAV

SEQ ID NO: 17639 - protein, 13 aa, Homo Sapiens
DVRDLNALLPAVP

SEQ ID NO: 17640 - protein, 13 aa, Homo Sapiens
VRDLNALLPAVPS

SEQ ID NO: 17641 - protein, 13 aa, Homo Sapiens
RDLNALLPAVPSL

SEQ ID NO: 17642 - protein, 13 aa, Homo Sapiens
DLNALLPAVPSLG

SEQ ID NO: 17643 - protein, 13 aa, Homo Sapiens
LNALLPAVPSLGG

SEQ ID NO: 17644 - protein, 13 aa, Homo Sapiens
NALLPAVPSLGGG

SEQ ID NO: 17645 - protein, 13 aa, Homo Sapiens
ALLPAVPSLGGGG

SEQ ID NO: 17646 - protein, 13 aa, Homo Sapiens
LLPAVPSLGGGGG

SEQ ID NO: 17647 - protein, 13 aa, Homo Sapiens
LPAVPSLGGGGGC

SEQ ID NO: 17648 - protein, 13 aa, Homo Sapiens
PAVPSLGGGGGCA

SEQ ID NO: 17649 - protein, 13 aa, Homo Sapiens
AVPSLGGGGGCAL

SEQ ID NO: 17650 - protein, 13 aa, Homo Sapiens
VPSLGGGGGCALP

SEQ ID NO: 17651 - protein, 13 aa, Homo Sapiens
PSLGGGGGCALPV

SEQ ID NO: 17652 - protein, 13 aa, Homo Sapiens
SLGGGGGCALPVS

SEQ ID NO: 17653 - protein, 13 aa, Homo Sapiens
LGGGGGCALPVSG

SEQ ID NO: 17654 - protein, 13 aa, Homo Sapiens
GGGGGCALPVSGA

SEQ ID NO: 17655 - protein, 13 aa, Homo Sapiens
GGGGCALPVSGAA

SEQ ID NO: 17656 - protein, 13 aa, Homo Sapiens
GGGCALPVSGAAQ

SEQ ID NO: 17657 - protein, 13 aa, Homo Sapiens
GGCALPVSGAAQW

SEQ ID NO: 17658 - protein, 13 aa, Homo Sapiens
GCALPVSGAAQWA

SEQ ID NO: 17659 - protein, 13 aa, Homo Sapiens
CALPVSGAAQWAP

SEQ ID NO: 17660 - protein, 13 aa, Homo Sapiens
ALPVSGAAQWAPV

SEQ ID NO: 17661 - protein, 13 aa, Homo Sapiens
LPVSGAAQWAPVL

SEQ ID NO: 17662 - protein, 13 aa, Homo Sapiens
PVSGAAQWAPVLD

SEQ ID NO: 17663 - protein, 13 aa, Homo Sapiens
VSGAAQWAPVLDF

SEQ ID NO: 17664 - protein, 13 aa, Homo Sapiens
SGAAQWAPVLDFA

SEQ ID NO: 17665 - protein, 13 aa, Homo Sapiens
GAAQWAPVLDFAP

SEQ ID NO: 17666 - protein, 13 aa, Homo Sapiens
AAQWAPVLDFAPP

SEQ ID NO: 17667 - protein, 13 aa, Homo Sapiens
AQWAPVLDFAPPG

SEQ ID NO: 17668 - protein, 13 aa, Homo Sapiens
QWAPVLDFAPPGA

SEQ ID NO: 17669 - protein, 13 aa, Homo Sapiens
WAPVLDFAPPGAS

SEQ ID NO: 17670 - protein, 13 aa, Homo Sapiens
APVLDFAPPGASA

SEQ ID NO: 17671 - protein, 13 aa, Homo Sapiens
PVLDFAPPGASAY

SEQ ID NO: 17672 - protein, 13 aa, Homo Sapiens
VLDFAPPGASAYG

SEQ ID NO: 17673 - protein, 13 aa, Homo Sapiens
LDFAPPGASAYGS

SEQ ID NO: 17674 - protein, 13 aa, Homo Sapiens
DFAPPGASAYGSL

SEQ ID NO: 17675 - protein, 13 aa, Homo Sapiens
FAPPGASAYGSLG

SEQ ID NO: 17676 - protein, 13 aa, Homo Sapiens
APPGASAYGSLGG

SEQ ID NO: 17677 - protein, 13 aa, Homo Sapiens
PPGASAYGSLGGP

SEQ ID NO: 17678 - protein, 13 aa, Homo Sapiens
PGASAYGSLGGPA

SEQ ID NO: 17679 - protein, 13 aa, Homo Sapiens
GASAYGSLGGPAP

SEQ ID NO: 17680 - protein, 13 aa, Homo Sapiens
ASAYGSLGGPAPP

SEQ ID NO: 17681 - protein, 13 aa, Homo Sapiens
SAYGSLGGPAPPP

SEQ ID NO: 17682 - protein, 13 aa, Homo Sapiens
AYGSLGGPAPPPA

SEQ ID NO: 17683 - protein, 13 aa, Homo Sapiens
YGSLGGPAPPPAP

SEQ ID NO: 17684 - protein, 13 aa, Homo Sapiens
GSLGGPAPPPAPP

SEQ ID NO: 17685 - protein, 13 aa, Homo Sapiens
SLGGPAPPPAPPP

SEQ ID NO: 17686 - protein, 13 aa, Homo Sapiens
LGGPAPPPAPPPP

SEQ ID NO: 17687 - protein, 13 aa, Homo Sapiens
GGPAPPPAPPPPP

SEQ ID NO: 17688 - protein, 13 aa, Homo Sapiens
GPAPPPAPPPPPP

SEQ ID NO: 17689 - protein, 13 aa, Homo Sapiens
PAPPPAPPPPPPP

SEQ ID NO: 17690 - protein, 13 aa, Homo Sapiens
APPPAPPPPPPPP

SEQ ID NO: 17691 - protein, 13 aa, Homo Sapiens
PPPAPPPPPPPPP

SEQ ID NO: 17692 - protein, 13 aa, Homo Sapiens
PPAPPPPPPPPPH

SEQ ID NO: 17693 - protein, 13 aa, Homo Sapiens
PAPPPPPPPPPHS

SEQ ID NO: 17694 - protein, 13 aa, Homo Sapiens
APPPPPPPPPHSF

SEQ ID NO: 17695 - protein, 13 aa, Homo Sapiens
PPPPPPPPPHSFI

SEQ ID NO: 17696 - protein, 13 aa, Homo Sapiens
PPPPPPPPHSFIK

SEQ ID NO: 17697 - protein, 13 aa, Homo Sapiens
PPPPPPPHSFIKQ

SEQ ID NO: 17698 - protein, 13 aa, Homo Sapiens
PPPPPPHSFIKQE

SEQ ID NO: 17699 - protein, 13 aa, Homo Sapiens
PPPPPHSFIKQEP

SEQ ID NO: 17700 - protein, 13 aa, Homo Sapiens
PPPPHSFIKQEPS

SEQ ID NO: 17701 - protein, 13 aa, Homo Sapiens
PPPHSFIKQEPSW

SEQ ID NO: 17702 - protein, 13 aa, Homo Sapiens
PPHSFIKQEPSWG

SEQ ID NO: 17703 - protein, 13 aa, Homo Sapiens
PHSFIKQEPSWGG

SEQ ID NO: 17704 - protein, 13 aa, Homo Sapiens
HSFIKQEPSWGGA

SEQ ID NO: 17705 - protein, 13 aa, Homo Sapiens
SFIKQEPSWGGAE

SEQ ID NO: 17706 - protein, 13 aa, Homo Sapiens
FIKQEPSWGGAEP

SEQ ID NO: 17707 - protein, 13 aa, Homo Sapiens
IKQEPSWGGAEPH

SEQ ID NO: 17708 - protein, 13 aa, Homo Sapiens
KQEPSWGGAEPHE

SEQ ID NO: 17709 - protein, 13 aa, Homo Sapiens
QEPSWGGAEPHEE

SEQ ID NO: 17710 - protein, 13 aa, Homo Sapiens
EPSWGGAEPHEEQ

SEQ ID NO: 17711 - protein, 13 aa, Homo Sapiens
PSWGGAEPHEEQC

SEQ ID NO: 17712 - protein, 13 aa, Homo Sapiens
SWGGAEPHEEQCL

SEQ ID NO: 17713 - protein, 13 aa, Homo Sapiens
WGGAEPHEEQCLS

SEQ ID NO: 17714 - protein, 13 aa, Homo Sapiens
GGAEPHEEQCLSA

SEQ ID NO: 17715 - protein, 13 aa, Homo Sapiens
GAEPHEEQCLSAF

SEQ ID NO: 17716 - protein, 13 aa, Homo Sapiens
AEPHEEQCLSAFT

SEQ ID NO: 17717 - protein, 13 aa, Homo Sapiens
EPHEEQCLSAFTV

SEQ ID NO: 17718 - protein, 13 aa, Homo Sapiens
PHEEQCLSAFTVH

SEQ ID NO: 17719 - protein, 13 aa, Homo Sapiens
HEEQCLSAFTVHF

SEQ ID NO: 17720 - protein, 13 aa, Homo Sapiens
EEQCLSAFTVHFS

SEQ ID NO: 17721 - protein, 13 aa, Homo Sapiens
EQCLSAFTVHFSG

SEQ ID NO: 17722 - protein, 13 aa, Homo Sapiens
QCLSAFTVHFSGQ

SEQ ID NO: 17723 - protein, 13 aa, Homo Sapiens
CLSAFTVHFSGQF

SEQ ID NO: 17724 - protein, 13 aa, Homo Sapiens
LSAFTVHFSGQFT

SEQ ID NO: 17725 - protein, 13 aa, Homo Sapiens
SAFTVHFSGQFTG

SEQ ID NO: 17726 - protein, 13 aa, Homo Sapiens
AFTVHFSGQFTGT

SEQ ID NO: 17727 - protein, 13 aa, Homo Sapiens
FTVHFSGQFTGTA

SEQ ID NO: 17728 - protein, 13 aa, Homo Sapiens
TVHFSGQFTGTAG

SEQ ID NO: 17729 - protein, 13 aa, Homo Sapiens
VHFSGQFTGTAGA

SEQ ID NO: 17730 - protein, 13 aa, Homo Sapiens
HFSGQFTGTAGAC

SEQ ID NO: 17731 - protein, 13 aa, Homo Sapiens
FSGQFTGTAGACR

SEQ ID NO: 17732 - protein, 13 aa, Homo Sapiens
SGQFTGTAGACRY

SEQ ID NO: 17733 - protein, 13 aa, Homo Sapiens
GQFTGTAGACRYG

SEQ ID NO: 17734 - protein, 13 aa, Homo Sapiens
QFTGTAGACRYGP

SEQ ID NO: 17735 - protein, 13 aa, Homo Sapiens
FTGTAGACRYGPF

SEQ ID NO: 17736 - protein, 13 aa, Homo Sapiens
TGTAGACRYGPFG

SEQ ID NO: 17737 - protein, 13 aa, Homo Sapiens
GTAGACRYGPFGP

SEQ ID NO: 17738 - protein, 13 aa, Homo Sapiens
TAGACRYGPFGPP

SEQ ID NO: 17739 - protein, 13 aa, Homo Sapiens
AGACRYGPFGPPP

SEQ ID NO: 17740 - protein, 13 aa, Homo Sapiens
GACRYGPFGPPPP

SEQ ID NO: 17741 - protein, 13 aa, Homo Sapiens
ACRYGPFGPPPPS

SEQ ID NO: 17742 - protein, 13 aa, Homo Sapiens
CRYGPFGPPPPSQ

SEQ ID NO: 17743 - protein, 13 aa, Homo Sapiens
RYGPFGPPPPSQA

SEQ ID NO: 17744 - protein, 13 aa, Homo Sapiens
YGPFGPPPPSQAS

SEQ ID NO: 17745 - protein, 13 aa, Homo Sapiens
GPFGPPPPSQASS

SEQ ID NO: 17746 - protein, 13 aa, Homo Sapiens
PFGPPPPSQASSG

SEQ ID NO: 17747 - protein, 13 aa, Homo Sapiens
FGPPPPSQASSGQ

SEQ ID NO: 17748 - protein, 13 aa, Homo Sapiens
GPPPPSQASSGQA

SEQ ID NO: 17749 - protein, 13 aa, Homo Sapiens
PPPPSQASSGQAR

SEQ ID NO: 17750 - protein, 13 aa, Homo Sapiens
PPPSQASSGQARM

SEQ ID NO: 17751 - protein, 13 aa, Homo Sapiens
PPSQASSGQARMF

SEQ ID NO: 17752 - protein, 13 aa, Homo Sapiens
PSQASSGQARMFP

SEQ ID NO: 17753 - protein, 13 aa, Homo Sapiens
SQASSGQARMFPN

SEQ ID NO: 17754 - protein, 13 aa, Homo Sapiens
QASSGQARMFPNA

SEQ ID NO: 17755 - protein, 13 aa, Homo Sapiens
ASSGQARMFPNAP

SEQ ID NO: 17756 - protein, 13 aa, Homo Sapiens
SSGQARMFPNAPY

SEQ ID NO: 17757 - protein, 13 aa, Homo Sapiens
SGQARMFPNAPYL

SEQ ID NO: 17758 - protein, 13 aa, Homo Sapiens
GQARMFPNAPYLP

SEQ ID NO: 17759 - protein, 13 aa, Homo Sapiens
QARMFPNAPYLPS

SEQ ID NO: 17760 - protein, 13 aa, Homo Sapiens
ARMFPNAPYLPSC

SEQ ID NO: 17761 - protein, 13 aa, Homo Sapiens
RMFPNAPYLPSCL

SEQ ID NO: 17762 - protein, 13 aa, Homo Sapiens
MFPNAPYLPSCLE

SEQ ID NO: 17763 - protein, 13 aa, Homo Sapiens
FPNAPYLPSCLES

SEQ ID NO: 17764 - protein, 13 aa, Homo Sapiens
PNAPYLPSCLESQ

SEQ ID NO: 17765 - protein, 13 aa, Homo Sapiens
NAPYLPSCLESQP

SEQ ID NO: 17766 - protein, 13 aa, Homo Sapiens
APYLPSCLESQPA

SEQ ID NO: 17767 - protein, 13 aa, Homo Sapiens
PYLPSCLESQPAI

SEQ ID NO: 17768 - protein, 13 aa, Homo Sapiens
YLPSCLESQPAIR

SEQ ID NO: 17769 - protein, 13 aa, Homo Sapiens
LPSCLESQPAIRN

SEQ ID NO: 17770 - protein, 13 aa, Homo Sapiens
PSCLESQPAIRNQ

SEQ ID NO: 17771 - protein, 13 aa, Homo Sapiens
SCLESQPAIRNQG

SEQ ID NO: 17772 - protein, 13 aa, Homo Sapiens
CLESQPAIRNQGY

SEQ ID NO: 17773 - protein, 13 aa, Homo Sapiens
LESQPAIRNQGYS

SEQ ID NO: 17774 - protein, 13 aa, Homo Sapiens
ESQPAIRNQGYST

SEQ ID NO: 17775 - protein, 13 aa, Homo Sapiens
SQPAIRNQGYSTV

SEQ ID NO: 17776 - protein, 13 aa, Homo Sapiens
QPAIRNQGYSTVT

SEQ ID NO: 17777 - protein, 13 aa, Homo Sapiens
PAIRNQGYSTVTF

SEQ ID NO: 17778 - protein, 13 aa, Homo Sapiens
AIRNQGYSTVTFD

SEQ ID NO: 17779 - protein, 13 aa, Homo Sapiens
IRNQGYSTVTFDG

SEQ ID NO: 17780 - protein, 13 aa, Homo Sapiens
RNQGYSTVTFDGT

SEQ ID NO: 17781 - protein, 13 aa, Homo Sapiens
NQGYSTVTFDGTP

SEQ ID NO: 17782 - protein, 13 aa, Homo Sapiens
QGYSTVTFDGTPS

SEQ ID NO: 17783 - protein, 13 aa, Homo Sapiens
GYSTVTFDGTPSY

SEQ ID NO: 17784 - protein, 13 aa, Homo Sapiens
YSTVTFDGTPSYG

SEQ ID NO: 17785 - protein, 13 aa, Homo Sapiens
STVTFDGTPSYGH

SEQ ID NO: 17786 - protein, 13 aa, Homo Sapiens
TVTFDGTPSYGHT

SEQ ID NO: 17787 - protein, 13 aa, Homo Sapiens
VTFDGTPSYGHTP

SEQ ID NO: 17788 - protein, 13 aa, Homo Sapiens
TFDGTPSYGHTPS

SEQ ID NO: 17789 - protein, 13 aa, Homo Sapiens
FDGTPSYGHTPSH

SEQ ID NO: 17790 - protein, 13 aa, Homo Sapiens
DGTPSYGHTPSHH

SEQ ID NO: 17791 - protein, 13 aa, Homo Sapiens
GTPSYGHTPSHHA

SEQ ID NO: 17792 - protein, 13 aa, Homo Sapiens
TPSYGHTPSHHAA

SEQ ID NO: 17793 - protein, 13 aa, Homo Sapiens
PSYGHTPSHHAAQ

SEQ ID NO: 17794 - protein, 13 aa, Homo Sapiens
SYGHTPSHHAAQF

SEQ ID NO: 17795 - protein, 13 aa, Homo Sapiens
YGHTPSHHAAQFP

SEQ ID NO: 17796 - protein, 13 aa, Homo Sapiens
GHTPSHHAAQFPN

SEQ ID NO: 17797 - protein, 13 aa, Homo Sapiens
HTPSHHAAQFPNH

SEQ ID NO: 17798 - protein, 13 aa, Homo Sapiens
TPSHHAAQFPNHS

SEQ ID NO: 17799 - protein, 13 aa, Homo Sapiens
PSHHAAQFPNHSF

SEQ ID NO: 17800 - protein, 13 aa, Homo Sapiens
SHHAAQFPNHSFK

SEQ ID NO: 17801 - protein, 13 aa, Homo Sapiens
HHAAQFPNHSFKH

SEQ ID NO: 17802 - protein, 13 aa, Homo Sapiens
HAAQFPNHSFKHE

SEQ ID NO: 17803 - protein, 13 aa, Homo Sapiens
AAQFPNHSFKHED

SEQ ID NO: 17804 - protein, 13 aa, Homo Sapiens
AQFPNHSFKHEDP

SEQ ID NO: 17805 - protein, 13 aa, Homo Sapiens
QFPNHSFKHEDPM

SEQ ID NO: 17806 - protein, 13 aa, Homo Sapiens
FPNHSFKHEDPMG

SEQ ID NO: 17807 - protein, 13 aa, Homo Sapiens
PNHSFKHEDPMGQ

SEQ ID NO: 17808 - protein, 13 aa, Homo Sapiens
NHSFKHEDPMGQQ

SEQ ID NO: 17809 - protein, 13 aa, Homo Sapiens
HSFKHEDPMGQQG

SEQ ID NO: 17810 - protein, 13 aa, Homo Sapiens
SFKHEDPMGQQGS

SEQ ID NO: 17811 - protein, 13 aa, Homo Sapiens
FKHEDPMGQQGSL

SEQ ID NO: 17812 - protein, 13 aa, Homo Sapiens
KHEDPMGQQGSLG

SEQ ID NO: 17813 - protein, 13 aa, Homo Sapiens
HEDPMGQQGSLGE

SEQ ID NO: 17814 - protein, 13 aa, Homo Sapiens
EDPMGQQGSLGEQ

SEQ ID NO: 17815 - protein, 13 aa, Homo Sapiens
DPMGQQGSLGEQQ

SEQ ID NO: 17816 - protein, 13 aa, Homo Sapiens
PMGQQGSLGEQQY

SEQ ID NO: 17817 - protein, 13 aa, Homo Sapiens
MGQQGSLGEQQYS

SEQ ID NO: 17818 - protein, 13 aa, Homo Sapiens
GQQGSLGEQQYSV

SEQ ID NO: 17819 - protein, 13 aa, Homo Sapiens
QQGSLGEQQYSVP

SEQ ID NO: 17820 - protein, 13 aa, Homo Sapiens
QGSLGEQQYSVPP

SEQ ID NO: 17821 - protein, 13 aa, Homo Sapiens
GSLGEQQYSVPPP

SEQ ID NO: 17822 - protein, 13 aa, Homo Sapiens
SLGEQQYSVPPPV

SEQ ID NO: 17823 - protein, 13 aa, Homo Sapiens
LGEQQYSVPPPVY

SEQ ID NO: 17824 - protein, 13 aa, Homo Sapiens
GEQQYSVPPPVYG

SEQ ID NO: 17825 - protein, 13 aa, Homo Sapiens
EQQYSVPPPVYGC

SEQ ID NO: 17826 - protein, 13 aa, Homo Sapiens
QQYSVPPPVYGCH

SEQ ID NO: 17827 - protein, 13 aa, Homo Sapiens
QYSVPPPVYGCHT

SEQ ID NO: 17828 - protein, 13 aa, Homo Sapiens
YSVPPPVYGCHTP

SEQ ID NO: 17829 - protein, 13 aa, Homo Sapiens
SVPPPVYGCHTPT

SEQ ID NO: 17830 - protein, 13 aa, Homo Sapiens
VPPPVYGCHTPTD

SEQ ID NO: 17831 - protein, 13 aa, Homo Sapiens
PPPVYGCHTPTDS

SEQ ID NO: 17832 - protein, 13 aa, Homo Sapiens
PPVYGCHTPTDSC

SEQ ID NO: 17833 - protein, 13 aa, Homo Sapiens
PVYGCHTPTDSCT

SEQ ID NO: 17834 - protein, 13 aa, Homo Sapiens
VYGCHTPTDSCTG

SEQ ID NO: 17835 - protein, 13 aa, Homo Sapiens
YGCHTPTDSCTGS

SEQ ID NO: 17836 - protein, 13 aa, Homo Sapiens
GCHTPTDSCTGSQ

SEQ ID NO: 17837 - protein, 13 aa, Homo Sapiens
CHTPTDSCTGSQA

SEQ ID NO: 17838 - protein, 13 aa, Homo Sapiens
HTPTDSCTGSQAL

SEQ ID NO: 17839 - protein, 13 aa, Homo Sapiens
TPTDSCTGSQALL

SEQ ID NO: 17840 - protein, 13 aa, Homo Sapiens
PTDSCTGSQALLL

SEQ ID NO: 17841 - protein, 13 aa, Homo Sapiens
TDSCTGSQALLLR

SEQ ID NO: 17842 - protein, 13 aa, Homo Sapiens
DSCTGSQALLLRT

SEQ ID NO: 17843 - protein, 13 aa, Homo Sapiens
SCTGSQALLLRTP

SEQ ID NO: 17844 - protein, 13 aa, Homo Sapiens
CTGSQALLLRTPY

SEQ ID NO: 17845 - protein, 13 aa, Homo Sapiens
TGSQALLLRTPYS

SEQ ID NO: 17846 - protein, 13 aa, Homo Sapiens
GSQALLLRTPYSS

SEQ ID NO: 17847 - protein, 13 aa, Homo Sapiens
SQALLLRTPYSSD

SEQ ID NO: 17848 - protein, 13 aa, Homo Sapiens
QALLLRTPYSSDN

SEQ ID NO: 17849 - protein, 13 aa, Homo Sapiens
ALLLRTPYSSDNL

SEQ ID NO: 17850 - protein, 13 aa, Homo Sapiens
LLLRTPYSSDNLY

SEQ ID NO: 17851 - protein, 13 aa, Homo Sapiens
LLRTPYSSDNLYQ

SEQ ID NO: 17852 - protein, 13 aa, Homo Sapiens
LRTPYSSDNLYQM

SEQ ID NO: 17853 - protein, 13 aa, Homo Sapiens
RTPYSSDNLYQMT

SEQ ID NO: 17854 - protein, 13 aa, Homo Sapiens
TPYSSDNLYQMTS

SEQ ID NO: 17855 - protein, 13 aa, Homo Sapiens
PYSSDNLYQMTSQ

SEQ ID NO: 17856 - protein, 13 aa, Homo Sapiens
YSSDNLYQMTSQL

SEQ ID NO: 17857 - protein, 13 aa, Homo Sapiens
SSDNLYQMTSQLE

SEQ ID NO: 17858 - protein, 13 aa, Homo Sapiens
SDNLYQMTSQLEC

SEQ ID NO: 17859 - protein, 13 aa, Homo Sapiens
DNLYQMTSQLECM

SEQ ID NO: 17860 - protein, 13 aa, Homo Sapiens
NLYQMTSQLECMT

SEQ ID NO: 17861 - protein, 13 aa, Homo Sapiens
LYQMTSQLECMTW

SEQ ID NO: 17862 - protein, 13 aa, Homo Sapiens
YQMTSQLECMTWN

SEQ ID NO: 17863 - protein, 13 aa, Homo Sapiens
QMTSQLECMTWNQ

SEQ ID NO: 17864 - protein, 13 aa, Homo Sapiens
MTSQLECMTWNQM

SEQ ID NO: 17865 - protein, 13 aa, Homo Sapiens
TSQLECMTWNQMN

SEQ ID NO: 17866 - protein, 13 aa, Homo Sapiens
SQLECMTWNQMNL

SEQ ID NO: 17867 - protein, 13 aa, Homo Sapiens
QLECMTWNQMNLG

SEQ ID NO: 17868 - protein, 13 aa, Homo Sapiens
LECMTWNQMNLGA

SEQ ID NO: 17869 - protein, 13 aa, Homo Sapiens
ECMTWNQMNLGAT

SEQ ID NO: 17870 - protein, 13 aa, Homo Sapiens
CMTWNQMNLGATL

SEQ ID NO: 17871 - protein, 13 aa, Homo Sapiens
MTWNQMNLGATLK

SEQ ID NO: 17872 - protein, 13 aa, Homo Sapiens
TWNQMNLGATLKG

SEQ ID NO: 17873 - protein, 13 aa, Homo Sapiens
WNQMNLGATLKGH

SEQ ID NO: 17874 - protein, 13 aa, Homo Sapiens
NQMNLGATLKGHS

SEQ ID NO: 17875 - protein, 13 aa, Homo Sapiens
QMNLGATLKGHST

SEQ ID NO: 17876 - protein, 13 aa, Homo Sapiens
MNLGATLKGHSTG

SEQ ID NO: 17877 - protein, 13 aa, Homo Sapiens
NLGATLKGHSTGY

SEQ ID NO: 17878 - protein, 13 aa, Homo Sapiens
LGATLKGHSTGYE

SEQ ID NO: 17879 - protein, 13 aa, Homo Sapiens
GATLKGHSTGYES

SEQ ID NO: 17880 - protein, 13 aa, Homo Sapiens
ATLKGHSTGYESD

SEQ ID NO: 17881 - protein, 13 aa, Homo Sapiens
TLKGHSTGYESDN

SEQ ID NO: 17882 - protein, 13 aa, Homo Sapiens
LKGHSTGYESDNH

SEQ ID NO: 17883 - protein, 13 aa, Homo Sapiens
KGHSTGYESDNHT

SEQ ID NO: 17884 - protein, 13 aa, Homo Sapiens
GHSTGYESDNHTT

SEQ ID NO: 17885 - protein, 13 aa, Homo Sapiens
HSTGYESDNHTTP

SEQ ID NO: 17886 - protein, 13 aa, Homo Sapiens
STGYESDNHTTPI

SEQ ID NO: 17887 - protein, 13 aa, Homo Sapiens
TGYESDNHTTPIL

SEQ ID NO: 17888 - protein, 13 aa, Homo Sapiens
GYESDNHTTPILC

SEQ ID NO: 17889 - protein, 13 aa, Homo Sapiens
YESDNHTTPILCG

SEQ ID NO: 17890 - protein, 13 aa, Homo Sapiens
ESDNHTTPILCGA

SEQ ID NO: 17891 - protein, 13 aa, Homo Sapiens
SDNHTTPILCGAQ

SEQ ID NO: 17892 - protein, 13 aa, Homo Sapiens
DNHTTPILCGAQY

SEQ ID NO: 17893 - protein, 13 aa, Homo Sapiens
NHTTPILCGAQYR

SEQ ID NO: 17894 - protein, 13 aa, Homo Sapiens
HTTPILCGAQYRI

SEQ ID NO: 17895 - protein, 13 aa, Homo Sapiens
TTPILCGAQYRIH

SEQ ID NO: 17896 - protein, 13 aa, Homo Sapiens
TPILCGAQYRIHT

SEQ ID NO: 17897 - protein, 13 aa, Homo Sapiens
PILCGAQYRIHTH

SEQ ID NO: 17898 - protein, 13 aa, Homo Sapiens
ILCGAQYRIHTHG

SEQ ID NO: 17899 - protein, 13 aa, Homo Sapiens
LCGAQYRIHTHGV

SEQ ID NO: 17900 - protein, 13 aa, Homo Sapiens
CGAQYRIHTHGVF

SEQ ID NO: 17901 - protein, 13 aa, Homo Sapiens
GAQYRIHTHGVFR

SEQ ID NO: 17902 - protein, 13 aa, Homo Sapiens
AQYRIHTHGVFRG

SEQ ID NO: 17903 - protein, 13 aa, Homo Sapiens
QYRIHTHGVFRGI

SEQ ID NO: 17904 - protein, 13 aa, Homo Sapiens
YRIHTHGVFRGIQ

SEQ ID NO: 17905 - protein, 13 aa, Homo Sapiens
RIHTHGVFRGIQD

SEQ ID NO: 17906 - protein, 13 aa, Homo Sapiens
IHTHGVFRGIQDV

SEQ ID NO: 17907 - protein, 13 aa, Homo Sapiens
HTHGVFRGIQDVR

SEQ ID NO: 17908 - protein, 13 aa, Homo Sapiens
THGVFRGIQDVRR

SEQ ID NO: 17909 - protein, 13 aa, Homo Sapiens
HGVFRGIQDVRRV

SEQ ID NO: 17910 - protein, 13 aa, Homo Sapiens
GVFRGIQDVRRVP

SEQ ID NO: 17911 - protein, 13 aa, Homo Sapiens
VFRGIQDVRRVPG

SEQ ID NO: 17912 - protein, 13 aa, Homo Sapiens
FRGIQDVRRVPGV

SEQ ID NO: 17913 - protein, 13 aa, Homo Sapiens
RGIQDVRRVPGVA

SEQ ID NO: 17914 - protein, 13 aa, Homo Sapiens
GIQDVRRVPGVAP

SEQ ID NO: 17915 - protein, 13 aa, Homo Sapiens
IQDVRRVPGVAPT

SEQ ID NO: 17916 - protein, 13 aa, Homo Sapiens
QDVRRVPGVAPTL

SEQ ID NO: 17917 - protein, 13 aa, Homo Sapiens
DVRRVPGVAPTLV

SEQ ID NO: 17918 - protein, 13 aa, Homo Sapiens
VRRVPGVAPTLVR

SEQ ID NO: 17919 - protein, 13 aa, Homo Sapiens
RRVPGVAPTLVRS

SEQ ID NO: 17920 - protein, 13 aa, Homo Sapiens
RVPGVAPTLVRSA

SEQ ID NO: 17921 - protein, 13 aa, Homo Sapiens
VPGVAPTLVRSAS

SEQ ID NO: 17922 - protein, 13 aa, Homo Sapiens
PGVAPTLVRSASE

SEQ ID NO: 17923 - protein, 13 aa, Homo Sapiens
GVAPTLVRSASET

SEQ ID NO: 17924 - protein, 13 aa, Homo Sapiens
VAPTLVRSASETS

SEQ ID NO: 17925 - protein, 13 aa, Homo Sapiens
APTLVRSASETSE

SEQ ID NO: 17926 - protein, 13 aa, Homo Sapiens
PTLVRSASETSEK

SEQ ID NO: 17927 - protein, 13 aa, Homo Sapiens
TLVRSASETSEKR

SEQ ID NO: 17928 - protein, 13 aa, Homo Sapiens
LVRSASETSEKRP

SEQ ID NO: 17929 - protein, 13 aa, Homo Sapiens
VRSASETSEKRPF

SEQ ID NO: 17930 - protein, 13 aa, Homo Sapiens
RSASETSEKRPFM

SEQ ID NO: 17931 - protein, 13 aa, Homo Sapiens
SASETSEKRPFMC

SEQ ID NO: 17932 - protein, 13 aa, Homo Sapiens
ASETSEKRPFMCA

SEQ ID NO: 17933 - protein, 13 aa, Homo Sapiens
SETSEKRPFMCAY

SEQ ID NO: 17934 - protein, 13 aa, Homo Sapiens
ETSEKRPFMCAYP

SEQ ID NO: 17935 - protein, 13 aa, Homo Sapiens
TSEKRPFMCAYPG

SEQ ID NO: 17936 - protein, 13 aa, Homo Sapiens
SEKRPFMCAYPGC

SEQ ID NO: 17937 - protein, 13 aa, Homo Sapiens
EKRPFMCAYPGCN

SEQ ID NO: 17938 - protein, 13 aa, Homo Sapiens
KRPFMCAYPGCNK

SEQ ID NO: 17939 - protein, 13 aa, Homo Sapiens
RPFMCAYPGCNKR

SEQ ID NO: 17940 - protein, 13 aa, Homo Sapiens
PFMCAYPGCNKRY

SEQ ID NO: 17941 - protein, 13 aa, Homo Sapiens
FMCAYPGCNKRYF

SEQ ID NO: 17942 - protein, 13 aa, Homo Sapiens
MCAYPGCNKRYFK

SEQ ID NO: 17943 - protein, 13 aa, Homo Sapiens
CAYPGCNKRYFKL

SEQ ID NO: 17944 - protein, 13 aa, Homo Sapiens
AYPGCNKRYFKLS

SEQ ID NO: 17945 - protein, 13 aa, Homo Sapiens
YPGCNKRYFKLSH

SEQ ID NO: 17946 - protein, 13 aa, Homo Sapiens
PGCNKRYFKLSHL

SEQ ID NO: 17947 - protein, 13 aa, Homo Sapiens
GCNKRYFKLSHLQ

SEQ ID NO: 17948 - protein, 13 aa, Homo Sapiens
CNKRYFKLSHLQM

SEQ ID NO: 17949 - protein, 13 aa, Homo Sapiens
NKRYFKLSHLQMH

SEQ ID NO: 17950 - protein, 13 aa, Homo Sapiens
KRYFKLSHLQMHS

SEQ ID NO: 17951 - protein, 13 aa, Homo Sapiens
RYFKLSHLQMHSR

SEQ ID NO: 17952 - protein, 13 aa, Homo Sapiens
YFKLSHLQMHSRK

SEQ ID NO: 17953 - protein, 13 aa, Homo Sapiens
FKLSHLQMHSRKH

SEQ ID NO: 17954 - protein, 13 aa, Homo Sapiens
KLSHLQMHSRKHT

SEQ ID NO: 17955 - protein, 13 aa, Homo Sapiens
LSHLQMHSRKHTG

SEQ ID NO: 17956 - protein, 13 aa, Homo Sapiens
SHLQMHSRKHTGE

SEQ ID NO: 17957 - protein, 13 aa, Homo Sapiens
HLQMHSRKHTGEK

SEQ ID NO: 17958 - protein, 13 aa, Homo Sapiens
LQMHSRKHTGEKP

SEQ ID NO: 17959 - protein, 13 aa, Homo Sapiens
QMHSRKHTGEKPY

SEQ ID NO: 17960 - protein, 13 aa, Homo Sapiens
MHSRKHTGEKPYQ

SEQ ID NO: 17961 - protein, 13 aa, Homo Sapiens
HSRKHTGEKPYQC

SEQ ID NO: 17962 - protein, 13 aa, Homo Sapiens
SRKHTGEKPYQCD

SEQ ID NO: 17963 - protein, 13 aa, Homo Sapiens
RKHTGEKPYQCDF

SEQ ID NO: 17964 - protein, 13 aa, Homo Sapiens
KHTGEKPYQCDFK

SEQ ID NO: 17965 - protein, 13 aa, Homo Sapiens
HTGEKPYQCDFKD

SEQ ID NO: 17966 - protein, 13 aa, Homo Sapiens
TGEKPYQCDFKDC

SEQ ID NO: 17967 - protein, 13 aa, Homo Sapiens
GEKPYQCDFKDCE

SEQ ID NO: 17968 - protein, 13 aa, Homo Sapiens
EKPYQCDFKDCER

SEQ ID NO: 17969 - protein, 13 aa, Homo Sapiens
KPYQCDFKDCERR

SEQ ID NO: 17970 - protein, 13 aa, Homo Sapiens
PYQCDFKDCERRF

SEQ ID NO: 17971 - protein, 13 aa, Homo Sapiens
YQCDFKDCERRFS

SEQ ID NO: 17972 - protein, 13 aa, Homo Sapiens
QCDFKDCERRFSR

SEQ ID NO: 17973 - protein, 13 aa, Homo Sapiens
CDFKDCERRFSRS

SEQ ID NO: 17974 - protein, 13 aa, Homo Sapiens
DFKDCERRFSRSD

SEQ ID NO: 17975 - protein, 13 aa, Homo Sapiens
FKDCERRFSRSDQ

SEQ ID NO: 17976 - protein, 13 aa, Homo Sapiens
KDCERRFSRSDQL

SEQ ID NO: 17977 - protein, 13 aa, Homo Sapiens
DCERRFSRSDQLK

SEQ ID NO: 17978 - protein, 13 aa, Homo Sapiens
CERRFSRSDQLKR

SEQ ID NO: 17979 - protein, 13 aa, Homo Sapiens
ERRFSRSDQLKRH

SEQ ID NO: 17980 - protein, 13 aa, Homo Sapiens
RRFSRSDQLKRHQ

SEQ ID NO: 17981 - protein, 13 aa, Homo Sapiens
RFSRSDQLKRHQR

SEQ ID NO: 17982 - protein, 13 aa, Homo Sapiens
FSRSDQLKRHQRR

SEQ ID NO: 17983 - protein, 13 aa, Homo Sapiens
SRSDQLKRHQRRH

SEQ ID NO: 17984 - protein, 13 aa, Homo Sapiens
RSDQLKRHQRRHT

SEQ ID NO: 17985 - protein, 13 aa, Homo Sapiens
SDQLKRHQRRHTG

SEQ ID NO: 17986 - protein, 13 aa, Homo Sapiens
DQLKRHQRRHTGV

SEQ ID NO: 17987 - protein, 13 aa, Homo Sapiens
QLKRHQRRHTGVK

SEQ ID NO: 17988 - protein, 13 aa, Homo Sapiens
LKRHQRRHTGVKP

SEQ ID NO: 17989 - protein, 13 aa, Homo Sapiens
KRHQRRHTGVKPF

SEQ ID NO: 17990 - protein, 13 aa, Homo Sapiens
RHQRRHTGVKPFQ

SEQ ID NO: 17991 - protein, 13 aa, Homo Sapiens
HQRRHTGVKPFQC

SEQ ID NO: 17992 - protein, 13 aa, Homo Sapiens
QRRHTGVKPFQCK

SEQ ID NO: 17993 - protein, 13 aa, Homo Sapiens
RRHTGVKPFQCKT

SEQ ID NO: 17994 - protein, 13 aa, Homo Sapiens
RHTGVKPFQCKTC

SEQ ID NO: 17995 - protein, 13 aa, Homo Sapiens
HTGVKPFQCKTCQ

SEQ ID NO: 17996 - protein, 13 aa, Homo Sapiens
TGVKPFQCKTCQR

SEQ ID NO: 17997 - protein, 13 aa, Homo Sapiens
GVKPFQCKTCQRK

SEQ ID NO: 17998 - protein, 13 aa, Homo Sapiens
VKPFQCKTCQRKF

SEQ ID NO: 17999 - protein, 13 aa, Homo Sapiens
KPFQCKTCQRKFS

SEQ ID NO: 18000 - protein, 13 aa, Homo Sapiens
PFQCKTCQRKFSR

SEQ ID NO: 18001 - protein, 13 aa, Homo Sapiens
FQCKTCQRKFSRS

SEQ ID NO: 18002 - protein, 13 aa, Homo Sapiens
QCKTCQRKFSRSD

SEQ ID NO: 18003 - protein, 13 aa, Homo Sapiens
CKTCQRKFSRSDH

SEQ ID NO: 18004 - protein, 13 aa, Homo Sapiens
KTCQRKFSRSDHL

SEQ ID NO: 18005 - protein, 13 aa, Homo Sapiens
TCQRKFSRSDHLK

SEQ ID NO: 18006 - protein, 13 aa, Homo Sapiens
CQRKFSRSDHLKT

SEQ ID NO: 18007 - protein, 13 aa, Homo Sapiens
QRKFSRSDHLKTH

SEQ ID NO: 18008 - protein, 13 aa, Homo Sapiens
RKFSRSDHLKTHT

SEQ ID NO: 18009 - protein, 13 aa, Homo Sapiens
KFSRSDHLKTHTR

SEQ ID NO: 18010 - protein, 13 aa, Homo Sapiens
FSRSDHLKTHTRT

SEQ ID NO: 18011 - protein, 13 aa, Homo Sapiens
SRSDHLKTHTRTH

SEQ ID NO: 18012 - protein, 13 aa, Homo Sapiens
RSDHLKTHTRTHT

SEQ ID NO: 18013 - protein, 13 aa, Homo Sapiens
SDHLKTHTRTHTG

SEQ ID NO: 18014 - protein, 13 aa, Homo Sapiens
DHLKTHTRTHTGK

SEQ ID NO: 18015 - protein, 13 aa, Homo Sapiens
HLKTHTRTHTGKT

SEQ ID NO: 18016 - protein, 13 aa, Homo Sapiens
LKTHTRTHTGKTS

SEQ ID NO: 18017 - protein, 13 aa, Homo Sapiens
KTHTRTHTGKTSE

SEQ ID NO: 18018 - protein, 13 aa, Homo Sapiens
THTRTHTGKTSEK

SEQ ID NO: 18019 - protein, 13 aa, Homo Sapiens
HTRTHTGKTSEKP

SEQ ID NO: 18020 - protein, 13 aa, Homo Sapiens
TRTHTGKTSEKPF

SEQ ID NO: 18021 - protein, 13 aa, Homo Sapiens
RTHTGKTSEKPFS

SEQ ID NO: 18022 - protein, 13 aa, Homo Sapiens
THTGKTSEKPFSC

SEQ ID NO: 18023 - protein, 13 aa, Homo Sapiens
HTGKTSEKPFSCR

SEQ ID NO: 18024 - protein, 13 aa, Homo Sapiens
TGKTSEKPFSCRW

SEQ ID NO: 18025 - protein, 13 aa, Homo Sapiens
GKTSEKPFSCRWP

SEQ ID NO: 18026 - protein, 13 aa, Homo Sapiens
KTSEKPFSCRWPS

SEQ ID NO: 18027 - protein, 13 aa, Homo Sapiens
TSEKPFSCRWPSC

SEQ ID NO: 18028 - protein, 13 aa, Homo Sapiens
SEKPFSCRWPSCQ

SEQ ID NO: 18029 - protein, 13 aa, Homo Sapiens
EKPFSCRWPSCQK

SEQ ID NO: 18030 - protein, 13 aa, Homo Sapiens
KPFSCRWPSCQKK

SEQ ID NO: 18031 - protein, 13 aa, Homo Sapiens
PFSCRWPSCQKKF

SEQ ID NO: 18032 - protein, 13 aa, Homo Sapiens
FSCRWPSCQKKFA

SEQ ID NO: 18033 - protein, 13 aa, Homo Sapiens
SCRWPSCQKKFAR

SEQ ID NO: 18034 - protein, 13 aa, Homo Sapiens
CRWPSCQKKFARS

SEQ ID NO: 18035 - protein, 13 aa, Homo Sapiens
RWPSCQKKFARSD

SEQ ID NO: 18036 - protein, 13 aa, Homo Sapiens
WPSCQKKFARSDE

SEQ ID NO: 18037 - protein, 13 aa, Homo Sapiens
PSCQKKFARSDEL

SEQ ID NO: 18038 - protein, 13 aa, Homo Sapiens
SCQKKFARSDELV

SEQ ID NO: 18039 - protein, 13 aa, Homo Sapiens
CQKKFARSDELVR

SEQ ID NO: 18040 - protein, 13 aa, Homo Sapiens
QKKFARSDELVRH

SEQ ID NO: 18041 - protein, 13 aa, Homo Sapiens
KKFARSDELVRHH

SEQ ID NO: 18042 - protein, 13 aa, Homo Sapiens
KFARSDELVRHHN

SEQ ID NO: 18043 - protein, 13 aa, Homo Sapiens
FARSDELVRHHNM

SEQ ID NO: 18044 - protein, 13 aa, Homo Sapiens
ARSDELVRHHNMH

SEQ ID NO: 18045 - protein, 13 aa, Homo Sapiens
RSDELVRHHNMHQ

SEQ ID NO: 18046 - protein, 13 aa, Homo Sapiens
SDELVRHHNMHQR

SEQ ID NO: 18047 - protein, 13 aa, Homo Sapiens
DELVRHHNMHQRN

SEQ ID NO: 18048 - protein, 13 aa, Homo Sapiens
ELVRHHNMHQRNM

SEQ ID NO: 18049 - protein, 13 aa, Homo Sapiens
LVRHHNMHQRNMT

SEQ ID NO: 18050 - protein, 13 aa, Homo Sapiens
VRHHNMHQRNMTK

SEQ ID NO: 18051 - protein, 13 aa, Homo Sapiens
RHHNMHQRNMTKL

SEQ ID NO: 18052 - protein, 13 aa, Homo Sapiens
HHNMHQRNMTKLQ

SEQ ID NO: 18053 - protein, 13 aa, Homo Sapiens
HNMHQRNMTKLQL

SEQ ID NO: 18054 - protein, 13 aa, Homo Sapiens
NMHQRNMTKLQLA

SEQ ID NO: 18055 - protein, 13 aa, Homo Sapiens
MHQRNMTKLQLAL

SEQ ID NO: 18056 - protein, 14 aa, Homo Sapiens
MQDPASTCVPEPAS

SEQ ID NO: 18057 - protein, 14 aa, Homo Sapiens
QDPASTCVPEPASQ

SEQ ID NO: 18058 - protein, 14 aa, Homo Sapiens
DPASTCVPEPASQH

SEQ ID NO: 18059 - protein, 14 aa, Homo Sapiens
PASTCVPEPASQHT

SEQ ID NO: 18060 - protein, 14 aa, Homo Sapiens
ASTCVPEPASQHTL

SEQ ID NO: 18061 - protein, 14 aa, Homo Sapiens
STCVPEPASQHTLR

SEQ ID NO: 18062 - protein, 14 aa, Homo Sapiens
TCVPEPASQHTLRS

SEQ ID NO: 18063 - protein, 14 aa, Homo Sapiens
CVPEPASQHTLRSG

SEQ ID NO: 18064 - protein, 14 aa, Homo Sapiens
VPEPASQHTLRSGP

SEQ ID NO: 18065 - protein, 14 aa, Homo Sapiens
PEPASQHTLRSGPG

SEQ ID NO: 18066 - protein, 14 aa, Homo Sapiens
EPASQHTLRSGPGC

SEQ ID NO: 18067 - protein, 14 aa, Homo Sapiens
PASQHTLRSGPGCL

SEQ ID NO: 18068 - protein, 14 aa, Homo Sapiens
ASQHTLRSGPGCLQ

SEQ ID NO: 18069 - protein, 14 aa, Homo Sapiens
SQHTLRSGPGCLQQ

SEQ ID NO: 18070 - protein, 14 aa, Homo Sapiens
QHTLRSGPGCLQQP

SEQ ID NO: 18071 - protein, 14 aa, Homo Sapiens
HTLRSGPGCLQQPE

SEQ ID NO: 18072 - protein, 14 aa, Homo Sapiens
TLRSGPGCLQQPEQ

SEQ ID NO: 18073 - protein, 14 aa, Homo Sapiens
LRSGPGCLQQPEQQ

SEQ ID NO: 18074 - protein, 14 aa, Homo Sapiens
RSGPGCLQQPEQQG

SEQ ID NO: 18075 - protein, 14 aa, Homo Sapiens
SGPGCLQQPEQQGV

SEQ ID NO: 18076 - protein, 14 aa, Homo Sapiens
GPGCLQQPEQQGVR

SEQ ID NO: 18077 - protein, 14 aa, Homo Sapiens
PGCLQQPEQQGVRD

SEQ ID NO: 18078 - protein, 14 aa, Homo Sapiens
GCLQQPEQQGVRDP

SEQ ID NO: 18079 - protein, 14 aa, Homo Sapiens
CLQQPEQQGVRDPG

SEQ ID NO: 18080 - protein, 14 aa, Homo Sapiens
LQQPEQQGVRDPGG

SEQ ID NO: 18081 - protein, 14 aa, Homo Sapiens
QQPEQQGVRDPGGI

SEQ ID NO: 18082 - protein, 14 aa, Homo Sapiens
QPEQQGVRDPGGIW

SEQ ID NO: 18083 - protein, 14 aa, Homo Sapiens
PEQQGVRDPGGIWA

SEQ ID NO: 18084 - protein, 14 aa, Homo Sapiens
EQQGVRDPGGIWAK

SEQ ID NO: 18085 - protein, 14 aa, Homo Sapiens
QQGVRDPGGIWAKL

SEQ ID NO: 18086 - protein, 14 aa, Homo Sapiens
QGVRDPGGIWAKLG

SEQ ID NO: 18087 - protein, 14 aa, Homo Sapiens
GVRDPGGIWAKLGA

SEQ ID NO: 18088 - protein, 14 aa, Homo Sapiens
VRDPGGIWAKLGAA

SEQ ID NO: 18089 - protein, 14 aa, Homo Sapiens
RDPGGIWAKLGAAE

SEQ ID NO: 18090 - protein, 14 aa, Homo Sapiens
DPGGIWAKLGAAEA

SEQ ID NO: 18091 - protein, 14 aa, Homo Sapiens
PGGIWAKLGAAEAS

SEQ ID NO: 18092 - protein, 14 aa, Homo Sapiens
GGIWAKLGAAEASA

SEQ ID NO: 18093 - protein, 14 aa, Homo Sapiens
GIWAKLGAAEASAE

SEQ ID NO: 18094 - protein, 14 aa, Homo Sapiens
IWAKLGAAEASAER

SEQ ID NO: 18095 - protein, 14 aa, Homo Sapiens
WAKLGAAEASAERL

SEQ ID NO: 18096 - protein, 14 aa, Homo Sapiens
AKLGAAEASAERLQ

SEQ ID NO: 18097 - protein, 14 aa, Homo Sapiens
KLGAAEASAERLQG

SEQ ID NO: 18098 - protein, 14 aa, Homo Sapiens
LGAAEASAERLQGR

SEQ ID NO: 18099 - protein, 14 aa, Homo Sapiens
GAAEASAERLQGRR

SEQ ID NO: 18100 - protein, 14 aa, Homo Sapiens
AAEASAERLQGRRS

SEQ ID NO: 18101 - protein, 14 aa, Homo Sapiens
AEASAERLQGRRSR

SEQ ID NO: 18102 - protein, 14 aa, Homo Sapiens
EASAERLQGRRSRG

SEQ ID NO: 18103 - protein, 14 aa, Homo Sapiens
ASAERLQGRRSRGA

SEQ ID NO: 18104 - protein, 14 aa, Homo Sapiens
SAERLQGRRSRGAS

SEQ ID NO: 18105 - protein, 14 aa, Homo Sapiens
AERLQGRRSRGASG

SEQ ID NO: 18106 - protein, 14 aa, Homo Sapiens
ERLQGRRSRGASGS

SEQ ID NO: 18107 - protein, 14 aa, Homo Sapiens
RLQGRRSRGASGSE

SEQ ID NO: 18108 - protein, 14 aa, Homo Sapiens
LQGRRSRGASGSEP

SEQ ID NO: 18109 - protein, 14 aa, Homo Sapiens
QGRRSRGASGSEPQ

SEQ ID NO: 18110 - protein, 14 aa, Homo Sapiens
GRRSRGASGSEPQQ

SEQ ID NO: 18111 - protein, 14 aa, Homo Sapiens
RRSRGASGSEPQQM

SEQ ID NO: 18112 - protein, 14 aa, Homo Sapiens
RSRGASGSEPQQMG

SEQ ID NO: 18113 - protein, 14 aa, Homo Sapiens
SRGASGSEPQQMGS

SEQ ID NO: 18114 - protein, 14 aa, Homo Sapiens
RGASGSEPQQMGSD

SEQ ID NO: 18115 - protein, 14 aa, Homo Sapiens
GASGSEPQQMGSDV

SEQ ID NO: 18116 - protein, 14 aa, Homo Sapiens
ASGSEPQQMGSDVR

SEQ ID NO: 18117 - protein, 14 aa, Homo Sapiens
SGSEPQQMGSDVRD

SEQ ID NO: 18118 - protein, 14 aa, Homo Sapiens
GSEPQQMGSDVRDL

SEQ ID NO: 18119 - protein, 14 aa, Homo Sapiens
SEPQQMGSDVRDLN

SEQ ID NO: 18120 - protein, 14 aa, Homo Sapiens
EPQQMGSDVRDLNA

SEQ ID NO: 18121 - protein, 14 aa, Homo Sapiens
PQQMGSDVRDLNAL

SEQ ID NO: 18122 - protein, 14 aa, Homo Sapiens
QQMGSDVRDLNALL

SEQ ID NO: 18123 - protein, 14 aa, Homo Sapiens
QMGSDVRDLNALLP

SEQ ID NO: 18124 - protein, 14 aa, Homo Sapiens
MGSDVRDLNALLPA

SEQ ID NO: 18125 - protein, 14 aa, Homo Sapiens
GSDVRDLNALLPAV

SEQ ID NO: 18126 - protein, 14 aa, Homo Sapiens
SDVRDLNALLPAVP

SEQ ID NO: 18127 - protein, 14 aa, Homo Sapiens
DVRDLNALLPAVPS

SEQ ID NO: 18128 - protein, 14 aa, Homo Sapiens
VRDLNALLPAVPSL

SEQ ID NO: 18129 - protein, 14 aa, Homo Sapiens
RDLNALLPAVPSLG

SEQ ID NO: 18130 - protein, 14 aa, Homo Sapiens
DLNALLPAVPSLGG

SEQ ID NO: 18131 - protein, 14 aa, Homo Sapiens
LNALLPAVPSLGGG

SEQ ID NO: 18132 - protein, 14 aa, Homo Sapiens
NALLPAVPSLGGGG

SEQ ID NO: 18133 - protein, 14 aa, Homo Sapiens
ALLPAVPSLGGGGG

SEQ ID NO: 18134 - protein, 14 aa, Homo Sapiens
LLPAVPSLGGGGGC

SEQ ID NO: 18135 - protein, 14 aa, Homo Sapiens
LPAVPSLGGGGGCA

SEQ ID NO: 18136 - protein, 14 aa, Homo Sapiens
PAVPSLGGGGGCAL

SEQ ID NO: 18137 - protein, 14 aa, Homo Sapiens
AVPSLGGGGGCALP

SEQ ID NO: 18138 - protein, 14 aa, Homo Sapiens
VPSLGGGGGCALPV

SEQ ID NO: 18139 - protein, 14 aa, Homo Sapiens
PSLGGGGGCALPVS

SEQ ID NO: 18140 - protein, 14 aa, Homo Sapiens
SLGGGGGCALPVSG

SEQ ID NO: 18141 - protein, 14 aa, Homo Sapiens
LGGGGGCALPVSGA

SEQ ID NO: 18142 - protein, 14 aa, Homo Sapiens
GGGGGCALPVSGAA

SEQ ID NO: 18143 - protein, 14 aa, Homo Sapiens
GGGGCALPVSGAAQ

SEQ ID NO: 18144 - protein, 14 aa, Homo Sapiens
GGGCALPVSGAAQW

SEQ ID NO: 18145 - protein, 14 aa, Homo Sapiens
GGCALPVSGAAQWA

SEQ ID NO: 18146 - protein, 14 aa, Homo Sapiens
GCALPVSGAAQWAP

SEQ ID NO: 18147 - protein, 14 aa, Homo Sapiens
CALPVSGAAQWAPV

SEQ ID NO: 18148 - protein, 14 aa, Homo Sapiens
ALPVSGAAQWAPVL

SEQ ID NO: 18149 - protein, 14 aa, Homo Sapiens
LPVSGAAQWAPVLD

SEQ ID NO: 18150 - protein, 14 aa, Homo Sapiens
PVSGAAQWAPVLDF

SEQ ID NO: 18151 - protein, 14 aa, Homo Sapiens
VSGAAQWAPVLDFA

SEQ ID NO: 18152 - protein, 14 aa, Homo Sapiens
SGAAQWAPVLDFAP

SEQ ID NO: 18153 - protein, 14 aa, Homo Sapiens
GAAQWAPVLDFAPP

SEQ ID NO: 18154 - protein, 14 aa, Homo Sapiens
AAQWAPVLDFAPPG

SEQ ID NO: 18155 - protein, 14 aa, Homo Sapiens
AQWAPVLDFAPPGA

SEQ ID NO: 18156 - protein, 14 aa, Homo Sapiens
QWAPVLDFAPPGAS

SEQ ID NO: 18157 - protein, 14 aa, Homo Sapiens
WAPVLDFAPPGASA

SEQ ID NO: 18158 - protein, 14 aa, Homo Sapiens
APVLDFAPPGASAY

SEQ ID NO: 18159 - protein, 14 aa, Homo Sapiens
PVLDFAPPGASAYG

SEQ ID NO: 18160 - protein, 14 aa, Homo Sapiens
VLDFAPPGASAYGS

SEQ ID NO: 18161 - protein, 14 aa, Homo Sapiens
LDFAPPGASAYGSL

SEQ ID NO: 18162 - protein, 14 aa, Homo Sapiens
DFAPPGASAYGSLG

SEQ ID NO: 18163 - protein, 14 aa, Homo Sapiens
FAPPGASAYGSLGG

SEQ ID NO: 18164 - protein, 14 aa, Homo Sapiens
APPGASAYGSLGGP

SEQ ID NO: 18165 - protein, 14 aa, Homo Sapiens
PPGASAYGSLGGPA

SEQ ID NO: 18166 - protein, 14 aa, Homo Sapiens
PGASAYGSLGGPAP

SEQ ID NO: 18167 - protein, 14 aa, Homo Sapiens
GASAYGSLGGPAPP

SEQ ID NO: 18168 - protein, 14 aa, Homo Sapiens
ASAYGSLGGPAPPP

SEQ ID NO: 18169 - protein, 14 aa, Homo Sapiens
SAYGSLGGPAPPPA

SEQ ID NO: 18170 - protein, 14 aa, Homo Sapiens
AYGSLGGPAPPPAP

SEQ ID NO: 18171 - protein, 14 aa, Homo Sapiens
YGSLGGPAPPPAPP

SEQ ID NO: 18172 - protein, 14 aa, Homo Sapiens
GSLGGPAPPPAPPP

SEQ ID NO: 18173 - protein, 14 aa, Homo Sapiens
SLGGPAPPPAPPPP

SEQ ID NO: 18174 - protein, 14 aa, Homo Sapiens
LGGPAPPPAPPPPP

SEQ ID NO: 18175 - protein, 14 aa, Homo Sapiens
GGPAPPPAPPPPPP

SEQ ID NO: 18176 - protein, 14 aa, Homo Sapiens
GPAPPPAPPPPPPP

SEQ ID NO: 18177 - protein, 14 aa, Homo Sapiens
PAPPPAPPPPPPPP

SEQ ID NO: 18178 - protein, 14 aa, Homo Sapiens
APPPAPPPPPPPPP

SEQ ID NO: 18179 - protein, 14 aa, Homo Sapiens
PPPAPPPPPPPPPH

SEQ ID NO: 18180 - protein, 14 aa, Homo Sapiens
PPAPPPPPPPPPHS

SEQ ID NO: 18181 - protein, 14 aa, Homo Sapiens
PAPPPPPPPPPHSF

SEQ ID NO: 18182 - protein, 14 aa, Homo Sapiens
APPPPPPPPPHSFI

SEQ ID NO: 18183 - protein, 14 aa, Homo Sapiens
PPPPPPPPPHSFIK

SEQ ID NO: 18184 - protein, 14 aa, Homo Sapiens
PPPPPPPPHSFIKQ

SEQ ID NO: 18185 - protein, 14 aa, Homo Sapiens
PPPPPPPHSFIKQE

SEQ ID NO: 18186 - protein, 14 aa, Homo Sapiens
PPPPPPHSFIKQEP

SEQ ID NO: 18187 - protein, 14 aa, Homo Sapiens
PPPPPHSFIKQEPS

SEQ ID NO: 18188 - protein, 14 aa, Homo Sapiens
PPPPHSFIKQEPSW

SEQ ID NO: 18189 - protein, 14 aa, Homo Sapiens
PPPHSFIKQEPSWG

SEQ ID NO: 18190 - protein, 14 aa, Homo Sapiens
PPHSFIKQEPSWGG

SEQ ID NO: 18191 - protein, 14 aa, Homo Sapiens
PHSFIKQEPSWGGA

SEQ ID NO: 18192 - protein, 14 aa, Homo Sapiens
HSFIKQEPSWGGAE

SEQ ID NO: 18193 - protein, 14 aa, Homo Sapiens
SFIKQEPSWGGAEP

SEQ ID NO: 18194 - protein, 14 aa, Homo Sapiens
FIKQEPSWGGAEPH

SEQ ID NO: 18195 - protein, 14 aa, Homo Sapiens
IKQEPSWGGAEPHE

SEQ ID NO: 18196 - protein, 14 aa, Homo Sapiens
KQEPSWGGAEPHEE

SEQ ID NO: 18197 - protein, 14 aa, Homo Sapiens
QEPSWGGAEPHEEQ

SEQ ID NO: 18198 - protein, 14 aa, Homo Sapiens
EPSWGGAEPHEEQC

SEQ ID NO: 18199 - protein, 14 aa, Homo Sapiens
PSWGGAEPHEEQCL

SEQ ID NO: 18200 - protein, 14 aa, Homo Sapiens
SWGGAEPHEEQCLS

SEQ ID NO: 18201 - protein, 14 aa, Homo Sapiens
WGGAEPHEEQCLSA

SEQ ID NO: 18202 - protein, 14 aa, Homo Sapiens
GGAEPHEEQCLSAF

SEQ ID NO: 18203 - protein, 14 aa, Homo Sapiens
GAEPHEEQCLSAFT

SEQ ID NO: 18204 - protein, 14 aa, Homo Sapiens
AEPHEEQCLSAFTV

SEQ ID NO: 18205 - protein, 14 aa, Homo Sapiens
EPHEEQCLSAFTVH

SEQ ID NO: 18206 - protein, 14 aa, Homo Sapiens
PHEEQCLSAFTVHF

SEQ ID NO: 18207 - protein, 14 aa, Homo Sapiens
HEEQCLSAFTVHFS

SEQ ID NO: 18208 - protein, 14 aa, Homo Sapiens
EEQCLSAFTVHFSG

SEQ ID NO: 18209 - protein, 14 aa, Homo Sapiens
EQCLSAFTVHFSGQ

SEQ ID NO: 18210 - protein, 14 aa, Homo Sapiens
QCLSAFTVHFSGQF

SEQ ID NO: 18211 - protein, 14 aa, Homo Sapiens
CLSAFTVHFSGQFT

SEQ ID NO: 18212 - protein, 14 aa, Homo Sapiens
LSAFTVHFSGQFTG

SEQ ID NO: 18213 - protein, 14 aa, Homo Sapiens
SAFTVHFSGQFTGT

SEQ ID NO: 18214 - protein, 14 aa, Homo Sapiens
AFTVHFSGQFTGTA

SEQ ID NO: 18215 - protein, 14 aa, Homo Sapiens
FTVHFSGQFTGTAG

SEQ ID NO: 18216 - protein, 14 aa, Homo Sapiens
TVHFSGQFTGTAGA

SEQ ID NO: 18217 - protein, 14 aa, Homo Sapiens
VHFSGQFTGTAGAC

SEQ ID NO: 18218 - protein, 14 aa, Homo Sapiens
HFSGQFTGTAGACR

SEQ ID NO: 18219 - protein, 14 aa, Homo Sapiens
FSGQFTGTAGACRY

SEQ ID NO: 18220 - protein, 14 aa, Homo Sapiens
SGQFTGTAGACRYG

SEQ ID NO: 18221 - protein, 14 aa, Homo Sapiens
GQFTGTAGACRYGP

SEQ ID NO: 18222 - protein, 14 aa, Homo Sapiens
QFTGTAGACRYGPF

SEQ ID NO: 18223 - protein, 14 aa, Homo Sapiens
FTGTAGACRYGPFG

SEQ ID NO: 18224 - protein, 14 aa, Homo Sapiens
TGTAGACRYGPFGP

SEQ ID NO: 18225 - protein, 14 aa, Homo Sapiens
GTAGACRYGPFGPP

SEQ ID NO: 18226 - protein, 14 aa, Homo Sapiens
TAGACRYGPFGPPP

SEQ ID NO: 18227 - protein, 14 aa, Homo Sapiens
AGACRYGPFGPPPP

SEQ ID NO: 18228 - protein, 14 aa, Homo Sapiens
GACRYGPFGPPPPS

SEQ ID NO: 18229 - protein, 14 aa, Homo Sapiens
ACRYGPFGPPPPSQ

SEQ ID NO: 18230 - protein, 14 aa, Homo Sapiens
CRYGPFGPPPPSQA

SEQ ID NO: 18231 - protein, 14 aa, Homo Sapiens
RYGPFGPPPPSQAS

SEQ ID NO: 18232 - protein, 14 aa, Homo Sapiens
YGPFGPPPPSQASS

SEQ ID NO: 18233 - protein, 14 aa, Homo Sapiens
GPFGPPPPSQASSG

SEQ ID NO: 18234 - protein, 14 aa, Homo Sapiens
PFGPPPPSQASSGQ

SEQ ID NO: 18235 - protein, 14 aa, Homo Sapiens
FGPPPPSQASSGQA

SEQ ID NO: 18236 - protein, 14 aa, Homo Sapiens
GPPPPSQASSGQAR

SEQ ID NO: 18237 - protein, 14 aa, Homo Sapiens
PPPPSQASSGQARM

SEQ ID NO: 18238 - protein, 14 aa, Homo Sapiens
PPPSQASSGQARMF

SEQ ID NO: 18239 - protein, 14 aa, Homo Sapiens
PPSQASSGQARMFP

SEQ ID NO: 18240 - protein, 14 aa, Homo Sapiens
PSQASSGQARMFPN

SEQ ID NO: 18241 - protein, 14 aa, Homo Sapiens
SQASSGQARMFPNA

SEQ ID NO: 18242 - protein, 14 aa, Homo Sapiens
QASSGQARMFPNAP

SEQ ID NO: 18243 - protein, 14 aa, Homo Sapiens
ASSGQARMFPNAPY

SEQ ID NO: 18244 - protein, 14 aa, Homo Sapiens
SSGQARMFPNAPYL

SEQ ID NO: 18245 - protein, 14 aa, Homo Sapiens
SGQARMFPNAPYLP

SEQ ID NO: 18246 - protein, 14 aa, Homo Sapiens
GQARMFPNAPYLPS

SEQ ID NO: 18247 - protein, 14 aa, Homo Sapiens
QARMFPNAPYLPSC

SEQ ID NO: 18248 - protein, 14 aa, Homo Sapiens
ARMFPNAPYLPSCL

SEQ ID NO: 18249 - protein, 14 aa, Homo Sapiens
RMFPNAPYLPSCLE

SEQ ID NO: 18250 - protein, 14 aa, Homo Sapiens
MFPNAPYLPSCLES

SEQ ID NO: 18251 - protein, 14 aa, Homo Sapiens
FPNAPYLPSCLESQ

SEQ ID NO: 18252 - protein, 14 aa, Homo Sapiens
PNAPYLPSCLESQP

SEQ ID NO: 18253 - protein, 14 aa, Homo Sapiens
NAPYLPSCLESQPA

SEQ ID NO: 18254 - protein, 14 aa, Homo Sapiens
APYLPSCLESQPAI

SEQ ID NO: 18255 - protein, 14 aa, Homo Sapiens
PYLPSCLESQPAIR

SEQ ID NO: 18256 - protein, 14 aa, Homo Sapiens
YLPSCLESQPAIRN

SEQ ID NO: 18257 - protein, 14 aa, Homo Sapiens
LPSCLESQPAIRNQ

SEQ ID NO: 18258 - protein, 14 aa, Homo Sapiens
PSCLESQPAIRNQG

SEQ ID NO: 18259 - protein, 14 aa, Homo Sapiens
SCLESQPAIRNQGY

SEQ ID NO: 18260 - protein, 14 aa, Homo Sapiens
CLESQPAIRNQGYS

SEQ ID NO: 18261 - protein, 14 aa, Homo Sapiens
LESQPAIRNQGYST

SEQ ID NO: 18262 - protein, 14 aa, Homo Sapiens
ESQPAIRNQGYSTV

SEQ ID NO: 18263 - protein, 14 aa, Homo Sapiens
SQPAIRNQGYSTVT

SEQ ID NO: 18264 - protein, 14 aa, Homo Sapiens
QPAIRNQGYSTVTF

SEQ ID NO: 18265 - protein, 14 aa, Homo Sapiens
PAIRNQGYSTVTFD

SEQ ID NO: 18266 - protein, 14 aa, Homo Sapiens
AIRNQGYSTVTFDG

SEQ ID NO: 18267 - protein, 14 aa, Homo Sapiens
IRNQGYSTVTFDGT

SEQ ID NO: 18268 - protein, 14 aa, Homo Sapiens
RNQGYSTVTFDGTP

SEQ ID NO: 18269 - protein, 14 aa, Homo Sapiens
NQGYSTVTFDGTPS

SEQ ID NO: 18270 - protein, 14 aa, Homo Sapiens
QGYSTVTFDGTPSY

SEQ ID NO: 18271 - protein, 14 aa, Homo Sapiens
GYSTVTFDGTPSYG

SEQ ID NO: 18272 - protein, 14 aa, Homo Sapiens
YSTVTFDGTPSYGH

SEQ ID NO: 18273 - protein, 14 aa, Homo Sapiens
STVTFDGTPSYGHT

SEQ ID NO: 18274 - protein, 14 aa, Homo Sapiens
TVTFDGTPSYGHTP

SEQ ID NO: 18275 - protein, 14 aa, Homo Sapiens
VTFDGTPSYGHTPS

SEQ ID NO: 18276 - protein, 14 aa, Homo Sapiens
TFDGTPSYGHTPSH

SEQ ID NO: 18277 - protein, 14 aa, Homo Sapiens
FDGTPSYGHTPSHH

SEQ ID NO: 18278 - protein, 14 aa, Homo Sapiens
DGTPSYGHTPSHHA

SEQ ID NO: 18279 - protein, 14 aa, Homo Sapiens
GTPSYGHTPSHHAA

SEQ ID NO: 18280 - protein, 14 aa, Homo Sapiens
TPSYGHTPSHHAAQ

SEQ ID NO: 18281 - protein, 14 aa, Homo Sapiens
PSYGHTPSHHAAQF

SEQ ID NO: 18282 - protein, 14 aa, Homo Sapiens
SYGHTPSHHAAQFP

SEQ ID NO: 18283 - protein, 14 aa, Homo Sapiens
YGHTPSHHAAQFPN

SEQ ID NO: 18284 - protein, 14 aa, Homo Sapiens
GHTPSHHAAQFPNH

SEQ ID NO: 18285 - protein, 14 aa, Homo Sapiens
HTPSHHAAQFPNHS

SEQ ID NO: 18286 - protein, 14 aa, Homo Sapiens
TPSHHAAQFPNHSF

SEQ ID NO: 18287 - protein, 14 aa, Homo Sapiens
PSHHAAQFPNHSFK

SEQ ID NO: 18288 - protein, 14 aa, Homo Sapiens
SHHAAQFPNHSFKH

SEQ ID NO: 18289 - protein, 14 aa, Homo Sapiens
HHAAQFPNHSFKHE

SEQ ID NO: 18290 - protein, 14 aa, Homo Sapiens
HAAQFPNHSFKHED

SEQ ID NO: 18291 - protein, 14 aa, Homo Sapiens
AAQFPNHSFKHEDP

SEQ ID NO: 18292 - protein, 14 aa, Homo Sapiens
AQFPNHSFKHEDPM

SEQ ID NO: 18293 - protein, 14 aa, Homo Sapiens
QFPNHSFKHEDPMG

SEQ ID NO: 18294 - protein, 14 aa, Homo Sapiens
FPNHSFKHEDPMGQ

SEQ ID NO: 18295 - protein, 14 aa, Homo Sapiens
PNHSFKHEDPMGQQ

SEQ ID NO: 18296 - protein, 14 aa, Homo Sapiens
NHSFKHEDPMGQQG

SEQ ID NO: 18297 - protein, 14 aa, Homo Sapiens
HSFKHEDPMGQQGS

SEQ ID NO: 18298 - protein, 14 aa, Homo Sapiens
SFKHEDPMGQQGSL

SEQ ID NO: 18299 - protein, 14 aa, Homo Sapiens
FKHEDPMGQQGSLG

SEQ ID NO: 18300 - protein, 14 aa, Homo Sapiens
KHEDPMGQQGSLGE

SEQ ID NO: 18301 - protein, 14 aa, Homo Sapiens
HEDPMGQQGSLGEQ

SEQ ID NO: 18302 - protein, 14 aa, Homo Sapiens
EDPMGQQGSLGEQQ

SEQ ID NO: 18303 - protein, 14 aa, Homo Sapiens
DPMGQQGSLGEQQY

SEQ ID NO: 18304 - protein, 14 aa, Homo Sapiens
PMGQQGSLGEQQYS

SEQ ID NO: 18305 - protein, 14 aa, Homo Sapiens
MGQQGSLGEQQYSV

SEQ ID NO: 18306 - protein, 14 aa, Homo Sapiens
GQQGSLGEQQYSVP

SEQ ID NO: 18307 - protein, 14 aa, Homo Sapiens
QQGSLGEQQYSVPP

SEQ ID NO: 18308 - protein, 14 aa, Homo Sapiens
QGSLGEQQYSVPPP

SEQ ID NO: 18309 - protein, 14 aa, Homo Sapiens
GSLGEQQYSVPPPV

SEQ ID NO: 18310 - protein, 14 aa, Homo Sapiens
SLGEQQYSVPPPVY

SEQ ID NO: 18311 - protein, 14 aa, Homo Sapiens
LGEQQYSVPPPVYG

SEQ ID NO: 18312 - protein, 14 aa, Homo Sapiens
GEQQYSVPPPVYGC

SEQ ID NO: 18313 - protein, 14 aa, Homo Sapiens
EQQYSVPPPVYGCH

SEQ ID NO: 18314 - protein, 14 aa, Homo Sapiens
QQYSVPPPVYGCHT

SEQ ID NO: 18315 - protein, 14 aa, Homo Sapiens
QYSVPPPVYGCHTP

SEQ ID NO: 18316 - protein, 14 aa, Homo Sapiens
YSVPPPVYGCHTPT

SEQ ID NO: 18317 - protein, 14 aa, Homo Sapiens
SVPPPVYGCHTPTD

SEQ ID NO: 18318 - protein, 14 aa, Homo Sapiens
VPPPVYGCHTPTDS

SEQ ID NO: 18319 - protein, 14 aa, Homo Sapiens
PPPVYGCHTPTDSC

SEQ ID NO: 18320 - protein, 14 aa, Homo Sapiens
PPVYGCHTPTDSCT

SEQ ID NO: 18321 - protein, 14 aa, Homo Sapiens
PVYGCHTPTDSCTG

SEQ ID NO: 18322 - protein, 14 aa, Homo Sapiens
VYGCHTPTDSCTGS

SEQ ID NO: 18323 - protein, 14 aa, Homo Sapiens
YGCHTPTDSCTGSQ

SEQ ID NO: 18324 - protein, 14 aa, Homo Sapiens
GCHTPTDSCTGSQA

SEQ ID NO: 18325 - protein, 14 aa, Homo Sapiens
CHTPTDSCTGSQAL

SEQ ID NO: 18326 - protein, 14 aa, Homo Sapiens
HTPTDSCTGSQALL

SEQ ID NO: 18327 - protein, 14 aa, Homo Sapiens
TPTDSCTGSQALLL

SEQ ID NO: 18328 - protein, 14 aa, Homo Sapiens
PTDSCTGSQALLLR

SEQ ID NO: 18329 - protein, 14 aa, Homo Sapiens
TDSCTGSQALLLRT

SEQ ID NO: 18330 - protein, 14 aa, Homo Sapiens
DSCTGSQALLLRTP

SEQ ID NO: 18331 - protein, 14 aa, Homo Sapiens
SCTGSQALLLRTPY

SEQ ID NO: 18332 - protein, 14 aa, Homo Sapiens
CTGSQALLLRTPYS

SEQ ID NO: 18333 - protein, 14 aa, Homo Sapiens
TGSQALLLRTPYSS

SEQ ID NO: 18334 - protein, 14 aa, Homo Sapiens
GSQALLLRTPYSSD

SEQ ID NO: 18335 - protein, 14 aa, Homo Sapiens
SQALLLRTPYSSDN

SEQ ID NO: 18336 - protein, 14 aa, Homo Sapiens
QALLLRTPYSSDNL

SEQ ID NO: 18337 - protein, 14 aa, Homo Sapiens
ALLLRTPYSSDNLY

SEQ ID NO: 18338 - protein, 14 aa, Homo Sapiens
LLLRTPYSSDNLYQ

SEQ ID NO: 18339 - protein, 14 aa, Homo Sapiens
LLRTPYSSDNLYQM

SEQ ID NO: 18340 - protein, 14 aa, Homo Sapiens
LRTPYSSDNLYQMT

SEQ ID NO: 18341 - protein, 14 aa, Homo Sapiens
RTPYSSDNLYQMTS

SEQ ID NO: 18342 - protein, 14 aa, Homo Sapiens
TPYSSDNLYQMTSQ

SEQ ID NO: 18343 - protein, 14 aa, Homo Sapiens
PYSSDNLYQMTSQL

SEQ ID NO: 18344 - protein, 14 aa, Homo Sapiens
YSSDNLYQMTSQLE

SEQ ID NO: 18345 - protein, 14 aa, Homo Sapiens
SSDNLYQMTSQLEC

SEQ ID NO: 18346 - protein, 14 aa, Homo Sapiens
SDNLYQMTSQLECM

SEQ ID NO: 18347 - protein, 14 aa, Homo Sapiens
DNLYQMTSQLECMT

SEQ ID NO: 18348 - protein, 14 aa, Homo Sapiens
NLYQMTSQLECMTW

SEQ ID NO: 18349 - protein, 14 aa, Homo Sapiens
LYQMTSQLECMTWN

SEQ ID NO: 18350 - protein, 14 aa, Homo Sapiens
YQMTSQLECMTWNQ

SEQ ID NO: 18351 - protein, 14 aa, Homo Sapiens
QMTSQLECMTWNQM

SEQ ID NO: 18352 - protein, 14 aa, Homo Sapiens
MTSQLECMTWNQMN

SEQ ID NO: 18353 - protein, 14 aa, Homo Sapiens
TSQLECMTWNQMNL

SEQ ID NO: 18354 - protein, 14 aa, Homo Sapiens
SQLECMTWNQMNLG

SEQ ID NO: 18355 - protein, 14 aa, Homo Sapiens
QLECMTWNQMNLGA

SEQ ID NO: 18356 - protein, 14 aa, Homo Sapiens
LECMTWNQMNLGAT

SEQ ID NO: 18357 - protein, 14 aa, Homo Sapiens
ECMTWNQMNLGATL

SEQ ID NO: 18358 - protein, 14 aa, Homo Sapiens
CMTWNQMNLGATLK

SEQ ID NO: 18359 - protein, 14 aa, Homo Sapiens
MTWNQMNLGATLKG

SEQ ID NO: 18360 - protein, 14 aa, Homo Sapiens
TWNQMNLGATLKGH

SEQ ID NO: 18361 - protein, 14 aa, Homo Sapiens
WNQMNLGATLKGHS

SEQ ID NO: 18362 - protein, 14 aa, Homo Sapiens
NQMNLGATLKGHST

SEQ ID NO: 18363 - protein, 14 aa, Homo Sapiens
QMNLGATLKGHSTG

SEQ ID NO: 18364 - protein, 14 aa, Homo Sapiens
MNLGATLKGHSTGY

SEQ ID NO: 18365 - protein, 14 aa, Homo Sapiens
NLGATLKGHSTGYE

SEQ ID NO: 18366 - protein, 14 aa, Homo Sapiens
LGATLKGHSTGYES

SEQ ID NO: 18367 - protein, 14 aa, Homo Sapiens
GATLKGHSTGYESD

SEQ ID NO: 18368 - protein, 14 aa, Homo Sapiens
ATLKGHSTGYESDN

SEQ ID NO: 18369 - protein, 14 aa, Homo Sapiens
TLKGHSTGYESDNH

SEQ ID NO: 18370 - protein, 14 aa, Homo Sapiens
LKGHSTGYESDNHT

SEQ ID NO: 18371 - protein, 14 aa, Homo Sapiens
KGHSTGYESDNHTT

SEQ ID NO: 18372 - protein, 14 aa, Homo Sapiens
GHSTGYESDNHTTP

SEQ ID NO: 18373 - protein, 14 aa, Homo Sapiens
HSTGYESDNHTTPI

SEQ ID NO: 18374 - protein, 14 aa, Homo Sapiens
STGYESDNHTTPIL

SEQ ID NO: 18375 - protein, 14 aa, Homo Sapiens
TGYESDNHTTPILC

SEQ ID NO: 18376 - protein, 14 aa, Homo Sapiens
GYESDNHTTPILCG

SEQ ID NO: 18377 - protein, 14 aa, Homo Sapiens
YESDNHTTPILCGA

SEQ ID NO: 18378 - protein, 14 aa, Homo Sapiens
ESDNHTTPILCGAQ

SEQ ID NO: 18379 - protein, 14 aa, Homo Sapiens
SDNHTTPILCGAQY

SEQ ID NO: 18380 - protein, 14 aa, Homo Sapiens
DNHTTPILCGAQYR

SEQ ID NO: 18381 - protein, 14 aa, Homo Sapiens
NHTTPILCGAQYRI

SEQ ID NO: 18382 - protein, 14 aa, Homo Sapiens
HTTPILCGAQYRIH

SEQ ID NO: 18383 - protein, 14 aa, Homo Sapiens
TTPILCGAQYRIHT

SEQ ID NO: 18384 - protein, 14 aa, Homo Sapiens
TPILCGAQYRIHTH

SEQ ID NO: 18385 - protein, 14 aa, Homo Sapiens
PILCGAQYRIHTHG

SEQ ID NO: 18386 - protein, 14 aa, Homo Sapiens
ILCGAQYRIHTHGV

SEQ ID NO: 18387 - protein, 14 aa, Homo Sapiens
LCGAQYRIHTHGVF

SEQ ID NO: 18388 - protein, 14 aa, Homo Sapiens
CGAQYRIHTHGVFR

SEQ ID NO: 18389 - protein, 14 aa, Homo Sapiens
GAQYRIHTHGVFRG

SEQ ID NO: 18390 - protein, 14 aa, Homo Sapiens
AQYRIHTHGVFRGI

SEQ ID NO: 18391 - protein, 14 aa, Homo Sapiens
QYRIHTHGVFRGIQ

SEQ ID NO: 18392 - protein, 14 aa, Homo Sapiens
YRIHTHGVFRGIQD

SEQ ID NO: 18393 - protein, 14 aa, Homo Sapiens
RIHTHGVFRGIQDV

SEQ ID NO: 18394 - protein, 14 aa, Homo Sapiens
IHTHGVFRGIQDVR

SEQ ID NO: 18395 - protein, 14 aa, Homo Sapiens
HTHGVFRGIQDVRR

SEQ ID NO: 18396 - protein, 14 aa, Homo Sapiens
THGVFRGIQDVRRV

SEQ ID NO: 18397 - protein, 14 aa, Homo Sapiens
HGVFRGIQDVRRVP

SEQ ID NO: 18398 - protein, 14 aa, Homo Sapiens
GVFRGIQDVRRVPG

SEQ ID NO: 18399 - protein, 14 aa, Homo Sapiens
VFRGIQDVRRVPGV

SEQ ID NO: 18400 - protein, 14 aa, Homo Sapiens
FRGIQDVRRVPGVA

SEQ ID NO: 18401 - protein, 14 aa, Homo Sapiens
RGIQDVRRVPGVAP

SEQ ID NO: 18402 - protein, 14 aa, Homo Sapiens
GIQDVRRVPGVAPT

SEQ ID NO: 18403 - protein, 14 aa, Homo Sapiens
IQDVRRVPGVAPTL

SEQ ID NO: 18404 - protein, 14 aa, Homo Sapiens
QDVRRVPGVAPTLV

SEQ ID NO: 18405 - protein, 14 aa, Homo Sapiens
DVRRVPGVAPTLVR

SEQ ID NO: 18406 - protein, 14 aa, Homo Sapiens
VRRVPGVAPTLVRS

SEQ ID NO: 18407 - protein, 14 aa, Homo Sapiens
RRVPGVAPTLVRSA

SEQ ID NO: 18408 - protein, 14 aa, Homo Sapiens
RVPGVAPTLVRSAS

SEQ ID NO: 18409 - protein, 14 aa, Homo Sapiens
VPGVAPTLVRSASE

SEQ ID NO: 18410 - protein, 14 aa, Homo Sapiens
PGVAPTLVRSASET

SEQ ID NO: 18411 - protein, 14 aa, Homo Sapiens
GVAPTLVRSASETS

SEQ ID NO: 18412 - protein, 14 aa, Homo Sapiens
VAPTLVRSASETSE

SEQ ID NO: 18413 - protein, 14 aa, Homo Sapiens
APTLVRSASETSEK

SEQ ID NO: 18414 - protein, 14 aa, Homo Sapiens
PTLVRSASETSEKR

SEQ ID NO: 18415 - protein, 14 aa, Homo Sapiens
TLVRSASETSEKRP

SEQ ID NO: 18416 - protein, 14 aa, Homo Sapiens
LVRSASETSEKRPF

SEQ ID NO: 18417 - protein, 14 aa, Homo Sapiens
VRSASETSEKRPFM

SEQ ID NO: 18418 - protein, 14 aa, Homo Sapiens
RSASETSEKRPFMC

SEQ ID NO: 18419 - protein, 14 aa, Homo Sapiens
SASETSEKRPFMCA

SEQ ID NO: 18420 - protein, 14 aa, Homo Sapiens
ASETSEKRPFMCAY

SEQ ID NO: 18421 - protein, 14 aa, Homo Sapiens
SETSEKRPFMCAYP

SEQ ID NO: 18422 - protein, 14 aa, Homo Sapiens
ETSEKRPFMCAYPG

SEQ ID NO: 18423 - protein, 14 aa, Homo Sapiens
TSEKRPFMCAYPGC

SEQ ID NO: 18424 - protein, 14 aa, Homo Sapiens
SEKRPFMCAYPGCN

SEQ ID NO: 18425 - protein, 14 aa, Homo Sapiens
EKRPFMCAYPGCNK

SEQ ID NO: 18426 - protein, 14 aa, Homo Sapiens
KRPFMCAYPGCNKR

SEQ ID NO: 18427 - protein, 14 aa, Homo Sapiens
RPFMCAYPGCNKRY

SEQ ID NO: 18428 - protein, 14 aa, Homo Sapiens
PFMCAYPGCNKRYF

SEQ ID NO: 18429 - protein, 14 aa, Homo Sapiens
FMCAYPGCNKRYFK

SEQ ID NO: 18430 - protein, 14 aa, Homo Sapiens
MCAYPGCNKRYFKL

SEQ ID NO: 18431 - protein, 14 aa, Homo Sapiens
CAYPGCNKRYFKLS

SEQ ID NO: 18432 - protein, 14 aa, Homo Sapiens
AYPGCNKRYFKLSH

SEQ ID NO: 18433 - protein, 14 aa, Homo Sapiens
YPGCNKRYFKLSHL

SEQ ID NO: 18434 - protein, 14 aa, Homo Sapiens
PGCNKRYFKLSHLQ

SEQ ID NO: 18435 - protein, 14 aa, Homo Sapiens
GCNKRYFKLSHLQM

SEQ ID NO: 18436 - protein, 14 aa, Homo Sapiens
CNKRYFKLSHLQMH

SEQ ID NO: 18437 - protein, 14 aa, Homo Sapiens
NKRYFKLSHLQMHS

SEQ ID NO: 18438 - protein, 14 aa, Homo Sapiens
KRYFKLSHLQMHSR

SEQ ID NO: 18439 - protein, 14 aa, Homo Sapiens
RYFKLSHLQMHSRK

SEQ ID NO: 18440 - protein, 14 aa, Homo Sapiens
YFKLSHLQMHSRKH

SEQ ID NO: 18441 - protein, 14 aa, Homo Sapiens
FKLSHLQMHSRKHT

SEQ ID NO: 18442 - protein, 14 aa, Homo Sapiens
KLSHLQMHSRKHTG

SEQ ID NO: 18443 - protein, 14 aa, Homo Sapiens
LSHLQMHSRKHTGE

SEQ ID NO: 18444 - protein, 14 aa, Homo Sapiens
SHLQMHSRKHTGEK

SEQ ID NO: 18445 - protein, 14 aa, Homo Sapiens
HLQMHSRKHTGEKP

SEQ ID NO: 18446 - protein, 14 aa, Homo Sapiens
LQMHSRKHTGEKPY

SEQ ID NO: 18447 - protein, 14 aa, Homo Sapiens
QMHSRKHTGEKPYQ

SEQ ID NO: 18448 - protein, 14 aa, Homo Sapiens
MHSRKHTGEKPYQC

SEQ ID NO: 18449 - protein, 14 aa, Homo Sapiens
HSRKHTGEKPYQCD

SEQ ID NO: 18450 - protein, 14 aa, Homo Sapiens
SRKHTGEKPYQCDF

SEQ ID NO: 18451 - protein, 14 aa, Homo Sapiens
RKHTGEKPYQCDFK

SEQ ID NO: 18452 - protein, 14 aa, Homo Sapiens
KHTGEKPYQCDFKD

SEQ ID NO: 18453 - protein, 14 aa, Homo Sapiens
HTGEKPYQCDFKDC

SEQ ID NO: 18454 - protein, 14 aa, Homo Sapiens
TGEKPYQCDFKDCE

SEQ ID NO: 18455 - protein, 14 aa, Homo Sapiens
GEKPYQCDFKDCER

SEQ ID NO: 18456 - protein, 14 aa, Homo Sapiens
EKPYQCDFKDCERR

SEQ ID NO: 18457 - protein, 14 aa, Homo Sapiens
KPYQCDFKDCERRF

SEQ ID NO: 18458 - protein, 14 aa, Homo Sapiens
PYQCDFKDCERRFS

SEQ ID NO: 18459 - protein, 14 aa, Homo Sapiens
YQCDFKDCERRFSR

SEQ ID NO: 18460 - protein, 14 aa, Homo Sapiens
QCDFKDCERRFSRS

SEQ ID NO: 18461 - protein, 14 aa, Homo Sapiens
CDFKDCERRFSRSD

SEQ ID NO: 18462 - protein, 14 aa, Homo Sapiens
DFKDCERRFSRSDQ

SEQ ID NO: 18463 - protein, 14 aa, Homo Sapiens
FKDCERRFSRSDQL

SEQ ID NO: 18464 - protein, 14 aa, Homo Sapiens
KDCERRFSRSDQLK

SEQ ID NO: 18465 - protein, 14 aa, Homo Sapiens
DCERRFSRSDQLKR

SEQ ID NO: 18466 - protein, 14 aa, Homo Sapiens
CERRFSRSDQLKRH

SEQ ID NO: 18467 - protein, 14 aa, Homo Sapiens
ERRFSRSDQLKRHQ

SEQ ID NO: 18468 - protein, 14 aa, Homo Sapiens
RRFSRSDQLKRHQR

SEQ ID NO: 18469 - protein, 14 aa, Homo Sapiens
RFSRSDQLKRHQRR

SEQ ID NO: 18470 - protein, 14 aa, Homo Sapiens
FSRSDQLKRHQRRH

SEQ ID NO: 18471 - protein, 14 aa, Homo Sapiens
SRSDQLKRHQRRHT

SEQ ID NO: 18472 - protein, 14 aa, Homo Sapiens
RSDQLKRHQRRHTG

SEQ ID NO: 18473 - protein, 14 aa, Homo Sapiens
SDQLKRHQRRHTGV

SEQ ID NO: 18474 - protein, 14 aa, Homo Sapiens
DQLKRHQRRHTGVK

SEQ ID NO: 18475 - protein, 14 aa, Homo Sapiens
QLKRHQRRHTGVKP

SEQ ID NO: 18476 - protein, 14 aa, Homo Sapiens
LKRHQRRHTGVKPF

SEQ ID NO: 18477 - protein, 14 aa, Homo Sapiens
KRHQRRHTGVKPFQ

SEQ ID NO: 18478 - protein, 14 aa, Homo Sapiens
RHQRRHTGVKPFQC

SEQ ID NO: 18479 - protein, 14 aa, Homo Sapiens
HQRRHTGVKPFQCK

SEQ ID NO: 18480 - protein, 14 aa, Homo Sapiens
QRRHTGVKPFQCKT

SEQ ID NO: 18481 - protein, 14 aa, Homo Sapiens
RRHTGVKPFQCKTC

SEQ ID NO: 18482 - protein, 14 aa, Homo Sapiens
RHTGVKPFQCKTCQ

SEQ ID NO: 18483 - protein, 14 aa, Homo Sapiens
HTGVKPFQCKTCQR

SEQ ID NO: 18484 - protein, 14 aa, Homo Sapiens
TGVKPFQCKTCQRK

SEQ ID NO: 18485 - protein, 14 aa, Homo Sapiens
GVKPFQCKTCQRKF

SEQ ID NO: 18486 - protein, 14 aa, Homo Sapiens
VKPFQCKTCQRKFS

SEQ ID NO: 18487 - protein, 14 aa, Homo Sapiens
KPFQCKTCQRKFSR

SEQ ID NO: 18488 - protein, 14 aa, Homo Sapiens
PFQCKTCQRKFSRS

SEQ ID NO: 18489 - protein, 14 aa, Homo Sapiens
FQCKTCQRKFSRSD

SEQ ID NO: 18490 - protein, 14 aa, Homo Sapiens
QCKTCQRKFSRSDH

SEQ ID NO: 18491 - protein, 14 aa, Homo Sapiens
CKTCQRKFSRSDHL

SEQ ID NO: 18492 - protein, 14 aa, Homo Sapiens
KTCQRKFSRSDHLK

SEQ ID NO: 18493 - protein, 14 aa, Homo Sapiens
TCQRKFSRSDHLKT

SEQ ID NO: 18494 - protein, 14 aa, Homo Sapiens
CQRKFSRSDHLKTH

SEQ ID NO: 18495 - protein, 14 aa, Homo Sapiens
QRKFSRSDHLKTHT

SEQ ID NO: 18496 - protein, 14 aa, Homo Sapiens
RKFSRSDHLKTHTR

SEQ ID NO: 18497 - protein, 14 aa, Homo Sapiens
KFSRSDHLKTHTRT

SEQ ID NO: 18498 - protein, 14 aa, Homo Sapiens
FSRSDHLKTHTRTH

SEQ ID NO: 18499 - protein, 14 aa, Homo Sapiens
SRSDHLKTHTRTHT

SEQ ID NO: 18500 - protein, 14 aa, Homo Sapiens
RSDHLKTHTRTHTG

SEQ ID NO: 18501 - protein, 14 aa, Homo Sapiens
SDHLKTHTRTHTGK

SEQ ID NO: 18502 - protein, 14 aa, Homo Sapiens
DHLKTHTRTHTGKT

SEQ ID NO: 18503 - protein, 14 aa, Homo Sapiens
HLKTHTRTHTGKTS

SEQ ID NO: 18504 - protein, 14 aa, Homo Sapiens
LKTHTRTHTGKTSE

SEQ ID NO: 18505 - protein, 14 aa, Homo Sapiens
KTHTRTHTGKTSEK

SEQ ID NO: 18506 - protein, 14 aa, Homo Sapiens
THTRTHTGKTSEKP

SEQ ID NO: 18507 - protein, 14 aa, Homo Sapiens
HTRTHTGKTSEKPF

SEQ ID NO: 18508 - protein, 14 aa, Homo Sapiens
TRTHTGKTSEKPFS

SEQ ID NO: 18509 - protein, 14 aa, Homo Sapiens
RTHTGKTSEKPFSC

SEQ ID NO: 18510 - protein, 14 aa, Homo Sapiens
THTGKTSEKPFSCR

SEQ ID NO: 18511 - protein, 14 aa, Homo Sapiens
HTGKTSEKPFSCRW

SEQ ID NO: 18512 - protein, 14 aa, Homo Sapiens
TGKTSEKPFSCRWP

SEQ ID NO: 18513 - protein, 14 aa, Homo Sapiens
GKTSEKPFSCRWPS

SEQ ID NO: 18514 - protein, 14 aa, Homo Sapiens
KTSEKPFSCRWPSC

SEQ ID NO: 18515 - protein, 14 aa, Homo Sapiens
TSEKPFSCRWPSCQ

SEQ ID NO: 18516 - protein, 14 aa, Homo Sapiens
SEKPFSCRWPSCQK

SEQ ID NO: 18517 - protein, 14 aa, Homo Sapiens
EKPFSCRWPSCQKK

SEQ ID NO: 18518 - protein, 14 aa, Homo Sapiens
KPFSCRWPSCQKKF

SEQ ID NO: 18519 - protein, 14 aa, Homo Sapiens
PFSCRWPSCQKKFA

SEQ ID NO: 18520 - protein, 14 aa, Homo Sapiens
FSCRWPSCQKKFAR

SEQ ID NO: 18521 - protein, 14 aa, Homo Sapiens
SCRWPSCQKKFARS

SEQ ID NO: 18522 - protein, 14 aa, Homo Sapiens
CRWPSCQKKFARSD

SEQ ID NO: 18523 - protein, 14 aa, Homo Sapiens
RWPSCQKKFARSDE

SEQ ID NO: 18524 - protein, 14 aa, Homo Sapiens
WPSCQKKFARSDEL

SEQ ID NO: 18525 - protein, 14 aa, Homo Sapiens
PSCQKKFARSDELV

SEQ ID NO: 18526 - protein, 14 aa, Homo Sapiens
SCQKKFARSDELVR

SEQ ID NO: 18527 - protein, 14 aa, Homo Sapiens
CQKKFARSDELVRH

SEQ ID NO: 18528 - protein, 14 aa, Homo Sapiens
QKKFARSDELVRHH

SEQ ID NO: 18529 - protein, 14 aa, Homo Sapiens
KKFARSDELVRHHN

SEQ ID NO: 18530 - protein, 14 aa, Homo Sapiens
KFARSDELVRHHNM

SEQ ID NO: 18531 - protein, 14 aa, Homo Sapiens
FARSDELVRHHNMH

SEQ ID NO: 18532 - protein, 14 aa, Homo Sapiens
ARSDELVRHHNMHQ

SEQ ID NO: 18533 - protein, 14 aa, Homo Sapiens
RSDELVRHHNMHQR

SEQ ID NO: 18534 - protein, 14 aa, Homo Sapiens
SDELVRHHNMHQRN

SEQ ID NO: 18535 - protein, 14 aa, Homo Sapiens
DELVRHHNMHQRNM

SEQ ID NO: 18536 - protein, 14 aa, Homo Sapiens
ELVRHHNMHQRNMT

SEQ ID NO: 18537 - protein, 14 aa, Homo Sapiens
LVRHHNMHQRNMTK

SEQ ID NO: 18538 - protein, 14 aa, Homo Sapiens
VRHHNMHQRNMTKL

SEQ ID NO: 18539 - protein, 14 aa, Homo Sapiens
RHHNMHQRNMTKLQ

SEQ ID NO: 18540 - protein, 14 aa, Homo Sapiens
HHNMHQRNMTKLQL

SEQ ID NO: 18541 - protein, 14 aa, Homo Sapiens
HNMHQRNMTKLQLA

SEQ ID NO: 18542 - protein, 14 aa, Homo Sapiens
NMHQRNMTKLQLAL

SEQ ID NO: 18543 - protein, 15 aa, Homo Sapiens
MQDPASTCVPEPASQ

SEQ ID NO: 18544 - protein, 15 aa, Homo Sapiens
QDPASTCVPEPASQH

SEQ ID NO: 18545 - protein, 15 aa, Homo Sapiens
DPASTCVPEPASQHT

SEQ ID NO: 18546 - protein, 15 aa, Homo Sapiens
PASTCVPEPASQHTL

SEQ ID NO: 18547 - protein, 15 aa, Homo Sapiens
ASTCVPEPASQHTLR

SEQ ID NO: 18548 - protein, 15 aa, Homo Sapiens
STCVPEPASQHTLRS

SEQ ID NO: 18549 - protein, 15 aa, Homo Sapiens
TCVPEPASQHTLRSG

SEQ ID NO: 18550 - protein, 15 aa, Homo Sapiens
CVPEPASQHTLRSGP

SEQ ID NO: 18551 - protein, 15 aa, Homo Sapiens
VPEPASQHTLRSGPG

SEQ ID NO: 18552 - protein, 15 aa, Homo Sapiens
PEPASQHTLRSGPGC

SEQ ID NO: 18553 - protein, 15 aa, Homo Sapiens
EPASQHTLRSGPGCL

SEQ ID NO: 18554 - protein, 15 aa, Homo Sapiens
PASQHTLRSGPGCLQ

SEQ ID NO: 18555 - protein, 15 aa, Homo Sapiens
ASQHTLRSGPGCLQQ

SEQ ID NO: 18556 - protein, 15 aa, Homo Sapiens
SQHTLRSGPGCLQQP

SEQ ID NO: 18557 - protein, 15 aa, Homo Sapiens
QHTLRSGPGCLQQPE

SEQ ID NO: 18558 - protein, 15 aa, Homo Sapiens
HTLRSGPGCLQQPEQ

SEQ ID NO: 18559 - protein, 15 aa, Homo Sapiens
TLRSGPGCLQQPEQQ

SEQ ID NO: 18560 - protein, 15 aa, Homo Sapiens
LRSGPGCLQQPEQQG

SEQ ID NO: 18561 - protein, 15 aa, Homo Sapiens
RSGPGCLQQPEQQGV

SEQ ID NO: 18562 - protein, 15 aa, Homo Sapiens
SGPGCLQQPEQQGVR

SEQ ID NO: 18563 - protein, 15 aa, Homo Sapiens
GPGCLQQPEQQGVRD

SEQ ID NO: 18564 - protein, 15 aa, Homo Sapiens
PGCLQQPEQQGVRDP

SEQ ID NO: 18565 - protein, 15 aa, Homo Sapiens
GCLQQPEQQGVRDPG

SEQ ID NO: 18566 - protein, 15 aa, Homo Sapiens
CLQQPEQQGVRDPGG

SEQ ID NO: 18567 - protein, 15 aa, Homo Sapiens
LQQPEQQGVRDPGGI

SEQ ID NO: 18568 - protein, 15 aa, Homo Sapiens
QQPEQQGVRDPGGIW

SEQ ID NO: 18569 - protein, 15 aa, Homo Sapiens
QPEQQGVRDPGGIWA

SEQ ID NO: 18570 - protein, 15 aa, Homo Sapiens
PEQQGVRDPGGIWAK

SEQ ID NO: 18571 - protein, 15 aa, Homo Sapiens
EQQGVRDPGGIWAKL

SEQ ID NO: 18572 - protein, 15 aa, Homo Sapiens
QQGVRDPGGIWAKLG

SEQ ID NO: 18573 - protein, 15 aa, Homo Sapiens
QGVRDPGGIWAKLGA

SEQ ID NO: 18574 - protein, 15 aa, Homo Sapiens
GVRDPGGIWAKLGAA

SEQ ID NO: 18575 - protein, 15 aa, Homo Sapiens
VRDPGGIWAKLGAAE

SEQ ID NO: 18576 - protein, 15 aa, Homo Sapiens
RDPGGIWAKLGAAEA

SEQ ID NO: 18577 - protein, 15 aa, Homo Sapiens
DPGGIWAKLGAAEAS

SEQ ID NO: 18578 - protein, 15 aa, Homo Sapiens
PGGIWAKLGAAEASA

SEQ ID NO: 18579 - protein, 15 aa, Homo Sapiens
GGIWAKLGAAEASAE

SEQ ID NO: 18580 - protein, 15 aa, Homo Sapiens
GIWAKLGAAEASAER

SEQ ID NO: 18581 - protein, 15 aa, Homo Sapiens
IWAKLGAAEASAERL

SEQ ID NO: 18582 - protein, 15 aa, Homo Sapiens
WAKLGAAEASAERLQ

SEQ ID NO: 18583 - protein, 15 aa, Homo Sapiens
AKLGAAEASAERLQG

SEQ ID NO: 18584 - protein, 15 aa, Homo Sapiens
KLGAAEASAERLQGR

SEQ ID NO: 18585 - protein, 15 aa, Homo Sapiens
LGAAEASAERLQGRR

SEQ ID NO: 18586 - protein, 15 aa, Homo Sapiens
GAAEASAERLQGRRS

SEQ ID NO: 18587 - protein, 15 aa, Homo Sapiens
AAEASAERLQGRRSR

SEQ ID NO: 18588 - protein, 15 aa, Homo Sapiens
AEASAERLQGRRSRG

SEQ ID NO: 18589 - protein, 15 aa, Homo Sapiens
EASAERLQGRRSRGA

SEQ ID NO: 18590 - protein, 15 aa, Homo Sapiens
ASAERLQGRRSRGAS

SEQ ID NO: 18591 - protein, 15 aa, Homo Sapiens
SAERLQGRRSRGASG

SEQ ID NO: 18592 - protein, 15 aa, Homo Sapiens
AERLQGRRSRGASGS

SEQ ID NO: 18593 - protein, 15 aa, Homo Sapiens
ERLQGRRSRGASGSE

SEQ ID NO: 18594 - protein, 15 aa, Homo Sapiens
RLQGRRSRGASGSEP

SEQ ID NO: 18595 - protein, 15 aa, Homo Sapiens
LQGRRSRGASGSEPQ

SEQ ID NO: 18596 - protein, 15 aa, Homo Sapiens
QGRRSRGASGSEPQQ

SEQ ID NO: 18597 - protein, 15 aa, Homo Sapiens
GRRSRGASGSEPQQM

SEQ ID NO: 18598 - protein, 15 aa, Homo Sapiens
RRSRGASGSEPQQMG

SEQ ID NO: 18599 - protein, 15 aa, Homo Sapiens
RSRGASGSEPQQMGS

SEQ ID NO: 18600 - protein, 15 aa, Homo Sapiens
SRGASGSEPQQMGSD

SEQ ID NO: 18601 - protein, 15 aa, Homo Sapiens
RGASGSEPQQMGSDV

SEQ ID NO: 18602 - protein, 15 aa, Homo Sapiens
GASGSEPQQMGSDVR

SEQ ID NO: 18603 - protein, 15 aa, Homo Sapiens
ASGSEPQQMGSDVRD

SEQ ID NO: 18604 - protein, 15 aa, Homo Sapiens
SGSEPQQMGSDVRDL

SEQ ID NO: 18605 - protein, 15 aa, Homo Sapiens
GSEPQQMGSDVRDLN

SEQ ID NO: 18606 - protein, 15 aa, Homo Sapiens
SEPQQMGSDVRDLNA

SEQ ID NO: 18607 - protein, 15 aa, Homo Sapiens
EPQQMGSDVRDLNAL

SEQ ID NO: 18608 - protein, 15 aa, Homo Sapiens
PQQMGSDVRDLNALL

SEQ ID NO: 18609 - protein, 15 aa, Homo Sapiens
QQMGSDVRDLNALLP

SEQ ID NO: 18610 - protein, 15 aa, Homo Sapiens
QMGSDVRDLNALLPA

SEQ ID NO: 18611 - protein, 15 aa, Homo Sapiens
MGSDVRDLNALLPAV

SEQ ID NO: 18612 - protein, 15 aa, Homo Sapiens
GSDVRDLNALLPAVP

SEQ ID NO: 18613 - protein, 15 aa, Homo Sapiens
SDVRDLNALLPAVPS

SEQ ID NO: 18614 - protein, 15 aa, Homo Sapiens
DVRDLNALLPAVPSL

SEQ ID NO: 18615 - protein, 15 aa, Homo Sapiens
VRDLNALLPAVPSLG

SEQ ID NO: 18616 - protein, 15 aa, Homo Sapiens
RDLNALLPAVPSLGG

SEQ ID NO: 18617 - protein, 15 aa, Homo Sapiens
DLNALLPAVPSLGGG

SEQ ID NO: 18618 - protein, 15 aa, Homo Sapiens
LNALLPAVPSLGGGG

SEQ ID NO: 18619 - protein, 15 aa, Homo Sapiens
NALLPAVPSLGGGGG

SEQ ID NO: 18620 - protein, 15 aa, Homo Sapiens
ALLPAVPSLGGGGGC

SEQ ID NO: 18621 - protein, 15 aa, Homo Sapiens
LLPAVPSLGGGGGCA

SEQ ID NO: 18622 - protein, 15 aa, Homo Sapiens
LPAVPSLGGGGGCAL

SEQ ID NO: 18623 - protein, 15 aa, Homo Sapiens
PAVPSLGGGGGCALP

SEQ ID NO: 18624 - protein, 15 aa, Homo Sapiens
AVPSLGGGGGCALPV

SEQ ID NO: 18625 - protein, 15 aa, Homo Sapiens
VPSLGGGGGCALPVS

SEQ ID NO: 18626 - protein, 15 aa, Homo Sapiens
PSLGGGGGCALPVSG

SEQ ID NO: 18627 - protein, 15 aa, Homo Sapiens
SLGGGGGCALPVSGA

SEQ ID NO: 18628 - protein, 15 aa, Homo Sapiens
LGGGGGCALPVSGAA

SEQ ID NO: 18629 - protein, 15 aa, Homo Sapiens
GGGGGCALPVSGAAQ

SEQ ID NO: 18630 - protein, 15 aa, Homo Sapiens
GGGGCALPVSGAAQW

SEQ ID NO: 18631 - protein, 15 aa, Homo Sapiens
GGGCALPVSGAAQWA

SEQ ID NO: 18632 - protein, 15 aa, Homo Sapiens
GGCALPVSGAAQWAP

SEQ ID NO: 18633 - protein, 15 aa, Homo Sapiens
GCALPVSGAAQWAPV

SEQ ID NO: 18634 - protein, 15 aa, Homo Sapiens
CALPVSGAAQWAPVL

SEQ ID NO: 18635 - protein, 15 aa, Homo Sapiens
ALPVSGAAQWAPVLD

SEQ ID NO: 18636 - protein, 15 aa, Homo Sapiens
LPVSGAAQWAPVLDF

SEQ ID NO: 18637 - protein, 15 aa, Homo Sapiens
PVSGAAQWAPVLDFA

SEQ ID NO: 18638 - protein, 15 aa, Homo Sapiens
VSGAAQWAPVLDFAP

SEQ ID NO: 18639 - protein, 15 aa, Homo Sapiens
SGAAQWAPVLDFAPP

SEQ ID NO: 18640 - protein, 15 aa, Homo Sapiens
GAAQWAPVLDFAPPG

SEQ ID NO: 18641 - protein, 15 aa, Homo Sapiens
AAQWAPVLDFAPPGA

SEQ ID NO: 18642 - protein, 15 aa, Homo Sapiens
AQWAPVLDFAPPGAS

SEQ ID NO: 18643 - protein, 15 aa, Homo Sapiens
QWAPVLDFAPPGASA

SEQ ID NO: 18644 - protein, 15 aa, Homo Sapiens
WAPVLDFAPPGASAY

SEQ ID NO: 18645 - protein, 15 aa, Homo Sapiens
APVLDFAPPGASAYG

SEQ ID NO: 18646 - protein, 15 aa, Homo Sapiens
PVLDFAPPGASAYGS

SEQ ID NO: 18647 - protein, 15 aa, Homo Sapiens
VLDFAPPGASAYGSL

SEQ ID NO: 18648 - protein, 15 aa, Homo Sapiens
LDFAPPGASAYGSLG

SEQ ID NO: 18649 - protein, 15 aa, Homo Sapiens
DFAPPGASAYGSLGG

SEQ ID NO: 18650 - protein, 15 aa, Homo Sapiens
FAPPGASAYGSLGGP

SEQ ID NO: 18651 - protein, 15 aa, Homo Sapiens
APPGASAYGSLGGPA

SEQ ID NO: 18652 - protein, 15 aa, Homo Sapiens
PPGASAYGSLGGPAP

SEQ ID NO: 18653 - protein, 15 aa, Homo Sapiens
PGASAYGSLGGPAPP

SEQ ID NO: 18654 - protein, 15 aa, Homo Sapiens
GASAYGSLGGPAPPP

SEQ ID NO: 18655 - protein, 15 aa, Homo Sapiens
ASAYGSLGGPAPPPA

SEQ ID NO: 18656 - protein, 15 aa, Homo Sapiens
SAYGSLGGPAPPPAP

SEQ ID NO: 18657 - protein, 15 aa, Homo Sapiens
AYGSLGGPAPPPAPP

SEQ ID NO: 18658 - protein, 15 aa, Homo Sapiens
YGSLGGPAPPPAPPP

SEQ ID NO: 18659 - protein, 15 aa, Homo Sapiens
GSLGGPAPPPAPPPP

SEQ ID NO: 18660 - protein, 15 aa, Homo Sapiens
SLGGPAPPPAPPPPP

SEQ ID NO: 18661 - protein, 15 aa, Homo Sapiens
LGGPAPPPAPPPPPP

SEQ ID NO: 18662 - protein, 15 aa, Homo Sapiens
GGPAPPPAPPPPPPP

SEQ ID NO: 18663 - protein, 15 aa, Homo Sapiens
GPAPPPAPPPPPPPP

SEQ ID NO: 18664 - protein, 15 aa, Homo Sapiens
PAPPPAPPPPPPPPP

SEQ ID NO: 18665 - protein, 15 aa, Homo Sapiens
APPPAPPPPPPPPPH

SEQ ID NO: 18666 - protein, 15 aa, Homo Sapiens
PPPAPPPPPPPPPHS

SEQ ID NO: 18667 - protein, 15 aa, Homo Sapiens
PPAPPPPPPPPPHSF

SEQ ID NO: 18668 - protein, 15 aa, Homo Sapiens
PAPPPPPPPPPHSFI

SEQ ID NO: 18669 - protein, 15 aa, Homo Sapiens
APPPPPPPPPHSFIK

SEQ ID NO: 18670 - protein, 15 aa, Homo Sapiens
PPPPPPPPPHSFIKQ

SEQ ID NO: 18671 - protein, 15 aa, Homo Sapiens
PPPPPPPPHSFIKQE

SEQ ID NO: 18672 - protein, 15 aa, Homo Sapiens
PPPPPPPHSFIKQEP

SEQ ID NO: 18673 - protein, 15 aa, Homo Sapiens
PPPPPPHSFIKQEPS

SEQ ID NO: 18674 - protein, 15 aa, Homo Sapiens
PPPPPHSFIKQEPSW

SEQ ID NO: 18675 - protein, 15 aa, Homo Sapiens
PPPPHSFIKQEPSWG

SEQ ID NO: 18676 - protein, 15 aa, Homo Sapiens
PPPHSFIKQEPSWGG

SEQ ID NO: 18677 - protein, 15 aa, Homo Sapiens
PPHSFIKQEPSWGGA

SEQ ID NO: 18678 - protein, 15 aa, Homo Sapiens
PHSFIKQEPSWGGAE

SEQ ID NO: 18679 - protein, 15 aa, Homo Sapiens
HSFIKQEPSWGGAEP

SEQ ID NO: 18680 - protein, 15 aa, Homo Sapiens
SFIKQEPSWGGAEPH

SEQ ID NO: 18681 - protein, 15 aa, Homo Sapiens
FIKQEPSWGGAEPHE

SEQ ID NO: 18682 - protein, 15 aa, Homo Sapiens
IKQEPSWGGAEPHEE

SEQ ID NO: 18683 - protein, 15 aa, Homo Sapiens
KQEPSWGGAEPHEEQ

SEQ ID NO: 18684 - protein, 15 aa, Homo Sapiens
QEPSWGGAEPHEEQC

SEQ ID NO: 18685 - protein, 15 aa, Homo Sapiens
EPSWGGAEPHEEQCL

SEQ ID NO: 18686 - protein, 15 aa, Homo Sapiens
PSWGGAEPHEEQCLS

SEQ ID NO: 18687 - protein, 15 aa, Homo Sapiens
SWGGAEPHEEQCLSA

SEQ ID NO: 18688 - protein, 15 aa, Homo Sapiens
WGGAEPHEEQCLSAF

SEQ ID NO: 18689 - protein, 15 aa, Homo Sapiens
GGAEPHEEQCLSAFT

SEQ ID NO: 18690 - protein, 15 aa, Homo Sapiens
GAEPHEEQCLSAFTV

SEQ ID NO: 18691 - protein, 15 aa, Homo Sapiens
AEPHEEQCLSAFTVH

SEQ ID NO: 18692 - protein, 15 aa, Homo Sapiens
EPHEEQCLSAFTVHF

SEQ ID NO: 18693 - protein, 15 aa, Homo Sapiens
PHEEQCLSAFTVHFS

SEQ ID NO: 18694 - protein, 15 aa, Homo Sapiens
HEEQCLSAFTVHFSG

SEQ ID NO: 18695 - protein, 15 aa, Homo Sapiens
EEQCLSAFTVHFSGQ

SEQ ID NO: 18696 - protein, 15 aa, Homo Sapiens
EQCLSAFTVHFSGQF

SEQ ID NO: 18697 - protein, 15 aa, Homo Sapiens
QCLSAFTVHFSGQFT

SEQ ID NO: 18698 - protein, 15 aa, Homo Sapiens
CLSAFTVHFSGQFTG

SEQ ID NO: 18699 - protein, 15 aa, Homo Sapiens
LSAFTVHFSGQFTGT

SEQ ID NO: 18700 - protein, 15 aa, Homo Sapiens
SAFTVHFSGQFTGTA

SEQ ID NO: 18701 - protein, 15 aa, Homo Sapiens
AFTVHFSGQFTGTAG

SEQ ID NO: 18702 - protein, 15 aa, Homo Sapiens
FTVHFSGQFTGTAGA

SEQ ID NO: 18703 - protein, 15 aa, Homo Sapiens
TVHFSGQFTGTAGAC

SEQ ID NO: 18704 - protein, 15 aa, Homo Sapiens
VHFSGQFTGTAGACR

SEQ ID NO: 18705 - protein, 15 aa, Homo Sapiens
HFSGQFTGTAGACRY

SEQ ID NO: 18706 - protein, 15 aa, Homo Sapiens
FSGQFTGTAGACRYG

SEQ ID NO: 18707 - protein, 15 aa, Homo Sapiens
SGQFTGTAGACRYGP

SEQ ID NO: 18708 - protein, 15 aa, Homo Sapiens
GQFTGTAGACRYGPF

SEQ ID NO: 18709 - protein, 15 aa, Homo Sapiens
QFTGTAGACRYGPFG

SEQ ID NO: 18710 - protein, 15 aa, Homo Sapiens
FTGTAGACRYGPFGP

SEQ ID NO: 18711 - protein, 15 aa, Homo Sapiens
TGTAGACRYGPFGPP

SEQ ID NO: 18712 - protein, 15 aa, Homo Sapiens
GTAGACRYGPFGPPP

SEQ ID NO: 18713 - protein, 15 aa, Homo Sapiens
TAGACRYGPFGPPPP

SEQ ID NO: 18714 - protein, 15 aa, Homo Sapiens
AGACRYGPFGPPPPS

SEQ ID NO: 18715 - protein, 15 aa, Homo Sapiens
GACRYGPFGPPPPSQ

SEQ ID NO: 18716 - protein, 15 aa, Homo Sapiens
ACRYGPFGPPPPSQA

SEQ ID NO: 18717 - protein, 15 aa, Homo Sapiens
CRYGPFGPPPPSQAS

SEQ ID NO: 18718 - protein, 15 aa, Homo Sapiens
RYGPFGPPPPSQASS

SEQ ID NO: 18719 - protein, 15 aa, Homo Sapiens
YGPFGPPPPSQASSG

SEQ ID NO: 18720 - protein, 15 aa, Homo Sapiens
GPFGPPPPSQASSGQ

SEQ ID NO: 18721 - protein, 15 aa, Homo Sapiens
PFGPPPPSQASSGQA

SEQ ID NO: 18722 - protein, 15 aa, Homo Sapiens
FGPPPPSQASSGQAR

SEQ ID NO: 18723 - protein, 15 aa, Homo Sapiens
GPPPPSQASSGQARM

SEQ ID NO: 18724 - protein, 15 aa, Homo Sapiens
PPPPSQASSGQARMF

SEQ ID NO: 18725 - protein, 15 aa, Homo Sapiens
PPPSQASSGQARMFP

SEQ ID NO: 18726 - protein, 15 aa, Homo Sapiens
PPSQASSGQARMFPN

SEQ ID NO: 18727 - protein, 15 aa, Homo Sapiens
PSQASSGQARMFPNA

SEQ ID NO: 18728 - protein, 15 aa, Homo Sapiens
SQASSGQARMFPNAP

SEQ ID NO: 18729 - protein, 15 aa, Homo Sapiens
QASSGQARMFPNAPY

SEQ ID NO: 18730 - protein, 15 aa, Homo Sapiens
ASSGQARMFPNAPYL

SEQ ID NO: 18731 - protein, 15 aa, Homo Sapiens
SSGQARMFPNAPYLP

SEQ ID NO: 18732 - protein, 15 aa, Homo Sapiens
SGQARMFPNAPYLPS

SEQ ID NO: 18733 - protein, 15 aa, Homo Sapiens
GQARMFPNAPYLPSC

SEQ ID NO: 18734 - protein, 15 aa, Homo Sapiens
QARMFPNAPYLPSCL

SEQ ID NO: 18735 - protein, 15 aa, Homo Sapiens
ARMFPNAPYLPSCLE

SEQ ID NO: 18736 - protein, 15 aa, Homo Sapiens
RMFPNAPYLPSCLES

SEQ ID NO: 18737 - protein, 15 aa, Homo Sapiens
MFPNAPYLPSCLESQ

SEQ ID NO: 18738 - protein, 15 aa, Homo Sapiens
FPNAPYLPSCLESQP

SEQ ID NO: 18739 - protein, 15 aa, Homo Sapiens
PNAPYLPSCLESQPA

SEQ ID NO: 18740 - protein, 15 aa, Homo Sapiens
NAPYLPSCLESQPAI

SEQ ID NO: 18741 - protein, 15 aa, Homo Sapiens
APYLPSCLESQPAIR

SEQ ID NO: 18742 - protein, 15 aa, Homo Sapiens
PYLPSCLESQPAIRN

SEQ ID NO: 18743 - protein, 15 aa, Homo Sapiens
YLPSCLESQPAIRNQ

SEQ ID NO: 18744 - protein, 15 aa, Homo Sapiens
LPSCLESQPAIRNQG

SEQ ID NO: 18745 - protein, 15 aa, Homo Sapiens
PSCLESQPAIRNQGY

SEQ ID NO: 18746 - protein, 15 aa, Homo Sapiens
SCLESQPAIRNQGYS

SEQ ID NO: 18747 - protein, 15 aa, Homo Sapiens
CLESQPAIRNQGYST

SEQ ID NO: 18748 - protein, 15 aa, Homo Sapiens
LESQPAIRNQGYSTV

SEQ ID NO: 18749 - protein, 15 aa, Homo Sapiens
ESQPAIRNQGYSTVT

SEQ ID NO: 18750 - protein, 15 aa, Homo Sapiens
SQPAIRNQGYSTVTF

SEQ ID NO: 18751 - protein, 15 aa, Homo Sapiens
QPAIRNQGYSTVTFD

SEQ ID NO: 18752 - protein, 15 aa, Homo Sapiens
PAIRNQGYSTVTFDG

SEQ ID NO: 18753 - protein, 15 aa, Homo Sapiens
AIRNQGYSTVTFDGT

SEQ ID NO: 18754 - protein, 15 aa, Homo Sapiens
IRNQGYSTVTFDGTP

SEQ ID NO: 18755 - protein, 15 aa, Homo Sapiens
RNQGYSTVTFDGTPS

SEQ ID NO: 18756 - protein, 15 aa, Homo Sapiens
NQGYSTVTFDGTPSY

SEQ ID NO: 18757 - protein, 15 aa, Homo Sapiens
QGYSTVTFDGTPSYG

SEQ ID NO: 18758 - protein, 15 aa, Homo Sapiens
GYSTVTFDGTPSYGH

SEQ ID NO: 18759 - protein, 15 aa, Homo Sapiens
YSTVTFDGTPSYGHT

SEQ ID NO: 18760 - protein, 15 aa, Homo Sapiens
STVTFDGTPSYGHTP

SEQ ID NO: 18761 - protein, 15 aa, Homo Sapiens
TVTFDGTPSYGHTPS

SEQ ID NO: 18762 - protein, 15 aa, Homo Sapiens
VTFDGTPSYGHTPSH

SEQ ID NO: 18763 - protein, 15 aa, Homo Sapiens
TFDGTPSYGHTPSHH

SEQ ID NO: 18764 - protein, 15 aa, Homo Sapiens
FDGTPSYGHTPSHHA

SEQ ID NO: 18765 - protein, 15 aa, Homo Sapiens
DGTPSYGHTPSHHAA

SEQ ID NO: 18766 - protein, 15 aa, Homo Sapiens
GTPSYGHTPSHHAAQ

SEQ ID NO: 18767 - protein, 15 aa, Homo Sapiens
TPSYGHTPSHHAAQF

SEQ ID NO: 18768 - protein, 15 aa, Homo Sapiens
PSYGHTPSHHAAQFP

SEQ ID NO: 18769 - protein, 15 aa, Homo Sapiens
SYGHTPSHHAAQFPN

SEQ ID NO: 18770 - protein, 15 aa, Homo Sapiens
YGHTPSHHAAQFPNH

SEQ ID NO: 18771 - protein, 15 aa, Homo Sapiens
GHTPSHHAAQFPNHS

SEQ ID NO: 18772 - protein, 15 aa, Homo Sapiens
HTPSHHAAQFPNHSF

SEQ ID NO: 18773 - protein, 15 aa, Homo Sapiens
TPSHHAAQFPNHSFK

SEQ ID NO: 18774 - protein, 15 aa, Homo Sapiens
PSHHAAQFPNHSFKH

SEQ ID NO: 18775 - protein, 15 aa, Homo Sapiens
SHHAAQFPNHSFKHE

SEQ ID NO: 18776 - protein, 15 aa, Homo Sapiens
HHAAQFPNHSFKHED

SEQ ID NO: 18777 - protein, 15 aa, Homo Sapiens
HAAQFPNHSFKHEDP

SEQ ID NO: 18778 - protein, 15 aa, Homo Sapiens
AAQFPNHSFKHEDPM

SEQ ID NO: 18779 - protein, 15 aa, Homo Sapiens
AQFPNHSFKHEDPMG

SEQ ID NO: 18780 - protein, 15 aa, Homo Sapiens
QFPNHSFKHEDPMGQ

SEQ ID NO: 18781 - protein, 15 aa, Homo Sapiens
FPNHSFKHEDPMGQQ

SEQ ID NO: 18782 - protein, 15 aa, Homo Sapiens
PNHSFKHEDPMGQQG

SEQ ID NO: 18783 - protein, 15 aa, Homo Sapiens
NHSFKHEDPMGQQGS

SEQ ID NO: 18784 - protein, 15 aa, Homo Sapiens
HSFKHEDPMGQQGSL

SEQ ID NO: 18785 - protein, 15 aa, Homo Sapiens
SFKHEDPMGQQGSLG

SEQ ID NO: 18786 - protein, 15 aa, Homo Sapiens
FKHEDPMGQQGSLGE

SEQ ID NO: 18787 - protein, 15 aa, Homo Sapiens
KHEDPMGQQGSLGEQ

SEQ ID NO: 18788 - protein, 15 aa, Homo Sapiens
HEDPMGQQGSLGEQQ

SEQ ID NO: 18789 - protein, 15 aa, Homo Sapiens
EDPMGQQGSLGEQQY

SEQ ID NO: 18790 - protein, 15 aa, Homo Sapiens
DPMGQQGSLGEQQYS

SEQ ID NO: 18791 - protein, 15 aa, Homo Sapiens
PMGQQGSLGEQQYSV

SEQ ID NO: 18792 - protein, 15 aa, Homo Sapiens
MGQQGSLGEQQYSVP

SEQ ID NO: 18793 - protein, 15 aa, Homo Sapiens
GQQGSLGEQQYSVPP

SEQ ID NO: 18794 - protein, 15 aa, Homo Sapiens
QQGSLGEQQYSVPPP

SEQ ID NO: 18795 - protein, 15 aa, Homo Sapiens
QGSLGEQQYSVPPPV

SEQ ID NO: 18796 - protein, 15 aa, Homo Sapiens
GSLGEQQYSVPPPVY

SEQ ID NO: 18797 - protein, 15 aa, Homo Sapiens
SLGEQQYSVPPPVYG

SEQ ID NO: 18798 - protein, 15 aa, Homo Sapiens
LGEQQYSVPPPVYGC

SEQ ID NO: 18799 - protein, 15 aa, Homo Sapiens
GEQQYSVPPPVYGCH

SEQ ID NO: 18800 - protein, 15 aa, Homo Sapiens
EQQYSVPPPVYGCHT

SEQ ID NO: 18801 - protein, 15 aa, Homo Sapiens
QQYSVPPPVYGCHTP

SEQ ID NO: 18802 - protein, 15 aa, Homo Sapiens
QYSVPPPVYGCHTPT

SEQ ID NO: 18803 - protein, 15 aa, Homo Sapiens
YSVPPPVYGCHTPTD

SEQ ID NO: 18804 - protein, 15 aa, Homo Sapiens
SVPPPVYGCHTPTDS

SEQ ID NO: 18805 - protein, 15 aa, Homo Sapiens
VPPPVYGCHTPTDSC

SEQ ID NO: 18806 - protein, 15 aa, Homo Sapiens
PPPVYGCHTPTDSCT

SEQ ID NO: 18807 - protein, 15 aa, Homo Sapiens
PPVYGCHTPTDSCTG

SEQ ID NO: 18808 - protein, 15 aa, Homo Sapiens
PVYGCHTPTDSCTGS

SEQ ID NO: 18809 - protein, 15 aa, Homo Sapiens
VYGCHTPTDSCTGSQ

SEQ ID NO: 18810 - protein, 15 aa, Homo Sapiens
YGCHTPTDSCTGSQA

SEQ ID NO: 18811 - protein, 15 aa, Homo Sapiens
GCHTPTDSCTGSQAL

SEQ ID NO: 18812 - protein, 15 aa, Homo Sapiens
CHTPTDSCTGSQALL

SEQ ID NO: 18813 - protein, 15 aa, Homo Sapiens
HTPTDSCTGSQALLL

SEQ ID NO: 18814 - protein, 15 aa, Homo Sapiens
TPTDSCTGSQALLLR

SEQ ID NO: 18815 - protein, 15 aa, Homo Sapiens
PTDSCTGSQALLLRT

SEQ ID NO: 18816 - protein, 15 aa, Homo Sapiens
TDSCTGSQALLLRTP

SEQ ID NO: 18817 - protein, 15 aa, Homo Sapiens
DSCTGSQALLLRTPY

SEQ ID NO: 18818 - protein, 15 aa, Homo Sapiens
SCTGSQALLLRTPYS

SEQ ID NO: 18819 - protein, 15 aa, Homo Sapiens
CTGSQALLLRTPYSS

SEQ ID NO: 18820 - protein, 15 aa, Homo Sapiens
TGSQALLLRTPYSSD

SEQ ID NO: 18821 - protein, 15 aa, Homo Sapiens
GSQALLLRTPYSSDN

SEQ ID NO: 18822 - protein, 15 aa, Homo Sapiens
SQALLLRTPYSSDNL

SEQ ID NO: 18823 - protein, 15 aa, Homo Sapiens
QALLLRTPYSSDNLY

SEQ ID NO: 18824 - protein, 15 aa, Homo Sapiens
ALLLRTPYSSDNLYQ

SEQ ID NO: 18825 - protein, 15 aa, Homo Sapiens
LLLRTPYSSDNLYQM

SEQ ID NO: 18826 - protein, 15 aa, Homo Sapiens
LLRTPYSSDNLYQMT

SEQ ID NO: 18827 - protein, 15 aa, Homo Sapiens
LRTPYSSDNLYQMTS

SEQ ID NO: 18828 - protein, 15 aa, Homo Sapiens
RTPYSSDNLYQMTSQ

SEQ ID NO: 18829 - protein, 15 aa, Homo Sapiens
TPYSSDNLYQMTSQL

SEQ ID NO: 18830 - protein, 15 aa, Homo Sapiens
PYSSDNLYQMTSQLE

SEQ ID NO: 18831 - protein, 15 aa, Homo Sapiens
YSSDNLYQMTSQLEC

SEQ ID NO: 18832 - protein, 15 aa, Homo Sapiens
SSDNLYQMTSQLECM

SEQ ID NO: 18833 - protein, 15 aa, Homo Sapiens
SDNLYQMTSQLECMT

SEQ ID NO: 18834 - protein, 15 aa, Homo Sapiens
DNLYQMTSQLECMTW

SEQ ID NO: 18835 - protein, 15 aa, Homo Sapiens
NLYQMTSQLECMTWN

SEQ ID NO: 18836 - protein, 15 aa, Homo Sapiens
LYQMTSQLECMTWNQ

SEQ ID NO: 18837 - protein, 15 aa, Homo Sapiens
YQMTSQLECMTWNQM

SEQ ID NO: 18838 - protein, 15 aa, Homo Sapiens
QMTSQLECMTWNQMN

SEQ ID NO: 18839 - protein, 15 aa, Homo Sapiens
MTSQLECMTWNQMNL

SEQ ID NO: 18840 - protein, 15 aa, Homo Sapiens
TSQLECMTWNQMNLG

SEQ ID NO: 18841 - protein, 15 aa, Homo Sapiens
SQLECMTWNQMNLGA

SEQ ID NO: 18842 - protein, 15 aa, Homo Sapiens
QLECMTWNQMNLGAT

SEQ ID NO: 18843 - protein, 15 aa, Homo Sapiens
LECMTWNQMNLGATL

SEQ ID NO: 18844 - protein, 15 aa, Homo Sapiens
ECMTWNQMNLGATLK

SEQ ID NO: 18845 - protein, 15 aa, Homo Sapiens
CMTWNQMNLGATLKG

SEQ ID NO: 18846 - protein, 15 aa, Homo Sapiens
MTWNQMNLGATLKGH

SEQ ID NO: 18847 - protein, 15 aa, Homo Sapiens
TWNQMNLGATLKGHS

SEQ ID NO: 18848 - protein, 15 aa, Homo Sapiens
WNQMNLGATLKGHST

SEQ ID NO: 18849 - protein, 15 aa, Homo Sapiens
NQMNLGATLKGHSTG

SEQ ID NO: 18850 - protein, 15 aa, Homo Sapiens
QMNLGATLKGHSTGY

SEQ ID NO: 18851 - protein, 15 aa, Homo Sapiens
MNLGATLKGHSTGYE

SEQ ID NO: 18852 - protein, 15 aa, Homo Sapiens
NLGATLKGHSTGYES

SEQ ID NO: 18853 - protein, 15 aa, Homo Sapiens
LGATLKGHSTGYESD

SEQ ID NO: 18854 - protein, 15 aa, Homo Sapiens
GATLKGHSTGYESDN

SEQ ID NO: 18855 - protein, 15 aa, Homo Sapiens
ATLKGHSTGYESDNH

SEQ ID NO: 18856 - protein, 15 aa, Homo Sapiens
TLKGHSTGYESDNHT

SEQ ID NO: 18857 - protein, 15 aa, Homo Sapiens
LKGHSTGYESDNHTT

SEQ ID NO: 18858 - protein, 15 aa, Homo Sapiens
KGHSTGYESDNHTTP

SEQ ID NO: 18859 - protein, 15 aa, Homo Sapiens
GHSTGYESDNHTTPI

SEQ ID NO: 18860 - protein, 15 aa, Homo Sapiens
HSTGYESDNHTTPIL

SEQ ID NO: 18861 - protein, 15 aa, Homo Sapiens
STGYESDNHTTPILC

SEQ ID NO: 18862 - protein, 15 aa, Homo Sapiens
TGYESDNHTTPILCG

SEQ ID NO: 18863 - protein, 15 aa, Homo Sapiens
GYESDNHTTPILCGA

SEQ ID NO: 18864 - protein, 15 aa, Homo Sapiens
YESDNHTTPILCGAQ

SEQ ID NO: 18865 - protein, 15 aa, Homo Sapiens
ESDNHTTPILCGAQY

SEQ ID NO: 18866 - protein, 15 aa, Homo Sapiens
SDNHTTPILCGAQYR

SEQ ID NO: 18867 - protein, 15 aa, Homo Sapiens
DNHTTPILCGAQYRI

SEQ ID NO: 18868 - protein, 15 aa, Homo Sapiens
NHTTPILCGAQYRIH

SEQ ID NO: 18869 - protein, 15 aa, Homo Sapiens
HTTPILCGAQYRIHT

SEQ ID NO: 18870 - protein, 15 aa, Homo Sapiens
TTPILCGAQYRIHTH

SEQ ID NO: 18871 - protein, 15 aa, Homo Sapiens
TPILCGAQYRIHTHG

SEQ ID NO: 18872 - protein, 15 aa, Homo Sapiens
PILCGAQYRIHTHGV

SEQ ID NO: 18873 - protein, 15 aa, Homo Sapiens
ILCGAQYRIHTHGVF

SEQ ID NO: 18874 - protein, 15 aa, Homo Sapiens
LCGAQYRIHTHGVFR

SEQ ID NO: 18875 - protein, 15 aa, Homo Sapiens
CGAQYRIHTHGVFRG

SEQ ID NO: 18876 - protein, 15 aa, Homo Sapiens
GAQYRIHTHGVFRGI

SEQ ID NO: 18877 - protein, 15 aa, Homo Sapiens
AQYRIHTHGVFRGIQ

SEQ ID NO: 18878 - protein, 15 aa, Homo Sapiens
QYRIHTHGVFRGIQD

SEQ ID NO: 18879 - protein, 15 aa, Homo Sapiens
YRIHTHGVFRGIQDV

SEQ ID NO: 18880 - protein, 15 aa, Homo Sapiens
RIHTHGVFRGIQDVR

SEQ ID NO: 18881 - protein, 15 aa, Homo Sapiens
IHTHGVFRGIQDVRR

SEQ ID NO: 18882 - protein, 15 aa, Homo Sapiens
HTHGVFRGIQDVRRV

SEQ ID NO: 18883 - protein, 15 aa, Homo Sapiens
THGVFRGIQDVRRVP

SEQ ID NO: 18884 - protein, 15 aa, Homo Sapiens
HGVFRGIQDVRRVPG

SEQ ID NO: 18885 - protein, 15 aa, Homo Sapiens
GVFRGIQDVRRVPGV

SEQ ID NO: 18886 - protein, 15 aa, Homo Sapiens
VFRGIQDVRRVPGVA

SEQ ID NO: 18887 - protein, 15 aa, Homo Sapiens
FRGIQDVRRVPGVAP

SEQ ID NO: 18888 - protein, 15 aa, Homo Sapiens
RGIQDVRRVPGVAPT

SEQ ID NO: 18889 - protein, 15 aa, Homo Sapiens
GIQDVRRVPGVAPTL

SEQ ID NO: 18890 - protein, 15 aa, Homo Sapiens
IQDVRRVPGVAPTLV

SEQ ID NO: 18891 - protein, 15 aa, Homo Sapiens
QDVRRVPGVAPTLVR

SEQ ID NO: 18892 - protein, 15 aa, Homo Sapiens
DVRRVPGVAPTLVRS

SEQ ID NO: 18893 - protein, 15 aa, Homo Sapiens
VRRVPGVAPTLVRSA

SEQ ID NO: 18894 - protein, 15 aa, Homo Sapiens
RRVPGVAPTLVRSAS

SEQ ID NO: 18895 - protein, 15 aa, Homo Sapiens
RVPGVAPTLVRSASE

SEQ ID NO: 18896 - protein, 15 aa, Homo Sapiens
VPGVAPTLVRSASET

SEQ ID NO: 18897 - protein, 15 aa, Homo Sapiens
PGVAPTLVRSASETS

SEQ ID NO: 18898 - protein, 15 aa, Homo Sapiens
GVAPTLVRSASETSE

SEQ ID NO: 18899 - protein, 15 aa, Homo Sapiens
VAPTLVRSASETSEK

SEQ ID NO: 18900 - protein, 15 aa, Homo Sapiens
APTLVRSASETSEKR

SEQ ID NO: 18901 - protein, 15 aa, Homo Sapiens
PTLVRSASETSEKRP

SEQ ID NO: 18902 - protein, 15 aa, Homo Sapiens
TLVRSASETSEKRPF

SEQ ID NO: 18903 - protein, 15 aa, Homo Sapiens
LVRSASETSEKRPFM

SEQ ID NO: 18904 - protein, 15 aa, Homo Sapiens
VRSASETSEKRPFMC

SEQ ID NO: 18905 - protein, 15 aa, Homo Sapiens
RSASETSEKRPFMCA

SEQ ID NO: 18906 - protein, 15 aa, Homo Sapiens
SASETSEKRPFMCAY

SEQ ID NO: 18907 - protein, 15 aa, Homo Sapiens
ASETSEKRPFMCAYP

SEQ ID NO: 18908 - protein, 15 aa, Homo Sapiens
SETSEKRPFMCAYPG

SEQ ID NO: 18909 - protein, 15 aa, Homo Sapiens
ETSEKRPFMCAYPGC

SEQ ID NO: 18910 - protein, 15 aa, Homo Sapiens
TSEKRPFMCAYPGCN

SEQ ID NO: 18911 - protein, 15 aa, Homo Sapiens
SEKRPFMCAYPGCNK

SEQ ID NO: 18912 - protein, 15 aa, Homo Sapiens
EKRPFMCAYPGCNKR

SEQ ID NO: 18913 - protein, 15 aa, Homo Sapiens
KRPFMCAYPGCNKRY

SEQ ID NO: 18914 - protein, 15 aa, Homo Sapiens
RPFMCAYPGCNKRYF

SEQ ID NO: 18915 - protein, 15 aa, Homo Sapiens
PFMCAYPGCNKRYFK

SEQ ID NO: 18916 - protein, 15 aa, Homo Sapiens
FMCAYPGCNKRYFKL

SEQ ID NO: 18917 - protein, 15 aa, Homo Sapiens
MCAYPGCNKRYFKLS

SEQ ID NO: 18918 - protein, 15 aa, Homo Sapiens
CAYPGCNKRYFKLSH

SEQ ID NO: 18919 - protein, 15 aa, Homo Sapiens
AYPGCNKRYFKLSHL

SEQ ID NO: 18920 - protein, 15 aa, Homo Sapiens
YPGCNKRYFKLSHLQ

SEQ ID NO: 18921 - protein, 15 aa, Homo Sapiens
PGCNKRYFKLSHLQM

SEQ ID NO: 18922 - protein, 15 aa, Homo Sapiens
GCNKRYFKLSHLQMH

SEQ ID NO: 18923 - protein, 15 aa, Homo Sapiens
CNKRYFKLSHLQMHS

SEQ ID NO: 18924 - protein, 15 aa, Homo Sapiens
NKRYFKLSHLQMHSR

SEQ ID NO: 18925 - protein, 15 aa, Homo Sapiens
KRYFKLSHLQMHSRK

SEQ ID NO: 18926 - protein, 15 aa, Homo Sapiens
RYFKLSHLQMHSRKH

SEQ ID NO: 18927 - protein, 15 aa, Homo Sapiens
YFKLSHLQMHSRKHT

SEQ ID NO: 18928 - protein, 15 aa, Homo Sapiens
FKLSHLQMHSRKHTG

SEQ ID NO: 18929 - protein, 15 aa, Homo Sapiens
KLSHLQMHSRKHTGE

SEQ ID NO: 18930 - protein, 15 aa, Homo Sapiens
LSHLQMHSRKHTGEK

SEQ ID NO: 18931 - protein, 15 aa, Homo Sapiens
SHLQMHSRKHTGEKP

SEQ ID NO: 18932 - protein, 15 aa, Homo Sapiens
HLQMHSRKHTGEKPY

SEQ ID NO: 18933 - protein, 15 aa, Homo Sapiens
LQMHSRKHTGEKPYQ

SEQ ID NO: 18934 - protein, 15 aa, Homo Sapiens
QMHSRKHTGEKPYQC

SEQ ID NO: 18935 - protein, 15 aa, Homo Sapiens
MHSRKHTGEKPYQCD

SEQ ID NO: 18936 - protein, 15 aa, Homo Sapiens
HSRKHTGEKPYQCDF

SEQ ID NO: 18937 - protein, 15 aa, Homo Sapiens
SRKHTGEKPYQCDFK

SEQ ID NO: 18938 - protein, 15 aa, Homo Sapiens
RKHTGEKPYQCDFKD

SEQ ID NO: 18939 - protein, 15 aa, Homo Sapiens
KHTGEKPYQCDFKDC

SEQ ID NO: 18940 - protein, 15 aa, Homo Sapiens
HTGEKPYQCDFKDCE

SEQ ID NO: 18941 - protein, 15 aa, Homo Sapiens
TGEKPYQCDFKDCER

SEQ ID NO: 18942 - protein, 15 aa, Homo Sapiens
GEKPYQCDFKDCERR

SEQ ID NO: 18943 - protein, 15 aa, Homo Sapiens
EKPYQCDFKDCERRF

SEQ ID NO: 18944 - protein, 15 aa, Homo Sapiens
KPYQCDFKDCERRFS

SEQ ID NO: 18945 - protein, 15 aa, Homo Sapiens
PYQCDFKDCERRFSR

SEQ ID NO: 18946 - protein, 15 aa, Homo Sapiens
YQCDFKDCERRFSRS

SEQ ID NO: 18947 - protein, 15 aa, Homo Sapiens
QCDFKDCERRFSRSD

SEQ ID NO: 18948 - protein, 15 aa, Homo Sapiens
CDFKDCERRFSRSDQ

SEQ ID NO: 18949 - protein, 15 aa, Homo Sapiens
DFKDCERRFSRSDQL

SEQ ID NO: 18950 - protein, 15 aa, Homo Sapiens
FKDCERRFSRSDQLK

SEQ ID NO: 18951 - protein, 15 aa, Homo Sapiens
KDCERRFSRSDQLKR

SEQ ID NO: 18952 - protein, 15 aa, Homo Sapiens
DCERRFSRSDQLKRH

SEQ ID NO: 18953 - protein, 15 aa, Homo Sapiens
CERRFSRSDQLKRHQ

SEQ ID NO: 18954 - protein, 15 aa, Homo Sapiens
ERRFSRSDQLKRHQR

SEQ ID NO: 18955 - protein, 15 aa, Homo Sapiens
RRFSRSDQLKRHQRR

SEQ ID NO: 18956 - protein, 15 aa, Homo Sapiens
RFSRSDQLKRHQRRH

SEQ ID NO: 18957 - protein, 15 aa, Homo Sapiens
FSRSDQLKRHQRRHT

SEQ ID NO: 18958 - protein, 15 aa, Homo Sapiens
SRSDQLKRHQRRHTG

SEQ ID NO: 18959 - protein, 15 aa, Homo Sapiens
RSDQLKRHQRRHTGV

SEQ ID NO: 18960 - protein, 15 aa, Homo Sapiens
SDQLKRHQRRHTGVK

SEQ ID NO: 18961 - protein, 15 aa, Homo Sapiens
DQLKRHQRRHTGVKP

SEQ ID NO: 18962 - protein, 15 aa, Homo Sapiens
QLKRHQRRHTGVKPF

SEQ ID NO: 18963 - protein, 15 aa, Homo Sapiens
LKRHQRRHTGVKPFQ

SEQ ID NO: 18964 - protein, 15 aa, Homo Sapiens
KRHQRRHTGVKPFQC

SEQ ID NO: 18965 - protein, 15 aa, Homo Sapiens
RHQRRHTGVKPFQCK

SEQ ID NO: 18966 - protein, 15 aa, Homo Sapiens
HQRRHTGVKPFQCKT

SEQ ID NO: 18967 - protein, 15 aa, Homo Sapiens
QRRHTGVKPFQCKTC

SEQ ID NO: 18968 - protein, 15 aa, Homo Sapiens
RRHTGVKPFQCKTCQ

SEQ ID NO: 18969 - protein, 15 aa, Homo Sapiens
RHTGVKPFQCKTCQR

SEQ ID NO: 18970 - protein, 15 aa, Homo Sapiens
HTGVKPFQCKTCQRK

SEQ ID NO: 18971 - protein, 15 aa, Homo Sapiens
TGVKPFQCKTCQRKF

SEQ ID NO: 18972 - protein, 15 aa, Homo Sapiens
GVKPFQCKTCQRKFS

SEQ ID NO: 18973 - protein, 15 aa, Homo Sapiens
VKPFQCKTCQRKFSR

SEQ ID NO: 18974 - protein, 15 aa, Homo Sapiens
KPFQCKTCQRKFSRS

SEQ ID NO: 18975 - protein, 15 aa, Homo Sapiens
PFQCKTCQRKFSRSD

SEQ ID NO: 18976 - protein, 15 aa, Homo Sapiens
FQCKTCQRKFSRSDH

SEQ ID NO: 18977 - protein, 15 aa, Homo Sapiens
QCKTCQRKFSRSDHL

SEQ ID NO: 18978 - protein, 15 aa, Homo Sapiens
CKTCQRKFSRSDHLK

SEQ ID NO: 18979 - protein, 15 aa, Homo Sapiens
KTCQRKFSRSDHLKT

SEQ ID NO: 18980 - protein, 15 aa, Homo Sapiens
TCQRKFSRSDHLKTH

SEQ ID NO: 18981 - protein, 15 aa, Homo Sapiens
CQRKFSRSDHLKTHT

SEQ ID NO: 18982 - protein, 15 aa, Homo Sapiens
QRKFSRSDHLKTHTR

SEQ ID NO: 18983 - protein, 15 aa, Homo Sapiens
RKFSRSDHLKTHTRT

SEQ ID NO: 18984 - protein, 15 aa, Homo Sapiens
KFSRSDHLKTHTRTH

SEQ ID NO: 18985 - protein, 15 aa, Homo Sapiens
FSRSDHLKTHTRTHT

SEQ ID NO: 18986 - protein, 15 aa, Homo Sapiens
SRSDHLKTHTRTHTG

SEQ ID NO: 18987 - protein, 15 aa, Homo Sapiens
RSDHLKTHTRTHTGK

SEQ ID NO: 18988 - protein, 15 aa, Homo Sapiens
SDHLKTHTRTHTGKT

SEQ ID NO: 18989 - protein, 15 aa, Homo Sapiens
DHLKTHTRTHTGKTS

SEQ ID NO: 18990 - protein, 15 aa, Homo Sapiens
HLKTHTRTHTGKTSE

SEQ ID NO: 18991 - protein, 15 aa, Homo Sapiens
LKTHTRTHTGKTSEK

SEQ ID NO: 18992 - protein, 15 aa, Homo Sapiens
KTHTRTHTGKTSEKP

SEQ ID NO: 18993 - protein, 15 aa, Homo Sapiens
THTRTHTGKTSEKPF

SEQ ID NO: 18994 - protein, 15 aa, Homo Sapiens
HTRTHTGKTSEKPFS

SEQ ID NO: 18995 - protein, 15 aa, Homo Sapiens
TRTHTGKTSEKPFSC

SEQ ID NO: 18996 - protein, 15 aa, Homo Sapiens
RTHTGKTSEKPFSCR

SEQ ID NO: 18997 - protein, 15 aa, Homo Sapiens
THTGKTSEKPFSCRW

SEQ ID NO: 18998 - protein, 15 aa, Homo Sapiens
HTGKTSEKPFSCRWP

SEQ ID NO: 18999 - protein, 15 aa, Homo Sapiens
TGKTSEKPFSCRWPS

SEQ ID NO: 19000 - protein, 15 aa, Homo Sapiens
GKTSEKPFSCRWPSC

SEQ ID NO: 19001 - protein, 15 aa, Homo Sapiens
KTSEKPFSCRWPSCQ

SEQ ID NO: 19002 - protein, 15 aa, Homo Sapiens
TSEKPFSCRWPSCQK

SEQ ID NO: 19003 - protein, 15 aa, Homo Sapiens
SEKPFSCRWPSCQKK

SEQ ID NO: 19004 - protein, 15 aa, Homo Sapiens
EKPFSCRWPSCQKKF

SEQ ID NO: 19005 - protein, 15 aa, Homo Sapiens
KPFSCRWPSCQKKFA

SEQ ID NO: 19006 - protein, 15 aa, Homo Sapiens
PFSCRWPSCQKKFAR

SEQ ID NO: 19007 - protein, 15 aa, Homo Sapiens
FSCRWPSCQKKFARS

SEQ ID NO: 19008 - protein, 15 aa, Homo Sapiens
SCRWPSCQKKFARSD

SEQ ID NO: 19009 - protein, 15 aa, Homo Sapiens
CRWPSCQKKFARSDE

SEQ ID NO: 19010 - protein, 15 aa, Homo Sapiens
RWPSCQKKFARSDEL

SEQ ID NO: 19011 - protein, 15 aa, Homo Sapiens
WPSCQKKFARSDELV

SEQ ID NO: 19012 - protein, 15 aa, Homo Sapiens
PSCQKKFARSDELVR

SEQ ID NO: 19013 - protein, 15 aa, Homo Sapiens
SCQKKFARSDELVRH

SEQ ID NO: 19014 - protein, 15 aa, Homo Sapiens
CQKKFARSDELVRHH

SEQ ID NO: 19015 - protein, 15 aa, Homo Sapiens
QKKFARSDELVRHHN

SEQ ID NO: 19016 - protein, 15 aa, Homo Sapiens
KKFARSDELVRHHNM

SEQ ID NO: 19017 - protein, 15 aa, Homo Sapiens
KFARSDELVRHHNMH

SEQ ID NO: 19018 - protein, 15 aa, Homo Sapiens
FARSDELVRHHNMHQ

SEQ ID NO: 19019 - protein, 15 aa, Homo Sapiens
ARSDELVRHHNMHQR

SEQ ID NO: 19020 - protein, 15 aa, Homo Sapiens
RSDELVRHHNMHQRN

SEQ ID NO: 19021 - protein, 15 aa, Homo Sapiens
SDELVRHHNMHQRNM

SEQ ID NO: 19022 - protein, 15 aa, Homo Sapiens
DELVRHHNMHQRNMT

SEQ ID NO: 19023 - protein, 15 aa, Homo Sapiens
ELVRHHNMHQRNMTK

SEQ ID NO: 19024 - protein, 15 aa, Homo Sapiens
LVRHHNMHQRNMTKL

SEQ ID NO: 19025 - protein, 15 aa, Homo Sapiens
VRHHNMHQRNMTKLQ

SEQ ID NO: 19026 - protein, 15 aa, Homo Sapiens
RHHNMHQRNMTKLQL

SEQ ID NO: 19027 - protein, 15 aa, Homo Sapiens
HHNMHQRNMTKLQLA

SEQ ID NO: 19028 - protein, 15 aa, Homo Sapiens
HNMHQRNMTKLQLAL

SEQ ID NO: 19029 - protein, 16 aa, Homo Sapiens
MQDPASTCVPEPASQH

SEQ ID NO: 19030 - protein, 16 aa, Homo Sapiens
QDPASTCVPEPASQHT

SEQ ID NO: 19031 - protein, 16 aa, Homo Sapiens
DPASTCVPEPASQHTL

SEQ ID NO: 19032 - protein, 16 aa, Homo Sapiens
PASTCVPEPASQHTLR

SEQ ID NO: 19033 - protein, 16 aa, Homo Sapiens
ASTCVPEPASQHTLRS

SEQ ID NO: 19034 - protein, 16 aa, Homo Sapiens
STCVPEPASQHTLRSG

SEQ ID NO: 19035 - protein, 16 aa, Homo Sapiens
TCVPEPASQHTLRSGP

SEQ ID NO: 19036 - protein, 16 aa, Homo Sapiens
CVPEPASQHTLRSGPG

SEQ ID NO: 19037 - protein, 16 aa, Homo Sapiens
VPEPASQHTLRSGPGC

SEQ ID NO: 19038 - protein, 16 aa, Homo Sapiens
PEPASQHTLRSGPGCL

SEQ ID NO: 19039 - protein, 16 aa, Homo Sapiens
EPASQHTLRSGPGCLQ

SEQ ID NO: 19040 - protein, 16 aa, Homo Sapiens
PASQHTLRSGPGCLQQ

SEQ ID NO: 19041 - protein, 16 aa, Homo Sapiens
ASQHTLRSGPGCLQQP

SEQ ID NO: 19042 - protein, 16 aa, Homo Sapiens
SQHTLRSGPGCLQQPE

SEQ ID NO: 19043 - protein, 16 aa, Homo Sapiens
QHTLRSGPGCLQQPEQ

SEQ ID NO: 19044 - protein, 16 aa, Homo Sapiens
HTLRSGPGCLQQPEQQ

SEQ ID NO: 19045 - protein, 16 aa, Homo Sapiens
TLRSGPGCLQQPEQQG

SEQ ID NO: 19046 - protein, 16 aa, Homo Sapiens
LRSGPGCLQQPEQQGV

SEQ ID NO: 19047 - protein, 16 aa, Homo Sapiens
RSGPGCLQQPEQQGVR

SEQ ID NO: 19048 - protein, 16 aa, Homo Sapiens
SGPGCLQQPEQQGVRD

SEQ ID NO: 19049 - protein, 16 aa, Homo Sapiens
GPGCLQQPEQQGVRDP

SEQ ID NO: 19050 - protein, 16 aa, Homo Sapiens
PGCLQQPEQQGVRDPG

SEQ ID NO: 19051 - protein, 16 aa, Homo Sapiens
GCLQQPEQQGVRDPGG

SEQ ID NO: 19052 - protein, 16 aa, Homo Sapiens
CLQQPEQQGVRDPGGI

SEQ ID NO: 19053 - protein, 16 aa, Homo Sapiens
LQQPEQQGVRDPGGIW

SEQ ID NO: 19054 - protein, 16 aa, Homo Sapiens
QQPEQQGVRDPGGIWA

SEQ ID NO: 19055 - protein, 16 aa, Homo Sapiens
QPEQQGVRDPGGIWAK

SEQ ID NO: 19056 - protein, 16 aa, Homo Sapiens
PEQQGVRDPGGIWAKL

SEQ ID NO: 19057 - protein, 16 aa, Homo Sapiens
EQQGVRDPGGIWAKLG

SEQ ID NO: 19058 - protein, 16 aa, Homo Sapiens
QQGVRDPGGIWAKLGA

SEQ ID NO: 19059 - protein, 16 aa, Homo Sapiens
QGVRDPGGIWAKLGAA

SEQ ID NO: 19060 - protein, 16 aa, Homo Sapiens
GVRDPGGIWAKLGAAE

SEQ ID NO: 19061 - protein, 16 aa, Homo Sapiens
VRDPGGIWAKLGAAEA

SEQ ID NO: 19062 - protein, 16 aa, Homo Sapiens
RDPGGIWAKLGAAEAS

SEQ ID NO: 19063 - protein, 16 aa, Homo Sapiens
DPGGIWAKLGAAEASA

SEQ ID NO: 19064 - protein, 16 aa, Homo Sapiens
PGGIWAKLGAAEASAE

SEQ ID NO: 19065 - protein, 16 aa, Homo Sapiens
GGIWAKLGAAEASAER

SEQ ID NO: 19066 - protein, 16 aa, Homo Sapiens
GIWAKLGAAEASAERL

SEQ ID NO: 19067 - protein, 16 aa, Homo Sapiens
IWAKLGAAEASAERLQ

SEQ ID NO: 19068 - protein, 16 aa, Homo Sapiens
WAKLGAAEASAERLQG

SEQ ID NO: 19069 - protein, 16 aa, Homo Sapiens
AKLGAAEASAERLQGR

SEQ ID NO: 19070 - protein, 16 aa, Homo Sapiens
KLGAAEASAERLQGRR

SEQ ID NO: 19071 - protein, 16 aa, Homo Sapiens
LGAAEASAERLQGRRS

SEQ ID NO: 19072 - protein, 16 aa, Homo Sapiens
GAAEASAERLQGRRSR

SEQ ID NO: 19073 - protein, 16 aa, Homo Sapiens
AAEASAERLQGRRSRG

SEQ ID NO: 19074 - protein, 16 aa, Homo Sapiens
AEASAERLQGRRSRGA

SEQ ID NO: 19075 - protein, 16 aa, Homo Sapiens
EASAERLQGRRSRGAS

SEQ ID NO: 19076 - protein, 16 aa, Homo Sapiens
ASAERLQGRRSRGASG

SEQ ID NO: 19077 - protein, 16 aa, Homo Sapiens
SAERLQGRRSRGASGS

SEQ ID NO: 19078 - protein, 16 aa, Homo Sapiens
AERLQGRRSRGASGSE

SEQ ID NO: 19079 - protein, 16 aa, Homo Sapiens
ERLQGRRSRGASGSEP

SEQ ID NO: 19080 - protein, 16 aa, Homo Sapiens
RLQGRRSRGASGSEPQ

SEQ ID NO: 19081 - protein, 16 aa, Homo Sapiens
LQGRRSRGASGSEPQQ

SEQ ID NO: 19082 - protein, 16 aa, Homo Sapiens
QGRRSRGASGSEPQQM

SEQ ID NO: 19083 - protein, 16 aa, Homo Sapiens
GRRSRGASGSEPQQMG

SEQ ID NO: 19084 - protein, 16 aa, Homo Sapiens
RRSRGASGSEPQQMGS

SEQ ID NO: 19085 - protein, 16 aa, Homo Sapiens
RSRGASGSEPQQMGSD

SEQ ID NO: 19086 - protein, 16 aa, Homo Sapiens
SRGASGSEPQQMGSDV

SEQ ID NO: 19087 - protein, 16 aa, Homo Sapiens
RGASGSEPQQMGSDVR

SEQ ID NO: 19088 - protein, 16 aa, Homo Sapiens
GASGSEPQQMGSDVRD

SEQ ID NO: 19089 - protein, 16 aa, Homo Sapiens
ASGSEPQQMGSDVRDL

SEQ ID NO: 19090 - protein, 16 aa, Homo Sapiens
SGSEPQQMGSDVRDLN

SEQ ID NO: 19091 - protein, 16 aa, Homo Sapiens
GSEPQQMGSDVRDLNA

SEQ ID NO: 19092 - protein, 16 aa, Homo Sapiens
SEPQQMGSDVRDLNAL

SEQ ID NO: 19093 - protein, 16 aa, Homo Sapiens
EPQQMGSDVRDLNALL

SEQ ID NO: 19094 - protein, 16 aa, Homo Sapiens
PQQMGSDVRDLNALLP

SEQ ID NO: 19095 - protein, 16 aa, Homo Sapiens
QQMGSDVRDLNALLPA

SEQ ID NO: 19096 - protein, 16 aa, Homo Sapiens
QMGSDVRDLNALLPAV

SEQ ID NO: 19097 - protein, 16 aa, Homo Sapiens
MGSDVRDLNALLPAVP

SEQ ID NO: 19098 - protein, 16 aa, Homo Sapiens
GSDVRDLNALLPAVPS

SEQ ID NO: 19099 - protein, 16 aa, Homo Sapiens
SDVRDLNALLPAVPSL

SEQ ID NO: 19100 - protein, 16 aa, Homo Sapiens
DVRDLNALLPAVPSLG

SEQ ID NO: 19101 - protein, 16 aa, Homo Sapiens
VRDLNALLPAVPSLGG

SEQ ID NO: 19102 - protein, 16 aa, Homo Sapiens
RDLNALLPAVPSLGGG

SEQ ID NO: 19103 - protein, 16 aa, Homo Sapiens
DLNALLPAVPSLGGGG

SEQ ID NO: 19104 - protein, 16 aa, Homo Sapiens
LNALLPAVPSLGGGGG

SEQ ID NO: 19105 - protein, 16 aa, Homo Sapiens
NALLPAVPSLGGGGGC

SEQ ID NO: 19106 - protein, 16 aa, Homo Sapiens
ALLPAVPSLGGGGGCA

SEQ ID NO: 19107 - protein, 16 aa, Homo Sapiens
LLPAVPSLGGGGGCAL

SEQ ID NO: 19108 - protein, 16 aa, Homo Sapiens
LPAVPSLGGGGGCALP

SEQ ID NO: 19109 - protein, 16 aa, Homo Sapiens
PAVPSLGGGGGCALPV

SEQ ID NO: 19110 - protein, 16 aa, Homo Sapiens
AVPSLGGGGGCALPVS

SEQ ID NO: 19111 - protein, 16 aa, Homo Sapiens
VPSLGGGGGCALPVSG

SEQ ID NO: 19112 - protein, 16 aa, Homo Sapiens
PSLGGGGGCALPVSGA

SEQ ID NO: 19113 - protein, 16 aa, Homo Sapiens
SLGGGGGCALPVSGAA

SEQ ID NO: 19114 - protein, 16 aa, Homo Sapiens
LGGGGGCALPVSGAAQ

SEQ ID NO: 19115 - protein, 16 aa, Homo Sapiens
GGGGGCALPVSGAAQW

SEQ ID NO: 19116 - protein, 16 aa, Homo Sapiens
GGGGCALPVSGAAQWA

SEQ ID NO: 19117 - protein, 16 aa, Homo Sapiens
GGGCALPVSGAAQWAP

SEQ ID NO: 19118 - protein, 16 aa, Homo Sapiens
GGCALPVSGAAQWAPV

SEQ ID NO: 19119 - protein, 16 aa, Homo Sapiens
GCALPVSGAAQWAPVL

SEQ ID NO: 19120 - protein, 16 aa, Homo Sapiens
CALPVSGAAQWAPVLD

SEQ ID NO: 19121 - protein, 16 aa, Homo Sapiens
ALPVSGAAQWAPVLDF

SEQ ID NO: 19122 - protein, 16 aa, Homo Sapiens
LPVSGAAQWAPVLDFA

SEQ ID NO: 19123 - protein, 16 aa, Homo Sapiens
PVSGAAQWAPVLDFAP

SEQ ID NO: 19124 - protein, 16 aa, Homo Sapiens
VSGAAQWAPVLDFAPP

SEQ ID NO: 19125 - protein, 16 aa, Homo Sapiens
SGAAQWAPVLDFAPPG

SEQ ID NO: 19126 - protein, 16 aa, Homo Sapiens
GAAQWAPVLDFAPPGA

SEQ ID NO: 19127 - protein, 16 aa, Homo Sapiens
AAQWAPVLDFAPPGAS

SEQ ID NO: 19128 - protein, 16 aa, Homo Sapiens
AQWAPVLDFAPPGASA

SEQ ID NO: 19129 - protein, 16 aa, Homo Sapiens
QWAPVLDFAPPGASAY

SEQ ID NO: 19130 - protein, 16 aa, Homo Sapiens
WAPVLDFAPPGASAYG

SEQ ID NO: 19131 - protein, 16 aa, Homo Sapiens
APVLDFAPPGASAYGS

SEQ ID NO: 19132 - protein, 16 aa, Homo Sapiens
PVLDFAPPGASAYGSL

SEQ ID NO: 19133 - protein, 16 aa, Homo Sapiens
VLDFAPPGASAYGSLG

SEQ ID NO: 19134 - protein, 16 aa, Homo Sapiens
LDFAPPGASAYGSLGG

SEQ ID NO: 19135 - protein, 16 aa, Homo Sapiens
DFAPPGASAYGSLGGP

SEQ ID NO: 19136 - protein, 16 aa, Homo Sapiens
FAPPGASAYGSLGGPA

SEQ ID NO: 19137 - protein, 16 aa, Homo Sapiens
APPGASAYGSLGGPAP

SEQ ID NO: 19138 - protein, 16 aa, Homo Sapiens
PPGASAYGSLGGPAPP

SEQ ID NO: 19139 - protein, 16 aa, Homo Sapiens
PGASAYGSLGGPAPPP

SEQ ID NO: 19140 - protein, 16 aa, Homo Sapiens
GASAYGSLGGPAPPPA

SEQ ID NO: 19141 - protein, 16 aa, Homo Sapiens
ASAYGSLGGPAPPPAP

SEQ ID NO: 19142 - protein, 16 aa, Homo Sapiens
SAYGSLGGPAPPPAPP

SEQ ID NO: 19143 - protein, 16 aa, Homo Sapiens
AYGSLGGPAPPPAPPP

SEQ ID NO: 19144 - protein, 16 aa, Homo Sapiens
YGSLGGPAPPPAPPPP

SEQ ID NO: 19145 - protein, 16 aa, Homo Sapiens
GSLGGPAPPPAPPPPP

SEQ ID NO: 19146 - protein, 16 aa, Homo Sapiens
SLGGPAPPPAPPPPPP

SEQ ID NO: 19147 - protein, 16 aa, Homo Sapiens
LGGPAPPPAPPPPPPP

SEQ ID NO: 19148 - protein, 16 aa, Homo Sapiens
GGPAPPPAPPPPPPPP

SEQ ID NO: 19149 - protein, 16 aa, Homo Sapiens
GPAPPPAPPPPPPPPP

SEQ ID NO: 19150 - protein, 16 aa, Homo Sapiens
PAPPPAPPPPPPPPPH

SEQ ID NO: 19151 - protein, 16 aa, Homo Sapiens
APPPAPPPPPPPPPHS

SEQ ID NO: 19152 - protein, 16 aa, Homo Sapiens
PPPAPPPPPPPPPHSF

SEQ ID NO: 19153 - protein, 16 aa, Homo Sapiens
PPAPPPPPPPPPHSFI

SEQ ID NO: 19154 - protein, 16 aa, Homo Sapiens
PAPPPPPPPPPHSFIK

SEQ ID NO: 19155 - protein, 16 aa, Homo Sapiens
APPPPPPPPPHSFIKQ

SEQ ID NO: 19156 - protein, 16 aa, Homo Sapiens
PPPPPPPPPHSFIKQE

SEQ ID NO: 19157 - protein, 16 aa, Homo Sapiens
PPPPPPPPHSFIKQEP

SEQ ID NO: 19158 - protein, 16 aa, Homo Sapiens
PPPPPPPHSFIKQEPS

SEQ ID NO: 19159 - protein, 16 aa, Homo Sapiens
PPPPPPHSFIKQEPSW

SEQ ID NO: 19160 - protein, 16 aa, Homo Sapiens
PPPPPHSFIKQEPSWG

SEQ ID NO: 19161 - protein, 16 aa, Homo Sapiens
PPPPHSFIKQEPSWGG

SEQ ID NO: 19162 - protein, 16 aa, Homo Sapiens
PPPHSFIKQEPSWGGA

SEQ ID NO: 19163 - protein, 16 aa, Homo Sapiens
PPHSFIKQEPSWGGAE

SEQ ID NO: 19164 - protein, 16 aa, Homo Sapiens
PHSFIKQEPSWGGAEP

SEQ ID NO: 19165 - protein, 16 aa, Homo Sapiens
HSFIKQEPSWGGAEPH

SEQ ID NO: 19166 - protein, 16 aa, Homo Sapiens
SFIKQEPSWGGAEPHE

SEQ ID NO: 19167 - protein, 16 aa, Homo Sapiens
FIKQEPSWGGAEPHEE

SEQ ID NO: 19168 - protein, 16 aa, Homo Sapiens
IKQEPSWGGAEPHEEQ

SEQ ID NO: 19169 - protein, 16 aa, Homo Sapiens
KQEPSWGGAEPHEEQC

SEQ ID NO: 19170 - protein, 16 aa, Homo Sapiens
QEPSWGGAEPHEEQCL

SEQ ID NO: 19171 - protein, 16 aa, Homo Sapiens
EPSWGGAEPHEEQCLS

SEQ ID NO: 19172 - protein, 16 aa, Homo Sapiens
PSWGGAEPHEEQCLSA

SEQ ID NO: 19173 - protein, 16 aa, Homo Sapiens
SWGGAEPHEEQCLSAF

SEQ ID NO: 19174 - protein, 16 aa, Homo Sapiens
WGGAEPHEEQCLSAFT

SEQ ID NO: 19175 - protein, 16 aa, Homo Sapiens
GGAEPHEEQCLSAFTV

SEQ ID NO: 19176 - protein, 16 aa, Homo Sapiens
GAEPHEEQCLSAFTVH

SEQ ID NO: 19177 - protein, 16 aa, Homo Sapiens
AEPHEEQCLSAFTVHF

SEQ ID NO: 19178 - protein, 16 aa, Homo Sapiens
EPHEEQCLSAFTVHFS

SEQ ID NO: 19179 - protein, 16 aa, Homo Sapiens
PHEEQCLSAFTVHFSG

SEQ ID NO: 19180 - protein, 16 aa, Homo Sapiens
HEEQCLSAFTVHFSGQ

SEQ ID NO: 19181 - protein, 16 aa, Homo Sapiens
EEQCLSAFTVHFSGQF

SEQ ID NO: 19182 - protein, 16 aa, Homo Sapiens
EQCLSAFTVHFSGQFT

SEQ ID NO: 19183 - protein, 16 aa, Homo Sapiens
QCLSAFTVHFSGQFTG

SEQ ID NO: 19184 - protein, 16 aa, Homo Sapiens
CLSAFTVHFSGQFTGT

SEQ ID NO: 19185 - protein, 16 aa, Homo Sapiens
LSAFTVHFSGQFTGTA

SEQ ID NO: 19186 - protein, 16 aa, Homo Sapiens
SAFTVHFSGQFTGTAG

SEQ ID NO: 19187 - protein, 16 aa, Homo Sapiens
AFTVHFSGQFTGTAGA

SEQ ID NO: 19188 - protein, 16 aa, Homo Sapiens
FTVHFSGQFTGTAGAC

SEQ ID NO: 19189 - protein, 16 aa, Homo Sapiens
TVHFSGQFTGTAGACR

SEQ ID NO: 19190 - protein, 16 aa, Homo Sapiens
VHFSGQFTGTAGACRY

SEQ ID NO: 19191 - protein, 16 aa, Homo Sapiens
HFSGQFTGTAGACRYG

SEQ ID NO: 19192 - protein, 16 aa, Homo Sapiens
FSGQFTGTAGACRYGP

SEQ ID NO: 19193 - protein, 16 aa, Homo Sapiens
SGQFTGTAGACRYGPF

SEQ ID NO: 19194 - protein, 16 aa, Homo Sapiens
GQFTGTAGACRYGPFG

SEQ ID NO: 19195 - protein, 16 aa, Homo Sapiens
QFTGTAGACRYGPFGP

SEQ ID NO: 19196 - protein, 16 aa, Homo Sapiens
FTGTAGACRYGPFGPP

SEQ ID NO: 19197 - protein, 16 aa, Homo Sapiens
TGTAGACRYGPFGPPP

SEQ ID NO: 19198 - protein, 16 aa, Homo Sapiens
GTAGACRYGPFGPPPP

SEQ ID NO: 19199 - protein, 16 aa, Homo Sapiens
TAGACRYGPFGPPPPS

SEQ ID NO: 19200 - protein, 16 aa, Homo Sapiens
AGACRYGPFGPPPPSQ

SEQ ID NO: 19201 - protein, 16 aa, Homo Sapiens
GACRYGPFGPPPPSQA

SEQ ID NO: 19202 - protein, 16 aa, Homo Sapiens
ACRYGPFGPPPPSQAS

SEQ ID NO: 19203 - protein, 16 aa, Homo Sapiens
CRYGPFGPPPPSQASS

SEQ ID NO: 19204 - protein, 16 aa, Homo Sapiens
RYGPFGPPPPSQASSG

SEQ ID NO: 19205 - protein, 16 aa, Homo Sapiens
YGPFGPPPPSQASSGQ

SEQ ID NO: 19206 - protein, 16 aa, Homo Sapiens
GPFGPPPPSQASSGQA

SEQ ID NO: 19207 - protein, 16 aa, Homo Sapiens
PFGPPPPSQASSGQAR

SEQ ID NO: 19208 - protein, 16 aa, Homo Sapiens
FGPPPPSQASSGQARM

SEQ ID NO: 19209 - protein, 16 aa, Homo Sapiens
GPPPPSQASSGQARMF

SEQ ID NO: 19210 - protein, 16 aa, Homo Sapiens
PPPPSQASSGQARMFP

SEQ ID NO: 19211 - protein, 16 aa, Homo Sapiens
PPPSQASSGQARMFPN

SEQ ID NO: 19212 - protein, 16 aa, Homo Sapiens
PPSQASSGQARMFPNA

SEQ ID NO: 19213 - protein, 16 aa, Homo Sapiens
PSQASSGQARMFPNAP

SEQ ID NO: 19214 - protein, 16 aa, Homo Sapiens
SQASSGQARMFPNAPY

SEQ ID NO: 19215 - protein, 16 aa, Homo Sapiens
QASSGQARMFPNAPYL

SEQ ID NO: 19216 - protein, 16 aa, Homo Sapiens
ASSGQARMFPNAPYLP

SEQ ID NO: 19217 - protein, 16 aa, Homo Sapiens
SSGQARMFPNAPYLPS

SEQ ID NO: 19218 - protein, 16 aa, Homo Sapiens
SGQARMFPNAPYLPSC

SEQ ID NO: 19219 - protein, 16 aa, Homo Sapiens
GQARMFPNAPYLPSCL

SEQ ID NO: 19220 - protein, 16 aa, Homo Sapiens
QARMFPNAPYLPSCLE

SEQ ID NO: 19221 - protein, 16 aa, Homo Sapiens
ARMFPNAPYLPSCLES

SEQ ID NO: 19222 - protein, 16 aa, Homo Sapiens
RMFPNAPYLPSCLESQ

SEQ ID NO: 19223 - protein, 16 aa, Homo Sapiens
MFPNAPYLPSCLESQP

SEQ ID NO: 19224 - protein, 16 aa, Homo Sapiens
FPNAPYLPSCLESQPA

SEQ ID NO: 19225 - protein, 16 aa, Homo Sapiens
PNAPYLPSCLESQPAI

SEQ ID NO: 19226 - protein, 16 aa, Homo Sapiens
NAPYLPSCLESQPAIR

SEQ ID NO: 19227 - protein, 16 aa, Homo Sapiens
APYLPSCLESQPAIRN

SEQ ID NO: 19228 - protein, 16 aa, Homo Sapiens
PYLPSCLESQPAIRNQ

SEQ ID NO: 19229 - protein, 16 aa, Homo Sapiens
YLPSCLESQPAIRNQG

SEQ ID NO: 19230 - protein, 16 aa, Homo Sapiens
LPSCLESQPAIRNQGY

SEQ ID NO: 19231 - protein, 16 aa, Homo Sapiens
PSCLESQPAIRNQGYS

SEQ ID NO: 19232 - protein, 16 aa, Homo Sapiens
SCLESQPAIRNQGYST

SEQ ID NO: 19233 - protein, 16 aa, Homo Sapiens
CLESQPAIRNQGYSTV

SEQ ID NO: 19234 - protein, 16 aa, Homo Sapiens
LESQPAIRNQGYSTVT

SEQ ID NO: 19235 - protein, 16 aa, Homo Sapiens
ESQPAIRNQGYSTVTF

SEQ ID NO: 19236 - protein, 16 aa, Homo Sapiens
SQPAIRNQGYSTVTFD

SEQ ID NO: 19237 - protein, 16 aa, Homo Sapiens
QPAIRNQGYSTVTFDG

SEQ ID NO: 19238 - protein, 16 aa, Homo Sapiens
PAIRNQGYSTVTFDGT

SEQ ID NO: 19239 - protein, 16 aa, Homo Sapiens
AIRNQGYSTVTFDGTP

SEQ ID NO: 19240 - protein, 16 aa, Homo Sapiens
IRNQGYSTVTFDGTPS

SEQ ID NO: 19241 - protein, 16 aa, Homo Sapiens
RNQGYSTVTFDGTPSY

SEQ ID NO: 19242 - protein, 16 aa, Homo Sapiens
NQGYSTVTFDGTPSYG

SEQ ID NO: 19243 - protein, 16 aa, Homo Sapiens
QGYSTVTFDGTPSYGH

SEQ ID NO: 19244 - protein, 16 aa, Homo Sapiens
GYSTVTFDGTPSYGHT

SEQ ID NO: 19245 - protein, 16 aa, Homo Sapiens
YSTVTFDGTPSYGHTP

SEQ ID NO: 19246 - protein, 16 aa, Homo Sapiens
STVTFDGTPSYGHTPS

SEQ ID NO: 19247 - protein, 16 aa, Homo Sapiens
TVTFDGTPSYGHTPSH

SEQ ID NO: 19248 - protein, 16 aa, Homo Sapiens
VTFDGTPSYGHTPSHH

SEQ ID NO: 19249 - protein, 16 aa, Homo Sapiens
TFDGTPSYGHTPSHHA

SEQ ID NO: 19250 - protein, 16 aa, Homo Sapiens
FDGTPSYGHTPSHHAA

SEQ ID NO: 19251 - protein, 16 aa, Homo Sapiens
DGTPSYGHTPSHHAAQ

SEQ ID NO: 19252 - protein, 16 aa, Homo Sapiens
GTPSYGHTPSHHAAQF

SEQ ID NO: 19253 - protein, 16 aa, Homo Sapiens
TPSYGHTPSHHAAQFP

SEQ ID NO: 19254 - protein, 16 aa, Homo Sapiens
PSYGHTPSHHAAQFPN

SEQ ID NO: 19255 - protein, 16 aa, Homo Sapiens
SYGHTPSHHAAQFPNH

SEQ ID NO: 19256 - protein, 16 aa, Homo Sapiens
YGHTPSHHAAQFPNHS

SEQ ID NO: 19257 - protein, 16 aa, Homo Sapiens
GHTPSHHAAQFPNHSF

SEQ ID NO: 19258 - protein, 16 aa, Homo Sapiens
HTPSHHAAQFPNHSFK

SEQ ID NO: 19259 - protein, 16 aa, Homo Sapiens
TPSHHAAQFPNHSFKH

SEQ ID NO: 19260 - protein, 16 aa, Homo Sapiens
PSHHAAQFPNHSFKHE

SEQ ID NO: 19261 - protein, 16 aa, Homo Sapiens
SHHAAQFPNHSFKHED

SEQ ID NO: 19262 - protein, 16 aa, Homo Sapiens
HHAAQFPNHSFKHEDP

SEQ ID NO: 19263 - protein, 16 aa, Homo Sapiens
HAAQFPNHSFKHEDPM

SEQ ID NO: 19264 - protein, 16 aa, Homo Sapiens
AAQFPNHSFKHEDPMG

SEQ ID NO: 19265 - protein, 16 aa, Homo Sapiens
AQFPNHSFKHEDPMGQ

SEQ ID NO: 19266 - protein, 16 aa, Homo Sapiens
QFPNHSFKHEDPMGQQ

SEQ ID NO: 19267 - protein, 16 aa, Homo Sapiens
FPNHSFKHEDPMGQQG

SEQ ID NO: 19268 - protein, 16 aa, Homo Sapiens
PNHSFKHEDPMGQQGS

SEQ ID NO: 19269 - protein, 16 aa, Homo Sapiens
NHSFKHEDPMGQQGSL

SEQ ID NO: 19270 - protein, 16 aa, Homo Sapiens
HSFKHEDPMGQQGSLG

SEQ ID NO: 19271 - protein, 16 aa, Homo Sapiens
SFKHEDPMGQQGSLGE

SEQ ID NO: 19272 - protein, 16 aa, Homo Sapiens
FKHEDPMGQQGSLGEQ

SEQ ID NO: 19273 - protein, 16 aa, Homo Sapiens
KHEDPMGQQGSLGEQQ

SEQ ID NO: 19274 - protein, 16 aa, Homo Sapiens
HEDPMGQQGSLGEQQY

SEQ ID NO: 19275 - protein, 16 aa, Homo Sapiens
EDPMGQQGSLGEQQYS

SEQ ID NO: 19276 - protein, 16 aa, Homo Sapiens
DPMGQQGSLGEQQYSV

SEQ ID NO: 19277 - protein, 16 aa, Homo Sapiens
PMGQQGSLGEQQYSVP

SEQ ID NO: 19278 - protein, 16 aa, Homo Sapiens
MGQQGSLGEQQYSVPP

SEQ ID NO: 19279 - protein, 16 aa, Homo Sapiens
GQQGSLGEQQYSVPPP

SEQ ID NO: 19280 - protein, 16 aa, Homo Sapiens
QQGSLGEQQYSVPPPV

SEQ ID NO: 19281 - protein, 16 aa, Homo Sapiens
QGSLGEQQYSVPPPVY

SEQ ID NO: 19282 - protein, 16 aa, Homo Sapiens
GSLGEQQYSVPPPVYG

SEQ ID NO: 19283 - protein, 16 aa, Homo Sapiens
SLGEQQYSVPPPVYGC

SEQ ID NO: 19284 - protein, 16 aa, Homo Sapiens
LGEQQYSVPPPVYGCH

SEQ ID NO: 19285 - protein, 16 aa, Homo Sapiens
GEQQYSVPPPVYGCHT

SEQ ID NO: 19286 - protein, 16 aa, Homo Sapiens
EQQYSVPPPVYGCHTP

SEQ ID NO: 19287 - protein, 16 aa, Homo Sapiens
QQYSVPPPVYGCHTPT

SEQ ID NO: 19288 - protein, 16 aa, Homo Sapiens
QYSVPPPVYGCHTPTD

SEQ ID NO: 19289 - protein, 16 aa, Homo Sapiens
YSVPPPVYGCHTPTDS

SEQ ID NO: 19290 - protein, 16 aa, Homo Sapiens
SVPPPVYGCHTPTDSC

SEQ ID NO: 19291 - protein, 16 aa, Homo Sapiens
VPPPVYGCHTPTDSCT

SEQ ID NO: 19292 - protein, 16 aa, Homo Sapiens
PPPVYGCHTPTDSCTG

SEQ ID NO: 19293 - protein, 16 aa, Homo Sapiens
PPVYGCHTPTDSCTGS

SEQ ID NO: 19294 - protein, 16 aa, Homo Sapiens
PVYGCHTPTDSCTGSQ

SEQ ID NO: 19295 - protein, 16 aa, Homo Sapiens
VYGCHTPTDSCTGSQA

SEQ ID NO: 19296 - protein, 16 aa, Homo Sapiens
YGCHTPTDSCTGSQAL

SEQ ID NO: 19297 - protein, 16 aa, Homo Sapiens
GCHTPTDSCTGSQALL

SEQ ID NO: 19298 - protein, 16 aa, Homo Sapiens
CHTPTDSCTGSQALLL

SEQ ID NO: 19299 - protein, 16 aa, Homo Sapiens
HTPTDSCTGSQALLLR

SEQ ID NO: 19300 - protein, 16 aa, Homo Sapiens
TPTDSCTGSQALLLRT

SEQ ID NO: 19301 - protein, 16 aa, Homo Sapiens
PTDSCTGSQALLLRTP

SEQ ID NO: 19302 - protein, 16 aa, Homo Sapiens
TDSCTGSQALLLRTPY

SEQ ID NO: 19303 - protein, 16 aa, Homo Sapiens
DSCTGSQALLLRTPYS

SEQ ID NO: 19304 - protein, 16 aa, Homo Sapiens
SCTGSQALLLRTPYSS

SEQ ID NO: 19305 - protein, 16 aa, Homo Sapiens
CTGSQALLLRTPYSSD

SEQ ID NO: 19306 - protein, 16 aa, Homo Sapiens
TGSQALLLRTPYSSDN

SEQ ID NO: 19307 - protein, 16 aa, Homo Sapiens
GSQALLLRTPYSSDNL

SEQ ID NO: 19308 - protein, 16 aa, Homo Sapiens
SQALLLRTPYSSDNLY

SEQ ID NO: 19309 - protein, 16 aa, Homo Sapiens
QALLLRTPYSSDNLYQ

SEQ ID NO: 19310 - protein, 16 aa, Homo Sapiens
ALLLRTPYSSDNLYQM

SEQ ID NO: 19311 - protein, 16 aa, Homo Sapiens
LLLRTPYSSDNLYQMT

SEQ ID NO: 19312 - protein, 16 aa, Homo Sapiens
LLRTPYSSDNLYQMTS

SEQ ID NO: 19313 - protein, 16 aa, Homo Sapiens
LRTPYSSDNLYQMTSQ

SEQ ID NO: 19314 - protein, 16 aa, Homo Sapiens
RTPYSSDNLYQMTSQL

SEQ ID NO: 19315 - protein, 16 aa, Homo Sapiens
TPYSSDNLYQMTSQLE

SEQ ID NO: 19316 - protein, 16 aa, Homo Sapiens
PYSSDNLYQMTSQLEC

SEQ ID NO: 19317 - protein, 16 aa, Homo Sapiens
YSSDNLYQMTSQLECM

SEQ ID NO: 19318 - protein, 16 aa, Homo Sapiens
SSDNLYQMTSQLECMT

SEQ ID NO: 19319 - protein, 16 aa, Homo Sapiens
SDNLYQMTSQLECMTW

SEQ ID NO: 19320 - protein, 16 aa, Homo Sapiens
DNLYQMTSQLECMTWN

SEQ ID NO: 19321 - protein, 16 aa, Homo Sapiens
NLYQMTSQLECMTWNQ

SEQ ID NO: 19322 - protein, 16 aa, Homo Sapiens
LYQMTSQLECMTWNQM

SEQ ID NO: 19323 - protein, 16 aa, Homo Sapiens
YQMTSQLECMTWNQMN

SEQ ID NO: 19324 - protein, 16 aa, Homo Sapiens
QMTSQLECMTWNQMNL

SEQ ID NO: 19325 - protein, 16 aa, Homo Sapiens
MTSQLECMTWNQMNLG

SEQ ID NO: 19326 - protein, 16 aa, Homo Sapiens
TSQLECMTWNQMNLGA

SEQ ID NO: 19327 - protein, 16 aa, Homo Sapiens
SQLECMTWNQMNLGAT

SEQ ID NO: 19328 - protein, 16 aa, Homo Sapiens
QLECMTWNQMNLGATL

SEQ ID NO: 19329 - protein, 16 aa, Homo Sapiens
LECMTWNQMNLGATLK

SEQ ID NO: 19330 - protein, 16 aa, Homo Sapiens
ECMTWNQMNLGATLKG

SEQ ID NO: 19331 - protein, 16 aa, Homo Sapiens
CMTWNQMNLGATLKGH

SEQ ID NO: 19332 - protein, 16 aa, Homo Sapiens
MTWNQMNLGATLKGHS

SEQ ID NO: 19333 - protein, 16 aa, Homo Sapiens
TWNQMNLGATLKGHST

SEQ ID NO: 19334 - protein, 16 aa, Homo Sapiens
WNQMNLGATLKGHSTG

SEQ ID NO: 19335 - protein, 16 aa, Homo Sapiens
NQMNLGATLKGHSTGY

SEQ ID NO: 19336 - protein, 16 aa, Homo Sapiens
QMNLGATLKGHSTGYE

SEQ ID NO: 19337 - protein, 16 aa, Homo Sapiens
MNLGATLKGHSTGYES

SEQ ID NO: 19338 - protein, 16 aa, Homo Sapiens
NLGATLKGHSTGYESD

SEQ ID NO: 19339 - protein, 16 aa, Homo Sapiens
LGATLKGHSTGYESDN

SEQ ID NO: 19340 - protein, 16 aa, Homo Sapiens
GATLKGHSTGYESDNH

SEQ ID NO: 19341 - protein, 16 aa, Homo Sapiens
ATLKGHSTGYESDNHT

SEQ ID NO: 19342 - protein, 16 aa, Homo Sapiens
TLKGHSTGYESDNHTT

SEQ ID NO: 19343 - protein, 16 aa, Homo Sapiens
LKGHSTGYESDNHTTP

SEQ ID NO: 19344 - protein, 16 aa, Homo Sapiens
KGHSTGYESDNHTTPI

SEQ ID NO: 19345 - protein, 16 aa, Homo Sapiens
GHSTGYESDNHTTPIL

SEQ ID NO: 19346 - protein, 16 aa, Homo Sapiens
HSTGYESDNHTTPILC

SEQ ID NO: 19347 - protein, 16 aa, Homo Sapiens
STGYESDNHTTPILCG

SEQ ID NO: 19348 - protein, 16 aa, Homo Sapiens
TGYESDNHTTPILCGA

SEQ ID NO: 19349 - protein, 16 aa, Homo Sapiens
GYESDNHTTPILCGAQ

SEQ ID NO: 19350 - protein, 16 aa, Homo Sapiens
YESDNHTTPILCGAQY

SEQ ID NO: 19351 - protein, 16 aa, Homo Sapiens
ESDNHTTPILCGAQYR

SEQ ID NO: 19352 - protein, 16 aa, Homo Sapiens
SDNHTTPILCGAQYRI

SEQ ID NO: 19353 - protein, 16 aa, Homo Sapiens
DNHTTPILCGAQYRIH

SEQ ID NO: 19354 - protein, 16 aa, Homo Sapiens
NHTTPILCGAQYRIHT

SEQ ID NO: 19355 - protein, 16 aa, Homo Sapiens
HTTPILCGAQYRIHTH

SEQ ID NO: 19356 - protein, 16 aa, Homo Sapiens
TTPILCGAQYRIHTHG

SEQ ID NO: 19357 - protein, 16 aa, Homo Sapiens
TPILCGAQYRIHTHGV

SEQ ID NO: 19358 - protein, 16 aa, Homo Sapiens
PILCGAQYRIHTHGVF

SEQ ID NO: 19359 - protein, 16 aa, Homo Sapiens
ILCGAQYRIHTHGVFR

SEQ ID NO: 19360 - protein, 16 aa, Homo Sapiens
LCGAQYRIHTHGVFRG

SEQ ID NO: 19361 - protein, 16 aa, Homo Sapiens
CGAQYRIHTHGVFRGI

SEQ ID NO: 19362 - protein, 16 aa, Homo Sapiens
GAQYRIHTHGVFRGIQ

SEQ ID NO: 19363 - protein, 16 aa, Homo Sapiens
AQYRIHTHGVFRGIQD

SEQ ID NO: 19364 - protein, 16 aa, Homo Sapiens
QYRIHTHGVFRGIQDV

SEQ ID NO: 19365 - protein, 16 aa, Homo Sapiens
YRIHTHGVFRGIQDVR

SEQ ID NO: 19366 - protein, 16 aa, Homo Sapiens
RIHTHGVFRGIQDVRR

SEQ ID NO: 19367 - protein, 16 aa, Homo Sapiens
IHTHGVFRGIQDVRRV

SEQ ID NO: 19368 - protein, 16 aa, Homo Sapiens
HTHGVFRGIQDVRRVP

SEQ ID NO: 19369 - protein, 16 aa, Homo Sapiens
THGVFRGIQDVRRVPG

SEQ ID NO: 19370 - protein, 16 aa, Homo Sapiens
HGVFRGIQDVRRVPGV

SEQ ID NO: 19371 - protein, 16 aa, Homo Sapiens
GVFRGIQDVRRVPGVA

SEQ ID NO: 19372 - protein, 16 aa, Homo Sapiens
VFRGIQDVRRVPGVAP

SEQ ID NO: 19373 - protein, 16 aa, Homo Sapiens
FRGIQDVRRVPGVAPT

SEQ ID NO: 19374 - protein, 16 aa, Homo Sapiens
RGIQDVRRVPGVAPTL

SEQ ID NO: 19375 - protein, 16 aa, Homo Sapiens
GIQDVRRVPGVAPTLV

SEQ ID NO: 19376 - protein, 16 aa, Homo Sapiens
IQDVRRVPGVAPTLVR

SEQ ID NO: 19377 - protein, 16 aa, Homo Sapiens
QDVRRVPGVAPTLVRS

SEQ ID NO: 19378 - protein, 16 aa, Homo Sapiens
DVRRVPGVAPTLVRSA

SEQ ID NO: 19379 - protein, 16 aa, Homo Sapiens
VRRVPGVAPTLVRSAS

SEQ ID NO: 19380 - protein, 16 aa, Homo Sapiens
RRVPGVAPTLVRSASE

SEQ ID NO: 19381 - protein, 16 aa, Homo Sapiens
RVPGVAPTLVRSASET

SEQ ID NO: 19382 - protein, 16 aa, Homo Sapiens
VPGVAPTLVRSASETS

SEQ ID NO: 19383 - protein, 16 aa, Homo Sapiens
PGVAPTLVRSASETSE

SEQ ID NO: 19384 - protein, 16 aa, Homo Sapiens
GVAPTLVRSASETSEK

SEQ ID NO: 19385 - protein, 16 aa, Homo Sapiens
VAPTLVRSASETSEKR

SEQ ID NO: 19386 - protein, 16 aa, Homo Sapiens
APTLVRSASETSEKRP

SEQ ID NO: 19387 - protein, 16 aa, Homo Sapiens
PTLVRSASETSEKRPF

SEQ ID NO: 19388 - protein, 16 aa, Homo Sapiens
TLVRSASETSEKRPFM

SEQ ID NO: 19389 - protein, 16 aa, Homo Sapiens
LVRSASETSEKRPFMC

SEQ ID NO: 19390 - protein, 16 aa, Homo Sapiens
VRSASETSEKRPFMCA

SEQ ID NO: 19391 - protein, 16 aa, Homo Sapiens
RSASETSEKRPFMCAY

SEQ ID NO: 19392 - protein, 16 aa, Homo Sapiens
SASETSEKRPFMCAYP

SEQ ID NO: 19393 - protein, 16 aa, Homo Sapiens
ASETSEKRPFMCAYPG

SEQ ID NO: 19394 - protein, 16 aa, Homo Sapiens
SETSEKRPFMCAYPGC

SEQ ID NO: 19395 - protein, 16 aa, Homo Sapiens
ETSEKRPFMCAYPGCN

SEQ ID NO: 19396 - protein, 16 aa, Homo Sapiens
TSEKRPFMCAYPGCNK

SEQ ID NO: 19397 - protein, 16 aa, Homo Sapiens
SEKRPFMCAYPGCNKR

SEQ ID NO: 19398 - protein, 16 aa, Homo Sapiens
EKRPFMCAYPGCNKRY

SEQ ID NO: 19399 - protein, 16 aa, Homo Sapiens
KRPFMCAYPGCNKRYF

SEQ ID NO: 19400 - protein, 16 aa, Homo Sapiens
RPFMCAYPGCNKRYFK

SEQ ID NO: 19401 - protein, 16 aa, Homo Sapiens
PFMCAYPGCNKRYFKL

SEQ ID NO: 19402 - protein, 16 aa, Homo Sapiens
FMCAYPGCNKRYFKLS

SEQ ID NO: 19403 - protein, 16 aa, Homo Sapiens
MCAYPGCNKRYFKLSH

SEQ ID NO: 19404 - protein, 16 aa, Homo Sapiens
CAYPGCNKRYFKLSHL

SEQ ID NO: 19405 - protein, 16 aa, Homo Sapiens
AYPGCNKRYFKLSHLQ

SEQ ID NO: 19406 - protein, 16 aa, Homo Sapiens
YPGCNKRYFKLSHLQM

SEQ ID NO: 19407 - protein, 16 aa, Homo Sapiens
PGCNKRYFKLSHLQMH

SEQ ID NO: 19408 - protein, 16 aa, Homo Sapiens
GCNKRYFKLSHLQMHS

SEQ ID NO: 19409 - protein, 16 aa, Homo Sapiens
CNKRYFKLSHLQMHSR

SEQ ID NO: 19410 - protein, 16 aa, Homo Sapiens
NKRYFKLSHLQMHSRK

SEQ ID NO: 19411 - protein, 16 aa, Homo Sapiens
KRYFKLSHLQMHSRKH

SEQ ID NO: 19412 - protein, 16 aa, Homo Sapiens
RYFKLSHLQMHSRKHT

SEQ ID NO: 19413 - protein, 16 aa, Homo Sapiens
YFKLSHLQMHSRKHTG

SEQ ID NO: 19414 - protein, 16 aa, Homo Sapiens
FKLSHLQMHSRKHTGE

SEQ ID NO: 19415 - protein, 16 aa, Homo Sapiens
KLSHLQMHSRKHTGEK

SEQ ID NO: 19416 - protein, 16 aa, Homo Sapiens
LSHLQMHSRKHTGEKP

SEQ ID NO: 19417 - protein, 16 aa, Homo Sapiens
SHLQMHSRKHTGEKPY

SEQ ID NO: 19418 - protein, 16 aa, Homo Sapiens
HLQMHSRKHTGEKPYQ

SEQ ID NO: 19419 - protein, 16 aa, Homo Sapiens
LQMHSRKHTGEKPYQC

SEQ ID NO: 19420 - protein, 16 aa, Homo Sapiens
QMHSRKHTGEKPYQCD

SEQ ID NO: 19421 - protein, 16 aa, Homo Sapiens
MHSRKHTGEKPYQCDF

SEQ ID NO: 19422 - protein, 16 aa, Homo Sapiens
HSRKHTGEKPYQCDFK

SEQ ID NO: 19423 - protein, 16 aa, Homo Sapiens
SRKHTGEKPYQCDFKD

SEQ ID NO: 19424 - protein, 16 aa, Homo Sapiens
RKHTGEKPYQCDFKDC

SEQ ID NO: 19425 - protein, 16 aa, Homo Sapiens
KHTGEKPYQCDFKDCE

SEQ ID NO: 19426 - protein, 16 aa, Homo Sapiens
HTGEKPYQCDFKDCER

SEQ ID NO: 19427 - protein, 16 aa, Homo Sapiens
TGEKPYQCDFKDCERR

SEQ ID NO: 19428 - protein, 16 aa, Homo Sapiens
GEKPYQCDFKDCERRF

SEQ ID NO: 19429 - protein, 16 aa, Homo Sapiens
EKPYQCDFKDCERRFS

SEQ ID NO: 19430 - protein, 16 aa, Homo Sapiens
KPYQCDFKDCERRFSR

SEQ ID NO: 19431 - protein, 16 aa, Homo Sapiens
PYQCDFKDCERRFSRS

SEQ ID NO: 19432 - protein, 16 aa, Homo Sapiens
YQCDFKDCERRFSRSD

SEQ ID NO: 19433 - protein, 16 aa, Homo Sapiens
QCDFKDCERRFSRSDQ

SEQ ID NO: 19434 - protein, 16 aa, Homo Sapiens
CDFKDCERRFSRSDQL

SEQ ID NO: 19435 - protein, 16 aa, Homo Sapiens
DFKDCERRFSRSDQLK

SEQ ID NO: 19436 - protein, 16 aa, Homo Sapiens
FKDCERRFSRSDQLKR

SEQ ID NO: 19437 - protein, 16 aa, Homo Sapiens
KDCERRFSRSDQLKRH

SEQ ID NO: 19438 - protein, 16 aa, Homo Sapiens
DCERRFSRSDQLKRHQ

SEQ ID NO: 19439 - protein, 16 aa, Homo Sapiens
CERRFSRSDQLKRHQR

SEQ ID NO: 19440 - protein, 16 aa, Homo Sapiens
ERRFSRSDQLKRHQRR

SEQ ID NO: 19441 - protein, 16 aa, Homo Sapiens
RRFSRSDQLKRHQRRH

SEQ ID NO: 19442 - protein, 16 aa, Homo Sapiens
RFSRSDQLKRHQRRHT

SEQ ID NO: 19443 - protein, 16 aa, Homo Sapiens
FSRSDQLKRHQRRHTG

SEQ ID NO: 19444 - protein, 16 aa, Homo Sapiens
SRSDQLKRHQRRHTGV

SEQ ID NO: 19445 - protein, 16 aa, Homo Sapiens
RSDQLKRHQRRHTGVK

SEQ ID NO: 19446 - protein, 16 aa, Homo Sapiens
SDQLKRHQRRHTGVKP

SEQ ID NO: 19447 - protein, 16 aa, Homo Sapiens
DQLKRHQRRHTGVKPF

SEQ ID NO: 19448 - protein, 16 aa, Homo Sapiens
QLKRHQRRHTGVKPFQ

SEQ ID NO: 19449 - protein, 16 aa, Homo Sapiens
LKRHQRRHTGVKPFQC

SEQ ID NO: 19450 - protein, 16 aa, Homo Sapiens
KRHQRRHTGVKPFQCK

SEQ ID NO: 19451 - protein, 16 aa, Homo Sapiens
RHQRRHTGVKPFQCKT

SEQ ID NO: 19452 - protein, 16 aa, Homo Sapiens
HQRRHTGVKPFQCKTC

SEQ ID NO: 19453 - protein, 16 aa, Homo Sapiens
QRRHTGVKPFQCKTCQ

SEQ ID NO: 19454 - protein, 16 aa, Homo Sapiens
RRHTGVKPFQCKTCQR

SEQ ID NO: 19455 - protein, 16 aa, Homo Sapiens
RHTGVKPFQCKTCQRK

SEQ ID NO: 19456 - protein, 16 aa, Homo Sapiens
HTGVKPFQCKTCQRKF

SEQ ID NO: 19457 - protein, 16 aa, Homo Sapiens
TGVKPFQCKTCQRKFS

SEQ ID NO: 19458 - protein, 16 aa, Homo Sapiens
GVKPFQCKTCQRKFSR

SEQ ID NO: 19459 - protein, 16 aa, Homo Sapiens
VKPFQCKTCQRKFSRS

SEQ ID NO: 19460 - protein, 16 aa, Homo Sapiens
KPFQCKTCQRKFSRSD

SEQ ID NO: 19461 - protein, 16 aa, Homo Sapiens
PFQCKTCQRKFSRSDH

SEQ ID NO: 19462 - protein, 16 aa, Homo Sapiens
FQCKTCQRKFSRSDHL

SEQ ID NO: 19463 - protein, 16 aa, Homo Sapiens
QCKTCQRKFSRSDHLK

SEQ ID NO: 19464 - protein, 16 aa, Homo Sapiens
CKTCQRKFSRSDHLKT

SEQ ID NO: 19465 - protein, 16 aa, Homo Sapiens
KTCQRKFSRSDHLKTH

SEQ ID NO: 19466 - protein, 16 aa, Homo Sapiens
TCQRKFSRSDHLKTHT

SEQ ID NO: 19467 - protein, 16 aa, Homo Sapiens
CQRKFSRSDHLKTHTR

SEQ ID NO: 19468 - protein, 16 aa, Homo Sapiens
QRKFSRSDHLKTHTRT

SEQ ID NO: 19469 - protein, 16 aa, Homo Sapiens
RKFSRSDHLKTHTRTH

SEQ ID NO: 19470 - protein, 16 aa, Homo Sapiens
KFSRSDHLKTHTRTHT

SEQ ID NO: 19471 - protein, 16 aa, Homo Sapiens
FSRSDHLKTHTRTHTG

SEQ ID NO: 19472 - protein, 16 aa, Homo Sapiens
SRSDHLKTHTRTHTGK

SEQ ID NO: 19473 - protein, 16 aa, Homo Sapiens
RSDHLKTHTRTHTGKT

SEQ ID NO: 19474 - protein, 16 aa, Homo Sapiens
SDHLKTHTRTHTGKTS

SEQ ID NO: 19475 - protein, 16 aa, Homo Sapiens
DHLKTHTRTHTGKTSE

SEQ ID NO: 19476 - protein, 16 aa, Homo Sapiens
HLKTHTRTHTGKTSEK

SEQ ID NO: 19477 - protein, 16 aa, Homo Sapiens
LKTHTRTHTGKTSEKP

SEQ ID NO: 19478 - protein, 16 aa, Homo Sapiens
KTHTRTHTGKTSEKPF

SEQ ID NO: 19479 - protein, 16 aa, Homo Sapiens
THTRTHTGKTSEKPFS

SEQ ID NO: 19480 - protein, 16 aa, Homo Sapiens
HTRTHTGKTSEKPFSC

SEQ ID NO: 19481 - protein, 16 aa, Homo Sapiens
TRTHTGKTSEKPFSCR

SEQ ID NO: 19482 - protein, 16 aa, Homo Sapiens
RTHTGKTSEKPFSCRW

SEQ ID NO: 19483 - protein, 16 aa, Homo Sapiens
THTGKTSEKPFSCRWP

SEQ ID NO: 19484 - protein, 16 aa, Homo Sapiens
HTGKTSEKPFSCRWPS

SEQ ID NO: 19485 - protein, 16 aa, Homo Sapiens
TGKTSEKPFSCRWPSC

SEQ ID NO: 19486 - protein, 16 aa, Homo Sapiens
GKTSEKPFSCRWPSCQ

SEQ ID NO: 19487 - protein, 16 aa, Homo Sapiens
KTSEKPFSCRWPSCQK

SEQ ID NO: 19488 - protein, 16 aa, Homo Sapiens
TSEKPFSCRWPSCQKK

SEQ ID NO: 19489 - protein, 16 aa, Homo Sapiens
SEKPFSCRWPSCQKKF

SEQ ID NO: 19490 - protein, 16 aa, Homo Sapiens
EKPFSCRWPSCQKKFA

SEQ ID NO: 19491 - protein, 16 aa, Homo Sapiens
KPFSCRWPSCQKKFAR

SEQ ID NO: 19492 - protein, 16 aa, Homo Sapiens
PFSCRWPSCQKKFARS

SEQ ID NO: 19493 - protein, 16 aa, Homo Sapiens
FSCRWPSCQKKFARSD

SEQ ID NO: 19494 - protein, 16 aa, Homo Sapiens
SCRWPSCQKKFARSDE

SEQ ID NO: 19495 - protein, 16 aa, Homo Sapiens
CRWPSCQKKFARSDEL

SEQ ID NO: 19496 - protein, 16 aa, Homo Sapiens
RWPSCQKKFARSDELV

SEQ ID NO: 19497 - protein, 16 aa, Homo Sapiens
WPSCQKKFARSDELVR

SEQ ID NO: 19498 - protein, 16 aa, Homo Sapiens
PSCQKKFARSDELVRH

SEQ ID NO: 19499 - protein, 16 aa, Homo Sapiens
SCQKKFARSDELVRHH

SEQ ID NO: 19500 - protein, 16 aa, Homo Sapiens
CQKKFARSDELVRHHN

SEQ ID NO: 19501 - protein, 16 aa, Homo Sapiens
QKKFARSDELVRHHNM

SEQ ID NO: 19502 - protein, 16 aa, Homo Sapiens
KKFARSDELVRHHNMH

SEQ ID NO: 19503 - protein, 16 aa, Homo Sapiens
KFARSDELVRHHNMHQ

SEQ ID NO: 19504 - protein, 16 aa, Homo Sapiens
FARSDELVRHHNMHQR

SEQ ID NO: 19505 - protein, 16 aa, Homo Sapiens
ARSDELVRHHNMHQRN

SEQ ID NO: 19506 - protein, 16 aa, Homo Sapiens
RSDELVRHHNMHQRNM

SEQ ID NO: 19507 - protein, 16 aa, Homo Sapiens
SDELVRHHNMHQRNMT

SEQ ID NO: 19508 - protein, 16 aa, Homo Sapiens
DELVRHHNMHQRNMTK

SEQ ID NO: 19509 - protein, 16 aa, Homo Sapiens
ELVRHHNMHQRNMTKL

SEQ ID NO: 19510 - protein, 16 aa, Homo Sapiens
LVRHHNMHQRNMTKLQ

SEQ ID NO: 19511 - protein, 16 aa, Homo Sapiens
VRHHNMHQRNMTKLQL

SEQ ID NO: 19512 - protein, 16 aa, Homo Sapiens
RHHNMHQRNMTKLQLA

SEQ ID NO: 19513 - protein, 16 aa, Homo Sapiens
HHNMHQRNMTKLQLAL

SEQ ID NO: 19514 - protein, 2752 aa, Homo Sapiens
MYNGIGLPTPRGSGTNGYVQRNLSLVRGRRGERPDYKGEEELRRLEAALVKRPNPDILDHERKRRVELRCLELEEMMEEQGYEEQQIQEKVATFRLMLLEKDVNPGGKEETPGQRPAVTETHQLAELNEKKNERLRAAFGISDSYVDGSSFDPQRRAREAKQPAPEPPKPYSLVRESSSSRSPTPKQKKKKKKKDRGRRSESSSPRRERKKSSKKKKHRSESESKKRKHRSPTPKSKRKSKDKKRKRSRSTTPAPKSRRAHRSTSADSASSSDTSRSRSRSAAAKTHTTALAGRSPSPASGRRGEGDAPFSEPGTTSTQRPSSPETATKQPSSPYEDKDKDKKEKSATRPSPSPERSSTGPEPPAPTPLLAERHGGSPQPLATTPLSQEPVNPPSEASPTRDRSPPKSPEKLPQSSSSESSPPSPQPTKVSRHASSSPESPKPAPAPGSHREISSSPTSKNRSHGRAKRDKSHSHTPSRRMGRSRSPATAKRGRSRSRTPTKRGHSRSRSPQWRRSRSAQRWGRSRSPQRRGRSRSPQRPGWSRSRNTQRRGRSRSARRGRSHSRSPATRGRSRSRTPARRGRSRSRTPARRRSRSRTPTRRRSRSRTPARRGRSRSRTPARRRSRTRSPVRRRSRSRSPARRSGRSRSRTPARRGRSRSRTPARRGRSRSRTPARRSGRSRSRTPARRGRSRSRTPRRGRSRSRSLVRRGRSHSRTPQRRGRSGSSSERKNKSRTSQRRSRSNSSPEMKKSRISSRRSRSLSSPRSKAKSRLSLRRSLSGSSPCPKQKSQTPPRRSRSGSSQPKAKSRTPPRRSRSSSSPPPKQKSKTPSRQSHSSSSPHPKVKSGTPPRQGSITSPQANEQSVTPQRRSCFESSPDPELKSRTPSRHSCSGSSPPRVKSSTPPRQSPSRSSSPQPKVKAIISPRQRSHSGSSSPSPSRVTSRTTPRRSRSVSPCSNVESRLLPRYSHSGSSSPDTKVKPETPPRQSHSGSISPYPKVKAQTPPGPSLSGSKSPCPQEKSKDSLVQSCPGSLSLCAGVKSSTPPGESYFGVSSLQLKGQSQTSPDHRSDTSSPEVRQSHSESPSLQSKSQTSPKGGRSRSSSPVTELASRSPIRQDRGEFSASPMLKSGMSPEQSRFQSDSSSYPTVDSNSLLGQSRLETAESKEKMALPPQEDATASPPRQKDKFSPFPVQDRPESSLVFKDTLRTPPRERSGAGSSPETKEQNSALPTSSQDEELMEVVEKSEEPAGQILSHLSSELKEMSTSNFESSPEVEERPAVSLTLDQSQSQASLEAVEVPSMASSWGGPHFSPEHKELSNSPLRENSFGSPLEFRNSGPLGTEMNTGFSSEVKEDLNGPFLNQLETDPSLDMKEQSTRSSGHSSSELSPDAVEKAGMSSNQSISSPVLDAVPRTPSRERSSSASSPEMKDGLPRTPSRRSRSGSSPGLRDGSGTPSRHSLSGSSPGMKDIPRTPFRGRSECDSSPEPKALPQTPRPRSRSPSSPELNNKCLTPQRERSGSESSVDQKTVARTPLGQRSRSGSSQELDVKPSASPQERSESDSSPDSKAKTRTPLRQRSRSGSSPEVDSKSRLSPRRSRSGSSPEVKDKPRAAPRAQSGSDSSPEPKAPAPRALPRRSRSGSSSKGRGPSPEGSSSTESSPEHPPKSRTARRGSRSSPEPKTKSRTPPRRRSSRSSPELTRKARLSRRSRSASSSPETRSRTPPRHRRSPSVSSPEPAEKSRSSRRRRSASSPRTKTTSRRGRSPSPKPRGLQRSRSRSRREKTRTTRRRDRSGSSQSTSRRRQRSRSRSRVTRRRRGGSGYHSRSPARQESSRTSSRRRRGRSRTPPTSRKRSRSRTSPAPWKRSRSRASPATHRRSRSRTPLISRRRSRSRTSPVSRRRSRSRTSVTRRRSRSRASPVSRRRSRSRTPPVTRRRSRSRTPTTRRRSRSRTPPVTRRRSRSRTPPVTRRRSRSRTSPITRRRSRSRTSPVTRRRSRSRTSPVTRRRSRSRTSPVTRRRSRSRTPPAIRRRSRSRTPLLPRKRSRSRSPLAIRRRSRSRTPRTARGKRSLTRSPPAIRRRSASGSSSDRSRSATPPATRNHSGSRTPPVALNSSRMSCFSRPSMSPTPLDRCRSPGMLEPLGSSRTPMSVLQQAGGSMMDGPGPRIPDHQRTSVPENHAQSRIALALTAISLGTARPPPSMSAAGLAARMSQVPAPVPLMSLRTAPAANLASRIPAASAAAMNLASARTPAIPTAVNLADSRTPAAAAAMNLASPRTAVAPSAVNLADPRTPTAPAVNLAGARTPAALAALSLTGSGTPPTAANYPSSSRTPQAPASANLVGPRSAHATAPVNIAGSRTAAALAPASLTSARMAPALSGANLTSPRVPLSAYERVSGRTSPPLLDRARSRTPPSAPSQSRMTSERAPSPSSRMGQAPSQSLLPPAQDQPRSPVPSAFSDQSRCLIAQTTPVAGSQSLSSGAVATTTSSAGDHNGMLSVPAPGVPHSDVGEPPASTGAQQPSALAALQPAKERRSSSSSSSSSSSSSSSSSSSSSSSSSGSSSSDSEGSSLPVQPEVALKRVPSPTPAPKEAVREGRPPEPTPAKRKRRSSSSSSSSSSSSSSSSSSSSSSSSSSSSSSSSSSSSSSSSSSPSPAKPGPQALPKPASPKKPPPGERRSRSPRKPIDSLRDSRSLSYSPVERRRPSPQPSPRDQQSSSSERGSRRGQRGDSRSPSHKRRRETPSPRPMRHRSSRSP

SEQ ID NO: 19515 - protein, 8 aa, Homo Sapiens
GIGLPTPR

SEQ ID NO: 19516 - protein, 8 aa, Homo Sapiens
LPTPRGSG

SEQ ID NO: 19517 - protein, 8 aa, Homo Sapiens
RGSGTNGY

SEQ ID NO: 19518 - protein, 8 aa, Homo Sapiens
GTNGYVQR

SEQ ID NO: 19519 - protein, 8 aa, Homo Sapiens
YVQRNLSL

SEQ ID NO: 19520 - protein, 8 aa, Homo Sapiens
VQRNLSLV

SEQ ID NO: 19521 - protein, 8 aa, Homo Sapiens
QRNLSLVR

SEQ ID NO: 19522 - protein, 8 aa, Homo Sapiens
NLSLVRGR

SEQ ID NO: 19523 - protein, 8 aa, Homo Sapiens
LSLVRGRR

SEQ ID NO: 19524 - protein, 8 aa, Homo Sapiens
RRGERPDY

SEQ ID NO: 19525 - protein, 8 aa, Homo Sapiens
DYKGEEEL

SEQ ID NO: 19526 - protein, 8 aa, Homo Sapiens
GEEELRRL

SEQ ID NO: 19527 - protein, 8 aa, Homo Sapiens
EELRRLEA

SEQ ID NO: 19528 - protein, 8 aa, Homo Sapiens
ELRRLEAA

SEQ ID NO: 19529 - protein, 8 aa, Homo Sapiens
RRLEAALV

SEQ ID NO: 19530 - protein, 8 aa, Homo Sapiens
RLEAALVK

SEQ ID NO: 19531 - protein, 8 aa, Homo Sapiens
ERKRRVEL

SEQ ID NO: 19532 - protein, 8 aa, Homo Sapiens
RRVELRCL

SEQ ID NO: 19533 - protein, 8 aa, Homo Sapiens
VELRCLEL

SEQ ID NO: 19534 - protein, 8 aa, Homo Sapiens
EEMMEEQG

SEQ ID NO: 19535 - protein, 8 aa, Homo Sapiens
EMMEEQGY

SEQ ID NO: 19536 - protein, 8 aa, Homo Sapiens
IQEKVATF

SEQ ID NO: 19537 - protein, 8 aa, Homo Sapiens
EKVATFRL

SEQ ID NO: 19538 - protein, 8 aa, Homo Sapiens
KVATFRLM

SEQ ID NO: 19539 - protein, 8 aa, Homo Sapiens
VATFRLML

SEQ ID NO: 19540 - protein, 8 aa, Homo Sapiens
ATFRLMLL

SEQ ID NO: 19541 - protein, 8 aa, Homo Sapiens
FRLMLLEK

SEQ ID NO: 19542 - protein, 8 aa, Homo Sapiens
LMLLEKDV

SEQ ID NO: 19543 - protein, 8 aa, Homo Sapiens
ETPGQRPA

SEQ ID NO: 19544 - protein, 8 aa, Homo Sapiens
TPGQRPAV

SEQ ID NO: 19545 - protein, 8 aa, Homo Sapiens
AVTETHQL

SEQ ID NO: 19546 - protein, 8 aa, Homo Sapiens
ETHQLAEL

SEQ ID NO: 19547 - protein, 8 aa, Homo Sapiens
QLAELNEK

SEQ ID NO: 19548 - protein, 8 aa, Homo Sapiens
NERLRAAF

SEQ ID NO: 19549 - protein, 8 aa, Homo Sapiens
RLRAAFGI

SEQ ID NO: 19550 - protein, 8 aa, Homo Sapiens
FGISDSYV

SEQ ID NO: 19551 - protein, 8 aa, Homo Sapiens
SYVDGSSF

SEQ ID NO: 19552 - protein, 8 aa, Homo Sapiens
GSSFDPQR

SEQ ID NO: 19553 - protein, 8 aa, Homo Sapiens
SSFDPQRR

SEQ ID NO: 19554 - protein, 8 aa, Homo Sapiens
QRRAREAK

SEQ ID NO: 19555 - protein, 8 aa, Homo Sapiens
RRAREAKQ

SEQ ID NO: 19556 - protein, 8 aa, Homo Sapiens
APEPPKPY

SEQ ID NO: 19557 - protein, 8 aa, Homo Sapiens
EPPKPYSL

SEQ ID NO: 19558 - protein, 8 aa, Homo Sapiens
SSRSPTPK

SEQ ID NO: 19559 - protein, 8 aa, Homo Sapiens
RSPTPKQK

SEQ ID NO: 19560 - protein, 8 aa, Homo Sapiens
KQKKKKKK

SEQ ID NO: 19561 - protein, 8 aa, Homo Sapiens
KKKDRGRR

SEQ ID NO: 19562 - protein, 8 aa, Homo Sapiens
RRSESSSP

SEQ ID NO: 19563 - protein, 8 aa, Homo Sapiens
RSESSSPR

SEQ ID NO: 19564 - protein, 8 aa, Homo Sapiens
SSSPRRER

SEQ ID NO: 19565 - protein, 8 aa, Homo Sapiens
SSPRRERK

SEQ ID NO: 19566 - protein, 8 aa, Homo Sapiens
SPRRERKK

SEQ ID NO: 19567 - protein, 8 aa, Homo Sapiens
RERKKSSK

SEQ ID NO: 19568 - protein, 8 aa, Homo Sapiens
RKKSSKKK

SEQ ID NO: 19569 - protein, 8 aa, Homo Sapiens
SSKKKKHR

SEQ ID NO: 19570 - protein, 8 aa, Homo Sapiens
HRSESESK

SEQ ID NO: 19571 - protein, 8 aa, Homo Sapiens
RSESESKK

SEQ ID NO: 19572 - protein, 8 aa, Homo Sapiens
ESKKRKHR

SEQ ID NO: 19573 - protein, 8 aa, Homo Sapiens
KHRSPTPK

SEQ ID NO: 19574 - protein, 8 aa, Homo Sapiens
RSPTPKSK

SEQ ID NO: 19575 - protein, 8 aa, Homo Sapiens
SKRKSKDK

SEQ ID NO: 19576 - protein, 8 aa, Homo Sapiens
KRKSKDKK

SEQ ID NO: 19577 - protein, 8 aa, Homo Sapiens
KSKDKKRK

SEQ ID NO: 19578 - protein, 8 aa, Homo Sapiens
DKKRKRSR

SEQ ID NO: 19579 - protein, 8 aa, Homo Sapiens
RSRSTTPA

SEQ ID NO: 19580 - protein, 8 aa, Homo Sapiens
RSTTPAPK

SEQ ID NO: 19581 - protein, 8 aa, Homo Sapiens
TTPAPKSR

SEQ ID NO: 19582 - protein, 8 aa, Homo Sapiens
TPAPKSRR

SEQ ID NO: 19583 - protein, 8 aa, Homo Sapiens
APKSRRAH

SEQ ID NO: 19584 - protein, 8 aa, Homo Sapiens
KSRRAHRS

SEQ ID NO: 19585 - protein, 8 aa, Homo Sapiens
RRAHRSTS

SEQ ID NO: 19586 - protein, 8 aa, Homo Sapiens
RAHRSTSA

SEQ ID NO: 19587 - protein, 8 aa, Homo Sapiens
ASSSDTSR

SEQ ID NO: 19588 - protein, 8 aa, Homo Sapiens
DTSRSRSR

SEQ ID NO: 19589 - protein, 8 aa, Homo Sapiens
RSRSRSAA

SEQ ID NO: 19590 - protein, 8 aa, Homo Sapiens
RSRSAAAK

SEQ ID NO: 19591 - protein, 8 aa, Homo Sapiens
KTHTTALA

SEQ ID NO: 19592 - protein, 8 aa, Homo Sapiens
HTTALAGR

SEQ ID NO: 19593 - protein, 8 aa, Homo Sapiens
ALAGRSPS

SEQ ID NO: 19594 - protein, 8 aa, Homo Sapiens
SPSPASGR

SEQ ID NO: 19595 - protein, 8 aa, Homo Sapiens
RPSSPETA

SEQ ID NO: 19596 - protein, 8 aa, Homo Sapiens
SSPETATK

SEQ ID NO: 19597 - protein, 8 aa, Homo Sapiens
ETATKQPS

SEQ ID NO: 19598 - protein, 8 aa, Homo Sapiens
KDKDKKEK

SEQ ID NO: 19599 - protein, 8 aa, Homo Sapiens
ATRPSPSP

SEQ ID NO: 19600 - protein, 8 aa, Homo Sapiens
EPPAPTPL

SEQ ID NO: 19601 - protein, 8 aa, Homo Sapiens
QPLATTPL

SEQ ID NO: 19602 - protein, 8 aa, Homo Sapiens
TPLSQEPV

SEQ ID NO: 19603 - protein, 8 aa, Homo Sapiens
EASPTRDR

SEQ ID NO: 19604 - protein, 8 aa, Homo Sapiens
SSSPESPK

SEQ ID NO: 19605 - protein, 8 aa, Homo Sapiens
SPESPKPA

SEQ ID NO: 19606 - protein, 8 aa, Homo Sapiens
ESPKPAPA

SEQ ID NO: 19607 - protein, 8 aa, Homo Sapiens
APGSHREI

SEQ ID NO: 19608 - protein, 8 aa, Homo Sapiens
REISSSPT

SEQ ID NO: 19609 - protein, 8 aa, Homo Sapiens
ISSSPTSK

SEQ ID NO: 19610 - protein, 8 aa, Homo Sapiens
SSPTSKNR

SEQ ID NO: 19611 - protein, 8 aa, Homo Sapiens
RSHGRAKR

SEQ ID NO: 19612 - protein, 8 aa, Homo Sapiens
HGRAKRDK

SEQ ID NO: 19613 - protein, 8 aa, Homo Sapiens
KSHSHTPS

SEQ ID NO: 19614 - protein, 8 aa, Homo Sapiens
HSHTPSRR

SEQ ID NO: 19615 - protein, 8 aa, Homo Sapiens
TPSRRMGR

SEQ ID NO: 19616 - protein, 8 aa, Homo Sapiens
RRMGRSRS

SEQ ID NO: 19617 - protein, 8 aa, Homo Sapiens
MGRSRSPA

SEQ ID NO: 19618 - protein, 8 aa, Homo Sapiens
RSRSPATA

SEQ ID NO: 19619 - protein, 8 aa, Homo Sapiens
RSPATAKR

SEQ ID NO: 19620 - protein, 8 aa, Homo Sapiens
TAKRGRSR

SEQ ID NO: 19621 - protein, 8 aa, Homo Sapiens
KRGRSRSR

SEQ ID NO: 19622 - protein, 8 aa, Homo Sapiens
RSRSRTPT

SEQ ID NO: 19623 - protein, 8 aa, Homo Sapiens
RSRTPTKR

SEQ ID NO: 19624 - protein, 8 aa, Homo Sapiens
PTKRGHSR

SEQ ID NO: 19625 - protein, 8 aa, Homo Sapiens
KRGHSRSR

SEQ ID NO: 19626 - protein, 8 aa, Homo Sapiens
RSRSPQWR

SEQ ID NO: 19627 - protein, 8 aa, Homo Sapiens
SPQWRRSR

SEQ ID NO: 19628 - protein, 8 aa, Homo Sapiens
RRSRSAQR

SEQ ID NO: 19629 - protein, 8 aa, Homo Sapiens
RSRSAQRW

SEQ ID NO: 19630 - protein, 8 aa, Homo Sapiens
RSAQRWGR

SEQ ID NO: 19631 - protein, 8 aa, Homo Sapiens
AQRWGRSR

SEQ ID NO: 19632 - protein, 8 aa, Homo Sapiens
QRWGRSRS

SEQ ID NO: 19633 - protein, 8 aa, Homo Sapiens
RSRSPQRR

SEQ ID NO: 19634 - protein, 8 aa, Homo Sapiens
RSPQRRGR

SEQ ID NO: 19635 - protein, 8 aa, Homo Sapiens
SPQRRGRS

SEQ ID NO: 19636 - protein, 8 aa, Homo Sapiens
RGRSRSPQ

SEQ ID NO: 19637 - protein, 8 aa, Homo Sapiens
RSPQRPGW

SEQ ID NO: 19638 - protein, 8 aa, Homo Sapiens
RPGWSRSR

SEQ ID NO: 19639 - protein, 8 aa, Homo Sapiens
RSRNTQRR

SEQ ID NO: 19640 - protein, 8 aa, Homo Sapiens
RNTQRRGR

SEQ ID NO: 19641 - protein, 8 aa, Homo Sapiens
TQRRGRSR

SEQ ID NO: 19642 - protein, 8 aa, Homo Sapiens
RGRSRSAR

SEQ ID NO: 19643 - protein, 8 aa, Homo Sapiens
RRGRSHSR

SEQ ID NO: 19644 - protein, 8 aa, Homo Sapiens
RSHSRSPA

SEQ ID NO: 19645 - protein, 8 aa, Homo Sapiens
HSRSPATR

SEQ ID NO: 19646 - protein, 8 aa, Homo Sapiens
RSPATRGR

SEQ ID NO: 19647 - protein, 8 aa, Homo Sapiens
SPATRGRS

SEQ ID NO: 19648 - protein, 8 aa, Homo Sapiens
RSRSRTPA

SEQ ID NO: 19649 - protein, 8 aa, Homo Sapiens
RSRTPARR

SEQ ID NO: 19650 - protein, 8 aa, Homo Sapiens
RTPARRGR

SEQ ID NO: 19651 - protein, 8 aa, Homo Sapiens
RRGRSRSR

SEQ ID NO: 19652 - protein, 8 aa, Homo Sapiens
RSRSRTPA

SEQ ID NO: 19653 - protein, 8 aa, Homo Sapiens
RSRTPARR

SEQ ID NO: 19654 - protein, 8 aa, Homo Sapiens
TPARRRSR

SEQ ID NO: 19655 - protein, 8 aa, Homo Sapiens
ARRRSRSR

SEQ ID NO: 19656 - protein, 8 aa, Homo Sapiens
RSRSRTPT

SEQ ID NO: 19657 - protein, 8 aa, Homo Sapiens
RSRTPTRR

SEQ ID NO: 19658 - protein, 8 aa, Homo Sapiens
TPTRRRSR

SEQ ID NO: 19659 - protein, 8 aa, Homo Sapiens
RSRSRTPA

SEQ ID NO: 19660 - protein, 8 aa, Homo Sapiens
RSRTPARR

SEQ ID NO: 19661 - protein, 8 aa, Homo Sapiens
RTPARRGR

SEQ ID NO: 19662 - protein, 8 aa, Homo Sapiens
RRGRSRSR

SEQ ID NO: 19663 - protein, 8 aa, Homo Sapiens
RSRSRTPA

SEQ ID NO: 19664 - protein, 8 aa, Homo Sapiens
RSRTPARR

SEQ ID NO: 19665 - protein, 8 aa, Homo Sapiens
TPARRRSR

SEQ ID NO: 19666 - protein, 8 aa, Homo Sapiens
ARRRSRTR

SEQ ID NO: 19667 - protein, 8 aa, Homo Sapiens
RSRTRSPV

SEQ ID NO: 19668 - protein, 8 aa, Homo Sapiens
RTRSPVRR

SEQ ID NO: 19669 - protein, 8 aa, Homo Sapiens
SPVRRRSR

SEQ ID NO: 19670 - protein, 8 aa, Homo Sapiens
RRSRSRSP

SEQ ID NO: 19671 - protein, 8 aa, Homo Sapiens
RSRSRSPA

SEQ ID NO: 19672 - protein, 8 aa, Homo Sapiens
RSRSPARR

SEQ ID NO: 19673 - protein, 8 aa, Homo Sapiens
SPARRSGR

SEQ ID NO: 19674 - protein, 8 aa, Homo Sapiens
RRSGRSRS

SEQ ID NO: 19675 - protein, 8 aa, Homo Sapiens
RSGRSRSR

SEQ ID NO: 19676 - protein, 8 aa, Homo Sapiens
RSRSRTPA

SEQ ID NO: 19677 - protein, 8 aa, Homo Sapiens
RSRTPARR

SEQ ID NO: 19678 - protein, 8 aa, Homo Sapiens
RTPARRGR

SEQ ID NO: 19679 - protein, 8 aa, Homo Sapiens
RRGRSRSR

SEQ ID NO: 19680 - protein, 8 aa, Homo Sapiens
RSRSRTPA

SEQ ID NO: 19681 - protein, 8 aa, Homo Sapiens
RSRTPARR

SEQ ID NO: 19682 - protein, 8 aa, Homo Sapiens
RTPARRGR

SEQ ID NO: 19683 - protein, 8 aa, Homo Sapiens
RRGRSRSR

SEQ ID NO: 19684 - protein, 8 aa, Homo Sapiens
RSRSRTPA

SEQ ID NO: 19685 - protein, 8 aa, Homo Sapiens
RSRTPARR

SEQ ID NO: 19686 - protein, 8 aa, Homo Sapiens
TPARRSGR

SEQ ID NO: 19687 - protein, 8 aa, Homo Sapiens
RRSGRSRS

SEQ ID NO: 19688 - protein, 8 aa, Homo Sapiens
RSGRSRSR

SEQ ID NO: 19689 - protein, 8 aa, Homo Sapiens
RSRSRTPA

SEQ ID NO: 19690 - protein, 8 aa, Homo Sapiens
RSRTPARR

SEQ ID NO: 19691 - protein, 8 aa, Homo Sapiens
RTPARRGR

SEQ ID NO: 19692 - protein, 8 aa, Homo Sapiens
RRGRSRSR

SEQ ID NO: 19693 - protein, 8 aa, Homo Sapiens
RSRSRTPR

SEQ ID NO: 19694 - protein, 8 aa, Homo Sapiens
TPRRGRSR

SEQ ID NO: 19695 - protein, 8 aa, Homo Sapiens
RRGRSRSR

SEQ ID NO: 19696 - protein, 8 aa, Homo Sapiens
GRSRSRSL

SEQ ID NO: 19697 - protein, 8 aa, Homo Sapiens
RSRSRSLV

SEQ ID NO: 19698 - protein, 8 aa, Homo Sapiens
RSRSLVRR

SEQ ID NO: 19699 - protein, 8 aa, Homo Sapiens
RSLVRRGR

SEQ ID NO: 19700 - protein, 8 aa, Homo Sapiens
RRGRSHSR

SEQ ID NO: 19701 - protein, 8 aa, Homo Sapiens
RSHSRTPQ

SEQ ID NO: 19702 - protein, 8 aa, Homo Sapiens
HSRTPQRR

SEQ ID NO: 19703 - protein, 8 aa, Homo Sapiens
RTPQRRGR

SEQ ID NO: 19704 - protein, 8 aa, Homo Sapiens
RSGSSSER

SEQ ID NO: 19705 - protein, 8 aa, Homo Sapiens
SSSERKNK

SEQ ID NO: 19706 - protein, 8 aa, Homo Sapiens
KSRTSQRR

SEQ ID NO: 19707 - protein, 8 aa, Homo Sapiens
RTSQRRSR

SEQ ID NO: 19708 - protein, 8 aa, Homo Sapiens
RSNSSPEM

SEQ ID NO: 19709 - protein, 8 aa, Homo Sapiens
NSSPEMKK

SEQ ID NO: 19710 - protein, 8 aa, Homo Sapiens
KSRISSRR

SEQ ID NO: 19711 - protein, 8 aa, Homo Sapiens
RISSRRSR

SEQ ID NO: 19712 - protein, 8 aa, Homo Sapiens
SSRRSRSL

SEQ ID NO: 19713 - protein, 8 aa, Homo Sapiens
RRSRSLSS

SEQ ID NO: 19714 - protein, 8 aa, Homo Sapiens
SLSSPRSK

SEQ ID NO: 19715 - protein, 8 aa, Homo Sapiens
SSPRSKAK

SEQ ID NO: 19716 - protein, 8 aa, Homo Sapiens
SPRSKAKS

SEQ ID NO: 19717 - protein, 8 aa, Homo Sapiens
KAKSRLSL

SEQ ID NO: 19718 - protein, 8 aa, Homo Sapiens
KSRLSLRR

SEQ ID NO: 19719 - protein, 8 aa, Homo Sapiens
RLSLRRSL

SEQ ID NO: 19720 - protein, 8 aa, Homo Sapiens
SLSGSSPC

SEQ ID NO: 19721 - protein, 8 aa, Homo Sapiens
SGSSPCPK

SEQ ID NO: 19722 - protein, 8 aa, Homo Sapiens
SSPCPKQK

SEQ ID NO: 19723 - protein, 8 aa, Homo Sapiens
KSQTPPRR

SEQ ID NO: 19724 - protein, 8 aa, Homo Sapiens
QTPPRRSR

SEQ ID NO: 19725 - protein, 8 aa, Homo Sapiens
PPRRSRSG

SEQ ID NO: 19726 - protein, 8 aa, Homo Sapiens
RSRSGSSQ

SEQ ID NO: 19727 - protein, 8 aa, Homo Sapiens
RSGSSQPK

SEQ ID NO: 19728 - protein, 8 aa, Homo Sapiens
GSSQPKAK

SEQ ID NO: 19729 - protein, 8 aa, Homo Sapiens
KSRTPPRR

SEQ ID NO: 19730 - protein, 8 aa, Homo Sapiens
RTPPRRSR

SEQ ID NO: 19731 - protein, 8 aa, Homo Sapiens
PPRRSRSS

SEQ ID NO: 19732 - protein, 8 aa, Homo Sapiens
RRSRSSSS

SEQ ID NO: 19733 - protein, 8 aa, Homo Sapiens
RSRSSSSP

SEQ ID NO: 19734 - protein, 8 aa, Homo Sapiens
SSSSPPPK

SEQ ID NO: 19735 - protein, 8 aa, Homo Sapiens
SSPPPKQK

SEQ ID NO: 19736 - protein, 8 aa, Homo Sapiens
SSSSPHPK

SEQ ID NO: 19737 - protein, 8 aa, Homo Sapiens
SSSPHPKV

SEQ ID NO: 19738 - protein, 8 aa, Homo Sapiens
SSPHPKVK

SEQ ID NO: 19739 - protein, 8 aa, Homo Sapiens
KVKSGTPP

SEQ ID NO: 19740 - protein, 8 aa, Homo Sapiens
TPPRQGSI

SEQ ID NO: 19741 - protein, 8 aa, Homo Sapiens
EQSVTPQR

SEQ ID NO: 19742 - protein, 8 aa, Homo Sapiens
QSVTPQRR

SEQ ID NO: 19743 - protein, 8 aa, Homo Sapiens
TPQRRSCF

SEQ ID NO: 19744 - protein, 8 aa, Homo Sapiens
ESSPDPEL

SEQ ID NO: 19745 - protein, 8 aa, Homo Sapiens
SSPDPELK

SEQ ID NO: 19746 - protein, 8 aa, Homo Sapiens
CSGSSPPR

SEQ ID NO: 19747 - protein, 8 aa, Homo Sapiens
GSSPPRVK

SEQ ID NO: 19748 - protein, 8 aa, Homo Sapiens
PPRVKSST

SEQ ID NO: 19749 - protein, 8 aa, Homo Sapiens
RVKSSTPP

SEQ ID NO: 19750 - protein, 8 aa, Homo Sapiens
SPSRSSSP

SEQ ID NO: 19751 - protein, 8 aa, Homo Sapiens
RSSSPQPK

SEQ ID NO: 19752 - protein, 8 aa, Homo Sapiens
SSPQPKVK

SEQ ID NO: 19753 - protein, 8 aa, Homo Sapiens
QPKVKAII

SEQ ID NO: 19754 - protein, 8 aa, Homo Sapiens
AIISPRQR

SEQ ID NO: 19755 - protein, 8 aa, Homo Sapiens
SPRQRSHS

SEQ ID NO: 19756 - protein, 8 aa, Homo Sapiens
SSSPSPSR

SEQ ID NO: 19757 - protein, 8 aa, Homo Sapiens
SSPSPSRV

SEQ ID NO: 19758 - protein, 8 aa, Homo Sapiens
SPSPSRVT

SEQ ID NO: 19759 - protein, 8 aa, Homo Sapiens
SPSRVTSR

SEQ ID NO: 19760 - protein, 8 aa, Homo Sapiens
VTSRTTPR

SEQ ID NO: 19761 - protein, 8 aa, Homo Sapiens
TSRTTPRR

SEQ ID NO: 19762 - protein, 8 aa, Homo Sapiens
RTTPRRSR

SEQ ID NO: 19763 - protein, 8 aa, Homo Sapiens
TPRRSRSV

SEQ ID NO: 19764 - protein, 8 aa, Homo Sapiens
RRSRSVSP

SEQ ID NO: 19765 - protein, 8 aa, Homo Sapiens
SVSPCSNV

SEQ ID NO: 19766 - protein, 8 aa, Homo Sapiens
RLLPRYSH

SEQ ID NO: 19767 - protein, 8 aa, Homo Sapiens
LPRYSHSG

SEQ ID NO: 19768 - protein, 8 aa, Homo Sapiens
GSSSPDTK

SEQ ID NO: 19769 - protein, 8 aa, Homo Sapiens
SSSPDTKV

SEQ ID NO: 19770 - protein, 8 aa, Homo Sapiens
SSPDTKVK

SEQ ID NO: 19771 - protein, 8 aa, Homo Sapiens
ETPPRQSH

SEQ ID NO: 19772 - protein, 8 aa, Homo Sapiens
RQSHSGSI

SEQ ID NO: 19773 - protein, 8 aa, Homo Sapiens
GSISPYPK

SEQ ID NO: 19774 - protein, 8 aa, Homo Sapiens
SISPYPKV

SEQ ID NO: 19775 - protein, 8 aa, Homo Sapiens
SPYPKVKA

SEQ ID NO: 19776 - protein, 8 aa, Homo Sapiens
YPKVKAQT

SEQ ID NO: 19777 - protein, 8 aa, Homo Sapiens
KVKAQTPP

SEQ ID NO: 19778 - protein, 8 aa, Homo Sapiens
QTPPGPSL

SEQ ID NO: 19779 - protein, 8 aa, Homo Sapiens
KSPCPQEK

SEQ ID NO: 19780 - protein, 8 aa, Homo Sapiens
VQSCPGSL

SEQ ID NO: 19781 - protein, 8 aa, Homo Sapiens
SCPGSLSL

SEQ ID NO: 19782 - protein, 8 aa, Homo Sapiens
SLSLCAGV

SEQ ID NO: 19783 - protein, 8 aa, Homo Sapiens
LSLCAGVK

SEQ ID NO: 19784 - protein, 8 aa, Homo Sapiens
STPPGESY

SEQ ID NO: 19785 - protein, 8 aa, Homo Sapiens
TPPGESYF

SEQ ID NO: 19786 - protein, 8 aa, Homo Sapiens
SYFGVSSL

SEQ ID NO: 19787 - protein, 8 aa, Homo Sapiens
GVSSLQLK

SEQ ID NO: 19788 - protein, 8 aa, Homo Sapiens
SQTSPDHR

SEQ ID NO: 19789 - protein, 8 aa, Homo Sapiens
DTSSPEVR

SEQ ID NO: 19790 - protein, 8 aa, Homo Sapiens
SHSESPSL

SEQ ID NO: 19791 - protein, 8 aa, Homo Sapiens
ESPSLQSK

SEQ ID NO: 19792 - protein, 8 aa, Homo Sapiens
SLQSKSQT

SEQ ID NO: 19793 - protein, 8 aa, Homo Sapiens
QTSPKGGR

SEQ ID NO: 19794 - protein, 8 aa, Homo Sapiens
RSRSSSPV

SEQ ID NO: 19795 - protein, 8 aa, Homo Sapiens
SSSPVTEL

SEQ ID NO: 19796 - protein, 8 aa, Homo Sapiens
SPVTELAS

SEQ ID NO: 19797 - protein, 8 aa, Homo Sapiens
ELASRSPI

SEQ ID NO: 19798 - protein, 8 aa, Homo Sapiens
LASRSPIR

SEQ ID NO: 19799 - protein, 8 aa, Homo Sapiens
RSPIRQDR

SEQ ID NO: 19800 - protein, 8 aa, Homo Sapiens
GEFSASPM

SEQ ID NO: 19801 - protein, 8 aa, Homo Sapiens
FSASPMLK

SEQ ID NO: 19802 - protein, 8 aa, Homo Sapiens
SPMLKSGM

SEQ ID NO: 19803 - protein, 8 aa, Homo Sapiens
MLKSGMSP

SEQ ID NO: 19804 - protein, 8 aa, Homo Sapiens
GMSPEQSR

SEQ ID NO: 19805 - protein, 8 aa, Homo Sapiens
FQSDSSSY

SEQ ID NO: 19806 - protein, 8 aa, Homo Sapiens
TVDSNSLL

SEQ ID NO: 19807 - protein, 8 aa, Homo Sapiens
NSLLGQSR

SEQ ID NO: 19808 - protein, 8 aa, Homo Sapiens
SLLGQSRL

SEQ ID NO: 19809 - protein, 8 aa, Homo Sapiens
GQSRLETA

SEQ ID NO: 19810 - protein, 8 aa, Homo Sapiens
RLETAESK

SEQ ID NO: 19811 - protein, 8 aa, Homo Sapiens
ETAESKEK

SEQ ID NO: 19812 - protein, 8 aa, Homo Sapiens
AESKEKMA

SEQ ID NO: 19813 - protein, 8 aa, Homo Sapiens
ESKEKMAL

SEQ ID NO: 19814 - protein, 8 aa, Homo Sapiens
ALPPQEDA

SEQ ID NO: 19815 - protein, 8 aa, Homo Sapiens
LPPQEDAT

SEQ ID NO: 19816 - protein, 8 aa, Homo Sapiens
DATASPPR

SEQ ID NO: 19817 - protein, 8 aa, Homo Sapiens
TASPPRQK

SEQ ID NO: 19818 - protein, 8 aa, Homo Sapiens
DKFSPFPV

SEQ ID NO: 19819 - protein, 8 aa, Homo Sapiens
SPFPVQDR

SEQ ID NO: 19820 - protein, 8 aa, Homo Sapiens
FPVQDRPE

SEQ ID NO: 19821 - protein, 8 aa, Homo Sapiens
RPESSLVF

SEQ ID NO: 19822 - protein, 8 aa, Homo Sapiens
SLVFKDTL

SEQ ID NO: 19823 - protein, 8 aa, Homo Sapiens
LVFKDTLR

SEQ ID NO: 19824 - protein, 8 aa, Homo Sapiens
DTLRTPPR

SEQ ID NO: 19825 - protein, 8 aa, Homo Sapiens
PPRERSGA

SEQ ID NO: 19826 - protein, 8 aa, Homo Sapiens
ETKEQNSA

SEQ ID NO: 19827 - protein, 8 aa, Homo Sapiens
TKEQNSAL

SEQ ID NO: 19828 - protein, 8 aa, Homo Sapiens
ELMEVVEK

SEQ ID NO: 19829 - protein, 8 aa, Homo Sapiens
EEPAGQIL

SEQ ID NO: 19830 - protein, 8 aa, Homo Sapiens
KEMSTSNF

SEQ ID NO: 19831 - protein, 8 aa, Homo Sapiens
SSPEVEER

SEQ ID NO: 19832 - protein, 8 aa, Homo Sapiens
EVEERPAV

SEQ ID NO: 19833 - protein, 8 aa, Homo Sapiens
EERPAVSL

SEQ ID NO: 19834 - protein, 8 aa, Homo Sapiens
RPAVSLTL

SEQ ID NO: 19835 - protein, 8 aa, Homo Sapiens
SLTLDQSQ

SEQ ID NO: 19836 - protein, 8 aa, Homo Sapiens
TLDQSQSQ

SEQ ID NO: 19837 - protein, 8 aa, Homo Sapiens
SQASLEAV

SEQ ID NO: 19838 - protein, 8 aa, Homo Sapiens
ASLEAVEV

SEQ ID NO: 19839 - protein, 8 aa, Homo Sapiens
EAVEVPSM

SEQ ID NO: 19840 - protein, 8 aa, Homo Sapiens
EVPSMASS

SEQ ID NO: 19841 - protein, 8 aa, Homo Sapiens
VPSMASSW

SEQ ID NO: 19842 - protein, 8 aa, Homo Sapiens
SSWGGPHF

SEQ ID NO: 19843 - protein, 8 aa, Homo Sapiens
KELSNSPL

SEQ ID NO: 19844 - protein, 8 aa, Homo Sapiens
ELSNSPLR

SEQ ID NO: 19845 - protein, 8 aa, Homo Sapiens
SPLRENSF

SEQ ID NO: 19846 - protein, 8 aa, Homo Sapiens
SFGSPLEF

SEQ ID NO: 19847 - protein, 8 aa, Homo Sapiens
FGSPLEFR

SEQ ID NO: 19848 - protein, 8 aa, Homo Sapiens
NTGFSSEV

SEQ ID NO: 19849 - protein, 8 aa, Homo Sapiens
TGFSSEVK

SEQ ID NO: 19850 - protein, 8 aa, Homo Sapiens
KEDLNGPF

SEQ ID NO: 19851 - protein, 8 aa, Homo Sapiens
NQLETDPS

SEQ ID NO: 19852 - protein, 8 aa, Homo Sapiens
QLETDPSL

SEQ ID NO: 19853 - protein, 8 aa, Homo Sapiens
ETDPSLDM

SEQ ID NO: 19854 - protein, 8 aa, Homo Sapiens
SLDMKEQS

SEQ ID NO: 19855 - protein, 8 aa, Homo Sapiens
DMKEQSTR

SEQ ID NO: 19856 - protein, 8 aa, Homo Sapiens
STRSSGHS

SEQ ID NO: 19857 - protein, 8 aa, Homo Sapiens
LSPDAVEK

SEQ ID NO: 19858 - protein, 8 aa, Homo Sapiens
DAVEKAGM

SEQ ID NO: 19859 - protein, 8 aa, Homo Sapiens
GMSSNQSI

SEQ ID NO: 19860 - protein, 8 aa, Homo Sapiens
NQSISSPV

SEQ ID NO: 19861 - protein, 8 aa, Homo Sapiens
QSISSPVL

SEQ ID NO: 19862 - protein, 8 aa, Homo Sapiens
SSPVLDAV

SEQ ID NO: 19863 - protein, 8 aa, Homo Sapiens
VLDAVPRT

SEQ ID NO: 19864 - protein, 8 aa, Homo Sapiens
AVPRTPSR

SEQ ID NO: 19865 - protein, 8 aa, Homo Sapiens
SSASSPEM

SEQ ID NO: 19866 - protein, 8 aa, Homo Sapiens
SASSPEMK

SEQ ID NO: 19867 - protein, 8 aa, Homo Sapiens
SPEMKDGL

SEQ ID NO: 19868 - protein, 8 aa, Homo Sapiens
EMKDGLPR

SEQ ID NO: 19869 - protein, 8 aa, Homo Sapiens
RTPSRRSR

SEQ ID NO: 19870 - protein, 8 aa, Homo Sapiens
GLRDGSGT

SEQ ID NO: 19871 - protein, 8 aa, Homo Sapiens
SGSSPGMK

SEQ ID NO: 19872 - protein, 8 aa, Homo Sapiens
GMKDIPRT

SEQ ID NO: 19873 - protein, 8 aa, Homo Sapiens
DIPRTPFR

SEQ ID NO: 19874 - protein, 8 aa, Homo Sapiens
KALPQTPR

SEQ ID NO: 19875 - protein, 8 aa, Homo Sapiens
QTPRPRSR

SEQ ID NO: 19876 - protein, 8 aa, Homo Sapiens
TPRPRSRS

SEQ ID NO: 19877 - protein, 8 aa, Homo Sapiens
RPRSRSPS

SEQ ID NO: 19878 - protein, 8 aa, Homo Sapiens
SSPELNNK

SEQ ID NO: 19879 - protein, 8 aa, Homo Sapiens
PELNNKCL

SEQ ID NO: 19880 - protein, 8 aa, Homo Sapiens
CLTPQRER

SEQ ID NO: 19881 - protein, 8 aa, Homo Sapiens
SSVDQKTV

SEQ ID NO: 19882 - protein, 8 aa, Homo Sapiens
SVDQKTVA

SEQ ID NO: 19883 - protein, 8 aa, Homo Sapiens
KTVARTPL

SEQ ID NO: 19884 - protein, 8 aa, Homo Sapiens
RSRSGSSQ

SEQ ID NO: 19885 - protein, 8 aa, Homo Sapiens
SSQELDVK

SEQ ID NO: 19886 - protein, 8 aa, Homo Sapiens
ELDVKPSA

SEQ ID NO: 19887 - protein, 8 aa, Homo Sapiens
SSPDSKAK

SEQ ID NO: 19888 - protein, 8 aa, Homo Sapiens
KAKTRTPL

SEQ ID NO: 19889 - protein, 8 aa, Homo Sapiens
KTRTPLRQ

SEQ ID NO: 19890 - protein, 8 aa, Homo Sapiens
SSPEVDSK

SEQ ID NO: 19891 - protein, 8 aa, Homo Sapiens
EVDSKSRL

SEQ ID NO: 19892 - protein, 8 aa, Homo Sapiens
KSRLSPRR

SEQ ID NO: 19893 - protein, 8 aa, Homo Sapiens
RLSPRRSR

SEQ ID NO: 19894 - protein, 8 aa, Homo Sapiens
SPRRSRSG

SEQ ID NO: 19895 - protein, 8 aa, Homo Sapiens
KPRAAPRA

SEQ ID NO: 19896 - protein, 8 aa, Homo Sapiens
APRAQSGS

SEQ ID NO: 19897 - protein, 8 aa, Homo Sapiens
SPEPKAPA

SEQ ID NO: 19898 - protein, 8 aa, Homo Sapiens
EPKAPAPR

SEQ ID NO: 19899 - protein, 8 aa, Homo Sapiens
KAPAPRAL

SEQ ID NO: 19900 - protein, 8 aa, Homo Sapiens
RALPRRSR

SEQ ID NO: 19901 - protein, 8 aa, Homo Sapiens
LPRRSRSG

SEQ ID NO: 19902 - protein, 8 aa, Homo Sapiens
SRSGSSSK

SEQ ID NO: 19903 - protein, 8 aa, Homo Sapiens
SPEGSSST

SEQ ID NO: 19904 - protein, 8 aa, Homo Sapiens
SSPEHPPK

SEQ ID NO: 19905 - protein, 8 aa, Homo Sapiens
HPPKSRTA

SEQ ID NO: 19906 - protein, 8 aa, Homo Sapiens
RTARRGSR

SEQ ID NO: 19907 - protein, 8 aa, Homo Sapiens
SSPEPKTK

SEQ ID NO: 19908 - protein, 8 aa, Homo Sapiens
KTKSRTPP

SEQ ID NO: 19909 - protein, 8 aa, Homo Sapiens
KSRTPPRR

SEQ ID NO: 19910 - protein, 8 aa, Homo Sapiens
RRRSSRSS

SEQ ID NO: 19911 - protein, 8 aa, Homo Sapiens
RRSSRSSP

SEQ ID NO: 19912 - protein, 8 aa, Homo Sapiens
RSSPELTR

SEQ ID NO: 19913 - protein, 8 aa, Homo Sapiens
SSPELTRK

SEQ ID NO: 19914 - protein, 8 aa, Homo Sapiens
SPELTRKA

SEQ ID NO: 19915 - protein, 8 aa, Homo Sapiens
ELTRKARL

SEQ ID NO: 19916 - protein, 8 aa, Homo Sapiens
KARLSRRS

SEQ ID NO: 19917 - protein, 8 aa, Homo Sapiens
ARLSRRSR

SEQ ID NO: 19918 - protein, 8 aa, Homo Sapiens
RRSRSASS

SEQ ID NO: 19919 - protein, 8 aa, Homo Sapiens
RSRSASSS

SEQ ID NO: 19920 - protein, 8 aa, Homo Sapiens
ASSSPETR

SEQ ID NO: 19921 - protein, 8 aa, Homo Sapiens
SSPETRSR

SEQ ID NO: 19922 - protein, 8 aa, Homo Sapiens
SPETRSRT

SEQ ID NO: 19923 - protein, 8 aa, Homo Sapiens
RTPPRHRR

SEQ ID NO: 19924 - protein, 8 aa, Homo Sapiens
PPRHRRSP

SEQ ID NO: 19925 - protein, 8 aa, Homo Sapiens
SPSVSSPE

SEQ ID NO: 19926 - protein, 8 aa, Homo Sapiens
SVSSPEPA

SEQ ID NO: 19927 - protein, 8 aa, Homo Sapiens
SSPEPAEK

SEQ ID NO: 19928 - protein, 8 aa, Homo Sapiens
AEKSRSSR

SEQ ID NO: 19929 - protein, 8 aa, Homo Sapiens
KSRSSRRR

SEQ ID NO: 19930 - protein, 8 aa, Homo Sapiens
RRRRSASS

SEQ ID NO: 19931 - protein, 8 aa, Homo Sapiens
RRSASSPR

SEQ ID NO: 19932 - protein, 8 aa, Homo Sapiens
SASSPRTK

SEQ ID NO: 19933 - protein, 8 aa, Homo Sapiens
SPRTKTTS

SEQ ID NO: 19934 - protein, 8 aa, Homo Sapiens
RTKTTSRR

SEQ ID NO: 19935 - protein, 8 aa, Homo Sapiens
KTTSRRGR

SEQ ID NO: 19936 - protein, 8 aa, Homo Sapiens
RGRSPSPK

SEQ ID NO: 19937 - protein, 8 aa, Homo Sapiens
RSPSPKPR

SEQ ID NO: 19938 - protein, 8 aa, Homo Sapiens
GLQRSRSR

SEQ ID NO: 19939 - protein, 8 aa, Homo Sapiens
RSRSRSRR

SEQ ID NO: 19940 - protein, 8 aa, Homo Sapiens
RSRSRREK

SEQ ID NO: 19941 - protein, 8 aa, Homo Sapiens
RSRREKTR

SEQ ID NO: 19942 - protein, 8 aa, Homo Sapiens
REKTRTTR

SEQ ID NO: 19943 - protein, 8 aa, Homo Sapiens
KTRTTRRR

SEQ ID NO: 19944 - protein, 8 aa, Homo Sapiens
RTTRRRDR

SEQ ID NO: 19945 - protein, 8 aa, Homo Sapiens
GSSQSTSR

SEQ ID NO: 19946 - protein, 8 aa, Homo Sapiens
SSQSTSRR

SEQ ID NO: 19947 - protein, 8 aa, Homo Sapiens
SQSTSRRR

SEQ ID NO: 19948 - protein, 8 aa, Homo Sapiens
STSRRRQR

SEQ ID NO: 19949 - protein, 8 aa, Homo Sapiens
RRQRSRSR

SEQ ID NO: 19950 - protein, 8 aa, Homo Sapiens
RSRSRSRV

SEQ ID NO: 19951 - protein, 8 aa, Homo Sapiens
RSRSRVTR

SEQ ID NO: 19952 - protein, 8 aa, Homo Sapiens
RSRVTRRR

SEQ ID NO: 19953 - protein, 8 aa, Homo Sapiens
RRRGGSGY

SEQ ID NO: 19954 - protein, 8 aa, Homo Sapiens
RRGGSGYH

SEQ ID NO: 19955 - protein, 8 aa, Homo Sapiens
ESSRTSSR

SEQ ID NO: 19956 - protein, 8 aa, Homo Sapiens
SSRTSSRR

SEQ ID NO: 19957 - protein, 8 aa, Homo Sapiens
RTSSRRRR

SEQ ID NO: 19958 - protein, 8 aa, Homo Sapiens
SSRRRRGR

SEQ ID NO: 19959 - protein, 8 aa, Homo Sapiens
RRRRGRSR

SEQ ID NO: 19960 - protein, 8 aa, Homo Sapiens
RRRGRSRT

SEQ ID NO: 19961 - protein, 8 aa, Homo Sapiens
RGRSRTPP

SEQ ID NO: 19962 - protein, 8 aa, Homo Sapiens
RSRTPPTS

SEQ ID NO: 19963 - protein, 8 aa, Homo Sapiens
RTPPTSRK

SEQ ID NO: 19964 - protein, 8 aa, Homo Sapiens
PTSRKRSR

SEQ ID NO: 19965 - protein, 8 aa, Homo Sapiens
RSRSRTSP

SEQ ID NO: 19966 - protein, 8 aa, Homo Sapiens
RSRTSPAP

SEQ ID NO: 19967 - protein, 8 aa, Homo Sapiens
RTSPAPWK

SEQ ID NO: 19968 - protein, 8 aa, Homo Sapiens
TSPAPWKR

SEQ ID NO: 19969 - protein, 8 aa, Homo Sapiens
APWKRSRS

SEQ ID NO: 19970 - protein, 8 aa, Homo Sapiens
RSRASPAT

SEQ ID NO: 19971 - protein, 8 aa, Homo Sapiens
RASPATHR

SEQ ID NO: 19972 - protein, 8 aa, Homo Sapiens
ASPATHRR

SEQ ID NO: 19973 - protein, 8 aa, Homo Sapiens
SPATHRRS

SEQ ID NO: 19974 - protein, 8 aa, Homo Sapiens
RSRSRTPL

SEQ ID NO: 19975 - protein, 8 aa, Homo Sapiens
RTPLISRR

SEQ ID NO: 19976 - protein, 8 aa, Homo Sapiens
LISRRRSR

SEQ ID NO: 19977 - protein, 8 aa, Homo Sapiens
RSRSRTSP

SEQ ID NO: 19978 - protein, 8 aa, Homo Sapiens
RSRTSPVS

SEQ ID NO: 19979 - protein, 8 aa, Homo Sapiens
RTSPVSRR

SEQ ID NO: 19980 - protein, 8 aa, Homo Sapiens
TSPVSRRR

SEQ ID NO: 19981 - protein, 8 aa, Homo Sapiens
SPVSRRRS

SEQ ID NO: 19982 - protein, 8 aa, Homo Sapiens
RSRSRTSV

SEQ ID NO: 19983 - protein, 8 aa, Homo Sapiens
RSRTSVTR

SEQ ID NO: 19984 - protein, 8 aa, Homo Sapiens
RTSVTRRR

SEQ ID NO: 19985 - protein, 8 aa, Homo Sapiens
SVTRRRSR

SEQ ID NO: 19986 - protein, 8 aa, Homo Sapiens
RSRASPVS

SEQ ID NO: 19987 - protein, 8 aa, Homo Sapiens
RASPVSRR

SEQ ID NO: 19988 - protein, 8 aa, Homo Sapiens
SPVSRRRS

SEQ ID NO: 19989 - protein, 8 aa, Homo Sapiens
RSRSRTPP

SEQ ID NO: 19990 - protein, 8 aa, Homo Sapiens
RTPPVTRR

SEQ ID NO: 19991 - protein, 8 aa, Homo Sapiens
PVTRRRSR

SEQ ID NO: 19992 - protein, 8 aa, Homo Sapiens
RSRSRTPT

SEQ ID NO: 19993 - protein, 8 aa, Homo Sapiens
RSRTPTTR

SEQ ID NO: 19994 - protein, 8 aa, Homo Sapiens
RTPTTRRR

SEQ ID NO: 19995 - protein, 8 aa, Homo Sapiens
PTTRRRSR

SEQ ID NO: 19996 - protein, 8 aa, Homo Sapiens
RSRSRTPP

SEQ ID NO: 19997 - protein, 8 aa, Homo Sapiens
RTPPVTRR

SEQ ID NO: 19998 - protein, 8 aa, Homo Sapiens
PVTRRRSR

SEQ ID NO: 19999 - protein, 8 aa, Homo Sapiens
RSRSRTPP

SEQ ID NO: 20000 - protein, 8 aa, Homo Sapiens
RTPPVTRR

SEQ ID NO: 20001 - protein, 8 aa, Homo Sapiens
PVTRRRSR

SEQ ID NO: 20002 - protein, 8 aa, Homo Sapiens
RSRSRTSP

SEQ ID NO: 20003 - protein, 8 aa, Homo Sapiens
RSRTSPIT

SEQ ID NO: 20004 - protein, 8 aa, Homo Sapiens
RTSPITRR

SEQ ID NO: 20005 - protein, 8 aa, Homo Sapiens
TSPITRRR

SEQ ID NO: 20006 - protein, 8 aa, Homo Sapiens
SPITRRRS

SEQ ID NO: 20007 - protein, 8 aa, Homo Sapiens
RSRSRTSP

SEQ ID NO: 20008 - protein, 8 aa, Homo Sapiens
RSRTSPVT

SEQ ID NO: 20009 - protein, 8 aa, Homo Sapiens
RTSPVTRR

SEQ ID NO: 20010 - protein, 8 aa, Homo Sapiens
TSPVTRRR

SEQ ID NO: 20011 - protein, 8 aa, Homo Sapiens
SPVTRRRS

SEQ ID NO: 20012 - protein, 8 aa, Homo Sapiens
PVTRRRSR

SEQ ID NO: 20013 - protein, 8 aa, Homo Sapiens
RSRSRTSP

SEQ ID NO: 20014 - protein, 8 aa, Homo Sapiens
RSRTSPVT

SEQ ID NO: 20015 - protein, 8 aa, Homo Sapiens
RTSPVTRR

SEQ ID NO: 20016 - protein, 8 aa, Homo Sapiens
TSPVTRRR

SEQ ID NO: 20017 - protein, 8 aa, Homo Sapiens
SPVTRRRS

SEQ ID NO: 20018 - protein, 8 aa, Homo Sapiens
PVTRRRSR

SEQ ID NO: 20019 - protein, 8 aa, Homo Sapiens
RSRSRTSP

SEQ ID NO: 20020 - protein, 8 aa, Homo Sapiens
RSRTSPVT

SEQ ID NO: 20021 - protein, 8 aa, Homo Sapiens
RTSPVTRR

SEQ ID NO: 20022 - protein, 8 aa, Homo Sapiens
TSPVTRRR

SEQ ID NO: 20023 - protein, 8 aa, Homo Sapiens
SPVTRRRS

SEQ ID NO: 20024 - protein, 8 aa, Homo Sapiens
PVTRRRSR

SEQ ID NO: 20025 - protein, 8 aa, Homo Sapiens
RSRSRTPP

SEQ ID NO: 20026 - protein, 8 aa, Homo Sapiens
RSRTPPAI

SEQ ID NO: 20027 - protein, 8 aa, Homo Sapiens
RTPPAIRR

SEQ ID NO: 20028 - protein, 8 aa, Homo Sapiens
TPPAIRRR

SEQ ID NO: 20029 - protein, 8 aa, Homo Sapiens
RSRSRTPL

SEQ ID NO: 20030 - protein, 8 aa, Homo Sapiens
SRSRTPLL

SEQ ID NO: 20031 - protein, 8 aa, Homo Sapiens
RTPLLPRK

SEQ ID NO: 20032 - protein, 8 aa, Homo Sapiens
LLPRKRSR

SEQ ID NO: 20033 - protein, 8 aa, Homo Sapiens
LPRKRSRS

SEQ ID NO: 20034 - protein, 8 aa, Homo Sapiens
RSRSRSPL

SEQ ID NO: 20035 - protein, 8 aa, Homo Sapiens
RSRSPLAI

SEQ ID NO: 20036 - protein, 8 aa, Homo Sapiens
RSPLAIRR

SEQ ID NO: 20037 - protein, 8 aa, Homo Sapiens
LAIRRRSR

SEQ ID NO: 20038 - protein, 8 aa, Homo Sapiens
RSRSRTPR

SEQ ID NO: 20039 - protein, 8 aa, Homo Sapiens
RSRTPRTA

SEQ ID NO: 20040 - protein, 8 aa, Homo Sapiens
TPRTARGK

SEQ ID NO: 20041 - protein, 8 aa, Homo Sapiens
TARGKRSL

SEQ ID NO: 20042 - protein, 8 aa, Homo Sapiens
RGKRSLTR

SEQ ID NO: 20043 - protein, 8 aa, Homo Sapiens
SLTRSPPA

SEQ ID NO: 20044 - protein, 8 aa, Homo Sapiens
RSPPAIRR

SEQ ID NO: 20045 - protein, 8 aa, Homo Sapiens
RSRSATPP

SEQ ID NO: 20046 - protein, 8 aa, Homo Sapiens
SATPPATR

SEQ ID NO: 20047 - protein, 8 aa, Homo Sapiens
SRTPPVAL

SEQ ID NO: 20048 - protein, 8 aa, Homo Sapiens
PVALNSSR

SEQ ID NO: 20049 - protein, 8 aa, Homo Sapiens
VALNSSRM

SEQ ID NO: 20050 - protein, 8 aa, Homo Sapiens
SRMSCFSR

SEQ ID NO: 20051 - protein, 8 aa, Homo Sapiens
MSPTPLDR

SEQ ID NO: 20052 - protein, 8 aa, Homo Sapiens
RCRSPGML

SEQ ID NO: 20053 - protein, 8 aa, Homo Sapiens
SPGMLEPL

SEQ ID NO: 20054 - protein, 8 aa, Homo Sapiens
SSRTPMSV

SEQ ID NO: 20055 - protein, 8 aa, Homo Sapiens
PMSVLQQA

SEQ ID NO: 20056 - protein, 8 aa, Homo Sapiens
LQQAGGSM

SEQ ID NO: 20057 - protein, 8 aa, Homo Sapiens
QQAGGSMM

SEQ ID NO: 20058 - protein, 8 aa, Homo Sapiens
SMMDGPGP

SEQ ID NO: 20059 - protein, 8 aa, Homo Sapiens
MMDGPGPR

SEQ ID NO: 20060 - protein, 8 aa, Homo Sapiens
RIPDHQRT

SEQ ID NO: 20061 - protein, 8 aa, Homo Sapiens
SVPENHAQ

SEQ ID NO: 20062 - protein, 8 aa, Homo Sapiens
HAQSRIAL

SEQ ID NO: 20063 - protein, 8 aa, Homo Sapiens
AQSRIALA

SEQ ID NO: 20064 - protein, 8 aa, Homo Sapiens
RIALALTA

SEQ ID NO: 20065 - protein, 8 aa, Homo Sapiens
IALALTAI

SEQ ID NO: 20066 - protein, 8 aa, Homo Sapiens
LALTAISL

SEQ ID NO: 20067 - protein, 8 aa, Homo Sapiens
AISLGTAR

SEQ ID NO: 20068 - protein, 8 aa, Homo Sapiens
TARPPPSM

SEQ ID NO: 20069 - protein, 8 aa, Homo Sapiens
RPPPSMSA

SEQ ID NO: 20070 - protein, 8 aa, Homo Sapiens
SMSAAGLA

SEQ ID NO: 20071 - protein, 8 aa, Homo Sapiens
MSAAGLAA

SEQ ID NO: 20072 - protein, 8 aa, Homo Sapiens
SAAGLAAR

SEQ ID NO: 20073 - protein, 8 aa, Homo Sapiens
GLAARMSQ

SEQ ID NO: 20074 - protein, 8 aa, Homo Sapiens
LAARMSQV

SEQ ID NO: 20075 - protein, 8 aa, Homo Sapiens
MSQVPAPV

SEQ ID NO: 20076 - protein, 8 aa, Homo Sapiens
QVPAPVPL

SEQ ID NO: 20077 - protein, 8 aa, Homo Sapiens
VPAPVPLM

SEQ ID NO: 20078 - protein, 8 aa, Homo Sapiens
APVPLMSL

SEQ ID NO: 20079 - protein, 8 aa, Homo Sapiens
PLMSLRTA

SEQ ID NO: 20080 - protein, 8 aa, Homo Sapiens
SLRTAPAA

SEQ ID NO: 20081 - protein, 8 aa, Homo Sapiens
RTAPAANL

SEQ ID NO: 20082 - protein, 8 aa, Homo Sapiens
TAPAANLA

SEQ ID NO: 20083 - protein, 8 aa, Homo Sapiens
APAANLAS

SEQ ID NO: 20084 - protein, 8 aa, Homo Sapiens
PAANLASR

SEQ ID NO: 20085 - protein, 8 aa, Homo Sapiens
NLASRIPA

SEQ ID NO: 20086 - protein, 8 aa, Homo Sapiens
RIPAASAA

SEQ ID NO: 20087 - protein, 8 aa, Homo Sapiens
IPAASAAA

SEQ ID NO: 20088 - protein, 8 aa, Homo Sapiens
PAASAAAM

SEQ ID NO: 20089 - protein, 8 aa, Homo Sapiens
ASAAAMNL

SEQ ID NO: 20090 - protein, 8 aa, Homo Sapiens
SAAAMNLA

SEQ ID NO: 20091 - protein, 8 aa, Homo Sapiens
AAMNLASA

SEQ ID NO: 20092 - protein, 8 aa, Homo Sapiens
AMNLASAR

SEQ ID NO: 20093 - protein, 8 aa, Homo Sapiens
LASARTPA

SEQ ID NO: 20094 - protein, 8 aa, Homo Sapiens
TPAIPTAV

SEQ ID NO: 20095 - protein, 8 aa, Homo Sapiens
AIPTAVNL

SEQ ID NO: 20096 - protein, 8 aa, Homo Sapiens
IPTAVNLA

SEQ ID NO: 20097 - protein, 8 aa, Homo Sapiens
AVNLADSR

SEQ ID NO: 20098 - protein, 8 aa, Homo Sapiens
TPAAAAAM

SEQ ID NO: 20099 - protein, 8 aa, Homo Sapiens
AAAAAMNL

SEQ ID NO: 20100 - protein, 8 aa, Homo Sapiens
AMNLASPR

SEQ ID NO: 20101 - protein, 8 aa, Homo Sapiens
NLASPRTA

SEQ ID NO: 20102 - protein, 8 aa, Homo Sapiens
LASPRTAV

SEQ ID NO: 20103 - protein, 8 aa, Homo Sapiens
SPRTAVAP

SEQ ID NO: 20104 - protein, 8 aa, Homo Sapiens
TAVAPSAV

SEQ ID NO: 20105 - protein, 8 aa, Homo Sapiens
APSAVNLA

SEQ ID NO: 20106 - protein, 8 aa, Homo Sapiens
AVNLADPR

SEQ ID NO: 20107 - protein, 8 aa, Homo Sapiens
RTPTAPAV

SEQ ID NO: 20108 - protein, 8 aa, Homo Sapiens
PTAPAVNL

SEQ ID NO: 20109 - protein, 8 aa, Homo Sapiens
TAPAVNLA

SEQ ID NO: 20110 - protein, 8 aa, Homo Sapiens
APAVNLAG

SEQ ID NO: 20111 - protein, 8 aa, Homo Sapiens
AVNLAGAR

SEQ ID NO: 20112 - protein, 8 aa, Homo Sapiens
GARTPAAL

SEQ ID NO: 20113 - protein, 8 aa, Homo Sapiens
RTPAALAA

SEQ ID NO: 20114 - protein, 8 aa, Homo Sapiens
TPAALAAL

SEQ ID NO: 20115 - protein, 8 aa, Homo Sapiens
AALAALSL

SEQ ID NO: 20116 - protein, 8 aa, Homo Sapiens
ALAALSLT

SEQ ID NO: 20117 - protein, 8 aa, Homo Sapiens
TPPTAANY

SEQ ID NO: 20118 - protein, 8 aa, Homo Sapiens
YPSSSRTP

SEQ ID NO: 20119 - protein, 8 aa, Homo Sapiens
TPQAPASA

SEQ ID NO: 20120 - protein, 8 aa, Homo Sapiens
QAPASANL

SEQ ID NO: 20121 - protein, 8 aa, Homo Sapiens
APASANLV

SEQ ID NO: 20122 - protein, 8 aa, Homo Sapiens
SANLVGPR

SEQ ID NO: 20123 - protein, 8 aa, Homo Sapiens
NLVGPRSA

SEQ ID NO: 20124 - protein, 8 aa, Homo Sapiens
GPRSAHAT

SEQ ID NO: 20125 - protein, 8 aa, Homo Sapiens
SAHATAPV

SEQ ID NO: 20126 - protein, 8 aa, Homo Sapiens
HATAPVNI

SEQ ID NO: 20127 - protein, 8 aa, Homo Sapiens
ATAPVNIA

SEQ ID NO: 20128 - protein, 8 aa, Homo Sapiens
NIAGSRTA

SEQ ID NO: 20129 - protein, 8 aa, Homo Sapiens
TAAALAPA

SEQ ID NO: 20130 - protein, 8 aa, Homo Sapiens
AALAPASL

SEQ ID NO: 20131 - protein, 8 aa, Homo Sapiens
ALAPASLT

SEQ ID NO: 20132 - protein, 8 aa, Homo Sapiens
APASLTSA

SEQ ID NO: 20133 - protein, 8 aa, Homo Sapiens
SLTSARMA

SEQ ID NO: 20134 - protein, 8 aa, Homo Sapiens
TSARMAPA

SEQ ID NO: 20135 - protein, 8 aa, Homo Sapiens
SARMAPAL

SEQ ID NO: 20136 - protein, 8 aa, Homo Sapiens
MAPALSGA

SEQ ID NO: 20137 - protein, 8 aa, Homo Sapiens
APALSGAN

SEQ ID NO: 20138 - protein, 8 aa, Homo Sapiens
ALSGANLT

SEQ ID NO: 20139 - protein, 8 aa, Homo Sapiens
GANLTSPR

SEQ ID NO: 20140 - protein, 8 aa, Homo Sapiens
LTSPRVPL

SEQ ID NO: 20141 - protein, 8 aa, Homo Sapiens
SPRVPLSA

SEQ ID NO: 20142 - protein, 8 aa, Homo Sapiens
PLSAYERV

SEQ ID NO: 20143 - protein, 8 aa, Homo Sapiens
AYERVSGR

SEQ ID NO: 20144 - protein, 8 aa, Homo Sapiens
TSPPLLDR

SEQ ID NO: 20145 - protein, 8 aa, Homo Sapiens
RARSRTPP

SEQ ID NO: 20146 - protein, 8 aa, Homo Sapiens
RSRTPPSA

SEQ ID NO: 20147 - protein, 8 aa, Homo Sapiens
APSQSRMT

SEQ ID NO: 20148 - protein, 8 aa, Homo Sapiens
QSRMTSER

SEQ ID NO: 20149 - protein, 8 aa, Homo Sapiens
MTSERAPS

SEQ ID NO: 20150 - protein, 8 aa, Homo Sapiens
RAPSPSSR

SEQ ID NO: 20151 - protein, 8 aa, Homo Sapiens
APSPSSRM

SEQ ID NO: 20152 - protein, 8 aa, Homo Sapiens
GQAPSQSL

SEQ ID NO: 20153 - protein, 8 aa, Homo Sapiens
SQSLLPPA

SEQ ID NO: 20154 - protein, 8 aa, Homo Sapiens
SLLPPAQD

SEQ ID NO: 20155 - protein, 8 aa, Homo Sapiens
LLPPAQDQ

SEQ ID NO: 20156 - protein, 8 aa, Homo Sapiens
QPRSPVPS

SEQ ID NO: 20157 - protein, 8 aa, Homo Sapiens
RSPVPSAF

SEQ ID NO: 20158 - protein, 8 aa, Homo Sapiens
SAFSDQSR

SEQ ID NO: 20159 - protein, 8 aa, Homo Sapiens
FSDQSRCL

SEQ ID NO: 20160 - protein, 8 aa, Homo Sapiens
LIAQTTPV

SEQ ID NO: 20161 - protein, 8 aa, Homo Sapiens
PVAGSQSL

SEQ ID NO: 20162 - protein, 8 aa, Homo Sapiens
SQSLSSGA

SEQ ID NO: 20163 - protein, 8 aa, Homo Sapiens
QSLSSGAV

SEQ ID NO: 20164 - protein, 8 aa, Homo Sapiens
SLSSGAVA

SEQ ID NO: 20165 - protein, 8 aa, Homo Sapiens
NGMLSVPA

SEQ ID NO: 20166 - protein, 8 aa, Homo Sapiens
LSVPAPGV

SEQ ID NO: 20167 - protein, 8 aa, Homo Sapiens
VPAPGVPH

SEQ ID NO: 20168 - protein, 8 aa, Homo Sapiens
AQQPSALA

SEQ ID NO: 20169 - protein, 8 aa, Homo Sapiens
QQPSALAA

SEQ ID NO: 20170 - protein, 8 aa, Homo Sapiens
QPSALAAL

SEQ ID NO: 20171 - protein, 8 aa, Homo Sapiens
ALAALQPA

SEQ ID NO: 20172 - protein, 8 aa, Homo Sapiens
LAALQPAK

SEQ ID NO: 20173 - protein, 8 aa, Homo Sapiens
ALQPAKER

SEQ ID NO: 20174 - protein, 8 aa, Homo Sapiens
RRSSSSSS

SEQ ID NO: 20175 - protein, 8 aa, Homo Sapiens
SLPVQPEV

SEQ ID NO: 20176 - protein, 8 aa, Homo Sapiens
LPVQPEVA

SEQ ID NO: 20177 - protein, 8 aa, Homo Sapiens
VQPEVALK

SEQ ID NO: 20178 - protein, 8 aa, Homo Sapiens
TPAPKEAV

SEQ ID NO: 20179 - protein, 8 aa, Homo Sapiens
RPPEPTPA

SEQ ID NO: 20180 - protein, 8 aa, Homo Sapiens
TPAKRKRR

SEQ ID NO: 20181 - protein, 8 aa, Homo Sapiens
RRSSSSSS

SEQ ID NO: 20182 - protein, 8 aa, Homo Sapiens
SSSPSPAK

SEQ ID NO: 20183 - protein, 8 aa, Homo Sapiens
SPAKPGPQ

SEQ ID NO: 20184 - protein, 8 aa, Homo Sapiens
LPKPASPK

SEQ ID NO: 20185 - protein, 8 aa, Homo Sapiens
ERRSRSPR

SEQ ID NO: 20186 - protein, 8 aa, Homo Sapiens
RRSRSPRK

SEQ ID NO: 20187 - protein, 8 aa, Homo Sapiens
SLRDSRSL

SEQ ID NO: 20188 - protein, 8 aa, Homo Sapiens
RSLSYSPV

SEQ ID NO: 20189 - protein, 8 aa, Homo Sapiens
LSYSPVER

SEQ ID NO: 20190 - protein, 8 aa, Homo Sapiens
SYSPVERR

SEQ ID NO: 20191 - protein, 8 aa, Homo Sapiens
YSPVERRR

SEQ ID NO: 20192 - protein, 8 aa, Homo Sapiens
SPRDQQSS

SEQ ID NO: 20193 - protein, 8 aa, Homo Sapiens
QQSSSSER

SEQ ID NO: 20194 - protein, 8 aa, Homo Sapiens
SSSERGSR

SEQ ID NO: 20195 - protein, 8 aa, Homo Sapiens
SSERGSRR

SEQ ID NO: 20196 - protein, 8 aa, Homo Sapiens
RGSRRGQR

SEQ ID NO: 20197 - protein, 8 aa, Homo Sapiens
DSRSPSHK

SEQ ID NO: 20198 - protein, 8 aa, Homo Sapiens
RSPSHKRR

SEQ ID NO: 20199 - protein, 8 aa, Homo Sapiens
RRETPSPR

SEQ ID NO: 20200 - protein, 8 aa, Homo Sapiens
ETPSPRPM

SEQ ID NO: 20201 - protein, 8 aa, Homo Sapiens
TPSPRPMR

SEQ ID NO: 20202 - protein, 8 aa, Homo Sapiens
SPRPMRHR

SEQ ID NO: 20203 - protein, 8 aa, Homo Sapiens
RPMRHRSS

SEQ ID NO: 20204 - protein, 8 aa, Homo Sapiens
PMRHRSSR

SEQ ID NO: 20205 - protein, 9 aa, Homo Sapiens
LPTPRGSGT

SEQ ID NO: 20206 - protein, 9 aa, Homo Sapiens
TPRGSGTNG

SEQ ID NO: 20207 - protein, 9 aa, Homo Sapiens
SGTNGYVQR

SEQ ID NO: 20208 - protein, 9 aa, Homo Sapiens
GYVQRNLSL

SEQ ID NO: 20209 - protein, 9 aa, Homo Sapiens
YVQRNLSLV

SEQ ID NO: 20210 - protein, 9 aa, Homo Sapiens
VQRNLSLVR

SEQ ID NO: 20211 - protein, 9 aa, Homo Sapiens
RNLSLVRGR

SEQ ID NO: 20212 - protein, 9 aa, Homo Sapiens
NLSLVRGRR

SEQ ID NO: 20213 - protein, 9 aa, Homo Sapiens
LVRGRRGER

SEQ ID NO: 20214 - protein, 9 aa, Homo Sapiens
GRRGERPDY

SEQ ID NO: 20215 - protein, 9 aa, Homo Sapiens
RRGERPDYK

SEQ ID NO: 20216 - protein, 9 aa, Homo Sapiens
DYKGEEELR

SEQ ID NO: 20217 - protein, 9 aa, Homo Sapiens
EEELRRLEA

SEQ ID NO: 20218 - protein, 9 aa, Homo Sapiens
ELRRLEAAL

SEQ ID NO: 20219 - protein, 9 aa, Homo Sapiens
RRLEAALVK

SEQ ID NO: 20220 - protein, 9 aa, Homo Sapiens
RLEAALVKR

SEQ ID NO: 20221 - protein, 9 aa, Homo Sapiens
DILDHERKR

SEQ ID NO: 20222 - protein, 9 aa, Homo Sapiens
HERKRRVEL

SEQ ID NO: 20223 - protein, 9 aa, Homo Sapiens
ERKRRVELR

SEQ ID NO: 20224 - protein, 9 aa, Homo Sapiens
ELEEMMEEQ

SEQ ID NO: 20225 - protein, 9 aa, Homo Sapiens
EEMMEEQGY

SEQ ID NO: 20226 - protein, 9 aa, Homo Sapiens
EEQQIQEKV

SEQ ID NO: 20227 - protein, 9 aa, Homo Sapiens
QIQEKVATF

SEQ ID NO: 20228 - protein, 9 aa, Homo Sapiens
IQEKVATFR

SEQ ID NO: 20229 - protein, 9 aa, Homo Sapiens
QEKVATFRL

SEQ ID NO: 20230 - protein, 9 aa, Homo Sapiens
KVATFRLML

SEQ ID NO: 20231 - protein, 9 aa, Homo Sapiens
ATFRLMLLE

SEQ ID NO: 20232 - protein, 9 aa, Homo Sapiens
TFRLMLLEK

SEQ ID NO: 20233 - protein, 9 aa, Homo Sapiens
RLMLLEKDV

SEQ ID NO: 20234 - protein, 9 aa, Homo Sapiens
ETPGQRPAV

SEQ ID NO: 20235 - protein, 9 aa, Homo Sapiens
TPGQRPAVT

SEQ ID NO: 20236 - protein, 9 aa, Homo Sapiens
AVTETHQLA

SEQ ID NO: 20237 - protein, 9 aa, Homo Sapiens
HQLAELNEK

SEQ ID NO: 20238 - protein, 9 aa, Homo Sapiens
QLAELNEKK

SEQ ID NO: 20239 - protein, 9 aa, Homo Sapiens
ELNEKKNER

SEQ ID NO: 20240 - protein, 9 aa, Homo Sapiens
RLRAAFGIS

SEQ ID NO: 20241 - protein, 9 aa, Homo Sapiens
AAFGISDSY

SEQ ID NO: 20242 - protein, 9 aa, Homo Sapiens
DGSSFDPQR

SEQ ID NO: 20243 - protein, 9 aa, Homo Sapiens
SFDPQRRAR

SEQ ID NO: 20244 - protein, 9 aa, Homo Sapiens
PQRRAREAK

SEQ ID NO: 20245 - protein, 9 aa, Homo Sapiens
RAREAKQPA

SEQ ID NO: 20246 - protein, 9 aa, Homo Sapiens
KQPAPEPPK

SEQ ID NO: 20247 - protein, 9 aa, Homo Sapiens
EPPKPYSLV

SEQ ID NO: 20248 - protein, 9 aa, Homo Sapiens
LVRESSSSR

SEQ ID NO: 20249 - protein, 9 aa, Homo Sapiens
SSSRSPTPK

SEQ ID NO: 20250 - protein, 9 aa, Homo Sapiens
SSRSPTPKQ

SEQ ID NO: 20251 - protein, 9 aa, Homo Sapiens
RSPTPKQKK

SEQ ID NO: 20252 - protein, 9 aa, Homo Sapiens
KQKKKKKKK

SEQ ID NO: 20253 - protein, 9 aa, Homo Sapiens
RRSESSSPR

SEQ ID NO: 20254 - protein, 9 aa, Homo Sapiens
RSESSSPRR

SEQ ID NO: 20255 - protein, 9 aa, Homo Sapiens
ESSSPRRER

SEQ ID NO: 20256 - protein, 9 aa, Homo Sapiens
SSSPRRERK

SEQ ID NO: 20257 - protein, 9 aa, Homo Sapiens
SPRRERKKS

SEQ ID NO: 20258 - protein, 9 aa, Homo Sapiens
RRERKKSSK

SEQ ID NO: 20259 - protein, 9 aa, Homo Sapiens
RERKKSSKK

SEQ ID NO: 20260 - protein, 9 aa, Homo Sapiens
RKKSSKKKK

SEQ ID NO: 20261 - protein, 9 aa, Homo Sapiens
KSSKKKKHR

SEQ ID NO: 20262 - protein, 9 aa, Homo Sapiens
KHRSESESK

SEQ ID NO: 20263 - protein, 9 aa, Homo Sapiens
HRSESESKK

SEQ ID NO: 20264 - protein, 9 aa, Homo Sapiens
RKHRSPTPK

SEQ ID NO: 20265 - protein, 9 aa, Homo Sapiens
RSPTPKSKR

SEQ ID NO: 20266 - protein, 9 aa, Homo Sapiens
KSKRKSKDK

SEQ ID NO: 20267 - protein, 9 aa, Homo Sapiens
SKRKSKDKK

SEQ ID NO: 20268 - protein, 9 aa, Homo Sapiens
KSKDKKRKR

SEQ ID NO: 20269 - protein, 9 aa, Homo Sapiens
KDKKRKRSR

SEQ ID NO: 20270 - protein, 9 aa, Homo Sapiens
RSRSTTPAP

SEQ ID NO: 20271 - protein, 9 aa, Homo Sapiens
SRSTTPAPK

SEQ ID NO: 20272 - protein, 9 aa, Homo Sapiens
STTPAPKSR

SEQ ID NO: 20273 - protein, 9 aa, Homo Sapiens
TTPAPKSRR

SEQ ID NO: 20274 - protein, 9 aa, Homo Sapiens
TPAPKSRRA

SEQ ID NO: 20275 - protein, 9 aa, Homo Sapiens
APKSRRAHR

SEQ ID NO: 20276 - protein, 9 aa, Homo Sapiens
KSRRAHRST

SEQ ID NO: 20277 - protein, 9 aa, Homo Sapiens
RRAHRSTSA

SEQ ID NO: 20278 - protein, 9 aa, Homo Sapiens
SASSSDTSR

SEQ ID NO: 20279 - protein, 9 aa, Homo Sapiens
SSSDTSRSR

SEQ ID NO: 20280 - protein, 9 aa, Homo Sapiens
RSRSRSAAA

SEQ ID NO: 20281 - protein, 9 aa, Homo Sapiens
SRSRSAAAK

SEQ ID NO: 20282 - protein, 9 aa, Homo Sapiens
RSRSAAAKT

SEQ ID NO: 20283 - protein, 9 aa, Homo Sapiens
AAKTHTTAL

SEQ ID NO: 20284 - protein, 9 aa, Homo Sapiens
RSPSPASGR

SEQ ID NO: 20285 - protein, 9 aa, Homo Sapiens
SPASGRRGE

SEQ ID NO: 20286 - protein, 9 aa, Homo Sapiens
RRGEGDAPF

SEQ ID NO: 20287 - protein, 9 aa, Homo Sapiens
EPGTTSTQR

SEQ ID NO: 20288 - protein, 9 aa, Homo Sapiens
TQRPSSPET

SEQ ID NO: 20289 - protein, 9 aa, Homo Sapiens
RPSSPETAT

SEQ ID NO: 20290 - protein, 9 aa, Homo Sapiens
ATKQPSSPY

SEQ ID NO: 20291 - protein, 9 aa, Homo Sapiens
PYEDKDKDK

SEQ ID NO: 20292 - protein, 9 aa, Homo Sapiens
DKKEKSATR

SEQ ID NO: 20293 - protein, 9 aa, Homo Sapiens
ATRPSPSPE

SEQ ID NO: 20294 - protein, 9 aa, Homo Sapiens
SPSPERSST

SEQ ID NO: 20295 - protein, 9 aa, Homo Sapiens
PEPPAPTPL

SEQ ID NO: 20296 - protein, 9 aa, Homo Sapiens
EPPAPTPLL

SEQ ID NO: 20297 - protein, 9 aa, Homo Sapiens
LLAERHGGS

SEQ ID NO: 20298 - protein, 9 aa, Homo Sapiens
RHGGSPQPL

SEQ ID NO: 20299 - protein, 9 aa, Homo Sapiens
TTPLSQEPV

SEQ ID NO: 20300 - protein, 9 aa, Homo Sapiens
EPVNPPSEA

SEQ ID NO: 20301 - protein, 9 aa, Homo Sapiens
SPTRDRSPP

SEQ ID NO: 20302 - protein, 9 aa, Homo Sapiens
PTRDRSPPK

SEQ ID NO: 20303 - protein, 9 aa, Homo Sapiens
RSPPKSPEK

SEQ ID NO: 20304 - protein, 9 aa, Homo Sapiens
SPPKSPEKL

SEQ ID NO: 20305 - protein, 9 aa, Homo Sapiens
ASSSPESPK

SEQ ID NO: 20306 - protein, 9 aa, Homo Sapiens
KPAPAPGSH

SEQ ID NO: 20307 - protein, 9 aa, Homo Sapiens
EISSSPTSK

SEQ ID NO: 20308 - protein, 9 aa, Homo Sapiens
SSSPTSKNR

SEQ ID NO: 20309 - protein, 9 aa, Homo Sapiens
SPTSKNRSH

SEQ ID NO: 20310 - protein, 9 aa, Homo Sapiens
TSKNRSHGR

SEQ ID NO: 20311 - protein, 9 aa, Homo Sapiens
KNRSHGRAK

SEQ ID NO: 20312 - protein, 9 aa, Homo Sapiens
KSHSHTPSR

SEQ ID NO: 20313 - protein, 9 aa, Homo Sapiens
HTPSRRMGR

SEQ ID NO: 20314 - protein, 9 aa, Homo Sapiens
RRMGRSRSP

SEQ ID NO: 20315 - protein, 9 aa, Homo Sapiens
RMGRSRSPA

SEQ ID NO: 20316 - protein, 9 aa, Homo Sapiens
RSRSPATAK

SEQ ID NO: 20317 - protein, 9 aa, Homo Sapiens
ATAKRGRSR

SEQ ID NO: 20318 - protein, 9 aa, Homo Sapiens
RSRSRTPTK

SEQ ID NO: 20319 - protein, 9 aa, Homo Sapiens
HSRSRSPQW

SEQ ID NO: 20320 - protein, 9 aa, Homo Sapiens
RSRSPQWRR

SEQ ID NO: 20321 - protein, 9 aa, Homo Sapiens
RSPQWRRSR

SEQ ID NO: 20322 - protein, 9 aa, Homo Sapiens
SPQWRRSRS

SEQ ID NO: 20323 - protein, 9 aa, Homo Sapiens
WRRSRSAQR

SEQ ID NO: 20324 - protein, 9 aa, Homo Sapiens
RRSRSAQRW

SEQ ID NO: 20325 - protein, 9 aa, Homo Sapiens
SAQRWGRSR

SEQ ID NO: 20326 - protein, 9 aa, Homo Sapiens
QRWGRSRSP

SEQ ID NO: 20327 - protein, 9 aa, Homo Sapiens
SPQRRGRSR

SEQ ID NO: 20328 - protein, 9 aa, Homo Sapiens
RRGRSRSPQ

SEQ ID NO: 20329 - protein, 9 aa, Homo Sapiens
RGRSRSPQR

SEQ ID NO: 20330 - protein, 9 aa, Homo Sapiens
QRPGWSRSR

SEQ ID NO: 20331 - protein, 9 aa, Homo Sapiens
RPGWSRSRN

SEQ ID NO: 20332 - protein, 9 aa, Homo Sapiens
WSRSRNTQR

SEQ ID NO: 20333 - protein, 9 aa, Homo Sapiens
SRNTQRRGR

SEQ ID NO: 20334 - protein, 9 aa, Homo Sapiens
NTQRRGRSR

SEQ ID NO: 20335 - protein, 9 aa, Homo Sapiens
RRGRSRSAR

SEQ ID NO: 20336 - protein, 9 aa, Homo Sapiens
RGRSRSARR

SEQ ID NO: 20337 - protein, 9 aa, Homo Sapiens
RSRSARRGR

SEQ ID NO: 20338 - protein, 9 aa, Homo Sapiens
RSARRGRSH

SEQ ID NO: 20339 - protein, 9 aa, Homo Sapiens
ARRGRSHSR

SEQ ID NO: 20340 - protein, 9 aa, Homo Sapiens
RSHSRSPAT

SEQ ID NO: 20341 - protein, 9 aa, Homo Sapiens
SPATRGRSR

SEQ ID NO: 20342 - protein, 9 aa, Homo Sapiens
ATRGRSRSR

SEQ ID NO: 20343 - protein, 9 aa, Homo Sapiens
RSRSRTPAR

SEQ ID NO: 20344 - protein, 9 aa, Homo Sapiens
TPARRGRSR

SEQ ID NO: 20345 - protein, 9 aa, Homo Sapiens
ARRGRSRSR

SEQ ID NO: 20346 - protein, 9 aa, Homo Sapiens
RSRSRTPAR

SEQ ID NO: 20347 - protein, 9 aa, Homo Sapiens
RSRTPARRR

SEQ ID NO: 20348 - protein, 9 aa, Homo Sapiens
RTPARRRSR

SEQ ID NO: 20349 - protein, 9 aa, Homo Sapiens
TPARRRSRS

SEQ ID NO: 20350 - protein, 9 aa, Homo Sapiens
RRSRSRTPT

SEQ ID NO: 20351 - protein, 9 aa, Homo Sapiens
RSRSRTPTR

SEQ ID NO: 20352 - protein, 9 aa, Homo Sapiens
RSRTPTRRR

SEQ ID NO: 20353 - protein, 9 aa, Homo Sapiens
RTPTRRRSR

SEQ ID NO: 20354 - protein, 9 aa, Homo Sapiens
TPTRRRSRS

SEQ ID NO: 20355 - protein, 9 aa, Homo Sapiens
PTRRRSRSR

SEQ ID NO: 20356 - protein, 9 aa, Homo Sapiens
RRSRSRTPA

SEQ ID NO: 20357 - protein, 9 aa, Homo Sapiens
RSRSRTPAR

SEQ ID NO: 20358 - protein, 9 aa, Homo Sapiens
TPARRGRSR

SEQ ID NO: 20359 - protein, 9 aa, Homo Sapiens
ARRGRSRSR

SEQ ID NO: 20360 - protein, 9 aa, Homo Sapiens
RSRSRTPAR

SEQ ID NO: 20361 - protein, 9 aa, Homo Sapiens
RSRTPARRR

SEQ ID NO: 20362 - protein, 9 aa, Homo Sapiens
RTPARRRSR

SEQ ID NO: 20363 - protein, 9 aa, Homo Sapiens
TPARRRSRT

SEQ ID NO: 20364 - protein, 9 aa, Homo Sapiens
PARRRSRTR

SEQ ID NO: 20365 - protein, 9 aa, Homo Sapiens
RRRSRTRSP

SEQ ID NO: 20366 - protein, 9 aa, Homo Sapiens
RRSRTRSPV

SEQ ID NO: 20367 - protein, 9 aa, Homo Sapiens
RSRTRSPVR

SEQ ID NO: 20368 - protein, 9 aa, Homo Sapiens
RTRSPVRRR

SEQ ID NO: 20369 - protein, 9 aa, Homo Sapiens
RSPVRRRSR

SEQ ID NO: 20370 - protein, 9 aa, Homo Sapiens
SPVRRRSRS

SEQ ID NO: 20371 - protein, 9 aa, Homo Sapiens
PVRRRSRSR

SEQ ID NO: 20372 - protein, 9 aa, Homo Sapiens
RRRSRSRSP

SEQ ID NO: 20373 - protein, 9 aa, Homo Sapiens
RRSRSRSPA

SEQ ID NO: 20374 - protein, 9 aa, Homo Sapiens
RSRSRSPAR

SEQ ID NO: 20375 - protein, 9 aa, Homo Sapiens
RSPARRSGR

SEQ ID NO: 20376 - protein, 9 aa, Homo Sapiens
SPARRSGRS

SEQ ID NO: 20377 - protein, 9 aa, Homo Sapiens
RRSGRSRSR

SEQ ID NO: 20378 - protein, 9 aa, Homo Sapiens
RSRSRTPAR

SEQ ID NO: 20379 - protein, 9 aa, Homo Sapiens
TPARRGRSR

SEQ ID NO: 20380 - protein, 9 aa, Homo Sapiens
ARRGRSRSR

SEQ ID NO: 20381 - protein, 9 aa, Homo Sapiens
RSRSRTPAR

SEQ ID NO: 20382 - protein, 9 aa, Homo Sapiens
TPARRGRSR

SEQ ID NO: 20383 - protein, 9 aa, Homo Sapiens
ARRGRSRSR

SEQ ID NO: 20384 - protein, 9 aa, Homo Sapiens
RSRSRTPAR

SEQ ID NO: 20385 - protein, 9 aa, Homo Sapiens
RTPARRSGR

SEQ ID NO: 20386 - protein, 9 aa, Homo Sapiens
RRSGRSRSR

SEQ ID NO: 20387 - protein, 9 aa, Homo Sapiens
RSRSRTPAR

SEQ ID NO: 20388 - protein, 9 aa, Homo Sapiens
TPARRGRSR

SEQ ID NO: 20389 - protein, 9 aa, Homo Sapiens
ARRGRSRSR

SEQ ID NO: 20390 - protein, 9 aa, Homo Sapiens
GRSRSRTPR

SEQ ID NO: 20391 - protein, 9 aa, Homo Sapiens
RSRSRTPRR

SEQ ID NO: 20392 - protein, 9 aa, Homo Sapiens
RSRTPRRGR

SEQ ID NO: 20393 - protein, 9 aa, Homo Sapiens
RTPRRGRSR

SEQ ID NO: 20394 - protein, 9 aa, Homo Sapiens
TPRRGRSRS

SEQ ID NO: 20395 - protein, 9 aa, Homo Sapiens
RGRSRSRSL

SEQ ID NO: 20396 - protein, 9 aa, Homo Sapiens
RSRSRSLVR

SEQ ID NO: 20397 - protein, 9 aa, Homo Sapiens
SRSLVRRGR

SEQ ID NO: 20398 - protein, 9 aa, Homo Sapiens
RSHSRTPQR

SEQ ID NO: 20399 - protein, 9 aa, Homo Sapiens
TPQRRGRSG

SEQ ID NO: 20400 - protein, 9 aa, Homo Sapiens
GRSGSSSER

SEQ ID NO: 20401 - protein, 9 aa, Homo Sapiens
RSGSSSERK

SEQ ID NO: 20402 - protein, 9 aa, Homo Sapiens
GSSSERKNK

SEQ ID NO: 20403 - protein, 9 aa, Homo Sapiens
KNKSRTSQR

SEQ ID NO: 20404 - protein, 9 aa, Homo Sapiens
RSRSNSSPE

SEQ ID NO: 20405 - protein, 9 aa, Homo Sapiens
RSNSSPEMK

SEQ ID NO: 20406 - protein, 9 aa, Homo Sapiens
SNSSPEMKK

SEQ ID NO: 20407 - protein, 9 aa, Homo Sapiens
SPEMKKSRI

SEQ ID NO: 20408 - protein, 9 aa, Homo Sapiens
MKKSRISSR

SEQ ID NO: 20409 - protein, 9 aa, Homo Sapiens
SRISSRRSR

SEQ ID NO: 20410 - protein, 9 aa, Homo Sapiens
RSRSLSSPR

SEQ ID NO: 20411 - protein, 9 aa, Homo Sapiens
RSLSSPRSK

SEQ ID NO: 20412 - protein, 9 aa, Homo Sapiens
SLSSPRSKA

SEQ ID NO: 20413 - protein, 9 aa, Homo Sapiens
LSSPRSKAK

SEQ ID NO: 20414 - protein, 9 aa, Homo Sapiens
SPRSKAKSR

SEQ ID NO: 20415 - protein, 9 aa, Homo Sapiens
SKAKSRLSL

SEQ ID NO: 20416 - protein, 9 aa, Homo Sapiens
KAKSRLSLR

SEQ ID NO: 20417 - protein, 9 aa, Homo Sapiens
SRLSLRRSL

SEQ ID NO: 20418 - protein, 9 aa, Homo Sapiens
SLRRSLSGS

SEQ ID NO: 20419 - protein, 9 aa, Homo Sapiens
RRSLSGSSP

SEQ ID NO: 20420 - protein, 9 aa, Homo Sapiens
SLSGSSPCP

SEQ ID NO: 20421 - protein, 9 aa, Homo Sapiens
LSGSSPCPK

SEQ ID NO: 20422 - protein, 9 aa, Homo Sapiens
GSSPCPKQK

SEQ ID NO: 20423 - protein, 9 aa, Homo Sapiens
KQKSQTPPR

SEQ ID NO: 20424 - protein, 9 aa, Homo Sapiens
SQTPPRRSR

SEQ ID NO: 20425 - protein, 9 aa, Homo Sapiens
RRSRSGSSQ

SEQ ID NO: 20426 - protein, 9 aa, Homo Sapiens
SRSGSSQPK

SEQ ID NO: 20427 - protein, 9 aa, Homo Sapiens
SSQPKAKSR

SEQ ID NO: 20428 - protein, 9 aa, Homo Sapiens
KAKSRTPPR

SEQ ID NO: 20429 - protein, 9 aa, Homo Sapiens
PPRRSRSSS

SEQ ID NO: 20430 - protein, 9 aa, Homo Sapiens
RRSRSSSSP

SEQ ID NO: 20431 - protein, 9 aa, Homo Sapiens
RSRSSSSPP

SEQ ID NO: 20432 - protein, 9 aa, Homo Sapiens
RSSSSPPPK

SEQ ID NO: 20433 - protein, 9 aa, Homo Sapiens
SSSPPPKQK

SEQ ID NO: 20434 - protein, 9 aa, Homo Sapiens
KQKSKTPSR

SEQ ID NO: 20435 - protein, 9 aa, Homo Sapiens
TPSRQSHSS

SEQ ID NO: 20436 - protein, 9 aa, Homo Sapiens
HSSSSPHPK

SEQ ID NO: 20437 - protein, 9 aa, Homo Sapiens
SSSSPHPKV

SEQ ID NO: 20438 - protein, 9 aa, Homo Sapiens
SSSPHPKVK

SEQ ID NO: 20439 - protein, 9 aa, Homo Sapiens
KVKSGTPPR

SEQ ID NO: 20440 - protein, 9 aa, Homo Sapiens
SPQANEQSV

SEQ ID NO: 20441 - protein, 9 aa, Homo Sapiens
NEQSVTPQR

SEQ ID NO: 20442 - protein, 9 aa, Homo Sapiens
VTPQRRSCF

SEQ ID NO: 20443 - protein, 9 aa, Homo Sapiens
FESSPDPEL

SEQ ID NO: 20444 - protein, 9 aa, Homo Sapiens
ESSPDPELK

SEQ ID NO: 20445 - protein, 9 aa, Homo Sapiens
ELKSRTPSR

SEQ ID NO: 20446 - protein, 9 aa, Homo Sapiens
KSRTPSRHS

SEQ ID NO: 20447 - protein, 9 aa, Homo Sapiens
TPSRHSCSG

SEQ ID NO: 20448 - protein, 9 aa, Homo Sapiens
SCSGSSPPR

SEQ ID NO: 20449 - protein, 9 aa, Homo Sapiens
SPPRVKSST

SEQ ID NO: 20450 - protein, 9 aa, Homo Sapiens
RVKSSTPPR

SEQ ID NO: 20451 - protein, 9 aa, Homo Sapiens
SPSRSSSPQ

SEQ ID NO: 20452 - protein, 9 aa, Homo Sapiens
SSSPQPKVK

SEQ ID NO: 20453 - protein, 9 aa, Homo Sapiens
SPQPKVKAI

SEQ ID NO: 20454 - protein, 9 aa, Homo Sapiens
KVKAIISPR

SEQ ID NO: 20455 - protein, 9 aa, Homo Sapiens
KAIISPRQR

SEQ ID NO: 20456 - protein, 9 aa, Homo Sapiens
SPRQRSHSG

SEQ ID NO: 20457 - protein, 9 aa, Homo Sapiens
GSSSPSPSR

SEQ ID NO: 20458 - protein, 9 aa, Homo Sapiens
SSSPSPSRV

SEQ ID NO: 20459 - protein, 9 aa, Homo Sapiens
SPSPSRVTS

SEQ ID NO: 20460 - protein, 9 aa, Homo Sapiens
SPSRVTSRT

SEQ ID NO: 20461 - protein, 9 aa, Homo Sapiens
RVTSRTTPR

SEQ ID NO: 20462 - protein, 9 aa, Homo Sapiens
VTSRTTPRR

SEQ ID NO: 20463 - protein, 9 aa, Homo Sapiens
TTPRRSRSV

SEQ ID NO: 20464 - protein, 9 aa, Homo Sapiens
TPRRSRSVS

SEQ ID NO: 20465 - protein, 9 aa, Homo Sapiens
RSRSVSPCS

SEQ ID NO: 20466 - protein, 9 aa, Homo Sapiens
SPCSNVESR

SEQ ID NO: 20467 - protein, 9 aa, Homo Sapiens
NVESRLLPR

SEQ ID NO: 20468 - protein, 9 aa, Homo Sapiens
VESRLLPRY

SEQ ID NO: 20469 - protein, 9 aa, Homo Sapiens
SRLLPRYSH

SEQ ID NO: 20470 - protein, 9 aa, Homo Sapiens
LLPRYSHSG

SEQ ID NO: 20471 - protein, 9 aa, Homo Sapiens
LPRYSHSGS

SEQ ID NO: 20472 - protein, 9 aa, Homo Sapiens
SSSPDTKVK

SEQ ID NO: 20473 - protein, 9 aa, Homo Sapiens
KVKPETPPR

SEQ ID NO: 20474 - protein, 9 aa, Homo Sapiens
ETPPRQSHS

SEQ ID NO: 20475 - protein, 9 aa, Homo Sapiens
SGSISPYPK

SEQ ID NO: 20476 - protein, 9 aa, Homo Sapiens
SISPYPKVK

SEQ ID NO: 20477 - protein, 9 aa, Homo Sapiens
KVKAQTPPG

SEQ ID NO: 20478 - protein, 9 aa, Homo Sapiens
AQTPPGPSL

SEQ ID NO: 20479 - protein, 9 aa, Homo Sapiens
SLSGSKSPC

SEQ ID NO: 20480 - protein, 9 aa, Homo Sapiens
LVQSCPGSL

SEQ ID NO: 20481 - protein, 9 aa, Homo Sapiens
CPGSLSLCA

SEQ ID NO: 20482 - protein, 9 aa, Homo Sapiens
SLSLCAGVK

SEQ ID NO: 20483 - protein, 9 aa, Homo Sapiens
SLCAGVKSS

SEQ ID NO: 20484 - protein, 9 aa, Homo Sapiens
SSTPPGESY

SEQ ID NO: 20485 - protein, 9 aa, Homo Sapiens
STPPGESYF

SEQ ID NO: 20486 - protein, 9 aa, Homo Sapiens
PPGESYFGV

SEQ ID NO: 20487 - protein, 9 aa, Homo Sapiens
ESYFGVSSL

SEQ ID NO: 20488 - protein, 9 aa, Homo Sapiens
YFGVSSLQL

SEQ ID NO: 20489 - protein, 9 aa, Homo Sapiens
LQLKGQSQT

SEQ ID NO: 20490 - protein, 9 aa, Homo Sapiens
QSQTSPDHR

SEQ ID NO: 20491 - protein, 9 aa, Homo Sapiens
RSDTSSPEV

SEQ ID NO: 20492 - protein, 9 aa, Homo Sapiens
QSKSQTSPK

SEQ ID NO: 20493 - protein, 9 aa, Homo Sapiens
SQTSPKGGR

SEQ ID NO: 20494 - protein, 9 aa, Homo Sapiens
RSRSSSPVT

SEQ ID NO: 20495 - protein, 9 aa, Homo Sapiens
RSSSPVTEL

SEQ ID NO: 20496 - protein, 9 aa, Homo Sapiens
SSSPVTELA

SEQ ID NO: 20497 - protein, 9 aa, Homo Sapiens
ELASRSPIR

SEQ ID NO: 20498 - protein, 9 aa, Homo Sapiens
RQDRGEFSA

SEQ ID NO: 20499 - protein, 9 aa, Homo Sapiens
GEFSASPML

SEQ ID NO: 20500 - protein, 9 aa, Homo Sapiens
EFSASPMLK

SEQ ID NO: 20501 - protein, 9 aa, Homo Sapiens
SPMLKSGMS

SEQ ID NO: 20502 - protein, 9 aa, Homo Sapiens
MLKSGMSPE

SEQ ID NO: 20503 - protein, 9 aa, Homo Sapiens
GMSPEQSRF

SEQ ID NO: 20504 - protein, 9 aa, Homo Sapiens
RFQSDSSSY

SEQ ID NO: 20505 - protein, 9 aa, Homo Sapiens
FQSDSSSYP

SEQ ID NO: 20506 - protein, 9 aa, Homo Sapiens
YPTVDSNSL

SEQ ID NO: 20507 - protein, 9 aa, Homo Sapiens
PTVDSNSLL

SEQ ID NO: 20508 - protein, 9 aa, Homo Sapiens
LLGQSRLET

SEQ ID NO: 20509 - protein, 9 aa, Homo Sapiens
SRLETAESK

SEQ ID NO: 20510 - protein, 9 aa, Homo Sapiens
ETAESKEKM

SEQ ID NO: 20511 - protein, 9 aa, Homo Sapiens
AESKEKMAL

SEQ ID NO: 20512 - protein, 9 aa, Homo Sapiens
ALPPQEDAT

SEQ ID NO: 20513 - protein, 9 aa, Homo Sapiens
LPPQEDATA

SEQ ID NO: 20514 - protein, 9 aa, Homo Sapiens
EDATASPPR

SEQ ID NO: 20515 - protein, 9 aa, Homo Sapiens
ATASPPRQK

SEQ ID NO: 20516 - protein, 9 aa, Homo Sapiens
RQKDKFSPF

SEQ ID NO: 20517 - protein, 9 aa, Homo Sapiens
FSPFPVQDR

SEQ ID NO: 20518 - protein, 9 aa, Homo Sapiens
FPVQDRPES

SEQ ID NO: 20519 - protein, 9 aa, Homo Sapiens
RPESSLVFK

SEQ ID NO: 20520 - protein, 9 aa, Homo Sapiens
SLVFKDTLR

SEQ ID NO: 20521 - protein, 9 aa, Homo Sapiens
TLRTPPRER

SEQ ID NO: 20522 - protein, 9 aa, Homo Sapiens
PPRERSGAG

SEQ ID NO: 20523 - protein, 9 aa, Homo Sapiens
GAGSSPETK

SEQ ID NO: 20524 - protein, 9 aa, Homo Sapiens
ETKEQNSAL

SEQ ID NO: 20525 - protein, 9 aa, Homo Sapiens
SQDEELMEV

SEQ ID NO: 20526 - protein, 9 aa, Homo Sapiens
SEEPAGQIL

SEQ ID NO: 20527 - protein, 9 aa, Homo Sapiens
EPAGQILSH

SEQ ID NO: 20528 - protein, 9 aa, Homo Sapiens
ILSHLSSEL

SEQ ID NO: 20529 - protein, 9 aa, Homo Sapiens
LSHLSSELK

SEQ ID NO: 20530 - protein, 9 aa, Homo Sapiens
HLSSELKEM

SEQ ID NO: 20531 - protein, 9 aa, Homo Sapiens
SNFESSPEV

SEQ ID NO: 20532 - protein, 9 aa, Homo Sapiens
ESSPEVEER

SEQ ID NO: 20533 - protein, 9 aa, Homo Sapiens
PEVEERPAV

SEQ ID NO: 20534 - protein, 9 aa, Homo Sapiens
VEERPAVSL

SEQ ID NO: 20535 - protein, 9 aa, Homo Sapiens
TLDQSQSQA

SEQ ID NO: 20536 - protein, 9 aa, Homo Sapiens
SQSQASLEA

SEQ ID NO: 20537 - protein, 9 aa, Homo Sapiens
QSQASLEAV

SEQ ID NO: 20538 - protein, 9 aa, Homo Sapiens
QASLEAVEV

SEQ ID NO: 20539 - protein, 9 aa, Homo Sapiens
EAVEVPSMA

SEQ ID NO: 20540 - protein, 9 aa, Homo Sapiens
EVPSMASSW

SEQ ID NO: 20541 - protein, 9 aa, Homo Sapiens
MASSWGGPH

SEQ ID NO: 20542 - protein, 9 aa, Homo Sapiens
ASSWGGPHF

SEQ ID NO: 20543 - protein, 9 aa, Homo Sapiens
GPHFSPEHK

SEQ ID NO: 20544 - protein, 9 aa, Homo Sapiens
HFSPEHKEL

SEQ ID NO: 20545 - protein, 9 aa, Homo Sapiens
HKELSNSPL

SEQ ID NO: 20546 - protein, 9 aa, Homo Sapiens
RENSFGSPL

SEQ ID NO: 20547 - protein, 9 aa, Homo Sapiens
NSFGSPLEF

SEQ ID NO: 20548 - protein, 9 aa, Homo Sapiens
SFGSPLEFR

SEQ ID NO: 20549 - protein, 9 aa, Homo Sapiens
LEFRNSGPL

SEQ ID NO: 20550 - protein, 9 aa, Homo Sapiens
MNTGFSSEV

SEQ ID NO: 20551 - protein, 9 aa, Homo Sapiens
NTGFSSEVK

SEQ ID NO: 20552 - protein, 9 aa, Homo Sapiens
SEVKEDLNG

SEQ ID NO: 20553 - protein, 9 aa, Homo Sapiens
KEDLNGPFL

SEQ ID NO: 20554 - protein, 9 aa, Homo Sapiens
NQLETDPSL

SEQ ID NO: 20555 - protein, 9 aa, Homo Sapiens
ETDPSLDMK

SEQ ID NO: 20556 - protein, 9 aa, Homo Sapiens
SLDMKEQST

SEQ ID NO: 20557 - protein, 9 aa, Homo Sapiens
ELSPDAVEK

SEQ ID NO: 20558 - protein, 9 aa, Homo Sapiens
SNQSISSPV

SEQ ID NO: 20559 - protein, 9 aa, Homo Sapiens
NQSISSPVL

SEQ ID NO: 20560 - protein, 9 aa, Homo Sapiens
ISSPVLDAV

SEQ ID NO: 20561 - protein, 9 aa, Homo Sapiens
SPVLDAVPR

SEQ ID NO: 20562 - protein, 9 aa, Homo Sapiens
DAVPRTPSR

SEQ ID NO: 20563 - protein, 9 aa, Homo Sapiens
TPSRERSSS

SEQ ID NO: 20564 - protein, 9 aa, Homo Sapiens
SSSASSPEM

SEQ ID NO: 20565 - protein, 9 aa, Homo Sapiens
SSASSPEMK

SEQ ID NO: 20566 - protein, 9 aa, Homo Sapiens
EMKDGLPRT

SEQ ID NO: 20567 - protein, 9 aa, Homo Sapiens
DGLPRTPSR

SEQ ID NO: 20568 - protein, 9 aa, Homo Sapiens
LPRTPSRRS

SEQ ID NO: 20569 - protein, 9 aa, Homo Sapiens
TPSRRSRSG

SEQ ID NO: 20570 - protein, 9 aa, Homo Sapiens
SRSGSSPGL

SEQ ID NO: 20571 - protein, 9 aa, Homo Sapiens
RSGSSPGLR

SEQ ID NO: 20572 - protein, 9 aa, Homo Sapiens
SGTPSRHSL

SEQ ID NO: 20573 - protein, 9 aa, Homo Sapiens
TPSRHSLSG

SEQ ID NO: 20574 - protein, 9 aa, Homo Sapiens
SLSGSSPGM

SEQ ID NO: 20575 - protein, 9 aa, Homo Sapiens
LSGSSPGMK

SEQ ID NO: 20576 - protein, 9 aa, Homo Sapiens
KDIPRTPFR

SEQ ID NO: 20577 - protein, 9 aa, Homo Sapiens
TPRPRSRSP

SEQ ID NO: 20578 - protein, 9 aa, Homo Sapiens
RPRSRSPSS

SEQ ID NO: 20579 - protein, 9 aa, Homo Sapiens
RSRSPSSPE

SEQ ID NO: 20580 - protein, 9 aa, Homo Sapiens
SRSPSSPEL

SEQ ID NO: 20581 - protein, 9 aa, Homo Sapiens
SPELNNKCL

SEQ ID NO: 20582 - protein, 9 aa, Homo Sapiens
NNKCLTPQR

SEQ ID NO: 20583 - protein, 9 aa, Homo Sapiens
KCLTPQRER

SEQ ID NO: 20584 - protein, 9 aa, Homo Sapiens
GSESSVDQK

SEQ ID NO: 20585 - protein, 9 aa, Homo Sapiens
SVDQKTVAR

SEQ ID NO: 20586 - protein, 9 aa, Homo Sapiens
VARTPLGQR

SEQ ID NO: 20587 - protein, 9 aa, Homo Sapiens
RTPLGQRSR

SEQ ID NO: 20588 - protein, 9 aa, Homo Sapiens
SRSGSSQEL

SEQ ID NO: 20589 - protein, 9 aa, Homo Sapiens
GSSQELDVK

SEQ ID NO: 20590 - protein, 9 aa, Homo Sapiens
SKAKTRTPL

SEQ ID NO: 20591 - protein, 9 aa, Homo Sapiens
KAKTRTPLR

SEQ ID NO: 20592 - protein, 9 aa, Homo Sapiens
KTRTPLRQR

SEQ ID NO: 20593 - protein, 9 aa, Homo Sapiens
RTPLRQRSR

SEQ ID NO: 20594 - protein, 9 aa, Homo Sapiens
RSRSGSSPE

SEQ ID NO: 20595 - protein, 9 aa, Homo Sapiens
SRSGSSPEV

SEQ ID NO: 20596 - protein, 9 aa, Homo Sapiens
GSSPEVDSK

SEQ ID NO: 20597 - protein, 9 aa, Homo Sapiens
PEVDSKSRL

SEQ ID NO: 20598 - protein, 9 aa, Homo Sapiens
DSKSRLSPR

SEQ ID NO: 20599 - protein, 9 aa, Homo Sapiens
SRLSPRRSR

SEQ ID NO: 20600 - protein, 9 aa, Homo Sapiens
SPRRSRSGS

SEQ ID NO: 20601 - protein, 9 aa, Homo Sapiens
RSRSGSSPE

SEQ ID NO: 20602 - protein, 9 aa, Homo Sapiens
SRSGSSPEV

SEQ ID NO: 20603 - protein, 9 aa, Homo Sapiens
RSGSSPEVK

SEQ ID NO: 20604 - protein, 9 aa, Homo Sapiens
KDKPRAAPR

SEQ ID NO: 20605 - protein, 9 aa, Homo Sapiens
KPRAAPRAQ

SEQ ID NO: 20606 - protein, 9 aa, Homo Sapiens
APRAQSGSD

SEQ ID NO: 20607 - protein, 9 aa, Homo Sapiens
GSDSSPEPK

SEQ ID NO: 20608 - protein, 9 aa, Homo Sapiens
APAPRALPR

SEQ ID NO: 20609 - protein, 9 aa, Homo Sapiens
APRALPRRS

SEQ ID NO: 20610 - protein, 9 aa, Homo Sapiens
LPRRSRSGS

SEQ ID NO: 20611 - protein, 9 aa, Homo Sapiens
RSRSGSSSK

SEQ ID NO: 20612 - protein, 9 aa, Homo Sapiens
RSGSSSKGR

SEQ ID NO: 20613 - protein, 9 aa, Homo Sapiens
ESSPEHPPK

SEQ ID NO: 20614 - protein, 9 aa, Homo Sapiens
HPPKSRTAR

SEQ ID NO: 20615 - protein, 9 aa, Homo Sapiens
KSRTARRGS

SEQ ID NO: 20616 - protein, 9 aa, Homo Sapiens
GSRSSPEPK

SEQ ID NO: 20617 - protein, 9 aa, Homo Sapiens
RSSPEPKTK

SEQ ID NO: 20618 - protein, 9 aa, Homo Sapiens
KTKSRTPPR

SEQ ID NO: 20619 - protein, 9 aa, Homo Sapiens
KSRTPPRRR

SEQ ID NO: 20620 - protein, 9 aa, Homo Sapiens
RRRSSRSSP

SEQ ID NO: 20621 - protein, 9 aa, Homo Sapiens
RRSSRSSPE

SEQ ID NO: 20622 - protein, 9 aa, Homo Sapiens
RSSRSSPEL

SEQ ID NO: 20623 - protein, 9 aa, Homo Sapiens
RSSPELTRK

SEQ ID NO: 20624 - protein, 9 aa, Homo Sapiens
LTRKARLSR

SEQ ID NO: 20625 - protein, 9 aa, Homo Sapiens
KARLSRRSR

SEQ ID NO: 20626 - protein, 9 aa, Homo Sapiens
RLSRRSRSA

SEQ ID NO: 20627 - protein, 9 aa, Homo Sapiens
RSRSASSSP

SEQ ID NO: 20628 - protein, 9 aa, Homo Sapiens
SASSSPETR

SEQ ID NO: 20629 - protein, 9 aa, Homo Sapiens
SSSPETRSR

SEQ ID NO: 20630 - protein, 9 aa, Homo Sapiens
ETRSRTPPR

SEQ ID NO: 20631 - protein, 9 aa, Homo Sapiens
RSRTPPRHR

SEQ ID NO: 20632 - protein, 9 aa, Homo Sapiens
PPRHRRSPS

SEQ ID NO: 20633 - protein, 9 aa, Homo Sapiens
VSSPEPAEK

SEQ ID NO: 20634 - protein, 9 aa, Homo Sapiens
AEKSRSSRR

SEQ ID NO: 20635 - protein, 9 aa, Homo Sapiens
KSRSSRRRR

SEQ ID NO: 20636 - protein, 9 aa, Homo Sapiens
RRRSASSPR

SEQ ID NO: 20637 - protein, 9 aa, Homo Sapiens
RSASSPRTK

SEQ ID NO: 20638 - protein, 9 aa, Homo Sapiens
SPRTKTTSR

SEQ ID NO: 20639 - protein, 9 aa, Homo Sapiens
TSRRGRSPS

SEQ ID NO: 20640 - protein, 9 aa, Homo Sapiens
RRGRSPSPK

SEQ ID NO: 20641 - protein, 9 aa, Homo Sapiens
RGRSPSPKP

SEQ ID NO: 20642 - protein, 9 aa, Homo Sapiens
SPSPKPRGL

SEQ ID NO: 20643 - protein, 9 aa, Homo Sapiens
RGLQRSRSR

SEQ ID NO: 20644 - protein, 9 aa, Homo Sapiens
LQRSRSRSR

SEQ ID NO: 20645 - protein, 9 aa, Homo Sapiens
RSRSRREKT

SEQ ID NO: 20646 - protein, 9 aa, Homo Sapiens
RREKTRTTR

SEQ ID NO: 20647 - protein, 9 aa, Homo Sapiens
REKTRTTRR

SEQ ID NO: 20648 - protein, 9 aa, Homo Sapiens
GSSQSTSRR

SEQ ID NO: 20649 - protein, 9 aa, Homo Sapiens
SSQSTSRRR

SEQ ID NO: 20650 - protein, 9 aa, Homo Sapiens
QSTSRRRQR

SEQ ID NO: 20651 - protein, 9 aa, Homo Sapiens
TSRRRQRSR

SEQ ID NO: 20652 - protein, 9 aa, Homo Sapiens
RRRQRSRSR

SEQ ID NO: 20653 - protein, 9 aa, Homo Sapiens
RRQRSRSRS

SEQ ID NO: 20654 - protein, 9 aa, Homo Sapiens
RQRSRSRSR

SEQ ID NO: 20655 - protein, 9 aa, Homo Sapiens
RSRSRSRVT

SEQ ID NO: 20656 - protein, 9 aa, Homo Sapiens
SRSRSRVTR

SEQ ID NO: 20657 - protein, 9 aa, Homo Sapiens
RSRSRVTRR

SEQ ID NO: 20658 - protein, 9 aa, Homo Sapiens
RSRVTRRRR

SEQ ID NO: 20659 - protein, 9 aa, Homo Sapiens
RRRRGGSGY

SEQ ID NO: 20660 - protein, 9 aa, Homo Sapiens
RRRGGSGYH

SEQ ID NO: 20661 - protein, 9 aa, Homo Sapiens
RRGGSGYHS

SEQ ID NO: 20662 - protein, 9 aa, Homo Sapiens
RGGSGYHSR

SEQ ID NO: 20663 - protein, 9 aa, Homo Sapiens
GYHSRSPAR

SEQ ID NO: 20664 - protein, 9 aa, Homo Sapiens
ESSRTSSRR

SEQ ID NO: 20665 - protein, 9 aa, Homo Sapiens
SSRTSSRRR

SEQ ID NO: 20666 - protein, 9 aa, Homo Sapiens
TSSRRRRGR

SEQ ID NO: 20667 - protein, 9 aa, Homo Sapiens
RRRGRSRTP

SEQ ID NO: 20668 - protein, 9 aa, Homo Sapiens
RRGRSRTPP

SEQ ID NO: 20669 - protein, 9 aa, Homo Sapiens
RGRSRTPPT

SEQ ID NO: 20670 - protein, 9 aa, Homo Sapiens
RSRTPPTSR

SEQ ID NO: 20671 - protein, 9 aa, Homo Sapiens
RTPPTSRKR

SEQ ID NO: 20672 - protein, 9 aa, Homo Sapiens
TSRKRSRSR

SEQ ID NO: 20673 - protein, 9 aa, Homo Sapiens
RSRSRTSPA

SEQ ID NO: 20674 - protein, 9 aa, Homo Sapiens
RSRTSPAPW

SEQ ID NO: 20675 - protein, 9 aa, Homo Sapiens
RTSPAPWKR

SEQ ID NO: 20676 - protein, 9 aa, Homo Sapiens
APWKRSRSR

SEQ ID NO: 20677 - protein, 9 aa, Homo Sapiens
KRSRSRASP

SEQ ID NO: 20678 - protein, 9 aa, Homo Sapiens
RSRSRASPA

SEQ ID NO: 20679 - protein, 9 aa, Homo Sapiens
RSRASPATH

SEQ ID NO: 20680 - protein, 9 aa, Homo Sapiens
RASPATHRR

SEQ ID NO: 20681 - protein, 9 aa, Homo Sapiens
SPATHRRSR

SEQ ID NO: 20682 - protein, 9 aa, Homo Sapiens
ATHRRSRSR

SEQ ID NO: 20683 - protein, 9 aa, Homo Sapiens
RRSRSRTPL

SEQ ID NO: 20684 - protein, 9 aa, Homo Sapiens
RSRSRTPLI

SEQ ID NO: 20685 - protein, 9 aa, Homo Sapiens
RSRTPLISR

SEQ ID NO: 20686 - protein, 9 aa, Homo Sapiens
RTPLISRRR

SEQ ID NO: 20687 - protein, 9 aa, Homo Sapiens
PLISRRRSR

SEQ ID NO: 20688 - protein, 9 aa, Homo Sapiens
ISRRRSRSR

SEQ ID NO: 20689 - protein, 9 aa, Homo Sapiens
RRSRSRTSP

SEQ ID NO: 20690 - protein, 9 aa, Homo Sapiens
RSRSRTSPV

SEQ ID NO: 20691 - protein, 9 aa, Homo Sapiens
RSRTSPVSR

SEQ ID NO: 20692 - protein, 9 aa, Homo Sapiens
RTSPVSRRR

SEQ ID NO: 20693 - protein, 9 aa, Homo Sapiens
SPVSRRRSR

SEQ ID NO: 20694 - protein, 9 aa, Homo Sapiens
VSRRRSRSR

SEQ ID NO: 20695 - protein, 9 aa, Homo Sapiens
RRSRSRTSV

SEQ ID NO: 20696 - protein, 9 aa, Homo Sapiens
RSRSRTSVT

SEQ ID NO: 20697 - protein, 9 aa, Homo Sapiens
RSRTSVTRR

SEQ ID NO: 20698 - protein, 9 aa, Homo Sapiens
TSVTRRRSR

SEQ ID NO: 20699 - protein, 9 aa, Homo Sapiens
VTRRRSRSR

SEQ ID NO: 20700 - protein, 9 aa, Homo Sapiens
RRSRSRASP

SEQ ID NO: 20701 - protein, 9 aa, Homo Sapiens
RSRSRASPV

SEQ ID NO: 20702 - protein, 9 aa, Homo Sapiens
RSRASPVSR

SEQ ID NO: 20703 - protein, 9 aa, Homo Sapiens
RASPVSRRR

SEQ ID NO: 20704 - protein, 9 aa, Homo Sapiens
SPVSRRRSR

SEQ ID NO: 20705 - protein, 9 aa, Homo Sapiens
VSRRRSRSR

SEQ ID NO: 20706 - protein, 9 aa, Homo Sapiens
RRSRSRTPP

SEQ ID NO: 20707 - protein, 9 aa, Homo Sapiens
RSRSRTPPV

SEQ ID NO: 20708 - protein, 9 aa, Homo Sapiens
RSRTPPVTR

SEQ ID NO: 20709 - protein, 9 aa, Homo Sapiens
RTPPVTRRR

SEQ ID NO: 20710 - protein, 9 aa, Homo Sapiens
VTRRRSRSR

SEQ ID NO: 20711 - protein, 9 aa, Homo Sapiens
RRSRSRTPT

SEQ ID NO: 20712 - protein, 9 aa, Homo Sapiens
RSRSRTPTT

SEQ ID NO: 20713 - protein, 9 aa, Homo Sapiens
RSRTPTTRR

SEQ ID NO: 20714 - protein, 9 aa, Homo Sapiens
TPTTRRRSR

SEQ ID NO: 20715 - protein, 9 aa, Homo Sapiens
TTRRRSRSR

SEQ ID NO: 20716 - protein, 9 aa, Homo Sapiens
RRSRSRTPP

SEQ ID NO: 20717 - protein, 9 aa, Homo Sapiens
RSRSRTPPV

SEQ ID NO: 20718 - protein, 9 aa, Homo Sapiens
RSRTPPVTR

SEQ ID NO: 20719 - protein, 9 aa, Homo Sapiens
RTPPVTRRR

SEQ ID NO: 20720 - protein, 9 aa, Homo Sapiens
VTRRRSRSR

SEQ ID NO: 20721 - protein, 9 aa, Homo Sapiens
RRSRSRTPP

SEQ ID NO: 20722 - protein, 9 aa, Homo Sapiens
RSRSRTPPV

SEQ ID NO: 20723 - protein, 9 aa, Homo Sapiens
RSRTPPVTR

SEQ ID NO: 20724 - protein, 9 aa, Homo Sapiens
RTPPVTRRR

SEQ ID NO: 20725 - protein, 9 aa, Homo Sapiens
VTRRRSRSR

SEQ ID NO: 20726 - protein, 9 aa, Homo Sapiens
RRSRSRTSP

SEQ ID NO: 20727 - protein, 9 aa, Homo Sapiens
RSRSRTSPI

SEQ ID NO: 20728 - protein, 9 aa, Homo Sapiens
RSRTSPITR

SEQ ID NO: 20729 - protein, 9 aa, Homo Sapiens
RTSPITRRR

SEQ ID NO: 20730 - protein, 9 aa, Homo Sapiens
SPITRRRSR

SEQ ID NO: 20731 - protein, 9 aa, Homo Sapiens
ITRRRSRSR

SEQ ID NO: 20732 - protein, 9 aa, Homo Sapiens
RRSRSRTSP

SEQ ID NO: 20733 - protein, 9 aa, Homo Sapiens
RSRSRTSPV

SEQ ID NO: 20734 - protein, 9 aa, Homo Sapiens
RSRTSPVTR

SEQ ID NO: 20735 - protein, 9 aa, Homo Sapiens
RTSPVTRRR

SEQ ID NO: 20736 - protein, 9 aa, Homo Sapiens
SPVTRRRSR

SEQ ID NO: 20737 - protein, 9 aa, Homo Sapiens
VTRRRSRSR

SEQ ID NO: 20738 - protein, 9 aa, Homo Sapiens
RRSRSRTSP

SEQ ID NO: 20739 - protein, 9 aa, Homo Sapiens
RSRSRTSPV

SEQ ID NO: 20740 - protein, 9 aa, Homo Sapiens
RSRTSPVTR

SEQ ID NO: 20741 - protein, 9 aa, Homo Sapiens
RTSPVTRRR

SEQ ID NO: 20742 - protein, 9 aa, Homo Sapiens
SPVTRRRSR

SEQ ID NO: 20743 - protein, 9 aa, Homo Sapiens
VTRRRSRSR

SEQ ID NO: 20744 - protein, 9 aa, Homo Sapiens
RRSRSRTSP

SEQ ID NO: 20745 - protein, 9 aa, Homo Sapiens
RSRSRTSPV

SEQ ID NO: 20746 - protein, 9 aa, Homo Sapiens
RSRTSPVTR

SEQ ID NO: 20747 - protein, 9 aa, Homo Sapiens
RTSPVTRRR

SEQ ID NO: 20748 - protein, 9 aa, Homo Sapiens
SPVTRRRSR

SEQ ID NO: 20749 - protein, 9 aa, Homo Sapiens
VTRRRSRSR

SEQ ID NO: 20750 - protein, 9 aa, Homo Sapiens
RRSRSRTPP

SEQ ID NO: 20751 - protein, 9 aa, Homo Sapiens
RSRSRTPPA

SEQ ID NO: 20752 - protein, 9 aa, Homo Sapiens
RSRTPPAIR

SEQ ID NO: 20753 - protein, 9 aa, Homo Sapiens
RTPPAIRRR

SEQ ID NO: 20754 - protein, 9 aa, Homo Sapiens
AIRRRSRSR

SEQ ID NO: 20755 - protein, 9 aa, Homo Sapiens
RRSRSRTPL

SEQ ID NO: 20756 - protein, 9 aa, Homo Sapiens
RSRSRTPLL

SEQ ID NO: 20757 - protein, 9 aa, Homo Sapiens
RSRTPLLPR

SEQ ID NO: 20758 - protein, 9 aa, Homo Sapiens
RTPLLPRKR

SEQ ID NO: 20759 - protein, 9 aa, Homo Sapiens
LPRKRSRSR

SEQ ID NO: 20760 - protein, 9 aa, Homo Sapiens
KRSRSRSPL

SEQ ID NO: 20761 - protein, 9 aa, Homo Sapiens
RSRSRSPLA

SEQ ID NO: 20762 - protein, 9 aa, Homo Sapiens
RSRSPLAIR

SEQ ID NO: 20763 - protein, 9 aa, Homo Sapiens
RSPLAIRRR

SEQ ID NO: 20764 - protein, 9 aa, Homo Sapiens
AIRRRSRSR

SEQ ID NO: 20765 - protein, 9 aa, Homo Sapiens
RRSRSRTPR

SEQ ID NO: 20766 - protein, 9 aa, Homo Sapiens
RSRSRTPRT

SEQ ID NO: 20767 - protein, 9 aa, Homo Sapiens
RSRTPRTAR

SEQ ID NO: 20768 - protein, 9 aa, Homo Sapiens
RTPRTARGK

SEQ ID NO: 20769 - protein, 9 aa, Homo Sapiens
RTARGKRSL

SEQ ID NO: 20770 - protein, 9 aa, Homo Sapiens
RSLTRSPPA

SEQ ID NO: 20771 - protein, 9 aa, Homo Sapiens
SLTRSPPAI

SEQ ID NO: 20772 - protein, 9 aa, Homo Sapiens
LTRSPPAIR

SEQ ID NO: 20773 - protein, 9 aa, Homo Sapiens
RSPPAIRRR

SEQ ID NO: 20774 - protein, 9 aa, Homo Sapiens
PPAIRRRSA

SEQ ID NO: 20775 - protein, 9 aa, Homo Sapiens
RRSASGSSS

SEQ ID NO: 20776 - protein, 9 aa, Homo Sapiens
SASGSSSDR

SEQ ID NO: 20777 - protein, 9 aa, Homo Sapiens
RSRSATPPA

SEQ ID NO: 20778 - protein, 9 aa, Homo Sapiens
RSATPPATR

SEQ ID NO: 20779 - protein, 9 aa, Homo Sapiens
ATRNHSGSR

SEQ ID NO: 20780 - protein, 9 aa, Homo Sapiens
HSGSRTPPV

SEQ ID NO: 20781 - protein, 9 aa, Homo Sapiens
TPPVALNSS

SEQ ID NO: 20782 - protein, 9 aa, Homo Sapiens
PVALNSSRM

SEQ ID NO: 20783 - protein, 9 aa, Homo Sapiens
ALNSSRMSC

SEQ ID NO: 20784 - protein, 9 aa, Homo Sapiens
SSRMSCFSR

SEQ ID NO: 20785 - protein, 9 aa, Homo Sapiens
RMSCFSRPS

SEQ ID NO: 20786 - protein, 9 aa, Homo Sapiens
RPSMSPTPL

SEQ ID NO: 20787 - protein, 9 aa, Homo Sapiens
SMSPTPLDR

SEQ ID NO: 20788 - protein, 9 aa, Homo Sapiens
MLEPLGSSR

SEQ ID NO: 20789 - protein, 9 aa, Homo Sapiens
PLGSSRTPM

SEQ ID NO: 20790 - protein, 9 aa, Homo Sapiens
TPMSVLQQA

SEQ ID NO: 20791 - protein, 9 aa, Homo Sapiens
VLQQAGGSM

SEQ ID NO: 20792 - protein, 9 aa, Homo Sapiens
LQQAGGSMM

SEQ ID NO: 20793 - protein, 9 aa, Homo Sapiens
SMMDGPGPR

SEQ ID NO: 20794 - protein, 9 aa, Homo Sapiens
MMDGPGPRI

SEQ ID NO: 20795 - protein, 9 aa, Homo Sapiens
IPDHQRTSV

SEQ ID NO: 20796 - protein, 9 aa, Homo Sapiens
NHAQSRIAL

SEQ ID NO: 20797 - protein, 9 aa, Homo Sapiens
AQSRIALAL

SEQ ID NO: 20798 - protein, 9 aa, Homo Sapiens
RIALALTAI

SEQ ID NO: 20799 - protein, 9 aa, Homo Sapiens
ALALTAISL

SEQ ID NO: 20800 - protein, 9 aa, Homo Sapiens
ALTAISLGT

SEQ ID NO: 20801 - protein, 9 aa, Homo Sapiens
LTAISLGTA

SEQ ID NO: 20802 - protein, 9 aa, Homo Sapiens
TAISLGTAR

SEQ ID NO: 20803 - protein, 9 aa, Homo Sapiens
GTARPPPSM

SEQ ID NO: 20804 - protein, 9 aa, Homo Sapiens
RPPPSMSAA

SEQ ID NO: 20805 - protein, 9 aa, Homo Sapiens
SMSAAGLAA

SEQ ID NO: 20806 - protein, 9 aa, Homo Sapiens
MSAAGLAAR

SEQ ID NO: 20807 - protein, 9 aa, Homo Sapiens
SAAGLAARM

SEQ ID NO: 20808 - protein, 9 aa, Homo Sapiens
GLAARMSQV

SEQ ID NO: 20809 - protein, 9 aa, Homo Sapiens
AARMSQVPA

SEQ ID NO: 20810 - protein, 9 aa, Homo Sapiens
RMSQVPAPV

SEQ ID NO: 20811 - protein, 9 aa, Homo Sapiens
SQVPAPVPL

SEQ ID NO: 20812 - protein, 9 aa, Homo Sapiens
QVPAPVPLM

SEQ ID NO: 20813 - protein, 9 aa, Homo Sapiens
APVPLMSLR

SEQ ID NO: 20814 - protein, 9 aa, Homo Sapiens
VPLMSLRTA

SEQ ID NO: 20815 - protein, 9 aa, Homo Sapiens
LMSLRTAPA

SEQ ID NO: 20816 - protein, 9 aa, Homo Sapiens
MSLRTAPAA

SEQ ID NO: 20817 - protein, 9 aa, Homo Sapiens
RTAPAANLA

SEQ ID NO: 20818 - protein, 9 aa, Homo Sapiens
NLASRIPAA

SEQ ID NO: 20819 - protein, 9 aa, Homo Sapiens
RIPAASAAA

SEQ ID NO: 20820 - protein, 9 aa, Homo Sapiens
IPAASAAAM

SEQ ID NO: 20821 - protein, 9 aa, Homo Sapiens
ASAAAMNLA

SEQ ID NO: 20822 - protein, 9 aa, Homo Sapiens
AAAMNLASA

SEQ ID NO: 20823 - protein, 9 aa, Homo Sapiens
AAMNLASAR

SEQ ID NO: 20824 - protein, 9 aa, Homo Sapiens
AMNLASART

SEQ ID NO: 20825 - protein, 9 aa, Homo Sapiens
NLASARTPA

SEQ ID NO: 20826 - protein, 9 aa, Homo Sapiens
LASARTPAI

SEQ ID NO: 20827 - protein, 9 aa, Homo Sapiens
RTPAIPTAV

SEQ ID NO: 20828 - protein, 9 aa, Homo Sapiens
AIPTAVNLA

SEQ ID NO: 20829 - protein, 9 aa, Homo Sapiens
TAVNLADSR

SEQ ID NO: 20830 - protein, 9 aa, Homo Sapiens
NLADSRTPA

SEQ ID NO: 20831 - protein, 9 aa, Homo Sapiens
LADSRTPAA

SEQ ID NO: 20832 - protein, 9 aa, Homo Sapiens
RTPAAAAAM

SEQ ID NO: 20833 - protein, 9 aa, Homo Sapiens
TPAAAAAMN

SEQ ID NO: 20834 - protein, 9 aa, Homo Sapiens
AAAAAMNLA

SEQ ID NO: 20835 - protein, 9 aa, Homo Sapiens
AAMNLASPR

SEQ ID NO: 20836 - protein, 9 aa, Homo Sapiens
NLASPRTAV

SEQ ID NO: 20837 - protein, 9 aa, Homo Sapiens
LASPRTAVA

SEQ ID NO: 20838 - protein, 9 aa, Homo Sapiens
SPRTAVAPS

SEQ ID NO: 20839 - protein, 9 aa, Homo Sapiens
RTAVAPSAV

SEQ ID NO: 20840 - protein, 9 aa, Homo Sapiens
AVAPSAVNL

SEQ ID NO: 20841 - protein, 9 aa, Homo Sapiens
SAVNLADPR

SEQ ID NO: 20842 - protein, 9 aa, Homo Sapiens
NLADPRTPT

SEQ ID NO: 20843 - protein, 9 aa, Homo Sapiens
LADPRTPTA

SEQ ID NO: 20844 - protein, 9 aa, Homo Sapiens
DPRTPTAPA

SEQ ID NO: 20845 - protein, 9 aa, Homo Sapiens
TPTAPAVNL

SEQ ID NO: 20846 - protein, 9 aa, Homo Sapiens
APAVNLAGA

SEQ ID NO: 20847 - protein, 9 aa, Homo Sapiens
NLAGARTPA

SEQ ID NO: 20848 - protein, 9 aa, Homo Sapiens
LAGARTPAA

SEQ ID NO: 20849 - protein, 9 aa, Homo Sapiens
RTPAALAAL

SEQ ID NO: 20850 - protein, 9 aa, Homo Sapiens
TPAALAALS

SEQ ID NO: 20851 - protein, 9 aa, Homo Sapiens
ALAALSLTG

SEQ ID NO: 20852 - protein, 9 aa, Homo Sapiens
ALSLTGSGT

SEQ ID NO: 20853 - protein, 9 aa, Homo Sapiens
GTPPTAANY

SEQ ID NO: 20854 - protein, 9 aa, Homo Sapiens
AANYPSSSR

SEQ ID NO: 20855 - protein, 9 aa, Homo Sapiens
YPSSSRTPQ

SEQ ID NO: 20856 - protein, 9 aa, Homo Sapiens
RTPQAPASA

SEQ ID NO: 20857 - protein, 9 aa, Homo Sapiens
QAPASANLV

SEQ ID NO: 20858 - protein, 9 aa, Homo Sapiens
APASANLVG

SEQ ID NO: 20859 - protein, 9 aa, Homo Sapiens
ASANLVGPR

SEQ ID NO: 20860 - protein, 9 aa, Homo Sapiens
LVGPRSAHA

SEQ ID NO: 20861 - protein, 9 aa, Homo Sapiens
GPRSAHATA

SEQ ID NO: 20862 - protein, 9 aa, Homo Sapiens
RSAHATAPV

SEQ ID NO: 20863 - protein, 9 aa, Homo Sapiens
NIAGSRTAA

SEQ ID NO: 20864 - protein, 9 aa, Homo Sapiens
RTAAALAPA

SEQ ID NO: 20865 - protein, 9 aa, Homo Sapiens
AAALAPASL

SEQ ID NO: 20866 - protein, 9 aa, Homo Sapiens
ALAPASLTS

SEQ ID NO: 20867 - protein, 9 aa, Homo Sapiens
LAPASLTSA

SEQ ID NO: 20868 - protein, 9 aa, Homo Sapiens
APASLTSAR

SEQ ID NO: 20869 - protein, 9 aa, Homo Sapiens
LTSARMAPA

SEQ ID NO: 20870 - protein, 9 aa, Homo Sapiens
TSARMAPAL

SEQ ID NO: 20871 - protein, 9 aa, Homo Sapiens
RMAPALSGA

SEQ ID NO: 20872 - protein, 9 aa, Homo Sapiens
APALSGANL

SEQ ID NO: 20873 - protein, 9 aa, Homo Sapiens
ALSGANLTS

SEQ ID NO: 20874 - protein, 9 aa, Homo Sapiens
SGANLTSPR

SEQ ID NO: 20875 - protein, 9 aa, Homo Sapiens
NLTSPRVPL

SEQ ID NO: 20876 - protein, 9 aa, Homo Sapiens
SPRVPLSAY

SEQ ID NO: 20877 - protein, 9 aa, Homo Sapiens
RVPLSAYER

SEQ ID NO: 20878 - protein, 9 aa, Homo Sapiens
VPLSAYERV

SEQ ID NO: 20879 - protein, 9 aa, Homo Sapiens
SAYERVSGR

SEQ ID NO: 20880 - protein, 9 aa, Homo Sapiens
RTSPPLLDR

SEQ ID NO: 20881 - protein, 9 aa, Homo Sapiens
TSPPLLDRA

SEQ ID NO: 20882 - protein, 9 aa, Homo Sapiens
LLDRARSRT

SEQ ID NO: 20883 - protein, 9 aa, Homo Sapiens
RARSRTPPS

SEQ ID NO: 20884 - protein, 9 aa, Homo Sapiens
RTPPSAPSQ

SEQ ID NO: 20885 - protein, 9 aa, Homo Sapiens
APSQSRMTS

SEQ ID NO: 20886 - protein, 9 aa, Homo Sapiens
SQSRMTSER

SEQ ID NO: 20887 - protein, 9 aa, Homo Sapiens
APSPSSRMG

SEQ ID NO: 20888 - protein, 9 aa, Homo Sapiens
SPSSRMGQA

SEQ ID NO: 20889 - protein, 9 aa, Homo Sapiens
SSRMGQAPS

SEQ ID NO: 20890 - protein, 9 aa, Homo Sapiens
MGQAPSQSL

SEQ ID NO: 20891 - protein, 9 aa, Homo Sapiens
GQAPSQSLL

SEQ ID NO: 20892 - protein, 9 aa, Homo Sapiens
APSQSLLPP

SEQ ID NO: 20893 - protein, 9 aa, Homo Sapiens
SLLPPAQDQ

SEQ ID NO: 20894 - protein, 9 aa, Homo Sapiens
AQDQPRSPV

SEQ ID NO: 20895 - protein, 9 aa, Homo Sapiens
QPRSPVPSA

SEQ ID NO: 20896 - protein, 9 aa, Homo Sapiens
CLIAQTTPV

SEQ ID NO: 20897 - protein, 9 aa, Homo Sapiens
LIAQTTPVA

SEQ ID NO: 20898 - protein, 9 aa, Homo Sapiens
TPVAGSQSL

SEQ ID NO: 20899 - protein, 9 aa, Homo Sapiens
SQSLSSGAV

SEQ ID NO: 20900 - protein, 9 aa, Homo Sapiens
SLSSGAVAT

SEQ ID NO: 20901 - protein, 9 aa, Homo Sapiens
AVATTTSSA

SEQ ID NO: 20902 - protein, 9 aa, Homo Sapiens
MLSVPAPGV

SEQ ID NO: 20903 - protein, 9 aa, Homo Sapiens
APGVPHSDV

SEQ ID NO: 20904 - protein, 9 aa, Homo Sapiens
DVGEPPAST

SEQ ID NO: 20905 - protein, 9 aa, Homo Sapiens
TGAQQPSAL

SEQ ID NO: 20906 - protein, 9 aa, Homo Sapiens
AQQPSALAA

SEQ ID NO: 20907 - protein, 9 aa, Homo Sapiens
QQPSALAAL

SEQ ID NO: 20908 - protein, 9 aa, Homo Sapiens
SALAALQPA

SEQ ID NO: 20909 - protein, 9 aa, Homo Sapiens
ALAALQPAK

SEQ ID NO: 20910 - protein, 9 aa, Homo Sapiens
ALQPAKERR

SEQ ID NO: 20911 - protein, 9 aa, Homo Sapiens
QPAKERRSS

SEQ ID NO: 20912 - protein, 9 aa, Homo Sapiens
RRSSSSSSS

SEQ ID NO: 20913 - protein, 9 aa, Homo Sapiens
SSLPVQPEV

SEQ ID NO: 20914 - protein, 9 aa, Homo Sapiens
SLPVQPEVA

SEQ ID NO: 20915 - protein, 9 aa, Homo Sapiens
LPVQPEVAL

SEQ ID NO: 20916 - protein, 9 aa, Homo Sapiens
PVQPEVALK

SEQ ID NO: 20917 - protein, 9 aa, Homo Sapiens
EVALKRVPS

SEQ ID NO: 20918 - protein, 9 aa, Homo Sapiens
ALKRVPSPT

SEQ ID NO: 20919 - protein, 9 aa, Homo Sapiens
TPAPKEAVR

SEQ ID NO: 20920 - protein, 9 aa, Homo Sapiens
AVREGRPPE

SEQ ID NO: 20921 - protein, 9 aa, Homo Sapiens
RPPEPTPAK

SEQ ID NO: 20922 - protein, 9 aa, Homo Sapiens
EPTPAKRKR

SEQ ID NO: 20923 - protein, 9 aa, Homo Sapiens
TPAKRKRRS

SEQ ID NO: 20924 - protein, 9 aa, Homo Sapiens
RRSSSSSSS

SEQ ID NO: 20925 - protein, 9 aa, Homo Sapiens
SSSSPSPAK

SEQ ID NO: 20926 - protein, 9 aa, Homo Sapiens
SPAKPGPQA

SEQ ID NO: 20927 - protein, 9 aa, Homo Sapiens
KPGPQALPK

SEQ ID NO: 20928 - protein, 9 aa, Homo Sapiens
ALPKPASPK

SEQ ID NO: 20929 - protein, 9 aa, Homo Sapiens
LPKPASPKK

SEQ ID NO: 20930 - protein, 9 aa, Homo Sapiens
GERRSRSPR

SEQ ID NO: 20931 - protein, 9 aa, Homo Sapiens
ERRSRSPRK

SEQ ID NO: 20932 - protein, 9 aa, Homo Sapiens
RSRSPRKPI

SEQ ID NO: 20933 - protein, 9 aa, Homo Sapiens
SPRKPIDSL

SEQ ID NO: 20934 - protein, 9 aa, Homo Sapiens
SLRDSRSLS

SEQ ID NO: 20935 - protein, 9 aa, Homo Sapiens
SRSLSYSPV

SEQ ID NO: 20936 - protein, 9 aa, Homo Sapiens
SLSYSPVER

SEQ ID NO: 20937 - protein, 9 aa, Homo Sapiens
LSYSPVERR

SEQ ID NO: 20938 - protein, 9 aa, Homo Sapiens
SYSPVERRR

SEQ ID NO: 20939 - protein, 9 aa, Homo Sapiens
SPVERRRPS

SEQ ID NO: 20940 - protein, 9 aa, Homo Sapiens
RRRPSPQPS

SEQ ID NO: 20941 - protein, 9 aa, Homo Sapiens
RPSPQPSPR

SEQ ID NO: 20942 - protein, 9 aa, Homo Sapiens
SPRDQQSSS

SEQ ID NO: 20943 - protein, 9 aa, Homo Sapiens
DQQSSSSER

SEQ ID NO: 20944 - protein, 9 aa, Homo Sapiens
SSSSERGSR

SEQ ID NO: 20945 - protein, 9 aa, Homo Sapiens
SSSERGSRR

SEQ ID NO: 20946 - protein, 9 aa, Homo Sapiens
ERGSRRGQR

SEQ ID NO: 20947 - protein, 9 aa, Homo Sapiens
RRGQRGDSR

SEQ ID NO: 20948 - protein, 9 aa, Homo Sapiens
DSRSPSHKR

SEQ ID NO: 20949 - protein, 9 aa, Homo Sapiens
RSPSHKRRR

SEQ ID NO: 20950 - protein, 9 aa, Homo Sapiens
SPSHKRRRE

SEQ ID NO: 20951 - protein, 9 aa, Homo Sapiens
RRRETPSPR

SEQ ID NO: 20952 - protein, 9 aa, Homo Sapiens
RETPSPRPM

SEQ ID NO: 20953 - protein, 9 aa, Homo Sapiens
ETPSPRPMR

SEQ ID NO: 20954 - protein, 9 aa, Homo Sapiens
SPRPMRHRS

SEQ ID NO: 20955 - protein, 9 aa, Homo Sapiens
RPMRHRSSR

SEQ ID NO: 20956 - protein, 10 aa, Homo Sapiens
TPRGSGTNGY

SEQ ID NO: 20957 - protein, 10 aa, Homo Sapiens
YVQRNLSLVR

SEQ ID NO: 20958 - protein, 10 aa, Homo Sapiens
QRNLSLVRGR

SEQ ID NO: 20959 - protein, 10 aa, Homo Sapiens
RNLSLVRGRR

SEQ ID NO: 20960 - protein, 10 aa, Homo Sapiens
SLVRGRRGER

SEQ ID NO: 20961 - protein, 10 aa, Homo Sapiens
RGRRGERPDY

SEQ ID NO: 20962 - protein, 10 aa, Homo Sapiens
RPDYKGEEEL

SEQ ID NO: 20963 - protein, 10 aa, Homo Sapiens
DYKGEEELRR

SEQ ID NO: 20964 - protein, 10 aa, Homo Sapiens
EEELRRLEAA

SEQ ID NO: 20965 - protein, 10 aa, Homo Sapiens
EELRRLEAAL

SEQ ID NO: 20966 - protein, 10 aa, Homo Sapiens
ELRRLEAALV

SEQ ID NO: 20967 - protein, 10 aa, Homo Sapiens
LRRLEAALVK

SEQ ID NO: 20968 - protein, 10 aa, Homo Sapiens
RRLEAALVKR

SEQ ID NO: 20969 - protein, 10 aa, Homo Sapiens
ALVKRPNPDI

SEQ ID NO: 20970 - protein, 10 aa, Homo Sapiens
DILDHERKRR

SEQ ID NO: 20971 - protein, 10 aa, Homo Sapiens
ILDHERKRRV

SEQ ID NO: 20972 - protein, 10 aa, Homo Sapiens
DHERKRRVEL

SEQ ID NO: 20973 - protein, 10 aa, Homo Sapiens
HERKRRVELR

SEQ ID NO: 20974 - protein, 10 aa, Homo Sapiens
RRVELRCLEL

SEQ ID NO: 20975 - protein, 10 aa, Homo Sapiens
MMEEQGYEEQ

SEQ ID NO: 20976 - protein, 10 aa, Homo Sapiens
EEQGYEEQQI

SEQ ID NO: 20977 - protein, 10 aa, Homo Sapiens
GYEEQQIQEK

SEQ ID NO: 20978 - protein, 10 aa, Homo Sapiens
EEQQIQEKVA

SEQ ID NO: 20979 - protein, 10 aa, Homo Sapiens
QQIQEKVATF

SEQ ID NO: 20980 - protein, 10 aa, Homo Sapiens
QIQEKVATFR

SEQ ID NO: 20981 - protein, 10 aa, Homo Sapiens
IQEKVATFRL

SEQ ID NO: 20982 - protein, 10 aa, Homo Sapiens
KVATFRLMLL

SEQ ID NO: 20983 - protein, 10 aa, Homo Sapiens
ATFRLMLLEK

SEQ ID NO: 20984 - protein, 10 aa, Homo Sapiens
MLLEKDVNPG

SEQ ID NO: 20985 - protein, 10 aa, Homo Sapiens
EETPGQRPAV

SEQ ID NO: 20986 - protein, 10 aa, Homo Sapiens
ETPGQRPAVT

SEQ ID NO: 20987 - protein, 10 aa, Homo Sapiens
GQRPAVTETH

SEQ ID NO: 20988 - protein, 10 aa, Homo Sapiens
RPAVTETHQL

SEQ ID NO: 20989 - protein, 10 aa, Homo Sapiens
VTETHQLAEL

SEQ ID NO: 20990 - protein, 10 aa, Homo Sapiens
HQLAELNEKK

SEQ ID NO: 20991 - protein, 10 aa, Homo Sapiens
ELNEKKNERL

SEQ ID NO: 20992 - protein, 10 aa, Homo Sapiens
RAAFGISDSY

SEQ ID NO: 20993 - protein, 10 aa, Homo Sapiens
AAFGISDSYV

SEQ ID NO: 20994 - protein, 10 aa, Homo Sapiens
YVDGSSFDPQ

SEQ ID NO: 20995 - protein, 10 aa, Homo Sapiens
DGSSFDPQRR

SEQ ID NO: 20996 - protein, 10 aa, Homo Sapiens
SSFDPQRRAR

SEQ ID NO: 20997 - protein, 10 aa, Homo Sapiens
RAREAKQPAP

SEQ ID NO: 20998 - protein, 10 aa, Homo Sapiens
AKQPAPEPPK

SEQ ID NO: 20999 - protein, 10 aa, Homo Sapiens
QPAPEPPKPY

SEQ ID NO: 21000 - protein, 10 aa, Homo Sapiens
APEPPKPYSL

SEQ ID NO: 21001 - protein, 10 aa, Homo Sapiens
EPPKPYSLVR

SEQ ID NO: 21002 - protein, 10 aa, Homo Sapiens
KPYSLVRESS

SEQ ID NO: 21003 - protein, 10 aa, Homo Sapiens
SLVRESSSSR

SEQ ID NO: 21004 - protein, 10 aa, Homo Sapiens
SSSSRSPTPK

SEQ ID NO: 21005 - protein, 10 aa, Homo Sapiens
SSRSPTPKQK

SEQ ID NO: 21006 - protein, 10 aa, Homo Sapiens
RSPTPKQKKK

SEQ ID NO: 21007 - protein, 10 aa, Homo Sapiens
KKKKKKDRGR

SEQ ID NO: 21008 - protein, 10 aa, Homo Sapiens
KKKKKDRGRR

SEQ ID NO: 21009 - protein, 10 aa, Homo Sapiens
GRRSESSSPR

SEQ ID NO: 21010 - protein, 10 aa, Homo Sapiens
RRSESSSPRR

SEQ ID NO: 21011 - protein, 10 aa, Homo Sapiens
ESSSPRRERK

SEQ ID NO: 21012 - protein, 10 aa, Homo Sapiens
SSSPRRERKK

SEQ ID NO: 21013 - protein, 10 aa, Homo Sapiens
SPRRERKKSS

SEQ ID NO: 21014 - protein, 10 aa, Homo Sapiens
RRERKKSSKK

SEQ ID NO: 21015 - protein, 10 aa, Homo Sapiens
RERKKSSKKK

SEQ ID NO: 21016 - protein, 10 aa, Homo Sapiens
KKSSKKKKHR

SEQ ID NO: 21017 - protein, 10 aa, Homo Sapiens
KKHRSESESK

SEQ ID NO: 21018 - protein, 10 aa, Homo Sapiens
KHRSESESKK

SEQ ID NO: 21019 - protein, 10 aa, Homo Sapiens
RSESESKKRK

SEQ ID NO: 21020 - protein, 10 aa, Homo Sapiens
ESESKKRKHR

SEQ ID NO: 21021 - protein, 10 aa, Homo Sapiens
KRKHRSPTPK

SEQ ID NO: 21022 - protein, 10 aa, Homo Sapiens
KHRSPTPKSK

SEQ ID NO: 21023 - protein, 10 aa, Homo Sapiens
RSPTPKSKRK

SEQ ID NO: 21024 - protein, 10 aa, Homo Sapiens
KSKRKSKDKK

SEQ ID NO: 21025 - protein, 10 aa, Homo Sapiens
RKSKDKKRKR

SEQ ID NO: 21026 - protein, 10 aa, Homo Sapiens
RKRSRSTTPA

SEQ ID NO: 21027 - protein, 10 aa, Homo Sapiens
RSRSTTPAPK

SEQ ID NO: 21028 - protein, 10 aa, Homo Sapiens
RSTTPAPKSR

SEQ ID NO: 21029 - protein, 10 aa, Homo Sapiens
STTPAPKSRR

SEQ ID NO: 21030 - protein, 10 aa, Homo Sapiens
TTPAPKSRRA

SEQ ID NO: 21031 - protein, 10 aa, Homo Sapiens
TPAPKSRRAH

SEQ ID NO: 21032 - protein, 10 aa, Homo Sapiens
PAPKSRRAHR

SEQ ID NO: 21033 - protein, 10 aa, Homo Sapiens
APKSRRAHRS

SEQ ID NO: 21034 - protein, 10 aa, Homo Sapiens
KSRRAHRSTS

SEQ ID NO: 21035 - protein, 10 aa, Homo Sapiens
DSASSSDTSR

SEQ ID NO: 21036 - protein, 10 aa, Homo Sapiens
ASSSDTSRSR

SEQ ID NO: 21037 - protein, 10 aa, Homo Sapiens
SSDTSRSRSR

SEQ ID NO: 21038 - protein, 10 aa, Homo Sapiens
RSRSRSAAAK

SEQ ID NO: 21039 - protein, 10 aa, Homo Sapiens
RSRSAAAKTH

SEQ ID NO: 21040 - protein, 10 aa, Homo Sapiens
SAAAKTHTTA

SEQ ID NO: 21041 - protein, 10 aa, Homo Sapiens
AAAKTHTTAL

SEQ ID NO: 21042 - protein, 10 aa, Homo Sapiens
AAKTHTTALA

SEQ ID NO: 21043 - protein, 10 aa, Homo Sapiens
KTHTTALAGR

SEQ ID NO: 21044 - protein, 10 aa, Homo Sapiens
TTALAGRSPS

SEQ ID NO: 21045 - protein, 10 aa, Homo Sapiens
ALAGRSPSPA

SEQ ID NO: 21046 - protein, 10 aa, Homo Sapiens
SPASGRRGEG

SEQ ID NO: 21047 - protein, 10 aa, Homo Sapiens
GRRGEGDAPF

SEQ ID NO: 21048 - protein, 10 aa, Homo Sapiens
RPSSPETATK

SEQ ID NO: 21049 - protein, 10 aa, Homo Sapiens
TATKQPSSPY

SEQ ID NO: 21050 - protein, 10 aa, Homo Sapiens
PYEDKDKDKK

SEQ ID NO: 21051 - protein, 10 aa, Homo Sapiens
ATRPSPSPER

SEQ ID NO: 21052 - protein, 10 aa, Homo Sapiens
RPSPSPERSS

SEQ ID NO: 21053 - protein, 10 aa, Homo Sapiens
SPSPERSSTG

SEQ ID NO: 21054 - protein, 10 aa, Homo Sapiens
SPERSSTGPE

SEQ ID NO: 21055 - protein, 10 aa, Homo Sapiens
GPEPPAPTPL

SEQ ID NO: 21056 - protein, 10 aa, Homo Sapiens
PEPPAPTPLL

SEQ ID NO: 21057 - protein, 10 aa, Homo Sapiens
EPPAPTPLLA

SEQ ID NO: 21058 - protein, 10 aa, Homo Sapiens
SPQPLATTPL

SEQ ID NO: 21059 - protein, 10 aa, Homo Sapiens
ATTPLSQEPV

SEQ ID NO: 21060 - protein, 10 aa, Homo Sapiens
EPVNPPSEAS

SEQ ID NO: 21061 - protein, 10 aa, Homo Sapiens
NPPSEASPTR

SEQ ID NO: 21062 - protein, 10 aa, Homo Sapiens
SPTRDRSPPK

SEQ ID NO: 21063 - protein, 10 aa, Homo Sapiens
SSPPSPQPTK

SEQ ID NO: 21064 - protein, 10 aa, Homo Sapiens
HASSSPESPK

SEQ ID NO: 21065 - protein, 10 aa, Homo Sapiens
SPESPKPAPA

SEQ ID NO: 21066 - protein, 10 aa, Homo Sapiens
APAPGSHREI

SEQ ID NO: 21067 - protein, 10 aa, Homo Sapiens
REISSSPTSK

SEQ ID NO: 21068 - protein, 10 aa, Homo Sapiens
ISSSPTSKNR

SEQ ID NO: 21069 - protein, 10 aa, Homo Sapiens
PTSKNRSHGR

SEQ ID NO: 21070 - protein, 10 aa, Homo Sapiens
KNRSHGRAKR

SEQ ID NO: 21071 - protein, 10 aa, Homo Sapiens
RSHGRAKRDK

SEQ ID NO: 21072 - protein, 10 aa, Homo Sapiens
KSHSHTPSRR

SEQ ID NO: 21073 - protein, 10 aa, Homo Sapiens
SHTPSRRMGR

SEQ ID NO: 21074 - protein, 10 aa, Homo Sapiens
RRMGRSRSPA

SEQ ID NO: 21075 - protein, 10 aa, Homo Sapiens
GRSRSPATAK

SEQ ID NO: 21076 - protein, 10 aa, Homo Sapiens
RSRSPATAKR

SEQ ID NO: 21077 - protein, 10 aa, Homo Sapiens
RSPATAKRGR

SEQ ID NO: 21078 - protein, 10 aa, Homo Sapiens
TAKRGRSRSR

SEQ ID NO: 21079 - protein, 10 aa, Homo Sapiens
RGRSRSRTPT

SEQ ID NO: 21080 - protein, 10 aa, Homo Sapiens
GRSRSRTPTK

SEQ ID NO: 21081 - protein, 10 aa, Homo Sapiens
RSRSRTPTKR

SEQ ID NO: 21082 - protein, 10 aa, Homo Sapiens
RTPTKRGHSR

SEQ ID NO: 21083 - protein, 10 aa, Homo Sapiens
RGHSRSRSPQ

SEQ ID NO: 21084 - protein, 10 aa, Homo Sapiens
HSRSRSPQWR

SEQ ID NO: 21085 - protein, 10 aa, Homo Sapiens
RSRSPQWRRS

SEQ ID NO: 21086 - protein, 10 aa, Homo Sapiens
SRSPQWRRSR

SEQ ID NO: 21087 - protein, 10 aa, Homo Sapiens
SPQWRRSRSA

SEQ ID NO: 21088 - protein, 10 aa, Homo Sapiens
QWRRSRSAQR

SEQ ID NO: 21089 - protein, 10 aa, Homo Sapiens
RSRSAQRWGR

SEQ ID NO: 21090 - protein, 10 aa, Homo Sapiens
RSAQRWGRSR

SEQ ID NO: 21091 - protein, 10 aa, Homo Sapiens
QRWGRSRSPQ

SEQ ID NO: 21092 - protein, 10 aa, Homo Sapiens
RWGRSRSPQR

SEQ ID NO: 21093 - protein, 10 aa, Homo Sapiens
RSRSPQRRGR

SEQ ID NO: 21094 - protein, 10 aa, Homo Sapiens
RSPQRRGRSR

SEQ ID NO: 21095 - protein, 10 aa, Homo Sapiens
SPQRRGRSRS

SEQ ID NO: 21096 - protein, 10 aa, Homo Sapiens
RRGRSRSPQR

SEQ ID NO: 21097 - protein, 10 aa, Homo Sapiens
RSRSPQRPGW

SEQ ID NO: 21098 - protein, 10 aa, Homo Sapiens
RSPQRPGWSR

SEQ ID NO: 21099 - protein, 10 aa, Homo Sapiens
RPGWSRSRNT

SEQ ID NO: 21100 - protein, 10 aa, Homo Sapiens
GWSRSRNTQR

SEQ ID NO: 21101 - protein, 10 aa, Homo Sapiens
WSRSRNTQRR

SEQ ID NO: 21102 - protein, 10 aa, Homo Sapiens
RSRNTQRRGR

SEQ ID NO: 21103 - protein, 10 aa, Homo Sapiens
RNTQRRGRSR

SEQ ID NO: 21104 - protein, 10 aa, Homo Sapiens
QRRGRSRSAR

SEQ ID NO: 21105 - protein, 10 aa, Homo Sapiens
RRGRSRSARR

SEQ ID NO: 21106 - protein, 10 aa, Homo Sapiens
RSRSARRGRS

SEQ ID NO: 21107 - protein, 10 aa, Homo Sapiens
SARRGRSHSR

SEQ ID NO: 21108 - protein, 10 aa, Homo Sapiens
RGRSHSRSPA

SEQ ID NO: 21109 - protein, 10 aa, Homo Sapiens
RSHSRSPATR

SEQ ID NO: 21110 - protein, 10 aa, Homo Sapiens
HSRSPATRGR

SEQ ID NO: 21111 - protein, 10 aa, Homo Sapiens
RSPATRGRSR

SEQ ID NO: 21112 - protein, 10 aa, Homo Sapiens
SPATRGRSRS

SEQ ID NO: 21113 - protein, 10 aa, Homo Sapiens
RGRSRSRTPA

SEQ ID NO: 21114 - protein, 10 aa, Homo Sapiens
RSRSRTPARR

SEQ ID NO: 21115 - protein, 10 aa, Homo Sapiens
RSRTPARRGR

SEQ ID NO: 21116 - protein, 10 aa, Homo Sapiens
RTPARRGRSR

SEQ ID NO: 21117 - protein, 10 aa, Homo Sapiens
TPARRGRSRS

SEQ ID NO: 21118 - protein, 10 aa, Homo Sapiens
RGRSRSRTPA

SEQ ID NO: 21119 - protein, 10 aa, Homo Sapiens
RSRSRTPARR

SEQ ID NO: 21120 - protein, 10 aa, Homo Sapiens
SRTPARRRSR

SEQ ID NO: 21121 - protein, 10 aa, Homo Sapiens
TPARRRSRSR

SEQ ID NO: 21122 - protein, 10 aa, Homo Sapiens
RRRSRSRTPT

SEQ ID NO: 21123 - protein, 10 aa, Homo Sapiens
RRSRSRTPTR

SEQ ID NO: 21124 - protein, 10 aa, Homo Sapiens
RSRSRTPTRR

SEQ ID NO: 21125 - protein, 10 aa, Homo Sapiens
SRTPTRRRSR

SEQ ID NO: 21126 - protein, 10 aa, Homo Sapiens
TPTRRRSRSR

SEQ ID NO: 21127 - protein, 10 aa, Homo Sapiens
RRRSRSRTPA

SEQ ID NO: 21128 - protein, 10 aa, Homo Sapiens
RRSRSRTPAR

SEQ ID NO: 21129 - protein, 10 aa, Homo Sapiens
RSRSRTPARR

SEQ ID NO: 21130 - protein, 10 aa, Homo Sapiens
RSRTPARRGR

SEQ ID NO: 21131 - protein, 10 aa, Homo Sapiens
RTPARRGRSR

SEQ ID NO: 21132 - protein, 10 aa, Homo Sapiens
TPARRGRSRS

SEQ ID NO: 21133 - protein, 10 aa, Homo Sapiens
RGRSRSRTPA

SEQ ID NO: 21134 - protein, 10 aa, Homo Sapiens
RSRSRTPARR

SEQ ID NO: 21135 - protein, 10 aa, Homo Sapiens
SRTPARRRSR

SEQ ID NO: 21136 - protein, 10 aa, Homo Sapiens
TPARRRSRTR

SEQ ID NO: 21137 - protein, 10 aa, Homo Sapiens
RRRSRTRSPV

SEQ ID NO: 21138 - protein, 10 aa, Homo Sapiens
RRSRTRSPVR

SEQ ID NO: 21139 - protein, 10 aa, Homo Sapiens
RSRTRSPVRR

SEQ ID NO: 21140 - protein, 10 aa, Homo Sapiens
RTRSPVRRRS

SEQ ID NO: 21141 - protein, 10 aa, Homo Sapiens
TRSPVRRRSR

SEQ ID NO: 21142 - protein, 10 aa, Homo Sapiens
SPVRRRSRSR

SEQ ID NO: 21143 - protein, 10 aa, Homo Sapiens
RRRSRSRSPA

SEQ ID NO: 21144 - protein, 10 aa, Homo Sapiens
RRSRSRSPAR

SEQ ID NO: 21145 - protein, 10 aa, Homo Sapiens
RSRSRSPARR

SEQ ID NO: 21146 - protein, 10 aa, Homo Sapiens
SRSPARRSGR

SEQ ID NO: 21147 - protein, 10 aa, Homo Sapiens
SPARRSGRSR

SEQ ID NO: 21148 - protein, 10 aa, Homo Sapiens
ARRSGRSRSR

SEQ ID NO: 21149 - protein, 10 aa, Homo Sapiens
RRSGRSRSRT

SEQ ID NO: 21150 - protein, 10 aa, Homo Sapiens
SGRSRSRTPA

SEQ ID NO: 21151 - protein, 10 aa, Homo Sapiens
RSRSRTPARR

SEQ ID NO: 21152 - protein, 10 aa, Homo Sapiens
RSRTPARRGR

SEQ ID NO: 21153 - protein, 10 aa, Homo Sapiens
RTPARRGRSR

SEQ ID NO: 21154 - protein, 10 aa, Homo Sapiens
TPARRGRSRS

SEQ ID NO: 21155 - protein, 10 aa, Homo Sapiens
RGRSRSRTPA

SEQ ID NO: 21156 - protein, 10 aa, Homo Sapiens
RSRSRTPARR

SEQ ID NO: 21157 - protein, 10 aa, Homo Sapiens
RSRTPARRGR

SEQ ID NO: 21158 - protein, 10 aa, Homo Sapiens
RTPARRGRSR

SEQ ID NO: 21159 - protein, 10 aa, Homo Sapiens
TPARRGRSRS

SEQ ID NO: 21160 - protein, 10 aa, Homo Sapiens
RGRSRSRTPA

SEQ ID NO: 21161 - protein, 10 aa, Homo Sapiens
RSRSRTPARR

SEQ ID NO: 21162 - protein, 10 aa, Homo Sapiens
SRTPARRSGR

SEQ ID NO: 21163 - protein, 10 aa, Homo Sapiens
ARRSGRSRSR

SEQ ID NO: 21164 - protein, 10 aa, Homo Sapiens
RRSGRSRSRT

SEQ ID NO: 21165 - protein, 10 aa, Homo Sapiens
SGRSRSRTPA

SEQ ID NO: 21166 - protein, 10 aa, Homo Sapiens
RSRSRTPARR

SEQ ID NO: 21167 - protein, 10 aa, Homo Sapiens
RSRTPARRGR

SEQ ID NO: 21168 - protein, 10 aa, Homo Sapiens
RTPARRGRSR

SEQ ID NO: 21169 - protein, 10 aa, Homo Sapiens
TPARRGRSRS

SEQ ID NO: 21170 - protein, 10 aa, Homo Sapiens
RGRSRSRTPR

SEQ ID NO: 21171 - protein, 10 aa, Homo Sapiens
SRTPRRGRSR

SEQ ID NO: 21172 - protein, 10 aa, Homo Sapiens
TPRRGRSRSR

SEQ ID NO: 21173 - protein, 10 aa, Homo Sapiens
RRGRSRSRSL

SEQ ID NO: 21174 - protein, 10 aa, Homo Sapiens
RGRSRSRSLV

SEQ ID NO: 21175 - protein, 10 aa, Homo Sapiens
GRSRSRSLVR

SEQ ID NO: 21176 - protein, 10 aa, Homo Sapiens
RSRSRSLVRR

SEQ ID NO: 21177 - protein, 10 aa, Homo Sapiens
RSRSLVRRGR

SEQ ID NO: 21178 - protein, 10 aa, Homo Sapiens
LVRRGRSHSR

SEQ ID NO: 21179 - protein, 10 aa, Homo Sapiens
RGRSHSRTPQ

SEQ ID NO: 21180 - protein, 10 aa, Homo Sapiens
RSHSRTPQRR

SEQ ID NO: 21181 - protein, 10 aa, Homo Sapiens
HSRTPQRRGR

SEQ ID NO: 21182 - protein, 10 aa, Homo Sapiens
RGRSGSSSER

SEQ ID NO: 21183 - protein, 10 aa, Homo Sapiens
GRSGSSSERK

SEQ ID NO: 21184 - protein, 10 aa, Homo Sapiens
SSSERKNKSR

SEQ ID NO: 21185 - protein, 10 aa, Homo Sapiens
RKNKSRTSQR

SEQ ID NO: 21186 - protein, 10 aa, Homo Sapiens
KNKSRTSQRR

SEQ ID NO: 21187 - protein, 10 aa, Homo Sapiens
KSRTSQRRSR

SEQ ID NO: 21188 - protein, 10 aa, Homo Sapiens
RSRSNSSPEM

SEQ ID NO: 21189 - protein, 10 aa, Homo Sapiens
RSNSSPEMKK

SEQ ID NO: 21190 - protein, 10 aa, Homo Sapiens
NSSPEMKKSR

SEQ ID NO: 21191 - protein, 10 aa, Homo Sapiens
EMKKSRISSR

SEQ ID NO: 21192 - protein, 10 aa, Homo Sapiens
MKKSRISSRR

SEQ ID NO: 21193 - protein, 10 aa, Homo Sapiens
KSRISSRRSR

SEQ ID NO: 21194 - protein, 10 aa, Homo Sapiens
RISSRRSRSL

SEQ ID NO: 21195 - protein, 10 aa, Homo Sapiens
SSRRSRSLSS

SEQ ID NO: 21196 - protein, 10 aa, Homo Sapiens
RRSRSLSSPR

SEQ ID NO: 21197 - protein, 10 aa, Homo Sapiens
RSRSLSSPRS

SEQ ID NO: 21198 - protein, 10 aa, Homo Sapiens
SRSLSSPRSK

SEQ ID NO: 21199 - protein, 10 aa, Homo Sapiens
SLSSPRSKAK

SEQ ID NO: 21200 - protein, 10 aa, Homo Sapiens
SPRSKAKSRL

SEQ ID NO: 21201 - protein, 10 aa, Homo Sapiens
RSKAKSRLSL

SEQ ID NO: 21202 - protein, 10 aa, Homo Sapiens
SKAKSRLSLR

SEQ ID NO: 21203 - protein, 10 aa, Homo Sapiens
KAKSRLSLRR

SEQ ID NO: 21204 - protein, 10 aa, Homo Sapiens
KSRLSLRRSL

SEQ ID NO: 21205 - protein, 10 aa, Homo Sapiens
SLRRSLSGSS

SEQ ID NO: 21206 - protein, 10 aa, Homo Sapiens
SLSGSSPCPK

SEQ ID NO: 21207 - protein, 10 aa, Homo Sapiens
KQKSQTPPRR

SEQ ID NO: 21208 - protein, 10 aa, Homo Sapiens
KSQTPPRRSR

SEQ ID NO: 21209 - protein, 10 aa, Homo Sapiens
PPRRSRSGSS

SEQ ID NO: 21210 - protein, 10 aa, Homo Sapiens
RSRSGSSQPK

SEQ ID NO: 21211 - protein, 10 aa, Homo Sapiens
RSGSSQPKAK

SEQ ID NO: 21212 - protein, 10 aa, Homo Sapiens
KAKSRTPPRR

SEQ ID NO: 21213 - protein, 10 aa, Homo Sapiens
KSRTPPRRSR

SEQ ID NO: 21214 - protein, 10 aa, Homo Sapiens
TPPRRSRSSS

SEQ ID NO: 21215 - protein, 10 aa, Homo Sapiens
PPRRSRSSSS

SEQ ID NO: 21216 - protein, 10 aa, Homo Sapiens
RRSRSSSSPP

SEQ ID NO: 21217 - protein, 10 aa, Homo Sapiens
RSRSSSSPPP

SEQ ID NO: 21218 - protein, 10 aa, Homo Sapiens
SRSSSSPPPK

SEQ ID NO: 21219 - protein, 10 aa, Homo Sapiens
SSSSPPPKQK

SEQ ID NO: 21220 - protein, 10 aa, Homo Sapiens
SSPPPKQKSK

SEQ ID NO: 21221 - protein, 10 aa, Homo Sapiens
RQSHSSSSPH

SEQ ID NO: 21222 - protein, 10 aa, Homo Sapiens
HSSSSPHPKV

SEQ ID NO: 21223 - protein, 10 aa, Homo Sapiens
SSSSPHPKVK

SEQ ID NO: 21224 - protein, 10 aa, Homo Sapiens
KVKSGTPPRQ

SEQ ID NO: 21225 - protein, 10 aa, Homo Sapiens
RQGSITSPQA

SEQ ID NO: 21226 - protein, 10 aa, Homo Sapiens
TSPQANEQSV

SEQ ID NO: 21227 - protein, 10 aa, Homo Sapiens
SVTPQRRSCF

SEQ ID NO: 21228 - protein, 10 aa, Homo Sapiens
HSCSGSSPPR

SEQ ID NO: 21229 - protein, 10 aa, Homo Sapiens
SCSGSSPPRV

SEQ ID NO: 21230 - protein, 10 aa, Homo Sapiens
CSGSSPPRVK

SEQ ID NO: 21231 - protein, 10 aa, Homo Sapiens
RVKSSTPPRQ

SEQ ID NO: 21232 - protein, 10 aa, Homo Sapiens
STPPRQSPSR

SEQ ID NO: 21233 - protein, 10 aa, Homo Sapiens
PPRQSPSRSS

SEQ ID NO: 21234 - protein, 10 aa, Homo Sapiens
PSRSSSPQPK

SEQ ID NO: 21235 - protein, 10 aa, Homo Sapiens
RSSSPQPKVK

SEQ ID NO: 21236 - protein, 10 aa, Homo Sapiens
SPQPKVKAII

SEQ ID NO: 21237 - protein, 10 aa, Homo Sapiens
KVKAIISPRQ

SEQ ID NO: 21238 - protein, 10 aa, Homo Sapiens
SPRQRSHSGS

SEQ ID NO: 21239 - protein, 10 aa, Homo Sapiens
RSHSGSSSPS

SEQ ID NO: 21240 - protein, 10 aa, Homo Sapiens
SPSPSRVTSR

SEQ ID NO: 21241 - protein, 10 aa, Homo Sapiens
SPSRVTSRTT

SEQ ID NO: 21242 - protein, 10 aa, Homo Sapiens
SRVTSRTTPR

SEQ ID NO: 21243 - protein, 10 aa, Homo Sapiens
RVTSRTTPRR

SEQ ID NO: 21244 - protein, 10 aa, Homo Sapiens
TSRTTPRRSR

SEQ ID NO: 21245 - protein, 10 aa, Homo Sapiens
RTTPRRSRSV

SEQ ID NO: 21246 - protein, 10 aa, Homo Sapiens
TPRRSRSVSP

SEQ ID NO: 21247 - protein, 10 aa, Homo Sapiens
RSRSVSPCSN

SEQ ID NO: 21248 - protein, 10 aa, Homo Sapiens
VSPCSNVESR

SEQ ID NO: 21249 - protein, 10 aa, Homo Sapiens
SPCSNVESRL

SEQ ID NO: 21250 - protein, 10 aa, Homo Sapiens
NVESRLLPRY

SEQ ID NO: 21251 - protein, 10 aa, Homo Sapiens
RLLPRYSHSG

SEQ ID NO: 21252 - protein, 10 aa, Homo Sapiens
LLPRYSHSGS

SEQ ID NO: 21253 - protein, 10 aa, Homo Sapiens
LPRYSHSGSS

SEQ ID NO: 21254 - protein, 10 aa, Homo Sapiens
HSGSSSPDTK

SEQ ID NO: 21255 - protein, 10 aa, Homo Sapiens
GSSSPDTKVK

SEQ ID NO: 21256 - protein, 10 aa, Homo Sapiens
KVKPETPPRQ

SEQ ID NO: 21257 - protein, 10 aa, Homo Sapiens
PPRQSHSGSI

SEQ ID NO: 21258 - protein, 10 aa, Homo Sapiens
QSHSGSISPY

SEQ ID NO: 21259 - protein, 10 aa, Homo Sapiens
HSGSISPYPK

SEQ ID NO: 21260 - protein, 10 aa, Homo Sapiens
GSISPYPKVK

SEQ ID NO: 21261 - protein, 10 aa, Homo Sapiens
SISPYPKVKA

SEQ ID NO: 21262 - protein, 10 aa, Homo Sapiens
SPYPKVKAQT

SEQ ID NO: 21263 - protein, 10 aa, Homo Sapiens
KAQTPPGPSL

SEQ ID NO: 21264 - protein, 10 aa, Homo Sapiens
GSKSPCPQEK

SEQ ID NO: 21265 - protein, 10 aa, Homo Sapiens
KSPCPQEKSK

SEQ ID NO: 21266 - protein, 10 aa, Homo Sapiens
CPQEKSKDSL

SEQ ID NO: 21267 - protein, 10 aa, Homo Sapiens
SLVQSCPGSL

SEQ ID NO: 21268 - protein, 10 aa, Homo Sapiens
VQSCPGSLSL

SEQ ID NO: 21269 - protein, 10 aa, Homo Sapiens
GSLSLCAGVK

SEQ ID NO: 21270 - protein, 10 aa, Homo Sapiens
SLCAGVKSST

SEQ ID NO: 21271 - protein, 10 aa, Homo Sapiens
KSSTPPGESY

SEQ ID NO: 21272 - protein, 10 aa, Homo Sapiens
SSTPPGESYF

SEQ ID NO: 21273 - protein, 10 aa, Homo Sapiens
TPPGESYFGV

SEQ ID NO: 21274 - protein, 10 aa, Homo Sapiens
GESYFGVSSL

SEQ ID NO: 21275 - protein, 10 aa, Homo Sapiens
ESYFGVSSLQ

SEQ ID NO: 21276 - protein, 10 aa, Homo Sapiens
SYFGVSSLQL

SEQ ID NO: 21277 - protein, 10 aa, Homo Sapiens
YFGVSSLQLK

SEQ ID NO: 21278 - protein, 10 aa, Homo Sapiens
SLQLKGQSQT

SEQ ID NO: 21279 - protein, 10 aa, Homo Sapiens
LQLKGQSQTS

SEQ ID NO: 21280 - protein, 10 aa, Homo Sapiens
HRSDTSSPEV

SEQ ID NO: 21281 - protein, 10 aa, Homo Sapiens
RQSHSESPSL

SEQ ID NO: 21282 - protein, 10 aa, Homo Sapiens
HSESPSLQSK

SEQ ID NO: 21283 - protein, 10 aa, Homo Sapiens
SPSLQSKSQT

SEQ ID NO: 21284 - protein, 10 aa, Homo Sapiens
LQSKSQTSPK

SEQ ID NO: 21285 - protein, 10 aa, Homo Sapiens
QTSPKGGRSR

SEQ ID NO: 21286 - protein, 10 aa, Homo Sapiens
SPKGGRSRSS

SEQ ID NO: 21287 - protein, 10 aa, Homo Sapiens
RSRSSSPVTE

SEQ ID NO: 21288 - protein, 10 aa, Homo Sapiens
SSPVTELASR

SEQ ID NO: 21289 - protein, 10 aa, Homo Sapiens
ASRSPIRQDR

SEQ ID NO: 21290 - protein, 10 aa, Homo Sapiens
SPIRQDRGEF

SEQ ID NO: 21291 - protein, 10 aa, Homo Sapiens
RQDRGEFSAS

SEQ ID NO: 21292 - protein, 10 aa, Homo Sapiens
GEFSASPMLK

SEQ ID NO: 21293 - protein, 10 aa, Homo Sapiens
MLKSGMSPEQ

SEQ ID NO: 21294 - protein, 10 aa, Homo Sapiens
GMSPEQSRFQ

SEQ ID NO: 21295 - protein, 10 aa, Homo Sapiens
SRFQSDSSSY

SEQ ID NO: 21296 - protein, 10 aa, Homo Sapiens
FQSDSSSYPT

SEQ ID NO: 21297 - protein, 10 aa, Homo Sapiens
QSDSSSYPTV

SEQ ID NO: 21298 - protein, 10 aa, Homo Sapiens
SYPTVDSNSL

SEQ ID NO: 21299 - protein, 10 aa, Homo Sapiens
YPTVDSNSLL

SEQ ID NO: 21300 - protein, 10 aa, Homo Sapiens
DSNSLLGQSR

SEQ ID NO: 21301 - protein, 10 aa, Homo Sapiens
SLLGQSRLET

SEQ ID NO: 21302 - protein, 10 aa, Homo Sapiens
LLGQSRLETA

SEQ ID NO: 21303 - protein, 10 aa, Homo Sapiens
QSRLETAESK

SEQ ID NO: 21304 - protein, 10 aa, Homo Sapiens
RLETAESKEK

SEQ ID NO: 21305 - protein, 10 aa, Homo Sapiens
ETAESKEKMA

SEQ ID NO: 21306 - protein, 10 aa, Homo Sapiens
KMALPPQEDA

SEQ ID NO: 21307 - protein, 10 aa, Homo Sapiens
ALPPQEDATA

SEQ ID NO: 21308 - protein, 10 aa, Homo Sapiens
LPPQEDATAS

SEQ ID NO: 21309 - protein, 10 aa, Homo Sapiens
DATASPPRQK

SEQ ID NO: 21310 - protein, 10 aa, Homo Sapiens
TASPPRQKDK

SEQ ID NO: 21311 - protein, 10 aa, Homo Sapiens
ASPPRQKDKF

SEQ ID NO: 21312 - protein, 10 aa, Homo Sapiens
RQKDKFSPFP

SEQ ID NO: 21313 - protein, 10 aa, Homo Sapiens
KFSPFPVQDR

SEQ ID NO: 21314 - protein, 10 aa, Homo Sapiens
FPVQDRPESS

SEQ ID NO: 21315 - protein, 10 aa, Homo Sapiens
VQDRPESSLV

SEQ ID NO: 21316 - protein, 10 aa, Homo Sapiens
ESSLVFKDTL

SEQ ID NO: 21317 - protein, 10 aa, Homo Sapiens
SSLVFKDTLR

SEQ ID NO: 21318 - protein, 10 aa, Homo Sapiens
DTLRTPPRER

SEQ ID NO: 21319 - protein, 10 aa, Homo Sapiens
PETKEQNSAL

SEQ ID NO: 21320 - protein, 10 aa, Homo Sapiens
LPTSSQDEEL

SEQ ID NO: 21321 - protein, 10 aa, Homo Sapiens
SSQDEELMEV

SEQ ID NO: 21322 - protein, 10 aa, Homo Sapiens
SQDEELMEVV

SEQ ID NO: 21323 - protein, 10 aa, Homo Sapiens
EVVEKSEEPA

SEQ ID NO: 21324 - protein, 10 aa, Homo Sapiens
EPAGQILSHL

SEQ ID NO: 21325 - protein, 10 aa, Homo Sapiens
GQILSHLSSE

SEQ ID NO: 21326 - protein, 10 aa, Homo Sapiens
QILSHLSSEL

SEQ ID NO: 21327 - protein, 10 aa, Homo Sapiens
ILSHLSSELK

SEQ ID NO: 21328 - protein, 10 aa, Homo Sapiens
ELKEMSTSNF

SEQ ID NO: 21329 - protein, 10 aa, Homo Sapiens
TSNFESSPEV

SEQ ID NO: 21330 - protein, 10 aa, Homo Sapiens
SPEVEERPAV

SEQ ID NO: 21331 - protein, 10 aa, Homo Sapiens
EVEERPAVSL

SEQ ID NO: 21332 - protein, 10 aa, Homo Sapiens
EERPAVSLTL

SEQ ID NO: 21333 - protein, 10 aa, Homo Sapiens
RPAVSLTLDQ

SEQ ID NO: 21334 - protein, 10 aa, Homo Sapiens
SLTLDQSQSQ

SEQ ID NO: 21335 - protein, 10 aa, Homo Sapiens
LTLDQSQSQA

SEQ ID NO: 21336 - protein, 10 aa, Homo Sapiens
TLDQSQSQAS

SEQ ID NO: 21337 - protein, 10 aa, Homo Sapiens
SQSQASLEAV

SEQ ID NO: 21338 - protein, 10 aa, Homo Sapiens
SQASLEAVEV

SEQ ID NO: 21339 - protein, 10 aa, Homo Sapiens
SLEAVEVPSM

SEQ ID NO: 21340 - protein, 10 aa, Homo Sapiens
EAVEVPSMAS

SEQ ID NO: 21341 - protein, 10 aa, Homo Sapiens
VEVPSMASSW

SEQ ID NO: 21342 - protein, 10 aa, Homo Sapiens
SMASSWGGPH

SEQ ID NO: 21343 - protein, 10 aa, Homo Sapiens
MASSWGGPHF

SEQ ID NO: 21344 - protein, 10 aa, Homo Sapiens
EHKELSNSPL

SEQ ID NO: 21345 - protein, 10 aa, Homo Sapiens
NSFGSPLEFR

SEQ ID NO: 21346 - protein, 10 aa, Homo Sapiens
EMNTGFSSEV

SEQ ID NO: 21347 - protein, 10 aa, Homo Sapiens
MNTGFSSEVK

SEQ ID NO: 21348 - protein, 10 aa, Homo Sapiens
EVKEDLNGPF

SEQ ID NO: 21349 - protein, 10 aa, Homo Sapiens
DLNGPFLNQL

SEQ ID NO: 21350 - protein, 10 aa, Homo Sapiens
FLNQLETDPS

SEQ ID NO: 21351 - protein, 10 aa, Homo Sapiens
RSSGHSSSEL

SEQ ID NO: 21352 - protein, 10 aa, Homo Sapiens
SSSELSPDAV

SEQ ID NO: 21353 - protein, 10 aa, Homo Sapiens
ELSPDAVEKA

SEQ ID NO: 21354 - protein, 10 aa, Homo Sapiens
SPDAVEKAGM

SEQ ID NO: 21355 - protein, 10 aa, Homo Sapiens
SSNQSISSPV

SEQ ID NO: 21356 - protein, 10 aa, Homo Sapiens
SISSPVLDAV

SEQ ID NO: 21357 - protein, 10 aa, Homo Sapiens
SSPVLDAVPR

SEQ ID NO: 21358 - protein, 10 aa, Homo Sapiens
VPRTPSRERS

SEQ ID NO: 21359 - protein, 10 aa, Homo Sapiens
TPSRERSSSA

SEQ ID NO: 21360 - protein, 10 aa, Homo Sapiens
RSSSASSPEM

SEQ ID NO: 21361 - protein, 10 aa, Homo Sapiens
SSSASSPEMK

SEQ ID NO: 21362 - protein, 10 aa, Homo Sapiens
LPRTPSRRSR

SEQ ID NO: 21363 - protein, 10 aa, Homo Sapiens
TPSRRSRSGS

SEQ ID NO: 21364 - protein, 10 aa, Homo Sapiens
RSRSGSSPGL

SEQ ID NO: 21365 - protein, 10 aa, Homo Sapiens
GLRDGSGTPS

SEQ ID NO: 21366 - protein, 10 aa, Homo Sapiens
SLSGSSPGMK

SEQ ID NO: 21367 - protein, 10 aa, Homo Sapiens
SSPGMKDIPR

SEQ ID NO: 21368 - protein, 10 aa, Homo Sapiens
GMKDIPRTPF

SEQ ID NO: 21369 - protein, 10 aa, Homo Sapiens
MKDIPRTPFR

SEQ ID NO: 21370 - protein, 10 aa, Homo Sapiens
IPRTPFRGRS

SEQ ID NO: 21371 - protein, 10 aa, Homo Sapiens
KALPQTPRPR

SEQ ID NO: 21372 - protein, 10 aa, Homo Sapiens
TPRPRSRSPS

SEQ ID NO: 21373 - protein, 10 aa, Homo Sapiens
RPRSRSPSSP

SEQ ID NO: 21374 - protein, 10 aa, Homo Sapiens
RSRSPSSPEL

SEQ ID NO: 21375 - protein, 10 aa, Homo Sapiens
RERSGSESSV

SEQ ID NO: 21376 - protein, 10 aa, Homo Sapiens
SSVDQKTVAR

SEQ ID NO: 21377 - protein, 10 aa, Homo Sapiens
TVARTPLGQR

SEQ ID NO: 21378 - protein, 10 aa, Homo Sapiens
RSRSGSSQEL

SEQ ID NO: 21379 - protein, 10 aa, Homo Sapiens
SSPDSKAKTR

SEQ ID NO: 21380 - protein, 10 aa, Homo Sapiens
RSRSGSSPEV

SEQ ID NO: 21381 - protein, 10 aa, Homo Sapiens
SSPEVDSKSR

SEQ ID NO: 21382 - protein, 10 aa, Homo Sapiens
SPEVDSKSRL

SEQ ID NO: 21383 - protein, 10 aa, Homo Sapiens
DSKSRLSPRR

SEQ ID NO: 21384 - protein, 10 aa, Homo Sapiens
KSRLSPRRSR

SEQ ID NO: 21385 - protein, 10 aa, Homo Sapiens
SPRRSRSGSS

SEQ ID NO: 21386 - protein, 10 aa, Homo Sapiens
RSRSGSSPEV

SEQ ID NO: 21387 - protein, 10 aa, Homo Sapiens
KPRAAPRAQS

SEQ ID NO: 21388 - protein, 10 aa, Homo Sapiens
APRAQSGSDS

SEQ ID NO: 21389 - protein, 10 aa, Homo Sapiens
SGSDSSPEPK

SEQ ID NO: 21390 - protein, 10 aa, Homo Sapiens
EPKAPAPRAL

SEQ ID NO: 21391 - protein, 10 aa, Homo Sapiens
KAPAPRALPR

SEQ ID NO: 21392 - protein, 10 aa, Homo Sapiens
APRALPRRSR

SEQ ID NO: 21393 - protein, 10 aa, Homo Sapiens
LPRRSRSGSS

SEQ ID NO: 21394 - protein, 10 aa, Homo Sapiens
RRSRSGSSSK

SEQ ID NO: 21395 - protein, 10 aa, Homo Sapiens
GPSPEGSSST

SEQ ID NO: 21396 - protein, 10 aa, Homo Sapiens
HPPKSRTARR

SEQ ID NO: 21397 - protein, 10 aa, Homo Sapiens
KSRTARRGSR

SEQ ID NO: 21398 - protein, 10 aa, Homo Sapiens
RGSRSSPEPK

SEQ ID NO: 21399 - protein, 10 aa, Homo Sapiens
KTKSRTPPRR

SEQ ID NO: 21400 - protein, 10 aa, Homo Sapiens
RTPPRRRSSR

SEQ ID NO: 21401 - protein, 10 aa, Homo Sapiens
PPRRRSSRSS

SEQ ID NO: 21402 - protein, 10 aa, Homo Sapiens
RRRSSRSSPE

SEQ ID NO: 21403 - protein, 10 aa, Homo Sapiens
RRSSRSSPEL

SEQ ID NO: 21404 - protein, 10 aa, Homo Sapiens
SSRSSPELTR

SEQ ID NO: 21405 - protein, 10 aa, Homo Sapiens
SSPELTRKAR

SEQ ID NO: 21406 - protein, 10 aa, Homo Sapiens
SPELTRKARL

SEQ ID NO: 21407 - protein, 10 aa, Homo Sapiens
ELTRKARLSR

SEQ ID NO: 21408 - protein, 10 aa, Homo Sapiens
LTRKARLSRR

SEQ ID NO: 21409 - protein, 10 aa, Homo Sapiens
RKARLSRRSR

SEQ ID NO: 21410 - protein, 10 aa, Homo Sapiens
KARLSRRSRS

SEQ ID NO: 21411 - protein, 10 aa, Homo Sapiens
RRSRSASSSP

SEQ ID NO: 21412 - protein, 10 aa, Homo Sapiens
RSRSASSSPE

SEQ ID NO: 21413 - protein, 10 aa, Homo Sapiens
RSASSSPETR

SEQ ID NO: 21414 - protein, 10 aa, Homo Sapiens
ASSSPETRSR

SEQ ID NO: 21415 - protein, 10 aa, Homo Sapiens
SPETRSRTPP

SEQ ID NO: 21416 - protein, 10 aa, Homo Sapiens
RSRTPPRHRR

SEQ ID NO: 21417 - protein, 10 aa, Homo Sapiens
TPPRHRRSPS

SEQ ID NO: 21418 - protein, 10 aa, Homo Sapiens
PPRHRRSPSV

SEQ ID NO: 21419 - protein, 10 aa, Homo Sapiens
SPSVSSPEPA

SEQ ID NO: 21420 - protein, 10 aa, Homo Sapiens
SVSSPEPAEK

SEQ ID NO: 21421 - protein, 10 aa, Homo Sapiens
EPAEKSRSSR

SEQ ID NO: 21422 - protein, 10 aa, Homo Sapiens
EKSRSSRRRR

SEQ ID NO: 21423 - protein, 10 aa, Homo Sapiens
KSRSSRRRRS

SEQ ID NO: 21424 - protein, 10 aa, Homo Sapiens
RRRRSASSPR

SEQ ID NO: 21425 - protein, 10 aa, Homo Sapiens
RRSASSPRTK

SEQ ID NO: 21426 - protein, 10 aa, Homo Sapiens
SPRTKTTSRR

SEQ ID NO: 21427 - protein, 10 aa, Homo Sapiens
RTKTTSRRGR

SEQ ID NO: 21428 - protein, 10 aa, Homo Sapiens
SRRGRSPSPK

SEQ ID NO: 21429 - protein, 10 aa, Homo Sapiens
RGRSPSPKPR

SEQ ID NO: 21430 - protein, 10 aa, Homo Sapiens
KPRGLQRSRS

SEQ ID NO: 21431 - protein, 10 aa, Homo Sapiens
GLQRSRSRSR

SEQ ID NO: 21432 - protein, 10 aa, Homo Sapiens
LQRSRSRSRR

SEQ ID NO: 21433 - protein, 10 aa, Homo Sapiens
RSRSRSRREK

SEQ ID NO: 21434 - protein, 10 aa, Homo Sapiens
RSRSRREKTR

SEQ ID NO: 21435 - protein, 10 aa, Homo Sapiens
SRREKTRTTR

SEQ ID NO: 21436 - protein, 10 aa, Homo Sapiens
RREKTRTTRR

SEQ ID NO: 21437 - protein, 10 aa, Homo Sapiens
REKTRTTRRR

SEQ ID NO: 21438 - protein, 10 aa, Homo Sapiens
KTRTTRRRDR

SEQ ID NO: 21439 - protein, 10 aa, Homo Sapiens
RRRDRSGSSQ

SEQ ID NO: 21440 - protein, 10 aa, Homo Sapiens
RSGSSQSTSR

SEQ ID NO: 21441 - protein, 10 aa, Homo Sapiens
GSSQSTSRRR

SEQ ID NO: 21442 - protein, 10 aa, Homo Sapiens
SQSTSRRRQR

SEQ ID NO: 21443 - protein, 10 aa, Homo Sapiens
STSRRRQRSR

SEQ ID NO: 21444 - protein, 10 aa, Homo Sapiens
SRRRQRSRSR

SEQ ID NO: 21445 - protein, 10 aa, Homo Sapiens
RRRQRSRSRS

SEQ ID NO: 21446 - protein, 10 aa, Homo Sapiens
RRQRSRSRSR

SEQ ID NO: 21447 - protein, 10 aa, Homo Sapiens
RQRSRSRSRV

SEQ ID NO: 21448 - protein, 10 aa, Homo Sapiens
RSRSRSRVTR

SEQ ID NO: 21449 - protein, 10 aa, Homo Sapiens
SRSRSRVTRR

SEQ ID NO: 21450 - protein, 10 aa, Homo Sapiens
RSRSRVTRRR

SEQ ID NO: 21451 - protein, 10 aa, Homo Sapiens
SRSRVTRRRR

SEQ ID NO: 21452 - protein, 10 aa, Homo Sapiens
RRRGGSGYHS

SEQ ID NO: 21453 - protein, 10 aa, Homo Sapiens
RRGGSGYHSR

SEQ ID NO: 21454 - protein, 10 aa, Homo Sapiens
SGYHSRSPAR

SEQ ID NO: 21455 - protein, 10 aa, Homo Sapiens
RQESSRTSSR

SEQ ID NO: 21456 - protein, 10 aa, Homo Sapiens
ESSRTSSRRR

SEQ ID NO: 21457 - protein, 10 aa, Homo Sapiens
SSRTSSRRRR

SEQ ID NO: 21458 - protein, 10 aa, Homo Sapiens
RTSSRRRRGR

SEQ ID NO: 21459 - protein, 10 aa, Homo Sapiens
SSRRRRGRSR

SEQ ID NO: 21460 - protein, 10 aa, Homo Sapiens
RRRGRSRTPP

SEQ ID NO: 21461 - protein, 10 aa, Homo Sapiens
RGRSRTPPTS

SEQ ID NO: 21462 - protein, 10 aa, Homo Sapiens
RSRTPPTSRK

SEQ ID NO: 21463 - protein, 10 aa, Homo Sapiens
PTSRKRSRSR

SEQ ID NO: 21464 - protein, 10 aa, Homo Sapiens
RSRSRTSPAP

SEQ ID NO: 21465 - protein, 10 aa, Homo Sapiens
RSRTSPAPWK

SEQ ID NO: 21466 - protein, 10 aa, Homo Sapiens
TSPAPWKRSR

SEQ ID NO: 21467 - protein, 10 aa, Homo Sapiens
SPAPWKRSRS

SEQ ID NO: 21468 - protein, 10 aa, Homo Sapiens
APWKRSRSRA

SEQ ID NO: 21469 - protein, 10 aa, Homo Sapiens
RSRSRASPAT

SEQ ID NO: 21470 - protein, 10 aa, Homo Sapiens
RSRASPATHR

SEQ ID NO: 21471 - protein, 10 aa, Homo Sapiens
ASPATHRRSR

SEQ ID NO: 21472 - protein, 10 aa, Homo Sapiens
SPATHRRSRS

SEQ ID NO: 21473 - protein, 10 aa, Homo Sapiens
PATHRRSRSR

SEQ ID NO: 21474 - protein, 10 aa, Homo Sapiens
HRRSRSRTPL

SEQ ID NO: 21475 - protein, 10 aa, Homo Sapiens
RRSRSRTPLI

SEQ ID NO: 21476 - protein, 10 aa, Homo Sapiens
RSRSRTPLIS

SEQ ID NO: 21477 - protein, 10 aa, Homo Sapiens
RSRTPLISRR

SEQ ID NO: 21478 - protein, 10 aa, Homo Sapiens
SRTPLISRRR

SEQ ID NO: 21479 - protein, 10 aa, Homo Sapiens
TPLISRRRSR

SEQ ID NO: 21480 - protein, 10 aa, Homo Sapiens
LISRRRSRSR

SEQ ID NO: 21481 - protein, 10 aa, Homo Sapiens
RRRSRSRTSP

SEQ ID NO: 21482 - protein, 10 aa, Homo Sapiens
RRSRSRTSPV

SEQ ID NO: 21483 - protein, 10 aa, Homo Sapiens
RSRSRTSPVS

SEQ ID NO: 21484 - protein, 10 aa, Homo Sapiens
RSRTSPVSRR

SEQ ID NO: 21485 - protein, 10 aa, Homo Sapiens
SRTSPVSRRR

SEQ ID NO: 21486 - protein, 10 aa, Homo Sapiens
TSPVSRRRSR

SEQ ID NO: 21487 - protein, 10 aa, Homo Sapiens
SPVSRRRSRS

SEQ ID NO: 21488 - protein, 10 aa, Homo Sapiens
PVSRRRSRSR

SEQ ID NO: 21489 - protein, 10 aa, Homo Sapiens
RRRSRSRTSV

SEQ ID NO: 21490 - protein, 10 aa, Homo Sapiens
RSRSRTSVTR

SEQ ID NO: 21491 - protein, 10 aa, Homo Sapiens
RSRTSVTRRR

SEQ ID NO: 21492 - protein, 10 aa, Homo Sapiens
RTSVTRRRSR

SEQ ID NO: 21493 - protein, 10 aa, Homo Sapiens
SVTRRRSRSR

SEQ ID NO: 21494 - protein, 10 aa, Homo Sapiens
RRRSRSRASP

SEQ ID NO: 21495 - protein, 10 aa, Homo Sapiens
RRSRSRASPV

SEQ ID NO: 21496 - protein, 10 aa, Homo Sapiens
RSRSRASPVS

SEQ ID NO: 21497 - protein, 10 aa, Homo Sapiens
RSRASPVSRR

SEQ ID NO: 21498 - protein, 10 aa, Homo Sapiens
ASPVSRRRSR

SEQ ID NO: 21499 - protein, 10 aa, Homo Sapiens
SPVSRRRSRS

SEQ ID NO: 21500 - protein, 10 aa, Homo Sapiens
PVSRRRSRSR

SEQ ID NO: 21501 - protein, 10 aa, Homo Sapiens
RRRSRSRTPP

SEQ ID NO: 21502 - protein, 10 aa, Homo Sapiens
RRSRSRTPPV

SEQ ID NO: 21503 - protein, 10 aa, Homo Sapiens
RSRSRTPPVT

SEQ ID NO: 21504 - protein, 10 aa, Homo Sapiens
RSRTPPVTRR

SEQ ID NO: 21505 - protein, 10 aa, Homo Sapiens
PVTRRRSRSR

SEQ ID NO: 21506 - protein, 10 aa, Homo Sapiens
RRRSRSRTPT

SEQ ID NO: 21507 - protein, 10 aa, Homo Sapiens
RSRSRTPTTR

SEQ ID NO: 21508 - protein, 10 aa, Homo Sapiens
RSRTPTTRRR

SEQ ID NO: 21509 - protein, 10 aa, Homo Sapiens
RTPTTRRRSR

SEQ ID NO: 21510 - protein, 10 aa, Homo Sapiens
TPTTRRRSRS

SEQ ID NO: 21511 - protein, 10 aa, Homo Sapiens
PTTRRRSRSR

SEQ ID NO: 21512 - protein, 10 aa, Homo Sapiens
RRRSRSRTPP

SEQ ID NO: 21513 - protein, 10 aa, Homo Sapiens
RRSRSRTPPV

SEQ ID NO: 21514 - protein, 10 aa, Homo Sapiens
RSRSRTPPVT

SEQ ID NO: 21515 - protein, 10 aa, Homo Sapiens
RSRTPPVTRR

SEQ ID NO: 21516 - protein, 10 aa, Homo Sapiens
PVTRRRSRSR

SEQ ID NO: 21517 - protein, 10 aa, Homo Sapiens
RRRSRSRTPP

SEQ ID NO: 21518 - protein, 10 aa, Homo Sapiens
RRSRSRTPPV

SEQ ID NO: 21519 - protein, 10 aa, Homo Sapiens
RSRSRTPPVT

SEQ ID NO: 21520 - protein, 10 aa, Homo Sapiens
RSRTPPVTRR

SEQ ID NO: 21521 - protein, 10 aa, Homo Sapiens
PVTRRRSRSR

SEQ ID NO: 21522 - protein, 10 aa, Homo Sapiens
RRRSRSRTSP

SEQ ID NO: 21523 - protein, 10 aa, Homo Sapiens
RRSRSRTSPI

SEQ ID NO: 21524 - protein, 10 aa, Homo Sapiens
RSRSRTSPIT

SEQ ID NO: 21525 - protein, 10 aa, Homo Sapiens
RSRTSPITRR

SEQ ID NO: 21526 - protein, 10 aa, Homo Sapiens
SRTSPITRRR

SEQ ID NO: 21527 - protein, 10 aa, Homo Sapiens
TSPITRRRSR

SEQ ID NO: 21528 - protein, 10 aa, Homo Sapiens
SPITRRRSRS

SEQ ID NO: 21529 - protein, 10 aa, Homo Sapiens
PITRRRSRSR

SEQ ID NO: 21530 - protein, 10 aa, Homo Sapiens
RRRSRSRTSP

SEQ ID NO: 21531 - protein, 10 aa, Homo Sapiens
RRSRSRTSPV

SEQ ID NO: 21532 - protein, 10 aa, Homo Sapiens
RSRSRTSPVT

SEQ ID NO: 21533 - protein, 10 aa, Homo Sapiens
RSRTSPVTRR

SEQ ID NO: 21534 - protein, 10 aa, Homo Sapiens
SRTSPVTRRR

SEQ ID NO: 21535 - protein, 10 aa, Homo Sapiens
TSPVTRRRSR

SEQ ID NO: 21536 - protein, 10 aa, Homo Sapiens
SPVTRRRSRS

SEQ ID NO: 21537 - protein, 10 aa, Homo Sapiens
PVTRRRSRSR

SEQ ID NO: 21538 - protein, 10 aa, Homo Sapiens
RRRSRSRTSP

SEQ ID NO: 21539 - protein, 10 aa, Homo Sapiens
RRSRSRTSPV

SEQ ID NO: 21540 - protein, 10 aa, Homo Sapiens
RSRSRTSPVT

SEQ ID NO: 21541 - protein, 10 aa, Homo Sapiens
RSRTSPVTRR

SEQ ID NO: 21542 - protein, 10 aa, Homo Sapiens
SRTSPVTRRR

SEQ ID NO: 21543 - protein, 10 aa, Homo Sapiens
TSPVTRRRSR

SEQ ID NO: 21544 - protein, 10 aa, Homo Sapiens
SPVTRRRSRS

SEQ ID NO: 21545 - protein, 10 aa, Homo Sapiens
PVTRRRSRSR

SEQ ID NO: 21546 - protein, 10 aa, Homo Sapiens
RRRSRSRTSP

SEQ ID NO: 21547 - protein, 10 aa, Homo Sapiens
RRSRSRTSPV

SEQ ID NO: 21548 - protein, 10 aa, Homo Sapiens
RSRSRTSPVT

SEQ ID NO: 21549 - protein, 10 aa, Homo Sapiens
RSRTSPVTRR

SEQ ID NO: 21550 - protein, 10 aa, Homo Sapiens
SRTSPVTRRR

SEQ ID NO: 21551 - protein, 10 aa, Homo Sapiens
TSPVTRRRSR

SEQ ID NO: 21552 - protein, 10 aa, Homo Sapiens
SPVTRRRSRS

SEQ ID NO: 21553 - protein, 10 aa, Homo Sapiens
PVTRRRSRSR

SEQ ID NO: 21554 - protein, 10 aa, Homo Sapiens
RRRSRSRTPP

SEQ ID NO: 21555 - protein, 10 aa, Homo Sapiens
RRSRSRTPPA

SEQ ID NO: 21556 - protein, 10 aa, Homo Sapiens
RSRSRTPPAI

SEQ ID NO: 21557 - protein, 10 aa, Homo Sapiens
RSRTPPAIRR

SEQ ID NO: 21558 - protein, 10 aa, Homo Sapiens
TPPAIRRRSR

SEQ ID NO: 21559 - protein, 10 aa, Homo Sapiens
PAIRRRSRSR

SEQ ID NO: 21560 - protein, 10 aa, Homo Sapiens
RRRSRSRTPL

SEQ ID NO: 21561 - protein, 10 aa, Homo Sapiens
RRSRSRTPLL

SEQ ID NO: 21562 - protein, 10 aa, Homo Sapiens
RSRSRTPLLP

SEQ ID NO: 21563 - protein, 10 aa, Homo Sapiens
RSRTPLLPRK

SEQ ID NO: 21564 - protein, 10 aa, Homo Sapiens
LLPRKRSRSR

SEQ ID NO: 21565 - protein, 10 aa, Homo Sapiens
LPRKRSRSRS

SEQ ID NO: 21566 - protein, 10 aa, Homo Sapiens
RKRSRSRSPL

SEQ ID NO: 21567 - protein, 10 aa, Homo Sapiens
RSRSRSPLAI

SEQ ID NO: 21568 - protein, 10 aa, Homo Sapiens
RSRSPLAIRR

SEQ ID NO: 21569 - protein, 10 aa, Homo Sapiens
SPLAIRRRSR

SEQ ID NO: 21570 - protein, 10 aa, Homo Sapiens
LAIRRRSRSR

SEQ ID NO: 21571 - protein, 10 aa, Homo Sapiens
RRRSRSRTPR

SEQ ID NO: 21572 - protein, 10 aa, Homo Sapiens
RSRSRTPRTA

SEQ ID NO: 21573 - protein, 10 aa, Homo Sapiens
RTPRTARGKR

SEQ ID NO: 21574 - protein, 10 aa, Homo Sapiens
TPRTARGKRS

SEQ ID NO: 21575 - protein, 10 aa, Homo Sapiens
TARGKRSLTR

SEQ ID NO: 21576 - protein, 10 aa, Homo Sapiens
RSLTRSPPAI

SEQ ID NO: 21577 - protein, 10 aa, Homo Sapiens
LTRSPPAIRR

SEQ ID NO: 21578 - protein, 10 aa, Homo Sapiens
SPPAIRRRSA

SEQ ID NO: 21579 - protein, 10 aa, Homo Sapiens
PPAIRRRSAS

SEQ ID NO: 21580 - protein, 10 aa, Homo Sapiens
RRRSASGSSS

SEQ ID NO: 21581 - protein, 10 aa, Homo Sapiens
RSASGSSSDR

SEQ ID NO: 21582 - protein, 10 aa, Homo Sapiens
RSRSATPPAT

SEQ ID NO: 21583 - protein, 10 aa, Homo Sapiens
TPPVALNSSR

SEQ ID NO: 21584 - protein, 10 aa, Homo Sapiens
PPVALNSSRM

SEQ ID NO: 21585 - protein, 10 aa, Homo Sapiens
ALNSSRMSCF

SEQ ID NO: 21586 - protein, 10 aa, Homo Sapiens
NSSRMSCFSR

SEQ ID NO: 21587 - protein, 10 aa, Homo Sapiens
RMSCFSRPSM

SEQ ID NO: 21588 - protein, 10 aa, Homo Sapiens
SMSPTPLDRC

SEQ ID NO: 21589 - protein, 10 aa, Homo Sapiens
MSPTPLDRCR

SEQ ID NO: 21590 - protein, 10 aa, Homo Sapiens
PLDRCRSPGM

SEQ ID NO: 21591 - protein, 10 aa, Homo Sapiens
GMLEPLGSSR

SEQ ID NO: 21592 - protein, 10 aa, Homo Sapiens
MLEPLGSSRT

SEQ ID NO: 21593 - protein, 10 aa, Homo Sapiens
EPLGSSRTPM

SEQ ID NO: 21594 - protein, 10 aa, Homo Sapiens
SVLQQAGGSM

SEQ ID NO: 21595 - protein, 10 aa, Homo Sapiens
VLQQAGGSMM

SEQ ID NO: 21596 - protein, 10 aa, Homo Sapiens
GSMMDGPGPR

SEQ ID NO: 21597 - protein, 10 aa, Homo Sapiens
SMMDGPGPRI

SEQ ID NO: 21598 - protein, 10 aa, Homo Sapiens
RIPDHQRTSV

SEQ ID NO: 21599 - protein, 10 aa, Homo Sapiens
SVPENHAQSR

SEQ ID NO: 21600 - protein, 10 aa, Homo Sapiens
VPENHAQSRI

SEQ ID NO: 21601 - protein, 10 aa, Homo Sapiens
HAQSRIALAL

SEQ ID NO: 21602 - protein, 10 aa, Homo Sapiens
AQSRIALALT

SEQ ID NO: 21603 - protein, 10 aa, Homo Sapiens
IALALTAISL

SEQ ID NO: 21604 - protein, 10 aa, Homo Sapiens
ALTAISLGTA

SEQ ID NO: 21605 - protein, 10 aa, Homo Sapiens
LTAISLGTAR

SEQ ID NO: 21606 - protein, 10 aa, Homo Sapiens
RPPPSMSAAG

SEQ ID NO: 21607 - protein, 10 aa, Homo Sapiens
SMSAAGLAAR

SEQ ID NO: 21608 - protein, 10 aa, Homo Sapiens
MSAAGLAARM

SEQ ID NO: 21609 - protein, 10 aa, Homo Sapiens
LAARMSQVPA

SEQ ID NO: 21610 - protein, 10 aa, Homo Sapiens
ARMSQVPAPV

SEQ ID NO: 21611 - protein, 10 aa, Homo Sapiens
MSQVPAPVPL

SEQ ID NO: 21612 - protein, 10 aa, Homo Sapiens
SQVPAPVPLM

SEQ ID NO: 21613 - protein, 10 aa, Homo Sapiens
VPAPVPLMSL

SEQ ID NO: 21614 - protein, 10 aa, Homo Sapiens
APVPLMSLRT

SEQ ID NO: 21615 - protein, 10 aa, Homo Sapiens
VPLMSLRTAP

SEQ ID NO: 21616 - protein, 10 aa, Homo Sapiens
PLMSLRTAPA

SEQ ID NO: 21617 - protein, 10 aa, Homo Sapiens
LMSLRTAPAA

SEQ ID NO: 21618 - protein, 10 aa, Homo Sapiens
SLRTAPAANL

SEQ ID NO: 21619 - protein, 10 aa, Homo Sapiens
TAPAANLASR

SEQ ID NO: 21620 - protein, 10 aa, Homo Sapiens
APAANLASRI

SEQ ID NO: 21621 - protein, 10 aa, Homo Sapiens
NLASRIPAAS

SEQ ID NO: 21622 - protein, 10 aa, Homo Sapiens
RIPAASAAAM

SEQ ID NO: 21623 - protein, 10 aa, Homo Sapiens
SAAAMNLASA

SEQ ID NO: 21624 - protein, 10 aa, Homo Sapiens
AAAMNLASAR

SEQ ID NO: 21625 - protein, 10 aa, Homo Sapiens
NLASARTPAI

SEQ ID NO: 21626 - protein, 10 aa, Homo Sapiens
TPAIPTAVNL

SEQ ID NO: 21627 - protein, 10 aa, Homo Sapiens
PTAVNLADSR

SEQ ID NO: 21628 - protein, 10 aa, Homo Sapiens
NLADSRTPAA

SEQ ID NO: 21629 - protein, 10 aa, Homo Sapiens
TPAAAAAMNL

SEQ ID NO: 21630 - protein, 10 aa, Homo Sapiens
AAAMNLASPR

SEQ ID NO: 21631 - protein, 10 aa, Homo Sapiens
AMNLASPRTA

SEQ ID NO: 21632 - protein, 10 aa, Homo Sapiens
NLASPRTAVA

SEQ ID NO: 21633 - protein, 10 aa, Homo Sapiens
SPRTAVAPSA

SEQ ID NO: 21634 - protein, 10 aa, Homo Sapiens
TAVAPSAVNL

SEQ ID NO: 21635 - protein, 10 aa, Homo Sapiens
AVAPSAVNLA

SEQ ID NO: 21636 - protein, 10 aa, Homo Sapiens
NLADPRTPTA

SEQ ID NO: 21637 - protein, 10 aa, Homo Sapiens
DPRTPTAPAV

SEQ ID NO: 21638 - protein, 10 aa, Homo Sapiens
TPTAPAVNLA

SEQ ID NO: 21639 - protein, 10 aa, Homo Sapiens
TAPAVNLAGA

SEQ ID NO: 21640 - protein, 10 aa, Homo Sapiens
NLAGARTPAA

SEQ ID NO: 21641 - protein, 10 aa, Homo Sapiens
LAGARTPAAL

SEQ ID NO: 21642 - protein, 10 aa, Homo Sapiens
TPAALAALSL

SEQ ID NO: 21643 - protein, 10 aa, Homo Sapiens
ALAALSLTGS

SEQ ID NO: 21644 - protein, 10 aa, Homo Sapiens
SLTGSGTPPT

SEQ ID NO: 21645 - protein, 10 aa, Homo Sapiens
LTGSGTPPTA

SEQ ID NO: 21646 - protein, 10 aa, Homo Sapiens
TPPTAANYPS

SEQ ID NO: 21647 - protein, 10 aa, Homo Sapiens
TAANYPSSSR

SEQ ID NO: 21648 - protein, 10 aa, Homo Sapiens
YPSSSRTPQA

SEQ ID NO: 21649 - protein, 10 aa, Homo Sapiens
TPQAPASANL

SEQ ID NO: 21650 - protein, 10 aa, Homo Sapiens
NLVGPRSAHA

SEQ ID NO: 21651 - protein, 10 aa, Homo Sapiens
GPRSAHATAP

SEQ ID NO: 21652 - protein, 10 aa, Homo Sapiens
ATAPVNIAGS

SEQ ID NO: 21653 - protein, 10 aa, Homo Sapiens
TAPVNIAGSR

SEQ ID NO: 21654 - protein, 10 aa, Homo Sapiens
APVNIAGSRT

SEQ ID NO: 21655 - protein, 10 aa, Homo Sapiens
NIAGSRTAAA

SEQ ID NO: 21656 - protein, 10 aa, Homo Sapiens
IAGSRTAAAL

SEQ ID NO: 21657 - protein, 10 aa, Homo Sapiens
TAAALAPASL

SEQ ID NO: 21658 - protein, 10 aa, Homo Sapiens
ALAPASLTSA

SEQ ID NO: 21659 - protein, 10 aa, Homo Sapiens
LAPASLTSAR

SEQ ID NO: 21660 - protein, 10 aa, Homo Sapiens
APASLTSARM

SEQ ID NO: 21661 - protein, 10 aa, Homo Sapiens
SLTSARMAPA

SEQ ID NO: 21662 - protein, 10 aa, Homo Sapiens
LTSARMAPAL

SEQ ID NO: 21663 - protein, 10 aa, Homo Sapiens
MAPALSGANL

SEQ ID NO: 21664 - protein, 10 aa, Homo Sapiens
APALSGANLT

SEQ ID NO: 21665 - protein, 10 aa, Homo Sapiens
LSGANLTSPR

SEQ ID NO: 21666 - protein, 10 aa, Homo Sapiens
SGANLTSPRV

SEQ ID NO: 21667 - protein, 10 aa, Homo Sapiens
LTSPRVPLSA

SEQ ID NO: 21668 - protein, 10 aa, Homo Sapiens
TSPRVPLSAY

SEQ ID NO: 21669 - protein, 10 aa, Homo Sapiens
SPRVPLSAYE

SEQ ID NO: 21670 - protein, 10 aa, Homo Sapiens
RVPLSAYERV

SEQ ID NO: 21671 - protein, 10 aa, Homo Sapiens
LSAYERVSGR

SEQ ID NO: 21672 - protein, 10 aa, Homo Sapiens
RVSGRTSPPL

SEQ ID NO: 21673 - protein, 10 aa, Homo Sapiens
TSPPLLDRAR

SEQ ID NO: 21674 - protein, 10 aa, Homo Sapiens
PLLDRARSRT

SEQ ID NO: 21675 - protein, 10 aa, Homo Sapiens
RARSRTPPSA

SEQ ID NO: 21676 - protein, 10 aa, Homo Sapiens
RSRTPPSAPS

SEQ ID NO: 21677 - protein, 10 aa, Homo Sapiens
APSQSRMTSE

SEQ ID NO: 21678 - protein, 10 aa, Homo Sapiens
PSQSRMTSER

SEQ ID NO: 21679 - protein, 10 aa, Homo Sapiens
SQSRMTSERA

SEQ ID NO: 21680 - protein, 10 aa, Homo Sapiens
MTSERAPSPS

SEQ ID NO: 21681 - protein, 10 aa, Homo Sapiens
SPSSRMGQAP

SEQ ID NO: 21682 - protein, 10 aa, Homo Sapiens
SSRMGQAPSQ

SEQ ID NO: 21683 - protein, 10 aa, Homo Sapiens
RMGQAPSQSL

SEQ ID NO: 21684 - protein, 10 aa, Homo Sapiens
MGQAPSQSLL

SEQ ID NO: 21685 - protein, 10 aa, Homo Sapiens
APSQSLLPPA

SEQ ID NO: 21686 - protein, 10 aa, Homo Sapiens
SLLPPAQDQP

SEQ ID NO: 21687 - protein, 10 aa, Homo Sapiens
QPRSPVPSAF

SEQ ID NO: 21688 - protein, 10 aa, Homo Sapiens
CLIAQTTPVA

SEQ ID NO: 21689 - protein, 10 aa, Homo Sapiens
TTPVAGSQSL

SEQ ID NO: 21690 - protein, 10 aa, Homo Sapiens
SQSLSSGAVA

SEQ ID NO: 21691 - protein, 10 aa, Homo Sapiens
SLSSGAVATT

SEQ ID NO: 21692 - protein, 10 aa, Homo Sapiens
GAVATTTSSA

SEQ ID NO: 21693 - protein, 10 aa, Homo Sapiens
SSAGDHNGML

SEQ ID NO: 21694 - protein, 10 aa, Homo Sapiens
AGDHNGMLSV

SEQ ID NO: 21695 - protein, 10 aa, Homo Sapiens
GMLSVPAPGV

SEQ ID NO: 21696 - protein, 10 aa, Homo Sapiens
STGAQQPSAL

SEQ ID NO: 21697 - protein, 10 aa, Homo Sapiens
TGAQQPSALA

SEQ ID NO: 21698 - protein, 10 aa, Homo Sapiens
AQQPSALAAL

SEQ ID NO: 21699 - protein, 10 aa, Homo Sapiens
SALAALQPAK

SEQ ID NO: 21700 - protein, 10 aa, Homo Sapiens
LAALQPAKER

SEQ ID NO: 21701 - protein, 10 aa, Homo Sapiens
AALQPAKERR

SEQ ID NO: 21702 - protein, 10 aa, Homo Sapiens
QPAKERRSSS

SEQ ID NO: 21703 - protein, 10 aa, Homo Sapiens
RRSSSSSSSS

SEQ ID NO: 21704 - protein, 10 aa, Homo Sapiens
SDSEGSSLPV

SEQ ID NO: 21705 - protein, 10 aa, Homo Sapiens
SLPVQPEVAL

SEQ ID NO: 21706 - protein, 10 aa, Homo Sapiens
LPVQPEVALK

SEQ ID NO: 21707 - protein, 10 aa, Homo Sapiens
VQPEVALKRV

SEQ ID NO: 21708 - protein, 10 aa, Homo Sapiens
RVPSPTPAPK

SEQ ID NO: 21709 - protein, 10 aa, Homo Sapiens
SPTPAPKEAV

SEQ ID NO: 21710 - protein, 10 aa, Homo Sapiens
AVREGRPPEP

SEQ ID NO: 21711 - protein, 10 aa, Homo Sapiens
EPTPAKRKRR

SEQ ID NO: 21712 - protein, 10 aa, Homo Sapiens
TPAKRKRRSS

SEQ ID NO: 21713 - protein, 10 aa, Homo Sapiens
RRSSSSSSSS

SEQ ID NO: 21714 - protein, 10 aa, Homo Sapiens
SSSSSPSPAK

SEQ ID NO: 21715 - protein, 10 aa, Homo Sapiens
SPAKPGPQAL

SEQ ID NO: 21716 - protein, 10 aa, Homo Sapiens
QALPKPASPK

SEQ ID NO: 21717 - protein, 10 aa, Homo Sapiens
ALPKPASPKK

SEQ ID NO: 21718 - protein, 10 aa, Homo Sapiens
GERRSRSPRK

SEQ ID NO: 21719 - protein, 10 aa, Homo Sapiens
RRSRSPRKPI

SEQ ID NO: 21720 - protein, 10 aa, Homo Sapiens
SPRKPIDSLR

SEQ ID NO: 21721 - protein, 10 aa, Homo Sapiens
SLRDSRSLSY

SEQ ID NO: 21722 - protein, 10 aa, Homo Sapiens
DSRSLSYSPV

SEQ ID NO: 21723 - protein, 10 aa, Homo Sapiens
RSLSYSPVER

SEQ ID NO: 21724 - protein, 10 aa, Homo Sapiens
SLSYSPVERR

SEQ ID NO: 21725 - protein, 10 aa, Homo Sapiens
LSYSPVERRR

SEQ ID NO: 21726 - protein, 10 aa, Homo Sapiens
SPVERRRPSP

SEQ ID NO: 21727 - protein, 10 aa, Homo Sapiens
RRPSPQPSPR

SEQ ID NO: 21728 - protein, 10 aa, Homo Sapiens
SPRDQQSSSS

SEQ ID NO: 21729 - protein, 10 aa, Homo Sapiens
QSSSSERGSR

SEQ ID NO: 21730 - protein, 10 aa, Homo Sapiens
SSSSERGSRR

SEQ ID NO: 21731 - protein, 10 aa, Homo Sapiens
RGDSRSPSHK

SEQ ID NO: 21732 - protein, 10 aa, Homo Sapiens
DSRSPSHKRR

SEQ ID NO: 21733 - protein, 10 aa, Homo Sapiens
SPSHKRRRET

SEQ ID NO: 21734 - protein, 10 aa, Homo Sapiens
KRRRETPSPR

SEQ ID NO: 21735 - protein, 10 aa, Homo Sapiens
RRETPSPRPM

SEQ ID NO: 21736 - protein, 10 aa, Homo Sapiens
ETPSPRPMRH

SEQ ID NO: 21737 - protein, 10 aa, Homo Sapiens
TPSPRPMRHR

SEQ ID NO: 21738 - protein, 10 aa, Homo Sapiens
SPRPMRHRSS

SEQ ID NO: 21739 - protein, 10 aa, Homo Sapiens
RPMRHRSSRS

SEQ ID NO: 21740 - protein, 8 aa, Homo Sapiens
GIGLPTPR

SEQ ID NO: 21741 - protein, 8 aa, Homo Sapiens
LPTPRGSG

SEQ ID NO: 21742 - protein, 8 aa, Homo Sapiens
RGSGTNGY

SEQ ID NO: 21743 - protein, 8 aa, Homo Sapiens
GTNGYVQR

SEQ ID NO: 21744 - protein, 8 aa, Homo Sapiens
YVQRNLSL

SEQ ID NO: 21745 - protein, 8 aa, Homo Sapiens
VQRNLSLV

SEQ ID NO: 21746 - protein, 8 aa, Homo Sapiens
QRNLSLVR

SEQ ID NO: 21747 - protein, 8 aa, Homo Sapiens
NLSLVRGR

SEQ ID NO: 21748 - protein, 8 aa, Homo Sapiens
LSLVRGRR

SEQ ID NO: 21749 - protein, 8 aa, Homo Sapiens
RRGERPDY

SEQ ID NO: 21750 - protein, 8 aa, Homo Sapiens
DYKGEEEL

SEQ ID NO: 21751 - protein, 8 aa, Homo Sapiens
GEEELRRL

SEQ ID NO: 21752 - protein, 8 aa, Homo Sapiens
EELRRLEA

SEQ ID NO: 21753 - protein, 8 aa, Homo Sapiens
ELRRLEAA

SEQ ID NO: 21754 - protein, 8 aa, Homo Sapiens
RRLEAALV

SEQ ID NO: 21755 - protein, 8 aa, Homo Sapiens
RLEAALVK

SEQ ID NO: 21756 - protein, 8 aa, Homo Sapiens
ERKRRVEL

SEQ ID NO: 21757 - protein, 8 aa, Homo Sapiens
RRVELRCL

SEQ ID NO: 21758 - protein, 8 aa, Homo Sapiens
VELRCLEL

SEQ ID NO: 21759 - protein, 8 aa, Homo Sapiens
EEMMEEQG

SEQ ID NO: 21760 - protein, 8 aa, Homo Sapiens
EMMEEQGY

SEQ ID NO: 21761 - protein, 8 aa, Homo Sapiens
IQEKVATF

SEQ ID NO: 21762 - protein, 8 aa, Homo Sapiens
EKVATFRL

SEQ ID NO: 21763 - protein, 8 aa, Homo Sapiens
KVATFRLM

SEQ ID NO: 21764 - protein, 8 aa, Homo Sapiens
VATFRLML

SEQ ID NO: 21765 - protein, 8 aa, Homo Sapiens
ATFRLMLL

SEQ ID NO: 21766 - protein, 8 aa, Homo Sapiens
FRLMLLEK

SEQ ID NO: 21767 - protein, 8 aa, Homo Sapiens
LMLLEKDV

SEQ ID NO: 21768 - protein, 8 aa, Homo Sapiens
ETPGQRPA

SEQ ID NO: 21769 - protein, 8 aa, Homo Sapiens
TPGQRPAV

SEQ ID NO: 21770 - protein, 8 aa, Homo Sapiens
AVTETHQL

SEQ ID NO: 21771 - protein, 8 aa, Homo Sapiens
ETHQLAEL

SEQ ID NO: 21772 - protein, 8 aa, Homo Sapiens
QLAELNEK

SEQ ID NO: 21773 - protein, 8 aa, Homo Sapiens
NERLRAAF

SEQ ID NO: 21774 - protein, 8 aa, Homo Sapiens
RLRAAFGI

SEQ ID NO: 21775 - protein, 8 aa, Homo Sapiens
FGISDSYV

SEQ ID NO: 21776 - protein, 8 aa, Homo Sapiens
SYVDGSSF

SEQ ID NO: 21777 - protein, 8 aa, Homo Sapiens
GSSFDPQR

SEQ ID NO: 21778 - protein, 8 aa, Homo Sapiens
SSFDPQRR

SEQ ID NO: 21779 - protein, 8 aa, Homo Sapiens
QRRAREAK

SEQ ID NO: 21780 - protein, 8 aa, Homo Sapiens
RRAREAKQ

SEQ ID NO: 21781 - protein, 8 aa, Homo Sapiens
APEPPKPY

SEQ ID NO: 21782 - protein, 8 aa, Homo Sapiens
EPPKPYSL

SEQ ID NO: 21783 - protein, 8 aa, Homo Sapiens
SSRSPTPK

SEQ ID NO: 21784 - protein, 8 aa, Homo Sapiens
RSPTPKQK

SEQ ID NO: 21785 - protein, 8 aa, Homo Sapiens
KQKKKKKK

SEQ ID NO: 21786 - protein, 8 aa, Homo Sapiens
KKKDRGRR

SEQ ID NO: 21787 - protein, 8 aa, Homo Sapiens
RRSESSSP

SEQ ID NO: 21788 - protein, 8 aa, Homo Sapiens
RSESSSPR

SEQ ID NO: 21789 - protein, 8 aa, Homo Sapiens
SSSPRRER

SEQ ID NO: 21790 - protein, 8 aa, Homo Sapiens
SSPRRERK

SEQ ID NO: 21791 - protein, 8 aa, Homo Sapiens
SPRRERKK

SEQ ID NO: 21792 - protein, 8 aa, Homo Sapiens
RERKKSSK

SEQ ID NO: 21793 - protein, 8 aa, Homo Sapiens
RKKSSKKK

SEQ ID NO: 21794 - protein, 8 aa, Homo Sapiens
SSKKKKHR

SEQ ID NO: 21795 - protein, 8 aa, Homo Sapiens
HRSESESK

SEQ ID NO: 21796 - protein, 8 aa, Homo Sapiens
RSESESKK

SEQ ID NO: 21797 - protein, 8 aa, Homo Sapiens
ESKKRKHR

SEQ ID NO: 21798 - protein, 8 aa, Homo Sapiens
KHRSPTPK

SEQ ID NO: 21799 - protein, 8 aa, Homo Sapiens
RSPTPKSK

SEQ ID NO: 21800 - protein, 8 aa, Homo Sapiens
SKRKSKDK

SEQ ID NO: 21801 - protein, 8 aa, Homo Sapiens
KRKSKDKK

SEQ ID NO: 21802 - protein, 8 aa, Homo Sapiens
KSKDKKRK

SEQ ID NO: 21803 - protein, 8 aa, Homo Sapiens
DKKRKRSR

SEQ ID NO: 21804 - protein, 8 aa, Homo Sapiens
RSRSTTPA

SEQ ID NO: 21805 - protein, 8 aa, Homo Sapiens
RSTTPAPK

SEQ ID NO: 21806 - protein, 8 aa, Homo Sapiens
TTPAPKSR

SEQ ID NO: 21807 - protein, 8 aa, Homo Sapiens
TPAPKSRR

SEQ ID NO: 21808 - protein, 8 aa, Homo Sapiens
APKSRRAH

SEQ ID NO: 21809 - protein, 8 aa, Homo Sapiens
KSRRAHRS

SEQ ID NO: 21810 - protein, 8 aa, Homo Sapiens
RRAHRSTS

SEQ ID NO: 21811 - protein, 8 aa, Homo Sapiens
RAHRSTSA

SEQ ID NO: 21812 - protein, 8 aa, Homo Sapiens
ASSSDTSR

SEQ ID NO: 21813 - protein, 8 aa, Homo Sapiens
DTSRSRSR

SEQ ID NO: 21814 - protein, 8 aa, Homo Sapiens
RSRSRSAA

SEQ ID NO: 21815 - protein, 8 aa, Homo Sapiens
RSRSAAAK

SEQ ID NO: 21816 - protein, 8 aa, Homo Sapiens
KTHTTALA

SEQ ID NO: 21817 - protein, 8 aa, Homo Sapiens
HTTALAGR

SEQ ID NO: 21818 - protein, 8 aa, Homo Sapiens
ALAGRSPS

SEQ ID NO: 21819 - protein, 8 aa, Homo Sapiens
SPSPASGR

SEQ ID NO: 21820 - protein, 8 aa, Homo Sapiens
RPSSPETA

SEQ ID NO: 21821 - protein, 8 aa, Homo Sapiens
SSPETATK

SEQ ID NO: 21822 - protein, 8 aa, Homo Sapiens
ETATKQPS

SEQ ID NO: 21823 - protein, 8 aa, Homo Sapiens
KDKDKKEK

SEQ ID NO: 21824 - protein, 8 aa, Homo Sapiens
ATRPSPSP

SEQ ID NO: 21825 - protein, 8 aa, Homo Sapiens
EPPAPTPL

SEQ ID NO: 21826 - protein, 8 aa, Homo Sapiens
QPLATTPL

SEQ ID NO: 21827 - protein, 8 aa, Homo Sapiens
TPLSQEPV

SEQ ID NO: 21828 - protein, 8 aa, Homo Sapiens
EASPTRDR

SEQ ID NO: 21829 - protein, 8 aa, Homo Sapiens
SSSPESPK

SEQ ID NO: 21830 - protein, 8 aa, Homo Sapiens
SPESPKPA

SEQ ID NO: 21831 - protein, 8 aa, Homo Sapiens
ESPKPAPA

SEQ ID NO: 21832 - protein, 8 aa, Homo Sapiens
APGSHREI

SEQ ID NO: 21833 - protein, 8 aa, Homo Sapiens
REISSSPT

SEQ ID NO: 21834 - protein, 8 aa, Homo Sapiens
ISSSPTSK

SEQ ID NO: 21835 - protein, 8 aa, Homo Sapiens
SSPTSKNR

SEQ ID NO: 21836 - protein, 8 aa, Homo Sapiens
RSHGRAKR

SEQ ID NO: 21837 - protein, 8 aa, Homo Sapiens
HGRAKRDK

SEQ ID NO: 21838 - protein, 8 aa, Homo Sapiens
KSHSHTPS

SEQ ID NO: 21839 - protein, 8 aa, Homo Sapiens
HSHTPSRR

SEQ ID NO: 21840 - protein, 8 aa, Homo Sapiens
TPSRRMGR

SEQ ID NO: 21841 - protein, 8 aa, Homo Sapiens
RRMGRSRS

SEQ ID NO: 21842 - protein, 8 aa, Homo Sapiens
MGRSRSPA

SEQ ID NO: 21843 - protein, 8 aa, Homo Sapiens
RSRSPATA

SEQ ID NO: 21844 - protein, 8 aa, Homo Sapiens
RSPATAKR

SEQ ID NO: 21845 - protein, 8 aa, Homo Sapiens
TAKRGRSR

SEQ ID NO: 21846 - protein, 8 aa, Homo Sapiens
KRGRSRSR

SEQ ID NO: 21847 - protein, 8 aa, Homo Sapiens
RSRSRTPT

SEQ ID NO: 21848 - protein, 8 aa, Homo Sapiens
RSRTPTKR

SEQ ID NO: 21849 - protein, 8 aa, Homo Sapiens
PTKRGHSR

SEQ ID NO: 21850 - protein, 8 aa, Homo Sapiens
KRGHSRSR

SEQ ID NO: 21851 - protein, 8 aa, Homo Sapiens
RSRSPQWR

SEQ ID NO: 21852 - protein, 8 aa, Homo Sapiens
SPQWRRSR

SEQ ID NO: 21853 - protein, 8 aa, Homo Sapiens
RRSRSAQR

SEQ ID NO: 21854 - protein, 8 aa, Homo Sapiens
RSRSAQRW

SEQ ID NO: 21855 - protein, 8 aa, Homo Sapiens
RSAQRWGR

SEQ ID NO: 21856 - protein, 8 aa, Homo Sapiens
AQRWGRSR

SEQ ID NO: 21857 - protein, 8 aa, Homo Sapiens
QRWGRSRS

SEQ ID NO: 21858 - protein, 8 aa, Homo Sapiens
RSRSPQRR

SEQ ID NO: 21859 - protein, 8 aa, Homo Sapiens
RSPQRRGR

SEQ ID NO: 21860 - protein, 8 aa, Homo Sapiens
SPQRRGRS

SEQ ID NO: 21861 - protein, 8 aa, Homo Sapiens
RGRSRSPQ

SEQ ID NO: 21862 - protein, 8 aa, Homo Sapiens
RSPQRPGW

SEQ ID NO: 21863 - protein, 8 aa, Homo Sapiens
RPGWSRSR

SEQ ID NO: 21864 - protein, 8 aa, Homo Sapiens
RSRNTQRR

SEQ ID NO: 21865 - protein, 8 aa, Homo Sapiens
RNTQRRGR

SEQ ID NO: 21866 - protein, 8 aa, Homo Sapiens
TQRRGRSR

SEQ ID NO: 21867 - protein, 8 aa, Homo Sapiens
RGRSRSAR

SEQ ID NO: 21868 - protein, 8 aa, Homo Sapiens
RRGRSHSR

SEQ ID NO: 21869 - protein, 8 aa, Homo Sapiens
RSHSRSPA

SEQ ID NO: 21870 - protein, 8 aa, Homo Sapiens
HSRSPATR

SEQ ID NO: 21871 - protein, 8 aa, Homo Sapiens
RSPATRGR

SEQ ID NO: 21872 - protein, 8 aa, Homo Sapiens
SPATRGRS

SEQ ID NO: 21873 - protein, 8 aa, Homo Sapiens
RSRSRTPA

SEQ ID NO: 21874 - protein, 8 aa, Homo Sapiens
RSRTPARR

SEQ ID NO: 21875 - protein, 8 aa, Homo Sapiens
RTPARRGR

SEQ ID NO: 21876 - protein, 8 aa, Homo Sapiens
RRGRSRSR

SEQ ID NO: 21877 - protein, 8 aa, Homo Sapiens
RSRSRTPA

SEQ ID NO: 21878 - protein, 8 aa, Homo Sapiens
RSRTPARR

SEQ ID NO: 21879 - protein, 8 aa, Homo Sapiens
TPARRRSR

SEQ ID NO: 21880 - protein, 8 aa, Homo Sapiens
ARRRSRSR

SEQ ID NO: 21881 - protein, 8 aa, Homo Sapiens
RSRSRTPT

SEQ ID NO: 21882 - protein, 8 aa, Homo Sapiens
RSRTPTRR

SEQ ID NO: 21883 - protein, 8 aa, Homo Sapiens
TPTRRRSR

SEQ ID NO: 21884 - protein, 8 aa, Homo Sapiens
RSRSRTPA

SEQ ID NO: 21885 - protein, 8 aa, Homo Sapiens
RSRTPARR

SEQ ID NO: 21886 - protein, 8 aa, Homo Sapiens
RTPARRGR

SEQ ID NO: 21887 - protein, 8 aa, Homo Sapiens
RRGRSRSR

SEQ ID NO: 21888 - protein, 8 aa, Homo Sapiens
RSRSRTPA

SEQ ID NO: 21889 - protein, 8 aa, Homo Sapiens
RSRTPARR

SEQ ID NO: 21890 - protein, 8 aa, Homo Sapiens
TPARRRSR

SEQ ID NO: 21891 - protein, 8 aa, Homo Sapiens
ARRRSRTR

SEQ ID NO: 21892 - protein, 8 aa, Homo Sapiens
RSRTRSPV

SEQ ID NO: 21893 - protein, 8 aa, Homo Sapiens
RTRSPVRR

SEQ ID NO: 21894 - protein, 8 aa, Homo Sapiens
SPVRRRSR

SEQ ID NO: 21895 - protein, 8 aa, Homo Sapiens
RRSRSRSP

SEQ ID NO: 21896 - protein, 8 aa, Homo Sapiens
RSRSRSPA

SEQ ID NO: 21897 - protein, 8 aa, Homo Sapiens
RSRSPARR

SEQ ID NO: 21898 - protein, 8 aa, Homo Sapiens
SPARRSGR

SEQ ID NO: 21899 - protein, 8 aa, Homo Sapiens
RRSGRSRS

SEQ ID NO: 21900 - protein, 8 aa, Homo Sapiens
RSGRSRSR

SEQ ID NO: 21901 - protein, 8 aa, Homo Sapiens
RSRSRTPA

SEQ ID NO: 21902 - protein, 8 aa, Homo Sapiens
RSRTPARR

SEQ ID NO: 21903 - protein, 8 aa, Homo Sapiens
RTPARRGR

SEQ ID NO: 21904 - protein, 8 aa, Homo Sapiens
RRGRSRSR

SEQ ID NO: 21905 - protein, 8 aa, Homo Sapiens
RSRSRTPA

SEQ ID NO: 21906 - protein, 8 aa, Homo Sapiens
RSRTPARR

SEQ ID NO: 21907 - protein, 8 aa, Homo Sapiens
RTPARRGR

SEQ ID NO: 21908 - protein, 8 aa, Homo Sapiens
RRGRSRSR

SEQ ID NO: 21909 - protein, 8 aa, Homo Sapiens
RSRSRTPA

SEQ ID NO: 21910 - protein, 8 aa, Homo Sapiens
RSRTPARR

SEQ ID NO: 21911 - protein, 8 aa, Homo Sapiens
TPARRSGR

SEQ ID NO: 21912 - protein, 8 aa, Homo Sapiens
RRSGRSRS

SEQ ID NO: 21913 - protein, 8 aa, Homo Sapiens
RSGRSRSR

SEQ ID NO: 21914 - protein, 8 aa, Homo Sapiens
RSRSRTPA

SEQ ID NO: 21915 - protein, 8 aa, Homo Sapiens
RSRTPARR

SEQ ID NO: 21916 - protein, 8 aa, Homo Sapiens
RTPARRGR

SEQ ID NO: 21917 - protein, 8 aa, Homo Sapiens
RRGRSRSR

SEQ ID NO: 21918 - protein, 8 aa, Homo Sapiens
RSRSRTPR

SEQ ID NO: 21919 - protein, 8 aa, Homo Sapiens
TPRRGRSR

SEQ ID NO: 21920 - protein, 8 aa, Homo Sapiens
RRGRSRSR

SEQ ID NO: 21921 - protein, 8 aa, Homo Sapiens
GRSRSRSL

SEQ ID NO: 21922 - protein, 8 aa, Homo Sapiens
RSRSRSLV

SEQ ID NO: 21923 - protein, 8 aa, Homo Sapiens
RSRSLVRR

SEQ ID NO: 21924 - protein, 8 aa, Homo Sapiens
RSLVRRGR

SEQ ID NO: 21925 - protein, 8 aa, Homo Sapiens
RRGRSHSR

SEQ ID NO: 21926 - protein, 8 aa, Homo Sapiens
RSHSRTPQ

SEQ ID NO: 21927 - protein, 8 aa, Homo Sapiens
HSRTPQRR

SEQ ID NO: 21928 - protein, 8 aa, Homo Sapiens
RTPQRRGR

SEQ ID NO: 21929 - protein, 8 aa, Homo Sapiens
RSGSSSER

SEQ ID NO: 21930 - protein, 8 aa, Homo Sapiens
SSSERKNK

SEQ ID NO: 21931 - protein, 8 aa, Homo Sapiens
KSRTSQRR

SEQ ID NO: 21932 - protein, 8 aa, Homo Sapiens
RTSQRRSR

SEQ ID NO: 21933 - protein, 8 aa, Homo Sapiens
RSNSSPEM

SEQ ID NO: 21934 - protein, 8 aa, Homo Sapiens
NSSPEMKK

SEQ ID NO: 21935 - protein, 8 aa, Homo Sapiens
KSRISSRR

SEQ ID NO: 21936 - protein, 8 aa, Homo Sapiens
RISSRRSR

SEQ ID NO: 21937 - protein, 8 aa, Homo Sapiens
SSRRSRSL

SEQ ID NO: 21938 - protein, 8 aa, Homo Sapiens
RRSRSLSS

SEQ ID NO: 21939 - protein, 8 aa, Homo Sapiens
SLSSPRSK

SEQ ID NO: 21940 - protein, 8 aa, Homo Sapiens
SSPRSKAK

SEQ ID NO: 21941 - protein, 8 aa, Homo Sapiens
SPRSKAKS

SEQ ID NO: 21942 - protein, 8 aa, Homo Sapiens
KAKSRLSL

SEQ ID NO: 21943 - protein, 8 aa, Homo Sapiens
KSRLSLRR

SEQ ID NO: 21944 - protein, 8 aa, Homo Sapiens
RLSLRRSL

SEQ ID NO: 21945 - protein, 8 aa, Homo Sapiens
SLSGSSPC

SEQ ID NO: 21946 - protein, 8 aa, Homo Sapiens
SGSSPCPK

SEQ ID NO: 21947 - protein, 8 aa, Homo Sapiens
SSPCPKQK

SEQ ID NO: 21948 - protein, 8 aa, Homo Sapiens
KSQTPPRR

SEQ ID NO: 21949 - protein, 8 aa, Homo Sapiens
QTPPRRSR

SEQ ID NO: 21950 - protein, 8 aa, Homo Sapiens
PPRRSRSG

SEQ ID NO: 21951 - protein, 8 aa, Homo Sapiens
RSRSGSSQ

SEQ ID NO: 21952 - protein, 8 aa, Homo Sapiens
RSGSSQPK

SEQ ID NO: 21953 - protein, 8 aa, Homo Sapiens
GSSQPKAK

SEQ ID NO: 21954 - protein, 8 aa, Homo Sapiens
KSRTPPRR

SEQ ID NO: 21955 - protein, 8 aa, Homo Sapiens
RTPPRRSR

SEQ ID NO: 21956 - protein, 8 aa, Homo Sapiens
PPRRSRSS

SEQ ID NO: 21957 - protein, 8 aa, Homo Sapiens
RRSRSSSS

SEQ ID NO: 21958 - protein, 8 aa, Homo Sapiens
RSRSSSSP

SEQ ID NO: 21959 - protein, 8 aa, Homo Sapiens
SSSSPPPK

SEQ ID NO: 21960 - protein, 8 aa, Homo Sapiens
SSPPPKQK

SEQ ID NO: 21961 - protein, 8 aa, Homo Sapiens
SSSSPHPK

SEQ ID NO: 21962 - protein, 8 aa, Homo Sapiens
SSSPHPKV

SEQ ID NO: 21963 - protein, 8 aa, Homo Sapiens
SSPHPKVK

SEQ ID NO: 21964 - protein, 8 aa, Homo Sapiens
KVKSGTPP

SEQ ID NO: 21965 - protein, 8 aa, Homo Sapiens
TPPRQGSI

SEQ ID NO: 21966 - protein, 8 aa, Homo Sapiens
EQSVTPQR

SEQ ID NO: 21967 - protein, 8 aa, Homo Sapiens
QSVTPQRR

SEQ ID NO: 21968 - protein, 8 aa, Homo Sapiens
TPQRRSCF

SEQ ID NO: 21969 - protein, 8 aa, Homo Sapiens
ESSPDPEL

SEQ ID NO: 21970 - protein, 8 aa, Homo Sapiens
SSPDPELK

SEQ ID NO: 21971 - protein, 8 aa, Homo Sapiens
CSGSSPPR

SEQ ID NO: 21972 - protein, 8 aa, Homo Sapiens
GSSPPRVK

SEQ ID NO: 21973 - protein, 8 aa, Homo Sapiens
PPRVKSST

SEQ ID NO: 21974 - protein, 8 aa, Homo Sapiens
RVKSSTPP

SEQ ID NO: 21975 - protein, 8 aa, Homo Sapiens
SPSRSSSP

SEQ ID NO: 21976 - protein, 8 aa, Homo Sapiens
RSSSPQPK

SEQ ID NO: 21977 - protein, 8 aa, Homo Sapiens
SSPQPKVK

SEQ ID NO: 21978 - protein, 8 aa, Homo Sapiens
QPKVKAII

SEQ ID NO: 21979 - protein, 8 aa, Homo Sapiens
AIISPRQR

SEQ ID NO: 21980 - protein, 8 aa, Homo Sapiens
SPRQRSHS

SEQ ID NO: 21981 - protein, 8 aa, Homo Sapiens
SSSPSPSR

SEQ ID NO: 21982 - protein, 8 aa, Homo Sapiens
SSPSPSRV

SEQ ID NO: 21983 - protein, 8 aa, Homo Sapiens
SPSPSRVT

SEQ ID NO: 21984 - protein, 8 aa, Homo Sapiens
SPSRVTSR

SEQ ID NO: 21985 - protein, 8 aa, Homo Sapiens
VTSRTTPR

SEQ ID NO: 21986 - protein, 8 aa, Homo Sapiens
TSRTTPRR

SEQ ID NO: 21987 - protein, 8 aa, Homo Sapiens
RTTPRRSR

SEQ ID NO: 21988 - protein, 8 aa, Homo Sapiens
TPRRSRSV

SEQ ID NO: 21989 - protein, 8 aa, Homo Sapiens
RRSRSVSP

SEQ ID NO: 21990 - protein, 8 aa, Homo Sapiens
SVSPCSNV

SEQ ID NO: 21991 - protein, 8 aa, Homo Sapiens
RLLPRYSH

SEQ ID NO: 21992 - protein, 8 aa, Homo Sapiens
LPRYSHSG

SEQ ID NO: 21993 - protein, 8 aa, Homo Sapiens
GSSSPDTK

SEQ ID NO: 21994 - protein, 8 aa, Homo Sapiens
SSSPDTKV

SEQ ID NO: 21995 - protein, 8 aa, Homo Sapiens
SSPDTKVK

SEQ ID NO: 21996 - protein, 8 aa, Homo Sapiens
ETPPRQSH

SEQ ID NO: 21997 - protein, 8 aa, Homo Sapiens
RQSHSGSI

SEQ ID NO: 21998 - protein, 8 aa, Homo Sapiens
GSISPYPK

SEQ ID NO: 21999 - protein, 8 aa, Homo Sapiens
SISPYPKV

SEQ ID NO: 22000 - protein, 8 aa, Homo Sapiens
SPYPKVKA

SEQ ID NO: 22001 - protein, 8 aa, Homo Sapiens
YPKVKAQT

SEQ ID NO: 22002 - protein, 8 aa, Homo Sapiens
KVKAQTPP

SEQ ID NO: 22003 - protein, 8 aa, Homo Sapiens
QTPPGPSL

SEQ ID NO: 22004 - protein, 8 aa, Homo Sapiens
KSPCPQEK

SEQ ID NO: 22005 - protein, 8 aa, Homo Sapiens
VQSCPGSL

SEQ ID NO: 22006 - protein, 8 aa, Homo Sapiens
SCPGSLSL

SEQ ID NO: 22007 - protein, 8 aa, Homo Sapiens
SLSLCAGV

SEQ ID NO: 22008 - protein, 8 aa, Homo Sapiens
LSLCAGVK

SEQ ID NO: 22009 - protein, 8 aa, Homo Sapiens
STPPGESY

SEQ ID NO: 22010 - protein, 8 aa, Homo Sapiens
TPPGESYF

SEQ ID NO: 22011 - protein, 8 aa, Homo Sapiens
SYFGVSSL

SEQ ID NO: 22012 - protein, 8 aa, Homo Sapiens
GVSSLQLK

SEQ ID NO: 22013 - protein, 8 aa, Homo Sapiens
SQTSPDHR

SEQ ID NO: 22014 - protein, 8 aa, Homo Sapiens
DTSSPEVR

SEQ ID NO: 22015 - protein, 8 aa, Homo Sapiens
SHSESPSL

SEQ ID NO: 22016 - protein, 8 aa, Homo Sapiens
ESPSLQSK

SEQ ID NO: 22017 - protein, 8 aa, Homo Sapiens
SLQSKSQT

SEQ ID NO: 22018 - protein, 8 aa, Homo Sapiens
QTSPKGGR

SEQ ID NO: 22019 - protein, 8 aa, Homo Sapiens
RSRSSSPV

SEQ ID NO: 22020 - protein, 8 aa, Homo Sapiens
SSSPVTEL

SEQ ID NO: 22021 - protein, 8 aa, Homo Sapiens
SPVTELAS

SEQ ID NO: 22022 - protein, 8 aa, Homo Sapiens
ELASRSPI

SEQ ID NO: 22023 - protein, 8 aa, Homo Sapiens
LASRSPIR

SEQ ID NO: 22024 - protein, 8 aa, Homo Sapiens
RSPIRQDR

SEQ ID NO: 22025 - protein, 8 aa, Homo Sapiens
GEFSASPM

SEQ ID NO: 22026 - protein, 8 aa, Homo Sapiens
FSASPMLK

SEQ ID NO: 22027 - protein, 8 aa, Homo Sapiens
SPMLKSGM

SEQ ID NO: 22028 - protein, 8 aa, Homo Sapiens
MLKSGMSP

SEQ ID NO: 22029 - protein, 8 aa, Homo Sapiens
GMSPEQSR

SEQ ID NO: 22030 - protein, 8 aa, Homo Sapiens
FQSDSSSY

SEQ ID NO: 22031 - protein, 8 aa, Homo Sapiens
TVDSNSLL

SEQ ID NO: 22032 - protein, 8 aa, Homo Sapiens
NSLLGQSR

SEQ ID NO: 22033 - protein, 8 aa, Homo Sapiens
SLLGQSRL

SEQ ID NO: 22034 - protein, 8 aa, Homo Sapiens
GQSRLETA

SEQ ID NO: 22035 - protein, 8 aa, Homo Sapiens
RLETAESK

SEQ ID NO: 22036 - protein, 8 aa, Homo Sapiens
ETAESKEK

SEQ ID NO: 22037 - protein, 8 aa, Homo Sapiens
AESKEKMA

SEQ ID NO: 22038 - protein, 8 aa, Homo Sapiens
ESKEKMAL

SEQ ID NO: 22039 - protein, 8 aa, Homo Sapiens
ALPPQEDA

SEQ ID NO: 22040 - protein, 8 aa, Homo Sapiens
LPPQEDAT

SEQ ID NO: 22041 - protein, 8 aa, Homo Sapiens
DATASPPR

SEQ ID NO: 22042 - protein, 8 aa, Homo Sapiens
TASPPRQK

SEQ ID NO: 22043 - protein, 8 aa, Homo Sapiens
DKFSPFPV

SEQ ID NO: 22044 - protein, 8 aa, Homo Sapiens
SPFPVQDR

SEQ ID NO: 22045 - protein, 8 aa, Homo Sapiens
FPVQDRPE

SEQ ID NO: 22046 - protein, 8 aa, Homo Sapiens
RPESSLVF

SEQ ID NO: 22047 - protein, 8 aa, Homo Sapiens
SLVFKDTL

SEQ ID NO: 22048 - protein, 8 aa, Homo Sapiens
LVFKDTLR

SEQ ID NO: 22049 - protein, 8 aa, Homo Sapiens
DTLRTPPR

SEQ ID NO: 22050 - protein, 8 aa, Homo Sapiens
PPRERSGA

SEQ ID NO: 22051 - protein, 8 aa, Homo Sapiens
ETKEQNSA

SEQ ID NO: 22052 - protein, 8 aa, Homo Sapiens
TKEQNSAL

SEQ ID NO: 22053 - protein, 8 aa, Homo Sapiens
ELMEVVEK

SEQ ID NO: 22054 - protein, 8 aa, Homo Sapiens
EEPAGQIL

SEQ ID NO: 22055 - protein, 8 aa, Homo Sapiens
KEMSTSNF

SEQ ID NO: 22056 - protein, 8 aa, Homo Sapiens
SSPEVEER

SEQ ID NO: 22057 - protein, 8 aa, Homo Sapiens
EVEERPAV

SEQ ID NO: 22058 - protein, 8 aa, Homo Sapiens
EERPAVSL

SEQ ID NO: 22059 - protein, 8 aa, Homo Sapiens
RPAVSLTL

SEQ ID NO: 22060 - protein, 8 aa, Homo Sapiens
SLTLDQSQ

SEQ ID NO: 22061 - protein, 8 aa, Homo Sapiens
TLDQSQSQ

SEQ ID NO: 22062 - protein, 8 aa, Homo Sapiens
SQASLEAV

SEQ ID NO: 22063 - protein, 8 aa, Homo Sapiens
ASLEAVEV

SEQ ID NO: 22064 - protein, 8 aa, Homo Sapiens
EAVEVPSM

SEQ ID NO: 22065 - protein, 8 aa, Homo Sapiens
EVPSMASS

SEQ ID NO: 22066 - protein, 8 aa, Homo Sapiens
VPSMASSW

SEQ ID NO: 22067 - protein, 8 aa, Homo Sapiens
SSWGGPHF

SEQ ID NO: 22068 - protein, 8 aa, Homo Sapiens
KELSNSPL

SEQ ID NO: 22069 - protein, 8 aa, Homo Sapiens
ELSNSPLR

SEQ ID NO: 22070 - protein, 8 aa, Homo Sapiens
SPLRENSF

SEQ ID NO: 22071 - protein, 8 aa, Homo Sapiens
SFGSPLEF

SEQ ID NO: 22072 - protein, 8 aa, Homo Sapiens
FGSPLEFR

SEQ ID NO: 22073 - protein, 8 aa, Homo Sapiens
NTGFSSEV

SEQ ID NO: 22074 - protein, 8 aa, Homo Sapiens
TGFSSEVK

SEQ ID NO: 22075 - protein, 8 aa, Homo Sapiens
KEDLNGPF

SEQ ID NO: 22076 - protein, 8 aa, Homo Sapiens
NQLETDPS

SEQ ID NO: 22077 - protein, 8 aa, Homo Sapiens
QLETDPSL

SEQ ID NO: 22078 - protein, 8 aa, Homo Sapiens
ETDPSLDM

SEQ ID NO: 22079 - protein, 8 aa, Homo Sapiens
SLDMKEQS

SEQ ID NO: 22080 - protein, 8 aa, Homo Sapiens
DMKEQSTR

SEQ ID NO: 22081 - protein, 8 aa, Homo Sapiens
STRSSGHS

SEQ ID NO: 22082 - protein, 8 aa, Homo Sapiens
LSPDAVEK

SEQ ID NO: 22083 - protein, 8 aa, Homo Sapiens
DAVEKAGM

SEQ ID NO: 22084 - protein, 8 aa, Homo Sapiens
GMSSNQSI

SEQ ID NO: 22085 - protein, 8 aa, Homo Sapiens
NQSISSPV

SEQ ID NO: 22086 - protein, 8 aa, Homo Sapiens
QSISSPVL

SEQ ID NO: 22087 - protein, 8 aa, Homo Sapiens
SSPVLDAV

SEQ ID NO: 22088 - protein, 8 aa, Homo Sapiens
VLDAVPRT

SEQ ID NO: 22089 - protein, 8 aa, Homo Sapiens
AVPRTPSR

SEQ ID NO: 22090 - protein, 8 aa, Homo Sapiens
SSASSPEM

SEQ ID NO: 22091 - protein, 8 aa, Homo Sapiens
SASSPEMK

SEQ ID NO: 22092 - protein, 8 aa, Homo Sapiens
SPEMKDGL

SEQ ID NO: 22093 - protein, 8 aa, Homo Sapiens
EMKDGLPR

SEQ ID NO: 22094 - protein, 8 aa, Homo Sapiens
RTPSRRSR

SEQ ID NO: 22095 - protein, 8 aa, Homo Sapiens
GLRDGSGT

SEQ ID NO: 22096 - protein, 8 aa, Homo Sapiens
SGSSPGMK

SEQ ID NO: 22097 - protein, 8 aa, Homo Sapiens
GMKDIPRT

SEQ ID NO: 22098 - protein, 8 aa, Homo Sapiens
DIPRTPFR

SEQ ID NO: 22099 - protein, 8 aa, Homo Sapiens
KALPQTPR

SEQ ID NO: 22100 - protein, 8 aa, Homo Sapiens
QTPRPRSR

SEQ ID NO: 22101 - protein, 8 aa, Homo Sapiens
TPRPRSRS

SEQ ID NO: 22102 - protein, 8 aa, Homo Sapiens
RPRSRSPS

SEQ ID NO: 22103 - protein, 8 aa, Homo Sapiens
SSPELNNK

SEQ ID NO: 22104 - protein, 8 aa, Homo Sapiens
PELNNKCL

SEQ ID NO: 22105 - protein, 8 aa, Homo Sapiens
CLTPQRER

SEQ ID NO: 22106 - protein, 8 aa, Homo Sapiens
SSVDQKTV

SEQ ID NO: 22107 - protein, 8 aa, Homo Sapiens
SVDQKTVA

SEQ ID NO: 22108 - protein, 8 aa, Homo Sapiens
KTVARTPL

SEQ ID NO: 22109 - protein, 8 aa, Homo Sapiens
RSRSGSSQ

SEQ ID NO: 22110 - protein, 8 aa, Homo Sapiens
SSQELDVK

SEQ ID NO: 22111 - protein, 8 aa, Homo Sapiens
ELDVKPSA

SEQ ID NO: 22112 - protein, 8 aa, Homo Sapiens
SSPDSKAK

SEQ ID NO: 22113 - protein, 8 aa, Homo Sapiens
KAKTRTPL

SEQ ID NO: 22114 - protein, 8 aa, Homo Sapiens
KTRTPLRQ

SEQ ID NO: 22115 - protein, 8 aa, Homo Sapiens
SSPEVDSK

SEQ ID NO: 22116 - protein, 8 aa, Homo Sapiens
EVDSKSRL

SEQ ID NO: 22117 - protein, 8 aa, Homo Sapiens
KSRLSPRR

SEQ ID NO: 22118 - protein, 8 aa, Homo Sapiens
RLSPRRSR

SEQ ID NO: 22119 - protein, 8 aa, Homo Sapiens
SPRRSRSG

SEQ ID NO: 22120 - protein, 8 aa, Homo Sapiens
KPRAAPRA

SEQ ID NO: 22121 - protein, 8 aa, Homo Sapiens
APRAQSGS

SEQ ID NO: 22122 - protein, 8 aa, Homo Sapiens
SPEPKAPA

SEQ ID NO: 22123 - protein, 8 aa, Homo Sapiens
EPKAPAPR

SEQ ID NO: 22124 - protein, 8 aa, Homo Sapiens
KAPAPRAL

SEQ ID NO: 22125 - protein, 8 aa, Homo Sapiens
RALPRRSR

SEQ ID NO: 22126 - protein, 8 aa, Homo Sapiens
LPRRSRSG

SEQ ID NO: 22127 - protein, 8 aa, Homo Sapiens
SRSGSSSK

SEQ ID NO: 22128 - protein, 8 aa, Homo Sapiens
SPEGSSST

SEQ ID NO: 22129 - protein, 8 aa, Homo Sapiens
SSPEHPPK

SEQ ID NO: 22130 - protein, 8 aa, Homo Sapiens
HPPKSRTA

SEQ ID NO: 22131 - protein, 8 aa, Homo Sapiens
RTARRGSR

SEQ ID NO: 22132 - protein, 8 aa, Homo Sapiens
SSPEPKTK

SEQ ID NO: 22133 - protein, 8 aa, Homo Sapiens
KTKSRTPP

SEQ ID NO: 22134 - protein, 8 aa, Homo Sapiens
KSRTPPRR

SEQ ID NO: 22135 - protein, 8 aa, Homo Sapiens
RRRSSRSS

SEQ ID NO: 22136 - protein, 8 aa, Homo Sapiens
RRSSRSSP

SEQ ID NO: 22137 - protein, 8 aa, Homo Sapiens
RSSPELTR

SEQ ID NO: 22138 - protein, 8 aa, Homo Sapiens
SSPELTRK

SEQ ID NO: 22139 - protein, 8 aa, Homo Sapiens
SPELTRKA

SEQ ID NO: 22140 - protein, 8 aa, Homo Sapiens
ELTRKARL

SEQ ID NO: 22141 - protein, 8 aa, Homo Sapiens
KARLSRRS

SEQ ID NO: 22142 - protein, 8 aa, Homo Sapiens
ARLSRRSR

SEQ ID NO: 22143 - protein, 8 aa, Homo Sapiens
RRSRSASS

SEQ ID NO: 22144 - protein, 8 aa, Homo Sapiens
RSRSASSS

SEQ ID NO: 22145 - protein, 8 aa, Homo Sapiens
ASSSPETR

SEQ ID NO: 22146 - protein, 8 aa, Homo Sapiens
SSPETRSR

SEQ ID NO: 22147 - protein, 8 aa, Homo Sapiens
SPETRSRT

SEQ ID NO: 22148 - protein, 8 aa, Homo Sapiens
RTPPRHRR

SEQ ID NO: 22149 - protein, 8 aa, Homo Sapiens
PPRHRRSP

SEQ ID NO: 22150 - protein, 8 aa, Homo Sapiens
SPSVSSPE

SEQ ID NO: 22151 - protein, 8 aa, Homo Sapiens
SVSSPEPA

SEQ ID NO: 22152 - protein, 8 aa, Homo Sapiens
SSPEPAEK

SEQ ID NO: 22153 - protein, 8 aa, Homo Sapiens
AEKSRSSR

SEQ ID NO: 22154 - protein, 8 aa, Homo Sapiens
KSRSSRRR

SEQ ID NO: 22155 - protein, 8 aa, Homo Sapiens
RRRRSASS

SEQ ID NO: 22156 - protein, 8 aa, Homo Sapiens
RRSASSPR

SEQ ID NO: 22157 - protein, 8 aa, Homo Sapiens
SASSPRTK

SEQ ID NO: 22158 - protein, 8 aa, Homo Sapiens
SPRTKTTS

SEQ ID NO: 22159 - protein, 8 aa, Homo Sapiens
RTKTTSRR

SEQ ID NO: 22160 - protein, 8 aa, Homo Sapiens
KTTSRRGR

SEQ ID NO: 22161 - protein, 8 aa, Homo Sapiens
RGRSPSPK

SEQ ID NO: 22162 - protein, 8 aa, Homo Sapiens
RSPSPKPR

SEQ ID NO: 22163 - protein, 8 aa, Homo Sapiens
GLQRSRSR

SEQ ID NO: 22164 - protein, 8 aa, Homo Sapiens
RSRSRSRR

SEQ ID NO: 22165 - protein, 8 aa, Homo Sapiens
RSRSRREK

SEQ ID NO: 22166 - protein, 8 aa, Homo Sapiens
RSRREKTR

SEQ ID NO: 22167 - protein, 8 aa, Homo Sapiens
REKTRTTR

SEQ ID NO: 22168 - protein, 8 aa, Homo Sapiens
KTRTTRRR

SEQ ID NO: 22169 - protein, 8 aa, Homo Sapiens
RTTRRRDR

SEQ ID NO: 22170 - protein, 8 aa, Homo Sapiens
GSSQSTSR

SEQ ID NO: 22171 - protein, 8 aa, Homo Sapiens
SSQSTSRR

SEQ ID NO: 22172 - protein, 8 aa, Homo Sapiens
SQSTSRRR

SEQ ID NO: 22173 - protein, 8 aa, Homo Sapiens
STSRRRQR

SEQ ID NO: 22174 - protein, 8 aa, Homo Sapiens
RRQRSRSR

SEQ ID NO: 22175 - protein, 8 aa, Homo Sapiens
RSRSRSRV

SEQ ID NO: 22176 - protein, 8 aa, Homo Sapiens
RSRSRVTR

SEQ ID NO: 22177 - protein, 8 aa, Homo Sapiens
RSRVTRRR

SEQ ID NO: 22178 - protein, 8 aa, Homo Sapiens
RRRGGSGY

SEQ ID NO: 22179 - protein, 8 aa, Homo Sapiens
RRGGSGYH

SEQ ID NO: 22180 - protein, 8 aa, Homo Sapiens
ESSRTSSR

SEQ ID NO: 22181 - protein, 8 aa, Homo Sapiens
SSRTSSRR

SEQ ID NO: 22182 - protein, 8 aa, Homo Sapiens
RTSSRRRR

SEQ ID NO: 22183 - protein, 8 aa, Homo Sapiens
SSRRRRGR

SEQ ID NO: 22184 - protein, 8 aa, Homo Sapiens
RRRRGRSR

SEQ ID NO: 22185 - protein, 8 aa, Homo Sapiens
RRRGRSRT

SEQ ID NO: 22186 - protein, 8 aa, Homo Sapiens
RGRSRTPP

SEQ ID NO: 22187 - protein, 8 aa, Homo Sapiens
RSRTPPTS

SEQ ID NO: 22188 - protein, 8 aa, Homo Sapiens
RTPPTSRK

SEQ ID NO: 22189 - protein, 8 aa, Homo Sapiens
PTSRKRSR

SEQ ID NO: 22190 - protein, 8 aa, Homo Sapiens
RSRSRTSP

SEQ ID NO: 22191 - protein, 8 aa, Homo Sapiens
RSRTSPAP

SEQ ID NO: 22192 - protein, 8 aa, Homo Sapiens
RTSPAPWK

SEQ ID NO: 22193 - protein, 8 aa, Homo Sapiens
TSPAPWKR

SEQ ID NO: 22194 - protein, 8 aa, Homo Sapiens
APWKRSRS

SEQ ID NO: 22195 - protein, 8 aa, Homo Sapiens
RSRASPAT

SEQ ID NO: 22196 - protein, 8 aa, Homo Sapiens
RASPATHR

SEQ ID NO: 22197 - protein, 8 aa, Homo Sapiens
ASPATHRR

SEQ ID NO: 22198 - protein, 8 aa, Homo Sapiens
SPATHRRS

SEQ ID NO: 22199 - protein, 8 aa, Homo Sapiens
RSRSRTPL

SEQ ID NO: 22200 - protein, 8 aa, Homo Sapiens
RTPLISRR

SEQ ID NO: 22201 - protein, 8 aa, Homo Sapiens
LISRRRSR

SEQ ID NO: 22202 - protein, 8 aa, Homo Sapiens
RSRSRTSP

SEQ ID NO: 22203 - protein, 8 aa, Homo Sapiens
RSRTSPVS

SEQ ID NO: 22204 - protein, 8 aa, Homo Sapiens
RTSPVSRR

SEQ ID NO: 22205 - protein, 8 aa, Homo Sapiens
TSPVSRRR

SEQ ID NO: 22206 - protein, 8 aa, Homo Sapiens
SPVSRRRS

SEQ ID NO: 22207 - protein, 8 aa, Homo Sapiens
RSRSRTSV

SEQ ID NO: 22208 - protein, 8 aa, Homo Sapiens
RSRTSVTR

SEQ ID NO: 22209 - protein, 8 aa, Homo Sapiens
RTSVTRRR

SEQ ID NO: 22210 - protein, 8 aa, Homo Sapiens
SVTRRRSR

SEQ ID NO: 22211 - protein, 8 aa, Homo Sapiens
RSRASPVS

SEQ ID NO: 22212 - protein, 8 aa, Homo Sapiens
RASPVSRR

SEQ ID NO: 22213 - protein, 8 aa, Homo Sapiens
SPVSRRRS

SEQ ID NO: 22214 - protein, 8 aa, Homo Sapiens
RSRSRTPP

SEQ ID NO: 22215 - protein, 8 aa, Homo Sapiens
RTPPVTRR

SEQ ID NO: 22216 - protein, 8 aa, Homo Sapiens
PVTRRRSR

SEQ ID NO: 22217 - protein, 8 aa, Homo Sapiens
RSRSRTPT

SEQ ID NO: 22218 - protein, 8 aa, Homo Sapiens
RSRTPTTR

SEQ ID NO: 22219 - protein, 8 aa, Homo Sapiens
RTPTTRRR

SEQ ID NO: 22220 - protein, 8 aa, Homo Sapiens
PTTRRRSR

SEQ ID NO: 22221 - protein, 8 aa, Homo Sapiens
RSRSRTPP

SEQ ID NO: 22222 - protein, 8 aa, Homo Sapiens
RTPPVTRR

SEQ ID NO: 22223 - protein, 8 aa, Homo Sapiens
PVTRRRSR

SEQ ID NO: 22224 - protein, 8 aa, Homo Sapiens
RSRSRTPP

SEQ ID NO: 22225 - protein, 8 aa, Homo Sapiens
RTPPVTRR

SEQ ID NO: 22226 - protein, 8 aa, Homo Sapiens
PVTRRRSR

SEQ ID NO: 22227 - protein, 8 aa, Homo Sapiens
RSRSRTSP

SEQ ID NO: 22228 - protein, 8 aa, Homo Sapiens
RSRTSPIT

SEQ ID NO: 22229 - protein, 8 aa, Homo Sapiens
RTSPITRR

SEQ ID NO: 22230 - protein, 8 aa, Homo Sapiens
TSPITRRR

SEQ ID NO: 22231 - protein, 8 aa, Homo Sapiens
SPITRRRS

SEQ ID NO: 22232 - protein, 8 aa, Homo Sapiens
RSRSRTSP

SEQ ID NO: 22233 - protein, 8 aa, Homo Sapiens
RSRTSPVT

SEQ ID NO: 22234 - protein, 8 aa, Homo Sapiens
RTSPVTRR

SEQ ID NO: 22235 - protein, 8 aa, Homo Sapiens
TSPVTRRR

SEQ ID NO: 22236 - protein, 8 aa, Homo Sapiens
SPVTRRRS

SEQ ID NO: 22237 - protein, 8 aa, Homo Sapiens
PVTRRRSR

SEQ ID NO: 22238 - protein, 8 aa, Homo Sapiens
RSRSRTSP

SEQ ID NO: 22239 - protein, 8 aa, Homo Sapiens
RSRTSPVT

SEQ ID NO: 22240 - protein, 8 aa, Homo Sapiens
RTSPVTRR

SEQ ID NO: 22241 - protein, 8 aa, Homo Sapiens
TSPVTRRR

SEQ ID NO: 22242 - protein, 8 aa, Homo Sapiens
SPVTRRRS

SEQ ID NO: 22243 - protein, 8 aa, Homo Sapiens
PVTRRRSR

SEQ ID NO: 22244 - protein, 8 aa, Homo Sapiens
RSRSRTSP

SEQ ID NO: 22245 - protein, 8 aa, Homo Sapiens
RSRTSPVT

SEQ ID NO: 22246 - protein, 8 aa, Homo Sapiens
RTSPVTRR

SEQ ID NO: 22247 - protein, 8 aa, Homo Sapiens
TSPVTRRR

SEQ ID NO: 22248 - protein, 8 aa, Homo Sapiens
SPVTRRRS

SEQ ID NO: 22249 - protein, 8 aa, Homo Sapiens
PVTRRRSR

SEQ ID NO: 22250 - protein, 8 aa, Homo Sapiens
RSRSRTPP

SEQ ID NO: 22251 - protein, 8 aa, Homo Sapiens
RSRTPPAI

SEQ ID NO: 22252 - protein, 8 aa, Homo Sapiens
RTPPAIRR

SEQ ID NO: 22253 - protein, 8 aa, Homo Sapiens
TPPAIRRR

SEQ ID NO: 22254 - protein, 8 aa, Homo Sapiens
RSRSRTPL

SEQ ID NO: 22255 - protein, 8 aa, Homo Sapiens
SRSRTPLL

SEQ ID NO: 22256 - protein, 8 aa, Homo Sapiens
RTPLLPRK

SEQ ID NO: 22257 - protein, 8 aa, Homo Sapiens
LLPRKRSR

SEQ ID NO: 22258 - protein, 8 aa, Homo Sapiens
LPRKRSRS

SEQ ID NO: 22259 - protein, 8 aa, Homo Sapiens
RSRSRSPL

SEQ ID NO: 22260 - protein, 8 aa, Homo Sapiens
RSRSPLAI

SEQ ID NO: 22261 - protein, 8 aa, Homo Sapiens
RSPLAIRR

SEQ ID NO: 22262 - protein, 8 aa, Homo Sapiens
LAIRRRSR

SEQ ID NO: 22263 - protein, 8 aa, Homo Sapiens
RSRSRTPR

SEQ ID NO: 22264 - protein, 8 aa, Homo Sapiens
RSRTPRTA

SEQ ID NO: 22265 - protein, 8 aa, Homo Sapiens
TPRTARGK

SEQ ID NO: 22266 - protein, 8 aa, Homo Sapiens
TARGKRSL

SEQ ID NO: 22267 - protein, 8 aa, Homo Sapiens
RGKRSLTR

SEQ ID NO: 22268 - protein, 8 aa, Homo Sapiens
SLTRSPPA

SEQ ID NO: 22269 - protein, 8 aa, Homo Sapiens
RSPPAIRR

SEQ ID NO: 22270 - protein, 8 aa, Homo Sapiens
RSRSATPP

SEQ ID NO: 22271 - protein, 8 aa, Homo Sapiens
SATPPATR

SEQ ID NO: 22272 - protein, 8 aa, Homo Sapiens
SRTPPVAL

SEQ ID NO: 22273 - protein, 8 aa, Homo Sapiens
PVALNSSR

SEQ ID NO: 22274 - protein, 8 aa, Homo Sapiens
VALNSSRM

SEQ ID NO: 22275 - protein, 8 aa, Homo Sapiens
SRMSCFSR

SEQ ID NO: 22276 - protein, 8 aa, Homo Sapiens
MSPTPLDR

SEQ ID NO: 22277 - protein, 8 aa, Homo Sapiens
RCRSPGML

SEQ ID NO: 22278 - protein, 8 aa, Homo Sapiens
SPGMLEPL

SEQ ID NO: 22279 - protein, 8 aa, Homo Sapiens
SSRTPMSV

SEQ ID NO: 22280 - protein, 8 aa, Homo Sapiens
PMSVLQQA

SEQ ID NO: 22281 - protein, 8 aa, Homo Sapiens
LQQAGGSM

SEQ ID NO: 22282 - protein, 8 aa, Homo Sapiens
QQAGGSMM

SEQ ID NO: 22283 - protein, 8 aa, Homo Sapiens
SMMDGPGP

SEQ ID NO: 22284 - protein, 8 aa, Homo Sapiens
MMDGPGPR

SEQ ID NO: 22285 - protein, 8 aa, Homo Sapiens
RIPDHQRT

SEQ ID NO: 22286 - protein, 8 aa, Homo Sapiens
SVPENHAQ

SEQ ID NO: 22287 - protein, 8 aa, Homo Sapiens
HAQSRIAL

SEQ ID NO: 22288 - protein, 8 aa, Homo Sapiens
AQSRIALA

SEQ ID NO: 22289 - protein, 8 aa, Homo Sapiens
RIALALTA

SEQ ID NO: 22290 - protein, 8 aa, Homo Sapiens
IALALTAI

SEQ ID NO: 22291 - protein, 8 aa, Homo Sapiens
LALTAISL

SEQ ID NO: 22292 - protein, 8 aa, Homo Sapiens
AISLGTAR

SEQ ID NO: 22293 - protein, 8 aa, Homo Sapiens
TARPPPSM

SEQ ID NO: 22294 - protein, 8 aa, Homo Sapiens
RPPPSMSA

SEQ ID NO: 22295 - protein, 8 aa, Homo Sapiens
SMSAAGLA

SEQ ID NO: 22296 - protein, 8 aa, Homo Sapiens
MSAAGLAA

SEQ ID NO: 22297 - protein, 8 aa, Homo Sapiens
SAAGLAAR

SEQ ID NO: 22298 - protein, 8 aa, Homo Sapiens
GLAARMSQ

SEQ ID NO: 22299 - protein, 8 aa, Homo Sapiens
LAARMSQV

SEQ ID NO: 22300 - protein, 8 aa, Homo Sapiens
MSQVPAPV

SEQ ID NO: 22301 - protein, 8 aa, Homo Sapiens
QVPAPVPL

SEQ ID NO: 22302 - protein, 8 aa, Homo Sapiens
VPAPVPLM

SEQ ID NO: 22303 - protein, 8 aa, Homo Sapiens
APVPLMSL

SEQ ID NO: 22304 - protein, 8 aa, Homo Sapiens
PLMSLRTA

SEQ ID NO: 22305 - protein, 8 aa, Homo Sapiens
SLRTAPAA

SEQ ID NO: 22306 - protein, 8 aa, Homo Sapiens
RTAPAANL

SEQ ID NO: 22307 - protein, 8 aa, Homo Sapiens
TAPAANLA

SEQ ID NO: 22308 - protein, 8 aa, Homo Sapiens
APAANLAS

SEQ ID NO: 22309 - protein, 8 aa, Homo Sapiens
PAANLASR

SEQ ID NO: 22310 - protein, 8 aa, Homo Sapiens
NLASRIPA

SEQ ID NO: 22311 - protein, 8 aa, Homo Sapiens
RIPAASAA

SEQ ID NO: 22312 - protein, 8 aa, Homo Sapiens
IPAASAAA

SEQ ID NO: 22313 - protein, 8 aa, Homo Sapiens
PAASAAAM

SEQ ID NO: 22314 - protein, 8 aa, Homo Sapiens
ASAAAMNL

SEQ ID NO: 22315 - protein, 8 aa, Homo Sapiens
SAAAMNLA

SEQ ID NO: 22316 - protein, 8 aa, Homo Sapiens
AAMNLASA

SEQ ID NO: 22317 - protein, 8 aa, Homo Sapiens
AMNLASAR

SEQ ID NO: 22318 - protein, 8 aa, Homo Sapiens
LASARTPA

SEQ ID NO: 22319 - protein, 8 aa, Homo Sapiens
TPAIPTAV

SEQ ID NO: 22320 - protein, 8 aa, Homo Sapiens
AIPTAVNL

SEQ ID NO: 22321 - protein, 8 aa, Homo Sapiens
IPTAVNLA

SEQ ID NO: 22322 - protein, 8 aa, Homo Sapiens
AVNLADSR

SEQ ID NO: 22323 - protein, 8 aa, Homo Sapiens
TPAAAAAM

SEQ ID NO: 22324 - protein, 8 aa, Homo Sapiens
AAAAAMNL

SEQ ID NO: 22325 - protein, 8 aa, Homo Sapiens
AMNLASPR

SEQ ID NO: 22326 - protein, 8 aa, Homo Sapiens
NLASPRTA

SEQ ID NO: 22327 - protein, 8 aa, Homo Sapiens
LASPRTAV

SEQ ID NO: 22328 - protein, 8 aa, Homo Sapiens
SPRTAVAP

SEQ ID NO: 22329 - protein, 8 aa, Homo Sapiens
TAVAPSAV

SEQ ID NO: 22330 - protein, 8 aa, Homo Sapiens
APSAVNLA

SEQ ID NO: 22331 - protein, 8 aa, Homo Sapiens
AVNLADPR

SEQ ID NO: 22332 - protein, 8 aa, Homo Sapiens
RTPTAPAV

SEQ ID NO: 22333 - protein, 8 aa, Homo Sapiens
PTAPAVNL

SEQ ID NO: 22334 - protein, 8 aa, Homo Sapiens
TAPAVNLA

SEQ ID NO: 22335 - protein, 8 aa, Homo Sapiens
APAVNLAG

SEQ ID NO: 22336 - protein, 8 aa, Homo Sapiens
AVNLAGAR

SEQ ID NO: 22337 - protein, 8 aa, Homo Sapiens
GARTPAAL

SEQ ID NO: 22338 - protein, 8 aa, Homo Sapiens
RTPAALAA

SEQ ID NO: 22339 - protein, 8 aa, Homo Sapiens
TPAALAAL

SEQ ID NO: 22340 - protein, 8 aa, Homo Sapiens
AALAALSL

SEQ ID NO: 22341 - protein, 8 aa, Homo Sapiens
ALAALSLT

SEQ ID NO: 22342 - protein, 8 aa, Homo Sapiens
TPPTAANY

SEQ ID NO: 22343 - protein, 8 aa, Homo Sapiens
YPSSSRTP

SEQ ID NO: 22344 - protein, 8 aa, Homo Sapiens
TPQAPASA

SEQ ID NO: 22345 - protein, 8 aa, Homo Sapiens
QAPASANL

SEQ ID NO: 22346 - protein, 8 aa, Homo Sapiens
APASANLV

SEQ ID NO: 22347 - protein, 8 aa, Homo Sapiens
SANLVGPR

SEQ ID NO: 22348 - protein, 8 aa, Homo Sapiens
NLVGPRSA

SEQ ID NO: 22349 - protein, 8 aa, Homo Sapiens
GPRSAHAT

SEQ ID NO: 22350 - protein, 8 aa, Homo Sapiens
SAHATAPV

SEQ ID NO: 22351 - protein, 8 aa, Homo Sapiens
HATAPVNI

SEQ ID NO: 22352 - protein, 8 aa, Homo Sapiens
ATAPVNIA

SEQ ID NO: 22353 - protein, 8 aa, Homo Sapiens
NIAGSRTA

SEQ ID NO: 22354 - protein, 8 aa, Homo Sapiens
TAAALAPA

SEQ ID NO: 22355 - protein, 8 aa, Homo Sapiens
AALAPASL

SEQ ID NO: 22356 - protein, 8 aa, Homo Sapiens
ALAPASLT

SEQ ID NO: 22357 - protein, 8 aa, Homo Sapiens
APASLTSA

SEQ ID NO: 22358 - protein, 8 aa, Homo Sapiens
SLTSARMA

SEQ ID NO: 22359 - protein, 8 aa, Homo Sapiens
TSARMAPA

SEQ ID NO: 22360 - protein, 8 aa, Homo Sapiens
SARMAPAL

SEQ ID NO: 22361 - protein, 8 aa, Homo Sapiens
MAPALSGA

SEQ ID NO: 22362 - protein, 8 aa, Homo Sapiens
APALSGAN

SEQ ID NO: 22363 - protein, 8 aa, Homo Sapiens
ALSGANLT

SEQ ID NO: 22364 - protein, 8 aa, Homo Sapiens
GANLTSPR

SEQ ID NO: 22365 - protein, 8 aa, Homo Sapiens
LTSPRVPL

SEQ ID NO: 22366 - protein, 8 aa, Homo Sapiens
SPRVPLSA

SEQ ID NO: 22367 - protein, 8 aa, Homo Sapiens
PLSAYERV

SEQ ID NO: 22368 - protein, 8 aa, Homo Sapiens
AYERVSGR

SEQ ID NO: 22369 - protein, 8 aa, Homo Sapiens
TSPPLLDR

SEQ ID NO: 22370 - protein, 8 aa, Homo Sapiens
RARSRTPP

SEQ ID NO: 22371 - protein, 8 aa, Homo Sapiens
RSRTPPSA

SEQ ID NO: 22372 - protein, 8 aa, Homo Sapiens
APSQSRMT

SEQ ID NO: 22373 - protein, 8 aa, Homo Sapiens
QSRMTSER

SEQ ID NO: 22374 - protein, 8 aa, Homo Sapiens
MTSERAPS

SEQ ID NO: 22375 - protein, 8 aa, Homo Sapiens
RAPSPSSR

SEQ ID NO: 22376 - protein, 8 aa, Homo Sapiens
APSPSSRM

SEQ ID NO: 22377 - protein, 8 aa, Homo Sapiens
GQAPSQSL

SEQ ID NO: 22378 - protein, 8 aa, Homo Sapiens
SQSLLPPA

SEQ ID NO: 22379 - protein, 8 aa, Homo Sapiens
SLLPPAQD

SEQ ID NO: 22380 - protein, 8 aa, Homo Sapiens
LLPPAQDQ

SEQ ID NO: 22381 - protein, 8 aa, Homo Sapiens
QPRSPVPS

SEQ ID NO: 22382 - protein, 8 aa, Homo Sapiens
RSPVPSAF

SEQ ID NO: 22383 - protein, 8 aa, Homo Sapiens
SAFSDQSR

SEQ ID NO: 22384 - protein, 8 aa, Homo Sapiens
FSDQSRCL

SEQ ID NO: 22385 - protein, 8 aa, Homo Sapiens
LIAQTTPV

SEQ ID NO: 22386 - protein, 8 aa, Homo Sapiens
PVAGSQSL

SEQ ID NO: 22387 - protein, 8 aa, Homo Sapiens
SQSLSSGA

SEQ ID NO: 22388 - protein, 8 aa, Homo Sapiens
QSLSSGAV

SEQ ID NO: 22389 - protein, 8 aa, Homo Sapiens
SLSSGAVA

SEQ ID NO: 22390 - protein, 8 aa, Homo Sapiens
NGMLSVPA

SEQ ID NO: 22391 - protein, 8 aa, Homo Sapiens
LSVPAPGV

SEQ ID NO: 22392 - protein, 8 aa, Homo Sapiens
VPAPGVPH

SEQ ID NO: 22393 - protein, 8 aa, Homo Sapiens
AQQPSALA

SEQ ID NO: 22394 - protein, 8 aa, Homo Sapiens
QQPSALAA

SEQ ID NO: 22395 - protein, 8 aa, Homo Sapiens
QPSALAAL

SEQ ID NO: 22396 - protein, 8 aa, Homo Sapiens
ALAALQPA

SEQ ID NO: 22397 - protein, 8 aa, Homo Sapiens
LAALQPAK

SEQ ID NO: 22398 - protein, 8 aa, Homo Sapiens
ALQPAKER

SEQ ID NO: 22399 - protein, 8 aa, Homo Sapiens
RRSSSSSS

SEQ ID NO: 22400 - protein, 8 aa, Homo Sapiens
SLPVQPEV

SEQ ID NO: 22401 - protein, 8 aa, Homo Sapiens
LPVQPEVA

SEQ ID NO: 22402 - protein, 8 aa, Homo Sapiens
VQPEVALK

SEQ ID NO: 22403 - protein, 8 aa, Homo Sapiens
TPAPKEAV

SEQ ID NO: 22404 - protein, 8 aa, Homo Sapiens
RPPEPTPA

SEQ ID NO: 22405 - protein, 8 aa, Homo Sapiens
TPAKRKRR

SEQ ID NO: 22406 - protein, 8 aa, Homo Sapiens
RRSSSSSS

SEQ ID NO: 22407 - protein, 8 aa, Homo Sapiens
SSSPSPAK

SEQ ID NO: 22408 - protein, 8 aa, Homo Sapiens
SPAKPGPQ

SEQ ID NO: 22409 - protein, 8 aa, Homo Sapiens
LPKPASPK

SEQ ID NO: 22410 - protein, 8 aa, Homo Sapiens
ERRSRSPR

SEQ ID NO: 22411 - protein, 8 aa, Homo Sapiens
RRSRSPRK

SEQ ID NO: 22412 - protein, 8 aa, Homo Sapiens
SLRDSRSL

SEQ ID NO: 22413 - protein, 8 aa, Homo Sapiens
RSLSYSPV

SEQ ID NO: 22414 - protein, 8 aa, Homo Sapiens
LSYSPVER

SEQ ID NO: 22415 - protein, 8 aa, Homo Sapiens
SYSPVERR

SEQ ID NO: 22416 - protein, 8 aa, Homo Sapiens
YSPVERRR

SEQ ID NO: 22417 - protein, 8 aa, Homo Sapiens
SPRDQQSS

SEQ ID NO: 22418 - protein, 8 aa, Homo Sapiens
QQSSSSER

SEQ ID NO: 22419 - protein, 8 aa, Homo Sapiens
SSSERGSR

SEQ ID NO: 22420 - protein, 8 aa, Homo Sapiens
SSERGSRR

SEQ ID NO: 22421 - protein, 8 aa, Homo Sapiens
RGSRRGQR

SEQ ID NO: 22422 - protein, 8 aa, Homo Sapiens
DSRSPSHK

SEQ ID NO: 22423 - protein, 8 aa, Homo Sapiens
RSPSHKRR

SEQ ID NO: 22424 - protein, 8 aa, Homo Sapiens
RRETPSPR

SEQ ID NO: 22425 - protein, 8 aa, Homo Sapiens
ETPSPRPM

SEQ ID NO: 22426 - protein, 8 aa, Homo Sapiens
TPSPRPMR

SEQ ID NO: 22427 - protein, 8 aa, Homo Sapiens
SPRPMRHR

SEQ ID NO: 22428 - protein, 8 aa, Homo Sapiens
RPMRHRSS

SEQ ID NO: 22429 - protein, 8 aa, Homo Sapiens
PMRHRSSR

SEQ ID NO: 22430 - protein, 13 aa, Homo Sapiens
MYNGIGLPTPRGS

SEQ ID NO: 22431 - protein, 13 aa, Homo Sapiens
YNGIGLPTPRGSG

SEQ ID NO: 22432 - protein, 13 aa, Homo Sapiens
NGIGLPTPRGSGT

SEQ ID NO: 22433 - protein, 13 aa, Homo Sapiens
GIGLPTPRGSGTN

SEQ ID NO: 22434 - protein, 13 aa, Homo Sapiens
IGLPTPRGSGTNG

SEQ ID NO: 22435 - protein, 13 aa, Homo Sapiens
GLPTPRGSGTNGY

SEQ ID NO: 22436 - protein, 13 aa, Homo Sapiens
LPTPRGSGTNGYV

SEQ ID NO: 22437 - protein, 13 aa, Homo Sapiens
PTPRGSGTNGYVQ

SEQ ID NO: 22438 - protein, 13 aa, Homo Sapiens
TPRGSGTNGYVQR

SEQ ID NO: 22439 - protein, 13 aa, Homo Sapiens
PRGSGTNGYVQRN

SEQ ID NO: 22440 - protein, 13 aa, Homo Sapiens
RGSGTNGYVQRNL

SEQ ID NO: 22441 - protein, 13 aa, Homo Sapiens
GSGTNGYVQRNLS

SEQ ID NO: 22442 - protein, 13 aa, Homo Sapiens
SGTNGYVQRNLSL

SEQ ID NO: 22443 - protein, 13 aa, Homo Sapiens
GTNGYVQRNLSLV

SEQ ID NO: 22444 - protein, 13 aa, Homo Sapiens
TNGYVQRNLSLVR

SEQ ID NO: 22445 - protein, 13 aa, Homo Sapiens
NGYVQRNLSLVRG

SEQ ID NO: 22446 - protein, 13 aa, Homo Sapiens
GYVQRNLSLVRGR

SEQ ID NO: 22447 - protein, 13 aa, Homo Sapiens
YVQRNLSLVRGRR

SEQ ID NO: 22448 - protein, 13 aa, Homo Sapiens
VQRNLSLVRGRRG

SEQ ID NO: 22449 - protein, 13 aa, Homo Sapiens
QRNLSLVRGRRGE

SEQ ID NO: 22450 - protein, 13 aa, Homo Sapiens
RNLSLVRGRRGER

SEQ ID NO: 22451 - protein, 13 aa, Homo Sapiens
NLSLVRGRRGERP

SEQ ID NO: 22452 - protein, 13 aa, Homo Sapiens
LSLVRGRRGERPD

SEQ ID NO: 22453 - protein, 13 aa, Homo Sapiens
SLVRGRRGERPDY

SEQ ID NO: 22454 - protein, 13 aa, Homo Sapiens
LVRGRRGERPDYK

SEQ ID NO: 22455 - protein, 13 aa, Homo Sapiens
VRGRRGERPDYKG

SEQ ID NO: 22456 - protein, 13 aa, Homo Sapiens
RGRRGERPDYKGE

SEQ ID NO: 22457 - protein, 13 aa, Homo Sapiens
GRRGERPDYKGEE

SEQ ID NO: 22458 - protein, 13 aa, Homo Sapiens
RRGERPDYKGEEE

SEQ ID NO: 22459 - protein, 13 aa, Homo Sapiens
RGERPDYKGEEEL

SEQ ID NO: 22460 - protein, 13 aa, Homo Sapiens
GERPDYKGEEELR

SEQ ID NO: 22461 - protein, 13 aa, Homo Sapiens
ERPDYKGEEELRR

SEQ ID NO: 22462 - protein, 13 aa, Homo Sapiens
RPDYKGEEELRRL

SEQ ID NO: 22463 - protein, 13 aa, Homo Sapiens
PDYKGEEELRRLE

SEQ ID NO: 22464 - protein, 13 aa, Homo Sapiens
DYKGEEELRRLEA

SEQ ID NO: 22465 - protein, 13 aa, Homo Sapiens
YKGEEELRRLEAA

SEQ ID NO: 22466 - protein, 13 aa, Homo Sapiens
KGEEELRRLEAAL

SEQ ID NO: 22467 - protein, 13 aa, Homo Sapiens
GEEELRRLEAALV

SEQ ID NO: 22468 - protein, 13 aa, Homo Sapiens
EEELRRLEAALVK

SEQ ID NO: 22469 - protein, 13 aa, Homo Sapiens
EELRRLEAALVKR

SEQ ID NO: 22470 - protein, 13 aa, Homo Sapiens
ELRRLEAALVKRP

SEQ ID NO: 22471 - protein, 13 aa, Homo Sapiens
LRRLEAALVKRPN

SEQ ID NO: 22472 - protein, 13 aa, Homo Sapiens
RRLEAALVKRPNP

SEQ ID NO: 22473 - protein, 13 aa, Homo Sapiens
RLEAALVKRPNPD

SEQ ID NO: 22474 - protein, 13 aa, Homo Sapiens
LEAALVKRPNPDI

SEQ ID NO: 22475 - protein, 13 aa, Homo Sapiens
EAALVKRPNPDIL

SEQ ID NO: 22476 - protein, 13 aa, Homo Sapiens
AALVKRPNPDILD

SEQ ID NO: 22477 - protein, 13 aa, Homo Sapiens
ALVKRPNPDILDH

SEQ ID NO: 22478 - protein, 13 aa, Homo Sapiens
LVKRPNPDILDHE

SEQ ID NO: 22479 - protein, 13 aa, Homo Sapiens
VKRPNPDILDHER

SEQ ID NO: 22480 - protein, 13 aa, Homo Sapiens
KRPNPDILDHERK

SEQ ID NO: 22481 - protein, 13 aa, Homo Sapiens
RPNPDILDHERKR

SEQ ID NO: 22482 - protein, 13 aa, Homo Sapiens
PNPDILDHERKRR

SEQ ID NO: 22483 - protein, 13 aa, Homo Sapiens
NPDILDHERKRRV

SEQ ID NO: 22484 - protein, 13 aa, Homo Sapiens
PDILDHERKRRVE

SEQ ID NO: 22485 - protein, 13 aa, Homo Sapiens
DILDHERKRRVEL

SEQ ID NO: 22486 - protein, 13 aa, Homo Sapiens
ILDHERKRRVELR

SEQ ID NO: 22487 - protein, 13 aa, Homo Sapiens
LDHERKRRVELRC

SEQ ID NO: 22488 - protein, 13 aa, Homo Sapiens
DHERKRRVELRCL

SEQ ID NO: 22489 - protein, 13 aa, Homo Sapiens
HERKRRVELRCLE

SEQ ID NO: 22490 - protein, 13 aa, Homo Sapiens
ERKRRVELRCLEL

SEQ ID NO: 22491 - protein, 13 aa, Homo Sapiens
RKRRVELRCLELE

SEQ ID NO: 22492 - protein, 13 aa, Homo Sapiens
KRRVELRCLELEE

SEQ ID NO: 22493 - protein, 13 aa, Homo Sapiens
RRVELRCLELEEM

SEQ ID NO: 22494 - protein, 13 aa, Homo Sapiens
RVELRCLELEEMM

SEQ ID NO: 22495 - protein, 13 aa, Homo Sapiens
VELRCLELEEMME

SEQ ID NO: 22496 - protein, 13 aa, Homo Sapiens
ELRCLELEEMMEE

SEQ ID NO: 22497 - protein, 13 aa, Homo Sapiens
LRCLELEEMMEEQ

SEQ ID NO: 22498 - protein, 13 aa, Homo Sapiens
RCLELEEMMEEQG

SEQ ID NO: 22499 - protein, 13 aa, Homo Sapiens
CLELEEMMEEQGY

SEQ ID NO: 22500 - protein, 13 aa, Homo Sapiens
LELEEMMEEQGYE

SEQ ID NO: 22501 - protein, 13 aa, Homo Sapiens
ELEEMMEEQGYEE

SEQ ID NO: 22502 - protein, 13 aa, Homo Sapiens
LEEMMEEQGYEEQ

SEQ ID NO: 22503 - protein, 13 aa, Homo Sapiens
EEMMEEQGYEEQQ

SEQ ID NO: 22504 - protein, 13 aa, Homo Sapiens
EMMEEQGYEEQQI

SEQ ID NO: 22505 - protein, 13 aa, Homo Sapiens
MMEEQGYEEQQIQ

SEQ ID NO: 22506 - protein, 13 aa, Homo Sapiens
MEEQGYEEQQIQE

SEQ ID NO: 22507 - protein, 13 aa, Homo Sapiens
EEQGYEEQQIQEK

SEQ ID NO: 22508 - protein, 13 aa, Homo Sapiens
EQGYEEQQIQEKV

SEQ ID NO: 22509 - protein, 13 aa, Homo Sapiens
QGYEEQQIQEKVA

SEQ ID NO: 22510 - protein, 13 aa, Homo Sapiens
GYEEQQIQEKVAT

SEQ ID NO: 22511 - protein, 13 aa, Homo Sapiens
YEEQQIQEKVATF

SEQ ID NO: 22512 - protein, 13 aa, Homo Sapiens
EEQQIQEKVATFR

SEQ ID NO: 22513 - protein, 13 aa, Homo Sapiens
EQQIQEKVATFRL

SEQ ID NO: 22514 - protein, 13 aa, Homo Sapiens
QQIQEKVATFRLM

SEQ ID NO: 22515 - protein, 13 aa, Homo Sapiens
QIQEKVATFRLML

SEQ ID NO: 22516 - protein, 13 aa, Homo Sapiens
IQEKVATFRLMLL

SEQ ID NO: 22517 - protein, 13 aa, Homo Sapiens
QEKVATFRLMLLE

SEQ ID NO: 22518 - protein, 13 aa, Homo Sapiens
EKVATFRLMLLEK

SEQ ID NO: 22519 - protein, 13 aa, Homo Sapiens
KVATFRLMLLEKD

SEQ ID NO: 22520 - protein, 13 aa, Homo Sapiens
VATFRLMLLEKDV

SEQ ID NO: 22521 - protein, 13 aa, Homo Sapiens
ATFRLMLLEKDVN

SEQ ID NO: 22522 - protein, 13 aa, Homo Sapiens
TFRLMLLEKDVNP

SEQ ID NO: 22523 - protein, 13 aa, Homo Sapiens
FRLMLLEKDVNPG

SEQ ID NO: 22524 - protein, 13 aa, Homo Sapiens
RLMLLEKDVNPGG

SEQ ID NO: 22525 - protein, 13 aa, Homo Sapiens
LMLLEKDVNPGGK

SEQ ID NO: 22526 - protein, 13 aa, Homo Sapiens
MLLEKDVNPGGKE

SEQ ID NO: 22527 - protein, 13 aa, Homo Sapiens
LLEKDVNPGGKEE

SEQ ID NO: 22528 - protein, 13 aa, Homo Sapiens
LEKDVNPGGKEET

SEQ ID NO: 22529 - protein, 13 aa, Homo Sapiens
EKDVNPGGKEETP

SEQ ID NO: 22530 - protein, 13 aa, Homo Sapiens
KDVNPGGKEETPG

SEQ ID NO: 22531 - protein, 13 aa, Homo Sapiens
DVNPGGKEETPGQ

SEQ ID NO: 22532 - protein, 13 aa, Homo Sapiens
VNPGGKEETPGQR

SEQ ID NO: 22533 - protein, 13 aa, Homo Sapiens
NPGGKEETPGQRP

SEQ ID NO: 22534 - protein, 13 aa, Homo Sapiens
PGGKEETPGQRPA

SEQ ID NO: 22535 - protein, 13 aa, Homo Sapiens
GGKEETPGQRPAV

SEQ ID NO: 22536 - protein, 13 aa, Homo Sapiens
GKEETPGQRPAVT

SEQ ID NO: 22537 - protein, 13 aa, Homo Sapiens
KEETPGQRPAVTE

SEQ ID NO: 22538 - protein, 13 aa, Homo Sapiens
EETPGQRPAVTET

SEQ ID NO: 22539 - protein, 13 aa, Homo Sapiens
ETPGQRPAVTETH

SEQ ID NO: 22540 - protein, 13 aa, Homo Sapiens
TPGQRPAVTETHQ

SEQ ID NO: 22541 - protein, 13 aa, Homo Sapiens
PGQRPAVTETHQL

SEQ ID NO: 22542 - protein, 13 aa, Homo Sapiens
GQRPAVTETHQLA

SEQ ID NO: 22543 - protein, 13 aa, Homo Sapiens
QRPAVTETHQLAE

SEQ ID NO: 22544 - protein, 13 aa, Homo Sapiens
RPAVTETHQLAEL

SEQ ID NO: 22545 - protein, 13 aa, Homo Sapiens
PAVTETHQLAELN

SEQ ID NO: 22546 - protein, 13 aa, Homo Sapiens
AVTETHQLAELNE

SEQ ID NO: 22547 - protein, 13 aa, Homo Sapiens
VTETHQLAELNEK

SEQ ID NO: 22548 - protein, 13 aa, Homo Sapiens
TETHQLAELNEKK

SEQ ID NO: 22549 - protein, 13 aa, Homo Sapiens
ETHQLAELNEKKN

SEQ ID NO: 22550 - protein, 13 aa, Homo Sapiens
THQLAELNEKKNE

SEQ ID NO: 22551 - protein, 13 aa, Homo Sapiens
HQLAELNEKKNER

SEQ ID NO: 22552 - protein, 13 aa, Homo Sapiens
QLAELNEKKNERL

SEQ ID NO: 22553 - protein, 13 aa, Homo Sapiens
LAELNEKKNERLR

SEQ ID NO: 22554 - protein, 13 aa, Homo Sapiens
AELNEKKNERLRA

SEQ ID NO: 22555 - protein, 13 aa, Homo Sapiens
ELNEKKNERLRAA

SEQ ID NO: 22556 - protein, 13 aa, Homo Sapiens
LNEKKNERLRAAF

SEQ ID NO: 22557 - protein, 13 aa, Homo Sapiens
NEKKNERLRAAFG

SEQ ID NO: 22558 - protein, 13 aa, Homo Sapiens
EKKNERLRAAFGI

SEQ ID NO: 22559 - protein, 13 aa, Homo Sapiens
KKNERLRAAFGIS

SEQ ID NO: 22560 - protein, 13 aa, Homo Sapiens
KNERLRAAFGISD

SEQ ID NO: 22561 - protein, 13 aa, Homo Sapiens
NERLRAAFGISDS

SEQ ID NO: 22562 - protein, 13 aa, Homo Sapiens
ERLRAAFGISDSY

SEQ ID NO: 22563 - protein, 13 aa, Homo Sapiens
RLRAAFGISDSYV

SEQ ID NO: 22564 - protein, 13 aa, Homo Sapiens
LRAAFGISDSYVD

SEQ ID NO: 22565 - protein, 13 aa, Homo Sapiens
RAAFGISDSYVDG

SEQ ID NO: 22566 - protein, 13 aa, Homo Sapiens
AAFGISDSYVDGS

SEQ ID NO: 22567 - protein, 13 aa, Homo Sapiens
AFGISDSYVDGSS

SEQ ID NO: 22568 - protein, 13 aa, Homo Sapiens
FGISDSYVDGSSF

SEQ ID NO: 22569 - protein, 13 aa, Homo Sapiens
GISDSYVDGSSFD

SEQ ID NO: 22570 - protein, 13 aa, Homo Sapiens
ISDSYVDGSSFDP

SEQ ID NO: 22571 - protein, 13 aa, Homo Sapiens
SDSYVDGSSFDPQ

SEQ ID NO: 22572 - protein, 13 aa, Homo Sapiens
DSYVDGSSFDPQR

SEQ ID NO: 22573 - protein, 13 aa, Homo Sapiens
SYVDGSSFDPQRR

SEQ ID NO: 22574 - protein, 13 aa, Homo Sapiens
YVDGSSFDPQRRA

SEQ ID NO: 22575 - protein, 13 aa, Homo Sapiens
VDGSSFDPQRRAR

SEQ ID NO: 22576 - protein, 13 aa, Homo Sapiens
DGSSFDPQRRARE

SEQ ID NO: 22577 - protein, 13 aa, Homo Sapiens
GSSFDPQRRAREA

SEQ ID NO: 22578 - protein, 13 aa, Homo Sapiens
SSFDPQRRAREAK

SEQ ID NO: 22579 - protein, 13 aa, Homo Sapiens
SFDPQRRAREAKQ

SEQ ID NO: 22580 - protein, 13 aa, Homo Sapiens
FDPQRRAREAKQP

SEQ ID NO: 22581 - protein, 13 aa, Homo Sapiens
DPQRRAREAKQPA

SEQ ID NO: 22582 - protein, 13 aa, Homo Sapiens
PQRRAREAKQPAP

SEQ ID NO: 22583 - protein, 13 aa, Homo Sapiens
QRRAREAKQPAPE

SEQ ID NO: 22584 - protein, 13 aa, Homo Sapiens
RRAREAKQPAPEP

SEQ ID NO: 22585 - protein, 13 aa, Homo Sapiens
RAREAKQPAPEPP

SEQ ID NO: 22586 - protein, 13 aa, Homo Sapiens
AREAKQPAPEPPK

SEQ ID NO: 22587 - protein, 13 aa, Homo Sapiens
REAKQPAPEPPKP

SEQ ID NO: 22588 - protein, 13 aa, Homo Sapiens
EAKQPAPEPPKPY

SEQ ID NO: 22589 - protein, 13 aa, Homo Sapiens
AKQPAPEPPKPYS

SEQ ID NO: 22590 - protein, 13 aa, Homo Sapiens
KQPAPEPPKPYSL

SEQ ID NO: 22591 - protein, 13 aa, Homo Sapiens
QPAPEPPKPYSLV

SEQ ID NO: 22592 - protein, 13 aa, Homo Sapiens
PAPEPPKPYSLVR

SEQ ID NO: 22593 - protein, 13 aa, Homo Sapiens
APEPPKPYSLVRE

SEQ ID NO: 22594 - protein, 13 aa, Homo Sapiens
PEPPKPYSLVRES

SEQ ID NO: 22595 - protein, 13 aa, Homo Sapiens
EPPKPYSLVRESS

SEQ ID NO: 22596 - protein, 13 aa, Homo Sapiens
PPKPYSLVRESSS

SEQ ID NO: 22597 - protein, 13 aa, Homo Sapiens
PKPYSLVRESSSS

SEQ ID NO: 22598 - protein, 13 aa, Homo Sapiens
KPYSLVRESSSSR

SEQ ID NO: 22599 - protein, 13 aa, Homo Sapiens
PYSLVRESSSSRS

SEQ ID NO: 22600 - protein, 13 aa, Homo Sapiens
YSLVRESSSSRSP

SEQ ID NO: 22601 - protein, 13 aa, Homo Sapiens
SLVRESSSSRSPT

SEQ ID NO: 22602 - protein, 13 aa, Homo Sapiens
LVRESSSSRSPTP

SEQ ID NO: 22603 - protein, 13 aa, Homo Sapiens
VRESSSSRSPTPK

SEQ ID NO: 22604 - protein, 13 aa, Homo Sapiens
RESSSSRSPTPKQ

SEQ ID NO: 22605 - protein, 13 aa, Homo Sapiens
ESSSSRSPTPKQK

SEQ ID NO: 22606 - protein, 13 aa, Homo Sapiens
SSSSRSPTPKQKK

SEQ ID NO: 22607 - protein, 13 aa, Homo Sapiens
SSSRSPTPKQKKK

SEQ ID NO: 22608 - protein, 13 aa, Homo Sapiens
SSRSPTPKQKKKK

SEQ ID NO: 22609 - protein, 13 aa, Homo Sapiens
SRSPTPKQKKKKK

SEQ ID NO: 22610 - protein, 13 aa, Homo Sapiens
RSPTPKQKKKKKK

SEQ ID NO: 22611 - protein, 13 aa, Homo Sapiens
SPTPKQKKKKKKK

SEQ ID NO: 22612 - protein, 13 aa, Homo Sapiens
PTPKQKKKKKKKD

SEQ ID NO: 22613 - protein, 13 aa, Homo Sapiens
TPKQKKKKKKKDR

SEQ ID NO: 22614 - protein, 13 aa, Homo Sapiens
PKQKKKKKKKDRG

SEQ ID NO: 22615 - protein, 13 aa, Homo Sapiens
KQKKKKKKKDRGR

SEQ ID NO: 22616 - protein, 13 aa, Homo Sapiens
QKKKKKKKDRGRR

SEQ ID NO: 22617 - protein, 13 aa, Homo Sapiens
KKKKKKKDRGRRS

SEQ ID NO: 22618 - protein, 13 aa, Homo Sapiens
KKKKKKDRGRRSE

SEQ ID NO: 22619 - protein, 13 aa, Homo Sapiens
KKKKKDRGRRSES

SEQ ID NO: 22620 - protein, 13 aa, Homo Sapiens
KKKKDRGRRSESS

SEQ ID NO: 22621 - protein, 13 aa, Homo Sapiens
KKKDRGRRSESSS

SEQ ID NO: 22622 - protein, 13 aa, Homo Sapiens
KKDRGRRSESSSP

SEQ ID NO: 22623 - protein, 13 aa, Homo Sapiens
KDRGRRSESSSPR

SEQ ID NO: 22624 - protein, 13 aa, Homo Sapiens
DRGRRSESSSPRR

SEQ ID NO: 22625 - protein, 13 aa, Homo Sapiens
RGRRSESSSPRRE

SEQ ID NO: 22626 - protein, 13 aa, Homo Sapiens
GRRSESSSPRRER

SEQ ID NO: 22627 - protein, 13 aa, Homo Sapiens
RRSESSSPRRERK

SEQ ID NO: 22628 - protein, 13 aa, Homo Sapiens
RSESSSPRRERKK

SEQ ID NO: 22629 - protein, 13 aa, Homo Sapiens
SESSSPRRERKKS

SEQ ID NO: 22630 - protein, 13 aa, Homo Sapiens
ESSSPRRERKKSS

SEQ ID NO: 22631 - protein, 13 aa, Homo Sapiens
SSSPRRERKKSSK

SEQ ID NO: 22632 - protein, 13 aa, Homo Sapiens
SSPRRERKKSSKK

SEQ ID NO: 22633 - protein, 13 aa, Homo Sapiens
SPRRERKKSSKKK

SEQ ID NO: 22634 - protein, 13 aa, Homo Sapiens
PRRERKKSSKKKK

SEQ ID NO: 22635 - protein, 13 aa, Homo Sapiens
RRERKKSSKKKKH

SEQ ID NO: 22636 - protein, 13 aa, Homo Sapiens
RERKKSSKKKKHR

SEQ ID NO: 22637 - protein, 13 aa, Homo Sapiens
ERKKSSKKKKHRS

SEQ ID NO: 22638 - protein, 13 aa, Homo Sapiens
RKKSSKKKKHRSE

SEQ ID NO: 22639 - protein, 13 aa, Homo Sapiens
KKSSKKKKHRSES

SEQ ID NO: 22640 - protein, 13 aa, Homo Sapiens
KSSKKKKHRSESE

SEQ ID NO: 22641 - protein, 13 aa, Homo Sapiens
SSKKKKHRSESES

SEQ ID NO: 22642 - protein, 13 aa, Homo Sapiens
SKKKKHRSESESK

SEQ ID NO: 22643 - protein, 13 aa, Homo Sapiens
KKKKHRSESESKK

SEQ ID NO: 22644 - protein, 13 aa, Homo Sapiens
KKKHRSESESKKR

SEQ ID NO: 22645 - protein, 13 aa, Homo Sapiens
KKHRSESESKKRK

SEQ ID NO: 22646 - protein, 13 aa, Homo Sapiens
KHRSESESKKRKH

SEQ ID NO: 22647 - protein, 13 aa, Homo Sapiens
HRSESESKKRKHR

SEQ ID NO: 22648 - protein, 13 aa, Homo Sapiens
RSESESKKRKHRS

SEQ ID NO: 22649 - protein, 13 aa, Homo Sapiens
SESESKKRKHRSP

SEQ ID NO: 22650 - protein, 13 aa, Homo Sapiens
ESESKKRKHRSPT

SEQ ID NO: 22651 - protein, 13 aa, Homo Sapiens
SESKKRKHRSPTP

SEQ ID NO: 22652 - protein, 13 aa, Homo Sapiens
ESKKRKHRSPTPK

SEQ ID NO: 22653 - protein, 13 aa, Homo Sapiens
SKKRKHRSPTPKS

SEQ ID NO: 22654 - protein, 13 aa, Homo Sapiens
KKRKHRSPTPKSK

SEQ ID NO: 22655 - protein, 13 aa, Homo Sapiens
KRKHRSPTPKSKR

SEQ ID NO: 22656 - protein, 13 aa, Homo Sapiens
RKHRSPTPKSKRK

SEQ ID NO: 22657 - protein, 13 aa, Homo Sapiens
KHRSPTPKSKRKS

SEQ ID NO: 22658 - protein, 13 aa, Homo Sapiens
HRSPTPKSKRKSK

SEQ ID NO: 22659 - protein, 13 aa, Homo Sapiens
RSPTPKSKRKSKD

SEQ ID NO: 22660 - protein, 13 aa, Homo Sapiens
SPTPKSKRKSKDK

SEQ ID NO: 22661 - protein, 13 aa, Homo Sapiens
PTPKSKRKSKDKK

SEQ ID NO: 22662 - protein, 13 aa, Homo Sapiens
TPKSKRKSKDKKR

SEQ ID NO: 22663 - protein, 13 aa, Homo Sapiens
PKSKRKSKDKKRK

SEQ ID NO: 22664 - protein, 13 aa, Homo Sapiens
KSKRKSKDKKRKR

SEQ ID NO: 22665 - protein, 13 aa, Homo Sapiens
SKRKSKDKKRKRS

SEQ ID NO: 22666 - protein, 13 aa, Homo Sapiens
KRKSKDKKRKRSR

SEQ ID NO: 22667 - protein, 13 aa, Homo Sapiens
RKSKDKKRKRSRS

SEQ ID NO: 22668 - protein, 13 aa, Homo Sapiens
KSKDKKRKRSRST

SEQ ID NO: 22669 - protein, 13 aa, Homo Sapiens
SKDKKRKRSRSTT

SEQ ID NO: 22670 - protein, 13 aa, Homo Sapiens
KDKKRKRSRSTTP

SEQ ID NO: 22671 - protein, 13 aa, Homo Sapiens
DKKRKRSRSTTPA

SEQ ID NO: 22672 - protein, 13 aa, Homo Sapiens
KKRKRSRSTTPAP

SEQ ID NO: 22673 - protein, 13 aa, Homo Sapiens
KRKRSRSTTPAPK

SEQ ID NO: 22674 - protein, 13 aa, Homo Sapiens
RKRSRSTTPAPKS

SEQ ID NO: 22675 - protein, 13 aa, Homo Sapiens
KRSRSTTPAPKSR

SEQ ID NO: 22676 - protein, 13 aa, Homo Sapiens
RSRSTTPAPKSRR

SEQ ID NO: 22677 - protein, 13 aa, Homo Sapiens
SRSTTPAPKSRRA

SEQ ID NO: 22678 - protein, 13 aa, Homo Sapiens
RSTTPAPKSRRAH

SEQ ID NO: 22679 - protein, 13 aa, Homo Sapiens
STTPAPKSRRAHR

SEQ ID NO: 22680 - protein, 13 aa, Homo Sapiens
TTPAPKSRRAHRS

SEQ ID NO: 22681 - protein, 13 aa, Homo Sapiens
TPAPKSRRAHRST

SEQ ID NO: 22682 - protein, 13 aa, Homo Sapiens
PAPKSRRAHRSTS

SEQ ID NO: 22683 - protein, 13 aa, Homo Sapiens
APKSRRAHRSTSA

SEQ ID NO: 22684 - protein, 13 aa, Homo Sapiens
PKSRRAHRSTSAD

SEQ ID NO: 22685 - protein, 13 aa, Homo Sapiens
KSRRAHRSTSADS

SEQ ID NO: 22686 - protein, 13 aa, Homo Sapiens
SRRAHRSTSADSA

SEQ ID NO: 22687 - protein, 13 aa, Homo Sapiens
RRAHRSTSADSAS

SEQ ID NO: 22688 - protein, 13 aa, Homo Sapiens
RAHRSTSADSASS

SEQ ID NO: 22689 - protein, 13 aa, Homo Sapiens
AHRSTSADSASSS

SEQ ID NO: 22690 - protein, 13 aa, Homo Sapiens
HRSTSADSASSSD

SEQ ID NO: 22691 - protein, 13 aa, Homo Sapiens
RSTSADSASSSDT

SEQ ID NO: 22692 - protein, 13 aa, Homo Sapiens
STSADSASSSDTS

SEQ ID NO: 22693 - protein, 13 aa, Homo Sapiens
TSADSASSSDTSR

SEQ ID NO: 22694 - protein, 13 aa, Homo Sapiens
SADSASSSDTSRS

SEQ ID NO: 22695 - protein, 13 aa, Homo Sapiens
ADSASSSDTSRSR

SEQ ID NO: 22696 - protein, 13 aa, Homo Sapiens
DSASSSDTSRSRS

SEQ ID NO: 22697 - protein, 13 aa, Homo Sapiens
SASSSDTSRSRSR

SEQ ID NO: 22698 - protein, 13 aa, Homo Sapiens
ASSSDTSRSRSRS

SEQ ID NO: 22699 - protein, 13 aa, Homo Sapiens
SSSDTSRSRSRSA

SEQ ID NO: 22700 - protein, 13 aa, Homo Sapiens
SSDTSRSRSRSAA

SEQ ID NO: 22701 - protein, 13 aa, Homo Sapiens
SDTSRSRSRSAAA

SEQ ID NO: 22702 - protein, 13 aa, Homo Sapiens
DTSRSRSRSAAAK

SEQ ID NO: 22703 - protein, 13 aa, Homo Sapiens
TSRSRSRSAAAKT

SEQ ID NO: 22704 - protein, 13 aa, Homo Sapiens
SRSRSRSAAAKTH

SEQ ID NO: 22705 - protein, 13 aa, Homo Sapiens
RSRSRSAAAKTHT

SEQ ID NO: 22706 - protein, 13 aa, Homo Sapiens
SRSRSAAAKTHTT

SEQ ID NO: 22707 - protein, 13 aa, Homo Sapiens
RSRSAAAKTHTTA

SEQ ID NO: 22708 - protein, 13 aa, Homo Sapiens
SRSAAAKTHTTAL

SEQ ID NO: 22709 - protein, 13 aa, Homo Sapiens
RSAAAKTHTTALA

SEQ ID NO: 22710 - protein, 13 aa, Homo Sapiens
SAAAKTHTTALAG

SEQ ID NO: 22711 - protein, 13 aa, Homo Sapiens
AAAKTHTTALAGR

SEQ ID NO: 22712 - protein, 13 aa, Homo Sapiens
AAKTHTTALAGRS

SEQ ID NO: 22713 - protein, 13 aa, Homo Sapiens
AKTHTTALAGRSP

SEQ ID NO: 22714 - protein, 13 aa, Homo Sapiens
KTHTTALAGRSPS

SEQ ID NO: 22715 - protein, 13 aa, Homo Sapiens
THTTALAGRSPSP

SEQ ID NO: 22716 - protein, 13 aa, Homo Sapiens
HTTALAGRSPSPA

SEQ ID NO: 22717 - protein, 13 aa, Homo Sapiens
TTALAGRSPSPAS

SEQ ID NO: 22718 - protein, 13 aa, Homo Sapiens
TALAGRSPSPASG

SEQ ID NO: 22719 - protein, 13 aa, Homo Sapiens
ALAGRSPSPASGR

SEQ ID NO: 22720 - protein, 13 aa, Homo Sapiens
LAGRSPSPASGRR

SEQ ID NO: 22721 - protein, 13 aa, Homo Sapiens
AGRSPSPASGRRG

SEQ ID NO: 22722 - protein, 13 aa, Homo Sapiens
GRSPSPASGRRGE

SEQ ID NO: 22723 - protein, 13 aa, Homo Sapiens
RSPSPASGRRGEG

SEQ ID NO: 22724 - protein, 13 aa, Homo Sapiens
SPSPASGRRGEGD

SEQ ID NO: 22725 - protein, 13 aa, Homo Sapiens
PSPASGRRGEGDA

SEQ ID NO: 22726 - protein, 13 aa, Homo Sapiens
SPASGRRGEGDAP

SEQ ID NO: 22727 - protein, 13 aa, Homo Sapiens
PASGRRGEGDAPF

SEQ ID NO: 22728 - protein, 13 aa, Homo Sapiens
ASGRRGEGDAPFS

SEQ ID NO: 22729 - protein, 13 aa, Homo Sapiens
SGRRGEGDAPFSE

SEQ ID NO: 22730 - protein, 13 aa, Homo Sapiens
GRRGEGDAPFSEP

SEQ ID NO: 22731 - protein, 13 aa, Homo Sapiens
RRGEGDAPFSEPG

SEQ ID NO: 22732 - protein, 13 aa, Homo Sapiens
RGEGDAPFSEPGT

SEQ ID NO: 22733 - protein, 13 aa, Homo Sapiens
GEGDAPFSEPGTT

SEQ ID NO: 22734 - protein, 13 aa, Homo Sapiens
EGDAPFSEPGTTS

SEQ ID NO: 22735 - protein, 13 aa, Homo Sapiens
GDAPFSEPGTTST

SEQ ID NO: 22736 - protein, 13 aa, Homo Sapiens
DAPFSEPGTTSTQ

SEQ ID NO: 22737 - protein, 13 aa, Homo Sapiens
APFSEPGTTSTQR

SEQ ID NO: 22738 - protein, 13 aa, Homo Sapiens
PFSEPGTTSTQRP

SEQ ID NO: 22739 - protein, 13 aa, Homo Sapiens
FSEPGTTSTQRPS

SEQ ID NO: 22740 - protein, 13 aa, Homo Sapiens
SEPGTTSTQRPSS

SEQ ID NO: 22741 - protein, 13 aa, Homo Sapiens
EPGTTSTQRPSSP

SEQ ID NO: 22742 - protein, 13 aa, Homo Sapiens
PGTTSTQRPSSPE

SEQ ID NO: 22743 - protein, 13 aa, Homo Sapiens
GTTSTQRPSSPET

SEQ ID NO: 22744 - protein, 13 aa, Homo Sapiens
TTSTQRPSSPETA

SEQ ID NO: 22745 - protein, 13 aa, Homo Sapiens
TSTQRPSSPETAT

SEQ ID NO: 22746 - protein, 13 aa, Homo Sapiens
STQRPSSPETATK

SEQ ID NO: 22747 - protein, 13 aa, Homo Sapiens
TQRPSSPETATKQ

SEQ ID NO: 22748 - protein, 13 aa, Homo Sapiens
QRPSSPETATKQP

SEQ ID NO: 22749 - protein, 13 aa, Homo Sapiens
RPSSPETATKQPS

SEQ ID NO: 22750 - protein, 13 aa, Homo Sapiens
PSSPETATKQPSS

SEQ ID NO: 22751 - protein, 13 aa, Homo Sapiens
SSPETATKQPSSP

SEQ ID NO: 22752 - protein, 13 aa, Homo Sapiens
SPETATKQPSSPY

SEQ ID NO: 22753 - protein, 13 aa, Homo Sapiens
PETATKQPSSPYE

SEQ ID NO: 22754 - protein, 13 aa, Homo Sapiens
ETATKQPSSPYED

SEQ ID NO: 22755 - protein, 13 aa, Homo Sapiens
TATKQPSSPYEDK

SEQ ID NO: 22756 - protein, 13 aa, Homo Sapiens
ATKQPSSPYEDKD

SEQ ID NO: 22757 - protein, 13 aa, Homo Sapiens
TKQPSSPYEDKDK

SEQ ID NO: 22758 - protein, 13 aa, Homo Sapiens
KQPSSPYEDKDKD

SEQ ID NO: 22759 - protein, 13 aa, Homo Sapiens
QPSSPYEDKDKDK

SEQ ID NO: 22760 - protein, 13 aa, Homo Sapiens
PSSPYEDKDKDKK

SEQ ID NO: 22761 - protein, 13 aa, Homo Sapiens
SSPYEDKDKDKKE

SEQ ID NO: 22762 - protein, 13 aa, Homo Sapiens
SPYEDKDKDKKEK

SEQ ID NO: 22763 - protein, 13 aa, Homo Sapiens
PYEDKDKDKKEKS

SEQ ID NO: 22764 - protein, 13 aa, Homo Sapiens
YEDKDKDKKEKSA

SEQ ID NO: 22765 - protein, 13 aa, Homo Sapiens
EDKDKDKKEKSAT

SEQ ID NO: 22766 - protein, 13 aa, Homo Sapiens
DKDKDKKEKSATR

SEQ ID NO: 22767 - protein, 13 aa, Homo Sapiens
KDKDKKEKSATRP

SEQ ID NO: 22768 - protein, 13 aa, Homo Sapiens
DKDKKEKSATRPS

SEQ ID NO: 22769 - protein, 13 aa, Homo Sapiens
KDKKEKSATRPSP

SEQ ID NO: 22770 - protein, 13 aa, Homo Sapiens
DKKEKSATRPSPS

SEQ ID NO: 22771 - protein, 13 aa, Homo Sapiens
KKEKSATRPSPSP

SEQ ID NO: 22772 - protein, 13 aa, Homo Sapiens
KEKSATRPSPSPE

SEQ ID NO: 22773 - protein, 13 aa, Homo Sapiens
EKSATRPSPSPER

SEQ ID NO: 22774 - protein, 13 aa, Homo Sapiens
KSATRPSPSPERS

SEQ ID NO: 22775 - protein, 13 aa, Homo Sapiens
SATRPSPSPERSS

SEQ ID NO: 22776 - protein, 13 aa, Homo Sapiens
ATRPSPSPERSST

SEQ ID NO: 22777 - protein, 13 aa, Homo Sapiens
TRPSPSPERSSTG

SEQ ID NO: 22778 - protein, 13 aa, Homo Sapiens
RPSPSPERSSTGP

SEQ ID NO: 22779 - protein, 13 aa, Homo Sapiens
PSPSPERSSTGPE

SEQ ID NO: 22780 - protein, 13 aa, Homo Sapiens
SPSPERSSTGPEP

SEQ ID NO: 22781 - protein, 13 aa, Homo Sapiens
PSPERSSTGPEPP

SEQ ID NO: 22782 - protein, 13 aa, Homo Sapiens
SPERSSTGPEPPA

SEQ ID NO: 22783 - protein, 13 aa, Homo Sapiens
PERSSTGPEPPAP

SEQ ID NO: 22784 - protein, 13 aa, Homo Sapiens
ERSSTGPEPPAPT

SEQ ID NO: 22785 - protein, 13 aa, Homo Sapiens
RSSTGPEPPAPTP

SEQ ID NO: 22786 - protein, 13 aa, Homo Sapiens
SSTGPEPPAPTPL

SEQ ID NO: 22787 - protein, 13 aa, Homo Sapiens
STGPEPPAPTPLL

SEQ ID NO: 22788 - protein, 13 aa, Homo Sapiens
TGPEPPAPTPLLA

SEQ ID NO: 22789 - protein, 13 aa, Homo Sapiens
GPEPPAPTPLLAE

SEQ ID NO: 22790 - protein, 13 aa, Homo Sapiens
PEPPAPTPLLAER

SEQ ID NO: 22791 - protein, 13 aa, Homo Sapiens
EPPAPTPLLAERH

SEQ ID NO: 22792 - protein, 13 aa, Homo Sapiens
PPAPTPLLAERHG

SEQ ID NO: 22793 - protein, 13 aa, Homo Sapiens
PAPTPLLAERHGG

SEQ ID NO: 22794 - protein, 13 aa, Homo Sapiens
APTPLLAERHGGS

SEQ ID NO: 22795 - protein, 13 aa, Homo Sapiens
PTPLLAERHGGSP

SEQ ID NO: 22796 - protein, 13 aa, Homo Sapiens
TPLLAERHGGSPQ

SEQ ID NO: 22797 - protein, 13 aa, Homo Sapiens
PLLAERHGGSPQP

SEQ ID NO: 22798 - protein, 13 aa, Homo Sapiens
LLAERHGGSPQPL

SEQ ID NO: 22799 - protein, 13 aa, Homo Sapiens
LAERHGGSPQPLA

SEQ ID NO: 22800 - protein, 13 aa, Homo Sapiens
AERHGGSPQPLAT

SEQ ID NO: 22801 - protein, 13 aa, Homo Sapiens
ERHGGSPQPLATT

SEQ ID NO: 22802 - protein, 13 aa, Homo Sapiens
RHGGSPQPLATTP

SEQ ID NO: 22803 - protein, 13 aa, Homo Sapiens
HGGSPQPLATTPL

SEQ ID NO: 22804 - protein, 13 aa, Homo Sapiens
GGSPQPLATTPLS

SEQ ID NO: 22805 - protein, 13 aa, Homo Sapiens
GSPQPLATTPLSQ

SEQ ID NO: 22806 - protein, 13 aa, Homo Sapiens
SPQPLATTPLSQE

SEQ ID NO: 22807 - protein, 13 aa, Homo Sapiens
PQPLATTPLSQEP

SEQ ID NO: 22808 - protein, 13 aa, Homo Sapiens
QPLATTPLSQEPV

SEQ ID NO: 22809 - protein, 13 aa, Homo Sapiens
PLATTPLSQEPVN

SEQ ID NO: 22810 - protein, 13 aa, Homo Sapiens
LATTPLSQEPVNP

SEQ ID NO: 22811 - protein, 13 aa, Homo Sapiens
ATTPLSQEPVNPP

SEQ ID NO: 22812 - protein, 13 aa, Homo Sapiens
TTPLSQEPVNPPS

SEQ ID NO: 22813 - protein, 13 aa, Homo Sapiens
TPLSQEPVNPPSE

SEQ ID NO: 22814 - protein, 13 aa, Homo Sapiens
PLSQEPVNPPSEA

SEQ ID NO: 22815 - protein, 13 aa, Homo Sapiens
LSQEPVNPPSEAS

SEQ ID NO: 22816 - protein, 13 aa, Homo Sapiens
SQEPVNPPSEASP

SEQ ID NO: 22817 - protein, 13 aa, Homo Sapiens
QEPVNPPSEASPT

SEQ ID NO: 22818 - protein, 13 aa, Homo Sapiens
EPVNPPSEASPTR

SEQ ID NO: 22819 - protein, 13 aa, Homo Sapiens
PVNPPSEASPTRD

SEQ ID NO: 22820 - protein, 13 aa, Homo Sapiens
VNPPSEASPTRDR

SEQ ID NO: 22821 - protein, 13 aa, Homo Sapiens
NPPSEASPTRDRS

SEQ ID NO: 22822 - protein, 13 aa, Homo Sapiens
PPSEASPTRDRSP

SEQ ID NO: 22823 - protein, 13 aa, Homo Sapiens
PSEASPTRDRSPP

SEQ ID NO: 22824 - protein, 13 aa, Homo Sapiens
SEASPTRDRSPPK

SEQ ID NO: 22825 - protein, 13 aa, Homo Sapiens
EASPTRDRSPPKS

SEQ ID NO: 22826 - protein, 13 aa, Homo Sapiens
ASPTRDRSPPKSP

SEQ ID NO: 22827 - protein, 13 aa, Homo Sapiens
SPTRDRSPPKSPE

SEQ ID NO: 22828 - protein, 13 aa, Homo Sapiens
PTRDRSPPKSPEK

SEQ ID NO: 22829 - protein, 13 aa, Homo Sapiens
TRDRSPPKSPEKL

SEQ ID NO: 22830 - protein, 13 aa, Homo Sapiens
RDRSPPKSPEKLP

SEQ ID NO: 22831 - protein, 13 aa, Homo Sapiens
DRSPPKSPEKLPQ

SEQ ID NO: 22832 - protein, 13 aa, Homo Sapiens
RSPPKSPEKLPQS

SEQ ID NO: 22833 - protein, 13 aa, Homo Sapiens
SPPKSPEKLPQSS

SEQ ID NO: 22834 - protein, 13 aa, Homo Sapiens
PPKSPEKLPQSSS

SEQ ID NO: 22835 - protein, 13 aa, Homo Sapiens
PKSPEKLPQSSSS

SEQ ID NO: 22836 - protein, 13 aa, Homo Sapiens
KSPEKLPQSSSSE

SEQ ID NO: 22837 - protein, 13 aa, Homo Sapiens
SPEKLPQSSSSES

SEQ ID NO: 22838 - protein, 13 aa, Homo Sapiens
PEKLPQSSSSESS

SEQ ID NO: 22839 - protein, 13 aa, Homo Sapiens
EKLPQSSSSESSP

SEQ ID NO: 22840 - protein, 13 aa, Homo Sapiens
KLPQSSSSESSPP

SEQ ID NO: 22841 - protein, 13 aa, Homo Sapiens
LPQSSSSESSPPS

SEQ ID NO: 22842 - protein, 13 aa, Homo Sapiens
PQSSSSESSPPSP

SEQ ID NO: 22843 - protein, 13 aa, Homo Sapiens
QSSSSESSPPSPQ

SEQ ID NO: 22844 - protein, 13 aa, Homo Sapiens
SSSSESSPPSPQP

SEQ ID NO: 22845 - protein, 13 aa, Homo Sapiens
SSSESSPPSPQPT

SEQ ID NO: 22846 - protein, 13 aa, Homo Sapiens
SSESSPPSPQPTK

SEQ ID NO: 22847 - protein, 13 aa, Homo Sapiens
SESSPPSPQPTKV

SEQ ID NO: 22848 - protein, 13 aa, Homo Sapiens
ESSPPSPQPTKVS

SEQ ID NO: 22849 - protein, 13 aa, Homo Sapiens
SSPPSPQPTKVSR

SEQ ID NO: 22850 - protein, 13 aa, Homo Sapiens
SPPSPQPTKVSRH

SEQ ID NO: 22851 - protein, 13 aa, Homo Sapiens
PPSPQPTKVSRHA

SEQ ID NO: 22852 - protein, 13 aa, Homo Sapiens
PSPQPTKVSRHAS

SEQ ID NO: 22853 - protein, 13 aa, Homo Sapiens
SPQPTKVSRHASS

SEQ ID NO: 22854 - protein, 13 aa, Homo Sapiens
PQPTKVSRHASSS

SEQ ID NO: 22855 - protein, 13 aa, Homo Sapiens
QPTKVSRHASSSP

SEQ ID NO: 22856 - protein, 13 aa, Homo Sapiens
PTKVSRHASSSPE

SEQ ID NO: 22857 - protein, 13 aa, Homo Sapiens
TKVSRHASSSPES

SEQ ID NO: 22858 - protein, 13 aa, Homo Sapiens
KVSRHASSSPESP

SEQ ID NO: 22859 - protein, 13 aa, Homo Sapiens
VSRHASSSPESPK

SEQ ID NO: 22860 - protein, 13 aa, Homo Sapiens
SRHASSSPESPKP

SEQ ID NO: 22861 - protein, 13 aa, Homo Sapiens
RHASSSPESPKPA

SEQ ID NO: 22862 - protein, 13 aa, Homo Sapiens
HASSSPESPKPAP

SEQ ID NO: 22863 - protein, 13 aa, Homo Sapiens
ASSSPESPKPAPA

SEQ ID NO: 22864 - protein, 13 aa, Homo Sapiens
SSSPESPKPAPAP

SEQ ID NO: 22865 - protein, 13 aa, Homo Sapiens
SSPESPKPAPAPG

SEQ ID NO: 22866 - protein, 13 aa, Homo Sapiens
SPESPKPAPAPGS

SEQ ID NO: 22867 - protein, 13 aa, Homo Sapiens
PESPKPAPAPGSH

SEQ ID NO: 22868 - protein, 13 aa, Homo Sapiens
ESPKPAPAPGSHR

SEQ ID NO: 22869 - protein, 13 aa, Homo Sapiens
SPKPAPAPGSHRE

SEQ ID NO: 22870 - protein, 13 aa, Homo Sapiens
PKPAPAPGSHREI

SEQ ID NO: 22871 - protein, 13 aa, Homo Sapiens
KPAPAPGSHREIS

SEQ ID NO: 22872 - protein, 13 aa, Homo Sapiens
PAPAPGSHREISS

SEQ ID NO: 22873 - protein, 13 aa, Homo Sapiens
APAPGSHREISSS

SEQ ID NO: 22874 - protein, 13 aa, Homo Sapiens
PAPGSHREISSSP

SEQ ID NO: 22875 - protein, 13 aa, Homo Sapiens
APGSHREISSSPT

SEQ ID NO: 22876 - protein, 13 aa, Homo Sapiens
PGSHREISSSPTS

SEQ ID NO: 22877 - protein, 13 aa, Homo Sapiens
GSHREISSSPTSK

SEQ ID NO: 22878 - protein, 13 aa, Homo Sapiens
SHREISSSPTSKN

SEQ ID NO: 22879 - protein, 13 aa, Homo Sapiens
HREISSSPTSKNR

SEQ ID NO: 22880 - protein, 13 aa, Homo Sapiens
REISSSPTSKNRS

SEQ ID NO: 22881 - protein, 13 aa, Homo Sapiens
EISSSPTSKNRSH

SEQ ID NO: 22882 - protein, 13 aa, Homo Sapiens
ISSSPTSKNRSHG

SEQ ID NO: 22883 - protein, 13 aa, Homo Sapiens
SSSPTSKNRSHGR

SEQ ID NO: 22884 - protein, 13 aa, Homo Sapiens
SSPTSKNRSHGRA

SEQ ID NO: 22885 - protein, 13 aa, Homo Sapiens
SPTSKNRSHGRAK

SEQ ID NO: 22886 - protein, 13 aa, Homo Sapiens
PTSKNRSHGRAKR

SEQ ID NO: 22887 - protein, 13 aa, Homo Sapiens
TSKNRSHGRAKRD

SEQ ID NO: 22888 - protein, 13 aa, Homo Sapiens
SKNRSHGRAKRDK

SEQ ID NO: 22889 - protein, 13 aa, Homo Sapiens
KNRSHGRAKRDKS

SEQ ID NO: 22890 - protein, 13 aa, Homo Sapiens
NRSHGRAKRDKSH

SEQ ID NO: 22891 - protein, 13 aa, Homo Sapiens
RSHGRAKRDKSHS

SEQ ID NO: 22892 - protein, 13 aa, Homo Sapiens
SHGRAKRDKSHSH

SEQ ID NO: 22893 - protein, 13 aa, Homo Sapiens
HGRAKRDKSHSHT

SEQ ID NO: 22894 - protein, 13 aa, Homo Sapiens
GRAKRDKSHSHTP

SEQ ID NO: 22895 - protein, 13 aa, Homo Sapiens
RAKRDKSHSHTPS

SEQ ID NO: 22896 - protein, 13 aa, Homo Sapiens
AKRDKSHSHTPSR

SEQ ID NO: 22897 - protein, 13 aa, Homo Sapiens
KRDKSHSHTPSRR

SEQ ID NO: 22898 - protein, 13 aa, Homo Sapiens
RDKSHSHTPSRRM

SEQ ID NO: 22899 - protein, 13 aa, Homo Sapiens
DKSHSHTPSRRMG

SEQ ID NO: 22900 - protein, 13 aa, Homo Sapiens
KSHSHTPSRRMGR

SEQ ID NO: 22901 - protein, 13 aa, Homo Sapiens
SHSHTPSRRMGRS

SEQ ID NO: 22902 - protein, 13 aa, Homo Sapiens
HSHTPSRRMGRSR

SEQ ID NO: 22903 - protein, 13 aa, Homo Sapiens
SHTPSRRMGRSRS

SEQ ID NO: 22904 - protein, 13 aa, Homo Sapiens
HTPSRRMGRSRSP

SEQ ID NO: 22905 - protein, 13 aa, Homo Sapiens
TPSRRMGRSRSPA

SEQ ID NO: 22906 - protein, 13 aa, Homo Sapiens
PSRRMGRSRSPAT

SEQ ID NO: 22907 - protein, 13 aa, Homo Sapiens
SRRMGRSRSPATA

SEQ ID NO: 22908 - protein, 13 aa, Homo Sapiens
RRMGRSRSPATAK

SEQ ID NO: 22909 - protein, 13 aa, Homo Sapiens
RMGRSRSPATAKR

SEQ ID NO: 22910 - protein, 13 aa, Homo Sapiens
MGRSRSPATAKRG

SEQ ID NO: 22911 - protein, 13 aa, Homo Sapiens
GRSRSPATAKRGR

SEQ ID NO: 22912 - protein, 13 aa, Homo Sapiens
RSRSPATAKRGRS

SEQ ID NO: 22913 - protein, 13 aa, Homo Sapiens
SRSPATAKRGRSR

SEQ ID NO: 22914 - protein, 13 aa, Homo Sapiens
RSPATAKRGRSRS

SEQ ID NO: 22915 - protein, 13 aa, Homo Sapiens
SPATAKRGRSRSR

SEQ ID NO: 22916 - protein, 13 aa, Homo Sapiens
PATAKRGRSRSRT

SEQ ID NO: 22917 - protein, 13 aa, Homo Sapiens
ATAKRGRSRSRTP

SEQ ID NO: 22918 - protein, 13 aa, Homo Sapiens
TAKRGRSRSRTPT

SEQ ID NO: 22919 - protein, 13 aa, Homo Sapiens
AKRGRSRSRTPTK

SEQ ID NO: 22920 - protein, 13 aa, Homo Sapiens
KRGRSRSRTPTKR

SEQ ID NO: 22921 - protein, 13 aa, Homo Sapiens
RGRSRSRTPTKRG

SEQ ID NO: 22922 - protein, 13 aa, Homo Sapiens
GRSRSRTPTKRGH

SEQ ID NO: 22923 - protein, 13 aa, Homo Sapiens
RSRSRTPTKRGHS

SEQ ID NO: 22924 - protein, 13 aa, Homo Sapiens
SRSRTPTKRGHSR

SEQ ID NO: 22925 - protein, 13 aa, Homo Sapiens
RSRTPTKRGHSRS

SEQ ID NO: 22926 - protein, 13 aa, Homo Sapiens
SRTPTKRGHSRSR

SEQ ID NO: 22927 - protein, 13 aa, Homo Sapiens
RTPTKRGHSRSRS

SEQ ID NO: 22928 - protein, 13 aa, Homo Sapiens
TPTKRGHSRSRSP

SEQ ID NO: 22929 - protein, 13 aa, Homo Sapiens
PTKRGHSRSRSPQ

SEQ ID NO: 22930 - protein, 13 aa, Homo Sapiens
TKRGHSRSRSPQW

SEQ ID NO: 22931 - protein, 13 aa, Homo Sapiens
KRGHSRSRSPQWR

SEQ ID NO: 22932 - protein, 13 aa, Homo Sapiens
RGHSRSRSPQWRR

SEQ ID NO: 22933 - protein, 13 aa, Homo Sapiens
GHSRSRSPQWRRS

SEQ ID NO: 22934 - protein, 13 aa, Homo Sapiens
HSRSRSPQWRRSR

SEQ ID NO: 22935 - protein, 13 aa, Homo Sapiens
SRSRSPQWRRSRS

SEQ ID NO: 22936 - protein, 13 aa, Homo Sapiens
RSRSPQWRRSRSA

SEQ ID NO: 22937 - protein, 13 aa, Homo Sapiens
SRSPQWRRSRSAQ

SEQ ID NO: 22938 - protein, 13 aa, Homo Sapiens
RSPQWRRSRSAQR

SEQ ID NO: 22939 - protein, 13 aa, Homo Sapiens
SPQWRRSRSAQRW

SEQ ID NO: 22940 - protein, 13 aa, Homo Sapiens
PQWRRSRSAQRWG

SEQ ID NO: 22941 - protein, 13 aa, Homo Sapiens
QWRRSRSAQRWGR

SEQ ID NO: 22942 - protein, 13 aa, Homo Sapiens
WRRSRSAQRWGRS

SEQ ID NO: 22943 - protein, 13 aa, Homo Sapiens
RRSRSAQRWGRSR

SEQ ID NO: 22944 - protein, 13 aa, Homo Sapiens
RSRSAQRWGRSRS

SEQ ID NO: 22945 - protein, 13 aa, Homo Sapiens
SRSAQRWGRSRSP

SEQ ID NO: 22946 - protein, 13 aa, Homo Sapiens
RSAQRWGRSRSPQ

SEQ ID NO: 22947 - protein, 13 aa, Homo Sapiens
SAQRWGRSRSPQR

SEQ ID NO: 22948 - protein, 13 aa, Homo Sapiens
AQRWGRSRSPQRR

SEQ ID NO: 22949 - protein, 13 aa, Homo Sapiens
QRWGRSRSPQRRG

SEQ ID NO: 22950 - protein, 13 aa, Homo Sapiens
RWGRSRSPQRRGR

SEQ ID NO: 22951 - protein, 13 aa, Homo Sapiens
WGRSRSPQRRGRS

SEQ ID NO: 22952 - protein, 13 aa, Homo Sapiens
GRSRSPQRRGRSR

SEQ ID NO: 22953 - protein, 13 aa, Homo Sapiens
RSRSPQRRGRSRS

SEQ ID NO: 22954 - protein, 13 aa, Homo Sapiens
SRSPQRRGRSRSP

SEQ ID NO: 22955 - protein, 13 aa, Homo Sapiens
RSPQRRGRSRSPQ

SEQ ID NO: 22956 - protein, 13 aa, Homo Sapiens
SPQRRGRSRSPQR

SEQ ID NO: 22957 - protein, 13 aa, Homo Sapiens
PQRRGRSRSPQRP

SEQ ID NO: 22958 - protein, 13 aa, Homo Sapiens
QRRGRSRSPQRPG

SEQ ID NO: 22959 - protein, 13 aa, Homo Sapiens
RRGRSRSPQRPGW

SEQ ID NO: 22960 - protein, 13 aa, Homo Sapiens
RGRSRSPQRPGWS

SEQ ID NO: 22961 - protein, 13 aa, Homo Sapiens
GRSRSPQRPGWSR

SEQ ID NO: 22962 - protein, 13 aa, Homo Sapiens
RSRSPQRPGWSRS

SEQ ID NO: 22963 - protein, 13 aa, Homo Sapiens
SRSPQRPGWSRSR

SEQ ID NO: 22964 - protein, 13 aa, Homo Sapiens
RSPQRPGWSRSRN

SEQ ID NO: 22965 - protein, 13 aa, Homo Sapiens
SPQRPGWSRSRNT

SEQ ID NO: 22966 - protein, 13 aa, Homo Sapiens
PQRPGWSRSRNTQ

SEQ ID NO: 22967 - protein, 13 aa, Homo Sapiens
QRPGWSRSRNTQR

SEQ ID NO: 22968 - protein, 13 aa, Homo Sapiens
RPGWSRSRNTQRR

SEQ ID NO: 22969 - protein, 13 aa, Homo Sapiens
PGWSRSRNTQRRG

SEQ ID NO: 22970 - protein, 13 aa, Homo Sapiens
GWSRSRNTQRRGR

SEQ ID NO: 22971 - protein, 13 aa, Homo Sapiens
WSRSRNTQRRGRS

SEQ ID NO: 22972 - protein, 13 aa, Homo Sapiens
SRSRNTQRRGRSR

SEQ ID NO: 22973 - protein, 13 aa, Homo Sapiens
RSRNTQRRGRSRS

SEQ ID NO: 22974 - protein, 13 aa, Homo Sapiens
SRNTQRRGRSRSA

SEQ ID NO: 22975 - protein, 13 aa, Homo Sapiens
RNTQRRGRSRSAR

SEQ ID NO: 22976 - protein, 13 aa, Homo Sapiens
NTQRRGRSRSARR

SEQ ID NO: 22977 - protein, 13 aa, Homo Sapiens
TQRRGRSRSARRG

SEQ ID NO: 22978 - protein, 13 aa, Homo Sapiens
QRRGRSRSARRGR

SEQ ID NO: 22979 - protein, 13 aa, Homo Sapiens
RRGRSRSARRGRS

SEQ ID NO: 22980 - protein, 13 aa, Homo Sapiens
RGRSRSARRGRSH

SEQ ID NO: 22981 - protein, 13 aa, Homo Sapiens
GRSRSARRGRSHS

SEQ ID NO: 22982 - protein, 13 aa, Homo Sapiens
RSRSARRGRSHSR

SEQ ID NO: 22983 - protein, 13 aa, Homo Sapiens
SRSARRGRSHSRS

SEQ ID NO: 22984 - protein, 13 aa, Homo Sapiens
RSARRGRSHSRSP

SEQ ID NO: 22985 - protein, 13 aa, Homo Sapiens
SARRGRSHSRSPA

SEQ ID NO: 22986 - protein, 13 aa, Homo Sapiens
ARRGRSHSRSPAT

SEQ ID NO: 22987 - protein, 13 aa, Homo Sapiens
RRGRSHSRSPATR

SEQ ID NO: 22988 - protein, 13 aa, Homo Sapiens
RGRSHSRSPATRG

SEQ ID NO: 22989 - protein, 13 aa, Homo Sapiens
GRSHSRSPATRGR

SEQ ID NO: 22990 - protein, 13 aa, Homo Sapiens
RSHSRSPATRGRS

SEQ ID NO: 22991 - protein, 13 aa, Homo Sapiens
SHSRSPATRGRSR

SEQ ID NO: 22992 - protein, 13 aa, Homo Sapiens
HSRSPATRGRSRS

SEQ ID NO: 22993 - protein, 13 aa, Homo Sapiens
SRSPATRGRSRSR

SEQ ID NO: 22994 - protein, 13 aa, Homo Sapiens
RSPATRGRSRSRT

SEQ ID NO: 22995 - protein, 13 aa, Homo Sapiens
SPATRGRSRSRTP

SEQ ID NO: 22996 - protein, 13 aa, Homo Sapiens
PATRGRSRSRTPA

SEQ ID NO: 22997 - protein, 13 aa, Homo Sapiens
ATRGRSRSRTPAR

SEQ ID NO: 22998 - protein, 13 aa, Homo Sapiens
TRGRSRSRTPARR

SEQ ID NO: 22999 - protein, 13 aa, Homo Sapiens
RGRSRSRTPARRG

SEQ ID NO: 23000 - protein, 13 aa, Homo Sapiens
GRSRSRTPARRGR

SEQ ID NO: 23001 - protein, 13 aa, Homo Sapiens
RSRSRTPARRGRS

SEQ ID NO: 23002 - protein, 13 aa, Homo Sapiens
SRSRTPARRGRSR

SEQ ID NO: 23003 - protein, 13 aa, Homo Sapiens
RSRTPARRGRSRS

SEQ ID NO: 23004 - protein, 13 aa, Homo Sapiens
SRTPARRGRSRSR

SEQ ID NO: 23005 - protein, 13 aa, Homo Sapiens
RTPARRGRSRSRT

SEQ ID NO: 23006 - protein, 13 aa, Homo Sapiens
TPARRGRSRSRTP

SEQ ID NO: 23007 - protein, 13 aa, Homo Sapiens
PARRGRSRSRTPA

SEQ ID NO: 23008 - protein, 13 aa, Homo Sapiens
ARRGRSRSRTPAR

SEQ ID NO: 23009 - protein, 13 aa, Homo Sapiens
RRGRSRSRTPARR

SEQ ID NO: 23010 - protein, 13 aa, Homo Sapiens
RGRSRSRTPARRR

SEQ ID NO: 23011 - protein, 13 aa, Homo Sapiens
GRSRSRTPARRRS

SEQ ID NO: 23012 - protein, 13 aa, Homo Sapiens
RSRSRTPARRRSR

SEQ ID NO: 23013 - protein, 13 aa, Homo Sapiens
SRSRTPARRRSRS

SEQ ID NO: 23014 - protein, 13 aa, Homo Sapiens
RSRTPARRRSRSR

SEQ ID NO: 23015 - protein, 13 aa, Homo Sapiens
SRTPARRRSRSRT

SEQ ID NO: 23016 - protein, 13 aa, Homo Sapiens
RTPARRRSRSRTP

SEQ ID NO: 23017 - protein, 13 aa, Homo Sapiens
TPARRRSRSRTPT

SEQ ID NO: 23018 - protein, 13 aa, Homo Sapiens
PARRRSRSRTPTR

SEQ ID NO: 23019 - protein, 13 aa, Homo Sapiens
ARRRSRSRTPTRR

SEQ ID NO: 23020 - protein, 13 aa, Homo Sapiens
RRRSRSRTPTRRR

SEQ ID NO: 23021 - protein, 13 aa, Homo Sapiens
RRSRSRTPTRRRS

SEQ ID NO: 23022 - protein, 13 aa, Homo Sapiens
RSRSRTPTRRRSR

SEQ ID NO: 23023 - protein, 13 aa, Homo Sapiens
SRSRTPTRRRSRS

SEQ ID NO: 23024 - protein, 13 aa, Homo Sapiens
RSRTPTRRRSRSR

SEQ ID NO: 23025 - protein, 13 aa, Homo Sapiens
SRTPTRRRSRSRT

SEQ ID NO: 23026 - protein, 13 aa, Homo Sapiens
RTPTRRRSRSRTP

SEQ ID NO: 23027 - protein, 13 aa, Homo Sapiens
TPTRRRSRSRTPA

SEQ ID NO: 23028 - protein, 13 aa, Homo Sapiens
PTRRRSRSRTPAR

SEQ ID NO: 23029 - protein, 13 aa, Homo Sapiens
TRRRSRSRTPARR

SEQ ID NO: 23030 - protein, 13 aa, Homo Sapiens
RRRSRSRTPARRG

SEQ ID NO: 23031 - protein, 13 aa, Homo Sapiens
RRSRSRTPARRGR

SEQ ID NO: 23032 - protein, 13 aa, Homo Sapiens
RSRSRTPARRGRS

SEQ ID NO: 23033 - protein, 13 aa, Homo Sapiens
SRSRTPARRGRSR

SEQ ID NO: 23034 - protein, 13 aa, Homo Sapiens
RSRTPARRGRSRS

SEQ ID NO: 23035 - protein, 13 aa, Homo Sapiens
SRTPARRGRSRSR

SEQ ID NO: 23036 - protein, 13 aa, Homo Sapiens
RTPARRGRSRSRT

SEQ ID NO: 23037 - protein, 13 aa, Homo Sapiens
TPARRGRSRSRTP

SEQ ID NO: 23038 - protein, 13 aa, Homo Sapiens
PARRGRSRSRTPA

SEQ ID NO: 23039 - protein, 13 aa, Homo Sapiens
ARRGRSRSRTPAR

SEQ ID NO: 23040 - protein, 13 aa, Homo Sapiens
RRGRSRSRTPARR

SEQ ID NO: 23041 - protein, 13 aa, Homo Sapiens
RGRSRSRTPARRR

SEQ ID NO: 23042 - protein, 13 aa, Homo Sapiens
GRSRSRTPARRRS

SEQ ID NO: 23043 - protein, 13 aa, Homo Sapiens
RSRSRTPARRRSR

SEQ ID NO: 23044 - protein, 13 aa, Homo Sapiens
SRSRTPARRRSRT

SEQ ID NO: 23045 - protein, 13 aa, Homo Sapiens
RSRTPARRRSRTR

SEQ ID NO: 23046 - protein, 13 aa, Homo Sapiens
SRTPARRRSRTRS

SEQ ID NO: 23047 - protein, 13 aa, Homo Sapiens
RTPARRRSRTRSP

SEQ ID NO: 23048 - protein, 13 aa, Homo Sapiens
TPARRRSRTRSPV

SEQ ID NO: 23049 - protein, 13 aa, Homo Sapiens
PARRRSRTRSPVR

SEQ ID NO: 23050 - protein, 13 aa, Homo Sapiens
ARRRSRTRSPVRR

SEQ ID NO: 23051 - protein, 13 aa, Homo Sapiens
RRRSRTRSPVRRR

SEQ ID NO: 23052 - protein, 13 aa, Homo Sapiens
RRSRTRSPVRRRS

SEQ ID NO: 23053 - protein, 13 aa, Homo Sapiens
RSRTRSPVRRRSR

SEQ ID NO: 23054 - protein, 13 aa, Homo Sapiens
SRTRSPVRRRSRS

SEQ ID NO: 23055 - protein, 13 aa, Homo Sapiens
RTRSPVRRRSRSR

SEQ ID NO: 23056 - protein, 13 aa, Homo Sapiens
TRSPVRRRSRSRS

SEQ ID NO: 23057 - protein, 13 aa, Homo Sapiens
RSPVRRRSRSRSP

SEQ ID NO: 23058 - protein, 13 aa, Homo Sapiens
SPVRRRSRSRSPA

SEQ ID NO: 23059 - protein, 13 aa, Homo Sapiens
PVRRRSRSRSPAR

SEQ ID NO: 23060 - protein, 13 aa, Homo Sapiens
VRRRSRSRSPARR

SEQ ID NO: 23061 - protein, 13 aa, Homo Sapiens
RRRSRSRSPARRS

SEQ ID NO: 23062 - protein, 13 aa, Homo Sapiens
RRSRSRSPARRSG

SEQ ID NO: 23063 - protein, 13 aa, Homo Sapiens
RSRSRSPARRSGR

SEQ ID NO: 23064 - protein, 13 aa, Homo Sapiens
SRSRSPARRSGRS

SEQ ID NO: 23065 - protein, 13 aa, Homo Sapiens
RSRSPARRSGRSR

SEQ ID NO: 23066 - protein, 13 aa, Homo Sapiens
SRSPARRSGRSRS

SEQ ID NO: 23067 - protein, 13 aa, Homo Sapiens
RSPARRSGRSRSR

SEQ ID NO: 23068 - protein, 13 aa, Homo Sapiens
SPARRSGRSRSRT

SEQ ID NO: 23069 - protein, 13 aa, Homo Sapiens
PARRSGRSRSRTP

SEQ ID NO: 23070 - protein, 13 aa, Homo Sapiens
ARRSGRSRSRTPA

SEQ ID NO: 23071 - protein, 13 aa, Homo Sapiens
RRSGRSRSRTPAR

SEQ ID NO: 23072 - protein, 13 aa, Homo Sapiens
RSGRSRSRTPARR

SEQ ID NO: 23073 - protein, 13 aa, Homo Sapiens
SGRSRSRTPARRG

SEQ ID NO: 23074 - protein, 13 aa, Homo Sapiens
GRSRSRTPARRGR

SEQ ID NO: 23075 - protein, 13 aa, Homo Sapiens
RSRSRTPARRGRS

SEQ ID NO: 23076 - protein, 13 aa, Homo Sapiens
SRSRTPARRGRSR

SEQ ID NO: 23077 - protein, 13 aa, Homo Sapiens
RSRTPARRGRSRS

SEQ ID NO: 23078 - protein, 13 aa, Homo Sapiens
SRTPARRGRSRSR

SEQ ID NO: 23079 - protein, 13 aa, Homo Sapiens
RTPARRGRSRSRT

SEQ ID NO: 23080 - protein, 13 aa, Homo Sapiens
TPARRGRSRSRTP

SEQ ID NO: 23081 - protein, 13 aa, Homo Sapiens
PARRGRSRSRTPA

SEQ ID NO: 23082 - protein, 13 aa, Homo Sapiens
ARRGRSRSRTPAR

SEQ ID NO: 23083 - protein, 13 aa, Homo Sapiens
RRGRSRSRTPARR

SEQ ID NO: 23084 - protein, 13 aa, Homo Sapiens
RGRSRSRTPARRG

SEQ ID NO: 23085 - protein, 13 aa, Homo Sapiens
GRSRSRTPARRGR

SEQ ID NO: 23086 - protein, 13 aa, Homo Sapiens
RSRSRTPARRGRS

SEQ ID NO: 23087 - protein, 13 aa, Homo Sapiens
SRSRTPARRGRSR

SEQ ID NO: 23088 - protein, 13 aa, Homo Sapiens
RSRTPARRGRSRS

SEQ ID NO: 23089 - protein, 13 aa, Homo Sapiens
SRTPARRGRSRSR

SEQ ID NO: 23090 - protein, 13 aa, Homo Sapiens
RTPARRGRSRSRT

SEQ ID NO: 23091 - protein, 13 aa, Homo Sapiens
TPARRGRSRSRTP

SEQ ID NO: 23092 - protein, 13 aa, Homo Sapiens
PARRGRSRSRTPA

SEQ ID NO: 23093 - protein, 13 aa, Homo Sapiens
ARRGRSRSRTPAR

SEQ ID NO: 23094 - protein, 13 aa, Homo Sapiens
RRGRSRSRTPARR

SEQ ID NO: 23095 - protein, 13 aa, Homo Sapiens
RGRSRSRTPARRS

SEQ ID NO: 23096 - protein, 13 aa, Homo Sapiens
GRSRSRTPARRSG

SEQ ID NO: 23097 - protein, 13 aa, Homo Sapiens
RSRSRTPARRSGR

SEQ ID NO: 23098 - protein, 13 aa, Homo Sapiens
SRSRTPARRSGRS

SEQ ID NO: 23099 - protein, 13 aa, Homo Sapiens
RSRTPARRSGRSR

SEQ ID NO: 23100 - protein, 13 aa, Homo Sapiens
SRTPARRSGRSRS

SEQ ID NO: 23101 - protein, 13 aa, Homo Sapiens
RTPARRSGRSRSR

SEQ ID NO: 23102 - protein, 13 aa, Homo Sapiens
TPARRSGRSRSRT

SEQ ID NO: 23103 - protein, 13 aa, Homo Sapiens
PARRSGRSRSRTP

SEQ ID NO: 23104 - protein, 13 aa, Homo Sapiens
ARRSGRSRSRTPA

SEQ ID NO: 23105 - protein, 13 aa, Homo Sapiens
RRSGRSRSRTPAR

SEQ ID NO: 23106 - protein, 13 aa, Homo Sapiens
RSGRSRSRTPARR

SEQ ID NO: 23107 - protein, 13 aa, Homo Sapiens
SGRSRSRTPARRG

SEQ ID NO: 23108 - protein, 13 aa, Homo Sapiens
GRSRSRTPARRGR

SEQ ID NO: 23109 - protein, 13 aa, Homo Sapiens
RSRSRTPARRGRS

SEQ ID NO: 23110 - protein, 13 aa, Homo Sapiens
SRSRTPARRGRSR

SEQ ID NO: 23111 - protein, 13 aa, Homo Sapiens
RSRTPARRGRSRS

SEQ ID NO: 23112 - protein, 13 aa, Homo Sapiens
SRTPARRGRSRSR

SEQ ID NO: 23113 - protein, 13 aa, Homo Sapiens
RTPARRGRSRSRT

SEQ ID NO: 23114 - protein, 13 aa, Homo Sapiens
TPARRGRSRSRTP

SEQ ID NO: 23115 - protein, 13 aa, Homo Sapiens
PARRGRSRSRTPR

SEQ ID NO: 23116 - protein, 13 aa, Homo Sapiens
ARRGRSRSRTPRR

SEQ ID NO: 23117 - protein, 13 aa, Homo Sapiens
RRGRSRSRTPRRG

SEQ ID NO: 23118 - protein, 13 aa, Homo Sapiens
RGRSRSRTPRRGR

SEQ ID NO: 23119 - protein, 13 aa, Homo Sapiens
GRSRSRTPRRGRS

SEQ ID NO: 23120 - protein, 13 aa, Homo Sapiens
RSRSRTPRRGRSR

SEQ ID NO: 23121 - protein, 13 aa, Homo Sapiens
SRSRTPRRGRSRS

SEQ ID NO: 23122 - protein, 13 aa, Homo Sapiens
RSRTPRRGRSRSR

SEQ ID NO: 23123 - protein, 13 aa, Homo Sapiens
SRTPRRGRSRSRS

SEQ ID NO: 23124 - protein, 13 aa, Homo Sapiens
RTPRRGRSRSRSL

SEQ ID NO: 23125 - protein, 13 aa, Homo Sapiens
TPRRGRSRSRSLV

SEQ ID NO: 23126 - protein, 13 aa, Homo Sapiens
PRRGRSRSRSLVR

SEQ ID NO: 23127 - protein, 13 aa, Homo Sapiens
RRGRSRSRSLVRR

SEQ ID NO: 23128 - protein, 13 aa, Homo Sapiens
RGRSRSRSLVRRG

SEQ ID NO: 23129 - protein, 13 aa, Homo Sapiens
GRSRSRSLVRRGR

SEQ ID NO: 23130 - protein, 13 aa, Homo Sapiens
RSRSRSLVRRGRS

SEQ ID NO: 23131 - protein, 13 aa, Homo Sapiens
SRSRSLVRRGRSH

SEQ ID NO: 23132 - protein, 13 aa, Homo Sapiens
RSRSLVRRGRSHS

SEQ ID NO: 23133 - protein, 13 aa, Homo Sapiens
SRSLVRRGRSHSR

SEQ ID NO: 23134 - protein, 13 aa, Homo Sapiens
RSLVRRGRSHSRT

SEQ ID NO: 23135 - protein, 13 aa, Homo Sapiens
SLVRRGRSHSRTP

SEQ ID NO: 23136 - protein, 13 aa, Homo Sapiens
LVRRGRSHSRTPQ

SEQ ID NO: 23137 - protein, 13 aa, Homo Sapiens
VRRGRSHSRTPQR

SEQ ID NO: 23138 - protein, 13 aa, Homo Sapiens
RRGRSHSRTPQRR

SEQ ID NO: 23139 - protein, 13 aa, Homo Sapiens
RGRSHSRTPQRRG

SEQ ID NO: 23140 - protein, 13 aa, Homo Sapiens
GRSHSRTPQRRGR

SEQ ID NO: 23141 - protein, 13 aa, Homo Sapiens
RSHSRTPQRRGRS

SEQ ID NO: 23142 - protein, 13 aa, Homo Sapiens
SHSRTPQRRGRSG

SEQ ID NO: 23143 - protein, 13 aa, Homo Sapiens
HSRTPQRRGRSGS

SEQ ID NO: 23144 - protein, 13 aa, Homo Sapiens
SRTPQRRGRSGSS

SEQ ID NO: 23145 - protein, 13 aa, Homo Sapiens
RTPQRRGRSGSSS

SEQ ID NO: 23146 - protein, 13 aa, Homo Sapiens
TPQRRGRSGSSSE

SEQ ID NO: 23147 - protein, 13 aa, Homo Sapiens
PQRRGRSGSSSER

SEQ ID NO: 23148 - protein, 13 aa, Homo Sapiens
QRRGRSGSSSERK

SEQ ID NO: 23149 - protein, 13 aa, Homo Sapiens
RRGRSGSSSERKN

SEQ ID NO: 23150 - protein, 13 aa, Homo Sapiens
RGRSGSSSERKNK

SEQ ID NO: 23151 - protein, 13 aa, Homo Sapiens
GRSGSSSERKNKS

SEQ ID NO: 23152 - protein, 13 aa, Homo Sapiens
RSGSSSERKNKSR

SEQ ID NO: 23153 - protein, 13 aa, Homo Sapiens
SGSSSERKNKSRT

SEQ ID NO: 23154 - protein, 13 aa, Homo Sapiens
GSSSERKNKSRTS

SEQ ID NO: 23155 - protein, 13 aa, Homo Sapiens
SSSERKNKSRTSQ

SEQ ID NO: 23156 - protein, 13 aa, Homo Sapiens
SSERKNKSRTSQR

SEQ ID NO: 23157 - protein, 13 aa, Homo Sapiens
SERKNKSRTSQRR

SEQ ID NO: 23158 - protein, 13 aa, Homo Sapiens
ERKNKSRTSQRRS

SEQ ID NO: 23159 - protein, 13 aa, Homo Sapiens
RKNKSRTSQRRSR

SEQ ID NO: 23160 - protein, 13 aa, Homo Sapiens
KNKSRTSQRRSRS

SEQ ID NO: 23161 - protein, 13 aa, Homo Sapiens
NKSRTSQRRSRSN

SEQ ID NO: 23162 - protein, 13 aa, Homo Sapiens
KSRTSQRRSRSNS

SEQ ID NO: 23163 - protein, 13 aa, Homo Sapiens
SRTSQRRSRSNSS

SEQ ID NO: 23164 - protein, 13 aa, Homo Sapiens
RTSQRRSRSNSSP

SEQ ID NO: 23165 - protein, 13 aa, Homo Sapiens
TSQRRSRSNSSPE

SEQ ID NO: 23166 - protein, 13 aa, Homo Sapiens
SQRRSRSNSSPEM

SEQ ID NO: 23167 - protein, 13 aa, Homo Sapiens
QRRSRSNSSPEMK

SEQ ID NO: 23168 - protein, 13 aa, Homo Sapiens
RRSRSNSSPEMKK

SEQ ID NO: 23169 - protein, 13 aa, Homo Sapiens
RSRSNSSPEMKKS

SEQ ID NO: 23170 - protein, 13 aa, Homo Sapiens
SRSNSSPEMKKSR

SEQ ID NO: 23171 - protein, 13 aa, Homo Sapiens
RSNSSPEMKKSRI

SEQ ID NO: 23172 - protein, 13 aa, Homo Sapiens
SNSSPEMKKSRIS

SEQ ID NO: 23173 - protein, 13 aa, Homo Sapiens
NSSPEMKKSRISS

SEQ ID NO: 23174 - protein, 13 aa, Homo Sapiens
SSPEMKKSRISSR

SEQ ID NO: 23175 - protein, 13 aa, Homo Sapiens
SPEMKKSRISSRR

SEQ ID NO: 23176 - protein, 13 aa, Homo Sapiens
PEMKKSRISSRRS

SEQ ID NO: 23177 - protein, 13 aa, Homo Sapiens
EMKKSRISSRRSR

SEQ ID NO: 23178 - protein, 13 aa, Homo Sapiens
MKKSRISSRRSRS

SEQ ID NO: 23179 - protein, 13 aa, Homo Sapiens
KKSRISSRRSRSL

SEQ ID NO: 23180 - protein, 13 aa, Homo Sapiens
KSRISSRRSRSLS

SEQ ID NO: 23181 - protein, 13 aa, Homo Sapiens
SRISSRRSRSLSS

SEQ ID NO: 23182 - protein, 13 aa, Homo Sapiens
RISSRRSRSLSSP

SEQ ID NO: 23183 - protein, 13 aa, Homo Sapiens
ISSRRSRSLSSPR

SEQ ID NO: 23184 - protein, 13 aa, Homo Sapiens
SSRRSRSLSSPRS

SEQ ID NO: 23185 - protein, 13 aa, Homo Sapiens
SRRSRSLSSPRSK

SEQ ID NO: 23186 - protein, 13 aa, Homo Sapiens
RRSRSLSSPRSKA

SEQ ID NO: 23187 - protein, 13 aa, Homo Sapiens
RSRSLSSPRSKAK

SEQ ID NO: 23188 - protein, 13 aa, Homo Sapiens
SRSLSSPRSKAKS

SEQ ID NO: 23189 - protein, 13 aa, Homo Sapiens
RSLSSPRSKAKSR

SEQ ID NO: 23190 - protein, 13 aa, Homo Sapiens
SLSSPRSKAKSRL

SEQ ID NO: 23191 - protein, 13 aa, Homo Sapiens
LSSPRSKAKSRLS

SEQ ID NO: 23192 - protein, 13 aa, Homo Sapiens
SSPRSKAKSRLSL

SEQ ID NO: 23193 - protein, 13 aa, Homo Sapiens
SPRSKAKSRLSLR

SEQ ID NO: 23194 - protein, 13 aa, Homo Sapiens
PRSKAKSRLSLRR

SEQ ID NO: 23195 - protein, 13 aa, Homo Sapiens
RSKAKSRLSLRRS

SEQ ID NO: 23196 - protein, 13 aa, Homo Sapiens
SKAKSRLSLRRSL

SEQ ID NO: 23197 - protein, 13 aa, Homo Sapiens
KAKSRLSLRRSLS

SEQ ID NO: 23198 - protein, 13 aa, Homo Sapiens
AKSRLSLRRSLSG

SEQ ID NO: 23199 - protein, 13 aa, Homo Sapiens
KSRLSLRRSLSGS

SEQ ID NO: 23200 - protein, 13 aa, Homo Sapiens
SRLSLRRSLSGSS

SEQ ID NO: 23201 - protein, 13 aa, Homo Sapiens
RLSLRRSLSGSSP

SEQ ID NO: 23202 - protein, 13 aa, Homo Sapiens
LSLRRSLSGSSPC

SEQ ID NO: 23203 - protein, 13 aa, Homo Sapiens
SLRRSLSGSSPCP

SEQ ID NO: 23204 - protein, 13 aa, Homo Sapiens
LRRSLSGSSPCPK

SEQ ID NO: 23205 - protein, 13 aa, Homo Sapiens
RRSLSGSSPCPKQ

SEQ ID NO: 23206 - protein, 13 aa, Homo Sapiens
RSLSGSSPCPKQK

SEQ ID NO: 23207 - protein, 13 aa, Homo Sapiens
SLSGSSPCPKQKS

SEQ ID NO: 23208 - protein, 13 aa, Homo Sapiens
LSGSSPCPKQKSQ

SEQ ID NO: 23209 - protein, 13 aa, Homo Sapiens
SGSSPCPKQKSQT

SEQ ID NO: 23210 - protein, 13 aa, Homo Sapiens
GSSPCPKQKSQTP

SEQ ID NO: 23211 - protein, 13 aa, Homo Sapiens
SSPCPKQKSQTPP

SEQ ID NO: 23212 - protein, 13 aa, Homo Sapiens
SPCPKQKSQTPPR

SEQ ID NO: 23213 - protein, 13 aa, Homo Sapiens
PCPKQKSQTPPRR

SEQ ID NO: 23214 - protein, 13 aa, Homo Sapiens
CPKQKSQTPPRRS

SEQ ID NO: 23215 - protein, 13 aa, Homo Sapiens
PKQKSQTPPRRSR

SEQ ID NO: 23216 - protein, 13 aa, Homo Sapiens
KQKSQTPPRRSRS

SEQ ID NO: 23217 - protein, 13 aa, Homo Sapiens
QKSQTPPRRSRSG

SEQ ID NO: 23218 - protein, 13 aa, Homo Sapiens
KSQTPPRRSRSGS

SEQ ID NO: 23219 - protein, 13 aa, Homo Sapiens
SQTPPRRSRSGSS

SEQ ID NO: 23220 - protein, 13 aa, Homo Sapiens
QTPPRRSRSGSSQ

SEQ ID NO: 23221 - protein, 13 aa, Homo Sapiens
TPPRRSRSGSSQP

SEQ ID NO: 23222 - protein, 13 aa, Homo Sapiens
PPRRSRSGSSQPK

SEQ ID NO: 23223 - protein, 13 aa, Homo Sapiens
PRRSRSGSSQPKA

SEQ ID NO: 23224 - protein, 13 aa, Homo Sapiens
RRSRSGSSQPKAK

SEQ ID NO: 23225 - protein, 13 aa, Homo Sapiens
RSRSGSSQPKAKS

SEQ ID NO: 23226 - protein, 13 aa, Homo Sapiens
SRSGSSQPKAKSR

SEQ ID NO: 23227 - protein, 13 aa, Homo Sapiens
RSGSSQPKAKSRT

SEQ ID NO: 23228 - protein, 13 aa, Homo Sapiens
SGSSQPKAKSRTP

SEQ ID NO: 23229 - protein, 13 aa, Homo Sapiens
GSSQPKAKSRTPP

SEQ ID NO: 23230 - protein, 13 aa, Homo Sapiens
SSQPKAKSRTPPR

SEQ ID NO: 23231 - protein, 13 aa, Homo Sapiens
SQPKAKSRTPPRR

SEQ ID NO: 23232 - protein, 13 aa, Homo Sapiens
QPKAKSRTPPRRS

SEQ ID NO: 23233 - protein, 13 aa, Homo Sapiens
PKAKSRTPPRRSR

SEQ ID NO: 23234 - protein, 13 aa, Homo Sapiens
KAKSRTPPRRSRS

SEQ ID NO: 23235 - protein, 13 aa, Homo Sapiens
AKSRTPPRRSRSS

SEQ ID NO: 23236 - protein, 13 aa, Homo Sapiens
KSRTPPRRSRSSS

SEQ ID NO: 23237 - protein, 13 aa, Homo Sapiens
SRTPPRRSRSSSS

SEQ ID NO: 23238 - protein, 13 aa, Homo Sapiens
RTPPRRSRSSSSP

SEQ ID NO: 23239 - protein, 13 aa, Homo Sapiens
TPPRRSRSSSSPP

SEQ ID NO: 23240 - protein, 13 aa, Homo Sapiens
PPRRSRSSSSPPP

SEQ ID NO: 23241 - protein, 13 aa, Homo Sapiens
PRRSRSSSSPPPK

SEQ ID NO: 23242 - protein, 13 aa, Homo Sapiens
RRSRSSSSPPPKQ

SEQ ID NO: 23243 - protein, 13 aa, Homo Sapiens
RSRSSSSPPPKQK

SEQ ID NO: 23244 - protein, 13 aa, Homo Sapiens
SRSSSSPPPKQKS

SEQ ID NO: 23245 - protein, 13 aa, Homo Sapiens
RSSSSPPPKQKSK

SEQ ID NO: 23246 - protein, 13 aa, Homo Sapiens
SSSSPPPKQKSKT

SEQ ID NO: 23247 - protein, 13 aa, Homo Sapiens
SSSPPPKQKSKTP

SEQ ID NO: 23248 - protein, 13 aa, Homo Sapiens
SSPPPKQKSKTPS

SEQ ID NO: 23249 - protein, 13 aa, Homo Sapiens
SPPPKQKSKTPSR

SEQ ID NO: 23250 - protein, 13 aa, Homo Sapiens
PPPKQKSKTPSRQ

SEQ ID NO: 23251 - protein, 13 aa, Homo Sapiens
PPKQKSKTPSRQS

SEQ ID NO: 23252 - protein, 13 aa, Homo Sapiens
PKQKSKTPSRQSH

SEQ ID NO: 23253 - protein, 13 aa, Homo Sapiens
KQKSKTPSRQSHS

SEQ ID NO: 23254 - protein, 13 aa, Homo Sapiens
QKSKTPSRQSHSS

SEQ ID NO: 23255 - protein, 13 aa, Homo Sapiens
KSKTPSRQSHSSS

SEQ ID NO: 23256 - protein, 13 aa, Homo Sapiens
SKTPSRQSHSSSS

SEQ ID NO: 23257 - protein, 13 aa, Homo Sapiens
KTPSRQSHSSSSP

SEQ ID NO: 23258 - protein, 13 aa, Homo Sapiens
TPSRQSHSSSSPH

SEQ ID NO: 23259 - protein, 13 aa, Homo Sapiens
PSRQSHSSSSPHP

SEQ ID NO: 23260 - protein, 13 aa, Homo Sapiens
SRQSHSSSSPHPK

SEQ ID NO: 23261 - protein, 13 aa, Homo Sapiens
RQSHSSSSPHPKV

SEQ ID NO: 23262 - protein, 13 aa, Homo Sapiens
QSHSSSSPHPKVK

SEQ ID NO: 23263 - protein, 13 aa, Homo Sapiens
SHSSSSPHPKVKS

SEQ ID NO: 23264 - protein, 13 aa, Homo Sapiens
HSSSSPHPKVKSG

SEQ ID NO: 23265 - protein, 13 aa, Homo Sapiens
SSSSPHPKVKSGT

SEQ ID NO: 23266 - protein, 13 aa, Homo Sapiens
SSSPHPKVKSGTP

SEQ ID NO: 23267 - protein, 13 aa, Homo Sapiens
SSPHPKVKSGTPP

SEQ ID NO: 23268 - protein, 13 aa, Homo Sapiens
SPHPKVKSGTPPR

SEQ ID NO: 23269 - protein, 13 aa, Homo Sapiens
PHPKVKSGTPPRQ

SEQ ID NO: 23270 - protein, 13 aa, Homo Sapiens
HPKVKSGTPPRQG

SEQ ID NO: 23271 - protein, 13 aa, Homo Sapiens
PKVKSGTPPRQGS

SEQ ID NO: 23272 - protein, 13 aa, Homo Sapiens
KVKSGTPPRQGSI

SEQ ID NO: 23273 - protein, 13 aa, Homo Sapiens
VKSGTPPRQGSIT

SEQ ID NO: 23274 - protein, 13 aa, Homo Sapiens
KSGTPPRQGSITS

SEQ ID NO: 23275 - protein, 13 aa, Homo Sapiens
SGTPPRQGSITSP

SEQ ID NO: 23276 - protein, 13 aa, Homo Sapiens
GTPPRQGSITSPQ

SEQ ID NO: 23277 - protein, 13 aa, Homo Sapiens
TPPRQGSITSPQA

SEQ ID NO: 23278 - protein, 13 aa, Homo Sapiens
PPRQGSITSPQAN

SEQ ID NO: 23279 - protein, 13 aa, Homo Sapiens
PRQGSITSPQANE

SEQ ID NO: 23280 - protein, 13 aa, Homo Sapiens
RQGSITSPQANEQ

SEQ ID NO: 23281 - protein, 13 aa, Homo Sapiens
QGSITSPQANEQS

SEQ ID NO: 23282 - protein, 13 aa, Homo Sapiens
GSITSPQANEQSV

SEQ ID NO: 23283 - protein, 13 aa, Homo Sapiens
SITSPQANEQSVT

SEQ ID NO: 23284 - protein, 13 aa, Homo Sapiens
ITSPQANEQSVTP

SEQ ID NO: 23285 - protein, 13 aa, Homo Sapiens
TSPQANEQSVTPQ

SEQ ID NO: 23286 - protein, 13 aa, Homo Sapiens
SPQANEQSVTPQR

SEQ ID NO: 23287 - protein, 13 aa, Homo Sapiens
PQANEQSVTPQRR

SEQ ID NO: 23288 - protein, 13 aa, Homo Sapiens
QANEQSVTPQRRS

SEQ ID NO: 23289 - protein, 13 aa, Homo Sapiens
ANEQSVTPQRRSC

SEQ ID NO: 23290 - protein, 13 aa, Homo Sapiens
NEQSVTPQRRSCF

SEQ ID NO: 23291 - protein, 13 aa, Homo Sapiens
EQSVTPQRRSCFE

SEQ ID NO: 23292 - protein, 13 aa, Homo Sapiens
QSVTPQRRSCFES

SEQ ID NO: 23293 - protein, 13 aa, Homo Sapiens
SVTPQRRSCFESS

SEQ ID NO: 23294 - protein, 13 aa, Homo Sapiens
VTPQRRSCFESSP

SEQ ID NO: 23295 - protein, 13 aa, Homo Sapiens
TPQRRSCFESSPD

SEQ ID NO: 23296 - protein, 13 aa, Homo Sapiens
PQRRSCFESSPDP

SEQ ID NO: 23297 - protein, 13 aa, Homo Sapiens
QRRSCFESSPDPE

SEQ ID NO: 23298 - protein, 13 aa, Homo Sapiens
RRSCFESSPDPEL

SEQ ID NO: 23299 - protein, 13 aa, Homo Sapiens
RSCFESSPDPELK

SEQ ID NO: 23300 - protein, 13 aa, Homo Sapiens
SCFESSPDPELKS

SEQ ID NO: 23301 - protein, 13 aa, Homo Sapiens
CFESSPDPELKSR

SEQ ID NO: 23302 - protein, 13 aa, Homo Sapiens
FESSPDPELKSRT

SEQ ID NO: 23303 - protein, 13 aa, Homo Sapiens
ESSPDPELKSRTP

SEQ ID NO: 23304 - protein, 13 aa, Homo Sapiens
SSPDPELKSRTPS

SEQ ID NO: 23305 - protein, 13 aa, Homo Sapiens
SPDPELKSRTPSR

SEQ ID NO: 23306 - protein, 13 aa, Homo Sapiens
PDPELKSRTPSRH

SEQ ID NO: 23307 - protein, 13 aa, Homo Sapiens
DPELKSRTPSRHS

SEQ ID NO: 23308 - protein, 13 aa, Homo Sapiens
PELKSRTPSRHSC

SEQ ID NO: 23309 - protein, 13 aa, Homo Sapiens
ELKSRTPSRHSCS

SEQ ID NO: 23310 - protein, 13 aa, Homo Sapiens
LKSRTPSRHSCSG

SEQ ID NO: 23311 - protein, 13 aa, Homo Sapiens
KSRTPSRHSCSGS

SEQ ID NO: 23312 - protein, 13 aa, Homo Sapiens
SRTPSRHSCSGSS

SEQ ID NO: 23313 - protein, 13 aa, Homo Sapiens
RTPSRHSCSGSSP

SEQ ID NO: 23314 - protein, 13 aa, Homo Sapiens
TPSRHSCSGSSPP

SEQ ID NO: 23315 - protein, 13 aa, Homo Sapiens
PSRHSCSGSSPPR

SEQ ID NO: 23316 - protein, 13 aa, Homo Sapiens
SRHSCSGSSPPRV

SEQ ID NO: 23317 - protein, 13 aa, Homo Sapiens
RHSCSGSSPPRVK

SEQ ID NO: 23318 - protein, 13 aa, Homo Sapiens
HSCSGSSPPRVKS

SEQ ID NO: 23319 - protein, 13 aa, Homo Sapiens
SCSGSSPPRVKSS

SEQ ID NO: 23320 - protein, 13 aa, Homo Sapiens
CSGSSPPRVKSST

SEQ ID NO: 23321 - protein, 13 aa, Homo Sapiens
SGSSPPRVKSSTP

SEQ ID NO: 23322 - protein, 13 aa, Homo Sapiens
GSSPPRVKSSTPP

SEQ ID NO: 23323 - protein, 13 aa, Homo Sapiens
SSPPRVKSSTPPR

SEQ ID NO: 23324 - protein, 13 aa, Homo Sapiens
SPPRVKSSTPPRQ

SEQ ID NO: 23325 - protein, 13 aa, Homo Sapiens
PPRVKSSTPPRQS

SEQ ID NO: 23326 - protein, 13 aa, Homo Sapiens
PRVKSSTPPRQSP

SEQ ID NO: 23327 - protein, 13 aa, Homo Sapiens
RVKSSTPPRQSPS

SEQ ID NO: 23328 - protein, 13 aa, Homo Sapiens
VKSSTPPRQSPSR

SEQ ID NO: 23329 - protein, 13 aa, Homo Sapiens
KSSTPPRQSPSRS

SEQ ID NO: 23330 - protein, 13 aa, Homo Sapiens
SSTPPRQSPSRSS

SEQ ID NO: 23331 - protein, 13 aa, Homo Sapiens
STPPRQSPSRSSS

SEQ ID NO: 23332 - protein, 13 aa, Homo Sapiens
TPPRQSPSRSSSP

SEQ ID NO: 23333 - protein, 13 aa, Homo Sapiens
PPRQSPSRSSSPQ

SEQ ID NO: 23334 - protein, 13 aa, Homo Sapiens
PRQSPSRSSSPQP

SEQ ID NO: 23335 - protein, 13 aa, Homo Sapiens
RQSPSRSSSPQPK

SEQ ID NO: 23336 - protein, 13 aa, Homo Sapiens
QSPSRSSSPQPKV

SEQ ID NO: 23337 - protein, 13 aa, Homo Sapiens
SPSRSSSPQPKVK

SEQ ID NO: 23338 - protein, 13 aa, Homo Sapiens
PSRSSSPQPKVKA

SEQ ID NO: 23339 - protein, 13 aa, Homo Sapiens
SRSSSPQPKVKAI

SEQ ID NO: 23340 - protein, 13 aa, Homo Sapiens
RSSSPQPKVKAII

SEQ ID NO: 23341 - protein, 13 aa, Homo Sapiens
SSSPQPKVKAIIS

SEQ ID NO: 23342 - protein, 13 aa, Homo Sapiens
SSPQPKVKAIISP

SEQ ID NO: 23343 - protein, 13 aa, Homo Sapiens
SPQPKVKAIISPR

SEQ ID NO: 23344 - protein, 13 aa, Homo Sapiens
PQPKVKAIISPRQ

SEQ ID NO: 23345 - protein, 13 aa, Homo Sapiens
QPKVKAIISPRQR

SEQ ID NO: 23346 - protein, 13 aa, Homo Sapiens
PKVKAIISPRQRS

SEQ ID NO: 23347 - protein, 13 aa, Homo Sapiens
KVKAIISPRQRSH

SEQ ID NO: 23348 - protein, 13 aa, Homo Sapiens
VKAIISPRQRSHS

SEQ ID NO: 23349 - protein, 13 aa, Homo Sapiens
KAIISPRQRSHSG

SEQ ID NO: 23350 - protein, 13 aa, Homo Sapiens
AIISPRQRSHSGS

SEQ ID NO: 23351 - protein, 13 aa, Homo Sapiens
IISPRQRSHSGSS

SEQ ID NO: 23352 - protein, 13 aa, Homo Sapiens
ISPRQRSHSGSSS

SEQ ID NO: 23353 - protein, 13 aa, Homo Sapiens
SPRQRSHSGSSSP

SEQ ID NO: 23354 - protein, 13 aa, Homo Sapiens
PRQRSHSGSSSPS

SEQ ID NO: 23355 - protein, 13 aa, Homo Sapiens
RQRSHSGSSSPSP

SEQ ID NO: 23356 - protein, 13 aa, Homo Sapiens
QRSHSGSSSPSPS

SEQ ID NO: 23357 - protein, 13 aa, Homo Sapiens
RSHSGSSSPSPSR

SEQ ID NO: 23358 - protein, 13 aa, Homo Sapiens
SHSGSSSPSPSRV

SEQ ID NO: 23359 - protein, 13 aa, Homo Sapiens
HSGSSSPSPSRVT

SEQ ID NO: 23360 - protein, 13 aa, Homo Sapiens
SGSSSPSPSRVTS

SEQ ID NO: 23361 - protein, 13 aa, Homo Sapiens
GSSSPSPSRVTSR

SEQ ID NO: 23362 - protein, 13 aa, Homo Sapiens
SSSPSPSRVTSRT

SEQ ID NO: 23363 - protein, 13 aa, Homo Sapiens
SSPSPSRVTSRTT

SEQ ID NO: 23364 - protein, 13 aa, Homo Sapiens
SPSPSRVTSRTTP

SEQ ID NO: 23365 - protein, 13 aa, Homo Sapiens
PSPSRVTSRTTPR

SEQ ID NO: 23366 - protein, 13 aa, Homo Sapiens
SPSRVTSRTTPRR

SEQ ID NO: 23367 - protein, 13 aa, Homo Sapiens
PSRVTSRTTPRRS

SEQ ID NO: 23368 - protein, 13 aa, Homo Sapiens
SRVTSRTTPRRSR

SEQ ID NO: 23369 - protein, 13 aa, Homo Sapiens
RVTSRTTPRRSRS

SEQ ID NO: 23370 - protein, 13 aa, Homo Sapiens
VTSRTTPRRSRSV

SEQ ID NO: 23371 - protein, 13 aa, Homo Sapiens
TSRTTPRRSRSVS

SEQ ID NO: 23372 - protein, 13 aa, Homo Sapiens
SRTTPRRSRSVSP

SEQ ID NO: 23373 - protein, 13 aa, Homo Sapiens
RTTPRRSRSVSPC

SEQ ID NO: 23374 - protein, 13 aa, Homo Sapiens
TTPRRSRSVSPCS

SEQ ID NO: 23375 - protein, 13 aa, Homo Sapiens
TPRRSRSVSPCSN

SEQ ID NO: 23376 - protein, 13 aa, Homo Sapiens
PRRSRSVSPCSNV

SEQ ID NO: 23377 - protein, 13 aa, Homo Sapiens
RRSRSVSPCSNVE

SEQ ID NO: 23378 - protein, 13 aa, Homo Sapiens
RSRSVSPCSNVES

SEQ ID NO: 23379 - protein, 13 aa, Homo Sapiens
SRSVSPCSNVESR

SEQ ID NO: 23380 - protein, 13 aa, Homo Sapiens
RSVSPCSNVESRL

SEQ ID NO: 23381 - protein, 13 aa, Homo Sapiens
SVSPCSNVESRLL

SEQ ID NO: 23382 - protein, 13 aa, Homo Sapiens
VSPCSNVESRLLP

SEQ ID NO: 23383 - protein, 13 aa, Homo Sapiens
SPCSNVESRLLPR

SEQ ID NO: 23384 - protein, 13 aa, Homo Sapiens
PCSNVESRLLPRY

SEQ ID NO: 23385 - protein, 13 aa, Homo Sapiens
CSNVESRLLPRYS

SEQ ID NO: 23386 - protein, 13 aa, Homo Sapiens
SNVESRLLPRYSH

SEQ ID NO: 23387 - protein, 13 aa, Homo Sapiens
NVESRLLPRYSHS

SEQ ID NO: 23388 - protein, 13 aa, Homo Sapiens
VESRLLPRYSHSG

SEQ ID NO: 23389 - protein, 13 aa, Homo Sapiens
ESRLLPRYSHSGS

SEQ ID NO: 23390 - protein, 13 aa, Homo Sapiens
SRLLPRYSHSGSS

SEQ ID NO: 23391 - protein, 13 aa, Homo Sapiens
RLLPRYSHSGSSS

SEQ ID NO: 23392 - protein, 13 aa, Homo Sapiens
LLPRYSHSGSSSP

SEQ ID NO: 23393 - protein, 13 aa, Homo Sapiens
LPRYSHSGSSSPD

SEQ ID NO: 23394 - protein, 13 aa, Homo Sapiens
PRYSHSGSSSPDT

SEQ ID NO: 23395 - protein, 13 aa, Homo Sapiens
RYSHSGSSSPDTK

SEQ ID NO: 23396 - protein, 13 aa, Homo Sapiens
YSHSGSSSPDTKV

SEQ ID NO: 23397 - protein, 13 aa, Homo Sapiens
SHSGSSSPDTKVK

SEQ ID NO: 23398 - protein, 13 aa, Homo Sapiens
HSGSSSPDTKVKP

SEQ ID NO: 23399 - protein, 13 aa, Homo Sapiens
SGSSSPDTKVKPE

SEQ ID NO: 23400 - protein, 13 aa, Homo Sapiens
GSSSPDTKVKPET

SEQ ID NO: 23401 - protein, 13 aa, Homo Sapiens
SSSPDTKVKPETP

SEQ ID NO: 23402 - protein, 13 aa, Homo Sapiens
SSPDTKVKPETPP

SEQ ID NO: 23403 - protein, 13 aa, Homo Sapiens
SPDTKVKPETPPR

SEQ ID NO: 23404 - protein, 13 aa, Homo Sapiens
PDTKVKPETPPRQ

SEQ ID NO: 23405 - protein, 13 aa, Homo Sapiens
DTKVKPETPPRQS

SEQ ID NO: 23406 - protein, 13 aa, Homo Sapiens
TKVKPETPPRQSH

SEQ ID NO: 23407 - protein, 13 aa, Homo Sapiens
KVKPETPPRQSHS

SEQ ID NO: 23408 - protein, 13 aa, Homo Sapiens
VKPETPPRQSHSG

SEQ ID NO: 23409 - protein, 13 aa, Homo Sapiens
KPETPPRQSHSGS

SEQ ID NO: 23410 - protein, 13 aa, Homo Sapiens
PETPPRQSHSGSI

SEQ ID NO: 23411 - protein, 13 aa, Homo Sapiens
ETPPRQSHSGSIS

SEQ ID NO: 23412 - protein, 13 aa, Homo Sapiens
TPPRQSHSGSISP

SEQ ID NO: 23413 - protein, 13 aa, Homo Sapiens
PPRQSHSGSISPY

SEQ ID NO: 23414 - protein, 13 aa, Homo Sapiens
PRQSHSGSISPYP

SEQ ID NO: 23415 - protein, 13 aa, Homo Sapiens
RQSHSGSISPYPK

SEQ ID NO: 23416 - protein, 13 aa, Homo Sapiens
QSHSGSISPYPKV

SEQ ID NO: 23417 - protein, 13 aa, Homo Sapiens
SHSGSISPYPKVK

SEQ ID NO: 23418 - protein, 13 aa, Homo Sapiens
HSGSISPYPKVKA

SEQ ID NO: 23419 - protein, 13 aa, Homo Sapiens
SGSISPYPKVKAQ

SEQ ID NO: 23420 - protein, 13 aa, Homo Sapiens
GSISPYPKVKAQT

SEQ ID NO: 23421 - protein, 13 aa, Homo Sapiens
SISPYPKVKAQTP

SEQ ID NO: 23422 - protein, 13 aa, Homo Sapiens
ISPYPKVKAQTPP

SEQ ID NO: 23423 - protein, 13 aa, Homo Sapiens
SPYPKVKAQTPPG

SEQ ID NO: 23424 - protein, 13 aa, Homo Sapiens
PYPKVKAQTPPGP

SEQ ID NO: 23425 - protein, 13 aa, Homo Sapiens
YPKVKAQTPPGPS

SEQ ID NO: 23426 - protein, 13 aa, Homo Sapiens
PKVKAQTPPGPSL

SEQ ID NO: 23427 - protein, 13 aa, Homo Sapiens
KVKAQTPPGPSLS

SEQ ID NO: 23428 - protein, 13 aa, Homo Sapiens
VKAQTPPGPSLSG

SEQ ID NO: 23429 - protein, 13 aa, Homo Sapiens
KAQTPPGPSLSGS

SEQ ID NO: 23430 - protein, 13 aa, Homo Sapiens
AQTPPGPSLSGSK

SEQ ID NO: 23431 - protein, 13 aa, Homo Sapiens
QTPPGPSLSGSKS

SEQ ID NO: 23432 - protein, 13 aa, Homo Sapiens
TPPGPSLSGSKSP

SEQ ID NO: 23433 - protein, 13 aa, Homo Sapiens
PPGPSLSGSKSPC

SEQ ID NO: 23434 - protein, 13 aa, Homo Sapiens
PGPSLSGSKSPCP

SEQ ID NO: 23435 - protein, 13 aa, Homo Sapiens
GPSLSGSKSPCPQ

SEQ ID NO: 23436 - protein, 13 aa, Homo Sapiens
PSLSGSKSPCPQE

SEQ ID NO: 23437 - protein, 13 aa, Homo Sapiens
SLSGSKSPCPQEK

SEQ ID NO: 23438 - protein, 13 aa, Homo Sapiens
LSGSKSPCPQEKS

SEQ ID NO: 23439 - protein, 13 aa, Homo Sapiens
SGSKSPCPQEKSK

SEQ ID NO: 23440 - protein, 13 aa, Homo Sapiens
GSKSPCPQEKSKD

SEQ ID NO: 23441 - protein, 13 aa, Homo Sapiens
SKSPCPQEKSKDS

SEQ ID NO: 23442 - protein, 13 aa, Homo Sapiens
KSPCPQEKSKDSL

SEQ ID NO: 23443 - protein, 13 aa, Homo Sapiens
SPCPQEKSKDSLV

SEQ ID NO: 23444 - protein, 13 aa, Homo Sapiens
PCPQEKSKDSLVQ

SEQ ID NO: 23445 - protein, 13 aa, Homo Sapiens
CPQEKSKDSLVQS

SEQ ID NO: 23446 - protein, 13 aa, Homo Sapiens
PQEKSKDSLVQSC

SEQ ID NO: 23447 - protein, 13 aa, Homo Sapiens
QEKSKDSLVQSCP

SEQ ID NO: 23448 - protein, 13 aa, Homo Sapiens
EKSKDSLVQSCPG

SEQ ID NO: 23449 - protein, 13 aa, Homo Sapiens
KSKDSLVQSCPGS

SEQ ID NO: 23450 - protein, 13 aa, Homo Sapiens
SKDSLVQSCPGSL

SEQ ID NO: 23451 - protein, 13 aa, Homo Sapiens
KDSLVQSCPGSLS

SEQ ID NO: 23452 - protein, 13 aa, Homo Sapiens
DSLVQSCPGSLSL

SEQ ID NO: 23453 - protein, 13 aa, Homo Sapiens
SLVQSCPGSLSLC

SEQ ID NO: 23454 - protein, 13 aa, Homo Sapiens
LVQSCPGSLSLCA

SEQ ID NO: 23455 - protein, 13 aa, Homo Sapiens
VQSCPGSLSLCAG

SEQ ID NO: 23456 - protein, 13 aa, Homo Sapiens
QSCPGSLSLCAGV

SEQ ID NO: 23457 - protein, 13 aa, Homo Sapiens
SCPGSLSLCAGVK

SEQ ID NO: 23458 - protein, 13 aa, Homo Sapiens
CPGSLSLCAGVKS

SEQ ID NO: 23459 - protein, 13 aa, Homo Sapiens
PGSLSLCAGVKSS

SEQ ID NO: 23460 - protein, 13 aa, Homo Sapiens
GSLSLCAGVKSST

SEQ ID NO: 23461 - protein, 13 aa, Homo Sapiens
SLSLCAGVKSSTP

SEQ ID NO: 23462 - protein, 13 aa, Homo Sapiens
LSLCAGVKSSTPP

SEQ ID NO: 23463 - protein, 13 aa, Homo Sapiens
SLCAGVKSSTPPG

SEQ ID NO: 23464 - protein, 13 aa, Homo Sapiens
LCAGVKSSTPPGE

SEQ ID NO: 23465 - protein, 13 aa, Homo Sapiens
CAGVKSSTPPGES

SEQ ID NO: 23466 - protein, 13 aa, Homo Sapiens
AGVKSSTPPGESY

SEQ ID NO: 23467 - protein, 13 aa, Homo Sapiens
GVKSSTPPGESYF

SEQ ID NO: 23468 - protein, 13 aa, Homo Sapiens
VKSSTPPGESYFG

SEQ ID NO: 23469 - protein, 13 aa, Homo Sapiens
KSSTPPGESYFGV

SEQ ID NO: 23470 - protein, 13 aa, Homo Sapiens
SSTPPGESYFGVS

SEQ ID NO: 23471 - protein, 13 aa, Homo Sapiens
STPPGESYFGVSS

SEQ ID NO: 23472 - protein, 13 aa, Homo Sapiens
TPPGESYFGVSSL

SEQ ID NO: 23473 - protein, 13 aa, Homo Sapiens
PPGESYFGVSSLQ

SEQ ID NO: 23474 - protein, 13 aa, Homo Sapiens
PGESYFGVSSLQL

SEQ ID NO: 23475 - protein, 13 aa, Homo Sapiens
GESYFGVSSLQLK

SEQ ID NO: 23476 - protein, 13 aa, Homo Sapiens
ESYFGVSSLQLKG

SEQ ID NO: 23477 - protein, 13 aa, Homo Sapiens
SYFGVSSLQLKGQ

SEQ ID NO: 23478 - protein, 13 aa, Homo Sapiens
YFGVSSLQLKGQS

SEQ ID NO: 23479 - protein, 13 aa, Homo Sapiens
FGVSSLQLKGQSQ

SEQ ID NO: 23480 - protein, 13 aa, Homo Sapiens
GVSSLQLKGQSQT

SEQ ID NO: 23481 - protein, 13 aa, Homo Sapiens
VSSLQLKGQSQTS

SEQ ID NO: 23482 - protein, 13 aa, Homo Sapiens
SSLQLKGQSQTSP

SEQ ID NO: 23483 - protein, 13 aa, Homo Sapiens
SLQLKGQSQTSPD

SEQ ID NO: 23484 - protein, 13 aa, Homo Sapiens
LQLKGQSQTSPDH

SEQ ID NO: 23485 - protein, 13 aa, Homo Sapiens
QLKGQSQTSPDHR

SEQ ID NO: 23486 - protein, 13 aa, Homo Sapiens
LKGQSQTSPDHRS

SEQ ID NO: 23487 - protein, 13 aa, Homo Sapiens
KGQSQTSPDHRSD

SEQ ID NO: 23488 - protein, 13 aa, Homo Sapiens
GQSQTSPDHRSDT

SEQ ID NO: 23489 - protein, 13 aa, Homo Sapiens
QSQTSPDHRSDTS

SEQ ID NO: 23490 - protein, 13 aa, Homo Sapiens
SQTSPDHRSDTSS

SEQ ID NO: 23491 - protein, 13 aa, Homo Sapiens
QTSPDHRSDTSSP

SEQ ID NO: 23492 - protein, 13 aa, Homo Sapiens
TSPDHRSDTSSPE

SEQ ID NO: 23493 - protein, 13 aa, Homo Sapiens
SPDHRSDTSSPEV

SEQ ID NO: 23494 - protein, 13 aa, Homo Sapiens
PDHRSDTSSPEVR

SEQ ID NO: 23495 - protein, 13 aa, Homo Sapiens
DHRSDTSSPEVRQ

SEQ ID NO: 23496 - protein, 13 aa, Homo Sapiens
HRSDTSSPEVRQS

SEQ ID NO: 23497 - protein, 13 aa, Homo Sapiens
RSDTSSPEVRQSH

SEQ ID NO: 23498 - protein, 13 aa, Homo Sapiens
SDTSSPEVRQSHS

SEQ ID NO: 23499 - protein, 13 aa, Homo Sapiens
DTSSPEVRQSHSE

SEQ ID NO: 23500 - protein, 13 aa, Homo Sapiens
TSSPEVRQSHSES

SEQ ID NO: 23501 - protein, 13 aa, Homo Sapiens
SSPEVRQSHSESP

SEQ ID NO: 23502 - protein, 13 aa, Homo Sapiens
SPEVRQSHSESPS

SEQ ID NO: 23503 - protein, 13 aa, Homo Sapiens
PEVRQSHSESPSL

SEQ ID NO: 23504 - protein, 13 aa, Homo Sapiens
EVRQSHSESPSLQ

SEQ ID NO: 23505 - protein, 13 aa, Homo Sapiens
VRQSHSESPSLQS

SEQ ID NO: 23506 - protein, 13 aa, Homo Sapiens
RQSHSESPSLQSK

SEQ ID NO: 23507 - protein, 13 aa, Homo Sapiens
QSHSESPSLQSKS

SEQ ID NO: 23508 - protein, 13 aa, Homo Sapiens
SHSESPSLQSKSQ

SEQ ID NO: 23509 - protein, 13 aa, Homo Sapiens
HSESPSLQSKSQT

SEQ ID NO: 23510 - protein, 13 aa, Homo Sapiens
SESPSLQSKSQTS

SEQ ID NO: 23511 - protein, 13 aa, Homo Sapiens
ESPSLQSKSQTSP

SEQ ID NO: 23512 - protein, 13 aa, Homo Sapiens
SPSLQSKSQTSPK

SEQ ID NO: 23513 - protein, 13 aa, Homo Sapiens
PSLQSKSQTSPKG

SEQ ID NO: 23514 - protein, 13 aa, Homo Sapiens
SLQSKSQTSPKGG

SEQ ID NO: 23515 - protein, 13 aa, Homo Sapiens
LQSKSQTSPKGGR

SEQ ID NO: 23516 - protein, 13 aa, Homo Sapiens
QSKSQTSPKGGRS

SEQ ID NO: 23517 - protein, 13 aa, Homo Sapiens
SKSQTSPKGGRSR

SEQ ID NO: 23518 - protein, 13 aa, Homo Sapiens
KSQTSPKGGRSRS

SEQ ID NO: 23519 - protein, 13 aa, Homo Sapiens
SQTSPKGGRSRSS

SEQ ID NO: 23520 - protein, 13 aa, Homo Sapiens
QTSPKGGRSRSSS

SEQ ID NO: 23521 - protein, 13 aa, Homo Sapiens
TSPKGGRSRSSSP

SEQ ID NO: 23522 - protein, 13 aa, Homo Sapiens
SPKGGRSRSSSPV

SEQ ID NO: 23523 - protein, 13 aa, Homo Sapiens
PKGGRSRSSSPVT

SEQ ID NO: 23524 - protein, 13 aa, Homo Sapiens
KGGRSRSSSPVTE

SEQ ID NO: 23525 - protein, 13 aa, Homo Sapiens
GGRSRSSSPVTEL

SEQ ID NO: 23526 - protein, 13 aa, Homo Sapiens
GRSRSSSPVTELA

SEQ ID NO: 23527 - protein, 13 aa, Homo Sapiens
RSRSSSPVTELAS

SEQ ID NO: 23528 - protein, 13 aa, Homo Sapiens
SRSSSPVTELASR

SEQ ID NO: 23529 - protein, 13 aa, Homo Sapiens
RSSSPVTELASRS

SEQ ID NO: 23530 - protein, 13 aa, Homo Sapiens
SSSPVTELASRSP

SEQ ID NO: 23531 - protein, 13 aa, Homo Sapiens
SSPVTELASRSPI

SEQ ID NO: 23532 - protein, 13 aa, Homo Sapiens
SPVTELASRSPIR

SEQ ID NO: 23533 - protein, 13 aa, Homo Sapiens
PVTELASRSPIRQ

SEQ ID NO: 23534 - protein, 13 aa, Homo Sapiens
VTELASRSPIRQD

SEQ ID NO: 23535 - protein, 13 aa, Homo Sapiens
TELASRSPIRQDR

SEQ ID NO: 23536 - protein, 13 aa, Homo Sapiens
ELASRSPIRQDRG

SEQ ID NO: 23537 - protein, 13 aa, Homo Sapiens
LASRSPIRQDRGE

SEQ ID NO: 23538 - protein, 13 aa, Homo Sapiens
ASRSPIRQDRGEF

SEQ ID NO: 23539 - protein, 13 aa, Homo Sapiens
SRSPIRQDRGEFS

SEQ ID NO: 23540 - protein, 13 aa, Homo Sapiens
RSPIRQDRGEFSA

SEQ ID NO: 23541 - protein, 13 aa, Homo Sapiens
SPIRQDRGEFSAS

SEQ ID NO: 23542 - protein, 13 aa, Homo Sapiens
PIRQDRGEFSASP

SEQ ID NO: 23543 - protein, 13 aa, Homo Sapiens
IRQDRGEFSASPM

SEQ ID NO: 23544 - protein, 13 aa, Homo Sapiens
RQDRGEFSASPML

SEQ ID NO: 23545 - protein, 13 aa, Homo Sapiens
QDRGEFSASPMLK

SEQ ID NO: 23546 - protein, 13 aa, Homo Sapiens
DRGEFSASPMLKS

SEQ ID NO: 23547 - protein, 13 aa, Homo Sapiens
RGEFSASPMLKSG

SEQ ID NO: 23548 - protein, 13 aa, Homo Sapiens
GEFSASPMLKSGM

SEQ ID NO: 23549 - protein, 13 aa, Homo Sapiens
EFSASPMLKSGMS

SEQ ID NO: 23550 - protein, 13 aa, Homo Sapiens
FSASPMLKSGMSP

SEQ ID NO: 23551 - protein, 13 aa, Homo Sapiens
SASPMLKSGMSPE

SEQ ID NO: 23552 - protein, 13 aa, Homo Sapiens
ASPMLKSGMSPEQ

SEQ ID NO: 23553 - protein, 13 aa, Homo Sapiens
SPMLKSGMSPEQS

SEQ ID NO: 23554 - protein, 13 aa, Homo Sapiens
PMLKSGMSPEQSR

SEQ ID NO: 23555 - protein, 13 aa, Homo Sapiens
MLKSGMSPEQSRF

SEQ ID NO: 23556 - protein, 13 aa, Homo Sapiens
LKSGMSPEQSRFQ

SEQ ID NO: 23557 - protein, 13 aa, Homo Sapiens
KSGMSPEQSRFQS

SEQ ID NO: 23558 - protein, 13 aa, Homo Sapiens
SGMSPEQSRFQSD

SEQ ID NO: 23559 - protein, 13 aa, Homo Sapiens
GMSPEQSRFQSDS

SEQ ID NO: 23560 - protein, 13 aa, Homo Sapiens
MSPEQSRFQSDSS

SEQ ID NO: 23561 - protein, 13 aa, Homo Sapiens
SPEQSRFQSDSSS

SEQ ID NO: 23562 - protein, 13 aa, Homo Sapiens
PEQSRFQSDSSSY

SEQ ID NO: 23563 - protein, 13 aa, Homo Sapiens
EQSRFQSDSSSYP

SEQ ID NO: 23564 - protein, 13 aa, Homo Sapiens
QSRFQSDSSSYPT

SEQ ID NO: 23565 - protein, 13 aa, Homo Sapiens
SRFQSDSSSYPTV

SEQ ID NO: 23566 - protein, 13 aa, Homo Sapiens
RFQSDSSSYPTVD

SEQ ID NO: 23567 - protein, 13 aa, Homo Sapiens
FQSDSSSYPTVDS

SEQ ID NO: 23568 - protein, 13 aa, Homo Sapiens
QSDSSSYPTVDSN

SEQ ID NO: 23569 - protein, 13 aa, Homo Sapiens
SDSSSYPTVDSNS

SEQ ID NO: 23570 - protein, 13 aa, Homo Sapiens
DSSSYPTVDSNSL

SEQ ID NO: 23571 - protein, 13 aa, Homo Sapiens
SSSYPTVDSNSLL

SEQ ID NO: 23572 - protein, 13 aa, Homo Sapiens
SSYPTVDSNSLLG

SEQ ID NO: 23573 - protein, 13 aa, Homo Sapiens
SYPTVDSNSLLGQ

SEQ ID NO: 23574 - protein, 13 aa, Homo Sapiens
YPTVDSNSLLGQS

SEQ ID NO: 23575 - protein, 13 aa, Homo Sapiens
PTVDSNSLLGQSR

SEQ ID NO: 23576 - protein, 13 aa, Homo Sapiens
TVDSNSLLGQSRL

SEQ ID NO: 23577 - protein, 13 aa, Homo Sapiens
VDSNSLLGQSRLE

SEQ ID NO: 23578 - protein, 13 aa, Homo Sapiens
DSNSLLGQSRLET

SEQ ID NO: 23579 - protein, 13 aa, Homo Sapiens
SNSLLGQSRLETA

SEQ ID NO: 23580 - protein, 13 aa, Homo Sapiens
NSLLGQSRLETAE

SEQ ID NO: 23581 - protein, 13 aa, Homo Sapiens
SLLGQSRLETAES

SEQ ID NO: 23582 - protein, 13 aa, Homo Sapiens
LLGQSRLETAESK

SEQ ID NO: 23583 - protein, 13 aa, Homo Sapiens
LGQSRLETAESKE

SEQ ID NO: 23584 - protein, 13 aa, Homo Sapiens
GQSRLETAESKEK

SEQ ID NO: 23585 - protein, 13 aa, Homo Sapiens
QSRLETAESKEKM

SEQ ID NO: 23586 - protein, 13 aa, Homo Sapiens
SRLETAESKEKMA

SEQ ID NO: 23587 - protein, 13 aa, Homo Sapiens
RLETAESKEKMAL

SEQ ID NO: 23588 - protein, 13 aa, Homo Sapiens
LETAESKEKMALP

SEQ ID NO: 23589 - protein, 13 aa, Homo Sapiens
ETAESKEKMALPP

SEQ ID NO: 23590 - protein, 13 aa, Homo Sapiens
TAESKEKMALPPQ

SEQ ID NO: 23591 - protein, 13 aa, Homo Sapiens
AESKEKMALPPQE

SEQ ID NO: 23592 - protein, 13 aa, Homo Sapiens
ESKEKMALPPQED

SEQ ID NO: 23593 - protein, 13 aa, Homo Sapiens
SKEKMALPPQEDA

SEQ ID NO: 23594 - protein, 13 aa, Homo Sapiens
KEKMALPPQEDAT

SEQ ID NO: 23595 - protein, 13 aa, Homo Sapiens
EKMALPPQEDATA

SEQ ID NO: 23596 - protein, 13 aa, Homo Sapiens
KMALPPQEDATAS

SEQ ID NO: 23597 - protein, 13 aa, Homo Sapiens
MALPPQEDATASP

SEQ ID NO: 23598 - protein, 13 aa, Homo Sapiens
ALPPQEDATASPP

SEQ ID NO: 23599 - protein, 13 aa, Homo Sapiens
LPPQEDATASPPR

SEQ ID NO: 23600 - protein, 13 aa, Homo Sapiens
PPQEDATASPPRQ

SEQ ID NO: 23601 - protein, 13 aa, Homo Sapiens
PQEDATASPPRQK

SEQ ID NO: 23602 - protein, 13 aa, Homo Sapiens
QEDATASPPRQKD

SEQ ID NO: 23603 - protein, 13 aa, Homo Sapiens
EDATASPPRQKDK

SEQ ID NO: 23604 - protein, 13 aa, Homo Sapiens
DATASPPRQKDKF

SEQ ID NO: 23605 - protein, 13 aa, Homo Sapiens
ATASPPRQKDKFS

SEQ ID NO: 23606 - protein, 13 aa, Homo Sapiens
TASPPRQKDKFSP

SEQ ID NO: 23607 - protein, 13 aa, Homo Sapiens
ASPPRQKDKFSPF

SEQ ID NO: 23608 - protein, 13 aa, Homo Sapiens
SPPRQKDKFSPFP

SEQ ID NO: 23609 - protein, 13 aa, Homo Sapiens
PPRQKDKFSPFPV

SEQ ID NO: 23610 - protein, 13 aa, Homo Sapiens
PRQKDKFSPFPVQ

SEQ ID NO: 23611 - protein, 13 aa, Homo Sapiens
RQKDKFSPFPVQD

SEQ ID NO: 23612 - protein, 13 aa, Homo Sapiens
QKDKFSPFPVQDR

SEQ ID NO: 23613 - protein, 13 aa, Homo Sapiens
KDKFSPFPVQDRP

SEQ ID NO: 23614 - protein, 13 aa, Homo Sapiens
DKFSPFPVQDRPE

SEQ ID NO: 23615 - protein, 13 aa, Homo Sapiens
KFSPFPVQDRPES

SEQ ID NO: 23616 - protein, 13 aa, Homo Sapiens
FSPFPVQDRPESS

SEQ ID NO: 23617 - protein, 13 aa, Homo Sapiens
SPFPVQDRPESSL

SEQ ID NO: 23618 - protein, 13 aa, Homo Sapiens
PFPVQDRPESSLV

SEQ ID NO: 23619 - protein, 13 aa, Homo Sapiens
FPVQDRPESSLVF

SEQ ID NO: 23620 - protein, 13 aa, Homo Sapiens
PVQDRPESSLVFK

SEQ ID NO: 23621 - protein, 13 aa, Homo Sapiens
VQDRPESSLVFKD

SEQ ID NO: 23622 - protein, 13 aa, Homo Sapiens
QDRPESSLVFKDT

SEQ ID NO: 23623 - protein, 13 aa, Homo Sapiens
DRPESSLVFKDTL

SEQ ID NO: 23624 - protein, 13 aa, Homo Sapiens
RPESSLVFKDTLR

SEQ ID NO: 23625 - protein, 13 aa, Homo Sapiens
PESSLVFKDTLRT

SEQ ID NO: 23626 - protein, 13 aa, Homo Sapiens
ESSLVFKDTLRTP

SEQ ID NO: 23627 - protein, 13 aa, Homo Sapiens
SSLVFKDTLRTPP

SEQ ID NO: 23628 - protein, 13 aa, Homo Sapiens
SLVFKDTLRTPPR

SEQ ID NO: 23629 - protein, 13 aa, Homo Sapiens
LVFKDTLRTPPRE

SEQ ID NO: 23630 - protein, 13 aa, Homo Sapiens
VFKDTLRTPPRER

SEQ ID NO: 23631 - protein, 13 aa, Homo Sapiens
FKDTLRTPPRERS

SEQ ID NO: 23632 - protein, 13 aa, Homo Sapiens
KDTLRTPPRERSG

SEQ ID NO: 23633 - protein, 13 aa, Homo Sapiens
DTLRTPPRERSGA

SEQ ID NO: 23634 - protein, 13 aa, Homo Sapiens
TLRTPPRERSGAG

SEQ ID NO: 23635 - protein, 13 aa, Homo Sapiens
LRTPPRERSGAGS

SEQ ID NO: 23636 - protein, 13 aa, Homo Sapiens
RTPPRERSGAGSS

SEQ ID NO: 23637 - protein, 13 aa, Homo Sapiens
TPPRERSGAGSSP

SEQ ID NO: 23638 - protein, 13 aa, Homo Sapiens
PPRERSGAGSSPE

SEQ ID NO: 23639 - protein, 13 aa, Homo Sapiens
PRERSGAGSSPET

SEQ ID NO: 23640 - protein, 13 aa, Homo Sapiens
RERSGAGSSPETK

SEQ ID NO: 23641 - protein, 13 aa, Homo Sapiens
ERSGAGSSPETKE

SEQ ID NO: 23642 - protein, 13 aa, Homo Sapiens
RSGAGSSPETKEQ

SEQ ID NO: 23643 - protein, 13 aa, Homo Sapiens
SGAGSSPETKEQN

SEQ ID NO: 23644 - protein, 13 aa, Homo Sapiens
GAGSSPETKEQNS

SEQ ID NO: 23645 - protein, 13 aa, Homo Sapiens
AGSSPETKEQNSA

SEQ ID NO: 23646 - protein, 13 aa, Homo Sapiens
GSSPETKEQNSAL

SEQ ID NO: 23647 - protein, 13 aa, Homo Sapiens
SSPETKEQNSALP

SEQ ID NO: 23648 - protein, 13 aa, Homo Sapiens
SPETKEQNSALPT

SEQ ID NO: 23649 - protein, 13 aa, Homo Sapiens
PETKEQNSALPTS

SEQ ID NO: 23650 - protein, 13 aa, Homo Sapiens
ETKEQNSALPTSS

SEQ ID NO: 23651 - protein, 13 aa, Homo Sapiens
TKEQNSALPTSSQ

SEQ ID NO: 23652 - protein, 13 aa, Homo Sapiens
KEQNSALPTSSQD

SEQ ID NO: 23653 - protein, 13 aa, Homo Sapiens
EQNSALPTSSQDE

SEQ ID NO: 23654 - protein, 13 aa, Homo Sapiens
QNSALPTSSQDEE

SEQ ID NO: 23655 - protein, 13 aa, Homo Sapiens
NSALPTSSQDEEL

SEQ ID NO: 23656 - protein, 13 aa, Homo Sapiens
SALPTSSQDEELM

SEQ ID NO: 23657 - protein, 13 aa, Homo Sapiens
ALPTSSQDEELME

SEQ ID NO: 23658 - protein, 13 aa, Homo Sapiens
LPTSSQDEELMEV

SEQ ID NO: 23659 - protein, 13 aa, Homo Sapiens
PTSSQDEELMEVV

SEQ ID NO: 23660 - protein, 13 aa, Homo Sapiens
TSSQDEELMEVVE

SEQ ID NO: 23661 - protein, 13 aa, Homo Sapiens
SSQDEELMEVVEK

SEQ ID NO: 23662 - protein, 13 aa, Homo Sapiens
SQDEELMEVVEKS

SEQ ID NO: 23663 - protein, 13 aa, Homo Sapiens
QDEELMEVVEKSE

SEQ ID NO: 23664 - protein, 13 aa, Homo Sapiens
DEELMEVVEKSEE

SEQ ID NO: 23665 - protein, 13 aa, Homo Sapiens
EELMEVVEKSEEP

SEQ ID NO: 23666 - protein, 13 aa, Homo Sapiens
ELMEVVEKSEEPA

SEQ ID NO: 23667 - protein, 13 aa, Homo Sapiens
LMEVVEKSEEPAG

SEQ ID NO: 23668 - protein, 13 aa, Homo Sapiens
MEVVEKSEEPAGQ

SEQ ID NO: 23669 - protein, 13 aa, Homo Sapiens
EVVEKSEEPAGQI

SEQ ID NO: 23670 - protein, 13 aa, Homo Sapiens
VVEKSEEPAGQIL

SEQ ID NO: 23671 - protein, 13 aa, Homo Sapiens
VEKSEEPAGQILS

SEQ ID NO: 23672 - protein, 13 aa, Homo Sapiens
EKSEEPAGQILSH

SEQ ID NO: 23673 - protein, 13 aa, Homo Sapiens
KSEEPAGQILSHL

SEQ ID NO: 23674 - protein, 13 aa, Homo Sapiens
SEEPAGQILSHLS

SEQ ID NO: 23675 - protein, 13 aa, Homo Sapiens
EEPAGQILSHLSS

SEQ ID NO: 23676 - protein, 13 aa, Homo Sapiens
EPAGQILSHLSSE

SEQ ID NO: 23677 - protein, 13 aa, Homo Sapiens
PAGQILSHLSSEL

SEQ ID NO: 23678 - protein, 13 aa, Homo Sapiens
AGQILSHLSSELK

SEQ ID NO: 23679 - protein, 13 aa, Homo Sapiens
GQILSHLSSELKE

SEQ ID NO: 23680 - protein, 13 aa, Homo Sapiens
QILSHLSSELKEM

SEQ ID NO: 23681 - protein, 13 aa, Homo Sapiens
ILSHLSSELKEMS

SEQ ID NO: 23682 - protein, 13 aa, Homo Sapiens
LSHLSSELKEMST

SEQ ID NO: 23683 - protein, 13 aa, Homo Sapiens
SHLSSELKEMSTS

SEQ ID NO: 23684 - protein, 13 aa, Homo Sapiens
HLSSELKEMSTSN

SEQ ID NO: 23685 - protein, 13 aa, Homo Sapiens
LSSELKEMSTSNF

SEQ ID NO: 23686 - protein, 13 aa, Homo Sapiens
SSELKEMSTSNFE

SEQ ID NO: 23687 - protein, 13 aa, Homo Sapiens
SELKEMSTSNFES

SEQ ID NO: 23688 - protein, 13 aa, Homo Sapiens
ELKEMSTSNFESS

SEQ ID NO: 23689 - protein, 13 aa, Homo Sapiens
LKEMSTSNFESSP

SEQ ID NO: 23690 - protein, 13 aa, Homo Sapiens
KEMSTSNFESSPE

SEQ ID NO: 23691 - protein, 13 aa, Homo Sapiens
EMSTSNFESSPEV

SEQ ID NO: 23692 - protein, 13 aa, Homo Sapiens
MSTSNFESSPEVE

SEQ ID NO: 23693 - protein, 13 aa, Homo Sapiens
STSNFESSPEVEE

SEQ ID NO: 23694 - protein, 13 aa, Homo Sapiens
TSNFESSPEVEER

SEQ ID NO: 23695 - protein, 13 aa, Homo Sapiens
SNFESSPEVEERP

SEQ ID NO: 23696 - protein, 13 aa, Homo Sapiens
NFESSPEVEERPA

SEQ ID NO: 23697 - protein, 13 aa, Homo Sapiens
FESSPEVEERPAV

SEQ ID NO: 23698 - protein, 13 aa, Homo Sapiens
ESSPEVEERPAVS

SEQ ID NO: 23699 - protein, 13 aa, Homo Sapiens
SSPEVEERPAVSL

SEQ ID NO: 23700 - protein, 13 aa, Homo Sapiens
SPEVEERPAVSLT

SEQ ID NO: 23701 - protein, 13 aa, Homo Sapiens
PEVEERPAVSLTL

SEQ ID NO: 23702 - protein, 13 aa, Homo Sapiens
EVEERPAVSLTLD

SEQ ID NO: 23703 - protein, 13 aa, Homo Sapiens
VEERPAVSLTLDQ

SEQ ID NO: 23704 - protein, 13 aa, Homo Sapiens
EERPAVSLTLDQS

SEQ ID NO: 23705 - protein, 13 aa, Homo Sapiens
ERPAVSLTLDQSQ

SEQ ID NO: 23706 - protein, 13 aa, Homo Sapiens
RPAVSLTLDQSQS

SEQ ID NO: 23707 - protein, 13 aa, Homo Sapiens
PAVSLTLDQSQSQ

SEQ ID NO: 23708 - protein, 13 aa, Homo Sapiens
AVSLTLDQSQSQA

SEQ ID NO: 23709 - protein, 13 aa, Homo Sapiens
VSLTLDQSQSQAS

SEQ ID NO: 23710 - protein, 13 aa, Homo Sapiens
SLTLDQSQSQASL

SEQ ID NO: 23711 - protein, 13 aa, Homo Sapiens
LTLDQSQSQASLE

SEQ ID NO: 23712 - protein, 13 aa, Homo Sapiens
TLDQSQSQASLEA

SEQ ID NO: 23713 - protein, 13 aa, Homo Sapiens
LDQSQSQASLEAV

SEQ ID NO: 23714 - protein, 13 aa, Homo Sapiens
DQSQSQASLEAVE

SEQ ID NO: 23715 - protein, 13 aa, Homo Sapiens
QSQSQASLEAVEV

SEQ ID NO: 23716 - protein, 13 aa, Homo Sapiens
SQSQASLEAVEVP

SEQ ID NO: 23717 - protein, 13 aa, Homo Sapiens
QSQASLEAVEVPS

SEQ ID NO: 23718 - protein, 13 aa, Homo Sapiens
SQASLEAVEVPSM

SEQ ID NO: 23719 - protein, 13 aa, Homo Sapiens
QASLEAVEVPSMA

SEQ ID NO: 23720 - protein, 13 aa, Homo Sapiens
ASLEAVEVPSMAS

SEQ ID NO: 23721 - protein, 13 aa, Homo Sapiens
SLEAVEVPSMASS

SEQ ID NO: 23722 - protein, 13 aa, Homo Sapiens
LEAVEVPSMASSW

SEQ ID NO: 23723 - protein, 13 aa, Homo Sapiens
EAVEVPSMASSWG

SEQ ID NO: 23724 - protein, 13 aa, Homo Sapiens
AVEVPSMASSWGG

SEQ ID NO: 23725 - protein, 13 aa, Homo Sapiens
VEVPSMASSWGGP

SEQ ID NO: 23726 - protein, 13 aa, Homo Sapiens
EVPSMASSWGGPH

SEQ ID NO: 23727 - protein, 13 aa, Homo Sapiens
VPSMASSWGGPHF

SEQ ID NO: 23728 - protein, 13 aa, Homo Sapiens
PSMASSWGGPHFS

SEQ ID NO: 23729 - protein, 13 aa, Homo Sapiens
SMASSWGGPHFSP

SEQ ID NO: 23730 - protein, 13 aa, Homo Sapiens
MASSWGGPHFSPE

SEQ ID NO: 23731 - protein, 13 aa, Homo Sapiens
ASSWGGPHFSPEH

SEQ ID NO: 23732 - protein, 13 aa, Homo Sapiens
SSWGGPHFSPEHK

SEQ ID NO: 23733 - protein, 13 aa, Homo Sapiens
SWGGPHFSPEHKE

SEQ ID NO: 23734 - protein, 13 aa, Homo Sapiens
WGGPHFSPEHKEL

SEQ ID NO: 23735 - protein, 13 aa, Homo Sapiens
GGPHFSPEHKELS

SEQ ID NO: 23736 - protein, 13 aa, Homo Sapiens
GPHFSPEHKELSN

SEQ ID NO: 23737 - protein, 13 aa, Homo Sapiens
PHFSPEHKELSNS

SEQ ID NO: 23738 - protein, 13 aa, Homo Sapiens
HFSPEHKELSNSP

SEQ ID NO: 23739 - protein, 13 aa, Homo Sapiens
FSPEHKELSNSPL

SEQ ID NO: 23740 - protein, 13 aa, Homo Sapiens
SPEHKELSNSPLR

SEQ ID NO: 23741 - protein, 13 aa, Homo Sapiens
PEHKELSNSPLRE

SEQ ID NO: 23742 - protein, 13 aa, Homo Sapiens
EHKELSNSPLREN

SEQ ID NO: 23743 - protein, 13 aa, Homo Sapiens
HKELSNSPLRENS

SEQ ID NO: 23744 - protein, 13 aa, Homo Sapiens
KELSNSPLRENSF

SEQ ID NO: 23745 - protein, 13 aa, Homo Sapiens
ELSNSPLRENSFG

SEQ ID NO: 23746 - protein, 13 aa, Homo Sapiens
LSNSPLRENSFGS

SEQ ID NO: 23747 - protein, 13 aa, Homo Sapiens
SNSPLRENSFGSP

SEQ ID NO: 23748 - protein, 13 aa, Homo Sapiens
NSPLRENSFGSPL

SEQ ID NO: 23749 - protein, 13 aa, Homo Sapiens
SPLRENSFGSPLE

SEQ ID NO: 23750 - protein, 13 aa, Homo Sapiens
PLRENSFGSPLEF

SEQ ID NO: 23751 - protein, 13 aa, Homo Sapiens
LRENSFGSPLEFR

SEQ ID NO: 23752 - protein, 13 aa, Homo Sapiens
RENSFGSPLEFRN

SEQ ID NO: 23753 - protein, 13 aa, Homo Sapiens
ENSFGSPLEFRNS

SEQ ID NO: 23754 - protein, 13 aa, Homo Sapiens
NSFGSPLEFRNSG

SEQ ID NO: 23755 - protein, 13 aa, Homo Sapiens
SFGSPLEFRNSGP

SEQ ID NO: 23756 - protein, 13 aa, Homo Sapiens
FGSPLEFRNSGPL

SEQ ID NO: 23757 - protein, 13 aa, Homo Sapiens
GSPLEFRNSGPLG

SEQ ID NO: 23758 - protein, 13 aa, Homo Sapiens
SPLEFRNSGPLGT

SEQ ID NO: 23759 - protein, 13 aa, Homo Sapiens
PLEFRNSGPLGTE

SEQ ID NO: 23760 - protein, 13 aa, Homo Sapiens
LEFRNSGPLGTEM

SEQ ID NO: 23761 - protein, 13 aa, Homo Sapiens
EFRNSGPLGTEMN

SEQ ID NO: 23762 - protein, 13 aa, Homo Sapiens
FRNSGPLGTEMNT

SEQ ID NO: 23763 - protein, 13 aa, Homo Sapiens
RNSGPLGTEMNTG

SEQ ID NO: 23764 - protein, 13 aa, Homo Sapiens
NSGPLGTEMNTGF

SEQ ID NO: 23765 - protein, 13 aa, Homo Sapiens
SGPLGTEMNTGFS

SEQ ID NO: 23766 - protein, 13 aa, Homo Sapiens
GPLGTEMNTGFSS

SEQ ID NO: 23767 - protein, 13 aa, Homo Sapiens
PLGTEMNTGFSSE

SEQ ID NO: 23768 - protein, 13 aa, Homo Sapiens
LGTEMNTGFSSEV

SEQ ID NO: 23769 - protein, 13 aa, Homo Sapiens
GTEMNTGFSSEVK

SEQ ID NO: 23770 - protein, 13 aa, Homo Sapiens
TEMNTGFSSEVKE

SEQ ID NO: 23771 - protein, 13 aa, Homo Sapiens
EMNTGFSSEVKED

SEQ ID NO: 23772 - protein, 13 aa, Homo Sapiens
MNTGFSSEVKEDL

SEQ ID NO: 23773 - protein, 13 aa, Homo Sapiens
NTGFSSEVKEDLN

SEQ ID NO: 23774 - protein, 13 aa, Homo Sapiens
TGFSSEVKEDLNG

SEQ ID NO: 23775 - protein, 13 aa, Homo Sapiens
GFSSEVKEDLNGP

SEQ ID NO: 23776 - protein, 13 aa, Homo Sapiens
FSSEVKEDLNGPF

SEQ ID NO: 23777 - protein, 13 aa, Homo Sapiens
SSEVKEDLNGPFL

SEQ ID NO: 23778 - protein, 13 aa, Homo Sapiens
SEVKEDLNGPFLN

SEQ ID NO: 23779 - protein, 13 aa, Homo Sapiens
EVKEDLNGPFLNQ

SEQ ID NO: 23780 - protein, 13 aa, Homo Sapiens
VKEDLNGPFLNQL

SEQ ID NO: 23781 - protein, 13 aa, Homo Sapiens
KEDLNGPFLNQLE

SEQ ID NO: 23782 - protein, 13 aa, Homo Sapiens
EDLNGPFLNQLET

SEQ ID NO: 23783 - protein, 13 aa, Homo Sapiens
DLNGPFLNQLETD

SEQ ID NO: 23784 - protein, 13 aa, Homo Sapiens
LNGPFLNQLETDP

SEQ ID NO: 23785 - protein, 13 aa, Homo Sapiens
NGPFLNQLETDPS

SEQ ID NO: 23786 - protein, 13 aa, Homo Sapiens
GPFLNQLETDPSL

SEQ ID NO: 23787 - protein, 13 aa, Homo Sapiens
PFLNQLETDPSLD

SEQ ID NO: 23788 - protein, 13 aa, Homo Sapiens
FLNQLETDPSLDM

SEQ ID NO: 23789 - protein, 13 aa, Homo Sapiens
LNQLETDPSLDMK

SEQ ID NO: 23790 - protein, 13 aa, Homo Sapiens
NQLETDPSLDMKE

SEQ ID NO: 23791 - protein, 13 aa, Homo Sapiens
QLETDPSLDMKEQ

SEQ ID NO: 23792 - protein, 13 aa, Homo Sapiens
LETDPSLDMKEQS

SEQ ID NO: 23793 - protein, 13 aa, Homo Sapiens
ETDPSLDMKEQST

SEQ ID NO: 23794 - protein, 13 aa, Homo Sapiens
TDPSLDMKEQSTR

SEQ ID NO: 23795 - protein, 13 aa, Homo Sapiens
DPSLDMKEQSTRS

SEQ ID NO: 23796 - protein, 13 aa, Homo Sapiens
PSLDMKEQSTRSS

SEQ ID NO: 23797 - protein, 13 aa, Homo Sapiens
SLDMKEQSTRSSG

SEQ ID NO: 23798 - protein, 13 aa, Homo Sapiens
LDMKEQSTRSSGH

SEQ ID NO: 23799 - protein, 13 aa, Homo Sapiens
DMKEQSTRSSGHS

SEQ ID NO: 23800 - protein, 13 aa, Homo Sapiens
MKEQSTRSSGHSS

SEQ ID NO: 23801 - protein, 13 aa, Homo Sapiens
KEQSTRSSGHSSS

SEQ ID NO: 23802 - protein, 13 aa, Homo Sapiens
EQSTRSSGHSSSE

SEQ ID NO: 23803 - protein, 13 aa, Homo Sapiens
QSTRSSGHSSSEL

SEQ ID NO: 23804 - protein, 13 aa, Homo Sapiens
STRSSGHSSSELS

SEQ ID NO: 23805 - protein, 13 aa, Homo Sapiens
TRSSGHSSSELSP

SEQ ID NO: 23806 - protein, 13 aa, Homo Sapiens
RSSGHSSSELSPD

SEQ ID NO: 23807 - protein, 13 aa, Homo Sapiens
SSGHSSSELSPDA

SEQ ID NO: 23808 - protein, 13 aa, Homo Sapiens
SGHSSSELSPDAV

SEQ ID NO: 23809 - protein, 13 aa, Homo Sapiens
GHSSSELSPDAVE

SEQ ID NO: 23810 - protein, 13 aa, Homo Sapiens
HSSSELSPDAVEK

SEQ ID NO: 23811 - protein, 13 aa, Homo Sapiens
SSSELSPDAVEKA

SEQ ID NO: 23812 - protein, 13 aa, Homo Sapiens
SSELSPDAVEKAG

SEQ ID NO: 23813 - protein, 13 aa, Homo Sapiens
SELSPDAVEKAGM

SEQ ID NO: 23814 - protein, 13 aa, Homo Sapiens
ELSPDAVEKAGMS

SEQ ID NO: 23815 - protein, 13 aa, Homo Sapiens
LSPDAVEKAGMSS

SEQ ID NO: 23816 - protein, 13 aa, Homo Sapiens
SPDAVEKAGMSSN

SEQ ID NO: 23817 - protein, 13 aa, Homo Sapiens
PDAVEKAGMSSNQ

SEQ ID NO: 23818 - protein, 13 aa, Homo Sapiens
DAVEKAGMSSNQS

SEQ ID NO: 23819 - protein, 13 aa, Homo Sapiens
AVEKAGMSSNQSI

SEQ ID NO: 23820 - protein, 13 aa, Homo Sapiens
VEKAGMSSNQSIS

SEQ ID NO: 23821 - protein, 13 aa, Homo Sapiens
EKAGMSSNQSISS

SEQ ID NO: 23822 - protein, 13 aa, Homo Sapiens
KAGMSSNQSISSP

SEQ ID NO: 23823 - protein, 13 aa, Homo Sapiens
AGMSSNQSISSPV

SEQ ID NO: 23824 - protein, 13 aa, Homo Sapiens
GMSSNQSISSPVL

SEQ ID NO: 23825 - protein, 13 aa, Homo Sapiens
MSSNQSISSPVLD

SEQ ID NO: 23826 - protein, 13 aa, Homo Sapiens
SSNQSISSPVLDA

SEQ ID NO: 23827 - protein, 13 aa, Homo Sapiens
SNQSISSPVLDAV

SEQ ID NO: 23828 - protein, 13 aa, Homo Sapiens
NQSISSPVLDAVP

SEQ ID NO: 23829 - protein, 13 aa, Homo Sapiens
QSISSPVLDAVPR

SEQ ID NO: 23830 - protein, 13 aa, Homo Sapiens
SISSPVLDAVPRT

SEQ ID NO: 23831 - protein, 13 aa, Homo Sapiens
ISSPVLDAVPRTP

SEQ ID NO: 23832 - protein, 13 aa, Homo Sapiens
SSPVLDAVPRTPS

SEQ ID NO: 23833 - protein, 13 aa, Homo Sapiens
SPVLDAVPRTPSR

SEQ ID NO: 23834 - protein, 13 aa, Homo Sapiens
PVLDAVPRTPSRE

SEQ ID NO: 23835 - protein, 13 aa, Homo Sapiens
VLDAVPRTPSRER

SEQ ID NO: 23836 - protein, 13 aa, Homo Sapiens
LDAVPRTPSRERS

SEQ ID NO: 23837 - protein, 13 aa, Homo Sapiens
DAVPRTPSRERSS

SEQ ID NO: 23838 - protein, 13 aa, Homo Sapiens
AVPRTPSRERSSS

SEQ ID NO: 23839 - protein, 13 aa, Homo Sapiens
VPRTPSRERSSSA

SEQ ID NO: 23840 - protein, 13 aa, Homo Sapiens
PRTPSRERSSSAS

SEQ ID NO: 23841 - protein, 13 aa, Homo Sapiens
RTPSRERSSSASS

SEQ ID NO: 23842 - protein, 13 aa, Homo Sapiens
TPSRERSSSASSP

SEQ ID NO: 23843 - protein, 13 aa, Homo Sapiens
PSRERSSSASSPE

SEQ ID NO: 23844 - protein, 13 aa, Homo Sapiens
SRERSSSASSPEM

SEQ ID NO: 23845 - protein, 13 aa, Homo Sapiens
RERSSSASSPEMK

SEQ ID NO: 23846 - protein, 13 aa, Homo Sapiens
ERSSSASSPEMKD

SEQ ID NO: 23847 - protein, 13 aa, Homo Sapiens
RSSSASSPEMKDG

SEQ ID NO: 23848 - protein, 13 aa, Homo Sapiens
SSSASSPEMKDGL

SEQ ID NO: 23849 - protein, 13 aa, Homo Sapiens
SSASSPEMKDGLP

SEQ ID NO: 23850 - protein, 13 aa, Homo Sapiens
SASSPEMKDGLPR

SEQ ID NO: 23851 - protein, 13 aa, Homo Sapiens
ASSPEMKDGLPRT

SEQ ID NO: 23852 - protein, 13 aa, Homo Sapiens
SSPEMKDGLPRTP

SEQ ID NO: 23853 - protein, 13 aa, Homo Sapiens
SPEMKDGLPRTPS

SEQ ID NO: 23854 - protein, 13 aa, Homo Sapiens
PEMKDGLPRTPSR

SEQ ID NO: 23855 - protein, 13 aa, Homo Sapiens
EMKDGLPRTPSRR

SEQ ID NO: 23856 - protein, 13 aa, Homo Sapiens
MKDGLPRTPSRRS

SEQ ID NO: 23857 - protein, 13 aa, Homo Sapiens
KDGLPRTPSRRSR

SEQ ID NO: 23858 - protein, 13 aa, Homo Sapiens
DGLPRTPSRRSRS

SEQ ID NO: 23859 - protein, 13 aa, Homo Sapiens
GLPRTPSRRSRSG

SEQ ID NO: 23860 - protein, 13 aa, Homo Sapiens
LPRTPSRRSRSGS

SEQ ID NO: 23861 - protein, 13 aa, Homo Sapiens
PRTPSRRSRSGSS

SEQ ID NO: 23862 - protein, 13 aa, Homo Sapiens
RTPSRRSRSGSSP

SEQ ID NO: 23863 - protein, 13 aa, Homo Sapiens
TPSRRSRSGSSPG

SEQ ID NO: 23864 - protein, 13 aa, Homo Sapiens
PSRRSRSGSSPGL

SEQ ID NO: 23865 - protein, 13 aa, Homo Sapiens
SRRSRSGSSPGLR

SEQ ID NO: 23866 - protein, 13 aa, Homo Sapiens
RRSRSGSSPGLRD

SEQ ID NO: 23867 - protein, 13 aa, Homo Sapiens
RSRSGSSPGLRDG

SEQ ID NO: 23868 - protein, 13 aa, Homo Sapiens
SRSGSSPGLRDGS

SEQ ID NO: 23869 - protein, 13 aa, Homo Sapiens
RSGSSPGLRDGSG

SEQ ID NO: 23870 - protein, 13 aa, Homo Sapiens
SGSSPGLRDGSGT

SEQ ID NO: 23871 - protein, 13 aa, Homo Sapiens
GSSPGLRDGSGTP

SEQ ID NO: 23872 - protein, 13 aa, Homo Sapiens
SSPGLRDGSGTPS

SEQ ID NO: 23873 - protein, 13 aa, Homo Sapiens
SPGLRDGSGTPSR

SEQ ID NO: 23874 - protein, 13 aa, Homo Sapiens
PGLRDGSGTPSRH

SEQ ID NO: 23875 - protein, 13 aa, Homo Sapiens
GLRDGSGTPSRHS

SEQ ID NO: 23876 - protein, 13 aa, Homo Sapiens
LRDGSGTPSRHSL

SEQ ID NO: 23877 - protein, 13 aa, Homo Sapiens
RDGSGTPSRHSLS

SEQ ID NO: 23878 - protein, 13 aa, Homo Sapiens
DGSGTPSRHSLSG

SEQ ID NO: 23879 - protein, 13 aa, Homo Sapiens
GSGTPSRHSLSGS

SEQ ID NO: 23880 - protein, 13 aa, Homo Sapiens
SGTPSRHSLSGSS

SEQ ID NO: 23881 - protein, 13 aa, Homo Sapiens
GTPSRHSLSGSSP

SEQ ID NO: 23882 - protein, 13 aa, Homo Sapiens
TPSRHSLSGSSPG

SEQ ID NO: 23883 - protein, 13 aa, Homo Sapiens
PSRHSLSGSSPGM

SEQ ID NO: 23884 - protein, 13 aa, Homo Sapiens
SRHSLSGSSPGMK

SEQ ID NO: 23885 - protein, 13 aa, Homo Sapiens
RHSLSGSSPGMKD

SEQ ID NO: 23886 - protein, 13 aa, Homo Sapiens
HSLSGSSPGMKDI

SEQ ID NO: 23887 - protein, 13 aa, Homo Sapiens
SLSGSSPGMKDIP

SEQ ID NO: 23888 - protein, 13 aa, Homo Sapiens
LSGSSPGMKDIPR

SEQ ID NO: 23889 - protein, 13 aa, Homo Sapiens
SGSSPGMKDIPRT

SEQ ID NO: 23890 - protein, 13 aa, Homo Sapiens
GSSPGMKDIPRTP

SEQ ID NO: 23891 - protein, 13 aa, Homo Sapiens
SSPGMKDIPRTPF

SEQ ID NO: 23892 - protein, 13 aa, Homo Sapiens
SPGMKDIPRTPFR

SEQ ID NO: 23893 - protein, 13 aa, Homo Sapiens
PGMKDIPRTPFRG

SEQ ID NO: 23894 - protein, 13 aa, Homo Sapiens
GMKDIPRTPFRGR

SEQ ID NO: 23895 - protein, 13 aa, Homo Sapiens
MKDIPRTPFRGRS

SEQ ID NO: 23896 - protein, 13 aa, Homo Sapiens
KDIPRTPFRGRSE

SEQ ID NO: 23897 - protein, 13 aa, Homo Sapiens
DIPRTPFRGRSEC

SEQ ID NO: 23898 - protein, 13 aa, Homo Sapiens
IPRTPFRGRSECD

SEQ ID NO: 23899 - protein, 13 aa, Homo Sapiens
PRTPFRGRSECDS

SEQ ID NO: 23900 - protein, 13 aa, Homo Sapiens
RTPFRGRSECDSS

SEQ ID NO: 23901 - protein, 13 aa, Homo Sapiens
TPFRGRSECDSSP

SEQ ID NO: 23902 - protein, 13 aa, Homo Sapiens
PFRGRSECDSSPE

SEQ ID NO: 23903 - protein, 13 aa, Homo Sapiens
FRGRSECDSSPEP

SEQ ID NO: 23904 - protein, 13 aa, Homo Sapiens
RGRSECDSSPEPK

SEQ ID NO: 23905 - protein, 13 aa, Homo Sapiens
GRSECDSSPEPKA

SEQ ID NO: 23906 - protein, 13 aa, Homo Sapiens
RSECDSSPEPKAL

SEQ ID NO: 23907 - protein, 13 aa, Homo Sapiens
SECDSSPEPKALP

SEQ ID NO: 23908 - protein, 13 aa, Homo Sapiens
ECDSSPEPKALPQ

SEQ ID NO: 23909 - protein, 13 aa, Homo Sapiens
CDSSPEPKALPQT

SEQ ID NO: 23910 - protein, 13 aa, Homo Sapiens
DSSPEPKALPQTP

SEQ ID NO: 23911 - protein, 13 aa, Homo Sapiens
SSPEPKALPQTPR

SEQ ID NO: 23912 - protein, 13 aa, Homo Sapiens
SPEPKALPQTPRP

SEQ ID NO: 23913 - protein, 13 aa, Homo Sapiens
PEPKALPQTPRPR

SEQ ID NO: 23914 - protein, 13 aa, Homo Sapiens
EPKALPQTPRPRS

SEQ ID NO: 23915 - protein, 13 aa, Homo Sapiens
PKALPQTPRPRSR

SEQ ID NO: 23916 - protein, 13 aa, Homo Sapiens
KALPQTPRPRSRS

SEQ ID NO: 23917 - protein, 13 aa, Homo Sapiens
ALPQTPRPRSRSP

SEQ ID NO: 23918 - protein, 13 aa, Homo Sapiens
LPQTPRPRSRSPS

SEQ ID NO: 23919 - protein, 13 aa, Homo Sapiens
PQTPRPRSRSPSS

SEQ ID NO: 23920 - protein, 13 aa, Homo Sapiens
QTPRPRSRSPSSP

SEQ ID NO: 23921 - protein, 13 aa, Homo Sapiens
TPRPRSRSPSSPE

SEQ ID NO: 23922 - protein, 13 aa, Homo Sapiens
PRPRSRSPSSPEL

SEQ ID NO: 23923 - protein, 13 aa, Homo Sapiens
RPRSRSPSSPELN

SEQ ID NO: 23924 - protein, 13 aa, Homo Sapiens
PRSRSPSSPELNN

SEQ ID NO: 23925 - protein, 13 aa, Homo Sapiens
RSRSPSSPELNNK

SEQ ID NO: 23926 - protein, 13 aa, Homo Sapiens
SRSPSSPELNNKC

SEQ ID NO: 23927 - protein, 13 aa, Homo Sapiens
RSPSSPELNNKCL

SEQ ID NO: 23928 - protein, 13 aa, Homo Sapiens
SPSSPELNNKCLT

SEQ ID NO: 23929 - protein, 13 aa, Homo Sapiens
PSSPELNNKCLTP

SEQ ID NO: 23930 - protein, 13 aa, Homo Sapiens
SSPELNNKCLTPQ

SEQ ID NO: 23931 - protein, 13 aa, Homo Sapiens
SPELNNKCLTPQR

SEQ ID NO: 23932 - protein, 13 aa, Homo Sapiens
PELNNKCLTPQRE

SEQ ID NO: 23933 - protein, 13 aa, Homo Sapiens
ELNNKCLTPQRER

SEQ ID NO: 23934 - protein, 13 aa, Homo Sapiens
LNNKCLTPQRERS

SEQ ID NO: 23935 - protein, 13 aa, Homo Sapiens
NNKCLTPQRERSG

SEQ ID NO: 23936 - protein, 13 aa, Homo Sapiens
NKCLTPQRERSGS

SEQ ID NO: 23937 - protein, 13 aa, Homo Sapiens
KCLTPQRERSGSE

SEQ ID NO: 23938 - protein, 13 aa, Homo Sapiens
CLTPQRERSGSES

SEQ ID NO: 23939 - protein, 13 aa, Homo Sapiens
LTPQRERSGSESS

SEQ ID NO: 23940 - protein, 13 aa, Homo Sapiens
TPQRERSGSESSV

SEQ ID NO: 23941 - protein, 13 aa, Homo Sapiens
PQRERSGSESSVD

SEQ ID NO: 23942 - protein, 13 aa, Homo Sapiens
QRERSGSESSVDQ

SEQ ID NO: 23943 - protein, 13 aa, Homo Sapiens
RERSGSESSVDQK

SEQ ID NO: 23944 - protein, 13 aa, Homo Sapiens
ERSGSESSVDQKT

SEQ ID NO: 23945 - protein, 13 aa, Homo Sapiens
RSGSESSVDQKTV

SEQ ID NO: 23946 - protein, 13 aa, Homo Sapiens
SGSESSVDQKTVA

SEQ ID NO: 23947 - protein, 13 aa, Homo Sapiens
GSESSVDQKTVAR

SEQ ID NO: 23948 - protein, 13 aa, Homo Sapiens
SESSVDQKTVART

SEQ ID NO: 23949 - protein, 13 aa, Homo Sapiens
ESSVDQKTVARTP

SEQ ID NO: 23950 - protein, 13 aa, Homo Sapiens
SSVDQKTVARTPL

SEQ ID NO: 23951 - protein, 13 aa, Homo Sapiens
SVDQKTVARTPLG

SEQ ID NO: 23952 - protein, 13 aa, Homo Sapiens
VDQKTVARTPLGQ

SEQ ID NO: 23953 - protein, 13 aa, Homo Sapiens
DQKTVARTPLGQR

SEQ ID NO: 23954 - protein, 13 aa, Homo Sapiens
QKTVARTPLGQRS

SEQ ID NO: 23955 - protein, 13 aa, Homo Sapiens
KTVARTPLGQRSR

SEQ ID NO: 23956 - protein, 13 aa, Homo Sapiens
TVARTPLGQRSRS

SEQ ID NO: 23957 - protein, 13 aa, Homo Sapiens
VARTPLGQRSRSG

SEQ ID NO: 23958 - protein, 13 aa, Homo Sapiens
ARTPLGQRSRSGS

SEQ ID NO: 23959 - protein, 13 aa, Homo Sapiens
RTPLGQRSRSGSS

SEQ ID NO: 23960 - protein, 13 aa, Homo Sapiens
TPLGQRSRSGSSQ

SEQ ID NO: 23961 - protein, 13 aa, Homo Sapiens
PLGQRSRSGSSQE

SEQ ID NO: 23962 - protein, 13 aa, Homo Sapiens
LGQRSRSGSSQEL

SEQ ID NO: 23963 - protein, 13 aa, Homo Sapiens
GQRSRSGSSQELD

SEQ ID NO: 23964 - protein, 13 aa, Homo Sapiens
QRSRSGSSQELDV

SEQ ID NO: 23965 - protein, 13 aa, Homo Sapiens
RSRSGSSQELDVK

SEQ ID NO: 23966 - protein, 13 aa, Homo Sapiens
SRSGSSQELDVKP

SEQ ID NO: 23967 - protein, 13 aa, Homo Sapiens
RSGSSQELDVKPS

SEQ ID NO: 23968 - protein, 13 aa, Homo Sapiens
SGSSQELDVKPSA

SEQ ID NO: 23969 - protein, 13 aa, Homo Sapiens
GSSQELDVKPSAS

SEQ ID NO: 23970 - protein, 13 aa, Homo Sapiens
SSQELDVKPSASP

SEQ ID NO: 23971 - protein, 13 aa, Homo Sapiens
SQELDVKPSASPQ

SEQ ID NO: 23972 - protein, 13 aa, Homo Sapiens
QELDVKPSASPQE

SEQ ID NO: 23973 - protein, 13 aa, Homo Sapiens
ELDVKPSASPQER

SEQ ID NO: 23974 - protein, 13 aa, Homo Sapiens
LDVKPSASPQERS

SEQ ID NO: 23975 - protein, 13 aa, Homo Sapiens
DVKPSASPQERSE

SEQ ID NO: 23976 - protein, 13 aa, Homo Sapiens
VKPSASPQERSES

SEQ ID NO: 23977 - protein, 13 aa, Homo Sapiens
KPSASPQERSESD

SEQ ID NO: 23978 - protein, 13 aa, Homo Sapiens
PSASPQERSESDS

SEQ ID NO: 23979 - protein, 13 aa, Homo Sapiens
SASPQERSESDSS

SEQ ID NO: 23980 - protein, 13 aa, Homo Sapiens
ASPQERSESDSSP

SEQ ID NO: 23981 - protein, 13 aa, Homo Sapiens
SPQERSESDSSPD

SEQ ID NO: 23982 - protein, 13 aa, Homo Sapiens
PQERSESDSSPDS

SEQ ID NO: 23983 - protein, 13 aa, Homo Sapiens
QERSESDSSPDSK

SEQ ID NO: 23984 - protein, 13 aa, Homo Sapiens
ERSESDSSPDSKA

SEQ ID NO: 23985 - protein, 13 aa, Homo Sapiens
RSESDSSPDSKAK

SEQ ID NO: 23986 - protein, 13 aa, Homo Sapiens
SESDSSPDSKAKT

SEQ ID NO: 23987 - protein, 13 aa, Homo Sapiens
ESDSSPDSKAKTR

SEQ ID NO: 23988 - protein, 13 aa, Homo Sapiens
SDSSPDSKAKTRT

SEQ ID NO: 23989 - protein, 13 aa, Homo Sapiens
DSSPDSKAKTRTP

SEQ ID NO: 23990 - protein, 13 aa, Homo Sapiens
SSPDSKAKTRTPL

SEQ ID NO: 23991 - protein, 13 aa, Homo Sapiens
SPDSKAKTRTPLR

SEQ ID NO: 23992 - protein, 13 aa, Homo Sapiens
PDSKAKTRTPLRQ

SEQ ID NO: 23993 - protein, 13 aa, Homo Sapiens
DSKAKTRTPLRQR

SEQ ID NO: 23994 - protein, 13 aa, Homo Sapiens
SKAKTRTPLRQRS

SEQ ID NO: 23995 - protein, 13 aa, Homo Sapiens
KAKTRTPLRQRSR

SEQ ID NO: 23996 - protein, 13 aa, Homo Sapiens
AKTRTPLRQRSRS

SEQ ID NO: 23997 - protein, 13 aa, Homo Sapiens
KTRTPLRQRSRSG

SEQ ID NO: 23998 - protein, 13 aa, Homo Sapiens
TRTPLRQRSRSGS

SEQ ID NO: 23999 - protein, 13 aa, Homo Sapiens
RTPLRQRSRSGSS

SEQ ID NO: 24000 - protein, 13 aa, Homo Sapiens
TPLRQRSRSGSSP

SEQ ID NO: 24001 - protein, 13 aa, Homo Sapiens
PLRQRSRSGSSPE

SEQ ID NO: 24002 - protein, 13 aa, Homo Sapiens
LRQRSRSGSSPEV

SEQ ID NO: 24003 - protein, 13 aa, Homo Sapiens
RQRSRSGSSPEVD

SEQ ID NO: 24004 - protein, 13 aa, Homo Sapiens
QRSRSGSSPEVDS

SEQ ID NO: 24005 - protein, 13 aa, Homo Sapiens
RSRSGSSPEVDSK

SEQ ID NO: 24006 - protein, 13 aa, Homo Sapiens
SRSGSSPEVDSKS

SEQ ID NO: 24007 - protein, 13 aa, Homo Sapiens
RSGSSPEVDSKSR

SEQ ID NO: 24008 - protein, 13 aa, Homo Sapiens
SGSSPEVDSKSRL

SEQ ID NO: 24009 - protein, 13 aa, Homo Sapiens
GSSPEVDSKSRLS

SEQ ID NO: 24010 - protein, 13 aa, Homo Sapiens
SSPEVDSKSRLSP

SEQ ID NO: 24011 - protein, 13 aa, Homo Sapiens
SPEVDSKSRLSPR

SEQ ID NO: 24012 - protein, 13 aa, Homo Sapiens
PEVDSKSRLSPRR

SEQ ID NO: 24013 - protein, 13 aa, Homo Sapiens
EVDSKSRLSPRRS

SEQ ID NO: 24014 - protein, 13 aa, Homo Sapiens
VDSKSRLSPRRSR

SEQ ID NO: 24015 - protein, 13 aa, Homo Sapiens
DSKSRLSPRRSRS

SEQ ID NO: 24016 - protein, 13 aa, Homo Sapiens
SKSRLSPRRSRSG

SEQ ID NO: 24017 - protein, 13 aa, Homo Sapiens
KSRLSPRRSRSGS

SEQ ID NO: 24018 - protein, 13 aa, Homo Sapiens
SRLSPRRSRSGSS

SEQ ID NO: 24019 - protein, 13 aa, Homo Sapiens
RLSPRRSRSGSSP

SEQ ID NO: 24020 - protein, 13 aa, Homo Sapiens
LSPRRSRSGSSPE

SEQ ID NO: 24021 - protein, 13 aa, Homo Sapiens
SPRRSRSGSSPEV

SEQ ID NO: 24022 - protein, 13 aa, Homo Sapiens
PRRSRSGSSPEVK

SEQ ID NO: 24023 - protein, 13 aa, Homo Sapiens
RRSRSGSSPEVKD

SEQ ID NO: 24024 - protein, 13 aa, Homo Sapiens
RSRSGSSPEVKDK

SEQ ID NO: 24025 - protein, 13 aa, Homo Sapiens
SRSGSSPEVKDKP

SEQ ID NO: 24026 - protein, 13 aa, Homo Sapiens
RSGSSPEVKDKPR

SEQ ID NO: 24027 - protein, 13 aa, Homo Sapiens
SGSSPEVKDKPRA

SEQ ID NO: 24028 - protein, 13 aa, Homo Sapiens
GSSPEVKDKPRAA

SEQ ID NO: 24029 - protein, 13 aa, Homo Sapiens
SSPEVKDKPRAAP

SEQ ID NO: 24030 - protein, 13 aa, Homo Sapiens
SPEVKDKPRAAPR

SEQ ID NO: 24031 - protein, 13 aa, Homo Sapiens
PEVKDKPRAAPRA

SEQ ID NO: 24032 - protein, 13 aa, Homo Sapiens
EVKDKPRAAPRAQ

SEQ ID NO: 24033 - protein, 13 aa, Homo Sapiens
VKDKPRAAPRAQS

SEQ ID NO: 24034 - protein, 13 aa, Homo Sapiens
KDKPRAAPRAQSG

SEQ ID NO: 24035 - protein, 13 aa, Homo Sapiens
DKPRAAPRAQSGS

SEQ ID NO: 24036 - protein, 13 aa, Homo Sapiens
KPRAAPRAQSGSD

SEQ ID NO: 24037 - protein, 13 aa, Homo Sapiens
PRAAPRAQSGSDS

SEQ ID NO: 24038 - protein, 13 aa, Homo Sapiens
RAAPRAQSGSDSS

SEQ ID NO: 24039 - protein, 13 aa, Homo Sapiens
AAPRAQSGSDSSP

SEQ ID NO: 24040 - protein, 13 aa, Homo Sapiens
APRAQSGSDSSPE

SEQ ID NO: 24041 - protein, 13 aa, Homo Sapiens
PRAQSGSDSSPEP

SEQ ID NO: 24042 - protein, 13 aa, Homo Sapiens
RAQSGSDSSPEPK

SEQ ID NO: 24043 - protein, 13 aa, Homo Sapiens
AQSGSDSSPEPKA

SEQ ID NO: 24044 - protein, 13 aa, Homo Sapiens
QSGSDSSPEPKAP

SEQ ID NO: 24045 - protein, 13 aa, Homo Sapiens
SGSDSSPEPKAPA

SEQ ID NO: 24046 - protein, 13 aa, Homo Sapiens
GSDSSPEPKAPAP

SEQ ID NO: 24047 - protein, 13 aa, Homo Sapiens
SDSSPEPKAPAPR

SEQ ID NO: 24048 - protein, 13 aa, Homo Sapiens
DSSPEPKAPAPRA

SEQ ID NO: 24049 - protein, 13 aa, Homo Sapiens
SSPEPKAPAPRAL

SEQ ID NO: 24050 - protein, 13 aa, Homo Sapiens
SPEPKAPAPRALP

SEQ ID NO: 24051 - protein, 13 aa, Homo Sapiens
PEPKAPAPRALPR

SEQ ID NO: 24052 - protein, 13 aa, Homo Sapiens
EPKAPAPRALPRR

SEQ ID NO: 24053 - protein, 13 aa, Homo Sapiens
PKAPAPRALPRRS

SEQ ID NO: 24054 - protein, 13 aa, Homo Sapiens
KAPAPRALPRRSR

SEQ ID NO: 24055 - protein, 13 aa, Homo Sapiens
APAPRALPRRSRS

SEQ ID NO: 24056 - protein, 13 aa, Homo Sapiens
PAPRALPRRSRSG

SEQ ID NO: 24057 - protein, 13 aa, Homo Sapiens
APRALPRRSRSGS

SEQ ID NO: 24058 - protein, 13 aa, Homo Sapiens
PRALPRRSRSGSS

SEQ ID NO: 24059 - protein, 13 aa, Homo Sapiens
RALPRRSRSGSSS

SEQ ID NO: 24060 - protein, 13 aa, Homo Sapiens
ALPRRSRSGSSSK

SEQ ID NO: 24061 - protein, 13 aa, Homo Sapiens
LPRRSRSGSSSKG

SEQ ID NO: 24062 - protein, 13 aa, Homo Sapiens
PRRSRSGSSSKGR

SEQ ID NO: 24063 - protein, 13 aa, Homo Sapiens
RRSRSGSSSKGRG

SEQ ID NO: 24064 - protein, 13 aa, Homo Sapiens
RSRSGSSSKGRGP

SEQ ID NO: 24065 - protein, 13 aa, Homo Sapiens
SRSGSSSKGRGPS

SEQ ID NO: 24066 - protein, 13 aa, Homo Sapiens
RSGSSSKGRGPSP

SEQ ID NO: 24067 - protein, 13 aa, Homo Sapiens
SGSSSKGRGPSPE

SEQ ID NO: 24068 - protein, 13 aa, Homo Sapiens
GSSSKGRGPSPEG

SEQ ID NO: 24069 - protein, 13 aa, Homo Sapiens
SSSKGRGPSPEGS

SEQ ID NO: 24070 - protein, 13 aa, Homo Sapiens
SSKGRGPSPEGSS

SEQ ID NO: 24071 - protein, 13 aa, Homo Sapiens
SKGRGPSPEGSSS

SEQ ID NO: 24072 - protein, 13 aa, Homo Sapiens
KGRGPSPEGSSST

SEQ ID NO: 24073 - protein, 13 aa, Homo Sapiens
GRGPSPEGSSSTE

SEQ ID NO: 24074 - protein, 13 aa, Homo Sapiens
RGPSPEGSSSTES

SEQ ID NO: 24075 - protein, 13 aa, Homo Sapiens
GPSPEGSSSTESS

SEQ ID NO: 24076 - protein, 13 aa, Homo Sapiens
PSPEGSSSTESSP

SEQ ID NO: 24077 - protein, 13 aa, Homo Sapiens
SPEGSSSTESSPE

SEQ ID NO: 24078 - protein, 13 aa, Homo Sapiens
PEGSSSTESSPEH

SEQ ID NO: 24079 - protein, 13 aa, Homo Sapiens
EGSSSTESSPEHP

SEQ ID NO: 24080 - protein, 13 aa, Homo Sapiens
GSSSTESSPEHPP

SEQ ID NO: 24081 - protein, 13 aa, Homo Sapiens
SSSTESSPEHPPK

SEQ ID NO: 24082 - protein, 13 aa, Homo Sapiens
SSTESSPEHPPKS

SEQ ID NO: 24083 - protein, 13 aa, Homo Sapiens
STESSPEHPPKSR

SEQ ID NO: 24084 - protein, 13 aa, Homo Sapiens
TESSPEHPPKSRT

SEQ ID NO: 24085 - protein, 13 aa, Homo Sapiens
ESSPEHPPKSRTA

SEQ ID NO: 24086 - protein, 13 aa, Homo Sapiens
SSPEHPPKSRTAR

SEQ ID NO: 24087 - protein, 13 aa, Homo Sapiens
SPEHPPKSRTARR

SEQ ID NO: 24088 - protein, 13 aa, Homo Sapiens
PEHPPKSRTARRG

SEQ ID NO: 24089 - protein, 13 aa, Homo Sapiens
EHPPKSRTARRGS

SEQ ID NO: 24090 - protein, 13 aa, Homo Sapiens
HPPKSRTARRGSR

SEQ ID NO: 24091 - protein, 13 aa, Homo Sapiens
PPKSRTARRGSRS

SEQ ID NO: 24092 - protein, 13 aa, Homo Sapiens
PKSRTARRGSRSS

SEQ ID NO: 24093 - protein, 13 aa, Homo Sapiens
KSRTARRGSRSSP

SEQ ID NO: 24094 - protein, 13 aa, Homo Sapiens
SRTARRGSRSSPE

SEQ ID NO: 24095 - protein, 13 aa, Homo Sapiens
RTARRGSRSSPEP

SEQ ID NO: 24096 - protein, 13 aa, Homo Sapiens
TARRGSRSSPEPK

SEQ ID NO: 24097 - protein, 13 aa, Homo Sapiens
ARRGSRSSPEPKT

SEQ ID NO: 24098 - protein, 13 aa, Homo Sapiens
RRGSRSSPEPKTK

SEQ ID NO: 24099 - protein, 13 aa, Homo Sapiens
RGSRSSPEPKTKS

SEQ ID NO: 24100 - protein, 13 aa, Homo Sapiens
GSRSSPEPKTKSR

SEQ ID NO: 24101 - protein, 13 aa, Homo Sapiens
SRSSPEPKTKSRT

SEQ ID NO: 24102 - protein, 13 aa, Homo Sapiens
RSSPEPKTKSRTP

SEQ ID NO: 24103 - protein, 13 aa, Homo Sapiens
SSPEPKTKSRTPP

SEQ ID NO: 24104 - protein, 13 aa, Homo Sapiens
SPEPKTKSRTPPR

SEQ ID NO: 24105 - protein, 13 aa, Homo Sapiens
PEPKTKSRTPPRR

SEQ ID NO: 24106 - protein, 13 aa, Homo Sapiens
EPKTKSRTPPRRR

SEQ ID NO: 24107 - protein, 13 aa, Homo Sapiens
PKTKSRTPPRRRS

SEQ ID NO: 24108 - protein, 13 aa, Homo Sapiens
KTKSRTPPRRRSS

SEQ ID NO: 24109 - protein, 13 aa, Homo Sapiens
TKSRTPPRRRSSR

SEQ ID NO: 24110 - protein, 13 aa, Homo Sapiens
KSRTPPRRRSSRS

SEQ ID NO: 24111 - protein, 13 aa, Homo Sapiens
SRTPPRRRSSRSS

SEQ ID NO: 24112 - protein, 13 aa, Homo Sapiens
RTPPRRRSSRSSP

SEQ ID NO: 24113 - protein, 13 aa, Homo Sapiens
TPPRRRSSRSSPE

SEQ ID NO: 24114 - protein, 13 aa, Homo Sapiens
PPRRRSSRSSPEL

SEQ ID NO: 24115 - protein, 13 aa, Homo Sapiens
PRRRSSRSSPELT

SEQ ID NO: 24116 - protein, 13 aa, Homo Sapiens
RRRSSRSSPELTR

SEQ ID NO: 24117 - protein, 13 aa, Homo Sapiens
RRSSRSSPELTRK

SEQ ID NO: 24118 - protein, 13 aa, Homo Sapiens
RSSRSSPELTRKA

SEQ ID NO: 24119 - protein, 13 aa, Homo Sapiens
SSRSSPELTRKAR

SEQ ID NO: 24120 - protein, 13 aa, Homo Sapiens
SRSSPELTRKARL

SEQ ID NO: 24121 - protein, 13 aa, Homo Sapiens
RSSPELTRKARLS

SEQ ID NO: 24122 - protein, 13 aa, Homo Sapiens
SSPELTRKARLSR

SEQ ID NO: 24123 - protein, 13 aa, Homo Sapiens
SPELTRKARLSRR

SEQ ID NO: 24124 - protein, 13 aa, Homo Sapiens
PELTRKARLSRRS

SEQ ID NO: 24125 - protein, 13 aa, Homo Sapiens
ELTRKARLSRRSR

SEQ ID NO: 24126 - protein, 13 aa, Homo Sapiens
LTRKARLSRRSRS

SEQ ID NO: 24127 - protein, 13 aa, Homo Sapiens
TRKARLSRRSRSA

SEQ ID NO: 24128 - protein, 13 aa, Homo Sapiens
RKARLSRRSRSAS

SEQ ID NO: 24129 - protein, 13 aa, Homo Sapiens
KARLSRRSRSASS

SEQ ID NO: 24130 - protein, 13 aa, Homo Sapiens
ARLSRRSRSASSS

SEQ ID NO: 24131 - protein, 13 aa, Homo Sapiens
RLSRRSRSASSSP

SEQ ID NO: 24132 - protein, 13 aa, Homo Sapiens
LSRRSRSASSSPE

SEQ ID NO: 24133 - protein, 13 aa, Homo Sapiens
SRRSRSASSSPET

SEQ ID NO: 24134 - protein, 13 aa, Homo Sapiens
RRSRSASSSPETR

SEQ ID NO: 24135 - protein, 13 aa, Homo Sapiens
RSRSASSSPETRS

SEQ ID NO: 24136 - protein, 13 aa, Homo Sapiens
SRSASSSPETRSR

SEQ ID NO: 24137 - protein, 13 aa, Homo Sapiens
RSASSSPETRSRT

SEQ ID NO: 24138 - protein, 13 aa, Homo Sapiens
SASSSPETRSRTP

SEQ ID NO: 24139 - protein, 13 aa, Homo Sapiens
ASSSPETRSRTPP

SEQ ID NO: 24140 - protein, 13 aa, Homo Sapiens
SSSPETRSRTPPR

SEQ ID NO: 24141 - protein, 13 aa, Homo Sapiens
SSPETRSRTPPRH

SEQ ID NO: 24142 - protein, 13 aa, Homo Sapiens
SPETRSRTPPRHR

SEQ ID NO: 24143 - protein, 13 aa, Homo Sapiens
PETRSRTPPRHRR

SEQ ID NO: 24144 - protein, 13 aa, Homo Sapiens
ETRSRTPPRHRRS

SEQ ID NO: 24145 - protein, 13 aa, Homo Sapiens
TRSRTPPRHRRSP

SEQ ID NO: 24146 - protein, 13 aa, Homo Sapiens
RSRTPPRHRRSPS

SEQ ID NO: 24147 - protein, 13 aa, Homo Sapiens
SRTPPRHRRSPSV

SEQ ID NO: 24148 - protein, 13 aa, Homo Sapiens
RTPPRHRRSPSVS

SEQ ID NO: 24149 - protein, 13 aa, Homo Sapiens
TPPRHRRSPSVSS

SEQ ID NO: 24150 - protein, 13 aa, Homo Sapiens
PPRHRRSPSVSSP

SEQ ID NO: 24151 - protein, 13 aa, Homo Sapiens
PRHRRSPSVSSPE

SEQ ID NO: 24152 - protein, 13 aa, Homo Sapiens
RHRRSPSVSSPEP

SEQ ID NO: 24153 - protein, 13 aa, Homo Sapiens
HRRSPSVSSPEPA

SEQ ID NO: 24154 - protein, 13 aa, Homo Sapiens
RRSPSVSSPEPAE

SEQ ID NO: 24155 - protein, 13 aa, Homo Sapiens
RSPSVSSPEPAEK

SEQ ID NO: 24156 - protein, 13 aa, Homo Sapiens
SPSVSSPEPAEKS

SEQ ID NO: 24157 - protein, 13 aa, Homo Sapiens
PSVSSPEPAEKSR

SEQ ID NO: 24158 - protein, 13 aa, Homo Sapiens
SVSSPEPAEKSRS

SEQ ID NO: 24159 - protein, 13 aa, Homo Sapiens
VSSPEPAEKSRSS

SEQ ID NO: 24160 - protein, 13 aa, Homo Sapiens
SSPEPAEKSRSSR

SEQ ID NO: 24161 - protein, 13 aa, Homo Sapiens
SPEPAEKSRSSRR

SEQ ID NO: 24162 - protein, 13 aa, Homo Sapiens
PEPAEKSRSSRRR

SEQ ID NO: 24163 - protein, 13 aa, Homo Sapiens
EPAEKSRSSRRRR

SEQ ID NO: 24164 - protein, 13 aa, Homo Sapiens
PAEKSRSSRRRRS

SEQ ID NO: 24165 - protein, 13 aa, Homo Sapiens
AEKSRSSRRRRSA

SEQ ID NO: 24166 - protein, 13 aa, Homo Sapiens
EKSRSSRRRRSAS

SEQ ID NO: 24167 - protein, 13 aa, Homo Sapiens
KSRSSRRRRSASS

SEQ ID NO: 24168 - protein, 13 aa, Homo Sapiens
SRSSRRRRSASSP

SEQ ID NO: 24169 - protein, 13 aa, Homo Sapiens
RSSRRRRSASSPR

SEQ ID NO: 24170 - protein, 13 aa, Homo Sapiens
SSRRRRSASSPRT

SEQ ID NO: 24171 - protein, 13 aa, Homo Sapiens
SRRRRSASSPRTK

SEQ ID NO: 24172 - protein, 13 aa, Homo Sapiens
RRRRSASSPRTKT

SEQ ID NO: 24173 - protein, 13 aa, Homo Sapiens
RRRSASSPRTKTT

SEQ ID NO: 24174 - protein, 13 aa, Homo Sapiens
RRSASSPRTKTTS

SEQ ID NO: 24175 - protein, 13 aa, Homo Sapiens
RSASSPRTKTTSR

SEQ ID NO: 24176 - protein, 13 aa, Homo Sapiens
SASSPRTKTTSRR

SEQ ID NO: 24177 - protein, 13 aa, Homo Sapiens
ASSPRTKTTSRRG

SEQ ID NO: 24178 - protein, 13 aa, Homo Sapiens
SSPRTKTTSRRGR

SEQ ID NO: 24179 - protein, 13 aa, Homo Sapiens
SPRTKTTSRRGRS

SEQ ID NO: 24180 - protein, 13 aa, Homo Sapiens
PRTKTTSRRGRSP

SEQ ID NO: 24181 - protein, 13 aa, Homo Sapiens
RTKTTSRRGRSPS

SEQ ID NO: 24182 - protein, 13 aa, Homo Sapiens
TKTTSRRGRSPSP

SEQ ID NO: 24183 - protein, 13 aa, Homo Sapiens
KTTSRRGRSPSPK

SEQ ID NO: 24184 - protein, 13 aa, Homo Sapiens
TTSRRGRSPSPKP

SEQ ID NO: 24185 - protein, 13 aa, Homo Sapiens
TSRRGRSPSPKPR

SEQ ID NO: 24186 - protein, 13 aa, Homo Sapiens
SRRGRSPSPKPRG

SEQ ID NO: 24187 - protein, 13 aa, Homo Sapiens
RRGRSPSPKPRGL

SEQ ID NO: 24188 - protein, 13 aa, Homo Sapiens
RGRSPSPKPRGLQ

SEQ ID NO: 24189 - protein, 13 aa, Homo Sapiens
GRSPSPKPRGLQR

SEQ ID NO: 24190 - protein, 13 aa, Homo Sapiens
RSPSPKPRGLQRS

SEQ ID NO: 24191 - protein, 13 aa, Homo Sapiens
SPSPKPRGLQRSR

SEQ ID NO: 24192 - protein, 13 aa, Homo Sapiens
PSPKPRGLQRSRS

SEQ ID NO: 24193 - protein, 13 aa, Homo Sapiens
SPKPRGLQRSRSR

SEQ ID NO: 24194 - protein, 13 aa, Homo Sapiens
PKPRGLQRSRSRS

SEQ ID NO: 24195 - protein, 13 aa, Homo Sapiens
KPRGLQRSRSRSR

SEQ ID NO: 24196 - protein, 13 aa, Homo Sapiens
PRGLQRSRSRSRR

SEQ ID NO: 24197 - protein, 13 aa, Homo Sapiens
RGLQRSRSRSRRE

SEQ ID NO: 24198 - protein, 13 aa, Homo Sapiens
GLQRSRSRSRREK

SEQ ID NO: 24199 - protein, 13 aa, Homo Sapiens
LQRSRSRSRREKT

SEQ ID NO: 24200 - protein, 13 aa, Homo Sapiens
QRSRSRSRREKTR

SEQ ID NO: 24201 - protein, 13 aa, Homo Sapiens
RSRSRSRREKTRT

SEQ ID NO: 24202 - protein, 13 aa, Homo Sapiens
SRSRSRREKTRTT

SEQ ID NO: 24203 - protein, 13 aa, Homo Sapiens
RSRSRREKTRTTR

SEQ ID NO: 24204 - protein, 13 aa, Homo Sapiens
SRSRREKTRTTRR

SEQ ID NO: 24205 - protein, 13 aa, Homo Sapiens
RSRREKTRTTRRR

SEQ ID NO: 24206 - protein, 13 aa, Homo Sapiens
SRREKTRTTRRRD

SEQ ID NO: 24207 - protein, 13 aa, Homo Sapiens
RREKTRTTRRRDR

SEQ ID NO: 24208 - protein, 13 aa, Homo Sapiens
REKTRTTRRRDRS

SEQ ID NO: 24209 - protein, 13 aa, Homo Sapiens
EKTRTTRRRDRSG

SEQ ID NO: 24210 - protein, 13 aa, Homo Sapiens
KTRTTRRRDRSGS

SEQ ID NO: 24211 - protein, 13 aa, Homo Sapiens
TRTTRRRDRSGSS

SEQ ID NO: 24212 - protein, 13 aa, Homo Sapiens
RTTRRRDRSGSSQ

SEQ ID NO: 24213 - protein, 13 aa, Homo Sapiens
TTRRRDRSGSSQS

SEQ ID NO: 24214 - protein, 13 aa, Homo Sapiens
TRRRDRSGSSQST

SEQ ID NO: 24215 - protein, 13 aa, Homo Sapiens
RRRDRSGSSQSTS

SEQ ID NO: 24216 - protein, 13 aa, Homo Sapiens
RRDRSGSSQSTSR

SEQ ID NO: 24217 - protein, 13 aa, Homo Sapiens
RDRSGSSQSTSRR

SEQ ID NO: 24218 - protein, 13 aa, Homo Sapiens
DRSGSSQSTSRRR

SEQ ID NO: 24219 - protein, 13 aa, Homo Sapiens
RSGSSQSTSRRRQ

SEQ ID NO: 24220 - protein, 13 aa, Homo Sapiens
SGSSQSTSRRRQR

SEQ ID NO: 24221 - protein, 13 aa, Homo Sapiens
GSSQSTSRRRQRS

SEQ ID NO: 24222 - protein, 13 aa, Homo Sapiens
SSQSTSRRRQRSR

SEQ ID NO: 24223 - protein, 13 aa, Homo Sapiens
SQSTSRRRQRSRS

SEQ ID NO: 24224 - protein, 13 aa, Homo Sapiens
QSTSRRRQRSRSR

SEQ ID NO: 24225 - protein, 13 aa, Homo Sapiens
STSRRRQRSRSRS

SEQ ID NO: 24226 - protein, 13 aa, Homo Sapiens
TSRRRQRSRSRSR

SEQ ID NO: 24227 - protein, 13 aa, Homo Sapiens
SRRRQRSRSRSRV

SEQ ID NO: 24228 - protein, 13 aa, Homo Sapiens
RRRQRSRSRSRVT

SEQ ID NO: 24229 - protein, 13 aa, Homo Sapiens
RRQRSRSRSRVTR

SEQ ID NO: 24230 - protein, 13 aa, Homo Sapiens
RQRSRSRSRVTRR

SEQ ID NO: 24231 - protein, 13 aa, Homo Sapiens
QRSRSRSRVTRRR

SEQ ID NO: 24232 - protein, 13 aa, Homo Sapiens
RSRSRSRVTRRRR

SEQ ID NO: 24233 - protein, 13 aa, Homo Sapiens
SRSRSRVTRRRRG

SEQ ID NO: 24234 - protein, 13 aa, Homo Sapiens
RSRSRVTRRRRGG

SEQ ID NO: 24235 - protein, 13 aa, Homo Sapiens
SRSRVTRRRRGGS

SEQ ID NO: 24236 - protein, 13 aa, Homo Sapiens
RSRVTRRRRGGSG

SEQ ID NO: 24237 - protein, 13 aa, Homo Sapiens
SRVTRRRRGGSGY

SEQ ID NO: 24238 - protein, 13 aa, Homo Sapiens
RVTRRRRGGSGYH

SEQ ID NO: 24239 - protein, 13 aa, Homo Sapiens
VTRRRRGGSGYHS

SEQ ID NO: 24240 - protein, 13 aa, Homo Sapiens
TRRRRGGSGYHSR

SEQ ID NO: 24241 - protein, 13 aa, Homo Sapiens
RRRRGGSGYHSRS

SEQ ID NO: 24242 - protein, 13 aa, Homo Sapiens
RRRGGSGYHSRSP

SEQ ID NO: 24243 - protein, 13 aa, Homo Sapiens
RRGGSGYHSRSPA

SEQ ID NO: 24244 - protein, 13 aa, Homo Sapiens
RGGSGYHSRSPAR

SEQ ID NO: 24245 - protein, 13 aa, Homo Sapiens
GGSGYHSRSPARQ

SEQ ID NO: 24246 - protein, 13 aa, Homo Sapiens
GSGYHSRSPARQE

SEQ ID NO: 24247 - protein, 13 aa, Homo Sapiens
SGYHSRSPARQES

SEQ ID NO: 24248 - protein, 13 aa, Homo Sapiens
GYHSRSPARQESS

SEQ ID NO: 24249 - protein, 13 aa, Homo Sapiens
YHSRSPARQESSR

SEQ ID NO: 24250 - protein, 13 aa, Homo Sapiens
HSRSPARQESSRT

SEQ ID NO: 24251 - protein, 13 aa, Homo Sapiens
SRSPARQESSRTS

SEQ ID NO: 24252 - protein, 13 aa, Homo Sapiens
RSPARQESSRTSS

SEQ ID NO: 24253 - protein, 13 aa, Homo Sapiens
SPARQESSRTSSR

SEQ ID NO: 24254 - protein, 13 aa, Homo Sapiens
PARQESSRTSSRR

SEQ ID NO: 24255 - protein, 13 aa, Homo Sapiens
ARQESSRTSSRRR

SEQ ID NO: 24256 - protein, 13 aa, Homo Sapiens
RQESSRTSSRRRR

SEQ ID NO: 24257 - protein, 13 aa, Homo Sapiens
QESSRTSSRRRRG

SEQ ID NO: 24258 - protein, 13 aa, Homo Sapiens
ESSRTSSRRRRGR

SEQ ID NO: 24259 - protein, 13 aa, Homo Sapiens
SSRTSSRRRRGRS

SEQ ID NO: 24260 - protein, 13 aa, Homo Sapiens
SRTSSRRRRGRSR

SEQ ID NO: 24261 - protein, 13 aa, Homo Sapiens
RTSSRRRRGRSRT

SEQ ID NO: 24262 - protein, 13 aa, Homo Sapiens
TSSRRRRGRSRTP

SEQ ID NO: 24263 - protein, 13 aa, Homo Sapiens
SSRRRRGRSRTPP

SEQ ID NO: 24264 - protein, 13 aa, Homo Sapiens
SRRRRGRSRTPPT

SEQ ID NO: 24265 - protein, 13 aa, Homo Sapiens
RRRRGRSRTPPTS

SEQ ID NO: 24266 - protein, 13 aa, Homo Sapiens
RRRGRSRTPPTSR

SEQ ID NO: 24267 - protein, 13 aa, Homo Sapiens
RRGRSRTPPTSRK

SEQ ID NO: 24268 - protein, 13 aa, Homo Sapiens
RGRSRTPPTSRKR

SEQ ID NO: 24269 - protein, 13 aa, Homo Sapiens
GRSRTPPTSRKRS

SEQ ID NO: 24270 - protein, 13 aa, Homo Sapiens
RSRTPPTSRKRSR

SEQ ID NO: 24271 - protein, 13 aa, Homo Sapiens
SRTPPTSRKRSRS

SEQ ID NO: 24272 - protein, 13 aa, Homo Sapiens
RTPPTSRKRSRSR

SEQ ID NO: 24273 - protein, 13 aa, Homo Sapiens
TPPTSRKRSRSRT

SEQ ID NO: 24274 - protein, 13 aa, Homo Sapiens
PPTSRKRSRSRTS

SEQ ID NO: 24275 - protein, 13 aa, Homo Sapiens
PTSRKRSRSRTSP

SEQ ID NO: 24276 - protein, 13 aa, Homo Sapiens
TSRKRSRSRTSPA

SEQ ID NO: 24277 - protein, 13 aa, Homo Sapiens
SRKRSRSRTSPAP

SEQ ID NO: 24278 - protein, 13 aa, Homo Sapiens
RKRSRSRTSPAPW

SEQ ID NO: 24279 - protein, 13 aa, Homo Sapiens
KRSRSRTSPAPWK

SEQ ID NO: 24280 - protein, 13 aa, Homo Sapiens
RSRSRTSPAPWKR

SEQ ID NO: 24281 - protein, 13 aa, Homo Sapiens
SRSRTSPAPWKRS

SEQ ID NO: 24282 - protein, 13 aa, Homo Sapiens
RSRTSPAPWKRSR

SEQ ID NO: 24283 - protein, 13 aa, Homo Sapiens
SRTSPAPWKRSRS

SEQ ID NO: 24284 - protein, 13 aa, Homo Sapiens
RTSPAPWKRSRSR

SEQ ID NO: 24285 - protein, 13 aa, Homo Sapiens
TSPAPWKRSRSRA

SEQ ID NO: 24286 - protein, 13 aa, Homo Sapiens
SPAPWKRSRSRAS

SEQ ID NO: 24287 - protein, 13 aa, Homo Sapiens
PAPWKRSRSRASP

SEQ ID NO: 24288 - protein, 13 aa, Homo Sapiens
APWKRSRSRASPA

SEQ ID NO: 24289 - protein, 13 aa, Homo Sapiens
PWKRSRSRASPAT

SEQ ID NO: 24290 - protein, 13 aa, Homo Sapiens
WKRSRSRASPATH

SEQ ID NO: 24291 - protein, 13 aa, Homo Sapiens
KRSRSRASPATHR

SEQ ID NO: 24292 - protein, 13 aa, Homo Sapiens
RSRSRASPATHRR

SEQ ID NO: 24293 - protein, 13 aa, Homo Sapiens
SRSRASPATHRRS

SEQ ID NO: 24294 - protein, 13 aa, Homo Sapiens
RSRASPATHRRSR

SEQ ID NO: 24295 - protein, 13 aa, Homo Sapiens
SRASPATHRRSRS

SEQ ID NO: 24296 - protein, 13 aa, Homo Sapiens
RASPATHRRSRSR

SEQ ID NO: 24297 - protein, 13 aa, Homo Sapiens
ASPATHRRSRSRT

SEQ ID NO: 24298 - protein, 13 aa, Homo Sapiens
SPATHRRSRSRTP

SEQ ID NO: 24299 - protein, 13 aa, Homo Sapiens
PATHRRSRSRTPL

SEQ ID NO: 24300 - protein, 13 aa, Homo Sapiens
ATHRRSRSRTPLI

SEQ ID NO: 24301 - protein, 13 aa, Homo Sapiens
THRRSRSRTPLIS

SEQ ID NO: 24302 - protein, 13 aa, Homo Sapiens
HRRSRSRTPLISR

SEQ ID NO: 24303 - protein, 13 aa, Homo Sapiens
RRSRSRTPLISRR

SEQ ID NO: 24304 - protein, 13 aa, Homo Sapiens
RSRSRTPLISRRR

SEQ ID NO: 24305 - protein, 13 aa, Homo Sapiens
SRSRTPLISRRRS

SEQ ID NO: 24306 - protein, 13 aa, Homo Sapiens
RSRTPLISRRRSR

SEQ ID NO: 24307 - protein, 13 aa, Homo Sapiens
SRTPLISRRRSRS

SEQ ID NO: 24308 - protein, 13 aa, Homo Sapiens
RTPLISRRRSRSR

SEQ ID NO: 24309 - protein, 13 aa, Homo Sapiens
TPLISRRRSRSRT

SEQ ID NO: 24310 - protein, 13 aa, Homo Sapiens
PLISRRRSRSRTS

SEQ ID NO: 24311 - protein, 13 aa, Homo Sapiens
LISRRRSRSRTSP

SEQ ID NO: 24312 - protein, 13 aa, Homo Sapiens
ISRRRSRSRTSPV

SEQ ID NO: 24313 - protein, 13 aa, Homo Sapiens
SRRRSRSRTSPVS

SEQ ID NO: 24314 - protein, 13 aa, Homo Sapiens
RRRSRSRTSPVSR

SEQ ID NO: 24315 - protein, 13 aa, Homo Sapiens
RRSRSRTSPVSRR

SEQ ID NO: 24316 - protein, 13 aa, Homo Sapiens
RSRSRTSPVSRRR

SEQ ID NO: 24317 - protein, 13 aa, Homo Sapiens
SRSRTSPVSRRRS

SEQ ID NO: 24318 - protein, 13 aa, Homo Sapiens
RSRTSPVSRRRSR

SEQ ID NO: 24319 - protein, 13 aa, Homo Sapiens
SRTSPVSRRRSRS

SEQ ID NO: 24320 - protein, 13 aa, Homo Sapiens
RTSPVSRRRSRSR

SEQ ID NO: 24321 - protein, 13 aa, Homo Sapiens
TSPVSRRRSRSRT

SEQ ID NO: 24322 - protein, 13 aa, Homo Sapiens
SPVSRRRSRSRTS

SEQ ID NO: 24323 - protein, 13 aa, Homo Sapiens
PVSRRRSRSRTSV

SEQ ID NO: 24324 - protein, 13 aa, Homo Sapiens
VSRRRSRSRTSVT

SEQ ID NO: 24325 - protein, 13 aa, Homo Sapiens
SRRRSRSRTSVTR

SEQ ID NO: 24326 - protein, 13 aa, Homo Sapiens
RRRSRSRTSVTRR

SEQ ID NO: 24327 - protein, 13 aa, Homo Sapiens
RRSRSRTSVTRRR

SEQ ID NO: 24328 - protein, 13 aa, Homo Sapiens
RSRSRTSVTRRRS

SEQ ID NO: 24329 - protein, 13 aa, Homo Sapiens
SRSRTSVTRRRSR

SEQ ID NO: 24330 - protein, 13 aa, Homo Sapiens
RSRTSVTRRRSRS

SEQ ID NO: 24331 - protein, 13 aa, Homo Sapiens
SRTSVTRRRSRSR

SEQ ID NO: 24332 - protein, 13 aa, Homo Sapiens
RTSVTRRRSRSRA

SEQ ID NO: 24333 - protein, 13 aa, Homo Sapiens
TSVTRRRSRSRAS

SEQ ID NO: 24334 - protein, 13 aa, Homo Sapiens
SVTRRRSRSRASP

SEQ ID NO: 24335 - protein, 13 aa, Homo Sapiens
VTRRRSRSRASPV

SEQ ID NO: 24336 - protein, 13 aa, Homo Sapiens
TRRRSRSRASPVS

SEQ ID NO: 24337 - protein, 13 aa, Homo Sapiens
RRRSRSRASPVSR

SEQ ID NO: 24338 - protein, 13 aa, Homo Sapiens
RRSRSRASPVSRR

SEQ ID NO: 24339 - protein, 13 aa, Homo Sapiens
RSRSRASPVSRRR

SEQ ID NO: 24340 - protein, 13 aa, Homo Sapiens
SRSRASPVSRRRS

SEQ ID NO: 24341 - protein, 13 aa, Homo Sapiens
RSRASPVSRRRSR

SEQ ID NO: 24342 - protein, 13 aa, Homo Sapiens
SRASPVSRRRSRS

SEQ ID NO: 24343 - protein, 13 aa, Homo Sapiens
RASPVSRRRSRSR

SEQ ID NO: 24344 - protein, 13 aa, Homo Sapiens
ASPVSRRRSRSRT

SEQ ID NO: 24345 - protein, 13 aa, Homo Sapiens
SPVSRRRSRSRTP

SEQ ID NO: 24346 - protein, 13 aa, Homo Sapiens
PVSRRRSRSRTPP

SEQ ID NO: 24347 - protein, 13 aa, Homo Sapiens
VSRRRSRSRTPPV

SEQ ID NO: 24348 - protein, 13 aa, Homo Sapiens
SRRRSRSRTPPVT

SEQ ID NO: 24349 - protein, 13 aa, Homo Sapiens
RRRSRSRTPPVTR

SEQ ID NO: 24350 - protein, 13 aa, Homo Sapiens
RRSRSRTPPVTRR

SEQ ID NO: 24351 - protein, 13 aa, Homo Sapiens
RSRSRTPPVTRRR

SEQ ID NO: 24352 - protein, 13 aa, Homo Sapiens
SRSRTPPVTRRRS

SEQ ID NO: 24353 - protein, 13 aa, Homo Sapiens
RSRTPPVTRRRSR

SEQ ID NO: 24354 - protein, 13 aa, Homo Sapiens
SRTPPVTRRRSRS

SEQ ID NO: 24355 - protein, 13 aa, Homo Sapiens
RTPPVTRRRSRSR

SEQ ID NO: 24356 - protein, 13 aa, Homo Sapiens
TPPVTRRRSRSRT

SEQ ID NO: 24357 - protein, 13 aa, Homo Sapiens
PPVTRRRSRSRTP

SEQ ID NO: 24358 - protein, 13 aa, Homo Sapiens
PVTRRRSRSRTPT

SEQ ID NO: 24359 - protein, 13 aa, Homo Sapiens
VTRRRSRSRTPTT

SEQ ID NO: 24360 - protein, 13 aa, Homo Sapiens
TRRRSRSRTPTTR

SEQ ID NO: 24361 - protein, 13 aa, Homo Sapiens
RRRSRSRTPTTRR

SEQ ID NO: 24362 - protein, 13 aa, Homo Sapiens
RRSRSRTPTTRRR

SEQ ID NO: 24363 - protein, 13 aa, Homo Sapiens
RSRSRTPTTRRRS

SEQ ID NO: 24364 - protein, 13 aa, Homo Sapiens
SRSRTPTTRRRSR

SEQ ID NO: 24365 - protein, 13 aa, Homo Sapiens
RSRTPTTRRRSRS

SEQ ID NO: 24366 - protein, 13 aa, Homo Sapiens
SRTPTTRRRSRSR

SEQ ID NO: 24367 - protein, 13 aa, Homo Sapiens
RTPTTRRRSRSRT

SEQ ID NO: 24368 - protein, 13 aa, Homo Sapiens
TPTTRRRSRSRTP

SEQ ID NO: 24369 - protein, 13 aa, Homo Sapiens
PTTRRRSRSRTPP

SEQ ID NO: 24370 - protein, 13 aa, Homo Sapiens
TTRRRSRSRTPPV

SEQ ID NO: 24371 - protein, 13 aa, Homo Sapiens
TRRRSRSRTPPVT

SEQ ID NO: 24372 - protein, 13 aa, Homo Sapiens
RRRSRSRTPPVTR

SEQ ID NO: 24373 - protein, 13 aa, Homo Sapiens
RRSRSRTPPVTRR

SEQ ID NO: 24374 - protein, 13 aa, Homo Sapiens
RSRSRTPPVTRRR

SEQ ID NO: 24375 - protein, 13 aa, Homo Sapiens
SRSRTPPVTRRRS

SEQ ID NO: 24376 - protein, 13 aa, Homo Sapiens
RSRTPPVTRRRSR

SEQ ID NO: 24377 - protein, 13 aa, Homo Sapiens
SRTPPVTRRRSRS

SEQ ID NO: 24378 - protein, 13 aa, Homo Sapiens
RTPPVTRRRSRSR

SEQ ID NO: 24379 - protein, 13 aa, Homo Sapiens
TPPVTRRRSRSRT

SEQ ID NO: 24380 - protein, 13 aa, Homo Sapiens
PPVTRRRSRSRTP

SEQ ID NO: 24381 - protein, 13 aa, Homo Sapiens
PVTRRRSRSRTPP

SEQ ID NO: 24382 - protein, 13 aa, Homo Sapiens
VTRRRSRSRTPPV

SEQ ID NO: 24383 - protein, 13 aa, Homo Sapiens
TRRRSRSRTPPVT

SEQ ID NO: 24384 - protein, 13 aa, Homo Sapiens
RRRSRSRTPPVTR

SEQ ID NO: 24385 - protein, 13 aa, Homo Sapiens
RRSRSRTPPVTRR

SEQ ID NO: 24386 - protein, 13 aa, Homo Sapiens
RSRSRTPPVTRRR

SEQ ID NO: 24387 - protein, 13 aa, Homo Sapiens
SRSRTPPVTRRRS

SEQ ID NO: 24388 - protein, 13 aa, Homo Sapiens
RSRTPPVTRRRSR

SEQ ID NO: 24389 - protein, 13 aa, Homo Sapiens
SRTPPVTRRRSRS

SEQ ID NO: 24390 - protein, 13 aa, Homo Sapiens
RTPPVTRRRSRSR

SEQ ID NO: 24391 - protein, 13 aa, Homo Sapiens
TPPVTRRRSRSRT

SEQ ID NO: 24392 - protein, 13 aa, Homo Sapiens
PPVTRRRSRSRTS

SEQ ID NO: 24393 - protein, 13 aa, Homo Sapiens
PVTRRRSRSRTSP

SEQ ID NO: 24394 - protein, 13 aa, Homo Sapiens
VTRRRSRSRTSPI

SEQ ID NO: 24395 - protein, 13 aa, Homo Sapiens
TRRRSRSRTSPIT

SEQ ID NO: 24396 - protein, 13 aa, Homo Sapiens
RRRSRSRTSPITR

SEQ ID NO: 24397 - protein, 13 aa, Homo Sapiens
RRSRSRTSPITRR

SEQ ID NO: 24398 - protein, 13 aa, Homo Sapiens
RSRSRTSPITRRR

SEQ ID NO: 24399 - protein, 13 aa, Homo Sapiens
SRSRTSPITRRRS

SEQ ID NO: 24400 - protein, 13 aa, Homo Sapiens
RSRTSPITRRRSR

SEQ ID NO: 24401 - protein, 13 aa, Homo Sapiens
SRTSPITRRRSRS

SEQ ID NO: 24402 - protein, 13 aa, Homo Sapiens
RTSPITRRRSRSR

SEQ ID NO: 24403 - protein, 13 aa, Homo Sapiens
TSPITRRRSRSRT

SEQ ID NO: 24404 - protein, 13 aa, Homo Sapiens
SPITRRRSRSRTS

SEQ ID NO: 24405 - protein, 13 aa, Homo Sapiens
PITRRRSRSRTSP

SEQ ID NO: 24406 - protein, 13 aa, Homo Sapiens
ITRRRSRSRTSPV

SEQ ID NO: 24407 - protein, 13 aa, Homo Sapiens
TRRRSRSRTSPVT

SEQ ID NO: 24408 - protein, 13 aa, Homo Sapiens
RRRSRSRTSPVTR

SEQ ID NO: 24409 - protein, 13 aa, Homo Sapiens
RRSRSRTSPVTRR

SEQ ID NO: 24410 - protein, 13 aa, Homo Sapiens
RSRSRTSPVTRRR

SEQ ID NO: 24411 - protein, 13 aa, Homo Sapiens
SRSRTSPVTRRRS

SEQ ID NO: 24412 - protein, 13 aa, Homo Sapiens
RSRTSPVTRRRSR

SEQ ID NO: 24413 - protein, 13 aa, Homo Sapiens
SRTSPVTRRRSRS

SEQ ID NO: 24414 - protein, 13 aa, Homo Sapiens
RTSPVTRRRSRSR

SEQ ID NO: 24415 - protein, 13 aa, Homo Sapiens
TSPVTRRRSRSRT

SEQ ID NO: 24416 - protein, 13 aa, Homo Sapiens
SPVTRRRSRSRTS

SEQ ID NO: 24417 - protein, 13 aa, Homo Sapiens
PVTRRRSRSRTSP

SEQ ID NO: 24418 - protein, 13 aa, Homo Sapiens
VTRRRSRSRTSPV

SEQ ID NO: 24419 - protein, 13 aa, Homo Sapiens
TRRRSRSRTSPVT

SEQ ID NO: 24420 - protein, 13 aa, Homo Sapiens
RRRSRSRTSPVTR

SEQ ID NO: 24421 - protein, 13 aa, Homo Sapiens
RRSRSRTSPVTRR

SEQ ID NO: 24422 - protein, 13 aa, Homo Sapiens
RSRSRTSPVTRRR

SEQ ID NO: 24423 - protein, 13 aa, Homo Sapiens
SRSRTSPVTRRRS

SEQ ID NO: 24424 - protein, 13 aa, Homo Sapiens
RSRTSPVTRRRSR

SEQ ID NO: 24425 - protein, 13 aa, Homo Sapiens
SRTSPVTRRRSRS

SEQ ID NO: 24426 - protein, 13 aa, Homo Sapiens
RTSPVTRRRSRSR

SEQ ID NO: 24427 - protein, 13 aa, Homo Sapiens
TSPVTRRRSRSRT

SEQ ID NO: 24428 - protein, 13 aa, Homo Sapiens
SPVTRRRSRSRTS

SEQ ID NO: 24429 - protein, 13 aa, Homo Sapiens
PVTRRRSRSRTSP

SEQ ID NO: 24430 - protein, 13 aa, Homo Sapiens
VTRRRSRSRTSPV

SEQ ID NO: 24431 - protein, 13 aa, Homo Sapiens
TRRRSRSRTSPVT

SEQ ID NO: 24432 - protein, 13 aa, Homo Sapiens
RRRSRSRTSPVTR

SEQ ID NO: 24433 - protein, 13 aa, Homo Sapiens
RRSRSRTSPVTRR

SEQ ID NO: 24434 - protein, 13 aa, Homo Sapiens
RSRSRTSPVTRRR

SEQ ID NO: 24435 - protein, 13 aa, Homo Sapiens
SRSRTSPVTRRRS

SEQ ID NO: 24436 - protein, 13 aa, Homo Sapiens
RSRTSPVTRRRSR

SEQ ID NO: 24437 - protein, 13 aa, Homo Sapiens
SRTSPVTRRRSRS

SEQ ID NO: 24438 - protein, 13 aa, Homo Sapiens
RTSPVTRRRSRSR

SEQ ID NO: 24439 - protein, 13 aa, Homo Sapiens
TSPVTRRRSRSRT

SEQ ID NO: 24440 - protein, 13 aa, Homo Sapiens
SPVTRRRSRSRTP

SEQ ID NO: 24441 - protein, 13 aa, Homo Sapiens
PVTRRRSRSRTPP

SEQ ID NO: 24442 - protein, 13 aa, Homo Sapiens
VTRRRSRSRTPPA

SEQ ID NO: 24443 - protein, 13 aa, Homo Sapiens
TRRRSRSRTPPAI

SEQ ID NO: 24444 - protein, 13 aa, Homo Sapiens
RRRSRSRTPPAIR

SEQ ID NO: 24445 - protein, 13 aa, Homo Sapiens
RRSRSRTPPAIRR

SEQ ID NO: 24446 - protein, 13 aa, Homo Sapiens
RSRSRTPPAIRRR

SEQ ID NO: 24447 - protein, 13 aa, Homo Sapiens
SRSRTPPAIRRRS

SEQ ID NO: 24448 - protein, 13 aa, Homo Sapiens
RSRTPPAIRRRSR

SEQ ID NO: 24449 - protein, 13 aa, Homo Sapiens
SRTPPAIRRRSRS

SEQ ID NO: 24450 - protein, 13 aa, Homo Sapiens
RTPPAIRRRSRSR

SEQ ID NO: 24451 - protein, 13 aa, Homo Sapiens
TPPAIRRRSRSRT

SEQ ID NO: 24452 - protein, 13 aa, Homo Sapiens
PPAIRRRSRSRTP

SEQ ID NO: 24453 - protein, 13 aa, Homo Sapiens
PAIRRRSRSRTPL

SEQ ID NO: 24454 - protein, 13 aa, Homo Sapiens
AIRRRSRSRTPLL

SEQ ID NO: 24455 - protein, 13 aa, Homo Sapiens
IRRRSRSRTPLLP

SEQ ID NO: 24456 - protein, 13 aa, Homo Sapiens
RRRSRSRTPLLPR

SEQ ID NO: 24457 - protein, 13 aa, Homo Sapiens
RRSRSRTPLLPRK

SEQ ID NO: 24458 - protein, 13 aa, Homo Sapiens
RSRSRTPLLPRKR

SEQ ID NO: 24459 - protein, 13 aa, Homo Sapiens
SRSRTPLLPRKRS

SEQ ID NO: 24460 - protein, 13 aa, Homo Sapiens
RSRTPLLPRKRSR

SEQ ID NO: 24461 - protein, 13 aa, Homo Sapiens
SRTPLLPRKRSRS

SEQ ID NO: 24462 - protein, 13 aa, Homo Sapiens
RTPLLPRKRSRSR

SEQ ID NO: 24463 - protein, 13 aa, Homo Sapiens
TPLLPRKRSRSRS

SEQ ID NO: 24464 - protein, 13 aa, Homo Sapiens
PLLPRKRSRSRSP

SEQ ID NO: 24465 - protein, 13 aa, Homo Sapiens
LLPRKRSRSRSPL

SEQ ID NO: 24466 - protein, 13 aa, Homo Sapiens
LPRKRSRSRSPLA

SEQ ID NO: 24467 - protein, 13 aa, Homo Sapiens
PRKRSRSRSPLAI

SEQ ID NO: 24468 - protein, 13 aa, Homo Sapiens
RKRSRSRSPLAIR

SEQ ID NO: 24469 - protein, 13 aa, Homo Sapiens
KRSRSRSPLAIRR

SEQ ID NO: 24470 - protein, 13 aa, Homo Sapiens
RSRSRSPLAIRRR

SEQ ID NO: 24471 - protein, 13 aa, Homo Sapiens
SRSRSPLAIRRRS

SEQ ID NO: 24472 - protein, 13 aa, Homo Sapiens
RSRSPLAIRRRSR

SEQ ID NO: 24473 - protein, 13 aa, Homo Sapiens
SRSPLAIRRRSRS

SEQ ID NO: 24474 - protein, 13 aa, Homo Sapiens
RSPLAIRRRSRSR

SEQ ID NO: 24475 - protein, 13 aa, Homo Sapiens
SPLAIRRRSRSRT

SEQ ID NO: 24476 - protein, 13 aa, Homo Sapiens
PLAIRRRSRSRTP

SEQ ID NO: 24477 - protein, 13 aa, Homo Sapiens
LAIRRRSRSRTPR

SEQ ID NO: 24478 - protein, 13 aa, Homo Sapiens
AIRRRSRSRTPRT

SEQ ID NO: 24479 - protein, 13 aa, Homo Sapiens
IRRRSRSRTPRTA

SEQ ID NO: 24480 - protein, 13 aa, Homo Sapiens
RRRSRSRTPRTAR

SEQ ID NO: 24481 - protein, 13 aa, Homo Sapiens
RRSRSRTPRTARG

SEQ ID NO: 24482 - protein, 13 aa, Homo Sapiens
RSRSRTPRTARGK

SEQ ID NO: 24483 - protein, 13 aa, Homo Sapiens
SRSRTPRTARGKR

SEQ ID NO: 24484 - protein, 13 aa, Homo Sapiens
RSRTPRTARGKRS

SEQ ID NO: 24485 - protein, 13 aa, Homo Sapiens
SRTPRTARGKRSL

SEQ ID NO: 24486 - protein, 13 aa, Homo Sapiens
RTPRTARGKRSLT

SEQ ID NO: 24487 - protein, 13 aa, Homo Sapiens
TPRTARGKRSLTR

SEQ ID NO: 24488 - protein, 13 aa, Homo Sapiens
PRTARGKRSLTRS

SEQ ID NO: 24489 - protein, 13 aa, Homo Sapiens
RTARGKRSLTRSP

SEQ ID NO: 24490 - protein, 13 aa, Homo Sapiens
TARGKRSLTRSPP

SEQ ID NO: 24491 - protein, 13 aa, Homo Sapiens
ARGKRSLTRSPPA

SEQ ID NO: 24492 - protein, 13 aa, Homo Sapiens
RGKRSLTRSPPAI

SEQ ID NO: 24493 - protein, 13 aa, Homo Sapiens
GKRSLTRSPPAIR

SEQ ID NO: 24494 - protein, 13 aa, Homo Sapiens
KRSLTRSPPAIRR

SEQ ID NO: 24495 - protein, 13 aa, Homo Sapiens
RSLTRSPPAIRRR

SEQ ID NO: 24496 - protein, 13 aa, Homo Sapiens
SLTRSPPAIRRRS

SEQ ID NO: 24497 - protein, 13 aa, Homo Sapiens
LTRSPPAIRRRSA

SEQ ID NO: 24498 - protein, 13 aa, Homo Sapiens
TRSPPAIRRRSAS

SEQ ID NO: 24499 - protein, 13 aa, Homo Sapiens
RSPPAIRRRSASG

SEQ ID NO: 24500 - protein, 13 aa, Homo Sapiens
SPPAIRRRSASGS

SEQ ID NO: 24501 - protein, 13 aa, Homo Sapiens
PPAIRRRSASGSS

SEQ ID NO: 24502 - protein, 13 aa, Homo Sapiens
PAIRRRSASGSSS

SEQ ID NO: 24503 - protein, 13 aa, Homo Sapiens
AIRRRSASGSSSD

SEQ ID NO: 24504 - protein, 13 aa, Homo Sapiens
IRRRSASGSSSDR

SEQ ID NO: 24505 - protein, 13 aa, Homo Sapiens
RRRSASGSSSDRS

SEQ ID NO: 24506 - protein, 13 aa, Homo Sapiens
RRSASGSSSDRSR

SEQ ID NO: 24507 - protein, 13 aa, Homo Sapiens
RSASGSSSDRSRS

SEQ ID NO: 24508 - protein, 13 aa, Homo Sapiens
SASGSSSDRSRSA

SEQ ID NO: 24509 - protein, 13 aa, Homo Sapiens
ASGSSSDRSRSAT

SEQ ID NO: 24510 - protein, 13 aa, Homo Sapiens
SGSSSDRSRSATP

SEQ ID NO: 24511 - protein, 13 aa, Homo Sapiens
GSSSDRSRSATPP

SEQ ID NO: 24512 - protein, 13 aa, Homo Sapiens
SSSDRSRSATPPA

SEQ ID NO: 24513 - protein, 13 aa, Homo Sapiens
SSDRSRSATPPAT

SEQ ID NO: 24514 - protein, 13 aa, Homo Sapiens
SDRSRSATPPATR

SEQ ID NO: 24515 - protein, 13 aa, Homo Sapiens
DRSRSATPPATRN

SEQ ID NO: 24516 - protein, 13 aa, Homo Sapiens
RSRSATPPATRNH

SEQ ID NO: 24517 - protein, 13 aa, Homo Sapiens
SRSATPPATRNHS

SEQ ID NO: 24518 - protein, 13 aa, Homo Sapiens
RSATPPATRNHSG

SEQ ID NO: 24519 - protein, 13 aa, Homo Sapiens
SATPPATRNHSGS

SEQ ID NO: 24520 - protein, 13 aa, Homo Sapiens
ATPPATRNHSGSR

SEQ ID NO: 24521 - protein, 13 aa, Homo Sapiens
TPPATRNHSGSRT

SEQ ID NO: 24522 - protein, 13 aa, Homo Sapiens
PPATRNHSGSRTP

SEQ ID NO: 24523 - protein, 13 aa, Homo Sapiens
PATRNHSGSRTPP

SEQ ID NO: 24524 - protein, 13 aa, Homo Sapiens
ATRNHSGSRTPPV

SEQ ID NO: 24525 - protein, 13 aa, Homo Sapiens
TRNHSGSRTPPVA

SEQ ID NO: 24526 - protein, 13 aa, Homo Sapiens
RNHSGSRTPPVAL

SEQ ID NO: 24527 - protein, 13 aa, Homo Sapiens
NHSGSRTPPVALN

SEQ ID NO: 24528 - protein, 13 aa, Homo Sapiens
HSGSRTPPVALNS

SEQ ID NO: 24529 - protein, 13 aa, Homo Sapiens
SGSRTPPVALNSS

SEQ ID NO: 24530 - protein, 13 aa, Homo Sapiens
GSRTPPVALNSSR

SEQ ID NO: 24531 - protein, 13 aa, Homo Sapiens
SRTPPVALNSSRM

SEQ ID NO: 24532 - protein, 13 aa, Homo Sapiens
RTPPVALNSSRMS

SEQ ID NO: 24533 - protein, 13 aa, Homo Sapiens
TPPVALNSSRMSC

SEQ ID NO: 24534 - protein, 13 aa, Homo Sapiens
PPVALNSSRMSCF

SEQ ID NO: 24535 - protein, 13 aa, Homo Sapiens
PVALNSSRMSCFS

SEQ ID NO: 24536 - protein, 13 aa, Homo Sapiens
VALNSSRMSCFSR

SEQ ID NO: 24537 - protein, 13 aa, Homo Sapiens
ALNSSRMSCFSRP

SEQ ID NO: 24538 - protein, 13 aa, Homo Sapiens
LNSSRMSCFSRPS

SEQ ID NO: 24539 - protein, 13 aa, Homo Sapiens
NSSRMSCFSRPSM

SEQ ID NO: 24540 - protein, 13 aa, Homo Sapiens
SSRMSCFSRPSMS

SEQ ID NO: 24541 - protein, 13 aa, Homo Sapiens
SRMSCFSRPSMSP

SEQ ID NO: 24542 - protein, 13 aa, Homo Sapiens
RMSCFSRPSMSPT

SEQ ID NO: 24543 - protein, 13 aa, Homo Sapiens
MSCFSRPSMSPTP

SEQ ID NO: 24544 - protein, 13 aa, Homo Sapiens
SCFSRPSMSPTPL

SEQ ID NO: 24545 - protein, 13 aa, Homo Sapiens
CFSRPSMSPTPLD

SEQ ID NO: 24546 - protein, 13 aa, Homo Sapiens
FSRPSMSPTPLDR

SEQ ID NO: 24547 - protein, 13 aa, Homo Sapiens
SRPSMSPTPLDRC

SEQ ID NO: 24548 - protein, 13 aa, Homo Sapiens
RPSMSPTPLDRCR

SEQ ID NO: 24549 - protein, 13 aa, Homo Sapiens
PSMSPTPLDRCRS

SEQ ID NO: 24550 - protein, 13 aa, Homo Sapiens
SMSPTPLDRCRSP

SEQ ID NO: 24551 - protein, 13 aa, Homo Sapiens
MSPTPLDRCRSPG

SEQ ID NO: 24552 - protein, 13 aa, Homo Sapiens
SPTPLDRCRSPGM

SEQ ID NO: 24553 - protein, 13 aa, Homo Sapiens
PTPLDRCRSPGML

SEQ ID NO: 24554 - protein, 13 aa, Homo Sapiens
TPLDRCRSPGMLE

SEQ ID NO: 24555 - protein, 13 aa, Homo Sapiens
PLDRCRSPGMLEP

SEQ ID NO: 24556 - protein, 13 aa, Homo Sapiens
LDRCRSPGMLEPL

SEQ ID NO: 24557 - protein, 13 aa, Homo Sapiens
DRCRSPGMLEPLG

SEQ ID NO: 24558 - protein, 13 aa, Homo Sapiens
RCRSPGMLEPLGS

SEQ ID NO: 24559 - protein, 13 aa, Homo Sapiens
CRSPGMLEPLGSS

SEQ ID NO: 24560 - protein, 13 aa, Homo Sapiens
RSPGMLEPLGSSR

SEQ ID NO: 24561 - protein, 13 aa, Homo Sapiens
SPGMLEPLGSSRT

SEQ ID NO: 24562 - protein, 13 aa, Homo Sapiens
PGMLEPLGSSRTP

SEQ ID NO: 24563 - protein, 13 aa, Homo Sapiens
GMLEPLGSSRTPM

SEQ ID NO: 24564 - protein, 13 aa, Homo Sapiens
MLEPLGSSRTPMS

SEQ ID NO: 24565 - protein, 13 aa, Homo Sapiens
LEPLGSSRTPMSV

SEQ ID NO: 24566 - protein, 13 aa, Homo Sapiens
EPLGSSRTPMSVL

SEQ ID NO: 24567 - protein, 13 aa, Homo Sapiens
PLGSSRTPMSVLQ

SEQ ID NO: 24568 - protein, 13 aa, Homo Sapiens
LGSSRTPMSVLQQ

SEQ ID NO: 24569 - protein, 13 aa, Homo Sapiens
GSSRTPMSVLQQA

SEQ ID NO: 24570 - protein, 13 aa, Homo Sapiens
SSRTPMSVLQQAG

SEQ ID NO: 24571 - protein, 13 aa, Homo Sapiens
SRTPMSVLQQAGG

SEQ ID NO: 24572 - protein, 13 aa, Homo Sapiens
RTPMSVLQQAGGS

SEQ ID NO: 24573 - protein, 13 aa, Homo Sapiens
TPMSVLQQAGGSM

SEQ ID NO: 24574 - protein, 13 aa, Homo Sapiens
PMSVLQQAGGSMM

SEQ ID NO: 24575 - protein, 13 aa, Homo Sapiens
MSVLQQAGGSMMD

SEQ ID NO: 24576 - protein, 13 aa, Homo Sapiens
SVLQQAGGSMMDG

SEQ ID NO: 24577 - protein, 13 aa, Homo Sapiens
VLQQAGGSMMDGP

SEQ ID NO: 24578 - protein, 13 aa, Homo Sapiens
LQQAGGSMMDGPG

SEQ ID NO: 24579 - protein, 13 aa, Homo Sapiens
QQAGGSMMDGPGP

SEQ ID NO: 24580 - protein, 13 aa, Homo Sapiens
QAGGSMMDGPGPR

SEQ ID NO: 24581 - protein, 13 aa, Homo Sapiens
AGGSMMDGPGPRI

SEQ ID NO: 24582 - protein, 13 aa, Homo Sapiens
GGSMMDGPGPRIP

SEQ ID NO: 24583 - protein, 13 aa, Homo Sapiens
GSMMDGPGPRIPD

SEQ ID NO: 24584 - protein, 13 aa, Homo Sapiens
SMMDGPGPRIPDH

SEQ ID NO: 24585 - protein, 13 aa, Homo Sapiens
MMDGPGPRIPDHQ

SEQ ID NO: 24586 - protein, 13 aa, Homo Sapiens
MDGPGPRIPDHQR

SEQ ID NO: 24587 - protein, 13 aa, Homo Sapiens
DGPGPRIPDHQRT

SEQ ID NO: 24588 - protein, 13 aa, Homo Sapiens
GPGPRIPDHQRTS

SEQ ID NO: 24589 - protein, 13 aa, Homo Sapiens
PGPRIPDHQRTSV

SEQ ID NO: 24590 - protein, 13 aa, Homo Sapiens
GPRIPDHQRTSVP

SEQ ID NO: 24591 - protein, 13 aa, Homo Sapiens
PRIPDHQRTSVPE

SEQ ID NO: 24592 - protein, 13 aa, Homo Sapiens
RIPDHQRTSVPEN

SEQ ID NO: 24593 - protein, 13 aa, Homo Sapiens
IPDHQRTSVPENH

SEQ ID NO: 24594 - protein, 13 aa, Homo Sapiens
PDHQRTSVPENHA

SEQ ID NO: 24595 - protein, 13 aa, Homo Sapiens
DHQRTSVPENHAQ

SEQ ID NO: 24596 - protein, 13 aa, Homo Sapiens
HQRTSVPENHAQS

SEQ ID NO: 24597 - protein, 13 aa, Homo Sapiens
QRTSVPENHAQSR

SEQ ID NO: 24598 - protein, 13 aa, Homo Sapiens
RTSVPENHAQSRI

SEQ ID NO: 24599 - protein, 13 aa, Homo Sapiens
TSVPENHAQSRIA

SEQ ID NO: 24600 - protein, 13 aa, Homo Sapiens
SVPENHAQSRIAL

SEQ ID NO: 24601 - protein, 13 aa, Homo Sapiens
VPENHAQSRIALA

SEQ ID NO: 24602 - protein, 13 aa, Homo Sapiens
PENHAQSRIALAL

SEQ ID NO: 24603 - protein, 13 aa, Homo Sapiens
ENHAQSRIALALT

SEQ ID NO: 24604 - protein, 13 aa, Homo Sapiens
NHAQSRIALALTA

SEQ ID NO: 24605 - protein, 13 aa, Homo Sapiens
HAQSRIALALTAI

SEQ ID NO: 24606 - protein, 13 aa, Homo Sapiens
AQSRIALALTAIS

SEQ ID NO: 24607 - protein, 13 aa, Homo Sapiens
QSRIALALTAISL

SEQ ID NO: 24608 - protein, 13 aa, Homo Sapiens
SRIALALTAISLG

SEQ ID NO: 24609 - protein, 13 aa, Homo Sapiens
RIALALTAISLGT

SEQ ID NO: 24610 - protein, 13 aa, Homo Sapiens
IALALTAISLGTA

SEQ ID NO: 24611 - protein, 13 aa, Homo Sapiens
ALALTAISLGTAR

SEQ ID NO: 24612 - protein, 13 aa, Homo Sapiens
LALTAISLGTARP

SEQ ID NO: 24613 - protein, 13 aa, Homo Sapiens
ALTAISLGTARPP

SEQ ID NO: 24614 - protein, 13 aa, Homo Sapiens
LTAISLGTARPPP

SEQ ID NO: 24615 - protein, 13 aa, Homo Sapiens
TAISLGTARPPPS

SEQ ID NO: 24616 - protein, 13 aa, Homo Sapiens
AISLGTARPPPSM

SEQ ID NO: 24617 - protein, 13 aa, Homo Sapiens
ISLGTARPPPSMS

SEQ ID NO: 24618 - protein, 13 aa, Homo Sapiens
SLGTARPPPSMSA

SEQ ID NO: 24619 - protein, 13 aa, Homo Sapiens
LGTARPPPSMSAA

SEQ ID NO: 24620 - protein, 13 aa, Homo Sapiens
GTARPPPSMSAAG

SEQ ID NO: 24621 - protein, 13 aa, Homo Sapiens
TARPPPSMSAAGL

SEQ ID NO: 24622 - protein, 13 aa, Homo Sapiens
ARPPPSMSAAGLA

SEQ ID NO: 24623 - protein, 13 aa, Homo Sapiens
RPPPSMSAAGLAA

SEQ ID NO: 24624 - protein, 13 aa, Homo Sapiens
PPPSMSAAGLAAR

SEQ ID NO: 24625 - protein, 13 aa, Homo Sapiens
PPSMSAAGLAARM

SEQ ID NO: 24626 - protein, 13 aa, Homo Sapiens
PSMSAAGLAARMS

SEQ ID NO: 24627 - protein, 13 aa, Homo Sapiens
SMSAAGLAARMSQ

SEQ ID NO: 24628 - protein, 13 aa, Homo Sapiens
MSAAGLAARMSQV

SEQ ID NO: 24629 - protein, 13 aa, Homo Sapiens
SAAGLAARMSQVP

SEQ ID NO: 24630 - protein, 13 aa, Homo Sapiens
AAGLAARMSQVPA

SEQ ID NO: 24631 - protein, 13 aa, Homo Sapiens
AGLAARMSQVPAP

SEQ ID NO: 24632 - protein, 13 aa, Homo Sapiens
GLAARMSQVPAPV

SEQ ID NO: 24633 - protein, 13 aa, Homo Sapiens
LAARMSQVPAPVP

SEQ ID NO: 24634 - protein, 13 aa, Homo Sapiens
AARMSQVPAPVPL

SEQ ID NO: 24635 - protein, 13 aa, Homo Sapiens
ARMSQVPAPVPLM

SEQ ID NO: 24636 - protein, 13 aa, Homo Sapiens
RMSQVPAPVPLMS

SEQ ID NO: 24637 - protein, 13 aa, Homo Sapiens
MSQVPAPVPLMSL

SEQ ID NO: 24638 - protein, 13 aa, Homo Sapiens
SQVPAPVPLMSLR

SEQ ID NO: 24639 - protein, 13 aa, Homo Sapiens
QVPAPVPLMSLRT

SEQ ID NO: 24640 - protein, 13 aa, Homo Sapiens
VPAPVPLMSLRTA

SEQ ID NO: 24641 - protein, 13 aa, Homo Sapiens
PAPVPLMSLRTAP

SEQ ID NO: 24642 - protein, 13 aa, Homo Sapiens
APVPLMSLRTAPA

SEQ ID NO: 24643 - protein, 13 aa, Homo Sapiens
PVPLMSLRTAPAA

SEQ ID NO: 24644 - protein, 13 aa, Homo Sapiens
VPLMSLRTAPAAN

SEQ ID NO: 24645 - protein, 13 aa, Homo Sapiens
PLMSLRTAPAANL

SEQ ID NO: 24646 - protein, 13 aa, Homo Sapiens
LMSLRTAPAANLA

SEQ ID NO: 24647 - protein, 13 aa, Homo Sapiens
MSLRTAPAANLAS

SEQ ID NO: 24648 - protein, 13 aa, Homo Sapiens
SLRTAPAANLASR

SEQ ID NO: 24649 - protein, 13 aa, Homo Sapiens
LRTAPAANLASRI

SEQ ID NO: 24650 - protein, 13 aa, Homo Sapiens
RTAPAANLASRIP

SEQ ID NO: 24651 - protein, 13 aa, Homo Sapiens
TAPAANLASRIPA

SEQ ID NO: 24652 - protein, 13 aa, Homo Sapiens
APAANLASRIPAA

SEQ ID NO: 24653 - protein, 13 aa, Homo Sapiens
PAANLASRIPAAS

SEQ ID NO: 24654 - protein, 13 aa, Homo Sapiens
AANLASRIPAASA

SEQ ID NO: 24655 - protein, 13 aa, Homo Sapiens
ANLASRIPAASAA

SEQ ID NO: 24656 - protein, 13 aa, Homo Sapiens
NLASRIPAASAAA

SEQ ID NO: 24657 - protein, 13 aa, Homo Sapiens
LASRIPAASAAAM

SEQ ID NO: 24658 - protein, 13 aa, Homo Sapiens
ASRIPAASAAAMN

SEQ ID NO: 24659 - protein, 13 aa, Homo Sapiens
SRIPAASAAAMNL

SEQ ID NO: 24660 - protein, 13 aa, Homo Sapiens
RIPAASAAAMNLA

SEQ ID NO: 24661 - protein, 13 aa, Homo Sapiens
IPAASAAAMNLAS

SEQ ID NO: 24662 - protein, 13 aa, Homo Sapiens
PAASAAAMNLASA

SEQ ID NO: 24663 - protein, 13 aa, Homo Sapiens
AASAAAMNLASAR

SEQ ID NO: 24664 - protein, 13 aa, Homo Sapiens
ASAAAMNLASART

SEQ ID NO: 24665 - protein, 13 aa, Homo Sapiens
SAAAMNLASARTP

SEQ ID NO: 24666 - protein, 13 aa, Homo Sapiens
AAAMNLASARTPA

SEQ ID NO: 24667 - protein, 13 aa, Homo Sapiens
AAMNLASARTPAI

SEQ ID NO: 24668 - protein, 13 aa, Homo Sapiens
AMNLASARTPAIP

SEQ ID NO: 24669 - protein, 13 aa, Homo Sapiens
MNLASARTPAIPT

SEQ ID NO: 24670 - protein, 13 aa, Homo Sapiens
NLASARTPAIPTA

SEQ ID NO: 24671 - protein, 13 aa, Homo Sapiens
LASARTPAIPTAV

SEQ ID NO: 24672 - protein, 13 aa, Homo Sapiens
ASARTPAIPTAVN

SEQ ID NO: 24673 - protein, 13 aa, Homo Sapiens
SARTPAIPTAVNL

SEQ ID NO: 24674 - protein, 13 aa, Homo Sapiens
ARTPAIPTAVNLA

SEQ ID NO: 24675 - protein, 13 aa, Homo Sapiens
RTPAIPTAVNLAD

SEQ ID NO: 24676 - protein, 13 aa, Homo Sapiens
TPAIPTAVNLADS

SEQ ID NO: 24677 - protein, 13 aa, Homo Sapiens
PAIPTAVNLADSR

SEQ ID NO: 24678 - protein, 13 aa, Homo Sapiens
AIPTAVNLADSRT

SEQ ID NO: 24679 - protein, 13 aa, Homo Sapiens
IPTAVNLADSRTP

SEQ ID NO: 24680 - protein, 13 aa, Homo Sapiens
PTAVNLADSRTPA

SEQ ID NO: 24681 - protein, 13 aa, Homo Sapiens
TAVNLADSRTPAA

SEQ ID NO: 24682 - protein, 13 aa, Homo Sapiens
AVNLADSRTPAAA

SEQ ID NO: 24683 - protein, 13 aa, Homo Sapiens
VNLADSRTPAAAA

SEQ ID NO: 24684 - protein, 13 aa, Homo Sapiens
NLADSRTPAAAAA

SEQ ID NO: 24685 - protein, 13 aa, Homo Sapiens
LADSRTPAAAAAM

SEQ ID NO: 24686 - protein, 13 aa, Homo Sapiens
ADSRTPAAAAAMN

SEQ ID NO: 24687 - protein, 13 aa, Homo Sapiens
DSRTPAAAAAMNL

SEQ ID NO: 24688 - protein, 13 aa, Homo Sapiens
SRTPAAAAAMNLA

SEQ ID NO: 24689 - protein, 13 aa, Homo Sapiens
RTPAAAAAMNLAS

SEQ ID NO: 24690 - protein, 13 aa, Homo Sapiens
TPAAAAAMNLASP

SEQ ID NO: 24691 - protein, 13 aa, Homo Sapiens
PAAAAAMNLASPR

SEQ ID NO: 24692 - protein, 13 aa, Homo Sapiens
AAAAAMNLASPRT

SEQ ID NO: 24693 - protein, 13 aa, Homo Sapiens
AAAAMNLASPRTA

SEQ ID NO: 24694 - protein, 13 aa, Homo Sapiens
AAAMNLASPRTAV

SEQ ID NO: 24695 - protein, 13 aa, Homo Sapiens
AAMNLASPRTAVA

SEQ ID NO: 24696 - protein, 13 aa, Homo Sapiens
AMNLASPRTAVAP

SEQ ID NO: 24697 - protein, 13 aa, Homo Sapiens
MNLASPRTAVAPS

SEQ ID NO: 24698 - protein, 13 aa, Homo Sapiens
NLASPRTAVAPSA

SEQ ID NO: 24699 - protein, 13 aa, Homo Sapiens
LASPRTAVAPSAV

SEQ ID NO: 24700 - protein, 13 aa, Homo Sapiens
ASPRTAVAPSAVN

SEQ ID NO: 24701 - protein, 13 aa, Homo Sapiens
SPRTAVAPSAVNL

SEQ ID NO: 24702 - protein, 13 aa, Homo Sapiens
PRTAVAPSAVNLA

SEQ ID NO: 24703 - protein, 13 aa, Homo Sapiens
RTAVAPSAVNLAD

SEQ ID NO: 24704 - protein, 13 aa, Homo Sapiens
TAVAPSAVNLADP

SEQ ID NO: 24705 - protein, 13 aa, Homo Sapiens
AVAPSAVNLADPR

SEQ ID NO: 24706 - protein, 13 aa, Homo Sapiens
VAPSAVNLADPRT

SEQ ID NO: 24707 - protein, 13 aa, Homo Sapiens
APSAVNLADPRTP

SEQ ID NO: 24708 - protein, 13 aa, Homo Sapiens
PSAVNLADPRTPT

SEQ ID NO: 24709 - protein, 13 aa, Homo Sapiens
SAVNLADPRTPTA

SEQ ID NO: 24710 - protein, 13 aa, Homo Sapiens
AVNLADPRTPTAP

SEQ ID NO: 24711 - protein, 13 aa, Homo Sapiens
VNLADPRTPTAPA

SEQ ID NO: 24712 - protein, 13 aa, Homo Sapiens
NLADPRTPTAPAV

SEQ ID NO: 24713 - protein, 13 aa, Homo Sapiens
LADPRTPTAPAVN

SEQ ID NO: 24714 - protein, 13 aa, Homo Sapiens
ADPRTPTAPAVNL

SEQ ID NO: 24715 - protein, 13 aa, Homo Sapiens
DPRTPTAPAVNLA

SEQ ID NO: 24716 - protein, 13 aa, Homo Sapiens
PRTPTAPAVNLAG

SEQ ID NO: 24717 - protein, 13 aa, Homo Sapiens
RTPTAPAVNLAGA

SEQ ID NO: 24718 - protein, 13 aa, Homo Sapiens
TPTAPAVNLAGAR

SEQ ID NO: 24719 - protein, 13 aa, Homo Sapiens
PTAPAVNLAGART

SEQ ID NO: 24720 - protein, 13 aa, Homo Sapiens
TAPAVNLAGARTP

SEQ ID NO: 24721 - protein, 13 aa, Homo Sapiens
APAVNLAGARTPA

SEQ ID NO: 24722 - protein, 13 aa, Homo Sapiens
PAVNLAGARTPAA

SEQ ID NO: 24723 - protein, 13 aa, Homo Sapiens
AVNLAGARTPAAL

SEQ ID NO: 24724 - protein, 13 aa, Homo Sapiens
VNLAGARTPAALA

SEQ ID NO: 24725 - protein, 13 aa, Homo Sapiens
NLAGARTPAALAA

SEQ ID NO: 24726 - protein, 13 aa, Homo Sapiens
LAGARTPAALAAL

SEQ ID NO: 24727 - protein, 13 aa, Homo Sapiens
AGARTPAALAALS

SEQ ID NO: 24728 - protein, 13 aa, Homo Sapiens
GARTPAALAALSL

SEQ ID NO: 24729 - protein, 13 aa, Homo Sapiens
ARTPAALAALSLT

SEQ ID NO: 24730 - protein, 13 aa, Homo Sapiens
RTPAALAALSLTG

SEQ ID NO: 24731 - protein, 13 aa, Homo Sapiens
TPAALAALSLTGS

SEQ ID NO: 24732 - protein, 13 aa, Homo Sapiens
PAALAALSLTGSG

SEQ ID NO: 24733 - protein, 13 aa, Homo Sapiens
AALAALSLTGSGT

SEQ ID NO: 24734 - protein, 13 aa, Homo Sapiens
ALAALSLTGSGTP

SEQ ID NO: 24735 - protein, 13 aa, Homo Sapiens
LAALSLTGSGTPP

SEQ ID NO: 24736 - protein, 13 aa, Homo Sapiens
AALSLTGSGTPPT

SEQ ID NO: 24737 - protein, 13 aa, Homo Sapiens
ALSLTGSGTPPTA

SEQ ID NO: 24738 - protein, 13 aa, Homo Sapiens
LSLTGSGTPPTAA

SEQ ID NO: 24739 - protein, 13 aa, Homo Sapiens
SLTGSGTPPTAAN

SEQ ID NO: 24740 - protein, 13 aa, Homo Sapiens
LTGSGTPPTAANY

SEQ ID NO: 24741 - protein, 13 aa, Homo Sapiens
TGSGTPPTAANYP

SEQ ID NO: 24742 - protein, 13 aa, Homo Sapiens
GSGTPPTAANYPS

SEQ ID NO: 24743 - protein, 13 aa, Homo Sapiens
SGTPPTAANYPSS

SEQ ID NO: 24744 - protein, 13 aa, Homo Sapiens
GTPPTAANYPSSS

SEQ ID NO: 24745 - protein, 13 aa, Homo Sapiens
TPPTAANYPSSSR

SEQ ID NO: 24746 - protein, 13 aa, Homo Sapiens
PPTAANYPSSSRT

SEQ ID NO: 24747 - protein, 13 aa, Homo Sapiens
PTAANYPSSSRTP

SEQ ID NO: 24748 - protein, 13 aa, Homo Sapiens
TAANYPSSSRTPQ

SEQ ID NO: 24749 - protein, 13 aa, Homo Sapiens
AANYPSSSRTPQA

SEQ ID NO: 24750 - protein, 13 aa, Homo Sapiens
ANYPSSSRTPQAP

SEQ ID NO: 24751 - protein, 13 aa, Homo Sapiens
NYPSSSRTPQAPA

SEQ ID NO: 24752 - protein, 13 aa, Homo Sapiens
YPSSSRTPQAPAS

SEQ ID NO: 24753 - protein, 13 aa, Homo Sapiens
PSSSRTPQAPASA

SEQ ID NO: 24754 - protein, 13 aa, Homo Sapiens
SSSRTPQAPASAN

SEQ ID NO: 24755 - protein, 13 aa, Homo Sapiens
SSRTPQAPASANL

SEQ ID NO: 24756 - protein, 13 aa, Homo Sapiens
SRTPQAPASANLV

SEQ ID NO: 24757 - protein, 13 aa, Homo Sapiens
RTPQAPASANLVG

SEQ ID NO: 24758 - protein, 13 aa, Homo Sapiens
TPQAPASANLVGP

SEQ ID NO: 24759 - protein, 13 aa, Homo Sapiens
PQAPASANLVGPR

SEQ ID NO: 24760 - protein, 13 aa, Homo Sapiens
QAPASANLVGPRS

SEQ ID NO: 24761 - protein, 13 aa, Homo Sapiens
APASANLVGPRSA

SEQ ID NO: 24762 - protein, 13 aa, Homo Sapiens
PASANLVGPRSAH

SEQ ID NO: 24763 - protein, 13 aa, Homo Sapiens
ASANLVGPRSAHA

SEQ ID NO: 24764 - protein, 13 aa, Homo Sapiens
SANLVGPRSAHAT

SEQ ID NO: 24765 - protein, 13 aa, Homo Sapiens
ANLVGPRSAHATA

SEQ ID NO: 24766 - protein, 13 aa, Homo Sapiens
NLVGPRSAHATAP

SEQ ID NO: 24767 - protein, 13 aa, Homo Sapiens
LVGPRSAHATAPV

SEQ ID NO: 24768 - protein, 13 aa, Homo Sapiens
VGPRSAHATAPVN

SEQ ID NO: 24769 - protein, 13 aa, Homo Sapiens
GPRSAHATAPVNI

SEQ ID NO: 24770 - protein, 13 aa, Homo Sapiens
PRSAHATAPVNIA

SEQ ID NO: 24771 - protein, 13 aa, Homo Sapiens
RSAHATAPVNIAG

SEQ ID NO: 24772 - protein, 13 aa, Homo Sapiens
SAHATAPVNIAGS

SEQ ID NO: 24773 - protein, 13 aa, Homo Sapiens
AHATAPVNIAGSR

SEQ ID NO: 24774 - protein, 13 aa, Homo Sapiens
HATAPVNIAGSRT

SEQ ID NO: 24775 - protein, 13 aa, Homo Sapiens
ATAPVNIAGSRTA

SEQ ID NO: 24776 - protein, 13 aa, Homo Sapiens
TAPVNIAGSRTAA

SEQ ID NO: 24777 - protein, 13 aa, Homo Sapiens
APVNIAGSRTAAA

SEQ ID NO: 24778 - protein, 13 aa, Homo Sapiens
PVNIAGSRTAAAL

SEQ ID NO: 24779 - protein, 13 aa, Homo Sapiens
VNIAGSRTAAALA

SEQ ID NO: 24780 - protein, 13 aa, Homo Sapiens
NIAGSRTAAALAP

SEQ ID NO: 24781 - protein, 13 aa, Homo Sapiens
IAGSRTAAALAPA

SEQ ID NO: 24782 - protein, 13 aa, Homo Sapiens
AGSRTAAALAPAS

SEQ ID NO: 24783 - protein, 13 aa, Homo Sapiens
GSRTAAALAPASL

SEQ ID NO: 24784 - protein, 13 aa, Homo Sapiens
SRTAAALAPASLT

SEQ ID NO: 24785 - protein, 13 aa, Homo Sapiens
RTAAALAPASLTS

SEQ ID NO: 24786 - protein, 13 aa, Homo Sapiens
TAAALAPASLTSA

SEQ ID NO: 24787 - protein, 13 aa, Homo Sapiens
AAALAPASLTSAR

SEQ ID NO: 24788 - protein, 13 aa, Homo Sapiens
AALAPASLTSARM

SEQ ID NO: 24789 - protein, 13 aa, Homo Sapiens
ALAPASLTSARMA

SEQ ID NO: 24790 - protein, 13 aa, Homo Sapiens
LAPASLTSARMAP

SEQ ID NO: 24791 - protein, 13 aa, Homo Sapiens
APASLTSARMAPA

SEQ ID NO: 24792 - protein, 13 aa, Homo Sapiens
PASLTSARMAPAL

SEQ ID NO: 24793 - protein, 13 aa, Homo Sapiens
ASLTSARMAPALS

SEQ ID NO: 24794 - protein, 13 aa, Homo Sapiens
SLTSARMAPALSG

SEQ ID NO: 24795 - protein, 13 aa, Homo Sapiens
LTSARMAPALSGA

SEQ ID NO: 24796 - protein, 13 aa, Homo Sapiens
TSARMAPALSGAN

SEQ ID NO: 24797 - protein, 13 aa, Homo Sapiens
SARMAPALSGANL

SEQ ID NO: 24798 - protein, 13 aa, Homo Sapiens
ARMAPALSGANLT

SEQ ID NO: 24799 - protein, 13 aa, Homo Sapiens
RMAPALSGANLTS

SEQ ID NO: 24800 - protein, 13 aa, Homo Sapiens
MAPALSGANLTSP

SEQ ID NO: 24801 - protein, 13 aa, Homo Sapiens
APALSGANLTSPR

SEQ ID NO: 24802 - protein, 13 aa, Homo Sapiens
PALSGANLTSPRV

SEQ ID NO: 24803 - protein, 13 aa, Homo Sapiens
ALSGANLTSPRVP

SEQ ID NO: 24804 - protein, 13 aa, Homo Sapiens
LSGANLTSPRVPL

SEQ ID NO: 24805 - protein, 13 aa, Homo Sapiens
SGANLTSPRVPLS

SEQ ID NO: 24806 - protein, 13 aa, Homo Sapiens
GANLTSPRVPLSA

SEQ ID NO: 24807 - protein, 13 aa, Homo Sapiens
ANLTSPRVPLSAY

SEQ ID NO: 24808 - protein, 13 aa, Homo Sapiens
NLTSPRVPLSAYE

SEQ ID NO: 24809 - protein, 13 aa, Homo Sapiens
LTSPRVPLSAYER

SEQ ID NO: 24810 - protein, 13 aa, Homo Sapiens
TSPRVPLSAYERV

SEQ ID NO: 24811 - protein, 13 aa, Homo Sapiens
SPRVPLSAYERVS

SEQ ID NO: 24812 - protein, 13 aa, Homo Sapiens
PRVPLSAYERVSG

SEQ ID NO: 24813 - protein, 13 aa, Homo Sapiens
RVPLSAYERVSGR

SEQ ID NO: 24814 - protein, 13 aa, Homo Sapiens
VPLSAYERVSGRT

SEQ ID NO: 24815 - protein, 13 aa, Homo Sapiens
PLSAYERVSGRTS

SEQ ID NO: 24816 - protein, 13 aa, Homo Sapiens
LSAYERVSGRTSP

SEQ ID NO: 24817 - protein, 13 aa, Homo Sapiens
SAYERVSGRTSPP

SEQ ID NO: 24818 - protein, 13 aa, Homo Sapiens
AYERVSGRTSPPL

SEQ ID NO: 24819 - protein, 13 aa, Homo Sapiens
YERVSGRTSPPLL

SEQ ID NO: 24820 - protein, 13 aa, Homo Sapiens
ERVSGRTSPPLLD

SEQ ID NO: 24821 - protein, 13 aa, Homo Sapiens
RVSGRTSPPLLDR

SEQ ID NO: 24822 - protein, 13 aa, Homo Sapiens
VSGRTSPPLLDRA

SEQ ID NO: 24823 - protein, 13 aa, Homo Sapiens
SGRTSPPLLDRAR

SEQ ID NO: 24824 - protein, 13 aa, Homo Sapiens
GRTSPPLLDRARS

SEQ ID NO: 24825 - protein, 13 aa, Homo Sapiens
RTSPPLLDRARSR

SEQ ID NO: 24826 - protein, 13 aa, Homo Sapiens
TSPPLLDRARSRT

SEQ ID NO: 24827 - protein, 13 aa, Homo Sapiens
SPPLLDRARSRTP

SEQ ID NO: 24828 - protein, 13 aa, Homo Sapiens
PPLLDRARSRTPP

SEQ ID NO: 24829 - protein, 13 aa, Homo Sapiens
PLLDRARSRTPPS

SEQ ID NO: 24830 - protein, 13 aa, Homo Sapiens
LLDRARSRTPPSA

SEQ ID NO: 24831 - protein, 13 aa, Homo Sapiens
LDRARSRTPPSAP

SEQ ID NO: 24832 - protein, 13 aa, Homo Sapiens
DRARSRTPPSAPS

SEQ ID NO: 24833 - protein, 13 aa, Homo Sapiens
RARSRTPPSAPSQ

SEQ ID NO: 24834 - protein, 13 aa, Homo Sapiens
ARSRTPPSAPSQS

SEQ ID NO: 24835 - protein, 13 aa, Homo Sapiens
RSRTPPSAPSQSR

SEQ ID NO: 24836 - protein, 13 aa, Homo Sapiens
SRTPPSAPSQSRM

SEQ ID NO: 24837 - protein, 13 aa, Homo Sapiens
RTPPSAPSQSRMT

SEQ ID NO: 24838 - protein, 13 aa, Homo Sapiens
TPPSAPSQSRMTS

SEQ ID NO: 24839 - protein, 13 aa, Homo Sapiens
PPSAPSQSRMTSE

SEQ ID NO: 24840 - protein, 13 aa, Homo Sapiens
PSAPSQSRMTSER

SEQ ID NO: 24841 - protein, 13 aa, Homo Sapiens
SAPSQSRMTSERA

SEQ ID NO: 24842 - protein, 13 aa, Homo Sapiens
APSQSRMTSERAP

SEQ ID NO: 24843 - protein, 13 aa, Homo Sapiens
PSQSRMTSERAPS

SEQ ID NO: 24844 - protein, 13 aa, Homo Sapiens
SQSRMTSERAPSP

SEQ ID NO: 24845 - protein, 13 aa, Homo Sapiens
QSRMTSERAPSPS

SEQ ID NO: 24846 - protein, 13 aa, Homo Sapiens
SRMTSERAPSPSS

SEQ ID NO: 24847 - protein, 13 aa, Homo Sapiens
RMTSERAPSPSSR

SEQ ID NO: 24848 - protein, 13 aa, Homo Sapiens
MTSERAPSPSSRM

SEQ ID NO: 24849 - protein, 13 aa, Homo Sapiens
TSERAPSPSSRMG

SEQ ID NO: 24850 - protein, 13 aa, Homo Sapiens
SERAPSPSSRMGQ

SEQ ID NO: 24851 - protein, 13 aa, Homo Sapiens
ERAPSPSSRMGQA

SEQ ID NO: 24852 - protein, 13 aa, Homo Sapiens
RAPSPSSRMGQAP

SEQ ID NO: 24853 - protein, 13 aa, Homo Sapiens
APSPSSRMGQAPS

SEQ ID NO: 24854 - protein, 13 aa, Homo Sapiens
PSPSSRMGQAPSQ

SEQ ID NO: 24855 - protein, 13 aa, Homo Sapiens
SPSSRMGQAPSQS

SEQ ID NO: 24856 - protein, 13 aa, Homo Sapiens
PSSRMGQAPSQSL

SEQ ID NO: 24857 - protein, 13 aa, Homo Sapiens
SSRMGQAPSQSLL

SEQ ID NO: 24858 - protein, 13 aa, Homo Sapiens
SRMGQAPSQSLLP

SEQ ID NO: 24859 - protein, 13 aa, Homo Sapiens
RMGQAPSQSLLPP

SEQ ID NO: 24860 - protein, 13 aa, Homo Sapiens
MGQAPSQSLLPPA

SEQ ID NO: 24861 - protein, 13 aa, Homo Sapiens
GQAPSQSLLPPAQ

SEQ ID NO: 24862 - protein, 13 aa, Homo Sapiens
QAPSQSLLPPAQD

SEQ ID NO: 24863 - protein, 13 aa, Homo Sapiens
APSQSLLPPAQDQ

SEQ ID NO: 24864 - protein, 13 aa, Homo Sapiens
PSQSLLPPAQDQP

SEQ ID NO: 24865 - protein, 13 aa, Homo Sapiens
SQSLLPPAQDQPR

SEQ ID NO: 24866 - protein, 13 aa, Homo Sapiens
QSLLPPAQDQPRS

SEQ ID NO: 24867 - protein, 13 aa, Homo Sapiens
SLLPPAQDQPRSP

SEQ ID NO: 24868 - protein, 13 aa, Homo Sapiens
LLPPAQDQPRSPV

SEQ ID NO: 24869 - protein, 13 aa, Homo Sapiens
LPPAQDQPRSPVP

SEQ ID NO: 24870 - protein, 13 aa, Homo Sapiens
PPAQDQPRSPVPS

SEQ ID NO: 24871 - protein, 13 aa, Homo Sapiens
PAQDQPRSPVPSA

SEQ ID NO: 24872 - protein, 13 aa, Homo Sapiens
AQDQPRSPVPSAF

SEQ ID NO: 24873 - protein, 13 aa, Homo Sapiens
QDQPRSPVPSAFS

SEQ ID NO: 24874 - protein, 13 aa, Homo Sapiens
DQPRSPVPSAFSD

SEQ ID NO: 24875 - protein, 13 aa, Homo Sapiens
QPRSPVPSAFSDQ

SEQ ID NO: 24876 - protein, 13 aa, Homo Sapiens
PRSPVPSAFSDQS

SEQ ID NO: 24877 - protein, 13 aa, Homo Sapiens
RSPVPSAFSDQSR

SEQ ID NO: 24878 - protein, 13 aa, Homo Sapiens
SPVPSAFSDQSRC

SEQ ID NO: 24879 - protein, 13 aa, Homo Sapiens
PVPSAFSDQSRCL

SEQ ID NO: 24880 - protein, 13 aa, Homo Sapiens
VPSAFSDQSRCLI

SEQ ID NO: 24881 - protein, 13 aa, Homo Sapiens
PSAFSDQSRCLIA

SEQ ID NO: 24882 - protein, 13 aa, Homo Sapiens
SAFSDQSRCLIAQ

SEQ ID NO: 24883 - protein, 13 aa, Homo Sapiens
AFSDQSRCLIAQT

SEQ ID NO: 24884 - protein, 13 aa, Homo Sapiens
FSDQSRCLIAQTT

SEQ ID NO: 24885 - protein, 13 aa, Homo Sapiens
SDQSRCLIAQTTP

SEQ ID NO: 24886 - protein, 13 aa, Homo Sapiens
DQSRCLIAQTTPV

SEQ ID NO: 24887 - protein, 13 aa, Homo Sapiens
QSRCLIAQTTPVA

SEQ ID NO: 24888 - protein, 13 aa, Homo Sapiens
SRCLIAQTTPVAG

SEQ ID NO: 24889 - protein, 13 aa, Homo Sapiens
RCLIAQTTPVAGS

SEQ ID NO: 24890 - protein, 13 aa, Homo Sapiens
CLIAQTTPVAGSQ

SEQ ID NO: 24891 - protein, 13 aa, Homo Sapiens
LIAQTTPVAGSQS

SEQ ID NO: 24892 - protein, 13 aa, Homo Sapiens
IAQTTPVAGSQSL

SEQ ID NO: 24893 - protein, 13 aa, Homo Sapiens
AQTTPVAGSQSLS

SEQ ID NO: 24894 - protein, 13 aa, Homo Sapiens
QTTPVAGSQSLSS

SEQ ID NO: 24895 - protein, 13 aa, Homo Sapiens
TTPVAGSQSLSSG

SEQ ID NO: 24896 - protein, 13 aa, Homo Sapiens
TPVAGSQSLSSGA

SEQ ID NO: 24897 - protein, 13 aa, Homo Sapiens
PVAGSQSLSSGAV

SEQ ID NO: 24898 - protein, 13 aa, Homo Sapiens
VAGSQSLSSGAVA

SEQ ID NO: 24899 - protein, 13 aa, Homo Sapiens
AGSQSLSSGAVAT

SEQ ID NO: 24900 - protein, 13 aa, Homo Sapiens
GSQSLSSGAVATT

SEQ ID NO: 24901 - protein, 13 aa, Homo Sapiens
SQSLSSGAVATTT

SEQ ID NO: 24902 - protein, 13 aa, Homo Sapiens
QSLSSGAVATTTS

SEQ ID NO: 24903 - protein, 13 aa, Homo Sapiens
SLSSGAVATTTSS

SEQ ID NO: 24904 - protein, 13 aa, Homo Sapiens
LSSGAVATTTSSA

SEQ ID NO: 24905 - protein, 13 aa, Homo Sapiens
SSGAVATTTSSAG

SEQ ID NO: 24906 - protein, 13 aa, Homo Sapiens
SGAVATTTSSAGD

SEQ ID NO: 24907 - protein, 13 aa, Homo Sapiens
GAVATTTSSAGDH

SEQ ID NO: 24908 - protein, 13 aa, Homo Sapiens
AVATTTSSAGDHN

SEQ ID NO: 24909 - protein, 13 aa, Homo Sapiens
VATTTSSAGDHNG

SEQ ID NO: 24910 - protein, 13 aa, Homo Sapiens
ATTTSSAGDHNGM

SEQ ID NO: 24911 - protein, 13 aa, Homo Sapiens
TTTSSAGDHNGML

SEQ ID NO: 24912 - protein, 13 aa, Homo Sapiens
TTSSAGDHNGMLS

SEQ ID NO: 24913 - protein, 13 aa, Homo Sapiens
TSSAGDHNGMLSV

SEQ ID NO: 24914 - protein, 13 aa, Homo Sapiens
SSAGDHNGMLSVP

SEQ ID NO: 24915 - protein, 13 aa, Homo Sapiens
SAGDHNGMLSVPA

SEQ ID NO: 24916 - protein, 13 aa, Homo Sapiens
AGDHNGMLSVPAP

SEQ ID NO: 24917 - protein, 13 aa, Homo Sapiens
GDHNGMLSVPAPG

SEQ ID NO: 24918 - protein, 13 aa, Homo Sapiens
DHNGMLSVPAPGV

SEQ ID NO: 24919 - protein, 13 aa, Homo Sapiens
HNGMLSVPAPGVP

SEQ ID NO: 24920 - protein, 13 aa, Homo Sapiens
NGMLSVPAPGVPH

SEQ ID NO: 24921 - protein, 13 aa, Homo Sapiens
GMLSVPAPGVPHS

SEQ ID NO: 24922 - protein, 13 aa, Homo Sapiens
MLSVPAPGVPHSD

SEQ ID NO: 24923 - protein, 13 aa, Homo Sapiens
LSVPAPGVPHSDV

SEQ ID NO: 24924 - protein, 13 aa, Homo Sapiens
SVPAPGVPHSDVG

SEQ ID NO: 24925 - protein, 13 aa, Homo Sapiens
VPAPGVPHSDVGE

SEQ ID NO: 24926 - protein, 13 aa, Homo Sapiens
PAPGVPHSDVGEP

SEQ ID NO: 24927 - protein, 13 aa, Homo Sapiens
APGVPHSDVGEPP

SEQ ID NO: 24928 - protein, 13 aa, Homo Sapiens
PGVPHSDVGEPPA

SEQ ID NO: 24929 - protein, 13 aa, Homo Sapiens
GVPHSDVGEPPAS

SEQ ID NO: 24930 - protein, 13 aa, Homo Sapiens
VPHSDVGEPPAST

SEQ ID NO: 24931 - protein, 13 aa, Homo Sapiens
PHSDVGEPPASTG

SEQ ID NO: 24932 - protein, 13 aa, Homo Sapiens
HSDVGEPPASTGA

SEQ ID NO: 24933 - protein, 13 aa, Homo Sapiens
SDVGEPPASTGAQ

SEQ ID NO: 24934 - protein, 13 aa, Homo Sapiens
DVGEPPASTGAQQ

SEQ ID NO: 24935 - protein, 13 aa, Homo Sapiens
VGEPPASTGAQQP

SEQ ID NO: 24936 - protein, 13 aa, Homo Sapiens
GEPPASTGAQQPS

SEQ ID NO: 24937 - protein, 13 aa, Homo Sapiens
EPPASTGAQQPSA

SEQ ID NO: 24938 - protein, 13 aa, Homo Sapiens
PPASTGAQQPSAL

SEQ ID NO: 24939 - protein, 13 aa, Homo Sapiens
PASTGAQQPSALA

SEQ ID NO: 24940 - protein, 13 aa, Homo Sapiens
ASTGAQQPSALAA

SEQ ID NO: 24941 - protein, 13 aa, Homo Sapiens
STGAQQPSALAAL

SEQ ID NO: 24942 - protein, 13 aa, Homo Sapiens
TGAQQPSALAALQ

SEQ ID NO: 24943 - protein, 13 aa, Homo Sapiens
GAQQPSALAALQP

SEQ ID NO: 24944 - protein, 13 aa, Homo Sapiens
AQQPSALAALQPA

SEQ ID NO: 24945 - protein, 13 aa, Homo Sapiens
QQPSALAALQPAK

SEQ ID NO: 24946 - protein, 13 aa, Homo Sapiens
QPSALAALQPAKE

SEQ ID NO: 24947 - protein, 13 aa, Homo Sapiens
PSALAALQPAKER

SEQ ID NO: 24948 - protein, 13 aa, Homo Sapiens
SALAALQPAKERR

SEQ ID NO: 24949 - protein, 13 aa, Homo Sapiens
ALAALQPAKERRS

SEQ ID NO: 24950 - protein, 13 aa, Homo Sapiens
LAALQPAKERRSS

SEQ ID NO: 24951 - protein, 13 aa, Homo Sapiens
AALQPAKERRSSS

SEQ ID NO: 24952 - protein, 13 aa, Homo Sapiens
ALQPAKERRSSSS

SEQ ID NO: 24953 - protein, 13 aa, Homo Sapiens
LQPAKERRSSSSS

SEQ ID NO: 24954 - protein, 13 aa, Homo Sapiens
QPAKERRSSSSSS

SEQ ID NO: 24955 - protein, 13 aa, Homo Sapiens
PAKERRSSSSSSS

SEQ ID NO: 24956 - protein, 13 aa, Homo Sapiens
AKERRSSSSSSSS

SEQ ID NO: 24957 - protein, 13 aa, Homo Sapiens
KERRSSSSSSSSS

SEQ ID NO: 24958 - protein, 13 aa, Homo Sapiens
ERRSSSSSSSSSS

SEQ ID NO: 24959 - protein, 13 aa, Homo Sapiens
RRSSSSSSSSSSS

SEQ ID NO: 24960 - protein, 13 aa, Homo Sapiens
RSSSSSSSSSSSS

SEQ ID NO: 24961 - protein, 13 aa, Homo Sapiens
SSSSSSSSSSSSS

SEQ ID NO: 24962 - protein, 13 aa, Homo Sapiens
SSSSSSSSSSSSS

SEQ ID NO: 24963 - protein, 13 aa, Homo Sapiens
SSSSSSSSSSSSS

SEQ ID NO: 24964 - protein, 13 aa, Homo Sapiens
SSSSSSSSSSSSS

SEQ ID NO: 24965 - protein, 13 aa, Homo Sapiens
SSSSSSSSSSSSS

SEQ ID NO: 24966 - protein, 13 aa, Homo Sapiens
SSSSSSSSSSSSS

SEQ ID NO: 24967 - protein, 13 aa, Homo Sapiens
SSSSSSSSSSSSS

SEQ ID NO: 24968 - protein, 13 aa, Homo Sapiens
SSSSSSSSSSSSS

SEQ ID NO: 24969 - protein, 13 aa, Homo Sapiens
SSSSSSSSSSSSS

SEQ ID NO: 24970 - protein, 13 aa, Homo Sapiens
SSSSSSSSSSSSS

SEQ ID NO: 24971 - protein, 13 aa, Homo Sapiens
SSSSSSSSSSSSS

SEQ ID NO: 24972 - protein, 13 aa, Homo Sapiens
SSSSSSSSSSSSS

SEQ ID NO: 24973 - protein, 13 aa, Homo Sapiens
SSSSSSSSSSSSS

SEQ ID NO: 24974 - protein, 13 aa, Homo Sapiens
SSSSSSSSSSSSG

SEQ ID NO: 24975 - protein, 13 aa, Homo Sapiens
SSSSSSSSSSSGS

SEQ ID NO: 24976 - protein, 13 aa, Homo Sapiens
SSSSSSSSSSGSS

SEQ ID NO: 24977 - protein, 13 aa, Homo Sapiens
SSSSSSSSSGSSS

SEQ ID NO: 24978 - protein, 13 aa, Homo Sapiens
SSSSSSSSGSSSS

SEQ ID NO: 24979 - protein, 13 aa, Homo Sapiens
SSSSSSSGSSSSD

SEQ ID NO: 24980 - protein, 13 aa, Homo Sapiens
SSSSSSGSSSSDS

SEQ ID NO: 24981 - protein, 13 aa, Homo Sapiens
SSSSSGSSSSDSE

SEQ ID NO: 24982 - protein, 13 aa, Homo Sapiens
SSSSGSSSSDSEG

SEQ ID NO: 24983 - protein, 13 aa, Homo Sapiens
SSSGSSSSDSEGS

SEQ ID NO: 24984 - protein, 13 aa, Homo Sapiens
SSGSSSSDSEGSS

SEQ ID NO: 24985 - protein, 13 aa, Homo Sapiens
SGSSSSDSEGSSL

SEQ ID NO: 24986 - protein, 13 aa, Homo Sapiens
GSSSSDSEGSSLP

SEQ ID NO: 24987 - protein, 13 aa, Homo Sapiens
SSSSDSEGSSLPV

SEQ ID NO: 24988 - protein, 13 aa, Homo Sapiens
SSSDSEGSSLPVQ

SEQ ID NO: 24989 - protein, 13 aa, Homo Sapiens
SSDSEGSSLPVQP

SEQ ID NO: 24990 - protein, 13 aa, Homo Sapiens
SDSEGSSLPVQPE

SEQ ID NO: 24991 - protein, 13 aa, Homo Sapiens
DSEGSSLPVQPEV

SEQ ID NO: 24992 - protein, 13 aa, Homo Sapiens
SEGSSLPVQPEVA

SEQ ID NO: 24993 - protein, 13 aa, Homo Sapiens
EGSSLPVQPEVAL

SEQ ID NO: 24994 - protein, 13 aa, Homo Sapiens
GSSLPVQPEVALK

SEQ ID NO: 24995 - protein, 13 aa, Homo Sapiens
SSLPVQPEVALKR

SEQ ID NO: 24996 - protein, 13 aa, Homo Sapiens
SLPVQPEVALKRV

SEQ ID NO: 24997 - protein, 13 aa, Homo Sapiens
LPVQPEVALKRVP

SEQ ID NO: 24998 - protein, 13 aa, Homo Sapiens
PVQPEVALKRVPS

SEQ ID NO: 24999 - protein, 13 aa, Homo Sapiens
VQPEVALKRVPSP

SEQ ID NO: 25000 - protein, 13 aa, Homo Sapiens
QPEVALKRVPSPT

SEQ ID NO: 25001 - protein, 13 aa, Homo Sapiens
PEVALKRVPSPTP

SEQ ID NO: 25002 - protein, 13 aa, Homo Sapiens
EVALKRVPSPTPA

SEQ ID NO: 25003 - protein, 13 aa, Homo Sapiens
VALKRVPSPTPAP

SEQ ID NO: 25004 - protein, 13 aa, Homo Sapiens
ALKRVPSPTPAPK

SEQ ID NO: 25005 - protein, 13 aa, Homo Sapiens
LKRVPSPTPAPKE

SEQ ID NO: 25006 - protein, 13 aa, Homo Sapiens
KRVPSPTPAPKEA

SEQ ID NO: 25007 - protein, 13 aa, Homo Sapiens
RVPSPTPAPKEAV

SEQ ID NO: 25008 - protein, 13 aa, Homo Sapiens
VPSPTPAPKEAVR

SEQ ID NO: 25009 - protein, 13 aa, Homo Sapiens
PSPTPAPKEAVRE

SEQ ID NO: 25010 - protein, 13 aa, Homo Sapiens
SPTPAPKEAVREG

SEQ ID NO: 25011 - protein, 13 aa, Homo Sapiens
PTPAPKEAVREGR

SEQ ID NO: 25012 - protein, 13 aa, Homo Sapiens
TPAPKEAVREGRP

SEQ ID NO: 25013 - protein, 13 aa, Homo Sapiens
PAPKEAVREGRPP

SEQ ID NO: 25014 - protein, 13 aa, Homo Sapiens
APKEAVREGRPPE

SEQ ID NO: 25015 - protein, 13 aa, Homo Sapiens
PKEAVREGRPPEP

SEQ ID NO: 25016 - protein, 13 aa, Homo Sapiens
KEAVREGRPPEPT

SEQ ID NO: 25017 - protein, 13 aa, Homo Sapiens
EAVREGRPPEPTP

SEQ ID NO: 25018 - protein, 13 aa, Homo Sapiens
AVREGRPPEPTPA

SEQ ID NO: 25019 - protein, 13 aa, Homo Sapiens
VREGRPPEPTPAK

SEQ ID NO: 25020 - protein, 13 aa, Homo Sapiens
REGRPPEPTPAKR

SEQ ID NO: 25021 - protein, 13 aa, Homo Sapiens
EGRPPEPTPAKRK

SEQ ID NO: 25022 - protein, 13 aa, Homo Sapiens
GRPPEPTPAKRKR

SEQ ID NO: 25023 - protein, 13 aa, Homo Sapiens
RPPEPTPAKRKRR

SEQ ID NO: 25024 - protein, 13 aa, Homo Sapiens
PPEPTPAKRKRRS

SEQ ID NO: 25025 - protein, 13 aa, Homo Sapiens
PEPTPAKRKRRSS

SEQ ID NO: 25026 - protein, 13 aa, Homo Sapiens
EPTPAKRKRRSSS

SEQ ID NO: 25027 - protein, 13 aa, Homo Sapiens
PTPAKRKRRSSSS

SEQ ID NO: 25028 - protein, 13 aa, Homo Sapiens
TPAKRKRRSSSSS

SEQ ID NO: 25029 - protein, 13 aa, Homo Sapiens
PAKRKRRSSSSSS

SEQ ID NO: 25030 - protein, 13 aa, Homo Sapiens
AKRKRRSSSSSSS

SEQ ID NO: 25031 - protein, 13 aa, Homo Sapiens
KRKRRSSSSSSSS

SEQ ID NO: 25032 - protein, 13 aa, Homo Sapiens
RKRRSSSSSSSSS

SEQ ID NO: 25033 - protein, 13 aa, Homo Sapiens
KRRSSSSSSSSSS

SEQ ID NO: 25034 - protein, 13 aa, Homo Sapiens
RRSSSSSSSSSSS

SEQ ID NO: 25035 - protein, 13 aa, Homo Sapiens
RSSSSSSSSSSSS

SEQ ID NO: 25036 - protein, 13 aa, Homo Sapiens
SSSSSSSSSSSSS

SEQ ID NO: 25037 - protein, 13 aa, Homo Sapiens
SSSSSSSSSSSSS

SEQ ID NO: 25038 - protein, 13 aa, Homo Sapiens
SSSSSSSSSSSSS

SEQ ID NO: 25039 - protein, 13 aa, Homo Sapiens
SSSSSSSSSSSSS

SEQ ID NO: 25040 - protein, 13 aa, Homo Sapiens
SSSSSSSSSSSSS

SEQ ID NO: 25041 - protein, 13 aa, Homo Sapiens
SSSSSSSSSSSSS

SEQ ID NO: 25042 - protein, 13 aa, Homo Sapiens
SSSSSSSSSSSSS

SEQ ID NO: 25043 - protein, 13 aa, Homo Sapiens
SSSSSSSSSSSSS

SEQ ID NO: 25044 - protein, 13 aa, Homo Sapiens
SSSSSSSSSSSSS

SEQ ID NO: 25045 - protein, 13 aa, Homo Sapiens
SSSSSSSSSSSSS

SEQ ID NO: 25046 - protein, 13 aa, Homo Sapiens
SSSSSSSSSSSSS

SEQ ID NO: 25047 - protein, 13 aa, Homo Sapiens
SSSSSSSSSSSSS

SEQ ID NO: 25048 - protein, 13 aa, Homo Sapiens
SSSSSSSSSSSSS

SEQ ID NO: 25049 - protein, 13 aa, Homo Sapiens
SSSSSSSSSSSSS

SEQ ID NO: 25050 - protein, 13 aa, Homo Sapiens
SSSSSSSSSSSSS

SEQ ID NO: 25051 - protein, 13 aa, Homo Sapiens
SSSSSSSSSSSSS

SEQ ID NO: 25052 - protein, 13 aa, Homo Sapiens
SSSSSSSSSSSSS

SEQ ID NO: 25053 - protein, 13 aa, Homo Sapiens
SSSSSSSSSSSSS

SEQ ID NO: 25054 - protein, 13 aa, Homo Sapiens
SSSSSSSSSSSSS

SEQ ID NO: 25055 - protein, 13 aa, Homo Sapiens
SSSSSSSSSSSSS

SEQ ID NO: 25056 - protein, 13 aa, Homo Sapiens
SSSSSSSSSSSSS

SEQ ID NO: 25057 - protein, 13 aa, Homo Sapiens
SSSSSSSSSSSSS

SEQ ID NO: 25058 - protein, 13 aa, Homo Sapiens
SSSSSSSSSSSSS

SEQ ID NO: 25059 - protein, 13 aa, Homo Sapiens
SSSSSSSSSSSSS

SEQ ID NO: 25060 - protein, 13 aa, Homo Sapiens
SSSSSSSSSSSSS

SEQ ID NO: 25061 - protein, 13 aa, Homo Sapiens
SSSSSSSSSSSSS

SEQ ID NO: 25062 - protein, 13 aa, Homo Sapiens
SSSSSSSSSSSSS

SEQ ID NO: 25063 - protein, 13 aa, Homo Sapiens
SSSSSSSSSSSSS

SEQ ID NO: 25064 - protein, 13 aa, Homo Sapiens
SSSSSSSSSSSSS

SEQ ID NO: 25065 - protein, 13 aa, Homo Sapiens
SSSSSSSSSSSSS

SEQ ID NO: 25066 - protein, 13 aa, Homo Sapiens
SSSSSSSSSSSSP

SEQ ID NO: 25067 - protein, 13 aa, Homo Sapiens
SSSSSSSSSSSPS

SEQ ID NO: 25068 - protein, 13 aa, Homo Sapiens
SSSSSSSSSSPSP

SEQ ID NO: 25069 - protein, 13 aa, Homo Sapiens
SSSSSSSSSPSPA

SEQ ID NO: 25070 - protein, 13 aa, Homo Sapiens
SSSSSSSSPSPAK

SEQ ID NO: 25071 - protein, 13 aa, Homo Sapiens
SSSSSSSPSPAKP

SEQ ID NO: 25072 - protein, 13 aa, Homo Sapiens
SSSSSSPSPAKPG

SEQ ID NO: 25073 - protein, 13 aa, Homo Sapiens
SSSSSPSPAKPGP

SEQ ID NO: 25074 - protein, 13 aa, Homo Sapiens
SSSSPSPAKPGPQ

SEQ ID NO: 25075 - protein, 13 aa, Homo Sapiens
SSSPSPAKPGPQA

SEQ ID NO: 25076 - protein, 13 aa, Homo Sapiens
SSPSPAKPGPQAL

SEQ ID NO: 25077 - protein, 13 aa, Homo Sapiens
SPSPAKPGPQALP

SEQ ID NO: 25078 - protein, 13 aa, Homo Sapiens
PSPAKPGPQALPK

SEQ ID NO: 25079 - protein, 13 aa, Homo Sapiens
SPAKPGPQALPKP

SEQ ID NO: 25080 - protein, 13 aa, Homo Sapiens
PAKPGPQALPKPA

SEQ ID NO: 25081 - protein, 13 aa, Homo Sapiens
AKPGPQALPKPAS

SEQ ID NO: 25082 - protein, 13 aa, Homo Sapiens
KPGPQALPKPASP

SEQ ID NO: 25083 - protein, 13 aa, Homo Sapiens
PGPQALPKPASPK

SEQ ID NO: 25084 - protein, 13 aa, Homo Sapiens
GPQALPKPASPKK

SEQ ID NO: 25085 - protein, 13 aa, Homo Sapiens
PQALPKPASPKKP

SEQ ID NO: 25086 - protein, 13 aa, Homo Sapiens
QALPKPASPKKPP

SEQ ID NO: 25087 - protein, 13 aa, Homo Sapiens
ALPKPASPKKPPP

SEQ ID NO: 25088 - protein, 13 aa, Homo Sapiens
LPKPASPKKPPPG

SEQ ID NO: 25089 - protein, 13 aa, Homo Sapiens
PKPASPKKPPPGE

SEQ ID NO: 25090 - protein, 13 aa, Homo Sapiens
KPASPKKPPPGER

SEQ ID NO: 25091 - protein, 13 aa, Homo Sapiens
PASPKKPPPGERR

SEQ ID NO: 25092 - protein, 13 aa, Homo Sapiens
ASPKKPPPGERRS

SEQ ID NO: 25093 - protein, 13 aa, Homo Sapiens
SPKKPPPGERRSR

SEQ ID NO: 25094 - protein, 13 aa, Homo Sapiens
PKKPPPGERRSRS

SEQ ID NO: 25095 - protein, 13 aa, Homo Sapiens
KKPPPGERRSRSP

SEQ ID NO: 25096 - protein, 13 aa, Homo Sapiens
KPPPGERRSRSPR

SEQ ID NO: 25097 - protein, 13 aa, Homo Sapiens
PPPGERRSRSPRK

SEQ ID NO: 25098 - protein, 13 aa, Homo Sapiens
PPGERRSRSPRKP

SEQ ID NO: 25099 - protein, 13 aa, Homo Sapiens
PGERRSRSPRKPI

SEQ ID NO: 25100 - protein, 13 aa, Homo Sapiens
GERRSRSPRKPID

SEQ ID NO: 25101 - protein, 13 aa, Homo Sapiens
ERRSRSPRKPIDS

SEQ ID NO: 25102 - protein, 13 aa, Homo Sapiens
RRSRSPRKPIDSL

SEQ ID NO: 25103 - protein, 13 aa, Homo Sapiens
RSRSPRKPIDSLR

SEQ ID NO: 25104 - protein, 13 aa, Homo Sapiens
SRSPRKPIDSLRD

SEQ ID NO: 25105 - protein, 13 aa, Homo Sapiens
RSPRKPIDSLRDS

SEQ ID NO: 25106 - protein, 13 aa, Homo Sapiens
SPRKPIDSLRDSR

SEQ ID NO: 25107 - protein, 13 aa, Homo Sapiens
PRKPIDSLRDSRS

SEQ ID NO: 25108 - protein, 13 aa, Homo Sapiens
RKPIDSLRDSRSL

SEQ ID NO: 25109 - protein, 13 aa, Homo Sapiens
KPIDSLRDSRSLS

SEQ ID NO: 25110 - protein, 13 aa, Homo Sapiens
PIDSLRDSRSLSY

SEQ ID NO: 25111 - protein, 13 aa, Homo Sapiens
IDSLRDSRSLSYS

SEQ ID NO: 25112 - protein, 13 aa, Homo Sapiens
DSLRDSRSLSYSP

SEQ ID NO: 25113 - protein, 13 aa, Homo Sapiens
SLRDSRSLSYSPV

SEQ ID NO: 25114 - protein, 13 aa, Homo Sapiens
LRDSRSLSYSPVE

SEQ ID NO: 25115 - protein, 13 aa, Homo Sapiens
RDSRSLSYSPVER

SEQ ID NO: 25116 - protein, 13 aa, Homo Sapiens
DSRSLSYSPVERR

SEQ ID NO: 25117 - protein, 13 aa, Homo Sapiens
SRSLSYSPVERRR

SEQ ID NO: 25118 - protein, 13 aa, Homo Sapiens
RSLSYSPVERRRP

SEQ ID NO: 25119 - protein, 13 aa, Homo Sapiens
SLSYSPVERRRPS

SEQ ID NO: 25120 - protein, 13 aa, Homo Sapiens
LSYSPVERRRPSP

SEQ ID NO: 25121 - protein, 13 aa, Homo Sapiens
SYSPVERRRPSPQ

SEQ ID NO: 25122 - protein, 13 aa, Homo Sapiens
YSPVERRRPSPQP

SEQ ID NO: 25123 - protein, 13 aa, Homo Sapiens
SPVERRRPSPQPS

SEQ ID NO: 25124 - protein, 13 aa, Homo Sapiens
PVERRRPSPQPSP

SEQ ID NO: 25125 - protein, 13 aa, Homo Sapiens
VERRRPSPQPSPR

SEQ ID NO: 25126 - protein, 13 aa, Homo Sapiens
ERRRPSPQPSPRD

SEQ ID NO: 25127 - protein, 13 aa, Homo Sapiens
RRRPSPQPSPRDQ

SEQ ID NO: 25128 - protein, 13 aa, Homo Sapiens
RRPSPQPSPRDQQ

SEQ ID NO: 25129 - protein, 13 aa, Homo Sapiens
RPSPQPSPRDQQS

SEQ ID NO: 25130 - protein, 13 aa, Homo Sapiens
PSPQPSPRDQQSS

SEQ ID NO: 25131 - protein, 13 aa, Homo Sapiens
SPQPSPRDQQSSS

SEQ ID NO: 25132 - protein, 13 aa, Homo Sapiens
PQPSPRDQQSSSS

SEQ ID NO: 25133 - protein, 13 aa, Homo Sapiens
QPSPRDQQSSSSE

SEQ ID NO: 25134 - protein, 13 aa, Homo Sapiens
PSPRDQQSSSSER

SEQ ID NO: 25135 - protein, 13 aa, Homo Sapiens
SPRDQQSSSSERG

SEQ ID NO: 25136 - protein, 13 aa, Homo Sapiens
PRDQQSSSSERGS

SEQ ID NO: 25137 - protein, 13 aa, Homo Sapiens
RDQQSSSSERGSR

SEQ ID NO: 25138 - protein, 13 aa, Homo Sapiens
DQQSSSSERGSRR

SEQ ID NO: 25139 - protein, 13 aa, Homo Sapiens
QQSSSSERGSRRG

SEQ ID NO: 25140 - protein, 13 aa, Homo Sapiens
QSSSSERGSRRGQ

SEQ ID NO: 25141 - protein, 13 aa, Homo Sapiens
SSSSERGSRRGQR

SEQ ID NO: 25142 - protein, 13 aa, Homo Sapiens
SSSERGSRRGQRG

SEQ ID NO: 25143 - protein, 13 aa, Homo Sapiens
SSERGSRRGQRGD

SEQ ID NO: 25144 - protein, 13 aa, Homo Sapiens
SERGSRRGQRGDS

SEQ ID NO: 25145 - protein, 13 aa, Homo Sapiens
ERGSRRGQRGDSR

SEQ ID NO: 25146 - protein, 13 aa, Homo Sapiens
RGSRRGQRGDSRS

SEQ ID NO: 25147 - protein, 13 aa, Homo Sapiens
GSRRGQRGDSRSP

SEQ ID NO: 25148 - protein, 13 aa, Homo Sapiens
SRRGQRGDSRSPS

SEQ ID NO: 25149 - protein, 13 aa, Homo Sapiens
RRGQRGDSRSPSH

SEQ ID NO: 25150 - protein, 13 aa, Homo Sapiens
RGQRGDSRSPSHK

SEQ ID NO: 25151 - protein, 13 aa, Homo Sapiens
GQRGDSRSPSHKR

SEQ ID NO: 25152 - protein, 13 aa, Homo Sapiens
QRGDSRSPSHKRR

SEQ ID NO: 25153 - protein, 13 aa, Homo Sapiens
RGDSRSPSHKRRR

SEQ ID NO: 25154 - protein, 13 aa, Homo Sapiens
GDSRSPSHKRRRE

SEQ ID NO: 25155 - protein, 13 aa, Homo Sapiens
DSRSPSHKRRRET

SEQ ID NO: 25156 - protein, 13 aa, Homo Sapiens
SRSPSHKRRRETP

SEQ ID NO: 25157 - protein, 13 aa, Homo Sapiens
RSPSHKRRRETPS

SEQ ID NO: 25158 - protein, 13 aa, Homo Sapiens
SPSHKRRRETPSP

SEQ ID NO: 25159 - protein, 13 aa, Homo Sapiens
PSHKRRRETPSPR

SEQ ID NO: 25160 - protein, 13 aa, Homo Sapiens
SHKRRRETPSPRP

SEQ ID NO: 25161 - protein, 13 aa, Homo Sapiens
HKRRRETPSPRPM

SEQ ID NO: 25162 - protein, 13 aa, Homo Sapiens
KRRRETPSPRPMR

SEQ ID NO: 25163 - protein, 13 aa, Homo Sapiens
RRRETPSPRPMRH

SEQ ID NO: 25164 - protein, 13 aa, Homo Sapiens
RRETPSPRPMRHR

SEQ ID NO: 25165 - protein, 13 aa, Homo Sapiens
RETPSPRPMRHRS

SEQ ID NO: 25166 - protein, 13 aa, Homo Sapiens
ETPSPRPMRHRSS

SEQ ID NO: 25167 - protein, 13 aa, Homo Sapiens
TPSPRPMRHRSSR

SEQ ID NO: 25168 - protein, 13 aa, Homo Sapiens
PSPRPMRHRSSRS

SEQ ID NO: 25169 - protein, 13 aa, Homo Sapiens
SPRPMRHRSSRSP

SEQ ID NO: 25170 - protein, 14 aa, Homo Sapiens
MYNGIGLPTPRGSG

SEQ ID NO: 25171 - protein, 14 aa, Homo Sapiens
YNGIGLPTPRGSGT

SEQ ID NO: 25172 - protein, 14 aa, Homo Sapiens
NGIGLPTPRGSGTN

SEQ ID NO: 25173 - protein, 14 aa, Homo Sapiens
GIGLPTPRGSGTNG

SEQ ID NO: 25174 - protein, 14 aa, Homo Sapiens
IGLPTPRGSGTNGY

SEQ ID NO: 25175 - protein, 14 aa, Homo Sapiens
GLPTPRGSGTNGYV

SEQ ID NO: 25176 - protein, 14 aa, Homo Sapiens
LPTPRGSGTNGYVQ

SEQ ID NO: 25177 - protein, 14 aa, Homo Sapiens
PTPRGSGTNGYVQR

SEQ ID NO: 25178 - protein, 14 aa, Homo Sapiens
TPRGSGTNGYVQRN

SEQ ID NO: 25179 - protein, 14 aa, Homo Sapiens
PRGSGTNGYVQRNL

SEQ ID NO: 25180 - protein, 14 aa, Homo Sapiens
RGSGTNGYVQRNLS

SEQ ID NO: 25181 - protein, 14 aa, Homo Sapiens
GSGTNGYVQRNLSL

SEQ ID NO: 25182 - protein, 14 aa, Homo Sapiens
SGTNGYVQRNLSLV

SEQ ID NO: 25183 - protein, 14 aa, Homo Sapiens
GTNGYVQRNLSLVR

SEQ ID NO: 25184 - protein, 14 aa, Homo Sapiens
TNGYVQRNLSLVRG

SEQ ID NO: 25185 - protein, 14 aa, Homo Sapiens
NGYVQRNLSLVRGR

SEQ ID NO: 25186 - protein, 14 aa, Homo Sapiens
GYVQRNLSLVRGRR

SEQ ID NO: 25187 - protein, 14 aa, Homo Sapiens
YVQRNLSLVRGRRG

SEQ ID NO: 25188 - protein, 14 aa, Homo Sapiens
VQRNLSLVRGRRGE

SEQ ID NO: 25189 - protein, 14 aa, Homo Sapiens
QRNLSLVRGRRGER

SEQ ID NO: 25190 - protein, 14 aa, Homo Sapiens
RNLSLVRGRRGERP

SEQ ID NO: 25191 - protein, 14 aa, Homo Sapiens
NLSLVRGRRGERPD

SEQ ID NO: 25192 - protein, 14 aa, Homo Sapiens
LSLVRGRRGERPDY

SEQ ID NO: 25193 - protein, 14 aa, Homo Sapiens
SLVRGRRGERPDYK

SEQ ID NO: 25194 - protein, 14 aa, Homo Sapiens
LVRGRRGERPDYKG

SEQ ID NO: 25195 - protein, 14 aa, Homo Sapiens
VRGRRGERPDYKGE

SEQ ID NO: 25196 - protein, 14 aa, Homo Sapiens
RGRRGERPDYKGEE

SEQ ID NO: 25197 - protein, 14 aa, Homo Sapiens
GRRGERPDYKGEEE

SEQ ID NO: 25198 - protein, 14 aa, Homo Sapiens
RRGERPDYKGEEEL

SEQ ID NO: 25199 - protein, 14 aa, Homo Sapiens
RGERPDYKGEEELR

SEQ ID NO: 25200 - protein, 14 aa, Homo Sapiens
GERPDYKGEEELRR

SEQ ID NO: 25201 - protein, 14 aa, Homo Sapiens
ERPDYKGEEELRRL

SEQ ID NO: 25202 - protein, 14 aa, Homo Sapiens
RPDYKGEEELRRLE

SEQ ID NO: 25203 - protein, 14 aa, Homo Sapiens
PDYKGEEELRRLEA

SEQ ID NO: 25204 - protein, 14 aa, Homo Sapiens
DYKGEEELRRLEAA

SEQ ID NO: 25205 - protein, 14 aa, Homo Sapiens
YKGEEELRRLEAAL

SEQ ID NO: 25206 - protein, 14 aa, Homo Sapiens
KGEEELRRLEAALV

SEQ ID NO: 25207 - protein, 14 aa, Homo Sapiens
GEEELRRLEAALVK

SEQ ID NO: 25208 - protein, 14 aa, Homo Sapiens
EEELRRLEAALVKR

SEQ ID NO: 25209 - protein, 14 aa, Homo Sapiens
EELRRLEAALVKRP

SEQ ID NO: 25210 - protein, 14 aa, Homo Sapiens
ELRRLEAALVKRPN

SEQ ID NO: 25211 - protein, 14 aa, Homo Sapiens
LRRLEAALVKRPNP

SEQ ID NO: 25212 - protein, 14 aa, Homo Sapiens
RRLEAALVKRPNPD

SEQ ID NO: 25213 - protein, 14 aa, Homo Sapiens
RLEAALVKRPNPDI

SEQ ID NO: 25214 - protein, 14 aa, Homo Sapiens
LEAALVKRPNPDIL

SEQ ID NO: 25215 - protein, 14 aa, Homo Sapiens
EAALVKRPNPDILD

SEQ ID NO: 25216 - protein, 14 aa, Homo Sapiens
AALVKRPNPDILDH

SEQ ID NO: 25217 - protein, 14 aa, Homo Sapiens
ALVKRPNPDILDHE

SEQ ID NO: 25218 - protein, 14 aa, Homo Sapiens
LVKRPNPDILDHER

SEQ ID NO: 25219 - protein, 14 aa, Homo Sapiens
VKRPNPDILDHERK

SEQ ID NO: 25220 - protein, 14 aa, Homo Sapiens
KRPNPDILDHERKR

SEQ ID NO: 25221 - protein, 14 aa, Homo Sapiens
RPNPDILDHERKRR

SEQ ID NO: 25222 - protein, 14 aa, Homo Sapiens
PNPDILDHERKRRV

SEQ ID NO: 25223 - protein, 14 aa, Homo Sapiens
NPDILDHERKRRVE

SEQ ID NO: 25224 - protein, 14 aa, Homo Sapiens
PDILDHERKRRVEL

SEQ ID NO: 25225 - protein, 14 aa, Homo Sapiens
DILDHERKRRVELR

SEQ ID NO: 25226 - protein, 14 aa, Homo Sapiens
ILDHERKRRVELRC

SEQ ID NO: 25227 - protein, 14 aa, Homo Sapiens
LDHERKRRVELRCL

SEQ ID NO: 25228 - protein, 14 aa, Homo Sapiens
DHERKRRVELRCLE

SEQ ID NO: 25229 - protein, 14 aa, Homo Sapiens
HERKRRVELRCLEL

SEQ ID NO: 25230 - protein, 14 aa, Homo Sapiens
ERKRRVELRCLELE

SEQ ID NO: 25231 - protein, 14 aa, Homo Sapiens
RKRRVELRCLELEE

SEQ ID NO: 25232 - protein, 14 aa, Homo Sapiens
KRRVELRCLELEEM

SEQ ID NO: 25233 - protein, 14 aa, Homo Sapiens
RRVELRCLELEEMM

SEQ ID NO: 25234 - protein, 14 aa, Homo Sapiens
RVELRCLELEEMME

SEQ ID NO: 25235 - protein, 14 aa, Homo Sapiens
VELRCLELEEMMEE

SEQ ID NO: 25236 - protein, 14 aa, Homo Sapiens
ELRCLELEEMMEEQ

SEQ ID NO: 25237 - protein, 14 aa, Homo Sapiens
LRCLELEEMMEEQG

SEQ ID NO: 25238 - protein, 14 aa, Homo Sapiens
RCLELEEMMEEQGY

SEQ ID NO: 25239 - protein, 14 aa, Homo Sapiens
CLELEEMMEEQGYE

SEQ ID NO: 25240 - protein, 14 aa, Homo Sapiens
LELEEMMEEQGYEE

SEQ ID NO: 25241 - protein, 14 aa, Homo Sapiens
ELEEMMEEQGYEEQ

SEQ ID NO: 25242 - protein, 14 aa, Homo Sapiens
LEEMMEEQGYEEQQ

SEQ ID NO: 25243 - protein, 14 aa, Homo Sapiens
EEMMEEQGYEEQQI

SEQ ID NO: 25244 - protein, 14 aa, Homo Sapiens
EMMEEQGYEEQQIQ

SEQ ID NO: 25245 - protein, 14 aa, Homo Sapiens
MMEEQGYEEQQIQE

SEQ ID NO: 25246 - protein, 14 aa, Homo Sapiens
MEEQGYEEQQIQEK

SEQ ID NO: 25247 - protein, 14 aa, Homo Sapiens
EEQGYEEQQIQEKV

SEQ ID NO: 25248 - protein, 14 aa, Homo Sapiens
EQGYEEQQIQEKVA

SEQ ID NO: 25249 - protein, 14 aa, Homo Sapiens
QGYEEQQIQEKVAT

SEQ ID NO: 25250 - protein, 14 aa, Homo Sapiens
GYEEQQIQEKVATF

SEQ ID NO: 25251 - protein, 14 aa, Homo Sapiens
YEEQQIQEKVATFR

SEQ ID NO: 25252 - protein, 14 aa, Homo Sapiens
EEQQIQEKVATFRL

SEQ ID NO: 25253 - protein, 14 aa, Homo Sapiens
EQQIQEKVATFRLM

SEQ ID NO: 25254 - protein, 14 aa, Homo Sapiens
QQIQEKVATFRLML

SEQ ID NO: 25255 - protein, 14 aa, Homo Sapiens
QIQEKVATFRLMLL

SEQ ID NO: 25256 - protein, 14 aa, Homo Sapiens
IQEKVATFRLMLLE

SEQ ID NO: 25257 - protein, 14 aa, Homo Sapiens
QEKVATFRLMLLEK

SEQ ID NO: 25258 - protein, 14 aa, Homo Sapiens
EKVATFRLMLLEKD

SEQ ID NO: 25259 - protein, 14 aa, Homo Sapiens
KVATFRLMLLEKDV

SEQ ID NO: 25260 - protein, 14 aa, Homo Sapiens
VATFRLMLLEKDVN

SEQ ID NO: 25261 - protein, 14 aa, Homo Sapiens
ATFRLMLLEKDVNP

SEQ ID NO: 25262 - protein, 14 aa, Homo Sapiens
TFRLMLLEKDVNPG

SEQ ID NO: 25263 - protein, 14 aa, Homo Sapiens
FRLMLLEKDVNPGG

SEQ ID NO: 25264 - protein, 14 aa, Homo Sapiens
RLMLLEKDVNPGGK

SEQ ID NO: 25265 - protein, 14 aa, Homo Sapiens
LMLLEKDVNPGGKE

SEQ ID NO: 25266 - protein, 14 aa, Homo Sapiens
MLLEKDVNPGGKEE

SEQ ID NO: 25267 - protein, 14 aa, Homo Sapiens
LLEKDVNPGGKEET

SEQ ID NO: 25268 - protein, 14 aa, Homo Sapiens
LEKDVNPGGKEETP

SEQ ID NO: 25269 - protein, 14 aa, Homo Sapiens
EKDVNPGGKEETPG

SEQ ID NO: 25270 - protein, 14 aa, Homo Sapiens
KDVNPGGKEETPGQ

SEQ ID NO: 25271 - protein, 14 aa, Homo Sapiens
DVNPGGKEETPGQR

SEQ ID NO: 25272 - protein, 14 aa, Homo Sapiens
VNPGGKEETPGQRP

SEQ ID NO: 25273 - protein, 14 aa, Homo Sapiens
NPGGKEETPGQRPA

SEQ ID NO: 25274 - protein, 14 aa, Homo Sapiens
PGGKEETPGQRPAV

SEQ ID NO: 25275 - protein, 14 aa, Homo Sapiens
GGKEETPGQRPAVT

SEQ ID NO: 25276 - protein, 14 aa, Homo Sapiens
GKEETPGQRPAVTE

SEQ ID NO: 25277 - protein, 14 aa, Homo Sapiens
KEETPGQRPAVTET

SEQ ID NO: 25278 - protein, 14 aa, Homo Sapiens
EETPGQRPAVTETH

SEQ ID NO: 25279 - protein, 14 aa, Homo Sapiens
ETPGQRPAVTETHQ

SEQ ID NO: 25280 - protein, 14 aa, Homo Sapiens
TPGQRPAVTETHQL

SEQ ID NO: 25281 - protein, 14 aa, Homo Sapiens
PGQRPAVTETHQLA

SEQ ID NO: 25282 - protein, 14 aa, Homo Sapiens
GQRPAVTETHQLAE

SEQ ID NO: 25283 - protein, 14 aa, Homo Sapiens
QRPAVTETHQLAEL

SEQ ID NO: 25284 - protein, 14 aa, Homo Sapiens
RPAVTETHQLAELN

SEQ ID NO: 25285 - protein, 14 aa, Homo Sapiens
PAVTETHQLAELNE

SEQ ID NO: 25286 - protein, 14 aa, Homo Sapiens
AVTETHQLAELNEK

SEQ ID NO: 25287 - protein, 14 aa, Homo Sapiens
VTETHQLAELNEKK

SEQ ID NO: 25288 - protein, 14 aa, Homo Sapiens
TETHQLAELNEKKN

SEQ ID NO: 25289 - protein, 14 aa, Homo Sapiens
ETHQLAELNEKKNE

SEQ ID NO: 25290 - protein, 14 aa, Homo Sapiens
THQLAELNEKKNER

SEQ ID NO: 25291 - protein, 14 aa, Homo Sapiens
HQLAELNEKKNERL

SEQ ID NO: 25292 - protein, 14 aa, Homo Sapiens
QLAELNEKKNERLR

SEQ ID NO: 25293 - protein, 14 aa, Homo Sapiens
LAELNEKKNERLRA

SEQ ID NO: 25294 - protein, 14 aa, Homo Sapiens
AELNEKKNERLRAA

SEQ ID NO: 25295 - protein, 14 aa, Homo Sapiens
ELNEKKNERLRAAF

SEQ ID NO: 25296 - protein, 14 aa, Homo Sapiens
LNEKKNERLRAAFG

SEQ ID NO: 25297 - protein, 14 aa, Homo Sapiens
NEKKNERLRAAFGI

SEQ ID NO: 25298 - protein, 14 aa, Homo Sapiens
EKKNERLRAAFGIS

SEQ ID NO: 25299 - protein, 14 aa, Homo Sapiens
KKNERLRAAFGISD

SEQ ID NO: 25300 - protein, 14 aa, Homo Sapiens
KNERLRAAFGISDS

SEQ ID NO: 25301 - protein, 14 aa, Homo Sapiens
NERLRAAFGISDSY

SEQ ID NO: 25302 - protein, 14 aa, Homo Sapiens
ERLRAAFGISDSYV

SEQ ID NO: 25303 - protein, 14 aa, Homo Sapiens
RLRAAFGISDSYVD

SEQ ID NO: 25304 - protein, 14 aa, Homo Sapiens
LRAAFGISDSYVDG

SEQ ID NO: 25305 - protein, 14 aa, Homo Sapiens
RAAFGISDSYVDGS

SEQ ID NO: 25306 - protein, 14 aa, Homo Sapiens
AAFGISDSYVDGSS

SEQ ID NO: 25307 - protein, 14 aa, Homo Sapiens
AFGISDSYVDGSSF

SEQ ID NO: 25308 - protein, 14 aa, Homo Sapiens
FGISDSYVDGSSFD

SEQ ID NO: 25309 - protein, 14 aa, Homo Sapiens
GISDSYVDGSSFDP

SEQ ID NO: 25310 - protein, 14 aa, Homo Sapiens
ISDSYVDGSSFDPQ

SEQ ID NO: 25311 - protein, 14 aa, Homo Sapiens
SDSYVDGSSFDPQR

SEQ ID NO: 25312 - protein, 14 aa, Homo Sapiens
DSYVDGSSFDPQRR

SEQ ID NO: 25313 - protein, 14 aa, Homo Sapiens
SYVDGSSFDPQRRA

SEQ ID NO: 25314 - protein, 14 aa, Homo Sapiens
YVDGSSFDPQRRAR

SEQ ID NO: 25315 - protein, 14 aa, Homo Sapiens
VDGSSFDPQRRARE

SEQ ID NO: 25316 - protein, 14 aa, Homo Sapiens
DGSSFDPQRRAREA

SEQ ID NO: 25317 - protein, 14 aa, Homo Sapiens
GSSFDPQRRAREAK

SEQ ID NO: 25318 - protein, 14 aa, Homo Sapiens
SSFDPQRRAREAKQ

SEQ ID NO: 25319 - protein, 14 aa, Homo Sapiens
SFDPQRRAREAKQP

SEQ ID NO: 25320 - protein, 14 aa, Homo Sapiens
FDPQRRAREAKQPA

SEQ ID NO: 25321 - protein, 14 aa, Homo Sapiens
DPQRRAREAKQPAP

SEQ ID NO: 25322 - protein, 14 aa, Homo Sapiens
PQRRAREAKQPAPE

SEQ ID NO: 25323 - protein, 14 aa, Homo Sapiens
QRRAREAKQPAPEP

SEQ ID NO: 25324 - protein, 14 aa, Homo Sapiens
RRAREAKQPAPEPP

SEQ ID NO: 25325 - protein, 14 aa, Homo Sapiens
RAREAKQPAPEPPK

SEQ ID NO: 25326 - protein, 14 aa, Homo Sapiens
AREAKQPAPEPPKP

SEQ ID NO: 25327 - protein, 14 aa, Homo Sapiens
REAKQPAPEPPKPY

SEQ ID NO: 25328 - protein, 14 aa, Homo Sapiens
EAKQPAPEPPKPYS

SEQ ID NO: 25329 - protein, 14 aa, Homo Sapiens
AKQPAPEPPKPYSL

SEQ ID NO: 25330 - protein, 14 aa, Homo Sapiens
KQPAPEPPKPYSLV

SEQ ID NO: 25331 - protein, 14 aa, Homo Sapiens
QPAPEPPKPYSLVR

SEQ ID NO: 25332 - protein, 14 aa, Homo Sapiens
PAPEPPKPYSLVRE

SEQ ID NO: 25333 - protein, 14 aa, Homo Sapiens
APEPPKPYSLVRES

SEQ ID NO: 25334 - protein, 14 aa, Homo Sapiens
PEPPKPYSLVRESS

SEQ ID NO: 25335 - protein, 14 aa, Homo Sapiens
EPPKPYSLVRESSS

SEQ ID NO: 25336 - protein, 14 aa, Homo Sapiens
PPKPYSLVRESSSS

SEQ ID NO: 25337 - protein, 14 aa, Homo Sapiens
PKPYSLVRESSSSR

SEQ ID NO: 25338 - protein, 14 aa, Homo Sapiens
KPYSLVRESSSSRS

SEQ ID NO: 25339 - protein, 14 aa, Homo Sapiens
PYSLVRESSSSRSP

SEQ ID NO: 25340 - protein, 14 aa, Homo Sapiens
YSLVRESSSSRSPT

SEQ ID NO: 25341 - protein, 14 aa, Homo Sapiens
SLVRESSSSRSPTP

SEQ ID NO: 25342 - protein, 14 aa, Homo Sapiens
LVRESSSSRSPTPK

SEQ ID NO: 25343 - protein, 14 aa, Homo Sapiens
VRESSSSRSPTPKQ

SEQ ID NO: 25344 - protein, 14 aa, Homo Sapiens
RESSSSRSPTPKQK

SEQ ID NO: 25345 - protein, 14 aa, Homo Sapiens
ESSSSRSPTPKQKK

SEQ ID NO: 25346 - protein, 14 aa, Homo Sapiens
SSSSRSPTPKQKKK

SEQ ID NO: 25347 - protein, 14 aa, Homo Sapiens
SSSRSPTPKQKKKK

SEQ ID NO: 25348 - protein, 14 aa, Homo Sapiens
SSRSPTPKQKKKKK

SEQ ID NO: 25349 - protein, 14 aa, Homo Sapiens
SRSPTPKQKKKKKK

SEQ ID NO: 25350 - protein, 14 aa, Homo Sapiens
RSPTPKQKKKKKKK

SEQ ID NO: 25351 - protein, 14 aa, Homo Sapiens
SPTPKQKKKKKKKD

SEQ ID NO: 25352 - protein, 14 aa, Homo Sapiens
PTPKQKKKKKKKDR

SEQ ID NO: 25353 - protein, 14 aa, Homo Sapiens
TPKQKKKKKKKDRG

SEQ ID NO: 25354 - protein, 14 aa, Homo Sapiens
PKQKKKKKKKDRGR

SEQ ID NO: 25355 - protein, 14 aa, Homo Sapiens
KQKKKKKKKDRGRR

SEQ ID NO: 25356 - protein, 14 aa, Homo Sapiens
QKKKKKKKDRGRRS

SEQ ID NO: 25357 - protein, 14 aa, Homo Sapiens
KKKKKKKDRGRRSE

SEQ ID NO: 25358 - protein, 14 aa, Homo Sapiens
KKKKKKDRGRRSES

SEQ ID NO: 25359 - protein, 14 aa, Homo Sapiens
KKKKKDRGRRSESS

SEQ ID NO: 25360 - protein, 14 aa, Homo Sapiens
KKKKDRGRRSESSS

SEQ ID NO: 25361 - protein, 14 aa, Homo Sapiens
KKKDRGRRSESSSP

SEQ ID NO: 25362 - protein, 14 aa, Homo Sapiens
KKDRGRRSESSSPR

SEQ ID NO: 25363 - protein, 14 aa, Homo Sapiens
KDRGRRSESSSPRR

SEQ ID NO: 25364 - protein, 14 aa, Homo Sapiens
DRGRRSESSSPRRE

SEQ ID NO: 25365 - protein, 14 aa, Homo Sapiens
RGRRSESSSPRRER

SEQ ID NO: 25366 - protein, 14 aa, Homo Sapiens
GRRSESSSPRRERK

SEQ ID NO: 25367 - protein, 14 aa, Homo Sapiens
RRSESSSPRRERKK

SEQ ID NO: 25368 - protein, 14 aa, Homo Sapiens
RSESSSPRRERKKS

SEQ ID NO: 25369 - protein, 14 aa, Homo Sapiens
SESSSPRRERKKSS

SEQ ID NO: 25370 - protein, 14 aa, Homo Sapiens
ESSSPRRERKKSSK

SEQ ID NO: 25371 - protein, 14 aa, Homo Sapiens
SSSPRRERKKSSKK

SEQ ID NO: 25372 - protein, 14 aa, Homo Sapiens
SSPRRERKKSSKKK

SEQ ID NO: 25373 - protein, 14 aa, Homo Sapiens
SPRRERKKSSKKKK

SEQ ID NO: 25374 - protein, 14 aa, Homo Sapiens
PRRERKKSSKKKKH

SEQ ID NO: 25375 - protein, 14 aa, Homo Sapiens
RRERKKSSKKKKHR

SEQ ID NO: 25376 - protein, 14 aa, Homo Sapiens
RERKKSSKKKKHRS

SEQ ID NO: 25377 - protein, 14 aa, Homo Sapiens
ERKKSSKKKKHRSE

SEQ ID NO: 25378 - protein, 14 aa, Homo Sapiens
RKKSSKKKKHRSES

SEQ ID NO: 25379 - protein, 14 aa, Homo Sapiens
KKSSKKKKHRSESE

SEQ ID NO: 25380 - protein, 14 aa, Homo Sapiens
KSSKKKKHRSESES

SEQ ID NO: 25381 - protein, 14 aa, Homo Sapiens
SSKKKKHRSESESK

SEQ ID NO: 25382 - protein, 14 aa, Homo Sapiens
SKKKKHRSESESKK

SEQ ID NO: 25383 - protein, 14 aa, Homo Sapiens
KKKKHRSESESKKR

SEQ ID NO: 25384 - protein, 14 aa, Homo Sapiens
KKKHRSESESKKRK

SEQ ID NO: 25385 - protein, 14 aa, Homo Sapiens
KKHRSESESKKRKH

SEQ ID NO: 25386 - protein, 14 aa, Homo Sapiens
KHRSESESKKRKHR

SEQ ID NO: 25387 - protein, 14 aa, Homo Sapiens
HRSESESKKRKHRS

SEQ ID NO: 25388 - protein, 14 aa, Homo Sapiens
RSESESKKRKHRSP

SEQ ID NO: 25389 - protein, 14 aa, Homo Sapiens
SESESKKRKHRSPT

SEQ ID NO: 25390 - protein, 14 aa, Homo Sapiens
ESESKKRKHRSPTP

SEQ ID NO: 25391 - protein, 14 aa, Homo Sapiens
SESKKRKHRSPTPK

SEQ ID NO: 25392 - protein, 14 aa, Homo Sapiens
ESKKRKHRSPTPKS

SEQ ID NO: 25393 - protein, 14 aa, Homo Sapiens
SKKRKHRSPTPKSK

SEQ ID NO: 25394 - protein, 14 aa, Homo Sapiens
KKRKHRSPTPKSKR

SEQ ID NO: 25395 - protein, 14 aa, Homo Sapiens
KRKHRSPTPKSKRK

SEQ ID NO: 25396 - protein, 14 aa, Homo Sapiens
RKHRSPTPKSKRKS

SEQ ID NO: 25397 - protein, 14 aa, Homo Sapiens
KHRSPTPKSKRKSK

SEQ ID NO: 25398 - protein, 14 aa, Homo Sapiens
HRSPTPKSKRKSKD

SEQ ID NO: 25399 - protein, 14 aa, Homo Sapiens
RSPTPKSKRKSKDK

SEQ ID NO: 25400 - protein, 14 aa, Homo Sapiens
SPTPKSKRKSKDKK

SEQ ID NO: 25401 - protein, 14 aa, Homo Sapiens
PTPKSKRKSKDKKR

SEQ ID NO: 25402 - protein, 14 aa, Homo Sapiens
TPKSKRKSKDKKRK

SEQ ID NO: 25403 - protein, 14 aa, Homo Sapiens
PKSKRKSKDKKRKR

SEQ ID NO: 25404 - protein, 14 aa, Homo Sapiens
KSKRKSKDKKRKRS

SEQ ID NO: 25405 - protein, 14 aa, Homo Sapiens
SKRKSKDKKRKRSR

SEQ ID NO: 25406 - protein, 14 aa, Homo Sapiens
KRKSKDKKRKRSRS

SEQ ID NO: 25407 - protein, 14 aa, Homo Sapiens
RKSKDKKRKRSRST

SEQ ID NO: 25408 - protein, 14 aa, Homo Sapiens
KSKDKKRKRSRSTT

SEQ ID NO: 25409 - protein, 14 aa, Homo Sapiens
SKDKKRKRSRSTTP

SEQ ID NO: 25410 - protein, 14 aa, Homo Sapiens
KDKKRKRSRSTTPA

SEQ ID NO: 25411 - protein, 14 aa, Homo Sapiens
DKKRKRSRSTTPAP

SEQ ID NO: 25412 - protein, 14 aa, Homo Sapiens
KKRKRSRSTTPAPK

SEQ ID NO: 25413 - protein, 14 aa, Homo Sapiens
KRKRSRSTTPAPKS

SEQ ID NO: 25414 - protein, 14 aa, Homo Sapiens
RKRSRSTTPAPKSR

SEQ ID NO: 25415 - protein, 14 aa, Homo Sapiens
KRSRSTTPAPKSRR

SEQ ID NO: 25416 - protein, 14 aa, Homo Sapiens
RSRSTTPAPKSRRA

SEQ ID NO: 25417 - protein, 14 aa, Homo Sapiens
SRSTTPAPKSRRAH

SEQ ID NO: 25418 - protein, 14 aa, Homo Sapiens
RSTTPAPKSRRAHR

SEQ ID NO: 25419 - protein, 14 aa, Homo Sapiens
STTPAPKSRRAHRS

SEQ ID NO: 25420 - protein, 14 aa, Homo Sapiens
TTPAPKSRRAHRST

SEQ ID NO: 25421 - protein, 14 aa, Homo Sapiens
TPAPKSRRAHRSTS

SEQ ID NO: 25422 - protein, 14 aa, Homo Sapiens
PAPKSRRAHRSTSA

SEQ ID NO: 25423 - protein, 14 aa, Homo Sapiens
APKSRRAHRSTSAD

SEQ ID NO: 25424 - protein, 14 aa, Homo Sapiens
PKSRRAHRSTSADS

SEQ ID NO: 25425 - protein, 14 aa, Homo Sapiens
KSRRAHRSTSADSA

SEQ ID NO: 25426 - protein, 14 aa, Homo Sapiens
SRRAHRSTSADSAS

SEQ ID NO: 25427 - protein, 14 aa, Homo Sapiens
RRAHRSTSADSASS

SEQ ID NO: 25428 - protein, 14 aa, Homo Sapiens
RAHRSTSADSASSS

SEQ ID NO: 25429 - protein, 14 aa, Homo Sapiens
AHRSTSADSASSSD

SEQ ID NO: 25430 - protein, 14 aa, Homo Sapiens
HRSTSADSASSSDT

SEQ ID NO: 25431 - protein, 14 aa, Homo Sapiens
RSTSADSASSSDTS

SEQ ID NO: 25432 - protein, 14 aa, Homo Sapiens
STSADSASSSDTSR

SEQ ID NO: 25433 - protein, 14 aa, Homo Sapiens
TSADSASSSDTSRS

SEQ ID NO: 25434 - protein, 14 aa, Homo Sapiens
SADSASSSDTSRSR

SEQ ID NO: 25435 - protein, 14 aa, Homo Sapiens
ADSASSSDTSRSRS

SEQ ID NO: 25436 - protein, 14 aa, Homo Sapiens
DSASSSDTSRSRSR

SEQ ID NO: 25437 - protein, 14 aa, Homo Sapiens
SASSSDTSRSRSRS

SEQ ID NO: 25438 - protein, 14 aa, Homo Sapiens
ASSSDTSRSRSRSA

SEQ ID NO: 25439 - protein, 14 aa, Homo Sapiens
SSSDTSRSRSRSAA

SEQ ID NO: 25440 - protein, 14 aa, Homo Sapiens
SSDTSRSRSRSAAA

SEQ ID NO: 25441 - protein, 14 aa, Homo Sapiens
SDTSRSRSRSAAAK

SEQ ID NO: 25442 - protein, 14 aa, Homo Sapiens
DTSRSRSRSAAAKT

SEQ ID NO: 25443 - protein, 14 aa, Homo Sapiens
TSRSRSRSAAAKTH

SEQ ID NO: 25444 - protein, 14 aa, Homo Sapiens
SRSRSRSAAAKTHT

SEQ ID NO: 25445 - protein, 14 aa, Homo Sapiens
RSRSRSAAAKTHTT

SEQ ID NO: 25446 - protein, 14 aa, Homo Sapiens
SRSRSAAAKTHTTA

SEQ ID NO: 25447 - protein, 14 aa, Homo Sapiens
RSRSAAAKTHTTAL

SEQ ID NO: 25448 - protein, 14 aa, Homo Sapiens
SRSAAAKTHTTALA

SEQ ID NO: 25449 - protein, 14 aa, Homo Sapiens
RSAAAKTHTTALAG

SEQ ID NO: 25450 - protein, 14 aa, Homo Sapiens
SAAAKTHTTALAGR

SEQ ID NO: 25451 - protein, 14 aa, Homo Sapiens
AAAKTHTTALAGRS

SEQ ID NO: 25452 - protein, 14 aa, Homo Sapiens
AAKTHTTALAGRSP

SEQ ID NO: 25453 - protein, 14 aa, Homo Sapiens
AKTHTTALAGRSPS

SEQ ID NO: 25454 - protein, 14 aa, Homo Sapiens
KTHTTALAGRSPSP

SEQ ID NO: 25455 - protein, 14 aa, Homo Sapiens
THTTALAGRSPSPA

SEQ ID NO: 25456 - protein, 14 aa, Homo Sapiens
HTTALAGRSPSPAS

SEQ ID NO: 25457 - protein, 14 aa, Homo Sapiens
TTALAGRSPSPASG

SEQ ID NO: 25458 - protein, 14 aa, Homo Sapiens
TALAGRSPSPASGR

SEQ ID NO: 25459 - protein, 14 aa, Homo Sapiens
ALAGRSPSPASGRR

SEQ ID NO: 25460 - protein, 14 aa, Homo Sapiens
LAGRSPSPASGRRG

SEQ ID NO: 25461 - protein, 14 aa, Homo Sapiens
AGRSPSPASGRRGE

SEQ ID NO: 25462 - protein, 14 aa, Homo Sapiens
GRSPSPASGRRGEG

SEQ ID NO: 25463 - protein, 14 aa, Homo Sapiens
RSPSPASGRRGEGD

SEQ ID NO: 25464 - protein, 14 aa, Homo Sapiens
SPSPASGRRGEGDA

SEQ ID NO: 25465 - protein, 14 aa, Homo Sapiens
PSPASGRRGEGDAP

SEQ ID NO: 25466 - protein, 14 aa, Homo Sapiens
SPASGRRGEGDAPF

SEQ ID NO: 25467 - protein, 14 aa, Homo Sapiens
PASGRRGEGDAPFS

SEQ ID NO: 25468 - protein, 14 aa, Homo Sapiens
ASGRRGEGDAPFSE

SEQ ID NO: 25469 - protein, 14 aa, Homo Sapiens
SGRRGEGDAPFSEP

SEQ ID NO: 25470 - protein, 14 aa, Homo Sapiens
GRRGEGDAPFSEPG

SEQ ID NO: 25471 - protein, 14 aa, Homo Sapiens
RRGEGDAPFSEPGT

SEQ ID NO: 25472 - protein, 14 aa, Homo Sapiens
RGEGDAPFSEPGTT

SEQ ID NO: 25473 - protein, 14 aa, Homo Sapiens
GEGDAPFSEPGTTS

SEQ ID NO: 25474 - protein, 14 aa, Homo Sapiens
EGDAPFSEPGTTST

SEQ ID NO: 25475 - protein, 14 aa, Homo Sapiens
GDAPFSEPGTTSTQ

SEQ ID NO: 25476 - protein, 14 aa, Homo Sapiens
DAPFSEPGTTSTQR

SEQ ID NO: 25477 - protein, 14 aa, Homo Sapiens
APFSEPGTTSTQRP

SEQ ID NO: 25478 - protein, 14 aa, Homo Sapiens
PFSEPGTTSTQRPS

SEQ ID NO: 25479 - protein, 14 aa, Homo Sapiens
FSEPGTTSTQRPSS

SEQ ID NO: 25480 - protein, 14 aa, Homo Sapiens
SEPGTTSTQRPSSP

SEQ ID NO: 25481 - protein, 14 aa, Homo Sapiens
EPGTTSTQRPSSPE

SEQ ID NO: 25482 - protein, 14 aa, Homo Sapiens
PGTTSTQRPSSPET

SEQ ID NO: 25483 - protein, 14 aa, Homo Sapiens
GTTSTQRPSSPETA

SEQ ID NO: 25484 - protein, 14 aa, Homo Sapiens
TTSTQRPSSPETAT

SEQ ID NO: 25485 - protein, 14 aa, Homo Sapiens
TSTQRPSSPETATK

SEQ ID NO: 25486 - protein, 14 aa, Homo Sapiens
STQRPSSPETATKQ

SEQ ID NO: 25487 - protein, 14 aa, Homo Sapiens
TQRPSSPETATKQP

SEQ ID NO: 25488 - protein, 14 aa, Homo Sapiens
QRPSSPETATKQPS

SEQ ID NO: 25489 - protein, 14 aa, Homo Sapiens
RPSSPETATKQPSS

SEQ ID NO: 25490 - protein, 14 aa, Homo Sapiens
PSSPETATKQPSSP

SEQ ID NO: 25491 - protein, 14 aa, Homo Sapiens
SSPETATKQPSSPY

SEQ ID NO: 25492 - protein, 14 aa, Homo Sapiens
SPETATKQPSSPYE

SEQ ID NO: 25493 - protein, 14 aa, Homo Sapiens
PETATKQPSSPYED

SEQ ID NO: 25494 - protein, 14 aa, Homo Sapiens
ETATKQPSSPYEDK

SEQ ID NO: 25495 - protein, 14 aa, Homo Sapiens
TATKQPSSPYEDKD

SEQ ID NO: 25496 - protein, 14 aa, Homo Sapiens
ATKQPSSPYEDKDK

SEQ ID NO: 25497 - protein, 14 aa, Homo Sapiens
TKQPSSPYEDKDKD

SEQ ID NO: 25498 - protein, 14 aa, Homo Sapiens
KQPSSPYEDKDKDK

SEQ ID NO: 25499 - protein, 14 aa, Homo Sapiens
QPSSPYEDKDKDKK

SEQ ID NO: 25500 - protein, 14 aa, Homo Sapiens
PSSPYEDKDKDKKE

SEQ ID NO: 25501 - protein, 14 aa, Homo Sapiens
SSPYEDKDKDKKEK

SEQ ID NO: 25502 - protein, 14 aa, Homo Sapiens
SPYEDKDKDKKEKS

SEQ ID NO: 25503 - protein, 14 aa, Homo Sapiens
PYEDKDKDKKEKSA

SEQ ID NO: 25504 - protein, 14 aa, Homo Sapiens
YEDKDKDKKEKSAT

SEQ ID NO: 25505 - protein, 14 aa, Homo Sapiens
EDKDKDKKEKSATR

SEQ ID NO: 25506 - protein, 14 aa, Homo Sapiens
DKDKDKKEKSATRP

SEQ ID NO: 25507 - protein, 14 aa, Homo Sapiens
KDKDKKEKSATRPS

SEQ ID NO: 25508 - protein, 14 aa, Homo Sapiens
DKDKKEKSATRPSP

SEQ ID NO: 25509 - protein, 14 aa, Homo Sapiens
KDKKEKSATRPSPS

SEQ ID NO: 25510 - protein, 14 aa, Homo Sapiens
DKKEKSATRPSPSP

SEQ ID NO: 25511 - protein, 14 aa, Homo Sapiens
KKEKSATRPSPSPE

SEQ ID NO: 25512 - protein, 14 aa, Homo Sapiens
KEKSATRPSPSPER

SEQ ID NO: 25513 - protein, 14 aa, Homo Sapiens
EKSATRPSPSPERS

SEQ ID NO: 25514 - protein, 14 aa, Homo Sapiens
KSATRPSPSPERSS

SEQ ID NO: 25515 - protein, 14 aa, Homo Sapiens
SATRPSPSPERSST

SEQ ID NO: 25516 - protein, 14 aa, Homo Sapiens
ATRPSPSPERSSTG

SEQ ID NO: 25517 - protein, 14 aa, Homo Sapiens
TRPSPSPERSSTGP

SEQ ID NO: 25518 - protein, 14 aa, Homo Sapiens
RPSPSPERSSTGPE

SEQ ID NO: 25519 - protein, 14 aa, Homo Sapiens
PSPSPERSSTGPEP

SEQ ID NO: 25520 - protein, 14 aa, Homo Sapiens
SPSPERSSTGPEPP

SEQ ID NO: 25521 - protein, 14 aa, Homo Sapiens
PSPERSSTGPEPPA

SEQ ID NO: 25522 - protein, 14 aa, Homo Sapiens
SPERSSTGPEPPAP

SEQ ID NO: 25523 - protein, 14 aa, Homo Sapiens
PERSSTGPEPPAPT

SEQ ID NO: 25524 - protein, 14 aa, Homo Sapiens
ERSSTGPEPPAPTP

SEQ ID NO: 25525 - protein, 14 aa, Homo Sapiens
RSSTGPEPPAPTPL

SEQ ID NO: 25526 - protein, 14 aa, Homo Sapiens
SSTGPEPPAPTPLL

SEQ ID NO: 25527 - protein, 14 aa, Homo Sapiens
STGPEPPAPTPLLA

SEQ ID NO: 25528 - protein, 14 aa, Homo Sapiens
TGPEPPAPTPLLAE

SEQ ID NO: 25529 - protein, 14 aa, Homo Sapiens
GPEPPAPTPLLAER

SEQ ID NO: 25530 - protein, 14 aa, Homo Sapiens
PEPPAPTPLLAERH

SEQ ID NO: 25531 - protein, 14 aa, Homo Sapiens
EPPAPTPLLAERHG

SEQ ID NO: 25532 - protein, 14 aa, Homo Sapiens
PPAPTPLLAERHGG

SEQ ID NO: 25533 - protein, 14 aa, Homo Sapiens
PAPTPLLAERHGGS

SEQ ID NO: 25534 - protein, 14 aa, Homo Sapiens
APTPLLAERHGGSP

SEQ ID NO: 25535 - protein, 14 aa, Homo Sapiens
PTPLLAERHGGSPQ

SEQ ID NO: 25536 - protein, 14 aa, Homo Sapiens
TPLLAERHGGSPQP

SEQ ID NO: 25537 - protein, 14 aa, Homo Sapiens
PLLAERHGGSPQPL

SEQ ID NO: 25538 - protein, 14 aa, Homo Sapiens
LLAERHGGSPQPLA

SEQ ID NO: 25539 - protein, 14 aa, Homo Sapiens
LAERHGGSPQPLAT

SEQ ID NO: 25540 - protein, 14 aa, Homo Sapiens
AERHGGSPQPLATT

SEQ ID NO: 25541 - protein, 14 aa, Homo Sapiens
ERHGGSPQPLATTP

SEQ ID NO: 25542 - protein, 14 aa, Homo Sapiens
RHGGSPQPLATTPL

SEQ ID NO: 25543 - protein, 14 aa, Homo Sapiens
HGGSPQPLATTPLS

SEQ ID NO: 25544 - protein, 14 aa, Homo Sapiens
GGSPQPLATTPLSQ

SEQ ID NO: 25545 - protein, 14 aa, Homo Sapiens
GSPQPLATTPLSQE

SEQ ID NO: 25546 - protein, 14 aa, Homo Sapiens
SPQPLATTPLSQEP

SEQ ID NO: 25547 - protein, 14 aa, Homo Sapiens
PQPLATTPLSQEPV

SEQ ID NO: 25548 - protein, 14 aa, Homo Sapiens
QPLATTPLSQEPVN

SEQ ID NO: 25549 - protein, 14 aa, Homo Sapiens
PLATTPLSQEPVNP

SEQ ID NO: 25550 - protein, 14 aa, Homo Sapiens
LATTPLSQEPVNPP

SEQ ID NO: 25551 - protein, 14 aa, Homo Sapiens
ATTPLSQEPVNPPS

SEQ ID NO: 25552 - protein, 14 aa, Homo Sapiens
TTPLSQEPVNPPSE

SEQ ID NO: 25553 - protein, 14 aa, Homo Sapiens
TPLSQEPVNPPSEA

SEQ ID NO: 25554 - protein, 14 aa, Homo Sapiens
PLSQEPVNPPSEAS

SEQ ID NO: 25555 - protein, 14 aa, Homo Sapiens
LSQEPVNPPSEASP

SEQ ID NO: 25556 - protein, 14 aa, Homo Sapiens
SQEPVNPPSEASPT

SEQ ID NO: 25557 - protein, 14 aa, Homo Sapiens
QEPVNPPSEASPTR

SEQ ID NO: 25558 - protein, 14 aa, Homo Sapiens
EPVNPPSEASPTRD

SEQ ID NO: 25559 - protein, 14 aa, Homo Sapiens
PVNPPSEASPTRDR

SEQ ID NO: 25560 - protein, 14 aa, Homo Sapiens
VNPPSEASPTRDRS

SEQ ID NO: 25561 - protein, 14 aa, Homo Sapiens
NPPSEASPTRDRSP

SEQ ID NO: 25562 - protein, 14 aa, Homo Sapiens
PPSEASPTRDRSPP

SEQ ID NO: 25563 - protein, 14 aa, Homo Sapiens
PSEASPTRDRSPPK

SEQ ID NO: 25564 - protein, 14 aa, Homo Sapiens
SEASPTRDRSPPKS

SEQ ID NO: 25565 - protein, 14 aa, Homo Sapiens
EASPTRDRSPPKSP

SEQ ID NO: 25566 - protein, 14 aa, Homo Sapiens
ASPTRDRSPPKSPE

SEQ ID NO: 25567 - protein, 14 aa, Homo Sapiens
SPTRDRSPPKSPEK

SEQ ID NO: 25568 - protein, 14 aa, Homo Sapiens
PTRDRSPPKSPEKL

SEQ ID NO: 25569 - protein, 14 aa, Homo Sapiens
TRDRSPPKSPEKLP

SEQ ID NO: 25570 - protein, 14 aa, Homo Sapiens
RDRSPPKSPEKLPQ

SEQ ID NO: 25571 - protein, 14 aa, Homo Sapiens
DRSPPKSPEKLPQS

SEQ ID NO: 25572 - protein, 14 aa, Homo Sapiens
RSPPKSPEKLPQSS

SEQ ID NO: 25573 - protein, 14 aa, Homo Sapiens
SPPKSPEKLPQSSS

SEQ ID NO: 25574 - protein, 14 aa, Homo Sapiens
PPKSPEKLPQSSSS

SEQ ID NO: 25575 - protein, 14 aa, Homo Sapiens
PKSPEKLPQSSSSE

SEQ ID NO: 25576 - protein, 14 aa, Homo Sapiens
KSPEKLPQSSSSES

SEQ ID NO: 25577 - protein, 14 aa, Homo Sapiens
SPEKLPQSSSSESS

SEQ ID NO: 25578 - protein, 14 aa, Homo Sapiens
PEKLPQSSSSESSP

SEQ ID NO: 25579 - protein, 14 aa, Homo Sapiens
EKLPQSSSSESSPP

SEQ ID NO: 25580 - protein, 14 aa, Homo Sapiens
KLPQSSSSESSPPS

SEQ ID NO: 25581 - protein, 14 aa, Homo Sapiens
LPQSSSSESSPPSP

SEQ ID NO: 25582 - protein, 14 aa, Homo Sapiens
PQSSSSESSPPSPQ

SEQ ID NO: 25583 - protein, 14 aa, Homo Sapiens
QSSSSESSPPSPQP

SEQ ID NO: 25584 - protein, 14 aa, Homo Sapiens
SSSSESSPPSPQPT

SEQ ID NO: 25585 - protein, 14 aa, Homo Sapiens
SSSESSPPSPQPTK

SEQ ID NO: 25586 - protein, 14 aa, Homo Sapiens
SSESSPPSPQPTKV

SEQ ID NO: 25587 - protein, 14 aa, Homo Sapiens
SESSPPSPQPTKVS

SEQ ID NO: 25588 - protein, 14 aa, Homo Sapiens
ESSPPSPQPTKVSR

SEQ ID NO: 25589 - protein, 14 aa, Homo Sapiens
SSPPSPQPTKVSRH

SEQ ID NO: 25590 - protein, 14 aa, Homo Sapiens
SPPSPQPTKVSRHA

SEQ ID NO: 25591 - protein, 14 aa, Homo Sapiens
PPSPQPTKVSRHAS

SEQ ID NO: 25592 - protein, 14 aa, Homo Sapiens
PSPQPTKVSRHASS

SEQ ID NO: 25593 - protein, 14 aa, Homo Sapiens
SPQPTKVSRHASSS

SEQ ID NO: 25594 - protein, 14 aa, Homo Sapiens
PQPTKVSRHASSSP

SEQ ID NO: 25595 - protein, 14 aa, Homo Sapiens
QPTKVSRHASSSPE

SEQ ID NO: 25596 - protein, 14 aa, Homo Sapiens
PTKVSRHASSSPES

SEQ ID NO: 25597 - protein, 14 aa, Homo Sapiens
TKVSRHASSSPESP

SEQ ID NO: 25598 - protein, 14 aa, Homo Sapiens
KVSRHASSSPESPK

SEQ ID NO: 25599 - protein, 14 aa, Homo Sapiens
VSRHASSSPESPKP

SEQ ID NO: 25600 - protein, 14 aa, Homo Sapiens
SRHASSSPESPKPA

SEQ ID NO: 25601 - protein, 14 aa, Homo Sapiens
RHASSSPESPKPAP

SEQ ID NO: 25602 - protein, 14 aa, Homo Sapiens
HASSSPESPKPAPA

SEQ ID NO: 25603 - protein, 14 aa, Homo Sapiens
ASSSPESPKPAPAP

SEQ ID NO: 25604 - protein, 14 aa, Homo Sapiens
SSSPESPKPAPAPG

SEQ ID NO: 25605 - protein, 14 aa, Homo Sapiens
SSPESPKPAPAPGS

SEQ ID NO: 25606 - protein, 14 aa, Homo Sapiens
SPESPKPAPAPGSH

SEQ ID NO: 25607 - protein, 14 aa, Homo Sapiens
PESPKPAPAPGSHR

SEQ ID NO: 25608 - protein, 14 aa, Homo Sapiens
ESPKPAPAPGSHRE

SEQ ID NO: 25609 - protein, 14 aa, Homo Sapiens
SPKPAPAPGSHREI

SEQ ID NO: 25610 - protein, 14 aa, Homo Sapiens
PKPAPAPGSHREIS

SEQ ID NO: 25611 - protein, 14 aa, Homo Sapiens
KPAPAPGSHREISS

SEQ ID NO: 25612 - protein, 14 aa, Homo Sapiens
PAPAPGSHREISSS

SEQ ID NO: 25613 - protein, 14 aa, Homo Sapiens
APAPGSHREISSSP

SEQ ID NO: 25614 - protein, 14 aa, Homo Sapiens
PAPGSHREISSSPT

SEQ ID NO: 25615 - protein, 14 aa, Homo Sapiens
APGSHREISSSPTS

SEQ ID NO: 25616 - protein, 14 aa, Homo Sapiens
PGSHREISSSPTSK

SEQ ID NO: 25617 - protein, 14 aa, Homo Sapiens
GSHREISSSPTSKN

SEQ ID NO: 25618 - protein, 14 aa, Homo Sapiens
SHREISSSPTSKNR

SEQ ID NO: 25619 - protein, 14 aa, Homo Sapiens
HREISSSPTSKNRS

SEQ ID NO: 25620 - protein, 14 aa, Homo Sapiens
REISSSPTSKNRSH

SEQ ID NO: 25621 - protein, 14 aa, Homo Sapiens
EISSSPTSKNRSHG

SEQ ID NO: 25622 - protein, 14 aa, Homo Sapiens
ISSSPTSKNRSHGR

SEQ ID NO: 25623 - protein, 14 aa, Homo Sapiens
SSSPTSKNRSHGRA

SEQ ID NO: 25624 - protein, 14 aa, Homo Sapiens
SSPTSKNRSHGRAK

SEQ ID NO: 25625 - protein, 14 aa, Homo Sapiens
SPTSKNRSHGRAKR

SEQ ID NO: 25626 - protein, 14 aa, Homo Sapiens
PTSKNRSHGRAKRD

SEQ ID NO: 25627 - protein, 14 aa, Homo Sapiens
TSKNRSHGRAKRDK

SEQ ID NO: 25628 - protein, 14 aa, Homo Sapiens
SKNRSHGRAKRDKS

SEQ ID NO: 25629 - protein, 14 aa, Homo Sapiens
KNRSHGRAKRDKSH

SEQ ID NO: 25630 - protein, 14 aa, Homo Sapiens
NRSHGRAKRDKSHS

SEQ ID NO: 25631 - protein, 14 aa, Homo Sapiens
RSHGRAKRDKSHSH

SEQ ID NO: 25632 - protein, 14 aa, Homo Sapiens
SHGRAKRDKSHSHT

SEQ ID NO: 25633 - protein, 14 aa, Homo Sapiens
HGRAKRDKSHSHTP

SEQ ID NO: 25634 - protein, 14 aa, Homo Sapiens
GRAKRDKSHSHTPS

SEQ ID NO: 25635 - protein, 14 aa, Homo Sapiens
RAKRDKSHSHTPSR

SEQ ID NO: 25636 - protein, 14 aa, Homo Sapiens
AKRDKSHSHTPSRR

SEQ ID NO: 25637 - protein, 14 aa, Homo Sapiens
KRDKSHSHTPSRRM

SEQ ID NO: 25638 - protein, 14 aa, Homo Sapiens
RDKSHSHTPSRRMG

SEQ ID NO: 25639 - protein, 14 aa, Homo Sapiens
DKSHSHTPSRRMGR

SEQ ID NO: 25640 - protein, 14 aa, Homo Sapiens
KSHSHTPSRRMGRS

SEQ ID NO: 25641 - protein, 14 aa, Homo Sapiens
SHSHTPSRRMGRSR

SEQ ID NO: 25642 - protein, 14 aa, Homo Sapiens
HSHTPSRRMGRSRS

SEQ ID NO: 25643 - protein, 14 aa, Homo Sapiens
SHTPSRRMGRSRSP

SEQ ID NO: 25644 - protein, 14 aa, Homo Sapiens
HTPSRRMGRSRSPA

SEQ ID NO: 25645 - protein, 14 aa, Homo Sapiens
TPSRRMGRSRSPAT

SEQ ID NO: 25646 - protein, 14 aa, Homo Sapiens
PSRRMGRSRSPATA

SEQ ID NO: 25647 - protein, 14 aa, Homo Sapiens
SRRMGRSRSPATAK

SEQ ID NO: 25648 - protein, 14 aa, Homo Sapiens
RRMGRSRSPATAKR

SEQ ID NO: 25649 - protein, 14 aa, Homo Sapiens
RMGRSRSPATAKRG

SEQ ID NO: 25650 - protein, 14 aa, Homo Sapiens
MGRSRSPATAKRGR

SEQ ID NO: 25651 - protein, 14 aa, Homo Sapiens
GRSRSPATAKRGRS

SEQ ID NO: 25652 - protein, 14 aa, Homo Sapiens
RSRSPATAKRGRSR

SEQ ID NO: 25653 - protein, 14 aa, Homo Sapiens
SRSPATAKRGRSRS

SEQ ID NO: 25654 - protein, 14 aa, Homo Sapiens
RSPATAKRGRSRSR

SEQ ID NO: 25655 - protein, 14 aa, Homo Sapiens
SPATAKRGRSRSRT

SEQ ID NO: 25656 - protein, 14 aa, Homo Sapiens
PATAKRGRSRSRTP

SEQ ID NO: 25657 - protein, 14 aa, Homo Sapiens
ATAKRGRSRSRTPT

SEQ ID NO: 25658 - protein, 14 aa, Homo Sapiens
TAKRGRSRSRTPTK

SEQ ID NO: 25659 - protein, 14 aa, Homo Sapiens
AKRGRSRSRTPTKR

SEQ ID NO: 25660 - protein, 14 aa, Homo Sapiens
KRGRSRSRTPTKRG

SEQ ID NO: 25661 - protein, 14 aa, Homo Sapiens
RGRSRSRTPTKRGH

SEQ ID NO: 25662 - protein, 14 aa, Homo Sapiens
GRSRSRTPTKRGHS

SEQ ID NO: 25663 - protein, 14 aa, Homo Sapiens
RSRSRTPTKRGHSR

SEQ ID NO: 25664 - protein, 14 aa, Homo Sapiens
SRSRTPTKRGHSRS

SEQ ID NO: 25665 - protein, 14 aa, Homo Sapiens
RSRTPTKRGHSRSR

SEQ ID NO: 25666 - protein, 14 aa, Homo Sapiens
SRTPTKRGHSRSRS

SEQ ID NO: 25667 - protein, 14 aa, Homo Sapiens
RTPTKRGHSRSRSP

SEQ ID NO: 25668 - protein, 14 aa, Homo Sapiens
TPTKRGHSRSRSPQ

SEQ ID NO: 25669 - protein, 14 aa, Homo Sapiens
PTKRGHSRSRSPQW

SEQ ID NO: 25670 - protein, 14 aa, Homo Sapiens
TKRGHSRSRSPQWR

SEQ ID NO: 25671 - protein, 14 aa, Homo Sapiens
KRGHSRSRSPQWRR

SEQ ID NO: 25672 - protein, 14 aa, Homo Sapiens
RGHSRSRSPQWRRS

SEQ ID NO: 25673 - protein, 14 aa, Homo Sapiens
GHSRSRSPQWRRSR

SEQ ID NO: 25674 - protein, 14 aa, Homo Sapiens
HSRSRSPQWRRSRS

SEQ ID NO: 25675 - protein, 14 aa, Homo Sapiens
SRSRSPQWRRSRSA

SEQ ID NO: 25676 - protein, 14 aa, Homo Sapiens
RSRSPQWRRSRSAQ

SEQ ID NO: 25677 - protein, 14 aa, Homo Sapiens
SRSPQWRRSRSAQR

SEQ ID NO: 25678 - protein, 14 aa, Homo Sapiens
RSPQWRRSRSAQRW

SEQ ID NO: 25679 - protein, 14 aa, Homo Sapiens
SPQWRRSRSAQRWG

SEQ ID NO: 25680 - protein, 14 aa, Homo Sapiens
PQWRRSRSAQRWGR

SEQ ID NO: 25681 - protein, 14 aa, Homo Sapiens
QWRRSRSAQRWGRS

SEQ ID NO: 25682 - protein, 14 aa, Homo Sapiens
WRRSRSAQRWGRSR

SEQ ID NO: 25683 - protein, 14 aa, Homo Sapiens
RRSRSAQRWGRSRS

SEQ ID NO: 25684 - protein, 14 aa, Homo Sapiens
RSRSAQRWGRSRSP

SEQ ID NO: 25685 - protein, 14 aa, Homo Sapiens
SRSAQRWGRSRSPQ

SEQ ID NO: 25686 - protein, 14 aa, Homo Sapiens
RSAQRWGRSRSPQR

SEQ ID NO: 25687 - protein, 14 aa, Homo Sapiens
SAQRWGRSRSPQRR

SEQ ID NO: 25688 - protein, 14 aa, Homo Sapiens
AQRWGRSRSPQRRG

SEQ ID NO: 25689 - protein, 14 aa, Homo Sapiens
QRWGRSRSPQRRGR

SEQ ID NO: 25690 - protein, 14 aa, Homo Sapiens
RWGRSRSPQRRGRS

SEQ ID NO: 25691 - protein, 14 aa, Homo Sapiens
WGRSRSPQRRGRSR

SEQ ID NO: 25692 - protein, 14 aa, Homo Sapiens
GRSRSPQRRGRSRS

SEQ ID NO: 25693 - protein, 14 aa, Homo Sapiens
RSRSPQRRGRSRSP

SEQ ID NO: 25694 - protein, 14 aa, Homo Sapiens
SRSPQRRGRSRSPQ

SEQ ID NO: 25695 - protein, 14 aa, Homo Sapiens
RSPQRRGRSRSPQR

SEQ ID NO: 25696 - protein, 14 aa, Homo Sapiens
SPQRRGRSRSPQRP

SEQ ID NO: 25697 - protein, 14 aa, Homo Sapiens
PQRRGRSRSPQRPG

SEQ ID NO: 25698 - protein, 14 aa, Homo Sapiens
QRRGRSRSPQRPGW

SEQ ID NO: 25699 - protein, 14 aa, Homo Sapiens
RRGRSRSPQRPGWS

SEQ ID NO: 25700 - protein, 14 aa, Homo Sapiens
RGRSRSPQRPGWSR

SEQ ID NO: 25701 - protein, 14 aa, Homo Sapiens
GRSRSPQRPGWSRS

SEQ ID NO: 25702 - protein, 14 aa, Homo Sapiens
RSRSPQRPGWSRSR

SEQ ID NO: 25703 - protein, 14 aa, Homo Sapiens
SRSPQRPGWSRSRN

SEQ ID NO: 25704 - protein, 14 aa, Homo Sapiens
RSPQRPGWSRSRNT

SEQ ID NO: 25705 - protein, 14 aa, Homo Sapiens
SPQRPGWSRSRNTQ

SEQ ID NO: 25706 - protein, 14 aa, Homo Sapiens
PQRPGWSRSRNTQR

SEQ ID NO: 25707 - protein, 14 aa, Homo Sapiens
QRPGWSRSRNTQRR

SEQ ID NO: 25708 - protein, 14 aa, Homo Sapiens
RPGWSRSRNTQRRG

SEQ ID NO: 25709 - protein, 14 aa, Homo Sapiens
PGWSRSRNTQRRGR

SEQ ID NO: 25710 - protein, 14 aa, Homo Sapiens
GWSRSRNTQRRGRS

SEQ ID NO: 25711 - protein, 14 aa, Homo Sapiens
WSRSRNTQRRGRSR

SEQ ID NO: 25712 - protein, 14 aa, Homo Sapiens
SRSRNTQRRGRSRS

SEQ ID NO: 25713 - protein, 14 aa, Homo Sapiens
RSRNTQRRGRSRSA

SEQ ID NO: 25714 - protein, 14 aa, Homo Sapiens
SRNTQRRGRSRSAR

SEQ ID NO: 25715 - protein, 14 aa, Homo Sapiens
RNTQRRGRSRSARR

SEQ ID NO: 25716 - protein, 14 aa, Homo Sapiens
NTQRRGRSRSARRG

SEQ ID NO: 25717 - protein, 14 aa, Homo Sapiens
TQRRGRSRSARRGR

SEQ ID NO: 25718 - protein, 14 aa, Homo Sapiens
QRRGRSRSARRGRS

SEQ ID NO: 25719 - protein, 14 aa, Homo Sapiens
RRGRSRSARRGRSH

SEQ ID NO: 25720 - protein, 14 aa, Homo Sapiens
RGRSRSARRGRSHS

SEQ ID NO: 25721 - protein, 14 aa, Homo Sapiens
GRSRSARRGRSHSR

SEQ ID NO: 25722 - protein, 14 aa, Homo Sapiens
RSRSARRGRSHSRS

SEQ ID NO: 25723 - protein, 14 aa, Homo Sapiens
SRSARRGRSHSRSP

SEQ ID NO: 25724 - protein, 14 aa, Homo Sapiens
RSARRGRSHSRSPA

SEQ ID NO: 25725 - protein, 14 aa, Homo Sapiens
SARRGRSHSRSPAT

SEQ ID NO: 25726 - protein, 14 aa, Homo Sapiens
ARRGRSHSRSPATR

SEQ ID NO: 25727 - protein, 14 aa, Homo Sapiens
RRGRSHSRSPATRG

SEQ ID NO: 25728 - protein, 14 aa, Homo Sapiens
RGRSHSRSPATRGR

SEQ ID NO: 25729 - protein, 14 aa, Homo Sapiens
GRSHSRSPATRGRS

SEQ ID NO: 25730 - protein, 14 aa, Homo Sapiens
RSHSRSPATRGRSR

SEQ ID NO: 25731 - protein, 14 aa, Homo Sapiens
SHSRSPATRGRSRS

SEQ ID NO: 25732 - protein, 14 aa, Homo Sapiens
HSRSPATRGRSRSR

SEQ ID NO: 25733 - protein, 14 aa, Homo Sapiens
SRSPATRGRSRSRT

SEQ ID NO: 25734 - protein, 14 aa, Homo Sapiens
RSPATRGRSRSRTP

SEQ ID NO: 25735 - protein, 14 aa, Homo Sapiens
SPATRGRSRSRTPA

SEQ ID NO: 25736 - protein, 14 aa, Homo Sapiens
PATRGRSRSRTPAR

SEQ ID NO: 25737 - protein, 14 aa, Homo Sapiens
ATRGRSRSRTPARR

SEQ ID NO: 25738 - protein, 14 aa, Homo Sapiens
TRGRSRSRTPARRG

SEQ ID NO: 25739 - protein, 14 aa, Homo Sapiens
RGRSRSRTPARRGR

SEQ ID NO: 25740 - protein, 14 aa, Homo Sapiens
GRSRSRTPARRGRS

SEQ ID NO: 25741 - protein, 14 aa, Homo Sapiens
RSRSRTPARRGRSR

SEQ ID NO: 25742 - protein, 14 aa, Homo Sapiens
SRSRTPARRGRSRS

SEQ ID NO: 25743 - protein, 14 aa, Homo Sapiens
RSRTPARRGRSRSR

SEQ ID NO: 25744 - protein, 14 aa, Homo Sapiens
SRTPARRGRSRSRT

SEQ ID NO: 25745 - protein, 14 aa, Homo Sapiens
RTPARRGRSRSRTP

SEQ ID NO: 25746 - protein, 14 aa, Homo Sapiens
TPARRGRSRSRTPA

SEQ ID NO: 25747 - protein, 14 aa, Homo Sapiens
PARRGRSRSRTPAR

SEQ ID NO: 25748 - protein, 14 aa, Homo Sapiens
ARRGRSRSRTPARR

SEQ ID NO: 25749 - protein, 14 aa, Homo Sapiens
RRGRSRSRTPARRR

SEQ ID NO: 25750 - protein, 14 aa, Homo Sapiens
RGRSRSRTPARRRS

SEQ ID NO: 25751 - protein, 14 aa, Homo Sapiens
GRSRSRTPARRRSR

SEQ ID NO: 25752 - protein, 14 aa, Homo Sapiens
RSRSRTPARRRSRS

SEQ ID NO: 25753 - protein, 14 aa, Homo Sapiens
SRSRTPARRRSRSR

SEQ ID NO: 25754 - protein, 14 aa, Homo Sapiens
RSRTPARRRSRSRT

SEQ ID NO: 25755 - protein, 14 aa, Homo Sapiens
SRTPARRRSRSRTP

SEQ ID NO: 25756 - protein, 14 aa, Homo Sapiens
RTPARRRSRSRTPT

SEQ ID NO: 25757 - protein, 14 aa, Homo Sapiens
TPARRRSRSRTPTR

SEQ ID NO: 25758 - protein, 14 aa, Homo Sapiens
PARRRSRSRTPTRR

SEQ ID NO: 25759 - protein, 14 aa, Homo Sapiens
ARRRSRSRTPTRRR

SEQ ID NO: 25760 - protein, 14 aa, Homo Sapiens
RRRSRSRTPTRRRS

SEQ ID NO: 25761 - protein, 14 aa, Homo Sapiens
RRSRSRTPTRRRSR

SEQ ID NO: 25762 - protein, 14 aa, Homo Sapiens
RSRSRTPTRRRSRS

SEQ ID NO: 25763 - protein, 14 aa, Homo Sapiens
SRSRTPTRRRSRSR

SEQ ID NO: 25764 - protein, 14 aa, Homo Sapiens
RSRTPTRRRSRSRT

SEQ ID NO: 25765 - protein, 14 aa, Homo Sapiens
SRTPTRRRSRSRTP

SEQ ID NO: 25766 - protein, 14 aa, Homo Sapiens
RTPTRRRSRSRTPA

SEQ ID NO: 25767 - protein, 14 aa, Homo Sapiens
TPTRRRSRSRTPAR

SEQ ID NO: 25768 - protein, 14 aa, Homo Sapiens
PTRRRSRSRTPARR

SEQ ID NO: 25769 - protein, 14 aa, Homo Sapiens
TRRRSRSRTPARRG

SEQ ID NO: 25770 - protein, 14 aa, Homo Sapiens
RRRSRSRTPARRGR

SEQ ID NO: 25771 - protein, 14 aa, Homo Sapiens
RRSRSRTPARRGRS

SEQ ID NO: 25772 - protein, 14 aa, Homo Sapiens
RSRSRTPARRGRSR

SEQ ID NO: 25773 - protein, 14 aa, Homo Sapiens
SRSRTPARRGRSRS

SEQ ID NO: 25774 - protein, 14 aa, Homo Sapiens
RSRTPARRGRSRSR

SEQ ID NO: 25775 - protein, 14 aa, Homo Sapiens
SRTPARRGRSRSRT

SEQ ID NO: 25776 - protein, 14 aa, Homo Sapiens
RTPARRGRSRSRTP

SEQ ID NO: 25777 - protein, 14 aa, Homo Sapiens
TPARRGRSRSRTPA

SEQ ID NO: 25778 - protein, 14 aa, Homo Sapiens
PARRGRSRSRTPAR

SEQ ID NO: 25779 - protein, 14 aa, Homo Sapiens
ARRGRSRSRTPARR

SEQ ID NO: 25780 - protein, 14 aa, Homo Sapiens
RRGRSRSRTPARRR

SEQ ID NO: 25781 - protein, 14 aa, Homo Sapiens
RGRSRSRTPARRRS

SEQ ID NO: 25782 - protein, 14 aa, Homo Sapiens
GRSRSRTPARRRSR

SEQ ID NO: 25783 - protein, 14 aa, Homo Sapiens
RSRSRTPARRRSRT

SEQ ID NO: 25784 - protein, 14 aa, Homo Sapiens
SRSRTPARRRSRTR

SEQ ID NO: 25785 - protein, 14 aa, Homo Sapiens
RSRTPARRRSRTRS

SEQ ID NO: 25786 - protein, 14 aa, Homo Sapiens
SRTPARRRSRTRSP

SEQ ID NO: 25787 - protein, 14 aa, Homo Sapiens
RTPARRRSRTRSPV

SEQ ID NO: 25788 - protein, 14 aa, Homo Sapiens
TPARRRSRTRSPVR

SEQ ID NO: 25789 - protein, 14 aa, Homo Sapiens
PARRRSRTRSPVRR

SEQ ID NO: 25790 - protein, 14 aa, Homo Sapiens
ARRRSRTRSPVRRR

SEQ ID NO: 25791 - protein, 14 aa, Homo Sapiens
RRRSRTRSPVRRRS

SEQ ID NO: 25792 - protein, 14 aa, Homo Sapiens
RRSRTRSPVRRRSR

SEQ ID NO: 25793 - protein, 14 aa, Homo Sapiens
RSRTRSPVRRRSRS

SEQ ID NO: 25794 - protein, 14 aa, Homo Sapiens
SRTRSPVRRRSRSR

SEQ ID NO: 25795 - protein, 14 aa, Homo Sapiens
RTRSPVRRRSRSRS

SEQ ID NO: 25796 - protein, 14 aa, Homo Sapiens
TRSPVRRRSRSRSP

SEQ ID NO: 25797 - protein, 14 aa, Homo Sapiens
RSPVRRRSRSRSPA

SEQ ID NO: 25798 - protein, 14 aa, Homo Sapiens
SPVRRRSRSRSPAR

SEQ ID NO: 25799 - protein, 14 aa, Homo Sapiens
PVRRRSRSRSPARR

SEQ ID NO: 25800 - protein, 14 aa, Homo Sapiens
VRRRSRSRSPARRS

SEQ ID NO: 25801 - protein, 14 aa, Homo Sapiens
RRRSRSRSPARRSG

SEQ ID NO: 25802 - protein, 14 aa, Homo Sapiens
RRSRSRSPARRSGR

SEQ ID NO: 25803 - protein, 14 aa, Homo Sapiens
RSRSRSPARRSGRS

SEQ ID NO: 25804 - protein, 14 aa, Homo Sapiens
SRSRSPARRSGRSR

SEQ ID NO: 25805 - protein, 14 aa, Homo Sapiens
RSRSPARRSGRSRS

SEQ ID NO: 25806 - protein, 14 aa, Homo Sapiens
SRSPARRSGRSRSR

SEQ ID NO: 25807 - protein, 14 aa, Homo Sapiens
RSPARRSGRSRSRT

SEQ ID NO: 25808 - protein, 14 aa, Homo Sapiens
SPARRSGRSRSRTP

SEQ ID NO: 25809 - protein, 14 aa, Homo Sapiens
PARRSGRSRSRTPA

SEQ ID NO: 25810 - protein, 14 aa, Homo Sapiens
ARRSGRSRSRTPAR

SEQ ID NO: 25811 - protein, 14 aa, Homo Sapiens
RRSGRSRSRTPARR

SEQ ID NO: 25812 - protein, 14 aa, Homo Sapiens
RSGRSRSRTPARRG

SEQ ID NO: 25813 - protein, 14 aa, Homo Sapiens
SGRSRSRTPARRGR

SEQ ID NO: 25814 - protein, 14 aa, Homo Sapiens
GRSRSRTPARRGRS

SEQ ID NO: 25815 - protein, 14 aa, Homo Sapiens
RSRSRTPARRGRSR

SEQ ID NO: 25816 - protein, 14 aa, Homo Sapiens
SRSRTPARRGRSRS

SEQ ID NO: 25817 - protein, 14 aa, Homo Sapiens
RSRTPARRGRSRSR

SEQ ID NO: 25818 - protein, 14 aa, Homo Sapiens
SRTPARRGRSRSRT

SEQ ID NO: 25819 - protein, 14 aa, Homo Sapiens
RTPARRGRSRSRTP

SEQ ID NO: 25820 - protein, 14 aa, Homo Sapiens
TPARRGRSRSRTPA

SEQ ID NO: 25821 - protein, 14 aa, Homo Sapiens
PARRGRSRSRTPAR

SEQ ID NO: 25822 - protein, 14 aa, Homo Sapiens
ARRGRSRSRTPARR

SEQ ID NO: 25823 - protein, 14 aa, Homo Sapiens
RRGRSRSRTPARRG

SEQ ID NO: 25824 - protein, 14 aa, Homo Sapiens
RGRSRSRTPARRGR

SEQ ID NO: 25825 - protein, 14 aa, Homo Sapiens
GRSRSRTPARRGRS

SEQ ID NO: 25826 - protein, 14 aa, Homo Sapiens
RSRSRTPARRGRSR

SEQ ID NO: 25827 - protein, 14 aa, Homo Sapiens
SRSRTPARRGRSRS

SEQ ID NO: 25828 - protein, 14 aa, Homo Sapiens
RSRTPARRGRSRSR

SEQ ID NO: 25829 - protein, 14 aa, Homo Sapiens
SRTPARRGRSRSRT

SEQ ID NO: 25830 - protein, 14 aa, Homo Sapiens
RTPARRGRSRSRTP

SEQ ID NO: 25831 - protein, 14 aa, Homo Sapiens
TPARRGRSRSRTPA

SEQ ID NO: 25832 - protein, 14 aa, Homo Sapiens
PARRGRSRSRTPAR

SEQ ID NO: 25833 - protein, 14 aa, Homo Sapiens
ARRGRSRSRTPARR

SEQ ID NO: 25834 - protein, 14 aa, Homo Sapiens
RRGRSRSRTPARRS

SEQ ID NO: 25835 - protein, 14 aa, Homo Sapiens
RGRSRSRTPARRSG

SEQ ID NO: 25836 - protein, 14 aa, Homo Sapiens
GRSRSRTPARRSGR

SEQ ID NO: 25837 - protein, 14 aa, Homo Sapiens
RSRSRTPARRSGRS

SEQ ID NO: 25838 - protein, 14 aa, Homo Sapiens
SRSRTPARRSGRSR

SEQ ID NO: 25839 - protein, 14 aa, Homo Sapiens
RSRTPARRSGRSRS

SEQ ID NO: 25840 - protein, 14 aa, Homo Sapiens
SRTPARRSGRSRSR

SEQ ID NO: 25841 - protein, 14 aa, Homo Sapiens
RTPARRSGRSRSRT

SEQ ID NO: 25842 - protein, 14 aa, Homo Sapiens
TPARRSGRSRSRTP

SEQ ID NO: 25843 - protein, 14 aa, Homo Sapiens
PARRSGRSRSRTPA

SEQ ID NO: 25844 - protein, 14 aa, Homo Sapiens
ARRSGRSRSRTPAR

SEQ ID NO: 25845 - protein, 14 aa, Homo Sapiens
RRSGRSRSRTPARR

SEQ ID NO: 25846 - protein, 14 aa, Homo Sapiens
RSGRSRSRTPARRG

SEQ ID NO: 25847 - protein, 14 aa, Homo Sapiens
SGRSRSRTPARRGR

SEQ ID NO: 25848 - protein, 14 aa, Homo Sapiens
GRSRSRTPARRGRS

SEQ ID NO: 25849 - protein, 14 aa, Homo Sapiens
RSRSRTPARRGRSR

SEQ ID NO: 25850 - protein, 14 aa, Homo Sapiens
SRSRTPARRGRSRS

SEQ ID NO: 25851 - protein, 14 aa, Homo Sapiens
RSRTPARRGRSRSR

SEQ ID NO: 25852 - protein, 14 aa, Homo Sapiens
SRTPARRGRSRSRT

SEQ ID NO: 25853 - protein, 14 aa, Homo Sapiens
RTPARRGRSRSRTP

SEQ ID NO: 25854 - protein, 14 aa, Homo Sapiens
TPARRGRSRSRTPR

SEQ ID NO: 25855 - protein, 14 aa, Homo Sapiens
PARRGRSRSRTPRR

SEQ ID NO: 25856 - protein, 14 aa, Homo Sapiens
ARRGRSRSRTPRRG

SEQ ID NO: 25857 - protein, 14 aa, Homo Sapiens
RRGRSRSRTPRRGR

SEQ ID NO: 25858 - protein, 14 aa, Homo Sapiens
RGRSRSRTPRRGRS

SEQ ID NO: 25859 - protein, 14 aa, Homo Sapiens
GRSRSRTPRRGRSR

SEQ ID NO: 25860 - protein, 14 aa, Homo Sapiens
RSRSRTPRRGRSRS

SEQ ID NO: 25861 - protein, 14 aa, Homo Sapiens
SRSRTPRRGRSRSR

SEQ ID NO: 25862 - protein, 14 aa, Homo Sapiens
RSRTPRRGRSRSRS

SEQ ID NO: 25863 - protein, 14 aa, Homo Sapiens
SRTPRRGRSRSRSL

SEQ ID NO: 25864 - protein, 14 aa, Homo Sapiens
RTPRRGRSRSRSLV

SEQ ID NO: 25865 - protein, 14 aa, Homo Sapiens
TPRRGRSRSRSLVR

SEQ ID NO: 25866 - protein, 14 aa, Homo Sapiens
PRRGRSRSRSLVRR

SEQ ID NO: 25867 - protein, 14 aa, Homo Sapiens
RRGRSRSRSLVRRG

SEQ ID NO: 25868 - protein, 14 aa, Homo Sapiens
RGRSRSRSLVRRGR

SEQ ID NO: 25869 - protein, 14 aa, Homo Sapiens
GRSRSRSLVRRGRS

SEQ ID NO: 25870 - protein, 14 aa, Homo Sapiens
RSRSRSLVRRGRSH

SEQ ID NO: 25871 - protein, 14 aa, Homo Sapiens
SRSRSLVRRGRSHS

SEQ ID NO: 25872 - protein, 14 aa, Homo Sapiens
RSRSLVRRGRSHSR

SEQ ID NO: 25873 - protein, 14 aa, Homo Sapiens
SRSLVRRGRSHSRT

SEQ ID NO: 25874 - protein, 14 aa, Homo Sapiens
RSLVRRGRSHSRTP

SEQ ID NO: 25875 - protein, 14 aa, Homo Sapiens
SLVRRGRSHSRTPQ

SEQ ID NO: 25876 - protein, 14 aa, Homo Sapiens
LVRRGRSHSRTPQR

SEQ ID NO: 25877 - protein, 14 aa, Homo Sapiens
VRRGRSHSRTPQRR

SEQ ID NO: 25878 - protein, 14 aa, Homo Sapiens
RRGRSHSRTPQRRG

SEQ ID NO: 25879 - protein, 14 aa, Homo Sapiens
RGRSHSRTPQRRGR

SEQ ID NO: 25880 - protein, 14 aa, Homo Sapiens
GRSHSRTPQRRGRS

SEQ ID NO: 25881 - protein, 14 aa, Homo Sapiens
RSHSRTPQRRGRSG

SEQ ID NO: 25882 - protein, 14 aa, Homo Sapiens
SHSRTPQRRGRSGS

SEQ ID NO: 25883 - protein, 14 aa, Homo Sapiens
HSRTPQRRGRSGSS

SEQ ID NO: 25884 - protein, 14 aa, Homo Sapiens
SRTPQRRGRSGSSS

SEQ ID NO: 25885 - protein, 14 aa, Homo Sapiens
RTPQRRGRSGSSSE

SEQ ID NO: 25886 - protein, 14 aa, Homo Sapiens
TPQRRGRSGSSSER

SEQ ID NO: 25887 - protein, 14 aa, Homo Sapiens
PQRRGRSGSSSERK

SEQ ID NO: 25888 - protein, 14 aa, Homo Sapiens
QRRGRSGSSSERKN

SEQ ID NO: 25889 - protein, 14 aa, Homo Sapiens
RRGRSGSSSERKNK

SEQ ID NO: 25890 - protein, 14 aa, Homo Sapiens
RGRSGSSSERKNKS

SEQ ID NO: 25891 - protein, 14 aa, Homo Sapiens
GRSGSSSERKNKSR

SEQ ID NO: 25892 - protein, 14 aa, Homo Sapiens
RSGSSSERKNKSRT

SEQ ID NO: 25893 - protein, 14 aa, Homo Sapiens
SGSSSERKNKSRTS

SEQ ID NO: 25894 - protein, 14 aa, Homo Sapiens
GSSSERKNKSRTSQ

SEQ ID NO: 25895 - protein, 14 aa, Homo Sapiens
SSSERKNKSRTSQR

SEQ ID NO: 25896 - protein, 14 aa, Homo Sapiens
SSERKNKSRTSQRR

SEQ ID NO: 25897 - protein, 14 aa, Homo Sapiens
SERKNKSRTSQRRS

SEQ ID NO: 25898 - protein, 14 aa, Homo Sapiens
ERKNKSRTSQRRSR

SEQ ID NO: 25899 - protein, 14 aa, Homo Sapiens
RKNKSRTSQRRSRS

SEQ ID NO: 25900 - protein, 14 aa, Homo Sapiens
KNKSRTSQRRSRSN

SEQ ID NO: 25901 - protein, 14 aa, Homo Sapiens
NKSRTSQRRSRSNS

SEQ ID NO: 25902 - protein, 14 aa, Homo Sapiens
KSRTSQRRSRSNSS

SEQ ID NO: 25903 - protein, 14 aa, Homo Sapiens
SRTSQRRSRSNSSP

SEQ ID NO: 25904 - protein, 14 aa, Homo Sapiens
RTSQRRSRSNSSPE

SEQ ID NO: 25905 - protein, 14 aa, Homo Sapiens
TSQRRSRSNSSPEM

SEQ ID NO: 25906 - protein, 14 aa, Homo Sapiens
SQRRSRSNSSPEMK

SEQ ID NO: 25907 - protein, 14 aa, Homo Sapiens
QRRSRSNSSPEMKK

SEQ ID NO: 25908 - protein, 14 aa, Homo Sapiens
RRSRSNSSPEMKKS

SEQ ID NO: 25909 - protein, 14 aa, Homo Sapiens
RSRSNSSPEMKKSR

SEQ ID NO: 25910 - protein, 14 aa, Homo Sapiens
SRSNSSPEMKKSRI

SEQ ID NO: 25911 - protein, 14 aa, Homo Sapiens
RSNSSPEMKKSRIS

SEQ ID NO: 25912 - protein, 14 aa, Homo Sapiens
SNSSPEMKKSRISS

SEQ ID NO: 25913 - protein, 14 aa, Homo Sapiens
NSSPEMKKSRISSR

SEQ ID NO: 25914 - protein, 14 aa, Homo Sapiens
SSPEMKKSRISSRR

SEQ ID NO: 25915 - protein, 14 aa, Homo Sapiens
SPEMKKSRISSRRS

SEQ ID NO: 25916 - protein, 14 aa, Homo Sapiens
PEMKKSRISSRRSR

SEQ ID NO: 25917 - protein, 14 aa, Homo Sapiens
EMKKSRISSRRSRS

SEQ ID NO: 25918 - protein, 14 aa, Homo Sapiens
MKKSRISSRRSRSL

SEQ ID NO: 25919 - protein, 14 aa, Homo Sapiens
KKSRISSRRSRSLS

SEQ ID NO: 25920 - protein, 14 aa, Homo Sapiens
KSRISSRRSRSLSS

SEQ ID NO: 25921 - protein, 14 aa, Homo Sapiens
SRISSRRSRSLSSP

SEQ ID NO: 25922 - protein, 14 aa, Homo Sapiens
RISSRRSRSLSSPR

SEQ ID NO: 25923 - protein, 14 aa, Homo Sapiens
ISSRRSRSLSSPRS

SEQ ID NO: 25924 - protein, 14 aa, Homo Sapiens
SSRRSRSLSSPRSK

SEQ ID NO: 25925 - protein, 14 aa, Homo Sapiens
SRRSRSLSSPRSKA

SEQ ID NO: 25926 - protein, 14 aa, Homo Sapiens
RRSRSLSSPRSKAK

SEQ ID NO: 25927 - protein, 14 aa, Homo Sapiens
RSRSLSSPRSKAKS

SEQ ID NO: 25928 - protein, 14 aa, Homo Sapiens
SRSLSSPRSKAKSR

SEQ ID NO: 25929 - protein, 14 aa, Homo Sapiens
RSLSSPRSKAKSRL

SEQ ID NO: 25930 - protein, 14 aa, Homo Sapiens
SLSSPRSKAKSRLS

SEQ ID NO: 25931 - protein, 14 aa, Homo Sapiens
LSSPRSKAKSRLSL

SEQ ID NO: 25932 - protein, 14 aa, Homo Sapiens
SSPRSKAKSRLSLR

SEQ ID NO: 25933 - protein, 14 aa, Homo Sapiens
SPRSKAKSRLSLRR

SEQ ID NO: 25934 - protein, 14 aa, Homo Sapiens
PRSKAKSRLSLRRS

SEQ ID NO: 25935 - protein, 14 aa, Homo Sapiens
RSKAKSRLSLRRSL

SEQ ID NO: 25936 - protein, 14 aa, Homo Sapiens
SKAKSRLSLRRSLS

SEQ ID NO: 25937 - protein, 14 aa, Homo Sapiens
KAKSRLSLRRSLSG

SEQ ID NO: 25938 - protein, 14 aa, Homo Sapiens
AKSRLSLRRSLSGS

SEQ ID NO: 25939 - protein, 14 aa, Homo Sapiens
KSRLSLRRSLSGSS

SEQ ID NO: 25940 - protein, 14 aa, Homo Sapiens
SRLSLRRSLSGSSP

SEQ ID NO: 25941 - protein, 14 aa, Homo Sapiens
RLSLRRSLSGSSPC

SEQ ID NO: 25942 - protein, 14 aa, Homo Sapiens
LSLRRSLSGSSPCP

SEQ ID NO: 25943 - protein, 14 aa, Homo Sapiens
SLRRSLSGSSPCPK

SEQ ID NO: 25944 - protein, 14 aa, Homo Sapiens
LRRSLSGSSPCPKQ

SEQ ID NO: 25945 - protein, 14 aa, Homo Sapiens
RRSLSGSSPCPKQK

SEQ ID NO: 25946 - protein, 14 aa, Homo Sapiens
RSLSGSSPCPKQKS

SEQ ID NO: 25947 - protein, 14 aa, Homo Sapiens
SLSGSSPCPKQKSQ

SEQ ID NO: 25948 - protein, 14 aa, Homo Sapiens
LSGSSPCPKQKSQT

SEQ ID NO: 25949 - protein, 14 aa, Homo Sapiens
SGSSPCPKQKSQTP

SEQ ID NO: 25950 - protein, 14 aa, Homo Sapiens
GSSPCPKQKSQTPP

SEQ ID NO: 25951 - protein, 14 aa, Homo Sapiens
SSPCPKQKSQTPPR

SEQ ID NO: 25952 - protein, 14 aa, Homo Sapiens
SPCPKQKSQTPPRR

SEQ ID NO: 25953 - protein, 14 aa, Homo Sapiens
PCPKQKSQTPPRRS

SEQ ID NO: 25954 - protein, 14 aa, Homo Sapiens
CPKQKSQTPPRRSR

SEQ ID NO: 25955 - protein, 14 aa, Homo Sapiens
PKQKSQTPPRRSRS

SEQ ID NO: 25956 - protein, 14 aa, Homo Sapiens
KQKSQTPPRRSRSG

SEQ ID NO: 25957 - protein, 14 aa, Homo Sapiens
QKSQTPPRRSRSGS

SEQ ID NO: 25958 - protein, 14 aa, Homo Sapiens
KSQTPPRRSRSGSS

SEQ ID NO: 25959 - protein, 14 aa, Homo Sapiens
SQTPPRRSRSGSSQ

SEQ ID NO: 25960 - protein, 14 aa, Homo Sapiens
QTPPRRSRSGSSQP

SEQ ID NO: 25961 - protein, 14 aa, Homo Sapiens
TPPRRSRSGSSQPK

SEQ ID NO: 25962 - protein, 14 aa, Homo Sapiens
PPRRSRSGSSQPKA

SEQ ID NO: 25963 - protein, 14 aa, Homo Sapiens
PRRSRSGSSQPKAK

SEQ ID NO: 25964 - protein, 14 aa, Homo Sapiens
RRSRSGSSQPKAKS

SEQ ID NO: 25965 - protein, 14 aa, Homo Sapiens
RSRSGSSQPKAKSR

SEQ ID NO: 25966 - protein, 14 aa, Homo Sapiens
SRSGSSQPKAKSRT

SEQ ID NO: 25967 - protein, 14 aa, Homo Sapiens
RSGSSQPKAKSRTP

SEQ ID NO: 25968 - protein, 14 aa, Homo Sapiens
SGSSQPKAKSRTPP

SEQ ID NO: 25969 - protein, 14 aa, Homo Sapiens
GSSQPKAKSRTPPR

SEQ ID NO: 25970 - protein, 14 aa, Homo Sapiens
SSQPKAKSRTPPRR

SEQ ID NO: 25971 - protein, 14 aa, Homo Sapiens
SQPKAKSRTPPRRS

SEQ ID NO: 25972 - protein, 14 aa, Homo Sapiens
QPKAKSRTPPRRSR

SEQ ID NO: 25973 - protein, 14 aa, Homo Sapiens
PKAKSRTPPRRSRS

SEQ ID NO: 25974 - protein, 14 aa, Homo Sapiens
KAKSRTPPRRSRSS

SEQ ID NO: 25975 - protein, 14 aa, Homo Sapiens
AKSRTPPRRSRSSS

SEQ ID NO: 25976 - protein, 14 aa, Homo Sapiens
KSRTPPRRSRSSSS

SEQ ID NO: 25977 - protein, 14 aa, Homo Sapiens
SRTPPRRSRSSSSP

SEQ ID NO: 25978 - protein, 14 aa, Homo Sapiens
RTPPRRSRSSSSPP

SEQ ID NO: 25979 - protein, 14 aa, Homo Sapiens
TPPRRSRSSSSPPP

SEQ ID NO: 25980 - protein, 14 aa, Homo Sapiens
PPRRSRSSSSPPPK

SEQ ID NO: 25981 - protein, 14 aa, Homo Sapiens
PRRSRSSSSPPPKQ

SEQ ID NO: 25982 - protein, 14 aa, Homo Sapiens
RRSRSSSSPPPKQK

SEQ ID NO: 25983 - protein, 14 aa, Homo Sapiens
RSRSSSSPPPKQKS

SEQ ID NO: 25984 - protein, 14 aa, Homo Sapiens
SRSSSSPPPKQKSK

SEQ ID NO: 25985 - protein, 14 aa, Homo Sapiens
RSSSSPPPKQKSKT

SEQ ID NO: 25986 - protein, 14 aa, Homo Sapiens
SSSSPPPKQKSKTP

SEQ ID NO: 25987 - protein, 14 aa, Homo Sapiens
SSSPPPKQKSKTPS

SEQ ID NO: 25988 - protein, 14 aa, Homo Sapiens
SSPPPKQKSKTPSR

SEQ ID NO: 25989 - protein, 14 aa, Homo Sapiens
SPPPKQKSKTPSRQ

SEQ ID NO: 25990 - protein, 14 aa, Homo Sapiens
PPPKQKSKTPSRQS

SEQ ID NO: 25991 - protein, 14 aa, Homo Sapiens
PPKQKSKTPSRQSH

SEQ ID NO: 25992 - protein, 14 aa, Homo Sapiens
PKQKSKTPSRQSHS

SEQ ID NO: 25993 - protein, 14 aa, Homo Sapiens
KQKSKTPSRQSHSS

SEQ ID NO: 25994 - protein, 14 aa, Homo Sapiens
QKSKTPSRQSHSSS

SEQ ID NO: 25995 - protein, 14 aa, Homo Sapiens
KSKTPSRQSHSSSS

SEQ ID NO: 25996 - protein, 14 aa, Homo Sapiens
SKTPSRQSHSSSSP

SEQ ID NO: 25997 - protein, 14 aa, Homo Sapiens
KTPSRQSHSSSSPH

SEQ ID NO: 25998 - protein, 14 aa, Homo Sapiens
TPSRQSHSSSSPHP

SEQ ID NO: 25999 - protein, 14 aa, Homo Sapiens
PSRQSHSSSSPHPK

SEQ ID NO: 26000 - protein, 14 aa, Homo Sapiens
SRQSHSSSSPHPKV

SEQ ID NO: 26001 - protein, 14 aa, Homo Sapiens
RQSHSSSSPHPKVK

SEQ ID NO: 26002 - protein, 14 aa, Homo Sapiens
QSHSSSSPHPKVKS

SEQ ID NO: 26003 - protein, 14 aa, Homo Sapiens
SHSSSSPHPKVKSG

SEQ ID NO: 26004 - protein, 14 aa, Homo Sapiens
HSSSSPHPKVKSGT

SEQ ID NO: 26005 - protein, 14 aa, Homo Sapiens
SSSSPHPKVKSGTP

SEQ ID NO: 26006 - protein, 14 aa, Homo Sapiens
SSSPHPKVKSGTPP

SEQ ID NO: 26007 - protein, 14 aa, Homo Sapiens
SSPHPKVKSGTPPR

SEQ ID NO: 26008 - protein, 14 aa, Homo Sapiens
SPHPKVKSGTPPRQ

SEQ ID NO: 26009 - protein, 14 aa, Homo Sapiens
PHPKVKSGTPPRQG

SEQ ID NO: 26010 - protein, 14 aa, Homo Sapiens
HPKVKSGTPPRQGS

SEQ ID NO: 26011 - protein, 14 aa, Homo Sapiens
PKVKSGTPPRQGSI

SEQ ID NO: 26012 - protein, 14 aa, Homo Sapiens
KVKSGTPPRQGSIT

SEQ ID NO: 26013 - protein, 14 aa, Homo Sapiens
VKSGTPPRQGSITS

SEQ ID NO: 26014 - protein, 14 aa, Homo Sapiens
KSGTPPRQGSITSP

SEQ ID NO: 26015 - protein, 14 aa, Homo Sapiens
SGTPPRQGSITSPQ

SEQ ID NO: 26016 - protein, 14 aa, Homo Sapiens
GTPPRQGSITSPQA

SEQ ID NO: 26017 - protein, 14 aa, Homo Sapiens
TPPRQGSITSPQAN

SEQ ID NO: 26018 - protein, 14 aa, Homo Sapiens
PPRQGSITSPQANE

SEQ ID NO: 26019 - protein, 14 aa, Homo Sapiens
PRQGSITSPQANEQ

SEQ ID NO: 26020 - protein, 14 aa, Homo Sapiens
RQGSITSPQANEQS

SEQ ID NO: 26021 - protein, 14 aa, Homo Sapiens
QGSITSPQANEQSV

SEQ ID NO: 26022 - protein, 14 aa, Homo Sapiens
GSITSPQANEQSVT

SEQ ID NO: 26023 - protein, 14 aa, Homo Sapiens
SITSPQANEQSVTP

SEQ ID NO: 26024 - protein, 14 aa, Homo Sapiens
ITSPQANEQSVTPQ

SEQ ID NO: 26025 - protein, 14 aa, Homo Sapiens
TSPQANEQSVTPQR

SEQ ID NO: 26026 - protein, 14 aa, Homo Sapiens
SPQANEQSVTPQRR

SEQ ID NO: 26027 - protein, 14 aa, Homo Sapiens
PQANEQSVTPQRRS

SEQ ID NO: 26028 - protein, 14 aa, Homo Sapiens
QANEQSVTPQRRSC

SEQ ID NO: 26029 - protein, 14 aa, Homo Sapiens
ANEQSVTPQRRSCF

SEQ ID NO: 26030 - protein, 14 aa, Homo Sapiens
NEQSVTPQRRSCFE

SEQ ID NO: 26031 - protein, 14 aa, Homo Sapiens
EQSVTPQRRSCFES

SEQ ID NO: 26032 - protein, 14 aa, Homo Sapiens
QSVTPQRRSCFESS

SEQ ID NO: 26033 - protein, 14 aa, Homo Sapiens
SVTPQRRSCFESSP

SEQ ID NO: 26034 - protein, 14 aa, Homo Sapiens
VTPQRRSCFESSPD

SEQ ID NO: 26035 - protein, 14 aa, Homo Sapiens
TPQRRSCFESSPDP

SEQ ID NO: 26036 - protein, 14 aa, Homo Sapiens
PQRRSCFESSPDPE

SEQ ID NO: 26037 - protein, 14 aa, Homo Sapiens
QRRSCFESSPDPEL

SEQ ID NO: 26038 - protein, 14 aa, Homo Sapiens
RRSCFESSPDPELK

SEQ ID NO: 26039 - protein, 14 aa, Homo Sapiens
RSCFESSPDPELKS

SEQ ID NO: 26040 - protein, 14 aa, Homo Sapiens
SCFESSPDPELKSR

SEQ ID NO: 26041 - protein, 14 aa, Homo Sapiens
CFESSPDPELKSRT

SEQ ID NO: 26042 - protein, 14 aa, Homo Sapiens
FESSPDPELKSRTP

SEQ ID NO: 26043 - protein, 14 aa, Homo Sapiens
ESSPDPELKSRTPS

SEQ ID NO: 26044 - protein, 14 aa, Homo Sapiens
SSPDPELKSRTPSR

SEQ ID NO: 26045 - protein, 14 aa, Homo Sapiens
SPDPELKSRTPSRH

SEQ ID NO: 26046 - protein, 14 aa, Homo Sapiens
PDPELKSRTPSRHS

SEQ ID NO: 26047 - protein, 14 aa, Homo Sapiens
DPELKSRTPSRHSC

SEQ ID NO: 26048 - protein, 14 aa, Homo Sapiens
PELKSRTPSRHSCS

SEQ ID NO: 26049 - protein, 14 aa, Homo Sapiens
ELKSRTPSRHSCSG

SEQ ID NO: 26050 - protein, 14 aa, Homo Sapiens
LKSRTPSRHSCSGS

SEQ ID NO: 26051 - protein, 14 aa, Homo Sapiens
KSRTPSRHSCSGSS

SEQ ID NO: 26052 - protein, 14 aa, Homo Sapiens
SRTPSRHSCSGSSP

SEQ ID NO: 26053 - protein, 14 aa, Homo Sapiens
RTPSRHSCSGSSPP

SEQ ID NO: 26054 - protein, 14 aa, Homo Sapiens
TPSRHSCSGSSPPR

SEQ ID NO: 26055 - protein, 14 aa, Homo Sapiens
PSRHSCSGSSPPRV

SEQ ID NO: 26056 - protein, 14 aa, Homo Sapiens
SRHSCSGSSPPRVK

SEQ ID NO: 26057 - protein, 14 aa, Homo Sapiens
RHSCSGSSPPRVKS

SEQ ID NO: 26058 - protein, 14 aa, Homo Sapiens
HSCSGSSPPRVKSS

SEQ ID NO: 26059 - protein, 14 aa, Homo Sapiens
SCSGSSPPRVKSST

SEQ ID NO: 26060 - protein, 14 aa, Homo Sapiens
CSGSSPPRVKSSTP

SEQ ID NO: 26061 - protein, 14 aa, Homo Sapiens
SGSSPPRVKSSTPP

SEQ ID NO: 26062 - protein, 14 aa, Homo Sapiens
GSSPPRVKSSTPPR

SEQ ID NO: 26063 - protein, 14 aa, Homo Sapiens
SSPPRVKSSTPPRQ

SEQ ID NO: 26064 - protein, 14 aa, Homo Sapiens
SPPRVKSSTPPRQS

SEQ ID NO: 26065 - protein, 14 aa, Homo Sapiens
PPRVKSSTPPRQSP

SEQ ID NO: 26066 - protein, 14 aa, Homo Sapiens
PRVKSSTPPRQSPS

SEQ ID NO: 26067 - protein, 14 aa, Homo Sapiens
RVKSSTPPRQSPSR

SEQ ID NO: 26068 - protein, 14 aa, Homo Sapiens
VKSSTPPRQSPSRS

SEQ ID NO: 26069 - protein, 14 aa, Homo Sapiens
KSSTPPRQSPSRSS

SEQ ID NO: 26070 - protein, 14 aa, Homo Sapiens
SSTPPRQSPSRSSS

SEQ ID NO: 26071 - protein, 14 aa, Homo Sapiens
STPPRQSPSRSSSP

SEQ ID NO: 26072 - protein, 14 aa, Homo Sapiens
TPPRQSPSRSSSPQ

SEQ ID NO: 26073 - protein, 14 aa, Homo Sapiens
PPRQSPSRSSSPQP

SEQ ID NO: 26074 - protein, 14 aa, Homo Sapiens
PRQSPSRSSSPQPK

SEQ ID NO: 26075 - protein, 14 aa, Homo Sapiens
RQSPSRSSSPQPKV

SEQ ID NO: 26076 - protein, 14 aa, Homo Sapiens
QSPSRSSSPQPKVK

SEQ ID NO: 26077 - protein, 14 aa, Homo Sapiens
SPSRSSSPQPKVKA

SEQ ID NO: 26078 - protein, 14 aa, Homo Sapiens
PSRSSSPQPKVKAI

SEQ ID NO: 26079 - protein, 14 aa, Homo Sapiens
SRSSSPQPKVKAII

SEQ ID NO: 26080 - protein, 14 aa, Homo Sapiens
RSSSPQPKVKAIIS

SEQ ID NO: 26081 - protein, 14 aa, Homo Sapiens
SSSPQPKVKAIISP

SEQ ID NO: 26082 - protein, 14 aa, Homo Sapiens
SSPQPKVKAIISPR

SEQ ID NO: 26083 - protein, 14 aa, Homo Sapiens
SPQPKVKAIISPRQ

SEQ ID NO: 26084 - protein, 14 aa, Homo Sapiens
PQPKVKAIISPRQR

SEQ ID NO: 26085 - protein, 14 aa, Homo Sapiens
QPKVKAIISPRQRS

SEQ ID NO: 26086 - protein, 14 aa, Homo Sapiens
PKVKAIISPRQRSH

SEQ ID NO: 26087 - protein, 14 aa, Homo Sapiens
KVKAIISPRQRSHS

SEQ ID NO: 26088 - protein, 14 aa, Homo Sapiens
VKAIISPRQRSHSG

SEQ ID NO: 26089 - protein, 14 aa, Homo Sapiens
KAIISPRQRSHSGS

SEQ ID NO: 26090 - protein, 14 aa, Homo Sapiens
AIISPRQRSHSGSS

SEQ ID NO: 26091 - protein, 14 aa, Homo Sapiens
IISPRQRSHSGSSS

SEQ ID NO: 26092 - protein, 14 aa, Homo Sapiens
ISPRQRSHSGSSSP

SEQ ID NO: 26093 - protein, 14 aa, Homo Sapiens
SPRQRSHSGSSSPS

SEQ ID NO: 26094 - protein, 14 aa, Homo Sapiens
PRQRSHSGSSSPSP

SEQ ID NO: 26095 - protein, 14 aa, Homo Sapiens
RQRSHSGSSSPSPS

SEQ ID NO: 26096 - protein, 14 aa, Homo Sapiens
QRSHSGSSSPSPSR

SEQ ID NO: 26097 - protein, 14 aa, Homo Sapiens
RSHSGSSSPSPSRV

SEQ ID NO: 26098 - protein, 14 aa, Homo Sapiens
SHSGSSSPSPSRVT

SEQ ID NO: 26099 - protein, 14 aa, Homo Sapiens
HSGSSSPSPSRVTS

SEQ ID NO: 26100 - protein, 14 aa, Homo Sapiens
SGSSSPSPSRVTSR

SEQ ID NO: 26101 - protein, 14 aa, Homo Sapiens
GSSSPSPSRVTSRT

SEQ ID NO: 26102 - protein, 14 aa, Homo Sapiens
SSSPSPSRVTSRTT

SEQ ID NO: 26103 - protein, 14 aa, Homo Sapiens
SSPSPSRVTSRTTP

SEQ ID NO: 26104 - protein, 14 aa, Homo Sapiens
SPSPSRVTSRTTPR

SEQ ID NO: 26105 - protein, 14 aa, Homo Sapiens
PSPSRVTSRTTPRR

SEQ ID NO: 26106 - protein, 14 aa, Homo Sapiens
SPSRVTSRTTPRRS

SEQ ID NO: 26107 - protein, 14 aa, Homo Sapiens
PSRVTSRTTPRRSR

SEQ ID NO: 26108 - protein, 14 aa, Homo Sapiens
SRVTSRTTPRRSRS

SEQ ID NO: 26109 - protein, 14 aa, Homo Sapiens
RVTSRTTPRRSRSV

SEQ ID NO: 26110 - protein, 14 aa, Homo Sapiens
VTSRTTPRRSRSVS

SEQ ID NO: 26111 - protein, 14 aa, Homo Sapiens
TSRTTPRRSRSVSP

SEQ ID NO: 26112 - protein, 14 aa, Homo Sapiens
SRTTPRRSRSVSPC

SEQ ID NO: 26113 - protein, 14 aa, Homo Sapiens
RTTPRRSRSVSPCS

SEQ ID NO: 26114 - protein, 14 aa, Homo Sapiens
TTPRRSRSVSPCSN

SEQ ID NO: 26115 - protein, 14 aa, Homo Sapiens
TPRRSRSVSPCSNV

SEQ ID NO: 26116 - protein, 14 aa, Homo Sapiens
PRRSRSVSPCSNVE

SEQ ID NO: 26117 - protein, 14 aa, Homo Sapiens
RRSRSVSPCSNVES

SEQ ID NO: 26118 - protein, 14 aa, Homo Sapiens
RSRSVSPCSNVESR

SEQ ID NO: 26119 - protein, 14 aa, Homo Sapiens
SRSVSPCSNVESRL

SEQ ID NO: 26120 - protein, 14 aa, Homo Sapiens
RSVSPCSNVESRLL

SEQ ID NO: 26121 - protein, 14 aa, Homo Sapiens
SVSPCSNVESRLLP

SEQ ID NO: 26122 - protein, 14 aa, Homo Sapiens
VSPCSNVESRLLPR

SEQ ID NO: 26123 - protein, 14 aa, Homo Sapiens
SPCSNVESRLLPRY

SEQ ID NO: 26124 - protein, 14 aa, Homo Sapiens
PCSNVESRLLPRYS

SEQ ID NO: 26125 - protein, 14 aa, Homo Sapiens
CSNVESRLLPRYSH

SEQ ID NO: 26126 - protein, 14 aa, Homo Sapiens
SNVESRLLPRYSHS

SEQ ID NO: 26127 - protein, 14 aa, Homo Sapiens
NVESRLLPRYSHSG

SEQ ID NO: 26128 - protein, 14 aa, Homo Sapiens
VESRLLPRYSHSGS

SEQ ID NO: 26129 - protein, 14 aa, Homo Sapiens
ESRLLPRYSHSGSS

SEQ ID NO: 26130 - protein, 14 aa, Homo Sapiens
SRLLPRYSHSGSSS

SEQ ID NO: 26131 - protein, 14 aa, Homo Sapiens
RLLPRYSHSGSSSP

SEQ ID NO: 26132 - protein, 14 aa, Homo Sapiens
LLPRYSHSGSSSPD

SEQ ID NO: 26133 - protein, 14 aa, Homo Sapiens
LPRYSHSGSSSPDT

SEQ ID NO: 26134 - protein, 14 aa, Homo Sapiens
PRYSHSGSSSPDTK

SEQ ID NO: 26135 - protein, 14 aa, Homo Sapiens
RYSHSGSSSPDTKV

SEQ ID NO: 26136 - protein, 14 aa, Homo Sapiens
YSHSGSSSPDTKVK

SEQ ID NO: 26137 - protein, 14 aa, Homo Sapiens
SHSGSSSPDTKVKP

SEQ ID NO: 26138 - protein, 14 aa, Homo Sapiens
HSGSSSPDTKVKPE

SEQ ID NO: 26139 - protein, 14 aa, Homo Sapiens
SGSSSPDTKVKPET

SEQ ID NO: 26140 - protein, 14 aa, Homo Sapiens
GSSSPDTKVKPETP

SEQ ID NO: 26141 - protein, 14 aa, Homo Sapiens
SSSPDTKVKPETPP

SEQ ID NO: 26142 - protein, 14 aa, Homo Sapiens
SSPDTKVKPETPPR

SEQ ID NO: 26143 - protein, 14 aa, Homo Sapiens
SPDTKVKPETPPRQ

SEQ ID NO: 26144 - protein, 14 aa, Homo Sapiens
PDTKVKPETPPRQS

SEQ ID NO: 26145 - protein, 14 aa, Homo Sapiens
DTKVKPETPPRQSH

SEQ ID NO: 26146 - protein, 14 aa, Homo Sapiens
TKVKPETPPRQSHS

SEQ ID NO: 26147 - protein, 14 aa, Homo Sapiens
KVKPETPPRQSHSG

SEQ ID NO: 26148 - protein, 14 aa, Homo Sapiens
VKPETPPRQSHSGS

SEQ ID NO: 26149 - protein, 14 aa, Homo Sapiens
KPETPPRQSHSGSI

SEQ ID NO: 26150 - protein, 14 aa, Homo Sapiens
PETPPRQSHSGSIS

SEQ ID NO: 26151 - protein, 14 aa, Homo Sapiens
ETPPRQSHSGSISP

SEQ ID NO: 26152 - protein, 14 aa, Homo Sapiens
TPPRQSHSGSISPY

SEQ ID NO: 26153 - protein, 14 aa, Homo Sapiens
PPRQSHSGSISPYP

SEQ ID NO: 26154 - protein, 14 aa, Homo Sapiens
PRQSHSGSISPYPK

SEQ ID NO: 26155 - protein, 14 aa, Homo Sapiens
RQSHSGSISPYPKV

SEQ ID NO: 26156 - protein, 14 aa, Homo Sapiens
QSHSGSISPYPKVK

SEQ ID NO: 26157 - protein, 14 aa, Homo Sapiens
SHSGSISPYPKVKA

SEQ ID NO: 26158 - protein, 14 aa, Homo Sapiens
HSGSISPYPKVKAQ

SEQ ID NO: 26159 - protein, 14 aa, Homo Sapiens
SGSISPYPKVKAQT

SEQ ID NO: 26160 - protein, 14 aa, Homo Sapiens
GSISPYPKVKAQTP

SEQ ID NO: 26161 - protein, 14 aa, Homo Sapiens
SISPYPKVKAQTPP

SEQ ID NO: 26162 - protein, 14 aa, Homo Sapiens
ISPYPKVKAQTPPG

SEQ ID NO: 26163 - protein, 14 aa, Homo Sapiens
SPYPKVKAQTPPGP

SEQ ID NO: 26164 - protein, 14 aa, Homo Sapiens
PYPKVKAQTPPGPS

SEQ ID NO: 26165 - protein, 14 aa, Homo Sapiens
YPKVKAQTPPGPSL

SEQ ID NO: 26166 - protein, 14 aa, Homo Sapiens
PKVKAQTPPGPSLS

SEQ ID NO: 26167 - protein, 14 aa, Homo Sapiens
KVKAQTPPGPSLSG

SEQ ID NO: 26168 - protein, 14 aa, Homo Sapiens
VKAQTPPGPSLSGS

SEQ ID NO: 26169 - protein, 14 aa, Homo Sapiens
KAQTPPGPSLSGSK

SEQ ID NO: 26170 - protein, 14 aa, Homo Sapiens
AQTPPGPSLSGSKS

SEQ ID NO: 26171 - protein, 14 aa, Homo Sapiens
QTPPGPSLSGSKSP

SEQ ID NO: 26172 - protein, 14 aa, Homo Sapiens
TPPGPSLSGSKSPC

SEQ ID NO: 26173 - protein, 14 aa, Homo Sapiens
PPGPSLSGSKSPCP

SEQ ID NO: 26174 - protein, 14 aa, Homo Sapiens
PGPSLSGSKSPCPQ

SEQ ID NO: 26175 - protein, 14 aa, Homo Sapiens
GPSLSGSKSPCPQE

SEQ ID NO: 26176 - protein, 14 aa, Homo Sapiens
PSLSGSKSPCPQEK

SEQ ID NO: 26177 - protein, 14 aa, Homo Sapiens
SLSGSKSPCPQEKS

SEQ ID NO: 26178 - protein, 14 aa, Homo Sapiens
LSGSKSPCPQEKSK

SEQ ID NO: 26179 - protein, 14 aa, Homo Sapiens
SGSKSPCPQEKSKD

SEQ ID NO: 26180 - protein, 14 aa, Homo Sapiens
GSKSPCPQEKSKDS

SEQ ID NO: 26181 - protein, 14 aa, Homo Sapiens
SKSPCPQEKSKDSL

SEQ ID NO: 26182 - protein, 14 aa, Homo Sapiens
KSPCPQEKSKDSLV

SEQ ID NO: 26183 - protein, 14 aa, Homo Sapiens
SPCPQEKSKDSLVQ

SEQ ID NO: 26184 - protein, 14 aa, Homo Sapiens
PCPQEKSKDSLVQS

SEQ ID NO: 26185 - protein, 14 aa, Homo Sapiens
CPQEKSKDSLVQSC

SEQ ID NO: 26186 - protein, 14 aa, Homo Sapiens
PQEKSKDSLVQSCP

SEQ ID NO: 26187 - protein, 14 aa, Homo Sapiens
QEKSKDSLVQSCPG

SEQ ID NO: 26188 - protein, 14 aa, Homo Sapiens
EKSKDSLVQSCPGS

SEQ ID NO: 26189 - protein, 14 aa, Homo Sapiens
KSKDSLVQSCPGSL

SEQ ID NO: 26190 - protein, 14 aa, Homo Sapiens
SKDSLVQSCPGSLS

SEQ ID NO: 26191 - protein, 14 aa, Homo Sapiens
KDSLVQSCPGSLSL

SEQ ID NO: 26192 - protein, 14 aa, Homo Sapiens
DSLVQSCPGSLSLC

SEQ ID NO: 26193 - protein, 14 aa, Homo Sapiens
SLVQSCPGSLSLCA

SEQ ID NO: 26194 - protein, 14 aa, Homo Sapiens
LVQSCPGSLSLCAG

SEQ ID NO: 26195 - protein, 14 aa, Homo Sapiens
VQSCPGSLSLCAGV

SEQ ID NO: 26196 - protein, 14 aa, Homo Sapiens
QSCPGSLSLCAGVK

SEQ ID NO: 26197 - protein, 14 aa, Homo Sapiens
SCPGSLSLCAGVKS

SEQ ID NO: 26198 - protein, 14 aa, Homo Sapiens
CPGSLSLCAGVKSS

SEQ ID NO: 26199 - protein, 14 aa, Homo Sapiens
PGSLSLCAGVKSST

SEQ ID NO: 26200 - protein, 14 aa, Homo Sapiens
GSLSLCAGVKSSTP

SEQ ID NO: 26201 - protein, 14 aa, Homo Sapiens
SLSLCAGVKSSTPP

SEQ ID NO: 26202 - protein, 14 aa, Homo Sapiens
LSLCAGVKSSTPPG

SEQ ID NO: 26203 - protein, 14 aa, Homo Sapiens
SLCAGVKSSTPPGE

SEQ ID NO: 26204 - protein, 14 aa, Homo Sapiens
LCAGVKSSTPPGES

SEQ ID NO: 26205 - protein, 14 aa, Homo Sapiens
CAGVKSSTPPGESY

SEQ ID NO: 26206 - protein, 14 aa, Homo Sapiens
AGVKSSTPPGESYF

SEQ ID NO: 26207 - protein, 14 aa, Homo Sapiens
GVKSSTPPGESYFG

SEQ ID NO: 26208 - protein, 14 aa, Homo Sapiens
VKSSTPPGESYFGV

SEQ ID NO: 26209 - protein, 14 aa, Homo Sapiens
KSSTPPGESYFGVS

SEQ ID NO: 26210 - protein, 14 aa, Homo Sapiens
SSTPPGESYFGVSS

SEQ ID NO: 26211 - protein, 14 aa, Homo Sapiens
STPPGESYFGVSSL

SEQ ID NO: 26212 - protein, 14 aa, Homo Sapiens
TPPGESYFGVSSLQ

SEQ ID NO: 26213 - protein, 14 aa, Homo Sapiens
PPGESYFGVSSLQL

SEQ ID NO: 26214 - protein, 14 aa, Homo Sapiens
PGESYFGVSSLQLK

SEQ ID NO: 26215 - protein, 14 aa, Homo Sapiens
GESYFGVSSLQLKG

SEQ ID NO: 26216 - protein, 14 aa, Homo Sapiens
ESYFGVSSLQLKGQ

SEQ ID NO: 26217 - protein, 14 aa, Homo Sapiens
SYFGVSSLQLKGQS

SEQ ID NO: 26218 - protein, 14 aa, Homo Sapiens
YFGVSSLQLKGQSQ

SEQ ID NO: 26219 - protein, 14 aa, Homo Sapiens
FGVSSLQLKGQSQT

SEQ ID NO: 26220 - protein, 14 aa, Homo Sapiens
GVSSLQLKGQSQTS

SEQ ID NO: 26221 - protein, 14 aa, Homo Sapiens
VSSLQLKGQSQTSP

SEQ ID NO: 26222 - protein, 14 aa, Homo Sapiens
SSLQLKGQSQTSPD

SEQ ID NO: 26223 - protein, 14 aa, Homo Sapiens
SLQLKGQSQTSPDH

SEQ ID NO: 26224 - protein, 14 aa, Homo Sapiens
LQLKGQSQTSPDHR

SEQ ID NO: 26225 - protein, 14 aa, Homo Sapiens
QLKGQSQTSPDHRS

SEQ ID NO: 26226 - protein, 14 aa, Homo Sapiens
LKGQSQTSPDHRSD

SEQ ID NO: 26227 - protein, 14 aa, Homo Sapiens
KGQSQTSPDHRSDT

SEQ ID NO: 26228 - protein, 14 aa, Homo Sapiens
GQSQTSPDHRSDTS

SEQ ID NO: 26229 - protein, 14 aa, Homo Sapiens
QSQTSPDHRSDTSS

SEQ ID NO: 26230 - protein, 14 aa, Homo Sapiens
SQTSPDHRSDTSSP

SEQ ID NO: 26231 - protein, 14 aa, Homo Sapiens
QTSPDHRSDTSSPE

SEQ ID NO: 26232 - protein, 14 aa, Homo Sapiens
TSPDHRSDTSSPEV

SEQ ID NO: 26233 - protein, 14 aa, Homo Sapiens
SPDHRSDTSSPEVR

SEQ ID NO: 26234 - protein, 14 aa, Homo Sapiens
PDHRSDTSSPEVRQ

SEQ ID NO: 26235 - protein, 14 aa, Homo Sapiens
DHRSDTSSPEVRQS

SEQ ID NO: 26236 - protein, 14 aa, Homo Sapiens
HRSDTSSPEVRQSH

SEQ ID NO: 26237 - protein, 14 aa, Homo Sapiens
RSDTSSPEVRQSHS

SEQ ID NO: 26238 - protein, 14 aa, Homo Sapiens
SDTSSPEVRQSHSE

SEQ ID NO: 26239 - protein, 14 aa, Homo Sapiens
DTSSPEVRQSHSES

SEQ ID NO: 26240 - protein, 14 aa, Homo Sapiens
TSSPEVRQSHSESP

SEQ ID NO: 26241 - protein, 14 aa, Homo Sapiens
SSPEVRQSHSESPS

SEQ ID NO: 26242 - protein, 14 aa, Homo Sapiens
SPEVRQSHSESPSL

SEQ ID NO: 26243 - protein, 14 aa, Homo Sapiens
PEVRQSHSESPSLQ

SEQ ID NO: 26244 - protein, 14 aa, Homo Sapiens
EVRQSHSESPSLQS

SEQ ID NO: 26245 - protein, 14 aa, Homo Sapiens
VRQSHSESPSLQSK

SEQ ID NO: 26246 - protein, 14 aa, Homo Sapiens
RQSHSESPSLQSKS

SEQ ID NO: 26247 - protein, 14 aa, Homo Sapiens
QSHSESPSLQSKSQ

SEQ ID NO: 26248 - protein, 14 aa, Homo Sapiens
SHSESPSLQSKSQT

SEQ ID NO: 26249 - protein, 14 aa, Homo Sapiens
HSESPSLQSKSQTS

SEQ ID NO: 26250 - protein, 14 aa, Homo Sapiens
SESPSLQSKSQTSP

SEQ ID NO: 26251 - protein, 14 aa, Homo Sapiens
ESPSLQSKSQTSPK

SEQ ID NO: 26252 - protein, 14 aa, Homo Sapiens
SPSLQSKSQTSPKG

SEQ ID NO: 26253 - protein, 14 aa, Homo Sapiens
PSLQSKSQTSPKGG

SEQ ID NO: 26254 - protein, 14 aa, Homo Sapiens
SLQSKSQTSPKGGR

SEQ ID NO: 26255 - protein, 14 aa, Homo Sapiens
LQSKSQTSPKGGRS

SEQ ID NO: 26256 - protein, 14 aa, Homo Sapiens
QSKSQTSPKGGRSR

SEQ ID NO: 26257 - protein, 14 aa, Homo Sapiens
SKSQTSPKGGRSRS

SEQ ID NO: 26258 - protein, 14 aa, Homo Sapiens
KSQTSPKGGRSRSS

SEQ ID NO: 26259 - protein, 14 aa, Homo Sapiens
SQTSPKGGRSRSSS

SEQ ID NO: 26260 - protein, 14 aa, Homo Sapiens
QTSPKGGRSRSSSP

SEQ ID NO: 26261 - protein, 14 aa, Homo Sapiens
TSPKGGRSRSSSPV

SEQ ID NO: 26262 - protein, 14 aa, Homo Sapiens
SPKGGRSRSSSPVT

SEQ ID NO: 26263 - protein, 14 aa, Homo Sapiens
PKGGRSRSSSPVTE

SEQ ID NO: 26264 - protein, 14 aa, Homo Sapiens
KGGRSRSSSPVTEL

SEQ ID NO: 26265 - protein, 14 aa, Homo Sapiens
GGRSRSSSPVTELA

SEQ ID NO: 26266 - protein, 14 aa, Homo Sapiens
GRSRSSSPVTELAS

SEQ ID NO: 26267 - protein, 14 aa, Homo Sapiens
RSRSSSPVTELASR

SEQ ID NO: 26268 - protein, 14 aa, Homo Sapiens
SRSSSPVTELASRS

SEQ ID NO: 26269 - protein, 14 aa, Homo Sapiens
RSSSPVTELASRSP

SEQ ID NO: 26270 - protein, 14 aa, Homo Sapiens
SSSPVTELASRSPI

SEQ ID NO: 26271 - protein, 14 aa, Homo Sapiens
SSPVTELASRSPIR

SEQ ID NO: 26272 - protein, 14 aa, Homo Sapiens
SPVTELASRSPIRQ

SEQ ID NO: 26273 - protein, 14 aa, Homo Sapiens
PVTELASRSPIRQD

SEQ ID NO: 26274 - protein, 14 aa, Homo Sapiens
VTELASRSPIRQDR

SEQ ID NO: 26275 - protein, 14 aa, Homo Sapiens
TELASRSPIRQDRG

SEQ ID NO: 26276 - protein, 14 aa, Homo Sapiens
ELASRSPIRQDRGE

SEQ ID NO: 26277 - protein, 14 aa, Homo Sapiens
LASRSPIRQDRGEF

SEQ ID NO: 26278 - protein, 14 aa, Homo Sapiens
ASRSPIRQDRGEFS

SEQ ID NO: 26279 - protein, 14 aa, Homo Sapiens
SRSPIRQDRGEFSA

SEQ ID NO: 26280 - protein, 14 aa, Homo Sapiens
RSPIRQDRGEFSAS

SEQ ID NO: 26281 - protein, 14 aa, Homo Sapiens
SPIRQDRGEFSASP

SEQ ID NO: 26282 - protein, 14 aa, Homo Sapiens
PIRQDRGEFSASPM

SEQ ID NO: 26283 - protein, 14 aa, Homo Sapiens
IRQDRGEFSASPML

SEQ ID NO: 26284 - protein, 14 aa, Homo Sapiens
RQDRGEFSASPMLK

SEQ ID NO: 26285 - protein, 14 aa, Homo Sapiens
QDRGEFSASPMLKS

SEQ ID NO: 26286 - protein, 14 aa, Homo Sapiens
DRGEFSASPMLKSG

SEQ ID NO: 26287 - protein, 14 aa, Homo Sapiens
RGEFSASPMLKSGM

SEQ ID NO: 26288 - protein, 14 aa, Homo Sapiens
GEFSASPMLKSGMS

SEQ ID NO: 26289 - protein, 14 aa, Homo Sapiens
EFSASPMLKSGMSP

SEQ ID NO: 26290 - protein, 14 aa, Homo Sapiens
FSASPMLKSGMSPE

SEQ ID NO: 26291 - protein, 14 aa, Homo Sapiens
SASPMLKSGMSPEQ

SEQ ID NO: 26292 - protein, 14 aa, Homo Sapiens
ASPMLKSGMSPEQS

SEQ ID NO: 26293 - protein, 14 aa, Homo Sapiens
SPMLKSGMSPEQSR

SEQ ID NO: 26294 - protein, 14 aa, Homo Sapiens
PMLKSGMSPEQSRF

SEQ ID NO: 26295 - protein, 14 aa, Homo Sapiens
MLKSGMSPEQSRFQ

SEQ ID NO: 26296 - protein, 14 aa, Homo Sapiens
LKSGMSPEQSRFQS

SEQ ID NO: 26297 - protein, 14 aa, Homo Sapiens
KSGMSPEQSRFQSD

SEQ ID NO: 26298 - protein, 14 aa, Homo Sapiens
SGMSPEQSRFQSDS

SEQ ID NO: 26299 - protein, 14 aa, Homo Sapiens
GMSPEQSRFQSDSS

SEQ ID NO: 26300 - protein, 14 aa, Homo Sapiens
MSPEQSRFQSDSSS

SEQ ID NO: 26301 - protein, 14 aa, Homo Sapiens
SPEQSRFQSDSSSY

SEQ ID NO: 26302 - protein, 14 aa, Homo Sapiens
PEQSRFQSDSSSYP

SEQ ID NO: 26303 - protein, 14 aa, Homo Sapiens
EQSRFQSDSSSYPT

SEQ ID NO: 26304 - protein, 14 aa, Homo Sapiens
QSRFQSDSSSYPTV

SEQ ID NO: 26305 - protein, 14 aa, Homo Sapiens
SRFQSDSSSYPTVD

SEQ ID NO: 26306 - protein, 14 aa, Homo Sapiens
RFQSDSSSYPTVDS

SEQ ID NO: 26307 - protein, 14 aa, Homo Sapiens
FQSDSSSYPTVDSN

SEQ ID NO: 26308 - protein, 14 aa, Homo Sapiens
QSDSSSYPTVDSNS

SEQ ID NO: 26309 - protein, 14 aa, Homo Sapiens
SDSSSYPTVDSNSL

SEQ ID NO: 26310 - protein, 14 aa, Homo Sapiens
DSSSYPTVDSNSLL

SEQ ID NO: 26311 - protein, 14 aa, Homo Sapiens
SSSYPTVDSNSLLG

SEQ ID NO: 26312 - protein, 14 aa, Homo Sapiens
SSYPTVDSNSLLGQ

SEQ ID NO: 26313 - protein, 14 aa, Homo Sapiens
SYPTVDSNSLLGQS

SEQ ID NO: 26314 - protein, 14 aa, Homo Sapiens
YPTVDSNSLLGQSR

SEQ ID NO: 26315 - protein, 14 aa, Homo Sapiens
PTVDSNSLLGQSRL

SEQ ID NO: 26316 - protein, 14 aa, Homo Sapiens
TVDSNSLLGQSRLE

SEQ ID NO: 26317 - protein, 14 aa, Homo Sapiens
VDSNSLLGQSRLET

SEQ ID NO: 26318 - protein, 14 aa, Homo Sapiens
DSNSLLGQSRLETA

SEQ ID NO: 26319 - protein, 14 aa, Homo Sapiens
SNSLLGQSRLETAE

SEQ ID NO: 26320 - protein, 14 aa, Homo Sapiens
NSLLGQSRLETAES

SEQ ID NO: 26321 - protein, 14 aa, Homo Sapiens
SLLGQSRLETAESK

SEQ ID NO: 26322 - protein, 14 aa, Homo Sapiens
LLGQSRLETAESKE

SEQ ID NO: 26323 - protein, 14 aa, Homo Sapiens
LGQSRLETAESKEK

SEQ ID NO: 26324 - protein, 14 aa, Homo Sapiens
GQSRLETAESKEKM

SEQ ID NO: 26325 - protein, 14 aa, Homo Sapiens
QSRLETAESKEKMA

SEQ ID NO: 26326 - protein, 14 aa, Homo Sapiens
SRLETAESKEKMAL

SEQ ID NO: 26327 - protein, 14 aa, Homo Sapiens
RLETAESKEKMALP

SEQ ID NO: 26328 - protein, 14 aa, Homo Sapiens
LETAESKEKMALPP

SEQ ID NO: 26329 - protein, 14 aa, Homo Sapiens
ETAESKEKMALPPQ

SEQ ID NO: 26330 - protein, 14 aa, Homo Sapiens
TAESKEKMALPPQE

SEQ ID NO: 26331 - protein, 14 aa, Homo Sapiens
AESKEKMALPPQED

SEQ ID NO: 26332 - protein, 14 aa, Homo Sapiens
ESKEKMALPPQEDA

SEQ ID NO: 26333 - protein, 14 aa, Homo Sapiens
SKEKMALPPQEDAT

SEQ ID NO: 26334 - protein, 14 aa, Homo Sapiens
KEKMALPPQEDATA

SEQ ID NO: 26335 - protein, 14 aa, Homo Sapiens
EKMALPPQEDATAS

SEQ ID NO: 26336 - protein, 14 aa, Homo Sapiens
KMALPPQEDATASP

SEQ ID NO: 26337 - protein, 14 aa, Homo Sapiens
MALPPQEDATASPP

SEQ ID NO: 26338 - protein, 14 aa, Homo Sapiens
ALPPQEDATASPPR

SEQ ID NO: 26339 - protein, 14 aa, Homo Sapiens
LPPQEDATASPPRQ

SEQ ID NO: 26340 - protein, 14 aa, Homo Sapiens
PPQEDATASPPRQK

SEQ ID NO: 26341 - protein, 14 aa, Homo Sapiens
PQEDATASPPRQKD

SEQ ID NO: 26342 - protein, 14 aa, Homo Sapiens
QEDATASPPRQKDK

SEQ ID NO: 26343 - protein, 14 aa, Homo Sapiens
EDATASPPRQKDKF

SEQ ID NO: 26344 - protein, 14 aa, Homo Sapiens
DATASPPRQKDKFS

SEQ ID NO: 26345 - protein, 14 aa, Homo Sapiens
ATASPPRQKDKFSP

SEQ ID NO: 26346 - protein, 14 aa, Homo Sapiens
TASPPRQKDKFSPF

SEQ ID NO: 26347 - protein, 14 aa, Homo Sapiens
ASPPRQKDKFSPFP

SEQ ID NO: 26348 - protein, 14 aa, Homo Sapiens
SPPRQKDKFSPFPV

SEQ ID NO: 26349 - protein, 14 aa, Homo Sapiens
PPRQKDKFSPFPVQ

SEQ ID NO: 26350 - protein, 14 aa, Homo Sapiens
PRQKDKFSPFPVQD

SEQ ID NO: 26351 - protein, 14 aa, Homo Sapiens
RQKDKFSPFPVQDR

SEQ ID NO: 26352 - protein, 14 aa, Homo Sapiens
QKDKFSPFPVQDRP

SEQ ID NO: 26353 - protein, 14 aa, Homo Sapiens
KDKFSPFPVQDRPE

SEQ ID NO: 26354 - protein, 14 aa, Homo Sapiens
DKFSPFPVQDRPES

SEQ ID NO: 26355 - protein, 14 aa, Homo Sapiens
KFSPFPVQDRPESS

SEQ ID NO: 26356 - protein, 14 aa, Homo Sapiens
FSPFPVQDRPESSL

SEQ ID NO: 26357 - protein, 14 aa, Homo Sapiens
SPFPVQDRPESSLV

SEQ ID NO: 26358 - protein, 14 aa, Homo Sapiens
PFPVQDRPESSLVF

SEQ ID NO: 26359 - protein, 14 aa, Homo Sapiens
FPVQDRPESSLVFK

SEQ ID NO: 26360 - protein, 14 aa, Homo Sapiens
PVQDRPESSLVFKD

SEQ ID NO: 26361 - protein, 14 aa, Homo Sapiens
VQDRPESSLVFKDT

SEQ ID NO: 26362 - protein, 14 aa, Homo Sapiens
QDRPESSLVFKDTL

SEQ ID NO: 26363 - protein, 14 aa, Homo Sapiens
DRPESSLVFKDTLR

SEQ ID NO: 26364 - protein, 14 aa, Homo Sapiens
RPESSLVFKDTLRT

SEQ ID NO: 26365 - protein, 14 aa, Homo Sapiens
PESSLVFKDTLRTP

SEQ ID NO: 26366 - protein, 14 aa, Homo Sapiens
ESSLVFKDTLRTPP

SEQ ID NO: 26367 - protein, 14 aa, Homo Sapiens
SSLVFKDTLRTPPR

SEQ ID NO: 26368 - protein, 14 aa, Homo Sapiens
SLVFKDTLRTPPRE

SEQ ID NO: 26369 - protein, 14 aa, Homo Sapiens
LVFKDTLRTPPRER

SEQ ID NO: 26370 - protein, 14 aa, Homo Sapiens
VFKDTLRTPPRERS

SEQ ID NO: 26371 - protein, 14 aa, Homo Sapiens
FKDTLRTPPRERSG

SEQ ID NO: 26372 - protein, 14 aa, Homo Sapiens
KDTLRTPPRERSGA

SEQ ID NO: 26373 - protein, 14 aa, Homo Sapiens
DTLRTPPRERSGAG

SEQ ID NO: 26374 - protein, 14 aa, Homo Sapiens
TLRTPPRERSGAGS

SEQ ID NO: 26375 - protein, 14 aa, Homo Sapiens
LRTPPRERSGAGSS

SEQ ID NO: 26376 - protein, 14 aa, Homo Sapiens
RTPPRERSGAGSSP

SEQ ID NO: 26377 - protein, 14 aa, Homo Sapiens
TPPRERSGAGSSPE

SEQ ID NO: 26378 - protein, 14 aa, Homo Sapiens
PPRERSGAGSSPET

SEQ ID NO: 26379 - protein, 14 aa, Homo Sapiens
PRERSGAGSSPETK

SEQ ID NO: 26380 - protein, 14 aa, Homo Sapiens
RERSGAGSSPETKE

SEQ ID NO: 26381 - protein, 14 aa, Homo Sapiens
ERSGAGSSPETKEQ

SEQ ID NO: 26382 - protein, 14 aa, Homo Sapiens
RSGAGSSPETKEQN

SEQ ID NO: 26383 - protein, 14 aa, Homo Sapiens
SGAGSSPETKEQNS

SEQ ID NO: 26384 - protein, 14 aa, Homo Sapiens
GAGSSPETKEQNSA

SEQ ID NO: 26385 - protein, 14 aa, Homo Sapiens
AGSSPETKEQNSAL

SEQ ID NO: 26386 - protein, 14 aa, Homo Sapiens
GSSPETKEQNSALP

SEQ ID NO: 26387 - protein, 14 aa, Homo Sapiens
SSPETKEQNSALPT

SEQ ID NO: 26388 - protein, 14 aa, Homo Sapiens
SPETKEQNSALPTS

SEQ ID NO: 26389 - protein, 14 aa, Homo Sapiens
PETKEQNSALPTSS

SEQ ID NO: 26390 - protein, 14 aa, Homo Sapiens
ETKEQNSALPTSSQ

SEQ ID NO: 26391 - protein, 14 aa, Homo Sapiens
TKEQNSALPTSSQD

SEQ ID NO: 26392 - protein, 14 aa, Homo Sapiens
KEQNSALPTSSQDE

SEQ ID NO: 26393 - protein, 14 aa, Homo Sapiens
EQNSALPTSSQDEE

SEQ ID NO: 26394 - protein, 14 aa, Homo Sapiens
QNSALPTSSQDEEL

SEQ ID NO: 26395 - protein, 14 aa, Homo Sapiens
NSALPTSSQDEELM

SEQ ID NO: 26396 - protein, 14 aa, Homo Sapiens
SALPTSSQDEELME

SEQ ID NO: 26397 - protein, 14 aa, Homo Sapiens
ALPTSSQDEELMEV

SEQ ID NO: 26398 - protein, 14 aa, Homo Sapiens
LPTSSQDEELMEVV

SEQ ID NO: 26399 - protein, 14 aa, Homo Sapiens
PTSSQDEELMEVVE

SEQ ID NO: 26400 - protein, 14 aa, Homo Sapiens
TSSQDEELMEVVEK

SEQ ID NO: 26401 - protein, 14 aa, Homo Sapiens
SSQDEELMEVVEKS

SEQ ID NO: 26402 - protein, 14 aa, Homo Sapiens
SQDEELMEVVEKSE

SEQ ID NO: 26403 - protein, 14 aa, Homo Sapiens
QDEELMEVVEKSEE

SEQ ID NO: 26404 - protein, 14 aa, Homo Sapiens
DEELMEVVEKSEEP

SEQ ID NO: 26405 - protein, 14 aa, Homo Sapiens
EELMEVVEKSEEPA

SEQ ID NO: 26406 - protein, 14 aa, Homo Sapiens
ELMEVVEKSEEPAG

SEQ ID NO: 26407 - protein, 14 aa, Homo Sapiens
LMEVVEKSEEPAGQ

SEQ ID NO: 26408 - protein, 14 aa, Homo Sapiens
MEVVEKSEEPAGQI

SEQ ID NO: 26409 - protein, 14 aa, Homo Sapiens
EVVEKSEEPAGQIL

SEQ ID NO: 26410 - protein, 14 aa, Homo Sapiens
VVEKSEEPAGQILS

SEQ ID NO: 26411 - protein, 14 aa, Homo Sapiens
VEKSEEPAGQILSH

SEQ ID NO: 26412 - protein, 14 aa, Homo Sapiens
EKSEEPAGQILSHL

SEQ ID NO: 26413 - protein, 14 aa, Homo Sapiens
KSEEPAGQILSHLS

SEQ ID NO: 26414 - protein, 14 aa, Homo Sapiens
SEEPAGQILSHLSS

SEQ ID NO: 26415 - protein, 14 aa, Homo Sapiens
EEPAGQILSHLSSE

SEQ ID NO: 26416 - protein, 14 aa, Homo Sapiens
EPAGQILSHLSSEL

SEQ ID NO: 26417 - protein, 14 aa, Homo Sapiens
PAGQILSHLSSELK

SEQ ID NO: 26418 - protein, 14 aa, Homo Sapiens
AGQILSHLSSELKE

SEQ ID NO: 26419 - protein, 14 aa, Homo Sapiens
GQILSHLSSELKEM

SEQ ID NO: 26420 - protein, 14 aa, Homo Sapiens
QILSHLSSELKEMS

SEQ ID NO: 26421 - protein, 14 aa, Homo Sapiens
ILSHLSSELKEMST

SEQ ID NO: 26422 - protein, 14 aa, Homo Sapiens
LSHLSSELKEMSTS

SEQ ID NO: 26423 - protein, 14 aa, Homo Sapiens
SHLSSELKEMSTSN

SEQ ID NO: 26424 - protein, 14 aa, Homo Sapiens
HLSSELKEMSTSNF

SEQ ID NO: 26425 - protein, 14 aa, Homo Sapiens
LSSELKEMSTSNFE

SEQ ID NO: 26426 - protein, 14 aa, Homo Sapiens
SSELKEMSTSNFES

SEQ ID NO: 26427 - protein, 14 aa, Homo Sapiens
SELKEMSTSNFESS

SEQ ID NO: 26428 - protein, 14 aa, Homo Sapiens
ELKEMSTSNFESSP

SEQ ID NO: 26429 - protein, 14 aa, Homo Sapiens
LKEMSTSNFESSPE

SEQ ID NO: 26430 - protein, 14 aa, Homo Sapiens
KEMSTSNFESSPEV

SEQ ID NO: 26431 - protein, 14 aa, Homo Sapiens
EMSTSNFESSPEVE

SEQ ID NO: 26432 - protein, 14 aa, Homo Sapiens
MSTSNFESSPEVEE

SEQ ID NO: 26433 - protein, 14 aa, Homo Sapiens
STSNFESSPEVEER

SEQ ID NO: 26434 - protein, 14 aa, Homo Sapiens
TSNFESSPEVEERP

SEQ ID NO: 26435 - protein, 14 aa, Homo Sapiens
SNFESSPEVEERPA

SEQ ID NO: 26436 - protein, 14 aa, Homo Sapiens
NFESSPEVEERPAV

SEQ ID NO: 26437 - protein, 14 aa, Homo Sapiens
FESSPEVEERPAVS

SEQ ID NO: 26438 - protein, 14 aa, Homo Sapiens
ESSPEVEERPAVSL

SEQ ID NO: 26439 - protein, 14 aa, Homo Sapiens
SSPEVEERPAVSLT

SEQ ID NO: 26440 - protein, 14 aa, Homo Sapiens
SPEVEERPAVSLTL

SEQ ID NO: 26441 - protein, 14 aa, Homo Sapiens
PEVEERPAVSLTLD

SEQ ID NO: 26442 - protein, 14 aa, Homo Sapiens
EVEERPAVSLTLDQ

SEQ ID NO: 26443 - protein, 14 aa, Homo Sapiens
VEERPAVSLTLDQS

SEQ ID NO: 26444 - protein, 14 aa, Homo Sapiens
EERPAVSLTLDQSQ

SEQ ID NO: 26445 - protein, 14 aa, Homo Sapiens
ERPAVSLTLDQSQS

SEQ ID NO: 26446 - protein, 14 aa, Homo Sapiens
RPAVSLTLDQSQSQ

SEQ ID NO: 26447 - protein, 14 aa, Homo Sapiens
PAVSLTLDQSQSQA

SEQ ID NO: 26448 - protein, 14 aa, Homo Sapiens
AVSLTLDQSQSQAS

SEQ ID NO: 26449 - protein, 14 aa, Homo Sapiens
VSLTLDQSQSQASL

SEQ ID NO: 26450 - protein, 14 aa, Homo Sapiens
SLTLDQSQSQASLE

SEQ ID NO: 26451 - protein, 14 aa, Homo Sapiens
LTLDQSQSQASLEA

SEQ ID NO: 26452 - protein, 14 aa, Homo Sapiens
TLDQSQSQASLEAV

SEQ ID NO: 26453 - protein, 14 aa, Homo Sapiens
LDQSQSQASLEAVE

SEQ ID NO: 26454 - protein, 14 aa, Homo Sapiens
DQSQSQASLEAVEV

SEQ ID NO: 26455 - protein, 14 aa, Homo Sapiens
QSQSQASLEAVEVP

SEQ ID NO: 26456 - protein, 14 aa, Homo Sapiens
SQSQASLEAVEVPS

SEQ ID NO: 26457 - protein, 14 aa, Homo Sapiens
QSQASLEAVEVPSM

SEQ ID NO: 26458 - protein, 14 aa, Homo Sapiens
SQASLEAVEVPSMA

SEQ ID NO: 26459 - protein, 14 aa, Homo Sapiens
QASLEAVEVPSMAS

SEQ ID NO: 26460 - protein, 14 aa, Homo Sapiens
ASLEAVEVPSMASS

SEQ ID NO: 26461 - protein, 14 aa, Homo Sapiens
SLEAVEVPSMASSW

SEQ ID NO: 26462 - protein, 14 aa, Homo Sapiens
LEAVEVPSMASSWG

SEQ ID NO: 26463 - protein, 14 aa, Homo Sapiens
EAVEVPSMASSWGG

SEQ ID NO: 26464 - protein, 14 aa, Homo Sapiens
AVEVPSMASSWGGP

SEQ ID NO: 26465 - protein, 14 aa, Homo Sapiens
VEVPSMASSWGGPH

SEQ ID NO: 26466 - protein, 14 aa, Homo Sapiens
EVPSMASSWGGPHF

SEQ ID NO: 26467 - protein, 14 aa, Homo Sapiens
VPSMASSWGGPHFS

SEQ ID NO: 26468 - protein, 14 aa, Homo Sapiens
PSMASSWGGPHFSP

SEQ ID NO: 26469 - protein, 14 aa, Homo Sapiens
SMASSWGGPHFSPE

SEQ ID NO: 26470 - protein, 14 aa, Homo Sapiens
MASSWGGPHFSPEH

SEQ ID NO: 26471 - protein, 14 aa, Homo Sapiens
ASSWGGPHFSPEHK

SEQ ID NO: 26472 - protein, 14 aa, Homo Sapiens
SSWGGPHFSPEHKE

SEQ ID NO: 26473 - protein, 14 aa, Homo Sapiens
SWGGPHFSPEHKEL

SEQ ID NO: 26474 - protein, 14 aa, Homo Sapiens
WGGPHFSPEHKELS

SEQ ID NO: 26475 - protein, 14 aa, Homo Sapiens
GGPHFSPEHKELSN

SEQ ID NO: 26476 - protein, 14 aa, Homo Sapiens
GPHFSPEHKELSNS

SEQ ID NO: 26477 - protein, 14 aa, Homo Sapiens
PHFSPEHKELSNSP

SEQ ID NO: 26478 - protein, 14 aa, Homo Sapiens
HFSPEHKELSNSPL

SEQ ID NO: 26479 - protein, 14 aa, Homo Sapiens
FSPEHKELSNSPLR

SEQ ID NO: 26480 - protein, 14 aa, Homo Sapiens
SPEHKELSNSPLRE

SEQ ID NO: 26481 - protein, 14 aa, Homo Sapiens
PEHKELSNSPLREN

SEQ ID NO: 26482 - protein, 14 aa, Homo Sapiens
EHKELSNSPLRENS

SEQ ID NO: 26483 - protein, 14 aa, Homo Sapiens
HKELSNSPLRENSF

SEQ ID NO: 26484 - protein, 14 aa, Homo Sapiens
KELSNSPLRENSFG

SEQ ID NO: 26485 - protein, 14 aa, Homo Sapiens
ELSNSPLRENSFGS

SEQ ID NO: 26486 - protein, 14 aa, Homo Sapiens
LSNSPLRENSFGSP

SEQ ID NO: 26487 - protein, 14 aa, Homo Sapiens
SNSPLRENSFGSPL

SEQ ID NO: 26488 - protein, 14 aa, Homo Sapiens
NSPLRENSFGSPLE

SEQ ID NO: 26489 - protein, 14 aa, Homo Sapiens
SPLRENSFGSPLEF

SEQ ID NO: 26490 - protein, 14 aa, Homo Sapiens
PLRENSFGSPLEFR

SEQ ID NO: 26491 - protein, 14 aa, Homo Sapiens
LRENSFGSPLEFRN

SEQ ID NO: 26492 - protein, 14 aa, Homo Sapiens
RENSFGSPLEFRNS

SEQ ID NO: 26493 - protein, 14 aa, Homo Sapiens
ENSFGSPLEFRNSG

SEQ ID NO: 26494 - protein, 14 aa, Homo Sapiens
NSFGSPLEFRNSGP

SEQ ID NO: 26495 - protein, 14 aa, Homo Sapiens
SFGSPLEFRNSGPL

SEQ ID NO: 26496 - protein, 14 aa, Homo Sapiens
FGSPLEFRNSGPLG

SEQ ID NO: 26497 - protein, 14 aa, Homo Sapiens
GSPLEFRNSGPLGT

SEQ ID NO: 26498 - protein, 14 aa, Homo Sapiens
SPLEFRNSGPLGTE

SEQ ID NO: 26499 - protein, 14 aa, Homo Sapiens
PLEFRNSGPLGTEM

SEQ ID NO: 26500 - protein, 14 aa, Homo Sapiens
LEFRNSGPLGTEMN

SEQ ID NO: 26501 - protein, 14 aa, Homo Sapiens
EFRNSGPLGTEMNT

SEQ ID NO: 26502 - protein, 14 aa, Homo Sapiens
FRNSGPLGTEMNTG

SEQ ID NO: 26503 - protein, 14 aa, Homo Sapiens
RNSGPLGTEMNTGF

SEQ ID NO: 26504 - protein, 14 aa, Homo Sapiens
NSGPLGTEMNTGFS

SEQ ID NO: 26505 - protein, 14 aa, Homo Sapiens
SGPLGTEMNTGFSS

SEQ ID NO: 26506 - protein, 14 aa, Homo Sapiens
GPLGTEMNTGFSSE

SEQ ID NO: 26507 - protein, 14 aa, Homo Sapiens
PLGTEMNTGFSSEV

SEQ ID NO: 26508 - protein, 14 aa, Homo Sapiens
LGTEMNTGFSSEVK

SEQ ID NO: 26509 - protein, 14 aa, Homo Sapiens
GTEMNTGFSSEVKE

SEQ ID NO: 26510 - protein, 14 aa, Homo Sapiens
TEMNTGFSSEVKED

SEQ ID NO: 26511 - protein, 14 aa, Homo Sapiens
EMNTGFSSEVKEDL

SEQ ID NO: 26512 - protein, 14 aa, Homo Sapiens
MNTGFSSEVKEDLN

SEQ ID NO: 26513 - protein, 14 aa, Homo Sapiens
NTGFSSEVKEDLNG

SEQ ID NO: 26514 - protein, 14 aa, Homo Sapiens
TGFSSEVKEDLNGP

SEQ ID NO: 26515 - protein, 14 aa, Homo Sapiens
GFSSEVKEDLNGPF

SEQ ID NO: 26516 - protein, 14 aa, Homo Sapiens
FSSEVKEDLNGPFL

SEQ ID NO: 26517 - protein, 14 aa, Homo Sapiens
SSEVKEDLNGPFLN

SEQ ID NO: 26518 - protein, 14 aa, Homo Sapiens
SEVKEDLNGPFLNQ

SEQ ID NO: 26519 - protein, 14 aa, Homo Sapiens
EVKEDLNGPFLNQL

SEQ ID NO: 26520 - protein, 14 aa, Homo Sapiens
VKEDLNGPFLNQLE

SEQ ID NO: 26521 - protein, 14 aa, Homo Sapiens
KEDLNGPFLNQLET

SEQ ID NO: 26522 - protein, 14 aa, Homo Sapiens
EDLNGPFLNQLETD

SEQ ID NO: 26523 - protein, 14 aa, Homo Sapiens
DLNGPFLNQLETDP

SEQ ID NO: 26524 - protein, 14 aa, Homo Sapiens
LNGPFLNQLETDPS

SEQ ID NO: 26525 - protein, 14 aa, Homo Sapiens
NGPFLNQLETDPSL

SEQ ID NO: 26526 - protein, 14 aa, Homo Sapiens
GPFLNQLETDPSLD

SEQ ID NO: 26527 - protein, 14 aa, Homo Sapiens
PFLNQLETDPSLDM

SEQ ID NO: 26528 - protein, 14 aa, Homo Sapiens
FLNQLETDPSLDMK

SEQ ID NO: 26529 - protein, 14 aa, Homo Sapiens
LNQLETDPSLDMKE

SEQ ID NO: 26530 - protein, 14 aa, Homo Sapiens
NQLETDPSLDMKEQ

SEQ ID NO: 26531 - protein, 14 aa, Homo Sapiens
QLETDPSLDMKEQS

SEQ ID NO: 26532 - protein, 14 aa, Homo Sapiens
LETDPSLDMKEQST

SEQ ID NO: 26533 - protein, 14 aa, Homo Sapiens
ETDPSLDMKEQSTR

SEQ ID NO: 26534 - protein, 14 aa, Homo Sapiens
TDPSLDMKEQSTRS

SEQ ID NO: 26535 - protein, 14 aa, Homo Sapiens
DPSLDMKEQSTRSS

SEQ ID NO: 26536 - protein, 14 aa, Homo Sapiens
PSLDMKEQSTRSSG

SEQ ID NO: 26537 - protein, 14 aa, Homo Sapiens
SLDMKEQSTRSSGH

SEQ ID NO: 26538 - protein, 14 aa, Homo Sapiens
LDMKEQSTRSSGHS

SEQ ID NO: 26539 - protein, 14 aa, Homo Sapiens
DMKEQSTRSSGHSS

SEQ ID NO: 26540 - protein, 14 aa, Homo Sapiens
MKEQSTRSSGHSSS

SEQ ID NO: 26541 - protein, 14 aa, Homo Sapiens
KEQSTRSSGHSSSE

SEQ ID NO: 26542 - protein, 14 aa, Homo Sapiens
EQSTRSSGHSSSEL

SEQ ID NO: 26543 - protein, 14 aa, Homo Sapiens
QSTRSSGHSSSELS

SEQ ID NO: 26544 - protein, 14 aa, Homo Sapiens
STRSSGHSSSELSP

SEQ ID NO: 26545 - protein, 14 aa, Homo Sapiens
TRSSGHSSSELSPD

SEQ ID NO: 26546 - protein, 14 aa, Homo Sapiens
RSSGHSSSELSPDA

SEQ ID NO: 26547 - protein, 14 aa, Homo Sapiens
SSGHSSSELSPDAV

SEQ ID NO: 26548 - protein, 14 aa, Homo Sapiens
SGHSSSELSPDAVE

SEQ ID NO: 26549 - protein, 14 aa, Homo Sapiens
GHSSSELSPDAVEK

SEQ ID NO: 26550 - protein, 14 aa, Homo Sapiens
HSSSELSPDAVEKA

SEQ ID NO: 26551 - protein, 14 aa, Homo Sapiens
SSSELSPDAVEKAG

SEQ ID NO: 26552 - protein, 14 aa, Homo Sapiens
SSELSPDAVEKAGM

SEQ ID NO: 26553 - protein, 14 aa, Homo Sapiens
SELSPDAVEKAGMS

SEQ ID NO: 26554 - protein, 14 aa, Homo Sapiens
ELSPDAVEKAGMSS

SEQ ID NO: 26555 - protein, 14 aa, Homo Sapiens
LSPDAVEKAGMSSN

SEQ ID NO: 26556 - protein, 14 aa, Homo Sapiens
SPDAVEKAGMSSNQ

SEQ ID NO: 26557 - protein, 14 aa, Homo Sapiens
PDAVEKAGMSSNQS

SEQ ID NO: 26558 - protein, 14 aa, Homo Sapiens
DAVEKAGMSSNQSI

SEQ ID NO: 26559 - protein, 14 aa, Homo Sapiens
AVEKAGMSSNQSIS

SEQ ID NO: 26560 - protein, 14 aa, Homo Sapiens
VEKAGMSSNQSISS

SEQ ID NO: 26561 - protein, 14 aa, Homo Sapiens
EKAGMSSNQSISSP

SEQ ID NO: 26562 - protein, 14 aa, Homo Sapiens
KAGMSSNQSISSPV

SEQ ID NO: 26563 - protein, 14 aa, Homo Sapiens
AGMSSNQSISSPVL

SEQ ID NO: 26564 - protein, 14 aa, Homo Sapiens
GMSSNQSISSPVLD

SEQ ID NO: 26565 - protein, 14 aa, Homo Sapiens
MSSNQSISSPVLDA

SEQ ID NO: 26566 - protein, 14 aa, Homo Sapiens
SSNQSISSPVLDAV

SEQ ID NO: 26567 - protein, 14 aa, Homo Sapiens
SNQSISSPVLDAVP

SEQ ID NO: 26568 - protein, 14 aa, Homo Sapiens
NQSISSPVLDAVPR

SEQ ID NO: 26569 - protein, 14 aa, Homo Sapiens
QSISSPVLDAVPRT

SEQ ID NO: 26570 - protein, 14 aa, Homo Sapiens
SISSPVLDAVPRTP

SEQ ID NO: 26571 - protein, 14 aa, Homo Sapiens
ISSPVLDAVPRTPS

SEQ ID NO: 26572 - protein, 14 aa, Homo Sapiens
SSPVLDAVPRTPSR

SEQ ID NO: 26573 - protein, 14 aa, Homo Sapiens
SPVLDAVPRTPSRE

SEQ ID NO: 26574 - protein, 14 aa, Homo Sapiens
PVLDAVPRTPSRER

SEQ ID NO: 26575 - protein, 14 aa, Homo Sapiens
VLDAVPRTPSRERS

SEQ ID NO: 26576 - protein, 14 aa, Homo Sapiens
LDAVPRTPSRERSS

SEQ ID NO: 26577 - protein, 14 aa, Homo Sapiens
DAVPRTPSRERSSS

SEQ ID NO: 26578 - protein, 14 aa, Homo Sapiens
AVPRTPSRERSSSA

SEQ ID NO: 26579 - protein, 14 aa, Homo Sapiens
VPRTPSRERSSSAS

SEQ ID NO: 26580 - protein, 14 aa, Homo Sapiens
PRTPSRERSSSASS

SEQ ID NO: 26581 - protein, 14 aa, Homo Sapiens
RTPSRERSSSASSP

SEQ ID NO: 26582 - protein, 14 aa, Homo Sapiens
TPSRERSSSASSPE

SEQ ID NO: 26583 - protein, 14 aa, Homo Sapiens
PSRERSSSASSPEM

SEQ ID NO: 26584 - protein, 14 aa, Homo Sapiens
SRERSSSASSPEMK

SEQ ID NO: 26585 - protein, 14 aa, Homo Sapiens
RERSSSASSPEMKD

SEQ ID NO: 26586 - protein, 14 aa, Homo Sapiens
ERSSSASSPEMKDG

SEQ ID NO: 26587 - protein, 14 aa, Homo Sapiens
RSSSASSPEMKDGL

SEQ ID NO: 26588 - protein, 14 aa, Homo Sapiens
SSSASSPEMKDGLP

SEQ ID NO: 26589 - protein, 14 aa, Homo Sapiens
SSASSPEMKDGLPR

SEQ ID NO: 26590 - protein, 14 aa, Homo Sapiens
SASSPEMKDGLPRT

SEQ ID NO: 26591 - protein, 14 aa, Homo Sapiens
ASSPEMKDGLPRTP

SEQ ID NO: 26592 - protein, 14 aa, Homo Sapiens
SSPEMKDGLPRTPS

SEQ ID NO: 26593 - protein, 14 aa, Homo Sapiens
SPEMKDGLPRTPSR

SEQ ID NO: 26594 - protein, 14 aa, Homo Sapiens
PEMKDGLPRTPSRR

SEQ ID NO: 26595 - protein, 14 aa, Homo Sapiens
EMKDGLPRTPSRRS

SEQ ID NO: 26596 - protein, 14 aa, Homo Sapiens
MKDGLPRTPSRRSR

SEQ ID NO: 26597 - protein, 14 aa, Homo Sapiens
KDGLPRTPSRRSRS

SEQ ID NO: 26598 - protein, 14 aa, Homo Sapiens
DGLPRTPSRRSRSG

SEQ ID NO: 26599 - protein, 14 aa, Homo Sapiens
GLPRTPSRRSRSGS

SEQ ID NO: 26600 - protein, 14 aa, Homo Sapiens
LPRTPSRRSRSGSS

SEQ ID NO: 26601 - protein, 14 aa, Homo Sapiens
PRTPSRRSRSGSSP

SEQ ID NO: 26602 - protein, 14 aa, Homo Sapiens
RTPSRRSRSGSSPG

SEQ ID NO: 26603 - protein, 14 aa, Homo Sapiens
TPSRRSRSGSSPGL

SEQ ID NO: 26604 - protein, 14 aa, Homo Sapiens
PSRRSRSGSSPGLR

SEQ ID NO: 26605 - protein, 14 aa, Homo Sapiens
SRRSRSGSSPGLRD

SEQ ID NO: 26606 - protein, 14 aa, Homo Sapiens
RRSRSGSSPGLRDG

SEQ ID NO: 26607 - protein, 14 aa, Homo Sapiens
RSRSGSSPGLRDGS

SEQ ID NO: 26608 - protein, 14 aa, Homo Sapiens
SRSGSSPGLRDGSG

SEQ ID NO: 26609 - protein, 14 aa, Homo Sapiens
RSGSSPGLRDGSGT

SEQ ID NO: 26610 - protein, 14 aa, Homo Sapiens
SGSSPGLRDGSGTP

SEQ ID NO: 26611 - protein, 14 aa, Homo Sapiens
GSSPGLRDGSGTPS

SEQ ID NO: 26612 - protein, 14 aa, Homo Sapiens
SSPGLRDGSGTPSR

SEQ ID NO: 26613 - protein, 14 aa, Homo Sapiens
SPGLRDGSGTPSRH

SEQ ID NO: 26614 - protein, 14 aa, Homo Sapiens
PGLRDGSGTPSRHS

SEQ ID NO: 26615 - protein, 14 aa, Homo Sapiens
GLRDGSGTPSRHSL

SEQ ID NO: 26616 - protein, 14 aa, Homo Sapiens
LRDGSGTPSRHSLS

SEQ ID NO: 26617 - protein, 14 aa, Homo Sapiens
RDGSGTPSRHSLSG

SEQ ID NO: 26618 - protein, 14 aa, Homo Sapiens
DGSGTPSRHSLSGS

SEQ ID NO: 26619 - protein, 14 aa, Homo Sapiens
GSGTPSRHSLSGSS

SEQ ID NO: 26620 - protein, 14 aa, Homo Sapiens
SGTPSRHSLSGSSP

SEQ ID NO: 26621 - protein, 14 aa, Homo Sapiens
GTPSRHSLSGSSPG

SEQ ID NO: 26622 - protein, 14 aa, Homo Sapiens
TPSRHSLSGSSPGM

SEQ ID NO: 26623 - protein, 14 aa, Homo Sapiens
PSRHSLSGSSPGMK

SEQ ID NO: 26624 - protein, 14 aa, Homo Sapiens
SRHSLSGSSPGMKD

SEQ ID NO: 26625 - protein, 14 aa, Homo Sapiens
RHSLSGSSPGMKDI

SEQ ID NO: 26626 - protein, 14 aa, Homo Sapiens
HSLSGSSPGMKDIP

SEQ ID NO: 26627 - protein, 14 aa, Homo Sapiens
SLSGSSPGMKDIPR

SEQ ID NO: 26628 - protein, 14 aa, Homo Sapiens
LSGSSPGMKDIPRT

SEQ ID NO: 26629 - protein, 14 aa, Homo Sapiens
SGSSPGMKDIPRTP

SEQ ID NO: 26630 - protein, 14 aa, Homo Sapiens
GSSPGMKDIPRTPF

SEQ ID NO: 26631 - protein, 14 aa, Homo Sapiens
SSPGMKDIPRTPFR

SEQ ID NO: 26632 - protein, 14 aa, Homo Sapiens
SPGMKDIPRTPFRG

SEQ ID NO: 26633 - protein, 14 aa, Homo Sapiens
PGMKDIPRTPFRGR

SEQ ID NO: 26634 - protein, 14 aa, Homo Sapiens
GMKDIPRTPFRGRS

SEQ ID NO: 26635 - protein, 14 aa, Homo Sapiens
MKDIPRTPFRGRSE

SEQ ID NO: 26636 - protein, 14 aa, Homo Sapiens
KDIPRTPFRGRSEC

SEQ ID NO: 26637 - protein, 14 aa, Homo Sapiens
DIPRTPFRGRSECD

SEQ ID NO: 26638 - protein, 14 aa, Homo Sapiens
IPRTPFRGRSECDS

SEQ ID NO: 26639 - protein, 14 aa, Homo Sapiens
PRTPFRGRSECDSS

SEQ ID NO: 26640 - protein, 14 aa, Homo Sapiens
RTPFRGRSECDSSP

SEQ ID NO: 26641 - protein, 14 aa, Homo Sapiens
TPFRGRSECDSSPE

SEQ ID NO: 26642 - protein, 14 aa, Homo Sapiens
PFRGRSECDSSPEP

SEQ ID NO: 26643 - protein, 14 aa, Homo Sapiens
FRGRSECDSSPEPK

SEQ ID NO: 26644 - protein, 14 aa, Homo Sapiens
RGRSECDSSPEPKA

SEQ ID NO: 26645 - protein, 14 aa, Homo Sapiens
GRSECDSSPEPKAL

SEQ ID NO: 26646 - protein, 14 aa, Homo Sapiens
RSECDSSPEPKALP

SEQ ID NO: 26647 - protein, 14 aa, Homo Sapiens
SECDSSPEPKALPQ

SEQ ID NO: 26648 - protein, 14 aa, Homo Sapiens
ECDSSPEPKALPQT

SEQ ID NO: 26649 - protein, 14 aa, Homo Sapiens
CDSSPEPKALPQTP

SEQ ID NO: 26650 - protein, 14 aa, Homo Sapiens
DSSPEPKALPQTPR

SEQ ID NO: 26651 - protein, 14 aa, Homo Sapiens
SSPEPKALPQTPRP

SEQ ID NO: 26652 - protein, 14 aa, Homo Sapiens
SPEPKALPQTPRPR

SEQ ID NO: 26653 - protein, 14 aa, Homo Sapiens
PEPKALPQTPRPRS

SEQ ID NO: 26654 - protein, 14 aa, Homo Sapiens
EPKALPQTPRPRSR

SEQ ID NO: 26655 - protein, 14 aa, Homo Sapiens
PKALPQTPRPRSRS

SEQ ID NO: 26656 - protein, 14 aa, Homo Sapiens
KALPQTPRPRSRSP

SEQ ID NO: 26657 - protein, 14 aa, Homo Sapiens
ALPQTPRPRSRSPS

SEQ ID NO: 26658 - protein, 14 aa, Homo Sapiens
LPQTPRPRSRSPSS

SEQ ID NO: 26659 - protein, 14 aa, Homo Sapiens
PQTPRPRSRSPSSP

SEQ ID NO: 26660 - protein, 14 aa, Homo Sapiens
QTPRPRSRSPSSPE

SEQ ID NO: 26661 - protein, 14 aa, Homo Sapiens
TPRPRSRSPSSPEL

SEQ ID NO: 26662 - protein, 14 aa, Homo Sapiens
PRPRSRSPSSPELN

SEQ ID NO: 26663 - protein, 14 aa, Homo Sapiens
RPRSRSPSSPELNN

SEQ ID NO: 26664 - protein, 14 aa, Homo Sapiens
PRSRSPSSPELNNK

SEQ ID NO: 26665 - protein, 14 aa, Homo Sapiens
RSRSPSSPELNNKC

SEQ ID NO: 26666 - protein, 14 aa, Homo Sapiens
SRSPSSPELNNKCL

SEQ ID NO: 26667 - protein, 14 aa, Homo Sapiens
RSPSSPELNNKCLT

SEQ ID NO: 26668 - protein, 14 aa, Homo Sapiens
SPSSPELNNKCLTP

SEQ ID NO: 26669 - protein, 14 aa, Homo Sapiens
PSSPELNNKCLTPQ

SEQ ID NO: 26670 - protein, 14 aa, Homo Sapiens
SSPELNNKCLTPQR

SEQ ID NO: 26671 - protein, 14 aa, Homo Sapiens
SPELNNKCLTPQRE

SEQ ID NO: 26672 - protein, 14 aa, Homo Sapiens
PELNNKCLTPQRER

SEQ ID NO: 26673 - protein, 14 aa, Homo Sapiens
ELNNKCLTPQRERS

SEQ ID NO: 26674 - protein, 14 aa, Homo Sapiens
LNNKCLTPQRERSG

SEQ ID NO: 26675 - protein, 14 aa, Homo Sapiens
NNKCLTPQRERSGS

SEQ ID NO: 26676 - protein, 14 aa, Homo Sapiens
NKCLTPQRERSGSE

SEQ ID NO: 26677 - protein, 14 aa, Homo Sapiens
KCLTPQRERSGSES

SEQ ID NO: 26678 - protein, 14 aa, Homo Sapiens
CLTPQRERSGSESS

SEQ ID NO: 26679 - protein, 14 aa, Homo Sapiens
LTPQRERSGSESSV

SEQ ID NO: 26680 - protein, 14 aa, Homo Sapiens
TPQRERSGSESSVD

SEQ ID NO: 26681 - protein, 14 aa, Homo Sapiens
PQRERSGSESSVDQ

SEQ ID NO: 26682 - protein, 14 aa, Homo Sapiens
QRERSGSESSVDQK

SEQ ID NO: 26683 - protein, 14 aa, Homo Sapiens
RERSGSESSVDQKT

SEQ ID NO: 26684 - protein, 14 aa, Homo Sapiens
ERSGSESSVDQKTV

SEQ ID NO: 26685 - protein, 14 aa, Homo Sapiens
RSGSESSVDQKTVA

SEQ ID NO: 26686 - protein, 14 aa, Homo Sapiens
SGSESSVDQKTVAR

SEQ ID NO: 26687 - protein, 14 aa, Homo Sapiens
GSESSVDQKTVART

SEQ ID NO: 26688 - protein, 14 aa, Homo Sapiens
SESSVDQKTVARTP

SEQ ID NO: 26689 - protein, 14 aa, Homo Sapiens
ESSVDQKTVARTPL

SEQ ID NO: 26690 - protein, 14 aa, Homo Sapiens
SSVDQKTVARTPLG

SEQ ID NO: 26691 - protein, 14 aa, Homo Sapiens
SVDQKTVARTPLGQ

SEQ ID NO: 26692 - protein, 14 aa, Homo Sapiens
VDQKTVARTPLGQR

SEQ ID NO: 26693 - protein, 14 aa, Homo Sapiens
DQKTVARTPLGQRS

SEQ ID NO: 26694 - protein, 14 aa, Homo Sapiens
QKTVARTPLGQRSR

SEQ ID NO: 26695 - protein, 14 aa, Homo Sapiens
KTVARTPLGQRSRS

SEQ ID NO: 26696 - protein, 14 aa, Homo Sapiens
TVARTPLGQRSRSG

SEQ ID NO: 26697 - protein, 14 aa, Homo Sapiens
VARTPLGQRSRSGS

SEQ ID NO: 26698 - protein, 14 aa, Homo Sapiens
ARTPLGQRSRSGSS

SEQ ID NO: 26699 - protein, 14 aa, Homo Sapiens
RTPLGQRSRSGSSQ

SEQ ID NO: 26700 - protein, 14 aa, Homo Sapiens
TPLGQRSRSGSSQE

SEQ ID NO: 26701 - protein, 14 aa, Homo Sapiens
PLGQRSRSGSSQEL

SEQ ID NO: 26702 - protein, 14 aa, Homo Sapiens
LGQRSRSGSSQELD

SEQ ID NO: 26703 - protein, 14 aa, Homo Sapiens
GQRSRSGSSQELDV

SEQ ID NO: 26704 - protein, 14 aa, Homo Sapiens
QRSRSGSSQELDVK

SEQ ID NO: 26705 - protein, 14 aa, Homo Sapiens
RSRSGSSQELDVKP

SEQ ID NO: 26706 - protein, 14 aa, Homo Sapiens
SRSGSSQELDVKPS

SEQ ID NO: 26707 - protein, 14 aa, Homo Sapiens
RSGSSQELDVKPSA

SEQ ID NO: 26708 - protein, 14 aa, Homo Sapiens
SGSSQELDVKPSAS

SEQ ID NO: 26709 - protein, 14 aa, Homo Sapiens
GSSQELDVKPSASP

SEQ ID NO: 26710 - protein, 14 aa, Homo Sapiens
SSQELDVKPSASPQ

SEQ ID NO: 26711 - protein, 14 aa, Homo Sapiens
SQELDVKPSASPQE

SEQ ID NO: 26712 - protein, 14 aa, Homo Sapiens
QELDVKPSASPQER

SEQ ID NO: 26713 - protein, 14 aa, Homo Sapiens
ELDVKPSASPQERS

SEQ ID NO: 26714 - protein, 14 aa, Homo Sapiens
LDVKPSASPQERSE

SEQ ID NO: 26715 - protein, 14 aa, Homo Sapiens
DVKPSASPQERSES

SEQ ID NO: 26716 - protein, 14 aa, Homo Sapiens
VKPSASPQERSESD

SEQ ID NO: 26717 - protein, 14 aa, Homo Sapiens
KPSASPQERSESDS

SEQ ID NO: 26718 - protein, 14 aa, Homo Sapiens
PSASPQERSESDSS

SEQ ID NO: 26719 - protein, 14 aa, Homo Sapiens
SASPQERSESDSSP

SEQ ID NO: 26720 - protein, 14 aa, Homo Sapiens
ASPQERSESDSSPD

SEQ ID NO: 26721 - protein, 14 aa, Homo Sapiens
SPQERSESDSSPDS

SEQ ID NO: 26722 - protein, 14 aa, Homo Sapiens
PQERSESDSSPDSK

SEQ ID NO: 26723 - protein, 14 aa, Homo Sapiens
QERSESDSSPDSKA

SEQ ID NO: 26724 - protein, 14 aa, Homo Sapiens
ERSESDSSPDSKAK

SEQ ID NO: 26725 - protein, 14 aa, Homo Sapiens
RSESDSSPDSKAKT

SEQ ID NO: 26726 - protein, 14 aa, Homo Sapiens
SESDSSPDSKAKTR

SEQ ID NO: 26727 - protein, 14 aa, Homo Sapiens
ESDSSPDSKAKTRT

SEQ ID NO: 26728 - protein, 14 aa, Homo Sapiens
SDSSPDSKAKTRTP

SEQ ID NO: 26729 - protein, 14 aa, Homo Sapiens
DSSPDSKAKTRTPL

SEQ ID NO: 26730 - protein, 14 aa, Homo Sapiens
SSPDSKAKTRTPLR

SEQ ID NO: 26731 - protein, 14 aa, Homo Sapiens
SPDSKAKTRTPLRQ

SEQ ID NO: 26732 - protein, 14 aa, Homo Sapiens
PDSKAKTRTPLRQR

SEQ ID NO: 26733 - protein, 14 aa, Homo Sapiens
DSKAKTRTPLRQRS

SEQ ID NO: 26734 - protein, 14 aa, Homo Sapiens
SKAKTRTPLRQRSR

SEQ ID NO: 26735 - protein, 14 aa, Homo Sapiens
KAKTRTPLRQRSRS

SEQ ID NO: 26736 - protein, 14 aa, Homo Sapiens
AKTRTPLRQRSRSG

SEQ ID NO: 26737 - protein, 14 aa, Homo Sapiens
KTRTPLRQRSRSGS

SEQ ID NO: 26738 - protein, 14 aa, Homo Sapiens
TRTPLRQRSRSGSS

SEQ ID NO: 26739 - protein, 14 aa, Homo Sapiens
RTPLRQRSRSGSSP

SEQ ID NO: 26740 - protein, 14 aa, Homo Sapiens
TPLRQRSRSGSSPE

SEQ ID NO: 26741 - protein, 14 aa, Homo Sapiens
PLRQRSRSGSSPEV

SEQ ID NO: 26742 - protein, 14 aa, Homo Sapiens
LRQRSRSGSSPEVD

SEQ ID NO: 26743 - protein, 14 aa, Homo Sapiens
RQRSRSGSSPEVDS

SEQ ID NO: 26744 - protein, 14 aa, Homo Sapiens
QRSRSGSSPEVDSK

SEQ ID NO: 26745 - protein, 14 aa, Homo Sapiens
RSRSGSSPEVDSKS

SEQ ID NO: 26746 - protein, 14 aa, Homo Sapiens
SRSGSSPEVDSKSR

SEQ ID NO: 26747 - protein, 14 aa, Homo Sapiens
RSGSSPEVDSKSRL

SEQ ID NO: 26748 - protein, 14 aa, Homo Sapiens
SGSSPEVDSKSRLS

SEQ ID NO: 26749 - protein, 14 aa, Homo Sapiens
GSSPEVDSKSRLSP

SEQ ID NO: 26750 - protein, 14 aa, Homo Sapiens
SSPEVDSKSRLSPR

SEQ ID NO: 26751 - protein, 14 aa, Homo Sapiens
SPEVDSKSRLSPRR

SEQ ID NO: 26752 - protein, 14 aa, Homo Sapiens
PEVDSKSRLSPRRS

SEQ ID NO: 26753 - protein, 14 aa, Homo Sapiens
EVDSKSRLSPRRSR

SEQ ID NO: 26754 - protein, 14 aa, Homo Sapiens
VDSKSRLSPRRSRS

SEQ ID NO: 26755 - protein, 14 aa, Homo Sapiens
DSKSRLSPRRSRSG

SEQ ID NO: 26756 - protein, 14 aa, Homo Sapiens
SKSRLSPRRSRSGS

SEQ ID NO: 26757 - protein, 14 aa, Homo Sapiens
KSRLSPRRSRSGSS

SEQ ID NO: 26758 - protein, 14 aa, Homo Sapiens
SRLSPRRSRSGSSP

SEQ ID NO: 26759 - protein, 14 aa, Homo Sapiens
RLSPRRSRSGSSPE

SEQ ID NO: 26760 - protein, 14 aa, Homo Sapiens
LSPRRSRSGSSPEV

SEQ ID NO: 26761 - protein, 14 aa, Homo Sapiens
SPRRSRSGSSPEVK

SEQ ID NO: 26762 - protein, 14 aa, Homo Sapiens
PRRSRSGSSPEVKD

SEQ ID NO: 26763 - protein, 14 aa, Homo Sapiens
RRSRSGSSPEVKDK

SEQ ID NO: 26764 - protein, 14 aa, Homo Sapiens
RSRSGSSPEVKDKP

SEQ ID NO: 26765 - protein, 14 aa, Homo Sapiens
SRSGSSPEVKDKPR

SEQ ID NO: 26766 - protein, 14 aa, Homo Sapiens
RSGSSPEVKDKPRA

SEQ ID NO: 26767 - protein, 14 aa, Homo Sapiens
SGSSPEVKDKPRAA

SEQ ID NO: 26768 - protein, 14 aa, Homo Sapiens
GSSPEVKDKPRAAP

SEQ ID NO: 26769 - protein, 14 aa, Homo Sapiens
SSPEVKDKPRAAPR

SEQ ID NO: 26770 - protein, 14 aa, Homo Sapiens
SPEVKDKPRAAPRA

SEQ ID NO: 26771 - protein, 14 aa, Homo Sapiens
PEVKDKPRAAPRAQ

SEQ ID NO: 26772 - protein, 14 aa, Homo Sapiens
EVKDKPRAAPRAQS

SEQ ID NO: 26773 - protein, 14 aa, Homo Sapiens
VKDKPRAAPRAQSG

SEQ ID NO: 26774 - protein, 14 aa, Homo Sapiens
KDKPRAAPRAQSGS

SEQ ID NO: 26775 - protein, 14 aa, Homo Sapiens
DKPRAAPRAQSGSD

SEQ ID NO: 26776 - protein, 14 aa, Homo Sapiens
KPRAAPRAQSGSDS

SEQ ID NO: 26777 - protein, 14 aa, Homo Sapiens
PRAAPRAQSGSDSS

SEQ ID NO: 26778 - protein, 14 aa, Homo Sapiens
RAAPRAQSGSDSSP

SEQ ID NO: 26779 - protein, 14 aa, Homo Sapiens
AAPRAQSGSDSSPE

SEQ ID NO: 26780 - protein, 14 aa, Homo Sapiens
APRAQSGSDSSPEP

SEQ ID NO: 26781 - protein, 14 aa, Homo Sapiens
PRAQSGSDSSPEPK

SEQ ID NO: 26782 - protein, 14 aa, Homo Sapiens
RAQSGSDSSPEPKA

SEQ ID NO: 26783 - protein, 14 aa, Homo Sapiens
AQSGSDSSPEPKAP

SEQ ID NO: 26784 - protein, 14 aa, Homo Sapiens
QSGSDSSPEPKAPA

SEQ ID NO: 26785 - protein, 14 aa, Homo Sapiens
SGSDSSPEPKAPAP

SEQ ID NO: 26786 - protein, 14 aa, Homo Sapiens
GSDSSPEPKAPAPR

SEQ ID NO: 26787 - protein, 14 aa, Homo Sapiens
SDSSPEPKAPAPRA

SEQ ID NO: 26788 - protein, 14 aa, Homo Sapiens
DSSPEPKAPAPRAL

SEQ ID NO: 26789 - protein, 14 aa, Homo Sapiens
SSPEPKAPAPRALP

SEQ ID NO: 26790 - protein, 14 aa, Homo Sapiens
SPEPKAPAPRALPR

SEQ ID NO: 26791 - protein, 14 aa, Homo Sapiens
PEPKAPAPRALPRR

SEQ ID NO: 26792 - protein, 14 aa, Homo Sapiens
EPKAPAPRALPRRS

SEQ ID NO: 26793 - protein, 14 aa, Homo Sapiens
PKAPAPRALPRRSR

SEQ ID NO: 26794 - protein, 14 aa, Homo Sapiens
KAPAPRALPRRSRS

SEQ ID NO: 26795 - protein, 14 aa, Homo Sapiens
APAPRALPRRSRSG

SEQ ID NO: 26796 - protein, 14 aa, Homo Sapiens
PAPRALPRRSRSGS

SEQ ID NO: 26797 - protein, 14 aa, Homo Sapiens
APRALPRRSRSGSS

SEQ ID NO: 26798 - protein, 14 aa, Homo Sapiens
PRALPRRSRSGSSS

SEQ ID NO: 26799 - protein, 14 aa, Homo Sapiens
RALPRRSRSGSSSK

SEQ ID NO: 26800 - protein, 14 aa, Homo Sapiens
ALPRRSRSGSSSKG

SEQ ID NO: 26801 - protein, 14 aa, Homo Sapiens
LPRRSRSGSSSKGR

SEQ ID NO: 26802 - protein, 14 aa, Homo Sapiens
PRRSRSGSSSKGRG

SEQ ID NO: 26803 - protein, 14 aa, Homo Sapiens
RRSRSGSSSKGRGP

SEQ ID NO: 26804 - protein, 14 aa, Homo Sapiens
RSRSGSSSKGRGPS

SEQ ID NO: 26805 - protein, 14 aa, Homo Sapiens
SRSGSSSKGRGPSP

SEQ ID NO: 26806 - protein, 14 aa, Homo Sapiens
RSGSSSKGRGPSPE

SEQ ID NO: 26807 - protein, 14 aa, Homo Sapiens
SGSSSKGRGPSPEG

SEQ ID NO: 26808 - protein, 14 aa, Homo Sapiens
GSSSKGRGPSPEGS

SEQ ID NO: 26809 - protein, 14 aa, Homo Sapiens
SSSKGRGPSPEGSS

SEQ ID NO: 26810 - protein, 14 aa, Homo Sapiens
SSKGRGPSPEGSSS

SEQ ID NO: 26811 - protein, 14 aa, Homo Sapiens
SKGRGPSPEGSSST

SEQ ID NO: 26812 - protein, 14 aa, Homo Sapiens
KGRGPSPEGSSSTE

SEQ ID NO: 26813 - protein, 14 aa, Homo Sapiens
GRGPSPEGSSSTES

SEQ ID NO: 26814 - protein, 14 aa, Homo Sapiens
RGPSPEGSSSTESS

SEQ ID NO: 26815 - protein, 14 aa, Homo Sapiens
GPSPEGSSSTESSP

SEQ ID NO: 26816 - protein, 14 aa, Homo Sapiens
PSPEGSSSTESSPE

SEQ ID NO: 26817 - protein, 14 aa, Homo Sapiens
SPEGSSSTESSPEH

SEQ ID NO: 26818 - protein, 14 aa, Homo Sapiens
PEGSSSTESSPEHP

SEQ ID NO: 26819 - protein, 14 aa, Homo Sapiens
EGSSSTESSPEHPP

SEQ ID NO: 26820 - protein, 14 aa, Homo Sapiens
GSSSTESSPEHPPK

SEQ ID NO: 26821 - protein, 14 aa, Homo Sapiens
SSSTESSPEHPPKS

SEQ ID NO: 26822 - protein, 14 aa, Homo Sapiens
SSTESSPEHPPKSR

SEQ ID NO: 26823 - protein, 14 aa, Homo Sapiens
STESSPEHPPKSRT

SEQ ID NO: 26824 - protein, 14 aa, Homo Sapiens
TESSPEHPPKSRTA

SEQ ID NO: 26825 - protein, 14 aa, Homo Sapiens
ESSPEHPPKSRTAR

SEQ ID NO: 26826 - protein, 14 aa, Homo Sapiens
SSPEHPPKSRTARR

SEQ ID NO: 26827 - protein, 14 aa, Homo Sapiens
SPEHPPKSRTARRG

SEQ ID NO: 26828 - protein, 14 aa, Homo Sapiens
PEHPPKSRTARRGS

SEQ ID NO: 26829 - protein, 14 aa, Homo Sapiens
EHPPKSRTARRGSR

SEQ ID NO: 26830 - protein, 14 aa, Homo Sapiens
HPPKSRTARRGSRS

SEQ ID NO: 26831 - protein, 14 aa, Homo Sapiens
PPKSRTARRGSRSS

SEQ ID NO: 26832 - protein, 14 aa, Homo Sapiens
PKSRTARRGSRSSP

SEQ ID NO: 26833 - protein, 14 aa, Homo Sapiens
KSRTARRGSRSSPE

SEQ ID NO: 26834 - protein, 14 aa, Homo Sapiens
SRTARRGSRSSPEP

SEQ ID NO: 26835 - protein, 14 aa, Homo Sapiens
RTARRGSRSSPEPK

SEQ ID NO: 26836 - protein, 14 aa, Homo Sapiens
TARRGSRSSPEPKT

SEQ ID NO: 26837 - protein, 14 aa, Homo Sapiens
ARRGSRSSPEPKTK

SEQ ID NO: 26838 - protein, 14 aa, Homo Sapiens
RRGSRSSPEPKTKS

SEQ ID NO: 26839 - protein, 14 aa, Homo Sapiens
RGSRSSPEPKTKSR

SEQ ID NO: 26840 - protein, 14 aa, Homo Sapiens
GSRSSPEPKTKSRT

SEQ ID NO: 26841 - protein, 14 aa, Homo Sapiens
SRSSPEPKTKSRTP

SEQ ID NO: 26842 - protein, 14 aa, Homo Sapiens
RSSPEPKTKSRTPP

SEQ ID NO: 26843 - protein, 14 aa, Homo Sapiens
SSPEPKTKSRTPPR

SEQ ID NO: 26844 - protein, 14 aa, Homo Sapiens
SPEPKTKSRTPPRR

SEQ ID NO: 26845 - protein, 14 aa, Homo Sapiens
PEPKTKSRTPPRRR

SEQ ID NO: 26846 - protein, 14 aa, Homo Sapiens
EPKTKSRTPPRRRS

SEQ ID NO: 26847 - protein, 14 aa, Homo Sapiens
PKTKSRTPPRRRSS

SEQ ID NO: 26848 - protein, 14 aa, Homo Sapiens
KTKSRTPPRRRSSR

SEQ ID NO: 26849 - protein, 14 aa, Homo Sapiens
TKSRTPPRRRSSRS

SEQ ID NO: 26850 - protein, 14 aa, Homo Sapiens
KSRTPPRRRSSRSS

SEQ ID NO: 26851 - protein, 14 aa, Homo Sapiens
SRTPPRRRSSRSSP

SEQ ID NO: 26852 - protein, 14 aa, Homo Sapiens
RTPPRRRSSRSSPE

SEQ ID NO: 26853 - protein, 14 aa, Homo Sapiens
TPPRRRSSRSSPEL

SEQ ID NO: 26854 - protein, 14 aa, Homo Sapiens
PPRRRSSRSSPELT

SEQ ID NO: 26855 - protein, 14 aa, Homo Sapiens
PRRRSSRSSPELTR

SEQ ID NO: 26856 - protein, 14 aa, Homo Sapiens
RRRSSRSSPELTRK

SEQ ID NO: 26857 - protein, 14 aa, Homo Sapiens
RRSSRSSPELTRKA

SEQ ID NO: 26858 - protein, 14 aa, Homo Sapiens
RSSRSSPELTRKAR

SEQ ID NO: 26859 - protein, 14 aa, Homo Sapiens
SSRSSPELTRKARL

SEQ ID NO: 26860 - protein, 14 aa, Homo Sapiens
SRSSPELTRKARLS

SEQ ID NO: 26861 - protein, 14 aa, Homo Sapiens
RSSPELTRKARLSR

SEQ ID NO: 26862 - protein, 14 aa, Homo Sapiens
SSPELTRKARLSRR

SEQ ID NO: 26863 - protein, 14 aa, Homo Sapiens
SPELTRKARLSRRS

SEQ ID NO: 26864 - protein, 14 aa, Homo Sapiens
PELTRKARLSRRSR

SEQ ID NO: 26865 - protein, 14 aa, Homo Sapiens
ELTRKARLSRRSRS

SEQ ID NO: 26866 - protein, 14 aa, Homo Sapiens
LTRKARLSRRSRSA

SEQ ID NO: 26867 - protein, 14 aa, Homo Sapiens
TRKARLSRRSRSAS

SEQ ID NO: 26868 - protein, 14 aa, Homo Sapiens
RKARLSRRSRSASS

SEQ ID NO: 26869 - protein, 14 aa, Homo Sapiens
KARLSRRSRSASSS

SEQ ID NO: 26870 - protein, 14 aa, Homo Sapiens
ARLSRRSRSASSSP

SEQ ID NO: 26871 - protein, 14 aa, Homo Sapiens
RLSRRSRSASSSPE

SEQ ID NO: 26872 - protein, 14 aa, Homo Sapiens
LSRRSRSASSSPET

SEQ ID NO: 26873 - protein, 14 aa, Homo Sapiens
SRRSRSASSSPETR

SEQ ID NO: 26874 - protein, 14 aa, Homo Sapiens
RRSRSASSSPETRS

SEQ ID NO: 26875 - protein, 14 aa, Homo Sapiens
RSRSASSSPETRSR

SEQ ID NO: 26876 - protein, 14 aa, Homo Sapiens
SRSASSSPETRSRT

SEQ ID NO: 26877 - protein, 14 aa, Homo Sapiens
RSASSSPETRSRTP

SEQ ID NO: 26878 - protein, 14 aa, Homo Sapiens
SASSSPETRSRTPP

SEQ ID NO: 26879 - protein, 14 aa, Homo Sapiens
ASSSPETRSRTPPR

SEQ ID NO: 26880 - protein, 14 aa, Homo Sapiens
SSSPETRSRTPPRH

SEQ ID NO: 26881 - protein, 14 aa, Homo Sapiens
SSPETRSRTPPRHR

SEQ ID NO: 26882 - protein, 14 aa, Homo Sapiens
SPETRSRTPPRHRR

SEQ ID NO: 26883 - protein, 14 aa, Homo Sapiens
PETRSRTPPRHRRS

SEQ ID NO: 26884 - protein, 14 aa, Homo Sapiens
ETRSRTPPRHRRSP

SEQ ID NO: 26885 - protein, 14 aa, Homo Sapiens
TRSRTPPRHRRSPS

SEQ ID NO: 26886 - protein, 14 aa, Homo Sapiens
RSRTPPRHRRSPSV

SEQ ID NO: 26887 - protein, 14 aa, Homo Sapiens
SRTPPRHRRSPSVS

SEQ ID NO: 26888 - protein, 14 aa, Homo Sapiens
RTPPRHRRSPSVSS

SEQ ID NO: 26889 - protein, 14 aa, Homo Sapiens
TPPRHRRSPSVSSP

SEQ ID NO: 26890 - protein, 14 aa, Homo Sapiens
PPRHRRSPSVSSPE

SEQ ID NO: 26891 - protein, 14 aa, Homo Sapiens
PRHRRSPSVSSPEP

SEQ ID NO: 26892 - protein, 14 aa, Homo Sapiens
RHRRSPSVSSPEPA

SEQ ID NO: 26893 - protein, 14 aa, Homo Sapiens
HRRSPSVSSPEPAE

SEQ ID NO: 26894 - protein, 14 aa, Homo Sapiens
RRSPSVSSPEPAEK

SEQ ID NO: 26895 - protein, 14 aa, Homo Sapiens
RSPSVSSPEPAEKS

SEQ ID NO: 26896 - protein, 14 aa, Homo Sapiens
SPSVSSPEPAEKSR

SEQ ID NO: 26897 - protein, 14 aa, Homo Sapiens
PSVSSPEPAEKSRS

SEQ ID NO: 26898 - protein, 14 aa, Homo Sapiens
SVSSPEPAEKSRSS

SEQ ID NO: 26899 - protein, 14 aa, Homo Sapiens
VSSPEPAEKSRSSR

SEQ ID NO: 26900 - protein, 14 aa, Homo Sapiens
SSPEPAEKSRSSRR

SEQ ID NO: 26901 - protein, 14 aa, Homo Sapiens
SPEPAEKSRSSRRR

SEQ ID NO: 26902 - protein, 14 aa, Homo Sapiens
PEPAEKSRSSRRRR

SEQ ID NO: 26903 - protein, 14 aa, Homo Sapiens
EPAEKSRSSRRRRS

SEQ ID NO: 26904 - protein, 14 aa, Homo Sapiens
PAEKSRSSRRRRSA

SEQ ID NO: 26905 - protein, 14 aa, Homo Sapiens
AEKSRSSRRRRSAS

SEQ ID NO: 26906 - protein, 14 aa, Homo Sapiens
EKSRSSRRRRSASS

SEQ ID NO: 26907 - protein, 14 aa, Homo Sapiens
KSRSSRRRRSASSP

SEQ ID NO: 26908 - protein, 14 aa, Homo Sapiens
SRSSRRRRSASSPR

SEQ ID NO: 26909 - protein, 14 aa, Homo Sapiens
RSSRRRRSASSPRT

SEQ ID NO: 26910 - protein, 14 aa, Homo Sapiens
SSRRRRSASSPRTK

SEQ ID NO: 26911 - protein, 14 aa, Homo Sapiens
SRRRRSASSPRTKT

SEQ ID NO: 26912 - protein, 14 aa, Homo Sapiens
RRRRSASSPRTKTT

SEQ ID NO: 26913 - protein, 14 aa, Homo Sapiens
RRRSASSPRTKTTS

SEQ ID NO: 26914 - protein, 14 aa, Homo Sapiens
RRSASSPRTKTTSR

SEQ ID NO: 26915 - protein, 14 aa, Homo Sapiens
RSASSPRTKTTSRR

SEQ ID NO: 26916 - protein, 14 aa, Homo Sapiens
SASSPRTKTTSRRG

SEQ ID NO: 26917 - protein, 14 aa, Homo Sapiens
ASSPRTKTTSRRGR

SEQ ID NO: 26918 - protein, 14 aa, Homo Sapiens
SSPRTKTTSRRGRS

SEQ ID NO: 26919 - protein, 14 aa, Homo Sapiens
SPRTKTTSRRGRSP

SEQ ID NO: 26920 - protein, 14 aa, Homo Sapiens
PRTKTTSRRGRSPS

SEQ ID NO: 26921 - protein, 14 aa, Homo Sapiens
RTKTTSRRGRSPSP

SEQ ID NO: 26922 - protein, 14 aa, Homo Sapiens
TKTTSRRGRSPSPK

SEQ ID NO: 26923 - protein, 14 aa, Homo Sapiens
KTTSRRGRSPSPKP

SEQ ID NO: 26924 - protein, 14 aa, Homo Sapiens
TTSRRGRSPSPKPR

SEQ ID NO: 26925 - protein, 14 aa, Homo Sapiens
TSRRGRSPSPKPRG

SEQ ID NO: 26926 - protein, 14 aa, Homo Sapiens
SRRGRSPSPKPRGL

SEQ ID NO: 26927 - protein, 14 aa, Homo Sapiens
RRGRSPSPKPRGLQ

SEQ ID NO: 26928 - protein, 14 aa, Homo Sapiens
RGRSPSPKPRGLQR

SEQ ID NO: 26929 - protein, 14 aa, Homo Sapiens
GRSPSPKPRGLQRS

SEQ ID NO: 26930 - protein, 14 aa, Homo Sapiens
RSPSPKPRGLQRSR

SEQ ID NO: 26931 - protein, 14 aa, Homo Sapiens
SPSPKPRGLQRSRS

SEQ ID NO: 26932 - protein, 14 aa, Homo Sapiens
PSPKPRGLQRSRSR

SEQ ID NO: 26933 - protein, 14 aa, Homo Sapiens
SPKPRGLQRSRSRS

SEQ ID NO: 26934 - protein, 14 aa, Homo Sapiens
PKPRGLQRSRSRSR

SEQ ID NO: 26935 - protein, 14 aa, Homo Sapiens
KPRGLQRSRSRSRR

SEQ ID NO: 26936 - protein, 14 aa, Homo Sapiens
PRGLQRSRSRSRRE

SEQ ID NO: 26937 - protein, 14 aa, Homo Sapiens
RGLQRSRSRSRREK

SEQ ID NO: 26938 - protein, 14 aa, Homo Sapiens
GLQRSRSRSRREKT

SEQ ID NO: 26939 - protein, 14 aa, Homo Sapiens
LQRSRSRSRREKTR

SEQ ID NO: 26940 - protein, 14 aa, Homo Sapiens
QRSRSRSRREKTRT

SEQ ID NO: 26941 - protein, 14 aa, Homo Sapiens
RSRSRSRREKTRTT

SEQ ID NO: 26942 - protein, 14 aa, Homo Sapiens
SRSRSRREKTRTTR

SEQ ID NO: 26943 - protein, 14 aa, Homo Sapiens
RSRSRREKTRTTRR

SEQ ID NO: 26944 - protein, 14 aa, Homo Sapiens
SRSRREKTRTTRRR

SEQ ID NO: 26945 - protein, 14 aa, Homo Sapiens
RSRREKTRTTRRRD

SEQ ID NO: 26946 - protein, 14 aa, Homo Sapiens
SRREKTRTTRRRDR

SEQ ID NO: 26947 - protein, 14 aa, Homo Sapiens
RREKTRTTRRRDRS

SEQ ID NO: 26948 - protein, 14 aa, Homo Sapiens
REKTRTTRRRDRSG

SEQ ID NO: 26949 - protein, 14 aa, Homo Sapiens
EKTRTTRRRDRSGS

SEQ ID NO: 26950 - protein, 14 aa, Homo Sapiens
KTRTTRRRDRSGSS

SEQ ID NO: 26951 - protein, 14 aa, Homo Sapiens
TRTTRRRDRSGSSQ

SEQ ID NO: 26952 - protein, 14 aa, Homo Sapiens
RTTRRRDRSGSSQS

SEQ ID NO: 26953 - protein, 14 aa, Homo Sapiens
TTRRRDRSGSSQST

SEQ ID NO: 26954 - protein, 14 aa, Homo Sapiens
TRRRDRSGSSQSTS

SEQ ID NO: 26955 - protein, 14 aa, Homo Sapiens
RRRDRSGSSQSTSR

SEQ ID NO: 26956 - protein, 14 aa, Homo Sapiens
RRDRSGSSQSTSRR

SEQ ID NO: 26957 - protein, 14 aa, Homo Sapiens
RDRSGSSQSTSRRR

SEQ ID NO: 26958 - protein, 14 aa, Homo Sapiens
DRSGSSQSTSRRRQ

SEQ ID NO: 26959 - protein, 14 aa, Homo Sapiens
RSGSSQSTSRRRQR

SEQ ID NO: 26960 - protein, 14 aa, Homo Sapiens
SGSSQSTSRRRQRS

SEQ ID NO: 26961 - protein, 14 aa, Homo Sapiens
GSSQSTSRRRQRSR

SEQ ID NO: 26962 - protein, 14 aa, Homo Sapiens
SSQSTSRRRQRSRS

SEQ ID NO: 26963 - protein, 14 aa, Homo Sapiens
SQSTSRRRQRSRSR

SEQ ID NO: 26964 - protein, 14 aa, Homo Sapiens
QSTSRRRQRSRSRS

SEQ ID NO: 26965 - protein, 14 aa, Homo Sapiens
STSRRRQRSRSRSR

SEQ ID NO: 26966 - protein, 14 aa, Homo Sapiens
TSRRRQRSRSRSRV

SEQ ID NO: 26967 - protein, 14 aa, Homo Sapiens
SRRRQRSRSRSRVT

SEQ ID NO: 26968 - protein, 14 aa, Homo Sapiens
RRRQRSRSRSRVTR

SEQ ID NO: 26969 - protein, 14 aa, Homo Sapiens
RRQRSRSRSRVTRR

SEQ ID NO: 26970 - protein, 14 aa, Homo Sapiens
RQRSRSRSRVTRRR

SEQ ID NO: 26971 - protein, 14 aa, Homo Sapiens
QRSRSRSRVTRRRR

SEQ ID NO: 26972 - protein, 14 aa, Homo Sapiens
RSRSRSRVTRRRRG

SEQ ID NO: 26973 - protein, 14 aa, Homo Sapiens
SRSRSRVTRRRRGG

SEQ ID NO: 26974 - protein, 14 aa, Homo Sapiens
RSRSRVTRRRRGGS

SEQ ID NO: 26975 - protein, 14 aa, Homo Sapiens
SRSRVTRRRRGGSG

SEQ ID NO: 26976 - protein, 14 aa, Homo Sapiens
RSRVTRRRRGGSGY

SEQ ID NO: 26977 - protein, 14 aa, Homo Sapiens
SRVTRRRRGGSGYH

SEQ ID NO: 26978 - protein, 14 aa, Homo Sapiens
RVTRRRRGGSGYHS

SEQ ID NO: 26979 - protein, 14 aa, Homo Sapiens
VTRRRRGGSGYHSR

SEQ ID NO: 26980 - protein, 14 aa, Homo Sapiens
TRRRRGGSGYHSRS

SEQ ID NO: 26981 - protein, 14 aa, Homo Sapiens
RRRRGGSGYHSRSP

SEQ ID NO: 26982 - protein, 14 aa, Homo Sapiens
RRRGGSGYHSRSPA

SEQ ID NO: 26983 - protein, 14 aa, Homo Sapiens
RRGGSGYHSRSPAR

SEQ ID NO: 26984 - protein, 14 aa, Homo Sapiens
RGGSGYHSRSPARQ

SEQ ID NO: 26985 - protein, 14 aa, Homo Sapiens
GGSGYHSRSPARQE

SEQ ID NO: 26986 - protein, 14 aa, Homo Sapiens
GSGYHSRSPARQES

SEQ ID NO: 26987 - protein, 14 aa, Homo Sapiens
SGYHSRSPARQESS

SEQ ID NO: 26988 - protein, 14 aa, Homo Sapiens
GYHSRSPARQESSR

SEQ ID NO: 26989 - protein, 14 aa, Homo Sapiens
YHSRSPARQESSRT

SEQ ID NO: 26990 - protein, 14 aa, Homo Sapiens
HSRSPARQESSRTS

SEQ ID NO: 26991 - protein, 14 aa, Homo Sapiens
SRSPARQESSRTSS

SEQ ID NO: 26992 - protein, 14 aa, Homo Sapiens
RSPARQESSRTSSR

SEQ ID NO: 26993 - protein, 14 aa, Homo Sapiens
SPARQESSRTSSRR

SEQ ID NO: 26994 - protein, 14 aa, Homo Sapiens
PARQESSRTSSRRR

SEQ ID NO: 26995 - protein, 14 aa, Homo Sapiens
ARQESSRTSSRRRR

SEQ ID NO: 26996 - protein, 14 aa, Homo Sapiens
RQESSRTSSRRRRG

SEQ ID NO: 26997 - protein, 14 aa, Homo Sapiens
QESSRTSSRRRRGR

SEQ ID NO: 26998 - protein, 14 aa, Homo Sapiens
ESSRTSSRRRRGRS

SEQ ID NO: 26999 - protein, 14 aa, Homo Sapiens
SSRTSSRRRRGRSR

SEQ ID NO: 27000 - protein, 14 aa, Homo Sapiens
SRTSSRRRRGRSRT

SEQ ID NO: 27001 - protein, 14 aa, Homo Sapiens
RTSSRRRRGRSRTP

SEQ ID NO: 27002 - protein, 14 aa, Homo Sapiens
TSSRRRRGRSRTPP

SEQ ID NO: 27003 - protein, 14 aa, Homo Sapiens
SSRRRRGRSRTPPT

SEQ ID NO: 27004 - protein, 14 aa, Homo Sapiens
SRRRRGRSRTPPTS

SEQ ID NO: 27005 - protein, 14 aa, Homo Sapiens
RRRRGRSRTPPTSR

SEQ ID NO: 27006 - protein, 14 aa, Homo Sapiens
RRRGRSRTPPTSRK

SEQ ID NO: 27007 - protein, 14 aa, Homo Sapiens
RRGRSRTPPTSRKR

SEQ ID NO: 27008 - protein, 14 aa, Homo Sapiens
RGRSRTPPTSRKRS

SEQ ID NO: 27009 - protein, 14 aa, Homo Sapiens
GRSRTPPTSRKRSR

SEQ ID NO: 27010 - protein, 14 aa, Homo Sapiens
RSRTPPTSRKRSRS

SEQ ID NO: 27011 - protein, 14 aa, Homo Sapiens
SRTPPTSRKRSRSR

SEQ ID NO: 27012 - protein, 14 aa, Homo Sapiens
RTPPTSRKRSRSRT

SEQ ID NO: 27013 - protein, 14 aa, Homo Sapiens
TPPTSRKRSRSRTS

SEQ ID NO: 27014 - protein, 14 aa, Homo Sapiens
PPTSRKRSRSRTSP

SEQ ID NO: 27015 - protein, 14 aa, Homo Sapiens
PTSRKRSRSRTSPA

SEQ ID NO: 27016 - protein, 14 aa, Homo Sapiens
TSRKRSRSRTSPAP

SEQ ID NO: 27017 - protein, 14 aa, Homo Sapiens
SRKRSRSRTSPAPW

SEQ ID NO: 27018 - protein, 14 aa, Homo Sapiens
RKRSRSRTSPAPWK

SEQ ID NO: 27019 - protein, 14 aa, Homo Sapiens
KRSRSRTSPAPWKR

SEQ ID NO: 27020 - protein, 14 aa, Homo Sapiens
RSRSRTSPAPWKRS

SEQ ID NO: 27021 - protein, 14 aa, Homo Sapiens
SRSRTSPAPWKRSR

SEQ ID NO: 27022 - protein, 14 aa, Homo Sapiens
RSRTSPAPWKRSRS

SEQ ID NO: 27023 - protein, 14 aa, Homo Sapiens
SRTSPAPWKRSRSR

SEQ ID NO: 27024 - protein, 14 aa, Homo Sapiens
RTSPAPWKRSRSRA

SEQ ID NO: 27025 - protein, 14 aa, Homo Sapiens
TSPAPWKRSRSRAS

SEQ ID NO: 27026 - protein, 14 aa, Homo Sapiens
SPAPWKRSRSRASP

SEQ ID NO: 27027 - protein, 14 aa, Homo Sapiens
PAPWKRSRSRASPA

SEQ ID NO: 27028 - protein, 14 aa, Homo Sapiens
APWKRSRSRASPAT

SEQ ID NO: 27029 - protein, 14 aa, Homo Sapiens
PWKRSRSRASPATH

SEQ ID NO: 27030 - protein, 14 aa, Homo Sapiens
WKRSRSRASPATHR

SEQ ID NO: 27031 - protein, 14 aa, Homo Sapiens
KRSRSRASPATHRR

SEQ ID NO: 27032 - protein, 14 aa, Homo Sapiens
RSRSRASPATHRRS

SEQ ID NO: 27033 - protein, 14 aa, Homo Sapiens
SRSRASPATHRRSR

SEQ ID NO: 27034 - protein, 14 aa, Homo Sapiens
RSRASPATHRRSRS

SEQ ID NO: 27035 - protein, 14 aa, Homo Sapiens
SRASPATHRRSRSR

SEQ ID NO: 27036 - protein, 14 aa, Homo Sapiens
RASPATHRRSRSRT

SEQ ID NO: 27037 - protein, 14 aa, Homo Sapiens
ASPATHRRSRSRTP

SEQ ID NO: 27038 - protein, 14 aa, Homo Sapiens
SPATHRRSRSRTPL

SEQ ID NO: 27039 - protein, 14 aa, Homo Sapiens
PATHRRSRSRTPLI

SEQ ID NO: 27040 - protein, 14 aa, Homo Sapiens
ATHRRSRSRTPLIS

SEQ ID NO: 27041 - protein, 14 aa, Homo Sapiens
THRRSRSRTPLISR

SEQ ID NO: 27042 - protein, 14 aa, Homo Sapiens
HRRSRSRTPLISRR

SEQ ID NO: 27043 - protein, 14 aa, Homo Sapiens
RRSRSRTPLISRRR

SEQ ID NO: 27044 - protein, 14 aa, Homo Sapiens
RSRSRTPLISRRRS

SEQ ID NO: 27045 - protein, 14 aa, Homo Sapiens
SRSRTPLISRRRSR

SEQ ID NO: 27046 - protein, 14 aa, Homo Sapiens
RSRTPLISRRRSRS

SEQ ID NO: 27047 - protein, 14 aa, Homo Sapiens
SRTPLISRRRSRSR

SEQ ID NO: 27048 - protein, 14 aa, Homo Sapiens
RTPLISRRRSRSRT

SEQ ID NO: 27049 - protein, 14 aa, Homo Sapiens
TPLISRRRSRSRTS

SEQ ID NO: 27050 - protein, 14 aa, Homo Sapiens
PLISRRRSRSRTSP

SEQ ID NO: 27051 - protein, 14 aa, Homo Sapiens
LISRRRSRSRTSPV

SEQ ID NO: 27052 - protein, 14 aa, Homo Sapiens
ISRRRSRSRTSPVS

SEQ ID NO: 27053 - protein, 14 aa, Homo Sapiens
SRRRSRSRTSPVSR

SEQ ID NO: 27054 - protein, 14 aa, Homo Sapiens
RRRSRSRTSPVSRR

SEQ ID NO: 27055 - protein, 14 aa, Homo Sapiens
RRSRSRTSPVSRRR

SEQ ID NO: 27056 - protein, 14 aa, Homo Sapiens
RSRSRTSPVSRRRS

SEQ ID NO: 27057 - protein, 14 aa, Homo Sapiens
SRSRTSPVSRRRSR

SEQ ID NO: 27058 - protein, 14 aa, Homo Sapiens
RSRTSPVSRRRSRS

SEQ ID NO: 27059 - protein, 14 aa, Homo Sapiens
SRTSPVSRRRSRSR

SEQ ID NO: 27060 - protein, 14 aa, Homo Sapiens
RTSPVSRRRSRSRT

SEQ ID NO: 27061 - protein, 14 aa, Homo Sapiens
TSPVSRRRSRSRTS

SEQ ID NO: 27062 - protein, 14 aa, Homo Sapiens
SPVSRRRSRSRTSV

SEQ ID NO: 27063 - protein, 14 aa, Homo Sapiens
PVSRRRSRSRTSVT

SEQ ID NO: 27064 - protein, 14 aa, Homo Sapiens
VSRRRSRSRTSVTR

SEQ ID NO: 27065 - protein, 14 aa, Homo Sapiens
SRRRSRSRTSVTRR

SEQ ID NO: 27066 - protein, 14 aa, Homo Sapiens
RRRSRSRTSVTRRR

SEQ ID NO: 27067 - protein, 14 aa, Homo Sapiens
RRSRSRTSVTRRRS

SEQ ID NO: 27068 - protein, 14 aa, Homo Sapiens
RSRSRTSVTRRRSR

SEQ ID NO: 27069 - protein, 14 aa, Homo Sapiens
SRSRTSVTRRRSRS

SEQ ID NO: 27070 - protein, 14 aa, Homo Sapiens
RSRTSVTRRRSRSR

SEQ ID NO: 27071 - protein, 14 aa, Homo Sapiens
SRTSVTRRRSRSRA

SEQ ID NO: 27072 - protein, 14 aa, Homo Sapiens
RTSVTRRRSRSRAS

SEQ ID NO: 27073 - protein, 14 aa, Homo Sapiens
TSVTRRRSRSRASP

SEQ ID NO: 27074 - protein, 14 aa, Homo Sapiens
SVTRRRSRSRASPV

SEQ ID NO: 27075 - protein, 14 aa, Homo Sapiens
VTRRRSRSRASPVS

SEQ ID NO: 27076 - protein, 14 aa, Homo Sapiens
TRRRSRSRASPVSR

SEQ ID NO: 27077 - protein, 14 aa, Homo Sapiens
RRRSRSRASPVSRR

SEQ ID NO: 27078 - protein, 14 aa, Homo Sapiens
RRSRSRASPVSRRR

SEQ ID NO: 27079 - protein, 14 aa, Homo Sapiens
RSRSRASPVSRRRS

SEQ ID NO: 27080 - protein, 14 aa, Homo Sapiens
SRSRASPVSRRRSR

SEQ ID NO: 27081 - protein, 14 aa, Homo Sapiens
RSRASPVSRRRSRS

SEQ ID NO: 27082 - protein, 14 aa, Homo Sapiens
SRASPVSRRRSRSR

SEQ ID NO: 27083 - protein, 14 aa, Homo Sapiens
RASPVSRRRSRSRT

SEQ ID NO: 27084 - protein, 14 aa, Homo Sapiens
ASPVSRRRSRSRTP

SEQ ID NO: 27085 - protein, 14 aa, Homo Sapiens
SPVSRRRSRSRTPP

SEQ ID NO: 27086 - protein, 14 aa, Homo Sapiens
PVSRRRSRSRTPPV

SEQ ID NO: 27087 - protein, 14 aa, Homo Sapiens
VSRRRSRSRTPPVT

SEQ ID NO: 27088 - protein, 14 aa, Homo Sapiens
SRRRSRSRTPPVTR

SEQ ID NO: 27089 - protein, 14 aa, Homo Sapiens
RRRSRSRTPPVTRR

SEQ ID NO: 27090 - protein, 14 aa, Homo Sapiens
RRSRSRTPPVTRRR

SEQ ID NO: 27091 - protein, 14 aa, Homo Sapiens
RSRSRTPPVTRRRS

SEQ ID NO: 27092 - protein, 14 aa, Homo Sapiens
SRSRTPPVTRRRSR

SEQ ID NO: 27093 - protein, 14 aa, Homo Sapiens
RSRTPPVTRRRSRS

SEQ ID NO: 27094 - protein, 14 aa, Homo Sapiens
SRTPPVTRRRSRSR

SEQ ID NO: 27095 - protein, 14 aa, Homo Sapiens
RTPPVTRRRSRSRT

SEQ ID NO: 27096 - protein, 14 aa, Homo Sapiens
TPPVTRRRSRSRTP

SEQ ID NO: 27097 - protein, 14 aa, Homo Sapiens
PPVTRRRSRSRTPT

SEQ ID NO: 27098 - protein, 14 aa, Homo Sapiens
PVTRRRSRSRTPTT

SEQ ID NO: 27099 - protein, 14 aa, Homo Sapiens
VTRRRSRSRTPTTR

SEQ ID NO: 27100 - protein, 14 aa, Homo Sapiens
TRRRSRSRTPTTRR

SEQ ID NO: 27101 - protein, 14 aa, Homo Sapiens
RRRSRSRTPTTRRR

SEQ ID NO: 27102 - protein, 14 aa, Homo Sapiens
RRSRSRTPTTRRRS

SEQ ID NO: 27103 - protein, 14 aa, Homo Sapiens
RSRSRTPTTRRRSR

SEQ ID NO: 27104 - protein, 14 aa, Homo Sapiens
SRSRTPTTRRRSRS

SEQ ID NO: 27105 - protein, 14 aa, Homo Sapiens
RSRTPTTRRRSRSR

SEQ ID NO: 27106 - protein, 14 aa, Homo Sapiens
SRTPTTRRRSRSRT

SEQ ID NO: 27107 - protein, 14 aa, Homo Sapiens
RTPTTRRRSRSRTP

SEQ ID NO: 27108 - protein, 14 aa, Homo Sapiens
TPTTRRRSRSRTPP

SEQ ID NO: 27109 - protein, 14 aa, Homo Sapiens
PTTRRRSRSRTPPV

SEQ ID NO: 27110 - protein, 14 aa, Homo Sapiens
TTRRRSRSRTPPVT

SEQ ID NO: 27111 - protein, 14 aa, Homo Sapiens
TRRRSRSRTPPVTR

SEQ ID NO: 27112 - protein, 14 aa, Homo Sapiens
RRRSRSRTPPVTRR

SEQ ID NO: 27113 - protein, 14 aa, Homo Sapiens
RRSRSRTPPVTRRR

SEQ ID NO: 27114 - protein, 14 aa, Homo Sapiens
RSRSRTPPVTRRRS

SEQ ID NO: 27115 - protein, 14 aa, Homo Sapiens
SRSRTPPVTRRRSR

SEQ ID NO: 27116 - protein, 14 aa, Homo Sapiens
RSRTPPVTRRRSRS

SEQ ID NO: 27117 - protein, 14 aa, Homo Sapiens
SRTPPVTRRRSRSR

SEQ ID NO: 27118 - protein, 14 aa, Homo Sapiens
RTPPVTRRRSRSRT

SEQ ID NO: 27119 - protein, 14 aa, Homo Sapiens
TPPVTRRRSRSRTP

SEQ ID NO: 27120 - protein, 14 aa, Homo Sapiens
PPVTRRRSRSRTPP

SEQ ID NO: 27121 - protein, 14 aa, Homo Sapiens
PVTRRRSRSRTPPV

SEQ ID NO: 27122 - protein, 14 aa, Homo Sapiens
VTRRRSRSRTPPVT

SEQ ID NO: 27123 - protein, 14 aa, Homo Sapiens
TRRRSRSRTPPVTR

SEQ ID NO: 27124 - protein, 14 aa, Homo Sapiens
RRRSRSRTPPVTRR

SEQ ID NO: 27125 - protein, 14 aa, Homo Sapiens
RRSRSRTPPVTRRR

SEQ ID NO: 27126 - protein, 14 aa, Homo Sapiens
RSRSRTPPVTRRRS

SEQ ID NO: 27127 - protein, 14 aa, Homo Sapiens
SRSRTPPVTRRRSR

SEQ ID NO: 27128 - protein, 14 aa, Homo Sapiens
RSRTPPVTRRRSRS

SEQ ID NO: 27129 - protein, 14 aa, Homo Sapiens
SRTPPVTRRRSRSR

SEQ ID NO: 27130 - protein, 14 aa, Homo Sapiens
RTPPVTRRRSRSRT

SEQ ID NO: 27131 - protein, 14 aa, Homo Sapiens
TPPVTRRRSRSRTS

SEQ ID NO: 27132 - protein, 14 aa, Homo Sapiens
PPVTRRRSRSRTSP

SEQ ID NO: 27133 - protein, 14 aa, Homo Sapiens
PVTRRRSRSRTSPI

SEQ ID NO: 27134 - protein, 14 aa, Homo Sapiens
VTRRRSRSRTSPIT

SEQ ID NO: 27135 - protein, 14 aa, Homo Sapiens
TRRRSRSRTSPITR

SEQ ID NO: 27136 - protein, 14 aa, Homo Sapiens
RRRSRSRTSPITRR

SEQ ID NO: 27137 - protein, 14 aa, Homo Sapiens
RRSRSRTSPITRRR

SEQ ID NO: 27138 - protein, 14 aa, Homo Sapiens
RSRSRTSPITRRRS

SEQ ID NO: 27139 - protein, 14 aa, Homo Sapiens
SRSRTSPITRRRSR

SEQ ID NO: 27140 - protein, 14 aa, Homo Sapiens
RSRTSPITRRRSRS

SEQ ID NO: 27141 - protein, 14 aa, Homo Sapiens
SRTSPITRRRSRSR

SEQ ID NO: 27142 - protein, 14 aa, Homo Sapiens
RTSPITRRRSRSRT

SEQ ID NO: 27143 - protein, 14 aa, Homo Sapiens
TSPITRRRSRSRTS

SEQ ID NO: 27144 - protein, 14 aa, Homo Sapiens
SPITRRRSRSRTSP

SEQ ID NO: 27145 - protein, 14 aa, Homo Sapiens
PITRRRSRSRTSPV

SEQ ID NO: 27146 - protein, 14 aa, Homo Sapiens
ITRRRSRSRTSPVT

SEQ ID NO: 27147 - protein, 14 aa, Homo Sapiens
TRRRSRSRTSPVTR

SEQ ID NO: 27148 - protein, 14 aa, Homo Sapiens
RRRSRSRTSPVTRR

SEQ ID NO: 27149 - protein, 14 aa, Homo Sapiens
RRSRSRTSPVTRRR

SEQ ID NO: 27150 - protein, 14 aa, Homo Sapiens
RSRSRTSPVTRRRS

SEQ ID NO: 27151 - protein, 14 aa, Homo Sapiens
SRSRTSPVTRRRSR

SEQ ID NO: 27152 - protein, 14 aa, Homo Sapiens
RSRTSPVTRRRSRS

SEQ ID NO: 27153 - protein, 14 aa, Homo Sapiens
SRTSPVTRRRSRSR

SEQ ID NO: 27154 - protein, 14 aa, Homo Sapiens
RTSPVTRRRSRSRT

SEQ ID NO: 27155 - protein, 14 aa, Homo Sapiens
TSPVTRRRSRSRTS

SEQ ID NO: 27156 - protein, 14 aa, Homo Sapiens
SPVTRRRSRSRTSP

SEQ ID NO: 27157 - protein, 14 aa, Homo Sapiens
PVTRRRSRSRTSPV

SEQ ID NO: 27158 - protein, 14 aa, Homo Sapiens
VTRRRSRSRTSPVT

SEQ ID NO: 27159 - protein, 14 aa, Homo Sapiens
TRRRSRSRTSPVTR

SEQ ID NO: 27160 - protein, 14 aa, Homo Sapiens
RRRSRSRTSPVTRR

SEQ ID NO: 27161 - protein, 14 aa, Homo Sapiens
RRSRSRTSPVTRRR

SEQ ID NO: 27162 - protein, 14 aa, Homo Sapiens
RSRSRTSPVTRRRS

SEQ ID NO: 27163 - protein, 14 aa, Homo Sapiens
SRSRTSPVTRRRSR

SEQ ID NO: 27164 - protein, 14 aa, Homo Sapiens
RSRTSPVTRRRSRS

SEQ ID NO: 27165 - protein, 14 aa, Homo Sapiens
SRTSPVTRRRSRSR

SEQ ID NO: 27166 - protein, 14 aa, Homo Sapiens
RTSPVTRRRSRSRT

SEQ ID NO: 27167 - protein, 14 aa, Homo Sapiens
TSPVTRRRSRSRTS

SEQ ID NO: 27168 - protein, 14 aa, Homo Sapiens
SPVTRRRSRSRTSP

SEQ ID NO: 27169 - protein, 14 aa, Homo Sapiens
PVTRRRSRSRTSPV

SEQ ID NO: 27170 - protein, 14 aa, Homo Sapiens
VTRRRSRSRTSPVT

SEQ ID NO: 27171 - protein, 14 aa, Homo Sapiens
TRRRSRSRTSPVTR

SEQ ID NO: 27172 - protein, 14 aa, Homo Sapiens
RRRSRSRTSPVTRR

SEQ ID NO: 27173 - protein, 14 aa, Homo Sapiens
RRSRSRTSPVTRRR

SEQ ID NO: 27174 - protein, 14 aa, Homo Sapiens
RSRSRTSPVTRRRS

SEQ ID NO: 27175 - protein, 14 aa, Homo Sapiens
SRSRTSPVTRRRSR

SEQ ID NO: 27176 - protein, 14 aa, Homo Sapiens
RSRTSPVTRRRSRS

SEQ ID NO: 27177 - protein, 14 aa, Homo Sapiens
SRTSPVTRRRSRSR

SEQ ID NO: 27178 - protein, 14 aa, Homo Sapiens
RTSPVTRRRSRSRT

SEQ ID NO: 27179 - protein, 14 aa, Homo Sapiens
TSPVTRRRSRSRTP

SEQ ID NO: 27180 - protein, 14 aa, Homo Sapiens
SPVTRRRSRSRTPP

SEQ ID NO: 27181 - protein, 14 aa, Homo Sapiens
PVTRRRSRSRTPPA

SEQ ID NO: 27182 - protein, 14 aa, Homo Sapiens
VTRRRSRSRTPPAI

SEQ ID NO: 27183 - protein, 14 aa, Homo Sapiens
TRRRSRSRTPPAIR

SEQ ID NO: 27184 - protein, 14 aa, Homo Sapiens
RRRSRSRTPPAIRR

SEQ ID NO: 27185 - protein, 14 aa, Homo Sapiens
RRSRSRTPPAIRRR

SEQ ID NO: 27186 - protein, 14 aa, Homo Sapiens
RSRSRTPPAIRRRS

SEQ ID NO: 27187 - protein, 14 aa, Homo Sapiens
SRSRTPPAIRRRSR

SEQ ID NO: 27188 - protein, 14 aa, Homo Sapiens
RSRTPPAIRRRSRS

SEQ ID NO: 27189 - protein, 14 aa, Homo Sapiens
SRTPPAIRRRSRSR

SEQ ID NO: 27190 - protein, 14 aa, Homo Sapiens
RTPPAIRRRSRSRT

SEQ ID NO: 27191 - protein, 14 aa, Homo Sapiens
TPPAIRRRSRSRTP

SEQ ID NO: 27192 - protein, 14 aa, Homo Sapiens
PPAIRRRSRSRTPL

SEQ ID NO: 27193 - protein, 14 aa, Homo Sapiens
PAIRRRSRSRTPLL

SEQ ID NO: 27194 - protein, 14 aa, Homo Sapiens
AIRRRSRSRTPLLP

SEQ ID NO: 27195 - protein, 14 aa, Homo Sapiens
IRRRSRSRTPLLPR

SEQ ID NO: 27196 - protein, 14 aa, Homo Sapiens
RRRSRSRTPLLPRK

SEQ ID NO: 27197 - protein, 14 aa, Homo Sapiens
RRSRSRTPLLPRKR

SEQ ID NO: 27198 - protein, 14 aa, Homo Sapiens
RSRSRTPLLPRKRS

SEQ ID NO: 27199 - protein, 14 aa, Homo Sapiens
SRSRTPLLPRKRSR

SEQ ID NO: 27200 - protein, 14 aa, Homo Sapiens
RSRTPLLPRKRSRS

SEQ ID NO: 27201 - protein, 14 aa, Homo Sapiens
SRTPLLPRKRSRSR

SEQ ID NO: 27202 - protein, 14 aa, Homo Sapiens
RTPLLPRKRSRSRS

SEQ ID NO: 27203 - protein, 14 aa, Homo Sapiens
TPLLPRKRSRSRSP

SEQ ID NO: 27204 - protein, 14 aa, Homo Sapiens
PLLPRKRSRSRSPL

SEQ ID NO: 27205 - protein, 14 aa, Homo Sapiens
LLPRKRSRSRSPLA

SEQ ID NO: 27206 - protein, 14 aa, Homo Sapiens
LPRKRSRSRSPLAI

SEQ ID NO: 27207 - protein, 14 aa, Homo Sapiens
PRKRSRSRSPLAIR

SEQ ID NO: 27208 - protein, 14 aa, Homo Sapiens
RKRSRSRSPLAIRR

SEQ ID NO: 27209 - protein, 14 aa, Homo Sapiens
KRSRSRSPLAIRRR

SEQ ID NO: 27210 - protein, 14 aa, Homo Sapiens
RSRSRSPLAIRRRS

SEQ ID NO: 27211 - protein, 14 aa, Homo Sapiens
SRSRSPLAIRRRSR

SEQ ID NO: 27212 - protein, 14 aa, Homo Sapiens
RSRSPLAIRRRSRS

SEQ ID NO: 27213 - protein, 14 aa, Homo Sapiens
SRSPLAIRRRSRSR

SEQ ID NO: 27214 - protein, 14 aa, Homo Sapiens
RSPLAIRRRSRSRT

SEQ ID NO: 27215 - protein, 14 aa, Homo Sapiens
SPLAIRRRSRSRTP

SEQ ID NO: 27216 - protein, 14 aa, Homo Sapiens
PLAIRRRSRSRTPR

SEQ ID NO: 27217 - protein, 14 aa, Homo Sapiens
LAIRRRSRSRTPRT

SEQ ID NO: 27218 - protein, 14 aa, Homo Sapiens
AIRRRSRSRTPRTA

SEQ ID NO: 27219 - protein, 14 aa, Homo Sapiens
IRRRSRSRTPRTAR

SEQ ID NO: 27220 - protein, 14 aa, Homo Sapiens
RRRSRSRTPRTARG

SEQ ID NO: 27221 - protein, 14 aa, Homo Sapiens
RRSRSRTPRTARGK

SEQ ID NO: 27222 - protein, 14 aa, Homo Sapiens
RSRSRTPRTARGKR

SEQ ID NO: 27223 - protein, 14 aa, Homo Sapiens
SRSRTPRTARGKRS

SEQ ID NO: 27224 - protein, 14 aa, Homo Sapiens
RSRTPRTARGKRSL

SEQ ID NO: 27225 - protein, 14 aa, Homo Sapiens
SRTPRTARGKRSLT

SEQ ID NO: 27226 - protein, 14 aa, Homo Sapiens
RTPRTARGKRSLTR

SEQ ID NO: 27227 - protein, 14 aa, Homo Sapiens
TPRTARGKRSLTRS

SEQ ID NO: 27228 - protein, 14 aa, Homo Sapiens
PRTARGKRSLTRSP

SEQ ID NO: 27229 - protein, 14 aa, Homo Sapiens
RTARGKRSLTRSPP

SEQ ID NO: 27230 - protein, 14 aa, Homo Sapiens
TARGKRSLTRSPPA

SEQ ID NO: 27231 - protein, 14 aa, Homo Sapiens
ARGKRSLTRSPPAI

SEQ ID NO: 27232 - protein, 14 aa, Homo Sapiens
RGKRSLTRSPPAIR

SEQ ID NO: 27233 - protein, 14 aa, Homo Sapiens
GKRSLTRSPPAIRR

SEQ ID NO: 27234 - protein, 14 aa, Homo Sapiens
KRSLTRSPPAIRRR

SEQ ID NO: 27235 - protein, 14 aa, Homo Sapiens
RSLTRSPPAIRRRS

SEQ ID NO: 27236 - protein, 14 aa, Homo Sapiens
SLTRSPPAIRRRSA

SEQ ID NO: 27237 - protein, 14 aa, Homo Sapiens
LTRSPPAIRRRSAS

SEQ ID NO: 27238 - protein, 14 aa, Homo Sapiens
TRSPPAIRRRSASG

SEQ ID NO: 27239 - protein, 14 aa, Homo Sapiens
RSPPAIRRRSASGS

SEQ ID NO: 27240 - protein, 14 aa, Homo Sapiens
SPPAIRRRSASGSS

SEQ ID NO: 27241 - protein, 14 aa, Homo Sapiens
PPAIRRRSASGSSS

SEQ ID NO: 27242 - protein, 14 aa, Homo Sapiens
PAIRRRSASGSSSD

SEQ ID NO: 27243 - protein, 14 aa, Homo Sapiens
AIRRRSASGSSSDR

SEQ ID NO: 27244 - protein, 14 aa, Homo Sapiens
IRRRSASGSSSDRS

SEQ ID NO: 27245 - protein, 14 aa, Homo Sapiens
RRRSASGSSSDRSR

SEQ ID NO: 27246 - protein, 14 aa, Homo Sapiens
RRSASGSSSDRSRS

SEQ ID NO: 27247 - protein, 14 aa, Homo Sapiens
RSASGSSSDRSRSA

SEQ ID NO: 27248 - protein, 14 aa, Homo Sapiens
SASGSSSDRSRSAT

SEQ ID NO: 27249 - protein, 14 aa, Homo Sapiens
ASGSSSDRSRSATP

SEQ ID NO: 27250 - protein, 14 aa, Homo Sapiens
SGSSSDRSRSATPP

SEQ ID NO: 27251 - protein, 14 aa, Homo Sapiens
GSSSDRSRSATPPA

SEQ ID NO: 27252 - protein, 14 aa, Homo Sapiens
SSSDRSRSATPPAT

SEQ ID NO: 27253 - protein, 14 aa, Homo Sapiens
SSDRSRSATPPATR

SEQ ID NO: 27254 - protein, 14 aa, Homo Sapiens
SDRSRSATPPATRN

SEQ ID NO: 27255 - protein, 14 aa, Homo Sapiens
DRSRSATPPATRNH

SEQ ID NO: 27256 - protein, 14 aa, Homo Sapiens
RSRSATPPATRNHS

SEQ ID NO: 27257 - protein, 14 aa, Homo Sapiens
SRSATPPATRNHSG

SEQ ID NO: 27258 - protein, 14 aa, Homo Sapiens
RSATPPATRNHSGS

SEQ ID NO: 27259 - protein, 14 aa, Homo Sapiens
SATPPATRNHSGSR

SEQ ID NO: 27260 - protein, 14 aa, Homo Sapiens
ATPPATRNHSGSRT

SEQ ID NO: 27261 - protein, 14 aa, Homo Sapiens
TPPATRNHSGSRTP

SEQ ID NO: 27262 - protein, 14 aa, Homo Sapiens
PPATRNHSGSRTPP

SEQ ID NO: 27263 - protein, 14 aa, Homo Sapiens
PATRNHSGSRTPPV

SEQ ID NO: 27264 - protein, 14 aa, Homo Sapiens
ATRNHSGSRTPPVA

SEQ ID NO: 27265 - protein, 14 aa, Homo Sapiens
TRNHSGSRTPPVAL

SEQ ID NO: 27266 - protein, 14 aa, Homo Sapiens
RNHSGSRTPPVALN

SEQ ID NO: 27267 - protein, 14 aa, Homo Sapiens
NHSGSRTPPVALNS

SEQ ID NO: 27268 - protein, 14 aa, Homo Sapiens
HSGSRTPPVALNSS

SEQ ID NO: 27269 - protein, 14 aa, Homo Sapiens
SGSRTPPVALNSSR

SEQ ID NO: 27270 - protein, 14 aa, Homo Sapiens
GSRTPPVALNSSRM

SEQ ID NO: 27271 - protein, 14 aa, Homo Sapiens
SRTPPVALNSSRMS

SEQ ID NO: 27272 - protein, 14 aa, Homo Sapiens
RTPPVALNSSRMSC

SEQ ID NO: 27273 - protein, 14 aa, Homo Sapiens
TPPVALNSSRMSCF

SEQ ID NO: 27274 - protein, 14 aa, Homo Sapiens
PPVALNSSRMSCFS

SEQ ID NO: 27275 - protein, 14 aa, Homo Sapiens
PVALNSSRMSCFSR

SEQ ID NO: 27276 - protein, 14 aa, Homo Sapiens
VALNSSRMSCFSRP

SEQ ID NO: 27277 - protein, 14 aa, Homo Sapiens
ALNSSRMSCFSRPS

SEQ ID NO: 27278 - protein, 14 aa, Homo Sapiens
LNSSRMSCFSRPSM

SEQ ID NO: 27279 - protein, 14 aa, Homo Sapiens
NSSRMSCFSRPSMS

SEQ ID NO: 27280 - protein, 14 aa, Homo Sapiens
SSRMSCFSRPSMSP

SEQ ID NO: 27281 - protein, 14 aa, Homo Sapiens
SRMSCFSRPSMSPT

SEQ ID NO: 27282 - protein, 14 aa, Homo Sapiens
RMSCFSRPSMSPTP

SEQ ID NO: 27283 - protein, 14 aa, Homo Sapiens
MSCFSRPSMSPTPL

SEQ ID NO: 27284 - protein, 14 aa, Homo Sapiens
SCFSRPSMSPTPLD

SEQ ID NO: 27285 - protein, 14 aa, Homo Sapiens
CFSRPSMSPTPLDR

SEQ ID NO: 27286 - protein, 14 aa, Homo Sapiens
FSRPSMSPTPLDRC

SEQ ID NO: 27287 - protein, 14 aa, Homo Sapiens
SRPSMSPTPLDRCR

SEQ ID NO: 27288 - protein, 14 aa, Homo Sapiens
RPSMSPTPLDRCRS

SEQ ID NO: 27289 - protein, 14 aa, Homo Sapiens
PSMSPTPLDRCRSP

SEQ ID NO: 27290 - protein, 14 aa, Homo Sapiens
SMSPTPLDRCRSPG

SEQ ID NO: 27291 - protein, 14 aa, Homo Sapiens
MSPTPLDRCRSPGM

SEQ ID NO: 27292 - protein, 14 aa, Homo Sapiens
SPTPLDRCRSPGML

SEQ ID NO: 27293 - protein, 14 aa, Homo Sapiens
PTPLDRCRSPGMLE

SEQ ID NO: 27294 - protein, 14 aa, Homo Sapiens
TPLDRCRSPGMLEP

SEQ ID NO: 27295 - protein, 14 aa, Homo Sapiens
PLDRCRSPGMLEPL

SEQ ID NO: 27296 - protein, 14 aa, Homo Sapiens
LDRCRSPGMLEPLG

SEQ ID NO: 27297 - protein, 14 aa, Homo Sapiens
DRCRSPGMLEPLGS

SEQ ID NO: 27298 - protein, 14 aa, Homo Sapiens
RCRSPGMLEPLGSS

SEQ ID NO: 27299 - protein, 14 aa, Homo Sapiens
CRSPGMLEPLGSSR

SEQ ID NO: 27300 - protein, 14 aa, Homo Sapiens
RSPGMLEPLGSSRT

SEQ ID NO: 27301 - protein, 14 aa, Homo Sapiens
SPGMLEPLGSSRTP

SEQ ID NO: 27302 - protein, 14 aa, Homo Sapiens
PGMLEPLGSSRTPM

SEQ ID NO: 27303 - protein, 14 aa, Homo Sapiens
GMLEPLGSSRTPMS

SEQ ID NO: 27304 - protein, 14 aa, Homo Sapiens
MLEPLGSSRTPMSV

SEQ ID NO: 27305 - protein, 14 aa, Homo Sapiens
LEPLGSSRTPMSVL

SEQ ID NO: 27306 - protein, 14 aa, Homo Sapiens
EPLGSSRTPMSVLQ

SEQ ID NO: 27307 - protein, 14 aa, Homo Sapiens
PLGSSRTPMSVLQQ

SEQ ID NO: 27308 - protein, 14 aa, Homo Sapiens
LGSSRTPMSVLQQA

SEQ ID NO: 27309 - protein, 14 aa, Homo Sapiens
GSSRTPMSVLQQAG

SEQ ID NO: 27310 - protein, 14 aa, Homo Sapiens
SSRTPMSVLQQAGG

SEQ ID NO: 27311 - protein, 14 aa, Homo Sapiens
SRTPMSVLQQAGGS

SEQ ID NO: 27312 - protein, 14 aa, Homo Sapiens
RTPMSVLQQAGGSM

SEQ ID NO: 27313 - protein, 14 aa, Homo Sapiens
TPMSVLQQAGGSMM

SEQ ID NO: 27314 - protein, 14 aa, Homo Sapiens
PMSVLQQAGGSMMD

SEQ ID NO: 27315 - protein, 14 aa, Homo Sapiens
MSVLQQAGGSMMDG

SEQ ID NO: 27316 - protein, 14 aa, Homo Sapiens
SVLQQAGGSMMDGP

SEQ ID NO: 27317 - protein, 14 aa, Homo Sapiens
VLQQAGGSMMDGPG

SEQ ID NO: 27318 - protein, 14 aa, Homo Sapiens
LQQAGGSMMDGPGP

SEQ ID NO: 27319 - protein, 14 aa, Homo Sapiens
QQAGGSMMDGPGPR

SEQ ID NO: 27320 - protein, 14 aa, Homo Sapiens
QAGGSMMDGPGPRI

SEQ ID NO: 27321 - protein, 14 aa, Homo Sapiens
AGGSMMDGPGPRIP

SEQ ID NO: 27322 - protein, 14 aa, Homo Sapiens
GGSMMDGPGPRIPD

SEQ ID NO: 27323 - protein, 14 aa, Homo Sapiens
GSMMDGPGPRIPDH

SEQ ID NO: 27324 - protein, 14 aa, Homo Sapiens
SMMDGPGPRIPDHQ

SEQ ID NO: 27325 - protein, 14 aa, Homo Sapiens
MMDGPGPRIPDHQR

SEQ ID NO: 27326 - protein, 14 aa, Homo Sapiens
MDGPGPRIPDHQRT

SEQ ID NO: 27327 - protein, 14 aa, Homo Sapiens
DGPGPRIPDHQRTS

SEQ ID NO: 27328 - protein, 14 aa, Homo Sapiens
GPGPRIPDHQRTSV

SEQ ID NO: 27329 - protein, 14 aa, Homo Sapiens
PGPRIPDHQRTSVP

SEQ ID NO: 27330 - protein, 14 aa, Homo Sapiens
GPRIPDHQRTSVPE

SEQ ID NO: 27331 - protein, 14 aa, Homo Sapiens
PRIPDHQRTSVPEN

SEQ ID NO: 27332 - protein, 14 aa, Homo Sapiens
RIPDHQRTSVPENH

SEQ ID NO: 27333 - protein, 14 aa, Homo Sapiens
IPDHQRTSVPENHA

SEQ ID NO: 27334 - protein, 14 aa, Homo Sapiens
PDHQRTSVPENHAQ

SEQ ID NO: 27335 - protein, 14 aa, Homo Sapiens
DHQRTSVPENHAQS

SEQ ID NO: 27336 - protein, 14 aa, Homo Sapiens
HQRTSVPENHAQSR

SEQ ID NO: 27337 - protein, 14 aa, Homo Sapiens
QRTSVPENHAQSRI

SEQ ID NO: 27338 - protein, 14 aa, Homo Sapiens
RTSVPENHAQSRIA

SEQ ID NO: 27339 - protein, 14 aa, Homo Sapiens
TSVPENHAQSRIAL

SEQ ID NO: 27340 - protein, 14 aa, Homo Sapiens
SVPENHAQSRIALA

SEQ ID NO: 27341 - protein, 14 aa, Homo Sapiens
VPENHAQSRIALAL

SEQ ID NO: 27342 - protein, 14 aa, Homo Sapiens
PENHAQSRIALALT

SEQ ID NO: 27343 - protein, 14 aa, Homo Sapiens
ENHAQSRIALALTA

SEQ ID NO: 27344 - protein, 14 aa, Homo Sapiens
NHAQSRIALALTAI

SEQ ID NO: 27345 - protein, 14 aa, Homo Sapiens
HAQSRIALALTAIS

SEQ ID NO: 27346 - protein, 14 aa, Homo Sapiens
AQSRIALALTAISL

SEQ ID NO: 27347 - protein, 14 aa, Homo Sapiens
QSRIALALTAISLG

SEQ ID NO: 27348 - protein, 14 aa, Homo Sapiens
SRIALALTAISLGT

SEQ ID NO: 27349 - protein, 14 aa, Homo Sapiens
RIALALTAISLGTA

SEQ ID NO: 27350 - protein, 14 aa, Homo Sapiens
IALALTAISLGTAR

SEQ ID NO: 27351 - protein, 14 aa, Homo Sapiens
ALALTAISLGTARP

SEQ ID NO: 27352 - protein, 14 aa, Homo Sapiens
LALTAISLGTARPP

SEQ ID NO: 27353 - protein, 14 aa, Homo Sapiens
ALTAISLGTARPPP

SEQ ID NO: 27354 - protein, 14 aa, Homo Sapiens
LTAISLGTARPPPS

SEQ ID NO: 27355 - protein, 14 aa, Homo Sapiens
TAISLGTARPPPSM

SEQ ID NO: 27356 - protein, 14 aa, Homo Sapiens
AISLGTARPPPSMS

SEQ ID NO: 27357 - protein, 14 aa, Homo Sapiens
ISLGTARPPPSMSA

SEQ ID NO: 27358 - protein, 14 aa, Homo Sapiens
SLGTARPPPSMSAA

SEQ ID NO: 27359 - protein, 14 aa, Homo Sapiens
LGTARPPPSMSAAG

SEQ ID NO: 27360 - protein, 14 aa, Homo Sapiens
GTARPPPSMSAAGL

SEQ ID NO: 27361 - protein, 14 aa, Homo Sapiens
TARPPPSMSAAGLA

SEQ ID NO: 27362 - protein, 14 aa, Homo Sapiens
ARPPPSMSAAGLAA

SEQ ID NO: 27363 - protein, 14 aa, Homo Sapiens
RPPPSMSAAGLAAR

SEQ ID NO: 27364 - protein, 14 aa, Homo Sapiens
PPPSMSAAGLAARM

SEQ ID NO: 27365 - protein, 14 aa, Homo Sapiens
PPSMSAAGLAARMS

SEQ ID NO: 27366 - protein, 14 aa, Homo Sapiens
PSMSAAGLAARMSQ

SEQ ID NO: 27367 - protein, 14 aa, Homo Sapiens
SMSAAGLAARMSQV

SEQ ID NO: 27368 - protein, 14 aa, Homo Sapiens
MSAAGLAARMSQVP

SEQ ID NO: 27369 - protein, 14 aa, Homo Sapiens
SAAGLAARMSQVPA

SEQ ID NO: 27370 - protein, 14 aa, Homo Sapiens
AAGLAARMSQVPAP

SEQ ID NO: 27371 - protein, 14 aa, Homo Sapiens
AGLAARMSQVPAPV

SEQ ID NO: 27372 - protein, 14 aa, Homo Sapiens
GLAARMSQVPAPVP

SEQ ID NO: 27373 - protein, 14 aa, Homo Sapiens
LAARMSQVPAPVPL

SEQ ID NO: 27374 - protein, 14 aa, Homo Sapiens
AARMSQVPAPVPLM

SEQ ID NO: 27375 - protein, 14 aa, Homo Sapiens
ARMSQVPAPVPLMS

SEQ ID NO: 27376 - protein, 14 aa, Homo Sapiens
RMSQVPAPVPLMSL

SEQ ID NO: 27377 - protein, 14 aa, Homo Sapiens
MSQVPAPVPLMSLR

SEQ ID NO: 27378 - protein, 14 aa, Homo Sapiens
SQVPAPVPLMSLRT

SEQ ID NO: 27379 - protein, 14 aa, Homo Sapiens
QVPAPVPLMSLRTA

SEQ ID NO: 27380 - protein, 14 aa, Homo Sapiens
VPAPVPLMSLRTAP

SEQ ID NO: 27381 - protein, 14 aa, Homo Sapiens
PAPVPLMSLRTAPA

SEQ ID NO: 27382 - protein, 14 aa, Homo Sapiens
APVPLMSLRTAPAA

SEQ ID NO: 27383 - protein, 14 aa, Homo Sapiens
PVPLMSLRTAPAAN

SEQ ID NO: 27384 - protein, 14 aa, Homo Sapiens
VPLMSLRTAPAANL

SEQ ID NO: 27385 - protein, 14 aa, Homo Sapiens
PLMSLRTAPAANLA

SEQ ID NO: 27386 - protein, 14 aa, Homo Sapiens
LMSLRTAPAANLAS

SEQ ID NO: 27387 - protein, 14 aa, Homo Sapiens
MSLRTAPAANLASR

SEQ ID NO: 27388 - protein, 14 aa, Homo Sapiens
SLRTAPAANLASRI

SEQ ID NO: 27389 - protein, 14 aa, Homo Sapiens
LRTAPAANLASRIP

SEQ ID NO: 27390 - protein, 14 aa, Homo Sapiens
RTAPAANLASRIPA

SEQ ID NO: 27391 - protein, 14 aa, Homo Sapiens
TAPAANLASRIPAA

SEQ ID NO: 27392 - protein, 14 aa, Homo Sapiens
APAANLASRIPAAS

SEQ ID NO: 27393 - protein, 14 aa, Homo Sapiens
PAANLASRIPAASA

SEQ ID NO: 27394 - protein, 14 aa, Homo Sapiens
AANLASRIPAASAA

SEQ ID NO: 27395 - protein, 14 aa, Homo Sapiens
ANLASRIPAASAAA

SEQ ID NO: 27396 - protein, 14 aa, Homo Sapiens
NLASRIPAASAAAM

SEQ ID NO: 27397 - protein, 14 aa, Homo Sapiens
LASRIPAASAAAMN

SEQ ID NO: 27398 - protein, 14 aa, Homo Sapiens
ASRIPAASAAAMNL

SEQ ID NO: 27399 - protein, 14 aa, Homo Sapiens
SRIPAASAAAMNLA

SEQ ID NO: 27400 - protein, 14 aa, Homo Sapiens
RIPAASAAAMNLAS

SEQ ID NO: 27401 - protein, 14 aa, Homo Sapiens
IPAASAAAMNLASA

SEQ ID NO: 27402 - protein, 14 aa, Homo Sapiens
PAASAAAMNLASAR

SEQ ID NO: 27403 - protein, 14 aa, Homo Sapiens
AASAAAMNLASART

SEQ ID NO: 27404 - protein, 14 aa, Homo Sapiens
ASAAAMNLASARTP

SEQ ID NO: 27405 - protein, 14 aa, Homo Sapiens
SAAAMNLASARTPA

SEQ ID NO: 27406 - protein, 14 aa, Homo Sapiens
AAAMNLASARTPAI

SEQ ID NO: 27407 - protein, 14 aa, Homo Sapiens
AAMNLASARTPAIP

SEQ ID NO: 27408 - protein, 14 aa, Homo Sapiens
AMNLASARTPAIPT

SEQ ID NO: 27409 - protein, 14 aa, Homo Sapiens
MNLASARTPAIPTA

SEQ ID NO: 27410 - protein, 14 aa, Homo Sapiens
NLASARTPAIPTAV

SEQ ID NO: 27411 - protein, 14 aa, Homo Sapiens
LASARTPAIPTAVN

SEQ ID NO: 27412 - protein, 14 aa, Homo Sapiens
ASARTPAIPTAVNL

SEQ ID NO: 27413 - protein, 14 aa, Homo Sapiens
SARTPAIPTAVNLA

SEQ ID NO: 27414 - protein, 14 aa, Homo Sapiens
ARTPAIPTAVNLAD

SEQ ID NO: 27415 - protein, 14 aa, Homo Sapiens
RTPAIPTAVNLADS

SEQ ID NO: 27416 - protein, 14 aa, Homo Sapiens
TPAIPTAVNLADSR

SEQ ID NO: 27417 - protein, 14 aa, Homo Sapiens
PAIPTAVNLADSRT

SEQ ID NO: 27418 - protein, 14 aa, Homo Sapiens
AIPTAVNLADSRTP

SEQ ID NO: 27419 - protein, 14 aa, Homo Sapiens
IPTAVNLADSRTPA

SEQ ID NO: 27420 - protein, 14 aa, Homo Sapiens
PTAVNLADSRTPAA

SEQ ID NO: 27421 - protein, 14 aa, Homo Sapiens
TAVNLADSRTPAAA

SEQ ID NO: 27422 - protein, 14 aa, Homo Sapiens
AVNLADSRTPAAAA

SEQ ID NO: 27423 - protein, 14 aa, Homo Sapiens
VNLADSRTPAAAAA

SEQ ID NO: 27424 - protein, 14 aa, Homo Sapiens
NLADSRTPAAAAAM

SEQ ID NO: 27425 - protein, 14 aa, Homo Sapiens
LADSRTPAAAAAMN

SEQ ID NO: 27426 - protein, 14 aa, Homo Sapiens
ADSRTPAAAAAMNL

SEQ ID NO: 27427 - protein, 14 aa, Homo Sapiens
DSRTPAAAAAMNLA

SEQ ID NO: 27428 - protein, 14 aa, Homo Sapiens
SRTPAAAAAMNLAS

SEQ ID NO: 27429 - protein, 14 aa, Homo Sapiens
RTPAAAAAMNLASP

SEQ ID NO: 27430 - protein, 14 aa, Homo Sapiens
TPAAAAAMNLASPR

SEQ ID NO: 27431 - protein, 14 aa, Homo Sapiens
PAAAAAMNLASPRT

SEQ ID NO: 27432 - protein, 14 aa, Homo Sapiens
AAAAAMNLASPRTA

SEQ ID NO: 27433 - protein, 14 aa, Homo Sapiens
AAAAMNLASPRTAV

SEQ ID NO: 27434 - protein, 14 aa, Homo Sapiens
AAAMNLASPRTAVA

SEQ ID NO: 27435 - protein, 14 aa, Homo Sapiens
AAMNLASPRTAVAP

SEQ ID NO: 27436 - protein, 14 aa, Homo Sapiens
AMNLASPRTAVAPS

SEQ ID NO: 27437 - protein, 14 aa, Homo Sapiens
MNLASPRTAVAPSA

SEQ ID NO: 27438 - protein, 14 aa, Homo Sapiens
NLASPRTAVAPSAV

SEQ ID NO: 27439 - protein, 14 aa, Homo Sapiens
LASPRTAVAPSAVN

SEQ ID NO: 27440 - protein, 14 aa, Homo Sapiens
ASPRTAVAPSAVNL

SEQ ID NO: 27441 - protein, 14 aa, Homo Sapiens
SPRTAVAPSAVNLA

SEQ ID NO: 27442 - protein, 14 aa, Homo Sapiens
PRTAVAPSAVNLAD

SEQ ID NO: 27443 - protein, 14 aa, Homo Sapiens
RTAVAPSAVNLADP

SEQ ID NO: 27444 - protein, 14 aa, Homo Sapiens
TAVAPSAVNLADPR

SEQ ID NO: 27445 - protein, 14 aa, Homo Sapiens
AVAPSAVNLADPRT

SEQ ID NO: 27446 - protein, 14 aa, Homo Sapiens
VAPSAVNLADPRTP

SEQ ID NO: 27447 - protein, 14 aa, Homo Sapiens
APSAVNLADPRTPT

SEQ ID NO: 27448 - protein, 14 aa, Homo Sapiens
PSAVNLADPRTPTA

SEQ ID NO: 27449 - protein, 14 aa, Homo Sapiens
SAVNLADPRTPTAP

SEQ ID NO: 27450 - protein, 14 aa, Homo Sapiens
AVNLADPRTPTAPA

SEQ ID NO: 27451 - protein, 14 aa, Homo Sapiens
VNLADPRTPTAPAV

SEQ ID NO: 27452 - protein, 14 aa, Homo Sapiens
NLADPRTPTAPAVN

SEQ ID NO: 27453 - protein, 14 aa, Homo Sapiens
LADPRTPTAPAVNL

SEQ ID NO: 27454 - protein, 14 aa, Homo Sapiens
ADPRTPTAPAVNLA

SEQ ID NO: 27455 - protein, 14 aa, Homo Sapiens
DPRTPTAPAVNLAG

SEQ ID NO: 27456 - protein, 14 aa, Homo Sapiens
PRTPTAPAVNLAGA

SEQ ID NO: 27457 - protein, 14 aa, Homo Sapiens
RTPTAPAVNLAGAR

SEQ ID NO: 27458 - protein, 14 aa, Homo Sapiens
TPTAPAVNLAGART

SEQ ID NO: 27459 - protein, 14 aa, Homo Sapiens
PTAPAVNLAGARTP

SEQ ID NO: 27460 - protein, 14 aa, Homo Sapiens
TAPAVNLAGARTPA

SEQ ID NO: 27461 - protein, 14 aa, Homo Sapiens
APAVNLAGARTPAA

SEQ ID NO: 27462 - protein, 14 aa, Homo Sapiens
PAVNLAGARTPAAL

SEQ ID NO: 27463 - protein, 14 aa, Homo Sapiens
AVNLAGARTPAALA

SEQ ID NO: 27464 - protein, 14 aa, Homo Sapiens
VNLAGARTPAALAA

SEQ ID NO: 27465 - protein, 14 aa, Homo Sapiens
NLAGARTPAALAAL

SEQ ID NO: 27466 - protein, 14 aa, Homo Sapiens
LAGARTPAALAALS

SEQ ID NO: 27467 - protein, 14 aa, Homo Sapiens
AGARTPAALAALSL

SEQ ID NO: 27468 - protein, 14 aa, Homo Sapiens
GARTPAALAALSLT

SEQ ID NO: 27469 - protein, 14 aa, Homo Sapiens
ARTPAALAALSLTG

SEQ ID NO: 27470 - protein, 14 aa, Homo Sapiens
RTPAALAALSLTGS

SEQ ID NO: 27471 - protein, 14 aa, Homo Sapiens
TPAALAALSLTGSG

SEQ ID NO: 27472 - protein, 14 aa, Homo Sapiens
PAALAALSLTGSGT

SEQ ID NO: 27473 - protein, 14 aa, Homo Sapiens
AALAALSLTGSGTP

SEQ ID NO: 27474 - protein, 14 aa, Homo Sapiens
ALAALSLTGSGTPP

SEQ ID NO: 27475 - protein, 14 aa, Homo Sapiens
LAALSLTGSGTPPT

SEQ ID NO: 27476 - protein, 14 aa, Homo Sapiens
AALSLTGSGTPPTA

SEQ ID NO: 27477 - protein, 14 aa, Homo Sapiens
ALSLTGSGTPPTAA

SEQ ID NO: 27478 - protein, 14 aa, Homo Sapiens
LSLTGSGTPPTAAN

SEQ ID NO: 27479 - protein, 14 aa, Homo Sapiens
SLTGSGTPPTAANY

SEQ ID NO: 27480 - protein, 14 aa, Homo Sapiens
LTGSGTPPTAANYP

SEQ ID NO: 27481 - protein, 14 aa, Homo Sapiens
TGSGTPPTAANYPS

SEQ ID NO: 27482 - protein, 14 aa, Homo Sapiens
GSGTPPTAANYPSS

SEQ ID NO: 27483 - protein, 14 aa, Homo Sapiens
SGTPPTAANYPSSS

SEQ ID NO: 27484 - protein, 14 aa, Homo Sapiens
GTPPTAANYPSSSR

SEQ ID NO: 27485 - protein, 14 aa, Homo Sapiens
TPPTAANYPSSSRT

SEQ ID NO: 27486 - protein, 14 aa, Homo Sapiens
PPTAANYPSSSRTP

SEQ ID NO: 27487 - protein, 14 aa, Homo Sapiens
PTAANYPSSSRTPQ

SEQ ID NO: 27488 - protein, 14 aa, Homo Sapiens
TAANYPSSSRTPQA

SEQ ID NO: 27489 - protein, 14 aa, Homo Sapiens
AANYPSSSRTPQAP

SEQ ID NO: 27490 - protein, 14 aa, Homo Sapiens
ANYPSSSRTPQAPA

SEQ ID NO: 27491 - protein, 14 aa, Homo Sapiens
NYPSSSRTPQAPAS

SEQ ID NO: 27492 - protein, 14 aa, Homo Sapiens
YPSSSRTPQAPASA

SEQ ID NO: 27493 - protein, 14 aa, Homo Sapiens
PSSSRTPQAPASAN

SEQ ID NO: 27494 - protein, 14 aa, Homo Sapiens
SSSRTPQAPASANL

SEQ ID NO: 27495 - protein, 14 aa, Homo Sapiens
SSRTPQAPASANLV

SEQ ID NO: 27496 - protein, 14 aa, Homo Sapiens
SRTPQAPASANLVG

SEQ ID NO: 27497 - protein, 14 aa, Homo Sapiens
RTPQAPASANLVGP

SEQ ID NO: 27498 - protein, 14 aa, Homo Sapiens
TPQAPASANLVGPR

SEQ ID NO: 27499 - protein, 14 aa, Homo Sapiens
PQAPASANLVGPRS

SEQ ID NO: 27500 - protein, 14 aa, Homo Sapiens
QAPASANLVGPRSA

SEQ ID NO: 27501 - protein, 14 aa, Homo Sapiens
APASANLVGPRSAH

SEQ ID NO: 27502 - protein, 14 aa, Homo Sapiens
PASANLVGPRSAHA

SEQ ID NO: 27503 - protein, 14 aa, Homo Sapiens
ASANLVGPRSAHAT

SEQ ID NO: 27504 - protein, 14 aa, Homo Sapiens
SANLVGPRSAHATA

SEQ ID NO: 27505 - protein, 14 aa, Homo Sapiens
ANLVGPRSAHATAP

SEQ ID NO: 27506 - protein, 14 aa, Homo Sapiens
NLVGPRSAHATAPV

SEQ ID NO: 27507 - protein, 14 aa, Homo Sapiens
LVGPRSAHATAPVN

SEQ ID NO: 27508 - protein, 14 aa, Homo Sapiens
VGPRSAHATAPVNI

SEQ ID NO: 27509 - protein, 14 aa, Homo Sapiens
GPRSAHATAPVNIA

SEQ ID NO: 27510 - protein, 14 aa, Homo Sapiens
PRSAHATAPVNIAG

SEQ ID NO: 27511 - protein, 14 aa, Homo Sapiens
RSAHATAPVNIAGS

SEQ ID NO: 27512 - protein, 14 aa, Homo Sapiens
SAHATAPVNIAGSR

SEQ ID NO: 27513 - protein, 14 aa, Homo Sapiens
AHATAPVNIAGSRT

SEQ ID NO: 27514 - protein, 14 aa, Homo Sapiens
HATAPVNIAGSRTA

SEQ ID NO: 27515 - protein, 14 aa, Homo Sapiens
ATAPVNIAGSRTAA

SEQ ID NO: 27516 - protein, 14 aa, Homo Sapiens
TAPVNIAGSRTAAA

SEQ ID NO: 27517 - protein, 14 aa, Homo Sapiens
APVNIAGSRTAAAL

SEQ ID NO: 27518 - protein, 14 aa, Homo Sapiens
PVNIAGSRTAAALA

SEQ ID NO: 27519 - protein, 14 aa, Homo Sapiens
VNIAGSRTAAALAP

SEQ ID NO: 27520 - protein, 14 aa, Homo Sapiens
NIAGSRTAAALAPA

SEQ ID NO: 27521 - protein, 14 aa, Homo Sapiens
IAGSRTAAALAPAS

SEQ ID NO: 27522 - protein, 14 aa, Homo Sapiens
AGSRTAAALAPASL

SEQ ID NO: 27523 - protein, 14 aa, Homo Sapiens
GSRTAAALAPASLT

SEQ ID NO: 27524 - protein, 14 aa, Homo Sapiens
SRTAAALAPASLTS

SEQ ID NO: 27525 - protein, 14 aa, Homo Sapiens
RTAAALAPASLTSA

SEQ ID NO: 27526 - protein, 14 aa, Homo Sapiens
TAAALAPASLTSAR

SEQ ID NO: 27527 - protein, 14 aa, Homo Sapiens
AAALAPASLTSARM

SEQ ID NO: 27528 - protein, 14 aa, Homo Sapiens
AALAPASLTSARMA

SEQ ID NO: 27529 - protein, 14 aa, Homo Sapiens
ALAPASLTSARMAP

SEQ ID NO: 27530 - protein, 14 aa, Homo Sapiens
LAPASLTSARMAPA

SEQ ID NO: 27531 - protein, 14 aa, Homo Sapiens
APASLTSARMAPAL

SEQ ID NO: 27532 - protein, 14 aa, Homo Sapiens
PASLTSARMAPALS

SEQ ID NO: 27533 - protein, 14 aa, Homo Sapiens
ASLTSARMAPALSG

SEQ ID NO: 27534 - protein, 14 aa, Homo Sapiens
SLTSARMAPALSGA

SEQ ID NO: 27535 - protein, 14 aa, Homo Sapiens
LTSARMAPALSGAN

SEQ ID NO: 27536 - protein, 14 aa, Homo Sapiens
TSARMAPALSGANL

SEQ ID NO: 27537 - protein, 14 aa, Homo Sapiens
SARMAPALSGANLT

SEQ ID NO: 27538 - protein, 14 aa, Homo Sapiens
ARMAPALSGANLTS

SEQ ID NO: 27539 - protein, 14 aa, Homo Sapiens
RMAPALSGANLTSP

SEQ ID NO: 27540 - protein, 14 aa, Homo Sapiens
MAPALSGANLTSPR

SEQ ID NO: 27541 - protein, 14 aa, Homo Sapiens
APALSGANLTSPRV

SEQ ID NO: 27542 - protein, 14 aa, Homo Sapiens
PALSGANLTSPRVP

SEQ ID NO: 27543 - protein, 14 aa, Homo Sapiens
ALSGANLTSPRVPL

SEQ ID NO: 27544 - protein, 14 aa, Homo Sapiens
LSGANLTSPRVPLS

SEQ ID NO: 27545 - protein, 14 aa, Homo Sapiens
SGANLTSPRVPLSA

SEQ ID NO: 27546 - protein, 14 aa, Homo Sapiens
GANLTSPRVPLSAY

SEQ ID NO: 27547 - protein, 14 aa, Homo Sapiens
ANLTSPRVPLSAYE

SEQ ID NO: 27548 - protein, 14 aa, Homo Sapiens
NLTSPRVPLSAYER

SEQ ID NO: 27549 - protein, 14 aa, Homo Sapiens
LTSPRVPLSAYERV

SEQ ID NO: 27550 - protein, 14 aa, Homo Sapiens
TSPRVPLSAYERVS

SEQ ID NO: 27551 - protein, 14 aa, Homo Sapiens
SPRVPLSAYERVSG

SEQ ID NO: 27552 - protein, 14 aa, Homo Sapiens
PRVPLSAYERVSGR

SEQ ID NO: 27553 - protein, 14 aa, Homo Sapiens
RVPLSAYERVSGRT

SEQ ID NO: 27554 - protein, 14 aa, Homo Sapiens
VPLSAYERVSGRTS

SEQ ID NO: 27555 - protein, 14 aa, Homo Sapiens
PLSAYERVSGRTSP

SEQ ID NO: 27556 - protein, 14 aa, Homo Sapiens
LSAYERVSGRTSPP

SEQ ID NO: 27557 - protein, 14 aa, Homo Sapiens
SAYERVSGRTSPPL

SEQ ID NO: 27558 - protein, 14 aa, Homo Sapiens
AYERVSGRTSPPLL

SEQ ID NO: 27559 - protein, 14 aa, Homo Sapiens
YERVSGRTSPPLLD

SEQ ID NO: 27560 - protein, 14 aa, Homo Sapiens
ERVSGRTSPPLLDR

SEQ ID NO: 27561 - protein, 14 aa, Homo Sapiens
RVSGRTSPPLLDRA

SEQ ID NO: 27562 - protein, 14 aa, Homo Sapiens
VSGRTSPPLLDRAR

SEQ ID NO: 27563 - protein, 14 aa, Homo Sapiens
SGRTSPPLLDRARS

SEQ ID NO: 27564 - protein, 14 aa, Homo Sapiens
GRTSPPLLDRARSR

SEQ ID NO: 27565 - protein, 14 aa, Homo Sapiens
RTSPPLLDRARSRT

SEQ ID NO: 27566 - protein, 14 aa, Homo Sapiens
TSPPLLDRARSRTP

SEQ ID NO: 27567 - protein, 14 aa, Homo Sapiens
SPPLLDRARSRTPP

SEQ ID NO: 27568 - protein, 14 aa, Homo Sapiens
PPLLDRARSRTPPS

SEQ ID NO: 27569 - protein, 14 aa, Homo Sapiens
PLLDRARSRTPPSA

SEQ ID NO: 27570 - protein, 14 aa, Homo Sapiens
LLDRARSRTPPSAP

SEQ ID NO: 27571 - protein, 14 aa, Homo Sapiens
LDRARSRTPPSAPS

SEQ ID NO: 27572 - protein, 14 aa, Homo Sapiens
DRARSRTPPSAPSQ

SEQ ID NO: 27573 - protein, 14 aa, Homo Sapiens
RARSRTPPSAPSQS

SEQ ID NO: 27574 - protein, 14 aa, Homo Sapiens
ARSRTPPSAPSQSR

SEQ ID NO: 27575 - protein, 14 aa, Homo Sapiens
RSRTPPSAPSQSRM

SEQ ID NO: 27576 - protein, 14 aa, Homo Sapiens
SRTPPSAPSQSRMT

SEQ ID NO: 27577 - protein, 14 aa, Homo Sapiens
RTPPSAPSQSRMTS

SEQ ID NO: 27578 - protein, 14 aa, Homo Sapiens
TPPSAPSQSRMTSE

SEQ ID NO: 27579 - protein, 14 aa, Homo Sapiens
PPSAPSQSRMTSER

SEQ ID NO: 27580 - protein, 14 aa, Homo Sapiens
PSAPSQSRMTSERA

SEQ ID NO: 27581 - protein, 14 aa, Homo Sapiens
SAPSQSRMTSERAP

SEQ ID NO: 27582 - protein, 14 aa, Homo Sapiens
APSQSRMTSERAPS

SEQ ID NO: 27583 - protein, 14 aa, Homo Sapiens
PSQSRMTSERAPSP

SEQ ID NO: 27584 - protein, 14 aa, Homo Sapiens
SQSRMTSERAPSPS

SEQ ID NO: 27585 - protein, 14 aa, Homo Sapiens
QSRMTSERAPSPSS

SEQ ID NO: 27586 - protein, 14 aa, Homo Sapiens
SRMTSERAPSPSSR

SEQ ID NO: 27587 - protein, 14 aa, Homo Sapiens
RMTSERAPSPSSRM

SEQ ID NO: 27588 - protein, 14 aa, Homo Sapiens
MTSERAPSPSSRMG

SEQ ID NO: 27589 - protein, 14 aa, Homo Sapiens
TSERAPSPSSRMGQ

SEQ ID NO: 27590 - protein, 14 aa, Homo Sapiens
SERAPSPSSRMGQA

SEQ ID NO: 27591 - protein, 14 aa, Homo Sapiens
ERAPSPSSRMGQAP

SEQ ID NO: 27592 - protein, 14 aa, Homo Sapiens
RAPSPSSRMGQAPS

SEQ ID NO: 27593 - protein, 14 aa, Homo Sapiens
APSPSSRMGQAPSQ

SEQ ID NO: 27594 - protein, 14 aa, Homo Sapiens
PSPSSRMGQAPSQS

SEQ ID NO: 27595 - protein, 14 aa, Homo Sapiens
SPSSRMGQAPSQSL

SEQ ID NO: 27596 - protein, 14 aa, Homo Sapiens
PSSRMGQAPSQSLL

SEQ ID NO: 27597 - protein, 14 aa, Homo Sapiens
SSRMGQAPSQSLLP

SEQ ID NO: 27598 - protein, 14 aa, Homo Sapiens
SRMGQAPSQSLLPP

SEQ ID NO: 27599 - protein, 14 aa, Homo Sapiens
RMGQAPSQSLLPPA

SEQ ID NO: 27600 - protein, 14 aa, Homo Sapiens
MGQAPSQSLLPPAQ

SEQ ID NO: 27601 - protein, 14 aa, Homo Sapiens
GQAPSQSLLPPAQD

SEQ ID NO: 27602 - protein, 14 aa, Homo Sapiens
QAPSQSLLPPAQDQ

SEQ ID NO: 27603 - protein, 14 aa, Homo Sapiens
APSQSLLPPAQDQP

SEQ ID NO: 27604 - protein, 14 aa, Homo Sapiens
PSQSLLPPAQDQPR

SEQ ID NO: 27605 - protein, 14 aa, Homo Sapiens
SQSLLPPAQDQPRS

SEQ ID NO: 27606 - protein, 14 aa, Homo Sapiens
QSLLPPAQDQPRSP

SEQ ID NO: 27607 - protein, 14 aa, Homo Sapiens
SLLPPAQDQPRSPV

SEQ ID NO: 27608 - protein, 14 aa, Homo Sapiens
LLPPAQDQPRSPVP

SEQ ID NO: 27609 - protein, 14 aa, Homo Sapiens
LPPAQDQPRSPVPS

SEQ ID NO: 27610 - protein, 14 aa, Homo Sapiens
PPAQDQPRSPVPSA

SEQ ID NO: 27611 - protein, 14 aa, Homo Sapiens
PAQDQPRSPVPSAF

SEQ ID NO: 27612 - protein, 14 aa, Homo Sapiens
AQDQPRSPVPSAFS

SEQ ID NO: 27613 - protein, 14 aa, Homo Sapiens
QDQPRSPVPSAFSD

SEQ ID NO: 27614 - protein, 14 aa, Homo Sapiens
DQPRSPVPSAFSDQ

SEQ ID NO: 27615 - protein, 14 aa, Homo Sapiens
QPRSPVPSAFSDQS

SEQ ID NO: 27616 - protein, 14 aa, Homo Sapiens
PRSPVPSAFSDQSR

SEQ ID NO: 27617 - protein, 14 aa, Homo Sapiens
RSPVPSAFSDQSRC

SEQ ID NO: 27618 - protein, 14 aa, Homo Sapiens
SPVPSAFSDQSRCL

SEQ ID NO: 27619 - protein, 14 aa, Homo Sapiens
PVPSAFSDQSRCLI

SEQ ID NO: 27620 - protein, 14 aa, Homo Sapiens
VPSAFSDQSRCLIA

SEQ ID NO: 27621 - protein, 14 aa, Homo Sapiens
PSAFSDQSRCLIAQ

SEQ ID NO: 27622 - protein, 14 aa, Homo Sapiens
SAFSDQSRCLIAQT

SEQ ID NO: 27623 - protein, 14 aa, Homo Sapiens
AFSDQSRCLIAQTT

SEQ ID NO: 27624 - protein, 14 aa, Homo Sapiens
FSDQSRCLIAQTTP

SEQ ID NO: 27625 - protein, 14 aa, Homo Sapiens
SDQSRCLIAQTTPV

SEQ ID NO: 27626 - protein, 14 aa, Homo Sapiens
DQSRCLIAQTTPVA

SEQ ID NO: 27627 - protein, 14 aa, Homo Sapiens
QSRCLIAQTTPVAG

SEQ ID NO: 27628 - protein, 14 aa, Homo Sapiens
SRCLIAQTTPVAGS

SEQ ID NO: 27629 - protein, 14 aa, Homo Sapiens
RCLIAQTTPVAGSQ

SEQ ID NO: 27630 - protein, 14 aa, Homo Sapiens
CLIAQTTPVAGSQS

SEQ ID NO: 27631 - protein, 14 aa, Homo Sapiens
LIAQTTPVAGSQSL

SEQ ID NO: 27632 - protein, 14 aa, Homo Sapiens
IAQTTPVAGSQSLS

SEQ ID NO: 27633 - protein, 14 aa, Homo Sapiens
AQTTPVAGSQSLSS

SEQ ID NO: 27634 - protein, 14 aa, Homo Sapiens
QTTPVAGSQSLSSG

SEQ ID NO: 27635 - protein, 14 aa, Homo Sapiens
TTPVAGSQSLSSGA

SEQ ID NO: 27636 - protein, 14 aa, Homo Sapiens
TPVAGSQSLSSGAV

SEQ ID NO: 27637 - protein, 14 aa, Homo Sapiens
PVAGSQSLSSGAVA

SEQ ID NO: 27638 - protein, 14 aa, Homo Sapiens
VAGSQSLSSGAVAT

SEQ ID NO: 27639 - protein, 14 aa, Homo Sapiens
AGSQSLSSGAVATT

SEQ ID NO: 27640 - protein, 14 aa, Homo Sapiens
GSQSLSSGAVATTT

SEQ ID NO: 27641 - protein, 14 aa, Homo Sapiens
SQSLSSGAVATTTS

SEQ ID NO: 27642 - protein, 14 aa, Homo Sapiens
QSLSSGAVATTTSS

SEQ ID NO: 27643 - protein, 14 aa, Homo Sapiens
SLSSGAVATTTSSA

SEQ ID NO: 27644 - protein, 14 aa, Homo Sapiens
LSSGAVATTTSSAG

SEQ ID NO: 27645 - protein, 14 aa, Homo Sapiens
SSGAVATTTSSAGD

SEQ ID NO: 27646 - protein, 14 aa, Homo Sapiens
SGAVATTTSSAGDH

SEQ ID NO: 27647 - protein, 14 aa, Homo Sapiens
GAVATTTSSAGDHN

SEQ ID NO: 27648 - protein, 14 aa, Homo Sapiens
AVATTTSSAGDHNG

SEQ ID NO: 27649 - protein, 14 aa, Homo Sapiens
VATTTSSAGDHNGM

SEQ ID NO: 27650 - protein, 14 aa, Homo Sapiens
ATTTSSAGDHNGML

SEQ ID NO: 27651 - protein, 14 aa, Homo Sapiens
TTTSSAGDHNGMLS

SEQ ID NO: 27652 - protein, 14 aa, Homo Sapiens
TTSSAGDHNGMLSV

SEQ ID NO: 27653 - protein, 14 aa, Homo Sapiens
TSSAGDHNGMLSVP

SEQ ID NO: 27654 - protein, 14 aa, Homo Sapiens
SSAGDHNGMLSVPA

SEQ ID NO: 27655 - protein, 14 aa, Homo Sapiens
SAGDHNGMLSVPAP

SEQ ID NO: 27656 - protein, 14 aa, Homo Sapiens
AGDHNGMLSVPAPG

SEQ ID NO: 27657 - protein, 14 aa, Homo Sapiens
GDHNGMLSVPAPGV

SEQ ID NO: 27658 - protein, 14 aa, Homo Sapiens
DHNGMLSVPAPGVP

SEQ ID NO: 27659 - protein, 14 aa, Homo Sapiens
HNGMLSVPAPGVPH

SEQ ID NO: 27660 - protein, 14 aa, Homo Sapiens
NGMLSVPAPGVPHS

SEQ ID NO: 27661 - protein, 14 aa, Homo Sapiens
GMLSVPAPGVPHSD

SEQ ID NO: 27662 - protein, 14 aa, Homo Sapiens
MLSVPAPGVPHSDV

SEQ ID NO: 27663 - protein, 14 aa, Homo Sapiens
LSVPAPGVPHSDVG

SEQ ID NO: 27664 - protein, 14 aa, Homo Sapiens
SVPAPGVPHSDVGE

SEQ ID NO: 27665 - protein, 14 aa, Homo Sapiens
VPAPGVPHSDVGEP

SEQ ID NO: 27666 - protein, 14 aa, Homo Sapiens
PAPGVPHSDVGEPP

SEQ ID NO: 27667 - protein, 14 aa, Homo Sapiens
APGVPHSDVGEPPA

SEQ ID NO: 27668 - protein, 14 aa, Homo Sapiens
PGVPHSDVGEPPAS

SEQ ID NO: 27669 - protein, 14 aa, Homo Sapiens
GVPHSDVGEPPAST

SEQ ID NO: 27670 - protein, 14 aa, Homo Sapiens
VPHSDVGEPPASTG

SEQ ID NO: 27671 - protein, 14 aa, Homo Sapiens
PHSDVGEPPASTGA

SEQ ID NO: 27672 - protein, 14 aa, Homo Sapiens
HSDVGEPPASTGAQ

SEQ ID NO: 27673 - protein, 14 aa, Homo Sapiens
SDVGEPPASTGAQQ

SEQ ID NO: 27674 - protein, 14 aa, Homo Sapiens
DVGEPPASTGAQQP

SEQ ID NO: 27675 - protein, 14 aa, Homo Sapiens
VGEPPASTGAQQPS

SEQ ID NO: 27676 - protein, 14 aa, Homo Sapiens
GEPPASTGAQQPSA

SEQ ID NO: 27677 - protein, 14 aa, Homo Sapiens
EPPASTGAQQPSAL

SEQ ID NO: 27678 - protein, 14 aa, Homo Sapiens
PPASTGAQQPSALA

SEQ ID NO: 27679 - protein, 14 aa, Homo Sapiens
PASTGAQQPSALAA

SEQ ID NO: 27680 - protein, 14 aa, Homo Sapiens
ASTGAQQPSALAAL

SEQ ID NO: 27681 - protein, 14 aa, Homo Sapiens
STGAQQPSALAALQ

SEQ ID NO: 27682 - protein, 14 aa, Homo Sapiens
TGAQQPSALAALQP

SEQ ID NO: 27683 - protein, 14 aa, Homo Sapiens
GAQQPSALAALQPA

SEQ ID NO: 27684 - protein, 14 aa, Homo Sapiens
AQQPSALAALQPAK

SEQ ID NO: 27685 - protein, 14 aa, Homo Sapiens
QQPSALAALQPAKE

SEQ ID NO: 27686 - protein, 14 aa, Homo Sapiens
QPSALAALQPAKER

SEQ ID NO: 27687 - protein, 14 aa, Homo Sapiens
PSALAALQPAKERR

SEQ ID NO: 27688 - protein, 14 aa, Homo Sapiens
SALAALQPAKERRS

SEQ ID NO: 27689 - protein, 14 aa, Homo Sapiens
ALAALQPAKERRSS

SEQ ID NO: 27690 - protein, 14 aa, Homo Sapiens
LAALQPAKERRSSS

SEQ ID NO: 27691 - protein, 14 aa, Homo Sapiens
AALQPAKERRSSSS

SEQ ID NO: 27692 - protein, 14 aa, Homo Sapiens
ALQPAKERRSSSSS

SEQ ID NO: 27693 - protein, 14 aa, Homo Sapiens
LQPAKERRSSSSSS

SEQ ID NO: 27694 - protein, 14 aa, Homo Sapiens
QPAKERRSSSSSSS

SEQ ID NO: 27695 - protein, 14 aa, Homo Sapiens
PAKERRSSSSSSSS

SEQ ID NO: 27696 - protein, 14 aa, Homo Sapiens
AKERRSSSSSSSSS

SEQ ID NO: 27697 - protein, 14 aa, Homo Sapiens
KERRSSSSSSSSSS

SEQ ID NO: 27698 - protein, 14 aa, Homo Sapiens
ERRSSSSSSSSSSS

SEQ ID NO: 27699 - protein, 14 aa, Homo Sapiens
RRSSSSSSSSSSSS

SEQ ID NO: 27700 - protein, 14 aa, Homo Sapiens
RSSSSSSSSSSSSS

SEQ ID NO: 27701 - protein, 14 aa, Homo Sapiens
SSSSSSSSSSSSSS

SEQ ID NO: 27702 - protein, 14 aa, Homo Sapiens
SSSSSSSSSSSSSS

SEQ ID NO: 27703 - protein, 14 aa, Homo Sapiens
SSSSSSSSSSSSSS

SEQ ID NO: 27704 - protein, 14 aa, Homo Sapiens
SSSSSSSSSSSSSS

SEQ ID NO: 27705 - protein, 14 aa, Homo Sapiens
SSSSSSSSSSSSSS

SEQ ID NO: 27706 - protein, 14 aa, Homo Sapiens
SSSSSSSSSSSSSS

SEQ ID NO: 27707 - protein, 14 aa, Homo Sapiens
SSSSSSSSSSSSSS

SEQ ID NO: 27708 - protein, 14 aa, Homo Sapiens
SSSSSSSSSSSSSS

SEQ ID NO: 27709 - protein, 14 aa, Homo Sapiens
SSSSSSSSSSSSSS

SEQ ID NO: 27710 - protein, 14 aa, Homo Sapiens
SSSSSSSSSSSSSS

SEQ ID NO: 27711 - protein, 14 aa, Homo Sapiens
SSSSSSSSSSSSSS

SEQ ID NO: 27712 - protein, 14 aa, Homo Sapiens
SSSSSSSSSSSSSS

SEQ ID NO: 27713 - protein, 14 aa, Homo Sapiens
SSSSSSSSSSSSSG

SEQ ID NO: 27714 - protein, 14 aa, Homo Sapiens
SSSSSSSSSSSSGS

SEQ ID NO: 27715 - protein, 14 aa, Homo Sapiens
SSSSSSSSSSSGSS

SEQ ID NO: 27716 - protein, 14 aa, Homo Sapiens
SSSSSSSSSSGSSS

SEQ ID NO: 27717 - protein, 14 aa, Homo Sapiens
SSSSSSSSSGSSSS

SEQ ID NO: 27718 - protein, 14 aa, Homo Sapiens
SSSSSSSSGSSSSD

SEQ ID NO: 27719 - protein, 14 aa, Homo Sapiens
SSSSSSSGSSSSDS

SEQ ID NO: 27720 - protein, 14 aa, Homo Sapiens
SSSSSSGSSSSDSE

SEQ ID NO: 27721 - protein, 14 aa, Homo Sapiens
SSSSSGSSSSDSEG

SEQ ID NO: 27722 - protein, 14 aa, Homo Sapiens
SSSSGSSSSDSEGS

SEQ ID NO: 27723 - protein, 14 aa, Homo Sapiens
SSSGSSSSDSEGSS

SEQ ID NO: 27724 - protein, 14 aa, Homo Sapiens
SSGSSSSDSEGSSL

SEQ ID NO: 27725 - protein, 14 aa, Homo Sapiens
SGSSSSDSEGSSLP

SEQ ID NO: 27726 - protein, 14 aa, Homo Sapiens
GSSSSDSEGSSLPV

SEQ ID NO: 27727 - protein, 14 aa, Homo Sapiens
SSSSDSEGSSLPVQ

SEQ ID NO: 27728 - protein, 14 aa, Homo Sapiens
SSSDSEGSSLPVQP

SEQ ID NO: 27729 - protein, 14 aa, Homo Sapiens
SSDSEGSSLPVQPE

SEQ ID NO: 27730 - protein, 14 aa, Homo Sapiens
SDSEGSSLPVQPEV

SEQ ID NO: 27731 - protein, 14 aa, Homo Sapiens
DSEGSSLPVQPEVA

SEQ ID NO: 27732 - protein, 14 aa, Homo Sapiens
SEGSSLPVQPEVAL

SEQ ID NO: 27733 - protein, 14 aa, Homo Sapiens
EGSSLPVQPEVALK

SEQ ID NO: 27734 - protein, 14 aa, Homo Sapiens
GSSLPVQPEVALKR

SEQ ID NO: 27735 - protein, 14 aa, Homo Sapiens
SSLPVQPEVALKRV

SEQ ID NO: 27736 - protein, 14 aa, Homo Sapiens
SLPVQPEVALKRVP

SEQ ID NO: 27737 - protein, 14 aa, Homo Sapiens
LPVQPEVALKRVPS

SEQ ID NO: 27738 - protein, 14 aa, Homo Sapiens
PVQPEVALKRVPSP

SEQ ID NO: 27739 - protein, 14 aa, Homo Sapiens
VQPEVALKRVPSPT

SEQ ID NO: 27740 - protein, 14 aa, Homo Sapiens
QPEVALKRVPSPTP

SEQ ID NO: 27741 - protein, 14 aa, Homo Sapiens
PEVALKRVPSPTPA

SEQ ID NO: 27742 - protein, 14 aa, Homo Sapiens
EVALKRVPSPTPAP

SEQ ID NO: 27743 - protein, 14 aa, Homo Sapiens
VALKRVPSPTPAPK

SEQ ID NO: 27744 - protein, 14 aa, Homo Sapiens
ALKRVPSPTPAPKE

SEQ ID NO: 27745 - protein, 14 aa, Homo Sapiens
LKRVPSPTPAPKEA

SEQ ID NO: 27746 - protein, 14 aa, Homo Sapiens
KRVPSPTPAPKEAV

SEQ ID NO: 27747 - protein, 14 aa, Homo Sapiens
RVPSPTPAPKEAVR

SEQ ID NO: 27748 - protein, 14 aa, Homo Sapiens
VPSPTPAPKEAVRE

SEQ ID NO: 27749 - protein, 14 aa, Homo Sapiens
PSPTPAPKEAVREG

SEQ ID NO: 27750 - protein, 14 aa, Homo Sapiens
SPTPAPKEAVREGR

SEQ ID NO: 27751 - protein, 14 aa, Homo Sapiens
PTPAPKEAVREGRP

SEQ ID NO: 27752 - protein, 14 aa, Homo Sapiens
TPAPKEAVREGRPP

SEQ ID NO: 27753 - protein, 14 aa, Homo Sapiens
PAPKEAVREGRPPE

SEQ ID NO: 27754 - protein, 14 aa, Homo Sapiens
APKEAVREGRPPEP

SEQ ID NO: 27755 - protein, 14 aa, Homo Sapiens
PKEAVREGRPPEPT

SEQ ID NO: 27756 - protein, 14 aa, Homo Sapiens
KEAVREGRPPEPTP

SEQ ID NO: 27757 - protein, 14 aa, Homo Sapiens
EAVREGRPPEPTPA

SEQ ID NO: 27758 - protein, 14 aa, Homo Sapiens
AVREGRPPEPTPAK

SEQ ID NO: 27759 - protein, 14 aa, Homo Sapiens
VREGRPPEPTPAKR

SEQ ID NO: 27760 - protein, 14 aa, Homo Sapiens
REGRPPEPTPAKRK

SEQ ID NO: 27761 - protein, 14 aa, Homo Sapiens
EGRPPEPTPAKRKR

SEQ ID NO: 27762 - protein, 14 aa, Homo Sapiens
GRPPEPTPAKRKRR

SEQ ID NO: 27763 - protein, 14 aa, Homo Sapiens
RPPEPTPAKRKRRS

SEQ ID NO: 27764 - protein, 14 aa, Homo Sapiens
PPEPTPAKRKRRSS

SEQ ID NO: 27765 - protein, 14 aa, Homo Sapiens
PEPTPAKRKRRSSS

SEQ ID NO: 27766 - protein, 14 aa, Homo Sapiens
EPTPAKRKRRSSSS

SEQ ID NO: 27767 - protein, 14 aa, Homo Sapiens
PTPAKRKRRSSSSS

SEQ ID NO: 27768 - protein, 14 aa, Homo Sapiens
TPAKRKRRSSSSSS

SEQ ID NO: 27769 - protein, 14 aa, Homo Sapiens
PAKRKRRSSSSSSS

SEQ ID NO: 27770 - protein, 14 aa, Homo Sapiens
AKRKRRSSSSSSSS

SEQ ID NO: 27771 - protein, 14 aa, Homo Sapiens
KRKRRSSSSSSSSS

SEQ ID NO: 27772 - protein, 14 aa, Homo Sapiens
RKRRSSSSSSSSSS

SEQ ID NO: 27773 - protein, 14 aa, Homo Sapiens
KRRSSSSSSSSSSS

SEQ ID NO: 27774 - protein, 14 aa, Homo Sapiens
RRSSSSSSSSSSSS

SEQ ID NO: 27775 - protein, 14 aa, Homo Sapiens
RSSSSSSSSSSSSS

SEQ ID NO: 27776 - protein, 14 aa, Homo Sapiens
SSSSSSSSSSSSSS

SEQ ID NO: 27777 - protein, 14 aa, Homo Sapiens
SSSSSSSSSSSSSS

SEQ ID NO: 27778 - protein, 14 aa, Homo Sapiens
SSSSSSSSSSSSSS

SEQ ID NO: 27779 - protein, 14 aa, Homo Sapiens
SSSSSSSSSSSSSS

SEQ ID NO: 27780 - protein, 14 aa, Homo Sapiens
SSSSSSSSSSSSSS

SEQ ID NO: 27781 - protein, 14 aa, Homo Sapiens
SSSSSSSSSSSSSS

SEQ ID NO: 27782 - protein, 14 aa, Homo Sapiens
SSSSSSSSSSSSSS

SEQ ID NO: 27783 - protein, 14 aa, Homo Sapiens
SSSSSSSSSSSSSS

SEQ ID NO: 27784 - protein, 14 aa, Homo Sapiens
SSSSSSSSSSSSSS

SEQ ID NO: 27785 - protein, 14 aa, Homo Sapiens
SSSSSSSSSSSSSS

SEQ ID NO: 27786 - protein, 14 aa, Homo Sapiens
SSSSSSSSSSSSSS

SEQ ID NO: 27787 - protein, 14 aa, Homo Sapiens
SSSSSSSSSSSSSS

SEQ ID NO: 27788 - protein, 14 aa, Homo Sapiens
SSSSSSSSSSSSSS

SEQ ID NO: 27789 - protein, 14 aa, Homo Sapiens
SSSSSSSSSSSSSS

SEQ ID NO: 27790 - protein, 14 aa, Homo Sapiens
SSSSSSSSSSSSSS

SEQ ID NO: 27791 - protein, 14 aa, Homo Sapiens
SSSSSSSSSSSSSS

SEQ ID NO: 27792 - protein, 14 aa, Homo Sapiens
SSSSSSSSSSSSSS

SEQ ID NO: 27793 - protein, 14 aa, Homo Sapiens
SSSSSSSSSSSSSS

SEQ ID NO: 27794 - protein, 14 aa, Homo Sapiens
SSSSSSSSSSSSSS

SEQ ID NO: 27795 - protein, 14 aa, Homo Sapiens
SSSSSSSSSSSSSS

SEQ ID NO: 27796 - protein, 14 aa, Homo Sapiens
SSSSSSSSSSSSSS

SEQ ID NO: 27797 - protein, 14 aa, Homo Sapiens
SSSSSSSSSSSSSS

SEQ ID NO: 27798 - protein, 14 aa, Homo Sapiens
SSSSSSSSSSSSSS

SEQ ID NO: 27799 - protein, 14 aa, Homo Sapiens
SSSSSSSSSSSSSS

SEQ ID NO: 27800 - protein, 14 aa, Homo Sapiens
SSSSSSSSSSSSSS

SEQ ID NO: 27801 - protein, 14 aa, Homo Sapiens
SSSSSSSSSSSSSS

SEQ ID NO: 27802 - protein, 14 aa, Homo Sapiens
SSSSSSSSSSSSSS

SEQ ID NO: 27803 - protein, 14 aa, Homo Sapiens
SSSSSSSSSSSSSS

SEQ ID NO: 27804 - protein, 14 aa, Homo Sapiens
SSSSSSSSSSSSSS

SEQ ID NO: 27805 - protein, 14 aa, Homo Sapiens
SSSSSSSSSSSSSP

SEQ ID NO: 27806 - protein, 14 aa, Homo Sapiens
SSSSSSSSSSSSPS

SEQ ID NO: 27807 - protein, 14 aa, Homo Sapiens
SSSSSSSSSSSPSP

SEQ ID NO: 27808 - protein, 14 aa, Homo Sapiens
SSSSSSSSSSPSPA

SEQ ID NO: 27809 - protein, 14 aa, Homo Sapiens
SSSSSSSSSPSPAK

SEQ ID NO: 27810 - protein, 14 aa, Homo Sapiens
SSSSSSSSPSPAKP

SEQ ID NO: 27811 - protein, 14 aa, Homo Sapiens
SSSSSSSPSPAKPG

SEQ ID NO: 27812 - protein, 14 aa, Homo Sapiens
SSSSSSPSPAKPGP

SEQ ID NO: 27813 - protein, 14 aa, Homo Sapiens
SSSSSPSPAKPGPQ

SEQ ID NO: 27814 - protein, 14 aa, Homo Sapiens
SSSSPSPAKPGPQA

SEQ ID NO: 27815 - protein, 14 aa, Homo Sapiens
SSSPSPAKPGPQAL

SEQ ID NO: 27816 - protein, 14 aa, Homo Sapiens
SSPSPAKPGPQALP

SEQ ID NO: 27817 - protein, 14 aa, Homo Sapiens
SPSPAKPGPQALPK

SEQ ID NO: 27818 - protein, 14 aa, Homo Sapiens
PSPAKPGPQALPKP

SEQ ID NO: 27819 - protein, 14 aa, Homo Sapiens
SPAKPGPQALPKPA

SEQ ID NO: 27820 - protein, 14 aa, Homo Sapiens
PAKPGPQALPKPAS

SEQ ID NO: 27821 - protein, 14 aa, Homo Sapiens
AKPGPQALPKPASP

SEQ ID NO: 27822 - protein, 14 aa, Homo Sapiens
KPGPQALPKPASPK

SEQ ID NO: 27823 - protein, 14 aa, Homo Sapiens
PGPQALPKPASPKK

SEQ ID NO: 27824 - protein, 14 aa, Homo Sapiens
GPQALPKPASPKKP

SEQ ID NO: 27825 - protein, 14 aa, Homo Sapiens
PQALPKPASPKKPP

SEQ ID NO: 27826 - protein, 14 aa, Homo Sapiens
QALPKPASPKKPPP

SEQ ID NO: 27827 - protein, 14 aa, Homo Sapiens
ALPKPASPKKPPPG

SEQ ID NO: 27828 - protein, 14 aa, Homo Sapiens
LPKPASPKKPPPGE

SEQ ID NO: 27829 - protein, 14 aa, Homo Sapiens
PKPASPKKPPPGER

SEQ ID NO: 27830 - protein, 14 aa, Homo Sapiens
KPASPKKPPPGERR

SEQ ID NO: 27831 - protein, 14 aa, Homo Sapiens
PASPKKPPPGERRS

SEQ ID NO: 27832 - protein, 14 aa, Homo Sapiens
ASPKKPPPGERRSR

SEQ ID NO: 27833 - protein, 14 aa, Homo Sapiens
SPKKPPPGERRSRS

SEQ ID NO: 27834 - protein, 14 aa, Homo Sapiens
PKKPPPGERRSRSP

SEQ ID NO: 27835 - protein, 14 aa, Homo Sapiens
KKPPPGERRSRSPR

SEQ ID NO: 27836 - protein, 14 aa, Homo Sapiens
KPPPGERRSRSPRK

SEQ ID NO: 27837 - protein, 14 aa, Homo Sapiens
PPPGERRSRSPRKP

SEQ ID NO: 27838 - protein, 14 aa, Homo Sapiens
PPGERRSRSPRKPI

SEQ ID NO: 27839 - protein, 14 aa, Homo Sapiens
PGERRSRSPRKPID

SEQ ID NO: 27840 - protein, 14 aa, Homo Sapiens
GERRSRSPRKPIDS

SEQ ID NO: 27841 - protein, 14 aa, Homo Sapiens
ERRSRSPRKPIDSL

SEQ ID NO: 27842 - protein, 14 aa, Homo Sapiens
RRSRSPRKPIDSLR

SEQ ID NO: 27843 - protein, 14 aa, Homo Sapiens
RSRSPRKPIDSLRD

SEQ ID NO: 27844 - protein, 14 aa, Homo Sapiens
SRSPRKPIDSLRDS

SEQ ID NO: 27845 - protein, 14 aa, Homo Sapiens
RSPRKPIDSLRDSR

SEQ ID NO: 27846 - protein, 14 aa, Homo Sapiens
SPRKPIDSLRDSRS

SEQ ID NO: 27847 - protein, 14 aa, Homo Sapiens
PRKPIDSLRDSRSL

SEQ ID NO: 27848 - protein, 14 aa, Homo Sapiens
RKPIDSLRDSRSLS

SEQ ID NO: 27849 - protein, 14 aa, Homo Sapiens
KPIDSLRDSRSLSY

SEQ ID NO: 27850 - protein, 14 aa, Homo Sapiens
PIDSLRDSRSLSYS

SEQ ID NO: 27851 - protein, 14 aa, Homo Sapiens
IDSLRDSRSLSYSP

SEQ ID NO: 27852 - protein, 14 aa, Homo Sapiens
DSLRDSRSLSYSPV

SEQ ID NO: 27853 - protein, 14 aa, Homo Sapiens
SLRDSRSLSYSPVE

SEQ ID NO: 27854 - protein, 14 aa, Homo Sapiens
LRDSRSLSYSPVER

SEQ ID NO: 27855 - protein, 14 aa, Homo Sapiens
RDSRSLSYSPVERR

SEQ ID NO: 27856 - protein, 14 aa, Homo Sapiens
DSRSLSYSPVERRR

SEQ ID NO: 27857 - protein, 14 aa, Homo Sapiens
SRSLSYSPVERRRP

SEQ ID NO: 27858 - protein, 14 aa, Homo Sapiens
RSLSYSPVERRRPS

SEQ ID NO: 27859 - protein, 14 aa, Homo Sapiens
SLSYSPVERRRPSP

SEQ ID NO: 27860 - protein, 14 aa, Homo Sapiens
LSYSPVERRRPSPQ

SEQ ID NO: 27861 - protein, 14 aa, Homo Sapiens
SYSPVERRRPSPQP

SEQ ID NO: 27862 - protein, 14 aa, Homo Sapiens
YSPVERRRPSPQPS

SEQ ID NO: 27863 - protein, 14 aa, Homo Sapiens
SPVERRRPSPQPSP

SEQ ID NO: 27864 - protein, 14 aa, Homo Sapiens
PVERRRPSPQPSPR

SEQ ID NO: 27865 - protein, 14 aa, Homo Sapiens
VERRRPSPQPSPRD

SEQ ID NO: 27866 - protein, 14 aa, Homo Sapiens
ERRRPSPQPSPRDQ

SEQ ID NO: 27867 - protein, 14 aa, Homo Sapiens
RRRPSPQPSPRDQQ

SEQ ID NO: 27868 - protein, 14 aa, Homo Sapiens
RRPSPQPSPRDQQS

SEQ ID NO: 27869 - protein, 14 aa, Homo Sapiens
RPSPQPSPRDQQSS

SEQ ID NO: 27870 - protein, 14 aa, Homo Sapiens
PSPQPSPRDQQSSS

SEQ ID NO: 27871 - protein, 14 aa, Homo Sapiens
SPQPSPRDQQSSSS

SEQ ID NO: 27872 - protein, 14 aa, Homo Sapiens
PQPSPRDQQSSSSE

SEQ ID NO: 27873 - protein, 14 aa, Homo Sapiens
QPSPRDQQSSSSER

SEQ ID NO: 27874 - protein, 14 aa, Homo Sapiens
PSPRDQQSSSSERG

SEQ ID NO: 27875 - protein, 14 aa, Homo Sapiens
SPRDQQSSSSERGS

SEQ ID NO: 27876 - protein, 14 aa, Homo Sapiens
PRDQQSSSSERGSR

SEQ ID NO: 27877 - protein, 14 aa, Homo Sapiens
RDQQSSSSERGSRR

SEQ ID NO: 27878 - protein, 14 aa, Homo Sapiens
DQQSSSSERGSRRG

SEQ ID NO: 27879 - protein, 14 aa, Homo Sapiens
QQSSSSERGSRRGQ

SEQ ID NO: 27880 - protein, 14 aa, Homo Sapiens
QSSSSERGSRRGQR

SEQ ID NO: 27881 - protein, 14 aa, Homo Sapiens
SSSSERGSRRGQRG

SEQ ID NO: 27882 - protein, 14 aa, Homo Sapiens
SSSERGSRRGQRGD

SEQ ID NO: 27883 - protein, 14 aa, Homo Sapiens
SSERGSRRGQRGDS

SEQ ID NO: 27884 - protein, 14 aa, Homo Sapiens
SERGSRRGQRGDSR

SEQ ID NO: 27885 - protein, 14 aa, Homo Sapiens
ERGSRRGQRGDSRS

SEQ ID NO: 27886 - protein, 14 aa, Homo Sapiens
RGSRRGQRGDSRSP

SEQ ID NO: 27887 - protein, 14 aa, Homo Sapiens
GSRRGQRGDSRSPS

SEQ ID NO: 27888 - protein, 14 aa, Homo Sapiens
SRRGQRGDSRSPSH

SEQ ID NO: 27889 - protein, 14 aa, Homo Sapiens
RRGQRGDSRSPSHK

SEQ ID NO: 27890 - protein, 14 aa, Homo Sapiens
RGQRGDSRSPSHKR

SEQ ID NO: 27891 - protein, 14 aa, Homo Sapiens
GQRGDSRSPSHKRR

SEQ ID NO: 27892 - protein, 14 aa, Homo Sapiens
QRGDSRSPSHKRRR

SEQ ID NO: 27893 - protein, 14 aa, Homo Sapiens
RGDSRSPSHKRRRE

SEQ ID NO: 27894 - protein, 14 aa, Homo Sapiens
GDSRSPSHKRRRET

SEQ ID NO: 27895 - protein, 14 aa, Homo Sapiens
DSRSPSHKRRRETP

SEQ ID NO: 27896 - protein, 14 aa, Homo Sapiens
SRSPSHKRRRETPS

SEQ ID NO: 27897 - protein, 14 aa, Homo Sapiens
RSPSHKRRRETPSP

SEQ ID NO: 27898 - protein, 14 aa, Homo Sapiens
SPSHKRRRETPSPR

SEQ ID NO: 27899 - protein, 14 aa, Homo Sapiens
PSHKRRRETPSPRP

SEQ ID NO: 27900 - protein, 14 aa, Homo Sapiens
SHKRRRETPSPRPM

SEQ ID NO: 27901 - protein, 14 aa, Homo Sapiens
HKRRRETPSPRPMR

SEQ ID NO: 27902 - protein, 14 aa, Homo Sapiens
KRRRETPSPRPMRH

SEQ ID NO: 27903 - protein, 14 aa, Homo Sapiens
RRRETPSPRPMRHR

SEQ ID NO: 27904 - protein, 14 aa, Homo Sapiens
RRETPSPRPMRHRS

SEQ ID NO: 27905 - protein, 14 aa, Homo Sapiens
RETPSPRPMRHRSS

SEQ ID NO: 27906 - protein, 14 aa, Homo Sapiens
ETPSPRPMRHRSSR

SEQ ID NO: 27907 - protein, 14 aa, Homo Sapiens
TPSPRPMRHRSSRS

SEQ ID NO: 27908 - protein, 14 aa, Homo Sapiens
PSPRPMRHRSSRSP

SEQ ID NO: 27909 - protein, 15 aa, Homo Sapiens
MYNGIGLPTPRGSGT

SEQ ID NO: 27910 - protein, 15 aa, Homo Sapiens
YNGIGLPTPRGSGTN

SEQ ID NO: 27911 - protein, 15 aa, Homo Sapiens
NGIGLPTPRGSGTNG

SEQ ID NO: 27912 - protein, 15 aa, Homo Sapiens
GIGLPTPRGSGTNGY

SEQ ID NO: 27913 - protein, 15 aa, Homo Sapiens
IGLPTPRGSGTNGYV

SEQ ID NO: 27914 - protein, 15 aa, Homo Sapiens
GLPTPRGSGTNGYVQ

SEQ ID NO: 27915 - protein, 15 aa, Homo Sapiens
LPTPRGSGTNGYVQR

SEQ ID NO: 27916 - protein, 15 aa, Homo Sapiens
PTPRGSGTNGYVQRN

SEQ ID NO: 27917 - protein, 15 aa, Homo Sapiens
TPRGSGTNGYVQRNL

SEQ ID NO: 27918 - protein, 15 aa, Homo Sapiens
PRGSGTNGYVQRNLS

SEQ ID NO: 27919 - protein, 15 aa, Homo Sapiens
RGSGTNGYVQRNLSL

SEQ ID NO: 27920 - protein, 15 aa, Homo Sapiens
GSGTNGYVQRNLSLV

SEQ ID NO: 27921 - protein, 15 aa, Homo Sapiens
SGTNGYVQRNLSLVR

SEQ ID NO: 27922 - protein, 15 aa, Homo Sapiens
GTNGYVQRNLSLVRG

SEQ ID NO: 27923 - protein, 15 aa, Homo Sapiens
TNGYVQRNLSLVRGR

SEQ ID NO: 27924 - protein, 15 aa, Homo Sapiens
NGYVQRNLSLVRGRR

SEQ ID NO: 27925 - protein, 15 aa, Homo Sapiens
GYVQRNLSLVRGRRG

SEQ ID NO: 27926 - protein, 15 aa, Homo Sapiens
YVQRNLSLVRGRRGE

SEQ ID NO: 27927 - protein, 15 aa, Homo Sapiens
VQRNLSLVRGRRGER

SEQ ID NO: 27928 - protein, 15 aa, Homo Sapiens
QRNLSLVRGRRGERP

SEQ ID NO: 27929 - protein, 15 aa, Homo Sapiens
RNLSLVRGRRGERPD

SEQ ID NO: 27930 - protein, 15 aa, Homo Sapiens
NLSLVRGRRGERPDY

SEQ ID NO: 27931 - protein, 15 aa, Homo Sapiens
LSLVRGRRGERPDYK

SEQ ID NO: 27932 - protein, 15 aa, Homo Sapiens
SLVRGRRGERPDYKG

SEQ ID NO: 27933 - protein, 15 aa, Homo Sapiens
LVRGRRGERPDYKGE

SEQ ID NO: 27934 - protein, 15 aa, Homo Sapiens
VRGRRGERPDYKGEE

SEQ ID NO: 27935 - protein, 15 aa, Homo Sapiens
RGRRGERPDYKGEEE

SEQ ID NO: 27936 - protein, 15 aa, Homo Sapiens
GRRGERPDYKGEEEL

SEQ ID NO: 27937 - protein, 15 aa, Homo Sapiens
RRGERPDYKGEEELR

SEQ ID NO: 27938 - protein, 15 aa, Homo Sapiens
RGERPDYKGEEELRR

SEQ ID NO: 27939 - protein, 15 aa, Homo Sapiens
GERPDYKGEEELRRL

SEQ ID NO: 27940 - protein, 15 aa, Homo Sapiens
ERPDYKGEEELRRLE

SEQ ID NO: 27941 - protein, 15 aa, Homo Sapiens
RPDYKGEEELRRLEA

SEQ ID NO: 27942 - protein, 15 aa, Homo Sapiens
PDYKGEEELRRLEAA

SEQ ID NO: 27943 - protein, 15 aa, Homo Sapiens
DYKGEEELRRLEAAL

SEQ ID NO: 27944 - protein, 15 aa, Homo Sapiens
YKGEEELRRLEAALV

SEQ ID NO: 27945 - protein, 15 aa, Homo Sapiens
KGEEELRRLEAALVK

SEQ ID NO: 27946 - protein, 15 aa, Homo Sapiens
GEEELRRLEAALVKR

SEQ ID NO: 27947 - protein, 15 aa, Homo Sapiens
EEELRRLEAALVKRP

SEQ ID NO: 27948 - protein, 15 aa, Homo Sapiens
EELRRLEAALVKRPN

SEQ ID NO: 27949 - protein, 15 aa, Homo Sapiens
ELRRLEAALVKRPNP

SEQ ID NO: 27950 - protein, 15 aa, Homo Sapiens
LRRLEAALVKRPNPD

SEQ ID NO: 27951 - protein, 15 aa, Homo Sapiens
RRLEAALVKRPNPDI

SEQ ID NO: 27952 - protein, 15 aa, Homo Sapiens
RLEAALVKRPNPDIL

SEQ ID NO: 27953 - protein, 15 aa, Homo Sapiens
LEAALVKRPNPDILD

SEQ ID NO: 27954 - protein, 15 aa, Homo Sapiens
EAALVKRPNPDILDH

SEQ ID NO: 27955 - protein, 15 aa, Homo Sapiens
AALVKRPNPDILDHE

SEQ ID NO: 27956 - protein, 15 aa, Homo Sapiens
ALVKRPNPDILDHER

SEQ ID NO: 27957 - protein, 15 aa, Homo Sapiens
LVKRPNPDILDHERK

SEQ ID NO: 27958 - protein, 15 aa, Homo Sapiens
VKRPNPDILDHERKR

SEQ ID NO: 27959 - protein, 15 aa, Homo Sapiens
KRPNPDILDHERKRR

SEQ ID NO: 27960 - protein, 15 aa, Homo Sapiens
RPNPDILDHERKRRV

SEQ ID NO: 27961 - protein, 15 aa, Homo Sapiens
PNPDILDHERKRRVE

SEQ ID NO: 27962 - protein, 15 aa, Homo Sapiens
NPDILDHERKRRVEL

SEQ ID NO: 27963 - protein, 15 aa, Homo Sapiens
PDILDHERKRRVELR

SEQ ID NO: 27964 - protein, 15 aa, Homo Sapiens
DILDHERKRRVELRC

SEQ ID NO: 27965 - protein, 15 aa, Homo Sapiens
ILDHERKRRVELRCL

SEQ ID NO: 27966 - protein, 15 aa, Homo Sapiens
LDHERKRRVELRCLE

SEQ ID NO: 27967 - protein, 15 aa, Homo Sapiens
DHERKRRVELRCLEL

SEQ ID NO: 27968 - protein, 15 aa, Homo Sapiens
HERKRRVELRCLELE

SEQ ID NO: 27969 - protein, 15 aa, Homo Sapiens
ERKRRVELRCLELEE

SEQ ID NO: 27970 - protein, 15 aa, Homo Sapiens
RKRRVELRCLELEEM

SEQ ID NO: 27971 - protein, 15 aa, Homo Sapiens
KRRVELRCLELEEMM

SEQ ID NO: 27972 - protein, 15 aa, Homo Sapiens
RRVELRCLELEEMME

SEQ ID NO: 27973 - protein, 15 aa, Homo Sapiens
RVELRCLELEEMMEE

SEQ ID NO: 27974 - protein, 15 aa, Homo Sapiens
VELRCLELEEMMEEQ

SEQ ID NO: 27975 - protein, 15 aa, Homo Sapiens
ELRCLELEEMMEEQG

SEQ ID NO: 27976 - protein, 15 aa, Homo Sapiens
LRCLELEEMMEEQGY

SEQ ID NO: 27977 - protein, 15 aa, Homo Sapiens
RCLELEEMMEEQGYE

SEQ ID NO: 27978 - protein, 15 aa, Homo Sapiens
CLELEEMMEEQGYEE

SEQ ID NO: 27979 - protein, 15 aa, Homo Sapiens
LELEEMMEEQGYEEQ

SEQ ID NO: 27980 - protein, 15 aa, Homo Sapiens
ELEEMMEEQGYEEQQ

SEQ ID NO: 27981 - protein, 15 aa, Homo Sapiens
LEEMMEEQGYEEQQI

SEQ ID NO: 27982 - protein, 15 aa, Homo Sapiens
EEMMEEQGYEEQQIQ

SEQ ID NO: 27983 - protein, 15 aa, Homo Sapiens
EMMEEQGYEEQQIQE

SEQ ID NO: 27984 - protein, 15 aa, Homo Sapiens
MMEEQGYEEQQIQEK

SEQ ID NO: 27985 - protein, 15 aa, Homo Sapiens
MEEQGYEEQQIQEKV

SEQ ID NO: 27986 - protein, 15 aa, Homo Sapiens
EEQGYEEQQIQEKVA

SEQ ID NO: 27987 - protein, 15 aa, Homo Sapiens
EQGYEEQQIQEKVAT

SEQ ID NO: 27988 - protein, 15 aa, Homo Sapiens
QGYEEQQIQEKVATF

SEQ ID NO: 27989 - protein, 15 aa, Homo Sapiens
GYEEQQIQEKVATFR

SEQ ID NO: 27990 - protein, 15 aa, Homo Sapiens
YEEQQIQEKVATFRL

SEQ ID NO: 27991 - protein, 15 aa, Homo Sapiens
EEQQIQEKVATFRLM

SEQ ID NO: 27992 - protein, 15 aa, Homo Sapiens
EQQIQEKVATFRLML

SEQ ID NO: 27993 - protein, 15 aa, Homo Sapiens
QQIQEKVATFRLMLL

SEQ ID NO: 27994 - protein, 15 aa, Homo Sapiens
QIQEKVATFRLMLLE

SEQ ID NO: 27995 - protein, 15 aa, Homo Sapiens
IQEKVATFRLMLLEK

SEQ ID NO: 27996 - protein, 15 aa, Homo Sapiens
QEKVATFRLMLLEKD

SEQ ID NO: 27997 - protein, 15 aa, Homo Sapiens
EKVATFRLMLLEKDV

SEQ ID NO: 27998 - protein, 15 aa, Homo Sapiens
KVATFRLMLLEKDVN

SEQ ID NO: 27999 - protein, 15 aa, Homo Sapiens
VATFRLMLLEKDVNP

SEQ ID NO: 28000 - protein, 15 aa, Homo Sapiens
ATFRLMLLEKDVNPG

SEQ ID NO: 28001 - protein, 15 aa, Homo Sapiens
TFRLMLLEKDVNPGG

SEQ ID NO: 28002 - protein, 15 aa, Homo Sapiens
FRLMLLEKDVNPGGK

SEQ ID NO: 28003 - protein, 15 aa, Homo Sapiens
RLMLLEKDVNPGGKE

SEQ ID NO: 28004 - protein, 15 aa, Homo Sapiens
LMLLEKDVNPGGKEE

SEQ ID NO: 28005 - protein, 15 aa, Homo Sapiens
MLLEKDVNPGGKEET

SEQ ID NO: 28006 - protein, 15 aa, Homo Sapiens
LLEKDVNPGGKEETP

SEQ ID NO: 28007 - protein, 15 aa, Homo Sapiens
LEKDVNPGGKEETPG

SEQ ID NO: 28008 - protein, 15 aa, Homo Sapiens
EKDVNPGGKEETPGQ

SEQ ID NO: 28009 - protein, 15 aa, Homo Sapiens
KDVNPGGKEETPGQR

SEQ ID NO: 28010 - protein, 15 aa, Homo Sapiens
DVNPGGKEETPGQRP

SEQ ID NO: 28011 - protein, 15 aa, Homo Sapiens
VNPGGKEETPGQRPA

SEQ ID NO: 28012 - protein, 15 aa, Homo Sapiens
NPGGKEETPGQRPAV

SEQ ID NO: 28013 - protein, 15 aa, Homo Sapiens
PGGKEETPGQRPAVT

SEQ ID NO: 28014 - protein, 15 aa, Homo Sapiens
GGKEETPGQRPAVTE

SEQ ID NO: 28015 - protein, 15 aa, Homo Sapiens
GKEETPGQRPAVTET

SEQ ID NO: 28016 - protein, 15 aa, Homo Sapiens
KEETPGQRPAVTETH

SEQ ID NO: 28017 - protein, 15 aa, Homo Sapiens
EETPGQRPAVTETHQ

SEQ ID NO: 28018 - protein, 15 aa, Homo Sapiens
ETPGQRPAVTETHQL

SEQ ID NO: 28019 - protein, 15 aa, Homo Sapiens
TPGQRPAVTETHQLA

SEQ ID NO: 28020 - protein, 15 aa, Homo Sapiens
PGQRPAVTETHQLAE

SEQ ID NO: 28021 - protein, 15 aa, Homo Sapiens
GQRPAVTETHQLAEL

SEQ ID NO: 28022 - protein, 15 aa, Homo Sapiens
QRPAVTETHQLAELN

SEQ ID NO: 28023 - protein, 15 aa, Homo Sapiens
RPAVTETHQLAELNE

SEQ ID NO: 28024 - protein, 15 aa, Homo Sapiens
PAVTETHQLAELNEK

SEQ ID NO: 28025 - protein, 15 aa, Homo Sapiens
AVTETHQLAELNEKK

SEQ ID NO: 28026 - protein, 15 aa, Homo Sapiens
VTETHQLAELNEKKN

SEQ ID NO: 28027 - protein, 15 aa, Homo Sapiens
TETHQLAELNEKKNE

SEQ ID NO: 28028 - protein, 15 aa, Homo Sapiens
ETHQLAELNEKKNER

SEQ ID NO: 28029 - protein, 15 aa, Homo Sapiens
THQLAELNEKKNERL

SEQ ID NO: 28030 - protein, 15 aa, Homo Sapiens
HQLAELNEKKNERLR

SEQ ID NO: 28031 - protein, 15 aa, Homo Sapiens
QLAELNEKKNERLRA

SEQ ID NO: 28032 - protein, 15 aa, Homo Sapiens
LAELNEKKNERLRAA

SEQ ID NO: 28033 - protein, 15 aa, Homo Sapiens
AELNEKKNERLRAAF

SEQ ID NO: 28034 - protein, 15 aa, Homo Sapiens
ELNEKKNERLRAAFG

SEQ ID NO: 28035 - protein, 15 aa, Homo Sapiens
LNEKKNERLRAAFGI

SEQ ID NO: 28036 - protein, 15 aa, Homo Sapiens
NEKKNERLRAAFGIS

SEQ ID NO: 28037 - protein, 15 aa, Homo Sapiens
EKKNERLRAAFGISD

SEQ ID NO: 28038 - protein, 15 aa, Homo Sapiens
KKNERLRAAFGISDS

SEQ ID NO: 28039 - protein, 15 aa, Homo Sapiens
KNERLRAAFGISDSY

SEQ ID NO: 28040 - protein, 15 aa, Homo Sapiens
NERLRAAFGISDSYV

SEQ ID NO: 28041 - protein, 15 aa, Homo Sapiens
ERLRAAFGISDSYVD

SEQ ID NO: 28042 - protein, 15 aa, Homo Sapiens
RLRAAFGISDSYVDG

SEQ ID NO: 28043 - protein, 15 aa, Homo Sapiens
LRAAFGISDSYVDGS

SEQ ID NO: 28044 - protein, 15 aa, Homo Sapiens
RAAFGISDSYVDGSS

SEQ ID NO: 28045 - protein, 15 aa, Homo Sapiens
AAFGISDSYVDGSSF

SEQ ID NO: 28046 - protein, 15 aa, Homo Sapiens
AFGISDSYVDGSSFD

SEQ ID NO: 28047 - protein, 15 aa, Homo Sapiens
FGISDSYVDGSSFDP

SEQ ID NO: 28048 - protein, 15 aa, Homo Sapiens
GISDSYVDGSSFDPQ

SEQ ID NO: 28049 - protein, 15 aa, Homo Sapiens
ISDSYVDGSSFDPQR

SEQ ID NO: 28050 - protein, 15 aa, Homo Sapiens
SDSYVDGSSFDPQRR

SEQ ID NO: 28051 - protein, 15 aa, Homo Sapiens
DSYVDGSSFDPQRRA

SEQ ID NO: 28052 - protein, 15 aa, Homo Sapiens
SYVDGSSFDPQRRAR

SEQ ID NO: 28053 - protein, 15 aa, Homo Sapiens
YVDGSSFDPQRRARE

SEQ ID NO: 28054 - protein, 15 aa, Homo Sapiens
VDGSSFDPQRRAREA

SEQ ID NO: 28055 - protein, 15 aa, Homo Sapiens
DGSSFDPQRRAREAK

SEQ ID NO: 28056 - protein, 15 aa, Homo Sapiens
GSSFDPQRRAREAKQ

SEQ ID NO: 28057 - protein, 15 aa, Homo Sapiens
SSFDPQRRAREAKQP

SEQ ID NO: 28058 - protein, 15 aa, Homo Sapiens
SFDPQRRAREAKQPA

SEQ ID NO: 28059 - protein, 15 aa, Homo Sapiens
FDPQRRAREAKQPAP

SEQ ID NO: 28060 - protein, 15 aa, Homo Sapiens
DPQRRAREAKQPAPE

SEQ ID NO: 28061 - protein, 15 aa, Homo Sapiens
PQRRAREAKQPAPEP

SEQ ID NO: 28062 - protein, 15 aa, Homo Sapiens
QRRAREAKQPAPEPP

SEQ ID NO: 28063 - protein, 15 aa, Homo Sapiens
RRAREAKQPAPEPPK

SEQ ID NO: 28064 - protein, 15 aa, Homo Sapiens
RAREAKQPAPEPPKP

SEQ ID NO: 28065 - protein, 15 aa, Homo Sapiens
AREAKQPAPEPPKPY

SEQ ID NO: 28066 - protein, 15 aa, Homo Sapiens
REAKQPAPEPPKPYS

SEQ ID NO: 28067 - protein, 15 aa, Homo Sapiens
EAKQPAPEPPKPYSL

SEQ ID NO: 28068 - protein, 15 aa, Homo Sapiens
AKQPAPEPPKPYSLV

SEQ ID NO: 28069 - protein, 15 aa, Homo Sapiens
KQPAPEPPKPYSLVR

SEQ ID NO: 28070 - protein, 15 aa, Homo Sapiens
QPAPEPPKPYSLVRE

SEQ ID NO: 28071 - protein, 15 aa, Homo Sapiens
PAPEPPKPYSLVRES

SEQ ID NO: 28072 - protein, 15 aa, Homo Sapiens
APEPPKPYSLVRESS

SEQ ID NO: 28073 - protein, 15 aa, Homo Sapiens
PEPPKPYSLVRESSS

SEQ ID NO: 28074 - protein, 15 aa, Homo Sapiens
EPPKPYSLVRESSSS

SEQ ID NO: 28075 - protein, 15 aa, Homo Sapiens
PPKPYSLVRESSSSR

SEQ ID NO: 28076 - protein, 15 aa, Homo Sapiens
PKPYSLVRESSSSRS

SEQ ID NO: 28077 - protein, 15 aa, Homo Sapiens
KPYSLVRESSSSRSP

SEQ ID NO: 28078 - protein, 15 aa, Homo Sapiens
PYSLVRESSSSRSPT

SEQ ID NO: 28079 - protein, 15 aa, Homo Sapiens
YSLVRESSSSRSPTP

SEQ ID NO: 28080 - protein, 15 aa, Homo Sapiens
SLVRESSSSRSPTPK

SEQ ID NO: 28081 - protein, 15 aa, Homo Sapiens
LVRESSSSRSPTPKQ

SEQ ID NO: 28082 - protein, 15 aa, Homo Sapiens
VRESSSSRSPTPKQK

SEQ ID NO: 28083 - protein, 15 aa, Homo Sapiens
RESSSSRSPTPKQKK

SEQ ID NO: 28084 - protein, 15 aa, Homo Sapiens
ESSSSRSPTPKQKKK

SEQ ID NO: 28085 - protein, 15 aa, Homo Sapiens
SSSSRSPTPKQKKKK

SEQ ID NO: 28086 - protein, 15 aa, Homo Sapiens
SSSRSPTPKQKKKKK

SEQ ID NO: 28087 - protein, 15 aa, Homo Sapiens
SSRSPTPKQKKKKKK

SEQ ID NO: 28088 - protein, 15 aa, Homo Sapiens
SRSPTPKQKKKKKKK

SEQ ID NO: 28089 - protein, 15 aa, Homo Sapiens
RSPTPKQKKKKKKKD

SEQ ID NO: 28090 - protein, 15 aa, Homo Sapiens
SPTPKQKKKKKKKDR

SEQ ID NO: 28091 - protein, 15 aa, Homo Sapiens
PTPKQKKKKKKKDRG

SEQ ID NO: 28092 - protein, 15 aa, Homo Sapiens
TPKQKKKKKKKDRGR

SEQ ID NO: 28093 - protein, 15 aa, Homo Sapiens
PKQKKKKKKKDRGRR

SEQ ID NO: 28094 - protein, 15 aa, Homo Sapiens
KQKKKKKKKDRGRRS

SEQ ID NO: 28095 - protein, 15 aa, Homo Sapiens
QKKKKKKKDRGRRSE

SEQ ID NO: 28096 - protein, 15 aa, Homo Sapiens
KKKKKKKDRGRRSES

SEQ ID NO: 28097 - protein, 15 aa, Homo Sapiens
KKKKKKDRGRRSESS

SEQ ID NO: 28098 - protein, 15 aa, Homo Sapiens
KKKKKDRGRRSESSS

SEQ ID NO: 28099 - protein, 15 aa, Homo Sapiens
KKKKDRGRRSESSSP

SEQ ID NO: 28100 - protein, 15 aa, Homo Sapiens
KKKDRGRRSESSSPR

SEQ ID NO: 28101 - protein, 15 aa, Homo Sapiens
KKDRGRRSESSSPRR

SEQ ID NO: 28102 - protein, 15 aa, Homo Sapiens
KDRGRRSESSSPRRE

SEQ ID NO: 28103 - protein, 15 aa, Homo Sapiens
DRGRRSESSSPRRER

SEQ ID NO: 28104 - protein, 15 aa, Homo Sapiens
RGRRSESSSPRRERK

SEQ ID NO: 28105 - protein, 15 aa, Homo Sapiens
GRRSESSSPRRERKK

SEQ ID NO: 28106 - protein, 15 aa, Homo Sapiens
RRSESSSPRRERKKS

SEQ ID NO: 28107 - protein, 15 aa, Homo Sapiens
RSESSSPRRERKKSS

SEQ ID NO: 28108 - protein, 15 aa, Homo Sapiens
SESSSPRRERKKSSK

SEQ ID NO: 28109 - protein, 15 aa, Homo Sapiens
ESSSPRRERKKSSKK

SEQ ID NO: 28110 - protein, 15 aa, Homo Sapiens
SSSPRRERKKSSKKK

SEQ ID NO: 28111 - protein, 15 aa, Homo Sapiens
SSPRRERKKSSKKKK

SEQ ID NO: 28112 - protein, 15 aa, Homo Sapiens
SPRRERKKSSKKKKH

SEQ ID NO: 28113 - protein, 15 aa, Homo Sapiens
PRRERKKSSKKKKHR

SEQ ID NO: 28114 - protein, 15 aa, Homo Sapiens
RRERKKSSKKKKHRS

SEQ ID NO: 28115 - protein, 15 aa, Homo Sapiens
RERKKSSKKKKHRSE

SEQ ID NO: 28116 - protein, 15 aa, Homo Sapiens
ERKKSSKKKKHRSES

SEQ ID NO: 28117 - protein, 15 aa, Homo Sapiens
RKKSSKKKKHRSESE

SEQ ID NO: 28118 - protein, 15 aa, Homo Sapiens
KKSSKKKKHRSESES

SEQ ID NO: 28119 - protein, 15 aa, Homo Sapiens
KSSKKKKHRSESESK

SEQ ID NO: 28120 - protein, 15 aa, Homo Sapiens
SSKKKKHRSESESKK

SEQ ID NO: 28121 - protein, 15 aa, Homo Sapiens
SKKKKHRSESESKKR

SEQ ID NO: 28122 - protein, 15 aa, Homo Sapiens
KKKKHRSESESKKRK

SEQ ID NO: 28123 - protein, 15 aa, Homo Sapiens
KKKHRSESESKKRKH

SEQ ID NO: 28124 - protein, 15 aa, Homo Sapiens
KKHRSESESKKRKHR

SEQ ID NO: 28125 - protein, 15 aa, Homo Sapiens
KHRSESESKKRKHRS

SEQ ID NO: 28126 - protein, 15 aa, Homo Sapiens
HRSESESKKRKHRSP

SEQ ID NO: 28127 - protein, 15 aa, Homo Sapiens
RSESESKKRKHRSPT

SEQ ID NO: 28128 - protein, 15 aa, Homo Sapiens
SESESKKRKHRSPTP

SEQ ID NO: 28129 - protein, 15 aa, Homo Sapiens
ESESKKRKHRSPTPK

SEQ ID NO: 28130 - protein, 15 aa, Homo Sapiens
SESKKRKHRSPTPKS

SEQ ID NO: 28131 - protein, 15 aa, Homo Sapiens
ESKKRKHRSPTPKSK

SEQ ID NO: 28132 - protein, 15 aa, Homo Sapiens
SKKRKHRSPTPKSKR

SEQ ID NO: 28133 - protein, 15 aa, Homo Sapiens
KKRKHRSPTPKSKRK

SEQ ID NO: 28134 - protein, 15 aa, Homo Sapiens
KRKHRSPTPKSKRKS

SEQ ID NO: 28135 - protein, 15 aa, Homo Sapiens
RKHRSPTPKSKRKSK

SEQ ID NO: 28136 - protein, 15 aa, Homo Sapiens
KHRSPTPKSKRKSKD

SEQ ID NO: 28137 - protein, 15 aa, Homo Sapiens
HRSPTPKSKRKSKDK

SEQ ID NO: 28138 - protein, 15 aa, Homo Sapiens
RSPTPKSKRKSKDKK

SEQ ID NO: 28139 - protein, 15 aa, Homo Sapiens
SPTPKSKRKSKDKKR

SEQ ID NO: 28140 - protein, 15 aa, Homo Sapiens
PTPKSKRKSKDKKRK

SEQ ID NO: 28141 - protein, 15 aa, Homo Sapiens
TPKSKRKSKDKKRKR

SEQ ID NO: 28142 - protein, 15 aa, Homo Sapiens
PKSKRKSKDKKRKRS

SEQ ID NO: 28143 - protein, 15 aa, Homo Sapiens
KSKRKSKDKKRKRSR

SEQ ID NO: 28144 - protein, 15 aa, Homo Sapiens
SKRKSKDKKRKRSRS

SEQ ID NO: 28145 - protein, 15 aa, Homo Sapiens
KRKSKDKKRKRSRST

SEQ ID NO: 28146 - protein, 15 aa, Homo Sapiens
RKSKDKKRKRSRSTT

SEQ ID NO: 28147 - protein, 15 aa, Homo Sapiens
KSKDKKRKRSRSTTP

SEQ ID NO: 28148 - protein, 15 aa, Homo Sapiens
SKDKKRKRSRSTTPA

SEQ ID NO: 28149 - protein, 15 aa, Homo Sapiens
KDKKRKRSRSTTPAP

SEQ ID NO: 28150 - protein, 15 aa, Homo Sapiens
DKKRKRSRSTTPAPK

SEQ ID NO: 28151 - protein, 15 aa, Homo Sapiens
KKRKRSRSTTPAPKS

SEQ ID NO: 28152 - protein, 15 aa, Homo Sapiens
KRKRSRSTTPAPKSR

SEQ ID NO: 28153 - protein, 15 aa, Homo Sapiens
RKRSRSTTPAPKSRR

SEQ ID NO: 28154 - protein, 15 aa, Homo Sapiens
KRSRSTTPAPKSRRA

SEQ ID NO: 28155 - protein, 15 aa, Homo Sapiens
RSRSTTPAPKSRRAH

SEQ ID NO: 28156 - protein, 15 aa, Homo Sapiens
SRSTTPAPKSRRAHR

SEQ ID NO: 28157 - protein, 15 aa, Homo Sapiens
RSTTPAPKSRRAHRS

SEQ ID NO: 28158 - protein, 15 aa, Homo Sapiens
STTPAPKSRRAHRST

SEQ ID NO: 28159 - protein, 15 aa, Homo Sapiens
TTPAPKSRRAHRSTS

SEQ ID NO: 28160 - protein, 15 aa, Homo Sapiens
TPAPKSRRAHRSTSA

SEQ ID NO: 28161 - protein, 15 aa, Homo Sapiens
PAPKSRRAHRSTSAD

SEQ ID NO: 28162 - protein, 15 aa, Homo Sapiens
APKSRRAHRSTSADS

SEQ ID NO: 28163 - protein, 15 aa, Homo Sapiens
PKSRRAHRSTSADSA

SEQ ID NO: 28164 - protein, 15 aa, Homo Sapiens
KSRRAHRSTSADSAS

SEQ ID NO: 28165 - protein, 15 aa, Homo Sapiens
SRRAHRSTSADSASS

SEQ ID NO: 28166 - protein, 15 aa, Homo Sapiens
RRAHRSTSADSASSS

SEQ ID NO: 28167 - protein, 15 aa, Homo Sapiens
RAHRSTSADSASSSD

SEQ ID NO: 28168 - protein, 15 aa, Homo Sapiens
AHRSTSADSASSSDT

SEQ ID NO: 28169 - protein, 15 aa, Homo Sapiens
HRSTSADSASSSDTS

SEQ ID NO: 28170 - protein, 15 aa, Homo Sapiens
RSTSADSASSSDTSR

SEQ ID NO: 28171 - protein, 15 aa, Homo Sapiens
STSADSASSSDTSRS

SEQ ID NO: 28172 - protein, 15 aa, Homo Sapiens
TSADSASSSDTSRSR

SEQ ID NO: 28173 - protein, 15 aa, Homo Sapiens
SADSASSSDTSRSRS

SEQ ID NO: 28174 - protein, 15 aa, Homo Sapiens
ADSASSSDTSRSRSR

SEQ ID NO: 28175 - protein, 15 aa, Homo Sapiens
DSASSSDTSRSRSRS

SEQ ID NO: 28176 - protein, 15 aa, Homo Sapiens
SASSSDTSRSRSRSA

SEQ ID NO: 28177 - protein, 15 aa, Homo Sapiens
ASSSDTSRSRSRSAA

SEQ ID NO: 28178 - protein, 15 aa, Homo Sapiens
SSSDTSRSRSRSAAA

SEQ ID NO: 28179 - protein, 15 aa, Homo Sapiens
SSDTSRSRSRSAAAK

SEQ ID NO: 28180 - protein, 15 aa, Homo Sapiens
SDTSRSRSRSAAAKT

SEQ ID NO: 28181 - protein, 15 aa, Homo Sapiens
DTSRSRSRSAAAKTH

SEQ ID NO: 28182 - protein, 15 aa, Homo Sapiens
TSRSRSRSAAAKTHT

SEQ ID NO: 28183 - protein, 15 aa, Homo Sapiens
SRSRSRSAAAKTHTT

SEQ ID NO: 28184 - protein, 15 aa, Homo Sapiens
RSRSRSAAAKTHTTA

SEQ ID NO: 28185 - protein, 15 aa, Homo Sapiens
SRSRSAAAKTHTTAL

SEQ ID NO: 28186 - protein, 15 aa, Homo Sapiens
RSRSAAAKTHTTALA

SEQ ID NO: 28187 - protein, 15 aa, Homo Sapiens
SRSAAAKTHTTALAG

SEQ ID NO: 28188 - protein, 15 aa, Homo Sapiens
RSAAAKTHTTALAGR

SEQ ID NO: 28189 - protein, 15 aa, Homo Sapiens
SAAAKTHTTALAGRS

SEQ ID NO: 28190 - protein, 15 aa, Homo Sapiens
AAAKTHTTALAGRSP

SEQ ID NO: 28191 - protein, 15 aa, Homo Sapiens
AAKTHTTALAGRSPS

SEQ ID NO: 28192 - protein, 15 aa, Homo Sapiens
AKTHTTALAGRSPSP

SEQ ID NO: 28193 - protein, 15 aa, Homo Sapiens
KTHTTALAGRSPSPA

SEQ ID NO: 28194 - protein, 15 aa, Homo Sapiens
THTTALAGRSPSPAS

SEQ ID NO: 28195 - protein, 15 aa, Homo Sapiens
HTTALAGRSPSPASG

SEQ ID NO: 28196 - protein, 15 aa, Homo Sapiens
TTALAGRSPSPASGR

SEQ ID NO: 28197 - protein, 15 aa, Homo Sapiens
TALAGRSPSPASGRR

SEQ ID NO: 28198 - protein, 15 aa, Homo Sapiens
ALAGRSPSPASGRRG

SEQ ID NO: 28199 - protein, 15 aa, Homo Sapiens
LAGRSPSPASGRRGE

SEQ ID NO: 28200 - protein, 15 aa, Homo Sapiens
AGRSPSPASGRRGEG

SEQ ID NO: 28201 - protein, 15 aa, Homo Sapiens
GRSPSPASGRRGEGD

SEQ ID NO: 28202 - protein, 15 aa, Homo Sapiens
RSPSPASGRRGEGDA

SEQ ID NO: 28203 - protein, 15 aa, Homo Sapiens
SPSPASGRRGEGDAP

SEQ ID NO: 28204 - protein, 15 aa, Homo Sapiens
PSPASGRRGEGDAPF

SEQ ID NO: 28205 - protein, 15 aa, Homo Sapiens
SPASGRRGEGDAPFS

SEQ ID NO: 28206 - protein, 15 aa, Homo Sapiens
PASGRRGEGDAPFSE

SEQ ID NO: 28207 - protein, 15 aa, Homo Sapiens
ASGRRGEGDAPFSEP

SEQ ID NO: 28208 - protein, 15 aa, Homo Sapiens
SGRRGEGDAPFSEPG

SEQ ID NO: 28209 - protein, 15 aa, Homo Sapiens
GRRGEGDAPFSEPGT

SEQ ID NO: 28210 - protein, 15 aa, Homo Sapiens
RRGEGDAPFSEPGTT

SEQ ID NO: 28211 - protein, 15 aa, Homo Sapiens
RGEGDAPFSEPGTTS

SEQ ID NO: 28212 - protein, 15 aa, Homo Sapiens
GEGDAPFSEPGTTST

SEQ ID NO: 28213 - protein, 15 aa, Homo Sapiens
EGDAPFSEPGTTSTQ

SEQ ID NO: 28214 - protein, 15 aa, Homo Sapiens
GDAPFSEPGTTSTQR

SEQ ID NO: 28215 - protein, 15 aa, Homo Sapiens
DAPFSEPGTTSTQRP

SEQ ID NO: 28216 - protein, 15 aa, Homo Sapiens
APFSEPGTTSTQRPS

SEQ ID NO: 28217 - protein, 15 aa, Homo Sapiens
PFSEPGTTSTQRPSS

SEQ ID NO: 28218 - protein, 15 aa, Homo Sapiens
FSEPGTTSTQRPSSP

SEQ ID NO: 28219 - protein, 15 aa, Homo Sapiens
SEPGTTSTQRPSSPE

SEQ ID NO: 28220 - protein, 15 aa, Homo Sapiens
EPGTTSTQRPSSPET

SEQ ID NO: 28221 - protein, 15 aa, Homo Sapiens
PGTTSTQRPSSPETA

SEQ ID NO: 28222 - protein, 15 aa, Homo Sapiens
GTTSTQRPSSPETAT

SEQ ID NO: 28223 - protein, 15 aa, Homo Sapiens
TTSTQRPSSPETATK

SEQ ID NO: 28224 - protein, 15 aa, Homo Sapiens
TSTQRPSSPETATKQ

SEQ ID NO: 28225 - protein, 15 aa, Homo Sapiens
STQRPSSPETATKQP

SEQ ID NO: 28226 - protein, 15 aa, Homo Sapiens
TQRPSSPETATKQPS

SEQ ID NO: 28227 - protein, 15 aa, Homo Sapiens
QRPSSPETATKQPSS

SEQ ID NO: 28228 - protein, 15 aa, Homo Sapiens
RPSSPETATKQPSSP

SEQ ID NO: 28229 - protein, 15 aa, Homo Sapiens
PSSPETATKQPSSPY

SEQ ID NO: 28230 - protein, 15 aa, Homo Sapiens
SSPETATKQPSSPYE

SEQ ID NO: 28231 - protein, 15 aa, Homo Sapiens
SPETATKQPSSPYED

SEQ ID NO: 28232 - protein, 15 aa, Homo Sapiens
PETATKQPSSPYEDK

SEQ ID NO: 28233 - protein, 15 aa, Homo Sapiens
ETATKQPSSPYEDKD

SEQ ID NO: 28234 - protein, 15 aa, Homo Sapiens
TATKQPSSPYEDKDK

SEQ ID NO: 28235 - protein, 15 aa, Homo Sapiens
ATKQPSSPYEDKDKD

SEQ ID NO: 28236 - protein, 15 aa, Homo Sapiens
TKQPSSPYEDKDKDK

SEQ ID NO: 28237 - protein, 15 aa, Homo Sapiens
KQPSSPYEDKDKDKK

SEQ ID NO: 28238 - protein, 15 aa, Homo Sapiens
QPSSPYEDKDKDKKE

SEQ ID NO: 28239 - protein, 15 aa, Homo Sapiens
PSSPYEDKDKDKKEK

SEQ ID NO: 28240 - protein, 15 aa, Homo Sapiens
SSPYEDKDKDKKEKS

SEQ ID NO: 28241 - protein, 15 aa, Homo Sapiens
SPYEDKDKDKKEKSA

SEQ ID NO: 28242 - protein, 15 aa, Homo Sapiens
PYEDKDKDKKEKSAT

SEQ ID NO: 28243 - protein, 15 aa, Homo Sapiens
YEDKDKDKKEKSATR

SEQ ID NO: 28244 - protein, 15 aa, Homo Sapiens
EDKDKDKKEKSATRP

SEQ ID NO: 28245 - protein, 15 aa, Homo Sapiens
DKDKDKKEKSATRPS

SEQ ID NO: 28246 - protein, 15 aa, Homo Sapiens
KDKDKKEKSATRPSP

SEQ ID NO: 28247 - protein, 15 aa, Homo Sapiens
DKDKKEKSATRPSPS

SEQ ID NO: 28248 - protein, 15 aa, Homo Sapiens
KDKKEKSATRPSPSP

SEQ ID NO: 28249 - protein, 15 aa, Homo Sapiens
DKKEKSATRPSPSPE

SEQ ID NO: 28250 - protein, 15 aa, Homo Sapiens
KKEKSATRPSPSPER

SEQ ID NO: 28251 - protein, 15 aa, Homo Sapiens
KEKSATRPSPSPERS

SEQ ID NO: 28252 - protein, 15 aa, Homo Sapiens
EKSATRPSPSPERSS

SEQ ID NO: 28253 - protein, 15 aa, Homo Sapiens
KSATRPSPSPERSST

SEQ ID NO: 28254 - protein, 15 aa, Homo Sapiens
SATRPSPSPERSSTG

SEQ ID NO: 28255 - protein, 15 aa, Homo Sapiens
ATRPSPSPERSSTGP

SEQ ID NO: 28256 - protein, 15 aa, Homo Sapiens
TRPSPSPERSSTGPE

SEQ ID NO: 28257 - protein, 15 aa, Homo Sapiens
RPSPSPERSSTGPEP

SEQ ID NO: 28258 - protein, 15 aa, Homo Sapiens
PSPSPERSSTGPEPP

SEQ ID NO: 28259 - protein, 15 aa, Homo Sapiens
SPSPERSSTGPEPPA

SEQ ID NO: 28260 - protein, 15 aa, Homo Sapiens
PSPERSSTGPEPPAP

SEQ ID NO: 28261 - protein, 15 aa, Homo Sapiens
SPERSSTGPEPPAPT

SEQ ID NO: 28262 - protein, 15 aa, Homo Sapiens
PERSSTGPEPPAPTP

SEQ ID NO: 28263 - protein, 15 aa, Homo Sapiens
ERSSTGPEPPAPTPL

SEQ ID NO: 28264 - protein, 15 aa, Homo Sapiens
RSSTGPEPPAPTPLL

SEQ ID NO: 28265 - protein, 15 aa, Homo Sapiens
SSTGPEPPAPTPLLA

SEQ ID NO: 28266 - protein, 15 aa, Homo Sapiens
STGPEPPAPTPLLAE

SEQ ID NO: 28267 - protein, 15 aa, Homo Sapiens
TGPEPPAPTPLLAER

SEQ ID NO: 28268 - protein, 15 aa, Homo Sapiens
GPEPPAPTPLLAERH

SEQ ID NO: 28269 - protein, 15 aa, Homo Sapiens
PEPPAPTPLLAERHG

SEQ ID NO: 28270 - protein, 15 aa, Homo Sapiens
EPPAPTPLLAERHGG

SEQ ID NO: 28271 - protein, 15 aa, Homo Sapiens
PPAPTPLLAERHGGS

SEQ ID NO: 28272 - protein, 15 aa, Homo Sapiens
PAPTPLLAERHGGSP

SEQ ID NO: 28273 - protein, 15 aa, Homo Sapiens
APTPLLAERHGGSPQ

SEQ ID NO: 28274 - protein, 15 aa, Homo Sapiens
PTPLLAERHGGSPQP

SEQ ID NO: 28275 - protein, 15 aa, Homo Sapiens
TPLLAERHGGSPQPL

SEQ ID NO: 28276 - protein, 15 aa, Homo Sapiens
PLLAERHGGSPQPLA

SEQ ID NO: 28277 - protein, 15 aa, Homo Sapiens
LLAERHGGSPQPLAT

SEQ ID NO: 28278 - protein, 15 aa, Homo Sapiens
LAERHGGSPQPLATT

SEQ ID NO: 28279 - protein, 15 aa, Homo Sapiens
AERHGGSPQPLATTP

SEQ ID NO: 28280 - protein, 15 aa, Homo Sapiens
ERHGGSPQPLATTPL

SEQ ID NO: 28281 - protein, 15 aa, Homo Sapiens
RHGGSPQPLATTPLS

SEQ ID NO: 28282 - protein, 15 aa, Homo Sapiens
HGGSPQPLATTPLSQ

SEQ ID NO: 28283 - protein, 15 aa, Homo Sapiens
GGSPQPLATTPLSQE

SEQ ID NO: 28284 - protein, 15 aa, Homo Sapiens
GSPQPLATTPLSQEP

SEQ ID NO: 28285 - protein, 15 aa, Homo Sapiens
SPQPLATTPLSQEPV

SEQ ID NO: 28286 - protein, 15 aa, Homo Sapiens
PQPLATTPLSQEPVN

SEQ ID NO: 28287 - protein, 15 aa, Homo Sapiens
QPLATTPLSQEPVNP

SEQ ID NO: 28288 - protein, 15 aa, Homo Sapiens
PLATTPLSQEPVNPP

SEQ ID NO: 28289 - protein, 15 aa, Homo Sapiens
LATTPLSQEPVNPPS

SEQ ID NO: 28290 - protein, 15 aa, Homo Sapiens
ATTPLSQEPVNPPSE

SEQ ID NO: 28291 - protein, 15 aa, Homo Sapiens
TTPLSQEPVNPPSEA

SEQ ID NO: 28292 - protein, 15 aa, Homo Sapiens
TPLSQEPVNPPSEAS

SEQ ID NO: 28293 - protein, 15 aa, Homo Sapiens
PLSQEPVNPPSEASP

SEQ ID NO: 28294 - protein, 15 aa, Homo Sapiens
LSQEPVNPPSEASPT

SEQ ID NO: 28295 - protein, 15 aa, Homo Sapiens
SQEPVNPPSEASPTR

SEQ ID NO: 28296 - protein, 15 aa, Homo Sapiens
QEPVNPPSEASPTRD

SEQ ID NO: 28297 - protein, 15 aa, Homo Sapiens
EPVNPPSEASPTRDR

SEQ ID NO: 28298 - protein, 15 aa, Homo Sapiens
PVNPPSEASPTRDRS

SEQ ID NO: 28299 - protein, 15 aa, Homo Sapiens
VNPPSEASPTRDRSP

SEQ ID NO: 28300 - protein, 15 aa, Homo Sapiens
NPPSEASPTRDRSPP

SEQ ID NO: 28301 - protein, 15 aa, Homo Sapiens
PPSEASPTRDRSPPK

SEQ ID NO: 28302 - protein, 15 aa, Homo Sapiens
PSEASPTRDRSPPKS

SEQ ID NO: 28303 - protein, 15 aa, Homo Sapiens
SEASPTRDRSPPKSP

SEQ ID NO: 28304 - protein, 15 aa, Homo Sapiens
EASPTRDRSPPKSPE

SEQ ID NO: 28305 - protein, 15 aa, Homo Sapiens
ASPTRDRSPPKSPEK

SEQ ID NO: 28306 - protein, 15 aa, Homo Sapiens
SPTRDRSPPKSPEKL

SEQ ID NO: 28307 - protein, 15 aa, Homo Sapiens
PTRDRSPPKSPEKLP

SEQ ID NO: 28308 - protein, 15 aa, Homo Sapiens
TRDRSPPKSPEKLPQ

SEQ ID NO: 28309 - protein, 15 aa, Homo Sapiens
RDRSPPKSPEKLPQS

SEQ ID NO: 28310 - protein, 15 aa, Homo Sapiens
DRSPPKSPEKLPQSS

SEQ ID NO: 28311 - protein, 15 aa, Homo Sapiens
RSPPKSPEKLPQSSS

SEQ ID NO: 28312 - protein, 15 aa, Homo Sapiens
SPPKSPEKLPQSSSS

SEQ ID NO: 28313 - protein, 15 aa, Homo Sapiens
PPKSPEKLPQSSSSE

SEQ ID NO: 28314 - protein, 15 aa, Homo Sapiens
PKSPEKLPQSSSSES

SEQ ID NO: 28315 - protein, 15 aa, Homo Sapiens
KSPEKLPQSSSSESS

SEQ ID NO: 28316 - protein, 15 aa, Homo Sapiens
SPEKLPQSSSSESSP

SEQ ID NO: 28317 - protein, 15 aa, Homo Sapiens
PEKLPQSSSSESSPP

SEQ ID NO: 28318 - protein, 15 aa, Homo Sapiens
EKLPQSSSSESSPPS

SEQ ID NO: 28319 - protein, 15 aa, Homo Sapiens
KLPQSSSSESSPPSP

SEQ ID NO: 28320 - protein, 15 aa, Homo Sapiens
LPQSSSSESSPPSPQ

SEQ ID NO: 28321 - protein, 15 aa, Homo Sapiens
PQSSSSESSPPSPQP

SEQ ID NO: 28322 - protein, 15 aa, Homo Sapiens
QSSSSESSPPSPQPT

SEQ ID NO: 28323 - protein, 15 aa, Homo Sapiens
SSSSESSPPSPQPTK

SEQ ID NO: 28324 - protein, 15 aa, Homo Sapiens
SSSESSPPSPQPTKV

SEQ ID NO: 28325 - protein, 15 aa, Homo Sapiens
SSESSPPSPQPTKVS

SEQ ID NO: 28326 - protein, 15 aa, Homo Sapiens
SESSPPSPQPTKVSR

SEQ ID NO: 28327 - protein, 15 aa, Homo Sapiens
ESSPPSPQPTKVSRH

SEQ ID NO: 28328 - protein, 15 aa, Homo Sapiens
SSPPSPQPTKVSRHA

SEQ ID NO: 28329 - protein, 15 aa, Homo Sapiens
SPPSPQPTKVSRHAS

SEQ ID NO: 28330 - protein, 15 aa, Homo Sapiens
PPSPQPTKVSRHASS

SEQ ID NO: 28331 - protein, 15 aa, Homo Sapiens
PSPQPTKVSRHASSS

SEQ ID NO: 28332 - protein, 15 aa, Homo Sapiens
SPQPTKVSRHASSSP

SEQ ID NO: 28333 - protein, 15 aa, Homo Sapiens
PQPTKVSRHASSSPE

SEQ ID NO: 28334 - protein, 15 aa, Homo Sapiens
QPTKVSRHASSSPES

SEQ ID NO: 28335 - protein, 15 aa, Homo Sapiens
PTKVSRHASSSPESP

SEQ ID NO: 28336 - protein, 15 aa, Homo Sapiens
TKVSRHASSSPESPK

SEQ ID NO: 28337 - protein, 15 aa, Homo Sapiens
KVSRHASSSPESPKP

SEQ ID NO: 28338 - protein, 15 aa, Homo Sapiens
VSRHASSSPESPKPA

SEQ ID NO: 28339 - protein, 15 aa, Homo Sapiens
SRHASSSPESPKPAP

SEQ ID NO: 28340 - protein, 15 aa, Homo Sapiens
RHASSSPESPKPAPA

SEQ ID NO: 28341 - protein, 15 aa, Homo Sapiens
HASSSPESPKPAPAP

SEQ ID NO: 28342 - protein, 15 aa, Homo Sapiens
ASSSPESPKPAPAPG

SEQ ID NO: 28343 - protein, 15 aa, Homo Sapiens
SSSPESPKPAPAPGS

SEQ ID NO: 28344 - protein, 15 aa, Homo Sapiens
SSPESPKPAPAPGSH

SEQ ID NO: 28345 - protein, 15 aa, Homo Sapiens
SPESPKPAPAPGSHR

SEQ ID NO: 28346 - protein, 15 aa, Homo Sapiens
PESPKPAPAPGSHRE

SEQ ID NO: 28347 - protein, 15 aa, Homo Sapiens
ESPKPAPAPGSHREI

SEQ ID NO: 28348 - protein, 15 aa, Homo Sapiens
SPKPAPAPGSHREIS

SEQ ID NO: 28349 - protein, 15 aa, Homo Sapiens
PKPAPAPGSHREISS

SEQ ID NO: 28350 - protein, 15 aa, Homo Sapiens
KPAPAPGSHREISSS

SEQ ID NO: 28351 - protein, 15 aa, Homo Sapiens
PAPAPGSHREISSSP

SEQ ID NO: 28352 - protein, 15 aa, Homo Sapiens
APAPGSHREISSSPT

SEQ ID NO: 28353 - protein, 15 aa, Homo Sapiens
PAPGSHREISSSPTS

SEQ ID NO: 28354 - protein, 15 aa, Homo Sapiens
APGSHREISSSPTSK

SEQ ID NO: 28355 - protein, 15 aa, Homo Sapiens
PGSHREISSSPTSKN

SEQ ID NO: 28356 - protein, 15 aa, Homo Sapiens
GSHREISSSPTSKNR

SEQ ID NO: 28357 - protein, 15 aa, Homo Sapiens
SHREISSSPTSKNRS

SEQ ID NO: 28358 - protein, 15 aa, Homo Sapiens
HREISSSPTSKNRSH

SEQ ID NO: 28359 - protein, 15 aa, Homo Sapiens
REISSSPTSKNRSHG

SEQ ID NO: 28360 - protein, 15 aa, Homo Sapiens
EISSSPTSKNRSHGR

SEQ ID NO: 28361 - protein, 15 aa, Homo Sapiens
ISSSPTSKNRSHGRA

SEQ ID NO: 28362 - protein, 15 aa, Homo Sapiens
SSSPTSKNRSHGRAK

SEQ ID NO: 28363 - protein, 15 aa, Homo Sapiens
SSPTSKNRSHGRAKR

SEQ ID NO: 28364 - protein, 15 aa, Homo Sapiens
SPTSKNRSHGRAKRD

SEQ ID NO: 28365 - protein, 15 aa, Homo Sapiens
PTSKNRSHGRAKRDK

SEQ ID NO: 28366 - protein, 15 aa, Homo Sapiens
TSKNRSHGRAKRDKS

SEQ ID NO: 28367 - protein, 15 aa, Homo Sapiens
SKNRSHGRAKRDKSH

SEQ ID NO: 28368 - protein, 15 aa, Homo Sapiens
KNRSHGRAKRDKSHS

SEQ ID NO: 28369 - protein, 15 aa, Homo Sapiens
NRSHGRAKRDKSHSH

SEQ ID NO: 28370 - protein, 15 aa, Homo Sapiens
RSHGRAKRDKSHSHT

SEQ ID NO: 28371 - protein, 15 aa, Homo Sapiens
SHGRAKRDKSHSHTP

SEQ ID NO: 28372 - protein, 15 aa, Homo Sapiens
HGRAKRDKSHSHTPS

SEQ ID NO: 28373 - protein, 15 aa, Homo Sapiens
GRAKRDKSHSHTPSR

SEQ ID NO: 28374 - protein, 15 aa, Homo Sapiens
RAKRDKSHSHTPSRR

SEQ ID NO: 28375 - protein, 15 aa, Homo Sapiens
AKRDKSHSHTPSRRM

SEQ ID NO: 28376 - protein, 15 aa, Homo Sapiens
KRDKSHSHTPSRRMG

SEQ ID NO: 28377 - protein, 15 aa, Homo Sapiens
RDKSHSHTPSRRMGR

SEQ ID NO: 28378 - protein, 15 aa, Homo Sapiens
DKSHSHTPSRRMGRS

SEQ ID NO: 28379 - protein, 15 aa, Homo Sapiens
KSHSHTPSRRMGRSR

SEQ ID NO: 28380 - protein, 15 aa, Homo Sapiens
SHSHTPSRRMGRSRS

SEQ ID NO: 28381 - protein, 15 aa, Homo Sapiens
HSHTPSRRMGRSRSP

SEQ ID NO: 28382 - protein, 15 aa, Homo Sapiens
SHTPSRRMGRSRSPA

SEQ ID NO: 28383 - protein, 15 aa, Homo Sapiens
HTPSRRMGRSRSPAT

SEQ ID NO: 28384 - protein, 15 aa, Homo Sapiens
TPSRRMGRSRSPATA

SEQ ID NO: 28385 - protein, 15 aa, Homo Sapiens
PSRRMGRSRSPATAK

SEQ ID NO: 28386 - protein, 15 aa, Homo Sapiens
SRRMGRSRSPATAKR

SEQ ID NO: 28387 - protein, 15 aa, Homo Sapiens
RRMGRSRSPATAKRG

SEQ ID NO: 28388 - protein, 15 aa, Homo Sapiens
RMGRSRSPATAKRGR

SEQ ID NO: 28389 - protein, 15 aa, Homo Sapiens
MGRSRSPATAKRGRS

SEQ ID NO: 28390 - protein, 15 aa, Homo Sapiens
GRSRSPATAKRGRSR

SEQ ID NO: 28391 - protein, 15 aa, Homo Sapiens
RSRSPATAKRGRSRS

SEQ ID NO: 28392 - protein, 15 aa, Homo Sapiens
SRSPATAKRGRSRSR

SEQ ID NO: 28393 - protein, 15 aa, Homo Sapiens
RSPATAKRGRSRSRT

SEQ ID NO: 28394 - protein, 15 aa, Homo Sapiens
SPATAKRGRSRSRTP

SEQ ID NO: 28395 - protein, 15 aa, Homo Sapiens
PATAKRGRSRSRTPT

SEQ ID NO: 28396 - protein, 15 aa, Homo Sapiens
ATAKRGRSRSRTPTK

SEQ ID NO: 28397 - protein, 15 aa, Homo Sapiens
TAKRGRSRSRTPTKR

SEQ ID NO: 28398 - protein, 15 aa, Homo Sapiens
AKRGRSRSRTPTKRG

SEQ ID NO: 28399 - protein, 15 aa, Homo Sapiens
KRGRSRSRTPTKRGH

SEQ ID NO: 28400 - protein, 15 aa, Homo Sapiens
RGRSRSRTPTKRGHS

SEQ ID NO: 28401 - protein, 15 aa, Homo Sapiens
GRSRSRTPTKRGHSR

SEQ ID NO: 28402 - protein, 15 aa, Homo Sapiens
RSRSRTPTKRGHSRS

SEQ ID NO: 28403 - protein, 15 aa, Homo Sapiens
SRSRTPTKRGHSRSR

SEQ ID NO: 28404 - protein, 15 aa, Homo Sapiens
RSRTPTKRGHSRSRS

SEQ ID NO: 28405 - protein, 15 aa, Homo Sapiens
SRTPTKRGHSRSRSP

SEQ ID NO: 28406 - protein, 15 aa, Homo Sapiens
RTPTKRGHSRSRSPQ

SEQ ID NO: 28407 - protein, 15 aa, Homo Sapiens
TPTKRGHSRSRSPQW

SEQ ID NO: 28408 - protein, 15 aa, Homo Sapiens
PTKRGHSRSRSPQWR

SEQ ID NO: 28409 - protein, 15 aa, Homo Sapiens
TKRGHSRSRSPQWRR

SEQ ID NO: 28410 - protein, 15 aa, Homo Sapiens
KRGHSRSRSPQWRRS

SEQ ID NO: 28411 - protein, 15 aa, Homo Sapiens
RGHSRSRSPQWRRSR

SEQ ID NO: 28412 - protein, 15 aa, Homo Sapiens
GHSRSRSPQWRRSRS

SEQ ID NO: 28413 - protein, 15 aa, Homo Sapiens
HSRSRSPQWRRSRSA

SEQ ID NO: 28414 - protein, 15 aa, Homo Sapiens
SRSRSPQWRRSRSAQ

SEQ ID NO: 28415 - protein, 15 aa, Homo Sapiens
RSRSPQWRRSRSAQR

SEQ ID NO: 28416 - protein, 15 aa, Homo Sapiens
SRSPQWRRSRSAQRW

SEQ ID NO: 28417 - protein, 15 aa, Homo Sapiens
RSPQWRRSRSAQRWG

SEQ ID NO: 28418 - protein, 15 aa, Homo Sapiens
SPQWRRSRSAQRWGR

SEQ ID NO: 28419 - protein, 15 aa, Homo Sapiens
PQWRRSRSAQRWGRS

SEQ ID NO: 28420 - protein, 15 aa, Homo Sapiens
QWRRSRSAQRWGRSR

SEQ ID NO: 28421 - protein, 15 aa, Homo Sapiens
WRRSRSAQRWGRSRS

SEQ ID NO: 28422 - protein, 15 aa, Homo Sapiens
RRSRSAQRWGRSRSP

SEQ ID NO: 28423 - protein, 15 aa, Homo Sapiens
RSRSAQRWGRSRSPQ

SEQ ID NO: 28424 - protein, 15 aa, Homo Sapiens
SRSAQRWGRSRSPQR

SEQ ID NO: 28425 - protein, 15 aa, Homo Sapiens
RSAQRWGRSRSPQRR

SEQ ID NO: 28426 - protein, 15 aa, Homo Sapiens
SAQRWGRSRSPQRRG

SEQ ID NO: 28427 - protein, 15 aa, Homo Sapiens
AQRWGRSRSPQRRGR

SEQ ID NO: 28428 - protein, 15 aa, Homo Sapiens
QRWGRSRSPQRRGRS

SEQ ID NO: 28429 - protein, 15 aa, Homo Sapiens
RWGRSRSPQRRGRSR

SEQ ID NO: 28430 - protein, 15 aa, Homo Sapiens
WGRSRSPQRRGRSRS

SEQ ID NO: 28431 - protein, 15 aa, Homo Sapiens
GRSRSPQRRGRSRSP

SEQ ID NO: 28432 - protein, 15 aa, Homo Sapiens
RSRSPQRRGRSRSPQ

SEQ ID NO: 28433 - protein, 15 aa, Homo Sapiens
SRSPQRRGRSRSPQR

SEQ ID NO: 28434 - protein, 15 aa, Homo Sapiens
RSPQRRGRSRSPQRP

SEQ ID NO: 28435 - protein, 15 aa, Homo Sapiens
SPQRRGRSRSPQRPG

SEQ ID NO: 28436 - protein, 15 aa, Homo Sapiens
PQRRGRSRSPQRPGW

SEQ ID NO: 28437 - protein, 15 aa, Homo Sapiens
QRRGRSRSPQRPGWS

SEQ ID NO: 28438 - protein, 15 aa, Homo Sapiens
RRGRSRSPQRPGWSR

SEQ ID NO: 28439 - protein, 15 aa, Homo Sapiens
RGRSRSPQRPGWSRS

SEQ ID NO: 28440 - protein, 15 aa, Homo Sapiens
GRSRSPQRPGWSRSR

SEQ ID NO: 28441 - protein, 15 aa, Homo Sapiens
RSRSPQRPGWSRSRN

SEQ ID NO: 28442 - protein, 15 aa, Homo Sapiens
SRSPQRPGWSRSRNT

SEQ ID NO: 28443 - protein, 15 aa, Homo Sapiens
RSPQRPGWSRSRNTQ

SEQ ID NO: 28444 - protein, 15 aa, Homo Sapiens
SPQRPGWSRSRNTQR

SEQ ID NO: 28445 - protein, 15 aa, Homo Sapiens
PQRPGWSRSRNTQRR

SEQ ID NO: 28446 - protein, 15 aa, Homo Sapiens
QRPGWSRSRNTQRRG

SEQ ID NO: 28447 - protein, 15 aa, Homo Sapiens
RPGWSRSRNTQRRGR

SEQ ID NO: 28448 - protein, 15 aa, Homo Sapiens
PGWSRSRNTQRRGRS

SEQ ID NO: 28449 - protein, 15 aa, Homo Sapiens
GWSRSRNTQRRGRSR

SEQ ID NO: 28450 - protein, 15 aa, Homo Sapiens
WSRSRNTQRRGRSRS

SEQ ID NO: 28451 - protein, 15 aa, Homo Sapiens
SRSRNTQRRGRSRSA

SEQ ID NO: 28452 - protein, 15 aa, Homo Sapiens
RSRNTQRRGRSRSAR

SEQ ID NO: 28453 - protein, 15 aa, Homo Sapiens
SRNTQRRGRSRSARR

SEQ ID NO: 28454 - protein, 15 aa, Homo Sapiens
RNTQRRGRSRSARRG

SEQ ID NO: 28455 - protein, 15 aa, Homo Sapiens
NTQRRGRSRSARRGR

SEQ ID NO: 28456 - protein, 15 aa, Homo Sapiens
TQRRGRSRSARRGRS

SEQ ID NO: 28457 - protein, 15 aa, Homo Sapiens
QRRGRSRSARRGRSH

SEQ ID NO: 28458 - protein, 15 aa, Homo Sapiens
RRGRSRSARRGRSHS

SEQ ID NO: 28459 - protein, 15 aa, Homo Sapiens
RGRSRSARRGRSHSR

SEQ ID NO: 28460 - protein, 15 aa, Homo Sapiens
GRSRSARRGRSHSRS

SEQ ID NO: 28461 - protein, 15 aa, Homo Sapiens
RSRSARRGRSHSRSP

SEQ ID NO: 28462 - protein, 15 aa, Homo Sapiens
SRSARRGRSHSRSPA

SEQ ID NO: 28463 - protein, 15 aa, Homo Sapiens
RSARRGRSHSRSPAT

SEQ ID NO: 28464 - protein, 15 aa, Homo Sapiens
SARRGRSHSRSPATR

SEQ ID NO: 28465 - protein, 15 aa, Homo Sapiens
ARRGRSHSRSPATRG

SEQ ID NO: 28466 - protein, 15 aa, Homo Sapiens
RRGRSHSRSPATRGR

SEQ ID NO: 28467 - protein, 15 aa, Homo Sapiens
RGRSHSRSPATRGRS

SEQ ID NO: 28468 - protein, 15 aa, Homo Sapiens
GRSHSRSPATRGRSR

SEQ ID NO: 28469 - protein, 15 aa, Homo Sapiens
RSHSRSPATRGRSRS

SEQ ID NO: 28470 - protein, 15 aa, Homo Sapiens
SHSRSPATRGRSRSR

SEQ ID NO: 28471 - protein, 15 aa, Homo Sapiens
HSRSPATRGRSRSRT

SEQ ID NO: 28472 - protein, 15 aa, Homo Sapiens
SRSPATRGRSRSRTP

SEQ ID NO: 28473 - protein, 15 aa, Homo Sapiens
RSPATRGRSRSRTPA

SEQ ID NO: 28474 - protein, 15 aa, Homo Sapiens
SPATRGRSRSRTPAR

SEQ ID NO: 28475 - protein, 15 aa, Homo Sapiens
PATRGRSRSRTPARR

SEQ ID NO: 28476 - protein, 15 aa, Homo Sapiens
ATRGRSRSRTPARRG

SEQ ID NO: 28477 - protein, 15 aa, Homo Sapiens
TRGRSRSRTPARRGR

SEQ ID NO: 28478 - protein, 15 aa, Homo Sapiens
RGRSRSRTPARRGRS

SEQ ID NO: 28479 - protein, 15 aa, Homo Sapiens
GRSRSRTPARRGRSR

SEQ ID NO: 28480 - protein, 15 aa, Homo Sapiens
RSRSRTPARRGRSRS

SEQ ID NO: 28481 - protein, 15 aa, Homo Sapiens
SRSRTPARRGRSRSR

SEQ ID NO: 28482 - protein, 15 aa, Homo Sapiens
RSRTPARRGRSRSRT

SEQ ID NO: 28483 - protein, 15 aa, Homo Sapiens
SRTPARRGRSRSRTP

SEQ ID NO: 28484 - protein, 15 aa, Homo Sapiens
RTPARRGRSRSRTPA

SEQ ID NO: 28485 - protein, 15 aa, Homo Sapiens
TPARRGRSRSRTPAR

SEQ ID NO: 28486 - protein, 15 aa, Homo Sapiens
PARRGRSRSRTPARR

SEQ ID NO: 28487 - protein, 15 aa, Homo Sapiens
ARRGRSRSRTPARRR

SEQ ID NO: 28488 - protein, 15 aa, Homo Sapiens
RRGRSRSRTPARRRS

SEQ ID NO: 28489 - protein, 15 aa, Homo Sapiens
RGRSRSRTPARRRSR

SEQ ID NO: 28490 - protein, 15 aa, Homo Sapiens
GRSRSRTPARRRSRS

SEQ ID NO: 28491 - protein, 15 aa, Homo Sapiens
RSRSRTPARRRSRSR

SEQ ID NO: 28492 - protein, 15 aa, Homo Sapiens
SRSRTPARRRSRSRT

SEQ ID NO: 28493 - protein, 15 aa, Homo Sapiens
RSRTPARRRSRSRTP

SEQ ID NO: 28494 - protein, 15 aa, Homo Sapiens
SRTPARRRSRSRTPT

SEQ ID NO: 28495 - protein, 15 aa, Homo Sapiens
RTPARRRSRSRTPTR

SEQ ID NO: 28496 - protein, 15 aa, Homo Sapiens
TPARRRSRSRTPTRR

SEQ ID NO: 28497 - protein, 15 aa, Homo Sapiens
PARRRSRSRTPTRRR

SEQ ID NO: 28498 - protein, 15 aa, Homo Sapiens
ARRRSRSRTPTRRRS

SEQ ID NO: 28499 - protein, 15 aa, Homo Sapiens
RRRSRSRTPTRRRSR

SEQ ID NO: 28500 - protein, 15 aa, Homo Sapiens
RRSRSRTPTRRRSRS

SEQ ID NO: 28501 - protein, 15 aa, Homo Sapiens
RSRSRTPTRRRSRSR

SEQ ID NO: 28502 - protein, 15 aa, Homo Sapiens
SRSRTPTRRRSRSRT

SEQ ID NO: 28503 - protein, 15 aa, Homo Sapiens
RSRTPTRRRSRSRTP

SEQ ID NO: 28504 - protein, 15 aa, Homo Sapiens
SRTPTRRRSRSRTPA

SEQ ID NO: 28505 - protein, 15 aa, Homo Sapiens
RTPTRRRSRSRTPAR

SEQ ID NO: 28506 - protein, 15 aa, Homo Sapiens
TPTRRRSRSRTPARR

SEQ ID NO: 28507 - protein, 15 aa, Homo Sapiens
PTRRRSRSRTPARRG

SEQ ID NO: 28508 - protein, 15 aa, Homo Sapiens
TRRRSRSRTPARRGR

SEQ ID NO: 28509 - protein, 15 aa, Homo Sapiens
RRRSRSRTPARRGRS

SEQ ID NO: 28510 - protein, 15 aa, Homo Sapiens
RRSRSRTPARRGRSR

SEQ ID NO: 28511 - protein, 15 aa, Homo Sapiens
RSRSRTPARRGRSRS

SEQ ID NO: 28512 - protein, 15 aa, Homo Sapiens
SRSRTPARRGRSRSR

SEQ ID NO: 28513 - protein, 15 aa, Homo Sapiens
RSRTPARRGRSRSRT

SEQ ID NO: 28514 - protein, 15 aa, Homo Sapiens
SRTPARRGRSRSRTP

SEQ ID NO: 28515 - protein, 15 aa, Homo Sapiens
RTPARRGRSRSRTPA

SEQ ID NO: 28516 - protein, 15 aa, Homo Sapiens
TPARRGRSRSRTPAR

SEQ ID NO: 28517 - protein, 15 aa, Homo Sapiens
PARRGRSRSRTPARR

SEQ ID NO: 28518 - protein, 15 aa, Homo Sapiens
ARRGRSRSRTPARRR

SEQ ID NO: 28519 - protein, 15 aa, Homo Sapiens
RRGRSRSRTPARRRS

SEQ ID NO: 28520 - protein, 15 aa, Homo Sapiens
RGRSRSRTPARRRSR

SEQ ID NO: 28521 - protein, 15 aa, Homo Sapiens
GRSRSRTPARRRSRT

SEQ ID NO: 28522 - protein, 15 aa, Homo Sapiens
RSRSRTPARRRSRTR

SEQ ID NO: 28523 - protein, 15 aa, Homo Sapiens
SRSRTPARRRSRTRS

SEQ ID NO: 28524 - protein, 15 aa, Homo Sapiens
RSRTPARRRSRTRSP

SEQ ID NO: 28525 - protein, 15 aa, Homo Sapiens
SRTPARRRSRTRSPV

SEQ ID NO: 28526 - protein, 15 aa, Homo Sapiens
RTPARRRSRTRSPVR

SEQ ID NO: 28527 - protein, 15 aa, Homo Sapiens
TPARRRSRTRSPVRR

SEQ ID NO: 28528 - protein, 15 aa, Homo Sapiens
PARRRSRTRSPVRRR

SEQ ID NO: 28529 - protein, 15 aa, Homo Sapiens
ARRRSRTRSPVRRRS

SEQ ID NO: 28530 - protein, 15 aa, Homo Sapiens
RRRSRTRSPVRRRSR

SEQ ID NO: 28531 - protein, 15 aa, Homo Sapiens
RRSRTRSPVRRRSRS

SEQ ID NO: 28532 - protein, 15 aa, Homo Sapiens
RSRTRSPVRRRSRSR

SEQ ID NO: 28533 - protein, 15 aa, Homo Sapiens
SRTRSPVRRRSRSRS

SEQ ID NO: 28534 - protein, 15 aa, Homo Sapiens
RTRSPVRRRSRSRSP

SEQ ID NO: 28535 - protein, 15 aa, Homo Sapiens
TRSPVRRRSRSRSPA

SEQ ID NO: 28536 - protein, 15 aa, Homo Sapiens
RSPVRRRSRSRSPAR

SEQ ID NO: 28537 - protein, 15 aa, Homo Sapiens
SPVRRRSRSRSPARR

SEQ ID NO: 28538 - protein, 15 aa, Homo Sapiens
PVRRRSRSRSPARRS

SEQ ID NO: 28539 - protein, 15 aa, Homo Sapiens
VRRRSRSRSPARRSG

SEQ ID NO: 28540 - protein, 15 aa, Homo Sapiens
RRRSRSRSPARRSGR

SEQ ID NO: 28541 - protein, 15 aa, Homo Sapiens
RRSRSRSPARRSGRS

SEQ ID NO: 28542 - protein, 15 aa, Homo Sapiens
RSRSRSPARRSGRSR

SEQ ID NO: 28543 - protein, 15 aa, Homo Sapiens
SRSRSPARRSGRSRS

SEQ ID NO: 28544 - protein, 15 aa, Homo Sapiens
RSRSPARRSGRSRSR

SEQ ID NO: 28545 - protein, 15 aa, Homo Sapiens
SRSPARRSGRSRSRT

SEQ ID NO: 28546 - protein, 15 aa, Homo Sapiens
RSPARRSGRSRSRTP

SEQ ID NO: 28547 - protein, 15 aa, Homo Sapiens
SPARRSGRSRSRTPA

SEQ ID NO: 28548 - protein, 15 aa, Homo Sapiens
PARRSGRSRSRTPAR

SEQ ID NO: 28549 - protein, 15 aa, Homo Sapiens
ARRSGRSRSRTPARR

SEQ ID NO: 28550 - protein, 15 aa, Homo Sapiens
RRSGRSRSRTPARRG

SEQ ID NO: 28551 - protein, 15 aa, Homo Sapiens
RSGRSRSRTPARRGR

SEQ ID NO: 28552 - protein, 15 aa, Homo Sapiens
SGRSRSRTPARRGRS

SEQ ID NO: 28553 - protein, 15 aa, Homo Sapiens
GRSRSRTPARRGRSR

SEQ ID NO: 28554 - protein, 15 aa, Homo Sapiens
RSRSRTPARRGRSRS

SEQ ID NO: 28555 - protein, 15 aa, Homo Sapiens
SRSRTPARRGRSRSR

SEQ ID NO: 28556 - protein, 15 aa, Homo Sapiens
RSRTPARRGRSRSRT

SEQ ID NO: 28557 - protein, 15 aa, Homo Sapiens
SRTPARRGRSRSRTP

SEQ ID NO: 28558 - protein, 15 aa, Homo Sapiens
RTPARRGRSRSRTPA

SEQ ID NO: 28559 - protein, 15 aa, Homo Sapiens
TPARRGRSRSRTPAR

SEQ ID NO: 28560 - protein, 15 aa, Homo Sapiens
PARRGRSRSRTPARR

SEQ ID NO: 28561 - protein, 15 aa, Homo Sapiens
ARRGRSRSRTPARRG

SEQ ID NO: 28562 - protein, 15 aa, Homo Sapiens
RRGRSRSRTPARRGR

SEQ ID NO: 28563 - protein, 15 aa, Homo Sapiens
RGRSRSRTPARRGRS

SEQ ID NO: 28564 - protein, 15 aa, Homo Sapiens
GRSRSRTPARRGRSR

SEQ ID NO: 28565 - protein, 15 aa, Homo Sapiens
RSRSRTPARRGRSRS

SEQ ID NO: 28566 - protein, 15 aa, Homo Sapiens
SRSRTPARRGRSRSR

SEQ ID NO: 28567 - protein, 15 aa, Homo Sapiens
RSRTPARRGRSRSRT

SEQ ID NO: 28568 - protein, 15 aa, Homo Sapiens
SRTPARRGRSRSRTP

SEQ ID NO: 28569 - protein, 15 aa, Homo Sapiens
RTPARRGRSRSRTPA

SEQ ID NO: 28570 - protein, 15 aa, Homo Sapiens
TPARRGRSRSRTPAR

SEQ ID NO: 28571 - protein, 15 aa, Homo Sapiens
PARRGRSRSRTPARR

SEQ ID NO: 28572 - protein, 15 aa, Homo Sapiens
ARRGRSRSRTPARRS

SEQ ID NO: 28573 - protein, 15 aa, Homo Sapiens
RRGRSRSRTPARRSG

SEQ ID NO: 28574 - protein, 15 aa, Homo Sapiens
RGRSRSRTPARRSGR

SEQ ID NO: 28575 - protein, 15 aa, Homo Sapiens
GRSRSRTPARRSGRS

SEQ ID NO: 28576 - protein, 15 aa, Homo Sapiens
RSRSRTPARRSGRSR

SEQ ID NO: 28577 - protein, 15 aa, Homo Sapiens
SRSRTPARRSGRSRS

SEQ ID NO: 28578 - protein, 15 aa, Homo Sapiens
RSRTPARRSGRSRSR

SEQ ID NO: 28579 - protein, 15 aa, Homo Sapiens
SRTPARRSGRSRSRT

SEQ ID NO: 28580 - protein, 15 aa, Homo Sapiens
RTPARRSGRSRSRTP

SEQ ID NO: 28581 - protein, 15 aa, Homo Sapiens
TPARRSGRSRSRTPA

SEQ ID NO: 28582 - protein, 15 aa, Homo Sapiens
PARRSGRSRSRTPAR

SEQ ID NO: 28583 - protein, 15 aa, Homo Sapiens
ARRSGRSRSRTPARR

SEQ ID NO: 28584 - protein, 15 aa, Homo Sapiens
RRSGRSRSRTPARRG

SEQ ID NO: 28585 - protein, 15 aa, Homo Sapiens
RSGRSRSRTPARRGR

SEQ ID NO: 28586 - protein, 15 aa, Homo Sapiens
SGRSRSRTPARRGRS

SEQ ID NO: 28587 - protein, 15 aa, Homo Sapiens
GRSRSRTPARRGRSR

SEQ ID NO: 28588 - protein, 15 aa, Homo Sapiens
RSRSRTPARRGRSRS

SEQ ID NO: 28589 - protein, 15 aa, Homo Sapiens
SRSRTPARRGRSRSR

SEQ ID NO: 28590 - protein, 15 aa, Homo Sapiens
RSRTPARRGRSRSRT

SEQ ID NO: 28591 - protein, 15 aa, Homo Sapiens
SRTPARRGRSRSRTP

SEQ ID NO: 28592 - protein, 15 aa, Homo Sapiens
RTPARRGRSRSRTPR

SEQ ID NO: 28593 - protein, 15 aa, Homo Sapiens
TPARRGRSRSRTPRR

SEQ ID NO: 28594 - protein, 15 aa, Homo Sapiens
PARRGRSRSRTPRRG

SEQ ID NO: 28595 - protein, 15 aa, Homo Sapiens
ARRGRSRSRTPRRGR

SEQ ID NO: 28596 - protein, 15 aa, Homo Sapiens
RRGRSRSRTPRRGRS

SEQ ID NO: 28597 - protein, 15 aa, Homo Sapiens
RGRSRSRTPRRGRSR

SEQ ID NO: 28598 - protein, 15 aa, Homo Sapiens
GRSRSRTPRRGRSRS

SEQ ID NO: 28599 - protein, 15 aa, Homo Sapiens
RSRSRTPRRGRSRSR

SEQ ID NO: 28600 - protein, 15 aa, Homo Sapiens
SRSRTPRRGRSRSRS

SEQ ID NO: 28601 - protein, 15 aa, Homo Sapiens
RSRTPRRGRSRSRSL

SEQ ID NO: 28602 - protein, 15 aa, Homo Sapiens
SRTPRRGRSRSRSLV

SEQ ID NO: 28603 - protein, 15 aa, Homo Sapiens
RTPRRGRSRSRSLVR

SEQ ID NO: 28604 - protein, 15 aa, Homo Sapiens
TPRRGRSRSRSLVRR

SEQ ID NO: 28605 - protein, 15 aa, Homo Sapiens
PRRGRSRSRSLVRRG

SEQ ID NO: 28606 - protein, 15 aa, Homo Sapiens
RRGRSRSRSLVRRGR

SEQ ID NO: 28607 - protein, 15 aa, Homo Sapiens
RGRSRSRSLVRRGRS

SEQ ID NO: 28608 - protein, 15 aa, Homo Sapiens
GRSRSRSLVRRGRSH

SEQ ID NO: 28609 - protein, 15 aa, Homo Sapiens
RSRSRSLVRRGRSHS

SEQ ID NO: 28610 - protein, 15 aa, Homo Sapiens
SRSRSLVRRGRSHSR

SEQ ID NO: 28611 - protein, 15 aa, Homo Sapiens
RSRSLVRRGRSHSRT

SEQ ID NO: 28612 - protein, 15 aa, Homo Sapiens
SRSLVRRGRSHSRTP

SEQ ID NO: 28613 - protein, 15 aa, Homo Sapiens
RSLVRRGRSHSRTPQ

SEQ ID NO: 28614 - protein, 15 aa, Homo Sapiens
SLVRRGRSHSRTPQR

SEQ ID NO: 28615 - protein, 15 aa, Homo Sapiens
LVRRGRSHSRTPQRR

SEQ ID NO: 28616 - protein, 15 aa, Homo Sapiens
VRRGRSHSRTPQRRG

SEQ ID NO: 28617 - protein, 15 aa, Homo Sapiens
RRGRSHSRTPQRRGR

SEQ ID NO: 28618 - protein, 15 aa, Homo Sapiens
RGRSHSRTPQRRGRS

SEQ ID NO: 28619 - protein, 15 aa, Homo Sapiens
GRSHSRTPQRRGRSG

SEQ ID NO: 28620 - protein, 15 aa, Homo Sapiens
RSHSRTPQRRGRSGS

SEQ ID NO: 28621 - protein, 15 aa, Homo Sapiens
SHSRTPQRRGRSGSS

SEQ ID NO: 28622 - protein, 15 aa, Homo Sapiens
HSRTPQRRGRSGSSS

SEQ ID NO: 28623 - protein, 15 aa, Homo Sapiens
SRTPQRRGRSGSSSE

SEQ ID NO: 28624 - protein, 15 aa, Homo Sapiens
RTPQRRGRSGSSSER

SEQ ID NO: 28625 - protein, 15 aa, Homo Sapiens
TPQRRGRSGSSSERK

SEQ ID NO: 28626 - protein, 15 aa, Homo Sapiens
PQRRGRSGSSSERKN

SEQ ID NO: 28627 - protein, 15 aa, Homo Sapiens
QRRGRSGSSSERKNK

SEQ ID NO: 28628 - protein, 15 aa, Homo Sapiens
RRGRSGSSSERKNKS

SEQ ID NO: 28629 - protein, 15 aa, Homo Sapiens
RGRSGSSSERKNKSR

SEQ ID NO: 28630 - protein, 15 aa, Homo Sapiens
GRSGSSSERKNKSRT

SEQ ID NO: 28631 - protein, 15 aa, Homo Sapiens
RSGSSSERKNKSRTS

SEQ ID NO: 28632 - protein, 15 aa, Homo Sapiens
SGSSSERKNKSRTSQ

SEQ ID NO: 28633 - protein, 15 aa, Homo Sapiens
GSSSERKNKSRTSQR

SEQ ID NO: 28634 - protein, 15 aa, Homo Sapiens
SSSERKNKSRTSQRR

SEQ ID NO: 28635 - protein, 15 aa, Homo Sapiens
SSERKNKSRTSQRRS

SEQ ID NO: 28636 - protein, 15 aa, Homo Sapiens
SERKNKSRTSQRRSR

SEQ ID NO: 28637 - protein, 15 aa, Homo Sapiens
ERKNKSRTSQRRSRS

SEQ ID NO: 28638 - protein, 15 aa, Homo Sapiens
RKNKSRTSQRRSRSN

SEQ ID NO: 28639 - protein, 15 aa, Homo Sapiens
KNKSRTSQRRSRSNS

SEQ ID NO: 28640 - protein, 15 aa, Homo Sapiens
NKSRTSQRRSRSNSS

SEQ ID NO: 28641 - protein, 15 aa, Homo Sapiens
KSRTSQRRSRSNSSP

SEQ ID NO: 28642 - protein, 15 aa, Homo Sapiens
SRTSQRRSRSNSSPE

SEQ ID NO: 28643 - protein, 15 aa, Homo Sapiens
RTSQRRSRSNSSPEM

SEQ ID NO: 28644 - protein, 15 aa, Homo Sapiens
TSQRRSRSNSSPEMK

SEQ ID NO: 28645 - protein, 15 aa, Homo Sapiens
SQRRSRSNSSPEMKK

SEQ ID NO: 28646 - protein, 15 aa, Homo Sapiens
QRRSRSNSSPEMKKS

SEQ ID NO: 28647 - protein, 15 aa, Homo Sapiens
RRSRSNSSPEMKKSR

SEQ ID NO: 28648 - protein, 15 aa, Homo Sapiens
RSRSNSSPEMKKSRI

SEQ ID NO: 28649 - protein, 15 aa, Homo Sapiens
SRSNSSPEMKKSRIS

SEQ ID NO: 28650 - protein, 15 aa, Homo Sapiens
RSNSSPEMKKSRISS

SEQ ID NO: 28651 - protein, 15 aa, Homo Sapiens
SNSSPEMKKSRISSR

SEQ ID NO: 28652 - protein, 15 aa, Homo Sapiens
NSSPEMKKSRISSRR

SEQ ID NO: 28653 - protein, 15 aa, Homo Sapiens
SSPEMKKSRISSRRS

SEQ ID NO: 28654 - protein, 15 aa, Homo Sapiens
SPEMKKSRISSRRSR

SEQ ID NO: 28655 - protein, 15 aa, Homo Sapiens
PEMKKSRISSRRSRS

SEQ ID NO: 28656 - protein, 15 aa, Homo Sapiens
EMKKSRISSRRSRSL

SEQ ID NO: 28657 - protein, 15 aa, Homo Sapiens
MKKSRISSRRSRSLS

SEQ ID NO: 28658 - protein, 15 aa, Homo Sapiens
KKSRISSRRSRSLSS

SEQ ID NO: 28659 - protein, 15 aa, Homo Sapiens
KSRISSRRSRSLSSP

SEQ ID NO: 28660 - protein, 15 aa, Homo Sapiens
SRISSRRSRSLSSPR

SEQ ID NO: 28661 - protein, 15 aa, Homo Sapiens
RISSRRSRSLSSPRS

SEQ ID NO: 28662 - protein, 15 aa, Homo Sapiens
ISSRRSRSLSSPRSK

SEQ ID NO: 28663 - protein, 15 aa, Homo Sapiens
SSRRSRSLSSPRSKA

SEQ ID NO: 28664 - protein, 15 aa, Homo Sapiens
SRRSRSLSSPRSKAK

SEQ ID NO: 28665 - protein, 15 aa, Homo Sapiens
RRSRSLSSPRSKAKS

SEQ ID NO: 28666 - protein, 15 aa, Homo Sapiens
RSRSLSSPRSKAKSR

SEQ ID NO: 28667 - protein, 15 aa, Homo Sapiens
SRSLSSPRSKAKSRL

SEQ ID NO: 28668 - protein, 15 aa, Homo Sapiens
RSLSSPRSKAKSRLS

SEQ ID NO: 28669 - protein, 15 aa, Homo Sapiens
SLSSPRSKAKSRLSL

SEQ ID NO: 28670 - protein, 15 aa, Homo Sapiens
LSSPRSKAKSRLSLR

SEQ ID NO: 28671 - protein, 15 aa, Homo Sapiens
SSPRSKAKSRLSLRR

SEQ ID NO: 28672 - protein, 15 aa, Homo Sapiens
SPRSKAKSRLSLRRS

SEQ ID NO: 28673 - protein, 15 aa, Homo Sapiens
PRSKAKSRLSLRRSL

SEQ ID NO: 28674 - protein, 15 aa, Homo Sapiens
RSKAKSRLSLRRSLS

SEQ ID NO: 28675 - protein, 15 aa, Homo Sapiens
SKAKSRLSLRRSLSG

SEQ ID NO: 28676 - protein, 15 aa, Homo Sapiens
KAKSRLSLRRSLSGS

SEQ ID NO: 28677 - protein, 15 aa, Homo Sapiens
AKSRLSLRRSLSGSS

SEQ ID NO: 28678 - protein, 15 aa, Homo Sapiens
KSRLSLRRSLSGSSP

SEQ ID NO: 28679 - protein, 15 aa, Homo Sapiens
SRLSLRRSLSGSSPC

SEQ ID NO: 28680 - protein, 15 aa, Homo Sapiens
RLSLRRSLSGSSPCP

SEQ ID NO: 28681 - protein, 15 aa, Homo Sapiens
LSLRRSLSGSSPCPK

SEQ ID NO: 28682 - protein, 15 aa, Homo Sapiens
SLRRSLSGSSPCPKQ

SEQ ID NO: 28683 - protein, 15 aa, Homo Sapiens
LRRSLSGSSPCPKQK

SEQ ID NO: 28684 - protein, 15 aa, Homo Sapiens
RRSLSGSSPCPKQKS

SEQ ID NO: 28685 - protein, 15 aa, Homo Sapiens
RSLSGSSPCPKQKSQ

SEQ ID NO: 28686 - protein, 15 aa, Homo Sapiens
SLSGSSPCPKQKSQT

SEQ ID NO: 28687 - protein, 15 aa, Homo Sapiens
LSGSSPCPKQKSQTP

SEQ ID NO: 28688 - protein, 15 aa, Homo Sapiens
SGSSPCPKQKSQTPP

SEQ ID NO: 28689 - protein, 15 aa, Homo Sapiens
GSSPCPKQKSQTPPR

SEQ ID NO: 28690 - protein, 15 aa, Homo Sapiens
SSPCPKQKSQTPPRR

SEQ ID NO: 28691 - protein, 15 aa, Homo Sapiens
SPCPKQKSQTPPRRS

SEQ ID NO: 28692 - protein, 15 aa, Homo Sapiens
PCPKQKSQTPPRRSR

SEQ ID NO: 28693 - protein, 15 aa, Homo Sapiens
CPKQKSQTPPRRSRS

SEQ ID NO: 28694 - protein, 15 aa, Homo Sapiens
PKQKSQTPPRRSRSG

SEQ ID NO: 28695 - protein, 15 aa, Homo Sapiens
KQKSQTPPRRSRSGS

SEQ ID NO: 28696 - protein, 15 aa, Homo Sapiens
QKSQTPPRRSRSGSS

SEQ ID NO: 28697 - protein, 15 aa, Homo Sapiens
KSQTPPRRSRSGSSQ

SEQ ID NO: 28698 - protein, 15 aa, Homo Sapiens
SQTPPRRSRSGSSQP

SEQ ID NO: 28699 - protein, 15 aa, Homo Sapiens
QTPPRRSRSGSSQPK

SEQ ID NO: 28700 - protein, 15 aa, Homo Sapiens
TPPRRSRSGSSQPKA

SEQ ID NO: 28701 - protein, 15 aa, Homo Sapiens
PPRRSRSGSSQPKAK

SEQ ID NO: 28702 - protein, 15 aa, Homo Sapiens
PRRSRSGSSQPKAKS

SEQ ID NO: 28703 - protein, 15 aa, Homo Sapiens
RRSRSGSSQPKAKSR

SEQ ID NO: 28704 - protein, 15 aa, Homo Sapiens
RSRSGSSQPKAKSRT

SEQ ID NO: 28705 - protein, 15 aa, Homo Sapiens
SRSGSSQPKAKSRTP

SEQ ID NO: 28706 - protein, 15 aa, Homo Sapiens
RSGSSQPKAKSRTPP

SEQ ID NO: 28707 - protein, 15 aa, Homo Sapiens
SGSSQPKAKSRTPPR

SEQ ID NO: 28708 - protein, 15 aa, Homo Sapiens
GSSQPKAKSRTPPRR

SEQ ID NO: 28709 - protein, 15 aa, Homo Sapiens
SSQPKAKSRTPPRRS

SEQ ID NO: 28710 - protein, 15 aa, Homo Sapiens
SQPKAKSRTPPRRSR

SEQ ID NO: 28711 - protein, 15 aa, Homo Sapiens
QPKAKSRTPPRRSRS

SEQ ID NO: 28712 - protein, 15 aa, Homo Sapiens
PKAKSRTPPRRSRSS

SEQ ID NO: 28713 - protein, 15 aa, Homo Sapiens
KAKSRTPPRRSRSSS

SEQ ID NO: 28714 - protein, 15 aa, Homo Sapiens
AKSRTPPRRSRSSSS

SEQ ID NO: 28715 - protein, 15 aa, Homo Sapiens
KSRTPPRRSRSSSSP

SEQ ID NO: 28716 - protein, 15 aa, Homo Sapiens
SRTPPRRSRSSSSPP

SEQ ID NO: 28717 - protein, 15 aa, Homo Sapiens
RTPPRRSRSSSSPPP

SEQ ID NO: 28718 - protein, 15 aa, Homo Sapiens
TPPRRSRSSSSPPPK

SEQ ID NO: 28719 - protein, 15 aa, Homo Sapiens
PPRRSRSSSSPPPKQ

SEQ ID NO: 28720 - protein, 15 aa, Homo Sapiens
PRRSRSSSSPPPKQK

SEQ ID NO: 28721 - protein, 15 aa, Homo Sapiens
RRSRSSSSPPPKQKS

SEQ ID NO: 28722 - protein, 15 aa, Homo Sapiens
RSRSSSSPPPKQKSK

SEQ ID NO: 28723 - protein, 15 aa, Homo Sapiens
SRSSSSPPPKQKSKT

SEQ ID NO: 28724 - protein, 15 aa, Homo Sapiens
RSSSSPPPKQKSKTP

SEQ ID NO: 28725 - protein, 15 aa, Homo Sapiens
SSSSPPPKQKSKTPS

SEQ ID NO: 28726 - protein, 15 aa, Homo Sapiens
SSSPPPKQKSKTPSR

SEQ ID NO: 28727 - protein, 15 aa, Homo Sapiens
SSPPPKQKSKTPSRQ

SEQ ID NO: 28728 - protein, 15 aa, Homo Sapiens
SPPPKQKSKTPSRQS

SEQ ID NO: 28729 - protein, 15 aa, Homo Sapiens
PPPKQKSKTPSRQSH

SEQ ID NO: 28730 - protein, 15 aa, Homo Sapiens
PPKQKSKTPSRQSHS

SEQ ID NO: 28731 - protein, 15 aa, Homo Sapiens
PKQKSKTPSRQSHSS

SEQ ID NO: 28732 - protein, 15 aa, Homo Sapiens
KQKSKTPSRQSHSSS

SEQ ID NO: 28733 - protein, 15 aa, Homo Sapiens
QKSKTPSRQSHSSSS

SEQ ID NO: 28734 - protein, 15 aa, Homo Sapiens
KSKTPSRQSHSSSSP

SEQ ID NO: 28735 - protein, 15 aa, Homo Sapiens
SKTPSRQSHSSSSPH

SEQ ID NO: 28736 - protein, 15 aa, Homo Sapiens
KTPSRQSHSSSSPHP

SEQ ID NO: 28737 - protein, 15 aa, Homo Sapiens
TPSRQSHSSSSPHPK

SEQ ID NO: 28738 - protein, 15 aa, Homo Sapiens
PSRQSHSSSSPHPKV

SEQ ID NO: 28739 - protein, 15 aa, Homo Sapiens
SRQSHSSSSPHPKVK

SEQ ID NO: 28740 - protein, 15 aa, Homo Sapiens
RQSHSSSSPHPKVKS

SEQ ID NO: 28741 - protein, 15 aa, Homo Sapiens
QSHSSSSPHPKVKSG

SEQ ID NO: 28742 - protein, 15 aa, Homo Sapiens
SHSSSSPHPKVKSGT

SEQ ID NO: 28743 - protein, 15 aa, Homo Sapiens
HSSSSPHPKVKSGTP

SEQ ID NO: 28744 - protein, 15 aa, Homo Sapiens
SSSSPHPKVKSGTPP

SEQ ID NO: 28745 - protein, 15 aa, Homo Sapiens
SSSPHPKVKSGTPPR

SEQ ID NO: 28746 - protein, 15 aa, Homo Sapiens
SSPHPKVKSGTPPRQ

SEQ ID NO: 28747 - protein, 15 aa, Homo Sapiens
SPHPKVKSGTPPRQG

SEQ ID NO: 28748 - protein, 15 aa, Homo Sapiens
PHPKVKSGTPPRQGS

SEQ ID NO: 28749 - protein, 15 aa, Homo Sapiens
HPKVKSGTPPRQGSI

SEQ ID NO: 28750 - protein, 15 aa, Homo Sapiens
PKVKSGTPPRQGSIT

SEQ ID NO: 28751 - protein, 15 aa, Homo Sapiens
KVKSGTPPRQGSITS

SEQ ID NO: 28752 - protein, 15 aa, Homo Sapiens
VKSGTPPRQGSITSP

SEQ ID NO: 28753 - protein, 15 aa, Homo Sapiens
KSGTPPRQGSITSPQ

SEQ ID NO: 28754 - protein, 15 aa, Homo Sapiens
SGTPPRQGSITSPQA

SEQ ID NO: 28755 - protein, 15 aa, Homo Sapiens
GTPPRQGSITSPQAN

SEQ ID NO: 28756 - protein, 15 aa, Homo Sapiens
TPPRQGSITSPQANE

SEQ ID NO: 28757 - protein, 15 aa, Homo Sapiens
PPRQGSITSPQANEQ

SEQ ID NO: 28758 - protein, 15 aa, Homo Sapiens
PRQGSITSPQANEQS

SEQ ID NO: 28759 - protein, 15 aa, Homo Sapiens
RQGSITSPQANEQSV

SEQ ID NO: 28760 - protein, 15 aa, Homo Sapiens
QGSITSPQANEQSVT

SEQ ID NO: 28761 - protein, 15 aa, Homo Sapiens
GSITSPQANEQSVTP

SEQ ID NO: 28762 - protein, 15 aa, Homo Sapiens
SITSPQANEQSVTPQ

SEQ ID NO: 28763 - protein, 15 aa, Homo Sapiens
ITSPQANEQSVTPQR

SEQ ID NO: 28764 - protein, 15 aa, Homo Sapiens
TSPQANEQSVTPQRR

SEQ ID NO: 28765 - protein, 15 aa, Homo Sapiens
SPQANEQSVTPQRRS

SEQ ID NO: 28766 - protein, 15 aa, Homo Sapiens
PQANEQSVTPQRRSC

SEQ ID NO: 28767 - protein, 15 aa, Homo Sapiens
QANEQSVTPQRRSCF

SEQ ID NO: 28768 - protein, 15 aa, Homo Sapiens
ANEQSVTPQRRSCFE

SEQ ID NO: 28769 - protein, 15 aa, Homo Sapiens
NEQSVTPQRRSCFES

SEQ ID NO: 28770 - protein, 15 aa, Homo Sapiens
EQSVTPQRRSCFESS

SEQ ID NO: 28771 - protein, 15 aa, Homo Sapiens
QSVTPQRRSCFESSP

SEQ ID NO: 28772 - protein, 15 aa, Homo Sapiens
SVTPQRRSCFESSPD

SEQ ID NO: 28773 - protein, 15 aa, Homo Sapiens
VTPQRRSCFESSPDP

SEQ ID NO: 28774 - protein, 15 aa, Homo Sapiens
TPQRRSCFESSPDPE

SEQ ID NO: 28775 - protein, 15 aa, Homo Sapiens
PQRRSCFESSPDPEL

SEQ ID NO: 28776 - protein, 15 aa, Homo Sapiens
QRRSCFESSPDPELK

SEQ ID NO: 28777 - protein, 15 aa, Homo Sapiens
RRSCFESSPDPELKS

SEQ ID NO: 28778 - protein, 15 aa, Homo Sapiens
RSCFESSPDPELKSR

SEQ ID NO: 28779 - protein, 15 aa, Homo Sapiens
SCFESSPDPELKSRT

SEQ ID NO: 28780 - protein, 15 aa, Homo Sapiens
CFESSPDPELKSRTP

SEQ ID NO: 28781 - protein, 15 aa, Homo Sapiens
FESSPDPELKSRTPS

SEQ ID NO: 28782 - protein, 15 aa, Homo Sapiens
ESSPDPELKSRTPSR

SEQ ID NO: 28783 - protein, 15 aa, Homo Sapiens
SSPDPELKSRTPSRH

SEQ ID NO: 28784 - protein, 15 aa, Homo Sapiens
SPDPELKSRTPSRHS

SEQ ID NO: 28785 - protein, 15 aa, Homo Sapiens
PDPELKSRTPSRHSC

SEQ ID NO: 28786 - protein, 15 aa, Homo Sapiens
DPELKSRTPSRHSCS

SEQ ID NO: 28787 - protein, 15 aa, Homo Sapiens
PELKSRTPSRHSCSG

SEQ ID NO: 28788 - protein, 15 aa, Homo Sapiens
ELKSRTPSRHSCSGS

SEQ ID NO: 28789 - protein, 15 aa, Homo Sapiens
LKSRTPSRHSCSGSS

SEQ ID NO: 28790 - protein, 15 aa, Homo Sapiens
KSRTPSRHSCSGSSP

SEQ ID NO: 28791 - protein, 15 aa, Homo Sapiens
SRTPSRHSCSGSSPP

SEQ ID NO: 28792 - protein, 15 aa, Homo Sapiens
RTPSRHSCSGSSPPR

SEQ ID NO: 28793 - protein, 15 aa, Homo Sapiens
TPSRHSCSGSSPPRV

SEQ ID NO: 28794 - protein, 15 aa, Homo Sapiens
PSRHSCSGSSPPRVK

SEQ ID NO: 28795 - protein, 15 aa, Homo Sapiens
SRHSCSGSSPPRVKS

SEQ ID NO: 28796 - protein, 15 aa, Homo Sapiens
RHSCSGSSPPRVKSS

SEQ ID NO: 28797 - protein, 15 aa, Homo Sapiens
HSCSGSSPPRVKSST

SEQ ID NO: 28798 - protein, 15 aa, Homo Sapiens
SCSGSSPPRVKSSTP

SEQ ID NO: 28799 - protein, 15 aa, Homo Sapiens
CSGSSPPRVKSSTPP

SEQ ID NO: 28800 - protein, 15 aa, Homo Sapiens
SGSSPPRVKSSTPPR

SEQ ID NO: 28801 - protein, 15 aa, Homo Sapiens
GSSPPRVKSSTPPRQ

SEQ ID NO: 28802 - protein, 15 aa, Homo Sapiens
SSPPRVKSSTPPRQS

SEQ ID NO: 28803 - protein, 15 aa, Homo Sapiens
SPPRVKSSTPPRQSP

SEQ ID NO: 28804 - protein, 15 aa, Homo Sapiens
PPRVKSSTPPRQSPS

SEQ ID NO: 28805 - protein, 15 aa, Homo Sapiens
PRVKSSTPPRQSPSR

SEQ ID NO: 28806 - protein, 15 aa, Homo Sapiens
RVKSSTPPRQSPSRS

SEQ ID NO: 28807 - protein, 15 aa, Homo Sapiens
VKSSTPPRQSPSRSS

SEQ ID NO: 28808 - protein, 15 aa, Homo Sapiens
KSSTPPRQSPSRSSS

SEQ ID NO: 28809 - protein, 15 aa, Homo Sapiens
SSTPPRQSPSRSSSP

SEQ ID NO: 28810 - protein, 15 aa, Homo Sapiens
STPPRQSPSRSSSPQ

SEQ ID NO: 28811 - protein, 15 aa, Homo Sapiens
TPPRQSPSRSSSPQP

SEQ ID NO: 28812 - protein, 15 aa, Homo Sapiens
PPRQSPSRSSSPQPK

SEQ ID NO: 28813 - protein, 15 aa, Homo Sapiens
PRQSPSRSSSPQPKV

SEQ ID NO: 28814 - protein, 15 aa, Homo Sapiens
RQSPSRSSSPQPKVK

SEQ ID NO: 28815 - protein, 15 aa, Homo Sapiens
QSPSRSSSPQPKVKA

SEQ ID NO: 28816 - protein, 15 aa, Homo Sapiens
SPSRSSSPQPKVKAI

SEQ ID NO: 28817 - protein, 15 aa, Homo Sapiens
PSRSSSPQPKVKAII

SEQ ID NO: 28818 - protein, 15 aa, Homo Sapiens
SRSSSPQPKVKAIIS

SEQ ID NO: 28819 - protein, 15 aa, Homo Sapiens
RSSSPQPKVKAIISP

SEQ ID NO: 28820 - protein, 15 aa, Homo Sapiens
SSSPQPKVKAIISPR

SEQ ID NO: 28821 - protein, 15 aa, Homo Sapiens
SSPQPKVKAIISPRQ

SEQ ID NO: 28822 - protein, 15 aa, Homo Sapiens
SPQPKVKAIISPRQR

SEQ ID NO: 28823 - protein, 15 aa, Homo Sapiens
PQPKVKAIISPRQRS

SEQ ID NO: 28824 - protein, 15 aa, Homo Sapiens
QPKVKAIISPRQRSH

SEQ ID NO: 28825 - protein, 15 aa, Homo Sapiens
PKVKAIISPRQRSHS

SEQ ID NO: 28826 - protein, 15 aa, Homo Sapiens
KVKAIISPRQRSHSG

SEQ ID NO: 28827 - protein, 15 aa, Homo Sapiens
VKAIISPRQRSHSGS

SEQ ID NO: 28828 - protein, 15 aa, Homo Sapiens
KAIISPRQRSHSGSS

SEQ ID NO: 28829 - protein, 15 aa, Homo Sapiens
AIISPRQRSHSGSSS

SEQ ID NO: 28830 - protein, 15 aa, Homo Sapiens
IISPRQRSHSGSSSP

SEQ ID NO: 28831 - protein, 15 aa, Homo Sapiens
ISPRQRSHSGSSSPS

SEQ ID NO: 28832 - protein, 15 aa, Homo Sapiens
SPRQRSHSGSSSPSP

SEQ ID NO: 28833 - protein, 15 aa, Homo Sapiens
PRQRSHSGSSSPSPS

SEQ ID NO: 28834 - protein, 15 aa, Homo Sapiens
RQRSHSGSSSPSPSR

SEQ ID NO: 28835 - protein, 15 aa, Homo Sapiens
QRSHSGSSSPSPSRV

SEQ ID NO: 28836 - protein, 15 aa, Homo Sapiens
RSHSGSSSPSPSRVT

SEQ ID NO: 28837 - protein, 15 aa, Homo Sapiens
SHSGSSSPSPSRVTS

SEQ ID NO: 28838 - protein, 15 aa, Homo Sapiens
HSGSSSPSPSRVTSR

SEQ ID NO: 28839 - protein, 15 aa, Homo Sapiens
SGSSSPSPSRVTSRT

SEQ ID NO: 28840 - protein, 15 aa, Homo Sapiens
GSSSPSPSRVTSRTT

SEQ ID NO: 28841 - protein, 15 aa, Homo Sapiens
SSSPSPSRVTSRTTP

SEQ ID NO: 28842 - protein, 15 aa, Homo Sapiens
SSPSPSRVTSRTTPR

SEQ ID NO: 28843 - protein, 15 aa, Homo Sapiens
SPSPSRVTSRTTPRR

SEQ ID NO: 28844 - protein, 15 aa, Homo Sapiens
PSPSRVTSRTTPRRS

SEQ ID NO: 28845 - protein, 15 aa, Homo Sapiens
SPSRVTSRTTPRRSR

SEQ ID NO: 28846 - protein, 15 aa, Homo Sapiens
PSRVTSRTTPRRSRS

SEQ ID NO: 28847 - protein, 15 aa, Homo Sapiens
SRVTSRTTPRRSRSV

SEQ ID NO: 28848 - protein, 15 aa, Homo Sapiens
RVTSRTTPRRSRSVS

SEQ ID NO: 28849 - protein, 15 aa, Homo Sapiens
VTSRTTPRRSRSVSP

SEQ ID NO: 28850 - protein, 15 aa, Homo Sapiens
TSRTTPRRSRSVSPC

SEQ ID NO: 28851 - protein, 15 aa, Homo Sapiens
SRTTPRRSRSVSPCS

SEQ ID NO: 28852 - protein, 15 aa, Homo Sapiens
RTTPRRSRSVSPCSN

SEQ ID NO: 28853 - protein, 15 aa, Homo Sapiens
TTPRRSRSVSPCSNV

SEQ ID NO: 28854 - protein, 15 aa, Homo Sapiens
TPRRSRSVSPCSNVE

SEQ ID NO: 28855 - protein, 15 aa, Homo Sapiens
PRRSRSVSPCSNVES

SEQ ID NO: 28856 - protein, 15 aa, Homo Sapiens
RRSRSVSPCSNVESR

SEQ ID NO: 28857 - protein, 15 aa, Homo Sapiens
RSRSVSPCSNVESRL

SEQ ID NO: 28858 - protein, 15 aa, Homo Sapiens
SRSVSPCSNVESRLL

SEQ ID NO: 28859 - protein, 15 aa, Homo Sapiens
RSVSPCSNVESRLLP

SEQ ID NO: 28860 - protein, 15 aa, Homo Sapiens
SVSPCSNVESRLLPR

SEQ ID NO: 28861 - protein, 15 aa, Homo Sapiens
VSPCSNVESRLLPRY

SEQ ID NO: 28862 - protein, 15 aa, Homo Sapiens
SPCSNVESRLLPRYS

SEQ ID NO: 28863 - protein, 15 aa, Homo Sapiens
PCSNVESRLLPRYSH

SEQ ID NO: 28864 - protein, 15 aa, Homo Sapiens
CSNVESRLLPRYSHS

SEQ ID NO: 28865 - protein, 15 aa, Homo Sapiens
SNVESRLLPRYSHSG

SEQ ID NO: 28866 - protein, 15 aa, Homo Sapiens
NVESRLLPRYSHSGS

SEQ ID NO: 28867 - protein, 15 aa, Homo Sapiens
VESRLLPRYSHSGSS

SEQ ID NO: 28868 - protein, 15 aa, Homo Sapiens
ESRLLPRYSHSGSSS

SEQ ID NO: 28869 - protein, 15 aa, Homo Sapiens
SRLLPRYSHSGSSSP

SEQ ID NO: 28870 - protein, 15 aa, Homo Sapiens
RLLPRYSHSGSSSPD

SEQ ID NO: 28871 - protein, 15 aa, Homo Sapiens
LLPRYSHSGSSSPDT

SEQ ID NO: 28872 - protein, 15 aa, Homo Sapiens
LPRYSHSGSSSPDTK

SEQ ID NO: 28873 - protein, 15 aa, Homo Sapiens
PRYSHSGSSSPDTKV

SEQ ID NO: 28874 - protein, 15 aa, Homo Sapiens
RYSHSGSSSPDTKVK

SEQ ID NO: 28875 - protein, 15 aa, Homo Sapiens
YSHSGSSSPDTKVKP

SEQ ID NO: 28876 - protein, 15 aa, Homo Sapiens
SHSGSSSPDTKVKPE

SEQ ID NO: 28877 - protein, 15 aa, Homo Sapiens
HSGSSSPDTKVKPET

SEQ ID NO: 28878 - protein, 15 aa, Homo Sapiens
SGSSSPDTKVKPETP

SEQ ID NO: 28879 - protein, 15 aa, Homo Sapiens
GSSSPDTKVKPETPP

SEQ ID NO: 28880 - protein, 15 aa, Homo Sapiens
SSSPDTKVKPETPPR

SEQ ID NO: 28881 - protein, 15 aa, Homo Sapiens
SSPDTKVKPETPPRQ

SEQ ID NO: 28882 - protein, 15 aa, Homo Sapiens
SPDTKVKPETPPRQS

SEQ ID NO: 28883 - protein, 15 aa, Homo Sapiens
PDTKVKPETPPRQSH

SEQ ID NO: 28884 - protein, 15 aa, Homo Sapiens
DTKVKPETPPRQSHS

SEQ ID NO: 28885 - protein, 15 aa, Homo Sapiens
TKVKPETPPRQSHSG

SEQ ID NO: 28886 - protein, 15 aa, Homo Sapiens
KVKPETPPRQSHSGS

SEQ ID NO: 28887 - protein, 15 aa, Homo Sapiens
VKPETPPRQSHSGSI

SEQ ID NO: 28888 - protein, 15 aa, Homo Sapiens
KPETPPRQSHSGSIS

SEQ ID NO: 28889 - protein, 15 aa, Homo Sapiens
PETPPRQSHSGSISP

SEQ ID NO: 28890 - protein, 15 aa, Homo Sapiens
ETPPRQSHSGSISPY

SEQ ID NO: 28891 - protein, 15 aa, Homo Sapiens
TPPRQSHSGSISPYP

SEQ ID NO: 28892 - protein, 15 aa, Homo Sapiens
PPRQSHSGSISPYPK

SEQ ID NO: 28893 - protein, 15 aa, Homo Sapiens
PRQSHSGSISPYPKV

SEQ ID NO: 28894 - protein, 15 aa, Homo Sapiens
RQSHSGSISPYPKVK

SEQ ID NO: 28895 - protein, 15 aa, Homo Sapiens
QSHSGSISPYPKVKA

SEQ ID NO: 28896 - protein, 15 aa, Homo Sapiens
SHSGSISPYPKVKAQ

SEQ ID NO: 28897 - protein, 15 aa, Homo Sapiens
HSGSISPYPKVKAQT

SEQ ID NO: 28898 - protein, 15 aa, Homo Sapiens
SGSISPYPKVKAQTP

SEQ ID NO: 28899 - protein, 15 aa, Homo Sapiens
GSISPYPKVKAQTPP

SEQ ID NO: 28900 - protein, 15 aa, Homo Sapiens
SISPYPKVKAQTPPG

SEQ ID NO: 28901 - protein, 15 aa, Homo Sapiens
ISPYPKVKAQTPPGP

SEQ ID NO: 28902 - protein, 15 aa, Homo Sapiens
SPYPKVKAQTPPGPS

SEQ ID NO: 28903 - protein, 15 aa, Homo Sapiens
PYPKVKAQTPPGPSL

SEQ ID NO: 28904 - protein, 15 aa, Homo Sapiens
YPKVKAQTPPGPSLS

SEQ ID NO: 28905 - protein, 15 aa, Homo Sapiens
PKVKAQTPPGPSLSG

SEQ ID NO: 28906 - protein, 15 aa, Homo Sapiens
KVKAQTPPGPSLSGS

SEQ ID NO: 28907 - protein, 15 aa, Homo Sapiens
VKAQTPPGPSLSGSK

SEQ ID NO: 28908 - protein, 15 aa, Homo Sapiens
KAQTPPGPSLSGSKS

SEQ ID NO: 28909 - protein, 15 aa, Homo Sapiens
AQTPPGPSLSGSKSP

SEQ ID NO: 28910 - protein, 15 aa, Homo Sapiens
QTPPGPSLSGSKSPC

SEQ ID NO: 28911 - protein, 15 aa, Homo Sapiens
TPPGPSLSGSKSPCP

SEQ ID NO: 28912 - protein, 15 aa, Homo Sapiens
PPGPSLSGSKSPCPQ

SEQ ID NO: 28913 - protein, 15 aa, Homo Sapiens
PGPSLSGSKSPCPQE

SEQ ID NO: 28914 - protein, 15 aa, Homo Sapiens
GPSLSGSKSPCPQEK

SEQ ID NO: 28915 - protein, 15 aa, Homo Sapiens
PSLSGSKSPCPQEKS

SEQ ID NO: 28916 - protein, 15 aa, Homo Sapiens
SLSGSKSPCPQEKSK

SEQ ID NO: 28917 - protein, 15 aa, Homo Sapiens
LSGSKSPCPQEKSKD

SEQ ID NO: 28918 - protein, 15 aa, Homo Sapiens
SGSKSPCPQEKSKDS

SEQ ID NO: 28919 - protein, 15 aa, Homo Sapiens
GSKSPCPQEKSKDSL

SEQ ID NO: 28920 - protein, 15 aa, Homo Sapiens
SKSPCPQEKSKDSLV

SEQ ID NO: 28921 - protein, 15 aa, Homo Sapiens
KSPCPQEKSKDSLVQ

SEQ ID NO: 28922 - protein, 15 aa, Homo Sapiens
SPCPQEKSKDSLVQS

SEQ ID NO: 28923 - protein, 15 aa, Homo Sapiens
PCPQEKSKDSLVQSC

SEQ ID NO: 28924 - protein, 15 aa, Homo Sapiens
CPQEKSKDSLVQSCP

SEQ ID NO: 28925 - protein, 15 aa, Homo Sapiens
PQEKSKDSLVQSCPG

SEQ ID NO: 28926 - protein, 15 aa, Homo Sapiens
QEKSKDSLVQSCPGS

SEQ ID NO: 28927 - protein, 15 aa, Homo Sapiens
EKSKDSLVQSCPGSL

SEQ ID NO: 28928 - protein, 15 aa, Homo Sapiens
KSKDSLVQSCPGSLS

SEQ ID NO: 28929 - protein, 15 aa, Homo Sapiens
SKDSLVQSCPGSLSL

SEQ ID NO: 28930 - protein, 15 aa, Homo Sapiens
KDSLVQSCPGSLSLC

SEQ ID NO: 28931 - protein, 15 aa, Homo Sapiens
DSLVQSCPGSLSLCA

SEQ ID NO: 28932 - protein, 15 aa, Homo Sapiens
SLVQSCPGSLSLCAG

SEQ ID NO: 28933 - protein, 15 aa, Homo Sapiens
LVQSCPGSLSLCAGV

SEQ ID NO: 28934 - protein, 15 aa, Homo Sapiens
VQSCPGSLSLCAGVK

SEQ ID NO: 28935 - protein, 15 aa, Homo Sapiens
QSCPGSLSLCAGVKS

SEQ ID NO: 28936 - protein, 15 aa, Homo Sapiens
SCPGSLSLCAGVKSS

SEQ ID NO: 28937 - protein, 15 aa, Homo Sapiens
CPGSLSLCAGVKSST

SEQ ID NO: 28938 - protein, 15 aa, Homo Sapiens
PGSLSLCAGVKSSTP

SEQ ID NO: 28939 - protein, 15 aa, Homo Sapiens
GSLSLCAGVKSSTPP

SEQ ID NO: 28940 - protein, 15 aa, Homo Sapiens
SLSLCAGVKSSTPPG

SEQ ID NO: 28941 - protein, 15 aa, Homo Sapiens
LSLCAGVKSSTPPGE

SEQ ID NO: 28942 - protein, 15 aa, Homo Sapiens
SLCAGVKSSTPPGES

SEQ ID NO: 28943 - protein, 15 aa, Homo Sapiens
LCAGVKSSTPPGESY

SEQ ID NO: 28944 - protein, 15 aa, Homo Sapiens
CAGVKSSTPPGESYF

SEQ ID NO: 28945 - protein, 15 aa, Homo Sapiens
AGVKSSTPPGESYFG

SEQ ID NO: 28946 - protein, 15 aa, Homo Sapiens
GVKSSTPPGESYFGV

SEQ ID NO: 28947 - protein, 15 aa, Homo Sapiens
VKSSTPPGESYFGVS

SEQ ID NO: 28948 - protein, 15 aa, Homo Sapiens
KSSTPPGESYFGVSS

SEQ ID NO: 28949 - protein, 15 aa, Homo Sapiens
SSTPPGESYFGVSSL

SEQ ID NO: 28950 - protein, 15 aa, Homo Sapiens
STPPGESYFGVSSLQ

SEQ ID NO: 28951 - protein, 15 aa, Homo Sapiens
TPPGESYFGVSSLQL

SEQ ID NO: 28952 - protein, 15 aa, Homo Sapiens
PPGESYFGVSSLQLK

SEQ ID NO: 28953 - protein, 15 aa, Homo Sapiens
PGESYFGVSSLQLKG

SEQ ID NO: 28954 - protein, 15 aa, Homo Sapiens
GESYFGVSSLQLKGQ

SEQ ID NO: 28955 - protein, 15 aa, Homo Sapiens
ESYFGVSSLQLKGQS

SEQ ID NO: 28956 - protein, 15 aa, Homo Sapiens
SYFGVSSLQLKGQSQ

SEQ ID NO: 28957 - protein, 15 aa, Homo Sapiens
YFGVSSLQLKGQSQT

SEQ ID NO: 28958 - protein, 15 aa, Homo Sapiens
FGVSSLQLKGQSQTS

SEQ ID NO: 28959 - protein, 15 aa, Homo Sapiens
GVSSLQLKGQSQTSP

SEQ ID NO: 28960 - protein, 15 aa, Homo Sapiens
VSSLQLKGQSQTSPD

SEQ ID NO: 28961 - protein, 15 aa, Homo Sapiens
SSLQLKGQSQTSPDH

SEQ ID NO: 28962 - protein, 15 aa, Homo Sapiens
SLQLKGQSQTSPDHR

SEQ ID NO: 28963 - protein, 15 aa, Homo Sapiens
LQLKGQSQTSPDHRS

SEQ ID NO: 28964 - protein, 15 aa, Homo Sapiens
QLKGQSQTSPDHRSD

SEQ ID NO: 28965 - protein, 15 aa, Homo Sapiens
LKGQSQTSPDHRSDT

SEQ ID NO: 28966 - protein, 15 aa, Homo Sapiens
KGQSQTSPDHRSDTS

SEQ ID NO: 28967 - protein, 15 aa, Homo Sapiens
GQSQTSPDHRSDTSS

SEQ ID NO: 28968 - protein, 15 aa, Homo Sapiens
QSQTSPDHRSDTSSP

SEQ ID NO: 28969 - protein, 15 aa, Homo Sapiens
SQTSPDHRSDTSSPE

SEQ ID NO: 28970 - protein, 15 aa, Homo Sapiens
QTSPDHRSDTSSPEV

SEQ ID NO: 28971 - protein, 15 aa, Homo Sapiens
TSPDHRSDTSSPEVR

SEQ ID NO: 28972 - protein, 15 aa, Homo Sapiens
SPDHRSDTSSPEVRQ

SEQ ID NO: 28973 - protein, 15 aa, Homo Sapiens
PDHRSDTSSPEVRQS

SEQ ID NO: 28974 - protein, 15 aa, Homo Sapiens
DHRSDTSSPEVRQSH

SEQ ID NO: 28975 - protein, 15 aa, Homo Sapiens
HRSDTSSPEVRQSHS

SEQ ID NO: 28976 - protein, 15 aa, Homo Sapiens
RSDTSSPEVRQSHSE

SEQ ID NO: 28977 - protein, 15 aa, Homo Sapiens
SDTSSPEVRQSHSES

SEQ ID NO: 28978 - protein, 15 aa, Homo Sapiens
DTSSPEVRQSHSESP

SEQ ID NO: 28979 - protein, 15 aa, Homo Sapiens
TSSPEVRQSHSESPS

SEQ ID NO: 28980 - protein, 15 aa, Homo Sapiens
SSPEVRQSHSESPSL

SEQ ID NO: 28981 - protein, 15 aa, Homo Sapiens
SPEVRQSHSESPSLQ

SEQ ID NO: 28982 - protein, 15 aa, Homo Sapiens
PEVRQSHSESPSLQS

SEQ ID NO: 28983 - protein, 15 aa, Homo Sapiens
EVRQSHSESPSLQSK

SEQ ID NO: 28984 - protein, 15 aa, Homo Sapiens
VRQSHSESPSLQSKS

SEQ ID NO: 28985 - protein, 15 aa, Homo Sapiens
RQSHSESPSLQSKSQ

SEQ ID NO: 28986 - protein, 15 aa, Homo Sapiens
QSHSESPSLQSKSQT

SEQ ID NO: 28987 - protein, 15 aa, Homo Sapiens
SHSESPSLQSKSQTS

SEQ ID NO: 28988 - protein, 15 aa, Homo Sapiens
HSESPSLQSKSQTSP

SEQ ID NO: 28989 - protein, 15 aa, Homo Sapiens
SESPSLQSKSQTSPK

SEQ ID NO: 28990 - protein, 15 aa, Homo Sapiens
ESPSLQSKSQTSPKG

SEQ ID NO: 28991 - protein, 15 aa, Homo Sapiens
SPSLQSKSQTSPKGG

SEQ ID NO: 28992 - protein, 15 aa, Homo Sapiens
PSLQSKSQTSPKGGR

SEQ ID NO: 28993 - protein, 15 aa, Homo Sapiens
SLQSKSQTSPKGGRS

SEQ ID NO: 28994 - protein, 15 aa, Homo Sapiens
LQSKSQTSPKGGRSR

SEQ ID NO: 28995 - protein, 15 aa, Homo Sapiens
QSKSQTSPKGGRSRS

SEQ ID NO: 28996 - protein, 15 aa, Homo Sapiens
SKSQTSPKGGRSRSS

SEQ ID NO: 28997 - protein, 15 aa, Homo Sapiens
KSQTSPKGGRSRSSS

SEQ ID NO: 28998 - protein, 15 aa, Homo Sapiens
SQTSPKGGRSRSSSP

SEQ ID NO: 28999 - protein, 15 aa, Homo Sapiens
QTSPKGGRSRSSSPV

SEQ ID NO: 29000 - protein, 15 aa, Homo Sapiens
TSPKGGRSRSSSPVT

SEQ ID NO: 29001 - protein, 15 aa, Homo Sapiens
SPKGGRSRSSSPVTE

SEQ ID NO: 29002 - protein, 15 aa, Homo Sapiens
PKGGRSRSSSPVTEL

SEQ ID NO: 29003 - protein, 15 aa, Homo Sapiens
KGGRSRSSSPVTELA

SEQ ID NO: 29004 - protein, 15 aa, Homo Sapiens
GGRSRSSSPVTELAS

SEQ ID NO: 29005 - protein, 15 aa, Homo Sapiens
GRSRSSSPVTELASR

SEQ ID NO: 29006 - protein, 15 aa, Homo Sapiens
RSRSSSPVTELASRS

SEQ ID NO: 29007 - protein, 15 aa, Homo Sapiens
SRSSSPVTELASRSP

SEQ ID NO: 29008 - protein, 15 aa, Homo Sapiens
RSSSPVTELASRSPI

SEQ ID NO: 29009 - protein, 15 aa, Homo Sapiens
SSSPVTELASRSPIR

SEQ ID NO: 29010 - protein, 15 aa, Homo Sapiens
SSPVTELASRSPIRQ

SEQ ID NO: 29011 - protein, 15 aa, Homo Sapiens
SPVTELASRSPIRQD

SEQ ID NO: 29012 - protein, 15 aa, Homo Sapiens
PVTELASRSPIRQDR

SEQ ID NO: 29013 - protein, 15 aa, Homo Sapiens
VTELASRSPIRQDRG

SEQ ID NO: 29014 - protein, 15 aa, Homo Sapiens
TELASRSPIRQDRGE

SEQ ID NO: 29015 - protein, 15 aa, Homo Sapiens
ELASRSPIRQDRGEF

SEQ ID NO: 29016 - protein, 15 aa, Homo Sapiens
LASRSPIRQDRGEFS

SEQ ID NO: 29017 - protein, 15 aa, Homo Sapiens
ASRSPIRQDRGEFSA

SEQ ID NO: 29018 - protein, 15 aa, Homo Sapiens
SRSPIRQDRGEFSAS

SEQ ID NO: 29019 - protein, 15 aa, Homo Sapiens
RSPIRQDRGEFSASP

SEQ ID NO: 29020 - protein, 15 aa, Homo Sapiens
SPIRQDRGEFSASPM

SEQ ID NO: 29021 - protein, 15 aa, Homo Sapiens
PIRQDRGEFSASPML

SEQ ID NO: 29022 - protein, 15 aa, Homo Sapiens
IRQDRGEFSASPMLK

SEQ ID NO: 29023 - protein, 15 aa, Homo Sapiens
RQDRGEFSASPMLKS

SEQ ID NO: 29024 - protein, 15 aa, Homo Sapiens
QDRGEFSASPMLKSG

SEQ ID NO: 29025 - protein, 15 aa, Homo Sapiens
DRGEFSASPMLKSGM

SEQ ID NO: 29026 - protein, 15 aa, Homo Sapiens
RGEFSASPMLKSGMS

SEQ ID NO: 29027 - protein, 15 aa, Homo Sapiens
GEFSASPMLKSGMSP

SEQ ID NO: 29028 - protein, 15 aa, Homo Sapiens
EFSASPMLKSGMSPE

SEQ ID NO: 29029 - protein, 15 aa, Homo Sapiens
FSASPMLKSGMSPEQ

SEQ ID NO: 29030 - protein, 15 aa, Homo Sapiens
SASPMLKSGMSPEQS

SEQ ID NO: 29031 - protein, 15 aa, Homo Sapiens
ASPMLKSGMSPEQSR

SEQ ID NO: 29032 - protein, 15 aa, Homo Sapiens
SPMLKSGMSPEQSRF

SEQ ID NO: 29033 - protein, 15 aa, Homo Sapiens
PMLKSGMSPEQSRFQ

SEQ ID NO: 29034 - protein, 15 aa, Homo Sapiens
MLKSGMSPEQSRFQS

SEQ ID NO: 29035 - protein, 15 aa, Homo Sapiens
LKSGMSPEQSRFQSD

SEQ ID NO: 29036 - protein, 15 aa, Homo Sapiens
KSGMSPEQSRFQSDS

SEQ ID NO: 29037 - protein, 15 aa, Homo Sapiens
SGMSPEQSRFQSDSS

SEQ ID NO: 29038 - protein, 15 aa, Homo Sapiens
GMSPEQSRFQSDSSS

SEQ ID NO: 29039 - protein, 15 aa, Homo Sapiens
MSPEQSRFQSDSSSY

SEQ ID NO: 29040 - protein, 15 aa, Homo Sapiens
SPEQSRFQSDSSSYP

SEQ ID NO: 29041 - protein, 15 aa, Homo Sapiens
PEQSRFQSDSSSYPT

SEQ ID NO: 29042 - protein, 15 aa, Homo Sapiens
EQSRFQSDSSSYPTV

SEQ ID NO: 29043 - protein, 15 aa, Homo Sapiens
QSRFQSDSSSYPTVD

SEQ ID NO: 29044 - protein, 15 aa, Homo Sapiens
SRFQSDSSSYPTVDS

SEQ ID NO: 29045 - protein, 15 aa, Homo Sapiens
RFQSDSSSYPTVDSN

SEQ ID NO: 29046 - protein, 15 aa, Homo Sapiens
FQSDSSSYPTVDSNS

SEQ ID NO: 29047 - protein, 15 aa, Homo Sapiens
QSDSSSYPTVDSNSL

SEQ ID NO: 29048 - protein, 15 aa, Homo Sapiens
SDSSSYPTVDSNSLL

SEQ ID NO: 29049 - protein, 15 aa, Homo Sapiens
DSSSYPTVDSNSLLG

SEQ ID NO: 29050 - protein, 15 aa, Homo Sapiens
SSSYPTVDSNSLLGQ

SEQ ID NO: 29051 - protein, 15 aa, Homo Sapiens
SSYPTVDSNSLLGQS

SEQ ID NO: 29052 - protein, 15 aa, Homo Sapiens
SYPTVDSNSLLGQSR

SEQ ID NO: 29053 - protein, 15 aa, Homo Sapiens
YPTVDSNSLLGQSRL

SEQ ID NO: 29054 - protein, 15 aa, Homo Sapiens
PTVDSNSLLGQSRLE

SEQ ID NO: 29055 - protein, 15 aa, Homo Sapiens
TVDSNSLLGQSRLET

SEQ ID NO: 29056 - protein, 15 aa, Homo Sapiens
VDSNSLLGQSRLETA

SEQ ID NO: 29057 - protein, 15 aa, Homo Sapiens
DSNSLLGQSRLETAE

SEQ ID NO: 29058 - protein, 15 aa, Homo Sapiens
SNSLLGQSRLETAES

SEQ ID NO: 29059 - protein, 15 aa, Homo Sapiens
NSLLGQSRLETAESK

SEQ ID NO: 29060 - protein, 15 aa, Homo Sapiens
SLLGQSRLETAESKE

SEQ ID NO: 29061 - protein, 15 aa, Homo Sapiens
LLGQSRLETAESKEK

SEQ ID NO: 29062 - protein, 15 aa, Homo Sapiens
LGQSRLETAESKEKM

SEQ ID NO: 29063 - protein, 15 aa, Homo Sapiens
GQSRLETAESKEKMA

SEQ ID NO: 29064 - protein, 15 aa, Homo Sapiens
QSRLETAESKEKMAL

SEQ ID NO: 29065 - protein, 15 aa, Homo Sapiens
SRLETAESKEKMALP

SEQ ID NO: 29066 - protein, 15 aa, Homo Sapiens
RLETAESKEKMALPP

SEQ ID NO: 29067 - protein, 15 aa, Homo Sapiens
LETAESKEKMALPPQ

SEQ ID NO: 29068 - protein, 15 aa, Homo Sapiens
ETAESKEKMALPPQE

SEQ ID NO: 29069 - protein, 15 aa, Homo Sapiens
TAESKEKMALPPQED

SEQ ID NO: 29070 - protein, 15 aa, Homo Sapiens
AESKEKMALPPQEDA

SEQ ID NO: 29071 - protein, 15 aa, Homo Sapiens
ESKEKMALPPQEDAT

SEQ ID NO: 29072 - protein, 15 aa, Homo Sapiens
SKEKMALPPQEDATA

SEQ ID NO: 29073 - protein, 15 aa, Homo Sapiens
KEKMALPPQEDATAS

SEQ ID NO: 29074 - protein, 15 aa, Homo Sapiens
EKMALPPQEDATASP

SEQ ID NO: 29075 - protein, 15 aa, Homo Sapiens
KMALPPQEDATASPP

SEQ ID NO: 29076 - protein, 15 aa, Homo Sapiens
MALPPQEDATASPPR

SEQ ID NO: 29077 - protein, 15 aa, Homo Sapiens
ALPPQEDATASPPRQ

SEQ ID NO: 29078 - protein, 15 aa, Homo Sapiens
LPPQEDATASPPRQK

SEQ ID NO: 29079 - protein, 15 aa, Homo Sapiens
PPQEDATASPPRQKD

SEQ ID NO: 29080 - protein, 15 aa, Homo Sapiens
PQEDATASPPRQKDK

SEQ ID NO: 29081 - protein, 15 aa, Homo Sapiens
QEDATASPPRQKDKF

SEQ ID NO: 29082 - protein, 15 aa, Homo Sapiens
EDATASPPRQKDKFS

SEQ ID NO: 29083 - protein, 15 aa, Homo Sapiens
DATASPPRQKDKFSP

SEQ ID NO: 29084 - protein, 15 aa, Homo Sapiens
ATASPPRQKDKFSPF

SEQ ID NO: 29085 - protein, 15 aa, Homo Sapiens
TASPPRQKDKFSPFP

SEQ ID NO: 29086 - protein, 15 aa, Homo Sapiens
ASPPRQKDKFSPFPV

SEQ ID NO: 29087 - protein, 15 aa, Homo Sapiens
SPPRQKDKFSPFPVQ

SEQ ID NO: 29088 - protein, 15 aa, Homo Sapiens
PPRQKDKFSPFPVQD

SEQ ID NO: 29089 - protein, 15 aa, Homo Sapiens
PRQKDKFSPFPVQDR

SEQ ID NO: 29090 - protein, 15 aa, Homo Sapiens
RQKDKFSPFPVQDRP

SEQ ID NO: 29091 - protein, 15 aa, Homo Sapiens
QKDKFSPFPVQDRPE

SEQ ID NO: 29092 - protein, 15 aa, Homo Sapiens
KDKFSPFPVQDRPES

SEQ ID NO: 29093 - protein, 15 aa, Homo Sapiens
DKFSPFPVQDRPESS

SEQ ID NO: 29094 - protein, 15 aa, Homo Sapiens
KFSPFPVQDRPESSL

SEQ ID NO: 29095 - protein, 15 aa, Homo Sapiens
FSPFPVQDRPESSLV

SEQ ID NO: 29096 - protein, 15 aa, Homo Sapiens
SPFPVQDRPESSLVF

SEQ ID NO: 29097 - protein, 15 aa, Homo Sapiens
PFPVQDRPESSLVFK

SEQ ID NO: 29098 - protein, 15 aa, Homo Sapiens
FPVQDRPESSLVFKD

SEQ ID NO: 29099 - protein, 15 aa, Homo Sapiens
PVQDRPESSLVFKDT

SEQ ID NO: 29100 - protein, 15 aa, Homo Sapiens
VQDRPESSLVFKDTL

SEQ ID NO: 29101 - protein, 15 aa, Homo Sapiens
QDRPESSLVFKDTLR

SEQ ID NO: 29102 - protein, 15 aa, Homo Sapiens
DRPESSLVFKDTLRT

SEQ ID NO: 29103 - protein, 15 aa, Homo Sapiens
RPESSLVFKDTLRTP

SEQ ID NO: 29104 - protein, 15 aa, Homo Sapiens
PESSLVFKDTLRTPP

SEQ ID NO: 29105 - protein, 15 aa, Homo Sapiens
ESSLVFKDTLRTPPR

SEQ ID NO: 29106 - protein, 15 aa, Homo Sapiens
SSLVFKDTLRTPPRE

SEQ ID NO: 29107 - protein, 15 aa, Homo Sapiens
SLVFKDTLRTPPRER

SEQ ID NO: 29108 - protein, 15 aa, Homo Sapiens
LVFKDTLRTPPRERS

SEQ ID NO: 29109 - protein, 15 aa, Homo Sapiens
VFKDTLRTPPRERSG

SEQ ID NO: 29110 - protein, 15 aa, Homo Sapiens
FKDTLRTPPRERSGA

SEQ ID NO: 29111 - protein, 15 aa, Homo Sapiens
KDTLRTPPRERSGAG

SEQ ID NO: 29112 - protein, 15 aa, Homo Sapiens
DTLRTPPRERSGAGS

SEQ ID NO: 29113 - protein, 15 aa, Homo Sapiens
TLRTPPRERSGAGSS

SEQ ID NO: 29114 - protein, 15 aa, Homo Sapiens
LRTPPRERSGAGSSP

SEQ ID NO: 29115 - protein, 15 aa, Homo Sapiens
RTPPRERSGAGSSPE

SEQ ID NO: 29116 - protein, 15 aa, Homo Sapiens
TPPRERSGAGSSPET

SEQ ID NO: 29117 - protein, 15 aa, Homo Sapiens
PPRERSGAGSSPETK

SEQ ID NO: 29118 - protein, 15 aa, Homo Sapiens
PRERSGAGSSPETKE

SEQ ID NO: 29119 - protein, 15 aa, Homo Sapiens
RERSGAGSSPETKEQ

SEQ ID NO: 29120 - protein, 15 aa, Homo Sapiens
ERSGAGSSPETKEQN

SEQ ID NO: 29121 - protein, 15 aa, Homo Sapiens
RSGAGSSPETKEQNS

SEQ ID NO: 29122 - protein, 15 aa, Homo Sapiens
SGAGSSPETKEQNSA

SEQ ID NO: 29123 - protein, 15 aa, Homo Sapiens
GAGSSPETKEQNSAL

SEQ ID NO: 29124 - protein, 15 aa, Homo Sapiens
AGSSPETKEQNSALP

SEQ ID NO: 29125 - protein, 15 aa, Homo Sapiens
GSSPETKEQNSALPT

SEQ ID NO: 29126 - protein, 15 aa, Homo Sapiens
SSPETKEQNSALPTS

SEQ ID NO: 29127 - protein, 15 aa, Homo Sapiens
SPETKEQNSALPTSS

SEQ ID NO: 29128 - protein, 15 aa, Homo Sapiens
PETKEQNSALPTSSQ

SEQ ID NO: 29129 - protein, 15 aa, Homo Sapiens
ETKEQNSALPTSSQD

SEQ ID NO: 29130 - protein, 15 aa, Homo Sapiens
TKEQNSALPTSSQDE

SEQ ID NO: 29131 - protein, 15 aa, Homo Sapiens
KEQNSALPTSSQDEE

SEQ ID NO: 29132 - protein, 15 aa, Homo Sapiens
EQNSALPTSSQDEEL

SEQ ID NO: 29133 - protein, 15 aa, Homo Sapiens
QNSALPTSSQDEELM

SEQ ID NO: 29134 - protein, 15 aa, Homo Sapiens
NSALPTSSQDEELME

SEQ ID NO: 29135 - protein, 15 aa, Homo Sapiens
SALPTSSQDEELMEV

SEQ ID NO: 29136 - protein, 15 aa, Homo Sapiens
ALPTSSQDEELMEVV

SEQ ID NO: 29137 - protein, 15 aa, Homo Sapiens
LPTSSQDEELMEVVE

SEQ ID NO: 29138 - protein, 15 aa, Homo Sapiens
PTSSQDEELMEVVEK

SEQ ID NO: 29139 - protein, 15 aa, Homo Sapiens
TSSQDEELMEVVEKS

SEQ ID NO: 29140 - protein, 15 aa, Homo Sapiens
SSQDEELMEVVEKSE

SEQ ID NO: 29141 - protein, 15 aa, Homo Sapiens
SQDEELMEVVEKSEE

SEQ ID NO: 29142 - protein, 15 aa, Homo Sapiens
QDEELMEVVEKSEEP

SEQ ID NO: 29143 - protein, 15 aa, Homo Sapiens
DEELMEVVEKSEEPA

SEQ ID NO: 29144 - protein, 15 aa, Homo Sapiens
EELMEVVEKSEEPAG

SEQ ID NO: 29145 - protein, 15 aa, Homo Sapiens
ELMEVVEKSEEPAGQ

SEQ ID NO: 29146 - protein, 15 aa, Homo Sapiens
LMEVVEKSEEPAGQI

SEQ ID NO: 29147 - protein, 15 aa, Homo Sapiens
MEVVEKSEEPAGQIL

SEQ ID NO: 29148 - protein, 15 aa, Homo Sapiens
EVVEKSEEPAGQILS

SEQ ID NO: 29149 - protein, 15 aa, Homo Sapiens
VVEKSEEPAGQILSH

SEQ ID NO: 29150 - protein, 15 aa, Homo Sapiens
VEKSEEPAGQILSHL

SEQ ID NO: 29151 - protein, 15 aa, Homo Sapiens
EKSEEPAGQILSHLS

SEQ ID NO: 29152 - protein, 15 aa, Homo Sapiens
KSEEPAGQILSHLSS

SEQ ID NO: 29153 - protein, 15 aa, Homo Sapiens
SEEPAGQILSHLSSE

SEQ ID NO: 29154 - protein, 15 aa, Homo Sapiens
EEPAGQILSHLSSEL

SEQ ID NO: 29155 - protein, 15 aa, Homo Sapiens
EPAGQILSHLSSELK

SEQ ID NO: 29156 - protein, 15 aa, Homo Sapiens
PAGQILSHLSSELKE

SEQ ID NO: 29157 - protein, 15 aa, Homo Sapiens
AGQILSHLSSELKEM

SEQ ID NO: 29158 - protein, 15 aa, Homo Sapiens
GQILSHLSSELKEMS

SEQ ID NO: 29159 - protein, 15 aa, Homo Sapiens
QILSHLSSELKEMST

SEQ ID NO: 29160 - protein, 15 aa, Homo Sapiens
ILSHLSSELKEMSTS

SEQ ID NO: 29161 - protein, 15 aa, Homo Sapiens
LSHLSSELKEMSTSN

SEQ ID NO: 29162 - protein, 15 aa, Homo Sapiens
SHLSSELKEMSTSNF

SEQ ID NO: 29163 - protein, 15 aa, Homo Sapiens
HLSSELKEMSTSNFE

SEQ ID NO: 29164 - protein, 15 aa, Homo Sapiens
LSSELKEMSTSNFES

SEQ ID NO: 29165 - protein, 15 aa, Homo Sapiens
SSELKEMSTSNFESS

SEQ ID NO: 29166 - protein, 15 aa, Homo Sapiens
SELKEMSTSNFESSP

SEQ ID NO: 29167 - protein, 15 aa, Homo Sapiens
ELKEMSTSNFESSPE

SEQ ID NO: 29168 - protein, 15 aa, Homo Sapiens
LKEMSTSNFESSPEV

SEQ ID NO: 29169 - protein, 15 aa, Homo Sapiens
KEMSTSNFESSPEVE

SEQ ID NO: 29170 - protein, 15 aa, Homo Sapiens
EMSTSNFESSPEVEE

SEQ ID NO: 29171 - protein, 15 aa, Homo Sapiens
MSTSNFESSPEVEER

SEQ ID NO: 29172 - protein, 15 aa, Homo Sapiens
STSNFESSPEVEERP

SEQ ID NO: 29173 - protein, 15 aa, Homo Sapiens
TSNFESSPEVEERPA

SEQ ID NO: 29174 - protein, 15 aa, Homo Sapiens
SNFESSPEVEERPAV

SEQ ID NO: 29175 - protein, 15 aa, Homo Sapiens
NFESSPEVEERPAVS

SEQ ID NO: 29176 - protein, 15 aa, Homo Sapiens
FESSPEVEERPAVSL

SEQ ID NO: 29177 - protein, 15 aa, Homo Sapiens
ESSPEVEERPAVSLT

SEQ ID NO: 29178 - protein, 15 aa, Homo Sapiens
SSPEVEERPAVSLTL

SEQ ID NO: 29179 - protein, 15 aa, Homo Sapiens
SPEVEERPAVSLTLD

SEQ ID NO: 29180 - protein, 15 aa, Homo Sapiens
PEVEERPAVSLTLDQ

SEQ ID NO: 29181 - protein, 15 aa, Homo Sapiens
EVEERPAVSLTLDQS

SEQ ID NO: 29182 - protein, 15 aa, Homo Sapiens
VEERPAVSLTLDQSQ

SEQ ID NO: 29183 - protein, 15 aa, Homo Sapiens
EERPAVSLTLDQSQS

SEQ ID NO: 29184 - protein, 15 aa, Homo Sapiens
ERPAVSLTLDQSQSQ

SEQ ID NO: 29185 - protein, 15 aa, Homo Sapiens
RPAVSLTLDQSQSQA

SEQ ID NO: 29186 - protein, 15 aa, Homo Sapiens
PAVSLTLDQSQSQAS

SEQ ID NO: 29187 - protein, 15 aa, Homo Sapiens
AVSLTLDQSQSQASL

SEQ ID NO: 29188 - protein, 15 aa, Homo Sapiens
VSLTLDQSQSQASLE

SEQ ID NO: 29189 - protein, 15 aa, Homo Sapiens
SLTLDQSQSQASLEA

SEQ ID NO: 29190 - protein, 15 aa, Homo Sapiens
LTLDQSQSQASLEAV

SEQ ID NO: 29191 - protein, 15 aa, Homo Sapiens
TLDQSQSQASLEAVE

SEQ ID NO: 29192 - protein, 15 aa, Homo Sapiens
LDQSQSQASLEAVEV

SEQ ID NO: 29193 - protein, 15 aa, Homo Sapiens
DQSQSQASLEAVEVP

SEQ ID NO: 29194 - protein, 15 aa, Homo Sapiens
QSQSQASLEAVEVPS

SEQ ID NO: 29195 - protein, 15 aa, Homo Sapiens
SQSQASLEAVEVPSM

SEQ ID NO: 29196 - protein, 15 aa, Homo Sapiens
QSQASLEAVEVPSMA

SEQ ID NO: 29197 - protein, 15 aa, Homo Sapiens
SQASLEAVEVPSMAS

SEQ ID NO: 29198 - protein, 15 aa, Homo Sapiens
QASLEAVEVPSMASS

SEQ ID NO: 29199 - protein, 15 aa, Homo Sapiens
ASLEAVEVPSMASSW

SEQ ID NO: 29200 - protein, 15 aa, Homo Sapiens
SLEAVEVPSMASSWG

SEQ ID NO: 29201 - protein, 15 aa, Homo Sapiens
LEAVEVPSMASSWGG

SEQ ID NO: 29202 - protein, 15 aa, Homo Sapiens
EAVEVPSMASSWGGP

SEQ ID NO: 29203 - protein, 15 aa, Homo Sapiens
AVEVPSMASSWGGPH

SEQ ID NO: 29204 - protein, 15 aa, Homo Sapiens
VEVPSMASSWGGPHF

SEQ ID NO: 29205 - protein, 15 aa, Homo Sapiens
EVPSMASSWGGPHFS

SEQ ID NO: 29206 - protein, 15 aa, Homo Sapiens
VPSMASSWGGPHFSP

SEQ ID NO: 29207 - protein, 15 aa, Homo Sapiens
PSMASSWGGPHFSPE

SEQ ID NO: 29208 - protein, 15 aa, Homo Sapiens
SMASSWGGPHFSPEH

SEQ ID NO: 29209 - protein, 15 aa, Homo Sapiens
MASSWGGPHFSPEHK

SEQ ID NO: 29210 - protein, 15 aa, Homo Sapiens
ASSWGGPHFSPEHKE

SEQ ID NO: 29211 - protein, 15 aa, Homo Sapiens
SSWGGPHFSPEHKEL

SEQ ID NO: 29212 - protein, 15 aa, Homo Sapiens
SWGGPHFSPEHKELS

SEQ ID NO: 29213 - protein, 15 aa, Homo Sapiens
WGGPHFSPEHKELSN

SEQ ID NO: 29214 - protein, 15 aa, Homo Sapiens
GGPHFSPEHKELSNS

SEQ ID NO: 29215 - protein, 15 aa, Homo Sapiens
GPHFSPEHKELSNSP

SEQ ID NO: 29216 - protein, 15 aa, Homo Sapiens
PHFSPEHKELSNSPL

SEQ ID NO: 29217 - protein, 15 aa, Homo Sapiens
HFSPEHKELSNSPLR

SEQ ID NO: 29218 - protein, 15 aa, Homo Sapiens
FSPEHKELSNSPLRE

SEQ ID NO: 29219 - protein, 15 aa, Homo Sapiens
SPEHKELSNSPLREN

SEQ ID NO: 29220 - protein, 15 aa, Homo Sapiens
PEHKELSNSPLRENS

SEQ ID NO: 29221 - protein, 15 aa, Homo Sapiens
EHKELSNSPLRENSF

SEQ ID NO: 29222 - protein, 15 aa, Homo Sapiens
HKELSNSPLRENSFG

SEQ ID NO: 29223 - protein, 15 aa, Homo Sapiens
KELSNSPLRENSFGS

SEQ ID NO: 29224 - protein, 15 aa, Homo Sapiens
ELSNSPLRENSFGSP

SEQ ID NO: 29225 - protein, 15 aa, Homo Sapiens
LSNSPLRENSFGSPL

SEQ ID NO: 29226 - protein, 15 aa, Homo Sapiens
SNSPLRENSFGSPLE

SEQ ID NO: 29227 - protein, 15 aa, Homo Sapiens
NSPLRENSFGSPLEF

SEQ ID NO: 29228 - protein, 15 aa, Homo Sapiens
SPLRENSFGSPLEFR

SEQ ID NO: 29229 - protein, 15 aa, Homo Sapiens
PLRENSFGSPLEFRN

SEQ ID NO: 29230 - protein, 15 aa, Homo Sapiens
LRENSFGSPLEFRNS

SEQ ID NO: 29231 - protein, 15 aa, Homo Sapiens
RENSFGSPLEFRNSG

SEQ ID NO: 29232 - protein, 15 aa, Homo Sapiens
ENSFGSPLEFRNSGP

SEQ ID NO: 29233 - protein, 15 aa, Homo Sapiens
NSFGSPLEFRNSGPL

SEQ ID NO: 29234 - protein, 15 aa, Homo Sapiens
SFGSPLEFRNSGPLG

SEQ ID NO: 29235 - protein, 15 aa, Homo Sapiens
FGSPLEFRNSGPLGT

SEQ ID NO: 29236 - protein, 15 aa, Homo Sapiens
GSPLEFRNSGPLGTE

SEQ ID NO: 29237 - protein, 15 aa, Homo Sapiens
SPLEFRNSGPLGTEM

SEQ ID NO: 29238 - protein, 15 aa, Homo Sapiens
PLEFRNSGPLGTEMN

SEQ ID NO: 29239 - protein, 15 aa, Homo Sapiens
LEFRNSGPLGTEMNT

SEQ ID NO: 29240 - protein, 15 aa, Homo Sapiens
EFRNSGPLGTEMNTG

SEQ ID NO: 29241 - protein, 15 aa, Homo Sapiens
FRNSGPLGTEMNTGF

SEQ ID NO: 29242 - protein, 15 aa, Homo Sapiens
RNSGPLGTEMNTGFS

SEQ ID NO: 29243 - protein, 15 aa, Homo Sapiens
NSGPLGTEMNTGFSS

SEQ ID NO: 29244 - protein, 15 aa, Homo Sapiens
SGPLGTEMNTGFSSE

SEQ ID NO: 29245 - protein, 15 aa, Homo Sapiens
GPLGTEMNTGFSSEV

SEQ ID NO: 29246 - protein, 15 aa, Homo Sapiens
PLGTEMNTGFSSEVK

SEQ ID NO: 29247 - protein, 15 aa, Homo Sapiens
LGTEMNTGFSSEVKE

SEQ ID NO: 29248 - protein, 15 aa, Homo Sapiens
GTEMNTGFSSEVKED

SEQ ID NO: 29249 - protein, 15 aa, Homo Sapiens
TEMNTGFSSEVKEDL

SEQ ID NO: 29250 - protein, 15 aa, Homo Sapiens
EMNTGFSSEVKEDLN

SEQ ID NO: 29251 - protein, 15 aa, Homo Sapiens
MNTGFSSEVKEDLNG

SEQ ID NO: 29252 - protein, 15 aa, Homo Sapiens
NTGFSSEVKEDLNGP

SEQ ID NO: 29253 - protein, 15 aa, Homo Sapiens
TGFSSEVKEDLNGPF

SEQ ID NO: 29254 - protein, 15 aa, Homo Sapiens
GFSSEVKEDLNGPFL

SEQ ID NO: 29255 - protein, 15 aa, Homo Sapiens
FSSEVKEDLNGPFLN

SEQ ID NO: 29256 - protein, 15 aa, Homo Sapiens
SSEVKEDLNGPFLNQ

SEQ ID NO: 29257 - protein, 15 aa, Homo Sapiens
SEVKEDLNGPFLNQL

SEQ ID NO: 29258 - protein, 15 aa, Homo Sapiens
EVKEDLNGPFLNQLE

SEQ ID NO: 29259 - protein, 15 aa, Homo Sapiens
VKEDLNGPFLNQLET

SEQ ID NO: 29260 - protein, 15 aa, Homo Sapiens
KEDLNGPFLNQLETD

SEQ ID NO: 29261 - protein, 15 aa, Homo Sapiens
EDLNGPFLNQLETDP

SEQ ID NO: 29262 - protein, 15 aa, Homo Sapiens
DLNGPFLNQLETDPS

SEQ ID NO: 29263 - protein, 15 aa, Homo Sapiens
LNGPFLNQLETDPSL

SEQ ID NO: 29264 - protein, 15 aa, Homo Sapiens
NGPFLNQLETDPSLD

SEQ ID NO: 29265 - protein, 15 aa, Homo Sapiens
GPFLNQLETDPSLDM

SEQ ID NO: 29266 - protein, 15 aa, Homo Sapiens
PFLNQLETDPSLDMK

SEQ ID NO: 29267 - protein, 15 aa, Homo Sapiens
FLNQLETDPSLDMKE

SEQ ID NO: 29268 - protein, 15 aa, Homo Sapiens
LNQLETDPSLDMKEQ

SEQ ID NO: 29269 - protein, 15 aa, Homo Sapiens
NQLETDPSLDMKEQS

SEQ ID NO: 29270 - protein, 15 aa, Homo Sapiens
QLETDPSLDMKEQST

SEQ ID NO: 29271 - protein, 15 aa, Homo Sapiens
LETDPSLDMKEQSTR

SEQ ID NO: 29272 - protein, 15 aa, Homo Sapiens
ETDPSLDMKEQSTRS

SEQ ID NO: 29273 - protein, 15 aa, Homo Sapiens
TDPSLDMKEQSTRSS

SEQ ID NO: 29274 - protein, 15 aa, Homo Sapiens
DPSLDMKEQSTRSSG

SEQ ID NO: 29275 - protein, 15 aa, Homo Sapiens
PSLDMKEQSTRSSGH

SEQ ID NO: 29276 - protein, 15 aa, Homo Sapiens
SLDMKEQSTRSSGHS

SEQ ID NO: 29277 - protein, 15 aa, Homo Sapiens
LDMKEQSTRSSGHSS

SEQ ID NO: 29278 - protein, 15 aa, Homo Sapiens
DMKEQSTRSSGHSSS

SEQ ID NO: 29279 - protein, 15 aa, Homo Sapiens
MKEQSTRSSGHSSSE

SEQ ID NO: 29280 - protein, 15 aa, Homo Sapiens
KEQSTRSSGHSSSEL

SEQ ID NO: 29281 - protein, 15 aa, Homo Sapiens
EQSTRSSGHSSSELS

SEQ ID NO: 29282 - protein, 15 aa, Homo Sapiens
QSTRSSGHSSSELSP

SEQ ID NO: 29283 - protein, 15 aa, Homo Sapiens
STRSSGHSSSELSPD

SEQ ID NO: 29284 - protein, 15 aa, Homo Sapiens
TRSSGHSSSELSPDA

SEQ ID NO: 29285 - protein, 15 aa, Homo Sapiens
RSSGHSSSELSPDAV

SEQ ID NO: 29286 - protein, 15 aa, Homo Sapiens
SSGHSSSELSPDAVE

SEQ ID NO: 29287 - protein, 15 aa, Homo Sapiens
SGHSSSELSPDAVEK

SEQ ID NO: 29288 - protein, 15 aa, Homo Sapiens
GHSSSELSPDAVEKA

SEQ ID NO: 29289 - protein, 15 aa, Homo Sapiens
HSSSELSPDAVEKAG

SEQ ID NO: 29290 - protein, 15 aa, Homo Sapiens
SSSELSPDAVEKAGM

SEQ ID NO: 29291 - protein, 15 aa, Homo Sapiens
SSELSPDAVEKAGMS

SEQ ID NO: 29292 - protein, 15 aa, Homo Sapiens
SELSPDAVEKAGMSS

SEQ ID NO: 29293 - protein, 15 aa, Homo Sapiens
ELSPDAVEKAGMSSN

SEQ ID NO: 29294 - protein, 15 aa, Homo Sapiens
LSPDAVEKAGMSSNQ

SEQ ID NO: 29295 - protein, 15 aa, Homo Sapiens
SPDAVEKAGMSSNQS

SEQ ID NO: 29296 - protein, 15 aa, Homo Sapiens
PDAVEKAGMSSNQSI

SEQ ID NO: 29297 - protein, 15 aa, Homo Sapiens
DAVEKAGMSSNQSIS

SEQ ID NO: 29298 - protein, 15 aa, Homo Sapiens
AVEKAGMSSNQSISS

SEQ ID NO: 29299 - protein, 15 aa, Homo Sapiens
VEKAGMSSNQSISSP

SEQ ID NO: 29300 - protein, 15 aa, Homo Sapiens
EKAGMSSNQSISSPV

SEQ ID NO: 29301 - protein, 15 aa, Homo Sapiens
KAGMSSNQSISSPVL

SEQ ID NO: 29302 - protein, 15 aa, Homo Sapiens
AGMSSNQSISSPVLD

SEQ ID NO: 29303 - protein, 15 aa, Homo Sapiens
GMSSNQSISSPVLDA

SEQ ID NO: 29304 - protein, 15 aa, Homo Sapiens
MSSNQSISSPVLDAV

SEQ ID NO: 29305 - protein, 15 aa, Homo Sapiens
SSNQSISSPVLDAVP

SEQ ID NO: 29306 - protein, 15 aa, Homo Sapiens
SNQSISSPVLDAVPR

SEQ ID NO: 29307 - protein, 15 aa, Homo Sapiens
NQSISSPVLDAVPRT

SEQ ID NO: 29308 - protein, 15 aa, Homo Sapiens
QSISSPVLDAVPRTP

SEQ ID NO: 29309 - protein, 15 aa, Homo Sapiens
SISSPVLDAVPRTPS

SEQ ID NO: 29310 - protein, 15 aa, Homo Sapiens
ISSPVLDAVPRTPSR

SEQ ID NO: 29311 - protein, 15 aa, Homo Sapiens
SSPVLDAVPRTPSRE

SEQ ID NO: 29312 - protein, 15 aa, Homo Sapiens
SPVLDAVPRTPSRER

SEQ ID NO: 29313 - protein, 15 aa, Homo Sapiens
PVLDAVPRTPSRERS

SEQ ID NO: 29314 - protein, 15 aa, Homo Sapiens
VLDAVPRTPSRERSS

SEQ ID NO: 29315 - protein, 15 aa, Homo Sapiens
LDAVPRTPSRERSSS

SEQ ID NO: 29316 - protein, 15 aa, Homo Sapiens
DAVPRTPSRERSSSA

SEQ ID NO: 29317 - protein, 15 aa, Homo Sapiens
AVPRTPSRERSSSAS

SEQ ID NO: 29318 - protein, 15 aa, Homo Sapiens
VPRTPSRERSSSASS

SEQ ID NO: 29319 - protein, 15 aa, Homo Sapiens
PRTPSRERSSSASSP

SEQ ID NO: 29320 - protein, 15 aa, Homo Sapiens
RTPSRERSSSASSPE

SEQ ID NO: 29321 - protein, 15 aa, Homo Sapiens
TPSRERSSSASSPEM

SEQ ID NO: 29322 - protein, 15 aa, Homo Sapiens
PSRERSSSASSPEMK

SEQ ID NO: 29323 - protein, 15 aa, Homo Sapiens
SRERSSSASSPEMKD

SEQ ID NO: 29324 - protein, 15 aa, Homo Sapiens
RERSSSASSPEMKDG

SEQ ID NO: 29325 - protein, 15 aa, Homo Sapiens
ERSSSASSPEMKDGL

SEQ ID NO: 29326 - protein, 15 aa, Homo Sapiens
RSSSASSPEMKDGLP

SEQ ID NO: 29327 - protein, 15 aa, Homo Sapiens
SSSASSPEMKDGLPR

SEQ ID NO: 29328 - protein, 15 aa, Homo Sapiens
SSASSPEMKDGLPRT

SEQ ID NO: 29329 - protein, 15 aa, Homo Sapiens
SASSPEMKDGLPRTP

SEQ ID NO: 29330 - protein, 15 aa, Homo Sapiens
ASSPEMKDGLPRTPS

SEQ ID NO: 29331 - protein, 15 aa, Homo Sapiens
SSPEMKDGLPRTPSR

SEQ ID NO: 29332 - protein, 15 aa, Homo Sapiens
SPEMKDGLPRTPSRR

SEQ ID NO: 29333 - protein, 15 aa, Homo Sapiens
PEMKDGLPRTPSRRS

SEQ ID NO: 29334 - protein, 15 aa, Homo Sapiens
EMKDGLPRTPSRRSR

SEQ ID NO: 29335 - protein, 15 aa, Homo Sapiens
MKDGLPRTPSRRSRS

SEQ ID NO: 29336 - protein, 15 aa, Homo Sapiens
KDGLPRTPSRRSRSG

SEQ ID NO: 29337 - protein, 15 aa, Homo Sapiens
DGLPRTPSRRSRSGS

SEQ ID NO: 29338 - protein, 15 aa, Homo Sapiens
GLPRTPSRRSRSGSS

SEQ ID NO: 29339 - protein, 15 aa, Homo Sapiens
LPRTPSRRSRSGSSP

SEQ ID NO: 29340 - protein, 15 aa, Homo Sapiens
PRTPSRRSRSGSSPG

SEQ ID NO: 29341 - protein, 15 aa, Homo Sapiens
RTPSRRSRSGSSPGL

SEQ ID NO: 29342 - protein, 15 aa, Homo Sapiens
TPSRRSRSGSSPGLR

SEQ ID NO: 29343 - protein, 15 aa, Homo Sapiens
PSRRSRSGSSPGLRD

SEQ ID NO: 29344 - protein, 15 aa, Homo Sapiens
SRRSRSGSSPGLRDG

SEQ ID NO: 29345 - protein, 15 aa, Homo Sapiens
RRSRSGSSPGLRDGS

SEQ ID NO: 29346 - protein, 15 aa, Homo Sapiens
RSRSGSSPGLRDGSG

SEQ ID NO: 29347 - protein, 15 aa, Homo Sapiens
SRSGSSPGLRDGSGT

SEQ ID NO: 29348 - protein, 15 aa, Homo Sapiens
RSGSSPGLRDGSGTP

SEQ ID NO: 29349 - protein, 15 aa, Homo Sapiens
SGSSPGLRDGSGTPS

SEQ ID NO: 29350 - protein, 15 aa, Homo Sapiens
GSSPGLRDGSGTPSR

SEQ ID NO: 29351 - protein, 15 aa, Homo Sapiens
SSPGLRDGSGTPSRH

SEQ ID NO: 29352 - protein, 15 aa, Homo Sapiens
SPGLRDGSGTPSRHS

SEQ ID NO: 29353 - protein, 15 aa, Homo Sapiens
PGLRDGSGTPSRHSL

SEQ ID NO: 29354 - protein, 15 aa, Homo Sapiens
GLRDGSGTPSRHSLS

SEQ ID NO: 29355 - protein, 15 aa, Homo Sapiens
LRDGSGTPSRHSLSG

SEQ ID NO: 29356 - protein, 15 aa, Homo Sapiens
RDGSGTPSRHSLSGS

SEQ ID NO: 29357 - protein, 15 aa, Homo Sapiens
DGSGTPSRHSLSGSS

SEQ ID NO: 29358 - protein, 15 aa, Homo Sapiens
GSGTPSRHSLSGSSP

SEQ ID NO: 29359 - protein, 15 aa, Homo Sapiens
SGTPSRHSLSGSSPG

SEQ ID NO: 29360 - protein, 15 aa, Homo Sapiens
GTPSRHSLSGSSPGM

SEQ ID NO: 29361 - protein, 15 aa, Homo Sapiens
TPSRHSLSGSSPGMK

SEQ ID NO: 29362 - protein, 15 aa, Homo Sapiens
PSRHSLSGSSPGMKD

SEQ ID NO: 29363 - protein, 15 aa, Homo Sapiens
SRHSLSGSSPGMKDI

SEQ ID NO: 29364 - protein, 15 aa, Homo Sapiens
RHSLSGSSPGMKDIP

SEQ ID NO: 29365 - protein, 15 aa, Homo Sapiens
HSLSGSSPGMKDIPR

SEQ ID NO: 29366 - protein, 15 aa, Homo Sapiens
SLSGSSPGMKDIPRT

SEQ ID NO: 29367 - protein, 15 aa, Homo Sapiens
LSGSSPGMKDIPRTP

SEQ ID NO: 29368 - protein, 15 aa, Homo Sapiens
SGSSPGMKDIPRTPF

SEQ ID NO: 29369 - protein, 15 aa, Homo Sapiens
GSSPGMKDIPRTPFR

SEQ ID NO: 29370 - protein, 15 aa, Homo Sapiens
SSPGMKDIPRTPFRG

SEQ ID NO: 29371 - protein, 15 aa, Homo Sapiens
SPGMKDIPRTPFRGR

SEQ ID NO: 29372 - protein, 15 aa, Homo Sapiens
PGMKDIPRTPFRGRS

SEQ ID NO: 29373 - protein, 15 aa, Homo Sapiens
GMKDIPRTPFRGRSE

SEQ ID NO: 29374 - protein, 15 aa, Homo Sapiens
MKDIPRTPFRGRSEC

SEQ ID NO: 29375 - protein, 15 aa, Homo Sapiens
KDIPRTPFRGRSECD

SEQ ID NO: 29376 - protein, 15 aa, Homo Sapiens
DIPRTPFRGRSECDS

SEQ ID NO: 29377 - protein, 15 aa, Homo Sapiens
IPRTPFRGRSECDSS

SEQ ID NO: 29378 - protein, 15 aa, Homo Sapiens
PRTPFRGRSECDSSP

SEQ ID NO: 29379 - protein, 15 aa, Homo Sapiens
RTPFRGRSECDSSPE

SEQ ID NO: 29380 - protein, 15 aa, Homo Sapiens
TPFRGRSECDSSPEP

SEQ ID NO: 29381 - protein, 15 aa, Homo Sapiens
PFRGRSECDSSPEPK

SEQ ID NO: 29382 - protein, 15 aa, Homo Sapiens
FRGRSECDSSPEPKA

SEQ ID NO: 29383 - protein, 15 aa, Homo Sapiens
RGRSECDSSPEPKAL

SEQ ID NO: 29384 - protein, 15 aa, Homo Sapiens
GRSECDSSPEPKALP

SEQ ID NO: 29385 - protein, 15 aa, Homo Sapiens
RSECDSSPEPKALPQ

SEQ ID NO: 29386 - protein, 15 aa, Homo Sapiens
SECDSSPEPKALPQT

SEQ ID NO: 29387 - protein, 15 aa, Homo Sapiens
ECDSSPEPKALPQTP

SEQ ID NO: 29388 - protein, 15 aa, Homo Sapiens
CDSSPEPKALPQTPR

SEQ ID NO: 29389 - protein, 15 aa, Homo Sapiens
DSSPEPKALPQTPRP

SEQ ID NO: 29390 - protein, 15 aa, Homo Sapiens
SSPEPKALPQTPRPR

SEQ ID NO: 29391 - protein, 15 aa, Homo Sapiens
SPEPKALPQTPRPRS

SEQ ID NO: 29392 - protein, 15 aa, Homo Sapiens
PEPKALPQTPRPRSR

SEQ ID NO: 29393 - protein, 15 aa, Homo Sapiens
EPKALPQTPRPRSRS

SEQ ID NO: 29394 - protein, 15 aa, Homo Sapiens
PKALPQTPRPRSRSP

SEQ ID NO: 29395 - protein, 15 aa, Homo Sapiens
KALPQTPRPRSRSPS

SEQ ID NO: 29396 - protein, 15 aa, Homo Sapiens
ALPQTPRPRSRSPSS

SEQ ID NO: 29397 - protein, 15 aa, Homo Sapiens
LPQTPRPRSRSPSSP

SEQ ID NO: 29398 - protein, 15 aa, Homo Sapiens
PQTPRPRSRSPSSPE

SEQ ID NO: 29399 - protein, 15 aa, Homo Sapiens
QTPRPRSRSPSSPEL

SEQ ID NO: 29400 - protein, 15 aa, Homo Sapiens
TPRPRSRSPSSPELN

SEQ ID NO: 29401 - protein, 15 aa, Homo Sapiens
PRPRSRSPSSPELNN

SEQ ID NO: 29402 - protein, 15 aa, Homo Sapiens
RPRSRSPSSPELNNK

SEQ ID NO: 29403 - protein, 15 aa, Homo Sapiens
PRSRSPSSPELNNKC

SEQ ID NO: 29404 - protein, 15 aa, Homo Sapiens
RSRSPSSPELNNKCL

SEQ ID NO: 29405 - protein, 15 aa, Homo Sapiens
SRSPSSPELNNKCLT

SEQ ID NO: 29406 - protein, 15 aa, Homo Sapiens
RSPSSPELNNKCLTP

SEQ ID NO: 29407 - protein, 15 aa, Homo Sapiens
SPSSPELNNKCLTPQ

SEQ ID NO: 29408 - protein, 15 aa, Homo Sapiens
PSSPELNNKCLTPQR

SEQ ID NO: 29409 - protein, 15 aa, Homo Sapiens
SSPELNNKCLTPQRE

SEQ ID NO: 29410 - protein, 15 aa, Homo Sapiens
SPELNNKCLTPQRER

SEQ ID NO: 29411 - protein, 15 aa, Homo Sapiens
PELNNKCLTPQRERS

SEQ ID NO: 29412 - protein, 15 aa, Homo Sapiens
ELNNKCLTPQRERSG

SEQ ID NO: 29413 - protein, 15 aa, Homo Sapiens
LNNKCLTPQRERSGS

SEQ ID NO: 29414 - protein, 15 aa, Homo Sapiens
NNKCLTPQRERSGSE

SEQ ID NO: 29415 - protein, 15 aa, Homo Sapiens
NKCLTPQRERSGSES

SEQ ID NO: 29416 - protein, 15 aa, Homo Sapiens
KCLTPQRERSGSESS

SEQ ID NO: 29417 - protein, 15 aa, Homo Sapiens
CLTPQRERSGSESSV

SEQ ID NO: 29418 - protein, 15 aa, Homo Sapiens
LTPQRERSGSESSVD

SEQ ID NO: 29419 - protein, 15 aa, Homo Sapiens
TPQRERSGSESSVDQ

SEQ ID NO: 29420 - protein, 15 aa, Homo Sapiens
PQRERSGSESSVDQK

SEQ ID NO: 29421 - protein, 15 aa, Homo Sapiens
QRERSGSESSVDQKT

SEQ ID NO: 29422 - protein, 15 aa, Homo Sapiens
RERSGSESSVDQKTV

SEQ ID NO: 29423 - protein, 15 aa, Homo Sapiens
ERSGSESSVDQKTVA

SEQ ID NO: 29424 - protein, 15 aa, Homo Sapiens
RSGSESSVDQKTVAR

SEQ ID NO: 29425 - protein, 15 aa, Homo Sapiens
SGSESSVDQKTVART

SEQ ID NO: 29426 - protein, 15 aa, Homo Sapiens
GSESSVDQKTVARTP

SEQ ID NO: 29427 - protein, 15 aa, Homo Sapiens
SESSVDQKTVARTPL

SEQ ID NO: 29428 - protein, 15 aa, Homo Sapiens
ESSVDQKTVARTPLG

SEQ ID NO: 29429 - protein, 15 aa, Homo Sapiens
SSVDQKTVARTPLGQ

SEQ ID NO: 29430 - protein, 15 aa, Homo Sapiens
SVDQKTVARTPLGQR

SEQ ID NO: 29431 - protein, 15 aa, Homo Sapiens
VDQKTVARTPLGQRS

SEQ ID NO: 29432 - protein, 15 aa, Homo Sapiens
DQKTVARTPLGQRSR

SEQ ID NO: 29433 - protein, 15 aa, Homo Sapiens
QKTVARTPLGQRSRS

SEQ ID NO: 29434 - protein, 15 aa, Homo Sapiens
KTVARTPLGQRSRSG

SEQ ID NO: 29435 - protein, 15 aa, Homo Sapiens
TVARTPLGQRSRSGS

SEQ ID NO: 29436 - protein, 15 aa, Homo Sapiens
VARTPLGQRSRSGSS

SEQ ID NO: 29437 - protein, 15 aa, Homo Sapiens
ARTPLGQRSRSGSSQ

SEQ ID NO: 29438 - protein, 15 aa, Homo Sapiens
RTPLGQRSRSGSSQE

SEQ ID NO: 29439 - protein, 15 aa, Homo Sapiens
TPLGQRSRSGSSQEL

SEQ ID NO: 29440 - protein, 15 aa, Homo Sapiens
PLGQRSRSGSSQELD

SEQ ID NO: 29441 - protein, 15 aa, Homo Sapiens
LGQRSRSGSSQELDV

SEQ ID NO: 29442 - protein, 15 aa, Homo Sapiens
GQRSRSGSSQELDVK

SEQ ID NO: 29443 - protein, 15 aa, Homo Sapiens
QRSRSGSSQELDVKP

SEQ ID NO: 29444 - protein, 15 aa, Homo Sapiens
RSRSGSSQELDVKPS

SEQ ID NO: 29445 - protein, 15 aa, Homo Sapiens
SRSGSSQELDVKPSA

SEQ ID NO: 29446 - protein, 15 aa, Homo Sapiens
RSGSSQELDVKPSAS

SEQ ID NO: 29447 - protein, 15 aa, Homo Sapiens
SGSSQELDVKPSASP

SEQ ID NO: 29448 - protein, 15 aa, Homo Sapiens
GSSQELDVKPSASPQ

SEQ ID NO: 29449 - protein, 15 aa, Homo Sapiens
SSQELDVKPSASPQE

SEQ ID NO: 29450 - protein, 15 aa, Homo Sapiens
SQELDVKPSASPQER

SEQ ID NO: 29451 - protein, 15 aa, Homo Sapiens
QELDVKPSASPQERS

SEQ ID NO: 29452 - protein, 15 aa, Homo Sapiens
ELDVKPSASPQERSE

SEQ ID NO: 29453 - protein, 15 aa, Homo Sapiens
LDVKPSASPQERSES

SEQ ID NO: 29454 - protein, 15 aa, Homo Sapiens
DVKPSASPQERSESD

SEQ ID NO: 29455 - protein, 15 aa, Homo Sapiens
VKPSASPQERSESDS

SEQ ID NO: 29456 - protein, 15 aa, Homo Sapiens
KPSASPQERSESDSS

SEQ ID NO: 29457 - protein, 15 aa, Homo Sapiens
PSASPQERSESDSSP

SEQ ID NO: 29458 - protein, 15 aa, Homo Sapiens
SASPQERSESDSSPD

SEQ ID NO: 29459 - protein, 15 aa, Homo Sapiens
ASPQERSESDSSPDS

SEQ ID NO: 29460 - protein, 15 aa, Homo Sapiens
SPQERSESDSSPDSK

SEQ ID NO: 29461 - protein, 15 aa, Homo Sapiens
PQERSESDSSPDSKA

SEQ ID NO: 29462 - protein, 15 aa, Homo Sapiens
QERSESDSSPDSKAK

SEQ ID NO: 29463 - protein, 15 aa, Homo Sapiens
ERSESDSSPDSKAKT

SEQ ID NO: 29464 - protein, 15 aa, Homo Sapiens
RSESDSSPDSKAKTR

SEQ ID NO: 29465 - protein, 15 aa, Homo Sapiens
SESDSSPDSKAKTRT

SEQ ID NO: 29466 - protein, 15 aa, Homo Sapiens
ESDSSPDSKAKTRTP

SEQ ID NO: 29467 - protein, 15 aa, Homo Sapiens
SDSSPDSKAKTRTPL

SEQ ID NO: 29468 - protein, 15 aa, Homo Sapiens
DSSPDSKAKTRTPLR

SEQ ID NO: 29469 - protein, 15 aa, Homo Sapiens
SSPDSKAKTRTPLRQ

SEQ ID NO: 29470 - protein, 15 aa, Homo Sapiens
SPDSKAKTRTPLRQR

SEQ ID NO: 29471 - protein, 15 aa, Homo Sapiens
PDSKAKTRTPLRQRS

SEQ ID NO: 29472 - protein, 15 aa, Homo Sapiens
DSKAKTRTPLRQRSR

SEQ ID NO: 29473 - protein, 15 aa, Homo Sapiens
SKAKTRTPLRQRSRS

SEQ ID NO: 29474 - protein, 15 aa, Homo Sapiens
KAKTRTPLRQRSRSG

SEQ ID NO: 29475 - protein, 15 aa, Homo Sapiens
AKTRTPLRQRSRSGS

SEQ ID NO: 29476 - protein, 15 aa, Homo Sapiens
KTRTPLRQRSRSGSS

SEQ ID NO: 29477 - protein, 15 aa, Homo Sapiens
TRTPLRQRSRSGSSP

SEQ ID NO: 29478 - protein, 15 aa, Homo Sapiens
RTPLRQRSRSGSSPE

SEQ ID NO: 29479 - protein, 15 aa, Homo Sapiens
TPLRQRSRSGSSPEV

SEQ ID NO: 29480 - protein, 15 aa, Homo Sapiens
PLRQRSRSGSSPEVD

SEQ ID NO: 29481 - protein, 15 aa, Homo Sapiens
LRQRSRSGSSPEVDS

SEQ ID NO: 29482 - protein, 15 aa, Homo Sapiens
RQRSRSGSSPEVDSK

SEQ ID NO: 29483 - protein, 15 aa, Homo Sapiens
QRSRSGSSPEVDSKS

SEQ ID NO: 29484 - protein, 15 aa, Homo Sapiens
RSRSGSSPEVDSKSR

SEQ ID NO: 29485 - protein, 15 aa, Homo Sapiens
SRSGSSPEVDSKSRL

SEQ ID NO: 29486 - protein, 15 aa, Homo Sapiens
RSGSSPEVDSKSRLS

SEQ ID NO: 29487 - protein, 15 aa, Homo Sapiens
SGSSPEVDSKSRLSP

SEQ ID NO: 29488 - protein, 15 aa, Homo Sapiens
GSSPEVDSKSRLSPR

SEQ ID NO: 29489 - protein, 15 aa, Homo Sapiens
SSPEVDSKSRLSPRR

SEQ ID NO: 29490 - protein, 15 aa, Homo Sapiens
SPEVDSKSRLSPRRS

SEQ ID NO: 29491 - protein, 15 aa, Homo Sapiens
PEVDSKSRLSPRRSR

SEQ ID NO: 29492 - protein, 15 aa, Homo Sapiens
EVDSKSRLSPRRSRS

SEQ ID NO: 29493 - protein, 15 aa, Homo Sapiens
VDSKSRLSPRRSRSG

SEQ ID NO: 29494 - protein, 15 aa, Homo Sapiens
DSKSRLSPRRSRSGS

SEQ ID NO: 29495 - protein, 15 aa, Homo Sapiens
SKSRLSPRRSRSGSS

SEQ ID NO: 29496 - protein, 15 aa, Homo Sapiens
KSRLSPRRSRSGSSP

SEQ ID NO: 29497 - protein, 15 aa, Homo Sapiens
SRLSPRRSRSGSSPE

SEQ ID NO: 29498 - protein, 15 aa, Homo Sapiens
RLSPRRSRSGSSPEV

SEQ ID NO: 29499 - protein, 15 aa, Homo Sapiens
LSPRRSRSGSSPEVK

SEQ ID NO: 29500 - protein, 15 aa, Homo Sapiens
SPRRSRSGSSPEVKD

SEQ ID NO: 29501 - protein, 15 aa, Homo Sapiens
PRRSRSGSSPEVKDK

SEQ ID NO: 29502 - protein, 15 aa, Homo Sapiens
RRSRSGSSPEVKDKP

SEQ ID NO: 29503 - protein, 15 aa, Homo Sapiens
RSRSGSSPEVKDKPR

SEQ ID NO: 29504 - protein, 15 aa, Homo Sapiens
SRSGSSPEVKDKPRA

SEQ ID NO: 29505 - protein, 15 aa, Homo Sapiens
RSGSSPEVKDKPRAA

SEQ ID NO: 29506 - protein, 15 aa, Homo Sapiens
SGSSPEVKDKPRAAP

SEQ ID NO: 29507 - protein, 15 aa, Homo Sapiens
GSSPEVKDKPRAAPR

SEQ ID NO: 29508 - protein, 15 aa, Homo Sapiens
SSPEVKDKPRAAPRA

SEQ ID NO: 29509 - protein, 15 aa, Homo Sapiens
SPEVKDKPRAAPRAQ

SEQ ID NO: 29510 - protein, 15 aa, Homo Sapiens
PEVKDKPRAAPRAQS

SEQ ID NO: 29511 - protein, 15 aa, Homo Sapiens
EVKDKPRAAPRAQSG

SEQ ID NO: 29512 - protein, 15 aa, Homo Sapiens
VKDKPRAAPRAQSGS

SEQ ID NO: 29513 - protein, 15 aa, Homo Sapiens
KDKPRAAPRAQSGSD

SEQ ID NO: 29514 - protein, 15 aa, Homo Sapiens
DKPRAAPRAQSGSDS

SEQ ID NO: 29515 - protein, 15 aa, Homo Sapiens
KPRAAPRAQSGSDSS

SEQ ID NO: 29516 - protein, 15 aa, Homo Sapiens
PRAAPRAQSGSDSSP

SEQ ID NO: 29517 - protein, 15 aa, Homo Sapiens
RAAPRAQSGSDSSPE

SEQ ID NO: 29518 - protein, 15 aa, Homo Sapiens
AAPRAQSGSDSSPEP

SEQ ID NO: 29519 - protein, 15 aa, Homo Sapiens
APRAQSGSDSSPEPK

SEQ ID NO: 29520 - protein, 15 aa, Homo Sapiens
PRAQSGSDSSPEPKA

SEQ ID NO: 29521 - protein, 15 aa, Homo Sapiens
RAQSGSDSSPEPKAP

SEQ ID NO: 29522 - protein, 15 aa, Homo Sapiens
AQSGSDSSPEPKAPA

SEQ ID NO: 29523 - protein, 15 aa, Homo Sapiens
QSGSDSSPEPKAPAP

SEQ ID NO: 29524 - protein, 15 aa, Homo Sapiens
SGSDSSPEPKAPAPR

SEQ ID NO: 29525 - protein, 15 aa, Homo Sapiens
GSDSSPEPKAPAPRA

SEQ ID NO: 29526 - protein, 15 aa, Homo Sapiens
SDSSPEPKAPAPRAL

SEQ ID NO: 29527 - protein, 15 aa, Homo Sapiens
DSSPEPKAPAPRALP

SEQ ID NO: 29528 - protein, 15 aa, Homo Sapiens
SSPEPKAPAPRALPR

SEQ ID NO: 29529 - protein, 15 aa, Homo Sapiens
SPEPKAPAPRALPRR

SEQ ID NO: 29530 - protein, 15 aa, Homo Sapiens
PEPKAPAPRALPRRS

SEQ ID NO: 29531 - protein, 15 aa, Homo Sapiens
EPKAPAPRALPRRSR

SEQ ID NO: 29532 - protein, 15 aa, Homo Sapiens
PKAPAPRALPRRSRS

SEQ ID NO: 29533 - protein, 15 aa, Homo Sapiens
KAPAPRALPRRSRSG

SEQ ID NO: 29534 - protein, 15 aa, Homo Sapiens
APAPRALPRRSRSGS

SEQ ID NO: 29535 - protein, 15 aa, Homo Sapiens
PAPRALPRRSRSGSS

SEQ ID NO: 29536 - protein, 15 aa, Homo Sapiens
APRALPRRSRSGSSS

SEQ ID NO: 29537 - protein, 15 aa, Homo Sapiens
PRALPRRSRSGSSSK

SEQ ID NO: 29538 - protein, 15 aa, Homo Sapiens
RALPRRSRSGSSSKG

SEQ ID NO: 29539 - protein, 15 aa, Homo Sapiens
ALPRRSRSGSSSKGR

SEQ ID NO: 29540 - protein, 15 aa, Homo Sapiens
LPRRSRSGSSSKGRG

SEQ ID NO: 29541 - protein, 15 aa, Homo Sapiens
PRRSRSGSSSKGRGP

SEQ ID NO: 29542 - protein, 15 aa, Homo Sapiens
RRSRSGSSSKGRGPS

SEQ ID NO: 29543 - protein, 15 aa, Homo Sapiens
RSRSGSSSKGRGPSP

SEQ ID NO: 29544 - protein, 15 aa, Homo Sapiens
SRSGSSSKGRGPSPE

SEQ ID NO: 29545 - protein, 15 aa, Homo Sapiens
RSGSSSKGRGPSPEG

SEQ ID NO: 29546 - protein, 15 aa, Homo Sapiens
SGSSSKGRGPSPEGS

SEQ ID NO: 29547 - protein, 15 aa, Homo Sapiens
GSSSKGRGPSPEGSS

SEQ ID NO: 29548 - protein, 15 aa, Homo Sapiens
SSSKGRGPSPEGSSS

SEQ ID NO: 29549 - protein, 15 aa, Homo Sapiens
SSKGRGPSPEGSSST

SEQ ID NO: 29550 - protein, 15 aa, Homo Sapiens
SKGRGPSPEGSSSTE

SEQ ID NO: 29551 - protein, 15 aa, Homo Sapiens
KGRGPSPEGSSSTES

SEQ ID NO: 29552 - protein, 15 aa, Homo Sapiens
GRGPSPEGSSSTESS

SEQ ID NO: 29553 - protein, 15 aa, Homo Sapiens
RGPSPEGSSSTESSP

SEQ ID NO: 29554 - protein, 15 aa, Homo Sapiens
GPSPEGSSSTESSPE

SEQ ID NO: 29555 - protein, 15 aa, Homo Sapiens
PSPEGSSSTESSPEH

SEQ ID NO: 29556 - protein, 15 aa, Homo Sapiens
SPEGSSSTESSPEHP

SEQ ID NO: 29557 - protein, 15 aa, Homo Sapiens
PEGSSSTESSPEHPP

SEQ ID NO: 29558 - protein, 15 aa, Homo Sapiens
EGSSSTESSPEHPPK

SEQ ID NO: 29559 - protein, 15 aa, Homo Sapiens
GSSSTESSPEHPPKS

SEQ ID NO: 29560 - protein, 15 aa, Homo Sapiens
SSSTESSPEHPPKSR

SEQ ID NO: 29561 - protein, 15 aa, Homo Sapiens
SSTESSPEHPPKSRT

SEQ ID NO: 29562 - protein, 15 aa, Homo Sapiens
STESSPEHPPKSRTA

SEQ ID NO: 29563 - protein, 15 aa, Homo Sapiens
TESSPEHPPKSRTAR

SEQ ID NO: 29564 - protein, 15 aa, Homo Sapiens
ESSPEHPPKSRTARR

SEQ ID NO: 29565 - protein, 15 aa, Homo Sapiens
SSPEHPPKSRTARRG

SEQ ID NO: 29566 - protein, 15 aa, Homo Sapiens
SPEHPPKSRTARRGS

SEQ ID NO: 29567 - protein, 15 aa, Homo Sapiens
PEHPPKSRTARRGSR

SEQ ID NO: 29568 - protein, 15 aa, Homo Sapiens
EHPPKSRTARRGSRS

SEQ ID NO: 29569 - protein, 15 aa, Homo Sapiens
HPPKSRTARRGSRSS

SEQ ID NO: 29570 - protein, 15 aa, Homo Sapiens
PPKSRTARRGSRSSP

SEQ ID NO: 29571 - protein, 15 aa, Homo Sapiens
PKSRTARRGSRSSPE

SEQ ID NO: 29572 - protein, 15 aa, Homo Sapiens
KSRTARRGSRSSPEP

SEQ ID NO: 29573 - protein, 15 aa, Homo Sapiens
SRTARRGSRSSPEPK

SEQ ID NO: 29574 - protein, 15 aa, Homo Sapiens
RTARRGSRSSPEPKT

SEQ ID NO: 29575 - protein, 15 aa, Homo Sapiens
TARRGSRSSPEPKTK

SEQ ID NO: 29576 - protein, 15 aa, Homo Sapiens
ARRGSRSSPEPKTKS

SEQ ID NO: 29577 - protein, 15 aa, Homo Sapiens
RRGSRSSPEPKTKSR

SEQ ID NO: 29578 - protein, 15 aa, Homo Sapiens
RGSRSSPEPKTKSRT

SEQ ID NO: 29579 - protein, 15 aa, Homo Sapiens
GSRSSPEPKTKSRTP

SEQ ID NO: 29580 - protein, 15 aa, Homo Sapiens
SRSSPEPKTKSRTPP

SEQ ID NO: 29581 - protein, 15 aa, Homo Sapiens
RSSPEPKTKSRTPPR

SEQ ID NO: 29582 - protein, 15 aa, Homo Sapiens
SSPEPKTKSRTPPRR

SEQ ID NO: 29583 - protein, 15 aa, Homo Sapiens
SPEPKTKSRTPPRRR

SEQ ID NO: 29584 - protein, 15 aa, Homo Sapiens
PEPKTKSRTPPRRRS

SEQ ID NO: 29585 - protein, 15 aa, Homo Sapiens
EPKTKSRTPPRRRSS

SEQ ID NO: 29586 - protein, 15 aa, Homo Sapiens
PKTKSRTPPRRRSSR

SEQ ID NO: 29587 - protein, 15 aa, Homo Sapiens
KTKSRTPPRRRSSRS

SEQ ID NO: 29588 - protein, 15 aa, Homo Sapiens
TKSRTPPRRRSSRSS

SEQ ID NO: 29589 - protein, 15 aa, Homo Sapiens
KSRTPPRRRSSRSSP

SEQ ID NO: 29590 - protein, 15 aa, Homo Sapiens
SRTPPRRRSSRSSPE

SEQ ID NO: 29591 - protein, 15 aa, Homo Sapiens
RTPPRRRSSRSSPEL

SEQ ID NO: 29592 - protein, 15 aa, Homo Sapiens
TPPRRRSSRSSPELT

SEQ ID NO: 29593 - protein, 15 aa, Homo Sapiens
PPRRRSSRSSPELTR

SEQ ID NO: 29594 - protein, 15 aa, Homo Sapiens
PRRRSSRSSPELTRK

SEQ ID NO: 29595 - protein, 15 aa, Homo Sapiens
RRRSSRSSPELTRKA

SEQ ID NO: 29596 - protein, 15 aa, Homo Sapiens
RRSSRSSPELTRKAR

SEQ ID NO: 29597 - protein, 15 aa, Homo Sapiens
RSSRSSPELTRKARL

SEQ ID NO: 29598 - protein, 15 aa, Homo Sapiens
SSRSSPELTRKARLS

SEQ ID NO: 29599 - protein, 15 aa, Homo Sapiens
SRSSPELTRKARLSR

SEQ ID NO: 29600 - protein, 15 aa, Homo Sapiens
RSSPELTRKARLSRR

SEQ ID NO: 29601 - protein, 15 aa, Homo Sapiens
SSPELTRKARLSRRS

SEQ ID NO: 29602 - protein, 15 aa, Homo Sapiens
SPELTRKARLSRRSR

SEQ ID NO: 29603 - protein, 15 aa, Homo Sapiens
PELTRKARLSRRSRS

SEQ ID NO: 29604 - protein, 15 aa, Homo Sapiens
ELTRKARLSRRSRSA

SEQ ID NO: 29605 - protein, 15 aa, Homo Sapiens
LTRKARLSRRSRSAS

SEQ ID NO: 29606 - protein, 15 aa, Homo Sapiens
TRKARLSRRSRSASS

SEQ ID NO: 29607 - protein, 15 aa, Homo Sapiens
RKARLSRRSRSASSS

SEQ ID NO: 29608 - protein, 15 aa, Homo Sapiens
KARLSRRSRSASSSP

SEQ ID NO: 29609 - protein, 15 aa, Homo Sapiens
ARLSRRSRSASSSPE

SEQ ID NO: 29610 - protein, 15 aa, Homo Sapiens
RLSRRSRSASSSPET

SEQ ID NO: 29611 - protein, 15 aa, Homo Sapiens
LSRRSRSASSSPETR

SEQ ID NO: 29612 - protein, 15 aa, Homo Sapiens
SRRSRSASSSPETRS

SEQ ID NO: 29613 - protein, 15 aa, Homo Sapiens
RRSRSASSSPETRSR

SEQ ID NO: 29614 - protein, 15 aa, Homo Sapiens
RSRSASSSPETRSRT

SEQ ID NO: 29615 - protein, 15 aa, Homo Sapiens
SRSASSSPETRSRTP

SEQ ID NO: 29616 - protein, 15 aa, Homo Sapiens
RSASSSPETRSRTPP

SEQ ID NO: 29617 - protein, 15 aa, Homo Sapiens
SASSSPETRSRTPPR

SEQ ID NO: 29618 - protein, 15 aa, Homo Sapiens
ASSSPETRSRTPPRH

SEQ ID NO: 29619 - protein, 15 aa, Homo Sapiens
SSSPETRSRTPPRHR

SEQ ID NO: 29620 - protein, 15 aa, Homo Sapiens
SSPETRSRTPPRHRR

SEQ ID NO: 29621 - protein, 15 aa, Homo Sapiens
SPETRSRTPPRHRRS

SEQ ID NO: 29622 - protein, 15 aa, Homo Sapiens
PETRSRTPPRHRRSP

SEQ ID NO: 29623 - protein, 15 aa, Homo Sapiens
ETRSRTPPRHRRSPS

SEQ ID NO: 29624 - protein, 15 aa, Homo Sapiens
TRSRTPPRHRRSPSV

SEQ ID NO: 29625 - protein, 15 aa, Homo Sapiens
RSRTPPRHRRSPSVS

SEQ ID NO: 29626 - protein, 15 aa, Homo Sapiens
SRTPPRHRRSPSVSS

SEQ ID NO: 29627 - protein, 15 aa, Homo Sapiens
RTPPRHRRSPSVSSP

SEQ ID NO: 29628 - protein, 15 aa, Homo Sapiens
TPPRHRRSPSVSSPE

SEQ ID NO: 29629 - protein, 15 aa, Homo Sapiens
PPRHRRSPSVSSPEP

SEQ ID NO: 29630 - protein, 15 aa, Homo Sapiens
PRHRRSPSVSSPEPA

SEQ ID NO: 29631 - protein, 15 aa, Homo Sapiens
RHRRSPSVSSPEPAE

SEQ ID NO: 29632 - protein, 15 aa, Homo Sapiens
HRRSPSVSSPEPAEK

SEQ ID NO: 29633 - protein, 15 aa, Homo Sapiens
RRSPSVSSPEPAEKS

SEQ ID NO: 29634 - protein, 15 aa, Homo Sapiens
RSPSVSSPEPAEKSR

SEQ ID NO: 29635 - protein, 15 aa, Homo Sapiens
SPSVSSPEPAEKSRS

SEQ ID NO: 29636 - protein, 15 aa, Homo Sapiens
PSVSSPEPAEKSRSS

SEQ ID NO: 29637 - protein, 15 aa, Homo Sapiens
SVSSPEPAEKSRSSR

SEQ ID NO: 29638 - protein, 15 aa, Homo Sapiens
VSSPEPAEKSRSSRR

SEQ ID NO: 29639 - protein, 15 aa, Homo Sapiens
SSPEPAEKSRSSRRR

SEQ ID NO: 29640 - protein, 15 aa, Homo Sapiens
SPEPAEKSRSSRRRR

SEQ ID NO: 29641 - protein, 15 aa, Homo Sapiens
PEPAEKSRSSRRRRS

SEQ ID NO: 29642 - protein, 15 aa, Homo Sapiens
EPAEKSRSSRRRRSA

SEQ ID NO: 29643 - protein, 15 aa, Homo Sapiens
PAEKSRSSRRRRSAS

SEQ ID NO: 29644 - protein, 15 aa, Homo Sapiens
AEKSRSSRRRRSASS

SEQ ID NO: 29645 - protein, 15 aa, Homo Sapiens
EKSRSSRRRRSASSP

SEQ ID NO: 29646 - protein, 15 aa, Homo Sapiens
KSRSSRRRRSASSPR

SEQ ID NO: 29647 - protein, 15 aa, Homo Sapiens
SRSSRRRRSASSPRT

SEQ ID NO: 29648 - protein, 15 aa, Homo Sapiens
RSSRRRRSASSPRTK

SEQ ID NO: 29649 - protein, 15 aa, Homo Sapiens
SSRRRRSASSPRTKT

SEQ ID NO: 29650 - protein, 15 aa, Homo Sapiens
SRRRRSASSPRTKTT

SEQ ID NO: 29651 - protein, 15 aa, Homo Sapiens
RRRRSASSPRTKTTS

SEQ ID NO: 29652 - protein, 15 aa, Homo Sapiens
RRRSASSPRTKTTSR

SEQ ID NO: 29653 - protein, 15 aa, Homo Sapiens
RRSASSPRTKTTSRR

SEQ ID NO: 29654 - protein, 15 aa, Homo Sapiens
RSASSPRTKTTSRRG

SEQ ID NO: 29655 - protein, 15 aa, Homo Sapiens
SASSPRTKTTSRRGR

SEQ ID NO: 29656 - protein, 15 aa, Homo Sapiens
ASSPRTKTTSRRGRS

SEQ ID NO: 29657 - protein, 15 aa, Homo Sapiens
SSPRTKTTSRRGRSP

SEQ ID NO: 29658 - protein, 15 aa, Homo Sapiens
SPRTKTTSRRGRSPS

SEQ ID NO: 29659 - protein, 15 aa, Homo Sapiens
PRTKTTSRRGRSPSP

SEQ ID NO: 29660 - protein, 15 aa, Homo Sapiens
RTKTTSRRGRSPSPK

SEQ ID NO: 29661 - protein, 15 aa, Homo Sapiens
TKTTSRRGRSPSPKP

SEQ ID NO: 29662 - protein, 15 aa, Homo Sapiens
KTTSRRGRSPSPKPR

SEQ ID NO: 29663 - protein, 15 aa, Homo Sapiens
TTSRRGRSPSPKPRG

SEQ ID NO: 29664 - protein, 15 aa, Homo Sapiens
TSRRGRSPSPKPRGL

SEQ ID NO: 29665 - protein, 15 aa, Homo Sapiens
SRRGRSPSPKPRGLQ

SEQ ID NO: 29666 - protein, 15 aa, Homo Sapiens
RRGRSPSPKPRGLQR

SEQ ID NO: 29667 - protein, 15 aa, Homo Sapiens
RGRSPSPKPRGLQRS

SEQ ID NO: 29668 - protein, 15 aa, Homo Sapiens
GRSPSPKPRGLQRSR

SEQ ID NO: 29669 - protein, 15 aa, Homo Sapiens
RSPSPKPRGLQRSRS

SEQ ID NO: 29670 - protein, 15 aa, Homo Sapiens
SPSPKPRGLQRSRSR

SEQ ID NO: 29671 - protein, 15 aa, Homo Sapiens
PSPKPRGLQRSRSRS

SEQ ID NO: 29672 - protein, 15 aa, Homo Sapiens
SPKPRGLQRSRSRSR

SEQ ID NO: 29673 - protein, 15 aa, Homo Sapiens
PKPRGLQRSRSRSRR

SEQ ID NO: 29674 - protein, 15 aa, Homo Sapiens
KPRGLQRSRSRSRRE

SEQ ID NO: 29675 - protein, 15 aa, Homo Sapiens
PRGLQRSRSRSRREK

SEQ ID NO: 29676 - protein, 15 aa, Homo Sapiens
RGLQRSRSRSRREKT

SEQ ID NO: 29677 - protein, 15 aa, Homo Sapiens
GLQRSRSRSRREKTR

SEQ ID NO: 29678 - protein, 15 aa, Homo Sapiens
LQRSRSRSRREKTRT

SEQ ID NO: 29679 - protein, 15 aa, Homo Sapiens
QRSRSRSRREKTRTT

SEQ ID NO: 29680 - protein, 15 aa, Homo Sapiens
RSRSRSRREKTRTTR

SEQ ID NO: 29681 - protein, 15 aa, Homo Sapiens
SRSRSRREKTRTTRR

SEQ ID NO: 29682 - protein, 15 aa, Homo Sapiens
RSRSRREKTRTTRRR

SEQ ID NO: 29683 - protein, 15 aa, Homo Sapiens
SRSRREKTRTTRRRD

SEQ ID NO: 29684 - protein, 15 aa, Homo Sapiens
RSRREKTRTTRRRDR

SEQ ID NO: 29685 - protein, 15 aa, Homo Sapiens
SRREKTRTTRRRDRS

SEQ ID NO: 29686 - protein, 15 aa, Homo Sapiens
RREKTRTTRRRDRSG

SEQ ID NO: 29687 - protein, 15 aa, Homo Sapiens
REKTRTTRRRDRSGS

SEQ ID NO: 29688 - protein, 15 aa, Homo Sapiens
EKTRTTRRRDRSGSS

SEQ ID NO: 29689 - protein, 15 aa, Homo Sapiens
KTRTTRRRDRSGSSQ

SEQ ID NO: 29690 - protein, 15 aa, Homo Sapiens
TRTTRRRDRSGSSQS

SEQ ID NO: 29691 - protein, 15 aa, Homo Sapiens
RTTRRRDRSGSSQST

SEQ ID NO: 29692 - protein, 15 aa, Homo Sapiens
TTRRRDRSGSSQSTS

SEQ ID NO: 29693 - protein, 15 aa, Homo Sapiens
TRRRDRSGSSQSTSR

SEQ ID NO: 29694 - protein, 15 aa, Homo Sapiens
RRRDRSGSSQSTSRR

SEQ ID NO: 29695 - protein, 15 aa, Homo Sapiens
RRDRSGSSQSTSRRR

SEQ ID NO: 29696 - protein, 15 aa, Homo Sapiens
RDRSGSSQSTSRRRQ

SEQ ID NO: 29697 - protein, 15 aa, Homo Sapiens
DRSGSSQSTSRRRQR

SEQ ID NO: 29698 - protein, 15 aa, Homo Sapiens
RSGSSQSTSRRRQRS

SEQ ID NO: 29699 - protein, 15 aa, Homo Sapiens
SGSSQSTSRRRQRSR

SEQ ID NO: 29700 - protein, 15 aa, Homo Sapiens
GSSQSTSRRRQRSRS

SEQ ID NO: 29701 - protein, 15 aa, Homo Sapiens
SSQSTSRRRQRSRSR

SEQ ID NO: 29702 - protein, 15 aa, Homo Sapiens
SQSTSRRRQRSRSRS

SEQ ID NO: 29703 - protein, 15 aa, Homo Sapiens
QSTSRRRQRSRSRSR

SEQ ID NO: 29704 - protein, 15 aa, Homo Sapiens
STSRRRQRSRSRSRV

SEQ ID NO: 29705 - protein, 15 aa, Homo Sapiens
TSRRRQRSRSRSRVT

SEQ ID NO: 29706 - protein, 15 aa, Homo Sapiens
SRRRQRSRSRSRVTR

SEQ ID NO: 29707 - protein, 15 aa, Homo Sapiens
RRRQRSRSRSRVTRR

SEQ ID NO: 29708 - protein, 15 aa, Homo Sapiens
RRQRSRSRSRVTRRR

SEQ ID NO: 29709 - protein, 15 aa, Homo Sapiens
RQRSRSRSRVTRRRR

SEQ ID NO: 29710 - protein, 15 aa, Homo Sapiens
QRSRSRSRVTRRRRG

SEQ ID NO: 29711 - protein, 15 aa, Homo Sapiens
RSRSRSRVTRRRRGG

SEQ ID NO: 29712 - protein, 15 aa, Homo Sapiens
SRSRSRVTRRRRGGS

SEQ ID NO: 29713 - protein, 15 aa, Homo Sapiens
RSRSRVTRRRRGGSG

SEQ ID NO: 29714 - protein, 15 aa, Homo Sapiens
SRSRVTRRRRGGSGY

SEQ ID NO: 29715 - protein, 15 aa, Homo Sapiens
RSRVTRRRRGGSGYH

SEQ ID NO: 29716 - protein, 15 aa, Homo Sapiens
SRVTRRRRGGSGYHS

SEQ ID NO: 29717 - protein, 15 aa, Homo Sapiens
RVTRRRRGGSGYHSR

SEQ ID NO: 29718 - protein, 15 aa, Homo Sapiens
VTRRRRGGSGYHSRS

SEQ ID NO: 29719 - protein, 15 aa, Homo Sapiens
TRRRRGGSGYHSRSP

SEQ ID NO: 29720 - protein, 15 aa, Homo Sapiens
RRRRGGSGYHSRSPA

SEQ ID NO: 29721 - protein, 15 aa, Homo Sapiens
RRRGGSGYHSRSPAR

SEQ ID NO: 29722 - protein, 15 aa, Homo Sapiens
RRGGSGYHSRSPARQ

SEQ ID NO: 29723 - protein, 15 aa, Homo Sapiens
RGGSGYHSRSPARQE

SEQ ID NO: 29724 - protein, 15 aa, Homo Sapiens
GGSGYHSRSPARQES

SEQ ID NO: 29725 - protein, 15 aa, Homo Sapiens
GSGYHSRSPARQESS

SEQ ID NO: 29726 - protein, 15 aa, Homo Sapiens
SGYHSRSPARQESSR

SEQ ID NO: 29727 - protein, 15 aa, Homo Sapiens
GYHSRSPARQESSRT

SEQ ID NO: 29728 - protein, 15 aa, Homo Sapiens
YHSRSPARQESSRTS

SEQ ID NO: 29729 - protein, 15 aa, Homo Sapiens
HSRSPARQESSRTSS

SEQ ID NO: 29730 - protein, 15 aa, Homo Sapiens
SRSPARQESSRTSSR

SEQ ID NO: 29731 - protein, 15 aa, Homo Sapiens
RSPARQESSRTSSRR

SEQ ID NO: 29732 - protein, 15 aa, Homo Sapiens
SPARQESSRTSSRRR

SEQ ID NO: 29733 - protein, 15 aa, Homo Sapiens
PARQESSRTSSRRRR

SEQ ID NO: 29734 - protein, 15 aa, Homo Sapiens
ARQESSRTSSRRRRG

SEQ ID NO: 29735 - protein, 15 aa, Homo Sapiens
RQESSRTSSRRRRGR

SEQ ID NO: 29736 - protein, 15 aa, Homo Sapiens
QESSRTSSRRRRGRS

SEQ ID NO: 29737 - protein, 15 aa, Homo Sapiens
ESSRTSSRRRRGRSR

SEQ ID NO: 29738 - protein, 15 aa, Homo Sapiens
SSRTSSRRRRGRSRT

SEQ ID NO: 29739 - protein, 15 aa, Homo Sapiens
SRTSSRRRRGRSRTP

SEQ ID NO: 29740 - protein, 15 aa, Homo Sapiens
RTSSRRRRGRSRTPP

SEQ ID NO: 29741 - protein, 15 aa, Homo Sapiens
TSSRRRRGRSRTPPT

SEQ ID NO: 29742 - protein, 15 aa, Homo Sapiens
SSRRRRGRSRTPPTS

SEQ ID NO: 29743 - protein, 15 aa, Homo Sapiens
SRRRRGRSRTPPTSR

SEQ ID NO: 29744 - protein, 15 aa, Homo Sapiens
RRRRGRSRTPPTSRK

SEQ ID NO: 29745 - protein, 15 aa, Homo Sapiens
RRRGRSRTPPTSRKR

SEQ ID NO: 29746 - protein, 15 aa, Homo Sapiens
RRGRSRTPPTSRKRS

SEQ ID NO: 29747 - protein, 15 aa, Homo Sapiens
RGRSRTPPTSRKRSR

SEQ ID NO: 29748 - protein, 15 aa, Homo Sapiens
GRSRTPPTSRKRSRS

SEQ ID NO: 29749 - protein, 15 aa, Homo Sapiens
RSRTPPTSRKRSRSR

SEQ ID NO: 29750 - protein, 15 aa, Homo Sapiens
SRTPPTSRKRSRSRT

SEQ ID NO: 29751 - protein, 15 aa, Homo Sapiens
RTPPTSRKRSRSRTS

SEQ ID NO: 29752 - protein, 15 aa, Homo Sapiens
TPPTSRKRSRSRTSP

SEQ ID NO: 29753 - protein, 15 aa, Homo Sapiens
PPTSRKRSRSRTSPA

SEQ ID NO: 29754 - protein, 15 aa, Homo Sapiens
PTSRKRSRSRTSPAP

SEQ ID NO: 29755 - protein, 15 aa, Homo Sapiens
TSRKRSRSRTSPAPW

SEQ ID NO: 29756 - protein, 15 aa, Homo Sapiens
SRKRSRSRTSPAPWK

SEQ ID NO: 29757 - protein, 15 aa, Homo Sapiens
RKRSRSRTSPAPWKR

SEQ ID NO: 29758 - protein, 15 aa, Homo Sapiens
KRSRSRTSPAPWKRS

SEQ ID NO: 29759 - protein, 15 aa, Homo Sapiens
RSRSRTSPAPWKRSR

SEQ ID NO: 29760 - protein, 15 aa, Homo Sapiens
SRSRTSPAPWKRSRS

SEQ ID NO: 29761 - protein, 15 aa, Homo Sapiens
RSRTSPAPWKRSRSR

SEQ ID NO: 29762 - protein, 15 aa, Homo Sapiens
SRTSPAPWKRSRSRA

SEQ ID NO: 29763 - protein, 15 aa, Homo Sapiens
RTSPAPWKRSRSRAS

SEQ ID NO: 29764 - protein, 15 aa, Homo Sapiens
TSPAPWKRSRSRASP

SEQ ID NO: 29765 - protein, 15 aa, Homo Sapiens
SPAPWKRSRSRASPA

SEQ ID NO: 29766 - protein, 15 aa, Homo Sapiens
PAPWKRSRSRASPAT

SEQ ID NO: 29767 - protein, 15 aa, Homo Sapiens
APWKRSRSRASPATH

SEQ ID NO: 29768 - protein, 15 aa, Homo Sapiens
PWKRSRSRASPATHR

SEQ ID NO: 29769 - protein, 15 aa, Homo Sapiens
WKRSRSRASPATHRR

SEQ ID NO: 29770 - protein, 15 aa, Homo Sapiens
KRSRSRASPATHRRS

SEQ ID NO: 29771 - protein, 15 aa, Homo Sapiens
RSRSRASPATHRRSR

SEQ ID NO: 29772 - protein, 15 aa, Homo Sapiens
SRSRASPATHRRSRS

SEQ ID NO: 29773 - protein, 15 aa, Homo Sapiens
RSRASPATHRRSRSR

SEQ ID NO: 29774 - protein, 15 aa, Homo Sapiens
SRASPATHRRSRSRT

SEQ ID NO: 29775 - protein, 15 aa, Homo Sapiens
RASPATHRRSRSRTP

SEQ ID NO: 29776 - protein, 15 aa, Homo Sapiens
ASPATHRRSRSRTPL

SEQ ID NO: 29777 - protein, 15 aa, Homo Sapiens
SPATHRRSRSRTPLI

SEQ ID NO: 29778 - protein, 15 aa, Homo Sapiens
PATHRRSRSRTPLIS

SEQ ID NO: 29779 - protein, 15 aa, Homo Sapiens
ATHRRSRSRTPLISR

SEQ ID NO: 29780 - protein, 15 aa, Homo Sapiens
THRRSRSRTPLISRR

SEQ ID NO: 29781 - protein, 15 aa, Homo Sapiens
HRRSRSRTPLISRRR

SEQ ID NO: 29782 - protein, 15 aa, Homo Sapiens
RRSRSRTPLISRRRS

SEQ ID NO: 29783 - protein, 15 aa, Homo Sapiens
RSRSRTPLISRRRSR

SEQ ID NO: 29784 - protein, 15 aa, Homo Sapiens
SRSRTPLISRRRSRS

SEQ ID NO: 29785 - protein, 15 aa, Homo Sapiens
RSRTPLISRRRSRSR

SEQ ID NO: 29786 - protein, 15 aa, Homo Sapiens
SRTPLISRRRSRSRT

SEQ ID NO: 29787 - protein, 15 aa, Homo Sapiens
RTPLISRRRSRSRTS

SEQ ID NO: 29788 - protein, 15 aa, Homo Sapiens
TPLISRRRSRSRTSP

SEQ ID NO: 29789 - protein, 15 aa, Homo Sapiens
PLISRRRSRSRTSPV

SEQ ID NO: 29790 - protein, 15 aa, Homo Sapiens
LISRRRSRSRTSPVS

SEQ ID NO: 29791 - protein, 15 aa, Homo Sapiens
ISRRRSRSRTSPVSR

SEQ ID NO: 29792 - protein, 15 aa, Homo Sapiens
SRRRSRSRTSPVSRR

SEQ ID NO: 29793 - protein, 15 aa, Homo Sapiens
RRRSRSRTSPVSRRR

SEQ ID NO: 29794 - protein, 15 aa, Homo Sapiens
RRSRSRTSPVSRRRS

SEQ ID NO: 29795 - protein, 15 aa, Homo Sapiens
RSRSRTSPVSRRRSR

SEQ ID NO: 29796 - protein, 15 aa, Homo Sapiens
SRSRTSPVSRRRSRS

SEQ ID NO: 29797 - protein, 15 aa, Homo Sapiens
RSRTSPVSRRRSRSR

SEQ ID NO: 29798 - protein, 15 aa, Homo Sapiens
SRTSPVSRRRSRSRT

SEQ ID NO: 29799 - protein, 15 aa, Homo Sapiens
RTSPVSRRRSRSRTS

SEQ ID NO: 29800 - protein, 15 aa, Homo Sapiens
TSPVSRRRSRSRTSV

SEQ ID NO: 29801 - protein, 15 aa, Homo Sapiens
SPVSRRRSRSRTSVT

SEQ ID NO: 29802 - protein, 15 aa, Homo Sapiens
PVSRRRSRSRTSVTR

SEQ ID NO: 29803 - protein, 15 aa, Homo Sapiens
VSRRRSRSRTSVTRR

SEQ ID NO: 29804 - protein, 15 aa, Homo Sapiens
SRRRSRSRTSVTRRR

SEQ ID NO: 29805 - protein, 15 aa, Homo Sapiens
RRRSRSRTSVTRRRS

SEQ ID NO: 29806 - protein, 15 aa, Homo Sapiens
RRSRSRTSVTRRRSR

SEQ ID NO: 29807 - protein, 15 aa, Homo Sapiens
RSRSRTSVTRRRSRS

SEQ ID NO: 29808 - protein, 15 aa, Homo Sapiens
SRSRTSVTRRRSRSR

SEQ ID NO: 29809 - protein, 15 aa, Homo Sapiens
RSRTSVTRRRSRSRA

SEQ ID NO: 29810 - protein, 15 aa, Homo Sapiens
SRTSVTRRRSRSRAS

SEQ ID NO: 29811 - protein, 15 aa, Homo Sapiens
RTSVTRRRSRSRASP

SEQ ID NO: 29812 - protein, 15 aa, Homo Sapiens
TSVTRRRSRSRASPV

SEQ ID NO: 29813 - protein, 15 aa, Homo Sapiens
SVTRRRSRSRASPVS

SEQ ID NO: 29814 - protein, 15 aa, Homo Sapiens
VTRRRSRSRASPVSR

SEQ ID NO: 29815 - protein, 15 aa, Homo Sapiens
TRRRSRSRASPVSRR

SEQ ID NO: 29816 - protein, 15 aa, Homo Sapiens
RRRSRSRASPVSRRR

SEQ ID NO: 29817 - protein, 15 aa, Homo Sapiens
RRSRSRASPVSRRRS

SEQ ID NO: 29818 - protein, 15 aa, Homo Sapiens
RSRSRASPVSRRRSR

SEQ ID NO: 29819 - protein, 15 aa, Homo Sapiens
SRSRASPVSRRRSRS

SEQ ID NO: 29820 - protein, 15 aa, Homo Sapiens
RSRASPVSRRRSRSR

SEQ ID NO: 29821 - protein, 15 aa, Homo Sapiens
SRASPVSRRRSRSRT

SEQ ID NO: 29822 - protein, 15 aa, Homo Sapiens
RASPVSRRRSRSRTP

SEQ ID NO: 29823 - protein, 15 aa, Homo Sapiens
ASPVSRRRSRSRTPP

SEQ ID NO: 29824 - protein, 15 aa, Homo Sapiens
SPVSRRRSRSRTPPV

SEQ ID NO: 29825 - protein, 15 aa, Homo Sapiens
PVSRRRSRSRTPPVT

SEQ ID NO: 29826 - protein, 15 aa, Homo Sapiens
VSRRRSRSRTPPVTR

SEQ ID NO: 29827 - protein, 15 aa, Homo Sapiens
SRRRSRSRTPPVTRR

SEQ ID NO: 29828 - protein, 15 aa, Homo Sapiens
RRRSRSRTPPVTRRR

SEQ ID NO: 29829 - protein, 15 aa, Homo Sapiens
RRSRSRTPPVTRRRS

SEQ ID NO: 29830 - protein, 15 aa, Homo Sapiens
RSRSRTPPVTRRRSR

SEQ ID NO: 29831 - protein, 15 aa, Homo Sapiens
SRSRTPPVTRRRSRS

SEQ ID NO: 29832 - protein, 15 aa, Homo Sapiens
RSRTPPVTRRRSRSR

SEQ ID NO: 29833 - protein, 15 aa, Homo Sapiens
SRTPPVTRRRSRSRT

SEQ ID NO: 29834 - protein, 15 aa, Homo Sapiens
RTPPVTRRRSRSRTP

SEQ ID NO: 29835 - protein, 15 aa, Homo Sapiens
TPPVTRRRSRSRTPT

SEQ ID NO: 29836 - protein, 15 aa, Homo Sapiens
PPVTRRRSRSRTPTT

SEQ ID NO: 29837 - protein, 15 aa, Homo Sapiens
PVTRRRSRSRTPTTR

SEQ ID NO: 29838 - protein, 15 aa, Homo Sapiens
VTRRRSRSRTPTTRR

SEQ ID NO: 29839 - protein, 15 aa, Homo Sapiens
TRRRSRSRTPTTRRR

SEQ ID NO: 29840 - protein, 15 aa, Homo Sapiens
RRRSRSRTPTTRRRS

SEQ ID NO: 29841 - protein, 15 aa, Homo Sapiens
RRSRSRTPTTRRRSR

SEQ ID NO: 29842 - protein, 15 aa, Homo Sapiens
RSRSRTPTTRRRSRS

SEQ ID NO: 29843 - protein, 15 aa, Homo Sapiens
SRSRTPTTRRRSRSR

SEQ ID NO: 29844 - protein, 15 aa, Homo Sapiens
RSRTPTTRRRSRSRT

SEQ ID NO: 29845 - protein, 15 aa, Homo Sapiens
SRTPTTRRRSRSRTP

SEQ ID NO: 29846 - protein, 15 aa, Homo Sapiens
RTPTTRRRSRSRTPP

SEQ ID NO: 29847 - protein, 15 aa, Homo Sapiens
TPTTRRRSRSRTPPV

SEQ ID NO: 29848 - protein, 15 aa, Homo Sapiens
PTTRRRSRSRTPPVT

SEQ ID NO: 29849 - protein, 15 aa, Homo Sapiens
TTRRRSRSRTPPVTR

SEQ ID NO: 29850 - protein, 15 aa, Homo Sapiens
TRRRSRSRTPPVTRR

SEQ ID NO: 29851 - protein, 15 aa, Homo Sapiens
RRRSRSRTPPVTRRR

SEQ ID NO: 29852 - protein, 15 aa, Homo Sapiens
RRSRSRTPPVTRRRS

SEQ ID NO: 29853 - protein, 15 aa, Homo Sapiens
RSRSRTPPVTRRRSR

SEQ ID NO: 29854 - protein, 15 aa, Homo Sapiens
SRSRTPPVTRRRSRS

SEQ ID NO: 29855 - protein, 15 aa, Homo Sapiens
RSRTPPVTRRRSRSR

SEQ ID NO: 29856 - protein, 15 aa, Homo Sapiens
SRTPPVTRRRSRSRT

SEQ ID NO: 29857 - protein, 15 aa, Homo Sapiens
RTPPVTRRRSRSRTP

SEQ ID NO: 29858 - protein, 15 aa, Homo Sapiens
TPPVTRRRSRSRTPP

SEQ ID NO: 29859 - protein, 15 aa, Homo Sapiens
PPVTRRRSRSRTPPV

SEQ ID NO: 29860 - protein, 15 aa, Homo Sapiens
PVTRRRSRSRTPPVT

SEQ ID NO: 29861 - protein, 15 aa, Homo Sapiens
VTRRRSRSRTPPVTR

SEQ ID NO: 29862 - protein, 15 aa, Homo Sapiens
TRRRSRSRTPPVTRR

SEQ ID NO: 29863 - protein, 15 aa, Homo Sapiens
RRRSRSRTPPVTRRR

SEQ ID NO: 29864 - protein, 15 aa, Homo Sapiens
RRSRSRTPPVTRRRS

SEQ ID NO: 29865 - protein, 15 aa, Homo Sapiens
RSRSRTPPVTRRRSR

SEQ ID NO: 29866 - protein, 15 aa, Homo Sapiens
SRSRTPPVTRRRSRS

SEQ ID NO: 29867 - protein, 15 aa, Homo Sapiens
RSRTPPVTRRRSRSR

SEQ ID NO: 29868 - protein, 15 aa, Homo Sapiens
SRTPPVTRRRSRSRT

SEQ ID NO: 29869 - protein, 15 aa, Homo Sapiens
RTPPVTRRRSRSRTS

SEQ ID NO: 29870 - protein, 15 aa, Homo Sapiens
TPPVTRRRSRSRTSP

SEQ ID NO: 29871 - protein, 15 aa, Homo Sapiens
PPVTRRRSRSRTSPI

SEQ ID NO: 29872 - protein, 15 aa, Homo Sapiens
PVTRRRSRSRTSPIT

SEQ ID NO: 29873 - protein, 15 aa, Homo Sapiens
VTRRRSRSRTSPITR

SEQ ID NO: 29874 - protein, 15 aa, Homo Sapiens
TRRRSRSRTSPITRR

SEQ ID NO: 29875 - protein, 15 aa, Homo Sapiens
RRRSRSRTSPITRRR

SEQ ID NO: 29876 - protein, 15 aa, Homo Sapiens
RRSRSRTSPITRRRS

SEQ ID NO: 29877 - protein, 15 aa, Homo Sapiens
RSRSRTSPITRRRSR

SEQ ID NO: 29878 - protein, 15 aa, Homo Sapiens
SRSRTSPITRRRSRS

SEQ ID NO: 29879 - protein, 15 aa, Homo Sapiens
RSRTSPITRRRSRSR

SEQ ID NO: 29880 - protein, 15 aa, Homo Sapiens
SRTSPITRRRSRSRT

SEQ ID NO: 29881 - protein, 15 aa, Homo Sapiens
RTSPITRRRSRSRTS

SEQ ID NO: 29882 - protein, 15 aa, Homo Sapiens
TSPITRRRSRSRTSP

SEQ ID NO: 29883 - protein, 15 aa, Homo Sapiens
SPITRRRSRSRTSPV

SEQ ID NO: 29884 - protein, 15 aa, Homo Sapiens
PITRRRSRSRTSPVT

SEQ ID NO: 29885 - protein, 15 aa, Homo Sapiens
ITRRRSRSRTSPVTR

SEQ ID NO: 29886 - protein, 15 aa, Homo Sapiens
TRRRSRSRTSPVTRR

SEQ ID NO: 29887 - protein, 15 aa, Homo Sapiens
RRRSRSRTSPVTRRR

SEQ ID NO: 29888 - protein, 15 aa, Homo Sapiens
RRSRSRTSPVTRRRS

SEQ ID NO: 29889 - protein, 15 aa, Homo Sapiens
RSRSRTSPVTRRRSR

SEQ ID NO: 29890 - protein, 15 aa, Homo Sapiens
SRSRTSPVTRRRSRS

SEQ ID NO: 29891 - protein, 15 aa, Homo Sapiens
RSRTSPVTRRRSRSR

SEQ ID NO: 29892 - protein, 15 aa, Homo Sapiens
SRTSPVTRRRSRSRT

SEQ ID NO: 29893 - protein, 15 aa, Homo Sapiens
RTSPVTRRRSRSRTS

SEQ ID NO: 29894 - protein, 15 aa, Homo Sapiens
TSPVTRRRSRSRTSP

SEQ ID NO: 29895 - protein, 15 aa, Homo Sapiens
SPVTRRRSRSRTSPV

SEQ ID NO: 29896 - protein, 15 aa, Homo Sapiens
PVTRRRSRSRTSPVT

SEQ ID NO: 29897 - protein, 15 aa, Homo Sapiens
VTRRRSRSRTSPVTR

SEQ ID NO: 29898 - protein, 15 aa, Homo Sapiens
TRRRSRSRTSPVTRR

SEQ ID NO: 29899 - protein, 15 aa, Homo Sapiens
RRRSRSRTSPVTRRR

SEQ ID NO: 29900 - protein, 15 aa, Homo Sapiens
RRSRSRTSPVTRRRS

SEQ ID NO: 29901 - protein, 15 aa, Homo Sapiens
RSRSRTSPVTRRRSR

SEQ ID NO: 29902 - protein, 15 aa, Homo Sapiens
SRSRTSPVTRRRSRS

SEQ ID NO: 29903 - protein, 15 aa, Homo Sapiens
RSRTSPVTRRRSRSR

SEQ ID NO: 29904 - protein, 15 aa, Homo Sapiens
SRTSPVTRRRSRSRT

SEQ ID NO: 29905 - protein, 15 aa, Homo Sapiens
RTSPVTRRRSRSRTS

SEQ ID NO: 29906 - protein, 15 aa, Homo Sapiens
TSPVTRRRSRSRTSP

SEQ ID NO: 29907 - protein, 15 aa, Homo Sapiens
SPVTRRRSRSRTSPV

SEQ ID NO: 29908 - protein, 15 aa, Homo Sapiens
PVTRRRSRSRTSPVT

SEQ ID NO: 29909 - protein, 15 aa, Homo Sapiens
VTRRRSRSRTSPVTR

SEQ ID NO: 29910 - protein, 15 aa, Homo Sapiens
TRRRSRSRTSPVTRR

SEQ ID NO: 29911 - protein, 15 aa, Homo Sapiens
RRRSRSRTSPVTRRR

SEQ ID NO: 29912 - protein, 15 aa, Homo Sapiens
RRSRSRTSPVTRRRS

SEQ ID NO: 29913 - protein, 15 aa, Homo Sapiens
RSRSRTSPVTRRRSR

SEQ ID NO: 29914 - protein, 15 aa, Homo Sapiens
SRSRTSPVTRRRSRS

SEQ ID NO: 29915 - protein, 15 aa, Homo Sapiens
RSRTSPVTRRRSRSR

SEQ ID NO: 29916 - protein, 15 aa, Homo Sapiens
SRTSPVTRRRSRSRT

SEQ ID NO: 29917 - protein, 15 aa, Homo Sapiens
RTSPVTRRRSRSRTP

SEQ ID NO: 29918 - protein, 15 aa, Homo Sapiens
TSPVTRRRSRSRTPP

SEQ ID NO: 29919 - protein, 15 aa, Homo Sapiens
SPVTRRRSRSRTPPA

SEQ ID NO: 29920 - protein, 15 aa, Homo Sapiens
PVTRRRSRSRTPPAI

SEQ ID NO: 29921 - protein, 15 aa, Homo Sapiens
VTRRRSRSRTPPAIR

SEQ ID NO: 29922 - protein, 15 aa, Homo Sapiens
TRRRSRSRTPPAIRR

SEQ ID NO: 29923 - protein, 15 aa, Homo Sapiens
RRRSRSRTPPAIRRR

SEQ ID NO: 29924 - protein, 15 aa, Homo Sapiens
RRSRSRTPPAIRRRS

SEQ ID NO: 29925 - protein, 15 aa, Homo Sapiens
RSRSRTPPAIRRRSR

SEQ ID NO: 29926 - protein, 15 aa, Homo Sapiens
SRSRTPPAIRRRSRS

SEQ ID NO: 29927 - protein, 15 aa, Homo Sapiens
RSRTPPAIRRRSRSR

SEQ ID NO: 29928 - protein, 15 aa, Homo Sapiens
SRTPPAIRRRSRSRT

SEQ ID NO: 29929 - protein, 15 aa, Homo Sapiens
RTPPAIRRRSRSRTP

SEQ ID NO: 29930 - protein, 15 aa, Homo Sapiens
TPPAIRRRSRSRTPL

SEQ ID NO: 29931 - protein, 15 aa, Homo Sapiens
PPAIRRRSRSRTPLL

SEQ ID NO: 29932 - protein, 15 aa, Homo Sapiens
PAIRRRSRSRTPLLP

SEQ ID NO: 29933 - protein, 15 aa, Homo Sapiens
AIRRRSRSRTPLLPR

SEQ ID NO: 29934 - protein, 15 aa, Homo Sapiens
IRRRSRSRTPLLPRK

SEQ ID NO: 29935 - protein, 15 aa, Homo Sapiens
RRRSRSRTPLLPRKR

SEQ ID NO: 29936 - protein, 15 aa, Homo Sapiens
RRSRSRTPLLPRKRS

SEQ ID NO: 29937 - protein, 15 aa, Homo Sapiens
RSRSRTPLLPRKRSR

SEQ ID NO: 29938 - protein, 15 aa, Homo Sapiens
SRSRTPLLPRKRSRS

SEQ ID NO: 29939 - protein, 15 aa, Homo Sapiens
RSRTPLLPRKRSRSR

SEQ ID NO: 29940 - protein, 15 aa, Homo Sapiens
SRTPLLPRKRSRSRS

SEQ ID NO: 29941 - protein, 15 aa, Homo Sapiens
RTPLLPRKRSRSRSP

SEQ ID NO: 29942 - protein, 15 aa, Homo Sapiens
TPLLPRKRSRSRSPL

SEQ ID NO: 29943 - protein, 15 aa, Homo Sapiens
PLLPRKRSRSRSPLA

SEQ ID NO: 29944 - protein, 15 aa, Homo Sapiens
LLPRKRSRSRSPLAI

SEQ ID NO: 29945 - protein, 15 aa, Homo Sapiens
LPRKRSRSRSPLAIR

SEQ ID NO: 29946 - protein, 15 aa, Homo Sapiens
PRKRSRSRSPLAIRR

SEQ ID NO: 29947 - protein, 15 aa, Homo Sapiens
RKRSRSRSPLAIRRR

SEQ ID NO: 29948 - protein, 15 aa, Homo Sapiens
KRSRSRSPLAIRRRS

SEQ ID NO: 29949 - protein, 15 aa, Homo Sapiens
RSRSRSPLAIRRRSR

SEQ ID NO: 29950 - protein, 15 aa, Homo Sapiens
SRSRSPLAIRRRSRS

SEQ ID NO: 29951 - protein, 15 aa, Homo Sapiens
RSRSPLAIRRRSRSR

SEQ ID NO: 29952 - protein, 15 aa, Homo Sapiens
SRSPLAIRRRSRSRT

SEQ ID NO: 29953 - protein, 15 aa, Homo Sapiens
RSPLAIRRRSRSRTP

SEQ ID NO: 29954 - protein, 15 aa, Homo Sapiens
SPLAIRRRSRSRTPR

SEQ ID NO: 29955 - protein, 15 aa, Homo Sapiens
PLAIRRRSRSRTPRT

SEQ ID NO: 29956 - protein, 15 aa, Homo Sapiens
LAIRRRSRSRTPRTA

SEQ ID NO: 29957 - protein, 15 aa, Homo Sapiens
AIRRRSRSRTPRTAR

SEQ ID NO: 29958 - protein, 15 aa, Homo Sapiens
IRRRSRSRTPRTARG

SEQ ID NO: 29959 - protein, 15 aa, Homo Sapiens
RRRSRSRTPRTARGK

SEQ ID NO: 29960 - protein, 15 aa, Homo Sapiens
RRSRSRTPRTARGKR

SEQ ID NO: 29961 - protein, 15 aa, Homo Sapiens
RSRSRTPRTARGKRS

SEQ ID NO: 29962 - protein, 15 aa, Homo Sapiens
SRSRTPRTARGKRSL

SEQ ID NO: 29963 - protein, 15 aa, Homo Sapiens
RSRTPRTARGKRSLT

SEQ ID NO: 29964 - protein, 15 aa, Homo Sapiens
SRTPRTARGKRSLTR

SEQ ID NO: 29965 - protein, 15 aa, Homo Sapiens
RTPRTARGKRSLTRS

SEQ ID NO: 29966 - protein, 15 aa, Homo Sapiens
TPRTARGKRSLTRSP

SEQ ID NO: 29967 - protein, 15 aa, Homo Sapiens
PRTARGKRSLTRSPP

SEQ ID NO: 29968 - protein, 15 aa, Homo Sapiens
RTARGKRSLTRSPPA

SEQ ID NO: 29969 - protein, 15 aa, Homo Sapiens
TARGKRSLTRSPPAI

SEQ ID NO: 29970 - protein, 15 aa, Homo Sapiens
ARGKRSLTRSPPAIR

SEQ ID NO: 29971 - protein, 15 aa, Homo Sapiens
RGKRSLTRSPPAIRR

SEQ ID NO: 29972 - protein, 15 aa, Homo Sapiens
GKRSLTRSPPAIRRR

SEQ ID NO: 29973 - protein, 15 aa, Homo Sapiens
KRSLTRSPPAIRRRS

SEQ ID NO: 29974 - protein, 15 aa, Homo Sapiens
RSLTRSPPAIRRRSA

SEQ ID NO: 29975 - protein, 15 aa, Homo Sapiens
SLTRSPPAIRRRSAS

SEQ ID NO: 29976 - protein, 15 aa, Homo Sapiens
LTRSPPAIRRRSASG

SEQ ID NO: 29977 - protein, 15 aa, Homo Sapiens
TRSPPAIRRRSASGS

SEQ ID NO: 29978 - protein, 15 aa, Homo Sapiens
RSPPAIRRRSASGSS

SEQ ID NO: 29979 - protein, 15 aa, Homo Sapiens
SPPAIRRRSASGSSS

SEQ ID NO: 29980 - protein, 15 aa, Homo Sapiens
PPAIRRRSASGSSSD

SEQ ID NO: 29981 - protein, 15 aa, Homo Sapiens
PAIRRRSASGSSSDR

SEQ ID NO: 29982 - protein, 15 aa, Homo Sapiens
AIRRRSASGSSSDRS

SEQ ID NO: 29983 - protein, 15 aa, Homo Sapiens
IRRRSASGSSSDRSR

SEQ ID NO: 29984 - protein, 15 aa, Homo Sapiens
RRRSASGSSSDRSRS

SEQ ID NO: 29985 - protein, 15 aa, Homo Sapiens
RRSASGSSSDRSRSA

SEQ ID NO: 29986 - protein, 15 aa, Homo Sapiens
RSASGSSSDRSRSAT

SEQ ID NO: 29987 - protein, 15 aa, Homo Sapiens
SASGSSSDRSRSATP

SEQ ID NO: 29988 - protein, 15 aa, Homo Sapiens
ASGSSSDRSRSATPP

SEQ ID NO: 29989 - protein, 15 aa, Homo Sapiens
SGSSSDRSRSATPPA

SEQ ID NO: 29990 - protein, 15 aa, Homo Sapiens
GSSSDRSRSATPPAT

SEQ ID NO: 29991 - protein, 15 aa, Homo Sapiens
SSSDRSRSATPPATR

SEQ ID NO: 29992 - protein, 15 aa, Homo Sapiens
SSDRSRSATPPATRN

SEQ ID NO: 29993 - protein, 15 aa, Homo Sapiens
SDRSRSATPPATRNH

SEQ ID NO: 29994 - protein, 15 aa, Homo Sapiens
DRSRSATPPATRNHS

SEQ ID NO: 29995 - protein, 15 aa, Homo Sapiens
RSRSATPPATRNHSG

SEQ ID NO: 29996 - protein, 15 aa, Homo Sapiens
SRSATPPATRNHSGS

SEQ ID NO: 29997 - protein, 15 aa, Homo Sapiens
RSATPPATRNHSGSR

SEQ ID NO: 29998 - protein, 15 aa, Homo Sapiens
SATPPATRNHSGSRT

SEQ ID NO: 29999 - protein, 15 aa, Homo Sapiens
ATPPATRNHSGSRTP

SEQ ID NO: 30000 - protein, 15 aa, Homo Sapiens
TPPATRNHSGSRTPP

SEQ ID NO: 30001 - protein, 15 aa, Homo Sapiens
PPATRNHSGSRTPPV

SEQ ID NO: 30002 - protein, 15 aa, Homo Sapiens
PATRNHSGSRTPPVA

SEQ ID NO: 30003 - protein, 15 aa, Homo Sapiens
ATRNHSGSRTPPVAL

SEQ ID NO: 30004 - protein, 15 aa, Homo Sapiens
TRNHSGSRTPPVALN

SEQ ID NO: 30005 - protein, 15 aa, Homo Sapiens
RNHSGSRTPPVALNS

SEQ ID NO: 30006 - protein, 15 aa, Homo Sapiens
NHSGSRTPPVALNSS

SEQ ID NO: 30007 - protein, 15 aa, Homo Sapiens
HSGSRTPPVALNSSR

SEQ ID NO: 30008 - protein, 15 aa, Homo Sapiens
SGSRTPPVALNSSRM

SEQ ID NO: 30009 - protein, 15 aa, Homo Sapiens
GSRTPPVALNSSRMS

SEQ ID NO: 30010 - protein, 15 aa, Homo Sapiens
SRTPPVALNSSRMSC

SEQ ID NO: 30011 - protein, 15 aa, Homo Sapiens
RTPPVALNSSRMSCF

SEQ ID NO: 30012 - protein, 15 aa, Homo Sapiens
TPPVALNSSRMSCFS

SEQ ID NO: 30013 - protein, 15 aa, Homo Sapiens
PPVALNSSRMSCFSR

SEQ ID NO: 30014 - protein, 15 aa, Homo Sapiens
PVALNSSRMSCFSRP

SEQ ID NO: 30015 - protein, 15 aa, Homo Sapiens
VALNSSRMSCFSRPS

SEQ ID NO: 30016 - protein, 15 aa, Homo Sapiens
ALNSSRMSCFSRPSM

SEQ ID NO: 30017 - protein, 15 aa, Homo Sapiens
LNSSRMSCFSRPSMS

SEQ ID NO: 30018 - protein, 15 aa, Homo Sapiens
NSSRMSCFSRPSMSP

SEQ ID NO: 30019 - protein, 15 aa, Homo Sapiens
SSRMSCFSRPSMSPT

SEQ ID NO: 30020 - protein, 15 aa, Homo Sapiens
SRMSCFSRPSMSPTP

SEQ ID NO: 30021 - protein, 15 aa, Homo Sapiens
RMSCFSRPSMSPTPL

SEQ ID NO: 30022 - protein, 15 aa, Homo Sapiens
MSCFSRPSMSPTPLD

SEQ ID NO: 30023 - protein, 15 aa, Homo Sapiens
SCFSRPSMSPTPLDR

SEQ ID NO: 30024 - protein, 15 aa, Homo Sapiens
CFSRPSMSPTPLDRC

SEQ ID NO: 30025 - protein, 15 aa, Homo Sapiens
FSRPSMSPTPLDRCR

SEQ ID NO: 30026 - protein, 15 aa, Homo Sapiens
SRPSMSPTPLDRCRS

SEQ ID NO: 30027 - protein, 15 aa, Homo Sapiens
RPSMSPTPLDRCRSP

SEQ ID NO: 30028 - protein, 15 aa, Homo Sapiens
PSMSPTPLDRCRSPG

SEQ ID NO: 30029 - protein, 15 aa, Homo Sapiens
SMSPTPLDRCRSPGM

SEQ ID NO: 30030 - protein, 15 aa, Homo Sapiens
MSPTPLDRCRSPGML

SEQ ID NO: 30031 - protein, 15 aa, Homo Sapiens
SPTPLDRCRSPGMLE

SEQ ID NO: 30032 - protein, 15 aa, Homo Sapiens
PTPLDRCRSPGMLEP

SEQ ID NO: 30033 - protein, 15 aa, Homo Sapiens
TPLDRCRSPGMLEPL

SEQ ID NO: 30034 - protein, 15 aa, Homo Sapiens
PLDRCRSPGMLEPLG

SEQ ID NO: 30035 - protein, 15 aa, Homo Sapiens
LDRCRSPGMLEPLGS

SEQ ID NO: 30036 - protein, 15 aa, Homo Sapiens
DRCRSPGMLEPLGSS

SEQ ID NO: 30037 - protein, 15 aa, Homo Sapiens
RCRSPGMLEPLGSSR

SEQ ID NO: 30038 - protein, 15 aa, Homo Sapiens
CRSPGMLEPLGSSRT

SEQ ID NO: 30039 - protein, 15 aa, Homo Sapiens
RSPGMLEPLGSSRTP

SEQ ID NO: 30040 - protein, 15 aa, Homo Sapiens
SPGMLEPLGSSRTPM

SEQ ID NO: 30041 - protein, 15 aa, Homo Sapiens
PGMLEPLGSSRTPMS

SEQ ID NO: 30042 - protein, 15 aa, Homo Sapiens
GMLEPLGSSRTPMSV

SEQ ID NO: 30043 - protein, 15 aa, Homo Sapiens
MLEPLGSSRTPMSVL

SEQ ID NO: 30044 - protein, 15 aa, Homo Sapiens
LEPLGSSRTPMSVLQ

SEQ ID NO: 30045 - protein, 15 aa, Homo Sapiens
EPLGSSRTPMSVLQQ

SEQ ID NO: 30046 - protein, 15 aa, Homo Sapiens
PLGSSRTPMSVLQQA

SEQ ID NO: 30047 - protein, 15 aa, Homo Sapiens
LGSSRTPMSVLQQAG

SEQ ID NO: 30048 - protein, 15 aa, Homo Sapiens
GSSRTPMSVLQQAGG

SEQ ID NO: 30049 - protein, 15 aa, Homo Sapiens
SSRTPMSVLQQAGGS

SEQ ID NO: 30050 - protein, 15 aa, Homo Sapiens
SRTPMSVLQQAGGSM

SEQ ID NO: 30051 - protein, 15 aa, Homo Sapiens
RTPMSVLQQAGGSMM

SEQ ID NO: 30052 - protein, 15 aa, Homo Sapiens
TPMSVLQQAGGSMMD

SEQ ID NO: 30053 - protein, 15 aa, Homo Sapiens
PMSVLQQAGGSMMDG

SEQ ID NO: 30054 - protein, 15 aa, Homo Sapiens
MSVLQQAGGSMMDGP

SEQ ID NO: 30055 - protein, 15 aa, Homo Sapiens
SVLQQAGGSMMDGPG

SEQ ID NO: 30056 - protein, 15 aa, Homo Sapiens
VLQQAGGSMMDGPGP

SEQ ID NO: 30057 - protein, 15 aa, Homo Sapiens
LQQAGGSMMDGPGPR

SEQ ID NO: 30058 - protein, 15 aa, Homo Sapiens
QQAGGSMMDGPGPRI

SEQ ID NO: 30059 - protein, 15 aa, Homo Sapiens
QAGGSMMDGPGPRIP

SEQ ID NO: 30060 - protein, 15 aa, Homo Sapiens
AGGSMMDGPGPRIPD

SEQ ID NO: 30061 - protein, 15 aa, Homo Sapiens
GGSMMDGPGPRIPDH

SEQ ID NO: 30062 - protein, 15 aa, Homo Sapiens
GSMMDGPGPRIPDHQ

SEQ ID NO: 30063 - protein, 15 aa, Homo Sapiens
SMMDGPGPRIPDHQR

SEQ ID NO: 30064 - protein, 15 aa, Homo Sapiens
MMDGPGPRIPDHQRT

SEQ ID NO: 30065 - protein, 15 aa, Homo Sapiens
MDGPGPRIPDHQRTS

SEQ ID NO: 30066 - protein, 15 aa, Homo Sapiens
DGPGPRIPDHQRTSV

SEQ ID NO: 30067 - protein, 15 aa, Homo Sapiens
GPGPRIPDHQRTSVP

SEQ ID NO: 30068 - protein, 15 aa, Homo Sapiens
PGPRIPDHQRTSVPE

SEQ ID NO: 30069 - protein, 15 aa, Homo Sapiens
GPRIPDHQRTSVPEN

SEQ ID NO: 30070 - protein, 15 aa, Homo Sapiens
PRIPDHQRTSVPENH

SEQ ID NO: 30071 - protein, 15 aa, Homo Sapiens
RIPDHQRTSVPENHA

SEQ ID NO: 30072 - protein, 15 aa, Homo Sapiens
IPDHQRTSVPENHAQ

SEQ ID NO: 30073 - protein, 15 aa, Homo Sapiens
PDHQRTSVPENHAQS

SEQ ID NO: 30074 - protein, 15 aa, Homo Sapiens
DHQRTSVPENHAQSR

SEQ ID NO: 30075 - protein, 15 aa, Homo Sapiens
HQRTSVPENHAQSRI

SEQ ID NO: 30076 - protein, 15 aa, Homo Sapiens
QRTSVPENHAQSRIA

SEQ ID NO: 30077 - protein, 15 aa, Homo Sapiens
RTSVPENHAQSRIAL

SEQ ID NO: 30078 - protein, 15 aa, Homo Sapiens
TSVPENHAQSRIALA

SEQ ID NO: 30079 - protein, 15 aa, Homo Sapiens
SVPENHAQSRIALAL

SEQ ID NO: 30080 - protein, 15 aa, Homo Sapiens
VPENHAQSRIALALT

SEQ ID NO: 30081 - protein, 15 aa, Homo Sapiens
PENHAQSRIALALTA

SEQ ID NO: 30082 - protein, 15 aa, Homo Sapiens
ENHAQSRIALALTAI

SEQ ID NO: 30083 - protein, 15 aa, Homo Sapiens
NHAQSRIALALTAIS

SEQ ID NO: 30084 - protein, 15 aa, Homo Sapiens
HAQSRIALALTAISL

SEQ ID NO: 30085 - protein, 15 aa, Homo Sapiens
AQSRIALALTAISLG

SEQ ID NO: 30086 - protein, 15 aa, Homo Sapiens
QSRIALALTAISLGT

SEQ ID NO: 30087 - protein, 15 aa, Homo Sapiens
SRIALALTAISLGTA

SEQ ID NO: 30088 - protein, 15 aa, Homo Sapiens
RIALALTAISLGTAR

SEQ ID NO: 30089 - protein, 15 aa, Homo Sapiens
IALALTAISLGTARP

SEQ ID NO: 30090 - protein, 15 aa, Homo Sapiens
ALALTAISLGTARPP

SEQ ID NO: 30091 - protein, 15 aa, Homo Sapiens
LALTAISLGTARPPP

SEQ ID NO: 30092 - protein, 15 aa, Homo Sapiens
ALTAISLGTARPPPS

SEQ ID NO: 30093 - protein, 15 aa, Homo Sapiens
LTAISLGTARPPPSM

SEQ ID NO: 30094 - protein, 15 aa, Homo Sapiens
TAISLGTARPPPSMS

SEQ ID NO: 30095 - protein, 15 aa, Homo Sapiens
AISLGTARPPPSMSA

SEQ ID NO: 30096 - protein, 15 aa, Homo Sapiens
ISLGTARPPPSMSAA

SEQ ID NO: 30097 - protein, 15 aa, Homo Sapiens
SLGTARPPPSMSAAG

SEQ ID NO: 30098 - protein, 15 aa, Homo Sapiens
LGTARPPPSMSAAGL

SEQ ID NO: 30099 - protein, 15 aa, Homo Sapiens
GTARPPPSMSAAGLA

SEQ ID NO: 30100 - protein, 15 aa, Homo Sapiens
TARPPPSMSAAGLAA

SEQ ID NO: 30101 - protein, 15 aa, Homo Sapiens
ARPPPSMSAAGLAAR

SEQ ID NO: 30102 - protein, 15 aa, Homo Sapiens
RPPPSMSAAGLAARM

SEQ ID NO: 30103 - protein, 15 aa, Homo Sapiens
PPPSMSAAGLAARMS

SEQ ID NO: 30104 - protein, 15 aa, Homo Sapiens
PPSMSAAGLAARMSQ

SEQ ID NO: 30105 - protein, 15 aa, Homo Sapiens
PSMSAAGLAARMSQV

SEQ ID NO: 30106 - protein, 15 aa, Homo Sapiens
SMSAAGLAARMSQVP

SEQ ID NO: 30107 - protein, 15 aa, Homo Sapiens
MSAAGLAARMSQVPA

SEQ ID NO: 30108 - protein, 15 aa, Homo Sapiens
SAAGLAARMSQVPAP

SEQ ID NO: 30109 - protein, 15 aa, Homo Sapiens
AAGLAARMSQVPAPV

SEQ ID NO: 30110 - protein, 15 aa, Homo Sapiens
AGLAARMSQVPAPVP

SEQ ID NO: 30111 - protein, 15 aa, Homo Sapiens
GLAARMSQVPAPVPL

SEQ ID NO: 30112 - protein, 15 aa, Homo Sapiens
LAARMSQVPAPVPLM

SEQ ID NO: 30113 - protein, 15 aa, Homo Sapiens
AARMSQVPAPVPLMS

SEQ ID NO: 30114 - protein, 15 aa, Homo Sapiens
ARMSQVPAPVPLMSL

SEQ ID NO: 30115 - protein, 15 aa, Homo Sapiens
RMSQVPAPVPLMSLR

SEQ ID NO: 30116 - protein, 15 aa, Homo Sapiens
MSQVPAPVPLMSLRT

SEQ ID NO: 30117 - protein, 15 aa, Homo Sapiens
SQVPAPVPLMSLRTA

SEQ ID NO: 30118 - protein, 15 aa, Homo Sapiens
QVPAPVPLMSLRTAP

SEQ ID NO: 30119 - protein, 15 aa, Homo Sapiens
VPAPVPLMSLRTAPA

SEQ ID NO: 30120 - protein, 15 aa, Homo Sapiens
PAPVPLMSLRTAPAA

SEQ ID NO: 30121 - protein, 15 aa, Homo Sapiens
APVPLMSLRTAPAAN

SEQ ID NO: 30122 - protein, 15 aa, Homo Sapiens
PVPLMSLRTAPAANL

SEQ ID NO: 30123 - protein, 15 aa, Homo Sapiens
VPLMSLRTAPAANLA

SEQ ID NO: 30124 - protein, 15 aa, Homo Sapiens
PLMSLRTAPAANLAS

SEQ ID NO: 30125 - protein, 15 aa, Homo Sapiens
LMSLRTAPAANLASR

SEQ ID NO: 30126 - protein, 15 aa, Homo Sapiens
MSLRTAPAANLASRI

SEQ ID NO: 30127 - protein, 15 aa, Homo Sapiens
SLRTAPAANLASRIP

SEQ ID NO: 30128 - protein, 15 aa, Homo Sapiens
LRTAPAANLASRIPA

SEQ ID NO: 30129 - protein, 15 aa, Homo Sapiens
RTAPAANLASRIPAA

SEQ ID NO: 30130 - protein, 15 aa, Homo Sapiens
TAPAANLASRIPAAS

SEQ ID NO: 30131 - protein, 15 aa, Homo Sapiens
APAANLASRIPAASA

SEQ ID NO: 30132 - protein, 15 aa, Homo Sapiens
PAANLASRIPAASAA

SEQ ID NO: 30133 - protein, 15 aa, Homo Sapiens
AANLASRIPAASAAA

SEQ ID NO: 30134 - protein, 15 aa, Homo Sapiens
ANLASRIPAASAAAM

SEQ ID NO: 30135 - protein, 15 aa, Homo Sapiens
NLASRIPAASAAAMN

SEQ ID NO: 30136 - protein, 15 aa, Homo Sapiens
LASRIPAASAAAMNL

SEQ ID NO: 30137 - protein, 15 aa, Homo Sapiens
ASRIPAASAAAMNLA

SEQ ID NO: 30138 - protein, 15 aa, Homo Sapiens
SRIPAASAAAMNLAS

SEQ ID NO: 30139 - protein, 15 aa, Homo Sapiens
RIPAASAAAMNLASA

SEQ ID NO: 30140 - protein, 15 aa, Homo Sapiens
IPAASAAAMNLASAR

SEQ ID NO: 30141 - protein, 15 aa, Homo Sapiens
PAASAAAMNLASART

SEQ ID NO: 30142 - protein, 15 aa, Homo Sapiens
AASAAAMNLASARTP

SEQ ID NO: 30143 - protein, 15 aa, Homo Sapiens
ASAAAMNLASARTPA

SEQ ID NO: 30144 - protein, 15 aa, Homo Sapiens
SAAAMNLASARTPAI

SEQ ID NO: 30145 - protein, 15 aa, Homo Sapiens
AAAMNLASARTPAIP

SEQ ID NO: 30146 - protein, 15 aa, Homo Sapiens
AAMNLASARTPAIPT

SEQ ID NO: 30147 - protein, 15 aa, Homo Sapiens
AMNLASARTPAIPTA

SEQ ID NO: 30148 - protein, 15 aa, Homo Sapiens
MNLASARTPAIPTAV

SEQ ID NO: 30149 - protein, 15 aa, Homo Sapiens
NLASARTPAIPTAVN

SEQ ID NO: 30150 - protein, 15 aa, Homo Sapiens
LASARTPAIPTAVNL

SEQ ID NO: 30151 - protein, 15 aa, Homo Sapiens
ASARTPAIPTAVNLA

SEQ ID NO: 30152 - protein, 15 aa, Homo Sapiens
SARTPAIPTAVNLAD

SEQ ID NO: 30153 - protein, 15 aa, Homo Sapiens
ARTPAIPTAVNLADS

SEQ ID NO: 30154 - protein, 15 aa, Homo Sapiens
RTPAIPTAVNLADSR

SEQ ID NO: 30155 - protein, 15 aa, Homo Sapiens
TPAIPTAVNLADSRT

SEQ ID NO: 30156 - protein, 15 aa, Homo Sapiens
PAIPTAVNLADSRTP

SEQ ID NO: 30157 - protein, 15 aa, Homo Sapiens
AIPTAVNLADSRTPA

SEQ ID NO: 30158 - protein, 15 aa, Homo Sapiens
IPTAVNLADSRTPAA

SEQ ID NO: 30159 - protein, 15 aa, Homo Sapiens
PTAVNLADSRTPAAA

SEQ ID NO: 30160 - protein, 15 aa, Homo Sapiens
TAVNLADSRTPAAAA

SEQ ID NO: 30161 - protein, 15 aa, Homo Sapiens
AVNLADSRTPAAAAA

SEQ ID NO: 30162 - protein, 15 aa, Homo Sapiens
VNLADSRTPAAAAAM

SEQ ID NO: 30163 - protein, 15 aa, Homo Sapiens
NLADSRTPAAAAAMN

SEQ ID NO: 30164 - protein, 15 aa, Homo Sapiens
LADSRTPAAAAAMNL

SEQ ID NO: 30165 - protein, 15 aa, Homo Sapiens
ADSRTPAAAAAMNLA

SEQ ID NO: 30166 - protein, 15 aa, Homo Sapiens
DSRTPAAAAAMNLAS

SEQ ID NO: 30167 - protein, 15 aa, Homo Sapiens
SRTPAAAAAMNLASP

SEQ ID NO: 30168 - protein, 15 aa, Homo Sapiens
RTPAAAAAMNLASPR

SEQ ID NO: 30169 - protein, 15 aa, Homo Sapiens
TPAAAAAMNLASPRT

SEQ ID NO: 30170 - protein, 15 aa, Homo Sapiens
PAAAAAMNLASPRTA

SEQ ID NO: 30171 - protein, 15 aa, Homo Sapiens
AAAAAMNLASPRTAV

SEQ ID NO: 30172 - protein, 15 aa, Homo Sapiens
AAAAMNLASPRTAVA

SEQ ID NO: 30173 - protein, 15 aa, Homo Sapiens
AAAMNLASPRTAVAP

SEQ ID NO: 30174 - protein, 15 aa, Homo Sapiens
AAMNLASPRTAVAPS

SEQ ID NO: 30175 - protein, 15 aa, Homo Sapiens
AMNLASPRTAVAPSA

SEQ ID NO: 30176 - protein, 15 aa, Homo Sapiens
MNLASPRTAVAPSAV

SEQ ID NO: 30177 - protein, 15 aa, Homo Sapiens
NLASPRTAVAPSAVN

SEQ ID NO: 30178 - protein, 15 aa, Homo Sapiens
LASPRTAVAPSAVNL

SEQ ID NO: 30179 - protein, 15 aa, Homo Sapiens
ASPRTAVAPSAVNLA

SEQ ID NO: 30180 - protein, 15 aa, Homo Sapiens
SPRTAVAPSAVNLAD

SEQ ID NO: 30181 - protein, 15 aa, Homo Sapiens
PRTAVAPSAVNLADP

SEQ ID NO: 30182 - protein, 15 aa, Homo Sapiens
RTAVAPSAVNLADPR

SEQ ID NO: 30183 - protein, 15 aa, Homo Sapiens
TAVAPSAVNLADPRT

SEQ ID NO: 30184 - protein, 15 aa, Homo Sapiens
AVAPSAVNLADPRTP

SEQ ID NO: 30185 - protein, 15 aa, Homo Sapiens
VAPSAVNLADPRTPT

SEQ ID NO: 30186 - protein, 15 aa, Homo Sapiens
APSAVNLADPRTPTA

SEQ ID NO: 30187 - protein, 15 aa, Homo Sapiens
PSAVNLADPRTPTAP

SEQ ID NO: 30188 - protein, 15 aa, Homo Sapiens
SAVNLADPRTPTAPA

SEQ ID NO: 30189 - protein, 15 aa, Homo Sapiens
AVNLADPRTPTAPAV

SEQ ID NO: 30190 - protein, 15 aa, Homo Sapiens
VNLADPRTPTAPAVN

SEQ ID NO: 30191 - protein, 15 aa, Homo Sapiens
NLADPRTPTAPAVNL

SEQ ID NO: 30192 - protein, 15 aa, Homo Sapiens
LADPRTPTAPAVNLA

SEQ ID NO: 30193 - protein, 15 aa, Homo Sapiens
ADPRTPTAPAVNLAG

SEQ ID NO: 30194 - protein, 15 aa, Homo Sapiens
DPRTPTAPAVNLAGA

SEQ ID NO: 30195 - protein, 15 aa, Homo Sapiens
PRTPTAPAVNLAGAR

SEQ ID NO: 30196 - protein, 15 aa, Homo Sapiens
RTPTAPAVNLAGART

SEQ ID NO: 30197 - protein, 15 aa, Homo Sapiens
TPTAPAVNLAGARTP

SEQ ID NO: 30198 - protein, 15 aa, Homo Sapiens
PTAPAVNLAGARTPA

SEQ ID NO: 30199 - protein, 15 aa, Homo Sapiens
TAPAVNLAGARTPAA

SEQ ID NO: 30200 - protein, 15 aa, Homo Sapiens
APAVNLAGARTPAAL

SEQ ID NO: 30201 - protein, 15 aa, Homo Sapiens
PAVNLAGARTPAALA

SEQ ID NO: 30202 - protein, 15 aa, Homo Sapiens
AVNLAGARTPAALAA

SEQ ID NO: 30203 - protein, 15 aa, Homo Sapiens
VNLAGARTPAALAAL

SEQ ID NO: 30204 - protein, 15 aa, Homo Sapiens
NLAGARTPAALAALS

SEQ ID NO: 30205 - protein, 15 aa, Homo Sapiens
LAGARTPAALAALSL

SEQ ID NO: 30206 - protein, 15 aa, Homo Sapiens
AGARTPAALAALSLT

SEQ ID NO: 30207 - protein, 15 aa, Homo Sapiens
GARTPAALAALSLTG

SEQ ID NO: 30208 - protein, 15 aa, Homo Sapiens
ARTPAALAALSLTGS

SEQ ID NO: 30209 - protein, 15 aa, Homo Sapiens
RTPAALAALSLTGSG

SEQ ID NO: 30210 - protein, 15 aa, Homo Sapiens
TPAALAALSLTGSGT

SEQ ID NO: 30211 - protein, 15 aa, Homo Sapiens
PAALAALSLTGSGTP

SEQ ID NO: 30212 - protein, 15 aa, Homo Sapiens
AALAALSLTGSGTPP

SEQ ID NO: 30213 - protein, 15 aa, Homo Sapiens
ALAALSLTGSGTPPT

SEQ ID NO: 30214 - protein, 15 aa, Homo Sapiens
LAALSLTGSGTPPTA

SEQ ID NO: 30215 - protein, 15 aa, Homo Sapiens
AALSLTGSGTPPTAA

SEQ ID NO: 30216 - protein, 15 aa, Homo Sapiens
ALSLTGSGTPPTAAN

SEQ ID NO: 30217 - protein, 15 aa, Homo Sapiens
LSLTGSGTPPTAANY

SEQ ID NO: 30218 - protein, 15 aa, Homo Sapiens
SLTGSGTPPTAANYP

SEQ ID NO: 30219 - protein, 15 aa, Homo Sapiens
LTGSGTPPTAANYPS

SEQ ID NO: 30220 - protein, 15 aa, Homo Sapiens
TGSGTPPTAANYPSS

SEQ ID NO: 30221 - protein, 15 aa, Homo Sapiens
GSGTPPTAANYPSSS

SEQ ID NO: 30222 - protein, 15 aa, Homo Sapiens
SGTPPTAANYPSSSR

SEQ ID NO: 30223 - protein, 15 aa, Homo Sapiens
GTPPTAANYPSSSRT

SEQ ID NO: 30224 - protein, 15 aa, Homo Sapiens
TPPTAANYPSSSRTP

SEQ ID NO: 30225 - protein, 15 aa, Homo Sapiens
PPTAANYPSSSRTPQ

SEQ ID NO: 30226 - protein, 15 aa, Homo Sapiens
PTAANYPSSSRTPQA

SEQ ID NO: 30227 - protein, 15 aa, Homo Sapiens
TAANYPSSSRTPQAP

SEQ ID NO: 30228 - protein, 15 aa, Homo Sapiens
AANYPSSSRTPQAPA

SEQ ID NO: 30229 - protein, 15 aa, Homo Sapiens
ANYPSSSRTPQAPAS

SEQ ID NO: 30230 - protein, 15 aa, Homo Sapiens
NYPSSSRTPQAPASA

SEQ ID NO: 30231 - protein, 15 aa, Homo Sapiens
YPSSSRTPQAPASAN

SEQ ID NO: 30232 - protein, 15 aa, Homo Sapiens
PSSSRTPQAPASANL

SEQ ID NO: 30233 - protein, 15 aa, Homo Sapiens
SSSRTPQAPASANLV

SEQ ID NO: 30234 - protein, 15 aa, Homo Sapiens
SSRTPQAPASANLVG

SEQ ID NO: 30235 - protein, 15 aa, Homo Sapiens
SRTPQAPASANLVGP

SEQ ID NO: 30236 - protein, 15 aa, Homo Sapiens
RTPQAPASANLVGPR

SEQ ID NO: 30237 - protein, 15 aa, Homo Sapiens
TPQAPASANLVGPRS

SEQ ID NO: 30238 - protein, 15 aa, Homo Sapiens
PQAPASANLVGPRSA

SEQ ID NO: 30239 - protein, 15 aa, Homo Sapiens
QAPASANLVGPRSAH

SEQ ID NO: 30240 - protein, 15 aa, Homo Sapiens
APASANLVGPRSAHA

SEQ ID NO: 30241 - protein, 15 aa, Homo Sapiens
PASANLVGPRSAHAT

SEQ ID NO: 30242 - protein, 15 aa, Homo Sapiens
ASANLVGPRSAHATA

SEQ ID NO: 30243 - protein, 15 aa, Homo Sapiens
SANLVGPRSAHATAP

SEQ ID NO: 30244 - protein, 15 aa, Homo Sapiens
ANLVGPRSAHATAPV

SEQ ID NO: 30245 - protein, 15 aa, Homo Sapiens
NLVGPRSAHATAPVN

SEQ ID NO: 30246 - protein, 15 aa, Homo Sapiens
LVGPRSAHATAPVNI

SEQ ID NO: 30247 - protein, 15 aa, Homo Sapiens
VGPRSAHATAPVNIA

SEQ ID NO: 30248 - protein, 15 aa, Homo Sapiens
GPRSAHATAPVNIAG

SEQ ID NO: 30249 - protein, 15 aa, Homo Sapiens
PRSAHATAPVNIAGS

SEQ ID NO: 30250 - protein, 15 aa, Homo Sapiens
RSAHATAPVNIAGSR

SEQ ID NO: 30251 - protein, 15 aa, Homo Sapiens
SAHATAPVNIAGSRT

SEQ ID NO: 30252 - protein, 15 aa, Homo Sapiens
AHATAPVNIAGSRTA

SEQ ID NO: 30253 - protein, 15 aa, Homo Sapiens
HATAPVNIAGSRTAA

SEQ ID NO: 30254 - protein, 15 aa, Homo Sapiens
ATAPVNIAGSRTAAA

SEQ ID NO: 30255 - protein, 15 aa, Homo Sapiens
TAPVNIAGSRTAAAL

SEQ ID NO: 30256 - protein, 15 aa, Homo Sapiens
APVNIAGSRTAAALA

SEQ ID NO: 30257 - protein, 15 aa, Homo Sapiens
PVNIAGSRTAAALAP

SEQ ID NO: 30258 - protein, 15 aa, Homo Sapiens
VNIAGSRTAAALAPA

SEQ ID NO: 30259 - protein, 15 aa, Homo Sapiens
NIAGSRTAAALAPAS

SEQ ID NO: 30260 - protein, 15 aa, Homo Sapiens
IAGSRTAAALAPASL

SEQ ID NO: 30261 - protein, 15 aa, Homo Sapiens
AGSRTAAALAPASLT

SEQ ID NO: 30262 - protein, 15 aa, Homo Sapiens
GSRTAAALAPASLTS

SEQ ID NO: 30263 - protein, 15 aa, Homo Sapiens
SRTAAALAPASLTSA

SEQ ID NO: 30264 - protein, 15 aa, Homo Sapiens
RTAAALAPASLTSAR

SEQ ID NO: 30265 - protein, 15 aa, Homo Sapiens
TAAALAPASLTSARM

SEQ ID NO: 30266 - protein, 15 aa, Homo Sapiens
AAALAPASLTSARMA

SEQ ID NO: 30267 - protein, 15 aa, Homo Sapiens
AALAPASLTSARMAP

SEQ ID NO: 30268 - protein, 15 aa, Homo Sapiens
ALAPASLTSARMAPA

SEQ ID NO: 30269 - protein, 15 aa, Homo Sapiens
LAPASLTSARMAPAL

SEQ ID NO: 30270 - protein, 15 aa, Homo Sapiens
APASLTSARMAPALS

SEQ ID NO: 30271 - protein, 15 aa, Homo Sapiens
PASLTSARMAPALSG

SEQ ID NO: 30272 - protein, 15 aa, Homo Sapiens
ASLTSARMAPALSGA

SEQ ID NO: 30273 - protein, 15 aa, Homo Sapiens
SLTSARMAPALSGAN

SEQ ID NO: 30274 - protein, 15 aa, Homo Sapiens
LTSARMAPALSGANL

SEQ ID NO: 30275 - protein, 15 aa, Homo Sapiens
TSARMAPALSGANLT

SEQ ID NO: 30276 - protein, 15 aa, Homo Sapiens
SARMAPALSGANLTS

SEQ ID NO: 30277 - protein, 15 aa, Homo Sapiens
ARMAPALSGANLTSP

SEQ ID NO: 30278 - protein, 15 aa, Homo Sapiens
RMAPALSGANLTSPR

SEQ ID NO: 30279 - protein, 15 aa, Homo Sapiens
MAPALSGANLTSPRV

SEQ ID NO: 30280 - protein, 15 aa, Homo Sapiens
APALSGANLTSPRVP

SEQ ID NO: 30281 - protein, 15 aa, Homo Sapiens
PALSGANLTSPRVPL

SEQ ID NO: 30282 - protein, 15 aa, Homo Sapiens
ALSGANLTSPRVPLS

SEQ ID NO: 30283 - protein, 15 aa, Homo Sapiens
LSGANLTSPRVPLSA

SEQ ID NO: 30284 - protein, 15 aa, Homo Sapiens
SGANLTSPRVPLSAY

SEQ ID NO: 30285 - protein, 15 aa, Homo Sapiens
GANLTSPRVPLSAYE

SEQ ID NO: 30286 - protein, 15 aa, Homo Sapiens
ANLTSPRVPLSAYER

SEQ ID NO: 30287 - protein, 15 aa, Homo Sapiens
NLTSPRVPLSAYERV

SEQ ID NO: 30288 - protein, 15 aa, Homo Sapiens
LTSPRVPLSAYERVS

SEQ ID NO: 30289 - protein, 15 aa, Homo Sapiens
TSPRVPLSAYERVSG

SEQ ID NO: 30290 - protein, 15 aa, Homo Sapiens
SPRVPLSAYERVSGR

SEQ ID NO: 30291 - protein, 15 aa, Homo Sapiens
PRVPLSAYERVSGRT

SEQ ID NO: 30292 - protein, 15 aa, Homo Sapiens
RVPLSAYERVSGRTS

SEQ ID NO: 30293 - protein, 15 aa, Homo Sapiens
VPLSAYERVSGRTSP

SEQ ID NO: 30294 - protein, 15 aa, Homo Sapiens
PLSAYERVSGRTSPP

SEQ ID NO: 30295 - protein, 15 aa, Homo Sapiens
LSAYERVSGRTSPPL

SEQ ID NO: 30296 - protein, 15 aa, Homo Sapiens
SAYERVSGRTSPPLL

SEQ ID NO: 30297 - protein, 15 aa, Homo Sapiens
AYERVSGRTSPPLLD

SEQ ID NO: 30298 - protein, 15 aa, Homo Sapiens
YERVSGRTSPPLLDR

SEQ ID NO: 30299 - protein, 15 aa, Homo Sapiens
ERVSGRTSPPLLDRA

SEQ ID NO: 30300 - protein, 15 aa, Homo Sapiens
RVSGRTSPPLLDRAR

SEQ ID NO: 30301 - protein, 15 aa, Homo Sapiens
VSGRTSPPLLDRARS

SEQ ID NO: 30302 - protein, 15 aa, Homo Sapiens
SGRTSPPLLDRARSR

SEQ ID NO: 30303 - protein, 15 aa, Homo Sapiens
GRTSPPLLDRARSRT

SEQ ID NO: 30304 - protein, 15 aa, Homo Sapiens
RTSPPLLDRARSRTP

SEQ ID NO: 30305 - protein, 15 aa, Homo Sapiens
TSPPLLDRARSRTPP

SEQ ID NO: 30306 - protein, 15 aa, Homo Sapiens
SPPLLDRARSRTPPS

SEQ ID NO: 30307 - protein, 15 aa, Homo Sapiens
PPLLDRARSRTPPSA

SEQ ID NO: 30308 - protein, 15 aa, Homo Sapiens
PLLDRARSRTPPSAP

SEQ ID NO: 30309 - protein, 15 aa, Homo Sapiens
LLDRARSRTPPSAPS

SEQ ID NO: 30310 - protein, 15 aa, Homo Sapiens
LDRARSRTPPSAPSQ

SEQ ID NO: 30311 - protein, 15 aa, Homo Sapiens
DRARSRTPPSAPSQS

SEQ ID NO: 30312 - protein, 15 aa, Homo Sapiens
RARSRTPPSAPSQSR

SEQ ID NO: 30313 - protein, 15 aa, Homo Sapiens
ARSRTPPSAPSQSRM

SEQ ID NO: 30314 - protein, 15 aa, Homo Sapiens
RSRTPPSAPSQSRMT

SEQ ID NO: 30315 - protein, 15 aa, Homo Sapiens
SRTPPSAPSQSRMTS

SEQ ID NO: 30316 - protein, 15 aa, Homo Sapiens
RTPPSAPSQSRMTSE

SEQ ID NO: 30317 - protein, 15 aa, Homo Sapiens
TPPSAPSQSRMTSER

SEQ ID NO: 30318 - protein, 15 aa, Homo Sapiens
PPSAPSQSRMTSERA

SEQ ID NO: 30319 - protein, 15 aa, Homo Sapiens
PSAPSQSRMTSERAP

SEQ ID NO: 30320 - protein, 15 aa, Homo Sapiens
SAPSQSRMTSERAPS

SEQ ID NO: 30321 - protein, 15 aa, Homo Sapiens
APSQSRMTSERAPSP

SEQ ID NO: 30322 - protein, 15 aa, Homo Sapiens
PSQSRMTSERAPSPS

SEQ ID NO: 30323 - protein, 15 aa, Homo Sapiens
SQSRMTSERAPSPSS

SEQ ID NO: 30324 - protein, 15 aa, Homo Sapiens
QSRMTSERAPSPSSR

SEQ ID NO: 30325 - protein, 15 aa, Homo Sapiens
SRMTSERAPSPSSRM

SEQ ID NO: 30326 - protein, 15 aa, Homo Sapiens
RMTSERAPSPSSRMG

SEQ ID NO: 30327 - protein, 15 aa, Homo Sapiens
MTSERAPSPSSRMGQ

SEQ ID NO: 30328 - protein, 15 aa, Homo Sapiens
TSERAPSPSSRMGQA

SEQ ID NO: 30329 - protein, 15 aa, Homo Sapiens
SERAPSPSSRMGQAP

SEQ ID NO: 30330 - protein, 15 aa, Homo Sapiens
ERAPSPSSRMGQAPS

SEQ ID NO: 30331 - protein, 15 aa, Homo Sapiens
RAPSPSSRMGQAPSQ

SEQ ID NO: 30332 - protein, 15 aa, Homo Sapiens
APSPSSRMGQAPSQS

SEQ ID NO: 30333 - protein, 15 aa, Homo Sapiens
PSPSSRMGQAPSQSL

SEQ ID NO: 30334 - protein, 15 aa, Homo Sapiens
SPSSRMGQAPSQSLL

SEQ ID NO: 30335 - protein, 15 aa, Homo Sapiens
PSSRMGQAPSQSLLP

SEQ ID NO: 30336 - protein, 15 aa, Homo Sapiens
SSRMGQAPSQSLLPP

SEQ ID NO: 30337 - protein, 15 aa, Homo Sapiens
SRMGQAPSQSLLPPA

SEQ ID NO: 30338 - protein, 15 aa, Homo Sapiens
RMGQAPSQSLLPPAQ

SEQ ID NO: 30339 - protein, 15 aa, Homo Sapiens
MGQAPSQSLLPPAQD

SEQ ID NO: 30340 - protein, 15 aa, Homo Sapiens
GQAPSQSLLPPAQDQ

SEQ ID NO: 30341 - protein, 15 aa, Homo Sapiens
QAPSQSLLPPAQDQP

SEQ ID NO: 30342 - protein, 15 aa, Homo Sapiens
APSQSLLPPAQDQPR

SEQ ID NO: 30343 - protein, 15 aa, Homo Sapiens
PSQSLLPPAQDQPRS

SEQ ID NO: 30344 - protein, 15 aa, Homo Sapiens
SQSLLPPAQDQPRSP

SEQ ID NO: 30345 - protein, 15 aa, Homo Sapiens
QSLLPPAQDQPRSPV

SEQ ID NO: 30346 - protein, 15 aa, Homo Sapiens
SLLPPAQDQPRSPVP

SEQ ID NO: 30347 - protein, 15 aa, Homo Sapiens
LLPPAQDQPRSPVPS

SEQ ID NO: 30348 - protein, 15 aa, Homo Sapiens
LPPAQDQPRSPVPSA

SEQ ID NO: 30349 - protein, 15 aa, Homo Sapiens
PPAQDQPRSPVPSAF

SEQ ID NO: 30350 - protein, 15 aa, Homo Sapiens
PAQDQPRSPVPSAFS

SEQ ID NO: 30351 - protein, 15 aa, Homo Sapiens
AQDQPRSPVPSAFSD

SEQ ID NO: 30352 - protein, 15 aa, Homo Sapiens
QDQPRSPVPSAFSDQ

SEQ ID NO: 30353 - protein, 15 aa, Homo Sapiens
DQPRSPVPSAFSDQS

SEQ ID NO: 30354 - protein, 15 aa, Homo Sapiens
QPRSPVPSAFSDQSR

SEQ ID NO: 30355 - protein, 15 aa, Homo Sapiens
PRSPVPSAFSDQSRC

SEQ ID NO: 30356 - protein, 15 aa, Homo Sapiens
RSPVPSAFSDQSRCL

SEQ ID NO: 30357 - protein, 15 aa, Homo Sapiens
SPVPSAFSDQSRCLI

SEQ ID NO: 30358 - protein, 15 aa, Homo Sapiens
PVPSAFSDQSRCLIA

SEQ ID NO: 30359 - protein, 15 aa, Homo Sapiens
VPSAFSDQSRCLIAQ

SEQ ID NO: 30360 - protein, 15 aa, Homo Sapiens
PSAFSDQSRCLIAQT

SEQ ID NO: 30361 - protein, 15 aa, Homo Sapiens
SAFSDQSRCLIAQTT

SEQ ID NO: 30362 - protein, 15 aa, Homo Sapiens
AFSDQSRCLIAQTTP

SEQ ID NO: 30363 - protein, 15 aa, Homo Sapiens
FSDQSRCLIAQTTPV

SEQ ID NO: 30364 - protein, 15 aa, Homo Sapiens
SDQSRCLIAQTTPVA

SEQ ID NO: 30365 - protein, 15 aa, Homo Sapiens
DQSRCLIAQTTPVAG

SEQ ID NO: 30366 - protein, 15 aa, Homo Sapiens
QSRCLIAQTTPVAGS

SEQ ID NO: 30367 - protein, 15 aa, Homo Sapiens
SRCLIAQTTPVAGSQ

SEQ ID NO: 30368 - protein, 15 aa, Homo Sapiens
RCLIAQTTPVAGSQS

SEQ ID NO: 30369 - protein, 15 aa, Homo Sapiens
CLIAQTTPVAGSQSL

SEQ ID NO: 30370 - protein, 15 aa, Homo Sapiens
LIAQTTPVAGSQSLS

SEQ ID NO: 30371 - protein, 15 aa, Homo Sapiens
IAQTTPVAGSQSLSS

SEQ ID NO: 30372 - protein, 15 aa, Homo Sapiens
AQTTPVAGSQSLSSG

SEQ ID NO: 30373 - protein, 15 aa, Homo Sapiens
QTTPVAGSQSLSSGA

SEQ ID NO: 30374 - protein, 15 aa, Homo Sapiens
TTPVAGSQSLSSGAV

SEQ ID NO: 30375 - protein, 15 aa, Homo Sapiens
TPVAGSQSLSSGAVA

SEQ ID NO: 30376 - protein, 15 aa, Homo Sapiens
PVAGSQSLSSGAVAT

SEQ ID NO: 30377 - protein, 15 aa, Homo Sapiens
VAGSQSLSSGAVATT

SEQ ID NO: 30378 - protein, 15 aa, Homo Sapiens
AGSQSLSSGAVATTT

SEQ ID NO: 30379 - protein, 15 aa, Homo Sapiens
GSQSLSSGAVATTTS

SEQ ID NO: 30380 - protein, 15 aa, Homo Sapiens
SQSLSSGAVATTTSS

SEQ ID NO: 30381 - protein, 15 aa, Homo Sapiens
QSLSSGAVATTTSSA

SEQ ID NO: 30382 - protein, 15 aa, Homo Sapiens
SLSSGAVATTTSSAG

SEQ ID NO: 30383 - protein, 15 aa, Homo Sapiens
LSSGAVATTTSSAGD

SEQ ID NO: 30384 - protein, 15 aa, Homo Sapiens
SSGAVATTTSSAGDH

SEQ ID NO: 30385 - protein, 15 aa, Homo Sapiens
SGAVATTTSSAGDHN

SEQ ID NO: 30386 - protein, 15 aa, Homo Sapiens
GAVATTTSSAGDHNG

SEQ ID NO: 30387 - protein, 15 aa, Homo Sapiens
AVATTTSSAGDHNGM

SEQ ID NO: 30388 - protein, 15 aa, Homo Sapiens
VATTTSSAGDHNGML

SEQ ID NO: 30389 - protein, 15 aa, Homo Sapiens
ATTTSSAGDHNGMLS

SEQ ID NO: 30390 - protein, 15 aa, Homo Sapiens
TTTSSAGDHNGMLSV

SEQ ID NO: 30391 - protein, 15 aa, Homo Sapiens
TTSSAGDHNGMLSVP

SEQ ID NO: 30392 - protein, 15 aa, Homo Sapiens
TSSAGDHNGMLSVPA

SEQ ID NO: 30393 - protein, 15 aa, Homo Sapiens
SSAGDHNGMLSVPAP

SEQ ID NO: 30394 - protein, 15 aa, Homo Sapiens
SAGDHNGMLSVPAPG

SEQ ID NO: 30395 - protein, 15 aa, Homo Sapiens
AGDHNGMLSVPAPGV

SEQ ID NO: 30396 - protein, 15 aa, Homo Sapiens
GDHNGMLSVPAPGVP

SEQ ID NO: 30397 - protein, 15 aa, Homo Sapiens
DHNGMLSVPAPGVPH

SEQ ID NO: 30398 - protein, 15 aa, Homo Sapiens
HNGMLSVPAPGVPHS

SEQ ID NO: 30399 - protein, 15 aa, Homo Sapiens
NGMLSVPAPGVPHSD

SEQ ID NO: 30400 - protein, 15 aa, Homo Sapiens
GMLSVPAPGVPHSDV

SEQ ID NO: 30401 - protein, 15 aa, Homo Sapiens
MLSVPAPGVPHSDVG

SEQ ID NO: 30402 - protein, 15 aa, Homo Sapiens
LSVPAPGVPHSDVGE

SEQ ID NO: 30403 - protein, 15 aa, Homo Sapiens
SVPAPGVPHSDVGEP

SEQ ID NO: 30404 - protein, 15 aa, Homo Sapiens
VPAPGVPHSDVGEPP

SEQ ID NO: 30405 - protein, 15 aa, Homo Sapiens
PAPGVPHSDVGEPPA

SEQ ID NO: 30406 - protein, 15 aa, Homo Sapiens
APGVPHSDVGEPPAS

SEQ ID NO: 30407 - protein, 15 aa, Homo Sapiens
PGVPHSDVGEPPAST

SEQ ID NO: 30408 - protein, 15 aa, Homo Sapiens
GVPHSDVGEPPASTG

SEQ ID NO: 30409 - protein, 15 aa, Homo Sapiens
VPHSDVGEPPASTGA

SEQ ID NO: 30410 - protein, 15 aa, Homo Sapiens
PHSDVGEPPASTGAQ

SEQ ID NO: 30411 - protein, 15 aa, Homo Sapiens
HSDVGEPPASTGAQQ

SEQ ID NO: 30412 - protein, 15 aa, Homo Sapiens
SDVGEPPASTGAQQP

SEQ ID NO: 30413 - protein, 15 aa, Homo Sapiens
DVGEPPASTGAQQPS

SEQ ID NO: 30414 - protein, 15 aa, Homo Sapiens
VGEPPASTGAQQPSA

SEQ ID NO: 30415 - protein, 15 aa, Homo Sapiens
GEPPASTGAQQPSAL

SEQ ID NO: 30416 - protein, 15 aa, Homo Sapiens
EPPASTGAQQPSALA

SEQ ID NO: 30417 - protein, 15 aa, Homo Sapiens
PPASTGAQQPSALAA

SEQ ID NO: 30418 - protein, 15 aa, Homo Sapiens
PASTGAQQPSALAAL

SEQ ID NO: 30419 - protein, 15 aa, Homo Sapiens
ASTGAQQPSALAALQ

SEQ ID NO: 30420 - protein, 15 aa, Homo Sapiens
STGAQQPSALAALQP

SEQ ID NO: 30421 - protein, 15 aa, Homo Sapiens
TGAQQPSALAALQPA

SEQ ID NO: 30422 - protein, 15 aa, Homo Sapiens
GAQQPSALAALQPAK

SEQ ID NO: 30423 - protein, 15 aa, Homo Sapiens
AQQPSALAALQPAKE

SEQ ID NO: 30424 - protein, 15 aa, Homo Sapiens
QQPSALAALQPAKER

SEQ ID NO: 30425 - protein, 15 aa, Homo Sapiens
QPSALAALQPAKERR

SEQ ID NO: 30426 - protein, 15 aa, Homo Sapiens
PSALAALQPAKERRS

SEQ ID NO: 30427 - protein, 15 aa, Homo Sapiens
SALAALQPAKERRSS

SEQ ID NO: 30428 - protein, 15 aa, Homo Sapiens
ALAALQPAKERRSSS

SEQ ID NO: 30429 - protein, 15 aa, Homo Sapiens
LAALQPAKERRSSSS

SEQ ID NO: 30430 - protein, 15 aa, Homo Sapiens
AALQPAKERRSSSSS

SEQ ID NO: 30431 - protein, 15 aa, Homo Sapiens
ALQPAKERRSSSSSS

SEQ ID NO: 30432 - protein, 15 aa, Homo Sapiens
LQPAKERRSSSSSSS

SEQ ID NO: 30433 - protein, 15 aa, Homo Sapiens
QPAKERRSSSSSSSS

SEQ ID NO: 30434 - protein, 15 aa, Homo Sapiens
PAKERRSSSSSSSSS

SEQ ID NO: 30435 - protein, 15 aa, Homo Sapiens
AKERRSSSSSSSSSS

SEQ ID NO: 30436 - protein, 15 aa, Homo Sapiens
KERRSSSSSSSSSSS

SEQ ID NO: 30437 - protein, 15 aa, Homo Sapiens
ERRSSSSSSSSSSSS

SEQ ID NO: 30438 - protein, 15 aa, Homo Sapiens
RRSSSSSSSSSSSSS

SEQ ID NO: 30439 - protein, 15 aa, Homo Sapiens
RSSSSSSSSSSSSSS

SEQ ID NO: 30440 - protein, 15 aa, Homo Sapiens
SSSSSSSSSSSSSSS

SEQ ID NO: 30441 - protein, 15 aa, Homo Sapiens
SSSSSSSSSSSSSSS

SEQ ID NO: 30442 - protein, 15 aa, Homo Sapiens
SSSSSSSSSSSSSSS

SEQ ID NO: 30443 - protein, 15 aa, Homo Sapiens
SSSSSSSSSSSSSSS

SEQ ID NO: 30444 - protein, 15 aa, Homo Sapiens
SSSSSSSSSSSSSSS

SEQ ID NO: 30445 - protein, 15 aa, Homo Sapiens
SSSSSSSSSSSSSSS

SEQ ID NO: 30446 - protein, 15 aa, Homo Sapiens
SSSSSSSSSSSSSSS

SEQ ID NO: 30447 - protein, 15 aa, Homo Sapiens
SSSSSSSSSSSSSSS

SEQ ID NO: 30448 - protein, 15 aa, Homo Sapiens
SSSSSSSSSSSSSSS

SEQ ID NO: 30449 - protein, 15 aa, Homo Sapiens
SSSSSSSSSSSSSSS

SEQ ID NO: 30450 - protein, 15 aa, Homo Sapiens
SSSSSSSSSSSSSSS

SEQ ID NO: 30451 - protein, 15 aa, Homo Sapiens
SSSSSSSSSSSSSSG

SEQ ID NO: 30452 - protein, 15 aa, Homo Sapiens
SSSSSSSSSSSSSGS

SEQ ID NO: 30453 - protein, 15 aa, Homo Sapiens
SSSSSSSSSSSSGSS

SEQ ID NO: 30454 - protein, 15 aa, Homo Sapiens
SSSSSSSSSSSGSSS

SEQ ID NO: 30455 - protein, 15 aa, Homo Sapiens
SSSSSSSSSSGSSSS

SEQ ID NO: 30456 - protein, 15 aa, Homo Sapiens
SSSSSSSSSGSSSSD

SEQ ID NO: 30457 - protein, 15 aa, Homo Sapiens
SSSSSSSSGSSSSDS

SEQ ID NO: 30458 - protein, 15 aa, Homo Sapiens
SSSSSSSGSSSSDSE

SEQ ID NO: 30459 - protein, 15 aa, Homo Sapiens
SSSSSSGSSSSDSEG

SEQ ID NO: 30460 - protein, 15 aa, Homo Sapiens
SSSSSGSSSSDSEGS

SEQ ID NO: 30461 - protein, 15 aa, Homo Sapiens
SSSSGSSSSDSEGSS

SEQ ID NO: 30462 - protein, 15 aa, Homo Sapiens
SSSGSSSSDSEGSSL

SEQ ID NO: 30463 - protein, 15 aa, Homo Sapiens
SSGSSSSDSEGSSLP

SEQ ID NO: 30464 - protein, 15 aa, Homo Sapiens
SGSSSSDSEGSSLPV

SEQ ID NO: 30465 - protein, 15 aa, Homo Sapiens
GSSSSDSEGSSLPVQ

SEQ ID NO: 30466 - protein, 15 aa, Homo Sapiens
SSSSDSEGSSLPVQP

SEQ ID NO: 30467 - protein, 15 aa, Homo Sapiens
SSSDSEGSSLPVQPE

SEQ ID NO: 30468 - protein, 15 aa, Homo Sapiens
SSDSEGSSLPVQPEV

SEQ ID NO: 30469 - protein, 15 aa, Homo Sapiens
SDSEGSSLPVQPEVA

SEQ ID NO: 30470 - protein, 15 aa, Homo Sapiens
DSEGSSLPVQPEVAL

SEQ ID NO: 30471 - protein, 15 aa, Homo Sapiens
SEGSSLPVQPEVALK

SEQ ID NO: 30472 - protein, 15 aa, Homo Sapiens
EGSSLPVQPEVALKR

SEQ ID NO: 30473 - protein, 15 aa, Homo Sapiens
GSSLPVQPEVALKRV

SEQ ID NO: 30474 - protein, 15 aa, Homo Sapiens
SSLPVQPEVALKRVP

SEQ ID NO: 30475 - protein, 15 aa, Homo Sapiens
SLPVQPEVALKRVPS

SEQ ID NO: 30476 - protein, 15 aa, Homo Sapiens
LPVQPEVALKRVPSP

SEQ ID NO: 30477 - protein, 15 aa, Homo Sapiens
PVQPEVALKRVPSPT

SEQ ID NO: 30478 - protein, 15 aa, Homo Sapiens
VQPEVALKRVPSPTP

SEQ ID NO: 30479 - protein, 15 aa, Homo Sapiens
QPEVALKRVPSPTPA

SEQ ID NO: 30480 - protein, 15 aa, Homo Sapiens
PEVALKRVPSPTPAP

SEQ ID NO: 30481 - protein, 15 aa, Homo Sapiens
EVALKRVPSPTPAPK

SEQ ID NO: 30482 - protein, 15 aa, Homo Sapiens
VALKRVPSPTPAPKE

SEQ ID NO: 30483 - protein, 15 aa, Homo Sapiens
ALKRVPSPTPAPKEA

SEQ ID NO: 30484 - protein, 15 aa, Homo Sapiens
LKRVPSPTPAPKEAV

SEQ ID NO: 30485 - protein, 15 aa, Homo Sapiens
KRVPSPTPAPKEAVR

SEQ ID NO: 30486 - protein, 15 aa, Homo Sapiens
RVPSPTPAPKEAVRE

SEQ ID NO: 30487 - protein, 15 aa, Homo Sapiens
VPSPTPAPKEAVREG

SEQ ID NO: 30488 - protein, 15 aa, Homo Sapiens
PSPTPAPKEAVREGR

SEQ ID NO: 30489 - protein, 15 aa, Homo Sapiens
SPTPAPKEAVREGRP

SEQ ID NO: 30490 - protein, 15 aa, Homo Sapiens
PTPAPKEAVREGRPP

SEQ ID NO: 30491 - protein, 15 aa, Homo Sapiens
TPAPKEAVREGRPPE

SEQ ID NO: 30492 - protein, 15 aa, Homo Sapiens
PAPKEAVREGRPPEP

SEQ ID NO: 30493 - protein, 15 aa, Homo Sapiens
APKEAVREGRPPEPT

SEQ ID NO: 30494 - protein, 15 aa, Homo Sapiens
PKEAVREGRPPEPTP

SEQ ID NO: 30495 - protein, 15 aa, Homo Sapiens
KEAVREGRPPEPTPA

SEQ ID NO: 30496 - protein, 15 aa, Homo Sapiens
EAVREGRPPEPTPAK

SEQ ID NO: 30497 - protein, 15 aa, Homo Sapiens
AVREGRPPEPTPAKR

SEQ ID NO: 30498 - protein, 15 aa, Homo Sapiens
VREGRPPEPTPAKRK

SEQ ID NO: 30499 - protein, 15 aa, Homo Sapiens
REGRPPEPTPAKRKR

SEQ ID NO: 30500 - protein, 15 aa, Homo Sapiens
EGRPPEPTPAKRKRR

SEQ ID NO: 30501 - protein, 15 aa, Homo Sapiens
GRPPEPTPAKRKRRS

SEQ ID NO: 30502 - protein, 15 aa, Homo Sapiens
RPPEPTPAKRKRRSS

SEQ ID NO: 30503 - protein, 15 aa, Homo Sapiens
PPEPTPAKRKRRSSS

SEQ ID NO: 30504 - protein, 15 aa, Homo Sapiens
PEPTPAKRKRRSSSS

SEQ ID NO: 30505 - protein, 15 aa, Homo Sapiens
EPTPAKRKRRSSSSS

SEQ ID NO: 30506 - protein, 15 aa, Homo Sapiens
PTPAKRKRRSSSSSS

SEQ ID NO: 30507 - protein, 15 aa, Homo Sapiens
TPAKRKRRSSSSSSS

SEQ ID NO: 30508 - protein, 15 aa, Homo Sapiens
PAKRKRRSSSSSSSS

SEQ ID NO: 30509 - protein, 15 aa, Homo Sapiens
AKRKRRSSSSSSSSS

SEQ ID NO: 30510 - protein, 15 aa, Homo Sapiens
KRKRRSSSSSSSSSS

SEQ ID NO: 30511 - protein, 15 aa, Homo Sapiens
RKRRSSSSSSSSSSS

SEQ ID NO: 30512 - protein, 15 aa, Homo Sapiens
KRRSSSSSSSSSSSS

SEQ ID NO: 30513 - protein, 15 aa, Homo Sapiens
RRSSSSSSSSSSSSS

SEQ ID NO: 30514 - protein, 15 aa, Homo Sapiens
RSSSSSSSSSSSSSS

SEQ ID NO: 30515 - protein, 15 aa, Homo Sapiens
SSSSSSSSSSSSSSS

SEQ ID NO: 30516 - protein, 15 aa, Homo Sapiens
SSSSSSSSSSSSSSS

SEQ ID NO: 30517 - protein, 15 aa, Homo Sapiens
SSSSSSSSSSSSSSS

SEQ ID NO: 30518 - protein, 15 aa, Homo Sapiens
SSSSSSSSSSSSSSS

SEQ ID NO: 30519 - protein, 15 aa, Homo Sapiens
SSSSSSSSSSSSSSS

SEQ ID NO: 30520 - protein, 15 aa, Homo Sapiens
SSSSSSSSSSSSSSS

SEQ ID NO: 30521 - protein, 15 aa, Homo Sapiens
SSSSSSSSSSSSSSS

SEQ ID NO: 30522 - protein, 15 aa, Homo Sapiens
SSSSSSSSSSSSSSS

SEQ ID NO: 30523 - protein, 15 aa, Homo Sapiens
SSSSSSSSSSSSSSS

SEQ ID NO: 30524 - protein, 15 aa, Homo Sapiens
SSSSSSSSSSSSSSS

SEQ ID NO: 30525 - protein, 15 aa, Homo Sapiens
SSSSSSSSSSSSSSS

SEQ ID NO: 30526 - protein, 15 aa, Homo Sapiens
SSSSSSSSSSSSSSS

SEQ ID NO: 30527 - protein, 15 aa, Homo Sapiens
SSSSSSSSSSSSSSS

SEQ ID NO: 30528 - protein, 15 aa, Homo Sapiens
SSSSSSSSSSSSSSS

SEQ ID NO: 30529 - protein, 15 aa, Homo Sapiens
SSSSSSSSSSSSSSS

SEQ ID NO: 30530 - protein, 15 aa, Homo Sapiens
SSSSSSSSSSSSSSS

SEQ ID NO: 30531 - protein, 15 aa, Homo Sapiens
SSSSSSSSSSSSSSS

SEQ ID NO: 30532 - protein, 15 aa, Homo Sapiens
SSSSSSSSSSSSSSS

SEQ ID NO: 30533 - protein, 15 aa, Homo Sapiens
SSSSSSSSSSSSSSS

SEQ ID NO: 30534 - protein, 15 aa, Homo Sapiens
SSSSSSSSSSSSSSS

SEQ ID NO: 30535 - protein, 15 aa, Homo Sapiens
SSSSSSSSSSSSSSS

SEQ ID NO: 30536 - protein, 15 aa, Homo Sapiens
SSSSSSSSSSSSSSS

SEQ ID NO: 30537 - protein, 15 aa, Homo Sapiens
SSSSSSSSSSSSSSS

SEQ ID NO: 30538 - protein, 15 aa, Homo Sapiens
SSSSSSSSSSSSSSS

SEQ ID NO: 30539 - protein, 15 aa, Homo Sapiens
SSSSSSSSSSSSSSS

SEQ ID NO: 30540 - protein, 15 aa, Homo Sapiens
SSSSSSSSSSSSSSS

SEQ ID NO: 30541 - protein, 15 aa, Homo Sapiens
SSSSSSSSSSSSSSS

SEQ ID NO: 30542 - protein, 15 aa, Homo Sapiens
SSSSSSSSSSSSSSS

SEQ ID NO: 30543 - protein, 15 aa, Homo Sapiens
SSSSSSSSSSSSSSP

SEQ ID NO: 30544 - protein, 15 aa, Homo Sapiens
SSSSSSSSSSSSSPS

SEQ ID NO: 30545 - protein, 15 aa, Homo Sapiens
SSSSSSSSSSSSPSP

SEQ ID NO: 30546 - protein, 15 aa, Homo Sapiens
SSSSSSSSSSSPSPA

SEQ ID NO: 30547 - protein, 15 aa, Homo Sapiens
SSSSSSSSSSPSPAK

SEQ ID NO: 30548 - protein, 15 aa, Homo Sapiens
SSSSSSSSSPSPAKP

SEQ ID NO: 30549 - protein, 15 aa, Homo Sapiens
SSSSSSSSPSPAKPG

SEQ ID NO: 30550 - protein, 15 aa, Homo Sapiens
SSSSSSSPSPAKPGP

SEQ ID NO: 30551 - protein, 15 aa, Homo Sapiens
SSSSSSPSPAKPGPQ

SEQ ID NO: 30552 - protein, 15 aa, Homo Sapiens
SSSSSPSPAKPGPQA

SEQ ID NO: 30553 - protein, 15 aa, Homo Sapiens
SSSSPSPAKPGPQAL

SEQ ID NO: 30554 - protein, 15 aa, Homo Sapiens
SSSPSPAKPGPQALP

SEQ ID NO: 30555 - protein, 15 aa, Homo Sapiens
SSPSPAKPGPQALPK

SEQ ID NO: 30556 - protein, 15 aa, Homo Sapiens
SPSPAKPGPQALPKP

SEQ ID NO: 30557 - protein, 15 aa, Homo Sapiens
PSPAKPGPQALPKPA

SEQ ID NO: 30558 - protein, 15 aa, Homo Sapiens
SPAKPGPQALPKPAS

SEQ ID NO: 30559 - protein, 15 aa, Homo Sapiens
PAKPGPQALPKPASP

SEQ ID NO: 30560 - protein, 15 aa, Homo Sapiens
AKPGPQALPKPASPK

SEQ ID NO: 30561 - protein, 15 aa, Homo Sapiens
KPGPQALPKPASPKK

SEQ ID NO: 30562 - protein, 15 aa, Homo Sapiens
PGPQALPKPASPKKP

SEQ ID NO: 30563 - protein, 15 aa, Homo Sapiens
GPQALPKPASPKKPP

SEQ ID NO: 30564 - protein, 15 aa, Homo Sapiens
PQALPKPASPKKPPP

SEQ ID NO: 30565 - protein, 15 aa, Homo Sapiens
QALPKPASPKKPPPG

SEQ ID NO: 30566 - protein, 15 aa, Homo Sapiens
ALPKPASPKKPPPGE

SEQ ID NO: 30567 - protein, 15 aa, Homo Sapiens
LPKPASPKKPPPGER

SEQ ID NO: 30568 - protein, 15 aa, Homo Sapiens
PKPASPKKPPPGERR

SEQ ID NO: 30569 - protein, 15 aa, Homo Sapiens
KPASPKKPPPGERRS

SEQ ID NO: 30570 - protein, 15 aa, Homo Sapiens
PASPKKPPPGERRSR

SEQ ID NO: 30571 - protein, 15 aa, Homo Sapiens
ASPKKPPPGERRSRS

SEQ ID NO: 30572 - protein, 15 aa, Homo Sapiens
SPKKPPPGERRSRSP

SEQ ID NO: 30573 - protein, 15 aa, Homo Sapiens
PKKPPPGERRSRSPR

SEQ ID NO: 30574 - protein, 15 aa, Homo Sapiens
KKPPPGERRSRSPRK

SEQ ID NO: 30575 - protein, 15 aa, Homo Sapiens
KPPPGERRSRSPRKP

SEQ ID NO: 30576 - protein, 15 aa, Homo Sapiens
PPPGERRSRSPRKPI

SEQ ID NO: 30577 - protein, 15 aa, Homo Sapiens
PPGERRSRSPRKPID

SEQ ID NO: 30578 - protein, 15 aa, Homo Sapiens
PGERRSRSPRKPIDS

SEQ ID NO: 30579 - protein, 15 aa, Homo Sapiens
GERRSRSPRKPIDSL

SEQ ID NO: 30580 - protein, 15 aa, Homo Sapiens
ERRSRSPRKPIDSLR

SEQ ID NO: 30581 - protein, 15 aa, Homo Sapiens
RRSRSPRKPIDSLRD

SEQ ID NO: 30582 - protein, 15 aa, Homo Sapiens
RSRSPRKPIDSLRDS

SEQ ID NO: 30583 - protein, 15 aa, Homo Sapiens
SRSPRKPIDSLRDSR

SEQ ID NO: 30584 - protein, 15 aa, Homo Sapiens
RSPRKPIDSLRDSRS

SEQ ID NO: 30585 - protein, 15 aa, Homo Sapiens
SPRKPIDSLRDSRSL

SEQ ID NO: 30586 - protein, 15 aa, Homo Sapiens
PRKPIDSLRDSRSLS

SEQ ID NO: 30587 - protein, 15 aa, Homo Sapiens
RKPIDSLRDSRSLSY

SEQ ID NO: 30588 - protein, 15 aa, Homo Sapiens
KPIDSLRDSRSLSYS

SEQ ID NO: 30589 - protein, 15 aa, Homo Sapiens
PIDSLRDSRSLSYSP

SEQ ID NO: 30590 - protein, 15 aa, Homo Sapiens
IDSLRDSRSLSYSPV

SEQ ID NO: 30591 - protein, 15 aa, Homo Sapiens
DSLRDSRSLSYSPVE

SEQ ID NO: 30592 - protein, 15 aa, Homo Sapiens
SLRDSRSLSYSPVER

SEQ ID NO: 30593 - protein, 15 aa, Homo Sapiens
LRDSRSLSYSPVERR

SEQ ID NO: 30594 - protein, 15 aa, Homo Sapiens
RDSRSLSYSPVERRR

SEQ ID NO: 30595 - protein, 15 aa, Homo Sapiens
DSRSLSYSPVERRRP

SEQ ID NO: 30596 - protein, 15 aa, Homo Sapiens
SRSLSYSPVERRRPS

SEQ ID NO: 30597 - protein, 15 aa, Homo Sapiens
RSLSYSPVERRRPSP

SEQ ID NO: 30598 - protein, 15 aa, Homo Sapiens
SLSYSPVERRRPSPQ

SEQ ID NO: 30599 - protein, 15 aa, Homo Sapiens
LSYSPVERRRPSPQP

SEQ ID NO: 30600 - protein, 15 aa, Homo Sapiens
SYSPVERRRPSPQPS

SEQ ID NO: 30601 - protein, 15 aa, Homo Sapiens
YSPVERRRPSPQPSP

SEQ ID NO: 30602 - protein, 15 aa, Homo Sapiens
SPVERRRPSPQPSPR

SEQ ID NO: 30603 - protein, 15 aa, Homo Sapiens
PVERRRPSPQPSPRD

SEQ ID NO: 30604 - protein, 15 aa, Homo Sapiens
VERRRPSPQPSPRDQ

SEQ ID NO: 30605 - protein, 15 aa, Homo Sapiens
ERRRPSPQPSPRDQQ

SEQ ID NO: 30606 - protein, 15 aa, Homo Sapiens
RRRPSPQPSPRDQQS

SEQ ID NO: 30607 - protein, 15 aa, Homo Sapiens
RRPSPQPSPRDQQSS

SEQ ID NO: 30608 - protein, 15 aa, Homo Sapiens
RPSPQPSPRDQQSSS

SEQ ID NO: 30609 - protein, 15 aa, Homo Sapiens
PSPQPSPRDQQSSSS

SEQ ID NO: 30610 - protein, 15 aa, Homo Sapiens
SPQPSPRDQQSSSSE

SEQ ID NO: 30611 - protein, 15 aa, Homo Sapiens
PQPSPRDQQSSSSER

SEQ ID NO: 30612 - protein, 15 aa, Homo Sapiens
QPSPRDQQSSSSERG

SEQ ID NO: 30613 - protein, 15 aa, Homo Sapiens
PSPRDQQSSSSERGS

SEQ ID NO: 30614 - protein, 15 aa, Homo Sapiens
SPRDQQSSSSERGSR

SEQ ID NO: 30615 - protein, 15 aa, Homo Sapiens
PRDQQSSSSERGSRR

SEQ ID NO: 30616 - protein, 15 aa, Homo Sapiens
RDQQSSSSERGSRRG

SEQ ID NO: 30617 - protein, 15 aa, Homo Sapiens
DQQSSSSERGSRRGQ

SEQ ID NO: 30618 - protein, 15 aa, Homo Sapiens
QQSSSSERGSRRGQR

SEQ ID NO: 30619 - protein, 15 aa, Homo Sapiens
QSSSSERGSRRGQRG

SEQ ID NO: 30620 - protein, 15 aa, Homo Sapiens
SSSSERGSRRGQRGD

SEQ ID NO: 30621 - protein, 15 aa, Homo Sapiens
SSSERGSRRGQRGDS

SEQ ID NO: 30622 - protein, 15 aa, Homo Sapiens
SSERGSRRGQRGDSR

SEQ ID NO: 30623 - protein, 15 aa, Homo Sapiens
SERGSRRGQRGDSRS

SEQ ID NO: 30624 - protein, 15 aa, Homo Sapiens
ERGSRRGQRGDSRSP

SEQ ID NO: 30625 - protein, 15 aa, Homo Sapiens
RGSRRGQRGDSRSPS

SEQ ID NO: 30626 - protein, 15 aa, Homo Sapiens
GSRRGQRGDSRSPSH

SEQ ID NO: 30627 - protein, 15 aa, Homo Sapiens
SRRGQRGDSRSPSHK

SEQ ID NO: 30628 - protein, 15 aa, Homo Sapiens
RRGQRGDSRSPSHKR

SEQ ID NO: 30629 - protein, 15 aa, Homo Sapiens
RGQRGDSRSPSHKRR

SEQ ID NO: 30630 - protein, 15 aa, Homo Sapiens
GQRGDSRSPSHKRRR

SEQ ID NO: 30631 - protein, 15 aa, Homo Sapiens
QRGDSRSPSHKRRRE

SEQ ID NO: 30632 - protein, 15 aa, Homo Sapiens
RGDSRSPSHKRRRET

SEQ ID NO: 30633 - protein, 15 aa, Homo Sapiens
GDSRSPSHKRRRETP

SEQ ID NO: 30634 - protein, 15 aa, Homo Sapiens
DSRSPSHKRRRETPS

SEQ ID NO: 30635 - protein, 15 aa, Homo Sapiens
SRSPSHKRRRETPSP

SEQ ID NO: 30636 - protein, 15 aa, Homo Sapiens
RSPSHKRRRETPSPR

SEQ ID NO: 30637 - protein, 15 aa, Homo Sapiens
SPSHKRRRETPSPRP

SEQ ID NO: 30638 - protein, 15 aa, Homo Sapiens
PSHKRRRETPSPRPM

SEQ ID NO: 30639 - protein, 15 aa, Homo Sapiens
SHKRRRETPSPRPMR

SEQ ID NO: 30640 - protein, 15 aa, Homo Sapiens
HKRRRETPSPRPMRH

SEQ ID NO: 30641 - protein, 15 aa, Homo Sapiens
KRRRETPSPRPMRHR

SEQ ID NO: 30642 - protein, 15 aa, Homo Sapiens
RRRETPSPRPMRHRS

SEQ ID NO: 30643 - protein, 15 aa, Homo Sapiens
RRETPSPRPMRHRSS

SEQ ID NO: 30644 - protein, 15 aa, Homo Sapiens
RETPSPRPMRHRSSR

SEQ ID NO: 30645 - protein, 15 aa, Homo Sapiens
ETPSPRPMRHRSSRS

SEQ ID NO: 30646 - protein, 15 aa, Homo Sapiens
TPSPRPMRHRSSRSP

SEQ ID NO: 30647 - protein, 16 aa, Homo Sapiens
MYNGIGLPTPRGSGTN

SEQ ID NO: 30648 - protein, 16 aa, Homo Sapiens
YNGIGLPTPRGSGTNG

SEQ ID NO: 30649 - protein, 16 aa, Homo Sapiens
NGIGLPTPRGSGTNGY

SEQ ID NO: 30650 - protein, 16 aa, Homo Sapiens
GIGLPTPRGSGTNGYV

SEQ ID NO: 30651 - protein, 16 aa, Homo Sapiens
IGLPTPRGSGTNGYVQ

SEQ ID NO: 30652 - protein, 16 aa, Homo Sapiens
GLPTPRGSGTNGYVQR

SEQ ID NO: 30653 - protein, 16 aa, Homo Sapiens
LPTPRGSGTNGYVQRN

SEQ ID NO: 30654 - protein, 16 aa, Homo Sapiens
PTPRGSGTNGYVQRNL

SEQ ID NO: 30655 - protein, 16 aa, Homo Sapiens
TPRGSGTNGYVQRNLS

SEQ ID NO: 30656 - protein, 16 aa, Homo Sapiens
PRGSGTNGYVQRNLSL

SEQ ID NO: 30657 - protein, 16 aa, Homo Sapiens
RGSGTNGYVQRNLSLV

SEQ ID NO: 30658 - protein, 16 aa, Homo Sapiens
GSGTNGYVQRNLSLVR

SEQ ID NO: 30659 - protein, 16 aa, Homo Sapiens
SGTNGYVQRNLSLVRG

SEQ ID NO: 30660 - protein, 16 aa, Homo Sapiens
GTNGYVQRNLSLVRGR

SEQ ID NO: 30661 - protein, 16 aa, Homo Sapiens
TNGYVQRNLSLVRGRR

SEQ ID NO: 30662 - protein, 16 aa, Homo Sapiens
NGYVQRNLSLVRGRRG

SEQ ID NO: 30663 - protein, 16 aa, Homo Sapiens
GYVQRNLSLVRGRRGE

SEQ ID NO: 30664 - protein, 16 aa, Homo Sapiens
YVQRNLSLVRGRRGER

SEQ ID NO: 30665 - protein, 16 aa, Homo Sapiens
VQRNLSLVRGRRGERP

SEQ ID NO: 30666 - protein, 16 aa, Homo Sapiens
QRNLSLVRGRRGERPD

SEQ ID NO: 30667 - protein, 16 aa, Homo Sapiens
RNLSLVRGRRGERPDY

SEQ ID NO: 30668 - protein, 16 aa, Homo Sapiens
NLSLVRGRRGERPDYK

SEQ ID NO: 30669 - protein, 16 aa, Homo Sapiens
LSLVRGRRGERPDYKG

SEQ ID NO: 30670 - protein, 16 aa, Homo Sapiens
SLVRGRRGERPDYKGE

SEQ ID NO: 30671 - protein, 16 aa, Homo Sapiens
LVRGRRGERPDYKGEE

SEQ ID NO: 30672 - protein, 16 aa, Homo Sapiens
VRGRRGERPDYKGEEE

SEQ ID NO: 30673 - protein, 16 aa, Homo Sapiens
RGRRGERPDYKGEEEL

SEQ ID NO: 30674 - protein, 16 aa, Homo Sapiens
GRRGERPDYKGEEELR

SEQ ID NO: 30675 - protein, 16 aa, Homo Sapiens
RRGERPDYKGEEELRR

SEQ ID NO: 30676 - protein, 16 aa, Homo Sapiens
RGERPDYKGEEELRRL

SEQ ID NO: 30677 - protein, 16 aa, Homo Sapiens
GERPDYKGEEELRRLE

SEQ ID NO: 30678 - protein, 16 aa, Homo Sapiens
ERPDYKGEEELRRLEA

SEQ ID NO: 30679 - protein, 16 aa, Homo Sapiens
RPDYKGEEELRRLEAA

SEQ ID NO: 30680 - protein, 16 aa, Homo Sapiens
PDYKGEEELRRLEAAL

SEQ ID NO: 30681 - protein, 16 aa, Homo Sapiens
DYKGEEELRRLEAALV

SEQ ID NO: 30682 - protein, 16 aa, Homo Sapiens
YKGEEELRRLEAALVK

SEQ ID NO: 30683 - protein, 16 aa, Homo Sapiens
KGEEELRRLEAALVKR

SEQ ID NO: 30684 - protein, 16 aa, Homo Sapiens
GEEELRRLEAALVKRP

SEQ ID NO: 30685 - protein, 16 aa, Homo Sapiens
EEELRRLEAALVKRPN

SEQ ID NO: 30686 - protein, 16 aa, Homo Sapiens
EELRRLEAALVKRPNP

SEQ ID NO: 30687 - protein, 16 aa, Homo Sapiens
ELRRLEAALVKRPNPD

SEQ ID NO: 30688 - protein, 16 aa, Homo Sapiens
LRRLEAALVKRPNPDI

SEQ ID NO: 30689 - protein, 16 aa, Homo Sapiens
RRLEAALVKRPNPDIL

SEQ ID NO: 30690 - protein, 16 aa, Homo Sapiens
RLEAALVKRPNPDILD

SEQ ID NO: 30691 - protein, 16 aa, Homo Sapiens
LEAALVKRPNPDILDH

SEQ ID NO: 30692 - protein, 16 aa, Homo Sapiens
EAALVKRPNPDILDHE

SEQ ID NO: 30693 - protein, 16 aa, Homo Sapiens
AALVKRPNPDILDHER

SEQ ID NO: 30694 - protein, 16 aa, Homo Sapiens
ALVKRPNPDILDHERK

SEQ ID NO: 30695 - protein, 16 aa, Homo Sapiens
LVKRPNPDILDHERKR

SEQ ID NO: 30696 - protein, 16 aa, Homo Sapiens
VKRPNPDILDHERKRR

SEQ ID NO: 30697 - protein, 16 aa, Homo Sapiens
KRPNPDILDHERKRRV

SEQ ID NO: 30698 - protein, 16 aa, Homo Sapiens
RPNPDILDHERKRRVE

SEQ ID NO: 30699 - protein, 16 aa, Homo Sapiens
PNPDILDHERKRRVEL

SEQ ID NO: 30700 - protein, 16 aa, Homo Sapiens
NPDILDHERKRRVELR

SEQ ID NO: 30701 - protein, 16 aa, Homo Sapiens
PDILDHERKRRVELRC

SEQ ID NO: 30702 - protein, 16 aa, Homo Sapiens
DILDHERKRRVELRCL

SEQ ID NO: 30703 - protein, 16 aa, Homo Sapiens
ILDHERKRRVELRCLE

SEQ ID NO: 30704 - protein, 16 aa, Homo Sapiens
LDHERKRRVELRCLEL

SEQ ID NO: 30705 - protein, 16 aa, Homo Sapiens
DHERKRRVELRCLELE

SEQ ID NO: 30706 - protein, 16 aa, Homo Sapiens
HERKRRVELRCLELEE

SEQ ID NO: 30707 - protein, 16 aa, Homo Sapiens
ERKRRVELRCLELEEM

SEQ ID NO: 30708 - protein, 16 aa, Homo Sapiens
RKRRVELRCLELEEMM

SEQ ID NO: 30709 - protein, 16 aa, Homo Sapiens
KRRVELRCLELEEMME

SEQ ID NO: 30710 - protein, 16 aa, Homo Sapiens
RRVELRCLELEEMMEE

SEQ ID NO: 30711 - protein, 16 aa, Homo Sapiens
RVELRCLELEEMMEEQ

SEQ ID NO: 30712 - protein, 16 aa, Homo Sapiens
VELRCLELEEMMEEQG

SEQ ID NO: 30713 - protein, 16 aa, Homo Sapiens
ELRCLELEEMMEEQGY

SEQ ID NO: 30714 - protein, 16 aa, Homo Sapiens
LRCLELEEMMEEQGYE

SEQ ID NO: 30715 - protein, 16 aa, Homo Sapiens
RCLELEEMMEEQGYEE

SEQ ID NO: 30716 - protein, 16 aa, Homo Sapiens
CLELEEMMEEQGYEEQ

SEQ ID NO: 30717 - protein, 16 aa, Homo Sapiens
LELEEMMEEQGYEEQQ

SEQ ID NO: 30718 - protein, 16 aa, Homo Sapiens
ELEEMMEEQGYEEQQI

SEQ ID NO: 30719 - protein, 16 aa, Homo Sapiens
LEEMMEEQGYEEQQIQ

SEQ ID NO: 30720 - protein, 16 aa, Homo Sapiens
EEMMEEQGYEEQQIQE

SEQ ID NO: 30721 - protein, 16 aa, Homo Sapiens
EMMEEQGYEEQQIQEK

SEQ ID NO: 30722 - protein, 16 aa, Homo Sapiens
MMEEQGYEEQQIQEKV

SEQ ID NO: 30723 - protein, 16 aa, Homo Sapiens
MEEQGYEEQQIQEKVA

SEQ ID NO: 30724 - protein, 16 aa, Homo Sapiens
EEQGYEEQQIQEKVAT

SEQ ID NO: 30725 - protein, 16 aa, Homo Sapiens
EQGYEEQQIQEKVATF

SEQ ID NO: 30726 - protein, 16 aa, Homo Sapiens
QGYEEQQIQEKVATFR

SEQ ID NO: 30727 - protein, 16 aa, Homo Sapiens
GYEEQQIQEKVATFRL

SEQ ID NO: 30728 - protein, 16 aa, Homo Sapiens
YEEQQIQEKVATFRLM

SEQ ID NO: 30729 - protein, 16 aa, Homo Sapiens
EEQQIQEKVATFRLML

SEQ ID NO: 30730 - protein, 16 aa, Homo Sapiens
EQQIQEKVATFRLMLL

SEQ ID NO: 30731 - protein, 16 aa, Homo Sapiens
QQIQEKVATFRLMLLE

SEQ ID NO: 30732 - protein, 16 aa, Homo Sapiens
QIQEKVATFRLMLLEK

SEQ ID NO: 30733 - protein, 16 aa, Homo Sapiens
IQEKVATFRLMLLEKD

SEQ ID NO: 30734 - protein, 16 aa, Homo Sapiens
QEKVATFRLMLLEKDV

SEQ ID NO: 30735 - protein, 16 aa, Homo Sapiens
EKVATFRLMLLEKDVN

SEQ ID NO: 30736 - protein, 16 aa, Homo Sapiens
KVATFRLMLLEKDVNP

SEQ ID NO: 30737 - protein, 16 aa, Homo Sapiens
VATFRLMLLEKDVNPG

SEQ ID NO: 30738 - protein, 16 aa, Homo Sapiens
ATFRLMLLEKDVNPGG

SEQ ID NO: 30739 - protein, 16 aa, Homo Sapiens
TFRLMLLEKDVNPGGK

SEQ ID NO: 30740 - protein, 16 aa, Homo Sapiens
FRLMLLEKDVNPGGKE

SEQ ID NO: 30741 - protein, 16 aa, Homo Sapiens
RLMLLEKDVNPGGKEE

SEQ ID NO: 30742 - protein, 16 aa, Homo Sapiens
LMLLEKDVNPGGKEET

SEQ ID NO: 30743 - protein, 16 aa, Homo Sapiens
MLLEKDVNPGGKEETP

SEQ ID NO: 30744 - protein, 16 aa, Homo Sapiens
LLEKDVNPGGKEETPG

SEQ ID NO: 30745 - protein, 16 aa, Homo Sapiens
LEKDVNPGGKEETPGQ

SEQ ID NO: 30746 - protein, 16 aa, Homo Sapiens
EKDVNPGGKEETPGQR

SEQ ID NO: 30747 - protein, 16 aa, Homo Sapiens
KDVNPGGKEETPGQRP

SEQ ID NO: 30748 - protein, 16 aa, Homo Sapiens
DVNPGGKEETPGQRPA

SEQ ID NO: 30749 - protein, 16 aa, Homo Sapiens
VNPGGKEETPGQRPAV

SEQ ID NO: 30750 - protein, 16 aa, Homo Sapiens
NPGGKEETPGQRPAVT

SEQ ID NO: 30751 - protein, 16 aa, Homo Sapiens
PGGKEETPGQRPAVTE

SEQ ID NO: 30752 - protein, 16 aa, Homo Sapiens
GGKEETPGQRPAVTET

SEQ ID NO: 30753 - protein, 16 aa, Homo Sapiens
GKEETPGQRPAVTETH

SEQ ID NO: 30754 - protein, 16 aa, Homo Sapiens
KEETPGQRPAVTETHQ

SEQ ID NO: 30755 - protein, 16 aa, Homo Sapiens
EETPGQRPAVTETHQL

SEQ ID NO: 30756 - protein, 16 aa, Homo Sapiens
ETPGQRPAVTETHQLA

SEQ ID NO: 30757 - protein, 16 aa, Homo Sapiens
TPGQRPAVTETHQLAE

SEQ ID NO: 30758 - protein, 16 aa, Homo Sapiens
PGQRPAVTETHQLAEL

SEQ ID NO: 30759 - protein, 16 aa, Homo Sapiens
GQRPAVTETHQLAELN

SEQ ID NO: 30760 - protein, 16 aa, Homo Sapiens
QRPAVTETHQLAELNE

SEQ ID NO: 30761 - protein, 16 aa, Homo Sapiens
RPAVTETHQLAELNEK

SEQ ID NO: 30762 - protein, 16 aa, Homo Sapiens
PAVTETHQLAELNEKK

SEQ ID NO: 30763 - protein, 16 aa, Homo Sapiens
AVTETHQLAELNEKKN

SEQ ID NO: 30764 - protein, 16 aa, Homo Sapiens
VTETHQLAELNEKKNE

SEQ ID NO: 30765 - protein, 16 aa, Homo Sapiens
TETHQLAELNEKKNER

SEQ ID NO: 30766 - protein, 16 aa, Homo Sapiens
ETHQLAELNEKKNERL

SEQ ID NO: 30767 - protein, 16 aa, Homo Sapiens
THQLAELNEKKNERLR

SEQ ID NO: 30768 - protein, 16 aa, Homo Sapiens
HQLAELNEKKNERLRA

SEQ ID NO: 30769 - protein, 16 aa, Homo Sapiens
QLAELNEKKNERLRAA

SEQ ID NO: 30770 - protein, 16 aa, Homo Sapiens
LAELNEKKNERLRAAF

SEQ ID NO: 30771 - protein, 16 aa, Homo Sapiens
AELNEKKNERLRAAFG

SEQ ID NO: 30772 - protein, 16 aa, Homo Sapiens
ELNEKKNERLRAAFGI

SEQ ID NO: 30773 - protein, 16 aa, Homo Sapiens
LNEKKNERLRAAFGIS

SEQ ID NO: 30774 - protein, 16 aa, Homo Sapiens
NEKKNERLRAAFGISD

SEQ ID NO: 30775 - protein, 16 aa, Homo Sapiens
EKKNERLRAAFGISDS

SEQ ID NO: 30776 - protein, 16 aa, Homo Sapiens
KKNERLRAAFGISDSY

SEQ ID NO: 30777 - protein, 16 aa, Homo Sapiens
KNERLRAAFGISDSYV

SEQ ID NO: 30778 - protein, 16 aa, Homo Sapiens
NERLRAAFGISDSYVD

SEQ ID NO: 30779 - protein, 16 aa, Homo Sapiens
ERLRAAFGISDSYVDG

SEQ ID NO: 30780 - protein, 16 aa, Homo Sapiens
RLRAAFGISDSYVDGS

SEQ ID NO: 30781 - protein, 16 aa, Homo Sapiens
LRAAFGISDSYVDGSS

SEQ ID NO: 30782 - protein, 16 aa, Homo Sapiens
RAAFGISDSYVDGSSF

SEQ ID NO: 30783 - protein, 16 aa, Homo Sapiens
AAFGISDSYVDGSSFD

SEQ ID NO: 30784 - protein, 16 aa, Homo Sapiens
AFGISDSYVDGSSFDP

SEQ ID NO: 30785 - protein, 16 aa, Homo Sapiens
FGISDSYVDGSSFDPQ

SEQ ID NO: 30786 - protein, 16 aa, Homo Sapiens
GISDSYVDGSSFDPQR

SEQ ID NO: 30787 - protein, 16 aa, Homo Sapiens
ISDSYVDGSSFDPQRR

SEQ ID NO: 30788 - protein, 16 aa, Homo Sapiens
SDSYVDGSSFDPQRRA

SEQ ID NO: 30789 - protein, 16 aa, Homo Sapiens
DSYVDGSSFDPQRRAR

SEQ ID NO: 30790 - protein, 16 aa, Homo Sapiens
SYVDGSSFDPQRRARE

SEQ ID NO: 30791 - protein, 16 aa, Homo Sapiens
YVDGSSFDPQRRAREA

SEQ ID NO: 30792 - protein, 16 aa, Homo Sapiens
VDGSSFDPQRRAREAK

SEQ ID NO: 30793 - protein, 16 aa, Homo Sapiens
DGSSFDPQRRAREAKQ

SEQ ID NO: 30794 - protein, 16 aa, Homo Sapiens
GSSFDPQRRAREAKQP

SEQ ID NO: 30795 - protein, 16 aa, Homo Sapiens
SSFDPQRRAREAKQPA

SEQ ID NO: 30796 - protein, 16 aa, Homo Sapiens
SFDPQRRAREAKQPAP

SEQ ID NO: 30797 - protein, 16 aa, Homo Sapiens
FDPQRRAREAKQPAPE

SEQ ID NO: 30798 - protein, 16 aa, Homo Sapiens
DPQRRAREAKQPAPEP

SEQ ID NO: 30799 - protein, 16 aa, Homo Sapiens
PQRRAREAKQPAPEPP

SEQ ID NO: 30800 - protein, 16 aa, Homo Sapiens
QRRAREAKQPAPEPPK

SEQ ID NO: 30801 - protein, 16 aa, Homo Sapiens
RRAREAKQPAPEPPKP

SEQ ID NO: 30802 - protein, 16 aa, Homo Sapiens
RAREAKQPAPEPPKPY

SEQ ID NO: 30803 - protein, 16 aa, Homo Sapiens
AREAKQPAPEPPKPYS

SEQ ID NO: 30804 - protein, 16 aa, Homo Sapiens
REAKQPAPEPPKPYSL

SEQ ID NO: 30805 - protein, 16 aa, Homo Sapiens
EAKQPAPEPPKPYSLV

SEQ ID NO: 30806 - protein, 16 aa, Homo Sapiens
AKQPAPEPPKPYSLVR

SEQ ID NO: 30807 - protein, 16 aa, Homo Sapiens
KQPAPEPPKPYSLVRE

SEQ ID NO: 30808 - protein, 16 aa, Homo Sapiens
QPAPEPPKPYSLVRES

SEQ ID NO: 30809 - protein, 16 aa, Homo Sapiens
PAPEPPKPYSLVRESS

SEQ ID NO: 30810 - protein, 16 aa, Homo Sapiens
APEPPKPYSLVRESSS

SEQ ID NO: 30811 - protein, 16 aa, Homo Sapiens
PEPPKPYSLVRESSSS

SEQ ID NO: 30812 - protein, 16 aa, Homo Sapiens
EPPKPYSLVRESSSSR

SEQ ID NO: 30813 - protein, 16 aa, Homo Sapiens
PPKPYSLVRESSSSRS

SEQ ID NO: 30814 - protein, 16 aa, Homo Sapiens
PKPYSLVRESSSSRSP

SEQ ID NO: 30815 - protein, 16 aa, Homo Sapiens
KPYSLVRESSSSRSPT

SEQ ID NO: 30816 - protein, 16 aa, Homo Sapiens
PYSLVRESSSSRSPTP

SEQ ID NO: 30817 - protein, 16 aa, Homo Sapiens
YSLVRESSSSRSPTPK

SEQ ID NO: 30818 - protein, 16 aa, Homo Sapiens
SLVRESSSSRSPTPKQ

SEQ ID NO: 30819 - protein, 16 aa, Homo Sapiens
LVRESSSSRSPTPKQK

SEQ ID NO: 30820 - protein, 16 aa, Homo Sapiens
VRESSSSRSPTPKQKK

SEQ ID NO: 30821 - protein, 16 aa, Homo Sapiens
RESSSSRSPTPKQKKK

SEQ ID NO: 30822 - protein, 16 aa, Homo Sapiens
ESSSSRSPTPKQKKKK

SEQ ID NO: 30823 - protein, 16 aa, Homo Sapiens
SSSSRSPTPKQKKKKK

SEQ ID NO: 30824 - protein, 16 aa, Homo Sapiens
SSSRSPTPKQKKKKKK

SEQ ID NO: 30825 - protein, 16 aa, Homo Sapiens
SSRSPTPKQKKKKKKK

SEQ ID NO: 30826 - protein, 16 aa, Homo Sapiens
SRSPTPKQKKKKKKKD

SEQ ID NO: 30827 - protein, 16 aa, Homo Sapiens
RSPTPKQKKKKKKKDR

SEQ ID NO: 30828 - protein, 16 aa, Homo Sapiens
SPTPKQKKKKKKKDRG

SEQ ID NO: 30829 - protein, 16 aa, Homo Sapiens
PTPKQKKKKKKKDRGR

SEQ ID NO: 30830 - protein, 16 aa, Homo Sapiens
TPKQKKKKKKKDRGRR

SEQ ID NO: 30831 - protein, 16 aa, Homo Sapiens
PKQKKKKKKKDRGRRS

SEQ ID NO: 30832 - protein, 16 aa, Homo Sapiens
KQKKKKKKKDRGRRSE

SEQ ID NO: 30833 - protein, 16 aa, Homo Sapiens
QKKKKKKKDRGRRSES

SEQ ID NO: 30834 - protein, 16 aa, Homo Sapiens
KKKKKKKDRGRRSESS

SEQ ID NO: 30835 - protein, 16 aa, Homo Sapiens
KKKKKKDRGRRSESSS

SEQ ID NO: 30836 - protein, 16 aa, Homo Sapiens
KKKKKDRGRRSESSSP

SEQ ID NO: 30837 - protein, 16 aa, Homo Sapiens
KKKKDRGRRSESSSPR

SEQ ID NO: 30838 - protein, 16 aa, Homo Sapiens
KKKDRGRRSESSSPRR

SEQ ID NO: 30839 - protein, 16 aa, Homo Sapiens
KKDRGRRSESSSPRRE

SEQ ID NO: 30840 - protein, 16 aa, Homo Sapiens
KDRGRRSESSSPRRER

SEQ ID NO: 30841 - protein, 16 aa, Homo Sapiens
DRGRRSESSSPRRERK

SEQ ID NO: 30842 - protein, 16 aa, Homo Sapiens
RGRRSESSSPRRERKK

SEQ ID NO: 30843 - protein, 16 aa, Homo Sapiens
GRRSESSSPRRERKKS

SEQ ID NO: 30844 - protein, 16 aa, Homo Sapiens
RRSESSSPRRERKKSS

SEQ ID NO: 30845 - protein, 16 aa, Homo Sapiens
RSESSSPRRERKKSSK

SEQ ID NO: 30846 - protein, 16 aa, Homo Sapiens
SESSSPRRERKKSSKK

SEQ ID NO: 30847 - protein, 16 aa, Homo Sapiens
ESSSPRRERKKSSKKK

SEQ ID NO: 30848 - protein, 16 aa, Homo Sapiens
SSSPRRERKKSSKKKK

SEQ ID NO: 30849 - protein, 16 aa, Homo Sapiens
SSPRRERKKSSKKKKH

SEQ ID NO: 30850 - protein, 16 aa, Homo Sapiens
SPRRERKKSSKKKKHR

SEQ ID NO: 30851 - protein, 16 aa, Homo Sapiens
PRRERKKSSKKKKHRS

SEQ ID NO: 30852 - protein, 16 aa, Homo Sapiens
RRERKKSSKKKKHRSE

SEQ ID NO: 30853 - protein, 16 aa, Homo Sapiens
RERKKSSKKKKHRSES

SEQ ID NO: 30854 - protein, 16 aa, Homo Sapiens
ERKKSSKKKKHRSESE

SEQ ID NO: 30855 - protein, 16 aa, Homo Sapiens
RKKSSKKKKHRSESES

SEQ ID NO: 30856 - protein, 16 aa, Homo Sapiens
KKSSKKKKHRSESESK

SEQ ID NO: 30857 - protein, 16 aa, Homo Sapiens
KSSKKKKHRSESESKK

SEQ ID NO: 30858 - protein, 16 aa, Homo Sapiens
SSKKKKHRSESESKKR

SEQ ID NO: 30859 - protein, 16 aa, Homo Sapiens
SKKKKHRSESESKKRK

SEQ ID NO: 30860 - protein, 16 aa, Homo Sapiens
KKKKHRSESESKKRKH

SEQ ID NO: 30861 - protein, 16 aa, Homo Sapiens
KKKHRSESESKKRKHR

SEQ ID NO: 30862 - protein, 16 aa, Homo Sapiens
KKHRSESESKKRKHRS

SEQ ID NO: 30863 - protein, 16 aa, Homo Sapiens
KHRSESESKKRKHRSP

SEQ ID NO: 30864 - protein, 16 aa, Homo Sapiens
HRSESESKKRKHRSPT

SEQ ID NO: 30865 - protein, 16 aa, Homo Sapiens
RSESESKKRKHRSPTP

SEQ ID NO: 30866 - protein, 16 aa, Homo Sapiens
SESESKKRKHRSPTPK

SEQ ID NO: 30867 - protein, 16 aa, Homo Sapiens
ESESKKRKHRSPTPKS

SEQ ID NO: 30868 - protein, 16 aa, Homo Sapiens
SESKKRKHRSPTPKSK

SEQ ID NO: 30869 - protein, 16 aa, Homo Sapiens
ESKKRKHRSPTPKSKR

SEQ ID NO: 30870 - protein, 16 aa, Homo Sapiens
SKKRKHRSPTPKSKRK

SEQ ID NO: 30871 - protein, 16 aa, Homo Sapiens
KKRKHRSPTPKSKRKS

SEQ ID NO: 30872 - protein, 16 aa, Homo Sapiens
KRKHRSPTPKSKRKSK

SEQ ID NO: 30873 - protein, 16 aa, Homo Sapiens
RKHRSPTPKSKRKSKD

SEQ ID NO: 30874 - protein, 16 aa, Homo Sapiens
KHRSPTPKSKRKSKDK

SEQ ID NO: 30875 - protein, 16 aa, Homo Sapiens
HRSPTPKSKRKSKDKK

SEQ ID NO: 30876 - protein, 16 aa, Homo Sapiens
RSPTPKSKRKSKDKKR

SEQ ID NO: 30877 - protein, 16 aa, Homo Sapiens
SPTPKSKRKSKDKKRK

SEQ ID NO: 30878 - protein, 16 aa, Homo Sapiens
PTPKSKRKSKDKKRKR

SEQ ID NO: 30879 - protein, 16 aa, Homo Sapiens
TPKSKRKSKDKKRKRS

SEQ ID NO: 30880 - protein, 16 aa, Homo Sapiens
PKSKRKSKDKKRKRSR

SEQ ID NO: 30881 - protein, 16 aa, Homo Sapiens
KSKRKSKDKKRKRSRS

SEQ ID NO: 30882 - protein, 16 aa, Homo Sapiens
SKRKSKDKKRKRSRST

SEQ ID NO: 30883 - protein, 16 aa, Homo Sapiens
KRKSKDKKRKRSRSTT

SEQ ID NO: 30884 - protein, 16 aa, Homo Sapiens
RKSKDKKRKRSRSTTP

SEQ ID NO: 30885 - protein, 16 aa, Homo Sapiens
KSKDKKRKRSRSTTPA

SEQ ID NO: 30886 - protein, 16 aa, Homo Sapiens
SKDKKRKRSRSTTPAP

SEQ ID NO: 30887 - protein, 16 aa, Homo Sapiens
KDKKRKRSRSTTPAPK

SEQ ID NO: 30888 - protein, 16 aa, Homo Sapiens
DKKRKRSRSTTPAPKS

SEQ ID NO: 30889 - protein, 16 aa, Homo Sapiens
KKRKRSRSTTPAPKSR

SEQ ID NO: 30890 - protein, 16 aa, Homo Sapiens
KRKRSRSTTPAPKSRR

SEQ ID NO: 30891 - protein, 16 aa, Homo Sapiens
RKRSRSTTPAPKSRRA

SEQ ID NO: 30892 - protein, 16 aa, Homo Sapiens
KRSRSTTPAPKSRRAH

SEQ ID NO: 30893 - protein, 16 aa, Homo Sapiens
RSRSTTPAPKSRRAHR

SEQ ID NO: 30894 - protein, 16 aa, Homo Sapiens
SRSTTPAPKSRRAHRS

SEQ ID NO: 30895 - protein, 16 aa, Homo Sapiens
RSTTPAPKSRRAHRST

SEQ ID NO: 30896 - protein, 16 aa, Homo Sapiens
STTPAPKSRRAHRSTS

SEQ ID NO: 30897 - protein, 16 aa, Homo Sapiens
TTPAPKSRRAHRSTSA

SEQ ID NO: 30898 - protein, 16 aa, Homo Sapiens
TPAPKSRRAHRSTSAD

SEQ ID NO: 30899 - protein, 16 aa, Homo Sapiens
PAPKSRRAHRSTSADS

SEQ ID NO: 30900 - protein, 16 aa, Homo Sapiens
APKSRRAHRSTSADSA

SEQ ID NO: 30901 - protein, 16 aa, Homo Sapiens
PKSRRAHRSTSADSAS

SEQ ID NO: 30902 - protein, 16 aa, Homo Sapiens
KSRRAHRSTSADSASS

SEQ ID NO: 30903 - protein, 16 aa, Homo Sapiens
SRRAHRSTSADSASSS

SEQ ID NO: 30904 - protein, 16 aa, Homo Sapiens
RRAHRSTSADSASSSD

SEQ ID NO: 30905 - protein, 16 aa, Homo Sapiens
RAHRSTSADSASSSDT

SEQ ID NO: 30906 - protein, 16 aa, Homo Sapiens
AHRSTSADSASSSDTS

SEQ ID NO: 30907 - protein, 16 aa, Homo Sapiens
HRSTSADSASSSDTSR

SEQ ID NO: 30908 - protein, 16 aa, Homo Sapiens
RSTSADSASSSDTSRS

SEQ ID NO: 30909 - protein, 16 aa, Homo Sapiens
STSADSASSSDTSRSR

SEQ ID NO: 30910 - protein, 16 aa, Homo Sapiens
TSADSASSSDTSRSRS

SEQ ID NO: 30911 - protein, 16 aa, Homo Sapiens
SADSASSSDTSRSRSR

SEQ ID NO: 30912 - protein, 16 aa, Homo Sapiens
ADSASSSDTSRSRSRS

SEQ ID NO: 30913 - protein, 16 aa, Homo Sapiens
DSASSSDTSRSRSRSA

SEQ ID NO: 30914 - protein, 16 aa, Homo Sapiens
SASSSDTSRSRSRSAA

SEQ ID NO: 30915 - protein, 16 aa, Homo Sapiens
ASSSDTSRSRSRSAAA

SEQ ID NO: 30916 - protein, 16 aa, Homo Sapiens
SSSDTSRSRSRSAAAK

SEQ ID NO: 30917 - protein, 16 aa, Homo Sapiens
SSDTSRSRSRSAAAKT

SEQ ID NO: 30918 - protein, 16 aa, Homo Sapiens
SDTSRSRSRSAAAKTH

SEQ ID NO: 30919 - protein, 16 aa, Homo Sapiens
DTSRSRSRSAAAKTHT

SEQ ID NO: 30920 - protein, 16 aa, Homo Sapiens
TSRSRSRSAAAKTHTT

SEQ ID NO: 30921 - protein, 16 aa, Homo Sapiens
SRSRSRSAAAKTHTTA

SEQ ID NO: 30922 - protein, 16 aa, Homo Sapiens
RSRSRSAAAKTHTTAL

SEQ ID NO: 30923 - protein, 16 aa, Homo Sapiens
SRSRSAAAKTHTTALA

SEQ ID NO: 30924 - protein, 16 aa, Homo Sapiens
RSRSAAAKTHTTALAG

SEQ ID NO: 30925 - protein, 16 aa, Homo Sapiens
SRSAAAKTHTTALAGR

SEQ ID NO: 30926 - protein, 16 aa, Homo Sapiens
RSAAAKTHTTALAGRS

SEQ ID NO: 30927 - protein, 16 aa, Homo Sapiens
SAAAKTHTTALAGRSP

SEQ ID NO: 30928 - protein, 16 aa, Homo Sapiens
AAAKTHTTALAGRSPS

SEQ ID NO: 30929 - protein, 16 aa, Homo Sapiens
AAKTHTTALAGRSPSP

SEQ ID NO: 30930 - protein, 16 aa, Homo Sapiens
AKTHTTALAGRSPSPA

SEQ ID NO: 30931 - protein, 16 aa, Homo Sapiens
KTHTTALAGRSPSPAS

SEQ ID NO: 30932 - protein, 16 aa, Homo Sapiens
THTTALAGRSPSPASG

SEQ ID NO: 30933 - protein, 16 aa, Homo Sapiens
HTTALAGRSPSPASGR

SEQ ID NO: 30934 - protein, 16 aa, Homo Sapiens
TTALAGRSPSPASGRR

SEQ ID NO: 30935 - protein, 16 aa, Homo Sapiens
TALAGRSPSPASGRRG

SEQ ID NO: 30936 - protein, 16 aa, Homo Sapiens
ALAGRSPSPASGRRGE

SEQ ID NO: 30937 - protein, 16 aa, Homo Sapiens
LAGRSPSPASGRRGEG

SEQ ID NO: 30938 - protein, 16 aa, Homo Sapiens
AGRSPSPASGRRGEGD

SEQ ID NO: 30939 - protein, 16 aa, Homo Sapiens
GRSPSPASGRRGEGDA

SEQ ID NO: 30940 - protein, 16 aa, Homo Sapiens
RSPSPASGRRGEGDAP

SEQ ID NO: 30941 - protein, 16 aa, Homo Sapiens
SPSPASGRRGEGDAPF

SEQ ID NO: 30942 - protein, 16 aa, Homo Sapiens
PSPASGRRGEGDAPFS

SEQ ID NO: 30943 - protein, 16 aa, Homo Sapiens
SPASGRRGEGDAPFSE

SEQ ID NO: 30944 - protein, 16 aa, Homo Sapiens
PASGRRGEGDAPFSEP

SEQ ID NO: 30945 - protein, 16 aa, Homo Sapiens
ASGRRGEGDAPFSEPG

SEQ ID NO: 30946 - protein, 16 aa, Homo Sapiens
SGRRGEGDAPFSEPGT

SEQ ID NO: 30947 - protein, 16 aa, Homo Sapiens
GRRGEGDAPFSEPGTT

SEQ ID NO: 30948 - protein, 16 aa, Homo Sapiens
RRGEGDAPFSEPGTTS

SEQ ID NO: 30949 - protein, 16 aa, Homo Sapiens
RGEGDAPFSEPGTTST

SEQ ID NO: 30950 - protein, 16 aa, Homo Sapiens
GEGDAPFSEPGTTSTQ

SEQ ID NO: 30951 - protein, 16 aa, Homo Sapiens
EGDAPFSEPGTTSTQR

SEQ ID NO: 30952 - protein, 16 aa, Homo Sapiens
GDAPFSEPGTTSTQRP

SEQ ID NO: 30953 - protein, 16 aa, Homo Sapiens
DAPFSEPGTTSTQRPS

SEQ ID NO: 30954 - protein, 16 aa, Homo Sapiens
APFSEPGTTSTQRPSS

SEQ ID NO: 30955 - protein, 16 aa, Homo Sapiens
PFSEPGTTSTQRPSSP

SEQ ID NO: 30956 - protein, 16 aa, Homo Sapiens
FSEPGTTSTQRPSSPE

SEQ ID NO: 30957 - protein, 16 aa, Homo Sapiens
SEPGTTSTQRPSSPET

SEQ ID NO: 30958 - protein, 16 aa, Homo Sapiens
EPGTTSTQRPSSPETA

SEQ ID NO: 30959 - protein, 16 aa, Homo Sapiens
PGTTSTQRPSSPETAT

SEQ ID NO: 30960 - protein, 16 aa, Homo Sapiens
GTTSTQRPSSPETATK

SEQ ID NO: 30961 - protein, 16 aa, Homo Sapiens
TTSTQRPSSPETATKQ

SEQ ID NO: 30962 - protein, 16 aa, Homo Sapiens
TSTQRPSSPETATKQP

SEQ ID NO: 30963 - protein, 16 aa, Homo Sapiens
STQRPSSPETATKQPS

SEQ ID NO: 30964 - protein, 16 aa, Homo Sapiens
TQRPSSPETATKQPSS

SEQ ID NO: 30965 - protein, 16 aa, Homo Sapiens
QRPSSPETATKQPSSP

SEQ ID NO: 30966 - protein, 16 aa, Homo Sapiens
RPSSPETATKQPSSPY

SEQ ID NO: 30967 - protein, 16 aa, Homo Sapiens
PSSPETATKQPSSPYE

SEQ ID NO: 30968 - protein, 16 aa, Homo Sapiens
SSPETATKQPSSPYED

SEQ ID NO: 30969 - protein, 16 aa, Homo Sapiens
SPETATKQPSSPYEDK

SEQ ID NO: 30970 - protein, 16 aa, Homo Sapiens
PETATKQPSSPYEDKD

SEQ ID NO: 30971 - protein, 16 aa, Homo Sapiens
ETATKQPSSPYEDKDK

SEQ ID NO: 30972 - protein, 16 aa, Homo Sapiens
TATKQPSSPYEDKDKD

SEQ ID NO: 30973 - protein, 16 aa, Homo Sapiens
ATKQPSSPYEDKDKDK

SEQ ID NO: 30974 - protein, 16 aa, Homo Sapiens
TKQPSSPYEDKDKDKK

SEQ ID NO: 30975 - protein, 16 aa, Homo Sapiens
KQPSSPYEDKDKDKKE

SEQ ID NO: 30976 - protein, 16 aa, Homo Sapiens
QPSSPYEDKDKDKKEK

SEQ ID NO: 30977 - protein, 16 aa, Homo Sapiens
PSSPYEDKDKDKKEKS

SEQ ID NO: 30978 - protein, 16 aa, Homo Sapiens
SSPYEDKDKDKKEKSA

SEQ ID NO: 30979 - protein, 16 aa, Homo Sapiens
SPYEDKDKDKKEKSAT

SEQ ID NO: 30980 - protein, 16 aa, Homo Sapiens
PYEDKDKDKKEKSATR

SEQ ID NO: 30981 - protein, 16 aa, Homo Sapiens
YEDKDKDKKEKSATRP

SEQ ID NO: 30982 - protein, 16 aa, Homo Sapiens
EDKDKDKKEKSATRPS

SEQ ID NO: 30983 - protein, 16 aa, Homo Sapiens
DKDKDKKEKSATRPSP

SEQ ID NO: 30984 - protein, 16 aa, Homo Sapiens
KDKDKKEKSATRPSPS

SEQ ID NO: 30985 - protein, 16 aa, Homo Sapiens
DKDKKEKSATRPSPSP

SEQ ID NO: 30986 - protein, 16 aa, Homo Sapiens
KDKKEKSATRPSPSPE

SEQ ID NO: 30987 - protein, 16 aa, Homo Sapiens
DKKEKSATRPSPSPER

SEQ ID NO: 30988 - protein, 16 aa, Homo Sapiens
KKEKSATRPSPSPERS

SEQ ID NO: 30989 - protein, 16 aa, Homo Sapiens
KEKSATRPSPSPERSS

SEQ ID NO: 30990 - protein, 16 aa, Homo Sapiens
EKSATRPSPSPERSST

SEQ ID NO: 30991 - protein, 16 aa, Homo Sapiens
KSATRPSPSPERSSTG

SEQ ID NO: 30992 - protein, 16 aa, Homo Sapiens
SATRPSPSPERSSTGP

SEQ ID NO: 30993 - protein, 16 aa, Homo Sapiens
ATRPSPSPERSSTGPE

SEQ ID NO: 30994 - protein, 16 aa, Homo Sapiens
TRPSPSPERSSTGPEP

SEQ ID NO: 30995 - protein, 16 aa, Homo Sapiens
RPSPSPERSSTGPEPP

SEQ ID NO: 30996 - protein, 16 aa, Homo Sapiens
PSPSPERSSTGPEPPA

SEQ ID NO: 30997 - protein, 16 aa, Homo Sapiens
SPSPERSSTGPEPPAP

SEQ ID NO: 30998 - protein, 16 aa, Homo Sapiens
PSPERSSTGPEPPAPT

SEQ ID NO: 30999 - protein, 16 aa, Homo Sapiens
SPERSSTGPEPPAPTP

SEQ ID NO: 31000 - protein, 16 aa, Homo Sapiens
PERSSTGPEPPAPTPL

SEQ ID NO: 31001 - protein, 16 aa, Homo Sapiens
ERSSTGPEPPAPTPLL

SEQ ID NO: 31002 - protein, 16 aa, Homo Sapiens
RSSTGPEPPAPTPLLA

SEQ ID NO: 31003 - protein, 16 aa, Homo Sapiens
SSTGPEPPAPTPLLAE

SEQ ID NO: 31004 - protein, 16 aa, Homo Sapiens
STGPEPPAPTPLLAER

SEQ ID NO: 31005 - protein, 16 aa, Homo Sapiens
TGPEPPAPTPLLAERH

SEQ ID NO: 31006 - protein, 16 aa, Homo Sapiens
GPEPPAPTPLLAERHG

SEQ ID NO: 31007 - protein, 16 aa, Homo Sapiens
PEPPAPTPLLAERHGG

SEQ ID NO: 31008 - protein, 16 aa, Homo Sapiens
EPPAPTPLLAERHGGS

SEQ ID NO: 31009 - protein, 16 aa, Homo Sapiens
PPAPTPLLAERHGGSP

SEQ ID NO: 31010 - protein, 16 aa, Homo Sapiens
PAPTPLLAERHGGSPQ

SEQ ID NO: 31011 - protein, 16 aa, Homo Sapiens
APTPLLAERHGGSPQP

SEQ ID NO: 31012 - protein, 16 aa, Homo Sapiens
PTPLLAERHGGSPQPL

SEQ ID NO: 31013 - protein, 16 aa, Homo Sapiens
TPLLAERHGGSPQPLA

SEQ ID NO: 31014 - protein, 16 aa, Homo Sapiens
PLLAERHGGSPQPLAT

SEQ ID NO: 31015 - protein, 16 aa, Homo Sapiens
LLAERHGGSPQPLATT

SEQ ID NO: 31016 - protein, 16 aa, Homo Sapiens
LAERHGGSPQPLATTP

SEQ ID NO: 31017 - protein, 16 aa, Homo Sapiens
AERHGGSPQPLATTPL

SEQ ID NO: 31018 - protein, 16 aa, Homo Sapiens
ERHGGSPQPLATTPLS

SEQ ID NO: 31019 - protein, 16 aa, Homo Sapiens
RHGGSPQPLATTPLSQ

SEQ ID NO: 31020 - protein, 16 aa, Homo Sapiens
HGGSPQPLATTPLSQE

SEQ ID NO: 31021 - protein, 16 aa, Homo Sapiens
GGSPQPLATTPLSQEP

SEQ ID NO: 31022 - protein, 16 aa, Homo Sapiens
GSPQPLATTPLSQEPV

SEQ ID NO: 31023 - protein, 16 aa, Homo Sapiens
SPQPLATTPLSQEPVN

SEQ ID NO: 31024 - protein, 16 aa, Homo Sapiens
PQPLATTPLSQEPVNP

SEQ ID NO: 31025 - protein, 16 aa, Homo Sapiens
QPLATTPLSQEPVNPP

SEQ ID NO: 31026 - protein, 16 aa, Homo Sapiens
PLATTPLSQEPVNPPS

SEQ ID NO: 31027 - protein, 16 aa, Homo Sapiens
LATTPLSQEPVNPPSE

SEQ ID NO: 31028 - protein, 16 aa, Homo Sapiens
ATTPLSQEPVNPPSEA

SEQ ID NO: 31029 - protein, 16 aa, Homo Sapiens
TTPLSQEPVNPPSEAS

SEQ ID NO: 31030 - protein, 16 aa, Homo Sapiens
TPLSQEPVNPPSEASP

SEQ ID NO: 31031 - protein, 16 aa, Homo Sapiens
PLSQEPVNPPSEASPT

SEQ ID NO: 31032 - protein, 16 aa, Homo Sapiens
LSQEPVNPPSEASPTR

SEQ ID NO: 31033 - protein, 16 aa, Homo Sapiens
SQEPVNPPSEASPTRD

SEQ ID NO: 31034 - protein, 16 aa, Homo Sapiens
QEPVNPPSEASPTRDR

SEQ ID NO: 31035 - protein, 16 aa, Homo Sapiens
EPVNPPSEASPTRDRS

SEQ ID NO: 31036 - protein, 16 aa, Homo Sapiens
PVNPPSEASPTRDRSP

SEQ ID NO: 31037 - protein, 16 aa, Homo Sapiens
VNPPSEASPTRDRSPP

SEQ ID NO: 31038 - protein, 16 aa, Homo Sapiens
NPPSEASPTRDRSPPK

SEQ ID NO: 31039 - protein, 16 aa, Homo Sapiens
PPSEASPTRDRSPPKS

SEQ ID NO: 31040 - protein, 16 aa, Homo Sapiens
PSEASPTRDRSPPKSP

SEQ ID NO: 31041 - protein, 16 aa, Homo Sapiens
SEASPTRDRSPPKSPE

SEQ ID NO: 31042 - protein, 16 aa, Homo Sapiens
EASPTRDRSPPKSPEK

SEQ ID NO: 31043 - protein, 16 aa, Homo Sapiens
ASPTRDRSPPKSPEKL

SEQ ID NO: 31044 - protein, 16 aa, Homo Sapiens
SPTRDRSPPKSPEKLP

SEQ ID NO: 31045 - protein, 16 aa, Homo Sapiens
PTRDRSPPKSPEKLPQ

SEQ ID NO: 31046 - protein, 16 aa, Homo Sapiens
TRDRSPPKSPEKLPQS

SEQ ID NO: 31047 - protein, 16 aa, Homo Sapiens
RDRSPPKSPEKLPQSS

SEQ ID NO: 31048 - protein, 16 aa, Homo Sapiens
DRSPPKSPEKLPQSSS

SEQ ID NO: 31049 - protein, 16 aa, Homo Sapiens
RSPPKSPEKLPQSSSS

SEQ ID NO: 31050 - protein, 16 aa, Homo Sapiens
SPPKSPEKLPQSSSSE

SEQ ID NO: 31051 - protein, 16 aa, Homo Sapiens
PPKSPEKLPQSSSSES

SEQ ID NO: 31052 - protein, 16 aa, Homo Sapiens
PKSPEKLPQSSSSESS

SEQ ID NO: 31053 - protein, 16 aa, Homo Sapiens
KSPEKLPQSSSSESSP

SEQ ID NO: 31054 - protein, 16 aa, Homo Sapiens
SPEKLPQSSSSESSPP

SEQ ID NO: 31055 - protein, 16 aa, Homo Sapiens
PEKLPQSSSSESSPPS

SEQ ID NO: 31056 - protein, 16 aa, Homo Sapiens
EKLPQSSSSESSPPSP

SEQ ID NO: 31057 - protein, 16 aa, Homo Sapiens
KLPQSSSSESSPPSPQ

SEQ ID NO: 31058 - protein, 16 aa, Homo Sapiens
LPQSSSSESSPPSPQP

SEQ ID NO: 31059 - protein, 16 aa, Homo Sapiens
PQSSSSESSPPSPQPT

SEQ ID NO: 31060 - protein, 16 aa, Homo Sapiens
QSSSSESSPPSPQPTK

SEQ ID NO: 31061 - protein, 16 aa, Homo Sapiens
SSSSESSPPSPQPTKV

SEQ ID NO: 31062 - protein, 16 aa, Homo Sapiens
SSSESSPPSPQPTKVS

SEQ ID NO: 31063 - protein, 16 aa, Homo Sapiens
SSESSPPSPQPTKVSR

SEQ ID NO: 31064 - protein, 16 aa, Homo Sapiens
SESSPPSPQPTKVSRH

SEQ ID NO: 31065 - protein, 16 aa, Homo Sapiens
ESSPPSPQPTKVSRHA

SEQ ID NO: 31066 - protein, 16 aa, Homo Sapiens
SSPPSPQPTKVSRHAS

SEQ ID NO: 31067 - protein, 16 aa, Homo Sapiens
SPPSPQPTKVSRHASS

SEQ ID NO: 31068 - protein, 16 aa, Homo Sapiens
PPSPQPTKVSRHASSS

SEQ ID NO: 31069 - protein, 16 aa, Homo Sapiens
PSPQPTKVSRHASSSP

SEQ ID NO: 31070 - protein, 16 aa, Homo Sapiens
SPQPTKVSRHASSSPE

SEQ ID NO: 31071 - protein, 16 aa, Homo Sapiens
PQPTKVSRHASSSPES

SEQ ID NO: 31072 - protein, 16 aa, Homo Sapiens
QPTKVSRHASSSPESP

SEQ ID NO: 31073 - protein, 16 aa, Homo Sapiens
PTKVSRHASSSPESPK

SEQ ID NO: 31074 - protein, 16 aa, Homo Sapiens
TKVSRHASSSPESPKP

SEQ ID NO: 31075 - protein, 16 aa, Homo Sapiens
KVSRHASSSPESPKPA

SEQ ID NO: 31076 - protein, 16 aa, Homo Sapiens
VSRHASSSPESPKPAP

SEQ ID NO: 31077 - protein, 16 aa, Homo Sapiens
SRHASSSPESPKPAPA

SEQ ID NO: 31078 - protein, 16 aa, Homo Sapiens
RHASSSPESPKPAPAP

SEQ ID NO: 31079 - protein, 16 aa, Homo Sapiens
HASSSPESPKPAPAPG

SEQ ID NO: 31080 - protein, 16 aa, Homo Sapiens
ASSSPESPKPAPAPGS

SEQ ID NO: 31081 - protein, 16 aa, Homo Sapiens
SSSPESPKPAPAPGSH

SEQ ID NO: 31082 - protein, 16 aa, Homo Sapiens
SSPESPKPAPAPGSHR

SEQ ID NO: 31083 - protein, 16 aa, Homo Sapiens
SPESPKPAPAPGSHRE

SEQ ID NO: 31084 - protein, 16 aa, Homo Sapiens
PESPKPAPAPGSHREI

SEQ ID NO: 31085 - protein, 16 aa, Homo Sapiens
ESPKPAPAPGSHREIS

SEQ ID NO: 31086 - protein, 16 aa, Homo Sapiens
SPKPAPAPGSHREISS

SEQ ID NO: 31087 - protein, 16 aa, Homo Sapiens
PKPAPAPGSHREISSS

SEQ ID NO: 31088 - protein, 16 aa, Homo Sapiens
KPAPAPGSHREISSSP

SEQ ID NO: 31089 - protein, 16 aa, Homo Sapiens
PAPAPGSHREISSSPT

SEQ ID NO: 31090 - protein, 16 aa, Homo Sapiens
APAPGSHREISSSPTS

SEQ ID NO: 31091 - protein, 16 aa, Homo Sapiens
PAPGSHREISSSPTSK

SEQ ID NO: 31092 - protein, 16 aa, Homo Sapiens
APGSHREISSSPTSKN

SEQ ID NO: 31093 - protein, 16 aa, Homo Sapiens
PGSHREISSSPTSKNR

SEQ ID NO: 31094 - protein, 16 aa, Homo Sapiens
GSHREISSSPTSKNRS

SEQ ID NO: 31095 - protein, 16 aa, Homo Sapiens
SHREISSSPTSKNRSH

SEQ ID NO: 31096 - protein, 16 aa, Homo Sapiens
HREISSSPTSKNRSHG

SEQ ID NO: 31097 - protein, 16 aa, Homo Sapiens
REISSSPTSKNRSHGR

SEQ ID NO: 31098 - protein, 16 aa, Homo Sapiens
EISSSPTSKNRSHGRA

SEQ ID NO: 31099 - protein, 16 aa, Homo Sapiens
ISSSPTSKNRSHGRAK

SEQ ID NO: 31100 - protein, 16 aa, Homo Sapiens
SSSPTSKNRSHGRAKR

SEQ ID NO: 31101 - protein, 16 aa, Homo Sapiens
SSPTSKNRSHGRAKRD

SEQ ID NO: 31102 - protein, 16 aa, Homo Sapiens
SPTSKNRSHGRAKRDK

SEQ ID NO: 31103 - protein, 16 aa, Homo Sapiens
PTSKNRSHGRAKRDKS

SEQ ID NO: 31104 - protein, 16 aa, Homo Sapiens
TSKNRSHGRAKRDKSH

SEQ ID NO: 31105 - protein, 16 aa, Homo Sapiens
SKNRSHGRAKRDKSHS

SEQ ID NO: 31106 - protein, 16 aa, Homo Sapiens
KNRSHGRAKRDKSHSH

SEQ ID NO: 31107 - protein, 16 aa, Homo Sapiens
NRSHGRAKRDKSHSHT

SEQ ID NO: 31108 - protein, 16 aa, Homo Sapiens
RSHGRAKRDKSHSHTP

SEQ ID NO: 31109 - protein, 16 aa, Homo Sapiens
SHGRAKRDKSHSHTPS

SEQ ID NO: 31110 - protein, 16 aa, Homo Sapiens
HGRAKRDKSHSHTPSR

SEQ ID NO: 31111 - protein, 16 aa, Homo Sapiens
GRAKRDKSHSHTPSRR

SEQ ID NO: 31112 - protein, 16 aa, Homo Sapiens
RAKRDKSHSHTPSRRM

SEQ ID NO: 31113 - protein, 16 aa, Homo Sapiens
AKRDKSHSHTPSRRMG

SEQ ID NO: 31114 - protein, 16 aa, Homo Sapiens
KRDKSHSHTPSRRMGR

SEQ ID NO: 31115 - protein, 16 aa, Homo Sapiens
RDKSHSHTPSRRMGRS

SEQ ID NO: 31116 - protein, 16 aa, Homo Sapiens
DKSHSHTPSRRMGRSR

SEQ ID NO: 31117 - protein, 16 aa, Homo Sapiens
KSHSHTPSRRMGRSRS

SEQ ID NO: 31118 - protein, 16 aa, Homo Sapiens
SHSHTPSRRMGRSRSP

SEQ ID NO: 31119 - protein, 16 aa, Homo Sapiens
HSHTPSRRMGRSRSPA

SEQ ID NO: 31120 - protein, 16 aa, Homo Sapiens
SHTPSRRMGRSRSPAT

SEQ ID NO: 31121 - protein, 16 aa, Homo Sapiens
HTPSRRMGRSRSPATA

SEQ ID NO: 31122 - protein, 16 aa, Homo Sapiens
TPSRRMGRSRSPATAK

SEQ ID NO: 31123 - protein, 16 aa, Homo Sapiens
PSRRMGRSRSPATAKR

SEQ ID NO: 31124 - protein, 16 aa, Homo Sapiens
SRRMGRSRSPATAKRG

SEQ ID NO: 31125 - protein, 16 aa, Homo Sapiens
RRMGRSRSPATAKRGR

SEQ ID NO: 31126 - protein, 16 aa, Homo Sapiens
RMGRSRSPATAKRGRS

SEQ ID NO: 31127 - protein, 16 aa, Homo Sapiens
MGRSRSPATAKRGRSR

SEQ ID NO: 31128 - protein, 16 aa, Homo Sapiens
GRSRSPATAKRGRSRS

SEQ ID NO: 31129 - protein, 16 aa, Homo Sapiens
RSRSPATAKRGRSRSR

SEQ ID NO: 31130 - protein, 16 aa, Homo Sapiens
SRSPATAKRGRSRSRT

SEQ ID NO: 31131 - protein, 16 aa, Homo Sapiens
RSPATAKRGRSRSRTP

SEQ ID NO: 31132 - protein, 16 aa, Homo Sapiens
SPATAKRGRSRSRTPT

SEQ ID NO: 31133 - protein, 16 aa, Homo Sapiens
PATAKRGRSRSRTPTK

SEQ ID NO: 31134 - protein, 16 aa, Homo Sapiens
ATAKRGRSRSRTPTKR

SEQ ID NO: 31135 - protein, 16 aa, Homo Sapiens
TAKRGRSRSRTPTKRG

SEQ ID NO: 31136 - protein, 16 aa, Homo Sapiens
AKRGRSRSRTPTKRGH

SEQ ID NO: 31137 - protein, 16 aa, Homo Sapiens
KRGRSRSRTPTKRGHS

SEQ ID NO: 31138 - protein, 16 aa, Homo Sapiens
RGRSRSRTPTKRGHSR

SEQ ID NO: 31139 - protein, 16 aa, Homo Sapiens
GRSRSRTPTKRGHSRS

SEQ ID NO: 31140 - protein, 16 aa, Homo Sapiens
RSRSRTPTKRGHSRSR

SEQ ID NO: 31141 - protein, 16 aa, Homo Sapiens
SRSRTPTKRGHSRSRS

SEQ ID NO: 31142 - protein, 16 aa, Homo Sapiens
RSRTPTKRGHSRSRSP

SEQ ID NO: 31143 - protein, 16 aa, Homo Sapiens
SRTPTKRGHSRSRSPQ

SEQ ID NO: 31144 - protein, 16 aa, Homo Sapiens
RTPTKRGHSRSRSPQW

SEQ ID NO: 31145 - protein, 16 aa, Homo Sapiens
TPTKRGHSRSRSPQWR

SEQ ID NO: 31146 - protein, 16 aa, Homo Sapiens
PTKRGHSRSRSPQWRR

SEQ ID NO: 31147 - protein, 16 aa, Homo Sapiens
TKRGHSRSRSPQWRRS

SEQ ID NO: 31148 - protein, 16 aa, Homo Sapiens
KRGHSRSRSPQWRRSR

SEQ ID NO: 31149 - protein, 16 aa, Homo Sapiens
RGHSRSRSPQWRRSRS

SEQ ID NO: 31150 - protein, 16 aa, Homo Sapiens
GHSRSRSPQWRRSRSA

SEQ ID NO: 31151 - protein, 16 aa, Homo Sapiens
HSRSRSPQWRRSRSAQ

SEQ ID NO: 31152 - protein, 16 aa, Homo Sapiens
SRSRSPQWRRSRSAQR

SEQ ID NO: 31153 - protein, 16 aa, Homo Sapiens
RSRSPQWRRSRSAQRW

SEQ ID NO: 31154 - protein, 16 aa, Homo Sapiens
SRSPQWRRSRSAQRWG

SEQ ID NO: 31155 - protein, 16 aa, Homo Sapiens
RSPQWRRSRSAQRWGR

SEQ ID NO: 31156 - protein, 16 aa, Homo Sapiens
SPQWRRSRSAQRWGRS

SEQ ID NO: 31157 - protein, 16 aa, Homo Sapiens
PQWRRSRSAQRWGRSR

SEQ ID NO: 31158 - protein, 16 aa, Homo Sapiens
QWRRSRSAQRWGRSRS

SEQ ID NO: 31159 - protein, 16 aa, Homo Sapiens
WRRSRSAQRWGRSRSP

SEQ ID NO: 31160 - protein, 16 aa, Homo Sapiens
RRSRSAQRWGRSRSPQ

SEQ ID NO: 31161 - protein, 16 aa, Homo Sapiens
RSRSAQRWGRSRSPQR

SEQ ID NO: 31162 - protein, 16 aa, Homo Sapiens
SRSAQRWGRSRSPQRR

SEQ ID NO: 31163 - protein, 16 aa, Homo Sapiens
RSAQRWGRSRSPQRRG

SEQ ID NO: 31164 - protein, 16 aa, Homo Sapiens
SAQRWGRSRSPQRRGR

SEQ ID NO: 31165 - protein, 16 aa, Homo Sapiens
AQRWGRSRSPQRRGRS

SEQ ID NO: 31166 - protein, 16 aa, Homo Sapiens
QRWGRSRSPQRRGRSR

SEQ ID NO: 31167 - protein, 16 aa, Homo Sapiens
RWGRSRSPQRRGRSRS

SEQ ID NO: 31168 - protein, 16 aa, Homo Sapiens
WGRSRSPQRRGRSRSP

SEQ ID NO: 31169 - protein, 16 aa, Homo Sapiens
GRSRSPQRRGRSRSPQ

SEQ ID NO: 31170 - protein, 16 aa, Homo Sapiens
RSRSPQRRGRSRSPQR

SEQ ID NO: 31171 - protein, 16 aa, Homo Sapiens
SRSPQRRGRSRSPQRP

SEQ ID NO: 31172 - protein, 16 aa, Homo Sapiens
RSPQRRGRSRSPQRPG

SEQ ID NO: 31173 - protein, 16 aa, Homo Sapiens
SPQRRGRSRSPQRPGW

SEQ ID NO: 31174 - protein, 16 aa, Homo Sapiens
PQRRGRSRSPQRPGWS

SEQ ID NO: 31175 - protein, 16 aa, Homo Sapiens
QRRGRSRSPQRPGWSR

SEQ ID NO: 31176 - protein, 16 aa, Homo Sapiens
RRGRSRSPQRPGWSRS

SEQ ID NO: 31177 - protein, 16 aa, Homo Sapiens
RGRSRSPQRPGWSRSR

SEQ ID NO: 31178 - protein, 16 aa, Homo Sapiens
GRSRSPQRPGWSRSRN

SEQ ID NO: 31179 - protein, 16 aa, Homo Sapiens
RSRSPQRPGWSRSRNT

SEQ ID NO: 31180 - protein, 16 aa, Homo Sapiens
SRSPQRPGWSRSRNTQ

SEQ ID NO: 31181 - protein, 16 aa, Homo Sapiens
RSPQRPGWSRSRNTQR

SEQ ID NO: 31182 - protein, 16 aa, Homo Sapiens
SPQRPGWSRSRNTQRR

SEQ ID NO: 31183 - protein, 16 aa, Homo Sapiens
PQRPGWSRSRNTQRRG

SEQ ID NO: 31184 - protein, 16 aa, Homo Sapiens
QRPGWSRSRNTQRRGR

SEQ ID NO: 31185 - protein, 16 aa, Homo Sapiens
RPGWSRSRNTQRRGRS

SEQ ID NO: 31186 - protein, 16 aa, Homo Sapiens
PGWSRSRNTQRRGRSR

SEQ ID NO: 31187 - protein, 16 aa, Homo Sapiens
GWSRSRNTQRRGRSRS

SEQ ID NO: 31188 - protein, 16 aa, Homo Sapiens
WSRSRNTQRRGRSRSA

SEQ ID NO: 31189 - protein, 16 aa, Homo Sapiens
SRSRNTQRRGRSRSAR

SEQ ID NO: 31190 - protein, 16 aa, Homo Sapiens
RSRNTQRRGRSRSARR

SEQ ID NO: 31191 - protein, 16 aa, Homo Sapiens
SRNTQRRGRSRSARRG

SEQ ID NO: 31192 - protein, 16 aa, Homo Sapiens
RNTQRRGRSRSARRGR

SEQ ID NO: 31193 - protein, 16 aa, Homo Sapiens
NTQRRGRSRSARRGRS

SEQ ID NO: 31194 - protein, 16 aa, Homo Sapiens
TQRRGRSRSARRGRSH

SEQ ID NO: 31195 - protein, 16 aa, Homo Sapiens
QRRGRSRSARRGRSHS

SEQ ID NO: 31196 - protein, 16 aa, Homo Sapiens
RRGRSRSARRGRSHSR

SEQ ID NO: 31197 - protein, 16 aa, Homo Sapiens
RGRSRSARRGRSHSRS

SEQ ID NO: 31198 - protein, 16 aa, Homo Sapiens
GRSRSARRGRSHSRSP

SEQ ID NO: 31199 - protein, 16 aa, Homo Sapiens
RSRSARRGRSHSRSPA

SEQ ID NO: 31200 - protein, 16 aa, Homo Sapiens
SRSARRGRSHSRSPAT

SEQ ID NO: 31201 - protein, 16 aa, Homo Sapiens
RSARRGRSHSRSPATR

SEQ ID NO: 31202 - protein, 16 aa, Homo Sapiens
SARRGRSHSRSPATRG

SEQ ID NO: 31203 - protein, 16 aa, Homo Sapiens
ARRGRSHSRSPATRGR

SEQ ID NO: 31204 - protein, 16 aa, Homo Sapiens
RRGRSHSRSPATRGRS

SEQ ID NO: 31205 - protein, 16 aa, Homo Sapiens
RGRSHSRSPATRGRSR

SEQ ID NO: 31206 - protein, 16 aa, Homo Sapiens
GRSHSRSPATRGRSRS

SEQ ID NO: 31207 - protein, 16 aa, Homo Sapiens
RSHSRSPATRGRSRSR

SEQ ID NO: 31208 - protein, 16 aa, Homo Sapiens
SHSRSPATRGRSRSRT

SEQ ID NO: 31209 - protein, 16 aa, Homo Sapiens
HSRSPATRGRSRSRTP

SEQ ID NO: 31210 - protein, 16 aa, Homo Sapiens
SRSPATRGRSRSRTPA

SEQ ID NO: 31211 - protein, 16 aa, Homo Sapiens
RSPATRGRSRSRTPAR

SEQ ID NO: 31212 - protein, 16 aa, Homo Sapiens
SPATRGRSRSRTPARR

SEQ ID NO: 31213 - protein, 16 aa, Homo Sapiens
PATRGRSRSRTPARRG

SEQ ID NO: 31214 - protein, 16 aa, Homo Sapiens
ATRGRSRSRTPARRGR

SEQ ID NO: 31215 - protein, 16 aa, Homo Sapiens
TRGRSRSRTPARRGRS

SEQ ID NO: 31216 - protein, 16 aa, Homo Sapiens
RGRSRSRTPARRGRSR

SEQ ID NO: 31217 - protein, 16 aa, Homo Sapiens
GRSRSRTPARRGRSRS

SEQ ID NO: 31218 - protein, 16 aa, Homo Sapiens
RSRSRTPARRGRSRSR

SEQ ID NO: 31219 - protein, 16 aa, Homo Sapiens
SRSRTPARRGRSRSRT

SEQ ID NO: 31220 - protein, 16 aa, Homo Sapiens
RSRTPARRGRSRSRTP

SEQ ID NO: 31221 - protein, 16 aa, Homo Sapiens
SRTPARRGRSRSRTPA

SEQ ID NO: 31222 - protein, 16 aa, Homo Sapiens
RTPARRGRSRSRTPAR

SEQ ID NO: 31223 - protein, 16 aa, Homo Sapiens
TPARRGRSRSRTPARR

SEQ ID NO: 31224 - protein, 16 aa, Homo Sapiens
PARRGRSRSRTPARRR

SEQ ID NO: 31225 - protein, 16 aa, Homo Sapiens
ARRGRSRSRTPARRRS

SEQ ID NO: 31226 - protein, 16 aa, Homo Sapiens
RRGRSRSRTPARRRSR

SEQ ID NO: 31227 - protein, 16 aa, Homo Sapiens
RGRSRSRTPARRRSRS

SEQ ID NO: 31228 - protein, 16 aa, Homo Sapiens
GRSRSRTPARRRSRSR

SEQ ID NO: 31229 - protein, 16 aa, Homo Sapiens
RSRSRTPARRRSRSRT

SEQ ID NO: 31230 - protein, 16 aa, Homo Sapiens
SRSRTPARRRSRSRTP

SEQ ID NO: 31231 - protein, 16 aa, Homo Sapiens
RSRTPARRRSRSRTPT

SEQ ID NO: 31232 - protein, 16 aa, Homo Sapiens
SRTPARRRSRSRTPTR

SEQ ID NO: 31233 - protein, 16 aa, Homo Sapiens
RTPARRRSRSRTPTRR

SEQ ID NO: 31234 - protein, 16 aa, Homo Sapiens
TPARRRSRSRTPTRRR

SEQ ID NO: 31235 - protein, 16 aa, Homo Sapiens
PARRRSRSRTPTRRRS

SEQ ID NO: 31236 - protein, 16 aa, Homo Sapiens
ARRRSRSRTPTRRRSR

SEQ ID NO: 31237 - protein, 16 aa, Homo Sapiens
RRRSRSRTPTRRRSRS

SEQ ID NO: 31238 - protein, 16 aa, Homo Sapiens
RRSRSRTPTRRRSRSR

SEQ ID NO: 31239 - protein, 16 aa, Homo Sapiens
RSRSRTPTRRRSRSRT

SEQ ID NO: 31240 - protein, 16 aa, Homo Sapiens
SRSRTPTRRRSRSRTP

SEQ ID NO: 31241 - protein, 16 aa, Homo Sapiens
RSRTPTRRRSRSRTPA

SEQ ID NO: 31242 - protein, 16 aa, Homo Sapiens
SRTPTRRRSRSRTPAR

SEQ ID NO: 31243 - protein, 16 aa, Homo Sapiens
RTPTRRRSRSRTPARR

SEQ ID NO: 31244 - protein, 16 aa, Homo Sapiens
TPTRRRSRSRTPARRG

SEQ ID NO: 31245 - protein, 16 aa, Homo Sapiens
PTRRRSRSRTPARRGR

SEQ ID NO: 31246 - protein, 16 aa, Homo Sapiens
TRRRSRSRTPARRGRS

SEQ ID NO: 31247 - protein, 16 aa, Homo Sapiens
RRRSRSRTPARRGRSR

SEQ ID NO: 31248 - protein, 16 aa, Homo Sapiens
RRSRSRTPARRGRSRS

SEQ ID NO: 31249 - protein, 16 aa, Homo Sapiens
RSRSRTPARRGRSRSR

SEQ ID NO: 31250 - protein, 16 aa, Homo Sapiens
SRSRTPARRGRSRSRT

SEQ ID NO: 31251 - protein, 16 aa, Homo Sapiens
RSRTPARRGRSRSRTP

SEQ ID NO: 31252 - protein, 16 aa, Homo Sapiens
SRTPARRGRSRSRTPA

SEQ ID NO: 31253 - protein, 16 aa, Homo Sapiens
RTPARRGRSRSRTPAR

SEQ ID NO: 31254 - protein, 16 aa, Homo Sapiens
TPARRGRSRSRTPARR

SEQ ID NO: 31255 - protein, 16 aa, Homo Sapiens
PARRGRSRSRTPARRR

SEQ ID NO: 31256 - protein, 16 aa, Homo Sapiens
ARRGRSRSRTPARRRS

SEQ ID NO: 31257 - protein, 16 aa, Homo Sapiens
RRGRSRSRTPARRRSR

SEQ ID NO: 31258 - protein, 16 aa, Homo Sapiens
RGRSRSRTPARRRSRT

SEQ ID NO: 31259 - protein, 16 aa, Homo Sapiens
GRSRSRTPARRRSRTR

SEQ ID NO: 31260 - protein, 16 aa, Homo Sapiens
RSRSRTPARRRSRTRS

SEQ ID NO: 31261 - protein, 16 aa, Homo Sapiens
SRSRTPARRRSRTRSP

SEQ ID NO: 31262 - protein, 16 aa, Homo Sapiens
RSRTPARRRSRTRSPV

SEQ ID NO: 31263 - protein, 16 aa, Homo Sapiens
SRTPARRRSRTRSPVR

SEQ ID NO: 31264 - protein, 16 aa, Homo Sapiens
RTPARRRSRTRSPVRR

SEQ ID NO: 31265 - protein, 16 aa, Homo Sapiens
TPARRRSRTRSPVRRR

SEQ ID NO: 31266 - protein, 16 aa, Homo Sapiens
PARRRSRTRSPVRRRS

SEQ ID NO: 31267 - protein, 16 aa, Homo Sapiens
ARRRSRTRSPVRRRSR

SEQ ID NO: 31268 - protein, 16 aa, Homo Sapiens
RRRSRTRSPVRRRSRS

SEQ ID NO: 31269 - protein, 16 aa, Homo Sapiens
RRSRTRSPVRRRSRSR

SEQ ID NO: 31270 - protein, 16 aa, Homo Sapiens
RSRTRSPVRRRSRSRS

SEQ ID NO: 31271 - protein, 16 aa, Homo Sapiens
SRTRSPVRRRSRSRSP

SEQ ID NO: 31272 - protein, 16 aa, Homo Sapiens
RTRSPVRRRSRSRSPA

SEQ ID NO: 31273 - protein, 16 aa, Homo Sapiens
TRSPVRRRSRSRSPAR

SEQ ID NO: 31274 - protein, 16 aa, Homo Sapiens
RSPVRRRSRSRSPARR

SEQ ID NO: 31275 - protein, 16 aa, Homo Sapiens
SPVRRRSRSRSPARRS

SEQ ID NO: 31276 - protein, 16 aa, Homo Sapiens
PVRRRSRSRSPARRSG

SEQ ID NO: 31277 - protein, 16 aa, Homo Sapiens
VRRRSRSRSPARRSGR

SEQ ID NO: 31278 - protein, 16 aa, Homo Sapiens
RRRSRSRSPARRSGRS

SEQ ID NO: 31279 - protein, 16 aa, Homo Sapiens
RRSRSRSPARRSGRSR

SEQ ID NO: 31280 - protein, 16 aa, Homo Sapiens
RSRSRSPARRSGRSRS

SEQ ID NO: 31281 - protein, 16 aa, Homo Sapiens
SRSRSPARRSGRSRSR

SEQ ID NO: 31282 - protein, 16 aa, Homo Sapiens
RSRSPARRSGRSRSRT

SEQ ID NO: 31283 - protein, 16 aa, Homo Sapiens
SRSPARRSGRSRSRTP

SEQ ID NO: 31284 - protein, 16 aa, Homo Sapiens
RSPARRSGRSRSRTPA

SEQ ID NO: 31285 - protein, 16 aa, Homo Sapiens
SPARRSGRSRSRTPAR

SEQ ID NO: 31286 - protein, 16 aa, Homo Sapiens
PARRSGRSRSRTPARR

SEQ ID NO: 31287 - protein, 16 aa, Homo Sapiens
ARRSGRSRSRTPARRG

SEQ ID NO: 31288 - protein, 16 aa, Homo Sapiens
RRSGRSRSRTPARRGR

SEQ ID NO: 31289 - protein, 16 aa, Homo Sapiens
RSGRSRSRTPARRGRS

SEQ ID NO: 31290 - protein, 16 aa, Homo Sapiens
SGRSRSRTPARRGRSR

SEQ ID NO: 31291 - protein, 16 aa, Homo Sapiens
GRSRSRTPARRGRSRS

SEQ ID NO: 31292 - protein, 16 aa, Homo Sapiens
RSRSRTPARRGRSRSR

SEQ ID NO: 31293 - protein, 16 aa, Homo Sapiens
SRSRTPARRGRSRSRT

SEQ ID NO: 31294 - protein, 16 aa, Homo Sapiens
RSRTPARRGRSRSRTP

SEQ ID NO: 31295 - protein, 16 aa, Homo Sapiens
SRTPARRGRSRSRTPA

SEQ ID NO: 31296 - protein, 16 aa, Homo Sapiens
RTPARRGRSRSRTPAR

SEQ ID NO: 31297 - protein, 16 aa, Homo Sapiens
TPARRGRSRSRTPARR

SEQ ID NO: 31298 - protein, 16 aa, Homo Sapiens
PARRGRSRSRTPARRG

SEQ ID NO: 31299 - protein, 16 aa, Homo Sapiens
ARRGRSRSRTPARRGR

SEQ ID NO: 31300 - protein, 16 aa, Homo Sapiens
RRGRSRSRTPARRGRS

SEQ ID NO: 31301 - protein, 16 aa, Homo Sapiens
RGRSRSRTPARRGRSR

SEQ ID NO: 31302 - protein, 16 aa, Homo Sapiens
GRSRSRTPARRGRSRS

SEQ ID NO: 31303 - protein, 16 aa, Homo Sapiens
RSRSRTPARRGRSRSR

SEQ ID NO: 31304 - protein, 16 aa, Homo Sapiens
SRSRTPARRGRSRSRT

SEQ ID NO: 31305 - protein, 16 aa, Homo Sapiens
RSRTPARRGRSRSRTP

SEQ ID NO: 31306 - protein, 16 aa, Homo Sapiens
SRTPARRGRSRSRTPA

SEQ ID NO: 31307 - protein, 16 aa, Homo Sapiens
RTPARRGRSRSRTPAR

SEQ ID NO: 31308 - protein, 16 aa, Homo Sapiens
TPARRGRSRSRTPARR

SEQ ID NO: 31309 - protein, 16 aa, Homo Sapiens
PARRGRSRSRTPARRS

SEQ ID NO: 31310 - protein, 16 aa, Homo Sapiens
ARRGRSRSRTPARRSG

SEQ ID NO: 31311 - protein, 16 aa, Homo Sapiens
RRGRSRSRTPARRSGR

SEQ ID NO: 31312 - protein, 16 aa, Homo Sapiens
RGRSRSRTPARRSGRS

SEQ ID NO: 31313 - protein, 16 aa, Homo Sapiens
GRSRSRTPARRSGRSR

SEQ ID NO: 31314 - protein, 16 aa, Homo Sapiens
RSRSRTPARRSGRSRS

SEQ ID NO: 31315 - protein, 16 aa, Homo Sapiens
SRSRTPARRSGRSRSR

SEQ ID NO: 31316 - protein, 16 aa, Homo Sapiens
RSRTPARRSGRSRSRT

SEQ ID NO: 31317 - protein, 16 aa, Homo Sapiens
SRTPARRSGRSRSRTP

SEQ ID NO: 31318 - protein, 16 aa, Homo Sapiens
RTPARRSGRSRSRTPA

SEQ ID NO: 31319 - protein, 16 aa, Homo Sapiens
TPARRSGRSRSRTPAR

SEQ ID NO: 31320 - protein, 16 aa, Homo Sapiens
PARRSGRSRSRTPARR

SEQ ID NO: 31321 - protein, 16 aa, Homo Sapiens
ARRSGRSRSRTPARRG

SEQ ID NO: 31322 - protein, 16 aa, Homo Sapiens
RRSGRSRSRTPARRGR

SEQ ID NO: 31323 - protein, 16 aa, Homo Sapiens
RSGRSRSRTPARRGRS

SEQ ID NO: 31324 - protein, 16 aa, Homo Sapiens
SGRSRSRTPARRGRSR

SEQ ID NO: 31325 - protein, 16 aa, Homo Sapiens
GRSRSRTPARRGRSRS

SEQ ID NO: 31326 - protein, 16 aa, Homo Sapiens
RSRSRTPARRGRSRSR

SEQ ID NO: 31327 - protein, 16 aa, Homo Sapiens
SRSRTPARRGRSRSRT

SEQ ID NO: 31328 - protein, 16 aa, Homo Sapiens
RSRTPARRGRSRSRTP

SEQ ID NO: 31329 - protein, 16 aa, Homo Sapiens
SRTPARRGRSRSRTPR

SEQ ID NO: 31330 - protein, 16 aa, Homo Sapiens
RTPARRGRSRSRTPRR

SEQ ID NO: 31331 - protein, 16 aa, Homo Sapiens
TPARRGRSRSRTPRRG

SEQ ID NO: 31332 - protein, 16 aa, Homo Sapiens
PARRGRSRSRTPRRGR

SEQ ID NO: 31333 - protein, 16 aa, Homo Sapiens
ARRGRSRSRTPRRGRS

SEQ ID NO: 31334 - protein, 16 aa, Homo Sapiens
RRGRSRSRTPRRGRSR

SEQ ID NO: 31335 - protein, 16 aa, Homo Sapiens
RGRSRSRTPRRGRSRS

SEQ ID NO: 31336 - protein, 16 aa, Homo Sapiens
GRSRSRTPRRGRSRSR

SEQ ID NO: 31337 - protein, 16 aa, Homo Sapiens
RSRSRTPRRGRSRSRS

SEQ ID NO: 31338 - protein, 16 aa, Homo Sapiens
SRSRTPRRGRSRSRSL

SEQ ID NO: 31339 - protein, 16 aa, Homo Sapiens
RSRTPRRGRSRSRSLV

SEQ ID NO: 31340 - protein, 16 aa, Homo Sapiens
SRTPRRGRSRSRSLVR

SEQ ID NO: 31341 - protein, 16 aa, Homo Sapiens
RTPRRGRSRSRSLVRR

SEQ ID NO: 31342 - protein, 16 aa, Homo Sapiens
TPRRGRSRSRSLVRRG

SEQ ID NO: 31343 - protein, 16 aa, Homo Sapiens
PRRGRSRSRSLVRRGR

SEQ ID NO: 31344 - protein, 16 aa, Homo Sapiens
RRGRSRSRSLVRRGRS

SEQ ID NO: 31345 - protein, 16 aa, Homo Sapiens
RGRSRSRSLVRRGRSH

SEQ ID NO: 31346 - protein, 16 aa, Homo Sapiens
GRSRSRSLVRRGRSHS

SEQ ID NO: 31347 - protein, 16 aa, Homo Sapiens
RSRSRSLVRRGRSHSR

SEQ ID NO: 31348 - protein, 16 aa, Homo Sapiens
SRSRSLVRRGRSHSRT

SEQ ID NO: 31349 - protein, 16 aa, Homo Sapiens
RSRSLVRRGRSHSRTP

SEQ ID NO: 31350 - protein, 16 aa, Homo Sapiens
SRSLVRRGRSHSRTPQ

SEQ ID NO: 31351 - protein, 16 aa, Homo Sapiens
RSLVRRGRSHSRTPQR

SEQ ID NO: 31352 - protein, 16 aa, Homo Sapiens
SLVRRGRSHSRTPQRR

SEQ ID NO: 31353 - protein, 16 aa, Homo Sapiens
LVRRGRSHSRTPQRRG

SEQ ID NO: 31354 - protein, 16 aa, Homo Sapiens
VRRGRSHSRTPQRRGR

SEQ ID NO: 31355 - protein, 16 aa, Homo Sapiens
RRGRSHSRTPQRRGRS

SEQ ID NO: 31356 - protein, 16 aa, Homo Sapiens
RGRSHSRTPQRRGRSG

SEQ ID NO: 31357 - protein, 16 aa, Homo Sapiens
GRSHSRTPQRRGRSGS

SEQ ID NO: 31358 - protein, 16 aa, Homo Sapiens
RSHSRTPQRRGRSGSS

SEQ ID NO: 31359 - protein, 16 aa, Homo Sapiens
SHSRTPQRRGRSGSSS

SEQ ID NO: 31360 - protein, 16 aa, Homo Sapiens
HSRTPQRRGRSGSSSE

SEQ ID NO: 31361 - protein, 16 aa, Homo Sapiens
SRTPQRRGRSGSSSER

SEQ ID NO: 31362 - protein, 16 aa, Homo Sapiens
RTPQRRGRSGSSSERK

SEQ ID NO: 31363 - protein, 16 aa, Homo Sapiens
TPQRRGRSGSSSERKN

SEQ ID NO: 31364 - protein, 16 aa, Homo Sapiens
PQRRGRSGSSSERKNK

SEQ ID NO: 31365 - protein, 16 aa, Homo Sapiens
QRRGRSGSSSERKNKS

SEQ ID NO: 31366 - protein, 16 aa, Homo Sapiens
RRGRSGSSSERKNKSR

SEQ ID NO: 31367 - protein, 16 aa, Homo Sapiens
RGRSGSSSERKNKSRT

SEQ ID NO: 31368 - protein, 16 aa, Homo Sapiens
GRSGSSSERKNKSRTS

SEQ ID NO: 31369 - protein, 16 aa, Homo Sapiens
RSGSSSERKNKSRTSQ

SEQ ID NO: 31370 - protein, 16 aa, Homo Sapiens
SGSSSERKNKSRTSQR

SEQ ID NO: 31371 - protein, 16 aa, Homo Sapiens
GSSSERKNKSRTSQRR

SEQ ID NO: 31372 - protein, 16 aa, Homo Sapiens
SSSERKNKSRTSQRRS

SEQ ID NO: 31373 - protein, 16 aa, Homo Sapiens
SSERKNKSRTSQRRSR

SEQ ID NO: 31374 - protein, 16 aa, Homo Sapiens
SERKNKSRTSQRRSRS

SEQ ID NO: 31375 - protein, 16 aa, Homo Sapiens
ERKNKSRTSQRRSRSN

SEQ ID NO: 31376 - protein, 16 aa, Homo Sapiens
RKNKSRTSQRRSRSNS

SEQ ID NO: 31377 - protein, 16 aa, Homo Sapiens
KNKSRTSQRRSRSNSS

SEQ ID NO: 31378 - protein, 16 aa, Homo Sapiens
NKSRTSQRRSRSNSSP

SEQ ID NO: 31379 - protein, 16 aa, Homo Sapiens
KSRTSQRRSRSNSSPE

SEQ ID NO: 31380 - protein, 16 aa, Homo Sapiens
SRTSQRRSRSNSSPEM

SEQ ID NO: 31381 - protein, 16 aa, Homo Sapiens
RTSQRRSRSNSSPEMK

SEQ ID NO: 31382 - protein, 16 aa, Homo Sapiens
TSQRRSRSNSSPEMKK

SEQ ID NO: 31383 - protein, 16 aa, Homo Sapiens
SQRRSRSNSSPEMKKS

SEQ ID NO: 31384 - protein, 16 aa, Homo Sapiens
QRRSRSNSSPEMKKSR

SEQ ID NO: 31385 - protein, 16 aa, Homo Sapiens
RRSRSNSSPEMKKSRI

SEQ ID NO: 31386 - protein, 16 aa, Homo Sapiens
RSRSNSSPEMKKSRIS

SEQ ID NO: 31387 - protein, 16 aa, Homo Sapiens
SRSNSSPEMKKSRISS

SEQ ID NO: 31388 - protein, 16 aa, Homo Sapiens
RSNSSPEMKKSRISSR

SEQ ID NO: 31389 - protein, 16 aa, Homo Sapiens
SNSSPEMKKSRISSRR

SEQ ID NO: 31390 - protein, 16 aa, Homo Sapiens
NSSPEMKKSRISSRRS

SEQ ID NO: 31391 - protein, 16 aa, Homo Sapiens
SSPEMKKSRISSRRSR

SEQ ID NO: 31392 - protein, 16 aa, Homo Sapiens
SPEMKKSRISSRRSRS

SEQ ID NO: 31393 - protein, 16 aa, Homo Sapiens
PEMKKSRISSRRSRSL

SEQ ID NO: 31394 - protein, 16 aa, Homo Sapiens
EMKKSRISSRRSRSLS

SEQ ID NO: 31395 - protein, 16 aa, Homo Sapiens
MKKSRISSRRSRSLSS

SEQ ID NO: 31396 - protein, 16 aa, Homo Sapiens
KKSRISSRRSRSLSSP

SEQ ID NO: 31397 - protein, 16 aa, Homo Sapiens
KSRISSRRSRSLSSPR

SEQ ID NO: 31398 - protein, 16 aa, Homo Sapiens
SRISSRRSRSLSSPRS

SEQ ID NO: 31399 - protein, 16 aa, Homo Sapiens
RISSRRSRSLSSPRSK

SEQ ID NO: 31400 - protein, 16 aa, Homo Sapiens
ISSRRSRSLSSPRSKA

SEQ ID NO: 31401 - protein, 16 aa, Homo Sapiens
SSRRSRSLSSPRSKAK

SEQ ID NO: 31402 - protein, 16 aa, Homo Sapiens
SRRSRSLSSPRSKAKS

SEQ ID NO: 31403 - protein, 16 aa, Homo Sapiens
RRSRSLSSPRSKAKSR

SEQ ID NO: 31404 - protein, 16 aa, Homo Sapiens
RSRSLSSPRSKAKSRL

SEQ ID NO: 31405 - protein, 16 aa, Homo Sapiens
SRSLSSPRSKAKSRLS

SEQ ID NO: 31406 - protein, 16 aa, Homo Sapiens
RSLSSPRSKAKSRLSL

SEQ ID NO: 31407 - protein, 16 aa, Homo Sapiens
SLSSPRSKAKSRLSLR

SEQ ID NO: 31408 - protein, 16 aa, Homo Sapiens
LSSPRSKAKSRLSLRR

SEQ ID NO: 31409 - protein, 16 aa, Homo Sapiens
SSPRSKAKSRLSLRRS

SEQ ID NO: 31410 - protein, 16 aa, Homo Sapiens
SPRSKAKSRLSLRRSL

SEQ ID NO: 31411 - protein, 16 aa, Homo Sapiens
PRSKAKSRLSLRRSLS

SEQ ID NO: 31412 - protein, 16 aa, Homo Sapiens
RSKAKSRLSLRRSLSG

SEQ ID NO: 31413 - protein, 16 aa, Homo Sapiens
SKAKSRLSLRRSLSGS

SEQ ID NO: 31414 - protein, 16 aa, Homo Sapiens
KAKSRLSLRRSLSGSS

SEQ ID NO: 31415 - protein, 16 aa, Homo Sapiens
AKSRLSLRRSLSGSSP

SEQ ID NO: 31416 - protein, 16 aa, Homo Sapiens
KSRLSLRRSLSGSSPC

SEQ ID NO: 31417 - protein, 16 aa, Homo Sapiens
SRLSLRRSLSGSSPCP

SEQ ID NO: 31418 - protein, 16 aa, Homo Sapiens
RLSLRRSLSGSSPCPK

SEQ ID NO: 31419 - protein, 16 aa, Homo Sapiens
LSLRRSLSGSSPCPKQ

SEQ ID NO: 31420 - protein, 16 aa, Homo Sapiens
SLRRSLSGSSPCPKQK

SEQ ID NO: 31421 - protein, 16 aa, Homo Sapiens
LRRSLSGSSPCPKQKS

SEQ ID NO: 31422 - protein, 16 aa, Homo Sapiens
RRSLSGSSPCPKQKSQ

SEQ ID NO: 31423 - protein, 16 aa, Homo Sapiens
RSLSGSSPCPKQKSQT

SEQ ID NO: 31424 - protein, 16 aa, Homo Sapiens
SLSGSSPCPKQKSQTP

SEQ ID NO: 31425 - protein, 16 aa, Homo Sapiens
LSGSSPCPKQKSQTPP

SEQ ID NO: 31426 - protein, 16 aa, Homo Sapiens
SGSSPCPKQKSQTPPR

SEQ ID NO: 31427 - protein, 16 aa, Homo Sapiens
GSSPCPKQKSQTPPRR

SEQ ID NO: 31428 - protein, 16 aa, Homo Sapiens
SSPCPKQKSQTPPRRS

SEQ ID NO: 31429 - protein, 16 aa, Homo Sapiens
SPCPKQKSQTPPRRSR

SEQ ID NO: 31430 - protein, 16 aa, Homo Sapiens
PCPKQKSQTPPRRSRS

SEQ ID NO: 31431 - protein, 16 aa, Homo Sapiens
CPKQKSQTPPRRSRSG

SEQ ID NO: 31432 - protein, 16 aa, Homo Sapiens
PKQKSQTPPRRSRSGS

SEQ ID NO: 31433 - protein, 16 aa, Homo Sapiens
KQKSQTPPRRSRSGSS

SEQ ID NO: 31434 - protein, 16 aa, Homo Sapiens
QKSQTPPRRSRSGSSQ

SEQ ID NO: 31435 - protein, 16 aa, Homo Sapiens
KSQTPPRRSRSGSSQP

SEQ ID NO: 31436 - protein, 16 aa, Homo Sapiens
SQTPPRRSRSGSSQPK

SEQ ID NO: 31437 - protein, 16 aa, Homo Sapiens
QTPPRRSRSGSSQPKA

SEQ ID NO: 31438 - protein, 16 aa, Homo Sapiens
TPPRRSRSGSSQPKAK

SEQ ID NO: 31439 - protein, 16 aa, Homo Sapiens
PPRRSRSGSSQPKAKS

SEQ ID NO: 31440 - protein, 16 aa, Homo Sapiens
PRRSRSGSSQPKAKSR

SEQ ID NO: 31441 - protein, 16 aa, Homo Sapiens
RRSRSGSSQPKAKSRT

SEQ ID NO: 31442 - protein, 16 aa, Homo Sapiens
RSRSGSSQPKAKSRTP

SEQ ID NO: 31443 - protein, 16 aa, Homo Sapiens
SRSGSSQPKAKSRTPP

SEQ ID NO: 31444 - protein, 16 aa, Homo Sapiens
RSGSSQPKAKSRTPPR

SEQ ID NO: 31445 - protein, 16 aa, Homo Sapiens
SGSSQPKAKSRTPPRR

SEQ ID NO: 31446 - protein, 16 aa, Homo Sapiens
GSSQPKAKSRTPPRRS

SEQ ID NO: 31447 - protein, 16 aa, Homo Sapiens
SSQPKAKSRTPPRRSR

SEQ ID NO: 31448 - protein, 16 aa, Homo Sapiens
SQPKAKSRTPPRRSRS

SEQ ID NO: 31449 - protein, 16 aa, Homo Sapiens
QPKAKSRTPPRRSRSS

SEQ ID NO: 31450 - protein, 16 aa, Homo Sapiens
PKAKSRTPPRRSRSSS

SEQ ID NO: 31451 - protein, 16 aa, Homo Sapiens
KAKSRTPPRRSRSSSS

SEQ ID NO: 31452 - protein, 16 aa, Homo Sapiens
AKSRTPPRRSRSSSSP

SEQ ID NO: 31453 - protein, 16 aa, Homo Sapiens
KSRTPPRRSRSSSSPP

SEQ ID NO: 31454 - protein, 16 aa, Homo Sapiens
SRTPPRRSRSSSSPPP

SEQ ID NO: 31455 - protein, 16 aa, Homo Sapiens
RTPPRRSRSSSSPPPK

SEQ ID NO: 31456 - protein, 16 aa, Homo Sapiens
TPPRRSRSSSSPPPKQ

SEQ ID NO: 31457 - protein, 16 aa, Homo Sapiens
PPRRSRSSSSPPPKQK

SEQ ID NO: 31458 - protein, 16 aa, Homo Sapiens
PRRSRSSSSPPPKQKS

SEQ ID NO: 31459 - protein, 16 aa, Homo Sapiens
RRSRSSSSPPPKQKSK

SEQ ID NO: 31460 - protein, 16 aa, Homo Sapiens
RSRSSSSPPPKQKSKT

SEQ ID NO: 31461 - protein, 16 aa, Homo Sapiens
SRSSSSPPPKQKSKTP

SEQ ID NO: 31462 - protein, 16 aa, Homo Sapiens
RSSSSPPPKQKSKTPS

SEQ ID NO: 31463 - protein, 16 aa, Homo Sapiens
SSSSPPPKQKSKTPSR

SEQ ID NO: 31464 - protein, 16 aa, Homo Sapiens
SSSPPPKQKSKTPSRQ

SEQ ID NO: 31465 - protein, 16 aa, Homo Sapiens
SSPPPKQKSKTPSRQS

SEQ ID NO: 31466 - protein, 16 aa, Homo Sapiens
SPPPKQKSKTPSRQSH

SEQ ID NO: 31467 - protein, 16 aa, Homo Sapiens
PPPKQKSKTPSRQSHS

SEQ ID NO: 31468 - protein, 16 aa, Homo Sapiens
PPKQKSKTPSRQSHSS

SEQ ID NO: 31469 - protein, 16 aa, Homo Sapiens
PKQKSKTPSRQSHSSS

SEQ ID NO: 31470 - protein, 16 aa, Homo Sapiens
KQKSKTPSRQSHSSSS

SEQ ID NO: 31471 - protein, 16 aa, Homo Sapiens
QKSKTPSRQSHSSSSP

SEQ ID NO: 31472 - protein, 16 aa, Homo Sapiens
KSKTPSRQSHSSSSPH

SEQ ID NO: 31473 - protein, 16 aa, Homo Sapiens
SKTPSRQSHSSSSPHP

SEQ ID NO: 31474 - protein, 16 aa, Homo Sapiens
KTPSRQSHSSSSPHPK

SEQ ID NO: 31475 - protein, 16 aa, Homo Sapiens
TPSRQSHSSSSPHPKV

SEQ ID NO: 31476 - protein, 16 aa, Homo Sapiens
PSRQSHSSSSPHPKVK

SEQ ID NO: 31477 - protein, 16 aa, Homo Sapiens
SRQSHSSSSPHPKVKS

SEQ ID NO: 31478 - protein, 16 aa, Homo Sapiens
RQSHSSSSPHPKVKSG

SEQ ID NO: 31479 - protein, 16 aa, Homo Sapiens
QSHSSSSPHPKVKSGT

SEQ ID NO: 31480 - protein, 16 aa, Homo Sapiens
SHSSSSPHPKVKSGTP

SEQ ID NO: 31481 - protein, 16 aa, Homo Sapiens
HSSSSPHPKVKSGTPP

SEQ ID NO: 31482 - protein, 16 aa, Homo Sapiens
SSSSPHPKVKSGTPPR

SEQ ID NO: 31483 - protein, 16 aa, Homo Sapiens
SSSPHPKVKSGTPPRQ

SEQ ID NO: 31484 - protein, 16 aa, Homo Sapiens
SSPHPKVKSGTPPRQG

SEQ ID NO: 31485 - protein, 16 aa, Homo Sapiens
SPHPKVKSGTPPRQGS

SEQ ID NO: 31486 - protein, 16 aa, Homo Sapiens
PHPKVKSGTPPRQGSI

SEQ ID NO: 31487 - protein, 16 aa, Homo Sapiens
HPKVKSGTPPRQGSIT

SEQ ID NO: 31488 - protein, 16 aa, Homo Sapiens
PKVKSGTPPRQGSITS

SEQ ID NO: 31489 - protein, 16 aa, Homo Sapiens
KVKSGTPPRQGSITSP

SEQ ID NO: 31490 - protein, 16 aa, Homo Sapiens
VKSGTPPRQGSITSPQ

SEQ ID NO: 31491 - protein, 16 aa, Homo Sapiens
KSGTPPRQGSITSPQA

SEQ ID NO: 31492 - protein, 16 aa, Homo Sapiens
SGTPPRQGSITSPQAN

SEQ ID NO: 31493 - protein, 16 aa, Homo Sapiens
GTPPRQGSITSPQANE

SEQ ID NO: 31494 - protein, 16 aa, Homo Sapiens
TPPRQGSITSPQANEQ

SEQ ID NO: 31495 - protein, 16 aa, Homo Sapiens
PPRQGSITSPQANEQS

SEQ ID NO: 31496 - protein, 16 aa, Homo Sapiens
PRQGSITSPQANEQSV

SEQ ID NO: 31497 - protein, 16 aa, Homo Sapiens
RQGSITSPQANEQSVT

SEQ ID NO: 31498 - protein, 16 aa, Homo Sapiens
QGSITSPQANEQSVTP

SEQ ID NO: 31499 - protein, 16 aa, Homo Sapiens
GSITSPQANEQSVTPQ

SEQ ID NO: 31500 - protein, 16 aa, Homo Sapiens
SITSPQANEQSVTPQR

SEQ ID NO: 31501 - protein, 16 aa, Homo Sapiens
ITSPQANEQSVTPQRR

SEQ ID NO: 31502 - protein, 16 aa, Homo Sapiens
TSPQANEQSVTPQRRS

SEQ ID NO: 31503 - protein, 16 aa, Homo Sapiens
SPQANEQSVTPQRRSC

SEQ ID NO: 31504 - protein, 16 aa, Homo Sapiens
PQANEQSVTPQRRSCF

SEQ ID NO: 31505 - protein, 16 aa, Homo Sapiens
QANEQSVTPQRRSCFE

SEQ ID NO: 31506 - protein, 16 aa, Homo Sapiens
ANEQSVTPQRRSCFES

SEQ ID NO: 31507 - protein, 16 aa, Homo Sapiens
NEQSVTPQRRSCFESS

SEQ ID NO: 31508 - protein, 16 aa, Homo Sapiens
EQSVTPQRRSCFESSP

SEQ ID NO: 31509 - protein, 16 aa, Homo Sapiens
QSVTPQRRSCFESSPD

SEQ ID NO: 31510 - protein, 16 aa, Homo Sapiens
SVTPQRRSCFESSPDP

SEQ ID NO: 31511 - protein, 16 aa, Homo Sapiens
VTPQRRSCFESSPDPE

SEQ ID NO: 31512 - protein, 16 aa, Homo Sapiens
TPQRRSCFESSPDPEL

SEQ ID NO: 31513 - protein, 16 aa, Homo Sapiens
PQRRSCFESSPDPELK

SEQ ID NO: 31514 - protein, 16 aa, Homo Sapiens
QRRSCFESSPDPELKS

SEQ ID NO: 31515 - protein, 16 aa, Homo Sapiens
RRSCFESSPDPELKSR

SEQ ID NO: 31516 - protein, 16 aa, Homo Sapiens
RSCFESSPDPELKSRT

SEQ ID NO: 31517 - protein, 16 aa, Homo Sapiens
SCFESSPDPELKSRTP

SEQ ID NO: 31518 - protein, 16 aa, Homo Sapiens
CFESSPDPELKSRTPS

SEQ ID NO: 31519 - protein, 16 aa, Homo Sapiens
FESSPDPELKSRTPSR

SEQ ID NO: 31520 - protein, 16 aa, Homo Sapiens
ESSPDPELKSRTPSRH

SEQ ID NO: 31521 - protein, 16 aa, Homo Sapiens
SSPDPELKSRTPSRHS

SEQ ID NO: 31522 - protein, 16 aa, Homo Sapiens
SPDPELKSRTPSRHSC

SEQ ID NO: 31523 - protein, 16 aa, Homo Sapiens
PDPELKSRTPSRHSCS

SEQ ID NO: 31524 - protein, 16 aa, Homo Sapiens
DPELKSRTPSRHSCSG

SEQ ID NO: 31525 - protein, 16 aa, Homo Sapiens
PELKSRTPSRHSCSGS

SEQ ID NO: 31526 - protein, 16 aa, Homo Sapiens
ELKSRTPSRHSCSGSS

SEQ ID NO: 31527 - protein, 16 aa, Homo Sapiens
LKSRTPSRHSCSGSSP

SEQ ID NO: 31528 - protein, 16 aa, Homo Sapiens
KSRTPSRHSCSGSSPP

SEQ ID NO: 31529 - protein, 16 aa, Homo Sapiens
SRTPSRHSCSGSSPPR

SEQ ID NO: 31530 - protein, 16 aa, Homo Sapiens
RTPSRHSCSGSSPPRV

SEQ ID NO: 31531 - protein, 16 aa, Homo Sapiens
TPSRHSCSGSSPPRVK

SEQ ID NO: 31532 - protein, 16 aa, Homo Sapiens
PSRHSCSGSSPPRVKS

SEQ ID NO: 31533 - protein, 16 aa, Homo Sapiens
SRHSCSGSSPPRVKSS

SEQ ID NO: 31534 - protein, 16 aa, Homo Sapiens
RHSCSGSSPPRVKSST

SEQ ID NO: 31535 - protein, 16 aa, Homo Sapiens
HSCSGSSPPRVKSSTP

SEQ ID NO: 31536 - protein, 16 aa, Homo Sapiens
SCSGSSPPRVKSSTPP

SEQ ID NO: 31537 - protein, 16 aa, Homo Sapiens
CSGSSPPRVKSSTPPR

SEQ ID NO: 31538 - protein, 16 aa, Homo Sapiens
SGSSPPRVKSSTPPRQ

SEQ ID NO: 31539 - protein, 16 aa, Homo Sapiens
GSSPPRVKSSTPPRQS

SEQ ID NO: 31540 - protein, 16 aa, Homo Sapiens
SSPPRVKSSTPPRQSP

SEQ ID NO: 31541 - protein, 16 aa, Homo Sapiens
SPPRVKSSTPPRQSPS

SEQ ID NO: 31542 - protein, 16 aa, Homo Sapiens
PPRVKSSTPPRQSPSR

SEQ ID NO: 31543 - protein, 16 aa, Homo Sapiens
PRVKSSTPPRQSPSRS

SEQ ID NO: 31544 - protein, 16 aa, Homo Sapiens
RVKSSTPPRQSPSRSS

SEQ ID NO: 31545 - protein, 16 aa, Homo Sapiens
VKSSTPPRQSPSRSSS

SEQ ID NO: 31546 - protein, 16 aa, Homo Sapiens
KSSTPPRQSPSRSSSP

SEQ ID NO: 31547 - protein, 16 aa, Homo Sapiens
SSTPPRQSPSRSSSPQ

SEQ ID NO: 31548 - protein, 16 aa, Homo Sapiens
STPPRQSPSRSSSPQP

SEQ ID NO: 31549 - protein, 16 aa, Homo Sapiens
TPPRQSPSRSSSPQPK

SEQ ID NO: 31550 - protein, 16 aa, Homo Sapiens
PPRQSPSRSSSPQPKV

SEQ ID NO: 31551 - protein, 16 aa, Homo Sapiens
PRQSPSRSSSPQPKVK

SEQ ID NO: 31552 - protein, 16 aa, Homo Sapiens
RQSPSRSSSPQPKVKA

SEQ ID NO: 31553 - protein, 16 aa, Homo Sapiens
QSPSRSSSPQPKVKAI

SEQ ID NO: 31554 - protein, 16 aa, Homo Sapiens
SPSRSSSPQPKVKAII

SEQ ID NO: 31555 - protein, 16 aa, Homo Sapiens
PSRSSSPQPKVKAIIS

SEQ ID NO: 31556 - protein, 16 aa, Homo Sapiens
SRSSSPQPKVKAIISP

SEQ ID NO: 31557 - protein, 16 aa, Homo Sapiens
RSSSPQPKVKAIISPR

SEQ ID NO: 31558 - protein, 16 aa, Homo Sapiens
SSSPQPKVKAIISPRQ

SEQ ID NO: 31559 - protein, 16 aa, Homo Sapiens
SSPQPKVKAIISPRQR

SEQ ID NO: 31560 - protein, 16 aa, Homo Sapiens
SPQPKVKAIISPRQRS

SEQ ID NO: 31561 - protein, 16 aa, Homo Sapiens
PQPKVKAIISPRQRSH

SEQ ID NO: 31562 - protein, 16 aa, Homo Sapiens
QPKVKAIISPRQRSHS

SEQ ID NO: 31563 - protein, 16 aa, Homo Sapiens
PKVKAIISPRQRSHSG

SEQ ID NO: 31564 - protein, 16 aa, Homo Sapiens
KVKAIISPRQRSHSGS

SEQ ID NO: 31565 - protein, 16 aa, Homo Sapiens
VKAIISPRQRSHSGSS

SEQ ID NO: 31566 - protein, 16 aa, Homo Sapiens
KAIISPRQRSHSGSSS

SEQ ID NO: 31567 - protein, 16 aa, Homo Sapiens
AIISPRQRSHSGSSSP

SEQ ID NO: 31568 - protein, 16 aa, Homo Sapiens
IISPRQRSHSGSSSPS

SEQ ID NO: 31569 - protein, 16 aa, Homo Sapiens
ISPRQRSHSGSSSPSP

SEQ ID NO: 31570 - protein, 16 aa, Homo Sapiens
SPRQRSHSGSSSPSPS

SEQ ID NO: 31571 - protein, 16 aa, Homo Sapiens
PRQRSHSGSSSPSPSR

SEQ ID NO: 31572 - protein, 16 aa, Homo Sapiens
RQRSHSGSSSPSPSRV

SEQ ID NO: 31573 - protein, 16 aa, Homo Sapiens
QRSHSGSSSPSPSRVT

SEQ ID NO: 31574 - protein, 16 aa, Homo Sapiens
RSHSGSSSPSPSRVTS

SEQ ID NO: 31575 - protein, 16 aa, Homo Sapiens
SHSGSSSPSPSRVTSR

SEQ ID NO: 31576 - protein, 16 aa, Homo Sapiens
HSGSSSPSPSRVTSRT

SEQ ID NO: 31577 - protein, 16 aa, Homo Sapiens
SGSSSPSPSRVTSRTT

SEQ ID NO: 31578 - protein, 16 aa, Homo Sapiens
GSSSPSPSRVTSRTTP

SEQ ID NO: 31579 - protein, 16 aa, Homo Sapiens
SSSPSPSRVTSRTTPR

SEQ ID NO: 31580 - protein, 16 aa, Homo Sapiens
SSPSPSRVTSRTTPRR

SEQ ID NO: 31581 - protein, 16 aa, Homo Sapiens
SPSPSRVTSRTTPRRS

SEQ ID NO: 31582 - protein, 16 aa, Homo Sapiens
PSPSRVTSRTTPRRSR

SEQ ID NO: 31583 - protein, 16 aa, Homo Sapiens
SPSRVTSRTTPRRSRS

SEQ ID NO: 31584 - protein, 16 aa, Homo Sapiens
PSRVTSRTTPRRSRSV

SEQ ID NO: 31585 - protein, 16 aa, Homo Sapiens
SRVTSRTTPRRSRSVS

SEQ ID NO: 31586 - protein, 16 aa, Homo Sapiens
RVTSRTTPRRSRSVSP

SEQ ID NO: 31587 - protein, 16 aa, Homo Sapiens
VTSRTTPRRSRSVSPC

SEQ ID NO: 31588 - protein, 16 aa, Homo Sapiens
TSRTTPRRSRSVSPCS

SEQ ID NO: 31589 - protein, 16 aa, Homo Sapiens
SRTTPRRSRSVSPCSN

SEQ ID NO: 31590 - protein, 16 aa, Homo Sapiens
RTTPRRSRSVSPCSNV

SEQ ID NO: 31591 - protein, 16 aa, Homo Sapiens
TTPRRSRSVSPCSNVE

SEQ ID NO: 31592 - protein, 16 aa, Homo Sapiens
TPRRSRSVSPCSNVES

SEQ ID NO: 31593 - protein, 16 aa, Homo Sapiens
PRRSRSVSPCSNVESR

SEQ ID NO: 31594 - protein, 16 aa, Homo Sapiens
RRSRSVSPCSNVESRL

SEQ ID NO: 31595 - protein, 16 aa, Homo Sapiens
RSRSVSPCSNVESRLL

SEQ ID NO: 31596 - protein, 16 aa, Homo Sapiens
SRSVSPCSNVESRLLP

SEQ ID NO: 31597 - protein, 16 aa, Homo Sapiens
RSVSPCSNVESRLLPR

SEQ ID NO: 31598 - protein, 16 aa, Homo Sapiens
SVSPCSNVESRLLPRY

SEQ ID NO: 31599 - protein, 16 aa, Homo Sapiens
VSPCSNVESRLLPRYS

SEQ ID NO: 31600 - protein, 16 aa, Homo Sapiens
SPCSNVESRLLPRYSH

SEQ ID NO: 31601 - protein, 16 aa, Homo Sapiens
PCSNVESRLLPRYSHS

SEQ ID NO: 31602 - protein, 16 aa, Homo Sapiens
CSNVESRLLPRYSHSG

SEQ ID NO: 31603 - protein, 16 aa, Homo Sapiens
SNVESRLLPRYSHSGS

SEQ ID NO: 31604 - protein, 16 aa, Homo Sapiens
NVESRLLPRYSHSGSS

SEQ ID NO: 31605 - protein, 16 aa, Homo Sapiens
VESRLLPRYSHSGSSS

SEQ ID NO: 31606 - protein, 16 aa, Homo Sapiens
ESRLLPRYSHSGSSSP

SEQ ID NO: 31607 - protein, 16 aa, Homo Sapiens
SRLLPRYSHSGSSSPD

SEQ ID NO: 31608 - protein, 16 aa, Homo Sapiens
RLLPRYSHSGSSSPDT

SEQ ID NO: 31609 - protein, 16 aa, Homo Sapiens
LLPRYSHSGSSSPDTK

SEQ ID NO: 31610 - protein, 16 aa, Homo Sapiens
LPRYSHSGSSSPDTKV

SEQ ID NO: 31611 - protein, 16 aa, Homo Sapiens
PRYSHSGSSSPDTKVK

SEQ ID NO: 31612 - protein, 16 aa, Homo Sapiens
RYSHSGSSSPDTKVKP

SEQ ID NO: 31613 - protein, 16 aa, Homo Sapiens
YSHSGSSSPDTKVKPE

SEQ ID NO: 31614 - protein, 16 aa, Homo Sapiens
SHSGSSSPDTKVKPET

SEQ ID NO: 31615 - protein, 16 aa, Homo Sapiens
HSGSSSPDTKVKPETP

SEQ ID NO: 31616 - protein, 16 aa, Homo Sapiens
SGSSSPDTKVKPETPP

SEQ ID NO: 31617 - protein, 16 aa, Homo Sapiens
GSSSPDTKVKPETPPR

SEQ ID NO: 31618 - protein, 16 aa, Homo Sapiens
SSSPDTKVKPETPPRQ

SEQ ID NO: 31619 - protein, 16 aa, Homo Sapiens
SSPDTKVKPETPPRQS

SEQ ID NO: 31620 - protein, 16 aa, Homo Sapiens
SPDTKVKPETPPRQSH

SEQ ID NO: 31621 - protein, 16 aa, Homo Sapiens
PDTKVKPETPPRQSHS

SEQ ID NO: 31622 - protein, 16 aa, Homo Sapiens
DTKVKPETPPRQSHSG

SEQ ID NO: 31623 - protein, 16 aa, Homo Sapiens
TKVKPETPPRQSHSGS

SEQ ID NO: 31624 - protein, 16 aa, Homo Sapiens
KVKPETPPRQSHSGSI

SEQ ID NO: 31625 - protein, 16 aa, Homo Sapiens
VKPETPPRQSHSGSIS

SEQ ID NO: 31626 - protein, 16 aa, Homo Sapiens
KPETPPRQSHSGSISP

SEQ ID NO: 31627 - protein, 16 aa, Homo Sapiens
PETPPRQSHSGSISPY

SEQ ID NO: 31628 - protein, 16 aa, Homo Sapiens
ETPPRQSHSGSISPYP

SEQ ID NO: 31629 - protein, 16 aa, Homo Sapiens
TPPRQSHSGSISPYPK

SEQ ID NO: 31630 - protein, 16 aa, Homo Sapiens
PPRQSHSGSISPYPKV

SEQ ID NO: 31631 - protein, 16 aa, Homo Sapiens
PRQSHSGSISPYPKVK

SEQ ID NO: 31632 - protein, 16 aa, Homo Sapiens
RQSHSGSISPYPKVKA

SEQ ID NO: 31633 - protein, 16 aa, Homo Sapiens
QSHSGSISPYPKVKAQ

SEQ ID NO: 31634 - protein, 16 aa, Homo Sapiens
SHSGSISPYPKVKAQT

SEQ ID NO: 31635 - protein, 16 aa, Homo Sapiens
HSGSISPYPKVKAQTP

SEQ ID NO: 31636 - protein, 16 aa, Homo Sapiens
SGSISPYPKVKAQTPP

SEQ ID NO: 31637 - protein, 16 aa, Homo Sapiens
GSISPYPKVKAQTPPG

SEQ ID NO: 31638 - protein, 16 aa, Homo Sapiens
SISPYPKVKAQTPPGP

SEQ ID NO: 31639 - protein, 16 aa, Homo Sapiens
ISPYPKVKAQTPPGPS

SEQ ID NO: 31640 - protein, 16 aa, Homo Sapiens
SPYPKVKAQTPPGPSL

SEQ ID NO: 31641 - protein, 16 aa, Homo Sapiens
PYPKVKAQTPPGPSLS

SEQ ID NO: 31642 - protein, 16 aa, Homo Sapiens
YPKVKAQTPPGPSLSG

SEQ ID NO: 31643 - protein, 16 aa, Homo Sapiens
PKVKAQTPPGPSLSGS

SEQ ID NO: 31644 - protein, 16 aa, Homo Sapiens
KVKAQTPPGPSLSGSK

SEQ ID NO: 31645 - protein, 16 aa, Homo Sapiens
VKAQTPPGPSLSGSKS

SEQ ID NO: 31646 - protein, 16 aa, Homo Sapiens
KAQTPPGPSLSGSKSP

SEQ ID NO: 31647 - protein, 16 aa, Homo Sapiens
AQTPPGPSLSGSKSPC

SEQ ID NO: 31648 - protein, 16 aa, Homo Sapiens
QTPPGPSLSGSKSPCP

SEQ ID NO: 31649 - protein, 16 aa, Homo Sapiens
TPPGPSLSGSKSPCPQ

SEQ ID NO: 31650 - protein, 16 aa, Homo Sapiens
PPGPSLSGSKSPCPQE

SEQ ID NO: 31651 - protein, 16 aa, Homo Sapiens
PGPSLSGSKSPCPQEK

SEQ ID NO: 31652 - protein, 16 aa, Homo Sapiens
GPSLSGSKSPCPQEKS

SEQ ID NO: 31653 - protein, 16 aa, Homo Sapiens
PSLSGSKSPCPQEKSK

SEQ ID NO: 31654 - protein, 16 aa, Homo Sapiens
SLSGSKSPCPQEKSKD

SEQ ID NO: 31655 - protein, 16 aa, Homo Sapiens
LSGSKSPCPQEKSKDS

SEQ ID NO: 31656 - protein, 16 aa, Homo Sapiens
SGSKSPCPQEKSKDSL

SEQ ID NO: 31657 - protein, 16 aa, Homo Sapiens
GSKSPCPQEKSKDSLV

SEQ ID NO: 31658 - protein, 16 aa, Homo Sapiens
SKSPCPQEKSKDSLVQ

SEQ ID NO: 31659 - protein, 16 aa, Homo Sapiens
KSPCPQEKSKDSLVQS

SEQ ID NO: 31660 - protein, 16 aa, Homo Sapiens
SPCPQEKSKDSLVQSC

SEQ ID NO: 31661 - protein, 16 aa, Homo Sapiens
PCPQEKSKDSLVQSCP

SEQ ID NO: 31662 - protein, 16 aa, Homo Sapiens
CPQEKSKDSLVQSCPG

SEQ ID NO: 31663 - protein, 16 aa, Homo Sapiens
PQEKSKDSLVQSCPGS

SEQ ID NO: 31664 - protein, 16 aa, Homo Sapiens
QEKSKDSLVQSCPGSL

SEQ ID NO: 31665 - protein, 16 aa, Homo Sapiens
EKSKDSLVQSCPGSLS

SEQ ID NO: 31666 - protein, 16 aa, Homo Sapiens
KSKDSLVQSCPGSLSL

SEQ ID NO: 31667 - protein, 16 aa, Homo Sapiens
SKDSLVQSCPGSLSLC

SEQ ID NO: 31668 - protein, 16 aa, Homo Sapiens
KDSLVQSCPGSLSLCA

SEQ ID NO: 31669 - protein, 16 aa, Homo Sapiens
DSLVQSCPGSLSLCAG

SEQ ID NO: 31670 - protein, 16 aa, Homo Sapiens
SLVQSCPGSLSLCAGV

SEQ ID NO: 31671 - protein, 16 aa, Homo Sapiens
LVQSCPGSLSLCAGVK

SEQ ID NO: 31672 - protein, 16 aa, Homo Sapiens
VQSCPGSLSLCAGVKS

SEQ ID NO: 31673 - protein, 16 aa, Homo Sapiens
QSCPGSLSLCAGVKSS

SEQ ID NO: 31674 - protein, 16 aa, Homo Sapiens
SCPGSLSLCAGVKSST

SEQ ID NO: 31675 - protein, 16 aa, Homo Sapiens
CPGSLSLCAGVKSSTP

SEQ ID NO: 31676 - protein, 16 aa, Homo Sapiens
PGSLSLCAGVKSSTPP

SEQ ID NO: 31677 - protein, 16 aa, Homo Sapiens
GSLSLCAGVKSSTPPG

SEQ ID NO: 31678 - protein, 16 aa, Homo Sapiens
SLSLCAGVKSSTPPGE

SEQ ID NO: 31679 - protein, 16 aa, Homo Sapiens
LSLCAGVKSSTPPGES

SEQ ID NO: 31680 - protein, 16 aa, Homo Sapiens
SLCAGVKSSTPPGESY

SEQ ID NO: 31681 - protein, 16 aa, Homo Sapiens
LCAGVKSSTPPGESYF

SEQ ID NO: 31682 - protein, 16 aa, Homo Sapiens
CAGVKSSTPPGESYFG

SEQ ID NO: 31683 - protein, 16 aa, Homo Sapiens
AGVKSSTPPGESYFGV

SEQ ID NO: 31684 - protein, 16 aa, Homo Sapiens
GVKSSTPPGESYFGVS

SEQ ID NO: 31685 - protein, 16 aa, Homo Sapiens
VKSSTPPGESYFGVSS

SEQ ID NO: 31686 - protein, 16 aa, Homo Sapiens
KSSTPPGESYFGVSSL

SEQ ID NO: 31687 - protein, 16 aa, Homo Sapiens
SSTPPGESYFGVSSLQ

SEQ ID NO: 31688 - protein, 16 aa, Homo Sapiens
STPPGESYFGVSSLQL

SEQ ID NO: 31689 - protein, 16 aa, Homo Sapiens
TPPGESYFGVSSLQLK

SEQ ID NO: 31690 - protein, 16 aa, Homo Sapiens
PPGESYFGVSSLQLKG

SEQ ID NO: 31691 - protein, 16 aa, Homo Sapiens
PGESYFGVSSLQLKGQ

SEQ ID NO: 31692 - protein, 16 aa, Homo Sapiens
GESYFGVSSLQLKGQS

SEQ ID NO: 31693 - protein, 16 aa, Homo Sapiens
ESYFGVSSLQLKGQSQ

SEQ ID NO: 31694 - protein, 16 aa, Homo Sapiens
SYFGVSSLQLKGQSQT

SEQ ID NO: 31695 - protein, 16 aa, Homo Sapiens
YFGVSSLQLKGQSQTS

SEQ ID NO: 31696 - protein, 16 aa, Homo Sapiens
FGVSSLQLKGQSQTSP

SEQ ID NO: 31697 - protein, 16 aa, Homo Sapiens
GVSSLQLKGQSQTSPD

SEQ ID NO: 31698 - protein, 16 aa, Homo Sapiens
VSSLQLKGQSQTSPDH

SEQ ID NO: 31699 - protein, 16 aa, Homo Sapiens
SSLQLKGQSQTSPDHR

SEQ ID NO: 31700 - protein, 16 aa, Homo Sapiens
SLQLKGQSQTSPDHRS

SEQ ID NO: 31701 - protein, 16 aa, Homo Sapiens
LQLKGQSQTSPDHRSD

SEQ ID NO: 31702 - protein, 16 aa, Homo Sapiens
QLKGQSQTSPDHRSDT

SEQ ID NO: 31703 - protein, 16 aa, Homo Sapiens
LKGQSQTSPDHRSDTS

SEQ ID NO: 31704 - protein, 16 aa, Homo Sapiens
KGQSQTSPDHRSDTSS

SEQ ID NO: 31705 - protein, 16 aa, Homo Sapiens
GQSQTSPDHRSDTSSP

SEQ ID NO: 31706 - protein, 16 aa, Homo Sapiens
QSQTSPDHRSDTSSPE

SEQ ID NO: 31707 - protein, 16 aa, Homo Sapiens
SQTSPDHRSDTSSPEV

SEQ ID NO: 31708 - protein, 16 aa, Homo Sapiens
QTSPDHRSDTSSPEVR

SEQ ID NO: 31709 - protein, 16 aa, Homo Sapiens
TSPDHRSDTSSPEVRQ

SEQ ID NO: 31710 - protein, 16 aa, Homo Sapiens
SPDHRSDTSSPEVRQS

SEQ ID NO: 31711 - protein, 16 aa, Homo Sapiens
PDHRSDTSSPEVRQSH

SEQ ID NO: 31712 - protein, 16 aa, Homo Sapiens
DHRSDTSSPEVRQSHS

SEQ ID NO: 31713 - protein, 16 aa, Homo Sapiens
HRSDTSSPEVRQSHSE

SEQ ID NO: 31714 - protein, 16 aa, Homo Sapiens
RSDTSSPEVRQSHSES

SEQ ID NO: 31715 - protein, 16 aa, Homo Sapiens
SDTSSPEVRQSHSESP

SEQ ID NO: 31716 - protein, 16 aa, Homo Sapiens
DTSSPEVRQSHSESPS

SEQ ID NO: 31717 - protein, 16 aa, Homo Sapiens
TSSPEVRQSHSESPSL

SEQ ID NO: 31718 - protein, 16 aa, Homo Sapiens
SSPEVRQSHSESPSLQ

SEQ ID NO: 31719 - protein, 16 aa, Homo Sapiens
SPEVRQSHSESPSLQS

SEQ ID NO: 31720 - protein, 16 aa, Homo Sapiens
PEVRQSHSESPSLQSK

SEQ ID NO: 31721 - protein, 16 aa, Homo Sapiens
EVRQSHSESPSLQSKS

SEQ ID NO: 31722 - protein, 16 aa, Homo Sapiens
VRQSHSESPSLQSKSQ

SEQ ID NO: 31723 - protein, 16 aa, Homo Sapiens
RQSHSESPSLQSKSQT

SEQ ID NO: 31724 - protein, 16 aa, Homo Sapiens
QSHSESPSLQSKSQTS

SEQ ID NO: 31725 - protein, 16 aa, Homo Sapiens
SHSESPSLQSKSQTSP

SEQ ID NO: 31726 - protein, 16 aa, Homo Sapiens
HSESPSLQSKSQTSPK

SEQ ID NO: 31727 - protein, 16 aa, Homo Sapiens
SESPSLQSKSQTSPKG

SEQ ID NO: 31728 - protein, 16 aa, Homo Sapiens
ESPSLQSKSQTSPKGG

SEQ ID NO: 31729 - protein, 16 aa, Homo Sapiens
SPSLQSKSQTSPKGGR

SEQ ID NO: 31730 - protein, 16 aa, Homo Sapiens
PSLQSKSQTSPKGGRS

SEQ ID NO: 31731 - protein, 16 aa, Homo Sapiens
SLQSKSQTSPKGGRSR

SEQ ID NO: 31732 - protein, 16 aa, Homo Sapiens
LQSKSQTSPKGGRSRS

SEQ ID NO: 31733 - protein, 16 aa, Homo Sapiens
QSKSQTSPKGGRSRSS

SEQ ID NO: 31734 - protein, 16 aa, Homo Sapiens
SKSQTSPKGGRSRSSS

SEQ ID NO: 31735 - protein, 16 aa, Homo Sapiens
KSQTSPKGGRSRSSSP

SEQ ID NO: 31736 - protein, 16 aa, Homo Sapiens
SQTSPKGGRSRSSSPV

SEQ ID NO: 31737 - protein, 16 aa, Homo Sapiens
QTSPKGGRSRSSSPVT

SEQ ID NO: 31738 - protein, 16 aa, Homo Sapiens
TSPKGGRSRSSSPVTE

SEQ ID NO: 31739 - protein, 16 aa, Homo Sapiens
SPKGGRSRSSSPVTEL

SEQ ID NO: 31740 - protein, 16 aa, Homo Sapiens
PKGGRSRSSSPVTELA

SEQ ID NO: 31741 - protein, 16 aa, Homo Sapiens
KGGRSRSSSPVTELAS

SEQ ID NO: 31742 - protein, 16 aa, Homo Sapiens
GGRSRSSSPVTELASR

SEQ ID NO: 31743 - protein, 16 aa, Homo Sapiens
GRSRSSSPVTELASRS

SEQ ID NO: 31744 - protein, 16 aa, Homo Sapiens
RSRSSSPVTELASRSP

SEQ ID NO: 31745 - protein, 16 aa, Homo Sapiens
SRSSSPVTELASRSPI

SEQ ID NO: 31746 - protein, 16 aa, Homo Sapiens
RSSSPVTELASRSPIR

SEQ ID NO: 31747 - protein, 16 aa, Homo Sapiens
SSSPVTELASRSPIRQ

SEQ ID NO: 31748 - protein, 16 aa, Homo Sapiens
SSPVTELASRSPIRQD

SEQ ID NO: 31749 - protein, 16 aa, Homo Sapiens
SPVTELASRSPIRQDR

SEQ ID NO: 31750 - protein, 16 aa, Homo Sapiens
PVTELASRSPIRQDRG

SEQ ID NO: 31751 - protein, 16 aa, Homo Sapiens
VTELASRSPIRQDRGE

SEQ ID NO: 31752 - protein, 16 aa, Homo Sapiens
TELASRSPIRQDRGEF

SEQ ID NO: 31753 - protein, 16 aa, Homo Sapiens
ELASRSPIRQDRGEFS

SEQ ID NO: 31754 - protein, 16 aa, Homo Sapiens
LASRSPIRQDRGEFSA

SEQ ID NO: 31755 - protein, 16 aa, Homo Sapiens
ASRSPIRQDRGEFSAS

SEQ ID NO: 31756 - protein, 16 aa, Homo Sapiens
SRSPIRQDRGEFSASP

SEQ ID NO: 31757 - protein, 16 aa, Homo Sapiens
RSPIRQDRGEFSASPM

SEQ ID NO: 31758 - protein, 16 aa, Homo Sapiens
SPIRQDRGEFSASPML

SEQ ID NO: 31759 - protein, 16 aa, Homo Sapiens
PIRQDRGEFSASPMLK

SEQ ID NO: 31760 - protein, 16 aa, Homo Sapiens
IRQDRGEFSASPMLKS

SEQ ID NO: 31761 - protein, 16 aa, Homo Sapiens
RQDRGEFSASPMLKSG

SEQ ID NO: 31762 - protein, 16 aa, Homo Sapiens
QDRGEFSASPMLKSGM

SEQ ID NO: 31763 - protein, 16 aa, Homo Sapiens
DRGEFSASPMLKSGMS

SEQ ID NO: 31764 - protein, 16 aa, Homo Sapiens
RGEFSASPMLKSGMSP

SEQ ID NO: 31765 - protein, 16 aa, Homo Sapiens
GEFSASPMLKSGMSPE

SEQ ID NO: 31766 - protein, 16 aa, Homo Sapiens
EFSASPMLKSGMSPEQ

SEQ ID NO: 31767 - protein, 16 aa, Homo Sapiens
FSASPMLKSGMSPEQS

SEQ ID NO: 31768 - protein, 16 aa, Homo Sapiens
SASPMLKSGMSPEQSR

SEQ ID NO: 31769 - protein, 16 aa, Homo Sapiens
ASPMLKSGMSPEQSRF

SEQ ID NO: 31770 - protein, 16 aa, Homo Sapiens
SPMLKSGMSPEQSRFQ

SEQ ID NO: 31771 - protein, 16 aa, Homo Sapiens
PMLKSGMSPEQSRFQS

SEQ ID NO: 31772 - protein, 16 aa, Homo Sapiens
MLKSGMSPEQSRFQSD

SEQ ID NO: 31773 - protein, 16 aa, Homo Sapiens
LKSGMSPEQSRFQSDS

SEQ ID NO: 31774 - protein, 16 aa, Homo Sapiens
KSGMSPEQSRFQSDSS

SEQ ID NO: 31775 - protein, 16 aa, Homo Sapiens
SGMSPEQSRFQSDSSS

SEQ ID NO: 31776 - protein, 16 aa, Homo Sapiens
GMSPEQSRFQSDSSSY

SEQ ID NO: 31777 - protein, 16 aa, Homo Sapiens
MSPEQSRFQSDSSSYP

SEQ ID NO: 31778 - protein, 16 aa, Homo Sapiens
SPEQSRFQSDSSSYPT

SEQ ID NO: 31779 - protein, 16 aa, Homo Sapiens
PEQSRFQSDSSSYPTV

SEQ ID NO: 31780 - protein, 16 aa, Homo Sapiens
EQSRFQSDSSSYPTVD

SEQ ID NO: 31781 - protein, 16 aa, Homo Sapiens
QSRFQSDSSSYPTVDS

SEQ ID NO: 31782 - protein, 16 aa, Homo Sapiens
SRFQSDSSSYPTVDSN

SEQ ID NO: 31783 - protein, 16 aa, Homo Sapiens
RFQSDSSSYPTVDSNS

SEQ ID NO: 31784 - protein, 16 aa, Homo Sapiens
FQSDSSSYPTVDSNSL

SEQ ID NO: 31785 - protein, 16 aa, Homo Sapiens
QSDSSSYPTVDSNSLL

SEQ ID NO: 31786 - protein, 16 aa, Homo Sapiens
SDSSSYPTVDSNSLLG

SEQ ID NO: 31787 - protein, 16 aa, Homo Sapiens
DSSSYPTVDSNSLLGQ

SEQ ID NO: 31788 - protein, 16 aa, Homo Sapiens
SSSYPTVDSNSLLGQS

SEQ ID NO: 31789 - protein, 16 aa, Homo Sapiens
SSYPTVDSNSLLGQSR

SEQ ID NO: 31790 - protein, 16 aa, Homo Sapiens
SYPTVDSNSLLGQSRL

SEQ ID NO: 31791 - protein, 16 aa, Homo Sapiens
YPTVDSNSLLGQSRLE

SEQ ID NO: 31792 - protein, 16 aa, Homo Sapiens
PTVDSNSLLGQSRLET

SEQ ID NO: 31793 - protein, 16 aa, Homo Sapiens
TVDSNSLLGQSRLETA

SEQ ID NO: 31794 - protein, 16 aa, Homo Sapiens
VDSNSLLGQSRLETAE

SEQ ID NO: 31795 - protein, 16 aa, Homo Sapiens
DSNSLLGQSRLETAES

SEQ ID NO: 31796 - protein, 16 aa, Homo Sapiens
SNSLLGQSRLETAESK

SEQ ID NO: 31797 - protein, 16 aa, Homo Sapiens
NSLLGQSRLETAESKE

SEQ ID NO: 31798 - protein, 16 aa, Homo Sapiens
SLLGQSRLETAESKEK

SEQ ID NO: 31799 - protein, 16 aa, Homo Sapiens
LLGQSRLETAESKEKM

SEQ ID NO: 31800 - protein, 16 aa, Homo Sapiens
LGQSRLETAESKEKMA

SEQ ID NO: 31801 - protein, 16 aa, Homo Sapiens
GQSRLETAESKEKMAL

SEQ ID NO: 31802 - protein, 16 aa, Homo Sapiens
QSRLETAESKEKMALP

SEQ ID NO: 31803 - protein, 16 aa, Homo Sapiens
SRLETAESKEKMALPP

SEQ ID NO: 31804 - protein, 16 aa, Homo Sapiens
RLETAESKEKMALPPQ

SEQ ID NO: 31805 - protein, 16 aa, Homo Sapiens
LETAESKEKMALPPQE

SEQ ID NO: 31806 - protein, 16 aa, Homo Sapiens
ETAESKEKMALPPQED

SEQ ID NO: 31807 - protein, 16 aa, Homo Sapiens
TAESKEKMALPPQEDA

SEQ ID NO: 31808 - protein, 16 aa, Homo Sapiens
AESKEKMALPPQEDAT

SEQ ID NO: 31809 - protein, 16 aa, Homo Sapiens
ESKEKMALPPQEDATA

SEQ ID NO: 31810 - protein, 16 aa, Homo Sapiens
SKEKMALPPQEDATAS

SEQ ID NO: 31811 - protein, 16 aa, Homo Sapiens
KEKMALPPQEDATASP

SEQ ID NO: 31812 - protein, 16 aa, Homo Sapiens
EKMALPPQEDATASPP

SEQ ID NO: 31813 - protein, 16 aa, Homo Sapiens
KMALPPQEDATASPPR

SEQ ID NO: 31814 - protein, 16 aa, Homo Sapiens
MALPPQEDATASPPRQ

SEQ ID NO: 31815 - protein, 16 aa, Homo Sapiens
ALPPQEDATASPPRQK

SEQ ID NO: 31816 - protein, 16 aa, Homo Sapiens
LPPQEDATASPPRQKD

SEQ ID NO: 31817 - protein, 16 aa, Homo Sapiens
PPQEDATASPPRQKDK

SEQ ID NO: 31818 - protein, 16 aa, Homo Sapiens
PQEDATASPPRQKDKF

SEQ ID NO: 31819 - protein, 16 aa, Homo Sapiens
QEDATASPPRQKDKFS

SEQ ID NO: 31820 - protein, 16 aa, Homo Sapiens
EDATASPPRQKDKFSP

SEQ ID NO: 31821 - protein, 16 aa, Homo Sapiens
DATASPPRQKDKFSPF

SEQ ID NO: 31822 - protein, 16 aa, Homo Sapiens
ATASPPRQKDKFSPFP

SEQ ID NO: 31823 - protein, 16 aa, Homo Sapiens
TASPPRQKDKFSPFPV

SEQ ID NO: 31824 - protein, 16 aa, Homo Sapiens
ASPPRQKDKFSPFPVQ

SEQ ID NO: 31825 - protein, 16 aa, Homo Sapiens
SPPRQKDKFSPFPVQD

SEQ ID NO: 31826 - protein, 16 aa, Homo Sapiens
PPRQKDKFSPFPVQDR

SEQ ID NO: 31827 - protein, 16 aa, Homo Sapiens
PRQKDKFSPFPVQDRP

SEQ ID NO: 31828 - protein, 16 aa, Homo Sapiens
RQKDKFSPFPVQDRPE

SEQ ID NO: 31829 - protein, 16 aa, Homo Sapiens
QKDKFSPFPVQDRPES

SEQ ID NO: 31830 - protein, 16 aa, Homo Sapiens
KDKFSPFPVQDRPESS

SEQ ID NO: 31831 - protein, 16 aa, Homo Sapiens
DKFSPFPVQDRPESSL

SEQ ID NO: 31832 - protein, 16 aa, Homo Sapiens
KFSPFPVQDRPESSLV

SEQ ID NO: 31833 - protein, 16 aa, Homo Sapiens
FSPFPVQDRPESSLVF

SEQ ID NO: 31834 - protein, 16 aa, Homo Sapiens
SPFPVQDRPESSLVFK

SEQ ID NO: 31835 - protein, 16 aa, Homo Sapiens
PFPVQDRPESSLVFKD

SEQ ID NO: 31836 - protein, 16 aa, Homo Sapiens
FPVQDRPESSLVFKDT

SEQ ID NO: 31837 - protein, 16 aa, Homo Sapiens
PVQDRPESSLVFKDTL

SEQ ID NO: 31838 - protein, 16 aa, Homo Sapiens
VQDRPESSLVFKDTLR

SEQ ID NO: 31839 - protein, 16 aa, Homo Sapiens
QDRPESSLVFKDTLRT

SEQ ID NO: 31840 - protein, 16 aa, Homo Sapiens
DRPESSLVFKDTLRTP

SEQ ID NO: 31841 - protein, 16 aa, Homo Sapiens
RPESSLVFKDTLRTPP

SEQ ID NO: 31842 - protein, 16 aa, Homo Sapiens
PESSLVFKDTLRTPPR

SEQ ID NO: 31843 - protein, 16 aa, Homo Sapiens
ESSLVFKDTLRTPPRE

SEQ ID NO: 31844 - protein, 16 aa, Homo Sapiens
SSLVFKDTLRTPPRER

SEQ ID NO: 31845 - protein, 16 aa, Homo Sapiens
SLVFKDTLRTPPRERS

SEQ ID NO: 31846 - protein, 16 aa, Homo Sapiens
LVFKDTLRTPPRERSG

SEQ ID NO: 31847 - protein, 16 aa, Homo Sapiens
VFKDTLRTPPRERSGA

SEQ ID NO: 31848 - protein, 16 aa, Homo Sapiens
FKDTLRTPPRERSGAG

SEQ ID NO: 31849 - protein, 16 aa, Homo Sapiens
KDTLRTPPRERSGAGS

SEQ ID NO: 31850 - protein, 16 aa, Homo Sapiens
DTLRTPPRERSGAGSS

SEQ ID NO: 31851 - protein, 16 aa, Homo Sapiens
TLRTPPRERSGAGSSP

SEQ ID NO: 31852 - protein, 16 aa, Homo Sapiens
LRTPPRERSGAGSSPE

SEQ ID NO: 31853 - protein, 16 aa, Homo Sapiens
RTPPRERSGAGSSPET

SEQ ID NO: 31854 - protein, 16 aa, Homo Sapiens
TPPRERSGAGSSPETK

SEQ ID NO: 31855 - protein, 16 aa, Homo Sapiens
PPRERSGAGSSPETKE

SEQ ID NO: 31856 - protein, 16 aa, Homo Sapiens
PRERSGAGSSPETKEQ

SEQ ID NO: 31857 - protein, 16 aa, Homo Sapiens
RERSGAGSSPETKEQN

SEQ ID NO: 31858 - protein, 16 aa, Homo Sapiens
ERSGAGSSPETKEQNS

SEQ ID NO: 31859 - protein, 16 aa, Homo Sapiens
RSGAGSSPETKEQNSA

SEQ ID NO: 31860 - protein, 16 aa, Homo Sapiens
SGAGSSPETKEQNSAL

SEQ ID NO: 31861 - protein, 16 aa, Homo Sapiens
GAGSSPETKEQNSALP

SEQ ID NO: 31862 - protein, 16 aa, Homo Sapiens
AGSSPETKEQNSALPT

SEQ ID NO: 31863 - protein, 16 aa, Homo Sapiens
GSSPETKEQNSALPTS

SEQ ID NO: 31864 - protein, 16 aa, Homo Sapiens
SSPETKEQNSALPTSS

SEQ ID NO: 31865 - protein, 16 aa, Homo Sapiens
SPETKEQNSALPTSSQ

SEQ ID NO: 31866 - protein, 16 aa, Homo Sapiens
PETKEQNSALPTSSQD

SEQ ID NO: 31867 - protein, 16 aa, Homo Sapiens
ETKEQNSALPTSSQDE

SEQ ID NO: 31868 - protein, 16 aa, Homo Sapiens
TKEQNSALPTSSQDEE

SEQ ID NO: 31869 - protein, 16 aa, Homo Sapiens
KEQNSALPTSSQDEEL

SEQ ID NO: 31870 - protein, 16 aa, Homo Sapiens
EQNSALPTSSQDEELM

SEQ ID NO: 31871 - protein, 16 aa, Homo Sapiens
QNSALPTSSQDEELME

SEQ ID NO: 31872 - protein, 16 aa, Homo Sapiens
NSALPTSSQDEELMEV

SEQ ID NO: 31873 - protein, 16 aa, Homo Sapiens
SALPTSSQDEELMEVV

SEQ ID NO: 31874 - protein, 16 aa, Homo Sapiens
ALPTSSQDEELMEVVE

SEQ ID NO: 31875 - protein, 16 aa, Homo Sapiens
LPTSSQDEELMEVVEK

SEQ ID NO: 31876 - protein, 16 aa, Homo Sapiens
PTSSQDEELMEVVEKS

SEQ ID NO: 31877 - protein, 16 aa, Homo Sapiens
TSSQDEELMEVVEKSE

SEQ ID NO: 31878 - protein, 16 aa, Homo Sapiens
SSQDEELMEVVEKSEE

SEQ ID NO: 31879 - protein, 16 aa, Homo Sapiens
SQDEELMEVVEKSEEP

SEQ ID NO: 31880 - protein, 16 aa, Homo Sapiens
QDEELMEVVEKSEEPA

SEQ ID NO: 31881 - protein, 16 aa, Homo Sapiens
DEELMEVVEKSEEPAG

SEQ ID NO: 31882 - protein, 16 aa, Homo Sapiens
EELMEVVEKSEEPAGQ

SEQ ID NO: 31883 - protein, 16 aa, Homo Sapiens
ELMEVVEKSEEPAGQI

SEQ ID NO: 31884 - protein, 16 aa, Homo Sapiens
LMEVVEKSEEPAGQIL

SEQ ID NO: 31885 - protein, 16 aa, Homo Sapiens
MEVVEKSEEPAGQILS

SEQ ID NO: 31886 - protein, 16 aa, Homo Sapiens
EVVEKSEEPAGQILSH

SEQ ID NO: 31887 - protein, 16 aa, Homo Sapiens
VVEKSEEPAGQILSHL

SEQ ID NO: 31888 - protein, 16 aa, Homo Sapiens
VEKSEEPAGQILSHLS

SEQ ID NO: 31889 - protein, 16 aa, Homo Sapiens
EKSEEPAGQILSHLSS

SEQ ID NO: 31890 - protein, 16 aa, Homo Sapiens
KSEEPAGQILSHLSSE

SEQ ID NO: 31891 - protein, 16 aa, Homo Sapiens
SEEPAGQILSHLSSEL

SEQ ID NO: 31892 - protein, 16 aa, Homo Sapiens
EEPAGQILSHLSSELK

SEQ ID NO: 31893 - protein, 16 aa, Homo Sapiens
EPAGQILSHLSSELKE

SEQ ID NO: 31894 - protein, 16 aa, Homo Sapiens
PAGQILSHLSSELKEM

SEQ ID NO: 31895 - protein, 16 aa, Homo Sapiens
AGQILSHLSSELKEMS

SEQ ID NO: 31896 - protein, 16 aa, Homo Sapiens
GQILSHLSSELKEMST

SEQ ID NO: 31897 - protein, 16 aa, Homo Sapiens
QILSHLSSELKEMSTS

SEQ ID NO: 31898 - protein, 16 aa, Homo Sapiens
ILSHLSSELKEMSTSN

SEQ ID NO: 31899 - protein, 16 aa, Homo Sapiens
LSHLSSELKEMSTSNF

SEQ ID NO: 31900 - protein, 16 aa, Homo Sapiens
SHLSSELKEMSTSNFE

SEQ ID NO: 31901 - protein, 16 aa, Homo Sapiens
HLSSELKEMSTSNFES

SEQ ID NO: 31902 - protein, 16 aa, Homo Sapiens
LSSELKEMSTSNFESS

SEQ ID NO: 31903 - protein, 16 aa, Homo Sapiens
SSELKEMSTSNFESSP

SEQ ID NO: 31904 - protein, 16 aa, Homo Sapiens
SELKEMSTSNFESSPE

SEQ ID NO: 31905 - protein, 16 aa, Homo Sapiens
ELKEMSTSNFESSPEV

SEQ ID NO: 31906 - protein, 16 aa, Homo Sapiens
LKEMSTSNFESSPEVE

SEQ ID NO: 31907 - protein, 16 aa, Homo Sapiens
KEMSTSNFESSPEVEE

SEQ ID NO: 31908 - protein, 16 aa, Homo Sapiens
EMSTSNFESSPEVEER

SEQ ID NO: 31909 - protein, 16 aa, Homo Sapiens
MSTSNFESSPEVEERP

SEQ ID NO: 31910 - protein, 16 aa, Homo Sapiens
STSNFESSPEVEERPA

SEQ ID NO: 31911 - protein, 16 aa, Homo Sapiens
TSNFESSPEVEERPAV

SEQ ID NO: 31912 - protein, 16 aa, Homo Sapiens
SNFESSPEVEERPAVS

SEQ ID NO: 31913 - protein, 16 aa, Homo Sapiens
NFESSPEVEERPAVSL

SEQ ID NO: 31914 - protein, 16 aa, Homo Sapiens
FESSPEVEERPAVSLT

SEQ ID NO: 31915 - protein, 16 aa, Homo Sapiens
ESSPEVEERPAVSLTL

SEQ ID NO: 31916 - protein, 16 aa, Homo Sapiens
SSPEVEERPAVSLTLD

SEQ ID NO: 31917 - protein, 16 aa, Homo Sapiens
SPEVEERPAVSLTLDQ

SEQ ID NO: 31918 - protein, 16 aa, Homo Sapiens
PEVEERPAVSLTLDQS

SEQ ID NO: 31919 - protein, 16 aa, Homo Sapiens
EVEERPAVSLTLDQSQ

SEQ ID NO: 31920 - protein, 16 aa, Homo Sapiens
VEERPAVSLTLDQSQS

SEQ ID NO: 31921 - protein, 16 aa, Homo Sapiens
EERPAVSLTLDQSQSQ

SEQ ID NO: 31922 - protein, 16 aa, Homo Sapiens
ERPAVSLTLDQSQSQA

SEQ ID NO: 31923 - protein, 16 aa, Homo Sapiens
RPAVSLTLDQSQSQAS

SEQ ID NO: 31924 - protein, 16 aa, Homo Sapiens
PAVSLTLDQSQSQASL

SEQ ID NO: 31925 - protein, 16 aa, Homo Sapiens
AVSLTLDQSQSQASLE

SEQ ID NO: 31926 - protein, 16 aa, Homo Sapiens
VSLTLDQSQSQASLEA

SEQ ID NO: 31927 - protein, 16 aa, Homo Sapiens
SLTLDQSQSQASLEAV

SEQ ID NO: 31928 - protein, 16 aa, Homo Sapiens
LTLDQSQSQASLEAVE

SEQ ID NO: 31929 - protein, 16 aa, Homo Sapiens
TLDQSQSQASLEAVEV

SEQ ID NO: 31930 - protein, 16 aa, Homo Sapiens
LDQSQSQASLEAVEVP

SEQ ID NO: 31931 - protein, 16 aa, Homo Sapiens
DQSQSQASLEAVEVPS

SEQ ID NO: 31932 - protein, 16 aa, Homo Sapiens
QSQSQASLEAVEVPSM

SEQ ID NO: 31933 - protein, 16 aa, Homo Sapiens
SQSQASLEAVEVPSMA

SEQ ID NO: 31934 - protein, 16 aa, Homo Sapiens
QSQASLEAVEVPSMAS

SEQ ID NO: 31935 - protein, 16 aa, Homo Sapiens
SQASLEAVEVPSMASS

SEQ ID NO: 31936 - protein, 16 aa, Homo Sapiens
QASLEAVEVPSMASSW

SEQ ID NO: 31937 - protein, 16 aa, Homo Sapiens
ASLEAVEVPSMASSWG

SEQ ID NO: 31938 - protein, 16 aa, Homo Sapiens
SLEAVEVPSMASSWGG

SEQ ID NO: 31939 - protein, 16 aa, Homo Sapiens
LEAVEVPSMASSWGGP

SEQ ID NO: 31940 - protein, 16 aa, Homo Sapiens
EAVEVPSMASSWGGPH

SEQ ID NO: 31941 - protein, 16 aa, Homo Sapiens
AVEVPSMASSWGGPHF

SEQ ID NO: 31942 - protein, 16 aa, Homo Sapiens
VEVPSMASSWGGPHFS

SEQ ID NO: 31943 - protein, 16 aa, Homo Sapiens
EVPSMASSWGGPHFSP

SEQ ID NO: 31944 - protein, 16 aa, Homo Sapiens
VPSMASSWGGPHFSPE

SEQ ID NO: 31945 - protein, 16 aa, Homo Sapiens
PSMASSWGGPHFSPEH

SEQ ID NO: 31946 - protein, 16 aa, Homo Sapiens
SMASSWGGPHFSPEHK

SEQ ID NO: 31947 - protein, 16 aa, Homo Sapiens
MASSWGGPHFSPEHKE

SEQ ID NO: 31948 - protein, 16 aa, Homo Sapiens
ASSWGGPHFSPEHKEL

SEQ ID NO: 31949 - protein, 16 aa, Homo Sapiens
SSWGGPHFSPEHKELS

SEQ ID NO: 31950 - protein, 16 aa, Homo Sapiens
SWGGPHFSPEHKELSN

SEQ ID NO: 31951 - protein, 16 aa, Homo Sapiens
WGGPHFSPEHKELSNS

SEQ ID NO: 31952 - protein, 16 aa, Homo Sapiens
GGPHFSPEHKELSNSP

SEQ ID NO: 31953 - protein, 16 aa, Homo Sapiens
GPHFSPEHKELSNSPL

SEQ ID NO: 31954 - protein, 16 aa, Homo Sapiens
PHFSPEHKELSNSPLR

SEQ ID NO: 31955 - protein, 16 aa, Homo Sapiens
HFSPEHKELSNSPLRE

SEQ ID NO: 31956 - protein, 16 aa, Homo Sapiens
FSPEHKELSNSPLREN

SEQ ID NO: 31957 - protein, 16 aa, Homo Sapiens
SPEHKELSNSPLRENS

SEQ ID NO: 31958 - protein, 16 aa, Homo Sapiens
PEHKELSNSPLRENSF

SEQ ID NO: 31959 - protein, 16 aa, Homo Sapiens
EHKELSNSPLRENSFG

SEQ ID NO: 31960 - protein, 16 aa, Homo Sapiens
HKELSNSPLRENSFGS

SEQ ID NO: 31961 - protein, 16 aa, Homo Sapiens
KELSNSPLRENSFGSP

SEQ ID NO: 31962 - protein, 16 aa, Homo Sapiens
ELSNSPLRENSFGSPL

SEQ ID NO: 31963 - protein, 16 aa, Homo Sapiens
LSNSPLRENSFGSPLE

SEQ ID NO: 31964 - protein, 16 aa, Homo Sapiens
SNSPLRENSFGSPLEF

SEQ ID NO: 31965 - protein, 16 aa, Homo Sapiens
NSPLRENSFGSPLEFR

SEQ ID NO: 31966 - protein, 16 aa, Homo Sapiens
SPLRENSFGSPLEFRN

SEQ ID NO: 31967 - protein, 16 aa, Homo Sapiens
PLRENSFGSPLEFRNS

SEQ ID NO: 31968 - protein, 16 aa, Homo Sapiens
LRENSFGSPLEFRNSG

SEQ ID NO: 31969 - protein, 16 aa, Homo Sapiens
RENSFGSPLEFRNSGP

SEQ ID NO: 31970 - protein, 16 aa, Homo Sapiens
ENSFGSPLEFRNSGPL

SEQ ID NO: 31971 - protein, 16 aa, Homo Sapiens
NSFGSPLEFRNSGPLG

SEQ ID NO: 31972 - protein, 16 aa, Homo Sapiens
SFGSPLEFRNSGPLGT

SEQ ID NO: 31973 - protein, 16 aa, Homo Sapiens
FGSPLEFRNSGPLGTE

SEQ ID NO: 31974 - protein, 16 aa, Homo Sapiens
GSPLEFRNSGPLGTEM

SEQ ID NO: 31975 - protein, 16 aa, Homo Sapiens
SPLEFRNSGPLGTEMN

SEQ ID NO: 31976 - protein, 16 aa, Homo Sapiens
PLEFRNSGPLGTEMNT

SEQ ID NO: 31977 - protein, 16 aa, Homo Sapiens
LEFRNSGPLGTEMNTG

SEQ ID NO: 31978 - protein, 16 aa, Homo Sapiens
EFRNSGPLGTEMNTGF

SEQ ID NO: 31979 - protein, 16 aa, Homo Sapiens
FRNSGPLGTEMNTGFS

SEQ ID NO: 31980 - protein, 16 aa, Homo Sapiens
RNSGPLGTEMNTGFSS

SEQ ID NO: 31981 - protein, 16 aa, Homo Sapiens
NSGPLGTEMNTGFSSE

SEQ ID NO: 31982 - protein, 16 aa, Homo Sapiens
SGPLGTEMNTGFSSEV

SEQ ID NO: 31983 - protein, 16 aa, Homo Sapiens
GPLGTEMNTGFSSEVK

SEQ ID NO: 31984 - protein, 16 aa, Homo Sapiens
PLGTEMNTGFSSEVKE

SEQ ID NO: 31985 - protein, 16 aa, Homo Sapiens
LGTEMNTGFSSEVKED

SEQ ID NO: 31986 - protein, 16 aa, Homo Sapiens
GTEMNTGFSSEVKEDL

SEQ ID NO: 31987 - protein, 16 aa, Homo Sapiens
TEMNTGFSSEVKEDLN

SEQ ID NO: 31988 - protein, 16 aa, Homo Sapiens
EMNTGFSSEVKEDLNG

SEQ ID NO: 31989 - protein, 16 aa, Homo Sapiens
MNTGFSSEVKEDLNGP

SEQ ID NO: 31990 - protein, 16 aa, Homo Sapiens
NTGFSSEVKEDLNGPF

SEQ ID NO: 31991 - protein, 16 aa, Homo Sapiens
TGFSSEVKEDLNGPFL

SEQ ID NO: 31992 - protein, 16 aa, Homo Sapiens
GFSSEVKEDLNGPFLN

SEQ ID NO: 31993 - protein, 16 aa, Homo Sapiens
FSSEVKEDLNGPFLNQ

SEQ ID NO: 31994 - protein, 16 aa, Homo Sapiens
SSEVKEDLNGPFLNQL

SEQ ID NO: 31995 - protein, 16 aa, Homo Sapiens
SEVKEDLNGPFLNQLE

SEQ ID NO: 31996 - protein, 16 aa, Homo Sapiens
EVKEDLNGPFLNQLET

SEQ ID NO: 31997 - protein, 16 aa, Homo Sapiens
VKEDLNGPFLNQLETD

SEQ ID NO: 31998 - protein, 16 aa, Homo Sapiens
KEDLNGPFLNQLETDP

SEQ ID NO: 31999 - protein, 16 aa, Homo Sapiens
EDLNGPFLNQLETDPS

SEQ ID NO: 32000 - protein, 16 aa, Homo Sapiens
DLNGPFLNQLETDPSL

SEQ ID NO: 32001 - protein, 16 aa, Homo Sapiens
LNGPFLNQLETDPSLD

SEQ ID NO: 32002 - protein, 16 aa, Homo Sapiens
NGPFLNQLETDPSLDM

SEQ ID NO: 32003 - protein, 16 aa, Homo Sapiens
GPFLNQLETDPSLDMK

SEQ ID NO: 32004 - protein, 16 aa, Homo Sapiens
PFLNQLETDPSLDMKE

SEQ ID NO: 32005 - protein, 16 aa, Homo Sapiens
FLNQLETDPSLDMKEQ

SEQ ID NO: 32006 - protein, 16 aa, Homo Sapiens
LNQLETDPSLDMKEQS

SEQ ID NO: 32007 - protein, 16 aa, Homo Sapiens
NQLETDPSLDMKEQST

SEQ ID NO: 32008 - protein, 16 aa, Homo Sapiens
QLETDPSLDMKEQSTR

SEQ ID NO: 32009 - protein, 16 aa, Homo Sapiens
LETDPSLDMKEQSTRS

SEQ ID NO: 32010 - protein, 16 aa, Homo Sapiens
ETDPSLDMKEQSTRSS

SEQ ID NO: 32011 - protein, 16 aa, Homo Sapiens
TDPSLDMKEQSTRSSG

SEQ ID NO: 32012 - protein, 16 aa, Homo Sapiens
DPSLDMKEQSTRSSGH

SEQ ID NO: 32013 - protein, 16 aa, Homo Sapiens
PSLDMKEQSTRSSGHS

SEQ ID NO: 32014 - protein, 16 aa, Homo Sapiens
SLDMKEQSTRSSGHSS

SEQ ID NO: 32015 - protein, 16 aa, Homo Sapiens
LDMKEQSTRSSGHSSS

SEQ ID NO: 32016 - protein, 16 aa, Homo Sapiens
DMKEQSTRSSGHSSSE

SEQ ID NO: 32017 - protein, 16 aa, Homo Sapiens
MKEQSTRSSGHSSSEL

SEQ ID NO: 32018 - protein, 16 aa, Homo Sapiens
KEQSTRSSGHSSSELS

SEQ ID NO: 32019 - protein, 16 aa, Homo Sapiens
EQSTRSSGHSSSELSP

SEQ ID NO: 32020 - protein, 16 aa, Homo Sapiens
QSTRSSGHSSSELSPD

SEQ ID NO: 32021 - protein, 16 aa, Homo Sapiens
STRSSGHSSSELSPDA

SEQ ID NO: 32022 - protein, 16 aa, Homo Sapiens
TRSSGHSSSELSPDAV

SEQ ID NO: 32023 - protein, 16 aa, Homo Sapiens
RSSGHSSSELSPDAVE

SEQ ID NO: 32024 - protein, 16 aa, Homo Sapiens
SSGHSSSELSPDAVEK

SEQ ID NO: 32025 - protein, 16 aa, Homo Sapiens
SGHSSSELSPDAVEKA

SEQ ID NO: 32026 - protein, 16 aa, Homo Sapiens
GHSSSELSPDAVEKAG

SEQ ID NO: 32027 - protein, 16 aa, Homo Sapiens
HSSSELSPDAVEKAGM

SEQ ID NO: 32028 - protein, 16 aa, Homo Sapiens
SSSELSPDAVEKAGMS

SEQ ID NO: 32029 - protein, 16 aa, Homo Sapiens
SSELSPDAVEKAGMSS

SEQ ID NO: 32030 - protein, 16 aa, Homo Sapiens
SELSPDAVEKAGMSSN

SEQ ID NO: 32031 - protein, 16 aa, Homo Sapiens
ELSPDAVEKAGMSSNQ

SEQ ID NO: 32032 - protein, 16 aa, Homo Sapiens
LSPDAVEKAGMSSNQS

SEQ ID NO: 32033 - protein, 16 aa, Homo Sapiens
SPDAVEKAGMSSNQSI

SEQ ID NO: 32034 - protein, 16 aa, Homo Sapiens
PDAVEKAGMSSNQSIS

SEQ ID NO: 32035 - protein, 16 aa, Homo Sapiens
DAVEKAGMSSNQSISS

SEQ ID NO: 32036 - protein, 16 aa, Homo Sapiens
AVEKAGMSSNQSISSP

SEQ ID NO: 32037 - protein, 16 aa, Homo Sapiens
VEKAGMSSNQSISSPV

SEQ ID NO: 32038 - protein, 16 aa, Homo Sapiens
EKAGMSSNQSISSPVL

SEQ ID NO: 32039 - protein, 16 aa, Homo Sapiens
KAGMSSNQSISSPVLD

SEQ ID NO: 32040 - protein, 16 aa, Homo Sapiens
AGMSSNQSISSPVLDA

SEQ ID NO: 32041 - protein, 16 aa, Homo Sapiens
GMSSNQSISSPVLDAV

SEQ ID NO: 32042 - protein, 16 aa, Homo Sapiens
MSSNQSISSPVLDAVP

SEQ ID NO: 32043 - protein, 16 aa, Homo Sapiens
SSNQSISSPVLDAVPR

SEQ ID NO: 32044 - protein, 16 aa, Homo Sapiens
SNQSISSPVLDAVPRT

SEQ ID NO: 32045 - protein, 16 aa, Homo Sapiens
NQSISSPVLDAVPRTP

SEQ ID NO: 32046 - protein, 16 aa, Homo Sapiens
QSISSPVLDAVPRTPS

SEQ ID NO: 32047 - protein, 16 aa, Homo Sapiens
SISSPVLDAVPRTPSR

SEQ ID NO: 32048 - protein, 16 aa, Homo Sapiens
ISSPVLDAVPRTPSRE

SEQ ID NO: 32049 - protein, 16 aa, Homo Sapiens
SSPVLDAVPRTPSRER

SEQ ID NO: 32050 - protein, 16 aa, Homo Sapiens
SPVLDAVPRTPSRERS

SEQ ID NO: 32051 - protein, 16 aa, Homo Sapiens
PVLDAVPRTPSRERSS

SEQ ID NO: 32052 - protein, 16 aa, Homo Sapiens
VLDAVPRTPSRERSSS

SEQ ID NO: 32053 - protein, 16 aa, Homo Sapiens
LDAVPRTPSRERSSSA

SEQ ID NO: 32054 - protein, 16 aa, Homo Sapiens
DAVPRTPSRERSSSAS

SEQ ID NO: 32055 - protein, 16 aa, Homo Sapiens
AVPRTPSRERSSSASS

SEQ ID NO: 32056 - protein, 16 aa, Homo Sapiens
VPRTPSRERSSSASSP

SEQ ID NO: 32057 - protein, 16 aa, Homo Sapiens
PRTPSRERSSSASSPE

SEQ ID NO: 32058 - protein, 16 aa, Homo Sapiens
RTPSRERSSSASSPEM

SEQ ID NO: 32059 - protein, 16 aa, Homo Sapiens
TPSRERSSSASSPEMK

SEQ ID NO: 32060 - protein, 16 aa, Homo Sapiens
PSRERSSSASSPEMKD

SEQ ID NO: 32061 - protein, 16 aa, Homo Sapiens
SRERSSSASSPEMKDG

SEQ ID NO: 32062 - protein, 16 aa, Homo Sapiens
RERSSSASSPEMKDGL

SEQ ID NO: 32063 - protein, 16 aa, Homo Sapiens
ERSSSASSPEMKDGLP

SEQ ID NO: 32064 - protein, 16 aa, Homo Sapiens
RSSSASSPEMKDGLPR

SEQ ID NO: 32065 - protein, 16 aa, Homo Sapiens
SSSASSPEMKDGLPRT

SEQ ID NO: 32066 - protein, 16 aa, Homo Sapiens
SSASSPEMKDGLPRTP

SEQ ID NO: 32067 - protein, 16 aa, Homo Sapiens
SASSPEMKDGLPRTPS

SEQ ID NO: 32068 - protein, 16 aa, Homo Sapiens
ASSPEMKDGLPRTPSR

SEQ ID NO: 32069 - protein, 16 aa, Homo Sapiens
SSPEMKDGLPRTPSRR

SEQ ID NO: 32070 - protein, 16 aa, Homo Sapiens
SPEMKDGLPRTPSRRS

SEQ ID NO: 32071 - protein, 16 aa, Homo Sapiens
PEMKDGLPRTPSRRSR

SEQ ID NO: 32072 - protein, 16 aa, Homo Sapiens
EMKDGLPRTPSRRSRS

SEQ ID NO: 32073 - protein, 16 aa, Homo Sapiens
MKDGLPRTPSRRSRSG

SEQ ID NO: 32074 - protein, 16 aa, Homo Sapiens
KDGLPRTPSRRSRSGS

SEQ ID NO: 32075 - protein, 16 aa, Homo Sapiens
DGLPRTPSRRSRSGSS

SEQ ID NO: 32076 - protein, 16 aa, Homo Sapiens
GLPRTPSRRSRSGSSP

SEQ ID NO: 32077 - protein, 16 aa, Homo Sapiens
LPRTPSRRSRSGSSPG

SEQ ID NO: 32078 - protein, 16 aa, Homo Sapiens
PRTPSRRSRSGSSPGL

SEQ ID NO: 32079 - protein, 16 aa, Homo Sapiens
RTPSRRSRSGSSPGLR

SEQ ID NO: 32080 - protein, 16 aa, Homo Sapiens
TPSRRSRSGSSPGLRD

SEQ ID NO: 32081 - protein, 16 aa, Homo Sapiens
PSRRSRSGSSPGLRDG

SEQ ID NO: 32082 - protein, 16 aa, Homo Sapiens
SRRSRSGSSPGLRDGS

SEQ ID NO: 32083 - protein, 16 aa, Homo Sapiens
RRSRSGSSPGLRDGSG

SEQ ID NO: 32084 - protein, 16 aa, Homo Sapiens
RSRSGSSPGLRDGSGT

SEQ ID NO: 32085 - protein, 16 aa, Homo Sapiens
SRSGSSPGLRDGSGTP

SEQ ID NO: 32086 - protein, 16 aa, Homo Sapiens
RSGSSPGLRDGSGTPS

SEQ ID NO: 32087 - protein, 16 aa, Homo Sapiens
SGSSPGLRDGSGTPSR

SEQ ID NO: 32088 - protein, 16 aa, Homo Sapiens
GSSPGLRDGSGTPSRH

SEQ ID NO: 32089 - protein, 16 aa, Homo Sapiens
SSPGLRDGSGTPSRHS

SEQ ID NO: 32090 - protein, 16 aa, Homo Sapiens
SPGLRDGSGTPSRHSL

SEQ ID NO: 32091 - protein, 16 aa, Homo Sapiens
PGLRDGSGTPSRHSLS

SEQ ID NO: 32092 - protein, 16 aa, Homo Sapiens
GLRDGSGTPSRHSLSG

SEQ ID NO: 32093 - protein, 16 aa, Homo Sapiens
LRDGSGTPSRHSLSGS

SEQ ID NO: 32094 - protein, 16 aa, Homo Sapiens
RDGSGTPSRHSLSGSS

SEQ ID NO: 32095 - protein, 16 aa, Homo Sapiens
DGSGTPSRHSLSGSSP

SEQ ID NO: 32096 - protein, 16 aa, Homo Sapiens
GSGTPSRHSLSGSSPG

SEQ ID NO: 32097 - protein, 16 aa, Homo Sapiens
SGTPSRHSLSGSSPGM

SEQ ID NO: 32098 - protein, 16 aa, Homo Sapiens
GTPSRHSLSGSSPGMK

SEQ ID NO: 32099 - protein, 16 aa, Homo Sapiens
TPSRHSLSGSSPGMKD

SEQ ID NO: 32100 - protein, 16 aa, Homo Sapiens
PSRHSLSGSSPGMKDI

SEQ ID NO: 32101 - protein, 16 aa, Homo Sapiens
SRHSLSGSSPGMKDIP

SEQ ID NO: 32102 - protein, 16 aa, Homo Sapiens
RHSLSGSSPGMKDIPR

SEQ ID NO: 32103 - protein, 16 aa, Homo Sapiens
HSLSGSSPGMKDIPRT

SEQ ID NO: 32104 - protein, 16 aa, Homo Sapiens
SLSGSSPGMKDIPRTP

SEQ ID NO: 32105 - protein, 16 aa, Homo Sapiens
LSGSSPGMKDIPRTPF

SEQ ID NO: 32106 - protein, 16 aa, Homo Sapiens
SGSSPGMKDIPRTPFR

SEQ ID NO: 32107 - protein, 16 aa, Homo Sapiens
GSSPGMKDIPRTPFRG

SEQ ID NO: 32108 - protein, 16 aa, Homo Sapiens
SSPGMKDIPRTPFRGR

SEQ ID NO: 32109 - protein, 16 aa, Homo Sapiens
SPGMKDIPRTPFRGRS

SEQ ID NO: 32110 - protein, 16 aa, Homo Sapiens
PGMKDIPRTPFRGRSE

SEQ ID NO: 32111 - protein, 16 aa, Homo Sapiens
GMKDIPRTPFRGRSEC

SEQ ID NO: 32112 - protein, 16 aa, Homo Sapiens
MKDIPRTPFRGRSECD

SEQ ID NO: 32113 - protein, 16 aa, Homo Sapiens
KDIPRTPFRGRSECDS

SEQ ID NO: 32114 - protein, 16 aa, Homo Sapiens
DIPRTPFRGRSECDSS

SEQ ID NO: 32115 - protein, 16 aa, Homo Sapiens
IPRTPFRGRSECDSSP

SEQ ID NO: 32116 - protein, 16 aa, Homo Sapiens
PRTPFRGRSECDSSPE

SEQ ID NO: 32117 - protein, 16 aa, Homo Sapiens
RTPFRGRSECDSSPEP

SEQ ID NO: 32118 - protein, 16 aa, Homo Sapiens
TPFRGRSECDSSPEPK

SEQ ID NO: 32119 - protein, 16 aa, Homo Sapiens
PFRGRSECDSSPEPKA

SEQ ID NO: 32120 - protein, 16 aa, Homo Sapiens
FRGRSECDSSPEPKAL

SEQ ID NO: 32121 - protein, 16 aa, Homo Sapiens
RGRSECDSSPEPKALP

SEQ ID NO: 32122 - protein, 16 aa, Homo Sapiens
GRSECDSSPEPKALPQ

SEQ ID NO: 32123 - protein, 16 aa, Homo Sapiens
RSECDSSPEPKALPQT

SEQ ID NO: 32124 - protein, 16 aa, Homo Sapiens
SECDSSPEPKALPQTP

SEQ ID NO: 32125 - protein, 16 aa, Homo Sapiens
ECDSSPEPKALPQTPR

SEQ ID NO: 32126 - protein, 16 aa, Homo Sapiens
CDSSPEPKALPQTPRP

SEQ ID NO: 32127 - protein, 16 aa, Homo Sapiens
DSSPEPKALPQTPRPR

SEQ ID NO: 32128 - protein, 16 aa, Homo Sapiens
SSPEPKALPQTPRPRS

SEQ ID NO: 32129 - protein, 16 aa, Homo Sapiens
SPEPKALPQTPRPRSR

SEQ ID NO: 32130 - protein, 16 aa, Homo Sapiens
PEPKALPQTPRPRSRS

SEQ ID NO: 32131 - protein, 16 aa, Homo Sapiens
EPKALPQTPRPRSRSP

SEQ ID NO: 32132 - protein, 16 aa, Homo Sapiens
PKALPQTPRPRSRSPS

SEQ ID NO: 32133 - protein, 16 aa, Homo Sapiens
KALPQTPRPRSRSPSS

SEQ ID NO: 32134 - protein, 16 aa, Homo Sapiens
ALPQTPRPRSRSPSSP

SEQ ID NO: 32135 - protein, 16 aa, Homo Sapiens
LPQTPRPRSRSPSSPE

SEQ ID NO: 32136 - protein, 16 aa, Homo Sapiens
PQTPRPRSRSPSSPEL

SEQ ID NO: 32137 - protein, 16 aa, Homo Sapiens
QTPRPRSRSPSSPELN

SEQ ID NO: 32138 - protein, 16 aa, Homo Sapiens
TPRPRSRSPSSPELNN

SEQ ID NO: 32139 - protein, 16 aa, Homo Sapiens
PRPRSRSPSSPELNNK

SEQ ID NO: 32140 - protein, 16 aa, Homo Sapiens
RPRSRSPSSPELNNKC

SEQ ID NO: 32141 - protein, 16 aa, Homo Sapiens
PRSRSPSSPELNNKCL

SEQ ID NO: 32142 - protein, 16 aa, Homo Sapiens
RSRSPSSPELNNKCLT

SEQ ID NO: 32143 - protein, 16 aa, Homo Sapiens
SRSPSSPELNNKCLTP

SEQ ID NO: 32144 - protein, 16 aa, Homo Sapiens
RSPSSPELNNKCLTPQ

SEQ ID NO: 32145 - protein, 16 aa, Homo Sapiens
SPSSPELNNKCLTPQR

SEQ ID NO: 32146 - protein, 16 aa, Homo Sapiens
PSSPELNNKCLTPQRE

SEQ ID NO: 32147 - protein, 16 aa, Homo Sapiens
SSPELNNKCLTPQRER

SEQ ID NO: 32148 - protein, 16 aa, Homo Sapiens
SPELNNKCLTPQRERS

SEQ ID NO: 32149 - protein, 16 aa, Homo Sapiens
PELNNKCLTPQRERSG

SEQ ID NO: 32150 - protein, 16 aa, Homo Sapiens
ELNNKCLTPQRERSGS

SEQ ID NO: 32151 - protein, 16 aa, Homo Sapiens
LNNKCLTPQRERSGSE

SEQ ID NO: 32152 - protein, 16 aa, Homo Sapiens
NNKCLTPQRERSGSES

SEQ ID NO: 32153 - protein, 16 aa, Homo Sapiens
NKCLTPQRERSGSESS

SEQ ID NO: 32154 - protein, 16 aa, Homo Sapiens
KCLTPQRERSGSESSV

SEQ ID NO: 32155 - protein, 16 aa, Homo Sapiens
CLTPQRERSGSESSVD

SEQ ID NO: 32156 - protein, 16 aa, Homo Sapiens
LTPQRERSGSESSVDQ

SEQ ID NO: 32157 - protein, 16 aa, Homo Sapiens
TPQRERSGSESSVDQK

SEQ ID NO: 32158 - protein, 16 aa, Homo Sapiens
PQRERSGSESSVDQKT

SEQ ID NO: 32159 - protein, 16 aa, Homo Sapiens
QRERSGSESSVDQKTV

SEQ ID NO: 32160 - protein, 16 aa, Homo Sapiens
RERSGSESSVDQKTVA

SEQ ID NO: 32161 - protein, 16 aa, Homo Sapiens
ERSGSESSVDQKTVAR

SEQ ID NO: 32162 - protein, 16 aa, Homo Sapiens
RSGSESSVDQKTVART

SEQ ID NO: 32163 - protein, 16 aa, Homo Sapiens
SGSESSVDQKTVARTP

SEQ ID NO: 32164 - protein, 16 aa, Homo Sapiens
GSESSVDQKTVARTPL

SEQ ID NO: 32165 - protein, 16 aa, Homo Sapiens
SESSVDQKTVARTPLG

SEQ ID NO: 32166 - protein, 16 aa, Homo Sapiens
ESSVDQKTVARTPLGQ

SEQ ID NO: 32167 - protein, 16 aa, Homo Sapiens
SSVDQKTVARTPLGQR

SEQ ID NO: 32168 - protein, 16 aa, Homo Sapiens
SVDQKTVARTPLGQRS

SEQ ID NO: 32169 - protein, 16 aa, Homo Sapiens
VDQKTVARTPLGQRSR

SEQ ID NO: 32170 - protein, 16 aa, Homo Sapiens
DQKTVARTPLGQRSRS

SEQ ID NO: 32171 - protein, 16 aa, Homo Sapiens
QKTVARTPLGQRSRSG

SEQ ID NO: 32172 - protein, 16 aa, Homo Sapiens
KTVARTPLGQRSRSGS

SEQ ID NO: 32173 - protein, 16 aa, Homo Sapiens
TVARTPLGQRSRSGSS

SEQ ID NO: 32174 - protein, 16 aa, Homo Sapiens
VARTPLGQRSRSGSSQ

SEQ ID NO: 32175 - protein, 16 aa, Homo Sapiens
ARTPLGQRSRSGSSQE

SEQ ID NO: 32176 - protein, 16 aa, Homo Sapiens
RTPLGQRSRSGSSQEL

SEQ ID NO: 32177 - protein, 16 aa, Homo Sapiens
TPLGQRSRSGSSQELD

SEQ ID NO: 32178 - protein, 16 aa, Homo Sapiens
PLGQRSRSGSSQELDV

SEQ ID NO: 32179 - protein, 16 aa, Homo Sapiens
LGQRSRSGSSQELDVK

SEQ ID NO: 32180 - protein, 16 aa, Homo Sapiens
GQRSRSGSSQELDVKP

SEQ ID NO: 32181 - protein, 16 aa, Homo Sapiens
QRSRSGSSQELDVKPS

SEQ ID NO: 32182 - protein, 16 aa, Homo Sapiens
RSRSGSSQELDVKPSA

SEQ ID NO: 32183 - protein, 16 aa, Homo Sapiens
SRSGSSQELDVKPSAS

SEQ ID NO: 32184 - protein, 16 aa, Homo Sapiens
RSGSSQELDVKPSASP

SEQ ID NO: 32185 - protein, 16 aa, Homo Sapiens
SGSSQELDVKPSASPQ

SEQ ID NO: 32186 - protein, 16 aa, Homo Sapiens
GSSQELDVKPSASPQE

SEQ ID NO: 32187 - protein, 16 aa, Homo Sapiens
SSQELDVKPSASPQER

SEQ ID NO: 32188 - protein, 16 aa, Homo Sapiens
SQELDVKPSASPQERS

SEQ ID NO: 32189 - protein, 16 aa, Homo Sapiens
QELDVKPSASPQERSE

SEQ ID NO: 32190 - protein, 16 aa, Homo Sapiens
ELDVKPSASPQERSES

SEQ ID NO: 32191 - protein, 16 aa, Homo Sapiens
LDVKPSASPQERSESD

SEQ ID NO: 32192 - protein, 16 aa, Homo Sapiens
DVKPSASPQERSESDS

SEQ ID NO: 32193 - protein, 16 aa, Homo Sapiens
VKPSASPQERSESDSS

SEQ ID NO: 32194 - protein, 16 aa, Homo Sapiens
KPSASPQERSESDSSP

SEQ ID NO: 32195 - protein, 16 aa, Homo Sapiens
PSASPQERSESDSSPD

SEQ ID NO: 32196 - protein, 16 aa, Homo Sapiens
SASPQERSESDSSPDS

SEQ ID NO: 32197 - protein, 16 aa, Homo Sapiens
ASPQERSESDSSPDSK

SEQ ID NO: 32198 - protein, 16 aa, Homo Sapiens
SPQERSESDSSPDSKA

SEQ ID NO: 32199 - protein, 16 aa, Homo Sapiens
PQERSESDSSPDSKAK

SEQ ID NO: 32200 - protein, 16 aa, Homo Sapiens
QERSESDSSPDSKAKT

SEQ ID NO: 32201 - protein, 16 aa, Homo Sapiens
ERSESDSSPDSKAKTR

SEQ ID NO: 32202 - protein, 16 aa, Homo Sapiens
RSESDSSPDSKAKTRT

SEQ ID NO: 32203 - protein, 16 aa, Homo Sapiens
SESDSSPDSKAKTRTP

SEQ ID NO: 32204 - protein, 16 aa, Homo Sapiens
ESDSSPDSKAKTRTPL

SEQ ID NO: 32205 - protein, 16 aa, Homo Sapiens
SDSSPDSKAKTRTPLR

SEQ ID NO: 32206 - protein, 16 aa, Homo Sapiens
DSSPDSKAKTRTPLRQ

SEQ ID NO: 32207 - protein, 16 aa, Homo Sapiens
SSPDSKAKTRTPLRQR

SEQ ID NO: 32208 - protein, 16 aa, Homo Sapiens
SPDSKAKTRTPLRQRS

SEQ ID NO: 32209 - protein, 16 aa, Homo Sapiens
PDSKAKTRTPLRQRSR

SEQ ID NO: 32210 - protein, 16 aa, Homo Sapiens
DSKAKTRTPLRQRSRS

SEQ ID NO: 32211 - protein, 16 aa, Homo Sapiens
SKAKTRTPLRQRSRSG

SEQ ID NO: 32212 - protein, 16 aa, Homo Sapiens
KAKTRTPLRQRSRSGS

SEQ ID NO: 32213 - protein, 16 aa, Homo Sapiens
AKTRTPLRQRSRSGSS

SEQ ID NO: 32214 - protein, 16 aa, Homo Sapiens
KTRTPLRQRSRSGSSP

SEQ ID NO: 32215 - protein, 16 aa, Homo Sapiens
TRTPLRQRSRSGSSPE

SEQ ID NO: 32216 - protein, 16 aa, Homo Sapiens
RTPLRQRSRSGSSPEV

SEQ ID NO: 32217 - protein, 16 aa, Homo Sapiens
TPLRQRSRSGSSPEVD

SEQ ID NO: 32218 - protein, 16 aa, Homo Sapiens
PLRQRSRSGSSPEVDS

SEQ ID NO: 32219 - protein, 16 aa, Homo Sapiens
LRQRSRSGSSPEVDSK

SEQ ID NO: 32220 - protein, 16 aa, Homo Sapiens
RQRSRSGSSPEVDSKS

SEQ ID NO: 32221 - protein, 16 aa, Homo Sapiens
QRSRSGSSPEVDSKSR

SEQ ID NO: 32222 - protein, 16 aa, Homo Sapiens
RSRSGSSPEVDSKSRL

SEQ ID NO: 32223 - protein, 16 aa, Homo Sapiens
SRSGSSPEVDSKSRLS

SEQ ID NO: 32224 - protein, 16 aa, Homo Sapiens
RSGSSPEVDSKSRLSP

SEQ ID NO: 32225 - protein, 16 aa, Homo Sapiens
SGSSPEVDSKSRLSPR

SEQ ID NO: 32226 - protein, 16 aa, Homo Sapiens
GSSPEVDSKSRLSPRR

SEQ ID NO: 32227 - protein, 16 aa, Homo Sapiens
SSPEVDSKSRLSPRRS

SEQ ID NO: 32228 - protein, 16 aa, Homo Sapiens
SPEVDSKSRLSPRRSR

SEQ ID NO: 32229 - protein, 16 aa, Homo Sapiens
PEVDSKSRLSPRRSRS

SEQ ID NO: 32230 - protein, 16 aa, Homo Sapiens
EVDSKSRLSPRRSRSG

SEQ ID NO: 32231 - protein, 16 aa, Homo Sapiens
VDSKSRLSPRRSRSGS

SEQ ID NO: 32232 - protein, 16 aa, Homo Sapiens
DSKSRLSPRRSRSGSS

SEQ ID NO: 32233 - protein, 16 aa, Homo Sapiens
SKSRLSPRRSRSGSSP

SEQ ID NO: 32234 - protein, 16 aa, Homo Sapiens
KSRLSPRRSRSGSSPE

SEQ ID NO: 32235 - protein, 16 aa, Homo Sapiens
SRLSPRRSRSGSSPEV

SEQ ID NO: 32236 - protein, 16 aa, Homo Sapiens
RLSPRRSRSGSSPEVK

SEQ ID NO: 32237 - protein, 16 aa, Homo Sapiens
LSPRRSRSGSSPEVKD

SEQ ID NO: 32238 - protein, 16 aa, Homo Sapiens
SPRRSRSGSSPEVKDK

SEQ ID NO: 32239 - protein, 16 aa, Homo Sapiens
PRRSRSGSSPEVKDKP

SEQ ID NO: 32240 - protein, 16 aa, Homo Sapiens
RRSRSGSSPEVKDKPR

SEQ ID NO: 32241 - protein, 16 aa, Homo Sapiens
RSRSGSSPEVKDKPRA

SEQ ID NO: 32242 - protein, 16 aa, Homo Sapiens
SRSGSSPEVKDKPRAA

SEQ ID NO: 32243 - protein, 16 aa, Homo Sapiens
RSGSSPEVKDKPRAAP

SEQ ID NO: 32244 - protein, 16 aa, Homo Sapiens
SGSSPEVKDKPRAAPR

SEQ ID NO: 32245 - protein, 16 aa, Homo Sapiens
GSSPEVKDKPRAAPRA

SEQ ID NO: 32246 - protein, 16 aa, Homo Sapiens
SSPEVKDKPRAAPRAQ

SEQ ID NO: 32247 - protein, 16 aa, Homo Sapiens
SPEVKDKPRAAPRAQS

SEQ ID NO: 32248 - protein, 16 aa, Homo Sapiens
PEVKDKPRAAPRAQSG

SEQ ID NO: 32249 - protein, 16 aa, Homo Sapiens
EVKDKPRAAPRAQSGS

SEQ ID NO: 32250 - protein, 16 aa, Homo Sapiens
VKDKPRAAPRAQSGSD

SEQ ID NO: 32251 - protein, 16 aa, Homo Sapiens
KDKPRAAPRAQSGSDS

SEQ ID NO: 32252 - protein, 16 aa, Homo Sapiens
DKPRAAPRAQSGSDSS

SEQ ID NO: 32253 - protein, 16 aa, Homo Sapiens
KPRAAPRAQSGSDSSP

SEQ ID NO: 32254 - protein, 16 aa, Homo Sapiens
PRAAPRAQSGSDSSPE

SEQ ID NO: 32255 - protein, 16 aa, Homo Sapiens
RAAPRAQSGSDSSPEP

SEQ ID NO: 32256 - protein, 16 aa, Homo Sapiens
AAPRAQSGSDSSPEPK

SEQ ID NO: 32257 - protein, 16 aa, Homo Sapiens
APRAQSGSDSSPEPKA

SEQ ID NO: 32258 - protein, 16 aa, Homo Sapiens
PRAQSGSDSSPEPKAP

SEQ ID NO: 32259 - protein, 16 aa, Homo Sapiens
RAQSGSDSSPEPKAPA

SEQ ID NO: 32260 - protein, 16 aa, Homo Sapiens
AQSGSDSSPEPKAPAP

SEQ ID NO: 32261 - protein, 16 aa, Homo Sapiens
QSGSDSSPEPKAPAPR

SEQ ID NO: 32262 - protein, 16 aa, Homo Sapiens
SGSDSSPEPKAPAPRA

SEQ ID NO: 32263 - protein, 16 aa, Homo Sapiens
GSDSSPEPKAPAPRAL

SEQ ID NO: 32264 - protein, 16 aa, Homo Sapiens
SDSSPEPKAPAPRALP

SEQ ID NO: 32265 - protein, 16 aa, Homo Sapiens
DSSPEPKAPAPRALPR

SEQ ID NO: 32266 - protein, 16 aa, Homo Sapiens
SSPEPKAPAPRALPRR

SEQ ID NO: 32267 - protein, 16 aa, Homo Sapiens
SPEPKAPAPRALPRRS

SEQ ID NO: 32268 - protein, 16 aa, Homo Sapiens
PEPKAPAPRALPRRSR

SEQ ID NO: 32269 - protein, 16 aa, Homo Sapiens
EPKAPAPRALPRRSRS

SEQ ID NO: 32270 - protein, 16 aa, Homo Sapiens
PKAPAPRALPRRSRSG

SEQ ID NO: 32271 - protein, 16 aa, Homo Sapiens
KAPAPRALPRRSRSGS

SEQ ID NO: 32272 - protein, 16 aa, Homo Sapiens
APAPRALPRRSRSGSS

SEQ ID NO: 32273 - protein, 16 aa, Homo Sapiens
PAPRALPRRSRSGSSS

SEQ ID NO: 32274 - protein, 16 aa, Homo Sapiens
APRALPRRSRSGSSSK

SEQ ID NO: 32275 - protein, 16 aa, Homo Sapiens
PRALPRRSRSGSSSKG

SEQ ID NO: 32276 - protein, 16 aa, Homo Sapiens
RALPRRSRSGSSSKGR

SEQ ID NO: 32277 - protein, 16 aa, Homo Sapiens
ALPRRSRSGSSSKGRG

SEQ ID NO: 32278 - protein, 16 aa, Homo Sapiens
LPRRSRSGSSSKGRGP

SEQ ID NO: 32279 - protein, 16 aa, Homo Sapiens
PRRSRSGSSSKGRGPS

SEQ ID NO: 32280 - protein, 16 aa, Homo Sapiens
RRSRSGSSSKGRGPSP

SEQ ID NO: 32281 - protein, 16 aa, Homo Sapiens
RSRSGSSSKGRGPSPE

SEQ ID NO: 32282 - protein, 16 aa, Homo Sapiens
SRSGSSSKGRGPSPEG

SEQ ID NO: 32283 - protein, 16 aa, Homo Sapiens
RSGSSSKGRGPSPEGS

SEQ ID NO: 32284 - protein, 16 aa, Homo Sapiens
SGSSSKGRGPSPEGSS

SEQ ID NO: 32285 - protein, 16 aa, Homo Sapiens
GSSSKGRGPSPEGSSS

SEQ ID NO: 32286 - protein, 16 aa, Homo Sapiens
SSSKGRGPSPEGSSST

SEQ ID NO: 32287 - protein, 16 aa, Homo Sapiens
SSKGRGPSPEGSSSTE

SEQ ID NO: 32288 - protein, 16 aa, Homo Sapiens
SKGRGPSPEGSSSTES

SEQ ID NO: 32289 - protein, 16 aa, Homo Sapiens
KGRGPSPEGSSSTESS

SEQ ID NO: 32290 - protein, 16 aa, Homo Sapiens
GRGPSPEGSSSTESSP

SEQ ID NO: 32291 - protein, 16 aa, Homo Sapiens
RGPSPEGSSSTESSPE

SEQ ID NO: 32292 - protein, 16 aa, Homo Sapiens
GPSPEGSSSTESSPEH

SEQ ID NO: 32293 - protein, 16 aa, Homo Sapiens
PSPEGSSSTESSPEHP

SEQ ID NO: 32294 - protein, 16 aa, Homo Sapiens
SPEGSSSTESSPEHPP

SEQ ID NO: 32295 - protein, 16 aa, Homo Sapiens
PEGSSSTESSPEHPPK

SEQ ID NO: 32296 - protein, 16 aa, Homo Sapiens
EGSSSTESSPEHPPKS

SEQ ID NO: 32297 - protein, 16 aa, Homo Sapiens
GSSSTESSPEHPPKSR

SEQ ID NO: 32298 - protein, 16 aa, Homo Sapiens
SSSTESSPEHPPKSRT

SEQ ID NO: 32299 - protein, 16 aa, Homo Sapiens
SSTESSPEHPPKSRTA

SEQ ID NO: 32300 - protein, 16 aa, Homo Sapiens
STESSPEHPPKSRTAR

SEQ ID NO: 32301 - protein, 16 aa, Homo Sapiens
TESSPEHPPKSRTARR

SEQ ID NO: 32302 - protein, 16 aa, Homo Sapiens
ESSPEHPPKSRTARRG

SEQ ID NO: 32303 - protein, 16 aa, Homo Sapiens
SSPEHPPKSRTARRGS

SEQ ID NO: 32304 - protein, 16 aa, Homo Sapiens
SPEHPPKSRTARRGSR

SEQ ID NO: 32305 - protein, 16 aa, Homo Sapiens
PEHPPKSRTARRGSRS

SEQ ID NO: 32306 - protein, 16 aa, Homo Sapiens
EHPPKSRTARRGSRSS

SEQ ID NO: 32307 - protein, 16 aa, Homo Sapiens
HPPKSRTARRGSRSSP

SEQ ID NO: 32308 - protein, 16 aa, Homo Sapiens
PPKSRTARRGSRSSPE

SEQ ID NO: 32309 - protein, 16 aa, Homo Sapiens
PKSRTARRGSRSSPEP

SEQ ID NO: 32310 - protein, 16 aa, Homo Sapiens
KSRTARRGSRSSPEPK

SEQ ID NO: 32311 - protein, 16 aa, Homo Sapiens
SRTARRGSRSSPEPKT

SEQ ID NO: 32312 - protein, 16 aa, Homo Sapiens
RTARRGSRSSPEPKTK

SEQ ID NO: 32313 - protein, 16 aa, Homo Sapiens
TARRGSRSSPEPKTKS

SEQ ID NO: 32314 - protein, 16 aa, Homo Sapiens
ARRGSRSSPEPKTKSR

SEQ ID NO: 32315 - protein, 16 aa, Homo Sapiens
RRGSRSSPEPKTKSRT

SEQ ID NO: 32316 - protein, 16 aa, Homo Sapiens
RGSRSSPEPKTKSRTP

SEQ ID NO: 32317 - protein, 16 aa, Homo Sapiens
GSRSSPEPKTKSRTPP

SEQ ID NO: 32318 - protein, 16 aa, Homo Sapiens
SRSSPEPKTKSRTPPR

SEQ ID NO: 32319 - protein, 16 aa, Homo Sapiens
RSSPEPKTKSRTPPRR

SEQ ID NO: 32320 - protein, 16 aa, Homo Sapiens
SSPEPKTKSRTPPRRR

SEQ ID NO: 32321 - protein, 16 aa, Homo Sapiens
SPEPKTKSRTPPRRRS

SEQ ID NO: 32322 - protein, 16 aa, Homo Sapiens
PEPKTKSRTPPRRRSS

SEQ ID NO: 32323 - protein, 16 aa, Homo Sapiens
EPKTKSRTPPRRRSSR

SEQ ID NO: 32324 - protein, 16 aa, Homo Sapiens
PKTKSRTPPRRRSSRS

SEQ ID NO: 32325 - protein, 16 aa, Homo Sapiens
KTKSRTPPRRRSSRSS

SEQ ID NO: 32326 - protein, 16 aa, Homo Sapiens
TKSRTPPRRRSSRSSP

SEQ ID NO: 32327 - protein, 16 aa, Homo Sapiens
KSRTPPRRRSSRSSPE

SEQ ID NO: 32328 - protein, 16 aa, Homo Sapiens
SRTPPRRRSSRSSPEL

SEQ ID NO: 32329 - protein, 16 aa, Homo Sapiens
RTPPRRRSSRSSPELT

SEQ ID NO: 32330 - protein, 16 aa, Homo Sapiens
TPPRRRSSRSSPELTR

SEQ ID NO: 32331 - protein, 16 aa, Homo Sapiens
PPRRRSSRSSPELTRK

SEQ ID NO: 32332 - protein, 16 aa, Homo Sapiens
PRRRSSRSSPELTRKA

SEQ ID NO: 32333 - protein, 16 aa, Homo Sapiens
RRRSSRSSPELTRKAR

SEQ ID NO: 32334 - protein, 16 aa, Homo Sapiens
RRSSRSSPELTRKARL

SEQ ID NO: 32335 - protein, 16 aa, Homo Sapiens
RSSRSSPELTRKARLS

SEQ ID NO: 32336 - protein, 16 aa, Homo Sapiens
SSRSSPELTRKARLSR

SEQ ID NO: 32337 - protein, 16 aa, Homo Sapiens
SRSSPELTRKARLSRR

SEQ ID NO: 32338 - protein, 16 aa, Homo Sapiens
RSSPELTRKARLSRRS

SEQ ID NO: 32339 - protein, 16 aa, Homo Sapiens
SSPELTRKARLSRRSR

SEQ ID NO: 32340 - protein, 16 aa, Homo Sapiens
SPELTRKARLSRRSRS

SEQ ID NO: 32341 - protein, 16 aa, Homo Sapiens
PELTRKARLSRRSRSA

SEQ ID NO: 32342 - protein, 16 aa, Homo Sapiens
ELTRKARLSRRSRSAS

SEQ ID NO: 32343 - protein, 16 aa, Homo Sapiens
LTRKARLSRRSRSASS

SEQ ID NO: 32344 - protein, 16 aa, Homo Sapiens
TRKARLSRRSRSASSS

SEQ ID NO: 32345 - protein, 16 aa, Homo Sapiens
RKARLSRRSRSASSSP

SEQ ID NO: 32346 - protein, 16 aa, Homo Sapiens
KARLSRRSRSASSSPE

SEQ ID NO: 32347 - protein, 16 aa, Homo Sapiens
ARLSRRSRSASSSPET

SEQ ID NO: 32348 - protein, 16 aa, Homo Sapiens
RLSRRSRSASSSPETR

SEQ ID NO: 32349 - protein, 16 aa, Homo Sapiens
LSRRSRSASSSPETRS

SEQ ID NO: 32350 - protein, 16 aa, Homo Sapiens
SRRSRSASSSPETRSR

SEQ ID NO: 32351 - protein, 16 aa, Homo Sapiens
RRSRSASSSPETRSRT

SEQ ID NO: 32352 - protein, 16 aa, Homo Sapiens
RSRSASSSPETRSRTP

SEQ ID NO: 32353 - protein, 16 aa, Homo Sapiens
SRSASSSPETRSRTPP

SEQ ID NO: 32354 - protein, 16 aa, Homo Sapiens
RSASSSPETRSRTPPR

SEQ ID NO: 32355 - protein, 16 aa, Homo Sapiens
SASSSPETRSRTPPRH

SEQ ID NO: 32356 - protein, 16 aa, Homo Sapiens
ASSSPETRSRTPPRHR

SEQ ID NO: 32357 - protein, 16 aa, Homo Sapiens
SSSPETRSRTPPRHRR

SEQ ID NO: 32358 - protein, 16 aa, Homo Sapiens
SSPETRSRTPPRHRRS

SEQ ID NO: 32359 - protein, 16 aa, Homo Sapiens
SPETRSRTPPRHRRSP

SEQ ID NO: 32360 - protein, 16 aa, Homo Sapiens
PETRSRTPPRHRRSPS

SEQ ID NO: 32361 - protein, 16 aa, Homo Sapiens
ETRSRTPPRHRRSPSV

SEQ ID NO: 32362 - protein, 16 aa, Homo Sapiens
TRSRTPPRHRRSPSVS

SEQ ID NO: 32363 - protein, 16 aa, Homo Sapiens
RSRTPPRHRRSPSVSS

SEQ ID NO: 32364 - protein, 16 aa, Homo Sapiens
SRTPPRHRRSPSVSSP

SEQ ID NO: 32365 - protein, 16 aa, Homo Sapiens
RTPPRHRRSPSVSSPE

SEQ ID NO: 32366 - protein, 16 aa, Homo Sapiens
TPPRHRRSPSVSSPEP

SEQ ID NO: 32367 - protein, 16 aa, Homo Sapiens
PPRHRRSPSVSSPEPA

SEQ ID NO: 32368 - protein, 16 aa, Homo Sapiens
PRHRRSPSVSSPEPAE

SEQ ID NO: 32369 - protein, 16 aa, Homo Sapiens
RHRRSPSVSSPEPAEK

SEQ ID NO: 32370 - protein, 16 aa, Homo Sapiens
HRRSPSVSSPEPAEKS

SEQ ID NO: 32371 - protein, 16 aa, Homo Sapiens
RRSPSVSSPEPAEKSR

SEQ ID NO: 32372 - protein, 16 aa, Homo Sapiens
RSPSVSSPEPAEKSRS

SEQ ID NO: 32373 - protein, 16 aa, Homo Sapiens
SPSVSSPEPAEKSRSS

SEQ ID NO: 32374 - protein, 16 aa, Homo Sapiens
PSVSSPEPAEKSRSSR

SEQ ID NO: 32375 - protein, 16 aa, Homo Sapiens
SVSSPEPAEKSRSSRR

SEQ ID NO: 32376 - protein, 16 aa, Homo Sapiens
VSSPEPAEKSRSSRRR

SEQ ID NO: 32377 - protein, 16 aa, Homo Sapiens
SSPEPAEKSRSSRRRR

SEQ ID NO: 32378 - protein, 16 aa, Homo Sapiens
SPEPAEKSRSSRRRRS

SEQ ID NO: 32379 - protein, 16 aa, Homo Sapiens
PEPAEKSRSSRRRRSA

SEQ ID NO: 32380 - protein, 16 aa, Homo Sapiens
EPAEKSRSSRRRRSAS

SEQ ID NO: 32381 - protein, 16 aa, Homo Sapiens
PAEKSRSSRRRRSASS

SEQ ID NO: 32382 - protein, 16 aa, Homo Sapiens
AEKSRSSRRRRSASSP

SEQ ID NO: 32383 - protein, 16 aa, Homo Sapiens
EKSRSSRRRRSASSPR

SEQ ID NO: 32384 - protein, 16 aa, Homo Sapiens
KSRSSRRRRSASSPRT

SEQ ID NO: 32385 - protein, 16 aa, Homo Sapiens
SRSSRRRRSASSPRTK

SEQ ID NO: 32386 - protein, 16 aa, Homo Sapiens
RSSRRRRSASSPRTKT

SEQ ID NO: 32387 - protein, 16 aa, Homo Sapiens
SSRRRRSASSPRTKTT

SEQ ID NO: 32388 - protein, 16 aa, Homo Sapiens
SRRRRSASSPRTKTTS

SEQ ID NO: 32389 - protein, 16 aa, Homo Sapiens
RRRRSASSPRTKTTSR

SEQ ID NO: 32390 - protein, 16 aa, Homo Sapiens
RRRSASSPRTKTTSRR

SEQ ID NO: 32391 - protein, 16 aa, Homo Sapiens
RRSASSPRTKTTSRRG

SEQ ID NO: 32392 - protein, 16 aa, Homo Sapiens
RSASSPRTKTTSRRGR

SEQ ID NO: 32393 - protein, 16 aa, Homo Sapiens
SASSPRTKTTSRRGRS

SEQ ID NO: 32394 - protein, 16 aa, Homo Sapiens
ASSPRTKTTSRRGRSP

SEQ ID NO: 32395 - protein, 16 aa, Homo Sapiens
SSPRTKTTSRRGRSPS

SEQ ID NO: 32396 - protein, 16 aa, Homo Sapiens
SPRTKTTSRRGRSPSP

SEQ ID NO: 32397 - protein, 16 aa, Homo Sapiens
PRTKTTSRRGRSPSPK

SEQ ID NO: 32398 - protein, 16 aa, Homo Sapiens
RTKTTSRRGRSPSPKP

SEQ ID NO: 32399 - protein, 16 aa, Homo Sapiens
TKTTSRRGRSPSPKPR

SEQ ID NO: 32400 - protein, 16 aa, Homo Sapiens
KTTSRRGRSPSPKPRG

SEQ ID NO: 32401 - protein, 16 aa, Homo Sapiens
TTSRRGRSPSPKPRGL

SEQ ID NO: 32402 - protein, 16 aa, Homo Sapiens
TSRRGRSPSPKPRGLQ

SEQ ID NO: 32403 - protein, 16 aa, Homo Sapiens
SRRGRSPSPKPRGLQR

SEQ ID NO: 32404 - protein, 16 aa, Homo Sapiens
RRGRSPSPKPRGLQRS

SEQ ID NO: 32405 - protein, 16 aa, Homo Sapiens
RGRSPSPKPRGLQRSR

SEQ ID NO: 32406 - protein, 16 aa, Homo Sapiens
GRSPSPKPRGLQRSRS

SEQ ID NO: 32407 - protein, 16 aa, Homo Sapiens
RSPSPKPRGLQRSRSR

SEQ ID NO: 32408 - protein, 16 aa, Homo Sapiens
SPSPKPRGLQRSRSRS

SEQ ID NO: 32409 - protein, 16 aa, Homo Sapiens
PSPKPRGLQRSRSRSR

SEQ ID NO: 32410 - protein, 16 aa, Homo Sapiens
SPKPRGLQRSRSRSRR

SEQ ID NO: 32411 - protein, 16 aa, Homo Sapiens
PKPRGLQRSRSRSRRE

SEQ ID NO: 32412 - protein, 16 aa, Homo Sapiens
KPRGLQRSRSRSRREK

SEQ ID NO: 32413 - protein, 16 aa, Homo Sapiens
PRGLQRSRSRSRREKT

SEQ ID NO: 32414 - protein, 16 aa, Homo Sapiens
RGLQRSRSRSRREKTR

SEQ ID NO: 32415 - protein, 16 aa, Homo Sapiens
GLQRSRSRSRREKTRT

SEQ ID NO: 32416 - protein, 16 aa, Homo Sapiens
LQRSRSRSRREKTRTT

SEQ ID NO: 32417 - protein, 16 aa, Homo Sapiens
QRSRSRSRREKTRTTR

SEQ ID NO: 32418 - protein, 16 aa, Homo Sapiens
RSRSRSRREKTRTTRR

SEQ ID NO: 32419 - protein, 16 aa, Homo Sapiens
SRSRSRREKTRTTRRR

SEQ ID NO: 32420 - protein, 16 aa, Homo Sapiens
RSRSRREKTRTTRRRD

SEQ ID NO: 32421 - protein, 16 aa, Homo Sapiens
SRSRREKTRTTRRRDR

SEQ ID NO: 32422 - protein, 16 aa, Homo Sapiens
RSRREKTRTTRRRDRS

SEQ ID NO: 32423 - protein, 16 aa, Homo Sapiens
SRREKTRTTRRRDRSG

SEQ ID NO: 32424 - protein, 16 aa, Homo Sapiens
RREKTRTTRRRDRSGS

SEQ ID NO: 32425 - protein, 16 aa, Homo Sapiens
REKTRTTRRRDRSGSS

SEQ ID NO: 32426 - protein, 16 aa, Homo Sapiens
EKTRTTRRRDRSGSSQ

SEQ ID NO: 32427 - protein, 16 aa, Homo Sapiens
KTRTTRRRDRSGSSQS

SEQ ID NO: 32428 - protein, 16 aa, Homo Sapiens
TRTTRRRDRSGSSQST

SEQ ID NO: 32429 - protein, 16 aa, Homo Sapiens
RTTRRRDRSGSSQSTS

SEQ ID NO: 32430 - protein, 16 aa, Homo Sapiens
TTRRRDRSGSSQSTSR

SEQ ID NO: 32431 - protein, 16 aa, Homo Sapiens
TRRRDRSGSSQSTSRR

SEQ ID NO: 32432 - protein, 16 aa, Homo Sapiens
RRRDRSGSSQSTSRRR

SEQ ID NO: 32433 - protein, 16 aa, Homo Sapiens
RRDRSGSSQSTSRRRQ

SEQ ID NO: 32434 - protein, 16 aa, Homo Sapiens
RDRSGSSQSTSRRRQR

SEQ ID NO: 32435 - protein, 16 aa, Homo Sapiens
DRSGSSQSTSRRRQRS

SEQ ID NO: 32436 - protein, 16 aa, Homo Sapiens
RSGSSQSTSRRRQRSR

SEQ ID NO: 32437 - protein, 16 aa, Homo Sapiens
SGSSQSTSRRRQRSRS

SEQ ID NO: 32438 - protein, 16 aa, Homo Sapiens
GSSQSTSRRRQRSRSR

SEQ ID NO: 32439 - protein, 16 aa, Homo Sapiens
SSQSTSRRRQRSRSRS

SEQ ID NO: 32440 - protein, 16 aa, Homo Sapiens
SQSTSRRRQRSRSRSR

SEQ ID NO: 32441 - protein, 16 aa, Homo Sapiens
QSTSRRRQRSRSRSRV

SEQ ID NO: 32442 - protein, 16 aa, Homo Sapiens
STSRRRQRSRSRSRVT

SEQ ID NO: 32443 - protein, 16 aa, Homo Sapiens
TSRRRQRSRSRSRVTR

SEQ ID NO: 32444 - protein, 16 aa, Homo Sapiens
SRRRQRSRSRSRVTRR

SEQ ID NO: 32445 - protein, 16 aa, Homo Sapiens
RRRQRSRSRSRVTRRR

SEQ ID NO: 32446 - protein, 16 aa, Homo Sapiens
RRQRSRSRSRVTRRRR

SEQ ID NO: 32447 - protein, 16 aa, Homo Sapiens
RQRSRSRSRVTRRRRG

SEQ ID NO: 32448 - protein, 16 aa, Homo Sapiens
QRSRSRSRVTRRRRGG

SEQ ID NO: 32449 - protein, 16 aa, Homo Sapiens
RSRSRSRVTRRRRGGS

SEQ ID NO: 32450 - protein, 16 aa, Homo Sapiens
SRSRSRVTRRRRGGSG

SEQ ID NO: 32451 - protein, 16 aa, Homo Sapiens
RSRSRVTRRRRGGSGY

SEQ ID NO: 32452 - protein, 16 aa, Homo Sapiens
SRSRVTRRRRGGSGYH

SEQ ID NO: 32453 - protein, 16 aa, Homo Sapiens
RSRVTRRRRGGSGYHS

SEQ ID NO: 32454 - protein, 16 aa, Homo Sapiens
SRVTRRRRGGSGYHSR

SEQ ID NO: 32455 - protein, 16 aa, Homo Sapiens
RVTRRRRGGSGYHSRS

SEQ ID NO: 32456 - protein, 16 aa, Homo Sapiens
VTRRRRGGSGYHSRSP

SEQ ID NO: 32457 - protein, 16 aa, Homo Sapiens
TRRRRGGSGYHSRSPA

SEQ ID NO: 32458 - protein, 16 aa, Homo Sapiens
RRRRGGSGYHSRSPAR

SEQ ID NO: 32459 - protein, 16 aa, Homo Sapiens
RRRGGSGYHSRSPARQ

SEQ ID NO: 32460 - protein, 16 aa, Homo Sapiens
RRGGSGYHSRSPARQE

SEQ ID NO: 32461 - protein, 16 aa, Homo Sapiens
RGGSGYHSRSPARQES

SEQ ID NO: 32462 - protein, 16 aa, Homo Sapiens
GGSGYHSRSPARQESS

SEQ ID NO: 32463 - protein, 16 aa, Homo Sapiens
GSGYHSRSPARQESSR

SEQ ID NO: 32464 - protein, 16 aa, Homo Sapiens
SGYHSRSPARQESSRT

SEQ ID NO: 32465 - protein, 16 aa, Homo Sapiens
GYHSRSPARQESSRTS

SEQ ID NO: 32466 - protein, 16 aa, Homo Sapiens
YHSRSPARQESSRTSS

SEQ ID NO: 32467 - protein, 16 aa, Homo Sapiens
HSRSPARQESSRTSSR

SEQ ID NO: 32468 - protein, 16 aa, Homo Sapiens
SRSPARQESSRTSSRR

SEQ ID NO: 32469 - protein, 16 aa, Homo Sapiens
RSPARQESSRTSSRRR

SEQ ID NO: 32470 - protein, 16 aa, Homo Sapiens
SPARQESSRTSSRRRR

SEQ ID NO: 32471 - protein, 16 aa, Homo Sapiens
PARQESSRTSSRRRRG

SEQ ID NO: 32472 - protein, 16 aa, Homo Sapiens
ARQESSRTSSRRRRGR

SEQ ID NO: 32473 - protein, 16 aa, Homo Sapiens
RQESSRTSSRRRRGRS

SEQ ID NO: 32474 - protein, 16 aa, Homo Sapiens
QESSRTSSRRRRGRSR

SEQ ID NO: 32475 - protein, 16 aa, Homo Sapiens
ESSRTSSRRRRGRSRT

SEQ ID NO: 32476 - protein, 16 aa, Homo Sapiens
SSRTSSRRRRGRSRTP

SEQ ID NO: 32477 - protein, 16 aa, Homo Sapiens
SRTSSRRRRGRSRTPP

SEQ ID NO: 32478 - protein, 16 aa, Homo Sapiens
RTSSRRRRGRSRTPPT

SEQ ID NO: 32479 - protein, 16 aa, Homo Sapiens
TSSRRRRGRSRTPPTS

SEQ ID NO: 32480 - protein, 16 aa, Homo Sapiens
SSRRRRGRSRTPPTSR

SEQ ID NO: 32481 - protein, 16 aa, Homo Sapiens
SRRRRGRSRTPPTSRK

SEQ ID NO: 32482 - protein, 16 aa, Homo Sapiens
RRRRGRSRTPPTSRKR

SEQ ID NO: 32483 - protein, 16 aa, Homo Sapiens
RRRGRSRTPPTSRKRS

SEQ ID NO: 32484 - protein, 16 aa, Homo Sapiens
RRGRSRTPPTSRKRSR

SEQ ID NO: 32485 - protein, 16 aa, Homo Sapiens
RGRSRTPPTSRKRSRS

SEQ ID NO: 32486 - protein, 16 aa, Homo Sapiens
GRSRTPPTSRKRSRSR

SEQ ID NO: 32487 - protein, 16 aa, Homo Sapiens
RSRTPPTSRKRSRSRT

SEQ ID NO: 32488 - protein, 16 aa, Homo Sapiens
SRTPPTSRKRSRSRTS

SEQ ID NO: 32489 - protein, 16 aa, Homo Sapiens
RTPPTSRKRSRSRTSP

SEQ ID NO: 32490 - protein, 16 aa, Homo Sapiens
TPPTSRKRSRSRTSPA

SEQ ID NO: 32491 - protein, 16 aa, Homo Sapiens
PPTSRKRSRSRTSPAP

SEQ ID NO: 32492 - protein, 16 aa, Homo Sapiens
PTSRKRSRSRTSPAPW

SEQ ID NO: 32493 - protein, 16 aa, Homo Sapiens
TSRKRSRSRTSPAPWK

SEQ ID NO: 32494 - protein, 16 aa, Homo Sapiens
SRKRSRSRTSPAPWKR

SEQ ID NO: 32495 - protein, 16 aa, Homo Sapiens
RKRSRSRTSPAPWKRS

SEQ ID NO: 32496 - protein, 16 aa, Homo Sapiens
KRSRSRTSPAPWKRSR

SEQ ID NO: 32497 - protein, 16 aa, Homo Sapiens
RSRSRTSPAPWKRSRS

SEQ ID NO: 32498 - protein, 16 aa, Homo Sapiens
SRSRTSPAPWKRSRSR

SEQ ID NO: 32499 - protein, 16 aa, Homo Sapiens
RSRTSPAPWKRSRSRA

SEQ ID NO: 32500 - protein, 16 aa, Homo Sapiens
SRTSPAPWKRSRSRAS

SEQ ID NO: 32501 - protein, 16 aa, Homo Sapiens
RTSPAPWKRSRSRASP

SEQ ID NO: 32502 - protein, 16 aa, Homo Sapiens
TSPAPWKRSRSRASPA

SEQ ID NO: 32503 - protein, 16 aa, Homo Sapiens
SPAPWKRSRSRASPAT

SEQ ID NO: 32504 - protein, 16 aa, Homo Sapiens
PAPWKRSRSRASPATH

SEQ ID NO: 32505 - protein, 16 aa, Homo Sapiens
APWKRSRSRASPATHR

SEQ ID NO: 32506 - protein, 16 aa, Homo Sapiens
PWKRSRSRASPATHRR

SEQ ID NO: 32507 - protein, 16 aa, Homo Sapiens
WKRSRSRASPATHRRS

SEQ ID NO: 32508 - protein, 16 aa, Homo Sapiens
KRSRSRASPATHRRSR

SEQ ID NO: 32509 - protein, 16 aa, Homo Sapiens
RSRSRASPATHRRSRS

SEQ ID NO: 32510 - protein, 16 aa, Homo Sapiens
SRSRASPATHRRSRSR

SEQ ID NO: 32511 - protein, 16 aa, Homo Sapiens
RSRASPATHRRSRSRT

SEQ ID NO: 32512 - protein, 16 aa, Homo Sapiens
SRASPATHRRSRSRTP

SEQ ID NO: 32513 - protein, 16 aa, Homo Sapiens
RASPATHRRSRSRTPL

SEQ ID NO: 32514 - protein, 16 aa, Homo Sapiens
ASPATHRRSRSRTPLI

SEQ ID NO: 32515 - protein, 16 aa, Homo Sapiens
SPATHRRSRSRTPLIS

SEQ ID NO: 32516 - protein, 16 aa, Homo Sapiens
PATHRRSRSRTPLISR

SEQ ID NO: 32517 - protein, 16 aa, Homo Sapiens
ATHRRSRSRTPLISRR

SEQ ID NO: 32518 - protein, 16 aa, Homo Sapiens
THRRSRSRTPLISRRR

SEQ ID NO: 32519 - protein, 16 aa, Homo Sapiens
HRRSRSRTPLISRRRS

SEQ ID NO: 32520 - protein, 16 aa, Homo Sapiens
RRSRSRTPLISRRRSR

SEQ ID NO: 32521 - protein, 16 aa, Homo Sapiens
RSRSRTPLISRRRSRS

SEQ ID NO: 32522 - protein, 16 aa, Homo Sapiens
SRSRTPLISRRRSRSR

SEQ ID NO: 32523 - protein, 16 aa, Homo Sapiens
RSRTPLISRRRSRSRT

SEQ ID NO: 32524 - protein, 16 aa, Homo Sapiens
SRTPLISRRRSRSRTS

SEQ ID NO: 32525 - protein, 16 aa, Homo Sapiens
RTPLISRRRSRSRTSP

SEQ ID NO: 32526 - protein, 16 aa, Homo Sapiens
TPLISRRRSRSRTSPV

SEQ ID NO: 32527 - protein, 16 aa, Homo Sapiens
PLISRRRSRSRTSPVS

SEQ ID NO: 32528 - protein, 16 aa, Homo Sapiens
LISRRRSRSRTSPVSR

SEQ ID NO: 32529 - protein, 16 aa, Homo Sapiens
ISRRRSRSRTSPVSRR

SEQ ID NO: 32530 - protein, 16 aa, Homo Sapiens
SRRRSRSRTSPVSRRR

SEQ ID NO: 32531 - protein, 16 aa, Homo Sapiens
RRRSRSRTSPVSRRRS

SEQ ID NO: 32532 - protein, 16 aa, Homo Sapiens
RRSRSRTSPVSRRRSR

SEQ ID NO: 32533 - protein, 16 aa, Homo Sapiens
RSRSRTSPVSRRRSRS

SEQ ID NO: 32534 - protein, 16 aa, Homo Sapiens
SRSRTSPVSRRRSRSR

SEQ ID NO: 32535 - protein, 16 aa, Homo Sapiens
RSRTSPVSRRRSRSRT

SEQ ID NO: 32536 - protein, 16 aa, Homo Sapiens
SRTSPVSRRRSRSRTS

SEQ ID NO: 32537 - protein, 16 aa, Homo Sapiens
RTSPVSRRRSRSRTSV

SEQ ID NO: 32538 - protein, 16 aa, Homo Sapiens
TSPVSRRRSRSRTSVT

SEQ ID NO: 32539 - protein, 16 aa, Homo Sapiens
SPVSRRRSRSRTSVTR

SEQ ID NO: 32540 - protein, 16 aa, Homo Sapiens
PVSRRRSRSRTSVTRR

SEQ ID NO: 32541 - protein, 16 aa, Homo Sapiens
VSRRRSRSRTSVTRRR

SEQ ID NO: 32542 - protein, 16 aa, Homo Sapiens
SRRRSRSRTSVTRRRS

SEQ ID NO: 32543 - protein, 16 aa, Homo Sapiens
RRRSRSRTSVTRRRSR

SEQ ID NO: 32544 - protein, 16 aa, Homo Sapiens
RRSRSRTSVTRRRSRS

SEQ ID NO: 32545 - protein, 16 aa, Homo Sapiens
RSRSRTSVTRRRSRSR

SEQ ID NO: 32546 - protein, 16 aa, Homo Sapiens
SRSRTSVTRRRSRSRA

SEQ ID NO: 32547 - protein, 16 aa, Homo Sapiens
RSRTSVTRRRSRSRAS

SEQ ID NO: 32548 - protein, 16 aa, Homo Sapiens
SRTSVTRRRSRSRASP

SEQ ID NO: 32549 - protein, 16 aa, Homo Sapiens
RTSVTRRRSRSRASPV

SEQ ID NO: 32550 - protein, 16 aa, Homo Sapiens
TSVTRRRSRSRASPVS

SEQ ID NO: 32551 - protein, 16 aa, Homo Sapiens
SVTRRRSRSRASPVSR

SEQ ID NO: 32552 - protein, 16 aa, Homo Sapiens
VTRRRSRSRASPVSRR

SEQ ID NO: 32553 - protein, 16 aa, Homo Sapiens
TRRRSRSRASPVSRRR

SEQ ID NO: 32554 - protein, 16 aa, Homo Sapiens
RRRSRSRASPVSRRRS

SEQ ID NO: 32555 - protein, 16 aa, Homo Sapiens
RRSRSRASPVSRRRSR

SEQ ID NO: 32556 - protein, 16 aa, Homo Sapiens
RSRSRASPVSRRRSRS

SEQ ID NO: 32557 - protein, 16 aa, Homo Sapiens
SRSRASPVSRRRSRSR

SEQ ID NO: 32558 - protein, 16 aa, Homo Sapiens
RSRASPVSRRRSRSRT

SEQ ID NO: 32559 - protein, 16 aa, Homo Sapiens
SRASPVSRRRSRSRTP

SEQ ID NO: 32560 - protein, 16 aa, Homo Sapiens
RASPVSRRRSRSRTPP

SEQ ID NO: 32561 - protein, 16 aa, Homo Sapiens
ASPVSRRRSRSRTPPV

SEQ ID NO: 32562 - protein, 16 aa, Homo Sapiens
SPVSRRRSRSRTPPVT

SEQ ID NO: 32563 - protein, 16 aa, Homo Sapiens
PVSRRRSRSRTPPVTR

SEQ ID NO: 32564 - protein, 16 aa, Homo Sapiens
VSRRRSRSRTPPVTRR

SEQ ID NO: 32565 - protein, 16 aa, Homo Sapiens
SRRRSRSRTPPVTRRR

SEQ ID NO: 32566 - protein, 16 aa, Homo Sapiens
RRRSRSRTPPVTRRRS

SEQ ID NO: 32567 - protein, 16 aa, Homo Sapiens
RRSRSRTPPVTRRRSR

SEQ ID NO: 32568 - protein, 16 aa, Homo Sapiens
RSRSRTPPVTRRRSRS

SEQ ID NO: 32569 - protein, 16 aa, Homo Sapiens
SRSRTPPVTRRRSRSR

SEQ ID NO: 32570 - protein, 16 aa, Homo Sapiens
RSRTPPVTRRRSRSRT

SEQ ID NO: 32571 - protein, 16 aa, Homo Sapiens
SRTPPVTRRRSRSRTP

SEQ ID NO: 32572 - protein, 16 aa, Homo Sapiens
RTPPVTRRRSRSRTPT

SEQ ID NO: 32573 - protein, 16 aa, Homo Sapiens
TPPVTRRRSRSRTPTT

SEQ ID NO: 32574 - protein, 16 aa, Homo Sapiens
PPVTRRRSRSRTPTTR

SEQ ID NO: 32575 - protein, 16 aa, Homo Sapiens
PVTRRRSRSRTPTTRR

SEQ ID NO: 32576 - protein, 16 aa, Homo Sapiens
VTRRRSRSRTPTTRRR

SEQ ID NO: 32577 - protein, 16 aa, Homo Sapiens
TRRRSRSRTPTTRRRS

SEQ ID NO: 32578 - protein, 16 aa, Homo Sapiens
RRRSRSRTPTTRRRSR

SEQ ID NO: 32579 - protein, 16 aa, Homo Sapiens
RRSRSRTPTTRRRSRS

SEQ ID NO: 32580 - protein, 16 aa, Homo Sapiens
RSRSRTPTTRRRSRSR

SEQ ID NO: 32581 - protein, 16 aa, Homo Sapiens
SRSRTPTTRRRSRSRT

SEQ ID NO: 32582 - protein, 16 aa, Homo Sapiens
RSRTPTTRRRSRSRTP

SEQ ID NO: 32583 - protein, 16 aa, Homo Sapiens
SRTPTTRRRSRSRTPP

SEQ ID NO: 32584 - protein, 16 aa, Homo Sapiens
RTPTTRRRSRSRTPPV

SEQ ID NO: 32585 - protein, 16 aa, Homo Sapiens
TPTTRRRSRSRTPPVT

SEQ ID NO: 32586 - protein, 16 aa, Homo Sapiens
PTTRRRSRSRTPPVTR

SEQ ID NO: 32587 - protein, 16 aa, Homo Sapiens
TTRRRSRSRTPPVTRR

SEQ ID NO: 32588 - protein, 16 aa, Homo Sapiens
TRRRSRSRTPPVTRRR

SEQ ID NO: 32589 - protein, 16 aa, Homo Sapiens
RRRSRSRTPPVTRRRS

SEQ ID NO: 32590 - protein, 16 aa, Homo Sapiens
RRSRSRTPPVTRRRSR

SEQ ID NO: 32591 - protein, 16 aa, Homo Sapiens
RSRSRTPPVTRRRSRS

SEQ ID NO: 32592 - protein, 16 aa, Homo Sapiens
SRSRTPPVTRRRSRSR

SEQ ID NO: 32593 - protein, 16 aa, Homo Sapiens
RSRTPPVTRRRSRSRT

SEQ ID NO: 32594 - protein, 16 aa, Homo Sapiens
SRTPPVTRRRSRSRTP

SEQ ID NO: 32595 - protein, 16 aa, Homo Sapiens
RTPPVTRRRSRSRTPP

SEQ ID NO: 32596 - protein, 16 aa, Homo Sapiens
TPPVTRRRSRSRTPPV

SEQ ID NO: 32597 - protein, 16 aa, Homo Sapiens
PPVTRRRSRSRTPPVT

SEQ ID NO: 32598 - protein, 16 aa, Homo Sapiens
PVTRRRSRSRTPPVTR

SEQ ID NO: 32599 - protein, 16 aa, Homo Sapiens
VTRRRSRSRTPPVTRR

SEQ ID NO: 32600 - protein, 16 aa, Homo Sapiens
TRRRSRSRTPPVTRRR

SEQ ID NO: 32601 - protein, 16 aa, Homo Sapiens
RRRSRSRTPPVTRRRS

SEQ ID NO: 32602 - protein, 16 aa, Homo Sapiens
RRSRSRTPPVTRRRSR

SEQ ID NO: 32603 - protein, 16 aa, Homo Sapiens
RSRSRTPPVTRRRSRS

SEQ ID NO: 32604 - protein, 16 aa, Homo Sapiens
SRSRTPPVTRRRSRSR

SEQ ID NO: 32605 - protein, 16 aa, Homo Sapiens
RSRTPPVTRRRSRSRT

SEQ ID NO: 32606 - protein, 16 aa, Homo Sapiens
SRTPPVTRRRSRSRTS

SEQ ID NO: 32607 - protein, 16 aa, Homo Sapiens
RTPPVTRRRSRSRTSP

SEQ ID NO: 32608 - protein, 16 aa, Homo Sapiens
TPPVTRRRSRSRTSPI

SEQ ID NO: 32609 - protein, 16 aa, Homo Sapiens
PPVTRRRSRSRTSPIT

SEQ ID NO: 32610 - protein, 16 aa, Homo Sapiens
PVTRRRSRSRTSPITR

SEQ ID NO: 32611 - protein, 16 aa, Homo Sapiens
VTRRRSRSRTSPITRR

SEQ ID NO: 32612 - protein, 16 aa, Homo Sapiens
TRRRSRSRTSPITRRR

SEQ ID NO: 32613 - protein, 16 aa, Homo Sapiens
RRRSRSRTSPITRRRS

SEQ ID NO: 32614 - protein, 16 aa, Homo Sapiens
RRSRSRTSPITRRRSR

SEQ ID NO: 32615 - protein, 16 aa, Homo Sapiens
RSRSRTSPITRRRSRS

SEQ ID NO: 32616 - protein, 16 aa, Homo Sapiens
SRSRTSPITRRRSRSR

SEQ ID NO: 32617 - protein, 16 aa, Homo Sapiens
RSRTSPITRRRSRSRT

SEQ ID NO: 32618 - protein, 16 aa, Homo Sapiens
SRTSPITRRRSRSRTS

SEQ ID NO: 32619 - protein, 16 aa, Homo Sapiens
RTSPITRRRSRSRTSP

SEQ ID NO: 32620 - protein, 16 aa, Homo Sapiens
TSPITRRRSRSRTSPV

SEQ ID NO: 32621 - protein, 16 aa, Homo Sapiens
SPITRRRSRSRTSPVT

SEQ ID NO: 32622 - protein, 16 aa, Homo Sapiens
PITRRRSRSRTSPVTR

SEQ ID NO: 32623 - protein, 16 aa, Homo Sapiens
ITRRRSRSRTSPVTRR

SEQ ID NO: 32624 - protein, 16 aa, Homo Sapiens
TRRRSRSRTSPVTRRR

SEQ ID NO: 32625 - protein, 16 aa, Homo Sapiens
RRRSRSRTSPVTRRRS

SEQ ID NO: 32626 - protein, 16 aa, Homo Sapiens
RRSRSRTSPVTRRRSR

SEQ ID NO: 32627 - protein, 16 aa, Homo Sapiens
RSRSRTSPVTRRRSRS

SEQ ID NO: 32628 - protein, 16 aa, Homo Sapiens
SRSRTSPVTRRRSRSR

SEQ ID NO: 32629 - protein, 16 aa, Homo Sapiens
RSRTSPVTRRRSRSRT

SEQ ID NO: 32630 - protein, 16 aa, Homo Sapiens
SRTSPVTRRRSRSRTS

SEQ ID NO: 32631 - protein, 16 aa, Homo Sapiens
RTSPVTRRRSRSRTSP

SEQ ID NO: 32632 - protein, 16 aa, Homo Sapiens
TSPVTRRRSRSRTSPV

SEQ ID NO: 32633 - protein, 16 aa, Homo Sapiens
SPVTRRRSRSRTSPVT

SEQ ID NO: 32634 - protein, 16 aa, Homo Sapiens
PVTRRRSRSRTSPVTR

SEQ ID NO: 32635 - protein, 16 aa, Homo Sapiens
VTRRRSRSRTSPVTRR

SEQ ID NO: 32636 - protein, 16 aa, Homo Sapiens
TRRRSRSRTSPVTRRR

SEQ ID NO: 32637 - protein, 16 aa, Homo Sapiens
RRRSRSRTSPVTRRRS

SEQ ID NO: 32638 - protein, 16 aa, Homo Sapiens
RRSRSRTSPVTRRRSR

SEQ ID NO: 32639 - protein, 16 aa, Homo Sapiens
RSRSRTSPVTRRRSRS

SEQ ID NO: 32640 - protein, 16 aa, Homo Sapiens
SRSRTSPVTRRRSRSR

SEQ ID NO: 32641 - protein, 16 aa, Homo Sapiens
RSRTSPVTRRRSRSRT

SEQ ID NO: 32642 - protein, 16 aa, Homo Sapiens
SRTSPVTRRRSRSRTS

SEQ ID NO: 32643 - protein, 16 aa, Homo Sapiens
RTSPVTRRRSRSRTSP

SEQ ID NO: 32644 - protein, 16 aa, Homo Sapiens
TSPVTRRRSRSRTSPV

SEQ ID NO: 32645 - protein, 16 aa, Homo Sapiens
SPVTRRRSRSRTSPVT

SEQ ID NO: 32646 - protein, 16 aa, Homo Sapiens
PVTRRRSRSRTSPVTR

SEQ ID NO: 32647 - protein, 16 aa, Homo Sapiens
VTRRRSRSRTSPVTRR

SEQ ID NO: 32648 - protein, 16 aa, Homo Sapiens
TRRRSRSRTSPVTRRR

SEQ ID NO: 32649 - protein, 16 aa, Homo Sapiens
RRRSRSRTSPVTRRRS

SEQ ID NO: 32650 - protein, 16 aa, Homo Sapiens
RRSRSRTSPVTRRRSR

SEQ ID NO: 32651 - protein, 16 aa, Homo Sapiens
RSRSRTSPVTRRRSRS

SEQ ID NO: 32652 - protein, 16 aa, Homo Sapiens
SRSRTSPVTRRRSRSR

SEQ ID NO: 32653 - protein, 16 aa, Homo Sapiens
RSRTSPVTRRRSRSRT

SEQ ID NO: 32654 - protein, 16 aa, Homo Sapiens
SRTSPVTRRRSRSRTP

SEQ ID NO: 32655 - protein, 16 aa, Homo Sapiens
RTSPVTRRRSRSRTPP

SEQ ID NO: 32656 - protein, 16 aa, Homo Sapiens
TSPVTRRRSRSRTPPA

SEQ ID NO: 32657 - protein, 16 aa, Homo Sapiens
SPVTRRRSRSRTPPAI

SEQ ID NO: 32658 - protein, 16 aa, Homo Sapiens
PVTRRRSRSRTPPAIR

SEQ ID NO: 32659 - protein, 16 aa, Homo Sapiens
VTRRRSRSRTPPAIRR

SEQ ID NO: 32660 - protein, 16 aa, Homo Sapiens
TRRRSRSRTPPAIRRR

SEQ ID NO: 32661 - protein, 16 aa, Homo Sapiens
RRRSRSRTPPAIRRRS

SEQ ID NO: 32662 - protein, 16 aa, Homo Sapiens
RRSRSRTPPAIRRRSR

SEQ ID NO: 32663 - protein, 16 aa, Homo Sapiens
RSRSRTPPAIRRRSRS

SEQ ID NO: 32664 - protein, 16 aa, Homo Sapiens
SRSRTPPAIRRRSRSR

SEQ ID NO: 32665 - protein, 16 aa, Homo Sapiens
RSRTPPAIRRRSRSRT

SEQ ID NO: 32666 - protein, 16 aa, Homo Sapiens
SRTPPAIRRRSRSRTP

SEQ ID NO: 32667 - protein, 16 aa, Homo Sapiens
RTPPAIRRRSRSRTPL

SEQ ID NO: 32668 - protein, 16 aa, Homo Sapiens
TPPAIRRRSRSRTPLL

SEQ ID NO: 32669 - protein, 16 aa, Homo Sapiens
PPAIRRRSRSRTPLLP

SEQ ID NO: 32670 - protein, 16 aa, Homo Sapiens
PAIRRRSRSRTPLLPR

SEQ ID NO: 32671 - protein, 16 aa, Homo Sapiens
AIRRRSRSRTPLLPRK

SEQ ID NO: 32672 - protein, 16 aa, Homo Sapiens
IRRRSRSRTPLLPRKR

SEQ ID NO: 32673 - protein, 16 aa, Homo Sapiens
RRRSRSRTPLLPRKRS

SEQ ID NO: 32674 - protein, 16 aa, Homo Sapiens
RRSRSRTPLLPRKRSR

SEQ ID NO: 32675 - protein, 16 aa, Homo Sapiens
RSRSRTPLLPRKRSRS

SEQ ID NO: 32676 - protein, 16 aa, Homo Sapiens
SRSRTPLLPRKRSRSR

SEQ ID NO: 32677 - protein, 16 aa, Homo Sapiens
RSRTPLLPRKRSRSRS

SEQ ID NO: 32678 - protein, 16 aa, Homo Sapiens
SRTPLLPRKRSRSRSP

SEQ ID NO: 32679 - protein, 16 aa, Homo Sapiens
RTPLLPRKRSRSRSPL

SEQ ID NO: 32680 - protein, 16 aa, Homo Sapiens
TPLLPRKRSRSRSPLA

SEQ ID NO: 32681 - protein, 16 aa, Homo Sapiens
PLLPRKRSRSRSPLAI

SEQ ID NO: 32682 - protein, 16 aa, Homo Sapiens
LLPRKRSRSRSPLAIR

SEQ ID NO: 32683 - protein, 16 aa, Homo Sapiens
LPRKRSRSRSPLAIRR

SEQ ID NO: 32684 - protein, 16 aa, Homo Sapiens
PRKRSRSRSPLAIRRR

SEQ ID NO: 32685 - protein, 16 aa, Homo Sapiens
RKRSRSRSPLAIRRRS

SEQ ID NO: 32686 - protein, 16 aa, Homo Sapiens
KRSRSRSPLAIRRRSR

SEQ ID NO: 32687 - protein, 16 aa, Homo Sapiens
RSRSRSPLAIRRRSRS

SEQ ID NO: 32688 - protein, 16 aa, Homo Sapiens
SRSRSPLAIRRRSRSR

SEQ ID NO: 32689 - protein, 16 aa, Homo Sapiens
RSRSPLAIRRRSRSRT

SEQ ID NO: 32690 - protein, 16 aa, Homo Sapiens
SRSPLAIRRRSRSRTP

SEQ ID NO: 32691 - protein, 16 aa, Homo Sapiens
RSPLAIRRRSRSRTPR

SEQ ID NO: 32692 - protein, 16 aa, Homo Sapiens
SPLAIRRRSRSRTPRT

SEQ ID NO: 32693 - protein, 16 aa, Homo Sapiens
PLAIRRRSRSRTPRTA

SEQ ID NO: 32694 - protein, 16 aa, Homo Sapiens
LAIRRRSRSRTPRTAR

SEQ ID NO: 32695 - protein, 16 aa, Homo Sapiens
AIRRRSRSRTPRTARG

SEQ ID NO: 32696 - protein, 16 aa, Homo Sapiens
IRRRSRSRTPRTARGK

SEQ ID NO: 32697 - protein, 16 aa, Homo Sapiens
RRRSRSRTPRTARGKR

SEQ ID NO: 32698 - protein, 16 aa, Homo Sapiens
RRSRSRTPRTARGKRS

SEQ ID NO: 32699 - protein, 16 aa, Homo Sapiens
RSRSRTPRTARGKRSL

SEQ ID NO: 32700 - protein, 16 aa, Homo Sapiens
SRSRTPRTARGKRSLT

SEQ ID NO: 32701 - protein, 16 aa, Homo Sapiens
RSRTPRTARGKRSLTR

SEQ ID NO: 32702 - protein, 16 aa, Homo Sapiens
SRTPRTARGKRSLTRS

SEQ ID NO: 32703 - protein, 16 aa, Homo Sapiens
RTPRTARGKRSLTRSP

SEQ ID NO: 32704 - protein, 16 aa, Homo Sapiens
TPRTARGKRSLTRSPP

SEQ ID NO: 32705 - protein, 16 aa, Homo Sapiens
PRTARGKRSLTRSPPA

SEQ ID NO: 32706 - protein, 16 aa, Homo Sapiens
RTARGKRSLTRSPPAI

SEQ ID NO: 32707 - protein, 16 aa, Homo Sapiens
TARGKRSLTRSPPAIR

SEQ ID NO: 32708 - protein, 16 aa, Homo Sapiens
ARGKRSLTRSPPAIRR

SEQ ID NO: 32709 - protein, 16 aa, Homo Sapiens
RGKRSLTRSPPAIRRR

SEQ ID NO: 32710 - protein, 16 aa, Homo Sapiens
GKRSLTRSPPAIRRRS

SEQ ID NO: 32711 - protein, 16 aa, Homo Sapiens
KRSLTRSPPAIRRRSA

SEQ ID NO: 32712 - protein, 16 aa, Homo Sapiens
RSLTRSPPAIRRRSAS

SEQ ID NO: 32713 - protein, 16 aa, Homo Sapiens
SLTRSPPAIRRRSASG

SEQ ID NO: 32714 - protein, 16 aa, Homo Sapiens
LTRSPPAIRRRSASGS

SEQ ID NO: 32715 - protein, 16 aa, Homo Sapiens
TRSPPAIRRRSASGSS

SEQ ID NO: 32716 - protein, 16 aa, Homo Sapiens
RSPPAIRRRSASGSSS

SEQ ID NO: 32717 - protein, 16 aa, Homo Sapiens
SPPAIRRRSASGSSSD

SEQ ID NO: 32718 - protein, 16 aa, Homo Sapiens
PPAIRRRSASGSSSDR

SEQ ID NO: 32719 - protein, 16 aa, Homo Sapiens
PAIRRRSASGSSSDRS

SEQ ID NO: 32720 - protein, 16 aa, Homo Sapiens
AIRRRSASGSSSDRSR

SEQ ID NO: 32721 - protein, 16 aa, Homo Sapiens
IRRRSASGSSSDRSRS

SEQ ID NO: 32722 - protein, 16 aa, Homo Sapiens
RRRSASGSSSDRSRSA

SEQ ID NO: 32723 - protein, 16 aa, Homo Sapiens
RRSASGSSSDRSRSAT

SEQ ID NO: 32724 - protein, 16 aa, Homo Sapiens
RSASGSSSDRSRSATP

SEQ ID NO: 32725 - protein, 16 aa, Homo Sapiens
SASGSSSDRSRSATPP

SEQ ID NO: 32726 - protein, 16 aa, Homo Sapiens
ASGSSSDRSRSATPPA

SEQ ID NO: 32727 - protein, 16 aa, Homo Sapiens
SGSSSDRSRSATPPAT

SEQ ID NO: 32728 - protein, 16 aa, Homo Sapiens
GSSSDRSRSATPPATR

SEQ ID NO: 32729 - protein, 16 aa, Homo Sapiens
SSSDRSRSATPPATRN

SEQ ID NO: 32730 - protein, 16 aa, Homo Sapiens
SSDRSRSATPPATRNH

SEQ ID NO: 32731 - protein, 16 aa, Homo Sapiens
SDRSRSATPPATRNHS

SEQ ID NO: 32732 - protein, 16 aa, Homo Sapiens
DRSRSATPPATRNHSG

SEQ ID NO: 32733 - protein, 16 aa, Homo Sapiens
RSRSATPPATRNHSGS

SEQ ID NO: 32734 - protein, 16 aa, Homo Sapiens
SRSATPPATRNHSGSR

SEQ ID NO: 32735 - protein, 16 aa, Homo Sapiens
RSATPPATRNHSGSRT

SEQ ID NO: 32736 - protein, 16 aa, Homo Sapiens
SATPPATRNHSGSRTP

SEQ ID NO: 32737 - protein, 16 aa, Homo Sapiens
ATPPATRNHSGSRTPP

SEQ ID NO: 32738 - protein, 16 aa, Homo Sapiens
TPPATRNHSGSRTPPV

SEQ ID NO: 32739 - protein, 16 aa, Homo Sapiens
PPATRNHSGSRTPPVA

SEQ ID NO: 32740 - protein, 16 aa, Homo Sapiens
PATRNHSGSRTPPVAL

SEQ ID NO: 32741 - protein, 16 aa, Homo Sapiens
ATRNHSGSRTPPVALN

SEQ ID NO: 32742 - protein, 16 aa, Homo Sapiens
TRNHSGSRTPPVALNS

SEQ ID NO: 32743 - protein, 16 aa, Homo Sapiens
RNHSGSRTPPVALNSS

SEQ ID NO: 32744 - protein, 16 aa, Homo Sapiens
NHSGSRTPPVALNSSR

SEQ ID NO: 32745 - protein, 16 aa, Homo Sapiens
HSGSRTPPVALNSSRM

SEQ ID NO: 32746 - protein, 16 aa, Homo Sapiens
SGSRTPPVALNSSRMS

SEQ ID NO: 32747 - protein, 16 aa, Homo Sapiens
GSRTPPVALNSSRMSC

SEQ ID NO: 32748 - protein, 16 aa, Homo Sapiens
SRTPPVALNSSRMSCF

SEQ ID NO: 32749 - protein, 16 aa, Homo Sapiens
RTPPVALNSSRMSCFS

SEQ ID NO: 32750 - protein, 16 aa, Homo Sapiens
TPPVALNSSRMSCFSR

SEQ ID NO: 32751 - protein, 16 aa, Homo Sapiens
PPVALNSSRMSCFSRP

SEQ ID NO: 32752 - protein, 16 aa, Homo Sapiens
PVALNSSRMSCFSRPS

SEQ ID NO: 32753 - protein, 16 aa, Homo Sapiens
VALNSSRMSCFSRPSM

SEQ ID NO: 32754 - protein, 16 aa, Homo Sapiens
ALNSSRMSCFSRPSMS

SEQ ID NO: 32755 - protein, 16 aa, Homo Sapiens
LNSSRMSCFSRPSMSP

SEQ ID NO: 32756 - protein, 16 aa, Homo Sapiens
NSSRMSCFSRPSMSPT

SEQ ID NO: 32757 - protein, 16 aa, Homo Sapiens
SSRMSCFSRPSMSPTP

SEQ ID NO: 32758 - protein, 16 aa, Homo Sapiens
SRMSCFSRPSMSPTPL

SEQ ID NO: 32759 - protein, 16 aa, Homo Sapiens
RMSCFSRPSMSPTPLD

SEQ ID NO: 32760 - protein, 16 aa, Homo Sapiens
MSCFSRPSMSPTPLDR

SEQ ID NO: 32761 - protein, 16 aa, Homo Sapiens
SCFSRPSMSPTPLDRC

SEQ ID NO: 32762 - protein, 16 aa, Homo Sapiens
CFSRPSMSPTPLDRCR

SEQ ID NO: 32763 - protein, 16 aa, Homo Sapiens
FSRPSMSPTPLDRCRS

SEQ ID NO: 32764 - protein, 16 aa, Homo Sapiens
SRPSMSPTPLDRCRSP

SEQ ID NO: 32765 - protein, 16 aa, Homo Sapiens
RPSMSPTPLDRCRSPG

SEQ ID NO: 32766 - protein, 16 aa, Homo Sapiens
PSMSPTPLDRCRSPGM

SEQ ID NO: 32767 - protein, 16 aa, Homo Sapiens
SMSPTPLDRCRSPGML

SEQ ID NO: 32768 - protein, 16 aa, Homo Sapiens
MSPTPLDRCRSPGMLE

SEQ ID NO: 32769 - protein, 16 aa, Homo Sapiens
SPTPLDRCRSPGMLEP

SEQ ID NO: 32770 - protein, 16 aa, Homo Sapiens
PTPLDRCRSPGMLEPL

SEQ ID NO: 32771 - protein, 16 aa, Homo Sapiens
TPLDRCRSPGMLEPLG

SEQ ID NO: 32772 - protein, 16 aa, Homo Sapiens
PLDRCRSPGMLEPLGS

SEQ ID NO: 32773 - protein, 16 aa, Homo Sapiens
LDRCRSPGMLEPLGSS

SEQ ID NO: 32774 - protein, 16 aa, Homo Sapiens
DRCRSPGMLEPLGSSR

SEQ ID NO: 32775 - protein, 16 aa, Homo Sapiens
RCRSPGMLEPLGSSRT

SEQ ID NO: 32776 - protein, 16 aa, Homo Sapiens
CRSPGMLEPLGSSRTP

SEQ ID NO: 32777 - protein, 16 aa, Homo Sapiens
RSPGMLEPLGSSRTPM

SEQ ID NO: 32778 - protein, 16 aa, Homo Sapiens
SPGMLEPLGSSRTPMS

SEQ ID NO: 32779 - protein, 16 aa, Homo Sapiens
PGMLEPLGSSRTPMSV

SEQ ID NO: 32780 - protein, 16 aa, Homo Sapiens
GMLEPLGSSRTPMSVL

SEQ ID NO: 32781 - protein, 16 aa, Homo Sapiens
MLEPLGSSRTPMSVLQ

SEQ ID NO: 32782 - protein, 16 aa, Homo Sapiens
LEPLGSSRTPMSVLQQ

SEQ ID NO: 32783 - protein, 16 aa, Homo Sapiens
EPLGSSRTPMSVLQQA

SEQ ID NO: 32784 - protein, 16 aa, Homo Sapiens
PLGSSRTPMSVLQQAG

SEQ ID NO: 32785 - protein, 16 aa, Homo Sapiens
LGSSRTPMSVLQQAGG

SEQ ID NO: 32786 - protein, 16 aa, Homo Sapiens
GSSRTPMSVLQQAGGS

SEQ ID NO: 32787 - protein, 16 aa, Homo Sapiens
SSRTPMSVLQQAGGSM

SEQ ID NO: 32788 - protein, 16 aa, Homo Sapiens
SRTPMSVLQQAGGSMM

SEQ ID NO: 32789 - protein, 16 aa, Homo Sapiens
RTPMSVLQQAGGSMMD

SEQ ID NO: 32790 - protein, 16 aa, Homo Sapiens
TPMSVLQQAGGSMMDG

SEQ ID NO: 32791 - protein, 16 aa, Homo Sapiens
PMSVLQQAGGSMMDGP

SEQ ID NO: 32792 - protein, 16 aa, Homo Sapiens
MSVLQQAGGSMMDGPG

SEQ ID NO: 32793 - protein, 16 aa, Homo Sapiens
SVLQQAGGSMMDGPGP

SEQ ID NO: 32794 - protein, 16 aa, Homo Sapiens
VLQQAGGSMMDGPGPR

SEQ ID NO: 32795 - protein, 16 aa, Homo Sapiens
LQQAGGSMMDGPGPRI

SEQ ID NO: 32796 - protein, 16 aa, Homo Sapiens
QQAGGSMMDGPGPRIP

SEQ ID NO: 32797 - protein, 16 aa, Homo Sapiens
QAGGSMMDGPGPRIPD

SEQ ID NO: 32798 - protein, 16 aa, Homo Sapiens
AGGSMMDGPGPRIPDH

SEQ ID NO: 32799 - protein, 16 aa, Homo Sapiens
GGSMMDGPGPRIPDHQ

SEQ ID NO: 32800 - protein, 16 aa, Homo Sapiens
GSMMDGPGPRIPDHQR

SEQ ID NO: 32801 - protein, 16 aa, Homo Sapiens
SMMDGPGPRIPDHQRT

SEQ ID NO: 32802 - protein, 16 aa, Homo Sapiens
MMDGPGPRIPDHQRTS

SEQ ID NO: 32803 - protein, 16 aa, Homo Sapiens
MDGPGPRIPDHQRTSV

SEQ ID NO: 32804 - protein, 16 aa, Homo Sapiens
DGPGPRIPDHQRTSVP

SEQ ID NO: 32805 - protein, 16 aa, Homo Sapiens
GPGPRIPDHQRTSVPE

SEQ ID NO: 32806 - protein, 16 aa, Homo Sapiens
PGPRIPDHQRTSVPEN

SEQ ID NO: 32807 - protein, 16 aa, Homo Sapiens
GPRIPDHQRTSVPENH

SEQ ID NO: 32808 - protein, 16 aa, Homo Sapiens
PRIPDHQRTSVPENHA

SEQ ID NO: 32809 - protein, 16 aa, Homo Sapiens
RIPDHQRTSVPENHAQ

SEQ ID NO: 32810 - protein, 16 aa, Homo Sapiens
IPDHQRTSVPENHAQS

SEQ ID NO: 32811 - protein, 16 aa, Homo Sapiens
PDHQRTSVPENHAQSR

SEQ ID NO: 32812 - protein, 16 aa, Homo Sapiens
DHQRTSVPENHAQSRI

SEQ ID NO: 32813 - protein, 16 aa, Homo Sapiens
HQRTSVPENHAQSRIA

SEQ ID NO: 32814 - protein, 16 aa, Homo Sapiens
QRTSVPENHAQSRIAL

SEQ ID NO: 32815 - protein, 16 aa, Homo Sapiens
RTSVPENHAQSRIALA

SEQ ID NO: 32816 - protein, 16 aa, Homo Sapiens
TSVPENHAQSRIALAL

SEQ ID NO: 32817 - protein, 16 aa, Homo Sapiens
SVPENHAQSRIALALT

SEQ ID NO: 32818 - protein, 16 aa, Homo Sapiens
VPENHAQSRIALALTA

SEQ ID NO: 32819 - protein, 16 aa, Homo Sapiens
PENHAQSRIALALTAI

SEQ ID NO: 32820 - protein, 16 aa, Homo Sapiens
ENHAQSRIALALTAIS

SEQ ID NO: 32821 - protein, 16 aa, Homo Sapiens
NHAQSRIALALTAISL

SEQ ID NO: 32822 - protein, 16 aa, Homo Sapiens
HAQSRIALALTAISLG

SEQ ID NO: 32823 - protein, 16 aa, Homo Sapiens
AQSRIALALTAISLGT

SEQ ID NO: 32824 - protein, 16 aa, Homo Sapiens
QSRIALALTAISLGTA

SEQ ID NO: 32825 - protein, 16 aa, Homo Sapiens
SRIALALTAISLGTAR

SEQ ID NO: 32826 - protein, 16 aa, Homo Sapiens
RIALALTAISLGTARP

SEQ ID NO: 32827 - protein, 16 aa, Homo Sapiens
IALALTAISLGTARPP

SEQ ID NO: 32828 - protein, 16 aa, Homo Sapiens
ALALTAISLGTARPPP

SEQ ID NO: 32829 - protein, 16 aa, Homo Sapiens
LALTAISLGTARPPPS

SEQ ID NO: 32830 - protein, 16 aa, Homo Sapiens
ALTAISLGTARPPPSM

SEQ ID NO: 32831 - protein, 16 aa, Homo Sapiens
LTAISLGTARPPPSMS

SEQ ID NO: 32832 - protein, 16 aa, Homo Sapiens
TAISLGTARPPPSMSA

SEQ ID NO: 32833 - protein, 16 aa, Homo Sapiens
AISLGTARPPPSMSAA

SEQ ID NO: 32834 - protein, 16 aa, Homo Sapiens
ISLGTARPPPSMSAAG

SEQ ID NO: 32835 - protein, 16 aa, Homo Sapiens
SLGTARPPPSMSAAGL

SEQ ID NO: 32836 - protein, 16 aa, Homo Sapiens
LGTARPPPSMSAAGLA

SEQ ID NO: 32837 - protein, 16 aa, Homo Sapiens
GTARPPPSMSAAGLAA

SEQ ID NO: 32838 - protein, 16 aa, Homo Sapiens
TARPPPSMSAAGLAAR

SEQ ID NO: 32839 - protein, 16 aa, Homo Sapiens
ARPPPSMSAAGLAARM

SEQ ID NO: 32840 - protein, 16 aa, Homo Sapiens
RPPPSMSAAGLAARMS

SEQ ID NO: 32841 - protein, 16 aa, Homo Sapiens
PPPSMSAAGLAARMSQ

SEQ ID NO: 32842 - protein, 16 aa, Homo Sapiens
PPSMSAAGLAARMSQV

SEQ ID NO: 32843 - protein, 16 aa, Homo Sapiens
PSMSAAGLAARMSQVP

SEQ ID NO: 32844 - protein, 16 aa, Homo Sapiens
SMSAAGLAARMSQVPA

SEQ ID NO: 32845 - protein, 16 aa, Homo Sapiens
MSAAGLAARMSQVPAP

SEQ ID NO: 32846 - protein, 16 aa, Homo Sapiens
SAAGLAARMSQVPAPV

SEQ ID NO: 32847 - protein, 16 aa, Homo Sapiens
AAGLAARMSQVPAPVP

SEQ ID NO: 32848 - protein, 16 aa, Homo Sapiens
AGLAARMSQVPAPVPL

SEQ ID NO: 32849 - protein, 16 aa, Homo Sapiens
GLAARMSQVPAPVPLM

SEQ ID NO: 32850 - protein, 16 aa, Homo Sapiens
LAARMSQVPAPVPLMS

SEQ ID NO: 32851 - protein, 16 aa, Homo Sapiens
AARMSQVPAPVPLMSL

SEQ ID NO: 32852 - protein, 16 aa, Homo Sapiens
ARMSQVPAPVPLMSLR

SEQ ID NO: 32853 - protein, 16 aa, Homo Sapiens
RMSQVPAPVPLMSLRT

SEQ ID NO: 32854 - protein, 16 aa, Homo Sapiens
MSQVPAPVPLMSLRTA

SEQ ID NO: 32855 - protein, 16 aa, Homo Sapiens
SQVPAPVPLMSLRTAP

SEQ ID NO: 32856 - protein, 16 aa, Homo Sapiens
QVPAPVPLMSLRTAPA

SEQ ID NO: 32857 - protein, 16 aa, Homo Sapiens
VPAPVPLMSLRTAPAA

SEQ ID NO: 32858 - protein, 16 aa, Homo Sapiens
PAPVPLMSLRTAPAAN

SEQ ID NO: 32859 - protein, 16 aa, Homo Sapiens
APVPLMSLRTAPAANL

SEQ ID NO: 32860 - protein, 16 aa, Homo Sapiens
PVPLMSLRTAPAANLA

SEQ ID NO: 32861 - protein, 16 aa, Homo Sapiens
VPLMSLRTAPAANLAS

SEQ ID NO: 32862 - protein, 16 aa, Homo Sapiens
PLMSLRTAPAANLASR

SEQ ID NO: 32863 - protein, 16 aa, Homo Sapiens
LMSLRTAPAANLASRI

SEQ ID NO: 32864 - protein, 16 aa, Homo Sapiens
MSLRTAPAANLASRIP

SEQ ID NO: 32865 - protein, 16 aa, Homo Sapiens
SLRTAPAANLASRIPA

SEQ ID NO: 32866 - protein, 16 aa, Homo Sapiens
LRTAPAANLASRIPAA

SEQ ID NO: 32867 - protein, 16 aa, Homo Sapiens
RTAPAANLASRIPAAS

SEQ ID NO: 32868 - protein, 16 aa, Homo Sapiens
TAPAANLASRIPAASA

SEQ ID NO: 32869 - protein, 16 aa, Homo Sapiens
APAANLASRIPAASAA

SEQ ID NO: 32870 - protein, 16 aa, Homo Sapiens
PAANLASRIPAASAAA

SEQ ID NO: 32871 - protein, 16 aa, Homo Sapiens
AANLASRIPAASAAAM

SEQ ID NO: 32872 - protein, 16 aa, Homo Sapiens
ANLASRIPAASAAAMN

SEQ ID NO: 32873 - protein, 16 aa, Homo Sapiens
NLASRIPAASAAAMNL

SEQ ID NO: 32874 - protein, 16 aa, Homo Sapiens
LASRIPAASAAAMNLA

SEQ ID NO: 32875 - protein, 16 aa, Homo Sapiens
ASRIPAASAAAMNLAS

SEQ ID NO: 32876 - protein, 16 aa, Homo Sapiens
SRIPAASAAAMNLASA

SEQ ID NO: 32877 - protein, 16 aa, Homo Sapiens
RIPAASAAAMNLASAR

SEQ ID NO: 32878 - protein, 16 aa, Homo Sapiens
IPAASAAAMNLASART

SEQ ID NO: 32879 - protein, 16 aa, Homo Sapiens
PAASAAAMNLASARTP

SEQ ID NO: 32880 - protein, 16 aa, Homo Sapiens
AASAAAMNLASARTPA

SEQ ID NO: 32881 - protein, 16 aa, Homo Sapiens
ASAAAMNLASARTPAI

SEQ ID NO: 32882 - protein, 16 aa, Homo Sapiens
SAAAMNLASARTPAIP

SEQ ID NO: 32883 - protein, 16 aa, Homo Sapiens
AAAMNLASARTPAIPT

SEQ ID NO: 32884 - protein, 16 aa, Homo Sapiens
AAMNLASARTPAIPTA

SEQ ID NO: 32885 - protein, 16 aa, Homo Sapiens
AMNLASARTPAIPTAV

SEQ ID NO: 32886 - protein, 16 aa, Homo Sapiens
MNLASARTPAIPTAVN

SEQ ID NO: 32887 - protein, 16 aa, Homo Sapiens
NLASARTPAIPTAVNL

SEQ ID NO: 32888 - protein, 16 aa, Homo Sapiens
LASARTPAIPTAVNLA

SEQ ID NO: 32889 - protein, 16 aa, Homo Sapiens
ASARTPAIPTAVNLAD

SEQ ID NO: 32890 - protein, 16 aa, Homo Sapiens
SARTPAIPTAVNLADS

SEQ ID NO: 32891 - protein, 16 aa, Homo Sapiens
ARTPAIPTAVNLADSR

SEQ ID NO: 32892 - protein, 16 aa, Homo Sapiens
RTPAIPTAVNLADSRT

SEQ ID NO: 32893 - protein, 16 aa, Homo Sapiens
TPAIPTAVNLADSRTP

SEQ ID NO: 32894 - protein, 16 aa, Homo Sapiens
PAIPTAVNLADSRTPA

SEQ ID NO: 32895 - protein, 16 aa, Homo Sapiens
AIPTAVNLADSRTPAA

SEQ ID NO: 32896 - protein, 16 aa, Homo Sapiens
IPTAVNLADSRTPAAA

SEQ ID NO: 32897 - protein, 16 aa, Homo Sapiens
PTAVNLADSRTPAAAA

SEQ ID NO: 32898 - protein, 16 aa, Homo Sapiens
TAVNLADSRTPAAAAA

SEQ ID NO: 32899 - protein, 16 aa, Homo Sapiens
AVNLADSRTPAAAAAM

SEQ ID NO: 32900 - protein, 16 aa, Homo Sapiens
VNLADSRTPAAAAAMN

SEQ ID NO: 32901 - protein, 16 aa, Homo Sapiens
NLADSRTPAAAAAMNL

SEQ ID NO: 32902 - protein, 16 aa, Homo Sapiens
LADSRTPAAAAAMNLA

SEQ ID NO: 32903 - protein, 16 aa, Homo Sapiens
ADSRTPAAAAAMNLAS

SEQ ID NO: 32904 - protein, 16 aa, Homo Sapiens
DSRTPAAAAAMNLASP

SEQ ID NO: 32905 - protein, 16 aa, Homo Sapiens
SRTPAAAAAMNLASPR

SEQ ID NO: 32906 - protein, 16 aa, Homo Sapiens
RTPAAAAAMNLASPRT

SEQ ID NO: 32907 - protein, 16 aa, Homo Sapiens
TPAAAAAMNLASPRTA

SEQ ID NO: 32908 - protein, 16 aa, Homo Sapiens
PAAAAAMNLASPRTAV

SEQ ID NO: 32909 - protein, 16 aa, Homo Sapiens
AAAAAMNLASPRTAVA

SEQ ID NO: 32910 - protein, 16 aa, Homo Sapiens
AAAAMNLASPRTAVAP

SEQ ID NO: 32911 - protein, 16 aa, Homo Sapiens
AAAMNLASPRTAVAPS

SEQ ID NO: 32912 - protein, 16 aa, Homo Sapiens
AAMNLASPRTAVAPSA

SEQ ID NO: 32913 - protein, 16 aa, Homo Sapiens
AMNLASPRTAVAPSAV

SEQ ID NO: 32914 - protein, 16 aa, Homo Sapiens
MNLASPRTAVAPSAVN

SEQ ID NO: 32915 - protein, 16 aa, Homo Sapiens
NLASPRTAVAPSAVNL

SEQ ID NO: 32916 - protein, 16 aa, Homo Sapiens
LASPRTAVAPSAVNLA

SEQ ID NO: 32917 - protein, 16 aa, Homo Sapiens
ASPRTAVAPSAVNLAD

SEQ ID NO: 32918 - protein, 16 aa, Homo Sapiens
SPRTAVAPSAVNLADP

SEQ ID NO: 32919 - protein, 16 aa, Homo Sapiens
PRTAVAPSAVNLADPR

SEQ ID NO: 32920 - protein, 16 aa, Homo Sapiens
RTAVAPSAVNLADPRT

SEQ ID NO: 32921 - protein, 16 aa, Homo Sapiens
TAVAPSAVNLADPRTP

SEQ ID NO: 32922 - protein, 16 aa, Homo Sapiens
AVAPSAVNLADPRTPT

SEQ ID NO: 32923 - protein, 16 aa, Homo Sapiens
VAPSAVNLADPRTPTA

SEQ ID NO: 32924 - protein, 16 aa, Homo Sapiens
APSAVNLADPRTPTAP

SEQ ID NO: 32925 - protein, 16 aa, Homo Sapiens
PSAVNLADPRTPTAPA

SEQ ID NO: 32926 - protein, 16 aa, Homo Sapiens
SAVNLADPRTPTAPAV

SEQ ID NO: 32927 - protein, 16 aa, Homo Sapiens
AVNLADPRTPTAPAVN

SEQ ID NO: 32928 - protein, 16 aa, Homo Sapiens
VNLADPRTPTAPAVNL

SEQ ID NO: 32929 - protein, 16 aa, Homo Sapiens
NLADPRTPTAPAVNLA

SEQ ID NO: 32930 - protein, 16 aa, Homo Sapiens
LADPRTPTAPAVNLAG

SEQ ID NO: 32931 - protein, 16 aa, Homo Sapiens
ADPRTPTAPAVNLAGA

SEQ ID NO: 32932 - protein, 16 aa, Homo Sapiens
DPRTPTAPAVNLAGAR

SEQ ID NO: 32933 - protein, 16 aa, Homo Sapiens
PRTPTAPAVNLAGART

SEQ ID NO: 32934 - protein, 16 aa, Homo Sapiens
RTPTAPAVNLAGARTP

SEQ ID NO: 32935 - protein, 16 aa, Homo Sapiens
TPTAPAVNLAGARTPA

SEQ ID NO: 32936 - protein, 16 aa, Homo Sapiens
PTAPAVNLAGARTPAA

SEQ ID NO: 32937 - protein, 16 aa, Homo Sapiens
TAPAVNLAGARTPAAL

SEQ ID NO: 32938 - protein, 16 aa, Homo Sapiens
APAVNLAGARTPAALA

SEQ ID NO: 32939 - protein, 16 aa, Homo Sapiens
PAVNLAGARTPAALAA

SEQ ID NO: 32940 - protein, 16 aa, Homo Sapiens
AVNLAGARTPAALAAL

SEQ ID NO: 32941 - protein, 16 aa, Homo Sapiens
VNLAGARTPAALAALS

SEQ ID NO: 32942 - protein, 16 aa, Homo Sapiens
NLAGARTPAALAALSL

SEQ ID NO: 32943 - protein, 16 aa, Homo Sapiens
LAGARTPAALAALSLT

SEQ ID NO: 32944 - protein, 16 aa, Homo Sapiens
AGARTPAALAALSLTG

SEQ ID NO: 32945 - protein, 16 aa, Homo Sapiens
GARTPAALAALSLTGS

SEQ ID NO: 32946 - protein, 16 aa, Homo Sapiens
ARTPAALAALSLTGSG

SEQ ID NO: 32947 - protein, 16 aa, Homo Sapiens
RTPAALAALSLTGSGT

SEQ ID NO: 32948 - protein, 16 aa, Homo Sapiens
TPAALAALSLTGSGTP

SEQ ID NO: 32949 - protein, 16 aa, Homo Sapiens
PAALAALSLTGSGTPP

SEQ ID NO: 32950 - protein, 16 aa, Homo Sapiens
AALAALSLTGSGTPPT

SEQ ID NO: 32951 - protein, 16 aa, Homo Sapiens
ALAALSLTGSGTPPTA

SEQ ID NO: 32952 - protein, 16 aa, Homo Sapiens
LAALSLTGSGTPPTAA

SEQ ID NO: 32953 - protein, 16 aa, Homo Sapiens
AALSLTGSGTPPTAAN

SEQ ID NO: 32954 - protein, 16 aa, Homo Sapiens
ALSLTGSGTPPTAANY

SEQ ID NO: 32955 - protein, 16 aa, Homo Sapiens
LSLTGSGTPPTAANYP

SEQ ID NO: 32956 - protein, 16 aa, Homo Sapiens
SLTGSGTPPTAANYPS

SEQ ID NO: 32957 - protein, 16 aa, Homo Sapiens
LTGSGTPPTAANYPSS

SEQ ID NO: 32958 - protein, 16 aa, Homo Sapiens
TGSGTPPTAANYPSSS

SEQ ID NO: 32959 - protein, 16 aa, Homo Sapiens
GSGTPPTAANYPSSSR

SEQ ID NO: 32960 - protein, 16 aa, Homo Sapiens
SGTPPTAANYPSSSRT

SEQ ID NO: 32961 - protein, 16 aa, Homo Sapiens
GTPPTAANYPSSSRTP

SEQ ID NO: 32962 - protein, 16 aa, Homo Sapiens
TPPTAANYPSSSRTPQ

SEQ ID NO: 32963 - protein, 16 aa, Homo Sapiens
PPTAANYPSSSRTPQA

SEQ ID NO: 32964 - protein, 16 aa, Homo Sapiens
PTAANYPSSSRTPQAP

SEQ ID NO: 32965 - protein, 16 aa, Homo Sapiens
TAANYPSSSRTPQAPA

SEQ ID NO: 32966 - protein, 16 aa, Homo Sapiens
AANYPSSSRTPQAPAS

SEQ ID NO: 32967 - protein, 16 aa, Homo Sapiens
ANYPSSSRTPQAPASA

SEQ ID NO: 32968 - protein, 16 aa, Homo Sapiens
NYPSSSRTPQAPASAN

SEQ ID NO: 32969 - protein, 16 aa, Homo Sapiens
YPSSSRTPQAPASANL

SEQ ID NO: 32970 - protein, 16 aa, Homo Sapiens
PSSSRTPQAPASANLV

SEQ ID NO: 32971 - protein, 16 aa, Homo Sapiens
SSSRTPQAPASANLVG

SEQ ID NO: 32972 - protein, 16 aa, Homo Sapiens
SSRTPQAPASANLVGP

SEQ ID NO: 32973 - protein, 16 aa, Homo Sapiens
SRTPQAPASANLVGPR

SEQ ID NO: 32974 - protein, 16 aa, Homo Sapiens
RTPQAPASANLVGPRS

SEQ ID NO: 32975 - protein, 16 aa, Homo Sapiens
TPQAPASANLVGPRSA

SEQ ID NO: 32976 - protein, 16 aa, Homo Sapiens
PQAPASANLVGPRSAH

SEQ ID NO: 32977 - protein, 16 aa, Homo Sapiens
QAPASANLVGPRSAHA

SEQ ID NO: 32978 - protein, 16 aa, Homo Sapiens
APASANLVGPRSAHAT

SEQ ID NO: 32979 - protein, 16 aa, Homo Sapiens
PASANLVGPRSAHATA

SEQ ID NO: 32980 - protein, 16 aa, Homo Sapiens
ASANLVGPRSAHATAP

SEQ ID NO: 32981 - protein, 16 aa, Homo Sapiens
SANLVGPRSAHATAPV

SEQ ID NO: 32982 - protein, 16 aa, Homo Sapiens
ANLVGPRSAHATAPVN

SEQ ID NO: 32983 - protein, 16 aa, Homo Sapiens
NLVGPRSAHATAPVNI

SEQ ID NO: 32984 - protein, 16 aa, Homo Sapiens
LVGPRSAHATAPVNIA

SEQ ID NO: 32985 - protein, 16 aa, Homo Sapiens
VGPRSAHATAPVNIAG

SEQ ID NO: 32986 - protein, 16 aa, Homo Sapiens
GPRSAHATAPVNIAGS

SEQ ID NO: 32987 - protein, 16 aa, Homo Sapiens
PRSAHATAPVNIAGSR

SEQ ID NO: 32988 - protein, 16 aa, Homo Sapiens
RSAHATAPVNIAGSRT

SEQ ID NO: 32989 - protein, 16 aa, Homo Sapiens
SAHATAPVNIAGSRTA

SEQ ID NO: 32990 - protein, 16 aa, Homo Sapiens
AHATAPVNIAGSRTAA

SEQ ID NO: 32991 - protein, 16 aa, Homo Sapiens
HATAPVNIAGSRTAAA

SEQ ID NO: 32992 - protein, 16 aa, Homo Sapiens
ATAPVNIAGSRTAAAL

SEQ ID NO: 32993 - protein, 16 aa, Homo Sapiens
TAPVNIAGSRTAAALA

SEQ ID NO: 32994 - protein, 16 aa, Homo Sapiens
APVNIAGSRTAAALAP

SEQ ID NO: 32995 - protein, 16 aa, Homo Sapiens
PVNIAGSRTAAALAPA

SEQ ID NO: 32996 - protein, 16 aa, Homo Sapiens
VNIAGSRTAAALAPAS

SEQ ID NO: 32997 - protein, 16 aa, Homo Sapiens
NIAGSRTAAALAPASL

SEQ ID NO: 32998 - protein, 16 aa, Homo Sapiens
IAGSRTAAALAPASLT

SEQ ID NO: 32999 - protein, 16 aa, Homo Sapiens
AGSRTAAALAPASLTS

SEQ ID NO: 33000 - protein, 16 aa, Homo Sapiens
GSRTAAALAPASLTSA

SEQ ID NO: 33001 - protein, 16 aa, Homo Sapiens
SRTAAALAPASLTSAR

SEQ ID NO: 33002 - protein, 16 aa, Homo Sapiens
RTAAALAPASLTSARM

SEQ ID NO: 33003 - protein, 16 aa, Homo Sapiens
TAAALAPASLTSARMA

SEQ ID NO: 33004 - protein, 16 aa, Homo Sapiens
AAALAPASLTSARMAP

SEQ ID NO: 33005 - protein, 16 aa, Homo Sapiens
AALAPASLTSARMAPA

SEQ ID NO: 33006 - protein, 16 aa, Homo Sapiens
ALAPASLTSARMAPAL

SEQ ID NO: 33007 - protein, 16 aa, Homo Sapiens
LAPASLTSARMAPALS

SEQ ID NO: 33008 - protein, 16 aa, Homo Sapiens
APASLTSARMAPALSG

SEQ ID NO: 33009 - protein, 16 aa, Homo Sapiens
PASLTSARMAPALSGA

SEQ ID NO: 33010 - protein, 16 aa, Homo Sapiens
ASLTSARMAPALSGAN

SEQ ID NO: 33011 - protein, 16 aa, Homo Sapiens
SLTSARMAPALSGANL

SEQ ID NO: 33012 - protein, 16 aa, Homo Sapiens
LTSARMAPALSGANLT

SEQ ID NO: 33013 - protein, 16 aa, Homo Sapiens
TSARMAPALSGANLTS

SEQ ID NO: 33014 - protein, 16 aa, Homo Sapiens
SARMAPALSGANLTSP

SEQ ID NO: 33015 - protein, 16 aa, Homo Sapiens
ARMAPALSGANLTSPR

SEQ ID NO: 33016 - protein, 16 aa, Homo Sapiens
RMAPALSGANLTSPRV

SEQ ID NO: 33017 - protein, 16 aa, Homo Sapiens
MAPALSGANLTSPRVP

SEQ ID NO: 33018 - protein, 16 aa, Homo Sapiens
APALSGANLTSPRVPL

SEQ ID NO: 33019 - protein, 16 aa, Homo Sapiens
PALSGANLTSPRVPLS

SEQ ID NO: 33020 - protein, 16 aa, Homo Sapiens
ALSGANLTSPRVPLSA

SEQ ID NO: 33021 - protein, 16 aa, Homo Sapiens
LSGANLTSPRVPLSAY

SEQ ID NO: 33022 - protein, 16 aa, Homo Sapiens
SGANLTSPRVPLSAYE

SEQ ID NO: 33023 - protein, 16 aa, Homo Sapiens
GANLTSPRVPLSAYER

SEQ ID NO: 33024 - protein, 16 aa, Homo Sapiens
ANLTSPRVPLSAYERV

SEQ ID NO: 33025 - protein, 16 aa, Homo Sapiens
NLTSPRVPLSAYERVS

SEQ ID NO: 33026 - protein, 16 aa, Homo Sapiens
LTSPRVPLSAYERVSG

SEQ ID NO: 33027 - protein, 16 aa, Homo Sapiens
TSPRVPLSAYERVSGR

SEQ ID NO: 33028 - protein, 16 aa, Homo Sapiens
SPRVPLSAYERVSGRT

SEQ ID NO: 33029 - protein, 16 aa, Homo Sapiens
PRVPLSAYERVSGRTS

SEQ ID NO: 33030 - protein, 16 aa, Homo Sapiens
RVPLSAYERVSGRTSP

SEQ ID NO: 33031 - protein, 16 aa, Homo Sapiens
VPLSAYERVSGRTSPP

SEQ ID NO: 33032 - protein, 16 aa, Homo Sapiens
PLSAYERVSGRTSPPL

SEQ ID NO: 33033 - protein, 16 aa, Homo Sapiens
LSAYERVSGRTSPPLL

SEQ ID NO: 33034 - protein, 16 aa, Homo Sapiens
SAYERVSGRTSPPLLD

SEQ ID NO: 33035 - protein, 16 aa, Homo Sapiens
AYERVSGRTSPPLLDR

SEQ ID NO: 33036 - protein, 16 aa, Homo Sapiens
YERVSGRTSPPLLDRA

SEQ ID NO: 33037 - protein, 16 aa, Homo Sapiens
ERVSGRTSPPLLDRAR

SEQ ID NO: 33038 - protein, 16 aa, Homo Sapiens
RVSGRTSPPLLDRARS

SEQ ID NO: 33039 - protein, 16 aa, Homo Sapiens
VSGRTSPPLLDRARSR

SEQ ID NO: 33040 - protein, 16 aa, Homo Sapiens
SGRTSPPLLDRARSRT

SEQ ID NO: 33041 - protein, 16 aa, Homo Sapiens
GRTSPPLLDRARSRTP

SEQ ID NO: 33042 - protein, 16 aa, Homo Sapiens
RTSPPLLDRARSRTPP

SEQ ID NO: 33043 - protein, 16 aa, Homo Sapiens
TSPPLLDRARSRTPPS

SEQ ID NO: 33044 - protein, 16 aa, Homo Sapiens
SPPLLDRARSRTPPSA

SEQ ID NO: 33045 - protein, 16 aa, Homo Sapiens
PPLLDRARSRTPPSAP

SEQ ID NO: 33046 - protein, 16 aa, Homo Sapiens
PLLDRARSRTPPSAPS

SEQ ID NO: 33047 - protein, 16 aa, Homo Sapiens
LLDRARSRTPPSAPSQ

SEQ ID NO: 33048 - protein, 16 aa, Homo Sapiens
LDRARSRTPPSAPSQS

SEQ ID NO: 33049 - protein, 16 aa, Homo Sapiens
DRARSRTPPSAPSQSR

SEQ ID NO: 33050 - protein, 16 aa, Homo Sapiens
RARSRTPPSAPSQSRM

SEQ ID NO: 33051 - protein, 16 aa, Homo Sapiens
ARSRTPPSAPSQSRMT

SEQ ID NO: 33052 - protein, 16 aa, Homo Sapiens
RSRTPPSAPSQSRMTS

SEQ ID NO: 33053 - protein, 16 aa, Homo Sapiens
SRTPPSAPSQSRMTSE

SEQ ID NO: 33054 - protein, 16 aa, Homo Sapiens
RTPPSAPSQSRMTSER

SEQ ID NO: 33055 - protein, 16 aa, Homo Sapiens
TPPSAPSQSRMTSERA

SEQ ID NO: 33056 - protein, 16 aa, Homo Sapiens
PPSAPSQSRMTSERAP

SEQ ID NO: 33057 - protein, 16 aa, Homo Sapiens
PSAPSQSRMTSERAPS

SEQ ID NO: 33058 - protein, 16 aa, Homo Sapiens
SAPSQSRMTSERAPSP

SEQ ID NO: 33059 - protein, 16 aa, Homo Sapiens
APSQSRMTSERAPSPS

SEQ ID NO: 33060 - protein, 16 aa, Homo Sapiens
PSQSRMTSERAPSPSS

SEQ ID NO: 33061 - protein, 16 aa, Homo Sapiens
SQSRMTSERAPSPSSR

SEQ ID NO: 33062 - protein, 16 aa, Homo Sapiens
QSRMTSERAPSPSSRM

SEQ ID NO: 33063 - protein, 16 aa, Homo Sapiens
SRMTSERAPSPSSRMG

SEQ ID NO: 33064 - protein, 16 aa, Homo Sapiens
RMTSERAPSPSSRMGQ

SEQ ID NO: 33065 - protein, 16 aa, Homo Sapiens
MTSERAPSPSSRMGQA

SEQ ID NO: 33066 - protein, 16 aa, Homo Sapiens
TSERAPSPSSRMGQAP

SEQ ID NO: 33067 - protein, 16 aa, Homo Sapiens
SERAPSPSSRMGQAPS

SEQ ID NO: 33068 - protein, 16 aa, Homo Sapiens
ERAPSPSSRMGQAPSQ

SEQ ID NO: 33069 - protein, 16 aa, Homo Sapiens
RAPSPSSRMGQAPSQS

SEQ ID NO: 33070 - protein, 16 aa, Homo Sapiens
APSPSSRMGQAPSQSL

SEQ ID NO: 33071 - protein, 16 aa, Homo Sapiens
PSPSSRMGQAPSQSLL

SEQ ID NO: 33072 - protein, 16 aa, Homo Sapiens
SPSSRMGQAPSQSLLP

SEQ ID NO: 33073 - protein, 16 aa, Homo Sapiens
PSSRMGQAPSQSLLPP

SEQ ID NO: 33074 - protein, 16 aa, Homo Sapiens
SSRMGQAPSQSLLPPA

SEQ ID NO: 33075 - protein, 16 aa, Homo Sapiens
SRMGQAPSQSLLPPAQ

SEQ ID NO: 33076 - protein, 16 aa, Homo Sapiens
RMGQAPSQSLLPPAQD

SEQ ID NO: 33077 - protein, 16 aa, Homo Sapiens
MGQAPSQSLLPPAQDQ

SEQ ID NO: 33078 - protein, 16 aa, Homo Sapiens
GQAPSQSLLPPAQDQP

SEQ ID NO: 33079 - protein, 16 aa, Homo Sapiens
QAPSQSLLPPAQDQPR

SEQ ID NO: 33080 - protein, 16 aa, Homo Sapiens
APSQSLLPPAQDQPRS

SEQ ID NO: 33081 - protein, 16 aa, Homo Sapiens
PSQSLLPPAQDQPRSP

SEQ ID NO: 33082 - protein, 16 aa, Homo Sapiens
SQSLLPPAQDQPRSPV

SEQ ID NO: 33083 - protein, 16 aa, Homo Sapiens
QSLLPPAQDQPRSPVP

SEQ ID NO: 33084 - protein, 16 aa, Homo Sapiens
SLLPPAQDQPRSPVPS

SEQ ID NO: 33085 - protein, 16 aa, Homo Sapiens
LLPPAQDQPRSPVPSA

SEQ ID NO: 33086 - protein, 16 aa, Homo Sapiens
LPPAQDQPRSPVPSAF

SEQ ID NO: 33087 - protein, 16 aa, Homo Sapiens
PPAQDQPRSPVPSAFS

SEQ ID NO: 33088 - protein, 16 aa, Homo Sapiens
PAQDQPRSPVPSAFSD

SEQ ID NO: 33089 - protein, 16 aa, Homo Sapiens
AQDQPRSPVPSAFSDQ

SEQ ID NO: 33090 - protein, 16 aa, Homo Sapiens
QDQPRSPVPSAFSDQS

SEQ ID NO: 33091 - protein, 16 aa, Homo Sapiens
DQPRSPVPSAFSDQSR

SEQ ID NO: 33092 - protein, 16 aa, Homo Sapiens
QPRSPVPSAFSDQSRC

SEQ ID NO: 33093 - protein, 16 aa, Homo Sapiens
PRSPVPSAFSDQSRCL

SEQ ID NO: 33094 - protein, 16 aa, Homo Sapiens
RSPVPSAFSDQSRCLI

SEQ ID NO: 33095 - protein, 16 aa, Homo Sapiens
SPVPSAFSDQSRCLIA

SEQ ID NO: 33096 - protein, 16 aa, Homo Sapiens
PVPSAFSDQSRCLIAQ

SEQ ID NO: 33097 - protein, 16 aa, Homo Sapiens
VPSAFSDQSRCLIAQT

SEQ ID NO: 33098 - protein, 16 aa, Homo Sapiens
PSAFSDQSRCLIAQTT

SEQ ID NO: 33099 - protein, 16 aa, Homo Sapiens
SAFSDQSRCLIAQTTP

SEQ ID NO: 33100 - protein, 16 aa, Homo Sapiens
AFSDQSRCLIAQTTPV

SEQ ID NO: 33101 - protein, 16 aa, Homo Sapiens
FSDQSRCLIAQTTPVA

SEQ ID NO: 33102 - protein, 16 aa, Homo Sapiens
SDQSRCLIAQTTPVAG

SEQ ID NO: 33103 - protein, 16 aa, Homo Sapiens
DQSRCLIAQTTPVAGS

SEQ ID NO: 33104 - protein, 16 aa, Homo Sapiens
QSRCLIAQTTPVAGSQ

SEQ ID NO: 33105 - protein, 16 aa, Homo Sapiens
SRCLIAQTTPVAGSQS

SEQ ID NO: 33106 - protein, 16 aa, Homo Sapiens
RCLIAQTTPVAGSQSL

SEQ ID NO: 33107 - protein, 16 aa, Homo Sapiens
CLIAQTTPVAGSQSLS

SEQ ID NO: 33108 - protein, 16 aa, Homo Sapiens
LIAQTTPVAGSQSLSS

SEQ ID NO: 33109 - protein, 16 aa, Homo Sapiens
IAQTTPVAGSQSLSSG

SEQ ID NO: 33110 - protein, 16 aa, Homo Sapiens
AQTTPVAGSQSLSSGA

SEQ ID NO: 33111 - protein, 16 aa, Homo Sapiens
QTTPVAGSQSLSSGAV

SEQ ID NO: 33112 - protein, 16 aa, Homo Sapiens
TTPVAGSQSLSSGAVA

SEQ ID NO: 33113 - protein, 16 aa, Homo Sapiens
TPVAGSQSLSSGAVAT

SEQ ID NO: 33114 - protein, 16 aa, Homo Sapiens
PVAGSQSLSSGAVATT

SEQ ID NO: 33115 - protein, 16 aa, Homo Sapiens
VAGSQSLSSGAVATTT

SEQ ID NO: 33116 - protein, 16 aa, Homo Sapiens
AGSQSLSSGAVATTTS

SEQ ID NO: 33117 - protein, 16 aa, Homo Sapiens
GSQSLSSGAVATTTSS

SEQ ID NO: 33118 - protein, 16 aa, Homo Sapiens
SQSLSSGAVATTTSSA

SEQ ID NO: 33119 - protein, 16 aa, Homo Sapiens
QSLSSGAVATTTSSAG

SEQ ID NO: 33120 - protein, 16 aa, Homo Sapiens
SLSSGAVATTTSSAGD

SEQ ID NO: 33121 - protein, 16 aa, Homo Sapiens
LSSGAVATTTSSAGDH

SEQ ID NO: 33122 - protein, 16 aa, Homo Sapiens
SSGAVATTTSSAGDHN

SEQ ID NO: 33123 - protein, 16 aa, Homo Sapiens
SGAVATTTSSAGDHNG

SEQ ID NO: 33124 - protein, 16 aa, Homo Sapiens
GAVATTTSSAGDHNGM

SEQ ID NO: 33125 - protein, 16 aa, Homo Sapiens
AVATTTSSAGDHNGML

SEQ ID NO: 33126 - protein, 16 aa, Homo Sapiens
VATTTSSAGDHNGMLS

SEQ ID NO: 33127 - protein, 16 aa, Homo Sapiens
ATTTSSAGDHNGMLSV

SEQ ID NO: 33128 - protein, 16 aa, Homo Sapiens
TTTSSAGDHNGMLSVP

SEQ ID NO: 33129 - protein, 16 aa, Homo Sapiens
TTSSAGDHNGMLSVPA

SEQ ID NO: 33130 - protein, 16 aa, Homo Sapiens
TSSAGDHNGMLSVPAP

SEQ ID NO: 33131 - protein, 16 aa, Homo Sapiens
SSAGDHNGMLSVPAPG

SEQ ID NO: 33132 - protein, 16 aa, Homo Sapiens
SAGDHNGMLSVPAPGV

SEQ ID NO: 33133 - protein, 16 aa, Homo Sapiens
AGDHNGMLSVPAPGVP

SEQ ID NO: 33134 - protein, 16 aa, Homo Sapiens
GDHNGMLSVPAPGVPH

SEQ ID NO: 33135 - protein, 16 aa, Homo Sapiens
DHNGMLSVPAPGVPHS

SEQ ID NO: 33136 - protein, 16 aa, Homo Sapiens
HNGMLSVPAPGVPHSD

SEQ ID NO: 33137 - protein, 16 aa, Homo Sapiens
NGMLSVPAPGVPHSDV

SEQ ID NO: 33138 - protein, 16 aa, Homo Sapiens
GMLSVPAPGVPHSDVG

SEQ ID NO: 33139 - protein, 16 aa, Homo Sapiens
MLSVPAPGVPHSDVGE

SEQ ID NO: 33140 - protein, 16 aa, Homo Sapiens
LSVPAPGVPHSDVGEP

SEQ ID NO: 33141 - protein, 16 aa, Homo Sapiens
SVPAPGVPHSDVGEPP

SEQ ID NO: 33142 - protein, 16 aa, Homo Sapiens
VPAPGVPHSDVGEPPA

SEQ ID NO: 33143 - protein, 16 aa, Homo Sapiens
PAPGVPHSDVGEPPAS

SEQ ID NO: 33144 - protein, 16 aa, Homo Sapiens
APGVPHSDVGEPPAST

SEQ ID NO: 33145 - protein, 16 aa, Homo Sapiens
PGVPHSDVGEPPASTG

SEQ ID NO: 33146 - protein, 16 aa, Homo Sapiens
GVPHSDVGEPPASTGA

SEQ ID NO: 33147 - protein, 16 aa, Homo Sapiens
VPHSDVGEPPASTGAQ

SEQ ID NO: 33148 - protein, 16 aa, Homo Sapiens
PHSDVGEPPASTGAQQ

SEQ ID NO: 33149 - protein, 16 aa, Homo Sapiens
HSDVGEPPASTGAQQP

SEQ ID NO: 33150 - protein, 16 aa, Homo Sapiens
SDVGEPPASTGAQQPS

SEQ ID NO: 33151 - protein, 16 aa, Homo Sapiens
DVGEPPASTGAQQPSA

SEQ ID NO: 33152 - protein, 16 aa, Homo Sapiens
VGEPPASTGAQQPSAL

SEQ ID NO: 33153 - protein, 16 aa, Homo Sapiens
GEPPASTGAQQPSALA

SEQ ID NO: 33154 - protein, 16 aa, Homo Sapiens
EPPASTGAQQPSALAA

SEQ ID NO: 33155 - protein, 16 aa, Homo Sapiens
PPASTGAQQPSALAAL

SEQ ID NO: 33156 - protein, 16 aa, Homo Sapiens
PASTGAQQPSALAALQ

SEQ ID NO: 33157 - protein, 16 aa, Homo Sapiens
ASTGAQQPSALAALQP

SEQ ID NO: 33158 - protein, 16 aa, Homo Sapiens
STGAQQPSALAALQPA

SEQ ID NO: 33159 - protein, 16 aa, Homo Sapiens
TGAQQPSALAALQPAK

SEQ ID NO: 33160 - protein, 16 aa, Homo Sapiens
GAQQPSALAALQPAKE

SEQ ID NO: 33161 - protein, 16 aa, Homo Sapiens
AQQPSALAALQPAKER

SEQ ID NO: 33162 - protein, 16 aa, Homo Sapiens
QQPSALAALQPAKERR

SEQ ID NO: 33163 - protein, 16 aa, Homo Sapiens
QPSALAALQPAKERRS

SEQ ID NO: 33164 - protein, 16 aa, Homo Sapiens
PSALAALQPAKERRSS

SEQ ID NO: 33165 - protein, 16 aa, Homo Sapiens
SALAALQPAKERRSSS

SEQ ID NO: 33166 - protein, 16 aa, Homo Sapiens
ALAALQPAKERRSSSS

SEQ ID NO: 33167 - protein, 16 aa, Homo Sapiens
LAALQPAKERRSSSSS

SEQ ID NO: 33168 - protein, 16 aa, Homo Sapiens
AALQPAKERRSSSSSS

SEQ ID NO: 33169 - protein, 16 aa, Homo Sapiens
ALQPAKERRSSSSSSS

SEQ ID NO: 33170 - protein, 16 aa, Homo Sapiens
LQPAKERRSSSSSSSS

SEQ ID NO: 33171 - protein, 16 aa, Homo Sapiens
QPAKERRSSSSSSSSS

SEQ ID NO: 33172 - protein, 16 aa, Homo Sapiens
PAKERRSSSSSSSSSS

SEQ ID NO: 33173 - protein, 16 aa, Homo Sapiens
AKERRSSSSSSSSSSS

SEQ ID NO: 33174 - protein, 16 aa, Homo Sapiens
KERRSSSSSSSSSSSS

SEQ ID NO: 33175 - protein, 16 aa, Homo Sapiens
ERRSSSSSSSSSSSSS

SEQ ID NO: 33176 - protein, 16 aa, Homo Sapiens
RRSSSSSSSSSSSSSS

SEQ ID NO: 33177 - protein, 16 aa, Homo Sapiens
RSSSSSSSSSSSSSSS

SEQ ID NO: 33178 - protein, 16 aa, Homo Sapiens
SSSSSSSSSSSSSSSS

SEQ ID NO: 33179 - protein, 16 aa, Homo Sapiens
SSSSSSSSSSSSSSSS

SEQ ID NO: 33180 - protein, 16 aa, Homo Sapiens
SSSSSSSSSSSSSSSS

SEQ ID NO: 33181 - protein, 16 aa, Homo Sapiens
SSSSSSSSSSSSSSSS

SEQ ID NO: 33182 - protein, 16 aa, Homo Sapiens
SSSSSSSSSSSSSSSS

SEQ ID NO: 33183 - protein, 16 aa, Homo Sapiens
SSSSSSSSSSSSSSSS

SEQ ID NO: 33184 - protein, 16 aa, Homo Sapiens
SSSSSSSSSSSSSSSS

SEQ ID NO: 33185 - protein, 16 aa, Homo Sapiens
SSSSSSSSSSSSSSSS

SEQ ID NO: 33186 - protein, 16 aa, Homo Sapiens
SSSSSSSSSSSSSSSS

SEQ ID NO: 33187 - protein, 16 aa, Homo Sapiens
SSSSSSSSSSSSSSSS

SEQ ID NO: 33188 - protein, 16 aa, Homo Sapiens
SSSSSSSSSSSSSSSG

SEQ ID NO: 33189 - protein, 16 aa, Homo Sapiens
SSSSSSSSSSSSSSGS

SEQ ID NO: 33190 - protein, 16 aa, Homo Sapiens
SSSSSSSSSSSSSGSS

SEQ ID NO: 33191 - protein, 16 aa, Homo Sapiens
SSSSSSSSSSSSGSSS

SEQ ID NO: 33192 - protein, 16 aa, Homo Sapiens
SSSSSSSSSSSGSSSS

SEQ ID NO: 33193 - protein, 16 aa, Homo Sapiens
SSSSSSSSSSGSSSSD

SEQ ID NO: 33194 - protein, 16 aa, Homo Sapiens
SSSSSSSSSGSSSSDS

SEQ ID NO: 33195 - protein, 16 aa, Homo Sapiens
SSSSSSSSGSSSSDSE

SEQ ID NO: 33196 - protein, 16 aa, Homo Sapiens
SSSSSSSGSSSSDSEG

SEQ ID NO: 33197 - protein, 16 aa, Homo Sapiens
SSSSSSGSSSSDSEGS

SEQ ID NO: 33198 - protein, 16 aa, Homo Sapiens
SSSSSGSSSSDSEGSS

SEQ ID NO: 33199 - protein, 16 aa, Homo Sapiens
SSSSGSSSSDSEGSSL

SEQ ID NO: 33200 - protein, 16 aa, Homo Sapiens
SSSGSSSSDSEGSSLP

SEQ ID NO: 33201 - protein, 16 aa, Homo Sapiens
SSGSSSSDSEGSSLPV

SEQ ID NO: 33202 - protein, 16 aa, Homo Sapiens
SGSSSSDSEGSSLPVQ

SEQ ID NO: 33203 - protein, 16 aa, Homo Sapiens
GSSSSDSEGSSLPVQP

SEQ ID NO: 33204 - protein, 16 aa, Homo Sapiens
SSSSDSEGSSLPVQPE

SEQ ID NO: 33205 - protein, 16 aa, Homo Sapiens
SSSDSEGSSLPVQPEV

SEQ ID NO: 33206 - protein, 16 aa, Homo Sapiens
SSDSEGSSLPVQPEVA

SEQ ID NO: 33207 - protein, 16 aa, Homo Sapiens
SDSEGSSLPVQPEVAL

SEQ ID NO: 33208 - protein, 16 aa, Homo Sapiens
DSEGSSLPVQPEVALK

SEQ ID NO: 33209 - protein, 16 aa, Homo Sapiens
SEGSSLPVQPEVALKR

SEQ ID NO: 33210 - protein, 16 aa, Homo Sapiens
EGSSLPVQPEVALKRV

SEQ ID NO: 33211 - protein, 16 aa, Homo Sapiens
GSSLPVQPEVALKRVP

SEQ ID NO: 33212 - protein, 16 aa, Homo Sapiens
SSLPVQPEVALKRVPS

SEQ ID NO: 33213 - protein, 16 aa, Homo Sapiens
SLPVQPEVALKRVPSP

SEQ ID NO: 33214 - protein, 16 aa, Homo Sapiens
LPVQPEVALKRVPSPT

SEQ ID NO: 33215 - protein, 16 aa, Homo Sapiens
PVQPEVALKRVPSPTP

SEQ ID NO: 33216 - protein, 16 aa, Homo Sapiens
VQPEVALKRVPSPTPA

SEQ ID NO: 33217 - protein, 16 aa, Homo Sapiens
QPEVALKRVPSPTPAP

SEQ ID NO: 33218 - protein, 16 aa, Homo Sapiens
PEVALKRVPSPTPAPK

SEQ ID NO: 33219 - protein, 16 aa, Homo Sapiens
EVALKRVPSPTPAPKE

SEQ ID NO: 33220 - protein, 16 aa, Homo Sapiens
VALKRVPSPTPAPKEA

SEQ ID NO: 33221 - protein, 16 aa, Homo Sapiens
ALKRVPSPTPAPKEAV

SEQ ID NO: 33222 - protein, 16 aa, Homo Sapiens
LKRVPSPTPAPKEAVR

SEQ ID NO: 33223 - protein, 16 aa, Homo Sapiens
KRVPSPTPAPKEAVRE

SEQ ID NO: 33224 - protein, 16 aa, Homo Sapiens
RVPSPTPAPKEAVREG

SEQ ID NO: 33225 - protein, 16 aa, Homo Sapiens
VPSPTPAPKEAVREGR

SEQ ID NO: 33226 - protein, 16 aa, Homo Sapiens
PSPTPAPKEAVREGRP

SEQ ID NO: 33227 - protein, 16 aa, Homo Sapiens
SPTPAPKEAVREGRPP

SEQ ID NO: 33228 - protein, 16 aa, Homo Sapiens
PTPAPKEAVREGRPPE

SEQ ID NO: 33229 - protein, 16 aa, Homo Sapiens
TPAPKEAVREGRPPEP

SEQ ID NO: 33230 - protein, 16 aa, Homo Sapiens
PAPKEAVREGRPPEPT

SEQ ID NO: 33231 - protein, 16 aa, Homo Sapiens
APKEAVREGRPPEPTP

SEQ ID NO: 33232 - protein, 16 aa, Homo Sapiens
PKEAVREGRPPEPTPA

SEQ ID NO: 33233 - protein, 16 aa, Homo Sapiens
KEAVREGRPPEPTPAK

SEQ ID NO: 33234 - protein, 16 aa, Homo Sapiens
EAVREGRPPEPTPAKR

SEQ ID NO: 33235 - protein, 16 aa, Homo Sapiens
AVREGRPPEPTPAKRK

SEQ ID NO: 33236 - protein, 16 aa, Homo Sapiens
VREGRPPEPTPAKRKR

SEQ ID NO: 33237 - protein, 16 aa, Homo Sapiens
REGRPPEPTPAKRKRR

SEQ ID NO: 33238 - protein, 16 aa, Homo Sapiens
EGRPPEPTPAKRKRRS

SEQ ID NO: 33239 - protein, 16 aa, Homo Sapiens
GRPPEPTPAKRKRRSS

SEQ ID NO: 33240 - protein, 16 aa, Homo Sapiens
RPPEPTPAKRKRRSSS

SEQ ID NO: 33241 - protein, 16 aa, Homo Sapiens
PPEPTPAKRKRRSSSS

SEQ ID NO: 33242 - protein, 16 aa, Homo Sapiens
PEPTPAKRKRRSSSSS

SEQ ID NO: 33243 - protein, 16 aa, Homo Sapiens
EPTPAKRKRRSSSSSS

SEQ ID NO: 33244 - protein, 16 aa, Homo Sapiens
PTPAKRKRRSSSSSSS

SEQ ID NO: 33245 - protein, 16 aa, Homo Sapiens
TPAKRKRRSSSSSSSS

SEQ ID NO: 33246 - protein, 16 aa, Homo Sapiens
PAKRKRRSSSSSSSSS

SEQ ID NO: 33247 - protein, 16 aa, Homo Sapiens
AKRKRRSSSSSSSSSS

SEQ ID NO: 33248 - protein, 16 aa, Homo Sapiens
KRKRRSSSSSSSSSSS

SEQ ID NO: 33249 - protein, 16 aa, Homo Sapiens
RKRRSSSSSSSSSSSS

SEQ ID NO: 33250 - protein, 16 aa, Homo Sapiens
KRRSSSSSSSSSSSSS

SEQ ID NO: 33251 - protein, 16 aa, Homo Sapiens
RRSSSSSSSSSSSSSS

SEQ ID NO: 33252 - protein, 16 aa, Homo Sapiens
RSSSSSSSSSSSSSSS

SEQ ID NO: 33253 - protein, 16 aa, Homo Sapiens
SSSSSSSSSSSSSSSS

SEQ ID NO: 33254 - protein, 16 aa, Homo Sapiens
SSSSSSSSSSSSSSSS

SEQ ID NO: 33255 - protein, 16 aa, Homo Sapiens
SSSSSSSSSSSSSSSS

SEQ ID NO: 33256 - protein, 16 aa, Homo Sapiens
SSSSSSSSSSSSSSSS

SEQ ID NO: 33257 - protein, 16 aa, Homo Sapiens
SSSSSSSSSSSSSSSS

SEQ ID NO: 33258 - protein, 16 aa, Homo Sapiens
SSSSSSSSSSSSSSSS

SEQ ID NO: 33259 - protein, 16 aa, Homo Sapiens
SSSSSSSSSSSSSSSS

SEQ ID NO: 33260 - protein, 16 aa, Homo Sapiens
SSSSSSSSSSSSSSSS

SEQ ID NO: 33261 - protein, 16 aa, Homo Sapiens
SSSSSSSSSSSSSSSS

SEQ ID NO: 33262 - protein, 16 aa, Homo Sapiens
SSSSSSSSSSSSSSSS

SEQ ID NO: 33263 - protein, 16 aa, Homo Sapiens
SSSSSSSSSSSSSSSS

SEQ ID NO: 33264 - protein, 16 aa, Homo Sapiens
SSSSSSSSSSSSSSSS

SEQ ID NO: 33265 - protein, 16 aa, Homo Sapiens
SSSSSSSSSSSSSSSS

SEQ ID NO: 33266 - protein, 16 aa, Homo Sapiens
SSSSSSSSSSSSSSSS

SEQ ID NO: 33267 - protein, 16 aa, Homo Sapiens
SSSSSSSSSSSSSSSS

SEQ ID NO: 33268 - protein, 16 aa, Homo Sapiens
SSSSSSSSSSSSSSSS

SEQ ID NO: 33269 - protein, 16 aa, Homo Sapiens
SSSSSSSSSSSSSSSS

SEQ ID NO: 33270 - protein, 16 aa, Homo Sapiens
SSSSSSSSSSSSSSSS

SEQ ID NO: 33271 - protein, 16 aa, Homo Sapiens
SSSSSSSSSSSSSSSS

SEQ ID NO: 33272 - protein, 16 aa, Homo Sapiens
SSSSSSSSSSSSSSSS

SEQ ID NO: 33273 - protein, 16 aa, Homo Sapiens
SSSSSSSSSSSSSSSS

SEQ ID NO: 33274 - protein, 16 aa, Homo Sapiens
SSSSSSSSSSSSSSSS

SEQ ID NO: 33275 - protein, 16 aa, Homo Sapiens
SSSSSSSSSSSSSSSS

SEQ ID NO: 33276 - protein, 16 aa, Homo Sapiens
SSSSSSSSSSSSSSSS

SEQ ID NO: 33277 - protein, 16 aa, Homo Sapiens
SSSSSSSSSSSSSSSS

SEQ ID NO: 33278 - protein, 16 aa, Homo Sapiens
SSSSSSSSSSSSSSSS

SEQ ID NO: 33279 - protein, 16 aa, Homo Sapiens
SSSSSSSSSSSSSSSS

SEQ ID NO: 33280 - protein, 16 aa, Homo Sapiens
SSSSSSSSSSSSSSSP

SEQ ID NO: 33281 - protein, 16 aa, Homo Sapiens
SSSSSSSSSSSSSSPS

SEQ ID NO: 33282 - protein, 16 aa, Homo Sapiens
SSSSSSSSSSSSSPSP

SEQ ID NO: 33283 - protein, 16 aa, Homo Sapiens
SSSSSSSSSSSSPSPA

SEQ ID NO: 33284 - protein, 16 aa, Homo Sapiens
SSSSSSSSSSSPSPAK

SEQ ID NO: 33285 - protein, 16 aa, Homo Sapiens
SSSSSSSSSSPSPAKP

SEQ ID NO: 33286 - protein, 16 aa, Homo Sapiens
SSSSSSSSSPSPAKPG

SEQ ID NO: 33287 - protein, 16 aa, Homo Sapiens
SSSSSSSSPSPAKPGP

SEQ ID NO: 33288 - protein, 16 aa, Homo Sapiens
SSSSSSSPSPAKPGPQ

SEQ ID NO: 33289 - protein, 16 aa, Homo Sapiens
SSSSSSPSPAKPGPQA

SEQ ID NO: 33290 - protein, 16 aa, Homo Sapiens
SSSSSPSPAKPGPQAL

SEQ ID NO: 33291 - protein, 16 aa, Homo Sapiens
SSSSPSPAKPGPQALP

SEQ ID NO: 33292 - protein, 16 aa, Homo Sapiens
SSSPSPAKPGPQALPK

SEQ ID NO: 33293 - protein, 16 aa, Homo Sapiens
SSPSPAKPGPQALPKP

SEQ ID NO: 33294 - protein, 16 aa, Homo Sapiens
SPSPAKPGPQALPKPA

SEQ ID NO: 33295 - protein, 16 aa, Homo Sapiens
PSPAKPGPQALPKPAS

SEQ ID NO: 33296 - protein, 16 aa, Homo Sapiens
SPAKPGPQALPKPASP

SEQ ID NO: 33297 - protein, 16 aa, Homo Sapiens
PAKPGPQALPKPASPK

SEQ ID NO: 33298 - protein, 16 aa, Homo Sapiens
AKPGPQALPKPASPKK

SEQ ID NO: 33299 - protein, 16 aa, Homo Sapiens
KPGPQALPKPASPKKP

SEQ ID NO: 33300 - protein, 16 aa, Homo Sapiens
PGPQALPKPASPKKPP

SEQ ID NO: 33301 - protein, 16 aa, Homo Sapiens
GPQALPKPASPKKPPP

SEQ ID NO: 33302 - protein, 16 aa, Homo Sapiens
PQALPKPASPKKPPPG

SEQ ID NO: 33303 - protein, 16 aa, Homo Sapiens
QALPKPASPKKPPPGE

SEQ ID NO: 33304 - protein, 16 aa, Homo Sapiens
ALPKPASPKKPPPGER

SEQ ID NO: 33305 - protein, 16 aa, Homo Sapiens
LPKPASPKKPPPGERR

SEQ ID NO: 33306 - protein, 16 aa, Homo Sapiens
PKPASPKKPPPGERRS

SEQ ID NO: 33307 - protein, 16 aa, Homo Sapiens
KPASPKKPPPGERRSR

SEQ ID NO: 33308 - protein, 16 aa, Homo Sapiens
PASPKKPPPGERRSRS

SEQ ID NO: 33309 - protein, 16 aa, Homo Sapiens
ASPKKPPPGERRSRSP

SEQ ID NO: 33310 - protein, 16 aa, Homo Sapiens
SPKKPPPGERRSRSPR

SEQ ID NO: 33311 - protein, 16 aa, Homo Sapiens
PKKPPPGERRSRSPRK

SEQ ID NO: 33312 - protein, 16 aa, Homo Sapiens
KKPPPGERRSRSPRKP

SEQ ID NO: 33313 - protein, 16 aa, Homo Sapiens
KPPPGERRSRSPRKPI

SEQ ID NO: 33314 - protein, 16 aa, Homo Sapiens
PPPGERRSRSPRKPID

SEQ ID NO: 33315 - protein, 16 aa, Homo Sapiens
PPGERRSRSPRKPIDS

SEQ ID NO: 33316 - protein, 16 aa, Homo Sapiens
PGERRSRSPRKPIDSL

SEQ ID NO: 33317 - protein, 16 aa, Homo Sapiens
GERRSRSPRKPIDSLR

SEQ ID NO: 33318 - protein, 16 aa, Homo Sapiens
ERRSRSPRKPIDSLRD

SEQ ID NO: 33319 - protein, 16 aa, Homo Sapiens
RRSRSPRKPIDSLRDS

SEQ ID NO: 33320 - protein, 16 aa, Homo Sapiens
RSRSPRKPIDSLRDSR

SEQ ID NO: 33321 - protein, 16 aa, Homo Sapiens
SRSPRKPIDSLRDSRS

SEQ ID NO: 33322 - protein, 16 aa, Homo Sapiens
RSPRKPIDSLRDSRSL

SEQ ID NO: 33323 - protein, 16 aa, Homo Sapiens
SPRKPIDSLRDSRSLS

SEQ ID NO: 33324 - protein, 16 aa, Homo Sapiens
PRKPIDSLRDSRSLSY

SEQ ID NO: 33325 - protein, 16 aa, Homo Sapiens
RKPIDSLRDSRSLSYS

SEQ ID NO: 33326 - protein, 16 aa, Homo Sapiens
KPIDSLRDSRSLSYSP

SEQ ID NO: 33327 - protein, 16 aa, Homo Sapiens
PIDSLRDSRSLSYSPV

SEQ ID NO: 33328 - protein, 16 aa, Homo Sapiens
IDSLRDSRSLSYSPVE

SEQ ID NO: 33329 - protein, 16 aa, Homo Sapiens
DSLRDSRSLSYSPVER

SEQ ID NO: 33330 - protein, 16 aa, Homo Sapiens
SLRDSRSLSYSPVERR

SEQ ID NO: 33331 - protein, 16 aa, Homo Sapiens
LRDSRSLSYSPVERRR

SEQ ID NO: 33332 - protein, 16 aa, Homo Sapiens
RDSRSLSYSPVERRRP

SEQ ID NO: 33333 - protein, 16 aa, Homo Sapiens
DSRSLSYSPVERRRPS

SEQ ID NO: 33334 - protein, 16 aa, Homo Sapiens
SRSLSYSPVERRRPSP

SEQ ID NO: 33335 - protein, 16 aa, Homo Sapiens
RSLSYSPVERRRPSPQ

SEQ ID NO: 33336 - protein, 16 aa, Homo Sapiens
SLSYSPVERRRPSPQP

SEQ ID NO: 33337 - protein, 16 aa, Homo Sapiens
LSYSPVERRRPSPQPS

SEQ ID NO: 33338 - protein, 16 aa, Homo Sapiens
SYSPVERRRPSPQPSP

SEQ ID NO: 33339 - protein, 16 aa, Homo Sapiens
YSPVERRRPSPQPSPR

SEQ ID NO: 33340 - protein, 16 aa, Homo Sapiens
SPVERRRPSPQPSPRD

SEQ ID NO: 33341 - protein, 16 aa, Homo Sapiens
PVERRRPSPQPSPRDQ

SEQ ID NO: 33342 - protein, 16 aa, Homo Sapiens
VERRRPSPQPSPRDQQ

SEQ ID NO: 33343 - protein, 16 aa, Homo Sapiens
ERRRPSPQPSPRDQQS

SEQ ID NO: 33344 - protein, 16 aa, Homo Sapiens
RRRPSPQPSPRDQQSS

SEQ ID NO: 33345 - protein, 16 aa, Homo Sapiens
RRPSPQPSPRDQQSSS

SEQ ID NO: 33346 - protein, 16 aa, Homo Sapiens
RPSPQPSPRDQQSSSS

SEQ ID NO: 33347 - protein, 16 aa, Homo Sapiens
PSPQPSPRDQQSSSSE

SEQ ID NO: 33348 - protein, 16 aa, Homo Sapiens
SPQPSPRDQQSSSSER

SEQ ID NO: 33349 - protein, 16 aa, Homo Sapiens
PQPSPRDQQSSSSERG

SEQ ID NO: 33350 - protein, 16 aa, Homo Sapiens
QPSPRDQQSSSSERGS

SEQ ID NO: 33351 - protein, 16 aa, Homo Sapiens
PSPRDQQSSSSERGSR

SEQ ID NO: 33352 - protein, 16 aa, Homo Sapiens
SPRDQQSSSSERGSRR

SEQ ID NO: 33353 - protein, 16 aa, Homo Sapiens
PRDQQSSSSERGSRRG

SEQ ID NO: 33354 - protein, 16 aa, Homo Sapiens
RDQQSSSSERGSRRGQ

SEQ ID NO: 33355 - protein, 16 aa, Homo Sapiens
DQQSSSSERGSRRGQR

SEQ ID NO: 33356 - protein, 16 aa, Homo Sapiens
QQSSSSERGSRRGQRG

SEQ ID NO: 33357 - protein, 16 aa, Homo Sapiens
QSSSSERGSRRGQRGD

SEQ ID NO: 33358 - protein, 16 aa, Homo Sapiens
SSSSERGSRRGQRGDS

SEQ ID NO: 33359 - protein, 16 aa, Homo Sapiens
SSSERGSRRGQRGDSR

SEQ ID NO: 33360 - protein, 16 aa, Homo Sapiens
SSERGSRRGQRGDSRS

SEQ ID NO: 33361 - protein, 16 aa, Homo Sapiens
SERGSRRGQRGDSRSP

SEQ ID NO: 33362 - protein, 16 aa, Homo Sapiens
ERGSRRGQRGDSRSPS

SEQ ID NO: 33363 - protein, 16 aa, Homo Sapiens
RGSRRGQRGDSRSPSH

SEQ ID NO: 33364 - protein, 16 aa, Homo Sapiens
GSRRGQRGDSRSPSHK

SEQ ID NO: 33365 - protein, 16 aa, Homo Sapiens
SRRGQRGDSRSPSHKR

SEQ ID NO: 33366 - protein, 16 aa, Homo Sapiens
RRGQRGDSRSPSHKRR

SEQ ID NO: 33367 - protein, 16 aa, Homo Sapiens
RGQRGDSRSPSHKRRR

SEQ ID NO: 33368 - protein, 16 aa, Homo Sapiens
GQRGDSRSPSHKRRRE

SEQ ID NO: 33369 - protein, 16 aa, Homo Sapiens
QRGDSRSPSHKRRRET

SEQ ID NO: 33370 - protein, 16 aa, Homo Sapiens
RGDSRSPSHKRRRETP

SEQ ID NO: 33371 - protein, 16 aa, Homo Sapiens
GDSRSPSHKRRRETPS

SEQ ID NO: 33372 - protein, 16 aa, Homo Sapiens
DSRSPSHKRRRETPSP

SEQ ID NO: 33373 - protein, 16 aa, Homo Sapiens
SRSPSHKRRRETPSPR

SEQ ID NO: 33374 - protein, 16 aa, Homo Sapiens
RSPSHKRRRETPSPRP

SEQ ID NO: 33375 - protein, 16 aa, Homo Sapiens
SPSHKRRRETPSPRPM

SEQ ID NO: 33376 - protein, 16 aa, Homo Sapiens
PSHKRRRETPSPRPMR

SEQ ID NO: 33377 - protein, 16 aa, Homo Sapiens
SHKRRRETPSPRPMRH

SEQ ID NO: 33378 - protein, 16 aa, Homo Sapiens
HKRRRETPSPRPMRHR

SEQ ID NO: 33379 - protein, 16 aa, Homo Sapiens
KRRRETPSPRPMRHRS

SEQ ID NO: 33380 - protein, 16 aa, Homo Sapiens
RRRETPSPRPMRHRSS

SEQ ID NO: 33381 - protein, 16 aa, Homo Sapiens
RRETPSPRPMRHRSSR

SEQ ID NO: 33382 - protein, 16 aa, Homo Sapiens
RETPSPRPMRHRSSRS

SEQ ID NO: 33383 - protein, 16 aa, Homo Sapiens
ETPSPRPMRHRSSRSP

SEQ ID NO: 33384 - protein, 1255 aa, Homo Sapiens [sequence omitted]

SEQ ID NO: 33385 - protein, 8 aa, Homo Sapiens
AALCRWGL

SEQ ID NO: 33386 - protein, 8 aa, Homo Sapiens
ALCRWGLL

SEQ ID NO: 33387 - protein, 8 aa, Homo Sapiens
RWGLLLAL

SEQ ID NO: 33388 - protein, 8 aa, Homo Sapiens
ALLPPGAA

SEQ ID NO: 33389 - protein, 8 aa, Homo Sapiens
LLPPGAAS

SEQ ID NO: 33390 - protein, 8 aa, Homo Sapiens
LPPGAAST

SEQ ID NO: 33391 - protein, 8 aa, Homo Sapiens
TGTDMKLR

SEQ ID NO: 33392 - protein, 8 aa, Homo Sapiens
RLPASPET

SEQ ID NO: 33393 - protein, 8 aa, Homo Sapiens
LPASPETH

SEQ ID NO: 33394 - protein, 8 aa, Homo Sapiens
SPETHLDM

SEQ ID NO: 33395 - protein, 8 aa, Homo Sapiens
PETHLDML

SEQ ID NO: 33396 - protein, 8 aa, Homo Sapiens
ETHLDMLR

SEQ ID NO: 33397 - protein, 8 aa, Homo Sapiens
HLDMLRHL

SEQ ID NO: 33398 - protein, 8 aa, Homo Sapiens
DMLRHLYQ

SEQ ID NO: 33399 - protein, 8 aa, Homo Sapiens
HLYQGCQV

SEQ ID NO: 33400 - protein, 8 aa, Homo Sapiens
VVQGNLEL

SEQ ID NO: 33401 - protein, 8 aa, Homo Sapiens
LELTYLPT

SEQ ID NO: 33402 - protein, 8 aa, Homo Sapiens
LTYLPTNA

SEQ ID NO: 33403 - protein, 8 aa, Homo Sapiens
YLPTNASL

SEQ ID NO: 33404 - protein, 8 aa, Homo Sapiens
LPTNASLS

SEQ ID NO: 33405 - protein, 8 aa, Homo Sapiens
PTNASLSF

SEQ ID NO: 33406 - protein, 8 aa, Homo Sapiens
TNASLSFL

SEQ ID NO: 33407 - protein, 8 aa, Homo Sapiens
SLSFLQDI

SEQ ID NO: 33408 - protein, 8 aa, Homo Sapiens
FLQDIQEV

SEQ ID NO: 33409 - protein, 8 aa, Homo Sapiens
DIQEVQGY

SEQ ID NO: 33410 - protein, 8 aa, Homo Sapiens
IQEVQGYV

SEQ ID NO: 33411 - protein, 8 aa, Homo Sapiens
QEVQGYVL

SEQ ID NO: 33412 - protein, 8 aa, Homo Sapiens
EVQGYVLI

SEQ ID NO: 33413 - protein, 8 aa, Homo Sapiens
VQGYVLIA

SEQ ID NO: 33414 - protein, 8 aa, Homo Sapiens
VLIAHNQV

SEQ ID NO: 33415 - protein, 8 aa, Homo Sapiens
LIAHNQVR

SEQ ID NO: 33416 - protein, 8 aa, Homo Sapiens
NQVRQVPL

SEQ ID NO: 33417 - protein, 8 aa, Homo Sapiens
RQVPLQRL

SEQ ID NO: 33418 - protein, 8 aa, Homo Sapiens
QVPLQRLR

SEQ ID NO: 33419 - protein, 8 aa, Homo Sapiens
VPLQRLRI

SEQ ID NO: 33420 - protein, 8 aa, Homo Sapiens
PLQRLRIV

SEQ ID NO: 33421 - protein, 8 aa, Homo Sapiens
LQRLRIVR

SEQ ID NO: 33422 - protein, 8 aa, Homo Sapiens
RLRIVRGT

SEQ ID NO: 33423 - protein, 8 aa, Homo Sapiens
RIVRGTQL

SEQ ID NO: 33424 - protein, 8 aa, Homo Sapiens
IVRGTQLF

SEQ ID NO: 33425 - protein, 8 aa, Homo Sapiens
QLFEDNYA

SEQ ID NO: 33426 - protein, 8 aa, Homo Sapiens
FEDNYALA

SEQ ID NO: 33427 - protein, 8 aa, Homo Sapiens
VLDNGDPL

SEQ ID NO: 33428 - protein, 8 aa, Homo Sapiens
PLNNTTPV

SEQ ID NO: 33429 - protein, 8 aa, Homo Sapiens
NTTPVTGA

SEQ ID NO: 33430 - protein, 8 aa, Homo Sapiens
TGASPGGL

SEQ ID NO: 33431 - protein, 8 aa, Homo Sapiens
SPGGLREL

SEQ ID NO: 33432 - protein, 8 aa, Homo Sapiens
GLRELQLR

SEQ ID NO: 33433 - protein, 8 aa, Homo Sapiens
RELQLRSL

SEQ ID NO: 33434 - protein, 8 aa, Homo Sapiens
LQLRSLTE

SEQ ID NO: 33435 - protein, 8 aa, Homo Sapiens
QLRSLTEI

SEQ ID NO: 33436 - protein, 8 aa, Homo Sapiens
RSLTEILK

SEQ ID NO: 33437 - protein, 8 aa, Homo Sapiens
SLTEILKG

SEQ ID NO: 33438 - protein, 8 aa, Homo Sapiens
EILKGGVL

SEQ ID NO: 33439 - protein, 8 aa, Homo Sapiens
ILKGGVLI

SEQ ID NO: 33440 - protein, 8 aa, Homo Sapiens
KGGVLIQR

SEQ ID NO: 33441 - protein, 8 aa, Homo Sapiens
LIQRNPQL

SEQ ID NO: 33442 - protein, 8 aa, Homo Sapiens
CYQDTILW

SEQ ID NO: 33443 - protein, 8 aa, Homo Sapiens
YQDTILWK

SEQ ID NO: 33444 - protein, 8 aa, Homo Sapiens
TILWKDIF

SEQ ID NO: 33445 - protein, 8 aa, Homo Sapiens
LWKDIFHK

SEQ ID NO: 33446 - protein, 8 aa, Homo Sapiens
IFHKNNQL

SEQ ID NO: 33447 - protein, 8 aa, Homo Sapiens
NQLALTLI

SEQ ID NO: 33448 - protein, 8 aa, Homo Sapiens
LTLIDTNR

SEQ ID NO: 33449 - protein, 8 aa, Homo Sapiens
HPCSPMCK

SEQ ID NO: 33450 - protein, 8 aa, Homo Sapiens
EDCQSLTR

SEQ ID NO: 33451 - protein, 8 aa, Homo Sapiens
CQSLTRTV

SEQ ID NO: 33452 - protein, 8 aa, Homo Sapiens
SLTRTVCA

SEQ ID NO: 33453 - protein, 8 aa, Homo Sapiens
AGGCARCK

SEQ ID NO: 33454 - protein, 8 aa, Homo Sapiens
CARCKGPL

SEQ ID NO: 33455 - protein, 8 aa, Homo Sapiens
AAGCTGPK

SEQ ID NO: 33456 - protein, 8 aa, Homo Sapiens
GPKHSDCL

SEQ ID NO: 33457 - protein, 8 aa, Homo Sapiens
NHSGICEL

SEQ ID NO: 33458 - protein, 8 aa, Homo Sapiens
CELHCPAL

SEQ ID NO: 33459 - protein, 8 aa, Homo Sapiens
ELHCPALV

SEQ ID NO: 33460 - protein, 8 aa, Homo Sapiens
HCPALVTY

SEQ ID NO: 33461 - protein, 8 aa, Homo Sapiens
VTYNTDTF

SEQ ID NO: 33462 - protein, 8 aa, Homo Sapiens
NTDTFESM

SEQ ID NO: 33463 - protein, 8 aa, Homo Sapiens
MPNPEGRY

SEQ ID NO: 33464 - protein, 8 aa, Homo Sapiens
NPEGRYTF

SEQ ID NO: 33465 - protein, 8 aa, Homo Sapiens
YTFGASCV

SEQ ID NO: 33466 - protein, 8 aa, Homo Sapiens
FGASCVTA

SEQ ID NO: 33467 - protein, 8 aa, Homo Sapiens
SCVTACPY

SEQ ID NO: 33468 - protein, 8 aa, Homo Sapiens
VTACPYNY

SEQ ID NO: 33469 - protein, 8 aa, Homo Sapiens
TACPYNYL

SEQ ID NO: 33470 - protein, 8 aa, Homo Sapiens
CPYNYLST

SEQ ID NO: 33471 - protein, 8 aa, Homo Sapiens
YLSTDVGS

SEQ ID NO: 33472 - protein, 8 aa, Homo Sapiens
DVGSCTLV

SEQ ID NO: 33473 - protein, 8 aa, Homo Sapiens
CPLHNQEV

SEQ ID NO: 33474 - protein, 8 aa, Homo Sapiens
TAEDGTQR

SEQ ID NO: 33475 - protein, 8 aa, Homo Sapiens
KCSKPCAR

SEQ ID NO: 33476 - protein, 8 aa, Homo Sapiens
GLGMEHLR

SEQ ID NO: 33477 - protein, 8 aa, Homo Sapiens
GMEHLREV

SEQ ID NO: 33478 - protein, 8 aa, Homo Sapiens
HLREVRAV

SEQ ID NO: 33479 - protein, 8 aa, Homo Sapiens
EVRAVTSA

SEQ ID NO: 33480 - protein, 8 aa, Homo Sapiens
TSANIQEF

SEQ ID NO: 33481 - protein, 8 aa, Homo Sapiens
IQEFAGCK

SEQ ID NO: 33482 - protein, 8 aa, Homo Sapiens
FAGCKKIF

SEQ ID NO: 33483 - protein, 8 aa, Homo Sapiens
KIFGSLAF

SEQ ID NO: 33484 - protein, 8 aa, Homo Sapiens
SLAFLPES

SEQ ID NO: 33485 - protein, 8 aa, Homo Sapiens
LAFLPESF

SEQ ID NO: 33486 - protein, 8 aa, Homo Sapiens
ESFDGDPA

SEQ ID NO: 33487 - protein, 8 aa, Homo Sapiens
APLQPEQL

SEQ ID NO: 33488 - protein, 8 aa, Homo Sapiens
PLQPEQLQ

SEQ ID NO: 33489 - protein, 8 aa, Homo Sapiens
LQPEQLQV

SEQ ID NO: 33490 - protein, 8 aa, Homo Sapiens
QPEQLQVF

SEQ ID NO: 33491 - protein, 8 aa, Homo Sapiens
QLQVFETL

SEQ ID NO: 33492 - protein, 8 aa, Homo Sapiens
LEEITGYL

SEQ ID NO: 33493 - protein, 8 aa, Homo Sapiens
EEITGYLY

SEQ ID NO: 33494 - protein, 8 aa, Homo Sapiens
EITGYLYI

SEQ ID NO: 33495 - protein, 8 aa, Homo Sapiens
GYLYISAW

SEQ ID NO: 33496 - protein, 8 aa, Homo Sapiens
YLYISAWP

SEQ ID NO: 33497 - protein, 8 aa, Homo Sapiens
ISAWPDSL

SEQ ID NO: 33498 - protein, 8 aa, Homo Sapiens
WPDSLPDL

SEQ ID NO: 33499 - protein, 8 aa, Homo Sapiens
SLPDLSVF

SEQ ID NO: 33500 - protein, 8 aa, Homo Sapiens
DLSVFQNL

SEQ ID NO: 33501 - protein, 8 aa, Homo Sapiens
SVFQNLQV

SEQ ID NO: 33502 - protein, 8 aa, Homo Sapiens
VFQNLQVI

SEQ ID NO: 33503 - protein, 8 aa, Homo Sapiens
FQNLQVIR

SEQ ID NO: 33504 - protein, 8 aa, Homo Sapiens
NLQVIRGR

SEQ ID NO: 33505 - protein, 8 aa, Homo Sapiens
LQVIRGRI

SEQ ID NO: 33506 - protein, 8 aa, Homo Sapiens
QVIRGRIL

SEQ ID NO: 33507 - protein, 8 aa, Homo Sapiens
RILHNGAY

SEQ ID NO: 33508 - protein, 8 aa, Homo Sapiens
LHNGAYSL

SEQ ID NO: 33509 - protein, 8 aa, Homo Sapiens
LTLQGLGI

SEQ ID NO: 33510 - protein, 8 aa, Homo Sapiens
GISWLGLR

SEQ ID NO: 33511 - protein, 8 aa, Homo Sapiens
GLRSLREL

SEQ ID NO: 33512 - protein, 8 aa, Homo Sapiens
ELGSGLAL

SEQ ID NO: 33513 - protein, 8 aa, Homo Sapiens
LIHHNTHL

SEQ ID NO: 33514 - protein, 8 aa, Homo Sapiens
HLCFVHTV

SEQ ID NO: 33515 - protein, 8 aa, Homo Sapiens
CFVHTVPW

SEQ ID NO: 33516 - protein, 8 aa, Homo Sapiens
HTVPWDQL

SEQ ID NO: 33517 - protein, 8 aa, Homo Sapiens
TVPWDQLF

SEQ ID NO: 33518 - protein, 8 aa, Homo Sapiens
VPWDQLFR

SEQ ID NO: 33519 - protein, 8 aa, Homo Sapiens
QLFRNPHQ

SEQ ID NO: 33520 - protein, 8 aa, Homo Sapiens
FRNPHQAL

SEQ ID NO: 33521 - protein, 8 aa, Homo Sapiens
NPHQALLH

SEQ ID NO: 33522 - protein, 8 aa, Homo Sapiens
HQALLHTA

SEQ ID NO: 33523 - protein, 8 aa, Homo Sapiens
ALLHTANR

SEQ ID NO: 33524 - protein, 8 aa, Homo Sapiens
DECVGEGL

SEQ ID NO: 33525 - protein, 8 aa, Homo Sapiens
GLACHQLC

SEQ ID NO: 33526 - protein, 8 aa, Homo Sapiens
LCARGHCW

SEQ ID NO: 33527 - protein, 8 aa, Homo Sapiens
CVNCSQFL

SEQ ID NO: 33528 - protein, 8 aa, Homo Sapiens
VNCSQFLR

SEQ ID NO: 33529 - protein, 8 aa, Homo Sapiens
FLRGQECV

SEQ ID NO: 33530 - protein, 8 aa, Homo Sapiens
ECVEECRV

SEQ ID NO: 33531 - protein, 8 aa, Homo Sapiens
RVLQGLPR

SEQ ID NO: 33532 - protein, 8 aa, Homo Sapiens
VLQGLPRE

SEQ ID NO: 33533 - protein, 8 aa, Homo Sapiens
LQGLPREY

SEQ ID NO: 33534 - protein, 8 aa, Homo Sapiens
LPREYVNA

SEQ ID NO: 33535 - protein, 8 aa, Homo Sapiens
YVNARHCL

SEQ ID NO: 33536 - protein, 8 aa, Homo Sapiens
CQPQNGSV

SEQ ID NO: 33537 - protein, 8 aa, Homo Sapiens
CVACAHYK

SEQ ID NO: 33538 - protein, 8 aa, Homo Sapiens
YKDPPFCV

SEQ ID NO: 33539 - protein, 8 aa, Homo Sapiens
DPPFCVAR

SEQ ID NO: 33540 - protein, 8 aa, Homo Sapiens
VARCPSGV

SEQ ID NO: 33541 - protein, 8 aa, Homo Sapiens
GVKPDLSY

SEQ ID NO: 33542 - protein, 8 aa, Homo Sapiens
LSYMPIWK

SEQ ID NO: 33543 - protein, 8 aa, Homo Sapiens
SYMPIWKF

SEQ ID NO: 33544 - protein, 8 aa, Homo Sapiens
MPIWKFPD

SEQ ID NO: 33545 - protein, 8 aa, Homo Sapiens
FPDEEGAC

SEQ ID NO: 33546 - protein, 8 aa, Homo Sapiens
AEQRASPL

SEQ ID NO: 33547 - protein, 8 aa, Homo Sapiens
RASPLTSI

SEQ ID NO: 33548 - protein, 8 aa, Homo Sapiens
PLTSIISA

SEQ ID NO: 33549 - protein, 8 aa, Homo Sapiens
LTSIISAV

SEQ ID NO: 33550 - protein, 8 aa, Homo Sapiens
TSIISAVV

SEQ ID NO: 33551 - protein, 8 aa, Homo Sapiens
IISAVVGI

SEQ ID NO: 33552 - protein, 8 aa, Homo Sapiens
SAVVGILL

SEQ ID NO: 33553 - protein, 8 aa, Homo Sapiens
AVVGILLV

SEQ ID NO: 33554 - protein, 8 aa, Homo Sapiens
VVGILLVV

SEQ ID NO: 33555 - protein, 8 aa, Homo Sapiens
GILLVVVL

SEQ ID NO: 33556 - protein, 8 aa, Homo Sapiens
LLVVVLGV

SEQ ID NO: 33557 - protein, 8 aa, Homo Sapiens
LVVVLGVV

SEQ ID NO: 33558 - protein, 8 aa, Homo Sapiens
VVVLGVVF

SEQ ID NO: 33559 - protein, 8 aa, Homo Sapiens
VLGVVFGI

SEQ ID NO: 33560 - protein, 8 aa, Homo Sapiens
VVFGILIK

SEQ ID NO: 33561 - protein, 8 aa, Homo Sapiens
VFGILIKR

SEQ ID NO: 33562 - protein, 8 aa, Homo Sapiens
LIKRRQQK

SEQ ID NO: 33563 - protein, 8 aa, Homo Sapiens
RRQQKIRK

SEQ ID NO: 33564 - protein, 8 aa, Homo Sapiens
RQQKIRKY

SEQ ID NO: 33565 - protein, 8 aa, Homo Sapiens
KIRKYTMR

SEQ ID NO: 33566 - protein, 8 aa, Homo Sapiens
KYTMRRLL

SEQ ID NO: 33567 - protein, 8 aa, Homo Sapiens
RRLLQETE

SEQ ID NO: 33568 - protein, 8 aa, Homo Sapiens
RLLQETEL

SEQ ID NO: 33569 - protein, 8 aa, Homo Sapiens
LLQETELV

SEQ ID NO: 33570 - protein, 8 aa, Homo Sapiens
ETELVEPL

SEQ ID NO: 33571 - protein, 8 aa, Homo Sapiens
EPLTPSGA

SEQ ID NO: 33572 - protein, 8 aa, Homo Sapiens
PLTPSGAM

SEQ ID NO: 33573 - protein, 8 aa, Homo Sapiens
AMPNQAQM

SEQ ID NO: 33574 - protein, 8 aa, Homo Sapiens
MPNQAQMR

SEQ ID NO: 33575 - protein, 8 aa, Homo Sapiens
QAQMRILK

SEQ ID NO: 33576 - protein, 8 aa, Homo Sapiens
RILKETEL

SEQ ID NO: 33577 - protein, 8 aa, Homo Sapiens
ILKETELR

SEQ ID NO: 33578 - protein, 8 aa, Homo Sapiens
ETELRKVK

SEQ ID NO: 33579 - protein, 8 aa, Homo Sapiens
ELRKVKVL

SEQ ID NO: 33580 - protein, 8 aa, Homo Sapiens
KVLGSGAF

SEQ ID NO: 33581 - protein, 8 aa, Homo Sapiens
GAFGTVYK

SEQ ID NO: 33582 - protein, 8 aa, Homo Sapiens
TVYKGIWI

SEQ ID NO: 33583 - protein, 8 aa, Homo Sapiens
WIPDGENV

SEQ ID NO: 33584 - protein, 8 aa, Homo Sapiens
GENVKIPV

SEQ ID NO: 33585 - protein, 8 aa, Homo Sapiens
KIPVAIKV

SEQ ID NO: 33586 - protein, 8 aa, Homo Sapiens
IPVAIKVL

SEQ ID NO: 33587 - protein, 8 aa, Homo Sapiens
PVAIKVLR

SEQ ID NO: 33588 - protein, 8 aa, Homo Sapiens
NTSPKANK

SEQ ID NO: 33589 - protein, 8 aa, Homo Sapiens
SPKANKEI

SEQ ID NO: 33590 - protein, 8 aa, Homo Sapiens
KEILDEAY

SEQ ID NO: 33591 - protein, 8 aa, Homo Sapiens
EILDEAYV

SEQ ID NO: 33592 - protein, 8 aa, Homo Sapiens
ILDEAYVM

SEQ ID NO: 33593 - protein, 8 aa, Homo Sapiens
EAYVMAGV

SEQ ID NO: 33594 - protein, 8 aa, Homo Sapiens
YVMAGVGS

SEQ ID NO: 33595 - protein, 8 aa, Homo Sapiens
MAGVGSPY

SEQ ID NO: 33596 - protein, 8 aa, Homo Sapiens
SPYVSRLL

SEQ ID NO: 33597 - protein, 8 aa, Homo Sapiens
YVSRLLGI

SEQ ID NO: 33598 - protein, 8 aa, Homo Sapiens
RLLGICLT

SEQ ID NO: 33599 - protein, 8 aa, Homo Sapiens
GICLTSTV

SEQ ID NO: 33600 - protein, 8 aa, Homo Sapiens
CLTSTVQL

SEQ ID NO: 33601 - protein, 8 aa, Homo Sapiens
LTSTVQLV

SEQ ID NO: 33602 - protein, 8 aa, Homo Sapiens
TVQLVTQL

SEQ ID NO: 33603 - protein, 8 aa, Homo Sapiens
VQLVTQLM

SEQ ID NO: 33604 - protein, 8 aa, Homo Sapiens
LVTQLMPY

SEQ ID NO: 33605 - protein, 8 aa, Homo Sapiens
QLMPYGCL

SEQ ID NO: 33606 - protein, 8 aa, Homo Sapiens
LMPYGCLL

SEQ ID NO: 33607 - protein, 8 aa, Homo Sapiens
MPYGCLLD

SEQ ID NO: 33608 - protein, 8 aa, Homo Sapiens
CLLDHVRE

SEQ ID NO: 33609 - protein, 8 aa, Homo Sapiens
HVRENRGR

SEQ ID NO: 33610 - protein, 8 aa, Homo Sapiens
GRLGSQDL

SEQ ID NO: 33611 - protein, 8 aa, Homo Sapiens
RLGSQDLL

SEQ ID NO: 33612 - protein, 8 aa, Homo Sapiens
GSQDLLNW

SEQ ID NO: 33613 - protein, 8 aa, Homo Sapiens
DLLNWCMQ

SEQ ID NO: 33614 - protein, 8 aa, Homo Sapiens
LLNWCMQI

SEQ ID NO: 33615 - protein, 8 aa, Homo Sapiens
QIAKGMSY

SEQ ID NO: 33616 - protein, 8 aa, Homo Sapiens
IAKGMSYL

SEQ ID NO: 33617 - protein, 8 aa, Homo Sapiens
GMSYLEDV

SEQ ID NO: 33618 - protein, 8 aa, Homo Sapiens
MSYLEDVR

SEQ ID NO: 33619 - protein, 8 aa, Homo Sapiens
SYLEDVRL

SEQ ID NO: 33620 - protein, 8 aa, Homo Sapiens
YLEDVRLV

SEQ ID NO: 33621 - protein, 8 aa, Homo Sapiens
EDVRLVHR

SEQ ID NO: 33622 - protein, 8 aa, Homo Sapiens
RLVHRDLA

SEQ ID NO: 33623 - protein, 8 aa, Homo Sapiens
DLAARNVL

SEQ ID NO: 33624 - protein, 8 aa, Homo Sapiens
LAARNVLV

SEQ ID NO: 33625 - protein, 8 aa, Homo Sapiens
AARNVLVK

SEQ ID NO: 33626 - protein, 8 aa, Homo Sapiens
LVKSPNHV

SEQ ID NO: 33627 - protein, 8 aa, Homo Sapiens
NHVKITDF

SEQ ID NO: 33628 - protein, 8 aa, Homo Sapiens
KITDFGLA

SEQ ID NO: 33629 - protein, 8 aa, Homo Sapiens
ITDFGLAR

SEQ ID NO: 33630 - protein, 8 aa, Homo Sapiens
GLARLLDI

SEQ ID NO: 33631 - protein, 8 aa, Homo Sapiens
RLLDIDET

SEQ ID NO: 33632 - protein, 8 aa, Homo Sapiens
EYHADGGK

SEQ ID NO: 33633 - protein, 8 aa, Homo Sapiens
YHADGGKV

SEQ ID NO: 33634 - protein, 8 aa, Homo Sapiens
VPIKWMAL

SEQ ID NO: 33635 - protein, 8 aa, Homo Sapiens
KWMALESI

SEQ ID NO: 33636 - protein, 8 aa, Homo Sapiens
WMALESIL

SEQ ID NO: 33637 - protein, 8 aa, Homo Sapiens
MALESILR

SEQ ID NO: 33638 - protein, 8 aa, Homo Sapiens
ALESILRR

SEQ ID NO: 33639 - protein, 8 aa, Homo Sapiens
ESILRRRF

SEQ ID NO: 33640 - protein, 8 aa, Homo Sapiens
RRFTHQSD

SEQ ID NO: 33641 - protein, 8 aa, Homo Sapiens
FTHQSDVW

SEQ ID NO: 33642 - protein, 8 aa, Homo Sapiens
HQSDVWSY

SEQ ID NO: 33643 - protein, 8 aa, Homo Sapiens
WSYGVTVW

SEQ ID NO: 33644 - protein, 8 aa, Homo Sapiens
YGVTVWEL

SEQ ID NO: 33645 - protein, 8 aa, Homo Sapiens
TVWELMTF

SEQ ID NO: 33646 - protein, 8 aa, Homo Sapiens
WELMTFGA

SEQ ID NO: 33647 - protein, 8 aa, Homo Sapiens
ELMTFGAK

SEQ ID NO: 33648 - protein, 8 aa, Homo Sapiens
MTFGAKPY

SEQ ID NO: 33649 - protein, 8 aa, Homo Sapiens
KPYDGIPA

SEQ ID NO: 33650 - protein, 8 aa, Homo Sapiens
EIPDLLEK

SEQ ID NO: 33651 - protein, 8 aa, Homo Sapiens
DLLEKGER

SEQ ID NO: 33652 - protein, 8 aa, Homo Sapiens
LLEKGERL

SEQ ID NO: 33653 - protein, 8 aa, Homo Sapiens
LPQPPICT

SEQ ID NO: 33654 - protein, 8 aa, Homo Sapiens
CTIDVYMI

SEQ ID NO: 33655 - protein, 8 aa, Homo Sapiens
TIDVYMIM

SEQ ID NO: 33656 - protein, 8 aa, Homo Sapiens
DVYMIMVK

SEQ ID NO: 33657 - protein, 8 aa, Homo Sapiens
YMIMVKCW

SEQ ID NO: 33658 - protein, 8 aa, Homo Sapiens
MIMVKCWM

SEQ ID NO: 33659 - protein, 8 aa, Homo Sapiens
IMVKCWMI

SEQ ID NO: 33660 - protein, 8 aa, Homo Sapiens
WMIDSECR

SEQ ID NO: 33661 - protein, 8 aa, Homo Sapiens
SECRPRFR

SEQ ID NO: 33662 - protein, 8 aa, Homo Sapiens
RPRFRELV

SEQ ID NO: 33663 - protein, 8 aa, Homo Sapiens
ELVSEFSR

SEQ ID NO: 33664 - protein, 8 aa, Homo Sapiens
LVSEFSRM

SEQ ID NO: 33665 - protein, 8 aa, Homo Sapiens
SEFSRMAR

SEQ ID NO: 33666 - protein, 8 aa, Homo Sapiens
RMARDPQR

SEQ ID NO: 33667 - protein, 8 aa, Homo Sapiens
MARDPQRF

SEQ ID NO: 33668 - protein, 8 aa, Homo Sapiens
ARDPQRFV

SEQ ID NO: 33669 - protein, 8 aa, Homo Sapiens
DLGPASPL

SEQ ID NO: 33670 - protein, 8 aa, Homo Sapiens
SPLDSTFY

SEQ ID NO: 33671 - protein, 8 aa, Homo Sapiens
PLDSTFYR

SEQ ID NO: 33672 - protein, 8 aa, Homo Sapiens
STFYRSLL

SEQ ID NO: 33673 - protein, 8 aa, Homo Sapiens
SLLEDDDM

SEQ ID NO: 33674 - protein, 8 aa, Homo Sapiens
DMGDLVDA

SEQ ID NO: 33675 - protein, 8 aa, Homo Sapiens
DLVDAEEY

SEQ ID NO: 33676 - protein, 8 aa, Homo Sapiens
LVDAEEYL

SEQ ID NO: 33677 - protein, 8 aa, Homo Sapiens
YLVPQQGF

SEQ ID NO: 33678 - protein, 8 aa, Homo Sapiens
LVPQQGFF

SEQ ID NO: 33679 - protein, 8 aa, Homo Sapiens
CPDPAPGA

SEQ ID NO: 33680 - protein, 8 aa, Homo Sapiens
APGAGGMV

SEQ ID NO: 33681 - protein, 8 aa, Homo Sapiens
AGGMVHHR

SEQ ID NO: 33682 - protein, 8 aa, Homo Sapiens
GMVHHRHR

SEQ ID NO: 33683 - protein, 8 aa, Homo Sapiens
RHRSSSTR

SEQ ID NO: 33684 - protein, 8 aa, Homo Sapiens
EEAPRSPL

SEQ ID NO: 33685 - protein, 8 aa, Homo Sapiens
APRSPLAP

SEQ ID NO: 33686 - protein, 8 aa, Homo Sapiens
PLAPSEGA

SEQ ID NO: 33687 - protein, 8 aa, Homo Sapiens
EGAGSDVF

SEQ ID NO: 33688 - protein, 8 aa, Homo Sapiens
DLGMGAAK

SEQ ID NO: 33689 - protein, 8 aa, Homo Sapiens
GMGAAKGL

SEQ ID NO: 33690 - protein, 8 aa, Homo Sapiens
AAKGLQSL

SEQ ID NO: 33691 - protein, 8 aa, Homo Sapiens
DPSPLQRY

SEQ ID NO: 33692 - protein, 8 aa, Homo Sapiens
RYSEDPTV

SEQ ID NO: 33693 - protein, 8 aa, Homo Sapiens
SEDPTVPL

SEQ ID NO: 33694 - protein, 8 aa, Homo Sapiens
LPSETDGY

SEQ ID NO: 33695 - protein, 8 aa, Homo Sapiens
YVAPLTCS

SEQ ID NO: 33696 - protein, 8 aa, Homo Sapiens
CSPQPEYV

SEQ ID NO: 33697 - protein, 8 aa, Homo Sapiens
YVNQPDVR

SEQ ID NO: 33698 - protein, 8 aa, Homo Sapiens
RPQPPSPR

SEQ ID NO: 33699 - protein, 8 aa, Homo Sapiens
PLPAARPA

SEQ ID NO: 33700 - protein, 8 aa, Homo Sapiens
LPAARPAG

SEQ ID NO: 33701 - protein, 8 aa, Homo Sapiens
AARPAGAT

SEQ ID NO: 33702 - protein, 8 aa, Homo Sapiens
RPAGATLE

SEQ ID NO: 33703 - protein, 8 aa, Homo Sapiens
GATLERPK

SEQ ID NO: 33704 - protein, 8 aa, Homo Sapiens
TLERPKTL

SEQ ID NO: 33705 - protein, 8 aa, Homo Sapiens
SPGKNGVV

SEQ ID NO: 33706 - protein, 8 aa, Homo Sapiens
VVKDVFAF

SEQ ID NO: 33707 - protein, 8 aa, Homo Sapiens
DVFAFGGA

SEQ ID NO: 33708 - protein, 8 aa, Homo Sapiens
GAVENPEY

SEQ ID NO: 33709 - protein, 8 aa, Homo Sapiens
AVENPEYL

SEQ ID NO: 33710 - protein, 8 aa, Homo Sapiens
NPEYLTPQ

SEQ ID NO: 33711 - protein, 8 aa, Homo Sapiens
YLTPQGGA

SEQ ID NO: 33712 - protein, 8 aa, Homo Sapiens
QPHPPPAF

SEQ ID NO: 33713 - protein, 8 aa, Homo Sapiens
PPPAFSPA

SEQ ID NO: 33714 - protein, 8 aa, Homo Sapiens
PPAFSPAF

SEQ ID NO: 33715 - protein, 8 aa, Homo Sapiens
FSPAFDNL

SEQ ID NO: 33716 - protein, 8 aa, Homo Sapiens
SPAFDNLY

SEQ ID NO: 33717 - protein, 8 aa, Homo Sapiens
PAFDNLYY

SEQ ID NO: 33718 - protein, 8 aa, Homo Sapiens
AFDNLYYW

SEQ ID NO: 33719 - protein, 8 aa, Homo Sapiens
RGAPPSTF

SEQ ID NO: 33720 - protein, 8 aa, Homo Sapiens
GAPPSTFK

SEQ ID NO: 33721 - protein, 8 aa, Homo Sapiens
PTAENPEY

SEQ ID NO: 33722 - protein, 8 aa, Homo Sapiens
AENPEYLG

SEQ ID NO: 33723 - protein, 8 aa, Homo Sapiens
YLGLDVPV

SEQ ID NO: 33724 - protein, 9 aa, Homo Sapiens
MELAALCRW

SEQ ID NO: 33725 - protein, 9 aa, Homo Sapiens
LAALCRWGL

SEQ ID NO: 33726 - protein, 9 aa, Homo Sapiens
AALCRWGLL

SEQ ID NO: 33727 - protein, 9 aa, Homo Sapiens
ALCRWGLLL

SEQ ID NO: 33728 - protein, 9 aa, Homo Sapiens
CRWGLLLAL

SEQ ID NO: 33729 - protein, 9 aa, Homo Sapiens
RWGLLLALL

SEQ ID NO: 33730 - protein, 9 aa, Homo Sapiens
LLALLPPGA

SEQ ID NO: 33731 - protein, 9 aa, Homo Sapiens
LALLPPGAA

SEQ ID NO: 33732 - protein, 9 aa, Homo Sapiens
ALLPPGAAS

SEQ ID NO: 33733 - protein, 9 aa, Homo Sapiens
LLPPGAAST

SEQ ID NO: 33734 - protein, 9 aa, Homo Sapiens
QVCTGTDMK

SEQ ID NO: 33735 - protein, 9 aa, Homo Sapiens
CTGTDMKLR

SEQ ID NO: 33736 - protein, 9 aa, Homo Sapiens
LPASPETHL

SEQ ID NO: 33737 - protein, 9 aa, Homo Sapiens
SPETHLDML

SEQ ID NO: 33738 - protein, 9 aa, Homo Sapiens
ETHLDMLRH

SEQ ID NO: 33739 - protein, 9 aa, Homo Sapiens
HLDMLRHLY

SEQ ID NO: 33740 - protein, 9 aa, Homo Sapiens
MLRHLYQGC

SEQ ID NO: 33741 - protein, 9 aa, Homo Sapiens
HLYQGCQVV

SEQ ID NO: 33742 - protein, 9 aa, Homo Sapiens
QVVQGNLEL

SEQ ID NO: 33743 - protein, 9 aa, Homo Sapiens
VQGNLELTY

SEQ ID NO: 33744 - protein, 9 aa, Homo Sapiens
TYLPTNASL

SEQ ID NO: 33745 - protein, 9 aa, Homo Sapiens
YLPTNASLS

SEQ ID NO: 33746 - protein, 9 aa, Homo Sapiens
LPTNASLSF

SEQ ID NO: 33747 - protein, 9 aa, Homo Sapiens
PTNASLSFL

SEQ ID NO: 33748 - protein, 9 aa, Homo Sapiens
SLSFLQDIQ

SEQ ID NO: 33749 - protein, 9 aa, Homo Sapiens
SFLQDIQEV

SEQ ID NO: 33750 - protein, 9 aa, Homo Sapiens
FLQDIQEVQ

SEQ ID NO: 33751 - protein, 9 aa, Homo Sapiens
DIQEVQGYV

SEQ ID NO: 33752 - protein, 9 aa, Homo Sapiens
IQEVQGYVL

SEQ ID NO: 33753 - protein, 9 aa, Homo Sapiens
QEVQGYVLI

SEQ ID NO: 33754 - protein, 9 aa, Homo Sapiens
YVLIAHNQV

SEQ ID NO: 33755 - protein, 9 aa, Homo Sapiens
VLIAHNQVR

SEQ ID NO: 33756 - protein, 9 aa, Homo Sapiens
QVRQVPLQR

SEQ ID NO: 33757 - protein, 9 aa, Homo Sapiens
RQVPLQRLR

SEQ ID NO: 33758 - protein, 9 aa, Homo Sapiens
QVPLQRLRI

SEQ ID NO: 33759 - protein, 9 aa, Homo Sapiens
VPLQRLRIV

SEQ ID NO: 33760 - protein, 9 aa, Homo Sapiens
PLQRLRIVR

SEQ ID NO: 33761 - protein, 9 aa, Homo Sapiens
RLRIVRGTQ

SEQ ID NO: 33762 - protein, 9 aa, Homo Sapiens
RIVRGTQLF

SEQ ID NO: 33763 - protein, 9 aa, Homo Sapiens
IVRGTQLFE

SEQ ID NO: 33764 - protein, 9 aa, Homo Sapiens
TQLFEDNYA

SEQ ID NO: 33765 - protein, 9 aa, Homo Sapiens
QLFEDNYAL

SEQ ID NO: 33766 - protein, 9 aa, Homo Sapiens
FEDNYALAV

SEQ ID NO: 33767 - protein, 9 aa, Homo Sapiens
AVLDNGDPL

SEQ ID NO: 33768 - protein, 9 aa, Homo Sapiens
VLDNGDPLN

SEQ ID NO: 33769 - protein, 9 aa, Homo Sapiens
DPLNNTTPV

SEQ ID NO: 33770 - protein, 9 aa, Homo Sapiens
NTTPVTGAS

SEQ ID NO: 33771 - protein, 9 aa, Homo Sapiens
TPVTGASPG

SEQ ID NO: 33772 - protein, 9 aa, Homo Sapiens
LQLRSLTEI

SEQ ID NO: 33773 - protein, 9 aa, Homo Sapiens
QLRSLTEIL

SEQ ID NO: 33774 - protein, 9 aa, Homo Sapiens
TEILKGGVL

SEQ ID NO: 33775 - protein, 9 aa, Homo Sapiens
EILKGGVLI

SEQ ID NO: 33776 - protein, 9 aa, Homo Sapiens
ILKGGVLIQ

SEQ ID NO: 33777 - protein, 9 aa, Homo Sapiens
VLIQRNPQL

SEQ ID NO: 33778 - protein, 9 aa, Homo Sapiens
IQRNPQLCY

SEQ ID NO: 33779 - protein, 9 aa, Homo Sapiens
QLCYQDTIL

SEQ ID NO: 33780 - protein, 9 aa, Homo Sapiens
CYQDTILWK

SEQ ID NO: 33781 - protein, 9 aa, Homo Sapiens
YQDTILWKD

SEQ ID NO: 33782 - protein, 9 aa, Homo Sapiens
DTILWKDIF

SEQ ID NO: 33783 - protein, 9 aa, Homo Sapiens
ILWKDIFHK

SEQ ID NO: 33784 - protein, 9 aa, Homo Sapiens
DIFHKNNQL

SEQ ID NO: 33785 - protein, 9 aa, Homo Sapiens
FHKNNQLAL

SEQ ID NO: 33786 - protein, 9 aa, Homo Sapiens
ALTLIDTNR

SEQ ID NO: 33787 - protein, 9 aa, Homo Sapiens
TLIDTNRSR

SEQ ID NO: 33788 - protein, 9 aa, Homo Sapiens
LIDTNRSRA

SEQ ID NO: 33789 - protein, 9 aa, Homo Sapiens
RSRACHPCS

SEQ ID NO: 33790 - protein, 9 aa, Homo Sapiens
CSPMCKGSR

SEQ ID NO: 33791 - protein, 9 aa, Homo Sapiens
SPMCKGSRC

SEQ ID NO: 33792 - protein, 9 aa, Homo Sapiens
TVCAGGCAR

SEQ ID NO: 33793 - protein, 9 aa, Homo Sapiens
CAAGCTGPK

SEQ ID NO: 33794 - protein, 9 aa, Homo Sapiens
HSDCLACLH

SEQ ID NO: 33795 - protein, 9 aa, Homo Sapiens
CLHFNHSGI

SEQ ID NO: 33796 - protein, 9 aa, Homo Sapiens
GICELHCPA

SEQ ID NO: 33797 - protein, 9 aa, Homo Sapiens
CPALVTYNT

SEQ ID NO: 33798 - protein, 9 aa, Homo Sapiens
LVTYNTDTF

SEQ ID NO: 33799 - protein, 9 aa, Homo Sapiens
ESMPNPEGR

SEQ ID NO: 33800 - protein, 9 aa, Homo Sapiens
SMPNPEGRY

SEQ ID NO: 33801 - protein, 9 aa, Homo Sapiens
MPNPEGRYT

SEQ ID NO: 33802 - protein, 9 aa, Homo Sapiens
GRYTFGASC

SEQ ID NO: 33803 - protein, 9 aa, Homo Sapiens
YTFGASCVT

SEQ ID NO: 33804 - protein, 9 aa, Homo Sapiens
ASCVTACPY

SEQ ID NO: 33805 - protein, 9 aa, Homo Sapiens
CVTACPYNY

SEQ ID NO: 33806 - protein, 9 aa, Homo Sapiens
VTACPYNYL

SEQ ID NO: 33807 - protein, 9 aa, Homo Sapiens
YLSTDVGSC

SEQ ID NO: 33808 - protein, 9 aa, Homo Sapiens
STDVGSCTL

SEQ ID NO: 33809 - protein, 9 aa, Homo Sapiens
VCPLHNQEV

SEQ ID NO: 33810 - protein, 9 aa, Homo Sapiens
PLHNQEVTA

SEQ ID NO: 33811 - protein, 9 aa, Homo Sapiens
VTAEDGTQR

SEQ ID NO: 33812 - protein, 9 aa, Homo Sapiens
TQRCEKCSK

SEQ ID NO: 33813 - protein, 9 aa, Homo Sapiens
KCSKPCARV

SEQ ID NO: 33814 - protein, 9 aa, Homo Sapiens
ARVCYGLGM

SEQ ID NO: 33815 - protein, 9 aa, Homo Sapiens
CYGLGMEHL

SEQ ID NO: 33816 - protein, 9 aa, Homo Sapiens
LGMEHLREV

SEQ ID NO: 33817 - protein, 9 aa, Homo Sapiens
GMEHLREVR

SEQ ID NO: 33818 - protein, 9 aa, Homo Sapiens
REVRAVTSA

SEQ ID NO: 33819 - protein, 9 aa, Homo Sapiens
VTSANIQEF

SEQ ID NO: 33820 - protein, 9 aa, Homo Sapiens
TSANIQEFA

SEQ ID NO: 33821 - protein, 9 aa, Homo Sapiens
NIQEFAGCK

SEQ ID NO: 33822 - protein, 9 aa, Homo Sapiens
QEFAGCKKI

SEQ ID NO: 33823 - protein, 9 aa, Homo Sapiens
EFAGCKKIF

SEQ ID NO: 33824 - protein, 9 aa, Homo Sapiens
KKIFGSLAF

SEQ ID NO: 33825 - protein, 9 aa, Homo Sapiens
KIFGSLAFL

SEQ ID NO: 33826 - protein, 9 aa, Homo Sapiens
SLAFLPESF

SEQ ID NO: 33827 - protein, 9 aa, Homo Sapiens
FLPESFDGD

SEQ ID NO: 33828 - protein, 9 aa, Homo Sapiens
DPASNTAPL

SEQ ID NO: 33829 - protein, 9 aa, Homo Sapiens
NTAPLQPEQ

SEQ ID NO: 33830 - protein, 9 aa, Homo Sapiens
PLQPEQLQV

SEQ ID NO: 33831 - protein, 9 aa, Homo Sapiens
LQPEQLQVF

SEQ ID NO: 33832 - protein, 9 aa, Homo Sapiens
EQLQVFETL

SEQ ID NO: 33833 - protein, 9 aa, Homo Sapiens
QVFETLEEI

SEQ ID NO: 33834 - protein, 9 aa, Homo Sapiens
ETLEEITGY

SEQ ID NO: 33835 - protein, 9 aa, Homo Sapiens
TLEEITGYL

SEQ ID NO: 33836 - protein, 9 aa, Homo Sapiens
EEITGYLYI

SEQ ID NO: 33837 - protein, 9 aa, Homo Sapiens
TGYLYISAW

SEQ ID NO: 33838 - protein, 9 aa, Homo Sapiens
YLYISAWPD

SEQ ID NO: 33839 - protein, 9 aa, Homo Sapiens
YISAWPDSL

SEQ ID NO: 33840 - protein, 9 aa, Homo Sapiens
DSLPDLSVF

SEQ ID NO: 33841 - protein, 9 aa, Homo Sapiens
SLPDLSVFQ

SEQ ID NO: 33842 - protein, 9 aa, Homo Sapiens
SVFQNLQVI

SEQ ID NO: 33843 - protein, 9 aa, Homo Sapiens
VFQNLQVIR

SEQ ID NO: 33844 - protein, 9 aa, Homo Sapiens
LQVIRGRIL

SEQ ID NO: 33845 - protein, 9 aa, Homo Sapiens
GRILHNGAY

SEQ ID NO: 33846 - protein, 9 aa, Homo Sapiens
ILHNGAYSL

SEQ ID NO: 33847 - protein, 9 aa, Homo Sapiens
AYSLTLQGL

SEQ ID NO: 33848 - protein, 9 aa, Homo Sapiens
SLTLQGLGI

SEQ ID NO: 33849 - protein, 9 aa, Homo Sapiens
LQGLGISWL

SEQ ID NO: 33850 - protein, 9 aa, Homo Sapiens
GLGISWLGL

SEQ ID NO: 33851 - protein, 9 aa, Homo Sapiens
LGISWLGLR

SEQ ID NO: 33852 - protein, 9 aa, Homo Sapiens
SWLGLRSLR

SEQ ID NO: 33853 - protein, 9 aa, Homo Sapiens
SLRELGSGL

SEQ ID NO: 33854 - protein, 9 aa, Homo Sapiens
RELGSGLAL

SEQ ID NO: 33855 - protein, 9 aa, Homo Sapiens
ELGSGLALI

SEQ ID NO: 33856 - protein, 9 aa, Homo Sapiens
GLALIHHNT

SEQ ID NO: 33857 - protein, 9 aa, Homo Sapiens
ALIHHNTHL

SEQ ID NO: 33858 - protein, 9 aa, Homo Sapiens
NTHLCFVHT

SEQ ID NO: 33859 - protein, 9 aa, Homo Sapiens
THLCFVHTV

SEQ ID NO: 33860 - protein, 9 aa, Homo Sapiens
LCFVHTVPW

SEQ ID NO: 33861 - protein, 9 aa, Homo Sapiens
HTVPWDQLF

SEQ ID NO: 33862 - protein, 9 aa, Homo Sapiens
TVPWDQLFR

SEQ ID NO: 33863 - protein, 9 aa, Homo Sapiens
QLFRNPHQA

SEQ ID NO: 33864 - protein, 9 aa, Homo Sapiens
FRNPHQALL

SEQ ID NO: 33865 - protein, 9 aa, Homo Sapiens
QALLHTANR

SEQ ID NO: 33866 - protein, 9 aa, Homo Sapiens
GEGLACHQL

SEQ ID NO: 33867 - protein, 9 aa, Homo Sapiens
GLACHQLCA

SEQ ID NO: 33868 - protein, 9 aa, Homo Sapiens
LACHQLCAR

SEQ ID NO: 33869 - protein, 9 aa, Homo Sapiens
WGPGPTQCV

SEQ ID NO: 33870 - protein, 9 aa, Homo Sapiens
TQCVNCSQF

SEQ ID NO: 33871 - protein, 9 aa, Homo Sapiens
QCVNCSQFL

SEQ ID NO: 33872 - protein, 9 aa, Homo Sapiens
CVNCSQFLR

SEQ ID NO: 33873 - protein, 9 aa, Homo Sapiens
QFLRGQECV

SEQ ID NO: 33874 - protein, 9 aa, Homo Sapiens
FLRGQECVE

SEQ ID NO: 33875 - protein, 9 aa, Homo Sapiens
QECVEECRV

SEQ ID NO: 33876 - protein, 9 aa, Homo Sapiens
EECRVLQGL

SEQ ID NO: 33877 - protein, 9 aa, Homo Sapiens
VLQGLPREY

SEQ ID NO: 33878 - protein, 9 aa, Homo Sapiens
LQGLPREYV

SEQ ID NO: 33879 - protein, 9 aa, Homo Sapiens
GLPREYVNA

SEQ ID NO: 33880 - protein, 9 aa, Homo Sapiens
EYVNARHCL

SEQ ID NO: 33881 - protein, 9 aa, Homo Sapiens
LPCHPECQP

SEQ ID NO: 33882 - protein, 9 aa, Homo Sapiens
ECQPQNGSV

SEQ ID NO: 33883 - protein, 9 aa, Homo Sapiens
PQNGSVTCF

SEQ ID NO: 33884 - protein, 9 aa, Homo Sapiens
FGPEADQCV

SEQ ID NO: 33885 - protein, 9 aa, Homo Sapiens
CAHYKDPPF

SEQ ID NO: 33886 - protein, 9 aa, Homo Sapiens
YKDPPFCVA

SEQ ID NO: 33887 - protein, 9 aa, Homo Sapiens
CVARCPSGV

SEQ ID NO: 33888 - protein, 9 aa, Homo Sapiens
VARCPSGVK

SEQ ID NO: 33889 - protein, 9 aa, Homo Sapiens
GVKPDLSYM

SEQ ID NO: 33890 - protein, 9 aa, Homo Sapiens
KPDLSYMPI

SEQ ID NO: 33891 - protein, 9 aa, Homo Sapiens
DLSYMPIWK

SEQ ID NO: 33892 - protein, 9 aa, Homo Sapiens
LSYMPIWKF

SEQ ID NO: 33893 - protein, 9 aa, Homo Sapiens
MPIWKFPDE

SEQ ID NO: 33894 - protein, 9 aa, Homo Sapiens
FPDEEGACQ

SEQ ID NO: 33895 - protein, 9 aa, Homo Sapiens
EGACQPCPI

SEQ ID NO: 33896 - protein, 9 aa, Homo Sapiens
CPINCTHSC

SEQ ID NO: 33897 - protein, 9 aa, Homo Sapiens
PINCTHSCV

SEQ ID NO: 33898 - protein, 9 aa, Homo Sapiens
HSCVDLDDK

SEQ ID NO: 33899 - protein, 9 aa, Homo Sapiens
DLDDKGCPA

SEQ ID NO: 33900 - protein, 9 aa, Homo Sapiens
AEQRASPLT

SEQ ID NO: 33901 - protein, 9 aa, Homo Sapiens
RASPLTSII

SEQ ID NO: 33902 - protein, 9 aa, Homo Sapiens
SPLTSIISA

SEQ ID NO: 33903 - protein, 9 aa, Homo Sapiens
PLTSIISAV

SEQ ID NO: 33904 - protein, 9 aa, Homo Sapiens
LTSIISAVV

SEQ ID NO: 33905 - protein, 9 aa, Homo Sapiens
SIISAVVGI

SEQ ID NO: 33906 - protein, 9 aa, Homo Sapiens
IISAVVGIL

SEQ ID NO: 33907 - protein, 9 aa, Homo Sapiens
ISAVVGILL

SEQ ID NO: 33908 - protein, 9 aa, Homo Sapiens
SAVVGILLV

SEQ ID NO: 33909 - protein, 9 aa, Homo Sapiens
AVVGILLVV

SEQ ID NO: 33910 - protein, 9 aa, Homo Sapiens
VVGILLVVV

SEQ ID NO: 33911 - protein, 9 aa, Homo Sapiens
ILLVVVLGV

SEQ ID NO: 33912 - protein, 9 aa, Homo Sapiens
LLVVVLGVV

SEQ ID NO: 33913 - protein, 9 aa, Homo Sapiens
LVVVLGVVF

SEQ ID NO: 33914 - protein, 9 aa, Homo Sapiens
VVLGVVFGI

SEQ ID NO: 33915 - protein, 9 aa, Homo Sapiens
VLGVVFGIL

SEQ ID NO: 33916 - protein, 9 aa, Homo Sapiens
GVVFGILIK

SEQ ID NO: 33917 - protein, 9 aa, Homo Sapiens
VVFGILIKR

SEQ ID NO: 33918 - protein, 9 aa, Homo Sapiens
VFGILIKRR

SEQ ID NO: 33919 - protein, 9 aa, Homo Sapiens
ILIKRRQQK

SEQ ID NO: 33920 - protein, 9 aa, Homo Sapiens
KRRQQKIRK

SEQ ID NO: 33921 - protein, 9 aa, Homo Sapiens
RRQQKIRKY

SEQ ID NO: 33922 - protein, 9 aa, Homo Sapiens
KIRKYTMRR

SEQ ID NO: 33923 - protein, 9 aa, Homo Sapiens
RKYTMRRLL

SEQ ID NO: 33924 - protein, 9 aa, Homo Sapiens
TMRRLLQET

SEQ ID NO: 33925 - protein, 9 aa, Homo Sapiens
RRLLQETEL

SEQ ID NO: 33926 - protein, 9 aa, Homo Sapiens
RLLQETELV

SEQ ID NO: 33927 - protein, 9 aa, Homo Sapiens
LLQETELVE

SEQ ID NO: 33928 - protein, 9 aa, Homo Sapiens
QETELVEPL

SEQ ID NO: 33929 - protein, 9 aa, Homo Sapiens
EPLTPSGAM

SEQ ID NO: 33930 - protein, 9 aa, Homo Sapiens
MPNQAQMRI

SEQ ID NO: 33931 - protein, 9 aa, Homo Sapiens
NQAQMRILK

SEQ ID NO: 33932 - protein, 9 aa, Homo Sapiens
AQMRILKET

SEQ ID NO: 33933 - protein, 9 aa, Homo Sapiens
RILKETELR

SEQ ID NO: 33934 - protein, 9 aa, Homo Sapiens
ILKETELRK

SEQ ID NO: 33935 - protein, 9 aa, Homo Sapiens
KVKVLGSGA

SEQ ID NO: 33936 - protein, 9 aa, Homo Sapiens
VLGSGAFGT

SEQ ID NO: 33937 - protein, 9 aa, Homo Sapiens
LGSGAFGTV

SEQ ID NO: 33938 - protein, 9 aa, Homo Sapiens
GSGAFGTVY

SEQ ID NO: 33939 - protein, 9 aa, Homo Sapiens
SGAFGTVYK

SEQ ID NO: 33940 - protein, 9 aa, Homo Sapiens
ENVKIPVAI

SEQ ID NO: 33941 - protein, 9 aa, Homo Sapiens
NVKIPVAIK

SEQ ID NO: 33942 - protein, 9 aa, Homo Sapiens
KIPVAIKVL

SEQ ID NO: 33943 - protein, 9 aa, Homo Sapiens
IPVAIKVLR

SEQ ID NO: 33944 - protein, 9 aa, Homo Sapiens
VLRENTSPK

SEQ ID NO: 33945 - protein, 9 aa, Homo Sapiens
SPKANKEIL

SEQ ID NO: 33946 - protein, 9 aa, Homo Sapiens
NKEILDEAY

SEQ ID NO: 33947 - protein, 9 aa, Homo Sapiens
KEILDEAYV

SEQ ID NO: 33948 - protein, 9 aa, Homo Sapiens
EILDEAYVM

SEQ ID NO: 33949 - protein, 9 aa, Homo Sapiens
ILDEAYVMA

SEQ ID NO: 33950 - protein, 9 aa, Homo Sapiens
DEAYVMAGV

SEQ ID NO: 33951 - protein, 9 aa, Homo Sapiens
VMAGVGSPY

SEQ ID NO: 33952 - protein, 9 aa, Homo Sapiens
MAGVGSPYV

SEQ ID NO: 33953 - protein, 9 aa, Homo Sapiens
GVGSPYVSR

SEQ ID NO: 33954 - protein, 9 aa, Homo Sapiens
SPYVSRLLG

SEQ ID NO: 33955 - protein, 9 aa, Homo Sapiens
PYVSRLLGI

SEQ ID NO: 33956 - protein, 9 aa, Homo Sapiens
RLLGICLTS

SEQ ID NO: 33957 - protein, 9 aa, Homo Sapiens
LLGICLTST

SEQ ID NO: 33958 - protein, 9 aa, Homo Sapiens
LGICLTSTV

SEQ ID NO: 33959 - protein, 9 aa, Homo Sapiens
CLTSTVQLV

SEQ ID NO: 33960 - protein, 9 aa, Homo Sapiens
STVQLVTQL

SEQ ID NO: 33961 - protein, 9 aa, Homo Sapiens
TVQLVTQLM

SEQ ID NO: 33962 - protein, 9 aa, Homo Sapiens
QLVTQLMPY

SEQ ID NO: 33963 - protein, 9 aa, Homo Sapiens
QLMPYGCLL

SEQ ID NO: 33964 - protein, 9 aa, Homo Sapiens
MPYGCLLDH

SEQ ID NO: 33965 - protein, 9 aa, Homo Sapiens
HVRENRGRL

SEQ ID NO: 33966 - protein, 9 aa, Homo Sapiens
GRLGSQDLL

SEQ ID NO: 33967 - protein, 9 aa, Homo Sapiens
LGSQDLLNW

SEQ ID NO: 33968 - protein, 9 aa, Homo Sapiens
SQDLLNWCM

SEQ ID NO: 33969 - protein, 9 aa, Homo Sapiens
DLLNWCMQI

SEQ ID NO: 33970 - protein, 9 aa, Homo Sapiens
LLNWCMQIA

SEQ ID NO: 33971 - protein, 9 aa, Homo Sapiens
MQIAKGMSY

SEQ ID NO: 33972 - protein, 9 aa, Homo Sapiens
QIAKGMSYL

SEQ ID NO: 33973 - protein, 9 aa, Homo Sapiens
KGMSYLEDV

SEQ ID NO: 33974 - protein, 9 aa, Homo Sapiens
MSYLEDVRL

SEQ ID NO: 33975 - protein, 9 aa, Homo Sapiens
SYLEDVRLV

SEQ ID NO: 33976 - protein, 9 aa, Homo Sapiens
YLEDVRLVH

SEQ ID NO: 33977 - protein, 9 aa, Homo Sapiens
RLVHRDLAA

SEQ ID NO: 33978 - protein, 9 aa, Homo Sapiens
LVHRDLAAR

SEQ ID NO: 33979 - protein, 9 aa, Homo Sapiens
DLAARNVLV

SEQ ID NO: 33980 - protein, 9 aa, Homo Sapiens
LAARNVLVK

SEQ ID NO: 33981 - protein, 9 aa, Homo Sapiens
VLVKSPNHV

SEQ ID NO: 33982 - protein, 9 aa, Homo Sapiens
LVKSPNHVK

SEQ ID NO: 33983 - protein, 9 aa, Homo Sapiens
HVKITDFGL

SEQ ID NO: 33984 - protein, 9 aa, Homo Sapiens
KITDFGLAR

SEQ ID NO: 33985 - protein, 9 aa, Homo Sapiens
ITDFGLARL

SEQ ID NO: 33986 - protein, 9 aa, Homo Sapiens
RLLDIDETE

SEQ ID NO: 33987 - protein, 9 aa, Homo Sapiens
LLDIDETEY

SEQ ID NO: 33988 - protein, 9 aa, Homo Sapiens
DIDETEYHA

SEQ ID NO: 33989 - protein, 9 aa, Homo Sapiens
HADGGKVPI

SEQ ID NO: 33990 - protein, 9 aa, Homo Sapiens
KVPIKWMAL

SEQ ID NO: 33991 - protein, 9 aa, Homo Sapiens
KWMALESIL

SEQ ID NO: 33992 - protein, 9 aa, Homo Sapiens
WMALESILR

SEQ ID NO: 33993 - protein, 9 aa, Homo Sapiens
MALESILRR

SEQ ID NO: 33994 - protein, 9 aa, Homo Sapiens
ALESILRRR

SEQ ID NO: 33995 - protein, 9 aa, Homo Sapiens
SILRRRFTH

SEQ ID NO: 33996 - protein, 9 aa, Homo Sapiens
RRFTHQSDV

SEQ ID NO: 33997 - protein, 9 aa, Homo Sapiens
RFTHQSDVW

SEQ ID NO: 33998 - protein, 9 aa, Homo Sapiens
QSDVWSYGV

SEQ ID NO: 33999 - protein, 9 aa, Homo Sapiens
DVWSYGVTV

SEQ ID NO: 34000 - protein, 9 aa, Homo Sapiens
SYGVTVWEL

SEQ ID NO: 34001 - protein, 9 aa, Homo Sapiens
VTVWELMTF

SEQ ID NO: 34002 - protein, 9 aa, Homo Sapiens
LMTFGAKPY

SEQ ID NO: 34003 - protein, 9 aa, Homo Sapiens
MTFGAKPYD

SEQ ID NO: 34004 - protein, 9 aa, Homo Sapiens
FGAKPYDGI

SEQ ID NO: 34005 - protein, 9 aa, Homo Sapiens
KPYDGIPAR

SEQ ID NO: 34006 - protein, 9 aa, Homo Sapiens
DLLEKGERL

SEQ ID NO: 34007 - protein, 9 aa, Homo Sapiens
RLPQPPICT

SEQ ID NO: 34008 - protein, 9 aa, Homo Sapiens
LPQPPICTI

SEQ ID NO: 34009 - protein, 9 aa, Homo Sapiens
PPICTIDVY

SEQ ID NO: 34010 - protein, 9 aa, Homo Sapiens
CTIDVYMIM

SEQ ID NO: 34011 - protein, 9 aa, Homo Sapiens
TIDVYMIMV

SEQ ID NO: 34012 - protein, 9 aa, Homo Sapiens
VYMIMVKCW

SEQ ID NO: 34013 - protein, 9 aa, Homo Sapiens
YMIMVKCWM

SEQ ID NO: 34014 - protein, 9 aa, Homo Sapiens
MIMVKCWMI

SEQ ID NO: 34015 - protein, 9 aa, Homo Sapiens
DSECRPRFR

SEQ ID NO: 34016 - protein, 9 aa, Homo Sapiens
RPRFRELVS

SEQ ID NO: 34017 - protein, 9 aa, Homo Sapiens
RFRELVSEF

SEQ ID NO: 34018 - protein, 9 aa, Homo Sapiens
RELVSEFSR

SEQ ID NO: 34019 - protein, 9 aa, Homo Sapiens
ELVSEFSRM

SEQ ID NO: 34020 - protein, 9 aa, Homo Sapiens
LVSEFSRMA

SEQ ID NO: 34021 - protein, 9 aa, Homo Sapiens
VSEFSRMAR

SEQ ID NO: 34022 - protein, 9 aa, Homo Sapiens
RMARDPQRF

SEQ ID NO: 34023 - protein, 9 aa, Homo Sapiens
MARDPQRFV

SEQ ID NO: 34024 - protein, 9 aa, Homo Sapiens
ARDPQRFVV

SEQ ID NO: 34025 - protein, 9 aa, Homo Sapiens
FVVIQNEDL

SEQ ID NO: 34026 - protein, 9 aa, Homo Sapiens
IQNEDLGPA

SEQ ID NO: 34027 - protein, 9 aa, Homo Sapiens
PASPLDSTF

SEQ ID NO: 34028 - protein, 9 aa, Homo Sapiens
SPLDSTFYR

SEQ ID NO: 34029 - protein, 9 aa, Homo Sapiens
PLDSTFYRS

SEQ ID NO: 34030 - protein, 9 aa, Homo Sapiens
DSTFYRSLL

SEQ ID NO: 34031 - protein, 9 aa, Homo Sapiens
STFYRSLLE

SEQ ID NO: 34032 - protein, 9 aa, Homo Sapiens
LEDDDMGDL

SEQ ID NO: 34033 - protein, 9 aa, Homo Sapiens
DLVDAEEYL

SEQ ID NO: 34034 - protein, 9 aa, Homo Sapiens
LVDAEEYLV

SEQ ID NO: 34035 - protein, 9 aa, Homo Sapiens
EYLVPQQGF

SEQ ID NO: 34036 - protein, 9 aa, Homo Sapiens
YLVPQQGFF

SEQ ID NO: 34037 - protein, 9 aa, Homo Sapiens
QGFFCPDPA

SEQ ID NO: 34038 - protein, 9 aa, Homo Sapiens
DPAPGAGGM

SEQ ID NO: 34039 - protein, 9 aa, Homo Sapiens
GAGGMVHHR

SEQ ID NO: 34040 - protein, 9 aa, Homo Sapiens
GGMVHHRHR

SEQ ID NO: 34041 - protein, 9 aa, Homo Sapiens
HRHRSSSTR

SEQ ID NO: 34042 - protein, 9 aa, Homo Sapiens
RSGGGDLTL

SEQ ID NO: 34043 - protein, 9 aa, Homo Sapiens
GLEPSEEEA

SEQ ID NO: 34044 - protein, 9 aa, Homo Sapiens
EPSEEEAPR

SEQ ID NO: 34045 - protein, 9 aa, Homo Sapiens
EEEAPRSPL

SEQ ID NO: 34046 - protein, 9 aa, Homo Sapiens
EEAPRSPLA

SEQ ID NO: 34047 - protein, 9 aa, Homo Sapiens
APRSPLAPS

SEQ ID NO: 34048 - protein, 9 aa, Homo Sapiens
DVFDGDLGM

SEQ ID NO: 34049 - protein, 9 aa, Homo Sapiens
GAAKGLQSL

SEQ ID NO: 34050 - protein, 9 aa, Homo Sapiens
LPTHDPSPL

SEQ ID NO: 34051 - protein, 9 aa, Homo Sapiens
YSEDPTVPL

SEQ ID NO: 34052 - protein, 9 aa, Homo Sapiens
LPSETDGYV

SEQ ID NO: 34053 - protein, 9 aa, Homo Sapiens
ETDGYVAPL

SEQ ID NO: 34054 - protein, 9 aa, Homo Sapiens
LTCSPQPEY

SEQ ID NO: 34055 - protein, 9 aa, Homo Sapiens
TCSPQPEYV

SEQ ID NO: 34056 - protein, 9 aa, Homo Sapiens
EYVNQPDVR

SEQ ID NO: 34057 - protein, 9 aa, Homo Sapiens
PPSPREGPL

SEQ ID NO: 34058 - protein, 9 aa, Homo Sapiens
SPREGPLPA

SEQ ID NO: 34059 - protein, 9 aa, Homo Sapiens
REGPLPAAR

SEQ ID NO: 34060 - protein, 9 aa, Homo Sapiens
GPLPAARPA

SEQ ID NO: 34061 - protein, 9 aa, Homo Sapiens
LPAARPAGA

SEQ ID NO: 34062 - protein, 9 aa, Homo Sapiens
AARPAGATL

SEQ ID NO: 34063 - protein, 9 aa, Homo Sapiens
RPAGATLER

SEQ ID NO: 34064 - protein, 9 aa, Homo Sapiens
ATLERPKTL

SEQ ID NO: 34065 - protein, 9 aa, Homo Sapiens
RPKTLSPGK

SEQ ID NO: 34066 - protein, 9 aa, Homo Sapiens
TLSPGKNGV

SEQ ID NO: 34067 - protein, 9 aa, Homo Sapiens
GVVKDVFAF

SEQ ID NO: 34068 - protein, 9 aa, Homo Sapiens
DVFAFGGAV

SEQ ID NO: 34069 - protein, 9 aa, Homo Sapiens
GAVENPEYL

SEQ ID NO: 34070 - protein, 9 aa, Homo Sapiens
YLTPQGGAA

SEQ ID NO: 34071 - protein, 9 aa, Homo Sapiens
TPQGGAAPQ

SEQ ID NO: 34072 - protein, 9 aa, Homo Sapiens
APQPHPPPA

SEQ ID NO: 34073 - protein, 9 aa, Homo Sapiens
HPPPAFSPA

SEQ ID NO: 34074 - protein, 9 aa, Homo Sapiens
PPPAFSPAF

SEQ ID NO: 34075 - protein, 9 aa, Homo Sapiens
AFSPAFDNL

SEQ ID NO: 34076 - protein, 9 aa, Homo Sapiens
FSPAFDNLY

SEQ ID NO: 34077 - protein, 9 aa, Homo Sapiens
SPAFDNLYY

SEQ ID NO: 34078 - protein, 9 aa, Homo Sapiens
RGAPPSTFK

SEQ ID NO: 34079 - protein, 9 aa, Homo Sapiens
STFKGTPTA

SEQ ID NO: 34080 - protein, 9 aa, Homo Sapiens
TPTAENPEY

SEQ ID NO: 34081 - protein, 9 aa, Homo Sapiens
PTAENPEYL

SEQ ID NO: 34082 - protein, 9 aa, Homo Sapiens
AENPEYLGL

SEQ ID NO: 34083 - protein, 9 aa, Homo Sapiens
EYLGLDVPV

SEQ ID NO: 34084 - protein, 10 aa, Homo Sapiens
ELAALCRWGL

SEQ ID NO: 34085 - protein, 10 aa, Homo Sapiens
LAALCRWGLL

SEQ ID NO: 34086 - protein, 10 aa, Homo Sapiens
AALCRWGLLL

SEQ ID NO: 34087 - protein, 10 aa, Homo Sapiens
ALCRWGLLLA

SEQ ID NO: 34088 - protein, 10 aa, Homo Sapiens
CRWGLLLALL

SEQ ID NO: 34089 - protein, 10 aa, Homo Sapiens
LLLALLPPGA

SEQ ID NO: 34090 - protein, 10 aa, Homo Sapiens
LLALLPPGAA

SEQ ID NO: 34091 - protein, 10 aa, Homo Sapiens
ALLPPGAAST

SEQ ID NO: 34092 - protein, 10 aa, Homo Sapiens
LLPPGAASTQ

SEQ ID NO: 34093 - protein, 10 aa, Homo Sapiens
LPPGAASTQV

SEQ ID NO: 34094 - protein, 10 aa, Homo Sapiens
TQVCTGTDMK

SEQ ID NO: 34095 - protein, 10 aa, Homo Sapiens
KLRLPASPET

SEQ ID NO: 34096 - protein, 10 aa, Homo Sapiens
RLPASPETHL

SEQ ID NO: 34097 - protein, 10 aa, Homo Sapiens
ETHLDMLRHL

SEQ ID NO: 34098 - protein, 10 aa, Homo Sapiens
HLDMLRHLYQ

SEQ ID NO: 34099 - protein, 10 aa, Homo Sapiens
DMLRHLYQGC

SEQ ID NO: 34100 - protein, 10 aa, Homo Sapiens
HLYQGCQVVQ

SEQ ID NO: 34101 - protein, 10 aa, Homo Sapiens
CQVVQGNLEL

SEQ ID NO: 34102 - protein, 10 aa, Homo Sapiens
VVQGNLELTY

SEQ ID NO: 34103 - protein, 10 aa, Homo Sapiens
VQGNLELTYL

SEQ ID NO: 34104 - protein, 10 aa, Homo Sapiens
LTYLPTNASL

SEQ ID NO: 34105 - protein, 10 aa, Homo Sapiens
YLPTNASLSF

SEQ ID NO: 34106 - protein, 10 aa, Homo Sapiens
LPTNASLSFL

SEQ ID NO: 34107 - protein, 10 aa, Homo Sapiens
LSFLQDIQEV

SEQ ID NO: 34108 - protein, 10 aa, Homo Sapiens
FLQDIQEVQG

SEQ ID NO: 34109 - protein, 10 aa, Homo Sapiens
DIQEVQGYVL

SEQ ID NO: 34110 - protein, 10 aa, Homo Sapiens
EVQGYVLIAH

SEQ ID NO: 34111 - protein, 10 aa, Homo Sapiens
YVLIAHNQVR

SEQ ID NO: 34112 - protein, 10 aa, Homo Sapiens
VLIAHNQVRQ

SEQ ID NO: 34113 - protein, 10 aa, Homo Sapiens
LIAHNQVRQV

SEQ ID NO: 34114 - protein, 10 aa, Homo Sapiens
AHNQVRQVPL

SEQ ID NO: 34115 - protein, 10 aa, Homo Sapiens
RQVPLQRLRI

SEQ ID NO: 34116 - protein, 10 aa, Homo Sapiens
RLRIVRGTQL

SEQ ID NO: 34117 - protein, 10 aa, Homo Sapiens
TQLFEDNYAL

SEQ ID NO: 34118 - protein, 10 aa, Homo Sapiens
QLFEDNYALA

SEQ ID NO: 34119 - protein, 10 aa, Homo Sapiens
LFEDNYALAV

SEQ ID NO: 34120 - protein, 10 aa, Homo Sapiens
FEDNYALAVL

SEQ ID NO: 34121 - protein, 10 aa, Homo Sapiens
LAVLDNGDPL

SEQ ID NO: 34122 - protein, 10 aa, Homo Sapiens
DPLNNTTPVT

SEQ ID NO: 34123 - protein, 10 aa, Homo Sapiens
VTGASPGGLR

SEQ ID NO: 34124 - protein, 10 aa, Homo Sapiens
GASPGGLREL

SEQ ID NO: 34125 - protein, 10 aa, Homo Sapiens
SPGGLRELQL

SEQ ID NO: 34126 - protein, 10 aa, Homo Sapiens
GLRELQLRSL

SEQ ID NO: 34127 - protein, 10 aa, Homo Sapiens
ELQLRSLTEI

SEQ ID NO: 34128 - protein, 10 aa, Homo Sapiens
LQLRSLTEIL

SEQ ID NO: 34129 - protein, 10 aa, Homo Sapiens
QLRSLTEILK

SEQ ID NO: 34130 - protein, 10 aa, Homo Sapiens
SLTEILKGGV

SEQ ID NO: 34131 - protein, 10 aa, Homo Sapiens
TEILKGGVLI

SEQ ID NO: 34132 - protein, 10 aa, Homo Sapiens
ILKGGVLIQR

SEQ ID NO: 34133 - protein, 10 aa, Homo Sapiens
GVLIQRNPQL

SEQ ID NO: 34134 - protein, 10 aa, Homo Sapiens
VLIQRNPQLC

SEQ ID NO: 34135 - protein, 10 aa, Homo Sapiens
LIQRNPQLCY

SEQ ID NO: 34136 - protein, 10 aa, Homo Sapiens
LCYQDTILWK

SEQ ID NO: 34137 - protein, 10 aa, Homo Sapiens
YQDTILWKDI

SEQ ID NO: 34138 - protein, 10 aa, Homo Sapiens
DTILWKDIFH

SEQ ID NO: 34139 - protein, 10 aa, Homo Sapiens
TILWKDIFHK

SEQ ID NO: 34140 - protein, 10 aa, Homo Sapiens
ILWKDIFHKN

SEQ ID NO: 34141 - protein, 10 aa, Homo Sapiens
IFHKNNQLAL

SEQ ID NO: 34142 - protein, 10 aa, Homo Sapiens
LALTLIDTNR

SEQ ID NO: 34143 - protein, 10 aa, Homo Sapiens
LTLIDTNRSR

SEQ ID NO: 34144 - protein, 10 aa, Homo Sapiens
TLIDTNRSRA

SEQ ID NO: 34145 - protein, 10 aa, Homo Sapiens
RSRACHPCSP

SEQ ID NO: 34146 - protein, 10 aa, Homo Sapiens
ACHPCSPMCK

SEQ ID NO: 34147 - protein, 10 aa, Homo Sapiens
SPMCKGSRCW

SEQ ID NO: 34148 - protein, 10 aa, Homo Sapiens
GESSEDCQSL

SEQ ID NO: 34149 - protein, 10 aa, Homo Sapiens
SSEDCQSLTR

SEQ ID NO: 34150 - protein, 10 aa, Homo Sapiens
RTVCAGGCAR

SEQ ID NO: 34151 - protein, 10 aa, Homo Sapiens
PLPTDCCHEQ

SEQ ID NO: 34152 - protein, 10 aa, Homo Sapiens
LPTDCCHEQC

SEQ ID NO: 34153 - protein, 10 aa, Homo Sapiens
HSDCLACLHF

SEQ ID NO: 34154 - protein, 10 aa, Homo Sapiens
SGICELHCPA

SEQ ID NO: 34155 - protein, 10 aa, Homo Sapiens
GICELHCPAL

SEQ ID NO: 34156 - protein, 10 aa, Homo Sapiens
ELHCPALVTY

SEQ ID NO: 34157 - protein, 10 aa, Homo Sapiens
CPALVTYNTD

SEQ ID NO: 34158 - protein, 10 aa, Homo Sapiens
TYNTDTFESM

SEQ ID NO: 34159 - protein, 10 aa, Homo Sapiens
ESMPNPEGRY

SEQ ID NO: 34160 - protein, 10 aa, Homo Sapiens
MPNPEGRYTF

SEQ ID NO: 34161 - protein, 10 aa, Homo Sapiens
YTFGASCVTA

SEQ ID NO: 34162 - protein, 10 aa, Homo Sapiens
GASCVTACPY

SEQ ID NO: 34163 - protein, 10 aa, Homo Sapiens
CVTACPYNYL

SEQ ID NO: 34164 - protein, 10 aa, Homo Sapiens
VTACPYNYLS

SEQ ID NO: 34165 - protein, 10 aa, Homo Sapiens
CPYNYLSTDV

SEQ ID NO: 34166 - protein, 10 aa, Homo Sapiens
YLSTDVGSCT

SEQ ID NO: 34167 - protein, 10 aa, Homo Sapiens
STDVGSCTLV

SEQ ID NO: 34168 - protein, 10 aa, Homo Sapiens
LVCPLHNQEV

SEQ ID NO: 34169 - protein, 10 aa, Homo Sapiens
CPLHNQEVTA

SEQ ID NO: 34170 - protein, 10 aa, Homo Sapiens
EVTAEDGTQR

SEQ ID NO: 34171 - protein, 10 aa, Homo Sapiens
GTQRCEKCSK

SEQ ID NO: 34172 - protein, 10 aa, Homo Sapiens
CEKCSKPCAR

SEQ ID NO: 34173 - protein, 10 aa, Homo Sapiens
KPCARVCYGL

SEQ ID NO: 34174 - protein, 10 aa, Homo Sapiens
VCYGLGMEHL

SEQ ID NO: 34175 - protein, 10 aa, Homo Sapiens
CYGLGMEHLR

SEQ ID NO: 34176 - protein, 10 aa, Homo Sapiens
GLGMEHLREV

SEQ ID NO: 34177 - protein, 10 aa, Homo Sapiens
MEHLREVRAV

SEQ ID NO: 34178 - protein, 10 aa, Homo Sapiens
EVRAVTSANI

SEQ ID NO: 34179 - protein, 10 aa, Homo Sapiens
AVTSANIQEF

SEQ ID NO: 34180 - protein, 10 aa, Homo Sapiens
VTSANIQEFA

SEQ ID NO: 34181 - protein, 10 aa, Homo Sapiens
NIQEFAGCKK

SEQ ID NO: 34182 - protein, 10 aa, Homo Sapiens
QEFAGCKKIF

SEQ ID NO: 34183 - protein, 10 aa, Homo Sapiens
KKIFGSLAFL

SEQ ID NO: 34184 - protein, 10 aa, Homo Sapiens
GSLAFLPESF

SEQ ID NO: 34185 - protein, 10 aa, Homo Sapiens
LPESFDGDPA

SEQ ID NO: 34186 - protein, 10 aa, Homo Sapiens
NTAPLQPEQL

SEQ ID NO: 34187 - protein, 10 aa, Homo Sapiens
LQPEQLQVFE

SEQ ID NO: 34188 - protein, 10 aa, Homo Sapiens
PEQLQVFETL

SEQ ID NO: 34189 - protein, 10 aa, Homo Sapiens
LQVFETLEEI

SEQ ID NO: 34190 - protein, 10 aa, Homo Sapiens
FETLEEITGY

SEQ ID NO: 34191 - protein, 10 aa, Homo Sapiens
ETLEEITGYL

SEQ ID NO: 34192 - protein, 10 aa, Homo Sapiens
TLEEITGYLY

SEQ ID NO: 34193 - protein, 10 aa, Homo Sapiens
LEEITGYLYI

SEQ ID NO: 34194 - protein, 10 aa, Homo Sapiens
EEITGYLYIS

SEQ ID NO: 34195 - protein, 10 aa, Homo Sapiens
EITGYLYISA

SEQ ID NO: 34196 - protein, 10 aa, Homo Sapiens
ITGYLYISAW

SEQ ID NO: 34197 - protein, 10 aa, Homo Sapiens
YLYISAWPDS

SEQ ID NO: 34198 - protein, 10 aa, Homo Sapiens
LYISAWPDSL

SEQ ID NO: 34199 - protein, 10 aa, Homo Sapiens
SAWPDSLPDL

SEQ ID NO: 34200 - protein, 10 aa, Homo Sapiens
WPDSLPDLSV

SEQ ID NO: 34201 - protein, 10 aa, Homo Sapiens
SLPDLSVFQN

SEQ ID NO: 34202 - protein, 10 aa, Homo Sapiens
LPDLSVFQNL

SEQ ID NO: 34203 - protein, 10 aa, Homo Sapiens
DLSVFQNLQV

SEQ ID NO: 34204 - protein, 10 aa, Homo Sapiens
SVFQNLQVIR

SEQ ID NO: 34205 - protein, 10 aa, Homo Sapiens
FQNLQVIRGR

SEQ ID NO: 34206 - protein, 10 aa, Homo Sapiens
RGRILHNGAY

SEQ ID NO: 34207 - protein, 10 aa, Homo Sapiens
RILHNGAYSL

SEQ ID NO: 34208 - protein, 10 aa, Homo Sapiens
ILHNGAYSLT

SEQ ID NO: 34209 - protein, 10 aa, Homo Sapiens
LHNGAYSLTL

SEQ ID NO: 34210 - protein, 10 aa, Homo Sapiens
GAYSLTLQGL

SEQ ID NO: 34211 - protein, 10 aa, Homo Sapiens
LTLQGLGISW

SEQ ID NO: 34212 - protein, 10 aa, Homo Sapiens
TLQGLGISWL

SEQ ID NO: 34213 - protein, 10 aa, Homo Sapiens
GISWLGLRSL

SEQ ID NO: 34214 - protein, 10 aa, Homo Sapiens
ISWLGLRSLR

SEQ ID NO: 34215 - protein, 10 aa, Homo Sapiens
WLGLRSLREL

SEQ ID NO: 34216 - protein, 10 aa, Homo Sapiens
SLRELGSGLA

SEQ ID NO: 34217 - protein, 10 aa, Homo Sapiens
LRELGSGLAL

SEQ ID NO: 34218 - protein, 10 aa, Homo Sapiens
RELGSGLALI

SEQ ID NO: 34219 - protein, 10 aa, Homo Sapiens
ALIHHNTHLC

SEQ ID NO: 34220 - protein, 10 aa, Homo Sapiens
LIHHNTHLCF

SEQ ID NO: 34221 - protein, 10 aa, Homo Sapiens
NTHLCFVHTV

SEQ ID NO: 34222 - protein, 10 aa, Homo Sapiens
HLCFVHTVPW

SEQ ID NO: 34223 - protein, 10 aa, Homo Sapiens
FVHTVPWDQL

SEQ ID NO: 34224 - protein, 10 aa, Homo Sapiens
HTVPWDQLFR

SEQ ID NO: 34225 - protein, 10 aa, Homo Sapiens
VPWDQLFRNP

SEQ ID NO: 34226 - protein, 10 aa, Homo Sapiens
QLFRNPHQAL

SEQ ID NO: 34227 - protein, 10 aa, Homo Sapiens
NPHQALLHTA

SEQ ID NO: 34228 - protein, 10 aa, Homo Sapiens
HQALLHTANR

SEQ ID NO: 34229 - protein, 10 aa, Homo Sapiens
TANRPEDECV

SEQ ID NO: 34230 - protein, 10 aa, Homo Sapiens
PEDECVGEGL

SEQ ID NO: 34231 - protein, 10 aa, Homo Sapiens
GLACHQLCAR

SEQ ID NO: 34232 - protein, 10 aa, Homo Sapiens
RGHCWGPGPT

SEQ ID NO: 34233 - protein, 10 aa, Homo Sapiens
QCVNCSQFLR

SEQ ID NO: 34234 - protein, 10 aa, Homo Sapiens
SQFLRGQECV

SEQ ID NO: 34235 - protein, 10 aa, Homo Sapiens
FLRGQECVEE

SEQ ID NO: 34236 - protein, 10 aa, Homo Sapiens
GQECVEECRV

SEQ ID NO: 34237 - protein, 10 aa, Homo Sapiens
QECVEECRVL

SEQ ID NO: 34238 - protein, 10 aa, Homo Sapiens
VEECRVLQGL

SEQ ID NO: 34239 - protein, 10 aa, Homo Sapiens
ECRVLQGLPR

SEQ ID NO: 34240 - protein, 10 aa, Homo Sapiens
RVLQGLPREY

SEQ ID NO: 34241 - protein, 10 aa, Homo Sapiens
VLQGLPREYV

SEQ ID NO: 34242 - protein, 10 aa, Homo Sapiens
LPREYVNARH

SEQ ID NO: 34243 - protein, 10 aa, Homo Sapiens
REYVNARHCL

SEQ ID NO: 34244 - protein, 10 aa, Homo Sapiens
QPQNGSVTCF

SEQ ID NO: 34245 - protein, 10 aa, Homo Sapiens
EADQCVACAH

SEQ ID NO: 34246 - protein, 10 aa, Homo Sapiens
DQCVACAHYK

SEQ ID NO: 34247 - protein, 10 aa, Homo Sapiens
FCVARCPSGV

SEQ ID NO: 34248 - protein, 10 aa, Homo Sapiens
CVARCPSGVK

SEQ ID NO: 34249 - protein, 10 aa, Homo Sapiens
SGVKPDLSYM

SEQ ID NO: 34250 - protein, 10 aa, Homo Sapiens
KPDLSYMPIW

SEQ ID NO: 34251 - protein, 10 aa, Homo Sapiens
DLSYMPIWKF

SEQ ID NO: 34252 - protein, 10 aa, Homo Sapiens
MPIWKFPDEE

SEQ ID NO: 34253 - protein, 10 aa, Homo Sapiens
FPDEEGACQP

SEQ ID NO: 34254 - protein, 10 aa, Homo Sapiens
EEGACQPCPI

SEQ ID NO: 34255 - protein, 10 aa, Homo Sapiens
CPINCTHSCV

SEQ ID NO: 34256 - protein, 10 aa, Homo Sapiens
CPAEQRASPL

SEQ ID NO: 34257 - protein, 10 aa, Homo Sapiens
AEQRASPLTS

SEQ ID NO: 34258 - protein, 10 aa, Homo Sapiens
SPLTSIISAV

SEQ ID NO: 34259 - protein, 10 aa, Homo Sapiens
PLTSIISAVV

SEQ ID NO: 34260 - protein, 10 aa, Homo Sapiens
TSIISAVVGI

SEQ ID NO: 34261 - protein, 10 aa, Homo Sapiens
SIISAVVGIL

SEQ ID NO: 34262 - protein, 10 aa, Homo Sapiens
IISAVVGILL

SEQ ID NO: 34263 - protein, 10 aa, Homo Sapiens
ISAVVGILLV

SEQ ID NO: 34264 - protein, 10 aa, Homo Sapiens
SAVVGILLVV

SEQ ID NO: 34265 - protein, 10 aa, Homo Sapiens
AVVGILLVVV

SEQ ID NO: 34266 - protein, 10 aa, Homo Sapiens
GILLVVVLGV

SEQ ID NO: 34267 - protein, 10 aa, Homo Sapiens
ILLVVVLGVV

SEQ ID NO: 34268 - protein, 10 aa, Homo Sapiens
LLVVVLGVVF

SEQ ID NO: 34269 - protein, 10 aa, Homo Sapiens
VVVLGVVFGI

SEQ ID NO: 34270 - protein, 10 aa, Homo Sapiens
VVLGVVFGIL

SEQ ID NO: 34271 - protein, 10 aa, Homo Sapiens
VLGVVFGILI

SEQ ID NO: 34272 - protein, 10 aa, Homo Sapiens
GVVFGILIKR

SEQ ID NO: 34273 - protein, 10 aa, Homo Sapiens
VVFGILIKRR

SEQ ID NO: 34274 - protein, 10 aa, Homo Sapiens
GILIKRRQQK

SEQ ID NO: 34275 - protein, 10 aa, Homo Sapiens
ILIKRRQQKI

SEQ ID NO: 34276 - protein, 10 aa, Homo Sapiens
IKRRQQKIRK

SEQ ID NO: 34277 - protein, 10 aa, Homo Sapiens
KRRQQKIRKY

SEQ ID NO: 34278 - protein, 10 aa, Homo Sapiens
RQQKIRKYTM

SEQ ID NO: 34279 - protein, 10 aa, Homo Sapiens
QQKIRKYTMR

SEQ ID NO: 34280 - protein, 10 aa, Homo Sapiens
QKIRKYTMRR

SEQ ID NO: 34281 - protein, 10 aa, Homo Sapiens
KIRKYTMRRL

SEQ ID NO: 34282 - protein, 10 aa, Homo Sapiens
RKYTMRRLLQ

SEQ ID NO: 34283 - protein, 10 aa, Homo Sapiens
KYTMRRLLQE

SEQ ID NO: 34284 - protein, 10 aa, Homo Sapiens
YTMRRLLQET

SEQ ID NO: 34285 - protein, 10 aa, Homo Sapiens
LQETELVEPL

SEQ ID NO: 34286 - protein, 10 aa, Homo Sapiens
TPSGAMPNQA

SEQ ID NO: 34287 - protein, 10 aa, Homo Sapiens
GAMPNQAQMR

SEQ ID NO: 34288 - protein, 10 aa, Homo Sapiens
AMPNQAQMRI

SEQ ID NO: 34289 - protein, 10 aa, Homo Sapiens
MPNQAQMRIL

SEQ ID NO: 34290 - protein, 10 aa, Homo Sapiens
QMRILKETEL

SEQ ID NO: 34291 - protein, 10 aa, Homo Sapiens
MRILKETELR

SEQ ID NO: 34292 - protein, 10 aa, Homo Sapiens
RILKETELRK

SEQ ID NO: 34293 - protein, 10 aa, Homo Sapiens
ILKETELRKV

SEQ ID NO: 34294 - protein, 10 aa, Homo Sapiens
ETELRKVKVL

SEQ ID NO: 34295 - protein, 10 aa, Homo Sapiens
KVKVLGSGAF

SEQ ID NO: 34296 - protein, 10 aa, Homo Sapiens
KVLGSGAFGT

SEQ ID NO: 34297 - protein, 10 aa, Homo Sapiens
VLGSGAFGTV

SEQ ID NO: 34298 - protein, 10 aa, Homo Sapiens
LGSGAFGTVY

SEQ ID NO: 34299 - protein, 10 aa, Homo Sapiens
GSGAFGTVYK

SEQ ID NO: 34300 - protein, 10 aa, Homo Sapiens
AFGTVYKGIW

SEQ ID NO: 34301 - protein, 10 aa, Homo Sapiens
GIWIPDGENV

SEQ ID NO: 34302 - protein, 10 aa, Homo Sapiens
IWIPDGENVK

SEQ ID NO: 34303 - protein, 10 aa, Homo Sapiens
WIPDGENVKI

SEQ ID NO: 34304 - protein, 10 aa, Homo Sapiens
ENVKIPVAIK

SEQ ID NO: 34305 - protein, 10 aa, Homo Sapiens
NVKIPVAIKV

SEQ ID NO: 34306 - protein, 10 aa, Homo Sapiens
KIPVAIKVLR

SEQ ID NO: 34307 - protein, 10 aa, Homo Sapiens
KVLRENTSPK

SEQ ID NO: 34308 - protein, 10 aa, Homo Sapiens
VLRENTSPKA

SEQ ID NO: 34309 - protein, 10 aa, Homo Sapiens
NTSPKANKEI

SEQ ID NO: 34310 - protein, 10 aa, Homo Sapiens
KEILDEAYVM

SEQ ID NO: 34311 - protein, 10 aa, Homo Sapiens
EILDEAYVMA

SEQ ID NO: 34312 - protein, 10 aa, Homo Sapiens
ILDEAYVMAG

SEQ ID NO: 34313 - protein, 10 aa, Homo Sapiens
YVMAGVGSPY

SEQ ID NO: 34314 - protein, 10 aa, Homo Sapiens
VMAGVGSPYV

SEQ ID NO: 34315 - protein, 10 aa, Homo Sapiens
GVGSPYVSRL

SEQ ID NO: 34316 - protein, 10 aa, Homo Sapiens
SPYVSRLLGI

SEQ ID NO: 34317 - protein, 10 aa, Homo Sapiens
YVSRLLGICL

SEQ ID NO: 34318 - protein, 10 aa, Homo Sapiens
RLLGICLTST

SEQ ID NO: 34319 - protein, 10 aa, Homo Sapiens
LLGICLTSTV

SEQ ID NO: 34320 - protein, 10 aa, Homo Sapiens
ICLTSTVQLV

SEQ ID NO: 34321 - protein, 10 aa, Homo Sapiens
STVQLVTQLM

SEQ ID NO: 34322 - protein, 10 aa, Homo Sapiens
VQLVTQLMPY

SEQ ID NO: 34323 - protein, 10 aa, Homo Sapiens
TQLMPYGCLL

SEQ ID NO: 34324 - protein, 10 aa, Homo Sapiens
MPYGCLLDHV

SEQ ID NO: 34325 - protein, 10 aa, Homo Sapiens
CLLDHVRENR

SEQ ID NO: 34326 - protein, 10 aa, Homo Sapiens
RLGSQDLLNW

SEQ ID NO: 34327 - protein, 10 aa, Homo Sapiens
DLLNWCMQIA

SEQ ID NO: 34328 - protein, 10 aa, Homo Sapiens
LLNWCMQIAK

SEQ ID NO: 34329 - protein, 10 aa, Homo Sapiens
CMQIAKGMSY

SEQ ID NO: 34330 - protein, 10 aa, Homo Sapiens
MQIAKGMSYL

SEQ ID NO: 34331 - protein, 10 aa, Homo Sapiens
GMSYLEDVRL

SEQ ID NO: 34332 - protein, 10 aa, Homo Sapiens
MSYLEDVRLV

SEQ ID NO: 34333 - protein, 10 aa, Homo Sapiens
YLEDVRLVHR

SEQ ID NO: 34334 - protein, 10 aa, Homo Sapiens
RLVHRDLAAR

SEQ ID NO: 34335 - protein, 10 aa, Homo Sapiens
HRDLAARNVL

SEQ ID NO: 34336 - protein, 10 aa, Homo Sapiens
DLAARNVLVK

SEQ ID NO: 34337 - protein, 10 aa, Homo Sapiens
NVLVKSPNHV

SEQ ID NO: 34338 - protein, 10 aa, Homo Sapiens
VLVKSPNHVK

SEQ ID NO: 34339 - protein, 10 aa, Homo Sapiens
SPNHVKITDF

SEQ ID NO: 34340 - protein, 10 aa, Homo Sapiens
KITDFGLARL

SEQ ID NO: 34341 - protein, 10 aa, Homo Sapiens
ITDFGLARLL

SEQ ID NO: 34342 - protein, 10 aa, Homo Sapiens
RLLDIDETEY

SEQ ID NO: 34343 - protein, 10 aa, Homo Sapiens
ETEYHADGGK

SEQ ID NO: 34344 - protein, 10 aa, Homo Sapiens
TEYHADGGKV

SEQ ID NO: 34345 - protein, 10 aa, Homo Sapiens
YHADGGKVPI

SEQ ID NO: 34346 - protein, 10 aa, Homo Sapiens
KWMALESILR

SEQ ID NO: 34347 - protein, 10 aa, Homo Sapiens
WMALESILRR

SEQ ID NO: 34348 - protein, 10 aa, Homo Sapiens
MALESILRRR

SEQ ID NO: 34349 - protein, 10 aa, Homo Sapiens
RRFTHQSDVW

SEQ ID NO: 34350 - protein, 10 aa, Homo Sapiens
FTHQSDVWSY

SEQ ID NO: 34351 - protein, 10 aa, Homo Sapiens
HQSDVWSYGV

SEQ ID NO: 34352 - protein, 10 aa, Homo Sapiens
DVWSYGVTVW

SEQ ID NO: 34353 - protein, 10 aa, Homo Sapiens
WSYGVTVWEL

SEQ ID NO: 34354 - protein, 10 aa, Homo Sapiens
SYGVTVWELM

SEQ ID NO: 34355 - protein, 10 aa, Homo Sapiens
TVWELMTFGA

SEQ ID NO: 34356 - protein, 10 aa, Homo Sapiens
ELMTFGAKPY

SEQ ID NO: 34357 - protein, 10 aa, Homo Sapiens
IPAREIPDLL

SEQ ID NO: 34358 - protein, 10 aa, Homo Sapiens
RLPQPPICTI

SEQ ID NO: 34359 - protein, 10 aa, Homo Sapiens
QPPICTIDVY

SEQ ID NO: 34360 - protein, 10 aa, Homo Sapiens
PPICTIDVYM

SEQ ID NO: 34361 - protein, 10 aa, Homo Sapiens
CTIDVYMIMV

SEQ ID NO: 34362 - protein, 10 aa, Homo Sapiens
TIDVYMIMVK

SEQ ID NO: 34363 - protein, 10 aa, Homo Sapiens
VYMIMVKCWM

SEQ ID NO: 34364 - protein, 10 aa, Homo Sapiens
YMIMVKCWMI

SEQ ID NO: 34365 - protein, 10 aa, Homo Sapiens
KCWMIDSECR

SEQ ID NO: 34366 - protein, 10 aa, Homo Sapiens
WMIDSECRPR

SEQ ID NO: 34367 - protein, 10 aa, Homo Sapiens
SECRPRFREL

SEQ ID NO: 34368 - protein, 10 aa, Homo Sapiens
ECRPRFRELV

SEQ ID NO: 34369 - protein, 10 aa, Homo Sapiens
RPRFRELVSE

SEQ ID NO: 34370 - protein, 10 aa, Homo Sapiens
RFRELVSEFS

SEQ ID NO: 34371 - protein, 10 aa, Homo Sapiens
RELVSEFSRM

SEQ ID NO: 34372 - protein, 10 aa, Homo Sapiens
ELVSEFSRMA

SEQ ID NO: 34373 - protein, 10 aa, Homo Sapiens
LVSEFSRMAR

SEQ ID NO: 34374 - protein, 10 aa, Homo Sapiens
FSRMARDPQR

SEQ ID NO: 34375 - protein, 10 aa, Homo Sapiens
RMARDPQRFV

SEQ ID NO: 34376 - protein, 10 aa, Homo Sapiens
MARDPQRFVV

SEQ ID NO: 34377 - protein, 10 aa, Homo Sapiens
IQNEDLGPAS

SEQ ID NO: 34378 - protein, 10 aa, Homo Sapiens
NEDLGPASPL

SEQ ID NO: 34379 - protein, 10 aa, Homo Sapiens
GPASPLDSTF

SEQ ID NO: 34380 - protein, 10 aa, Homo Sapiens
PASPLDSTFY

SEQ ID NO: 34381 - protein, 10 aa, Homo Sapiens
ASPLDSTFYR

SEQ ID NO: 34382 - protein, 10 aa, Homo Sapiens
PLDSTFYRSL

SEQ ID NO: 34383 - protein, 10 aa, Homo Sapiens
LLEDDDMGDL

SEQ ID NO: 34384 - protein, 10 aa, Homo Sapiens
LEDDDMGDLV

SEQ ID NO: 34385 - protein, 10 aa, Homo Sapiens
MGDLVDAEEY

SEQ ID NO: 34386 - protein, 10 aa, Homo Sapiens
DLVDAEEYLV

SEQ ID NO: 34387 - protein, 10 aa, Homo Sapiens
EEYLVPQQGF

SEQ ID NO: 34388 - protein, 10 aa, Homo Sapiens
EYLVPQQGFF

SEQ ID NO: 34389 - protein, 10 aa, Homo Sapiens
YLVPQQGFFC

SEQ ID NO: 34390 - protein, 10 aa, Homo Sapiens
DPAPGAGGMV

SEQ ID NO: 34391 - protein, 10 aa, Homo Sapiens
HHRHRSSSTR

SEQ ID NO: 34392 - protein, 10 aa, Homo Sapiens
TRSGGGDLTL

SEQ ID NO: 34393 - protein, 10 aa, Homo Sapiens
SEEEAPRSPL

SEQ ID NO: 34394 - protein, 10 aa, Homo Sapiens
EEEAPRSPLA

SEQ ID NO: 34395 - protein, 10 aa, Homo Sapiens
APRSPLAPSE

SEQ ID NO: 34396 - protein, 10 aa, Homo Sapiens
APSEGAGSDV

SEQ ID NO: 34397 - protein, 10 aa, Homo Sapiens
DLGMGAAKGL

SEQ ID NO: 34398 - protein, 10 aa, Homo Sapiens
MGAAKGLQSL

SEQ ID NO: 34399 - protein, 10 aa, Homo Sapiens
SLPTHDPSPL

SEQ ID NO: 34400 - protein, 10 aa, Homo Sapiens
LQRYSEDPTV

SEQ ID NO: 34401 - protein, 10 aa, Homo Sapiens
RYSEDPTVPL

SEQ ID NO: 34402 - protein, 10 aa, Homo Sapiens
VPLPSETDGY

SEQ ID NO: 34403 - protein, 10 aa, Homo Sapiens
PLPSETDGYV

SEQ ID NO: 34404 - protein, 10 aa, Homo Sapiens
LPSETDGYVA

SEQ ID NO: 34405 - protein, 10 aa, Homo Sapiens
SETDGYVAPL

SEQ ID NO: 34406 - protein, 10 aa, Homo Sapiens
ETDGYVAPLT

SEQ ID NO: 34407 - protein, 10 aa, Homo Sapiens
YVAPLTCSPQ

SEQ ID NO: 34408 - protein, 10 aa, Homo Sapiens
LTCSPQPEYV

SEQ ID NO: 34409 - protein, 10 aa, Homo Sapiens
DVRPQPPSPR

SEQ ID NO: 34410 - protein, 10 aa, Homo Sapiens
QPPSPREGPL

SEQ ID NO: 34411 - protein, 10 aa, Homo Sapiens
SPREGPLPAA

SEQ ID NO: 34412 - protein, 10 aa, Homo Sapiens
PLPAARPAGA

SEQ ID NO: 34413 - protein, 10 aa, Homo Sapiens
LPAARPAGAT

SEQ ID NO: 34414 - protein, 10 aa, Homo Sapiens
KTLSPGKNGV

SEQ ID NO: 34415 - protein, 10 aa, Homo Sapiens
TLSPGKNGVV

SEQ ID NO: 34416 - protein, 10 aa, Homo Sapiens
YLTPQGGAAP

SEQ ID NO: 34417 - protein, 10 aa, Homo Sapiens
APQPHPPPAF

SEQ ID NO: 34418 - protein, 10 aa, Homo Sapiens
HPPPAFSPAF

SEQ ID NO: 34419 - protein, 10 aa, Homo Sapiens
AFSPAFDNLY

SEQ ID NO: 34420 - protein, 10 aa, Homo Sapiens
FSPAFDNLYY

SEQ ID NO: 34421 - protein, 10 aa, Homo Sapiens
SPAFDNLYYW

SEQ ID NO: 34422 - protein, 10 aa, Homo Sapiens
PERGAPPSTF

SEQ ID NO: 34423 - protein, 10 aa, Homo Sapiens
GTPTAENPEY

SEQ ID NO: 34424 - protein, 10 aa, Homo Sapiens
TPTAENPEYL

SEQ ID NO: 34425 - protein, 11 aa, Homo Sapiens
MELAALCRWGL

SEQ ID NO: 34426 - protein, 11 aa, Homo Sapiens
ELAALCRWGLL

SEQ ID NO: 34427 - protein, 11 aa, Homo Sapiens
AALCRWGLLLA

SEQ ID NO: 34428 - protein, 11 aa, Homo Sapiens
ALCRWGLLLAL

SEQ ID NO: 34429 - protein, 11 aa, Homo Sapiens
GLLLALLPPGA

SEQ ID NO: 34430 - protein, 11 aa, Homo Sapiens
LLLALLPPGAA

SEQ ID NO: 34431 - protein, 11 aa, Homo Sapiens
ALLPPGAASTQ

SEQ ID NO: 34432 - protein, 11 aa, Homo Sapiens
LLPPGAASTQV

SEQ ID NO: 34433 - protein, 11 aa, Homo Sapiens
LPPGAASTQVC

SEQ ID NO: 34434 - protein, 11 aa, Homo Sapiens
STQVCTGTDMK

SEQ ID NO: 34435 - protein, 11 aa, Homo Sapiens
TQVCTGTDMKL

SEQ ID NO: 34436 - protein, 11 aa, Homo Sapiens
QVCTGTDMKLR

SEQ ID NO: 34437 - protein, 11 aa, Homo Sapiens
LPASPETHLDM

SEQ ID NO: 34438 - protein, 11 aa, Homo Sapiens
ASPETHLDMLR

SEQ ID NO: 34439 - protein, 11 aa, Homo Sapiens
ETHLDMLRHLY

SEQ ID NO: 34440 - protein, 11 aa, Homo Sapiens
HLDMLRHLYQG

SEQ ID NO: 34441 - protein, 11 aa, Homo Sapiens
MLRHLYQGCQV

SEQ ID NO: 34442 - protein, 11 aa, Homo Sapiens
HLYQGCQVVQG

SEQ ID NO: 34443 - protein, 11 aa, Homo Sapiens
YQGCQVVQGNL

SEQ ID NO: 34444 - protein, 11 aa, Homo Sapiens
QVVQGNLELTY

SEQ ID NO: 34445 - protein, 11 aa, Homo Sapiens
VVQGNLELTYL

SEQ ID NO: 34446 - protein, 11 aa, Homo Sapiens
ELTYLPTNASL

SEQ ID NO: 34447 - protein, 11 aa, Homo Sapiens
TYLPTNASLSF

SEQ ID NO: 34448 - protein, 11 aa, Homo Sapiens
YLPTNASLSFL

SEQ ID NO: 34449 - protein, 11 aa, Homo Sapiens
SLSFLQDIQEV

SEQ ID NO: 34450 - protein, 11 aa, Homo Sapiens
FLQDIQEVQGY

SEQ ID NO: 34451 - protein, 11 aa, Homo Sapiens
LQDIQEVQGYV

SEQ ID NO: 34452 - protein, 11 aa, Homo Sapiens
DIQEVQGYVLI

SEQ ID NO: 34453 - protein, 11 aa, Homo Sapiens
QGYVLIAHNQV

SEQ ID NO: 34454 - protein, 11 aa, Homo Sapiens
GYVLIAHNQVR

SEQ ID NO: 34455 - protein, 11 aa, Homo Sapiens
VLIAHNQVRQV

SEQ ID NO: 34456 - protein, 11 aa, Homo Sapiens
HNQVRQVPLQR

SEQ ID NO: 34457 - protein, 11 aa, Homo Sapiens
NQVRQVPLQRL

SEQ ID NO: 34458 - protein, 11 aa, Homo Sapiens
QVRQVPLQRLR

SEQ ID NO: 34459 - protein, 11 aa, Homo Sapiens
RQVPLQRLRIV

SEQ ID NO: 34460 - protein, 11 aa, Homo Sapiens
QVPLQRLRIVR

SEQ ID NO: 34461 - protein, 11 aa, Homo Sapiens
QRLRIVRGTQL

SEQ ID NO: 34462 - protein, 11 aa, Homo Sapiens
RLRIVRGTQLF

SEQ ID NO: 34463 - protein, 11 aa, Homo Sapiens
TQLFEDNYALA

SEQ ID NO: 34464 - protein, 11 aa, Homo Sapiens
QLFEDNYALAV

SEQ ID NO: 34465 - protein, 11 aa, Homo Sapiens
ALAVLDNGDPL

SEQ ID NO: 34466 - protein, 11 aa, Homo Sapiens
VLDNGDPLNNT

SEQ ID NO: 34467 - protein, 11 aa, Homo Sapiens
NGDPLNNTTPV

SEQ ID NO: 34468 - protein, 11 aa, Homo Sapiens
PLNNTTPVTGA

SEQ ID NO: 34469 - protein, 11 aa, Homo Sapiens
TPVTGASPGGL

SEQ ID NO: 34470 - protein, 11 aa, Homo Sapiens
PVTGASPGGLR

SEQ ID NO: 34471 - protein, 11 aa, Homo Sapiens
GLRELQLRSLT

SEQ ID NO: 34472 - protein, 11 aa, Homo Sapiens
RELQLRSLTEI

SEQ ID NO: 34473 - protein, 11 aa, Homo Sapiens
ELQLRSLTEIL

SEQ ID NO: 34474 - protein, 11 aa, Homo Sapiens
LQLRSLTEILK

SEQ ID NO: 34475 - protein, 11 aa, Homo Sapiens
SLTEILKGGVL

SEQ ID NO: 34476 - protein, 11 aa, Homo Sapiens
EILKGGVLIQR

SEQ ID NO: 34477 - protein, 11 aa, Homo Sapiens
VLIQRNPQLCY

SEQ ID NO: 34478 - protein, 11 aa, Homo Sapiens
NPQLCYQDTIL

SEQ ID NO: 34479 - protein, 11 aa, Homo Sapiens
QLCYQDTILWK

SEQ ID NO: 34480 - protein, 11 aa, Homo Sapiens
CYQDTILWKDI

SEQ ID NO: 34481 - protein, 11 aa, Homo Sapiens
YQDTILWKDIF

SEQ ID NO: 34482 - protein, 11 aa, Homo Sapiens
DTILWKDIFHK

SEQ ID NO: 34483 - protein, 11 aa, Homo Sapiens
DIFHKNNQLAL

SEQ ID NO: 34484 - protein, 11 aa, Homo Sapiens
FHKNNQLALTL

SEQ ID NO: 34485 - protein, 11 aa, Homo Sapiens
QLALTLIDTNR

SEQ ID NO: 34486 - protein, 11 aa, Homo Sapiens
ALTLIDTNRSR

SEQ ID NO: 34487 - protein, 11 aa, Homo Sapiens
TLIDTNRSRAC

SEQ ID NO: 34488 - protein, 11 aa, Homo Sapiens
RSRACHPCSPM

SEQ ID NO: 34489 - protein, 11 aa, Homo Sapiens
RACHPCSPMCK

SEQ ID NO: 34490 - protein, 11 aa, Homo Sapiens
HPCSPMCKGSR

SEQ ID NO: 34491 - protein, 11 aa, Homo Sapiens
ESSEDCQSLTR

SEQ ID NO: 34492 - protein, 11 aa, Homo Sapiens
SEDCQSLTRTV

SEQ ID NO: 34493 - protein, 11 aa, Homo Sapiens
TVCAGGCARCK

SEQ ID NO: 34494 - protein, 11 aa, Homo Sapiens
LPTDCCHEQCA

SEQ ID NO: 34495 - protein, 11 aa, Homo Sapiens
EQCAAGCTGPK

SEQ ID NO: 34496 - protein, 11 aa, Homo Sapiens
GPKHSDCLACL

SEQ ID NO: 34497 - protein, 11 aa, Homo Sapiens
GICELHCPALV

SEQ ID NO: 34498 - protein, 11 aa, Homo Sapiens
CELHCPALVTY

SEQ ID NO: 34499 - protein, 11 aa, Homo Sapiens
CPALVTYNTDT

SEQ ID NO: 34500 - protein, 11 aa, Homo Sapiens
PALVTYNTDTF

SEQ ID NO: 34501 - protein, 11 aa, Homo Sapiens
VTYNTDTFESM

SEQ ID NO: 34502 - protein, 11 aa, Homo Sapiens
TFESMPNPEGR

SEQ ID NO: 34503 - protein, 11 aa, Homo Sapiens
FESMPNPEGRY

SEQ ID NO: 34504 - protein, 11 aa, Homo Sapiens
SMPNPEGRYTF

SEQ ID NO: 34505 - protein, 11 aa, Homo Sapiens
EGRYTFGASCV

SEQ ID NO: 34506 - protein, 11 aa, Homo Sapiens
FGASCVTACPY

SEQ ID NO: 34507 - protein, 11 aa, Homo Sapiens
ASCVTACPYNY

SEQ ID NO: 34508 - protein, 11 aa, Homo Sapiens
CVTACPYNYLS

SEQ ID NO: 34509 - protein, 11 aa, Homo Sapiens
YLSTDVGSCTL

SEQ ID NO: 34510 - protein, 11 aa, Homo Sapiens
LSTDVGSCTLV

SEQ ID NO: 34511 - protein, 11 aa, Homo Sapiens
DVGSCTLVCPL

SEQ ID NO: 34512 - protein, 11 aa, Homo Sapiens
TLVCPLHNQEV

SEQ ID NO: 34513 - protein, 11 aa, Homo Sapiens
TAEDGTQRCEK

SEQ ID NO: 34514 - protein, 11 aa, Homo Sapiens
RVCYGLGMEHL

SEQ ID NO: 34515 - protein, 11 aa, Homo Sapiens
YGLGMEHLREV

SEQ ID NO: 34516 - protein, 11 aa, Homo Sapiens
GMEHLREVRAV

SEQ ID NO: 34517 - protein, 11 aa, Homo Sapiens
HLREVRAVTSA

SEQ ID NO: 34518 - protein, 11 aa, Homo Sapiens
REVRAVTSANI

SEQ ID NO: 34519 - protein, 11 aa, Homo Sapiens
RAVTSANIQEF

SEQ ID NO: 34520 - protein, 11 aa, Homo Sapiens
AVTSANIQEFA

SEQ ID NO: 34521 - protein, 11 aa, Homo Sapiens
SANIQEFAGCK

SEQ ID NO: 34522 - protein, 11 aa, Homo Sapiens
FAGCKKIFGSL

SEQ ID NO: 34523 - protein, 11 aa, Homo Sapiens
FLPESFDGDPA

SEQ ID NO: 34524 - protein, 11 aa, Homo Sapiens
LPESFDGDPAS

SEQ ID NO: 34525 - protein, 11 aa, Homo Sapiens
APLQPEQLQVF

SEQ ID NO: 34526 - protein, 11 aa, Homo Sapiens
LQPEQLQVFET

SEQ ID NO: 34527 - protein, 11 aa, Homo Sapiens
QPEQLQVFETL

SEQ ID NO: 34528 - protein, 11 aa, Homo Sapiens
QLQVFETLEEI

SEQ ID NO: 34529 - protein, 11 aa, Homo Sapiens
VFETLEEITGY

SEQ ID NO: 34530 - protein, 11 aa, Homo Sapiens
FETLEEITGYL

SEQ ID NO: 34531 - protein, 11 aa, Homo Sapiens
ETLEEITGYLY

SEQ ID NO: 34532 - protein, 11 aa, Homo Sapiens
TLEEITGYLYI

SEQ ID NO: 34533 - protein, 11 aa, Homo Sapiens
EEITGYLYISA

SEQ ID NO: 34534 - protein, 11 aa, Homo Sapiens
EITGYLYISAW

SEQ ID NO: 34535 - protein, 11 aa, Homo Sapiens
YLYISAWPDSL

SEQ ID NO: 34536 - protein, 11 aa, Homo Sapiens
WPDSLPDLSVF

SEQ ID NO: 34537 - protein, 11 aa, Homo Sapiens
SLPDLSVFQNL

SEQ ID NO: 34538 - protein, 11 aa, Homo Sapiens
DLSVFQNLQVI

SEQ ID NO: 34539 - protein, 11 aa, Homo Sapiens
LSVFQNLQVIR

SEQ ID NO: 34540 - protein, 11 aa, Homo Sapiens
VFQNLQVIRGR

SEQ ID NO: 34541 - protein, 11 aa, Homo Sapiens
FQNLQVIRGRI

SEQ ID NO: 34542 - protein, 11 aa, Homo Sapiens
VIRGRILHNGA

SEQ ID NO: 34543 - protein, 11 aa, Homo Sapiens
GRILHNGAYSL

SEQ ID NO: 34544 - protein, 11 aa, Homo Sapiens
ILHNGAYSLTL

SEQ ID NO: 34545 - protein, 11 aa, Homo Sapiens
NGAYSLTLQGL

SEQ ID NO: 34546 - protein, 11 aa, Homo Sapiens
AYSLTLQGLGI

SEQ ID NO: 34547 - protein, 11 aa, Homo Sapiens
LTLQGLGISWL

SEQ ID NO: 34548 - protein, 11 aa, Homo Sapiens
TLQGLGISWLG

SEQ ID NO: 34549 - protein, 11 aa, Homo Sapiens
LQGLGISWLGL

SEQ ID NO: 34550 - protein, 11 aa, Homo Sapiens
GISWLGLRSLR

SEQ ID NO: 34551 - protein, 11 aa, Homo Sapiens
SWLGLRSLREL

SEQ ID NO: 34552 - protein, 11 aa, Homo Sapiens
SLRELGSGLAL

SEQ ID NO: 34553 - protein, 11 aa, Homo Sapiens
GLALIHHNTHL

SEQ ID NO: 34554 - protein, 11 aa, Homo Sapiens
ALIHHNTHLCF

SEQ ID NO: 34555 - protein, 11 aa, Homo Sapiens
LIHHNTHLCFV

SEQ ID NO: 34556 - protein, 11 aa, Homo Sapiens
CFVHTVPWDQL

SEQ ID NO: 34557 - protein, 11 aa, Homo Sapiens
FVHTVPWDQLF

SEQ ID NO: 34558 - protein, 11 aa, Homo Sapiens
VPWDQLFRNPH

SEQ ID NO: 34559 - protein, 11 aa, Homo Sapiens
QLFRNPHQALL

SEQ ID NO: 34560 - protein, 11 aa, Homo Sapiens
HTANRPEDECV

SEQ ID NO: 34561 - protein, 11 aa, Homo Sapiens
RPEDECVGEGL

SEQ ID NO: 34562 - protein, 11 aa, Homo Sapiens
CVGEGLACHQL

SEQ ID NO: 34563 - protein, 11 aa, Homo Sapiens
RGHCWGPGPTQ

SEQ ID NO: 34564 - protein, 11 aa, Homo Sapiens
HCWGPGPTQCV

SEQ ID NO: 34565 - protein, 11 aa, Homo Sapiens
GPTQCVNCSQF

SEQ ID NO: 34566 - protein, 11 aa, Homo Sapiens
TQCVNCSQFLR

SEQ ID NO: 34567 - protein, 11 aa, Homo Sapiens
FLRGQECVEEC

SEQ ID NO: 34568 - protein, 11 aa, Homo Sapiens
RVLQGLPREYV

SEQ ID NO: 34569 - protein, 11 aa, Homo Sapiens
LPREYVNARHC

SEQ ID NO: 34570 - protein, 11 aa, Homo Sapiens
LPCHPECQPQN

SEQ ID NO: 34571 - protein, 11 aa, Homo Sapiens
TCFGPEADQCV

SEQ ID NO: 34572 - protein, 11 aa, Homo Sapiens
EADQCVACAHY

SEQ ID NO: 34573 - protein, 11 aa, Homo Sapiens
VACAHYKDPPF

SEQ ID NO: 34574 - protein, 11 aa, Homo Sapiens
CAHYKDPPFCV

SEQ ID NO: 34575 - protein, 11 aa, Homo Sapiens
HYKDPPFCVAR

SEQ ID NO: 34576 - protein, 11 aa, Homo Sapiens
CPSGVKPDLSY

SEQ ID NO: 34577 - protein, 11 aa, Homo Sapiens
GVKPDLSYMPI

SEQ ID NO: 34578 - protein, 11 aa, Homo Sapiens
MPIWKFPDEEG

SEQ ID NO: 34579 - protein, 11 aa, Homo Sapiens
FPDEEGACQPC

SEQ ID NO: 34580 - protein, 11 aa, Homo Sapiens
CTHSCVDLDDK

SEQ ID NO: 34581 - protein, 11 aa, Homo Sapiens
DLDDKGCPAEQ

SEQ ID NO: 34582 - protein, 11 aa, Homo Sapiens
CPAEQRASPLT

SEQ ID NO: 34583 - protein, 11 aa, Homo Sapiens
AEQRASPLTSI

SEQ ID NO: 34584 - protein, 11 aa, Homo Sapiens
RASPLTSIISA

SEQ ID NO: 34585 - protein, 11 aa, Homo Sapiens
SPLTSIISAVV

SEQ ID NO: 34586 - protein, 11 aa, Homo Sapiens
LTSIISAVVGI

SEQ ID NO: 34587 - protein, 11 aa, Homo Sapiens
SIISAVVGILL

SEQ ID NO: 34588 - protein, 11 aa, Homo Sapiens
IISAVVGILLV

SEQ ID NO: 34589 - protein, 11 aa, Homo Sapiens
ISAVVGILLVV

SEQ ID NO: 34590 - protein, 11 aa, Homo Sapiens
SAVVGILLVVV

SEQ ID NO: 34591 - protein, 11 aa, Homo Sapiens
AVVGILLVVVL

SEQ ID NO: 34592 - protein, 11 aa, Homo Sapiens
GILLVVVLGVV

SEQ ID NO: 34593 - protein, 11 aa, Homo Sapiens
ILLVVVLGVVF

SEQ ID NO: 34594 - protein, 11 aa, Homo Sapiens
LVVVLGVVFGI

SEQ ID NO: 34595 - protein, 11 aa, Homo Sapiens
VVLGVVFGILI

SEQ ID NO: 34596 - protein, 11 aa, Homo Sapiens
VLGVVFGILIK

SEQ ID NO: 34597 - protein, 11 aa, Homo Sapiens
GVVFGILIKRR

SEQ ID NO: 34598 - protein, 11 aa, Homo Sapiens
ILIKRRQQKIR

SEQ ID NO: 34599 - protein, 11 aa, Homo Sapiens
LIKRRQQKIRK

SEQ ID NO: 34600 - protein, 11 aa, Homo Sapiens
RRQQKIRKYTM

SEQ ID NO: 34601 - protein, 11 aa, Homo Sapiens
RQQKIRKYTMR

SEQ ID NO: 34602 - protein, 11 aa, Homo Sapiens
QQKIRKYTMRR

SEQ ID NO: 34603 - protein, 11 aa, Homo Sapiens
KIRKYTMRRLL

SEQ ID NO: 34604 - protein, 11 aa, Homo Sapiens
TMRRLLQETEL

SEQ ID NO: 34605 - protein, 11 aa, Homo Sapiens
RRLLQETELVE

SEQ ID NO: 34606 - protein, 11 aa, Homo Sapiens
LLQETELVEPL

SEQ ID NO: 34607 - protein, 11 aa, Homo Sapiens
ELVEPLTPSGA

SEQ ID NO: 34608 - protein, 11 aa, Homo Sapiens
LVEPLTPSGAM

SEQ ID NO: 34609 - protein, 11 aa, Homo Sapiens
TPSGAMPNQAQ

SEQ ID NO: 34610 - protein, 11 aa, Homo Sapiens
AMPNQAQMRIL

SEQ ID NO: 34611 - protein, 11 aa, Homo Sapiens
MPNQAQMRILK

SEQ ID NO: 34612 - protein, 11 aa, Homo Sapiens
AQMRILKETEL

SEQ ID NO: 34613 - protein, 11 aa, Homo Sapiens
QMRILKETELR

SEQ ID NO: 34614 - protein, 11 aa, Homo Sapiens
MRILKETELRK

SEQ ID NO: 34615 - protein, 11 aa, Homo Sapiens
RILKETELRKV

SEQ ID NO: 34616 - protein, 11 aa, Homo Sapiens
ILKETELRKVK

SEQ ID NO: 34617 - protein, 11 aa, Homo Sapiens
KETELRKVKVL

SEQ ID NO: 34618 - protein, 11 aa, Homo Sapiens
KVLGSGAFGTV

SEQ ID NO: 34619 - protein, 11 aa, Homo Sapiens
VLGSGAFGTVY

SEQ ID NO: 34620 - protein, 11 aa, Homo Sapiens
SGAFGTVYKGI

SEQ ID NO: 34621 - protein, 11 aa, Homo Sapiens
GAFGTVYKGIW

SEQ ID NO: 34622 - protein, 11 aa, Homo Sapiens
AFGTVYKGIWI

SEQ ID NO: 34623 - protein, 11 aa, Homo Sapiens
IWIPDGENVKI

SEQ ID NO: 34624 - protein, 11 aa, Homo Sapiens
IPDGENVKIPV

SEQ ID NO: 34625 - protein, 11 aa, Homo Sapiens
ENVKIPVAIKV

SEQ ID NO: 34626 - protein, 11 aa, Homo Sapiens
IPVAIKVLREN

SEQ ID NO: 34627 - protein, 11 aa, Homo Sapiens
NTSPKANKEIL

SEQ ID NO: 34628 - protein, 11 aa, Homo Sapiens
KANKEILDEAY

SEQ ID NO: 34629 - protein, 11 aa, Homo Sapiens
KEILDEAYVMA

SEQ ID NO: 34630 - protein, 11 aa, Homo Sapiens
ILDEAYVMAGV

SEQ ID NO: 34631 - protein, 11 aa, Homo Sapiens
AYVMAGVGSPY

SEQ ID NO: 34632 - protein, 11 aa, Homo Sapiens
YVMAGVGSPYV

SEQ ID NO: 34633 - protein, 11 aa, Homo Sapiens
MAGVGSPYVSR

SEQ ID NO: 34634 - protein, 11 aa, Homo Sapiens
SPYVSRLLGIC

SEQ ID NO: 34635 - protein, 11 aa, Homo Sapiens
PYVSRLLGICL

SEQ ID NO: 34636 - protein, 11 aa, Homo Sapiens
YVSRLLGICLT

SEQ ID NO: 34637 - protein, 11 aa, Homo Sapiens
RLLGICLTSTV

SEQ ID NO: 34638 - protein, 11 aa, Homo Sapiens
GICLTSTVQLV

SEQ ID NO: 34639 - protein, 11 aa, Homo Sapiens
CLTSTVQLVTQ

SEQ ID NO: 34640 - protein, 11 aa, Homo Sapiens
LTSTVQLVTQL

SEQ ID NO: 34641 - protein, 11 aa, Homo Sapiens
TVQLVTQLMPY

SEQ ID NO: 34642 - protein, 11 aa, Homo Sapiens
LVTQLMPYGCL

SEQ ID NO: 34643 - protein, 11 aa, Homo Sapiens
LMPYGCLLDHV

SEQ ID NO: 34644 - protein, 11 aa, Homo Sapiens
MPYGCLLDHVR

SEQ ID NO: 34645 - protein, 11 aa, Homo Sapiens
RLGSQDLLNWC

SEQ ID NO: 34646 - protein, 11 aa, Homo Sapiens
SQDLLNWCMQI

SEQ ID NO: 34647 - protein, 11 aa, Homo Sapiens
DLLNWCMQIAK

SEQ ID NO: 34648 - protein, 11 aa, Homo Sapiens
WCMQIAKGMSY

SEQ ID NO: 34649 - protein, 11 aa, Homo Sapiens
CMQIAKGMSYL

SEQ ID NO: 34650 - protein, 11 aa, Homo Sapiens
MQIAKGMSYLE

SEQ ID NO: 34651 - protein, 11 aa, Homo Sapiens
KGMSYLEDVRL

SEQ ID NO: 34652 - protein, 11 aa, Homo Sapiens
GMSYLEDVRLV

SEQ ID NO: 34653 - protein, 11 aa, Homo Sapiens
SYLEDVRLVHR

SEQ ID NO: 34654 - protein, 11 aa, Homo Sapiens
YLEDVRLVHRD

SEQ ID NO: 34655 - protein, 11 aa, Homo Sapiens
LEDVRLVHRDL

SEQ ID NO: 34656 - protein, 11 aa, Homo Sapiens
LVHRDLAARNV

SEQ ID NO: 34657 - protein, 11 aa, Homo Sapiens
VHRDLAARNVL

SEQ ID NO: 34658 - protein, 11 aa, Homo Sapiens
RDLAARNVLVK

SEQ ID NO: 34659 - protein, 11 aa, Homo Sapiens
NVLVKSPNHVK

SEQ ID NO: 34660 - protein, 11 aa, Homo Sapiens
VLVKSPNHVKI

SEQ ID NO: 34661 - protein, 11 aa, Homo Sapiens
KSPNHVKITDF

SEQ ID NO: 34662 - protein, 11 aa, Homo Sapiens
HVKITDFGLAR

SEQ ID NO: 34663 - protein, 11 aa, Homo Sapiens
KITDFGLARLL

SEQ ID NO: 34664 - protein, 11 aa, Homo Sapiens
GLARLLDIDET

SEQ ID NO: 34665 - protein, 11 aa, Homo Sapiens
RLLDIDETEYH

SEQ ID NO: 34666 - protein, 11 aa, Homo Sapiens
LLDIDETEYHA

SEQ ID NO: 34667 - protein, 11 aa, Homo Sapiens
ETEYHADGGKV

SEQ ID NO: 34668 - protein, 11 aa, Homo Sapiens
HADGGKVPIKW

SEQ ID NO: 34669 - protein, 11 aa, Homo Sapiens
VPIKWMALESI

SEQ ID NO: 34670 - protein, 11 aa, Homo Sapiens
KWMALESILRR

SEQ ID NO: 34671 - protein, 11 aa, Homo Sapiens
WMALESILRRR

SEQ ID NO: 34672 - protein, 11 aa, Homo Sapiens
MALESILRRRF

SEQ ID NO: 34673 - protein, 11 aa, Homo Sapiens
RRFTHQSDVWS

SEQ ID NO: 34674 - protein, 11 aa, Homo Sapiens
RFTHQSDVWSY

SEQ ID NO: 34675 - protein, 11 aa, Homo Sapiens
QSDVWSYGVTV

SEQ ID NO: 34676 - protein, 11 aa, Homo Sapiens
VWSYGVTVWEL

SEQ ID NO: 34677 - protein, 11 aa, Homo Sapiens
WSYGVTVWELM

SEQ ID NO: 34678 - protein, 11 aa, Homo Sapiens
YGVTVWELMTF

SEQ ID NO: 34679 - protein, 11 aa, Homo Sapiens
VTVWELMTFGA

SEQ ID NO: 34680 - protein, 11 aa, Homo Sapiens
TVWELMTFGAK

SEQ ID NO: 34681 - protein, 11 aa, Homo Sapiens
WELMTFGAKPY

SEQ ID NO: 34682 - protein, 11 aa, Homo Sapiens
MTFGAKPYDGI

SEQ ID NO: 34683 - protein, 11 aa, Homo Sapiens
FGAKPYDGIPA

SEQ ID NO: 34684 - protein, 11 aa, Homo Sapiens
GAKPYDGIPAR

SEQ ID NO: 34685 - protein, 11 aa, Homo Sapiens
KPYDGIPAREI

SEQ ID NO: 34686 - protein, 11 aa, Homo Sapiens
GIPAREIPDLL

SEQ ID NO: 34687 - protein, 11 aa, Homo Sapiens
PAREIPDLLEK

SEQ ID NO: 34688 - protein, 11 aa, Homo Sapiens
EIPDLLEKGER

SEQ ID NO: 34689 - protein, 11 aa, Homo Sapiens
DLLEKGERLPQ

SEQ ID NO: 34690 - protein, 11 aa, Homo Sapiens
LPQPPICTIDV

SEQ ID NO: 34691 - protein, 11 aa, Homo Sapiens
QPPICTIDVYM

SEQ ID NO: 34692 - protein, 11 aa, Homo Sapiens
PPICTIDVYMI

SEQ ID NO: 34693 - protein, 11 aa, Homo Sapiens
ICTIDVYMIMV

SEQ ID NO: 34694 - protein, 11 aa, Homo Sapiens
CTIDVYMIMVK

SEQ ID NO: 34695 - protein, 11 aa, Homo Sapiens
DVYMIMVKCWM

SEQ ID NO: 34696 - protein, 11 aa, Homo Sapiens
VYMIMVKCWMI

SEQ ID NO: 34697 - protein, 11 aa, Homo Sapiens
WMIDSECRPRF

SEQ ID NO: 34698 - protein, 11 aa, Homo Sapiens
MIDSECRPRFR

SEQ ID NO: 34699 - protein, 11 aa, Homo Sapiens
RPRFRELVSEF

SEQ ID NO: 34700 - protein, 11 aa, Homo Sapiens
RFRELVSEFSR

SEQ ID NO: 34701 - protein, 11 aa, Homo Sapiens
ELVSEFSRMAR

SEQ ID NO: 34702 - protein, 11 aa, Homo Sapiens
EFSRMARDPQR

SEQ ID NO: 34703 - protein, 11 aa, Homo Sapiens
RMARDPQRFVV

SEQ ID NO: 34704 - protein, 11 aa, Homo Sapiens
MARDPQRFVVI

SEQ ID NO: 34705 - protein, 11 aa, Homo Sapiens
VVIQNEDLGPA

SEQ ID NO: 34706 - protein, 11 aa, Homo Sapiens
DLGPASPLDST

SEQ ID NO: 34707 - protein, 11 aa, Homo Sapiens
GPASPLDSTFY

SEQ ID NO: 34708 - protein, 11 aa, Homo Sapiens
PASPLDSTFYR

SEQ ID NO: 34709 - protein, 11 aa, Homo Sapiens
SPLDSTFYRSL

SEQ ID NO: 34710 - protein, 11 aa, Homo Sapiens
PLDSTFYRSLL

SEQ ID NO: 34711 - protein, 11 aa, Homo Sapiens
FYRSLLEDDDM

SEQ ID NO: 34712 - protein, 11 aa, Homo Sapiens
SLLEDDDMGDL

SEQ ID NO: 34713 - protein, 11 aa, Homo Sapiens
LLEDDDMGDLV

SEQ ID NO: 34714 - protein, 11 aa, Homo Sapiens
AEEYLVPQQGF

SEQ ID NO: 34715 - protein, 11 aa, Homo Sapiens
EEYLVPQQGFF

SEQ ID NO: 34716 - protein, 11 aa, Homo Sapiens
YLVPQQGFFCP

SEQ ID NO: 34717 - protein, 11 aa, Homo Sapiens
CPDPAPGAGGM

SEQ ID NO: 34718 - protein, 11 aa, Homo Sapiens
DPAPGAGGMVH

SEQ ID NO: 34719 - protein, 11 aa, Homo Sapiens
GAGGMVHHRHR

SEQ ID NO: 34720 - protein, 11 aa, Homo Sapiens
MVHHRHRSSST

SEQ ID NO: 34721 - protein, 11 aa, Homo Sapiens
TLGLEPSEEEA

SEQ ID NO: 34722 - protein, 11 aa, Homo Sapiens
APRSPLAPSEG

SEQ ID NO: 34723 - protein, 11 aa, Homo Sapiens
APSEGAGSDVF

SEQ ID NO: 34724 - protein, 11 aa, Homo Sapiens
DVFDGDLGMGA

SEQ ID NO: 34725 - protein, 11 aa, Homo Sapiens
GMGAAKGLQSL

SEQ ID NO: 34726 - protein, 11 aa, Homo Sapiens
SLPTHDPSPLQ

SEQ ID NO: 34727 - protein, 11 aa, Homo Sapiens
PTHDPSPLQRY

SEQ ID NO: 34728 - protein, 11 aa, Homo Sapiens
SPLQRYSEDPT

SEQ ID NO: 34729 - protein, 11 aa, Homo Sapiens
PLQRYSEDPTV

SEQ ID NO: 34730 - protein, 11 aa, Homo Sapiens
QRYSEDPTVPL

SEQ ID NO: 34731 - protein, 11 aa, Homo Sapiens
TVPLPSETDGY

SEQ ID NO: 34732 - protein, 11 aa, Homo Sapiens
VPLPSETDGYV

SEQ ID NO: 34733 - protein, 11 aa, Homo Sapiens
PLPSETDGYVA

SEQ ID NO: 34734 - protein, 11 aa, Homo Sapiens
LPSETDGYVAP

SEQ ID NO: 34735 - protein, 11 aa, Homo Sapiens
APLTCSPQPEY

SEQ ID NO: 34736 - protein, 11 aa, Homo Sapiens
PLTCSPQPEYV

SEQ ID NO: 34737 - protein, 11 aa, Homo Sapiens
SPREGPLPAAR

SEQ ID NO: 34738 - protein, 11 aa, Homo Sapiens
LPAARPAGATL

SEQ ID NO: 34739 - protein, 11 aa, Homo Sapiens
AARPAGATLER

SEQ ID NO: 34740 - protein, 11 aa, Homo Sapiens
RPAGATLERPK

SEQ ID NO: 34741 - protein, 11 aa, Homo Sapiens
LERPKTLSPGK

SEQ ID NO: 34742 - protein, 11 aa, Homo Sapiens
TLSPGKNGVVK

SEQ ID NO: 34743 - protein, 11 aa, Homo Sapiens
VVKDVFAFGGA

SEQ ID NO: 34744 - protein, 11 aa, Homo Sapiens
FAFGGAVENPE

SEQ ID NO: 34745 - protein, 11 aa, Homo Sapiens
FGGAVENPEYL

SEQ ID NO: 34746 - protein, 11 aa, Homo Sapiens
YLTPQGGAAPQ

SEQ ID NO: 34747 - protein, 11 aa, Homo Sapiens
TPQGGAAPQPH

SEQ ID NO: 34748 - protein, 11 aa, Homo Sapiens
GAAPQPHPPPA

SEQ ID NO: 34749 - protein, 11 aa, Homo Sapiens
PHPPPAFSPAF

SEQ ID NO: 34750 - protein, 11 aa, Homo Sapiens
PAFSPAFDNLY

SEQ ID NO: 34751 - protein, 11 aa, Homo Sapiens
AFSPAFDNLYY

SEQ ID NO: 34752 - protein, 11 aa, Homo Sapiens
FSPAFDNLYYW

SEQ ID NO: 34753 - protein, 11 aa, Homo Sapiens
LYYWDQDPPER

SEQ ID NO: 34754 - protein, 11 aa, Homo Sapiens
PPERGAPPSTF

SEQ ID NO: 34755 - protein, 11 aa, Homo Sapiens
PERGAPPSTFK

SEQ ID NO: 34756 - protein, 11 aa, Homo Sapiens
APPSTFKGTPT

SEQ ID NO: 34757 - protein, 11 aa, Homo Sapiens
KGTPTAENPEY

SEQ ID NO: 34758 - protein, 11 aa, Homo Sapiens
PTAENPEYLGL

SEQ ID NO: 34759 - protein, 11 aa, Homo Sapiens
AENPEYLGLDV

SEQ ID NO: 34760 - protein, 11 aa, Homo Sapiens
NPEYLGLDVPV

SEQ ID NO: 34761 - protein, 13 aa, Homo Sapiens
MELAALCRWGLLL

SEQ ID NO: 34762 - protein, 13 aa, Homo Sapiens
ELAALCRWGLLLA

SEQ ID NO: 34763 - protein, 13 aa, Homo Sapiens
LAALCRWGLLLAL

SEQ ID NO: 34764 - protein, 13 aa, Homo Sapiens
AALCRWGLLLALL

SEQ ID NO: 34765 - protein, 13 aa, Homo Sapiens
ALCRWGLLLALLP

SEQ ID NO: 34766 - protein, 13 aa, Homo Sapiens
LCRWGLLLALLPP

SEQ ID NO: 34767 - protein, 13 aa, Homo Sapiens
CRWGLLLALLPPG

SEQ ID NO: 34768 - protein, 13 aa, Homo Sapiens
RWGLLLALLPPGA

SEQ ID NO: 34769 - protein, 13 aa, Homo Sapiens
WGLLLALLPPGAA

SEQ ID NO: 34770 - protein, 13 aa, Homo Sapiens
GLLLALLPPGAAS

SEQ ID NO: 34771 - protein, 13 aa, Homo Sapiens
LLLALLPPGAAST

SEQ ID NO: 34772 - protein, 13 aa, Homo Sapiens
LLALLPPGAASTQ

SEQ ID NO: 34773 - protein, 13 aa, Homo Sapiens
LALLPPGAASTQV

SEQ ID NO: 34774 - protein, 13 aa, Homo Sapiens
ALLPPGAASTQVC

SEQ ID NO: 34775 - protein, 13 aa, Homo Sapiens
LLPPGAASTQVCT

SEQ ID NO: 34776 - protein, 13 aa, Homo Sapiens
LPPGAASTQVCTG

SEQ ID NO: 34777 - protein, 13 aa, Homo Sapiens
PPGAASTQVCTGT

SEQ ID NO: 34778 - protein, 13 aa, Homo Sapiens
PGAASTQVCTGTD

SEQ ID NO: 34779 - protein, 13 aa, Homo Sapiens
GAASTQVCTGTDM

SEQ ID NO: 34780 - protein, 13 aa, Homo Sapiens
AASTQVCTGTDMK

SEQ ID NO: 34781 - protein, 13 aa, Homo Sapiens
ASTQVCTGTDMKL

SEQ ID NO: 34782 - protein, 13 aa, Homo Sapiens
STQVCTGTDMKLR

SEQ ID NO: 34783 - protein, 13 aa, Homo Sapiens
TQVCTGTDMKLRL

SEQ ID NO: 34784 - protein, 13 aa, Homo Sapiens
QVCTGTDMKLRLP

SEQ ID NO: 34785 - protein, 13 aa, Homo Sapiens
VCTGTDMKLRLPA

SEQ ID NO: 34786 - protein, 13 aa, Homo Sapiens
CTGTDMKLRLPAS

SEQ ID NO: 34787 - protein, 13 aa, Homo Sapiens
TGTDMKLRLPASP

SEQ ID NO: 34788 - protein, 13 aa, Homo Sapiens
GTDMKLRLPASPE

SEQ ID NO: 34789 - protein, 13 aa, Homo Sapiens
TDMKLRLPASPET

SEQ ID NO: 34790 - protein, 13 aa, Homo Sapiens
DMKLRLPASPETH

SEQ ID NO: 34791 - protein, 13 aa, Homo Sapiens
MKLRLPASPETHL

SEQ ID NO: 34792 - protein, 13 aa, Homo Sapiens
KLRLPASPETHLD

SEQ ID NO: 34793 - protein, 13 aa, Homo Sapiens
LRLPASPETHLDM

SEQ ID NO: 34794 - protein, 13 aa, Homo Sapiens
RLPASPETHLDML

SEQ ID NO: 34795 - protein, 13 aa, Homo Sapiens
LPASPETHLDMLR

SEQ ID NO: 34796 - protein, 13 aa, Homo Sapiens
PASPETHLDMLRH

SEQ ID NO: 34797 - protein, 13 aa, Homo Sapiens
ASPETHLDMLRHL

SEQ ID NO: 34798 - protein, 13 aa, Homo Sapiens
SPETHLDMLRHLY

SEQ ID NO: 34799 - protein, 13 aa, Homo Sapiens
PETHLDMLRHLYQ

SEQ ID NO: 34800 - protein, 13 aa, Homo Sapiens
ETHLDMLRHLYQG

SEQ ID NO: 34801 - protein, 13 aa, Homo Sapiens
THLDMLRHLYQGC

SEQ ID NO: 34802 - protein, 13 aa, Homo Sapiens
HLDMLRHLYQGCQ

SEQ ID NO: 34803 - protein, 13 aa, Homo Sapiens
LDMLRHLYQGCQV

SEQ ID NO: 34804 - protein, 13 aa, Homo Sapiens
DMLRHLYQGCQVV

SEQ ID NO: 34805 - protein, 13 aa, Homo Sapiens
MLRHLYQGCQVVQ

SEQ ID NO: 34806 - protein, 13 aa, Homo Sapiens
LRHLYQGCQVVQG

SEQ ID NO: 34807 - protein, 13 aa, Homo Sapiens
RHLYQGCQVVQGN

SEQ ID NO: 34808 - protein, 13 aa, Homo Sapiens
HLYQGCQVVQGNL

SEQ ID NO: 34809 - protein, 13 aa, Homo Sapiens
LYQGCQVVQGNLE

SEQ ID NO: 34810 - protein, 13 aa, Homo Sapiens
YQGCQVVQGNLEL

SEQ ID NO: 34811 - protein, 13 aa, Homo Sapiens
QGCQVVQGNLELT

SEQ ID NO: 34812 - protein, 13 aa, Homo Sapiens
GCQVVQGNLELTY

SEQ ID NO: 34813 - protein, 13 aa, Homo Sapiens
CQVVQGNLELTYL

SEQ ID NO: 34814 - protein, 13 aa, Homo Sapiens
QVVQGNLELTYLP

SEQ ID NO: 34815 - protein, 13 aa, Homo Sapiens
VVQGNLELTYLPT

SEQ ID NO: 34816 - protein, 13 aa, Homo Sapiens
VQGNLELTYLPTN

SEQ ID NO: 34817 - protein, 13 aa, Homo Sapiens
QGNLELTYLPTNA

SEQ ID NO: 34818 - protein, 13 aa, Homo Sapiens
GNLELTYLPTNAS

SEQ ID NO: 34819 - protein, 13 aa, Homo Sapiens
NLELTYLPTNASL

SEQ ID NO: 34820 - protein, 13 aa, Homo Sapiens
LELTYLPTNASLS

SEQ ID NO: 34821 - protein, 13 aa, Homo Sapiens
ELTYLPTNASLSF

SEQ ID NO: 34822 - protein, 13 aa, Homo Sapiens
LTYLPTNASLSFL

SEQ ID NO: 34823 - protein, 13 aa, Homo Sapiens
TYLPTNASLSFLQ

SEQ ID NO: 34824 - protein, 13 aa, Homo Sapiens
YLPTNASLSFLQD

SEQ ID NO: 34825 - protein, 13 aa, Homo Sapiens
LPTNASLSFLQDI

SEQ ID NO: 34826 - protein, 13 aa, Homo Sapiens
PTNASLSFLQDIQ

SEQ ID NO: 34827 - protein, 13 aa, Homo Sapiens
TNASLSFLQDIQE

SEQ ID NO: 34828 - protein, 13 aa, Homo Sapiens
NASLSFLQDIQEV

SEQ ID NO: 34829 - protein, 13 aa, Homo Sapiens
ASLSFLQDIQEVQ

SEQ ID NO: 34830 - protein, 13 aa, Homo Sapiens
SLSFLQDIQEVQG

SEQ ID NO: 34831 - protein, 13 aa, Homo Sapiens
LSFLQDIQEVQGY

SEQ ID NO: 34832 - protein, 13 aa, Homo Sapiens
SFLQDIQEVQGYV

SEQ ID NO: 34833 - protein, 13 aa, Homo Sapiens
FLQDIQEVQGYVL

SEQ ID NO: 34834 - protein, 13 aa, Homo Sapiens
LQDIQEVQGYVLI

SEQ ID NO: 34835 - protein, 13 aa, Homo Sapiens
QDIQEVQGYVLIA

SEQ ID NO: 34836 - protein, 13 aa, Homo Sapiens
DIQEVQGYVLIAH

SEQ ID NO: 34837 - protein, 13 aa, Homo Sapiens
IQEVQGYVLIAHN

SEQ ID NO: 34838 - protein, 13 aa, Homo Sapiens
QEVQGYVLIAHNQ

SEQ ID NO: 34839 - protein, 13 aa, Homo Sapiens
EVQGYVLIAHNQV

SEQ ID NO: 34840 - protein, 13 aa, Homo Sapiens
VQGYVLIAHNQVR

SEQ ID NO: 34841 - protein, 13 aa, Homo Sapiens
QGYVLIAHNQVRQ

SEQ ID NO: 34842 - protein, 13 aa, Homo Sapiens
GYVLIAHNQVRQV

SEQ ID NO: 34843 - protein, 13 aa, Homo Sapiens
YVLIAHNQVRQVP

SEQ ID NO: 34844 - protein, 13 aa, Homo Sapiens
VLIAHNQVRQVPL

SEQ ID NO: 34845 - protein, 13 aa, Homo Sapiens
LIAHNQVRQVPLQ

SEQ ID NO: 34846 - protein, 13 aa, Homo Sapiens
IAHNQVRQVPLQR

SEQ ID NO: 34847 - protein, 13 aa, Homo Sapiens
AHNQVRQVPLQRL

SEQ ID NO: 34848 - protein, 13 aa, Homo Sapiens
HNQVRQVPLQRLR

SEQ ID NO: 34849 - protein, 13 aa, Homo Sapiens
NQVRQVPLQRLRI

SEQ ID NO: 34850 - protein, 13 aa, Homo Sapiens
QVRQVPLQRLRIV

SEQ ID NO: 34851 - protein, 13 aa, Homo Sapiens
VRQVPLQRLRIVR

SEQ ID NO: 34852 - protein, 13 aa, Homo Sapiens
RQVPLQRLRIVRG

SEQ ID NO: 34853 - protein, 13 aa, Homo Sapiens
QVPLQRLRIVRGT

SEQ ID NO: 34854 - protein, 13 aa, Homo Sapiens
VPLQRLRIVRGTQ

SEQ ID NO: 34855 - protein, 13 aa, Homo Sapiens
PLQRLRIVRGTQL

SEQ ID NO: 34856 - protein, 13 aa, Homo Sapiens
LQRLRIVRGTQLF

SEQ ID NO: 34857 - protein, 13 aa, Homo Sapiens
QRLRIVRGTQLFE

SEQ ID NO: 34858 - protein, 13 aa, Homo Sapiens
RLRIVRGTQLFED

SEQ ID NO: 34859 - protein, 13 aa, Homo Sapiens
LRIVRGTQLFEDN

SEQ ID NO: 34860 - protein, 13 aa, Homo Sapiens
RIVRGTQLFEDNY

SEQ ID NO: 34861 - protein, 13 aa, Homo Sapiens
IVRGTQLFEDNYA

SEQ ID NO: 34862 - protein, 13 aa, Homo Sapiens
VRGTQLFEDNYAL

SEQ ID NO: 34863 - protein, 13 aa, Homo Sapiens
RGTQLFEDNYALA

SEQ ID NO: 34864 - protein, 13 aa, Homo Sapiens
GTQLFEDNYALAV

SEQ ID NO: 34865 - protein, 13 aa, Homo Sapiens
TQLFEDNYALAVL

SEQ ID NO: 34866 - protein, 13 aa, Homo Sapiens
QLFEDNYALAVLD

SEQ ID NO: 34867 - protein, 13 aa, Homo Sapiens
LFEDNYALAVLDN

SEQ ID NO: 34868 - protein, 13 aa, Homo Sapiens
FEDNYALAVLDNG

SEQ ID NO: 34869 - protein, 13 aa, Homo Sapiens
EDNYALAVLDNGD

SEQ ID NO: 34870 - protein, 13 aa, Homo Sapiens
DNYALAVLDNGDP

SEQ ID NO: 34871 - protein, 13 aa, Homo Sapiens
NYALAVLDNGDPL

SEQ ID NO: 34872 - protein, 13 aa, Homo Sapiens
YALAVLDNGDPLN

SEQ ID NO: 34873 - protein, 13 aa, Homo Sapiens
ALAVLDNGDPLNN

SEQ ID NO: 34874 - protein, 13 aa, Homo Sapiens
LAVLDNGDPLNNT

SEQ ID NO: 34875 - protein, 13 aa, Homo Sapiens
AVLDNGDPLNNTT

SEQ ID NO: 34876 - protein, 13 aa, Homo Sapiens
VLDNGDPLNNTTP

SEQ ID NO: 34877 - protein, 13 aa, Homo Sapiens
LDNGDPLNNTTPV

SEQ ID NO: 34878 - protein, 13 aa, Homo Sapiens
DNGDPLNNTTPVT

SEQ ID NO: 34879 - protein, 13 aa, Homo Sapiens
NGDPLNNTTPVTG

SEQ ID NO: 34880 - protein, 13 aa, Homo Sapiens
GDPLNNTTPVTGA

SEQ ID NO: 34881 - protein, 13 aa, Homo Sapiens
DPLNNTTPVTGAS

SEQ ID NO: 34882 - protein, 13 aa, Homo Sapiens
PLNNTTPVTGASP

SEQ ID NO: 34883 - protein, 13 aa, Homo Sapiens
LNNTTPVTGASPG

SEQ ID NO: 34884 - protein, 13 aa, Homo Sapiens
NNTTPVTGASPGG

SEQ ID NO: 34885 - protein, 13 aa, Homo Sapiens
NTTPVTGASPGGL

SEQ ID NO: 34886 - protein, 13 aa, Homo Sapiens
TTPVTGASPGGLR

SEQ ID NO: 34887 - protein, 13 aa, Homo Sapiens
TPVTGASPGGLRE

SEQ ID NO: 34888 - protein, 13 aa, Homo Sapiens
PVTGASPGGLREL

SEQ ID NO: 34889 - protein, 13 aa, Homo Sapiens
VTGASPGGLRELQ

SEQ ID NO: 34890 - protein, 13 aa, Homo Sapiens
TGASPGGLRELQL

SEQ ID NO: 34891 - protein, 13 aa, Homo Sapiens
GASPGGLRELQLR

SEQ ID NO: 34892 - protein, 13 aa, Homo Sapiens
ASPGGLRELQLRS

SEQ ID NO: 34893 - protein, 13 aa, Homo Sapiens
SPGGLRELQLRSL

SEQ ID NO: 34894 - protein, 13 aa, Homo Sapiens
PGGLRELQLRSLT

SEQ ID NO: 34895 - protein, 13 aa, Homo Sapiens
GGLRELQLRSLTE

SEQ ID NO: 34896 - protein, 13 aa, Homo Sapiens
GLRELQLRSLTEI

SEQ ID NO: 34897 - protein, 13 aa, Homo Sapiens
LRELQLRSLTEIL

SEQ ID NO: 34898 - protein, 13 aa, Homo Sapiens
RELQLRSLTEILK

SEQ ID NO: 34899 - protein, 13 aa, Homo Sapiens
ELQLRSLTEILKG

SEQ ID NO: 34900 - protein, 13 aa, Homo Sapiens
LQLRSLTEILKGG

SEQ ID NO: 34901 - protein, 13 aa, Homo Sapiens
QLRSLTEILKGGV

SEQ ID NO: 34902 - protein, 13 aa, Homo Sapiens
LRSLTEILKGGVL

SEQ ID NO: 34903 - protein, 13 aa, Homo Sapiens
RSLTEILKGGVLI

SEQ ID NO: 34904 - protein, 13 aa, Homo Sapiens
SLTEILKGGVLIQ

SEQ ID NO: 34905 - protein, 13 aa, Homo Sapiens
LTEILKGGVLIQR

SEQ ID NO: 34906 - protein, 13 aa, Homo Sapiens
TEILKGGVLIQRN

SEQ ID NO: 34907 - protein, 13 aa, Homo Sapiens
EILKGGVLIQRNP

SEQ ID NO: 34908 - protein, 13 aa, Homo Sapiens
ILKGGVLIQRNPQ

SEQ ID NO: 34909 - protein, 13 aa, Homo Sapiens
LKGGVLIQRNPQL

SEQ ID NO: 34910 - protein, 13 aa, Homo Sapiens
KGGVLIQRNPQLC

SEQ ID NO: 34911 - protein, 13 aa, Homo Sapiens
GGVLIQRNPQLCY

SEQ ID NO: 34912 - protein, 13 aa, Homo Sapiens
GVLIQRNPQLCYQ

SEQ ID NO: 34913 - protein, 13 aa, Homo Sapiens
VLIQRNPQLCYQD

SEQ ID NO: 34914 - protein, 13 aa, Homo Sapiens
LIQRNPQLCYQDT

SEQ ID NO: 34915 - protein, 13 aa, Homo Sapiens
IQRNPQLCYQDTI

SEQ ID NO: 34916 - protein, 13 aa, Homo Sapiens
QRNPQLCYQDTIL

SEQ ID NO: 34917 - protein, 13 aa, Homo Sapiens
RNPQLCYQDTILW

SEQ ID NO: 34918 - protein, 13 aa, Homo Sapiens
NPQLCYQDTILWK

SEQ ID NO: 34919 - protein, 13 aa, Homo Sapiens
PQLCYQDTILWKD

SEQ ID NO: 34920 - protein, 13 aa, Homo Sapiens
QLCYQDTILWKDI

SEQ ID NO: 34921 - protein, 13 aa, Homo Sapiens
LCYQDTILWKDIF

SEQ ID NO: 34922 - protein, 13 aa, Homo Sapiens
CYQDTILWKDIFH

SEQ ID NO: 34923 - protein, 13 aa, Homo Sapiens
YQDTILWKDIFHK

SEQ ID NO: 34924 - protein, 13 aa, Homo Sapiens
QDTILWKDIFHKN

SEQ ID NO: 34925 - protein, 13 aa, Homo Sapiens
DTILWKDIFHKNN

SEQ ID NO: 34926 - protein, 13 aa, Homo Sapiens
TILWKDIFHKNNQ

SEQ ID NO: 34927 - protein, 13 aa, Homo Sapiens
ILWKDIFHKNNQL

SEQ ID NO: 34928 - protein, 13 aa, Homo Sapiens
LWKDIFHKNNQLA

SEQ ID NO: 34929 - protein, 13 aa, Homo Sapiens
WKDIFHKNNQLAL

SEQ ID NO: 34930 - protein, 13 aa, Homo Sapiens
KDIFHKNNQLALT

SEQ ID NO: 34931 - protein, 13 aa, Homo Sapiens
DIFHKNNQLALTL

SEQ ID NO: 34932 - protein, 13 aa, Homo Sapiens
IFHKNNQLALTLI

SEQ ID NO: 34933 - protein, 13 aa, Homo Sapiens
FHKNNQLALTLID

SEQ ID NO: 34934 - protein, 13 aa, Homo Sapiens
HKNNQLALTLIDT

SEQ ID NO: 34935 - protein, 13 aa, Homo Sapiens
KNNQLALTLIDTN

SEQ ID NO: 34936 - protein, 13 aa, Homo Sapiens
NNQLALTLIDTNR

SEQ ID NO: 34937 - protein, 13 aa, Homo Sapiens
NQLALTLIDTNRS

SEQ ID NO: 34938 - protein, 13 aa, Homo Sapiens
QLALTLIDTNRSR

SEQ ID NO: 34939 - protein, 13 aa, Homo Sapiens
LALTLIDTNRSRA

SEQ ID NO: 34940 - protein, 13 aa, Homo Sapiens
ALTLIDTNRSRAC

SEQ ID NO: 34941 - protein, 13 aa, Homo Sapiens
LTLIDTNRSRACH

SEQ ID NO: 34942 - protein, 13 aa, Homo Sapiens
TLIDTNRSRACHP

SEQ ID NO: 34943 - protein, 13 aa, Homo Sapiens
LIDTNRSRACHPC

SEQ ID NO: 34944 - protein, 13 aa, Homo Sapiens
IDTNRSRACHPCS

SEQ ID NO: 34945 - protein, 13 aa, Homo Sapiens
DTNRSRACHPCSP

SEQ ID NO: 34946 - protein, 13 aa, Homo Sapiens
TNRSRACHPCSPM

SEQ ID NO: 34947 - protein, 13 aa, Homo Sapiens
NRSRACHPCSPMC

SEQ ID NO: 34948 - protein, 13 aa, Homo Sapiens
RSRACHPCSPMCK

SEQ ID NO: 34949 - protein, 13 aa, Homo Sapiens
SRACHPCSPMCKG

SEQ ID NO: 34950 - protein, 13 aa, Homo Sapiens
RACHPCSPMCKGS

SEQ ID NO: 34951 - protein, 13 aa, Homo Sapiens
ACHPCSPMCKGSR

SEQ ID NO: 34952 - protein, 13 aa, Homo Sapiens
CHPCSPMCKGSRC

SEQ ID NO: 34953 - protein, 13 aa, Homo Sapiens
HPCSPMCKGSRCW

SEQ ID NO: 34954 - protein, 13 aa, Homo Sapiens
PCSPMCKGSRCWG

SEQ ID NO: 34955 - protein, 13 aa, Homo Sapiens
CSPMCKGSRCWGE

SEQ ID NO: 34956 - protein, 13 aa, Homo Sapiens
SPMCKGSRCWGES

SEQ ID NO: 34957 - protein, 13 aa, Homo Sapiens
PMCKGSRCWGESS

SEQ ID NO: 34958 - protein, 13 aa, Homo Sapiens
MCKGSRCWGESSE

SEQ ID NO: 34959 - protein, 13 aa, Homo Sapiens
CKGSRCWGESSED

SEQ ID NO: 34960 - protein, 13 aa, Homo Sapiens
KGSRCWGESSEDC

SEQ ID NO: 34961 - protein, 13 aa, Homo Sapiens
GSRCWGESSEDCQ

SEQ ID NO: 34962 - protein, 13 aa, Homo Sapiens
SRCWGESSEDCQS

SEQ ID NO: 34963 - protein, 13 aa, Homo Sapiens
RCWGESSEDCQSL

SEQ ID NO: 34964 - protein, 13 aa, Homo Sapiens
CWGESSEDCQSLT

SEQ ID NO: 34965 - protein, 13 aa, Homo Sapiens
WGESSEDCQSLTR

SEQ ID NO: 34966 - protein, 13 aa, Homo Sapiens
GESSEDCQSLTRT

SEQ ID NO: 34967 - protein, 13 aa, Homo Sapiens
ESSEDCQSLTRTV

SEQ ID NO: 34968 - protein, 13 aa, Homo Sapiens
SSEDCQSLTRTVC

SEQ ID NO: 34969 - protein, 13 aa, Homo Sapiens
SEDCQSLTRTVCA

SEQ ID NO: 34970 - protein, 13 aa, Homo Sapiens
EDCQSLTRTVCAG

SEQ ID NO: 34971 - protein, 13 aa, Homo Sapiens
DCQSLTRTVCAGG

SEQ ID NO: 34972 - protein, 13 aa, Homo Sapiens
CQSLTRTVCAGGC

SEQ ID NO: 34973 - protein, 13 aa, Homo Sapiens
QSLTRTVCAGGCA

SEQ ID NO: 34974 - protein, 13 aa, Homo Sapiens
SLTRTVCAGGCAR

SEQ ID NO: 34975 - protein, 13 aa, Homo Sapiens
LTRTVCAGGCARC

SEQ ID NO: 34976 - protein, 13 aa, Homo Sapiens
TRTVCAGGCARCK

SEQ ID NO: 34977 - protein, 13 aa, Homo Sapiens
RTVCAGGCARCKG

SEQ ID NO: 34978 - protein, 13 aa, Homo Sapiens
TVCAGGCARCKGP

SEQ ID NO: 34979 - protein, 13 aa, Homo Sapiens
VCAGGCARCKGPL

SEQ ID NO: 34980 - protein, 13 aa, Homo Sapiens
CAGGCARCKGPLP

SEQ ID NO: 34981 - protein, 13 aa, Homo Sapiens
AGGCARCKGPLPT

SEQ ID NO: 34982 - protein, 13 aa, Homo Sapiens
GGCARCKGPLPTD

SEQ ID NO: 34983 - protein, 13 aa, Homo Sapiens
GCARCKGPLPTDC

SEQ ID NO: 34984 - protein, 13 aa, Homo Sapiens
CARCKGPLPTDCC

SEQ ID NO: 34985 - protein, 13 aa, Homo Sapiens
ARCKGPLPTDCCH

SEQ ID NO: 34986 - protein, 13 aa, Homo Sapiens
RCKGPLPTDCCHE

SEQ ID NO: 34987 - protein, 13 aa, Homo Sapiens
CKGPLPTDCCHEQ

SEQ ID NO: 34988 - protein, 13 aa, Homo Sapiens
KGPLPTDCCHEQC

SEQ ID NO: 34989 - protein, 13 aa, Homo Sapiens
GPLPTDCCHEQCA

SEQ ID NO: 34990 - protein, 13 aa, Homo Sapiens
PLPTDCCHEQCAA

SEQ ID NO: 34991 - protein, 13 aa, Homo Sapiens
LPTDCCHEQCAAG

SEQ ID NO: 34992 - protein, 13 aa, Homo Sapiens
PTDCCHEQCAAGC

SEQ ID NO: 34993 - protein, 13 aa, Homo Sapiens
TDCCHEQCAAGCT

SEQ ID NO: 34994 - protein, 13 aa, Homo Sapiens
DCCHEQCAAGCTG

SEQ ID NO: 34995 - protein, 13 aa, Homo Sapiens
CCHEQCAAGCTGP

SEQ ID NO: 34996 - protein, 13 aa, Homo Sapiens
CHEQCAAGCTGPK

SEQ ID NO: 34997 - protein, 13 aa, Homo Sapiens
HEQCAAGCTGPKH

SEQ ID NO: 34998 - protein, 13 aa, Homo Sapiens
EQCAAGCTGPKHS

SEQ ID NO: 34999 - protein, 13 aa, Homo Sapiens
QCAAGCTGPKHSD

SEQ ID NO: 35000 - protein, 13 aa, Homo Sapiens
CAAGCTGPKHSDC

SEQ ID NO: 35001 - protein, 13 aa, Homo Sapiens
AAGCTGPKHSDCL

SEQ ID NO: 35002 - protein, 13 aa, Homo Sapiens
AGCTGPKHSDCLA

SEQ ID NO: 35003 - protein, 13 aa, Homo Sapiens
GCTGPKHSDCLAC

SEQ ID NO: 35004 - protein, 13 aa, Homo Sapiens
CTGPKHSDCLACL

SEQ ID NO: 35005 - protein, 13 aa, Homo Sapiens
TGPKHSDCLACLH

SEQ ID NO: 35006 - protein, 13 aa, Homo Sapiens
GPKHSDCLACLHF

SEQ ID NO: 35007 - protein, 13 aa, Homo Sapiens
PKHSDCLACLHFN

SEQ ID NO: 35008 - protein, 13 aa, Homo Sapiens
KHSDCLACLHFNH

SEQ ID NO: 35009 - protein, 13 aa, Homo Sapiens
HSDCLACLHFNHS

SEQ ID NO: 35010 - protein, 13 aa, Homo Sapiens
SDCLACLHFNHSG

SEQ ID NO: 35011 - protein, 13 aa, Homo Sapiens
DCLACLHFNHSGI

SEQ ID NO: 35012 - protein, 13 aa, Homo Sapiens
CLACLHFNHSGIC

SEQ ID NO: 35013 - protein, 13 aa, Homo Sapiens
LACLHFNHSGICE

SEQ ID NO: 35014 - protein, 13 aa, Homo Sapiens
ACLHFNHSGICEL

SEQ ID NO: 35015 - protein, 13 aa, Homo Sapiens
CLHFNHSGICELH

SEQ ID NO: 35016 - protein, 13 aa, Homo Sapiens
LHFNHSGICELHC

SEQ ID NO: 35017 - protein, 13 aa, Homo Sapiens
HFNHSGICELHCP

SEQ ID NO: 35018 - protein, 13 aa, Homo Sapiens
FNHSGICELHCPA

SEQ ID NO: 35019 - protein, 13 aa, Homo Sapiens
NHSGICELHCPAL

SEQ ID NO: 35020 - protein, 13 aa, Homo Sapiens
HSGICELHCPALV

SEQ ID NO: 35021 - protein, 13 aa, Homo Sapiens
SGICELHCPALVT

SEQ ID NO: 35022 - protein, 13 aa, Homo Sapiens
GICELHCPALVTY

SEQ ID NO: 35023 - protein, 13 aa, Homo Sapiens
ICELHCPALVTYN

SEQ ID NO: 35024 - protein, 13 aa, Homo Sapiens
CELHCPALVTYNT

SEQ ID NO: 35025 - protein, 13 aa, Homo Sapiens
ELHCPALVTYNTD

SEQ ID NO: 35026 - protein, 13 aa, Homo Sapiens
LHCPALVTYNTDT

SEQ ID NO: 35027 - protein, 13 aa, Homo Sapiens
HCPALVTYNTDTF

SEQ ID NO: 35028 - protein, 13 aa, Homo Sapiens
CPALVTYNTDTFE

SEQ ID NO: 35029 - protein, 13 aa, Homo Sapiens
PALVTYNTDTFES

SEQ ID NO: 35030 - protein, 13 aa, Homo Sapiens
ALVTYNTDTFESM

SEQ ID NO: 35031 - protein, 13 aa, Homo Sapiens
LVTYNTDTFESMP

SEQ ID NO: 35032 - protein, 13 aa, Homo Sapiens
VTYNTDTFESMPN

SEQ ID NO: 35033 - protein, 13 aa, Homo Sapiens
TYNTDTFESMPNP

SEQ ID NO: 35034 - protein, 13 aa, Homo Sapiens
YNTDTFESMPNPE

SEQ ID NO: 35035 - protein, 13 aa, Homo Sapiens
NTDTFESMPNPEG

SEQ ID NO: 35036 - protein, 13 aa, Homo Sapiens
TDTFESMPNPEGR

SEQ ID NO: 35037 - protein, 13 aa, Homo Sapiens
DTFESMPNPEGRY

SEQ ID NO: 35038 - protein, 13 aa, Homo Sapiens
TFESMPNPEGRYT

SEQ ID NO: 35039 - protein, 13 aa, Homo Sapiens
FESMPNPEGRYTF

SEQ ID NO: 35040 - protein, 13 aa, Homo Sapiens
ESMPNPEGRYTFG

SEQ ID NO: 35041 - protein, 13 aa, Homo Sapiens
SMPNPEGRYTFGA

SEQ ID NO: 35042 - protein, 13 aa, Homo Sapiens
MPNPEGRYTFGAS

SEQ ID NO: 35043 - protein, 13 aa, Homo Sapiens
PNPEGRYTFGASC

SEQ ID NO: 35044 - protein, 13 aa, Homo Sapiens
NPEGRYTFGASCV

SEQ ID NO: 35045 - protein, 13 aa, Homo Sapiens
PEGRYTFGASCVT

SEQ ID NO: 35046 - protein, 13 aa, Homo Sapiens
EGRYTFGASCVTA

SEQ ID NO: 35047 - protein, 13 aa, Homo Sapiens
GRYTFGASCVTAC

SEQ ID NO: 35048 - protein, 13 aa, Homo Sapiens
RYTFGASCVTACP

SEQ ID NO: 35049 - protein, 13 aa, Homo Sapiens
YTFGASCVTACPY

SEQ ID NO: 35050 - protein, 13 aa, Homo Sapiens
TFGASCVTACPYN

SEQ ID NO: 35051 - protein, 13 aa, Homo Sapiens
FGASCVTACPYNY

SEQ ID NO: 35052 - protein, 13 aa, Homo Sapiens
GASCVTACPYNYL

SEQ ID NO: 35053 - protein, 13 aa, Homo Sapiens
ASCVTACPYNYLS

SEQ ID NO: 35054 - protein, 13 aa, Homo Sapiens
SCVTACPYNYLST

SEQ ID NO: 35055 - protein, 13 aa, Homo Sapiens
CVTACPYNYLSTD

SEQ ID NO: 35056 - protein, 13 aa, Homo Sapiens
VTACPYNYLSTDV

SEQ ID NO: 35057 - protein, 13 aa, Homo Sapiens
TACPYNYLSTDVG

SEQ ID NO: 35058 - protein, 13 aa, Homo Sapiens
ACPYNYLSTDVGS

SEQ ID NO: 35059 - protein, 13 aa, Homo Sapiens
CPYNYLSTDVGSC

SEQ ID NO: 35060 - protein, 13 aa, Homo Sapiens
PYNYLSTDVGSCT

SEQ ID NO: 35061 - protein, 13 aa, Homo Sapiens
YNYLSTDVGSCTL

SEQ ID NO: 35062 - protein, 13 aa, Homo Sapiens
NYLSTDVGSCTLV

SEQ ID NO: 35063 - protein, 13 aa, Homo Sapiens
YLSTDVGSCTLVC

SEQ ID NO: 35064 - protein, 13 aa, Homo Sapiens
LSTDVGSCTLVCP

SEQ ID NO: 35065 - protein, 13 aa, Homo Sapiens
STDVGSCTLVCPL

SEQ ID NO: 35066 - protein, 13 aa, Homo Sapiens
TDVGSCTLVCPLH

SEQ ID NO: 35067 - protein, 13 aa, Homo Sapiens
DVGSCTLVCPLHN

SEQ ID NO: 35068 - protein, 13 aa, Homo Sapiens
VGSCTLVCPLHNQ

SEQ ID NO: 35069 - protein, 13 aa, Homo Sapiens
GSCTLVCPLHNQE

SEQ ID NO: 35070 - protein, 13 aa, Homo Sapiens
SCTLVCPLHNQEV

SEQ ID NO: 35071 - protein, 13 aa, Homo Sapiens
CTLVCPLHNQEVT

SEQ ID NO: 35072 - protein, 13 aa, Homo Sapiens
TLVCPLHNQEVTA

SEQ ID NO: 35073 - protein, 13 aa, Homo Sapiens
LVCPLHNQEVTAE

SEQ ID NO: 35074 - protein, 13 aa, Homo Sapiens
VCPLHNQEVTAED

SEQ ID NO: 35075 - protein, 13 aa, Homo Sapiens
CPLHNQEVTAEDG

SEQ ID NO: 35076 - protein, 13 aa, Homo Sapiens
PLHNQEVTAEDGT

SEQ ID NO: 35077 - protein, 13 aa, Homo Sapiens
LHNQEVTAEDGTQ

SEQ ID NO: 35078 - protein, 13 aa, Homo Sapiens
HNQEVTAEDGTQR

SEQ ID NO: 35079 - protein, 13 aa, Homo Sapiens
NQEVTAEDGTQRC

SEQ ID NO: 35080 - protein, 13 aa, Homo Sapiens
QEVTAEDGTQRCE

SEQ ID NO: 35081 - protein, 13 aa, Homo Sapiens
EVTAEDGTQRCEK

SEQ ID NO: 35082 - protein, 13 aa, Homo Sapiens
VTAEDGTQRCEKC

SEQ ID NO: 35083 - protein, 13 aa, Homo Sapiens
TAEDGTQRCEKCS

SEQ ID NO: 35084 - protein, 13 aa, Homo Sapiens
AEDGTQRCEKCSK

SEQ ID NO: 35085 - protein, 13 aa, Homo Sapiens
EDGTQRCEKCSKP

SEQ ID NO: 35086 - protein, 13 aa, Homo Sapiens
DGTQRCEKCSKPC

SEQ ID NO: 35087 - protein, 13 aa, Homo Sapiens
GTQRCEKCSKPCA

SEQ ID NO: 35088 - protein, 13 aa, Homo Sapiens
TQRCEKCSKPCAR

SEQ ID NO: 35089 - protein, 13 aa, Homo Sapiens
QRCEKCSKPCARV

SEQ ID NO: 35090 - protein, 13 aa, Homo Sapiens
RCEKCSKPCARVC

SEQ ID NO: 35091 - protein, 13 aa, Homo Sapiens
CEKCSKPCARVCY

SEQ ID NO: 35092 - protein, 13 aa, Homo Sapiens
EKCSKPCARVCYG

SEQ ID NO: 35093 - protein, 13 aa, Homo Sapiens
KCSKPCARVCYGL

SEQ ID NO: 35094 - protein, 13 aa, Homo Sapiens
CSKPCARVCYGLG

SEQ ID NO: 35095 - protein, 13 aa, Homo Sapiens
SKPCARVCYGLGM

SEQ ID NO: 35096 - protein, 13 aa, Homo Sapiens
KPCARVCYGLGME

SEQ ID NO: 35097 - protein, 13 aa, Homo Sapiens
PCARVCYGLGMEH

SEQ ID NO: 35098 - protein, 13 aa, Homo Sapiens
CARVCYGLGMEHL

SEQ ID NO: 35099 - protein, 13 aa, Homo Sapiens
ARVCYGLGMEHLR

SEQ ID NO: 35100 - protein, 13 aa, Homo Sapiens
RVCYGLGMEHLRE

SEQ ID NO: 35101 - protein, 13 aa, Homo Sapiens
VCYGLGMEHLREV

SEQ ID NO: 35102 - protein, 13 aa, Homo Sapiens
CYGLGMEHLREVR

SEQ ID NO: 35103 - protein, 13 aa, Homo Sapiens
YGLGMEHLREVRA

SEQ ID NO: 35104 - protein, 13 aa, Homo Sapiens
GLGMEHLREVRAV

SEQ ID NO: 35105 - protein, 13 aa, Homo Sapiens
LGMEHLREVRAVT

SEQ ID NO: 35106 - protein, 13 aa, Homo Sapiens
GMEHLREVRAVTS

SEQ ID NO: 35107 - protein, 13 aa, Homo Sapiens
MEHLREVRAVTSA

SEQ ID NO: 35108 - protein, 13 aa, Homo Sapiens
EHLREVRAVTSAN

SEQ ID NO: 35109 - protein, 13 aa, Homo Sapiens
HLREVRAVTSANI

SEQ ID NO: 35110 - protein, 13 aa, Homo Sapiens
LREVRAVTSANIQ

SEQ ID NO: 35111 - protein, 13 aa, Homo Sapiens
REVRAVTSANIQE

SEQ ID NO: 35112 - protein, 13 aa, Homo Sapiens
EVRAVTSANIQEF

SEQ ID NO: 35113 - protein, 13 aa, Homo Sapiens
VRAVTSANIQEFA

SEQ ID NO: 35114 - protein, 13 aa, Homo Sapiens
RAVTSANIQEFAG

SEQ ID NO: 35115 - protein, 13 aa, Homo Sapiens
AVTSANIQEFAGC

SEQ ID NO: 35116 - protein, 13 aa, Homo Sapiens
VTSANIQEFAGCK

SEQ ID NO: 35117 - protein, 13 aa, Homo Sapiens
TSANIQEFAGCKK

SEQ ID NO: 35118 - protein, 13 aa, Homo Sapiens
SANIQEFAGCKKI

SEQ ID NO: 35119 - protein, 13 aa, Homo Sapiens
ANIQEFAGCKKIF

SEQ ID NO: 35120 - protein, 13 aa, Homo Sapiens
NIQEFAGCKKIFG

SEQ ID NO: 35121 - protein, 13 aa, Homo Sapiens
IQEFAGCKKIFGS

SEQ ID NO: 35122 - protein, 13 aa, Homo Sapiens
QEFAGCKKIFGSL

SEQ ID NO: 35123 - protein, 13 aa, Homo Sapiens
EFAGCKKIFGSLA

SEQ ID NO: 35124 - protein, 13 aa, Homo Sapiens
FAGCKKIFGSLAF

SEQ ID NO: 35125 - protein, 13 aa, Homo Sapiens
AGCKKIFGSLAFL

SEQ ID NO: 35126 - protein, 13 aa, Homo Sapiens
GCKKIFGSLAFLP

SEQ ID NO: 35127 - protein, 13 aa, Homo Sapiens
CKKIFGSLAFLPE

SEQ ID NO: 35128 - protein, 13 aa, Homo Sapiens
KKIFGSLAFLPES

SEQ ID NO: 35129 - protein, 13 aa, Homo Sapiens
KIFGSLAFLPESF

SEQ ID NO: 35130 - protein, 13 aa, Homo Sapiens
IFGSLAFLPESFD

SEQ ID NO: 35131 - protein, 13 aa, Homo Sapiens
FGSLAFLPESFDG

SEQ ID NO: 35132 - protein, 13 aa, Homo Sapiens
GSLAFLPESFDGD

SEQ ID NO: 35133 - protein, 13 aa, Homo Sapiens
SLAFLPESFDGDP

SEQ ID NO: 35134 - protein, 13 aa, Homo Sapiens
LAFLPESFDGDPA

SEQ ID NO: 35135 - protein, 13 aa, Homo Sapiens
AFLPESFDGDPAS

SEQ ID NO: 35136 - protein, 13 aa, Homo Sapiens
FLPESFDGDPASN

SEQ ID NO: 35137 - protein, 13 aa, Homo Sapiens
LPESFDGDPASNT

SEQ ID NO: 35138 - protein, 13 aa, Homo Sapiens
PESFDGDPASNTA

SEQ ID NO: 35139 - protein, 13 aa, Homo Sapiens
ESFDGDPASNTAP

SEQ ID NO: 35140 - protein, 13 aa, Homo Sapiens
SFDGDPASNTAPL

SEQ ID NO: 35141 - protein, 13 aa, Homo Sapiens
FDGDPASNTAPLQ

SEQ ID NO: 35142 - protein, 13 aa, Homo Sapiens
DGDPASNTAPLQP

SEQ ID NO: 35143 - protein, 13 aa, Homo Sapiens
GDPASNTAPLQPE

SEQ ID NO: 35144 - protein, 13 aa, Homo Sapiens
DPASNTAPLQPEQ

SEQ ID NO: 35145 - protein, 13 aa, Homo Sapiens
PASNTAPLQPEQL

SEQ ID NO: 35146 - protein, 13 aa, Homo Sapiens
ASNTAPLQPEQLQ

SEQ ID NO: 35147 - protein, 13 aa, Homo Sapiens
SNTAPLQPEQLQV

SEQ ID NO: 35148 - protein, 13 aa, Homo Sapiens
NTAPLQPEQLQVF

SEQ ID NO: 35149 - protein, 13 aa, Homo Sapiens
TAPLQPEQLQVFE

SEQ ID NO: 35150 - protein, 13 aa, Homo Sapiens
APLQPEQLQVFET

SEQ ID NO: 35151 - protein, 13 aa, Homo Sapiens
PLQPEQLQVFETL

SEQ ID NO: 35152 - protein, 13 aa, Homo Sapiens
LQPEQLQVFETLE

SEQ ID NO: 35153 - protein, 13 aa, Homo Sapiens
QPEQLQVFETLEE

SEQ ID NO: 35154 - protein, 13 aa, Homo Sapiens
PEQLQVFETLEEI

SEQ ID NO: 35155 - protein, 13 aa, Homo Sapiens
EQLQVFETLEEIT

SEQ ID NO: 35156 - protein, 13 aa, Homo Sapiens
QLQVFETLEEITG

SEQ ID NO: 35157 - protein, 13 aa, Homo Sapiens
LQVFETLEEITGY

SEQ ID NO: 35158 - protein, 13 aa, Homo Sapiens
QVFETLEEITGYL

SEQ ID NO: 35159 - protein, 13 aa, Homo Sapiens
VFETLEEITGYLY

SEQ ID NO: 35160 - protein, 13 aa, Homo Sapiens
FETLEEITGYLYI

SEQ ID NO: 35161 - protein, 13 aa, Homo Sapiens
ETLEEITGYLYIS

SEQ ID NO: 35162 - protein, 13 aa, Homo Sapiens
TLEEITGYLYISA

SEQ ID NO: 35163 - protein, 13 aa, Homo Sapiens
LEEITGYLYISAW

SEQ ID NO: 35164 - protein, 13 aa, Homo Sapiens
EEITGYLYISAWP

SEQ ID NO: 35165 - protein, 13 aa, Homo Sapiens
EITGYLYISAWPD

SEQ ID NO: 35166 - protein, 13 aa, Homo Sapiens
ITGYLYISAWPDS

SEQ ID NO: 35167 - protein, 13 aa, Homo Sapiens
TGYLYISAWPDSL

SEQ ID NO: 35168 - protein, 13 aa, Homo Sapiens
GYLYISAWPDSLP

SEQ ID NO: 35169 - protein, 13 aa, Homo Sapiens
YLYISAWPDSLPD

SEQ ID NO: 35170 - protein, 13 aa, Homo Sapiens
LYISAWPDSLPDL

SEQ ID NO: 35171 - protein, 13 aa, Homo Sapiens
YISAWPDSLPDLS

SEQ ID NO: 35172 - protein, 13 aa, Homo Sapiens
ISAWPDSLPDLSV

SEQ ID NO: 35173 - protein, 13 aa, Homo Sapiens
SAWPDSLPDLSVF

SEQ ID NO: 35174 - protein, 13 aa, Homo Sapiens
AWPDSLPDLSVFQ

SEQ ID NO: 35175 - protein, 13 aa, Homo Sapiens
WPDSLPDLSVFQN

SEQ ID NO: 35176 - protein, 13 aa, Homo Sapiens
PDSLPDLSVFQNL

SEQ ID NO: 35177 - protein, 13 aa, Homo Sapiens
DSLPDLSVFQNLQ

SEQ ID NO: 35178 - protein, 13 aa, Homo Sapiens
SLPDLSVFQNLQV

SEQ ID NO: 35179 - protein, 13 aa, Homo Sapiens
LPDLSVFQNLQVI

SEQ ID NO: 35180 - protein, 13 aa, Homo Sapiens
PDLSVFQNLQVIR

SEQ ID NO: 35181 - protein, 13 aa, Homo Sapiens
DLSVFQNLQVIRG

SEQ ID NO: 35182 - protein, 13 aa, Homo Sapiens
LSVFQNLQVIRGR

SEQ ID NO: 35183 - protein, 13 aa, Homo Sapiens
SVFQNLQVIRGRI

SEQ ID NO: 35184 - protein, 13 aa, Homo Sapiens
VFQNLQVIRGRIL

SEQ ID NO: 35185 - protein, 13 aa, Homo Sapiens
FQNLQVIRGRILH

SEQ ID NO: 35186 - protein, 13 aa, Homo Sapiens
QNLQVIRGRILHN

SEQ ID NO: 35187 - protein, 13 aa, Homo Sapiens
NLQVIRGRILHNG

SEQ ID NO: 35188 - protein, 13 aa, Homo Sapiens
LQVIRGRILHNGA

SEQ ID NO: 35189 - protein, 13 aa, Homo Sapiens
QVIRGRILHNGAY

SEQ ID NO: 35190 - protein, 13 aa, Homo Sapiens
VIRGRILHNGAYS

SEQ ID NO: 35191 - protein, 13 aa, Homo Sapiens
IRGRILHNGAYSL

SEQ ID NO: 35192 - protein, 13 aa, Homo Sapiens
RGRILHNGAYSLT

SEQ ID NO: 35193 - protein, 13 aa, Homo Sapiens
GRILHNGAYSLTL

SEQ ID NO: 35194 - protein, 13 aa, Homo Sapiens
RILHNGAYSLTLQ

SEQ ID NO: 35195 - protein, 13 aa, Homo Sapiens
ILHNGAYSLTLQG

SEQ ID NO: 35196 - protein, 13 aa, Homo Sapiens
LHNGAYSLTLQGL

SEQ ID NO: 35197 - protein, 13 aa, Homo Sapiens
HNGAYSLTLQGLG

SEQ ID NO: 35198 - protein, 13 aa, Homo Sapiens
NGAYSLTLQGLGI

SEQ ID NO: 35199 - protein, 13 aa, Homo Sapiens
GAYSLTLQGLGIS

SEQ ID NO: 35200 - protein, 13 aa, Homo Sapiens
AYSLTLQGLGISW

SEQ ID NO: 35201 - protein, 13 aa, Homo Sapiens
YSLTLQGLGISWL

SEQ ID NO: 35202 - protein, 13 aa, Homo Sapiens
SLTLQGLGISWLG

SEQ ID NO: 35203 - protein, 13 aa, Homo Sapiens
LTLQGLGISWLGL

SEQ ID NO: 35204 - protein, 13 aa, Homo Sapiens
TLQGLGISWLGLR

SEQ ID NO: 35205 - protein, 13 aa, Homo Sapiens
LQGLGISWLGLRS

SEQ ID NO: 35206 - protein, 13 aa, Homo Sapiens
QGLGISWLGLRSL

SEQ ID NO: 35207 - protein, 13 aa, Homo Sapiens
GLGISWLGLRSLR

SEQ ID NO: 35208 - protein, 13 aa, Homo Sapiens
LGISWLGLRSLRE

SEQ ID NO: 35209 - protein, 13 aa, Homo Sapiens
GISWLGLRSLREL

SEQ ID NO: 35210 - protein, 13 aa, Homo Sapiens
ISWLGLRSLRELG

SEQ ID NO: 35211 - protein, 13 aa, Homo Sapiens
SWLGLRSLRELGS

SEQ ID NO: 35212 - protein, 13 aa, Homo Sapiens
WLGLRSLRELGSG

SEQ ID NO: 35213 - protein, 13 aa, Homo Sapiens
LGLRSLRELGSGL

SEQ ID NO: 35214 - protein, 13 aa, Homo Sapiens
GLRSLRELGSGLA

SEQ ID NO: 35215 - protein, 13 aa, Homo Sapiens
LRSLRELGSGLAL

SEQ ID NO: 35216 - protein, 13 aa, Homo Sapiens
RSLRELGSGLALI

SEQ ID NO: 35217 - protein, 13 aa, Homo Sapiens
SLRELGSGLALIH

SEQ ID NO: 35218 - protein, 13 aa, Homo Sapiens
LRELGSGLALIHH

SEQ ID NO: 35219 - protein, 13 aa, Homo Sapiens
RELGSGLALIHHN

SEQ ID NO: 35220 - protein, 13 aa, Homo Sapiens
ELGSGLALIHHNT

SEQ ID NO: 35221 - protein, 13 aa, Homo Sapiens
LGSGLALIHHNTH

SEQ ID NO: 35222 - protein, 13 aa, Homo Sapiens
GSGLALIHHNTHL

SEQ ID NO: 35223 - protein, 13 aa, Homo Sapiens
SGLALIHHNTHLC

SEQ ID NO: 35224 - protein, 13 aa, Homo Sapiens
GLALIHHNTHLCF

SEQ ID NO: 35225 - protein, 13 aa, Homo Sapiens
LALIHHNTHLCFV

SEQ ID NO: 35226 - protein, 13 aa, Homo Sapiens
ALIHHNTHLCFVH

SEQ ID NO: 35227 - protein, 13 aa, Homo Sapiens
LIHHNTHLCFVHT

SEQ ID NO: 35228 - protein, 13 aa, Homo Sapiens
IHHNTHLCFVHTV

SEQ ID NO: 35229 - protein, 13 aa, Homo Sapiens
HHNTHLCFVHTVP

SEQ ID NO: 35230 - protein, 13 aa, Homo Sapiens
HNTHLCFVHTVPW

SEQ ID NO: 35231 - protein, 13 aa, Homo Sapiens
NTHLCFVHTVPWD

SEQ ID NO: 35232 - protein, 13 aa, Homo Sapiens
THLCFVHTVPWDQ

SEQ ID NO: 35233 - protein, 13 aa, Homo Sapiens
HLCFVHTVPWDQL

SEQ ID NO: 35234 - protein, 13 aa, Homo Sapiens
LCFVHTVPWDQLF

SEQ ID NO: 35235 - protein, 13 aa, Homo Sapiens
CFVHTVPWDQLFR

SEQ ID NO: 35236 - protein, 13 aa, Homo Sapiens
FVHTVPWDQLFRN

SEQ ID NO: 35237 - protein, 13 aa, Homo Sapiens
VHTVPWDQLFRNP

SEQ ID NO: 35238 - protein, 13 aa, Homo Sapiens
HTVPWDQLFRNPH

SEQ ID NO: 35239 - protein, 13 aa, Homo Sapiens
TVPWDQLFRNPHQ

SEQ ID NO: 35240 - protein, 13 aa, Homo Sapiens
VPWDQLFRNPHQA

SEQ ID NO: 35241 - protein, 13 aa, Homo Sapiens
PWDQLFRNPHQAL

SEQ ID NO: 35242 - protein, 13 aa, Homo Sapiens
WDQLFRNPHQALL

SEQ ID NO: 35243 - protein, 13 aa, Homo Sapiens
DQLFRNPHQALLH

SEQ ID NO: 35244 - protein, 13 aa, Homo Sapiens
QLFRNPHQALLHT

SEQ ID NO: 35245 - protein, 13 aa, Homo Sapiens
LFRNPHQALLHTA

SEQ ID NO: 35246 - protein, 13 aa, Homo Sapiens
FRNPHQALLHTAN

SEQ ID NO: 35247 - protein, 13 aa, Homo Sapiens
RNPHQALLHTANR

SEQ ID NO: 35248 - protein, 13 aa, Homo Sapiens
NPHQALLHTANRP

SEQ ID NO: 35249 - protein, 13 aa, Homo Sapiens
PHQALLHTANRPE

SEQ ID NO: 35250 - protein, 13 aa, Homo Sapiens
HQALLHTANRPED

SEQ ID NO: 35251 - protein, 13 aa, Homo Sapiens
QALLHTANRPEDE

SEQ ID NO: 35252 - protein, 13 aa, Homo Sapiens
ALLHTANRPEDEC

SEQ ID NO: 35253 - protein, 13 aa, Homo Sapiens
LLHTANRPEDECV

SEQ ID NO: 35254 - protein, 13 aa, Homo Sapiens
LHTANRPEDECVG

SEQ ID NO: 35255 - protein, 13 aa, Homo Sapiens
HTANRPEDECVGE

SEQ ID NO: 35256 - protein, 13 aa, Homo Sapiens
TANRPEDECVGEG

SEQ ID NO: 35257 - protein, 13 aa, Homo Sapiens
ANRPEDECVGEGL

SEQ ID NO: 35258 - protein, 13 aa, Homo Sapiens
NRPEDECVGEGLA

SEQ ID NO: 35259 - protein, 13 aa, Homo Sapiens
RPEDECVGEGLAC

SEQ ID NO: 35260 - protein, 13 aa, Homo Sapiens
PEDECVGEGLACH

SEQ ID NO: 35261 - protein, 13 aa, Homo Sapiens
EDECVGEGLACHQ

SEQ ID NO: 35262 - protein, 13 aa, Homo Sapiens
DECVGEGLACHQL

SEQ ID NO: 35263 - protein, 13 aa, Homo Sapiens
ECVGEGLACHQLC

SEQ ID NO: 35264 - protein, 13 aa, Homo Sapiens
CVGEGLACHQLCA

SEQ ID NO: 35265 - protein, 13 aa, Homo Sapiens
VGEGLACHQLCAR

SEQ ID NO: 35266 - protein, 13 aa, Homo Sapiens
GEGLACHQLCARG

SEQ ID NO: 35267 - protein, 13 aa, Homo Sapiens
EGLACHQLCARGH

SEQ ID NO: 35268 - protein, 13 aa, Homo Sapiens
GLACHQLCARGHC

SEQ ID NO: 35269 - protein, 13 aa, Homo Sapiens
LACHQLCARGHCW

SEQ ID NO: 35270 - protein, 13 aa, Homo Sapiens
ACHQLCARGHCWG

SEQ ID NO: 35271 - protein, 13 aa, Homo Sapiens
CHQLCARGHCWGP

SEQ ID NO: 35272 - protein, 13 aa, Homo Sapiens
HQLCARGHCWGPG

SEQ ID NO: 35273 - protein, 13 aa, Homo Sapiens
QLCARGHCWGPGP

SEQ ID NO: 35274 - protein, 13 aa, Homo Sapiens
LCARGHCWGPGPT

SEQ ID NO: 35275 - protein, 13 aa, Homo Sapiens
CARGHCWGPGPTQ

SEQ ID NO: 35276 - protein, 13 aa, Homo Sapiens
ARGHCWGPGPTQC

SEQ ID NO: 35277 - protein, 13 aa, Homo Sapiens
RGHCWGPGPTQCV

SEQ ID NO: 35278 - protein, 13 aa, Homo Sapiens
GHCWGPGPTQCVN

SEQ ID NO: 35279 - protein, 13 aa, Homo Sapiens
HCWGPGPTQCVNC

SEQ ID NO: 35280 - protein, 13 aa, Homo Sapiens
CWGPGPTQCVNCS

SEQ ID NO: 35281 - protein, 13 aa, Homo Sapiens
WGPGPTQCVNCSQ

SEQ ID NO: 35282 - protein, 13 aa, Homo Sapiens
GPGPTQCVNCSQF

SEQ ID NO: 35283 - protein, 13 aa, Homo Sapiens
PGPTQCVNCSQFL

SEQ ID NO: 35284 - protein, 13 aa, Homo Sapiens
GPTQCVNCSQFLR

SEQ ID NO: 35285 - protein, 13 aa, Homo Sapiens
PTQCVNCSQFLRG

SEQ ID NO: 35286 - protein, 13 aa, Homo Sapiens
TQCVNCSQFLRGQ

SEQ ID NO: 35287 - protein, 13 aa, Homo Sapiens
QCVNCSQFLRGQE

SEQ ID NO: 35288 - protein, 13 aa, Homo Sapiens
CVNCSQFLRGQEC

SEQ ID NO: 35289 - protein, 13 aa, Homo Sapiens
VNCSQFLRGQECV

SEQ ID NO: 35290 - protein, 13 aa, Homo Sapiens
NCSQFLRGQECVE

SEQ ID NO: 35291 - protein, 13 aa, Homo Sapiens
CSQFLRGQECVEE

SEQ ID NO: 35292 - protein, 13 aa, Homo Sapiens
SQFLRGQECVEEC

SEQ ID NO: 35293 - protein, 13 aa, Homo Sapiens
QFLRGQECVEECR

SEQ ID NO: 35294 - protein, 13 aa, Homo Sapiens
FLRGQECVEECRV

SEQ ID NO: 35295 - protein, 13 aa, Homo Sapiens
LRGQECVEECRVL

SEQ ID NO: 35296 - protein, 13 aa, Homo Sapiens
RGQECVEECRVLQ

SEQ ID NO: 35297 - protein, 13 aa, Homo Sapiens
GQECVEECRVLQG

SEQ ID NO: 35298 - protein, 13 aa, Homo Sapiens
QECVEECRVLQGL

SEQ ID NO: 35299 - protein, 13 aa, Homo Sapiens
ECVEECRVLQGLP

SEQ ID NO: 35300 - protein, 13 aa, Homo Sapiens
CVEECRVLQGLPR

SEQ ID NO: 35301 - protein, 13 aa, Homo Sapiens
VEECRVLQGLPRE

SEQ ID NO: 35302 - protein, 13 aa, Homo Sapiens
EECRVLQGLPREY

SEQ ID NO: 35303 - protein, 13 aa, Homo Sapiens
ECRVLQGLPREYV

SEQ ID NO: 35304 - protein, 13 aa, Homo Sapiens
CRVLQGLPREYVN

SEQ ID NO: 35305 - protein, 13 aa, Homo Sapiens
RVLQGLPREYVNA

SEQ ID NO: 35306 - protein, 13 aa, Homo Sapiens
VLQGLPREYVNAR

SEQ ID NO: 35307 - protein, 13 aa, Homo Sapiens
LQGLPREYVNARH

SEQ ID NO: 35308 - protein, 13 aa, Homo Sapiens
QGLPREYVNARHC

SEQ ID NO: 35309 - protein, 13 aa, Homo Sapiens
GLPREYVNARHCL

SEQ ID NO: 35310 - protein, 13 aa, Homo Sapiens
LPREYVNARHCLP

SEQ ID NO: 35311 - protein, 13 aa, Homo Sapiens
PREYVNARHCLPC

SEQ ID NO: 35312 - protein, 13 aa, Homo Sapiens
REYVNARHCLPCH

SEQ ID NO: 35313 - protein, 13 aa, Homo Sapiens
EYVNARHCLPCHP

SEQ ID NO: 35314 - protein, 13 aa, Homo Sapiens
YVNARHCLPCHPE

SEQ ID NO: 35315 - protein, 13 aa, Homo Sapiens
VNARHCLPCHPEC

SEQ ID NO: 35316 - protein, 13 aa, Homo Sapiens
NARHCLPCHPECQ

SEQ ID NO: 35317 - protein, 13 aa, Homo Sapiens
ARHCLPCHPECQP

SEQ ID NO: 35318 - protein, 13 aa, Homo Sapiens
RHCLPCHPECQPQ

SEQ ID NO: 35319 - protein, 13 aa, Homo Sapiens
HCLPCHPECQPQN

SEQ ID NO: 35320 - protein, 13 aa, Homo Sapiens
CLPCHPECQPQNG

SEQ ID NO: 35321 - protein, 13 aa, Homo Sapiens
LPCHPECQPQNGS

SEQ ID NO: 35322 - protein, 13 aa, Homo Sapiens
PCHPECQPQNGSV

SEQ ID NO: 35323 - protein, 13 aa, Homo Sapiens
CHPECQPQNGSVT

SEQ ID NO: 35324 - protein, 13 aa, Homo Sapiens
HPECQPQNGSVTC

SEQ ID NO: 35325 - protein, 13 aa, Homo Sapiens
PECQPQNGSVTCF

SEQ ID NO: 35326 - protein, 13 aa, Homo Sapiens
ECQPQNGSVTCFG

SEQ ID NO: 35327 - protein, 13 aa, Homo Sapiens
CQPQNGSVTCFGP

SEQ ID NO: 35328 - protein, 13 aa, Homo Sapiens
QPQNGSVTCFGPE

SEQ ID NO: 35329 - protein, 13 aa, Homo Sapiens
PQNGSVTCFGPEA

SEQ ID NO: 35330 - protein, 13 aa, Homo Sapiens
QNGSVTCFGPEAD

SEQ ID NO: 35331 - protein, 13 aa, Homo Sapiens
NGSVTCFGPEADQ

SEQ ID NO: 35332 - protein, 13 aa, Homo Sapiens
GSVTCFGPEADQC

SEQ ID NO: 35333 - protein, 13 aa, Homo Sapiens
SVTCFGPEADQCV

SEQ ID NO: 35334 - protein, 13 aa, Homo Sapiens
VTCFGPEADQCVA

SEQ ID NO: 35335 - protein, 13 aa, Homo Sapiens
TCFGPEADQCVAC

SEQ ID NO: 35336 - protein, 13 aa, Homo Sapiens
CFGPEADQCVACA

SEQ ID NO: 35337 - protein, 13 aa, Homo Sapiens
FGPEADQCVACAH

SEQ ID NO: 35338 - protein, 13 aa, Homo Sapiens
GPEADQCVACAHY

SEQ ID NO: 35339 - protein, 13 aa, Homo Sapiens
PEADQCVACAHYK

SEQ ID NO: 35340 - protein, 13 aa, Homo Sapiens
EADQCVACAHYKD

SEQ ID NO: 35341 - protein, 13 aa, Homo Sapiens
ADQCVACAHYKDP

SEQ ID NO: 35342 - protein, 13 aa, Homo Sapiens
DQCVACAHYKDPP

SEQ ID NO: 35343 - protein, 13 aa, Homo Sapiens
QCVACAHYKDPPF

SEQ ID NO: 35344 - protein, 13 aa, Homo Sapiens
CVACAHYKDPPFC

SEQ ID NO: 35345 - protein, 13 aa, Homo Sapiens
VACAHYKDPPFCV

SEQ ID NO: 35346 - protein, 13 aa, Homo Sapiens
ACAHYKDPPFCVA

SEQ ID NO: 35347 - protein, 13 aa, Homo Sapiens
CAHYKDPPFCVAR

SEQ ID NO: 35348 - protein, 13 aa, Homo Sapiens
AHYKDPPFCVARC

SEQ ID NO: 35349 - protein, 13 aa, Homo Sapiens
HYKDPPFCVARCP

SEQ ID NO: 35350 - protein, 13 aa, Homo Sapiens
YKDPPFCVARCPS

SEQ ID NO: 35351 - protein, 13 aa, Homo Sapiens
KDPPFCVARCPSG

SEQ ID NO: 35352 - protein, 13 aa, Homo Sapiens
DPPFCVARCPSGV

SEQ ID NO: 35353 - protein, 13 aa, Homo Sapiens
PPFCVARCPSGVK

SEQ ID NO: 35354 - protein, 13 aa, Homo Sapiens
PFCVARCPSGVKP

SEQ ID NO: 35355 - protein, 13 aa, Homo Sapiens
FCVARCPSGVKPD

SEQ ID NO: 35356 - protein, 13 aa, Homo Sapiens
CVARCPSGVKPDL

SEQ ID NO: 35357 - protein, 13 aa, Homo Sapiens
VARCPSGVKPDLS

SEQ ID NO: 35358 - protein, 13 aa, Homo Sapiens
ARCPSGVKPDLSY

SEQ ID NO: 35359 - protein, 13 aa, Homo Sapiens
RCPSGVKPDLSYM

SEQ ID NO: 35360 - protein, 13 aa, Homo Sapiens
CPSGVKPDLSYMP

SEQ ID NO: 35361 - protein, 13 aa, Homo Sapiens
PSGVKPDLSYMPI

SEQ ID NO: 35362 - protein, 13 aa, Homo Sapiens
SGVKPDLSYMPIW

SEQ ID NO: 35363 - protein, 13 aa, Homo Sapiens
GVKPDLSYMPIWK

SEQ ID NO: 35364 - protein, 13 aa, Homo Sapiens
VKPDLSYMPIWKF

SEQ ID NO: 35365 - protein, 13 aa, Homo Sapiens
KPDLSYMPIWKFP

SEQ ID NO: 35366 - protein, 13 aa, Homo Sapiens
PDLSYMPIWKFPD

SEQ ID NO: 35367 - protein, 13 aa, Homo Sapiens
DLSYMPIWKFPDE

SEQ ID NO: 35368 - protein, 13 aa, Homo Sapiens
LSYMPIWKFPDEE

SEQ ID NO: 35369 - protein, 13 aa, Homo Sapiens
SYMPIWKFPDEEG

SEQ ID NO: 35370 - protein, 13 aa, Homo Sapiens
YMPIWKFPDEEGA

SEQ ID NO: 35371 - protein, 13 aa, Homo Sapiens
MPIWKFPDEEGAC

SEQ ID NO: 35372 - protein, 13 aa, Homo Sapiens
PIWKFPDEEGACQ

SEQ ID NO: 35373 - protein, 13 aa, Homo Sapiens
IWKFPDEEGACQP

SEQ ID NO: 35374 - protein, 13 aa, Homo Sapiens
WKFPDEEGACQPC

SEQ ID NO: 35375 - protein, 13 aa, Homo Sapiens
KFPDEEGACQPCP

SEQ ID NO: 35376 - protein, 13 aa, Homo Sapiens
FPDEEGACQPCPI

SEQ ID NO: 35377 - protein, 13 aa, Homo Sapiens
PDEEGACQPCPIN

SEQ ID NO: 35378 - protein, 13 aa, Homo Sapiens
DEEGACQPCPINC

SEQ ID NO: 35379 - protein, 13 aa, Homo Sapiens
EEGACQPCPINCT

SEQ ID NO: 35380 - protein, 13 aa, Homo Sapiens
EGACQPCPINCTH

SEQ ID NO: 35381 - protein, 13 aa, Homo Sapiens
GACQPCPINCTHS

SEQ ID NO: 35382 - protein, 13 aa, Homo Sapiens
ACQPCPINCTHSC

SEQ ID NO: 35383 - protein, 13 aa, Homo Sapiens
CQPCPINCTHSCV

SEQ ID NO: 35384 - protein, 13 aa, Homo Sapiens
QPCPINCTHSCVD

SEQ ID NO: 35385 - protein, 13 aa, Homo Sapiens
PCPINCTHSCVDL

SEQ ID NO: 35386 - protein, 13 aa, Homo Sapiens
CPINCTHSCVDLD

SEQ ID NO: 35387 - protein, 13 aa, Homo Sapiens
PINCTHSCVDLDD

SEQ ID NO: 35388 - protein, 13 aa, Homo Sapiens
INCTHSCVDLDDK

SEQ ID NO: 35389 - protein, 13 aa, Homo Sapiens
NCTHSCVDLDDKG

SEQ ID NO: 35390 - protein, 13 aa, Homo Sapiens
CTHSCVDLDDKGC

SEQ ID NO: 35391 - protein, 13 aa, Homo Sapiens
THSCVDLDDKGCP

SEQ ID NO: 35392 - protein, 13 aa, Homo Sapiens
HSCVDLDDKGCPA

SEQ ID NO: 35393 - protein, 13 aa, Homo Sapiens
SCVDLDDKGCPAE

SEQ ID NO: 35394 - protein, 13 aa, Homo Sapiens
CVDLDDKGCPAEQ

SEQ ID NO: 35395 - protein, 13 aa, Homo Sapiens
VDLDDKGCPAEQR

SEQ ID NO: 35396 - protein, 13 aa, Homo Sapiens
DLDDKGCPAEQRA

SEQ ID NO: 35397 - protein, 13 aa, Homo Sapiens
LDDKGCPAEQRAS

SEQ ID NO: 35398 - protein, 13 aa, Homo Sapiens
DDKGCPAEQRASP

SEQ ID NO: 35399 - protein, 13 aa, Homo Sapiens
DKGCPAEQRASPL

SEQ ID NO: 35400 - protein, 13 aa, Homo Sapiens
KGCPAEQRASPLT

SEQ ID NO: 35401 - protein, 13 aa, Homo Sapiens
GCPAEQRASPLTS

SEQ ID NO: 35402 - protein, 13 aa, Homo Sapiens
CPAEQRASPLTSI

SEQ ID NO: 35403 - protein, 13 aa, Homo Sapiens
PAEQRASPLTSII

SEQ ID NO: 35404 - protein, 13 aa, Homo Sapiens
AEQRASPLTSIIS

SEQ ID NO: 35405 - protein, 13 aa, Homo Sapiens
EQRASPLTSIISA

SEQ ID NO: 35406 - protein, 13 aa, Homo Sapiens
QRASPLTSIISAV

SEQ ID NO: 35407 - protein, 13 aa, Homo Sapiens
RASPLTSIISAVV

SEQ ID NO: 35408 - protein, 13 aa, Homo Sapiens
ASPLTSIISAVVG

SEQ ID NO: 35409 - protein, 13 aa, Homo Sapiens
SPLTSIISAVVGI

SEQ ID NO: 35410 - protein, 13 aa, Homo Sapiens
PLTSIISAVVGIL

SEQ ID NO: 35411 - protein, 13 aa, Homo Sapiens
LTSIISAVVGILL

SEQ ID NO: 35412 - protein, 13 aa, Homo Sapiens
TSIISAVVGILLV

SEQ ID NO: 35413 - protein, 13 aa, Homo Sapiens
SIISAVVGILLVV

SEQ ID NO: 35414 - protein, 13 aa, Homo Sapiens
IISAVVGILLVVV

SEQ ID NO: 35415 - protein, 13 aa, Homo Sapiens
ISAVVGILLVVVL

SEQ ID NO: 35416 - protein, 13 aa, Homo Sapiens
SAVVGILLVVVLG

SEQ ID NO: 35417 - protein, 13 aa, Homo Sapiens
AVVGILLVVVLGV

SEQ ID NO: 35418 - protein, 13 aa, Homo Sapiens
VVGILLVVVLGVV

SEQ ID NO: 35419 - protein, 13 aa, Homo Sapiens
VGILLVVVLGVVF

SEQ ID NO: 35420 - protein, 13 aa, Homo Sapiens
GILLVVVLGVVFG

SEQ ID NO: 35421 - protein, 13 aa, Homo Sapiens
ILLVVVLGVVFGI

SEQ ID NO: 35422 - protein, 13 aa, Homo Sapiens
LLVVVLGVVFGIL

SEQ ID NO: 35423 - protein, 13 aa, Homo Sapiens
LVVVLGVVFGILI

SEQ ID NO: 35424 - protein, 13 aa, Homo Sapiens
VVVLGVVFGILIK

SEQ ID NO: 35425 - protein, 13 aa, Homo Sapiens
VVLGVVFGILIKR

SEQ ID NO: 35426 - protein, 13 aa, Homo Sapiens
VLGVVFGILIKRR

SEQ ID NO: 35427 - protein, 13 aa, Homo Sapiens
LGVVFGILIKRRQ

SEQ ID NO: 35428 - protein, 13 aa, Homo Sapiens
GVVFGILIKRRQQ

SEQ ID NO: 35429 - protein, 13 aa, Homo Sapiens
VVFGILIKRRQQK

SEQ ID NO: 35430 - protein, 13 aa, Homo Sapiens
VFGILIKRRQQKI

SEQ ID NO: 35431 - protein, 13 aa, Homo Sapiens
FGILIKRRQQKIR

SEQ ID NO: 35432 - protein, 13 aa, Homo Sapiens
GILIKRRQQKIRK

SEQ ID NO: 35433 - protein, 13 aa, Homo Sapiens
ILIKRRQQKIRKY

SEQ ID NO: 35434 - protein, 13 aa, Homo Sapiens
LIKRRQQKIRKYT

SEQ ID NO: 35435 - protein, 13 aa, Homo Sapiens
IKRRQQKIRKYTM

SEQ ID NO: 35436 - protein, 13 aa, Homo Sapiens
KRRQQKIRKYTMR

SEQ ID NO: 35437 - protein, 13 aa, Homo Sapiens
RRQQKIRKYTMRR

SEQ ID NO: 35438 - protein, 13 aa, Homo Sapiens
RQQKIRKYTMRRL

SEQ ID NO: 35439 - protein, 13 aa, Homo Sapiens
QQKIRKYTMRRLL

SEQ ID NO: 35440 - protein, 13 aa, Homo Sapiens
QKIRKYTMRRLLQ

SEQ ID NO: 35441 - protein, 13 aa, Homo Sapiens
KIRKYTMRRLLQE

SEQ ID NO: 35442 - protein, 13 aa, Homo Sapiens
IRKYTMRRLLQET

SEQ ID NO: 35443 - protein, 13 aa, Homo Sapiens
RKYTMRRLLQETE

SEQ ID NO: 35444 - protein, 13 aa, Homo Sapiens
KYTMRRLLQETEL

SEQ ID NO: 35445 - protein, 13 aa, Homo Sapiens
YTMRRLLQETELV

SEQ ID NO: 35446 - protein, 13 aa, Homo Sapiens
TMRRLLQETELVE

SEQ ID NO: 35447 - protein, 13 aa, Homo Sapiens
MRRLLQETELVEP

SEQ ID NO: 35448 - protein, 13 aa, Homo Sapiens
RRLLQETELVEPL

SEQ ID NO: 35449 - protein, 13 aa, Homo Sapiens
RLLQETELVEPLT

SEQ ID NO: 35450 - protein, 13 aa, Homo Sapiens
LLQETELVEPLTP

SEQ ID NO: 35451 - protein, 13 aa, Homo Sapiens
LQETELVEPLTPS

SEQ ID NO: 35452 - protein, 13 aa, Homo Sapiens
QETELVEPLTPSG

SEQ ID NO: 35453 - protein, 13 aa, Homo Sapiens
ETELVEPLTPSGA

SEQ ID NO: 35454 - protein, 13 aa, Homo Sapiens
TELVEPLTPSGAM

SEQ ID NO: 35455 - protein, 13 aa, Homo Sapiens
ELVEPLTPSGAMP

SEQ ID NO: 35456 - protein, 13 aa, Homo Sapiens
LVEPLTPSGAMPN

SEQ ID NO: 35457 - protein, 13 aa, Homo Sapiens
VEPLTPSGAMPNQ

SEQ ID NO: 35458 - protein, 13 aa, Homo Sapiens
EPLTPSGAMPNQA

SEQ ID NO: 35459 - protein, 13 aa, Homo Sapiens
PLTPSGAMPNQAQ

SEQ ID NO: 35460 - protein, 13 aa, Homo Sapiens
LTPSGAMPNQAQM

SEQ ID NO: 35461 - protein, 13 aa, Homo Sapiens
TPSGAMPNQAQMR

SEQ ID NO: 35462 - protein, 13 aa, Homo Sapiens
PSGAMPNQAQMRI

SEQ ID NO: 35463 - protein, 13 aa, Homo Sapiens
SGAMPNQAQMRIL

SEQ ID NO: 35464 - protein, 13 aa, Homo Sapiens
GAMPNQAQMRILK

SEQ ID NO: 35465 - protein, 13 aa, Homo Sapiens
AMPNQAQMRILKE

SEQ ID NO: 35466 - protein, 13 aa, Homo Sapiens
MPNQAQMRILKET

SEQ ID NO: 35467 - protein, 13 aa, Homo Sapiens
PNQAQMRILKETE

SEQ ID NO: 35468 - protein, 13 aa, Homo Sapiens
NQAQMRILKETEL

SEQ ID NO: 35469 - protein, 13 aa, Homo Sapiens
QAQMRILKETELR

SEQ ID NO: 35470 - protein, 13 aa, Homo Sapiens
AQMRILKETELRK

SEQ ID NO: 35471 - protein, 13 aa, Homo Sapiens
QMRILKETELRKV

SEQ ID NO: 35472 - protein, 13 aa, Homo Sapiens
MRILKETELRKVK

SEQ ID NO: 35473 - protein, 13 aa, Homo Sapiens
RILKETELRKVKV

SEQ ID NO: 35474 - protein, 13 aa, Homo Sapiens
ILKETELRKVKVL

SEQ ID NO: 35475 - protein, 13 aa, Homo Sapiens
LKETELRKVKVLG

SEQ ID NO: 35476 - protein, 13 aa, Homo Sapiens
KETELRKVKVLGS

SEQ ID NO: 35477 - protein, 13 aa, Homo Sapiens
ETELRKVKVLGSG

SEQ ID NO: 35478 - protein, 13 aa, Homo Sapiens
TELRKVKVLGSGA

SEQ ID NO: 35479 - protein, 13 aa, Homo Sapiens
ELRKVKVLGSGAF

SEQ ID NO: 35480 - protein, 13 aa, Homo Sapiens
LRKVKVLGSGAFG

SEQ ID NO: 35481 - protein, 13 aa, Homo Sapiens
RKVKVLGSGAFGT

SEQ ID NO: 35482 - protein, 13 aa, Homo Sapiens
KVKVLGSGAFGTV

SEQ ID NO: 35483 - protein, 13 aa, Homo Sapiens
VKVLGSGAFGTVY

SEQ ID NO: 35484 - protein, 13 aa, Homo Sapiens
KVLGSGAFGTVYK

SEQ ID NO: 35485 - protein, 13 aa, Homo Sapiens
VLGSGAFGTVYKG

SEQ ID NO: 35486 - protein, 13 aa, Homo Sapiens
LGSGAFGTVYKGI

SEQ ID NO: 35487 - protein, 13 aa, Homo Sapiens
GSGAFGTVYKGIW

SEQ ID NO: 35488 - protein, 13 aa, Homo Sapiens
SGAFGTVYKGIWI

SEQ ID NO: 35489 - protein, 13 aa, Homo Sapiens
GAFGTVYKGIWIP

SEQ ID NO: 35490 - protein, 13 aa, Homo Sapiens
AFGTVYKGIWIPD

SEQ ID NO: 35491 - protein, 13 aa, Homo Sapiens
FGTVYKGIWIPDG

SEQ ID NO: 35492 - protein, 13 aa, Homo Sapiens
GTVYKGIWIPDGE

SEQ ID NO: 35493 - protein, 13 aa, Homo Sapiens
TVYKGIWIPDGEN

SEQ ID NO: 35494 - protein, 13 aa, Homo Sapiens
VYKGIWIPDGENV

SEQ ID NO: 35495 - protein, 13 aa, Homo Sapiens
YKGIWIPDGENVK

SEQ ID NO: 35496 - protein, 13 aa, Homo Sapiens
KGIWIPDGENVKI

SEQ ID NO: 35497 - protein, 13 aa, Homo Sapiens
GIWIPDGENVKIP

SEQ ID NO: 35498 - protein, 13 aa, Homo Sapiens
IWIPDGENVKIPV

SEQ ID NO: 35499 - protein, 13 aa, Homo Sapiens
WIPDGENVKIPVA

SEQ ID NO: 35500 - protein, 13 aa, Homo Sapiens
IPDGENVKIPVAI

SEQ ID NO: 35501 - protein, 13 aa, Homo Sapiens
PDGENVKIPVAIK

SEQ ID NO: 35502 - protein, 13 aa, Homo Sapiens
DGENVKIPVAIKV

SEQ ID NO: 35503 - protein, 13 aa, Homo Sapiens
GENVKIPVAIKVL

SEQ ID NO: 35504 - protein, 13 aa, Homo Sapiens
ENVKIPVAIKVLR

SEQ ID NO: 35505 - protein, 13 aa, Homo Sapiens
NVKIPVAIKVLRE

SEQ ID NO: 35506 - protein, 13 aa, Homo Sapiens
VKIPVAIKVLREN

SEQ ID NO: 35507 - protein, 13 aa, Homo Sapiens
KIPVAIKVLRENT

SEQ ID NO: 35508 - protein, 13 aa, Homo Sapiens
IPVAIKVLRENTS

SEQ ID NO: 35509 - protein, 13 aa, Homo Sapiens
PVAIKVLRENTSP

SEQ ID NO: 35510 - protein, 13 aa, Homo Sapiens
VAIKVLRENTSPK

SEQ ID NO: 35511 - protein, 13 aa, Homo Sapiens
AIKVLRENTSPKA

SEQ ID NO: 35512 - protein, 13 aa, Homo Sapiens
IKVLRENTSPKAN

SEQ ID NO: 35513 - protein, 13 aa, Homo Sapiens
KVLRENTSPKANK

SEQ ID NO: 35514 - protein, 13 aa, Homo Sapiens
VLRENTSPKANKE

SEQ ID NO: 35515 - protein, 13 aa, Homo Sapiens
LRENTSPKANKEI

SEQ ID NO: 35516 - protein, 13 aa, Homo Sapiens
RENTSPKANKEIL

SEQ ID NO: 35517 - protein, 13 aa, Homo Sapiens
ENTSPKANKEILD

SEQ ID NO: 35518 - protein, 13 aa, Homo Sapiens
NTSPKANKEILDE

SEQ ID NO: 35519 - protein, 13 aa, Homo Sapiens
TSPKANKEILDEA

SEQ ID NO: 35520 - protein, 13 aa, Homo Sapiens
SPKANKEILDEAY

SEQ ID NO: 35521 - protein, 13 aa, Homo Sapiens
PKANKEILDEAYV

SEQ ID NO: 35522 - protein, 13 aa, Homo Sapiens
KANKEILDEAYVM

SEQ ID NO: 35523 - protein, 13 aa, Homo Sapiens
ANKEILDEAYVMA

SEQ ID NO: 35524 - protein, 13 aa, Homo Sapiens
NKEILDEAYVMAG

SEQ ID NO: 35525 - protein, 13 aa, Homo Sapiens
KEILDEAYVMAGV

SEQ ID NO: 35526 - protein, 13 aa, Homo Sapiens
EILDEAYVMAGVG

SEQ ID NO: 35527 - protein, 13 aa, Homo Sapiens
ILDEAYVMAGVGS

SEQ ID NO: 35528 - protein, 13 aa, Homo Sapiens
LDEAYVMAGVGSP

SEQ ID NO: 35529 - protein, 13 aa, Homo Sapiens
DEAYVMAGVGSPY

SEQ ID NO: 35530 - protein, 13 aa, Homo Sapiens
EAYVMAGVGSPYV

SEQ ID NO: 35531 - protein, 13 aa, Homo Sapiens
AYVMAGVGSPYVS

SEQ ID NO: 35532 - protein, 13 aa, Homo Sapiens
YVMAGVGSPYVSR

SEQ ID NO: 35533 - protein, 13 aa, Homo Sapiens
VMAGVGSPYVSRL

SEQ ID NO: 35534 - protein, 13 aa, Homo Sapiens
MAGVGSPYVSRLL

SEQ ID NO: 35535 - protein, 13 aa, Homo Sapiens
AGVGSPYVSRLLG

SEQ ID NO: 35536 - protein, 13 aa, Homo Sapiens
GVGSPYVSRLLGI

SEQ ID NO: 35537 - protein, 13 aa, Homo Sapiens
VGSPYVSRLLGIC

SEQ ID NO: 35538 - protein, 13 aa, Homo Sapiens
GSPYVSRLLGICL

SEQ ID NO: 35539 - protein, 13 aa, Homo Sapiens
SPYVSRLLGICLT

SEQ ID NO: 35540 - protein, 13 aa, Homo Sapiens
PYVSRLLGICLTS

SEQ ID NO: 35541 - protein, 13 aa, Homo Sapiens
YVSRLLGICLTST

SEQ ID NO: 35542 - protein, 13 aa, Homo Sapiens
VSRLLGICLTSTV

SEQ ID NO: 35543 - protein, 13 aa, Homo Sapiens
SRLLGICLTSTVQ

SEQ ID NO: 35544 - protein, 13 aa, Homo Sapiens
RLLGICLTSTVQL

SEQ ID NO: 35545 - protein, 13 aa, Homo Sapiens
LLGICLTSTVQLV

SEQ ID NO: 35546 - protein, 13 aa, Homo Sapiens
LGICLTSTVQLVT

SEQ ID NO: 35547 - protein, 13 aa, Homo Sapiens
GICLTSTVQLVTQ

SEQ ID NO: 35548 - protein, 13 aa, Homo Sapiens
ICLTSTVQLVTQL

SEQ ID NO: 35549 - protein, 13 aa, Homo Sapiens
CLTSTVQLVTQLM

SEQ ID NO: 35550 - protein, 13 aa, Homo Sapiens
LTSTVQLVTQLMP

SEQ ID NO: 35551 - protein, 13 aa, Homo Sapiens
TSTVQLVTQLMPY

SEQ ID NO: 35552 - protein, 13 aa, Homo Sapiens
STVQLVTQLMPYG

SEQ ID NO: 35553 - protein, 13 aa, Homo Sapiens
TVQLVTQLMPYGC

SEQ ID NO: 35554 - protein, 13 aa, Homo Sapiens
VQLVTQLMPYGCL

SEQ ID NO: 35555 - protein, 13 aa, Homo Sapiens
QLVTQLMPYGCLL

SEQ ID NO: 35556 - protein, 13 aa, Homo Sapiens
LVTQLMPYGCLLD

SEQ ID NO: 35557 - protein, 13 aa, Homo Sapiens
VTQLMPYGCLLDH

SEQ ID NO: 35558 - protein, 13 aa, Homo Sapiens
TQLMPYGCLLDHV

SEQ ID NO: 35559 - protein, 13 aa, Homo Sapiens
QLMPYGCLLDHVR

SEQ ID NO: 35560 - protein, 13 aa, Homo Sapiens
LMPYGCLLDHVRE

SEQ ID NO: 35561 - protein, 13 aa, Homo Sapiens
MPYGCLLDHVREN

SEQ ID NO: 35562 - protein, 13 aa, Homo Sapiens
PYGCLLDHVRENR

SEQ ID NO: 35563 - protein, 13 aa, Homo Sapiens
YGCLLDHVRENRG

SEQ ID NO: 35564 - protein, 13 aa, Homo Sapiens
GCLLDHVRENRGR

SEQ ID NO: 35565 - protein, 13 aa, Homo Sapiens
CLLDHVRENRGRL

SEQ ID NO: 35566 - protein, 13 aa, Homo Sapiens
LLDHVRENRGRLG

SEQ ID NO: 35567 - protein, 13 aa, Homo Sapiens
LDHVRENRGRLGS

SEQ ID NO: 35568 - protein, 13 aa, Homo Sapiens
DHVRENRGRLGSQ

SEQ ID NO: 35569 - protein, 13 aa, Homo Sapiens
HVRENRGRLGSQD

SEQ ID NO: 35570 - protein, 13 aa, Homo Sapiens
VRENRGRLGSQDL

SEQ ID NO: 35571 - protein, 13 aa, Homo Sapiens
RENRGRLGSQDLL

SEQ ID NO: 35572 - protein, 13 aa, Homo Sapiens
ENRGRLGSQDLLN

SEQ ID NO: 35573 - protein, 13 aa, Homo Sapiens
NRGRLGSQDLLNW

SEQ ID NO: 35574 - protein, 13 aa, Homo Sapiens
RGRLGSQDLLNWC

SEQ ID NO: 35575 - protein, 13 aa, Homo Sapiens
GRLGSQDLLNWCM

SEQ ID NO: 35576 - protein, 13 aa, Homo Sapiens
RLGSQDLLNWCMQ

SEQ ID NO: 35577 - protein, 13 aa, Homo Sapiens
LGSQDLLNWCMQI

SEQ ID NO: 35578 - protein, 13 aa, Homo Sapiens
GSQDLLNWCMQIA

SEQ ID NO: 35579 - protein, 13 aa, Homo Sapiens
SQDLLNWCMQIAK

SEQ ID NO: 35580 - protein, 13 aa, Homo Sapiens
QDLLNWCMQIAKG

SEQ ID NO: 35581 - protein, 13 aa, Homo Sapiens
DLLNWCMQIAKGM

SEQ ID NO: 35582 - protein, 13 aa, Homo Sapiens
LLNWCMQIAKGMS

SEQ ID NO: 35583 - protein, 13 aa, Homo Sapiens
LNWCMQIAKGMSY

SEQ ID NO: 35584 - protein, 13 aa, Homo Sapiens
NWCMQIAKGMSYL

SEQ ID NO: 35585 - protein, 13 aa, Homo Sapiens
WCMQIAKGMSYLE

SEQ ID NO: 35586 - protein, 13 aa, Homo Sapiens
CMQIAKGMSYLED

SEQ ID NO: 35587 - protein, 13 aa, Homo Sapiens
MQIAKGMSYLEDV

SEQ ID NO: 35588 - protein, 13 aa, Homo Sapiens
QIAKGMSYLEDVR

SEQ ID NO: 35589 - protein, 13 aa, Homo Sapiens
IAKGMSYLEDVRL

SEQ ID NO: 35590 - protein, 13 aa, Homo Sapiens
AKGMSYLEDVRLV

SEQ ID NO: 35591 - protein, 13 aa, Homo Sapiens
KGMSYLEDVRLVH

SEQ ID NO: 35592 - protein, 13 aa, Homo Sapiens
GMSYLEDVRLVHR

SEQ ID NO: 35593 - protein, 13 aa, Homo Sapiens
MSYLEDVRLVHRD

SEQ ID NO: 35594 - protein, 13 aa, Homo Sapiens
SYLEDVRLVHRDL

SEQ ID NO: 35595 - protein, 13 aa, Homo Sapiens
YLEDVRLVHRDLA

SEQ ID NO: 35596 - protein, 13 aa, Homo Sapiens
LEDVRLVHRDLAA

SEQ ID NO: 35597 - protein, 13 aa, Homo Sapiens
EDVRLVHRDLAAR

SEQ ID NO: 35598 - protein, 13 aa, Homo Sapiens
DVRLVHRDLAARN

SEQ ID NO: 35599 - protein, 13 aa, Homo Sapiens
VRLVHRDLAARNV

SEQ ID NO: 35600 - protein, 13 aa, Homo Sapiens
RLVHRDLAARNVL

SEQ ID NO: 35601 - protein, 13 aa, Homo Sapiens
LVHRDLAARNVLV

SEQ ID NO: 35602 - protein, 13 aa, Homo Sapiens
VHRDLAARNVLVK

SEQ ID NO: 35603 - protein, 13 aa, Homo Sapiens
HRDLAARNVLVKS

SEQ ID NO: 35604 - protein, 13 aa, Homo Sapiens
RDLAARNVLVKSP

SEQ ID NO: 35605 - protein, 13 aa, Homo Sapiens
DLAARNVLVKSPN

SEQ ID NO: 35606 - protein, 13 aa, Homo Sapiens
LAARNVLVKSPNH

SEQ ID NO: 35607 - protein, 13 aa, Homo Sapiens
AARNVLVKSPNHV

SEQ ID NO: 35608 - protein, 13 aa, Homo Sapiens
ARNVLVKSPNHVK

SEQ ID NO: 35609 - protein, 13 aa, Homo Sapiens
RNVLVKSPNHVKI

SEQ ID NO: 35610 - protein, 13 aa, Homo Sapiens
NVLVKSPNHVKIT

SEQ ID NO: 35611 - protein, 13 aa, Homo Sapiens
VLVKSPNHVKITD

SEQ ID NO: 35612 - protein, 13 aa, Homo Sapiens
LVKSPNHVKITDF

SEQ ID NO: 35613 - protein, 13 aa, Homo Sapiens
VKSPNHVKITDFG

SEQ ID NO: 35614 - protein, 13 aa, Homo Sapiens
KSPNHVKITDFGL

SEQ ID NO: 35615 - protein, 13 aa, Homo Sapiens
SPNHVKITDFGLA

SEQ ID NO: 35616 - protein, 13 aa, Homo Sapiens
PNHVKITDFGLAR

SEQ ID NO: 35617 - protein, 13 aa, Homo Sapiens
NHVKITDFGLARL

SEQ ID NO: 35618 - protein, 13 aa, Homo Sapiens
HVKITDFGLARLL

SEQ ID NO: 35619 - protein, 13 aa, Homo Sapiens
VKITDFGLARLLD

SEQ ID NO: 35620 - protein, 13 aa, Homo Sapiens
KITDFGLARLLDI

SEQ ID NO: 35621 - protein, 13 aa, Homo Sapiens
ITDFGLARLLDID

SEQ ID NO: 35622 - protein, 13 aa, Homo Sapiens
TDFGLARLLDIDE

SEQ ID NO: 35623 - protein, 13 aa, Homo Sapiens
DFGLARLLDIDET

SEQ ID NO: 35624 - protein, 13 aa, Homo Sapiens
FGLARLLDIDETE

SEQ ID NO: 35625 - protein, 13 aa, Homo Sapiens
GLARLLDIDETEY

SEQ ID NO: 35626 - protein, 13 aa, Homo Sapiens
LARLLDIDETEYH

SEQ ID NO: 35627 - protein, 13 aa, Homo Sapiens
ARLLDIDETEYHA

SEQ ID NO: 35628 - protein, 13 aa, Homo Sapiens
RLLDIDETEYHAD

SEQ ID NO: 35629 - protein, 13 aa, Homo Sapiens
LLDIDETEYHADG

SEQ ID NO: 35630 - protein, 13 aa, Homo Sapiens
LDIDETEYHADGG

SEQ ID NO: 35631 - protein, 13 aa, Homo Sapiens
DIDETEYHADGGK

SEQ ID NO: 35632 - protein, 13 aa, Homo Sapiens
IDETEYHADGGKV

SEQ ID NO: 35633 - protein, 13 aa, Homo Sapiens
DETEYHADGGKVP

SEQ ID NO: 35634 - protein, 13 aa, Homo Sapiens
ETEYHADGGKVPI

SEQ ID NO: 35635 - protein, 13 aa, Homo Sapiens
TEYHADGGKVPIK

SEQ ID NO: 35636 - protein, 13 aa, Homo Sapiens
EYHADGGKVPIKW

SEQ ID NO: 35637 - protein, 13 aa, Homo Sapiens
YHADGGKVPIKWM

SEQ ID NO: 35638 - protein, 13 aa, Homo Sapiens
HADGGKVPIKWMA

SEQ ID NO: 35639 - protein, 13 aa, Homo Sapiens
ADGGKVPIKWMAL

SEQ ID NO: 35640 - protein, 13 aa, Homo Sapiens
DGGKVPIKWMALE

SEQ ID NO: 35641 - protein, 13 aa, Homo Sapiens
GGKVPIKWMALES

SEQ ID NO: 35642 - protein, 13 aa, Homo Sapiens
GKVPIKWMALESI

SEQ ID NO: 35643 - protein, 13 aa, Homo Sapiens
KVPIKWMALESIL

SEQ ID NO: 35644 - protein, 13 aa, Homo Sapiens
VPIKWMALESILR

SEQ ID NO: 35645 - protein, 13 aa, Homo Sapiens
PIKWMALESILRR

SEQ ID NO: 35646 - protein, 13 aa, Homo Sapiens
IKWMALESILRRR

SEQ ID NO: 35647 - protein, 13 aa, Homo Sapiens
KWMALESILRRRF

SEQ ID NO: 35648 - protein, 13 aa, Homo Sapiens
WMALESILRRRFT

SEQ ID NO: 35649 - protein, 13 aa, Homo Sapiens
MALESILRRRFTH

SEQ ID NO: 35650 - protein, 13 aa, Homo Sapiens
ALESILRRRFTHQ

SEQ ID NO: 35651 - protein, 13 aa, Homo Sapiens
LESILRRRFTHQS

SEQ ID NO: 35652 - protein, 13 aa, Homo Sapiens
ESILRRRFTHQSD

SEQ ID NO: 35653 - protein, 13 aa, Homo Sapiens
SILRRRFTHQSDV

SEQ ID NO: 35654 - protein, 13 aa, Homo Sapiens
ILRRRFTHQSDVW

SEQ ID NO: 35655 - protein, 13 aa, Homo Sapiens
LRRRFTHQSDVWS

SEQ ID NO: 35656 - protein, 13 aa, Homo Sapiens
RRRFTHQSDVWSY

SEQ ID NO: 35657 - protein, 13 aa, Homo Sapiens
RRFTHQSDVWSYG

SEQ ID NO: 35658 - protein, 13 aa, Homo Sapiens
RFTHQSDVWSYGV

SEQ ID NO: 35659 - protein, 13 aa, Homo Sapiens
FTHQSDVWSYGVT

SEQ ID NO: 35660 - protein, 13 aa, Homo Sapiens
THQSDVWSYGVTV

SEQ ID NO: 35661 - protein, 13 aa, Homo Sapiens
HQSDVWSYGVTVW

SEQ ID NO: 35662 - protein, 13 aa, Homo Sapiens
QSDVWSYGVTVWE

SEQ ID NO: 35663 - protein, 13 aa, Homo Sapiens
SDVWSYGVTVWEL

SEQ ID NO: 35664 - protein, 13 aa, Homo Sapiens
DVWSYGVTVWELM

SEQ ID NO: 35665 - protein, 13 aa, Homo Sapiens
VWSYGVTVWELMT

SEQ ID NO: 35666 - protein, 13 aa, Homo Sapiens
WSYGVTVWELMTF

SEQ ID NO: 35667 - protein, 13 aa, Homo Sapiens
SYGVTVWELMTFG

SEQ ID NO: 35668 - protein, 13 aa, Homo Sapiens
YGVTVWELMTFGA

SEQ ID NO: 35669 - protein, 13 aa, Homo Sapiens
GVTVWELMTFGAK

SEQ ID NO: 35670 - protein, 13 aa, Homo Sapiens
VTVWELMTFGAKP

SEQ ID NO: 35671 - protein, 13 aa, Homo Sapiens
TVWELMTFGAKPY

SEQ ID NO: 35672 - protein, 13 aa, Homo Sapiens
VWELMTFGAKPYD

SEQ ID NO: 35673 - protein, 13 aa, Homo Sapiens
WELMTFGAKPYDG

SEQ ID NO: 35674 - protein, 13 aa, Homo Sapiens
ELMTFGAKPYDGI

SEQ ID NO: 35675 - protein, 13 aa, Homo Sapiens
LMTFGAKPYDGIP

SEQ ID NO: 35676 - protein, 13 aa, Homo Sapiens
MTFGAKPYDGIPA

SEQ ID NO: 35677 - protein, 13 aa, Homo Sapiens
TFGAKPYDGIPAR

SEQ ID NO: 35678 - protein, 13 aa, Homo Sapiens
FGAKPYDGIPARE

SEQ ID NO: 35679 - protein, 13 aa, Homo Sapiens
GAKPYDGIPAREI

SEQ ID NO: 35680 - protein, 13 aa, Homo Sapiens
AKPYDGIPAREIP

SEQ ID NO: 35681 - protein, 13 aa, Homo Sapiens
KPYDGIPAREIPD

SEQ ID NO: 35682 - protein, 13 aa, Homo Sapiens
PYDGIPAREIPDL

SEQ ID NO: 35683 - protein, 13 aa, Homo Sapiens
YDGIPAREIPDLL

SEQ ID NO: 35684 - protein, 13 aa, Homo Sapiens
DGIPAREIPDLLE

SEQ ID NO: 35685 - protein, 13 aa, Homo Sapiens
GIPAREIPDLLEK

SEQ ID NO: 35686 - protein, 13 aa, Homo Sapiens
IPAREIPDLLEKG

SEQ ID NO: 35687 - protein, 13 aa, Homo Sapiens
PAREIPDLLEKGE

SEQ ID NO: 35688 - protein, 13 aa, Homo Sapiens
AREIPDLLEKGER

SEQ ID NO: 35689 - protein, 13 aa, Homo Sapiens
REIPDLLEKGERL

SEQ ID NO: 35690 - protein, 13 aa, Homo Sapiens
EIPDLLEKGERLP

SEQ ID NO: 35691 - protein, 13 aa, Homo Sapiens
IPDLLEKGERLPQ

SEQ ID NO: 35692 - protein, 13 aa, Homo Sapiens
PDLLEKGERLPQP

SEQ ID NO: 35693 - protein, 13 aa, Homo Sapiens
DLLEKGERLPQPP

SEQ ID NO: 35694 - protein, 13 aa, Homo Sapiens
LLEKGERLPQPPI

SEQ ID NO: 35695 - protein, 13 aa, Homo Sapiens
LEKGERLPQPPIC

SEQ ID NO: 35696 - protein, 13 aa, Homo Sapiens
EKGERLPQPPICT

SEQ ID NO: 35697 - protein, 13 aa, Homo Sapiens
KGERLPQPPICTI

SEQ ID NO: 35698 - protein, 13 aa, Homo Sapiens
GERLPQPPICTID

SEQ ID NO: 35699 - protein, 13 aa, Homo Sapiens
ERLPQPPICTIDV

SEQ ID NO: 35700 - protein, 13 aa, Homo Sapiens
RLPQPPICTIDVY

SEQ ID NO: 35701 - protein, 13 aa, Homo Sapiens
LPQPPICTIDVYM

SEQ ID NO: 35702 - protein, 13 aa, Homo Sapiens
PQPPICTIDVYMI

SEQ ID NO: 35703 - protein, 13 aa, Homo Sapiens
QPPICTIDVYMIM

SEQ ID NO: 35704 - protein, 13 aa, Homo Sapiens
PPICTIDVYMIMV

SEQ ID NO: 35705 - protein, 13 aa, Homo Sapiens
PICTIDVYMIMVK

SEQ ID NO: 35706 - protein, 13 aa, Homo Sapiens
ICTIDVYMIMVKC

SEQ ID NO: 35707 - protein, 13 aa, Homo Sapiens
CTIDVYMIMVKCW

SEQ ID NO: 35708 - protein, 13 aa, Homo Sapiens
TIDVYMIMVKCWM

SEQ ID NO: 35709 - protein, 13 aa, Homo Sapiens
IDVYMIMVKCWMI

SEQ ID NO: 35710 - protein, 13 aa, Homo Sapiens
DVYMIMVKCWMID

SEQ ID NO: 35711 - protein, 13 aa, Homo Sapiens
VYMIMVKCWMIDS

SEQ ID NO: 35712 - protein, 13 aa, Homo Sapiens
YMIMVKCWMIDSE

SEQ ID NO: 35713 - protein, 13 aa, Homo Sapiens
MIMVKCWMIDSEC

SEQ ID NO: 35714 - protein, 13 aa, Homo Sapiens
IMVKCWMIDSECR

SEQ ID NO: 35715 - protein, 13 aa, Homo Sapiens
MVKCWMIDSECRP

SEQ ID NO: 35716 - protein, 13 aa, Homo Sapiens
VKCWMIDSECRPR

SEQ ID NO: 35717 - protein, 13 aa, Homo Sapiens
KCWMIDSECRPRF

SEQ ID NO: 35718 - protein, 13 aa, Homo Sapiens
CWMIDSECRPRFR

SEQ ID NO: 35719 - protein, 13 aa, Homo Sapiens
WMIDSECRPRFRE

SEQ ID NO: 35720 - protein, 13 aa, Homo Sapiens
MIDSECRPRFREL

SEQ ID NO: 35721 - protein, 13 aa, Homo Sapiens
IDSECRPRFRELV

SEQ ID NO: 35722 - protein, 13 aa, Homo Sapiens
DSECRPRFRELVS

SEQ ID NO: 35723 - protein, 13 aa, Homo Sapiens
SECRPRFRELVSE

SEQ ID NO: 35724 - protein, 13 aa, Homo Sapiens
ECRPRFRELVSEF

SEQ ID NO: 35725 - protein, 13 aa, Homo Sapiens
CRPRFRELVSEFS

SEQ ID NO: 35726 - protein, 13 aa, Homo Sapiens
RPRFRELVSEFSR

SEQ ID NO: 35727 - protein, 13 aa, Homo Sapiens
PRFRELVSEFSRM

SEQ ID NO: 35728 - protein, 13 aa, Homo Sapiens
RFRELVSEFSRMA

SEQ ID NO: 35729 - protein, 13 aa, Homo Sapiens
FRELVSEFSRMAR

SEQ ID NO: 35730 - protein, 13 aa, Homo Sapiens
RELVSEFSRMARD

SEQ ID NO: 35731 - protein, 13 aa, Homo Sapiens
ELVSEFSRMARDP

SEQ ID NO: 35732 - protein, 13 aa, Homo Sapiens
LVSEFSRMARDPQ

SEQ ID NO: 35733 - protein, 13 aa, Homo Sapiens
VSEFSRMARDPQR

SEQ ID NO: 35734 - protein, 13 aa, Homo Sapiens
SEFSRMARDPQRF

SEQ ID NO: 35735 - protein, 13 aa, Homo Sapiens
EFSRMARDPQRFV

SEQ ID NO: 35736 - protein, 13 aa, Homo Sapiens
FSRMARDPQRFVV

SEQ ID NO: 35737 - protein, 13 aa, Homo Sapiens
SRMARDPQRFVVI

SEQ ID NO: 35738 - protein, 13 aa, Homo Sapiens
RMARDPQRFVVIQ

SEQ ID NO: 35739 - protein, 13 aa, Homo Sapiens
MARDPQRFVVIQN

SEQ ID NO: 35740 - protein, 13 aa, Homo Sapiens
ARDPQRFVVIQNE

SEQ ID NO: 35741 - protein, 13 aa, Homo Sapiens
RDPQRFVVIQNED

SEQ ID NO: 35742 - protein, 13 aa, Homo Sapiens
DPQRFVVIQNEDL

SEQ ID NO: 35743 - protein, 13 aa, Homo Sapiens
PQRFVVIQNEDLG

SEQ ID NO: 35744 - protein, 13 aa, Homo Sapiens
QRFVVIQNEDLGP

SEQ ID NO: 35745 - protein, 13 aa, Homo Sapiens
RFVVIQNEDLGPA

SEQ ID NO: 35746 - protein, 13 aa, Homo Sapiens
FVVIQNEDLGPAS

SEQ ID NO: 35747 - protein, 13 aa, Homo Sapiens
VVIQNEDLGPASP

SEQ ID NO: 35748 - protein, 13 aa, Homo Sapiens
VIQNEDLGPASPL

SEQ ID NO: 35749 - protein, 13 aa, Homo Sapiens
IQNEDLGPASPLD

SEQ ID NO: 35750 - protein, 13 aa, Homo Sapiens
QNEDLGPASPLDS

SEQ ID NO: 35751 - protein, 13 aa, Homo Sapiens
NEDLGPASPLDST

SEQ ID NO: 35752 - protein, 13 aa, Homo Sapiens
EDLGPASPLDSTF

SEQ ID NO: 35753 - protein, 13 aa, Homo Sapiens
DLGPASPLDSTFY

SEQ ID NO: 35754 - protein, 13 aa, Homo Sapiens
LGPASPLDSTFYR

SEQ ID NO: 35755 - protein, 13 aa, Homo Sapiens
GPASPLDSTFYRS

SEQ ID NO: 35756 - protein, 13 aa, Homo Sapiens
PASPLDSTFYRSL

SEQ ID NO: 35757 - protein, 13 aa, Homo Sapiens
ASPLDSTFYRSLL

SEQ ID NO: 35758 - protein, 13 aa, Homo Sapiens
SPLDSTFYRSLLE

SEQ ID NO: 35759 - protein, 13 aa, Homo Sapiens
PLDSTFYRSLLED

SEQ ID NO: 35760 - protein, 13 aa, Homo Sapiens
LDSTFYRSLLEDD

SEQ ID NO: 35761 - protein, 13 aa, Homo Sapiens
DSTFYRSLLEDDD

SEQ ID NO: 35762 - protein, 13 aa, Homo Sapiens
STFYRSLLEDDDM

SEQ ID NO: 35763 - protein, 13 aa, Homo Sapiens
TFYRSLLEDDDMG

SEQ ID NO: 35764 - protein, 13 aa, Homo Sapiens
FYRSLLEDDDMGD

SEQ ID NO: 35765 - protein, 13 aa, Homo Sapiens
YRSLLEDDDMGDL

SEQ ID NO: 35766 - protein, 13 aa, Homo Sapiens
RSLLEDDDMGDLV

SEQ ID NO: 35767 - protein, 13 aa, Homo Sapiens
SLLEDDDMGDLVD

SEQ ID NO: 35768 - protein, 13 aa, Homo Sapiens
LLEDDDMGDLVDA

SEQ ID NO: 35769 - protein, 13 aa, Homo Sapiens
LEDDDMGDLVDAE

SEQ ID NO: 35770 - protein, 13 aa, Homo Sapiens
EDDDMGDLVDAEE

SEQ ID NO: 35771 - protein, 13 aa, Homo Sapiens
DDDMGDLVDAEEY

SEQ ID NO: 35772 - protein, 13 aa, Homo Sapiens
DDMGDLVDAEEYL

SEQ ID NO: 35773 - protein, 13 aa, Homo Sapiens
DMGDLVDAEEYLV

SEQ ID NO: 35774 - protein, 13 aa, Homo Sapiens
MGDLVDAEEYLVP

SEQ ID NO: 35775 - protein, 13 aa, Homo Sapiens
GDLVDAEEYLVPQ

SEQ ID NO: 35776 - protein, 13 aa, Homo Sapiens
DLVDAEEYLVPQQ

SEQ ID NO: 35777 - protein, 13 aa, Homo Sapiens
LVDAEEYLVPQQG

SEQ ID NO: 35778 - protein, 13 aa, Homo Sapiens
VDAEEYLVPQQGF

SEQ ID NO: 35779 - protein, 13 aa, Homo Sapiens
DAEEYLVPQQGFF

SEQ ID NO: 35780 - protein, 13 aa, Homo Sapiens
AEEYLVPQQGFFC

SEQ ID NO: 35781 - protein, 13 aa, Homo Sapiens
EEYLVPQQGFFCP

SEQ ID NO: 35782 - protein, 13 aa, Homo Sapiens
EYLVPQQGFFCPD

SEQ ID NO: 35783 - protein, 13 aa, Homo Sapiens
YLVPQQGFFCPDP

SEQ ID NO: 35784 - protein, 13 aa, Homo Sapiens
LVPQQGFFCPDPA

SEQ ID NO: 35785 - protein, 13 aa, Homo Sapiens
VPQQGFFCPDPAP

SEQ ID NO: 35786 - protein, 13 aa, Homo Sapiens
PQQGFFCPDPAPG

SEQ ID NO: 35787 - protein, 13 aa, Homo Sapiens
QQGFFCPDPAPGA

SEQ ID NO: 35788 - protein, 13 aa, Homo Sapiens
QGFFCPDPAPGAG

SEQ ID NO: 35789 - protein, 13 aa, Homo Sapiens
GFFCPDPAPGAGG

SEQ ID NO: 35790 - protein, 13 aa, Homo Sapiens
FFCPDPAPGAGGM

SEQ ID NO: 35791 - protein, 13 aa, Homo Sapiens
FCPDPAPGAGGMV

SEQ ID NO: 35792 - protein, 13 aa, Homo Sapiens
CPDPAPGAGGMVH

SEQ ID NO: 35793 - protein, 13 aa, Homo Sapiens
PDPAPGAGGMVHH

SEQ ID NO: 35794 - protein, 13 aa, Homo Sapiens
DPAPGAGGMVHHR

SEQ ID NO: 35795 - protein, 13 aa, Homo Sapiens
PAPGAGGMVHHRH

SEQ ID NO: 35796 - protein, 13 aa, Homo Sapiens
APGAGGMVHHRHR

SEQ ID NO: 35797 - protein, 13 aa, Homo Sapiens
PGAGGMVHHRHRS

SEQ ID NO: 35798 - protein, 13 aa, Homo Sapiens
GAGGMVHHRHRSS

SEQ ID NO: 35799 - protein, 13 aa, Homo Sapiens
AGGMVHHRHRSSS

SEQ ID NO: 35800 - protein, 13 aa, Homo Sapiens
GGMVHHRHRSSST

SEQ ID NO: 35801 - protein, 13 aa, Homo Sapiens
GMVHHRHRSSSTR

SEQ ID NO: 35802 - protein, 13 aa, Homo Sapiens
MVHHRHRSSSTRS

SEQ ID NO: 35803 - protein, 13 aa, Homo Sapiens
VHHRHRSSSTRSG

SEQ ID NO: 35804 - protein, 13 aa, Homo Sapiens
HHRHRSSSTRSGG

SEQ ID NO: 35805 - protein, 13 aa, Homo Sapiens
HRHRSSSTRSGGG

SEQ ID NO: 35806 - protein, 13 aa, Homo Sapiens
RHRSSSTRSGGGD

SEQ ID NO: 35807 - protein, 13 aa, Homo Sapiens
HRSSSTRSGGGDL

SEQ ID NO: 35808 - protein, 13 aa, Homo Sapiens
RSSSTRSGGGDLT

SEQ ID NO: 35809 - protein, 13 aa, Homo Sapiens
SSSTRSGGGDLTL

SEQ ID NO: 35810 - protein, 13 aa, Homo Sapiens
SSTRSGGGDLTLG

SEQ ID NO: 35811 - protein, 13 aa, Homo Sapiens
STRSGGGDLTLGL

SEQ ID NO: 35812 - protein, 13 aa, Homo Sapiens
TRSGGGDLTLGLE

SEQ ID NO: 35813 - protein, 13 aa, Homo Sapiens
RSGGGDLTLGLEP

SEQ ID NO: 35814 - protein, 13 aa, Homo Sapiens
SGGGDLTLGLEPS

SEQ ID NO: 35815 - protein, 13 aa, Homo Sapiens
GGGDLTLGLEPSE

SEQ ID NO: 35816 - protein, 13 aa, Homo Sapiens
GGDLTLGLEPSEE

SEQ ID NO: 35817 - protein, 13 aa, Homo Sapiens
GDLTLGLEPSEEE

SEQ ID NO: 35818 - protein, 13 aa, Homo Sapiens
DLTLGLEPSEEEA

SEQ ID NO: 35819 - protein, 13 aa, Homo Sapiens
LTLGLEPSEEEAP

SEQ ID NO: 35820 - protein, 13 aa, Homo Sapiens
TLGLEPSEEEAPR

SEQ ID NO: 35821 - protein, 13 aa, Homo Sapiens
LGLEPSEEEAPRS

SEQ ID NO: 35822 - protein, 13 aa, Homo Sapiens
GLEPSEEEAPRSP

SEQ ID NO: 35823 - protein, 13 aa, Homo Sapiens
LEPSEEEAPRSPL

SEQ ID NO: 35824 - protein, 13 aa, Homo Sapiens
EPSEEEAPRSPLA

SEQ ID NO: 35825 - protein, 13 aa, Homo Sapiens
PSEEEAPRSPLAP

SEQ ID NO: 35826 - protein, 13 aa, Homo Sapiens
SEEEAPRSPLAPS

SEQ ID NO: 35827 - protein, 13 aa, Homo Sapiens
EEEAPRSPLAPSE

SEQ ID NO: 35828 - protein, 13 aa, Homo Sapiens
EEAPRSPLAPSEG

SEQ ID NO: 35829 - protein, 13 aa, Homo Sapiens
EAPRSPLAPSEGA

SEQ ID NO: 35830 - protein, 13 aa, Homo Sapiens
APRSPLAPSEGAG

SEQ ID NO: 35831 - protein, 13 aa, Homo Sapiens
PRSPLAPSEGAGS

SEQ ID NO: 35832 - protein, 13 aa, Homo Sapiens
RSPLAPSEGAGSD

SEQ ID NO: 35833 - protein, 13 aa, Homo Sapiens
SPLAPSEGAGSDV

SEQ ID NO: 35834 - protein, 13 aa, Homo Sapiens
PLAPSEGAGSDVF

SEQ ID NO: 35835 - protein, 13 aa, Homo Sapiens
LAPSEGAGSDVFD

SEQ ID NO: 35836 - protein, 13 aa, Homo Sapiens
APSEGAGSDVFDG

SEQ ID NO: 35837 - protein, 13 aa, Homo Sapiens
PSEGAGSDVFDGD

SEQ ID NO: 35838 - protein, 13 aa, Homo Sapiens
SEGAGSDVFDGDL

SEQ ID NO: 35839 - protein, 13 aa, Homo Sapiens
EGAGSDVFDGDLG

SEQ ID NO: 35840 - protein, 13 aa, Homo Sapiens
GAGSDVFDGDLGM

SEQ ID NO: 35841 - protein, 13 aa, Homo Sapiens
AGSDVFDGDLGMG

SEQ ID NO: 35842 - protein, 13 aa, Homo Sapiens
GSDVFDGDLGMGA

SEQ ID NO: 35843 - protein, 13 aa, Homo Sapiens
SDVFDGDLGMGAA

SEQ ID NO: 35844 - protein, 13 aa, Homo Sapiens
DVFDGDLGMGAAK

SEQ ID NO: 35845 - protein, 13 aa, Homo Sapiens
VFDGDLGMGAAKG

SEQ ID NO: 35846 - protein, 13 aa, Homo Sapiens
FDGDLGMGAAKGL

SEQ ID NO: 35847 - protein, 13 aa, Homo Sapiens
DGDLGMGAAKGLQ

SEQ ID NO: 35848 - protein, 13 aa, Homo Sapiens
GDLGMGAAKGLQS

SEQ ID NO: 35849 - protein, 13 aa, Homo Sapiens
DLGMGAAKGLQSL

SEQ ID NO: 35850 - protein, 13 aa, Homo Sapiens
LGMGAAKGLQSLP

SEQ ID NO: 35851 - protein, 13 aa, Homo Sapiens
GMGAAKGLQSLPT

SEQ ID NO: 35852 - protein, 13 aa, Homo Sapiens
MGAAKGLQSLPTH

SEQ ID NO: 35853 - protein, 13 aa, Homo Sapiens
GAAKGLQSLPTHD

SEQ ID NO: 35854 - protein, 13 aa, Homo Sapiens
AAKGLQSLPTHDP

SEQ ID NO: 35855 - protein, 13 aa, Homo Sapiens
AKGLQSLPTHDPS

SEQ ID NO: 35856 - protein, 13 aa, Homo Sapiens
KGLQSLPTHDPSP

SEQ ID NO: 35857 - protein, 13 aa, Homo Sapiens
GLQSLPTHDPSPL

SEQ ID NO: 35858 - protein, 13 aa, Homo Sapiens
LQSLPTHDPSPLQ

SEQ ID NO: 35859 - protein, 13 aa, Homo Sapiens
QSLPTHDPSPLQR

SEQ ID NO: 35860 - protein, 13 aa, Homo Sapiens
SLPTHDPSPLQRY

SEQ ID NO: 35861 - protein, 13 aa, Homo Sapiens
LPTHDPSPLQRYS

SEQ ID NO: 35862 - protein, 13 aa, Homo Sapiens
PTHDPSPLQRYSE

SEQ ID NO: 35863 - protein, 13 aa, Homo Sapiens
THDPSPLQRYSED

SEQ ID NO: 35864 - protein, 13 aa, Homo Sapiens
HDPSPLQRYSEDP

SEQ ID NO: 35865 - protein, 13 aa, Homo Sapiens
DPSPLQRYSEDPT

SEQ ID NO: 35866 - protein, 13 aa, Homo Sapiens
PSPLQRYSEDPTV

SEQ ID NO: 35867 - protein, 13 aa, Homo Sapiens
SPLQRYSEDPTVP

SEQ ID NO: 35868 - protein, 13 aa, Homo Sapiens
PLQRYSEDPTVPL

SEQ ID NO: 35869 - protein, 13 aa, Homo Sapiens
LQRYSEDPTVPLP

SEQ ID NO: 35870 - protein, 13 aa, Homo Sapiens
QRYSEDPTVPLPS

SEQ ID NO: 35871 - protein, 13 aa, Homo Sapiens
RYSEDPTVPLPSE

SEQ ID NO: 35872 - protein, 13 aa, Homo Sapiens
YSEDPTVPLPSET

SEQ ID NO: 35873 - protein, 13 aa, Homo Sapiens
SEDPTVPLPSETD

SEQ ID NO: 35874 - protein, 13 aa, Homo Sapiens
EDPTVPLPSETDG

SEQ ID NO: 35875 - protein, 13 aa, Homo Sapiens
DPTVPLPSETDGY

SEQ ID NO: 35876 - protein, 13 aa, Homo Sapiens
PTVPLPSETDGYV

SEQ ID NO: 35877 - protein, 13 aa, Homo Sapiens
TVPLPSETDGYVA

SEQ ID NO: 35878 - protein, 13 aa, Homo Sapiens
VPLPSETDGYVAP

SEQ ID NO: 35879 - protein, 13 aa, Homo Sapiens
PLPSETDGYVAPL

SEQ ID NO: 35880 - protein, 13 aa, Homo Sapiens
LPSETDGYVAPLT

SEQ ID NO: 35881 - protein, 13 aa, Homo Sapiens
PSETDGYVAPLTC

SEQ ID NO: 35882 - protein, 13 aa, Homo Sapiens
SETDGYVAPLTCS

SEQ ID NO: 35883 - protein, 13 aa, Homo Sapiens
ETDGYVAPLTCSP

SEQ ID NO: 35884 - protein, 13 aa, Homo Sapiens
TDGYVAPLTCSPQ

SEQ ID NO: 35885 - protein, 13 aa, Homo Sapiens
DGYVAPLTCSPQP

SEQ ID NO: 35886 - protein, 13 aa, Homo Sapiens
GYVAPLTCSPQPE

SEQ ID NO: 35887 - protein, 13 aa, Homo Sapiens
YVAPLTCSPQPEY

SEQ ID NO: 35888 - protein, 13 aa, Homo Sapiens
VAPLTCSPQPEYV

SEQ ID NO: 35889 - protein, 13 aa, Homo Sapiens
APLTCSPQPEYVN

SEQ ID NO: 35890 - protein, 13 aa, Homo Sapiens
PLTCSPQPEYVNQ

SEQ ID NO: 35891 - protein, 13 aa, Homo Sapiens
LTCSPQPEYVNQP

SEQ ID NO: 35892 - protein, 13 aa, Homo Sapiens
TCSPQPEYVNQPD

SEQ ID NO: 35893 - protein, 13 aa, Homo Sapiens
CSPQPEYVNQPDV

SEQ ID NO: 35894 - protein, 13 aa, Homo Sapiens
SPQPEYVNQPDVR

SEQ ID NO: 35895 - protein, 13 aa, Homo Sapiens
PQPEYVNQPDVRP

SEQ ID NO: 35896 - protein, 13 aa, Homo Sapiens
QPEYVNQPDVRPQ

SEQ ID NO: 35897 - protein, 13 aa, Homo Sapiens
PEYVNQPDVRPQP

SEQ ID NO: 35898 - protein, 13 aa, Homo Sapiens
EYVNQPDVRPQPP

SEQ ID NO: 35899 - protein, 13 aa, Homo Sapiens
YVNQPDVRPQPPS

SEQ ID NO: 35900 - protein, 13 aa, Homo Sapiens
VNQPDVRPQPPSP

SEQ ID NO: 35901 - protein, 13 aa, Homo Sapiens
NQPDVRPQPPSPR

SEQ ID NO: 35902 - protein, 13 aa, Homo Sapiens
QPDVRPQPPSPRE

SEQ ID NO: 35903 - protein, 13 aa, Homo Sapiens
PDVRPQPPSPREG

SEQ ID NO: 35904 - protein, 13 aa, Homo Sapiens
DVRPQPPSPREGP

SEQ ID NO: 35905 - protein, 13 aa, Homo Sapiens
VRPQPPSPREGPL

SEQ ID NO: 35906 - protein, 13 aa, Homo Sapiens
RPQPPSPREGPLP

SEQ ID NO: 35907 - protein, 13 aa, Homo Sapiens
PQPPSPREGPLPA

SEQ ID NO: 35908 - protein, 13 aa, Homo Sapiens
QPPSPREGPLPAA

SEQ ID NO: 35909 - protein, 13 aa, Homo Sapiens
PPSPREGPLPAAR

SEQ ID NO: 35910 - protein, 13 aa, Homo Sapiens
PSPREGPLPAARP

SEQ ID NO: 35911 - protein, 13 aa, Homo Sapiens
SPREGPLPAARPA

SEQ ID NO: 35912 - protein, 13 aa, Homo Sapiens
PREGPLPAARPAG

SEQ ID NO: 35913 - protein, 13 aa, Homo Sapiens
REGPLPAARPAGA

SEQ ID NO: 35914 - protein, 13 aa, Homo Sapiens
EGPLPAARPAGAT

SEQ ID NO: 35915 - protein, 13 aa, Homo Sapiens
GPLPAARPAGATL

SEQ ID NO: 35916 - protein, 13 aa, Homo Sapiens
PLPAARPAGATLE

SEQ ID NO: 35917 - protein, 13 aa, Homo Sapiens
LPAARPAGATLER

SEQ ID NO: 35918 - protein, 13 aa, Homo Sapiens
PAARPAGATLERP

SEQ ID NO: 35919 - protein, 13 aa, Homo Sapiens
AARPAGATLERPK

SEQ ID NO: 35920 - protein, 13 aa, Homo Sapiens
ARPAGATLERPKT

SEQ ID NO: 35921 - protein, 13 aa, Homo Sapiens
RPAGATLERPKTL

SEQ ID NO: 35922 - protein, 13 aa, Homo Sapiens
PAGATLERPKTLS

SEQ ID NO: 35923 - protein, 13 aa, Homo Sapiens
AGATLERPKTLSP

SEQ ID NO: 35924 - protein, 13 aa, Homo Sapiens
GATLERPKTLSPG

SEQ ID NO: 35925 - protein, 13 aa, Homo Sapiens
ATLERPKTLSPGK

SEQ ID NO: 35926 - protein, 13 aa, Homo Sapiens
TLERPKTLSPGKN

SEQ ID NO: 35927 - protein, 13 aa, Homo Sapiens
LERPKTLSPGKNG

SEQ ID NO: 35928 - protein, 13 aa, Homo Sapiens
ERPKTLSPGKNGV

SEQ ID NO: 35929 - protein, 13 aa, Homo Sapiens
RPKTLSPGKNGVV

SEQ ID NO: 35930 - protein, 13 aa, Homo Sapiens
PKTLSPGKNGVVK

SEQ ID NO: 35931 - protein, 13 aa, Homo Sapiens
KTLSPGKNGVVKD

SEQ ID NO: 35932 - protein, 13 aa, Homo Sapiens
TLSPGKNGVVKDV

SEQ ID NO: 35933 - protein, 13 aa, Homo Sapiens
LSPGKNGVVKDVF

SEQ ID NO: 35934 - protein, 13 aa, Homo Sapiens
SPGKNGVVKDVFA

SEQ ID NO: 35935 - protein, 13 aa, Homo Sapiens
PGKNGVVKDVFAF

SEQ ID NO: 35936 - protein, 13 aa, Homo Sapiens
GKNGVVKDVFAFG

SEQ ID NO: 35937 - protein, 13 aa, Homo Sapiens
KNGVVKDVFAFGG

SEQ ID NO: 35938 - protein, 13 aa, Homo Sapiens
NGVVKDVFAFGGA

SEQ ID NO: 35939 - protein, 13 aa, Homo Sapiens
GVVKDVFAFGGAV

SEQ ID NO: 35940 - protein, 13 aa, Homo Sapiens
VVKDVFAFGGAVE

SEQ ID NO: 35941 - protein, 13 aa, Homo Sapiens
VKDVFAFGGAVEN

SEQ ID NO: 35942 - protein, 13 aa, Homo Sapiens
KDVFAFGGAVENP

SEQ ID NO: 35943 - protein, 13 aa, Homo Sapiens
DVFAFGGAVENPE

SEQ ID NO: 35944 - protein, 13 aa, Homo Sapiens
VFAFGGAVENPEY

SEQ ID NO: 35945 - protein, 13 aa, Homo Sapiens
FAFGGAVENPEYL

SEQ ID NO: 35946 - protein, 13 aa, Homo Sapiens
AFGGAVENPEYLT

SEQ ID NO: 35947 - protein, 13 aa, Homo Sapiens
FGGAVENPEYLTP

SEQ ID NO: 35948 - protein, 13 aa, Homo Sapiens
GGAVENPEYLTPQ

SEQ ID NO: 35949 - protein, 13 aa, Homo Sapiens
GAVENPEYLTPQG

SEQ ID NO: 35950 - protein, 13 aa, Homo Sapiens
AVENPEYLTPQGG

SEQ ID NO: 35951 - protein, 13 aa, Homo Sapiens
VENPEYLTPQGGA

SEQ ID NO: 35952 - protein, 13 aa, Homo Sapiens
ENPEYLTPQGGAA

SEQ ID NO: 35953 - protein, 13 aa, Homo Sapiens
NPEYLTPQGGAAP

SEQ ID NO: 35954 - protein, 13 aa, Homo Sapiens
PEYLTPQGGAAPQ

SEQ ID NO: 35955 - protein, 13 aa, Homo Sapiens
EYLTPQGGAAPQP

SEQ ID NO: 35956 - protein, 13 aa, Homo Sapiens
YLTPQGGAAPQPH

SEQ ID NO: 35957 - protein, 13 aa, Homo Sapiens
LTPQGGAAPQPHP

SEQ ID NO: 35958 - protein, 13 aa, Homo Sapiens
TPQGGAAPQPHPP

SEQ ID NO: 35959 - protein, 13 aa, Homo Sapiens
PQGGAAPQPHPPP

SEQ ID NO: 35960 - protein, 13 aa, Homo Sapiens
QGGAAPQPHPPPA

SEQ ID NO: 35961 - protein, 13 aa, Homo Sapiens
GGAAPQPHPPPAF

SEQ ID NO: 35962 - protein, 13 aa, Homo Sapiens
GAAPQPHPPPAFS

SEQ ID NO: 35963 - protein, 13 aa, Homo Sapiens
AAPQPHPPPAFSP

SEQ ID NO: 35964 - protein, 13 aa, Homo Sapiens
APQPHPPPAFSPA

SEQ ID NO: 35965 - protein, 13 aa, Homo Sapiens
PQPHPPPAFSPAF

SEQ ID NO: 35966 - protein, 13 aa, Homo Sapiens
QPHPPPAFSPAFD

SEQ ID NO: 35967 - protein, 13 aa, Homo Sapiens
PHPPPAFSPAFDN

SEQ ID NO: 35968 - protein, 13 aa, Homo Sapiens
HPPPAFSPAFDNL

SEQ ID NO: 35969 - protein, 13 aa, Homo Sapiens
PPPAFSPAFDNLY

SEQ ID NO: 35970 - protein, 13 aa, Homo Sapiens
PPAFSPAFDNLYY

SEQ ID NO: 35971 - protein, 13 aa, Homo Sapiens
PAFSPAFDNLYYW

SEQ ID NO: 35972 - protein, 13 aa, Homo Sapiens
AFSPAFDNLYYWD

SEQ ID NO: 35973 - protein, 13 aa, Homo Sapiens
FSPAFDNLYYWDQ

SEQ ID NO: 35974 - protein, 13 aa, Homo Sapiens
SPAFDNLYYWDQD

SEQ ID NO: 35975 - protein, 13 aa, Homo Sapiens
PAFDNLYYWDQDP

SEQ ID NO: 35976 - protein, 13 aa, Homo Sapiens
AFDNLYYWDQDPP

SEQ ID NO: 35977 - protein, 13 aa, Homo Sapiens
FDNLYYWDQDPPE

SEQ ID NO: 35978 - protein, 13 aa, Homo Sapiens
DNLYYWDQDPPER

SEQ ID NO: 35979 - protein, 13 aa, Homo Sapiens
NLYYWDQDPPERG

SEQ ID NO: 35980 - protein, 13 aa, Homo Sapiens
LYYWDQDPPERGA

SEQ ID NO: 35981 - protein, 13 aa, Homo Sapiens
YYWDQDPPERGAP

SEQ ID NO: 35982 - protein, 13 aa, Homo Sapiens
YWDQDPPERGAPP

SEQ ID NO: 35983 - protein, 13 aa, Homo Sapiens
WDQDPPERGAPPS

SEQ ID NO: 35984 - protein, 13 aa, Homo Sapiens
DQDPPERGAPPST

SEQ ID NO: 35985 - protein, 13 aa, Homo Sapiens
QDPPERGAPPSTF

SEQ ID NO: 35986 - protein, 13 aa, Homo Sapiens
DPPERGAPPSTFK

SEQ ID NO: 35987 - protein, 13 aa, Homo Sapiens
PPERGAPPSTFKG

SEQ ID NO: 35988 - protein, 13 aa, Homo Sapiens
PERGAPPSTFKGT

SEQ ID NO: 35989 - protein, 13 aa, Homo Sapiens
ERGAPPSTFKGTP

SEQ ID NO: 35990 - protein, 13 aa, Homo Sapiens
RGAPPSTFKGTPT

SEQ ID NO: 35991 - protein, 13 aa, Homo Sapiens
GAPPSTFKGTPTA

SEQ ID NO: 35992 - protein, 13 aa, Homo Sapiens
APPSTFKGTPTAE

SEQ ID NO: 35993 - protein, 13 aa, Homo Sapiens
PPSTFKGTPTAEN

SEQ ID NO: 35994 - protein, 13 aa, Homo Sapiens
PSTFKGTPTAENP

SEQ ID NO: 35995 - protein, 13 aa, Homo Sapiens
STFKGTPTAENPE

SEQ ID NO: 35996 - protein, 13 aa, Homo Sapiens
TFKGTPTAENPEY

SEQ ID NO: 35997 - protein, 13 aa, Homo Sapiens
FKGTPTAENPEYL

SEQ ID NO: 35998 - protein, 13 aa, Homo Sapiens
KGTPTAENPEYLG

SEQ ID NO: 35999 - protein, 13 aa, Homo Sapiens
GTPTAENPEYLGL

SEQ ID NO: 36000 - protein, 13 aa, Homo Sapiens
TPTAENPEYLGLD

SEQ ID NO: 36001 - protein, 13 aa, Homo Sapiens
PTAENPEYLGLDV

SEQ ID NO: 36002 - protein, 13 aa, Homo Sapiens
TAENPEYLGLDVP

SEQ ID NO: 36003 - protein, 13 aa, Homo Sapiens
AENPEYLGLDVPV

SEQ ID NO: 36004 - protein, 14 aa, Homo Sapiens
MELAALCRWGLLLA

SEQ ID NO: 36005 - protein, 14 aa, Homo Sapiens
ELAALCRWGLLLAL

SEQ ID NO: 36006 - protein, 14 aa, Homo Sapiens
LAALCRWGLLLALL

SEQ ID NO: 36007 - protein, 14 aa, Homo Sapiens
AALCRWGLLLALLP

SEQ ID NO: 36008 - protein, 14 aa, Homo Sapiens
ALCRWGLLLALLPP

SEQ ID NO: 36009 - protein, 14 aa, Homo Sapiens
LCRWGLLLALLPPG

SEQ ID NO: 36010 - protein, 14 aa, Homo Sapiens
CRWGLLLALLPPGA

SEQ ID NO: 36011 - protein, 14 aa, Homo Sapiens
RWGLLLALLPPGAA

SEQ ID NO: 36012 - protein, 14 aa, Homo Sapiens
WGLLLALLPPGAAS

SEQ ID NO: 36013 - protein, 14 aa, Homo Sapiens
GLLLALLPPGAAST

SEQ ID NO: 36014 - protein, 14 aa, Homo Sapiens
LLLALLPPGAASTQ

SEQ ID NO: 36015 - protein, 14 aa, Homo Sapiens
LLALLPPGAASTQV

SEQ ID NO: 36016 - protein, 14 aa, Homo Sapiens
LALLPPGAASTQVC

SEQ ID NO: 36017 - protein, 14 aa, Homo Sapiens
ALLPPGAASTQVCT

SEQ ID NO: 36018 - protein, 14 aa, Homo Sapiens
LLPPGAASTQVCTG

SEQ ID NO: 36019 - protein, 14 aa, Homo Sapiens
LPPGAASTQVCTGT

SEQ ID NO: 36020 - protein, 14 aa, Homo Sapiens
PPGAASTQVCTGTD

SEQ ID NO: 36021 - protein, 14 aa, Homo Sapiens
PGAASTQVCTGTDM

SEQ ID NO: 36022 - protein, 14 aa, Homo Sapiens
GAASTQVCTGTDMK

SEQ ID NO: 36023 - protein, 14 aa, Homo Sapiens
AASTQVCTGTDMKL

SEQ ID NO: 36024 - protein, 14 aa, Homo Sapiens
ASTQVCTGTDMKLR

SEQ ID NO: 36025 - protein, 14 aa, Homo Sapiens
STQVCTGTDMKLRL

SEQ ID NO: 36026 - protein, 14 aa, Homo Sapiens
TQVCTGTDMKLRLP

SEQ ID NO: 36027 - protein, 14 aa, Homo Sapiens
QVCTGTDMKLRLPA

SEQ ID NO: 36028 - protein, 14 aa, Homo Sapiens
VCTGTDMKLRLPAS

SEQ ID NO: 36029 - protein, 14 aa, Homo Sapiens
CTGTDMKLRLPASP

SEQ ID NO: 36030 - protein, 14 aa, Homo Sapiens
TGTDMKLRLPASPE

SEQ ID NO: 36031 - protein, 14 aa, Homo Sapiens
GTDMKLRLPASPET

SEQ ID NO: 36032 - protein, 14 aa, Homo Sapiens
TDMKLRLPASPETH

SEQ ID NO: 36033 - protein, 14 aa, Homo Sapiens
DMKLRLPASPETHL

SEQ ID NO: 36034 - protein, 14 aa, Homo Sapiens
MKLRLPASPETHLD

SEQ ID NO: 36035 - protein, 14 aa, Homo Sapiens
KLRLPASPETHLDM

SEQ ID NO: 36036 - protein, 14 aa, Homo Sapiens
LRLPASPETHLDML

SEQ ID NO: 36037 - protein, 14 aa, Homo Sapiens
RLPASPETHLDMLR

SEQ ID NO: 36038 - protein, 14 aa, Homo Sapiens
LPASPETHLDMLRH

SEQ ID NO: 36039 - protein, 14 aa, Homo Sapiens
PASPETHLDMLRHL

SEQ ID NO: 36040 - protein, 14 aa, Homo Sapiens
ASPETHLDMLRHLY

SEQ ID NO: 36041 - protein, 14 aa, Homo Sapiens
SPETHLDMLRHLYQ

SEQ ID NO: 36042 - protein, 14 aa, Homo Sapiens
PETHLDMLRHLYQG

SEQ ID NO: 36043 - protein, 14 aa, Homo Sapiens
ETHLDMLRHLYQGC

SEQ ID NO: 36044 - protein, 14 aa, Homo Sapiens
THLDMLRHLYQGCQ

SEQ ID NO: 36045 - protein, 14 aa, Homo Sapiens
HLDMLRHLYQGCQV

SEQ ID NO: 36046 - protein, 14 aa, Homo Sapiens
LDMLRHLYQGCQVV

SEQ ID NO: 36047 - protein, 14 aa, Homo Sapiens
DMLRHLYQGCQVVQ

SEQ ID NO: 36048 - protein, 14 aa, Homo Sapiens
MLRHLYQGCQVVQG

SEQ ID NO: 36049 - protein, 14 aa, Homo Sapiens
LRHLYQGCQVVQGN

SEQ ID NO: 36050 - protein, 14 aa, Homo Sapiens
RHLYQGCQVVQGNL

SEQ ID NO: 36051 - protein, 14 aa, Homo Sapiens
HLYQGCQVVQGNLE

SEQ ID NO: 36052 - protein, 14 aa, Homo Sapiens
LYQGCQVVQGNLEL

SEQ ID NO: 36053 - protein, 14 aa, Homo Sapiens
YQGCQVVQGNLELT

SEQ ID NO: 36054 - protein, 14 aa, Homo Sapiens
QGCQVVQGNLELTY

SEQ ID NO: 36055 - protein, 14 aa, Homo Sapiens
GCQVVQGNLELTYL

SEQ ID NO: 36056 - protein, 14 aa, Homo Sapiens
CQVVQGNLELTYLP

SEQ ID NO: 36057 - protein, 14 aa, Homo Sapiens
QVVQGNLELTYLPT

SEQ ID NO: 36058 - protein, 14 aa, Homo Sapiens
VVQGNLELTYLPTN

SEQ ID NO: 36059 - protein, 14 aa, Homo Sapiens
VQGNLELTYLPTNA

SEQ ID NO: 36060 - protein, 14 aa, Homo Sapiens
QGNLELTYLPTNAS

SEQ ID NO: 36061 - protein, 14 aa, Homo Sapiens
GNLELTYLPTNASL

SEQ ID NO: 36062 - protein, 14 aa, Homo Sapiens
NLELTYLPTNASLS

SEQ ID NO: 36063 - protein, 14 aa, Homo Sapiens
LELTYLPTNASLSF

SEQ ID NO: 36064 - protein, 14 aa, Homo Sapiens
ELTYLPTNASLSFL

SEQ ID NO: 36065 - protein, 14 aa, Homo Sapiens
LTYLPTNASLSFLQ

SEQ ID NO: 36066 - protein, 14 aa, Homo Sapiens
TYLPTNASLSFLQD

SEQ ID NO: 36067 - protein, 14 aa, Homo Sapiens
YLPTNASLSFLQDI

SEQ ID NO: 36068 - protein, 14 aa, Homo Sapiens
LPTNASLSFLQDIQ

SEQ ID NO: 36069 - protein, 14 aa, Homo Sapiens
PTNASLSFLQDIQE

SEQ ID NO: 36070 - protein, 14 aa, Homo Sapiens
TNASLSFLQDIQEV

SEQ ID NO: 36071 - protein, 14 aa, Homo Sapiens
NASLSFLQDIQEVQ

SEQ ID NO: 36072 - protein, 14 aa, Homo Sapiens
ASLSFLQDIQEVQG

SEQ ID NO: 36073 - protein, 14 aa, Homo Sapiens
SLSFLQDIQEVQGY

SEQ ID NO: 36074 - protein, 14 aa, Homo Sapiens
LSFLQDIQEVQGYV

SEQ ID NO: 36075 - protein, 14 aa, Homo Sapiens
SFLQDIQEVQGYVL

SEQ ID NO: 36076 - protein, 14 aa, Homo Sapiens
FLQDIQEVQGYVLI

SEQ ID NO: 36077 - protein, 14 aa, Homo Sapiens
LQDIQEVQGYVLIA

SEQ ID NO: 36078 - protein, 14 aa, Homo Sapiens
QDIQEVQGYVLIAH

SEQ ID NO: 36079 - protein, 14 aa, Homo Sapiens
DIQEVQGYVLIAHN

SEQ ID NO: 36080 - protein, 14 aa, Homo Sapiens
IQEVQGYVLIAHNQ

SEQ ID NO: 36081 - protein, 14 aa, Homo Sapiens
QEVQGYVLIAHNQV

SEQ ID NO: 36082 - protein, 14 aa, Homo Sapiens
EVQGYVLIAHNQVR

SEQ ID NO: 36083 - protein, 14 aa, Homo Sapiens
VQGYVLIAHNQVRQ

SEQ ID NO: 36084 - protein, 14 aa, Homo Sapiens
QGYVLIAHNQVRQV

SEQ ID NO: 36085 - protein, 14 aa, Homo Sapiens
GYVLIAHNQVRQVP

SEQ ID NO: 36086 - protein, 14 aa, Homo Sapiens
YVLIAHNQVRQVPL

SEQ ID NO: 36087 - protein, 14 aa, Homo Sapiens
VLIAHNQVRQVPLQ

SEQ ID NO: 36088 - protein, 14 aa, Homo Sapiens
LIAHNQVRQVPLQR

SEQ ID NO: 36089 - protein, 14 aa, Homo Sapiens
IAHNQVRQVPLQRL

SEQ ID NO: 36090 - protein, 14 aa, Homo Sapiens
AHNQVRQVPLQRLR

SEQ ID NO: 36091 - protein, 14 aa, Homo Sapiens
HNQVRQVPLQRLRI

SEQ ID NO: 36092 - protein, 14 aa, Homo Sapiens
NQVRQVPLQRLRIV

SEQ ID NO: 36093 - protein, 14 aa, Homo Sapiens
QVRQVPLQRLRIVR

SEQ ID NO: 36094 - protein, 14 aa, Homo Sapiens
VRQVPLQRLRIVRG

SEQ ID NO: 36095 - protein, 14 aa, Homo Sapiens
RQVPLQRLRIVRGT

SEQ ID NO: 36096 - protein, 14 aa, Homo Sapiens
QVPLQRLRIVRGTQ

SEQ ID NO: 36097 - protein, 14 aa, Homo Sapiens
VPLQRLRIVRGTQL

SEQ ID NO: 36098 - protein, 14 aa, Homo Sapiens
PLQRLRIVRGTQLF

SEQ ID NO: 36099 - protein, 14 aa, Homo Sapiens
LQRLRIVRGTQLFE

SEQ ID NO: 36100 - protein, 14 aa, Homo Sapiens
QRLRIVRGTQLFED

SEQ ID NO: 36101 - protein, 14 aa, Homo Sapiens
RLRIVRGTQLFEDN

SEQ ID NO: 36102 - protein, 14 aa, Homo Sapiens
LRIVRGTQLFEDNY

SEQ ID NO: 36103 - protein, 14 aa, Homo Sapiens
RIVRGTQLFEDNYA

SEQ ID NO: 36104 - protein, 14 aa, Homo Sapiens
IVRGTQLFEDNYAL

SEQ ID NO: 36105 - protein, 14 aa, Homo Sapiens
VRGTQLFEDNYALA

SEQ ID NO: 36106 - protein, 14 aa, Homo Sapiens
RGTQLFEDNYALAV

SEQ ID NO: 36107 - protein, 14 aa, Homo Sapiens
GTQLFEDNYALAVL

SEQ ID NO: 36108 - protein, 14 aa, Homo Sapiens
TQLFEDNYALAVLD

SEQ ID NO: 36109 - protein, 14 aa, Homo Sapiens
QLFEDNYALAVLDN

SEQ ID NO: 36110 - protein, 14 aa, Homo Sapiens
LFEDNYALAVLDNG

SEQ ID NO: 36111 - protein, 14 aa, Homo Sapiens
FEDNYALAVLDNGD

SEQ ID NO: 36112 - protein, 14 aa, Homo Sapiens
EDNYALAVLDNGDP

SEQ ID NO: 36113 - protein, 14 aa, Homo Sapiens
DNYALAVLDNGDPL

SEQ ID NO: 36114 - protein, 14 aa, Homo Sapiens
NYALAVLDNGDPLN

SEQ ID NO: 36115 - protein, 14 aa, Homo Sapiens
YALAVLDNGDPLNN

SEQ ID NO: 36116 - protein, 14 aa, Homo Sapiens
ALAVLDNGDPLNNT

SEQ ID NO: 36117 - protein, 14 aa, Homo Sapiens
LAVLDNGDPLNNTT

SEQ ID NO: 36118 - protein, 14 aa, Homo Sapiens
AVLDNGDPLNNTTP

SEQ ID NO: 36119 - protein, 14 aa, Homo Sapiens
VLDNGDPLNNTTPV

SEQ ID NO: 36120 - protein, 14 aa, Homo Sapiens
LDNGDPLNNTTPVT

SEQ ID NO: 36121 - protein, 14 aa, Homo Sapiens
DNGDPLNNTTPVTG

SEQ ID NO: 36122 - protein, 14 aa, Homo Sapiens
NGDPLNNTTPVTGA

SEQ ID NO: 36123 - protein, 14 aa, Homo Sapiens
GDPLNNTTPVTGAS

SEQ ID NO: 36124 - protein, 14 aa, Homo Sapiens
DPLNNTTPVTGASP

SEQ ID NO: 36125 - protein, 14 aa, Homo Sapiens
PLNNTTPVTGASPG

SEQ ID NO: 36126 - protein, 14 aa, Homo Sapiens
LNNTTPVTGASPGG

SEQ ID NO: 36127 - protein, 14 aa, Homo Sapiens
NNTTPVTGASPGGL

SEQ ID NO: 36128 - protein, 14 aa, Homo Sapiens
NTTPVTGASPGGLR

SEQ ID NO: 36129 - protein, 14 aa, Homo Sapiens
TTPVTGASPGGLRE

SEQ ID NO: 36130 - protein, 14 aa, Homo Sapiens
TPVTGASPGGLREL

SEQ ID NO: 36131 - protein, 14 aa, Homo Sapiens
PVTGASPGGLRELQ

SEQ ID NO: 36132 - protein, 14 aa, Homo Sapiens
VTGASPGGLRELQL

SEQ ID NO: 36133 - protein, 14 aa, Homo Sapiens
TGASPGGLRELQLR

SEQ ID NO: 36134 - protein, 14 aa, Homo Sapiens
GASPGGLRELQLRS

SEQ ID NO: 36135 - protein, 14 aa, Homo Sapiens
ASPGGLRELQLRSL

SEQ ID NO: 36136 - protein, 14 aa, Homo Sapiens
SPGGLRELQLRSLT

SEQ ID NO: 36137 - protein, 14 aa, Homo Sapiens
PGGLRELQLRSLTE

SEQ ID NO: 36138 - protein, 14 aa, Homo Sapiens
GGLRELQLRSLTEI

SEQ ID NO: 36139 - protein, 14 aa, Homo Sapiens
GLRELQLRSLTEIL

SEQ ID NO: 36140 - protein, 14 aa, Homo Sapiens
LRELQLRSLTEILK

SEQ ID NO: 36141 - protein, 14 aa, Homo Sapiens
RELQLRSLTEILKG

SEQ ID NO: 36142 - protein, 14 aa, Homo Sapiens
ELQLRSLTEILKGG

SEQ ID NO: 36143 - protein, 14 aa, Homo Sapiens
LQLRSLTEILKGGV

SEQ ID NO: 36144 - protein, 14 aa, Homo Sapiens
QLRSLTEILKGGVL

SEQ ID NO: 36145 - protein, 14 aa, Homo Sapiens
LRSLTEILKGGVLI

SEQ ID NO: 36146 - protein, 14 aa, Homo Sapiens
RSLTEILKGGVLIQ

SEQ ID NO: 36147 - protein, 14 aa, Homo Sapiens
SLTEILKGGVLIQR

SEQ ID NO: 36148 - protein, 14 aa, Homo Sapiens
LTEILKGGVLIQRN

SEQ ID NO: 36149 - protein, 14 aa, Homo Sapiens
TEILKGGVLIQRNP

SEQ ID NO: 36150 - protein, 14 aa, Homo Sapiens
EILKGGVLIQRNPQ

SEQ ID NO: 36151 - protein, 14 aa, Homo Sapiens
ILKGGVLIQRNPQL

SEQ ID NO: 36152 - protein, 14 aa, Homo Sapiens
LKGGVLIQRNPQLC

SEQ ID NO: 36153 - protein, 14 aa, Homo Sapiens
KGGVLIQRNPQLCY

SEQ ID NO: 36154 - protein, 14 aa, Homo Sapiens
GGVLIQRNPQLCYQ

SEQ ID NO: 36155 - protein, 14 aa, Homo Sapiens
GVLIQRNPQLCYQD

SEQ ID NO: 36156 - protein, 14 aa, Homo Sapiens
VLIQRNPQLCYQDT

SEQ ID NO: 36157 - protein, 14 aa, Homo Sapiens
LIQRNPQLCYQDTI

SEQ ID NO: 36158 - protein, 14 aa, Homo Sapiens
IQRNPQLCYQDTIL

SEQ ID NO: 36159 - protein, 14 aa, Homo Sapiens
QRNPQLCYQDTILW

SEQ ID NO: 36160 - protein, 14 aa, Homo Sapiens
RNPQLCYQDTILWK

SEQ ID NO: 36161 - protein, 14 aa, Homo Sapiens
NPQLCYQDTILWKD

SEQ ID NO: 36162 - protein, 14 aa, Homo Sapiens
PQLCYQDTILWKDI

SEQ ID NO: 36163 - protein, 14 aa, Homo Sapiens
QLCYQDTILWKDIF

SEQ ID NO: 36164 - protein, 14 aa, Homo Sapiens
LCYQDTILWKDIFH

SEQ ID NO: 36165 - protein, 14 aa, Homo Sapiens
CYQDTILWKDIFHK

SEQ ID NO: 36166 - protein, 14 aa, Homo Sapiens
YQDTILWKDIFHKN

SEQ ID NO: 36167 - protein, 14 aa, Homo Sapiens
QDTILWKDIFHKNN

SEQ ID NO: 36168 - protein, 14 aa, Homo Sapiens
DTILWKDIFHKNNQ

SEQ ID NO: 36169 - protein, 14 aa, Homo Sapiens
TILWKDIFHKNNQL

SEQ ID NO: 36170 - protein, 14 aa, Homo Sapiens
ILWKDIFHKNNQLA

SEQ ID NO: 36171 - protein, 14 aa, Homo Sapiens
LWKDIFHKNNQLAL

SEQ ID NO: 36172 - protein, 14 aa, Homo Sapiens
WKDIFHKNNQLALT

SEQ ID NO: 36173 - protein, 14 aa, Homo Sapiens
KDIFHKNNQLALTL

SEQ ID NO: 36174 - protein, 14 aa, Homo Sapiens
DIFHKNNQLALTLI

SEQ ID NO: 36175 - protein, 14 aa, Homo Sapiens
IFHKNNQLALTLID

SEQ ID NO: 36176 - protein, 14 aa, Homo Sapiens
FHKNNQLALTLIDT

SEQ ID NO: 36177 - protein, 14 aa, Homo Sapiens
HKNNQLALTLIDTN

SEQ ID NO: 36178 - protein, 14 aa, Homo Sapiens
KNNQLALTLIDTNR

SEQ ID NO: 36179 - protein, 14 aa, Homo Sapiens
NNQLALTLIDTNRS

SEQ ID NO: 36180 - protein, 14 aa, Homo Sapiens
NQLALTLIDTNRSR

SEQ ID NO: 36181 - protein, 14 aa, Homo Sapiens
QLALTLIDTNRSRA

SEQ ID NO: 36182 - protein, 14 aa, Homo Sapiens
LALTLIDTNRSRAC

SEQ ID NO: 36183 - protein, 14 aa, Homo Sapiens
ALTLIDTNRSRACH

SEQ ID NO: 36184 - protein, 14 aa, Homo Sapiens
LTLIDTNRSRACHP

SEQ ID NO: 36185 - protein, 14 aa, Homo Sapiens
TLIDTNRSRACHPC

SEQ ID NO: 36186 - protein, 14 aa, Homo Sapiens
LIDTNRSRACHPCS

SEQ ID NO: 36187 - protein, 14 aa, Homo Sapiens
IDTNRSRACHPCSP

SEQ ID NO: 36188 - protein, 14 aa, Homo Sapiens
DTNRSRACHPCSPM

SEQ ID NO: 36189 - protein, 14 aa, Homo Sapiens
TNRSRACHPCSPMC

SEQ ID NO: 36190 - protein, 14 aa, Homo Sapiens
NRSRACHPCSPMCK

SEQ ID NO: 36191 - protein, 14 aa, Homo Sapiens
RSRACHPCSPMCKG

SEQ ID NO: 36192 - protein, 14 aa, Homo Sapiens
SRACHPCSPMCKGS

SEQ ID NO: 36193 - protein, 14 aa, Homo Sapiens
RACHPCSPMCKGSR

SEQ ID NO: 36194 - protein, 14 aa, Homo Sapiens
ACHPCSPMCKGSRC

SEQ ID NO: 36195 - protein, 14 aa, Homo Sapiens
CHPCSPMCKGSRCW

SEQ ID NO: 36196 - protein, 14 aa, Homo Sapiens
HPCSPMCKGSRCWG

SEQ ID NO: 36197 - protein, 14 aa, Homo Sapiens
PCSPMCKGSRCWGE

SEQ ID NO: 36198 - protein, 14 aa, Homo Sapiens
CSPMCKGSRCWGES

SEQ ID NO: 36199 - protein, 14 aa, Homo Sapiens
SPMCKGSRCWGESS

SEQ ID NO: 36200 - protein, 14 aa, Homo Sapiens
PMCKGSRCWGESSE

SEQ ID NO: 36201 - protein, 14 aa, Homo Sapiens
MCKGSRCWGESSED

SEQ ID NO: 36202 - protein, 14 aa, Homo Sapiens
CKGSRCWGESSEDC

SEQ ID NO: 36203 - protein, 14 aa, Homo Sapiens
KGSRCWGESSEDCQ

SEQ ID NO: 36204 - protein, 14 aa, Homo Sapiens
GSRCWGESSEDCQS

SEQ ID NO: 36205 - protein, 14 aa, Homo Sapiens
SRCWGESSEDCQSL

SEQ ID NO: 36206 - protein, 14 aa, Homo Sapiens
RCWGESSEDCQSLT

SEQ ID NO: 36207 - protein, 14 aa, Homo Sapiens
CWGESSEDCQSLTR

SEQ ID NO: 36208 - protein, 14 aa, Homo Sapiens
WGESSEDCQSLTRT

SEQ ID NO: 36209 - protein, 14 aa, Homo Sapiens
GESSEDCQSLTRTV

SEQ ID NO: 36210 - protein, 14 aa, Homo Sapiens
ESSEDCQSLTRTVC

SEQ ID NO: 36211 - protein, 14 aa, Homo Sapiens
SSEDCQSLTRTVCA

SEQ ID NO: 36212 - protein, 14 aa, Homo Sapiens
SEDCQSLTRTVCAG

SEQ ID NO: 36213 - protein, 14 aa, Homo Sapiens
EDCQSLTRTVCAGG

SEQ ID NO: 36214 - protein, 14 aa, Homo Sapiens
DCQSLTRTVCAGGC

SEQ ID NO: 36215 - protein, 14 aa, Homo Sapiens
CQSLTRTVCAGGCA

SEQ ID NO: 36216 - protein, 14 aa, Homo Sapiens
QSLTRTVCAGGCAR

SEQ ID NO: 36217 - protein, 14 aa, Homo Sapiens
SLTRTVCAGGCARC

SEQ ID NO: 36218 - protein, 14 aa, Homo Sapiens
LTRTVCAGGCARCK

SEQ ID NO: 36219 - protein, 14 aa, Homo Sapiens
TRTVCAGGCARCKG

SEQ ID NO: 36220 - protein, 14 aa, Homo Sapiens
RTVCAGGCARCKGP

SEQ ID NO: 36221 - protein, 14 aa, Homo Sapiens
TVCAGGCARCKGPL

SEQ ID NO: 36222 - protein, 14 aa, Homo Sapiens
VCAGGCARCKGPLP

SEQ ID NO: 36223 - protein, 14 aa, Homo Sapiens
CAGGCARCKGPLPT

SEQ ID NO: 36224 - protein, 14 aa, Homo Sapiens
AGGCARCKGPLPTD

SEQ ID NO: 36225 - protein, 14 aa, Homo Sapiens
GGCARCKGPLPTDC

SEQ ID NO: 36226 - protein, 14 aa, Homo Sapiens
GCARCKGPLPTDCC

SEQ ID NO: 36227 - protein, 14 aa, Homo Sapiens
CARCKGPLPTDCCH

SEQ ID NO: 36228 - protein, 14 aa, Homo Sapiens
ARCKGPLPTDCCHE

SEQ ID NO: 36229 - protein, 14 aa, Homo Sapiens
RCKGPLPTDCCHEQ

SEQ ID NO: 36230 - protein, 14 aa, Homo Sapiens
CKGPLPTDCCHEQC

SEQ ID NO: 36231 - protein, 14 aa, Homo Sapiens
KGPLPTDCCHEQCA

SEQ ID NO: 36232 - protein, 14 aa, Homo Sapiens
GPLPTDCCHEQCAA

SEQ ID NO: 36233 - protein, 14 aa, Homo Sapiens
PLPTDCCHEQCAAG

SEQ ID NO: 36234 - protein, 14 aa, Homo Sapiens
LPTDCCHEQCAAGC

SEQ ID NO: 36235 - protein, 14 aa, Homo Sapiens
PTDCCHEQCAAGCT

SEQ ID NO: 36236 - protein, 14 aa, Homo Sapiens
TDCCHEQCAAGCTG

SEQ ID NO: 36237 - protein, 14 aa, Homo Sapiens
DCCHEQCAAGCTGP

SEQ ID NO: 36238 - protein, 14 aa, Homo Sapiens
CCHEQCAAGCTGPK

SEQ ID NO: 36239 - protein, 14 aa, Homo Sapiens
CHEQCAAGCTGPKH

SEQ ID NO: 36240 - protein, 14 aa, Homo Sapiens
HEQCAAGCTGPKHS

SEQ ID NO: 36241 - protein, 14 aa, Homo Sapiens
EQCAAGCTGPKHSD

SEQ ID NO: 36242 - protein, 14 aa, Homo Sapiens
QCAAGCTGPKHSDC

SEQ ID NO: 36243 - protein, 14 aa, Homo Sapiens
CAAGCTGPKHSDCL

SEQ ID NO: 36244 - protein, 14 aa, Homo Sapiens
AAGCTGPKHSDCLA

SEQ ID NO: 36245 - protein, 14 aa, Homo Sapiens
AGCTGPKHSDCLAC

SEQ ID NO: 36246 - protein, 14 aa, Homo Sapiens
GCTGPKHSDCLACL

SEQ ID NO: 36247 - protein, 14 aa, Homo Sapiens
CTGPKHSDCLACLH

SEQ ID NO: 36248 - protein, 14 aa, Homo Sapiens
TGPKHSDCLACLHF

SEQ ID NO: 36249 - protein, 14 aa, Homo Sapiens
GPKHSDCLACLHFN

SEQ ID NO: 36250 - protein, 14 aa, Homo Sapiens
PKHSDCLACLHFNH

SEQ ID NO: 36251 - protein, 14 aa, Homo Sapiens
KHSDCLACLHFNHS

SEQ ID NO: 36252 - protein, 14 aa, Homo Sapiens
HSDCLACLHFNHSG

SEQ ID NO: 36253 - protein, 14 aa, Homo Sapiens
SDCLACLHFNHSGI

SEQ ID NO: 36254 - protein, 14 aa, Homo Sapiens
DCLACLHFNHSGIC

SEQ ID NO: 36255 - protein, 14 aa, Homo Sapiens
CLACLHFNHSGICE

SEQ ID NO: 36256 - protein, 14 aa, Homo Sapiens
LACLHFNHSGICEL

SEQ ID NO: 36257 - protein, 14 aa, Homo Sapiens
ACLHFNHSGICELH

SEQ ID NO: 36258 - protein, 14 aa, Homo Sapiens
CLHFNHSGICELHC

SEQ ID NO: 36259 - protein, 14 aa, Homo Sapiens
LHFNHSGICELHCP

SEQ ID NO: 36260 - protein, 14 aa, Homo Sapiens
HFNHSGICELHCPA

SEQ ID NO: 36261 - protein, 14 aa, Homo Sapiens
FNHSGICELHCPAL

SEQ ID NO: 36262 - protein, 14 aa, Homo Sapiens
NHSGICELHCPALV

SEQ ID NO: 36263 - protein, 14 aa, Homo Sapiens
HSGICELHCPALVT

SEQ ID NO: 36264 - protein, 14 aa, Homo Sapiens
SGICELHCPALVTY

SEQ ID NO: 36265 - protein, 14 aa, Homo Sapiens
GICELHCPALVTYN

SEQ ID NO: 36266 - protein, 14 aa, Homo Sapiens
ICELHCPALVTYNT

SEQ ID NO: 36267 - protein, 14 aa, Homo Sapiens
CELHCPALVTYNTD

SEQ ID NO: 36268 - protein, 14 aa, Homo Sapiens
ELHCPALVTYNTDT

SEQ ID NO: 36269 - protein, 14 aa, Homo Sapiens
LHCPALVTYNTDTF

SEQ ID NO: 36270 - protein, 14 aa, Homo Sapiens
HCPALVTYNTDTFE

SEQ ID NO: 36271 - protein, 14 aa, Homo Sapiens
CPALVTYNTDTFES

SEQ ID NO: 36272 - protein, 14 aa, Homo Sapiens
PALVTYNTDTFESM

SEQ ID NO: 36273 - protein, 14 aa, Homo Sapiens
ALVTYNTDTFESMP

SEQ ID NO: 36274 - protein, 14 aa, Homo Sapiens
LVTYNTDTFESMPN

SEQ ID NO: 36275 - protein, 14 aa, Homo Sapiens
VTYNTDTFESMPNP

SEQ ID NO: 36276 - protein, 14 aa, Homo Sapiens
TYNTDTFESMPNPE

SEQ ID NO: 36277 - protein, 14 aa, Homo Sapiens
YNTDTFESMPNPEG

SEQ ID NO: 36278 - protein, 14 aa, Homo Sapiens
NTDTFESMPNPEGR

SEQ ID NO: 36279 - protein, 14 aa, Homo Sapiens
TDTFESMPNPEGRY

SEQ ID NO: 36280 - protein, 14 aa, Homo Sapiens
DTFESMPNPEGRYT

SEQ ID NO: 36281 - protein, 14 aa, Homo Sapiens
TFESMPNPEGRYTF

SEQ ID NO: 36282 - protein, 14 aa, Homo Sapiens
FESMPNPEGRYTFG

SEQ ID NO: 36283 - protein, 14 aa, Homo Sapiens
ESMPNPEGRYTFGA

SEQ ID NO: 36284 - protein, 14 aa, Homo Sapiens
SMPNPEGRYTFGAS

SEQ ID NO: 36285 - protein, 14 aa, Homo Sapiens
MPNPEGRYTFGASC

SEQ ID NO: 36286 - protein, 14 aa, Homo Sapiens
PNPEGRYTFGASCV

SEQ ID NO: 36287 - protein, 14 aa, Homo Sapiens
NPEGRYTFGASCVT

SEQ ID NO: 36288 - protein, 14 aa, Homo Sapiens
PEGRYTFGASCVTA

SEQ ID NO: 36289 - protein, 14 aa, Homo Sapiens
EGRYTFGASCVTAC

SEQ ID NO: 36290 - protein, 14 aa, Homo Sapiens
GRYTFGASCVTACP

SEQ ID NO: 36291 - protein, 14 aa, Homo Sapiens
RYTFGASCVTACPY

SEQ ID NO: 36292 - protein, 14 aa, Homo Sapiens
YTFGASCVTACPYN

SEQ ID NO: 36293 - protein, 14 aa, Homo Sapiens
TFGASCVTACPYNY

SEQ ID NO: 36294 - protein, 14 aa, Homo Sapiens
FGASCVTACPYNYL

SEQ ID NO: 36295 - protein, 14 aa, Homo Sapiens
GASCVTACPYNYLS

SEQ ID NO: 36296 - protein, 14 aa, Homo Sapiens
ASCVTACPYNYLST

SEQ ID NO: 36297 - protein, 14 aa, Homo Sapiens
SCVTACPYNYLSTD

SEQ ID NO: 36298 - protein, 14 aa, Homo Sapiens
CVTACPYNYLSTDV

SEQ ID NO: 36299 - protein, 14 aa, Homo Sapiens
VTACPYNYLSTDVG

SEQ ID NO: 36300 - protein, 14 aa, Homo Sapiens
TACPYNYLSTDVGS

SEQ ID NO: 36301 - protein, 14 aa, Homo Sapiens
ACPYNYLSTDVGSC

SEQ ID NO: 36302 - protein, 14 aa, Homo Sapiens
CPYNYLSTDVGSCT

SEQ ID NO: 36303 - protein, 14 aa, Homo Sapiens
PYNYLSTDVGSCTL

SEQ ID NO: 36304 - protein, 14 aa, Homo Sapiens
YNYLSTDVGSCTLV

SEQ ID NO: 36305 - protein, 14 aa, Homo Sapiens
NYLSTDVGSCTLVC

SEQ ID NO: 36306 - protein, 14 aa, Homo Sapiens
YLSTDVGSCTLVCP

SEQ ID NO: 36307 - protein, 14 aa, Homo Sapiens
LSTDVGSCTLVCPL

SEQ ID NO: 36308 - protein, 14 aa, Homo Sapiens
STDVGSCTLVCPLH

SEQ ID NO: 36309 - protein, 14 aa, Homo Sapiens
TDVGSCTLVCPLHN

SEQ ID NO: 36310 - protein, 14 aa, Homo Sapiens
DVGSCTLVCPLHNQ

SEQ ID NO: 36311 - protein, 14 aa, Homo Sapiens
VGSCTLVCPLHNQE

SEQ ID NO: 36312 - protein, 14 aa, Homo Sapiens
GSCTLVCPLHNQEV

SEQ ID NO: 36313 - protein, 14 aa, Homo Sapiens
SCTLVCPLHNQEVT

SEQ ID NO: 36314 - protein, 14 aa, Homo Sapiens
CTLVCPLHNQEVTA

SEQ ID NO: 36315 - protein, 14 aa, Homo Sapiens
TLVCPLHNQEVTAE

SEQ ID NO: 36316 - protein, 14 aa, Homo Sapiens
LVCPLHNQEVTAED

SEQ ID NO: 36317 - protein, 14 aa, Homo Sapiens
VCPLHNQEVTAEDG

SEQ ID NO: 36318 - protein, 14 aa, Homo Sapiens
CPLHNQEVTAEDGT

SEQ ID NO: 36319 - protein, 14 aa, Homo Sapiens
PLHNQEVTAEDGTQ

SEQ ID NO: 36320 - protein, 14 aa, Homo Sapiens
LHNQEVTAEDGTQR

SEQ ID NO: 36321 - protein, 14 aa, Homo Sapiens
HNQEVTAEDGTQRC

SEQ ID NO: 36322 - protein, 14 aa, Homo Sapiens
NQEVTAEDGTQRCE

SEQ ID NO: 36323 - protein, 14 aa, Homo Sapiens
QEVTAEDGTQRCEK

SEQ ID NO: 36324 - protein, 14 aa, Homo Sapiens
EVTAEDGTQRCEKC

SEQ ID NO: 36325 - protein, 14 aa, Homo Sapiens
VTAEDGTQRCEKCS

SEQ ID NO: 36326 - protein, 14 aa, Homo Sapiens
TAEDGTQRCEKCSK

SEQ ID NO: 36327 - protein, 14 aa, Homo Sapiens
AEDGTQRCEKCSKP

SEQ ID NO: 36328 - protein, 14 aa, Homo Sapiens
EDGTQRCEKCSKPC

SEQ ID NO: 36329 - protein, 14 aa, Homo Sapiens
DGTQRCEKCSKPCA

SEQ ID NO: 36330 - protein, 14 aa, Homo Sapiens
GTQRCEKCSKPCAR

SEQ ID NO: 36331 - protein, 14 aa, Homo Sapiens
TQRCEKCSKPCARV

SEQ ID NO: 36332 - protein, 14 aa, Homo Sapiens
QRCEKCSKPCARVC

SEQ ID NO: 36333 - protein, 14 aa, Homo Sapiens
RCEKCSKPCARVCY

SEQ ID NO: 36334 - protein, 14 aa, Homo Sapiens
CEKCSKPCARVCYG

SEQ ID NO: 36335 - protein, 14 aa, Homo Sapiens
EKCSKPCARVCYGL

SEQ ID NO: 36336 - protein, 14 aa, Homo Sapiens
KCSKPCARVCYGLG

SEQ ID NO: 36337 - protein, 14 aa, Homo Sapiens
CSKPCARVCYGLGM

SEQ ID NO: 36338 - protein, 14 aa, Homo Sapiens
SKPCARVCYGLGME

SEQ ID NO: 36339 - protein, 14 aa, Homo Sapiens
KPCARVCYGLGMEH

SEQ ID NO: 36340 - protein, 14 aa, Homo Sapiens
PCARVCYGLGMEHL

SEQ ID NO: 36341 - protein, 14 aa, Homo Sapiens
CARVCYGLGMEHLR

SEQ ID NO: 36342 - protein, 14 aa, Homo Sapiens
ARVCYGLGMEHLRE

SEQ ID NO: 36343 - protein, 14 aa, Homo Sapiens
RVCYGLGMEHLREV

SEQ ID NO: 36344 - protein, 14 aa, Homo Sapiens
VCYGLGMEHLREVR

SEQ ID NO: 36345 - protein, 14 aa, Homo Sapiens
CYGLGMEHLREVRA

SEQ ID NO: 36346 - protein, 14 aa, Homo Sapiens
YGLGMEHLREVRAV

SEQ ID NO: 36347 - protein, 14 aa, Homo Sapiens
GLGMEHLREVRAVT

SEQ ID NO: 36348 - protein, 14 aa, Homo Sapiens
LGMEHLREVRAVTS

SEQ ID NO: 36349 - protein, 14 aa, Homo Sapiens
GMEHLREVRAVTSA

SEQ ID NO: 36350 - protein, 14 aa, Homo Sapiens
MEHLREVRAVTSAN

SEQ ID NO: 36351 - protein, 14 aa, Homo Sapiens
EHLREVRAVTSANI

SEQ ID NO: 36352 - protein, 14 aa, Homo Sapiens
HLREVRAVTSANIQ

SEQ ID NO: 36353 - protein, 14 aa, Homo Sapiens
LREVRAVTSANIQE

SEQ ID NO: 36354 - protein, 14 aa, Homo Sapiens
REVRAVTSANIQEF

SEQ ID NO: 36355 - protein, 14 aa, Homo Sapiens
EVRAVTSANIQEFA

SEQ ID NO: 36356 - protein, 14 aa, Homo Sapiens
VRAVTSANIQEFAG

SEQ ID NO: 36357 - protein, 14 aa, Homo Sapiens
RAVTSANIQEFAGC

SEQ ID NO: 36358 - protein, 14 aa, Homo Sapiens
AVTSANIQEFAGCK

SEQ ID NO: 36359 - protein, 14 aa, Homo Sapiens
VTSANIQEFAGCKK

SEQ ID NO: 36360 - protein, 14 aa, Homo Sapiens
TSANIQEFAGCKKI

SEQ ID NO: 36361 - protein, 14 aa, Homo Sapiens
SANIQEFAGCKKIF

SEQ ID NO: 36362 - protein, 14 aa, Homo Sapiens
ANIQEFAGCKKIFG

SEQ ID NO: 36363 - protein, 14 aa, Homo Sapiens
NIQEFAGCKKIFGS

SEQ ID NO: 36364 - protein, 14 aa, Homo Sapiens
IQEFAGCKKIFGSL

SEQ ID NO: 36365 - protein, 14 aa, Homo Sapiens
QEFAGCKKIFGSLA

SEQ ID NO: 36366 - protein, 14 aa, Homo Sapiens
EFAGCKKIFGSLAF

SEQ ID NO: 36367 - protein, 14 aa, Homo Sapiens
FAGCKKIFGSLAFL

SEQ ID NO: 36368 - protein, 14 aa, Homo Sapiens
AGCKKIFGSLAFLP

SEQ ID NO: 36369 - protein, 14 aa, Homo Sapiens
GCKKIFGSLAFLPE

SEQ ID NO: 36370 - protein, 14 aa, Homo Sapiens
CKKIFGSLAFLPES

SEQ ID NO: 36371 - protein, 14 aa, Homo Sapiens
KKIFGSLAFLPESF

SEQ ID NO: 36372 - protein, 14 aa, Homo Sapiens
KIFGSLAFLPESFD

SEQ ID NO: 36373 - protein, 14 aa, Homo Sapiens
IFGSLAFLPESFDG

SEQ ID NO: 36374 - protein, 14 aa, Homo Sapiens
FGSLAFLPESFDGD

SEQ ID NO: 36375 - protein, 14 aa, Homo Sapiens
GSLAFLPESFDGDP

SEQ ID NO: 36376 - protein, 14 aa, Homo Sapiens
SLAFLPESFDGDPA

SEQ ID NO: 36377 - protein, 14 aa, Homo Sapiens
LAFLPESFDGDPAS

SEQ ID NO: 36378 - protein, 14 aa, Homo Sapiens
AFLPESFDGDPASN

SEQ ID NO: 36379 - protein, 14 aa, Homo Sapiens
FLPESFDGDPASNT

SEQ ID NO: 36380 - protein, 14 aa, Homo Sapiens
LPESFDGDPASNTA

SEQ ID NO: 36381 - protein, 14 aa, Homo Sapiens
PESFDGDPASNTAP

SEQ ID NO: 36382 - protein, 14 aa, Homo Sapiens
ESFDGDPASNTAPL

SEQ ID NO: 36383 - protein, 14 aa, Homo Sapiens
SFDGDPASNTAPLQ

SEQ ID NO: 36384 - protein, 14 aa, Homo Sapiens
FDGDPASNTAPLQP

SEQ ID NO: 36385 - protein, 14 aa, Homo Sapiens
DGDPASNTAPLQPE

SEQ ID NO: 36386 - protein, 14 aa, Homo Sapiens
GDPASNTAPLQPEQ

SEQ ID NO: 36387 - protein, 14 aa, Homo Sapiens
DPASNTAPLQPEQL

SEQ ID NO: 36388 - protein, 14 aa, Homo Sapiens
PASNTAPLQPEQLQ

SEQ ID NO: 36389 - protein, 14 aa, Homo Sapiens
ASNTAPLQPEQLQV

SEQ ID NO: 36390 - protein, 14 aa, Homo Sapiens
SNTAPLQPEQLQVF

SEQ ID NO: 36391 - protein, 14 aa, Homo Sapiens
NTAPLQPEQLQVFE

SEQ ID NO: 36392 - protein, 14 aa, Homo Sapiens
TAPLQPEQLQVFET

SEQ ID NO: 36393 - protein, 14 aa, Homo Sapiens
APLQPEQLQVFETL

SEQ ID NO: 36394 - protein, 14 aa, Homo Sapiens
PLQPEQLQVFETLE

SEQ ID NO: 36395 - protein, 14 aa, Homo Sapiens
LQPEQLQVFETLEE

SEQ ID NO: 36396 - protein, 14 aa, Homo Sapiens
QPEQLQVFETLEEI

SEQ ID NO: 36397 - protein, 14 aa, Homo Sapiens
PEQLQVFETLEEIT

SEQ ID NO: 36398 - protein, 14 aa, Homo Sapiens
EQLQVFETLEEITG

SEQ ID NO: 36399 - protein, 14 aa, Homo Sapiens
QLQVFETLEEITGY

SEQ ID NO: 36400 - protein, 14 aa, Homo Sapiens
LQVFETLEEITGYL

SEQ ID NO: 36401 - protein, 14 aa, Homo Sapiens
QVFETLEEITGYLY

SEQ ID NO: 36402 - protein, 14 aa, Homo Sapiens
VFETLEEITGYLYI

SEQ ID NO: 36403 - protein, 14 aa, Homo Sapiens
FETLEEITGYLYIS

SEQ ID NO: 36404 - protein, 14 aa, Homo Sapiens
ETLEEITGYLYISA

SEQ ID NO: 36405 - protein, 14 aa, Homo Sapiens
TLEEITGYLYISAW

SEQ ID NO: 36406 - protein, 14 aa, Homo Sapiens
LEEITGYLYISAWP

SEQ ID NO: 36407 - protein, 14 aa, Homo Sapiens
EEITGYLYISAWPD

SEQ ID NO: 36408 - protein, 14 aa, Homo Sapiens
EITGYLYISAWPDS

SEQ ID NO: 36409 - protein, 14 aa, Homo Sapiens
ITGYLYISAWPDSL

SEQ ID NO: 36410 - protein, 14 aa, Homo Sapiens
TGYLYISAWPDSLP

SEQ ID NO: 36411 - protein, 14 aa, Homo Sapiens
GYLYISAWPDSLPD

SEQ ID NO: 36412 - protein, 14 aa, Homo Sapiens
YLYISAWPDSLPDL

SEQ ID NO: 36413 - protein, 14 aa, Homo Sapiens
LYISAWPDSLPDLS

SEQ ID NO: 36414 - protein, 14 aa, Homo Sapiens
YISAWPDSLPDLSV

SEQ ID NO: 36415 - protein, 14 aa, Homo Sapiens
ISAWPDSLPDLSVF

SEQ ID NO: 36416 - protein, 14 aa, Homo Sapiens
SAWPDSLPDLSVFQ

SEQ ID NO: 36417 - protein, 14 aa, Homo Sapiens
AWPDSLPDLSVFQN

SEQ ID NO: 36418 - protein, 14 aa, Homo Sapiens
WPDSLPDLSVFQNL

SEQ ID NO: 36419 - protein, 14 aa, Homo Sapiens
PDSLPDLSVFQNLQ

SEQ ID NO: 36420 - protein, 14 aa, Homo Sapiens
DSLPDLSVFQNLQV

SEQ ID NO: 36421 - protein, 14 aa, Homo Sapiens
SLPDLSVFQNLQVI

SEQ ID NO: 36422 - protein, 14 aa, Homo Sapiens
LPDLSVFQNLQVIR

SEQ ID NO: 36423 - protein, 14 aa, Homo Sapiens
PDLSVFQNLQVIRG

SEQ ID NO: 36424 - protein, 14 aa, Homo Sapiens
DLSVFQNLQVIRGR

SEQ ID NO: 36425 - protein, 14 aa, Homo Sapiens
LSVFQNLQVIRGRI

SEQ ID NO: 36426 - protein, 14 aa, Homo Sapiens
SVFQNLQVIRGRIL

SEQ ID NO: 36427 - protein, 14 aa, Homo Sapiens
VFQNLQVIRGRILH

SEQ ID NO: 36428 - protein, 14 aa, Homo Sapiens
FQNLQVIRGRILHN

SEQ ID NO: 36429 - protein, 14 aa, Homo Sapiens
QNLQVIRGRILHNG

SEQ ID NO: 36430 - protein, 14 aa, Homo Sapiens
NLQVIRGRILHNGA

SEQ ID NO: 36431 - protein, 14 aa, Homo Sapiens
LQVIRGRILHNGAY

SEQ ID NO: 36432 - protein, 14 aa, Homo Sapiens
QVIRGRILHNGAYS

SEQ ID NO: 36433 - protein, 14 aa, Homo Sapiens
VIRGRILHNGAYSL

SEQ ID NO: 36434 - protein, 14 aa, Homo Sapiens
IRGRILHNGAYSLT

SEQ ID NO: 36435 - protein, 14 aa, Homo Sapiens
RGRILHNGAYSLTL

SEQ ID NO: 36436 - protein, 14 aa, Homo Sapiens
GRILHNGAYSLTLQ

SEQ ID NO: 36437 - protein, 14 aa, Homo Sapiens
RILHNGAYSLTLQG

SEQ ID NO: 36438 - protein, 14 aa, Homo Sapiens
ILHNGAYSLTLQGL

SEQ ID NO: 36439 - protein, 14 aa, Homo Sapiens
LHNGAYSLTLQGLG

SEQ ID NO: 36440 - protein, 14 aa, Homo Sapiens
HNGAYSLTLQGLGI

SEQ ID NO: 36441 - protein, 14 aa, Homo Sapiens
NGAYSLTLQGLGIS

SEQ ID NO: 36442 - protein, 14 aa, Homo Sapiens
GAYSLTLQGLGISW

SEQ ID NO: 36443 - protein, 14 aa, Homo Sapiens
AYSLTLQGLGISWL

SEQ ID NO: 36444 - protein, 14 aa, Homo Sapiens
YSLTLQGLGISWLG

SEQ ID NO: 36445 - protein, 14 aa, Homo Sapiens
SLTLQGLGISWLGL

SEQ ID NO: 36446 - protein, 14 aa, Homo Sapiens
LTLQGLGISWLGLR

SEQ ID NO: 36447 - protein, 14 aa, Homo Sapiens
TLQGLGISWLGLRS

SEQ ID NO: 36448 - protein, 14 aa, Homo Sapiens
LQGLGISWLGLRSL

SEQ ID NO: 36449 - protein, 14 aa, Homo Sapiens
QGLGISWLGLRSLR

SEQ ID NO: 36450 - protein, 14 aa, Homo Sapiens
GLGISWLGLRSLRE

SEQ ID NO: 36451 - protein, 14 aa, Homo Sapiens
LGISWLGLRSLREL

SEQ ID NO: 36452 - protein, 14 aa, Homo Sapiens
GISWLGLRSLRELG

SEQ ID NO: 36453 - protein, 14 aa, Homo Sapiens
ISWLGLRSLRELGS

SEQ ID NO: 36454 - protein, 14 aa, Homo Sapiens
SWLGLRSLRELGSG

SEQ ID NO: 36455 - protein, 14 aa, Homo Sapiens
WLGLRSLRELGSGL

SEQ ID NO: 36456 - protein, 14 aa, Homo Sapiens
LGLRSLRELGSGLA

SEQ ID NO: 36457 - protein, 14 aa, Homo Sapiens
GLRSLRELGSGLAL

SEQ ID NO: 36458 - protein, 14 aa, Homo Sapiens
LRSLRELGSGLALI

SEQ ID NO: 36459 - protein, 14 aa, Homo Sapiens
RSLRELGSGLALIH

SEQ ID NO: 36460 - protein, 14 aa, Homo Sapiens
SLRELGSGLALIHH

SEQ ID NO: 36461 - protein, 14 aa, Homo Sapiens
LRELGSGLALIHHN

SEQ ID NO: 36462 - protein, 14 aa, Homo Sapiens
RELGSGLALIHHNT

SEQ ID NO: 36463 - protein, 14 aa, Homo Sapiens
ELGSGLALIHHNTH

SEQ ID NO: 36464 - protein, 14 aa, Homo Sapiens
LGSGLALIHHNTHL

SEQ ID NO: 36465 - protein, 14 aa, Homo Sapiens
GSGLALIHHNTHLC

SEQ ID NO: 36466 - protein, 14 aa, Homo Sapiens
SGLALIHHNTHLCF

SEQ ID NO: 36467 - protein, 14 aa, Homo Sapiens
GLALIHHNTHLCFV

SEQ ID NO: 36468 - protein, 14 aa, Homo Sapiens
LALIHHNTHLCFVH

SEQ ID NO: 36469 - protein, 14 aa, Homo Sapiens
ALIHHNTHLCFVHT

SEQ ID NO: 36470 - protein, 14 aa, Homo Sapiens
LIHHNTHLCFVHTV

SEQ ID NO: 36471 - protein, 14 aa, Homo Sapiens
IHHNTHLCFVHTVP

SEQ ID NO: 36472 - protein, 14 aa, Homo Sapiens
HHNTHLCFVHTVPW

SEQ ID NO: 36473 - protein, 14 aa, Homo Sapiens
HNTHLCFVHTVPWD

SEQ ID NO: 36474 - protein, 14 aa, Homo Sapiens
NTHLCFVHTVPWDQ

SEQ ID NO: 36475 - protein, 14 aa, Homo Sapiens
THLCFVHTVPWDQL

SEQ ID NO: 36476 - protein, 14 aa, Homo Sapiens
HLCFVHTVPWDQLF

SEQ ID NO: 36477 - protein, 14 aa, Homo Sapiens
LCFVHTVPWDQLFR

SEQ ID NO: 36478 - protein, 14 aa, Homo Sapiens
CFVHTVPWDQLFRN

SEQ ID NO: 36479 - protein, 14 aa, Homo Sapiens
FVHTVPWDQLFRNP

SEQ ID NO: 36480 - protein, 14 aa, Homo Sapiens
VHTVPWDQLFRNPH

SEQ ID NO: 36481 - protein, 14 aa, Homo Sapiens
HTVPWDQLFRNPHQ

SEQ ID NO: 36482 - protein, 14 aa, Homo Sapiens
TVPWDQLFRNPHQA

SEQ ID NO: 36483 - protein, 14 aa, Homo Sapiens
VPWDQLFRNPHQAL

SEQ ID NO: 36484 - protein, 14 aa, Homo Sapiens
PWDQLFRNPHQALL

SEQ ID NO: 36485 - protein, 14 aa, Homo Sapiens
WDQLFRNPHQALLH

SEQ ID NO: 36486 - protein, 14 aa, Homo Sapiens
DQLFRNPHQALLHT

SEQ ID NO: 36487 - protein, 14 aa, Homo Sapiens
QLFRNPHQALLHTA

SEQ ID NO: 36488 - protein, 14 aa, Homo Sapiens
LFRNPHQALLHTAN

SEQ ID NO: 36489 - protein, 14 aa, Homo Sapiens
FRNPHQALLHTANR

SEQ ID NO: 36490 - protein, 14 aa, Homo Sapiens
RNPHQALLHTANRP

SEQ ID NO: 36491 - protein, 14 aa, Homo Sapiens
NPHQALLHTANRPE

SEQ ID NO: 36492 - protein, 14 aa, Homo Sapiens
PHQALLHTANRPED

SEQ ID NO: 36493 - protein, 14 aa, Homo Sapiens
HQALLHTANRPEDE

SEQ ID NO: 36494 - protein, 14 aa, Homo Sapiens
QALLHTANRPEDEC

SEQ ID NO: 36495 - protein, 14 aa, Homo Sapiens
ALLHTANRPEDECV

SEQ ID NO: 36496 - protein, 14 aa, Homo Sapiens
LLHTANRPEDECVG

SEQ ID NO: 36497 - protein, 14 aa, Homo Sapiens
LHTANRPEDECVGE

SEQ ID NO: 36498 - protein, 14 aa, Homo Sapiens
HTANRPEDECVGEG

SEQ ID NO: 36499 - protein, 14 aa, Homo Sapiens
TANRPEDECVGEGL

SEQ ID NO: 36500 - protein, 14 aa, Homo Sapiens
ANRPEDECVGEGLA

SEQ ID NO: 36501 - protein, 14 aa, Homo Sapiens
NRPEDECVGEGLAC

SEQ ID NO: 36502 - protein, 14 aa, Homo Sapiens
RPEDECVGEGLACH

SEQ ID NO: 36503 - protein, 14 aa, Homo Sapiens
PEDECVGEGLACHQ

SEQ ID NO: 36504 - protein, 14 aa, Homo Sapiens
EDECVGEGLACHQL

SEQ ID NO: 36505 - protein, 14 aa, Homo Sapiens
DECVGEGLACHQLC

SEQ ID NO: 36506 - protein, 14 aa, Homo Sapiens
ECVGEGLACHQLCA

SEQ ID NO: 36507 - protein, 14 aa, Homo Sapiens
CVGEGLACHQLCAR

SEQ ID NO: 36508 - protein, 14 aa, Homo Sapiens
VGEGLACHQLCARG

SEQ ID NO: 36509 - protein, 14 aa, Homo Sapiens
GEGLACHQLCARGH

SEQ ID NO: 36510 - protein, 14 aa, Homo Sapiens
EGLACHQLCARGHC

SEQ ID NO: 36511 - protein, 14 aa, Homo Sapiens
GLACHQLCARGHCW

SEQ ID NO: 36512 - protein, 14 aa, Homo Sapiens
LACHQLCARGHCWG

SEQ ID NO: 36513 - protein, 14 aa, Homo Sapiens
ACHQLCARGHCWGP

SEQ ID NO: 36514 - protein, 14 aa, Homo Sapiens
CHQLCARGHCWGPG

SEQ ID NO: 36515 - protein, 14 aa, Homo Sapiens
HQLCARGHCWGPGP

SEQ ID NO: 36516 - protein, 14 aa, Homo Sapiens
QLCARGHCWGPGPT

SEQ ID NO: 36517 - protein, 14 aa, Homo Sapiens
LCARGHCWGPGPTQ

SEQ ID NO: 36518 - protein, 14 aa, Homo Sapiens
CARGHCWGPGPTQC

SEQ ID NO: 36519 - protein, 14 aa, Homo Sapiens
ARGHCWGPGPTQCV

SEQ ID NO: 36520 - protein, 14 aa, Homo Sapiens
RGHCWGPGPTQCVN

SEQ ID NO: 36521 - protein, 14 aa, Homo Sapiens
GHCWGPGPTQCVNC

SEQ ID NO: 36522 - protein, 14 aa, Homo Sapiens
HCWGPGPTQCVNCS

SEQ ID NO: 36523 - protein, 14 aa, Homo Sapiens
CWGPGPTQCVNCSQ

SEQ ID NO: 36524 - protein, 14 aa, Homo Sapiens
WGPGPTQCVNCSQF

SEQ ID NO: 36525 - protein, 14 aa, Homo Sapiens
GPGPTQCVNCSQFL

SEQ ID NO: 36526 - protein, 14 aa, Homo Sapiens
PGPTQCVNCSQFLR

SEQ ID NO: 36527 - protein, 14 aa, Homo Sapiens
GPTQCVNCSQFLRG

SEQ ID NO: 36528 - protein, 14 aa, Homo Sapiens
PTQCVNCSQFLRGQ

SEQ ID NO: 36529 - protein, 14 aa, Homo Sapiens
TQCVNCSQFLRGQE

SEQ ID NO: 36530 - protein, 14 aa, Homo Sapiens
QCVNCSQFLRGQEC

SEQ ID NO: 36531 - protein, 14 aa, Homo Sapiens
CVNCSQFLRGQECV

SEQ ID NO: 36532 - protein, 14 aa, Homo Sapiens
VNCSQFLRGQECVE

SEQ ID NO: 36533 - protein, 14 aa, Homo Sapiens
NCSQFLRGQECVEE

SEQ ID NO: 36534 - protein, 14 aa, Homo Sapiens
CSQFLRGQECVEEC

SEQ ID NO: 36535 - protein, 14 aa, Homo Sapiens
SQFLRGQECVEECR

SEQ ID NO: 36536 - protein, 14 aa, Homo Sapiens
QFLRGQECVEECRV

SEQ ID NO: 36537 - protein, 14 aa, Homo Sapiens
FLRGQECVEECRVL

SEQ ID NO: 36538 - protein, 14 aa, Homo Sapiens
LRGQECVEECRVLQ

SEQ ID NO: 36539 - protein, 14 aa, Homo Sapiens
RGQECVEECRVLQG

SEQ ID NO: 36540 - protein, 14 aa, Homo Sapiens
GQECVEECRVLQGL

SEQ ID NO: 36541 - protein, 14 aa, Homo Sapiens
QECVEECRVLQGLP

SEQ ID NO: 36542 - protein, 14 aa, Homo Sapiens
ECVEECRVLQGLPR

SEQ ID NO: 36543 - protein, 14 aa, Homo Sapiens
CVEECRVLQGLPRE

SEQ ID NO: 36544 - protein, 14 aa, Homo Sapiens
VEECRVLQGLPREY

SEQ ID NO: 36545 - protein, 14 aa, Homo Sapiens
EECRVLQGLPREYV

SEQ ID NO: 36546 - protein, 14 aa, Homo Sapiens
ECRVLQGLPREYVN

SEQ ID NO: 36547 - protein, 14 aa, Homo Sapiens
CRVLQGLPREYVNA

SEQ ID NO: 36548 - protein, 14 aa, Homo Sapiens
RVLQGLPREYVNAR

SEQ ID NO: 36549 - protein, 14 aa, Homo Sapiens
VLQGLPREYVNARH

SEQ ID NO: 36550 - protein, 14 aa, Homo Sapiens
LQGLPREYVNARHC

SEQ ID NO: 36551 - protein, 14 aa, Homo Sapiens
QGLPREYVNARHCL

SEQ ID NO: 36552 - protein, 14 aa, Homo Sapiens
GLPREYVNARHCLP

SEQ ID NO: 36553 - protein, 14 aa, Homo Sapiens
LPREYVNARHCLPC

SEQ ID NO: 36554 - protein, 14 aa, Homo Sapiens
PREYVNARHCLPCH

SEQ ID NO: 36555 - protein, 14 aa, Homo Sapiens
REYVNARHCLPCHP

SEQ ID NO: 36556 - protein, 14 aa, Homo Sapiens
EYVNARHCLPCHPE

SEQ ID NO: 36557 - protein, 14 aa, Homo Sapiens
YVNARHCLPCHPEC

SEQ ID NO: 36558 - protein, 14 aa, Homo Sapiens
VNARHCLPCHPECQ

SEQ ID NO: 36559 - protein, 14 aa, Homo Sapiens
NARHCLPCHPECQP

SEQ ID NO: 36560 - protein, 14 aa, Homo Sapiens
ARHCLPCHPECQPQ

SEQ ID NO: 36561 - protein, 14 aa, Homo Sapiens
RHCLPCHPECQPQN

SEQ ID NO: 36562 - protein, 14 aa, Homo Sapiens
HCLPCHPECQPQNG

SEQ ID NO: 36563 - protein, 14 aa, Homo Sapiens
CLPCHPECQPQNGS

SEQ ID NO: 36564 - protein, 14 aa, Homo Sapiens
LPCHPECQPQNGSV

SEQ ID NO: 36565 - protein, 14 aa, Homo Sapiens
PCHPECQPQNGSVT

SEQ ID NO: 36566 - protein, 14 aa, Homo Sapiens
CHPECQPQNGSVTC

SEQ ID NO: 36567 - protein, 14 aa, Homo Sapiens
HPECQPQNGSVTCF

SEQ ID NO: 36568 - protein, 14 aa, Homo Sapiens
PECQPQNGSVTCFG

SEQ ID NO: 36569 - protein, 14 aa, Homo Sapiens
ECQPQNGSVTCFGP

SEQ ID NO: 36570 - protein, 14 aa, Homo Sapiens
CQPQNGSVTCFGPE

SEQ ID NO: 36571 - protein, 14 aa, Homo Sapiens
QPQNGSVTCFGPEA

SEQ ID NO: 36572 - protein, 14 aa, Homo Sapiens
PQNGSVTCFGPEAD

SEQ ID NO: 36573 - protein, 14 aa, Homo Sapiens
QNGSVTCFGPEADQ

SEQ ID NO: 36574 - protein, 14 aa, Homo Sapiens
NGSVTCFGPEADQC

(The sequence listing continues in the following parts.)
